United States Patent Application Publication US 2008/0318210 A1 - sequence listing, part 4

SEQ ID NO: 121440 - RNA, 21 nt, Human herpesvirus 1
ggcgccgggggacgagaaaca

SEQ ID NO: 121441 - RNA, 18 nt, Human herpesvirus 1
ggcgccuccggggguccg

SEQ ID NO: 121442 - RNA, 14 nt, Human herpesvirus 1
ggcgcuugugagac

SEQ ID NO: 121443 - RNA, 21 nt, Human herpesvirus 1
ggcgcguuugcacaacacaaa

SEQ ID NO: 121444 - RNA, 14 nt, Human herpesvirus 1
ggcuacaggggcca

SEQ ID NO: 121445 - RNA, 20 nt, Human herpesvirus 1
ggcgucucccgggggcgcuu

SEQ ID NO: 121446 - RNA, 17 nt, Human herpesvirus 1
gcguugcgccggaccac

SEQ ID NO: 121447 - RNA, 15 nt, Human herpesvirus 1
gcuccucgcaaaacu

SEQ ID NO: 121448 - RNA, 14 nt, Human herpesvirus 1
gcucgagaugggcc

SEQ ID NO: 121449 - RNA, 20 nt, Human herpesvirus 1
gcucgauuauuugguguguu

SEQ ID NO: 121450 - RNA, 21 nt, Human herpesvirus 1
gccuucuuucgaaccgugguc

SEQ ID NO: 121451 - RNA, 19 nt, Human herpesvirus 1
gccuucgccccacacagcc

SEQ ID NO: 121452 - RNA, 21 nt, Human herpesvirus 1
gccugugugucguauguuuau

SEQ ID NO: 121453 - RNA, 16 nt, Human herpesvirus 1
gcgcgcucaaccaccg

SEQ ID NO: 121454 - RNA, 12 nt, Human herpesvirus 1
gccuugcguuua

SEQ ID NO: 121455 - RNA, 23 nt, Human herpesvirus 1
gcggagaaacggccgaagccacg

SEQ ID NO: 121456 - RNA, 22 nt, Human herpesvirus 1
gcggaaagacgguccacgucac

SEQ ID NO: 121457 - RNA, 19 nt, Human herpesvirus 1
gcggccacgucguccgggg

SEQ ID NO: 121458 - RNA, 12 nt, Human herpesvirus 1
gcggccaugccg

SEQ ID NO: 121459 - RNA, 14 nt, Human herpesvirus 1
gcgcucaaccaccg

SEQ ID NO: 121460 - RNA, 12 nt, Human herpesvirus 1
gcgcugcugcgg

SEQ ID NO: 121461 - RNA, 13 nt, Human herpesvirus 1
gcggcuggcgcgg

SEQ ID NO: 121462 - RNA, 22 nt, Human herpesvirus 1
gcggcugguccacacccagugg

SEQ ID NO: 121463 - RNA, 12 nt, Human herpesvirus 1
gcgguggugggg

SEQ ID NO: 121464 - RNA, 15 nt, Human herpesvirus 1
gcggggcgcuuguga

SEQ ID NO: 121465 - RNA, 24 nt, Human herpesvirus 1
gcggguccgcuguaacugcuguug

SEQ ID NO: 121466 - RNA, 21 nt, Human herpesvirus 1
gcgggugggccuugccguggu

SEQ ID NO: 121467 - RNA, 14 nt, Human herpesvirus 1
gcgucgcugugaug

SEQ ID NO: 121468 - RNA, 20 nt, Human herpesvirus 1
gcggugacgaacgcgagcga

SEQ ID NO: 121469 - RNA, 13 nt, Human herpesvirus 1
gcgucauaugcaa

SEQ ID NO: 121470 - RNA, 15 nt, Human herpesvirus 1
gcgucauaugcaaau

SEQ ID NO: 121471 - RNA, 21 nt, Human herpesvirus 1
gcguccgccaaauaaagccac

SEQ ID NO: 121472 - RNA, 17 nt, Human herpesvirus 1
gcaaccaacccacuggg

SEQ ID NO: 121473 - RNA, 15 nt, Human herpesvirus 1
gcaacgccgcagggg

SEQ ID NO: 121474 - RNA, 17 nt, Human herpesvirus 1
gccacccacccaccaag

SEQ ID NO: 121475 - RNA, 19 nt, Human herpesvirus 1
gccacagaaacaaaaccgg

SEQ ID NO: 121476 - RNA, 19 nt, Human herpesvirus 1
gccaccaauagaccagagg

SEQ ID NO: 121477 - RNA, 17 nt, Human herpesvirus 1
gccacaacagcccuguc

SEQ ID NO: 121478 - RNA, 17 nt, Human herpesvirus 1
gccccugggccccggga

SEQ ID NO: 121479 - RNA, 15 nt, Human herpesvirus 1
gcccgacagaccucc

SEQ ID NO: 121480 - RNA, 16 nt, Human herpesvirus 1
gccgaaccgaaccagc

SEQ ID NO: 121481 - RNA, 22 nt, Human herpesvirus 1
gcccaguaacaugcgcacguga

SEQ ID NO: 121482 - RNA, 18 nt, Human herpesvirus 1
gccccaccggcaccaaca

SEQ ID NO: 121483 - RNA, 17 nt, Human herpesvirus 1
gccaucgccggggaccg

SEQ ID NO: 121484 - RNA, 16 nt, Human herpesvirus 1
gccauacacagccacc

SEQ ID NO: 121485 - RNA, 17 nt, Human herpesvirus 1
gccauacacagccaccc

SEQ ID NO: 121486 - RNA, 16 nt, Human herpesvirus 1
gccgcccguugcaggg

SEQ ID NO: 121487 - RNA, 20 nt, Human herpesvirus 1
gccgccacccaucggggacc

SEQ ID NO: 121488 - RNA, 13 nt, Human herpesvirus 1
gccgcgacacuca

SEQ ID NO: 121489 - RNA, 18 nt, Human herpesvirus 1
gccgaggucccgugcaac

SEQ ID NO: 121490 - RNA, 18 nt, Human herpesvirus 1
gccgacaacugccugacc

SEQ ID NO: 121491 - RNA, 15 nt, Human herpesvirus 1
gccgacgaccugguu

SEQ ID NO: 121492 - RNA, 22 nt, Human herpesvirus 1
gccguuguucccauuaucccau

SEQ ID NO: 121493 - RNA, 20 nt, Human herpesvirus 1
gccgugcgauggacaccgca

SEQ ID NO: 121494 - RNA, 21 nt, Human herpesvirus 1
gccgugcggaguuaccugguc

SEQ ID NO: 121495 - RNA, 22 nt, Human herpesvirus 1
gccucccccugagccgcuuucc

SEQ ID NO: 121496 - RNA, 12 nt, Human herpesvirus 1
gccucccggggg

SEQ ID NO: 121497 - RNA, 15 nt, Human herpesvirus 1
gccuccggggguccg

SEQ ID NO: 121498 - RNA, 17 nt, Human herpesvirus 1
gccuccgaccccagaca

SEQ ID NO: 121499 - RNA, 19 nt, Human herpesvirus 1
gccuggcuauccggagaaa

SEQ ID NO: 121500 - RNA, 17 nt, Human herpesvirus 1
gccugggguagcugggu

SEQ ID NO: 121501 - RNA, 18 nt, Human herpesvirus 1
cuaauuaaauacaugcca

SEQ ID NO: 121502 - RNA, 16 nt, Human herpesvirus 1
cuaguugauaugcauc

SEQ ID NO: 121503 - RNA, 23 nt, Human herpesvirus 1
cuaggcaucggggguugcugucc

SEQ ID NO: 121504 - RNA, 15 nt, Human herpesvirus 1
cuagccgaucccucg

SEQ ID NO: 121505 - RNA, 20 nt, Human herpesvirus 1
cucacgcgcauccgcaagcu

SEQ ID NO: 121506 - RNA, 16 nt, Human herpesvirus 1
cgggagccagggccaa

SEQ ID NO: 121507 - RNA, 23 nt, Human herpesvirus 1
cgggcaaguaugccccccuggcg

SEQ ID NO: 121508 - RNA, 15 nt, Human herpesvirus 1
cgggaacgcccaaaa

SEQ ID NO: 121509 - RNA, 18 nt, Human herpesvirus 1
cggcuuugaaacugacau

SEQ ID NO: 121510 - RNA, 14 nt, Human herpesvirus 1
cggcggccccuggc

SEQ ID NO: 121511 - RNA, 20 nt, Human herpesvirus 1
cggcgggguuauaggccacg

SEQ ID NO: 121512 - RNA, 22 nt, Human herpesvirus 1
cggcgguugaguccggaacacc

SEQ ID NO: 121513 - RNA, 14 nt, Human herpesvirus 1
cggcgugggcgcgu

SEQ ID NO: 121514 - RNA, 14 nt, Human herpesvirus 1
cggggcgcuuguga

SEQ ID NO: 121515 - RNA, 16 nt, Human herpesvirus 1
cgggucccgaccgaac

SEQ ID NO: 121516 - RNA, 19 nt, Human herpesvirus 1
cgggguugggaugggaccu

SEQ ID NO: 121517 - RNA, 18 nt, Human herpesvirus 1
cgggugaaggcccagggc

SEQ ID NO: 121518 - RNA, 15 nt, Human herpesvirus 1
cggguagcuuuacaa

SEQ ID NO: 121519 - RNA, 12 nt, Human herpesvirus 1
cgggugugauag

SEQ ID NO: 121520 - RNA, 16 nt, Human herpesvirus 1
cgggcacguacacggg

SEQ ID NO: 121521 - RNA, 22 nt, Human herpesvirus 1
cgggcauggccccggggcgggu

SEQ ID NO: 121522 - RNA, 13 nt, Human herpesvirus 1
cgggcgacccaga

SEQ ID NO: 121523 - RNA, 21 nt, Human herpesvirus 1
cgggccgcccacuucccggua

SEQ ID NO: 121524 - RNA, 17 nt, Human herpesvirus 1
cgggccgccucgggggc

SEQ ID NO: 121525 - RNA, 13 nt, Human herpesvirus 1
cgggcguccgcca

SEQ ID NO: 121526 - RNA, 19 nt, Human herpesvirus 1
cgggcguugggguggaucu

SEQ ID NO: 121527 - RNA, 14 nt, Human herpesvirus 1
cgcaaacaggagcu

SEQ ID NO: 121528 - RNA, 22 nt, Human herpesvirus 1
cgcaacggggugauaaugauca

SEQ ID NO: 121529 - RNA, 15 nt, Human herpesvirus 1
cggauaacgcacuga

SEQ ID NO: 121530 - RNA, 20 nt, Human herpesvirus 1
cggauucgcucucggugcgu

SEQ ID NO: 121531 - RNA, 21 nt, Human herpesvirus 1
cggcaccaccggggccugaac

SEQ ID NO: 121532 - RNA, 12 nt, Human herpesvirus 1
cggcaaggagcg

SEQ ID NO: 121533 - RNA, 18 nt, Human herpesvirus 1
cggcaauaaaaagacaga

SEQ ID NO: 121534 - RNA, 14 nt, Human herpesvirus 1
cggcacugaccaag

SEQ ID NO: 121535 - RNA, 23 nt, Human herpesvirus 1
cggcauaacuccgaccggcgggu

SEQ ID NO: 121536 - RNA, 12 nt, Human herpesvirus 1
cggcauaugcaa

SEQ ID NO: 121537 - RNA, 13 nt, Human herpesvirus 1
cggcauaugcaaa

SEQ ID NO: 121538 - RNA, 14 nt, Human herpesvirus 1
cggcauaugcaaau

SEQ ID NO: 121539 - RNA, 21 nt, Human herpesvirus 1
cggccacgucguccggggggu

SEQ ID NO: 121540 - RNA, 19 nt, Human herpesvirus 1
cggcgcaucuucggcgggu

SEQ ID NO: 121541 - RNA, 20 nt, Human herpesvirus 1
cggcgccgcccgccccuggc

SEQ ID NO: 121542 - RNA, 14 nt, Human herpesvirus 1
cggcccgugcgggu

SEQ ID NO: 121543 - RNA, 17 nt, Human herpesvirus 1
cggccggauucccgggc

SEQ ID NO: 121544 - RNA, 18 nt, Human herpesvirus 1
cggccguuucuccgcccg

SEQ ID NO: 121545 - RNA, 20 nt, Human herpesvirus 1
cgugcgauggacaccgcaga

SEQ ID NO: 121546 - RNA, 15 nt, Human herpesvirus 1
cgguaaacaccaacu

SEQ ID NO: 121547 - RNA, 10 nt, Human herpesvirus 1
cgguggacau

SEQ ID NO: 121548 - RNA, 17 nt, Human herpesvirus 1
cguaacggcauaugcaa

SEQ ID NO: 121549 - RNA, 13 nt, Human herpesvirus 1
cguaaacaccagg

SEQ ID NO: 121550 - RNA, 14 nt, Human herpesvirus 1
cguaagggggccug

SEQ ID NO: 121551 - RNA, 23 nt, Human herpesvirus 1
cguguggaggucguuuucaugcc

SEQ ID NO: 121552 - RNA, 20 nt, Human herpesvirus 1
cucuucccccccaucacccc

SEQ ID NO: 121553 - RNA, 20 nt, Human herpesvirus 1
cuccuccaccacccaacccc

SEQ ID NO: 121554 - RNA, 18 nt, Human herpesvirus 1
cuccgaucccaacuccuc

SEQ ID NO: 121555 - RNA, 14 nt, Human herpesvirus 1
cuccgaccccagac

SEQ ID NO: 121556 - RNA, 14 nt, Human herpesvirus 1
cugggcaagcccua

SEQ ID NO: 121557 - RNA, 22 nt, Human herpesvirus 1
cugggggcacccacgcccgcga

SEQ ID NO: 121558 - RNA, 14 nt, Human herpesvirus 1
cugggaccccggcg

SEQ ID NO: 121559 - RNA, 12 nt, Human herpesvirus 1
cugggccccggg

SEQ ID NO: 121560 - RNA, 14 nt, Human herpesvirus 1
cuggcgagcccaga

SEQ ID NO: 121561 - RNA, 14 nt, Human herpesvirus 1
cugggaauagagca

SEQ ID NO: 121562 - RNA, 21 nt, Human herpesvirus 1
cuucacgugacaggagccaau

SEQ ID NO: 121563 - RNA, 21 nt, Human herpesvirus 1
cugucggccgccgacgaccug

SEQ ID NO: 121564 - RNA, 12 nt, Human herpesvirus 1
cuguaugacagc

SEQ ID NO: 121565 - RNA, 15 nt, Human herpesvirus 1
cuugcgggacugaau

SEQ ID NO: 121566 - RNA, 20 nt, Human herpesvirus 1
cuuggucaggagggcgcuca

SEQ ID NO: 121567 - RNA, 23 nt, Human herpesvirus 1
cuugccccccuccccgcacagau

SEQ ID NO: 121568 - RNA, 18 nt, Human herpesvirus 1
cuuccguacccagacaau

SEQ ID NO: 121569 - RNA, 21 nt, Human herpesvirus 1
cuucugggguguuuuaaucaa

SEQ ID NO: 121570 - RNA, 16 nt, Human herpesvirus 1
aaaaugcaaaugggau

SEQ ID NO: 121571 - RNA, 19 nt, Human herpesvirus 1
ccacccgaaacggccaacg

SEQ ID NO: 121572 - RNA, 17 nt, Human herpesvirus 1
ccacccacccaccaaga

SEQ ID NO: 121573 - RNA, 14 nt, Human herpesvirus 1
aaaauguaaccaua

SEQ ID NO: 121574 - RNA, 18 nt, Human herpesvirus 1
ccaccacugcacucccug

SEQ ID NO: 121575 - RNA, 18 nt, Human herpesvirus 1
ccaccaaagucucugugg

SEQ ID NO: 121576 - RNA, 18 nt, Human herpesvirus 1
ccaccaauagaccagagg

SEQ ID NO: 121577 - RNA, 19 nt, Human herpesvirus 1
ccacacucucugggcgggc

SEQ ID NO: 121578 - RNA, 15 nt, Human herpesvirus 1
ccacagacacgguua

SEQ ID NO: 121579 - RNA, 14 nt, Human herpesvirus 1
ccaacgacuuccuc

SEQ ID NO: 121580 - RNA, 14 nt, Human herpesvirus 1
ccaacccguguguu

SEQ ID NO: 121581 - RNA, 19 nt, Human herpesvirus 1
ccaaacaaacaaaccaaaa

SEQ ID NO: 121582 - RNA, 12 nt, Human herpesvirus 1
ccaaacaccccc

SEQ ID NO: 121583 - RNA, 24 nt, Human herpesvirus 1
ccaacauaaacaacuacacacagg

SEQ ID NO: 121584 - RNA, 20 nt, Human herpesvirus 1
ccagcaccguuaccaccgau

SEQ ID NO: 121585 - RNA, 21 nt, Human herpesvirus 1
ccacgcccgaccacacacccc

SEQ ID NO: 121586 - RNA, 19 nt, Human herpesvirus 1
ccacgggcugcgugucaaa

SEQ ID NO: 121587 - RNA, 13 nt, Human herpesvirus 1
ccacgcuggguuu

SEQ ID NO: 121588 - RNA, 13 nt, Human herpesvirus 1
ccacuacaccagc

SEQ ID NO: 121589 - RNA, 20 nt, Human herpesvirus 1
ccacguuucggcguguguuu

SEQ ID NO: 121590 - RNA, 22 nt, Human herpesvirus 1
ccaucgugcgcucgcucucggu

SEQ ID NO: 121591 - RNA, 20 nt, Human herpesvirus 1
ccaugauaaacugagaguua

SEQ ID NO: 121592 - RNA, 22 nt, Human herpesvirus 1
ccaucuacguugcggggcgggg

SEQ ID NO: 121593 - RNA, 14 nt, Human herpesvirus 1
ccaugguaccaaag

SEQ ID NO: 121594 - RNA, 15 nt, Human herpesvirus 1
ccaugguaccaaaga

SEQ ID NO: 121595 - RNA, 17 nt, Human herpesvirus 1
ccauggcgggacugggc

SEQ ID NO: 121596 - RNA, 20 nt, Human herpesvirus 1
cccaacccccggccccaguu

SEQ ID NO: 121597 - RNA, 15 nt, Human herpesvirus 1
cauccaccacccggc

SEQ ID NO: 121598 - RNA, 15 nt, Human herpesvirus 1
caucccacaaacaca

SEQ ID NO: 121599 - RNA, 16 nt, Human herpesvirus 1
caucccacaaacacaa

SEQ ID NO: 121600 - RNA, 19 nt, Human herpesvirus 1
cauccgucgggaggccaca

SEQ ID NO: 121601 - RNA, 19 nt, Human herpesvirus 1
caucccaugguaccaaaga

SEQ ID NO: 121602 - RNA, 20 nt, Human herpesvirus 1
caucccaugguaccaaagac

SEQ ID NO: 121603 - RNA, 18 nt, Human herpesvirus 1
caucccccgucuggguuu

SEQ ID NO: 121604 - RNA, 20 nt, Human herpesvirus 1
caugaauguguguaaccccc

SEQ ID NO: 121605 - RNA, 18 nt, Human herpesvirus 1
caggacaccgcguguucc

SEQ ID NO: 121606 - RNA, 17 nt, Human herpesvirus 1
caucaccccgcaauuug

SEQ ID NO: 121607 - RNA, 21 nt, Human herpesvirus 1
cauucauggggggguuggaga

SEQ ID NO: 121608 - RNA, 15 nt, Human herpesvirus 1
caugggacccacaga

SEQ ID NO: 121609 - RNA, 20 nt, Human herpesvirus 1
ccgaagccacgcccacuuua

SEQ ID NO: 121610 - RNA, 22 nt, Human herpesvirus 1
cccuugaauaaacacgacauua

SEQ ID NO: 121611 - RNA, 13 nt, Human herpesvirus 1
cccacgugaucag

SEQ ID NO: 121612 - RNA, 22 nt, Human herpesvirus 1
cccacgcucuccccugcugcca

SEQ ID NO: 121613 - RNA, 14 nt, Human herpesvirus 1
cccacccacccacu

SEQ ID NO: 121614 - RNA, 17 nt, Human herpesvirus 1
ccgcaacugcuccagaa

SEQ ID NO: 121615 - RNA, 19 nt, Human herpesvirus 1
ccgagggcgagcucagcuu

SEQ ID NO: 121616 - RNA, 23 nt, Human herpesvirus 1
ccgaaccaccacugcacucccug

SEQ ID NO: 121617 - RNA, 21 nt, Human herpesvirus 1
ccgaccuggagccgggggggu

SEQ ID NO: 121618 - RNA, 18 nt, Human herpesvirus 1
ccgcagccuucucccggu

SEQ ID NO: 121619 - RNA, 17 nt, Human herpesvirus 1
ccgcccccgcaaccagg

SEQ ID NO: 121620 - RNA, 16 nt, Human herpesvirus 1
ccgcccaccgcugggc

SEQ ID NO: 121621 - RNA, 16 nt, Human herpesvirus 1
ccgccacgcuggguuu

SEQ ID NO: 121622 - RNA, 17 nt, Human herpesvirus 1
ccgccaaauaaagccac

SEQ ID NO: 121623 - RNA, 18 nt, Human herpesvirus 1
ccgccaaauaaagccacu

SEQ ID NO: 121624 - RNA, 17 nt, Human herpesvirus 1
ccgcaugugcaucuuuu

SEQ ID NO: 121625 - RNA, 19 nt, Human herpesvirus 1
ccgcccucacagggcgggc

SEQ ID NO: 121626 - RNA, 23 nt, Human herpesvirus 1
ccgccugucgcacccacagcuuu

SEQ ID NO: 121627 - RNA, 22 nt, Human herpesvirus 1
ccgccguccccuuacaguucca

SEQ ID NO: 121628 - RNA, 22 nt, Human herpesvirus 1
ccgggucuguuggggacacugg

SEQ ID NO: 121629 - RNA, 19 nt, Human herpesvirus 1
ccggggguccgccggugag

SEQ ID NO: 121630 - RNA, 21 nt, Human herpesvirus 1
ccgggacgcaccgugacuaag

SEQ ID NO: 121631 - RNA, 11 nt, Human herpesvirus 1
ccgggagcucc

SEQ ID NO: 121632 - RNA, 23 nt, Human herpesvirus 1
ccgcggugucugggaauagagca

SEQ ID NO: 121633 - RNA, 14 nt, Human herpesvirus 1
ccgcuagcaccagg

SEQ ID NO: 121634 - RNA, 16 nt, Human herpesvirus 1
ccgcugacaaccaccu

SEQ ID NO: 121635 - RNA, 19 nt, Human herpesvirus 1
ccgcgugucgcgugugguu

SEQ ID NO: 121636 - RNA, 17 nt, Human herpesvirus 1
ccgcggggggggcgggc

SEQ ID NO: 121637 - RNA, 18 nt, Human herpesvirus 1
ccgcgggaggauguguuu

SEQ ID NO: 121638 - RNA, 19 nt, Human herpesvirus 1
ccguaacggcauaugcaaa

SEQ ID NO: 121639 - RNA, 20 nt, Human herpesvirus 1
ccgucaaaggugcacacccg

SEQ ID NO: 121640 - RNA, 15 nt, Human herpesvirus 1
ccgucgggcacguac

SEQ ID NO: 121641 - RNA, 19 nt, Human herpesvirus 1
ccugauguggcugcuccgc

SEQ ID NO: 121642 - RNA, 15 nt, Human herpesvirus 1
ccucguucugcugca

SEQ ID NO: 121643 - RNA, 13 nt, Human herpesvirus 1
ccucagaacccac

SEQ ID NO: 121644 - RNA, 16 nt, Human herpesvirus 1
ccuccuggacuuugag

SEQ ID NO: 121645 - RNA, 20 nt, Human herpesvirus 1
ccuccugggggguccaguca

SEQ ID NO: 121646 - RNA, 13 nt, Human herpesvirus 1
ccucgagaucccc

SEQ ID NO: 121647 - RNA, 18 nt, Human herpesvirus 1
ccuucuccgcguggguga

SEQ ID NO: 121648 - RNA, 20 nt, Human herpesvirus 1
ccuucgagggucucguucag

SEQ ID NO: 121649 - RNA, 18 nt, Human herpesvirus 1
ccuggaucccaacgaccc

SEQ ID NO: 121650 - RNA, 18 nt, Human herpesvirus 1
ccugggaucccacguccc

SEQ ID NO: 121651 - RNA, 19 nt, Human herpesvirus 1
ccuggcgcccccacccucg

SEQ ID NO: 121652 - RNA, 19 nt, Human herpesvirus 1
ccuggcgcggggguucaug

SEQ ID NO: 121653 - RNA, 14 nt, Human herpesvirus 1
cgaaacuucaucac

SEQ ID NO: 121654 - RNA, 23 nt, Human herpesvirus 1
ccuuugggcgggaggaagccaca

SEQ ID NO: 121655 - RNA, 14 nt, Human herpesvirus 1
ccuugugugucaau

SEQ ID NO: 121656 - RNA, 16 nt, Human herpesvirus 1
cgaauaaaaaccaaaa

SEQ ID NO: 121657 - RNA, 17 nt, Human herpesvirus 1
cgagcacauacauuaca

SEQ ID NO: 121658 - RNA, 19 nt, Human herpesvirus 1
cgagacagaccgcaguaca

SEQ ID NO: 121659 - RNA, 21 nt, Human herpesvirus 1
cgagaaccuagggaacccaga

SEQ ID NO: 121660 - RNA, 15 nt, Human herpesvirus 1
cgacgacgucugucg

SEQ ID NO: 121661 - RNA, 13 nt, Human herpesvirus 1
cgacaucuugucg

SEQ ID NO: 121662 - RNA, 15 nt, Human herpesvirus 1
cgacaaacggugaau

SEQ ID NO: 121663 - RNA, 15 nt, Human herpesvirus 1
cgauuauuuggugug

SEQ ID NO: 121664 - RNA, 14 nt, Human herpesvirus 1
cgauuggcaauguu

SEQ ID NO: 121665 - RNA, 22 nt, Human herpesvirus 1
cgauagcgaauaaaaaccaaaa

SEQ ID NO: 121666 - RNA, 14 nt, Human herpesvirus 1
cgagggcgagcuca

SEQ ID NO: 121667 - RNA, 23 nt, Human herpesvirus 1
cgagcuuguuuucgugggggacg

SEQ ID NO: 121668 - RNA, 12 nt, Human herpesvirus 1
ugccgcuuuauc

SEQ ID NO: 121669 - RNA, 18 nt, Human herpesvirus 1
ugccccccccaccccaga

SEQ ID NO: 121670 - RNA, 17 nt, Human herpesvirus 1
ugcgguuuaacacccgu

SEQ ID NO: 121671 - RNA, 22 nt, Human herpesvirus 1
ugcggcuuaugaacgacugggc

SEQ ID NO: 121672 - RNA, 17 nt, Human herpesvirus 1
ugcgggggagaaaaccg

SEQ ID NO: 121673 - RNA, 14 nt, Human herpesvirus 1
ugcggccaacacaa

SEQ ID NO: 121674 - RNA, 15 nt, Human herpesvirus 1
ugcgucgggccuccc

SEQ ID NO: 121675 - RNA, 18 nt, Human herpesvirus 1
ugcgcguguccuuacucc

SEQ ID NO: 121676 - RNA, 16 nt, Human herpesvirus 1
ugcgcgauguggauaa

SEQ ID NO: 121677 - RNA, 17 nt, Human herpesvirus 1
ugcgcgauguggauaaa

SEQ ID NO: 121678 - RNA, 13 nt, Human herpesvirus 1
ugcaaaugggaua

SEQ ID NO: 121679 - RNA, 16 nt, Human herpesvirus 1
ugcaaaugggauacau

SEQ ID NO: 121680 - RNA, 20 nt, Human herpesvirus 1
ugcaaaugggauacauggaa

SEQ ID NO: 121681 - RNA, 18 nt, Human herpesvirus 1
ugccacuccccacccacc

SEQ ID NO: 121682 - RNA, 15 nt, Human herpesvirus 1
ucuggccagcagggc

SEQ ID NO: 121683 - RNA, 20 nt, Human herpesvirus 1
ucuggcggguuggugcggug

SEQ ID NO: 121684 - RNA, 19 nt, Human herpesvirus 1
ucugggcccgacagaccuc

SEQ ID NO: 121685 - RNA, 19 nt, Human herpesvirus 1
ugaguuuguggacccaaag

SEQ ID NO: 121686 - RNA, 23 nt, Human herpesvirus 1
ugauacuuuuauuuauuaacuca

SEQ ID NO: 121687 - RNA, 14 nt, Human herpesvirus 1
ugauucuugucagg

SEQ ID NO: 121688 - RNA, 13 nt, Human herpesvirus 1
ugacccaaaacac

SEQ ID NO: 121689 - RNA, 21 nt, Human herpesvirus 1
ugaccgcccgccccucgccac

SEQ ID NO: 121690 - RNA, 15 nt, Human herpesvirus 1
ugacgccuucgaggg

SEQ ID NO: 121691 - RNA, 11 nt, Human herpesvirus 1
ucucccggggg

SEQ ID NO: 121692 - RNA, 20 nt, Human herpesvirus 1
ucuccgaucccaacuccuca

SEQ ID NO: 121693 - RNA, 22 nt, Human herpesvirus 1
ucuccuccaccacccaacccca

SEQ ID NO: 121694 - RNA, 20 nt, Human herpesvirus 1
ucugcgagauuuuucuguau

SEQ ID NO: 121695 - RNA, 20 nt, Human herpesvirus 1
ucguguggacgaaaaaaagc

SEQ ID NO: 121696 - RNA, 16 nt, Human herpesvirus 1
ucggcauagaaaaccg

SEQ ID NO: 121697 - RNA, 19 nt, Human herpesvirus 1
ucggcauagaaaaccgcca

SEQ ID NO: 121698 - RNA, 18 nt, Human herpesvirus 1
ucggacgccacacaccag

SEQ ID NO: 121699 - RNA, 18 nt, Human herpesvirus 1
ucgcuuugugggggacca

SEQ ID NO: 121700 - RNA, 22 nt, Human herpesvirus 1
ucggggaccugcggccaacaca

SEQ ID NO: 121701 - RNA, 13 nt, Human herpesvirus 1
ucgguaucgugca

SEQ ID NO: 121702 - RNA, 20 nt, Human herpesvirus 1
ucgggaacggacgggguucc

SEQ ID NO: 121703 - RNA, 18 nt, Human herpesvirus 1
ucgugcguagcauaccug

SEQ ID NO: 121704 - RNA, 15 nt, Human herpesvirus 1
ucgucccccucgcac

SEQ ID NO: 121705 - RNA, 13 nt, Human herpesvirus 1
ucgcugugaugaa

SEQ ID NO: 121706 - RNA, 19 nt, Human herpesvirus 1
ucgcucccguccauuccca

SEQ ID NO: 121707 - RNA, 13 nt, Human herpesvirus 1
ucgcguagggguc

SEQ ID NO: 121708 - RNA, 17 nt, Human herpesvirus 1
ucgaagccuacuacucg

SEQ ID NO: 121709 - RNA, 22 nt, Human herpesvirus 1
uccuuuuggguuucacugaaac

SEQ ID NO: 121710 - RNA, 19 nt, Human herpesvirus 1
ucgaaacuuaacacaccaa

SEQ ID NO: 121711 - RNA, 15 nt, Human herpesvirus 1
uccccacaacaugga

SEQ ID NO: 121712 - RNA, 16 nt, Human herpesvirus 1
uccccacccacccacu

SEQ ID NO: 121713 - RNA, 21 nt, Human herpesvirus 1
uccccacccacccacucccca

SEQ ID NO: 121714 - RNA, 20 nt, Human herpesvirus 1
ucccccauggggaaugguuu

SEQ ID NO: 121715 - RNA, 20 nt, Human herpesvirus 1
ucccgccacccgaaccacca

SEQ ID NO: 121716 - RNA, 23 nt, Human herpesvirus 1
uccccugccccccccaccccaga

SEQ ID NO: 121717 - RNA, 19 nt, Human herpesvirus 1
ucccacccggagcuuucuu

SEQ ID NO: 121718 - RNA, 14 nt, Human herpesvirus 1
ucccacacacacaa

SEQ ID NO: 121719 - RNA, 13 nt, Human herpesvirus 1
ucccaacccccua

SEQ ID NO: 121720 - RNA, 17 nt, Human herpesvirus 1
ucccaugguaccaaaga

SEQ ID NO: 121721 - RNA, 16 nt, Human herpesvirus 1
ucccagaauuuggcca

SEQ ID NO: 121722 - RNA, 19 nt, Human herpesvirus 1
uccucuccgcggugucugg

SEQ ID NO: 121723 - RNA, 18 nt, Human herpesvirus 1
uccgccaaauaaagccac

SEQ ID NO: 121724 - RNA, 19 nt, Human herpesvirus 1
uccgcaacugcuccagaaa

SEQ ID NO: 121725 - RNA, 18 nt, Human herpesvirus 1
uccgguccauaaacaggc

SEQ ID NO: 121726 - RNA, 20 nt, Human herpesvirus 1
uccggcagccguccagacac

SEQ ID NO: 121727 - RNA, 21 nt, Human herpesvirus 1
uccggaacaccccugggguag

SEQ ID NO: 121728 - RNA, 22 nt, Human herpesvirus 1
ucaucccaccccccaucuuguc

SEQ ID NO: 121729 - RNA, 17 nt, Human herpesvirus 1
uguaucggggguuccca

SEQ ID NO: 121730 - RNA, 20 nt, Human herpesvirus 1
uguagauucgaaaccacgga

SEQ ID NO: 121731 - RNA, 19 nt, Human herpesvirus 1
uguagccgaucuugauccc

SEQ ID NO: 121732 - RNA, 15 nt, Human herpesvirus 1
uggugggguuucuuc

SEQ ID NO: 121733 - RNA, 21 nt, Human herpesvirus 1
uguaucuuuucccugucugug

SEQ ID NO: 121734 - RNA, 12 nt, Human herpesvirus 1
uguccuuucuca

SEQ ID NO: 121735 - RNA, 23 nt, Human herpesvirus 1
uguccuuuuggguuucacugaaa

SEQ ID NO: 121736 - RNA, 19 nt, Human herpesvirus 1
ugucgcgugugguucaugu

SEQ ID NO: 121737 - RNA, 17 nt, Human herpesvirus 1
ugucgcguugucucuga

SEQ ID NO: 121738 - RNA, 20 nt, Human herpesvirus 1
ugucggccgccgacgaccug

SEQ ID NO: 121739 - RNA, 19 nt, Human herpesvirus 1
ugucggugcuguuucaggg

SEQ ID NO: 121740 - RNA, 15 nt, Human herpesvirus 1
uggcggccgcccaac

SEQ ID NO: 121741 - RNA, 18 nt, Human herpesvirus 1
uggcgcggggguucaugc

SEQ ID NO: 121742 - RNA, 20 nt, Human herpesvirus 1
uggggacacuggguucuccu

SEQ ID NO: 121743 - RNA, 16 nt, Human herpesvirus 1
uggguucuccuggaac

SEQ ID NO: 121744 - RNA, 18 nt, Human herpesvirus 1
ugggcacuuuccccaugc

SEQ ID NO: 121745 - RNA, 18 nt, Human herpesvirus 1
ugugauucuugucaggga

SEQ ID NO: 121746 - RNA, 21 nt, Human herpesvirus 1
uguucccauuaucccauuccu

SEQ ID NO: 121747 - RNA, 14 nt, Human herpesvirus 1
uuaaagacaacaaa

SEQ ID NO: 121748 - RNA, 14 nt, Human herpesvirus 1
uuaaauacaugcca

SEQ ID NO: 121749 - RNA, 19 nt, Human herpesvirus 1
uugacccgggcguccgcca

SEQ ID NO: 121750 - RNA, 23 nt, Human herpesvirus 1
uucccccccucgccccauacucc

SEQ ID NO: 121751 - RNA, 21 nt, Human herpesvirus 1
uuggggacacuggguucuccu

SEQ ID NO: 121752 - RNA, 16 nt, Human herpesvirus 1
uugggaugggaccuua

SEQ ID NO: 121753 - RNA, 20 nt, Human herpesvirus 1
uugggcgggaggaagccaca

SEQ ID NO: 121754 - RNA, 14 nt, Human herpesvirus 1
uuuaagcgcugcug

SEQ ID NO: 121755 - RNA, 22 nt, Human herpesvirus 1
uuguuucccaauccgacgggga

SEQ ID NO: 121756 - RNA, 20 nt, Human herpesvirus 1
uuguggggucggaaccauag

SEQ ID NO: 121757 - RNA, 22 nt, Human herpesvirus 1
uuuacaacaaaccccccaucac

SEQ ID NO: 121758 - RNA, 13 nt, Human herpesvirus 1
uuuauuaacauca

SEQ ID NO: 121759 - RNA, 13 nt, Human herpesvirus 1
uuucaguuucaug

SEQ ID NO: 121760 - RNA, 20 nt, Human herpesvirus 1
uuuccuuugcgcucccgccu

SEQ ID NO: 121761 - RNA, 22 nt, Human herpesvirus 1
uuuccggcagccguccagacac

SEQ ID NO: 121762 - RNA, 14 nt, Human herpesvirus 1
guaacguccuuugg

SEQ ID NO: 121763 - RNA, 17 nt, Human herpesvirus 1
guaacaugcgcacguga

SEQ ID NO: 121764 - RNA, 22 nt, Human herpesvirus 1
guagcauaccuggguguguuua

SEQ ID NO: 121765 - RNA, 12 nt, Human herpesvirus 1
guaccaaacaaa

SEQ ID NO: 121766 - RNA, 16 nt, Human herpesvirus 1
guaccaaacaaacaaa

SEQ ID NO: 121767 - RNA, 19 nt, Human herpesvirus 1
guaccaccccccugugaac

SEQ ID NO: 121768 - RNA, 23 nt, Human herpesvirus 1
guagaagcgcgccgcgacacuca

SEQ ID NO: 121769 - RNA, 13 nt, Human herpesvirus 1
guauuauuuaccu

SEQ ID NO: 121770 - RNA, 23 nt, Human herpesvirus 1
guauucggacagacucaagcaca

SEQ ID NO: 121771 - RNA, 23 nt, Human herpesvirus 1
gucacgagguacggggcggcccg

SEQ ID NO: 121772 - RNA, 17 nt, Human herpesvirus 1
guauccguucgacuccu

SEQ ID NO: 121773 - RNA, 20 nt, Human herpesvirus 1
ggguccgcuguaacugcugu

SEQ ID NO: 121774 - RNA, 15 nt, Human herpesvirus 1
gggucggaaccauag

SEQ ID NO: 121775 - RNA, 16 nt, Human herpesvirus 1
gggguuuucucuuccc

SEQ ID NO: 121776 - RNA, 18 nt, Human herpesvirus 1
gggguucccgcugcccac

SEQ ID NO: 121777 - RNA, 16 nt, Human herpesvirus 1
ggggucgcggccgcga

SEQ ID NO: 121778 - RNA, 13 nt, Human herpesvirus 1
gguagauggccau

SEQ ID NO: 121779 - RNA, 23 nt, Human herpesvirus 1
gguacgccccaccggcaccaaca

SEQ ID NO: 121780 - RNA, 15 nt, Human herpesvirus 1
ggggcuaaagggugg

SEQ ID NO: 121781 - RNA, 22 nt, Human herpesvirus 1
ggggcuggacguucgacacgcc

SEQ ID NO: 121782 - RNA, 13 nt, Human herpesvirus 1
ggcucagccagac

SEQ ID NO: 121783 - RNA, 12 nt, Human herpesvirus 1
ggcuacuaccua

SEQ ID NO: 121784 - RNA, 14 nt, Human herpesvirus 1
ggucaaacucaggc

SEQ ID NO: 121785 - RNA, 19 nt, Human herpesvirus 1
ggucaaacucaggcaaaca

SEQ ID NO: 121786 - RNA, 17 nt, Human herpesvirus 1
gguauaaggacauccac

SEQ ID NO: 121787 - RNA, 16 nt, Human herpesvirus 1
ggugacguccaacuga

SEQ ID NO: 121788 - RNA, 15 nt, Human herpesvirus 1
ggugaguguggcgcg

SEQ ID NO: 121789 - RNA, 15 nt, Human herpesvirus 1
ggugccgcuccccca

SEQ ID NO: 121790 - RNA, 23 nt, Human herpesvirus 1
guccuuuuggguuucacugaaac

SEQ ID NO: 121791 - RNA, 20 nt, Human herpesvirus 1
gucgaccgcgcccucgccac

SEQ ID NO: 121792 - RNA, 23 nt, Human herpesvirus 1
guccacacccaguggcuccgggc

SEQ ID NO: 121793 - RNA, 10 nt, Human herpesvirus 1
gucauaugca

SEQ ID NO: 121794 - RNA, 21 nt, Human herpesvirus 1
guccacgggggggagcacaag

SEQ ID NO: 121795 - RNA, 19 nt, Human herpesvirus 1
gucgucgggcgccaaagcc

SEQ ID NO: 121796 - RNA, 15 nt, Human herpesvirus 1
gucggguuaaacaca

SEQ ID NO: 121797 - RNA, 22 nt, Human herpesvirus 1
gucgucaaagggauacacaaac

SEQ ID NO: 121798 - RNA, 17 nt, Human herpesvirus 1
gucggcgaccgccagcc

SEQ ID NO: 121799 - RNA, 15 nt, Human herpesvirus 1
gucgcucgucagggc

SEQ ID NO: 121800 - RNA, 19 nt, Human herpesvirus 1
gucguuuuuaaaaaaccca

SEQ ID NO: 121801 - RNA, 15 nt, Human herpesvirus 1
gucguuggucagggc

SEQ ID NO: 121802 - RNA, 20 nt, Human herpesvirus 1
gucuauaucucugggcgggc

SEQ ID NO: 121803 - RNA, 16 nt, Human herpesvirus 1
gucuccgaaagccacc

SEQ ID NO: 121804 - RNA, 19 nt, Human herpesvirus 1
gucugggaauagagcagaa

SEQ ID NO: 121805 - RNA, 21 nt, Human herpesvirus 1
gucuuccgcugacaaccaccu

SEQ ID NO: 121806 - RNA, 16 nt, Human herpesvirus 1
gucuugccguggcgcc

SEQ ID NO: 121807 - RNA, 13 nt, Human herpesvirus 1
gucuuggggccca

SEQ ID NO: 121808 - RNA, 18 nt, Human herpesvirus 1
gugacacccuaccccagu

SEQ ID NO: 121809 - RNA, 20 nt, Human herpesvirus 1
gugaguuuguggacccaaag

SEQ ID NO: 121810 - RNA, 14 nt, Human herpesvirus 1
gugcguugcacgua

SEQ ID NO: 121811 - RNA, 17 nt, Human herpesvirus 1
gugccugacgccugcca

SEQ ID NO: 121812 - RNA, 23 nt, Human herpesvirus 1
gcuggucgucgggcgccaaagcc

SEQ ID NO: 121813 - RNA, 18 nt, Human herpesvirus 1
gcuggcgcggugccugac

SEQ ID NO: 121814 - RNA, 20 nt, Human herpesvirus 1
gcuaauuaaauacaugccac

SEQ ID NO: 121815 - RNA, 15 nt, Human herpesvirus 1
gcucagccagacgcc

SEQ ID NO: 121816 - RNA, 17 nt, Human herpesvirus 1
gcucacgagacgcgugu

SEQ ID NO: 121817 - RNA, 12 nt, Human herpesvirus 1
gcucaaccaccg

SEQ ID NO: 121818 - RNA, 14 nt, Human herpesvirus 1
gcugacaaccaccu

SEQ ID NO: 121819 - RNA, 18 nt, Human herpesvirus 1
gccauggcgggacugggc

SEQ ID NO: 121820 - RNA, 21 nt, Human herpesvirus 1
gccauuaagacgcugggacaa

SEQ ID NO: 121821 - RNA, 18 nt, Human herpesvirus 1
gccauggugccgaccggg

SEQ ID NO: 121822 - RNA, 15 nt, Human herpesvirus 1
gccccaccggcacca

SEQ ID NO: 121823 - RNA, 12 nt, Human herpesvirus 1
gccccauacucc

SEQ ID NO: 121824 - RNA, 22 nt, Human herpesvirus 1
gccccauacucccgccagcacc

SEQ ID NO: 121825 - RNA, 15 nt, Human herpesvirus 1
gcccccgcccuaaca

SEQ ID NO: 121826 - RNA, 16 nt, Human herpesvirus 1
gcccccacccucgggu

SEQ ID NO: 121827 - RNA, 17 nt, Human herpesvirus 1
gcccccccaacggggga

SEQ ID NO: 121828 - RNA, 15 nt, Human herpesvirus 1
gcccccccaagcgcc

SEQ ID NO: 121829 - RNA, 13 nt, Human herpesvirus 1
gcgcuugugagac

SEQ ID NO: 121830 - RNA, 12 nt, Human herpesvirus 1
gcggacacccgg

SEQ ID NO: 121831 - RNA, 15 nt, Human herpesvirus 1
gcggacccccggagg

SEQ ID NO: 121832 - RNA, 15 nt, Human herpesvirus 1
gcguuugcacaacac

SEQ ID NO: 121833 - RNA, 15 nt, Human herpesvirus 1
gcguugggcccugua

SEQ ID NO: 121834 - RNA, 20 nt, Human herpesvirus 1
gcguuguggcggucggccaa

SEQ ID NO: 121835 - RNA, 16 nt, Human herpesvirus 1
gcggguuggugcggug

SEQ ID NO: 121836 - RNA, 22 nt, Human herpesvirus 1
gcgggucgaaguuacaaacuga

SEQ ID NO: 121837 - RNA, 22 nt, Human herpesvirus 1
gcgggcuccucgcaaaacuggu

SEQ ID NO: 121838 - RNA, 10 nt, Human herpesvirus 1
gcgggcgggc

SEQ ID NO: 121839 - RNA, 14 nt, Human herpesvirus 1
gcgggcggggacga

SEQ ID NO: 121840 - RNA, 13 nt, Human herpesvirus 1
gcgggccccgggg

SEQ ID NO: 121841 - RNA, 11 nt, Human herpesvirus 1
gcgggacugaa

SEQ ID NO: 121842 - RNA, 22 nt, Human herpesvirus 1
ggaaaccguaacggcauaugca

SEQ ID NO: 121843 - RNA, 16 nt, Human herpesvirus 1
ggaaacccguccgggu

SEQ ID NO: 121844 - RNA, 23 nt, Human herpesvirus 1
ggacuccgcuugcguggccgugc

SEQ ID NO: 121845 - RNA, 18 nt, Human herpesvirus 1
ggacgggcucgccagcga

SEQ ID NO: 121846 - RNA, 18 nt, Human herpesvirus 1
ggacaucgguguguccuu

SEQ ID NO: 121847 - RNA, 20 nt, Human herpesvirus 1
ggacccccccaacccucguu

SEQ ID NO: 121848 - RNA, 16 nt, Human herpesvirus 1
ggcguaccaaacaaac

SEQ ID NO: 121849 - RNA, 14 nt, Human herpesvirus 1
ggcgaggggcggga

SEQ ID NO: 121850 - RNA, 18 nt, Human herpesvirus 1
ggcccgcgucgggaucca

SEQ ID NO: 121851 - RNA, 22 nt, Human herpesvirus 1
ggccgucgggcacguacacggg

SEQ ID NO: 121852 - RNA, 12 nt, Human herpesvirus 1
ggccucacgggg

SEQ ID NO: 121853 - RNA, 18 nt, Human herpesvirus 1
ggccgaggucccgugcaa

SEQ ID NO: 121854 - RNA, 15 nt, Human herpesvirus 1
ggccgcccacuuccc

SEQ ID NO: 121855 - RNA, 20 nt, Human herpesvirus 1
ggccgcgcccacuacaccag

SEQ ID NO: 121856 - RNA, 21 nt, Human herpesvirus 1
ggagcuuucuuccggccucga

SEQ ID NO: 121857 - RNA, 15 nt, Human herpesvirus 1
ggaggccacagcgcc

SEQ ID NO: 121858 - RNA, 18 nt, Human herpesvirus 1
ggaggcccccauccagca

SEQ ID NO: 121859 - RNA, 22 nt, Human herpesvirus 1
ggaggucguuuucaugcccggu

SEQ ID NO: 121860 - RNA, 16 nt, Human herpesvirus 1
ggcagcaugggaccca

SEQ ID NO: 121861 - RNA, 21 nt, Human herpesvirus 1
ggcaggccgaaacggccaugc

SEQ ID NO: 121862 - RNA, 22 nt, Human herpesvirus 1
ggcaggcgccuccggggguccg

SEQ ID NO: 121863 - RNA, 16 nt, Human herpesvirus 1
ggagugggggugccau

SEQ ID NO: 121864 - RNA, 20 nt, Human herpesvirus 1
ucaauaaaagaccacaccaa

SEQ ID NO: 121865 - RNA, 19 nt, Human herpesvirus 1
ucaaaggcuagcaaaugaa

SEQ ID NO: 121866 - RNA, 17 nt, Human herpesvirus 1
ucaaagggauacacaaa

SEQ ID NO: 121867 - RNA, 14 nt, Human herpesvirus 1
uauuuuggggacau

SEQ ID NO: 121868 - RNA, 12 nt, Human herpesvirus 1
ucaaacaaaucg

SEQ ID NO: 121869 - RNA, 20 nt, Human herpesvirus 1
uauuuauuaacaucaaacac

SEQ ID NO: 121870 - RNA, 23 nt, Human herpesvirus 1
uaucuaguugauaugcaucucug

SEQ ID NO: 121871 - RNA, 18 nt, Human herpesvirus 1
uaucuuggcguacaauac

SEQ ID NO: 121872 - RNA, 18 nt, Human herpesvirus 1
uauguuuaugggauuugg

SEQ ID NO: 121873 - RNA, 19 nt, Human herpesvirus 1
uauuaaaacggaaccaaac

SEQ ID NO: 121874 - RNA, 16 nt, Human herpesvirus 1
uauuaacucacagggg

SEQ ID NO: 121875 - RNA, 14 nt, Human herpesvirus 1
uaugugauaugcua

SEQ ID NO: 121876 - RNA, 11 nt, Human herpesvirus 1
uagcauaccug

SEQ ID NO: 121877 - RNA, 15 nt, Human herpesvirus 1
uacucgucccagaau

SEQ ID NO: 121878 - RNA, 20 nt, Human herpesvirus 1
uacucucccuccagccuccc

SEQ ID NO: 121879 - RNA, 15 nt, Human herpesvirus 1
uaggccgggacagca

SEQ ID NO: 121880 - RNA, 14 nt, Human herpesvirus 1
uauaaggacaucca

SEQ ID NO: 121881 - RNA, 19 nt, Human herpesvirus 1
uauaaggacauccaccacc

SEQ ID NO: 121882 - RNA, 15 nt, Human herpesvirus 1
uauaacgggggccau

SEQ ID NO: 121883 - RNA, 22 nt, Human herpesvirus 1
uaccaaacaaacaaaccaaaag

SEQ ID NO: 121884 - RNA, 21 nt, Human herpesvirus 1
uaccaacacaacggcaugccu

SEQ ID NO: 121885 - RNA, 20 nt, Human herpesvirus 1
uaccaagaccaacccagcca

SEQ ID NO: 121886 - RNA, 23 nt, Human herpesvirus 1
uaccacaggugggugcuuuggaa

SEQ ID NO: 121887 - RNA, 23 nt, Human herpesvirus 1
uaccaccccccugugaacacaga

SEQ ID NO: 121888 - RNA, 20 nt, Human herpesvirus 1
uacaccggccacccagguga

SEQ ID NO: 121889 - RNA, 17 nt, Human herpesvirus 1
uacccguguuugcccau

SEQ ID NO: 121890 - RNA, 15 nt, Human herpesvirus 1
uaccgccgacgccgu

SEQ ID NO: 121891 - RNA, 22 nt, Human herpesvirus 1
uaauaaauuuuacaaacagauu

SEQ ID NO: 121892 - RNA, 18 nt, Human herpesvirus 1
uaauaaacacacaaucac

SEQ ID NO: 121893 - RNA, 21 nt, Human herpesvirus 1
uaauaucuauauaguuugguc

SEQ ID NO: 121894 - RNA, 21 nt, Human herpesvirus 1
uaaucaggggaaccggggcca

SEQ ID NO: 121895 - RNA, 23 nt, Human herpesvirus 1
uaaacuugguauugcccaacacu

SEQ ID NO: 121896 - RNA, 18 nt, Human herpesvirus 1
uaaacggcaacaaccuga

SEQ ID NO: 121897 - RNA, 22 nt, Human herpesvirus 1
uaaaggcgagagcgcgggaccg

SEQ ID NO: 121898 - RNA, 13 nt, Human herpesvirus 1
uaaaaagacagaa

SEQ ID NO: 121899 - RNA, 20 nt, Human herpesvirus 1
gugguuauaugcacuuccua

SEQ ID NO: 121900 - RNA, 18 nt, Human herpesvirus 1
uaaaaaaagaacauacac

SEQ ID NO: 121901 - RNA, 14 nt, Human herpesvirus 1
guuuugucacggga

SEQ ID NO: 121902 - RNA, 16 nt, Human herpesvirus 1
uaaccccggggguccg

SEQ ID NO: 121903 - RNA, 12 nt, Human herpesvirus 1
uaaccauaccca

SEQ ID NO: 121904 - RNA, 18 nt, Human herpesvirus 1
uaacaugcgcacgugaug

SEQ ID NO: 121905 - RNA, 19 nt, Human herpesvirus 1
uaacaugcgcacgugaugu

SEQ ID NO: 121906 - RNA, 20 nt, Human herpesvirus 1
uaacaugcgcacgugaugua

SEQ ID NO: 121907 - RNA, 19 nt, Human herpesvirus 1
uaagaagcacauccaggua

SEQ ID NO: 121908 - RNA, 15 nt, Human herpesvirus 1
cuguguucacagggg

SEQ ID NO: 121909 - RNA, 13 nt, Human herpesvirus 1
cugucuccccggg

SEQ ID NO: 121910 - RNA, 17 nt, Human herpesvirus 1
cuguuggggacacuggg

SEQ ID NO: 121911 - RNA, 20 nt, Human herpesvirus 1
cuuaccacgcccgaccacac

SEQ ID NO: 121912 - RNA, 14 nt, Human herpesvirus 1
cuuaacacaccaaa

SEQ ID NO: 121913 - RNA, 22 nt, Human herpesvirus 1
cuuaauaaauuuuacaaacaga

SEQ ID NO: 121914 - RNA, 20 nt, Human herpesvirus 1
cuucaucgcgccccucgggu

SEQ ID NO: 121915 - RNA, 18 nt, Human herpesvirus 1
cuuccgcugacaaccacc

SEQ ID NO: 121916 - RNA, 21 nt, Human herpesvirus 1
cuuccggccucgaugacgucc

SEQ ID NO: 121917 - RNA, 19 nt, Human herpesvirus 1
cucucccccgcucugacgg

SEQ ID NO: 121918 - RNA, 17 nt, Human herpesvirus 1
cuccgaaagccaccaau

SEQ ID NO: 121919 - RNA, 20 nt, Human herpesvirus 1
cuccgaaagccaccaauaga

SEQ ID NO: 121920 - RNA, 13 nt, Human herpesvirus 1
cuccgaccccaga

SEQ ID NO: 121921 - RNA, 18 nt, Human herpesvirus 1
cugaacaaacaaaccaca

SEQ ID NO: 121922 - RNA, 15 nt, Human herpesvirus 1
cugauaaaacagcga

SEQ ID NO: 121923 - RNA, 14 nt, Human herpesvirus 1
cugccaaccugauc

SEQ ID NO: 121924 - RNA, 23 nt, Human herpesvirus 1
cugggcaagcccuacaccggcca

SEQ ID NO: 121925 - RNA, 18 nt, Human herpesvirus 1
cugguaucggccacgacc

SEQ ID NO: 121926 - RNA, 21 nt, Human herpesvirus 1
cuggggauugguuagacccau

SEQ ID NO: 121927 - RNA, 13 nt, Human herpesvirus 1
cuggucagcacgg

SEQ ID NO: 121928 - RNA, 13 nt, Human herpesvirus 1
cuggucccccggg

SEQ ID NO: 121929 - RNA, 18 nt, Human herpesvirus 1
cgugguuuuuauuuacaa

SEQ ID NO: 121930 - RNA, 21 nt, Human herpesvirus 1
cgugggugaugucggguccaa

SEQ ID NO: 121931 - RNA, 19 nt, Human herpesvirus 1
cgugucuuucgguggaccu

SEQ ID NO: 121932 - RNA, 16 nt, Human herpesvirus 1
cguaacggcauaugca

SEQ ID NO: 121933 - RNA, 23 nt, Human herpesvirus 1
cggggccugaacaaacaaaccac

SEQ ID NO: 121934 - RNA, 22 nt, Human herpesvirus 1
cgggggcccugccacuccggcg

SEQ ID NO: 121935 - RNA, 21 nt, Human herpesvirus 1
cggguagcuuuacaaugcaaa

SEQ ID NO: 121936 - RNA, 21 nt, Human herpesvirus 1
cgguuaaugguuaaaccucug

SEQ ID NO: 121937 - RNA, 20 nt, Human herpesvirus 1
cguaccaaacaaacaaacca

SEQ ID NO: 121938 - RNA, 18 nt, Human herpesvirus 1
cgggcaccacacaccagc

SEQ ID NO: 121939 - RNA, 19 nt, Human herpesvirus 1
cgggcaccacacaccagcg

SEQ ID NO: 121940 - RNA, 18 nt, Human herpesvirus 1
cgggccgucguuggucag

SEQ ID NO: 121941 - RNA, 18 nt, Human herpesvirus 1
cgggccguguccccggag

SEQ ID NO: 121942 - RNA, 14 nt, Human herpesvirus 1
cgggccaaccaaga

SEQ ID NO: 121943 - RNA, 22 nt, Human herpesvirus 1
cgggcguucccgagcggcgcau

SEQ ID NO: 121944 - RNA, 12 nt, Human herpesvirus 1
cggaccacgagc

SEQ ID NO: 121945 - RNA, 13 nt, Human herpesvirus 1
cgcuuuaucccac

SEQ ID NO: 121946 - RNA, 13 nt, Human herpesvirus 1
cggaaaccaaaga

SEQ ID NO: 121947 - RNA, 11 nt, Human herpesvirus 1
cggaaccauag

SEQ ID NO: 121948 - RNA, 11 nt, Human herpesvirus 1
cgacccagaug

SEQ ID NO: 121949 - RNA, 13 nt, Human herpesvirus 1
cgacacugaaaug

SEQ ID NO: 121950 - RNA, 18 nt, Human herpesvirus 1
cgaagaucgcguguaaua

SEQ ID NO: 121951 - RNA, 14 nt, Human herpesvirus 1
cgacacucacagau

SEQ ID NO: 121952 - RNA, 15 nt, Human herpesvirus 1
cuauaucucugggcg

SEQ ID NO: 121953 - RNA, 11 nt, Human herpesvirus 1
cuacaccagcc

SEQ ID NO: 121954 - RNA, 13 nt, Human herpesvirus 1
cuacacacaggaa

SEQ ID NO: 121955 - RNA, 23 nt, Human herpesvirus 1
gaccacucccgucucgcugcccu

SEQ ID NO: 121956 - RNA, 17 nt, Human herpesvirus 1
gaccccauugggaccaa

SEQ ID NO: 121957 - RNA, 11 nt, Human herpesvirus 1
gacccagaccg

SEQ ID NO: 121958 - RNA, 23 nt, Human herpesvirus 1
gacccagaccggcaccaccgacu

SEQ ID NO: 121959 - RNA, 22 nt, Human herpesvirus 1
gaccacggugucgucuguuaag

SEQ ID NO: 121960 - RNA, 13 nt, Human herpesvirus 1
gaccaacccagcc

SEQ ID NO: 121961 - RNA, 23 nt, Human herpesvirus 1
gaccaaggggguccguuuuguca

SEQ ID NO: 121962 - RNA, 16 nt, Human herpesvirus 1
gacauccaccacccgg

SEQ ID NO: 121963 - RNA, 18 nt, Human herpesvirus 1
gacaugcgcccgcggcca

SEQ ID NO: 121964 - RNA, 21 nt, Human herpesvirus 1
gacaucuugucgucaaaggga

SEQ ID NO: 121965 - RNA, 22 nt, Human herpesvirus 1
gaccaaaaucaaagcguuuguc

SEQ ID NO: 121966 - RNA, 16 nt, Human herpesvirus 1
gacaugggggguguuu

SEQ ID NO: 121967 - RNA, 17 nt, Human herpesvirus 1
gacguuaucucggugga

SEQ ID NO: 121968 - RNA, 21 nt, Human herpesvirus 1
gaccguggccgacaacugccu

SEQ ID NO: 121969 - RNA, 19 nt, Human herpesvirus 1
gacgagacgaacucgugga

SEQ ID NO: 121970 - RNA, 16 nt, Human herpesvirus 1
gacgagucguuuccca

SEQ ID NO: 121971 - RNA, 16 nt, Human herpesvirus 1
gacgccgaccgacucc

SEQ ID NO: 121972 - RNA, 14 nt, Human herpesvirus 1
gagcgcucuugucu

SEQ ID NO: 121973 - RNA, 14 nt, Human herpesvirus 1
gagcgcgggaccgu

SEQ ID NO: 121974 - RNA, 13 nt, Human herpesvirus 1
gagcacaaggggc

SEQ ID NO: 121975 - RNA, 18 nt, Human herpesvirus 1
gacucagggcucuacccu

SEQ ID NO: 121976 - RNA, 13 nt, Human herpesvirus 1
gaagacgcaauaa

SEQ ID NO: 121977 - RNA, 15 nt, Human herpesvirus 1
gaauaaaaaccaaaa

SEQ ID NO: 121978 - RNA, 16 nt, Human herpesvirus 1
gaacauacaccaaugg

SEQ ID NO: 121979 - RNA, 23 nt, Human herpesvirus 1
cuugacgcgucgaugcucugccg

SEQ ID NO: 121980 - RNA, 22 nt, Human herpesvirus 1
cuuggucagugccgauuccccc

SEQ ID NO: 121981 - RNA, 23 nt, Human herpesvirus 1
gauaucaggggccgugauaugcc

SEQ ID NO: 121982 - RNA, 21 nt, Human herpesvirus 1
gauagcgaauaaaaaccaaaa

SEQ ID NO: 121983 - RNA, 17 nt, Human herpesvirus 1
gauagcguauaacgggg

SEQ ID NO: 121984 - RNA, 19 nt, Human herpesvirus 1
gagguggggcgggggcccc

SEQ ID NO: 121985 - RNA, 16 nt, Human herpesvirus 1
gaggggcaccagaaac

SEQ ID NO: 121986 - RNA, 20 nt, Human herpesvirus 1
gauggacccguacugcccau

SEQ ID NO: 121987 - RNA, 11 nt, Human herpesvirus 1
gauguuuacuu

SEQ ID NO: 121988 - RNA, 21 nt, Human herpesvirus 1
gcacauccagguacccggcgg

SEQ ID NO: 121989 - RNA, 15 nt, Human herpesvirus 1
gcaccacacaccagc

SEQ ID NO: 121990 - RNA, 16 nt, Human herpesvirus 1
gcaccacacaccagcg

SEQ ID NO: 121991 - RNA, 14 nt, Human herpesvirus 1
gcaccaacaggggu

SEQ ID NO: 121992 - RNA, 13 nt, Human herpesvirus 1
gcacuuuccccau

SEQ ID NO: 121993 - RNA, 22 nt, Human herpesvirus 1
gcaggcgucgaucuccucaaac

SEQ ID NO: 121994 - RNA, 19 nt, Human herpesvirus 1
gcaggauuucgcgcaggug

SEQ ID NO: 121995 - RNA, 16 nt, Human herpesvirus 1
gcagccagcgcauaca

SEQ ID NO: 121996 - RNA, 12 nt, Human herpesvirus 1
gcagccuggucg

SEQ ID NO: 121997 - RNA, 14 nt, Human herpesvirus 1
gcaugcaccccaga

SEQ ID NO: 121998 - RNA, 14 nt, Human herpesvirus 1
gcauggccccgggg

SEQ ID NO: 121999 - RNA, 17 nt, Human herpesvirus 1
gcaucccccgucugggu

SEQ ID NO: 122000 - RNA, 17 nt, Human herpesvirus 1
gcauuuauugacccaaa

SEQ ID NO: 122001 - RNA, 18 nt, Human herpesvirus 1
gcauuuauugacccaaaa

SEQ ID NO: 122002 - RNA, 14 nt, Human herpesvirus 1
gccaacgaggacca

SEQ ID NO: 122003 - RNA, 22 nt, Human herpesvirus 1
gccaauaucgcuagagacagcc

SEQ ID NO: 122004 - RNA, 22 nt, Human herpesvirus 1
gccaacaauccccaggacaccg

SEQ ID NO: 122005 - RNA, 14 nt, Human herpesvirus 1
gccaaauaaagcca

SEQ ID NO: 122006 - RNA, 21 nt, Human herpesvirus 1
gccaaauaaagccacugaaac

SEQ ID NO: 122007 - RNA, 19 nt, Human herpesvirus 1
gccacgggcugcgugucaa

SEQ ID NO: 122008 - RNA, 20 nt, Human herpesvirus 1
gccacgggcugcgugucaaa

SEQ ID NO: 122009 - RNA, 13 nt, Human herpesvirus 1
gccacccagguga

SEQ ID NO: 122010 - RNA, 18 nt, Human herpesvirus 1
gccaccaauagaccagag

SEQ ID NO: 122011 - RNA, 13 nt, Human herpesvirus 1
gccaggaccgccu

SEQ ID NO: 122012 - RNA, 16 nt, Human herpesvirus 1
gccagcgcgggugguu

SEQ ID NO: 122013 - RNA, 14 nt, Human herpesvirus 1
gccaucacggccaa

SEQ ID NO: 122014 - RNA, 13 nt, Human herpesvirus 1
cccauuaucccau

SEQ ID NO: 122015 - RNA, 16 nt, Human herpesvirus 1
cccauaauaaaccucu

SEQ ID NO: 122016 - RNA, 21 nt, Human herpesvirus 1
cccaucgccgcggcucccggc

SEQ ID NO: 122017 - RNA, 23 nt, Human herpesvirus 1
ccaucaucugagagacgaacaaa

SEQ ID NO: 122018 - RNA, 22 nt, Human herpesvirus 1
ccauccagcauguuuuugagaa

SEQ ID NO: 122019 - RNA, 23 nt, Human herpesvirus 1
ccaucccacaaacacaaaacaca

SEQ ID NO: 122020 - RNA, 21 nt, Human herpesvirus 1
cccaguaacaugcgcacguga

SEQ ID NO: 122021 - RNA, 14 nt, Human herpesvirus 1
cccagggcacccaa

SEQ ID NO: 122022 - RNA, 13 nt, Human herpesvirus 1
ccagggaccuccu

SEQ ID NO: 122023 - RNA, 13 nt, Human herpesvirus 1
ccagggaggucac

SEQ ID NO: 122024 - RNA, 16 nt, Human herpesvirus 1
ccagggcugggagccc

SEQ ID NO: 122025 - RNA, 23 nt, Human herpesvirus 1
cccucccgaccgacacccccaua

SEQ ID NO: 122026 - RNA, 17 nt, Human herpesvirus 1
cccuccgggauaccggu

SEQ ID NO: 122027 - RNA, 16 nt, Human herpesvirus 1
cccucgcacauccuca

SEQ ID NO: 122028 - RNA, 17 nt, Human herpesvirus 1
cccucgcgccacacuca

SEQ ID NO: 122029 - RNA, 15 nt, Human herpesvirus 1
cccugcccgacaggg

SEQ ID NO: 122030 - RNA, 20 nt, Human herpesvirus 1
ccccuuacaguuccaccgaa

SEQ ID NO: 122031 - RNA, 17 nt, Human herpesvirus 1
cccgccagcaccccggu

SEQ ID NO: 122032 - RNA, 14 nt, Human herpesvirus 1
cccgcaaccaggag

SEQ ID NO: 122033 - RNA, 14 nt, Human herpesvirus 1
cccgaggacgccua

SEQ ID NO: 122034 - RNA, 20 nt, Human herpesvirus 1
cccgauggcccuccaggcug

SEQ ID NO: 122035 - RNA, 23 nt, Human herpesvirus 1
cccgagaaccuagggaacccaga

SEQ ID NO: 122036 - RNA, 21 nt, Human herpesvirus 1
ccguaagugggguccggguaa

SEQ ID NO: 122037 - RNA, 12 nt, Human herpesvirus 1
ccguccagacac

SEQ ID NO: 122038 - RNA, 15 nt, Human herpesvirus 1
ccguccagacacuug

SEQ ID NO: 122039 - RNA, 13 nt, Human herpesvirus 1
ccgguaugguaau

SEQ ID NO: 122040 - RNA, 22 nt, Human herpesvirus 1
ccgguccauaaacaggccgggu

SEQ ID NO: 122041 - RNA, 18 nt, Human herpesvirus 1
ccggugcguugcacguag

SEQ ID NO: 122042 - RNA, 23 nt, Human herpesvirus 1
ccgguugauuuuugggugggugg

SEQ ID NO: 122043 - RNA, 18 nt, Human herpesvirus 1
ccguaacggcauaugcaa

SEQ ID NO: 122044 - RNA, 19 nt, Human herpesvirus 1
ccuaucgcucgaccucucc

SEQ ID NO: 122045 - RNA, 19 nt, Human herpesvirus 1
ccgaaacggccaugcacac

SEQ ID NO: 122046 - RNA, 15 nt, Human herpesvirus 1
ccgaaaggaggccag

SEQ ID NO: 122047 - RNA, 19 nt, Human herpesvirus 1
cccuguuuauggugucguc

SEQ ID NO: 122048 - RNA, 19 nt, Human herpesvirus 1
ccgcgcuaugacggcaaua

SEQ ID NO: 122049 - RNA, 17 nt, Human herpesvirus 1
ccgaccccacaaacagc

SEQ ID NO: 122050 - RNA, 18 nt, Human herpesvirus 1
ccgacgcgucauaugcaa

SEQ ID NO: 122051 - RNA, 21 nt, Human herpesvirus 1
ccgaacaaacgacccaccaau

SEQ ID NO: 122052 - RNA, 11 nt, Human herpesvirus 1
ccgaaccacca

SEQ ID NO: 122053 - RNA, 15 nt, Human herpesvirus 1
ccgaaccgaaccagc

SEQ ID NO: 122054 - RNA, 15 nt, Human herpesvirus 1
ccggagaaacagcac

SEQ ID NO: 122055 - RNA, 14 nt, Human herpesvirus 1
ccggaaaccaaaga

SEQ ID NO: 122056 - RNA, 18 nt, Human herpesvirus 1
ccucccaauaaaaaaaga

SEQ ID NO: 122057 - RNA, 15 nt, Human herpesvirus 1
ccuccccgcacagau

SEQ ID NO: 122058 - RNA, 20 nt, Human herpesvirus 1
ccuccaggugcgccuuucag

SEQ ID NO: 122059 - RNA, 13 nt, Human herpesvirus 1
ccuccaccaacgc

SEQ ID NO: 122060 - RNA, 18 nt, Human herpesvirus 1
ccucugggguuugcccuc

SEQ ID NO: 122061 - RNA, 21 nt, Human herpesvirus 1
ccucuccgcggugucugggaa

SEQ ID NO: 122062 - RNA, 15 nt, Human herpesvirus 1
ccucguguggaugaa

SEQ ID NO: 122063 - RNA, 17 nt, Human herpesvirus 1
ccugagcuggcgaaccc

SEQ ID NO: 122064 - RNA, 13 nt, Human herpesvirus 1
ccugcggccaaca

SEQ ID NO: 122065 - RNA, 17 nt, Human herpesvirus 1
ccugcggccaacacaac

SEQ ID NO: 122066 - RNA, 23 nt, Human herpesvirus 1
ccuugcggaugugcgccguguag

SEQ ID NO: 122067 - RNA, 15 nt, Human herpesvirus 1
ccuugggagagccau

SEQ ID NO: 122068 - RNA, 22 nt, Human herpesvirus 1
cgaacccggcccgggggacuca

SEQ ID NO: 122069 - RNA, 18 nt, Human herpesvirus 1
ccuuuugcacuaugacag

SEQ ID NO: 122070 - RNA, 23 nt, Human herpesvirus 1
ccuucccgccauuaagacgcugg

SEQ ID NO: 122071 - RNA, 22 nt, Human herpesvirus 1
ccugggucuuccgcggagcucc

SEQ ID NO: 122072 - RNA, 21 nt, Human herpesvirus 1
ccugucgccucccaacccccu

SEQ ID NO: 122073 - RNA, 21 nt, Human herpesvirus 1
ccugucggcgauaucaggggc

SEQ ID NO: 122074 - RNA, 14 nt, Human herpesvirus 1
ccugugagaccagc

SEQ ID NO: 122075 - RNA, 18 nt, Human herpesvirus 1
cauuggacggggugcagu

SEQ ID NO: 122076 - RNA, 23 nt, Human herpesvirus 1
cauuuaaggcguuguuguguuga

SEQ ID NO: 122077 - RNA, 21 nt, Human herpesvirus 1
ccaacgucuccuccaccaccc

SEQ ID NO: 122078 - RNA, 14 nt, Human herpesvirus 1
ccacccacucccca

SEQ ID NO: 122079 - RNA, 13 nt, Human herpesvirus 1
ccaccccaacccc

SEQ ID NO: 122080 - RNA, 15 nt, Human herpesvirus 1
ccacccgacaacagc

SEQ ID NO: 122081 - RNA, 14 nt, Human herpesvirus 1
ccaauaaacguaua

SEQ ID NO: 122082 - RNA, 15 nt, Human herpesvirus 1
ccacgcaaacaacac

SEQ ID NO: 122083 - RNA, 16 nt, Human herpesvirus 1
ccacgugcacagccug

SEQ ID NO: 122084 - RNA, 20 nt, Human herpesvirus 1
ccacgggagccagggccaag

SEQ ID NO: 122085 - RNA, 15 nt, Human herpesvirus 1
ccacgggggggagca

SEQ ID NO: 122086 - RNA, 19 nt, Human herpesvirus 1
ccacucccuugaauaaaca

SEQ ID NO: 122087 - RNA, 12 nt, Human herpesvirus 1
ccacuacaccag

SEQ ID NO: 122088 - RNA, 21 nt, Human herpesvirus 1
ccagaauaaugaccaccacaa

SEQ ID NO: 122089 - RNA, 17 nt, Human herpesvirus 1
ccagacagaaaauguaa

SEQ ID NO: 122090 - RNA, 14 nt, Human herpesvirus 1
ccagcgacccgcac

SEQ ID NO: 122091 - RNA, 17 nt, Human herpesvirus 1
ccagaccggcaccaccg

SEQ ID NO: 122092 - RNA, 22 nt, Human herpesvirus 1
ccagacgcacagcgagggaccc

SEQ ID NO: 122093 - RNA, 17 nt, Human herpesvirus 1
caguggcuccgggccaa

SEQ ID NO: 122094 - RNA, 17 nt, Human herpesvirus 1
caguggcuucaugugga

SEQ ID NO: 122095 - RNA, 15 nt, Human herpesvirus 1
cauaacacccaaacc

SEQ ID NO: 122096 - RNA, 16 nt, Human herpesvirus 1
cagcagcuccccauga

SEQ ID NO: 122097 - RNA, 17 nt, Human herpesvirus 1
caucaaaagcccgauau

SEQ ID NO: 122098 - RNA, 14 nt, Human herpesvirus 1
caugaaugugugua

SEQ ID NO: 122099 - RNA, 20 nt, Human herpesvirus 1
caugauaaacugagaguuau

SEQ ID NO: 122100 - RNA, 18 nt, Human herpesvirus 1
caaacucauccuccagac

SEQ ID NO: 122101 - RNA, 14 nt, Human herpesvirus 1
caacaaaacugaua

SEQ ID NO: 122102 - RNA, 20 nt, Human herpesvirus 1
caacaaaccccccaucacag

SEQ ID NO: 122103 - RNA, 14 nt, Human herpesvirus 1
auuuagguaugcug

SEQ ID NO: 122104 - RNA, 13 nt, Human herpesvirus 1
auuuacaacaaac

SEQ ID NO: 122105 - RNA, 14 nt, Human herpesvirus 1
auuuacaacaaacc

SEQ ID NO: 122106 - RNA, 16 nt, Human herpesvirus 1
auugugauucuuguca

SEQ ID NO: 122107 - RNA, 20 nt, Human herpesvirus 1
auuuggggcgcuccugaugu

SEQ ID NO: 122108 - RNA, 22 nt, Human herpesvirus 1
auuuggccaggacguccuugua

SEQ ID NO: 122109 - RNA, 15 nt, Human herpesvirus 1
auucggacagacuca

SEQ ID NO: 122110 - RNA, 23 nt, Human herpesvirus 1
auucggacagacucaagcacaca

SEQ ID NO: 122111 - RNA, 22 nt, Human herpesvirus 1
auuggucaaacucaggcaaaca

SEQ ID NO: 122112 - RNA, 21 nt, Human herpesvirus 1
auuggcucggacgagacgaac

SEQ ID NO: 122113 - RNA, 18 nt, Human herpesvirus 1
auguggauaaaaagccag

SEQ ID NO: 122114 - RNA, 12 nt, Human herpesvirus 1
augucguguuua

SEQ ID NO: 122115 - RNA, 21 nt, Human herpesvirus 1
augucgcagggcgccaugcgu

SEQ ID NO: 122116 - RNA, 22 nt, Human herpesvirus 1
cacacaaaaggcguaccaaaca

SEQ ID NO: 122117 - RNA, 14 nt, Human herpesvirus 1
cacacacacaaaag

SEQ ID NO: 122118 - RNA, 12 nt, Human herpesvirus 1
cacacaccagcg

SEQ ID NO: 122119 - RNA, 11 nt, Human herpesvirus 1
cacacaccccc

SEQ ID NO: 122120 - RNA, 16 nt, Human herpesvirus 1
cacacacgggggagcg

SEQ ID NO: 122121 - RNA, 16 nt, Human herpesvirus 1
cacaccccccaugcca

SEQ ID NO: 122122 - RNA, 23 nt, Human herpesvirus 1
cacacgggggagcgcucuugucu

SEQ ID NO: 122123 - RNA, 19 nt, Human herpesvirus 1
cacaggugggugcuuugga

SEQ ID NO: 122124 - RNA, 21 nt, Human herpesvirus 1
cacccgacgcgucauaugcaa

SEQ ID NO: 122125 - RNA, 17 nt, Human herpesvirus 1
cacccgcgcaugaucuc

SEQ ID NO: 122126 - RNA, 19 nt, Human herpesvirus 1
cacccgcgcaugaucuccg

SEQ ID NO: 122127 - RNA, 14 nt, Human herpesvirus 1
caccccccaugcca

SEQ ID NO: 122128 - RNA, 13 nt, Human herpesvirus 1
cacccacaacauc

SEQ ID NO: 122129 - RNA, 16 nt, Human herpesvirus 1
cacccacccaccaaga

SEQ ID NO: 122130 - RNA, 14 nt, Human herpesvirus 1
cacccaggugacgc

SEQ ID NO: 122131 - RNA, 23 nt, Human herpesvirus 1
caccagcgggucuuuuguguugg

SEQ ID NO: 122132 - RNA, 15 nt, Human herpesvirus 1
caccagaaaccaggu

SEQ ID NO: 122133 - RNA, 16 nt, Human herpesvirus 1
caccacggucggguua

SEQ ID NO: 122134 - RNA, 21 nt, Human herpesvirus 1
caauaaacggcaacaaccuga

SEQ ID NO: 122135 - RNA, 21 nt, Human herpesvirus 1
caagggggggggggcauuuca

SEQ ID NO: 122136 - RNA, 18 nt, Human herpesvirus 1
caagcccuacaccggcca

SEQ ID NO: 122137 - RNA, 16 nt, Human herpesvirus 1
cagaggcggccagaaa

SEQ ID NO: 122138 - RNA, 13 nt, Human herpesvirus 1
cacucccgucucg

SEQ ID NO: 122139 - RNA, 17 nt, Human herpesvirus 1
caccgcugggcgcuaua

SEQ ID NO: 122140 - RNA, 16 nt, Human herpesvirus 1
caccugaccaaccuuu

SEQ ID NO: 122141 - RNA, 12 nt, Human herpesvirus 1
cacuacaccagc

SEQ ID NO: 122142 - RNA, 18 nt, Human herpesvirus 1
cacgggggggagcacaag

SEQ ID NO: 122143 - RNA, 20 nt, Human herpesvirus 1
cacgcauccccaguggguuu

SEQ ID NO: 122144 - RNA, 15 nt, Human herpesvirus 1
cacgggcuacccuca

SEQ ID NO: 122145 - RNA, 18 nt, Human herpesvirus 1
cacggcccggcgaugugg

SEQ ID NO: 122146 - RNA, 16 nt, Human herpesvirus 1
cacggcgucgcuguga

SEQ ID NO: 122147 - RNA, 14 nt, Human herpesvirus 1
cacggcguggagca

SEQ ID NO: 122148 - RNA, 17 nt, Human herpesvirus 1
agcgaauaaaaaccaaa

SEQ ID NO: 122149 - RNA, 21 nt, Human herpesvirus 1
agcccucucccccgcucugac

SEQ ID NO: 122150 - RNA, 21 nt, Human herpesvirus 1
agcccccaacaugacccagac

SEQ ID NO: 122151 - RNA, 19 nt, Human herpesvirus 1
agcgaccgcaacuucccac

SEQ ID NO: 122152 - RNA, 18 nt, Human herpesvirus 1
agcgcgccgcgacacuca

SEQ ID NO: 122153 - RNA, 23 nt, Human herpesvirus 1
agcgccauuacccuuuacgcggu

SEQ ID NO: 122154 - RNA, 12 nt, Human herpesvirus 1
agcucagcuuuu

SEQ ID NO: 122155 - RNA, 15 nt, Human herpesvirus 1
agcucagcuuuuacc

SEQ ID NO: 122156 - RNA, 17 nt, Human herpesvirus 1
aggacuuccccuuccuc

SEQ ID NO: 122157 - RNA, 11 nt, Human herpesvirus 1
aggacggccag

SEQ ID NO: 122158 - RNA, 20 nt, Human herpesvirus 1
aggacaucgguguguccuuu

SEQ ID NO: 122159 - RNA, 14 nt, Human herpesvirus 1
aggaggacgucucc

SEQ ID NO: 122160 - RNA, 20 nt, Human herpesvirus 1
aggcauuagucccgaagacc

SEQ ID NO: 122161 - RNA, 19 nt, Human herpesvirus 1
aguaacaugcgcacgugau

SEQ ID NO: 122162 - RNA, 22 nt, Human herpesvirus 1
aggucccaccugacgccaugaa

SEQ ID NO: 122163 - RNA, 16 nt, Human herpesvirus 1
agggguauaacaaagu

SEQ ID NO: 122164 - RNA, 23 nt, Human herpesvirus 1
agggggggggggcauuucagugu

SEQ ID NO: 122165 - RNA, 13 nt, Human herpesvirus 1
agggaacacaaac

SEQ ID NO: 122166 - RNA, 12 nt, Human herpesvirus 1
agggaacccaga

SEQ ID NO: 122167 - RNA, 12 nt, Human herpesvirus 1
auaaaaaccaaa

SEQ ID NO: 122168 - RNA, 12 nt, Human herpesvirus 1
auaaaaagccag

SEQ ID NO: 122169 - RNA, 23 nt, Human herpesvirus 1
agugcaggugggcggacgugccg

SEQ ID NO: 122170 - RNA, 18 nt, Human herpesvirus 1
aucgcucgaccucuccac

SEQ ID NO: 122171 - RNA, 11 nt, Human herpesvirus 1
aucgccagugc

SEQ ID NO: 122172 - RNA, 15 nt, Human herpesvirus 1
auccggagaaacagc

SEQ ID NO: 122173 - RNA, 16 nt, Human herpesvirus 1
aucccccguguuccca

SEQ ID NO: 122174 - RNA, 17 nt, Human herpesvirus 1
aucccaugguaccaaag

SEQ ID NO: 122175 - RNA, 17 nt, Human herpesvirus 1
auccagcacacccccau

SEQ ID NO: 122176 - RNA, 10 nt, Human herpesvirus 1
aucauugccg

SEQ ID NO: 122177 - RNA, 23 nt, Human herpesvirus 1
auacuuuuauuuauuaacucaca

SEQ ID NO: 122178 - RNA, 16 nt, Human herpesvirus 1
auauacaguaagacau

SEQ ID NO: 122179 - RNA, 20 nt, Human herpesvirus 1
auagcgaauaaaaaccaaaa

SEQ ID NO: 122180 - RNA, 13 nt, Human herpesvirus 1
aucacgccuuaau

SEQ ID NO: 122181 - RNA, 21 nt, Human herpesvirus 1
aucacgguccauacuggccug

SEQ ID NO: 122182 - RNA, 20 nt, Human herpesvirus 1
acagaaacgacaucuugucg

SEQ ID NO: 122183 - RNA, 12 nt, Human herpesvirus 1
acagaacagggc

SEQ ID NO: 122184 - RNA, 15 nt, Human herpesvirus 1
acagacucaagcaca

SEQ ID NO: 122185 - RNA, 21 nt, Human herpesvirus 1
acaggccgcggacacccgggg

SEQ ID NO: 122186 - RNA, 10 nt, Human herpesvirus 1
accaaaaaca

SEQ ID NO: 122187 - RNA, 17 nt, Human herpesvirus 1
accacugcacucccugc

SEQ ID NO: 122188 - RNA, 16 nt, Human herpesvirus 1
accaccccaaauacag

SEQ ID NO: 122189 - RNA, 20 nt, Human herpesvirus 1
acaugcgcacgugauguagg

SEQ ID NO: 122190 - RNA, 19 nt, Human herpesvirus 1
accucggaugacucagggc

SEQ ID NO: 122191 - RNA, 15 nt, Human herpesvirus 1
accucgaggacaccc

SEQ ID NO: 122192 - RNA, 23 nt, Human herpesvirus 1
accuuggcgccggccucgagggu

SEQ ID NO: 122193 - RNA, 22 nt, Human herpesvirus 1
accugauuaaguuuugcaguag

SEQ ID NO: 122194 - RNA, 14 nt, Human herpesvirus 1
acgcacgaccacgg

SEQ ID NO: 122195 - RNA, 19 nt, Human herpesvirus 1
acgccaccgacaccgcaga

SEQ ID NO: 122196 - RNA, 13 nt, Human herpesvirus 1
acgccaaaccacg

SEQ ID NO: 122197 - RNA, 14 nt, Human herpesvirus 1
acgccauacacagc

SEQ ID NO: 122198 - RNA, 15 nt, Human herpesvirus 1
acgcccgaccacaca

SEQ ID NO: 122199 - RNA, 12 nt, Human herpesvirus 1
acggaaccaaac

SEQ ID NO: 122200 - RNA, 14 nt, Human herpesvirus 1
acccaaccccaacu

SEQ ID NO: 122201 - RNA, 21 nt, Human herpesvirus 1
acccaaccccaacuccagacc

SEQ ID NO: 122202 - RNA, 10 nt, Human herpesvirus 1
acccaaagcc

SEQ ID NO: 122203 - RNA, 19 nt, Human herpesvirus 1
acccaaagcugugggcuaa

SEQ ID NO: 122204 - RNA, 14 nt, Human herpesvirus 1
acccaaaucccaua

SEQ ID NO: 122205 - RNA, 23 nt, Human herpesvirus 1
acccaggugacgccuucgagggu

SEQ ID NO: 122206 - RNA, 20 nt, Human herpesvirus 1
acccagaccggcaccaccga

SEQ ID NO: 122207 - RNA, 11 nt, Human herpesvirus 1
acccacucccc

SEQ ID NO: 122208 - RNA, 18 nt, Human herpesvirus 1
acccacuccccacccacc

SEQ ID NO: 122209 - RNA, 23 nt, Human herpesvirus 1
acccacccgacgcgucauaugca

SEQ ID NO: 122210 - RNA, 20 nt, Human herpesvirus 1
acccaccgcgagauguccaa

SEQ ID NO: 122211 - RNA, 16 nt, Human herpesvirus 1
acccauugguguaugu

SEQ ID NO: 122212 - RNA, 17 nt, Human herpesvirus 1
accccagacgacaucag

SEQ ID NO: 122213 - RNA, 17 nt, Human herpesvirus 1
acccuugugugucaaug

SEQ ID NO: 122214 - RNA, 17 nt, Human herpesvirus 1
accggccacccagguga

SEQ ID NO: 122215 - RNA, 23 nt, Human herpesvirus 1
accgugacuaagcgucccugggc

SEQ ID NO: 122216 - RNA, 17 nt, Human herpesvirus 1
accgguagaaccaaaac

SEQ ID NO: 122217 - RNA, 13 nt, Human herpesvirus 1
agacccaugguuu

SEQ ID NO: 122218 - RNA, 13 nt, Human herpesvirus 1
agaccacaccaac

SEQ ID NO: 122219 - RNA, 20 nt, Human herpesvirus 1
agacacgguuacaguuuauu

SEQ ID NO: 122220 - RNA, 14 nt, Human herpesvirus 1
agacgcugggacaa

SEQ ID NO: 122221 - RNA, 15 nt, Human herpesvirus 1
agacucaagcacaca

SEQ ID NO: 122222 - RNA, 13 nt, Human herpesvirus 1
agacguccuuaau

SEQ ID NO: 122223 - RNA, 20 nt, Human herpesvirus 1
agaaccuagggaacccagag

SEQ ID NO: 122224 - RNA, 16 nt, Human herpesvirus 1
agaaacgacaucuugu

SEQ ID NO: 122225 - RNA, 14 nt, Human herpesvirus 1
agaaacaaaaccgg

SEQ ID NO: 122226 - RNA, 21 nt, Human herpesvirus 1
agaaacaagcccgaccaccag

SEQ ID NO: 122227 - RNA, 13 nt, Human herpesvirus 1
agaaacagaccac

SEQ ID NO: 122228 - RNA, 20 nt, Human herpesvirus 1
acguauucggacagacucaa

SEQ ID NO: 122229 - RNA, 12 nt, Human herpesvirus 1
acucauuuggau

SEQ ID NO: 122230 - RNA, 23 nt, Human herpesvirus 1
acucaagcacacacgggggagcg

SEQ ID NO: 122231 - RNA, 17 nt, Human herpesvirus 1
acucaggcaaacagaaa

SEQ ID NO: 122232 - RNA, 16 nt, Human herpesvirus 1
acucauccuccagacg

SEQ ID NO: 122233 - RNA, 15 nt, Human herpesvirus 1
acucauuaaugggcg

SEQ ID NO: 122234 - RNA, 20 nt, Human herpesvirus 1
acucauuaaugggcggcccc

SEQ ID NO: 122235 - RNA, 15 nt, Human herpesvirus 1
acuggccgggagcac

SEQ ID NO: 122236 - RNA, 17 nt, Human herpesvirus 1
acuggguggcggggggu

SEQ ID NO: 122237 - RNA, 22 nt, Human herpesvirus 1
acuugccggucgccgugcuccu

SEQ ID NO: 122238 - RNA, 17 nt, Human herpesvirus 1
agaaaauguaaccauac

SEQ ID NO: 122239 - RNA, 14 nt, Human herpesvirus 1
aaaacggaaccaaa

SEQ ID NO: 122240 - RNA, 15 nt, Human herpesvirus 1
aaaacggaaccaaac

SEQ ID NO: 122241 - RNA, 12 nt, Human herpesvirus 1
aaaagaccccga

SEQ ID NO: 122242 - RNA, 21 nt, Human herpesvirus 1
aaccuagggaacccagaguac

SEQ ID NO: 122243 - RNA, 20 nt, Human herpesvirus 1
aaccuagggcggggcgggga

SEQ ID NO: 122244 - RNA, 15 nt, Human herpesvirus 1
aaccagguaauacca

SEQ ID NO: 122245 - RNA, 17 nt, Human herpesvirus 1
aaccagguaauaccaaa

SEQ ID NO: 122246 - RNA, 14 nt, Human herpesvirus 1
aacggcaacaaccu

SEQ ID NO: 122247 - RNA, 22 nt, Human herpesvirus 1
aacgggggacccgaaaccgaag

SEQ ID NO: 122248 - RNA, 21 nt, Human herpesvirus 1
aacgggggccaugucuccgga

SEQ ID NO: 122249 - RNA, 22 nt, Human herpesvirus 1
aaccaccccgcgugccaucacg

SEQ ID NO: 122250 - RNA, 17 nt, Human herpesvirus 1
aaccacagacacgguua

SEQ ID NO: 122251 - RNA, 19 nt, Human herpesvirus 1
aacaaaccacagacacggu

SEQ ID NO: 122252 - RNA, 19 nt, Human herpesvirus 1
aaaucucgucgacaaacag

SEQ ID NO: 122253 - RNA, 19 nt, Human herpesvirus 1
aaagcugugggcuaaauac

SEQ ID NO: 122254 - RNA, 15 nt, Human herpesvirus 1
aaagccaccaauaga

SEQ ID NO: 122255 - RNA, 16 nt, Human herpesvirus 1
aaaaggcguaccaaac

SEQ ID NO: 122256 - RNA, 17 nt, Human herpesvirus 1
aaaaggcguaccaaaca

SEQ ID NO: 122257 - RNA, 15 nt, Human herpesvirus 1
aaaagaccacaccaa

SEQ ID NO: 122258 - RNA, 17 nt, Human herpesvirus 1
aaucgucggaucaugaa

SEQ ID NO: 122259 - RNA, 22 nt, Human herpesvirus 1
aauaggugcgccgcaggccaaa

SEQ ID NO: 122260 - RNA, 22 nt, Human herpesvirus 1
aauugguguguuugucggugga

SEQ ID NO: 122261 - RNA, 13 nt, Human herpesvirus 1
aauguaaccauac

SEQ ID NO: 122262 - RNA, 19 nt, Human herpesvirus 1
aauacgugccgacuugccc

SEQ ID NO: 122263 - RNA, 14 nt, Human herpesvirus 1
aauaaaaaccaaaa

SEQ ID NO: 122264 - RNA, 16 nt, Human herpesvirus 1
aauaaaaaaagaacau

SEQ ID NO: 122265 - RNA, 21 nt, Human herpesvirus 1
aaggcucgugcguuggugugg

SEQ ID NO: 122266 - RNA, 18 nt, Human herpesvirus 1
aagucacgagguacgggg

SEQ ID NO: 122267 - RNA, 17 nt, Human herpesvirus 1
aagccgcucuccggaga

SEQ ID NO: 122268 - RNA, 21 nt, Human herpesvirus 1
aagcccccaacaugacccaga

SEQ ID NO: 122269 - RNA, 21 nt, Human herpesvirus 1
aagcccccgggacugcgggga

SEQ ID NO: 122270 - RNA, 17 nt, Human herpesvirus 1
acccucucuucccucag

SEQ ID NO: 122271 - RNA, 23 nt, Human herpesvirus 1
accugcggccaacacaacggacc

SEQ ID NO: 122272 - RNA, 23 nt, Human herpesvirus 1
acgaccacggugucgucuguuaa

SEQ ID NO: 122273 - RNA, 15 nt, Human herpesvirus 1
acgacggacggccac

SEQ ID NO: 122274 - RNA, 19 nt, Human herpesvirus 1
accaccccaaauacagcau

SEQ ID NO: 122275 - RNA, 19 nt, Human herpesvirus 1
accacgccacaacagcccu

SEQ ID NO: 122276 - RNA, 13 nt, Human herpesvirus 1
accacacaccagc

SEQ ID NO: 122277 - RNA, 23 nt, Human herpesvirus 1
accauaggaugaacaaaccaccc

SEQ ID NO: 122278 - RNA, 14 nt, Human herpesvirus 1
accaugaccucucg

SEQ ID NO: 122279 - RNA, 17 nt, Human herpesvirus 1
accacgggagccagggc

SEQ ID NO: 122280 - RNA, 14 nt, Human herpesvirus 1
acccccuuggucag

SEQ ID NO: 122281 - RNA, 17 nt, Human herpesvirus 1
accccagcauaccuaaa

SEQ ID NO: 122282 - RNA, 21 nt, Human herpesvirus 1
acccgacgcgucauaugcaaa

SEQ ID NO: 122283 - RNA, 20 nt, Human herpesvirus 1
acccgaaacggccaacggac

SEQ ID NO: 122284 - RNA, 21 nt, Human herpesvirus 1
acccggcccgggggacucacu

SEQ ID NO: 122285 - RNA, 21 nt, Human herpesvirus 1
acccguaaaugguugcaguga

SEQ ID NO: 122286 - RNA, 15 nt, Human herpesvirus 1
accccagacauuccg

SEQ ID NO: 122287 - RNA, 17 nt, Human herpesvirus 1
acccauugguguauguu

SEQ ID NO: 122288 - RNA, 15 nt, Human herpesvirus 1
acccagguaugcuac

SEQ ID NO: 122289 - RNA, 14 nt, Human herpesvirus 1
acauacaccaaugg

SEQ ID NO: 122290 - RNA, 17 nt, Human herpesvirus 1
acauacgacacacaggc

SEQ ID NO: 122291 - RNA, 14 nt, Human herpesvirus 1
acagaccacgcgga

SEQ ID NO: 122292 - RNA, 20 nt, Human herpesvirus 1
acaggagccaaugugggggg

SEQ ID NO: 122293 - RNA, 14 nt, Human herpesvirus 1
acacuaaccccggg

SEQ ID NO: 122294 - RNA, 15 nt, Human herpesvirus 1
acaccgcguguuccc

SEQ ID NO: 122295 - RNA, 20 nt, Human herpesvirus 1
acacccgggggaguuugugu

SEQ ID NO: 122296 - RNA, 12 nt, Human herpesvirus 1
acacguuuaccc

SEQ ID NO: 122297 - RNA, 22 nt, Human herpesvirus 1
acacgggggagcgcucuugucu

SEQ ID NO: 122298 - RNA, 13 nt, Human herpesvirus 1
acaccccccaugc

SEQ ID NO: 122299 - RNA, 15 nt, Human herpesvirus 1
acaccccccaugcca

SEQ ID NO: 122300 - RNA, 13 nt, Human herpesvirus 1
acacccuacccca

SEQ ID NO: 122301 - RNA, 18 nt, Human herpesvirus 1
acacccuugugugucaau

SEQ ID NO: 122302 - RNA, 13 nt, Human herpesvirus 1
acaccaccuacua

SEQ ID NO: 122303 - RNA, 17 nt, Human herpesvirus 1
acaccacgccacaacag

SEQ ID NO: 122304 - RNA, 12 nt, Human herpesvirus 1
acaccacgccug

SEQ ID NO: 122305 - RNA, 16 nt, Human herpesvirus 1
acaagaaucacaauga

SEQ ID NO: 122306 - RNA, 13 nt, Human herpesvirus 1
acgcccauaucug

SEQ ID NO: 122307 - RNA, 13 nt, Human herpesvirus 1
acgccgcaccgga

SEQ ID NO: 122308 - RNA, 15 nt, Human herpesvirus 1
acgccucuccggggg

SEQ ID NO: 122309 - RNA, 16 nt, Human herpesvirus 1
acgcgccucccggggg

SEQ ID NO: 122310 - RNA, 12 nt, Human herpesvirus 1
acuacaccagcc

SEQ ID NO: 122311 - RNA, 21 nt, Human herpesvirus 1
acuacacccuugugugucaau

SEQ ID NO: 122312 - RNA, 15 nt, Human herpesvirus 1
acucucaguuuauca

SEQ ID NO: 122313 - RNA, 22 nt, Human herpesvirus 1
acucaggacaucgguguguccu

SEQ ID NO: 122314 - RNA, 13 nt, Human herpesvirus 1
acucaagcacaca

SEQ ID NO: 122315 - RNA, 15 nt, Human herpesvirus 1
acuggggucuggguu

SEQ ID NO: 122316 - RNA, 16 nt, Human herpesvirus 1
agaccccuucucccca

SEQ ID NO: 122317 - RNA, 17 nt, Human herpesvirus 1
agaccacucccgucucg

SEQ ID NO: 122318 - RNA, 22 nt, Human herpesvirus 1
agacaucccaugguaccaaaga

SEQ ID NO: 122319 - RNA, 23 nt, Human herpesvirus 1
agacaucccaugguaccaaagac

SEQ ID NO: 122320 - RNA, 17 nt, Human herpesvirus 1
agaauggaugggaggag

SEQ ID NO: 122321 - RNA, 16 nt, Human herpesvirus 1
agagccugccgccuca

SEQ ID NO: 122322 - RNA, 14 nt, Human herpesvirus 1
agagcccacaugcg

SEQ ID NO: 122323 - RNA, 12 nt, Human herpesvirus 1
caaaaucaaagc

SEQ ID NO: 122324 - RNA, 23 nt, Human herpesvirus 1
caaaaguuugucugcguauucca

SEQ ID NO: 122325 - RNA, 17 nt, Human herpesvirus 1
caaaaggcguaccaaac

SEQ ID NO: 122326 - RNA, 18 nt, Human herpesvirus 1
caaaaggcguaccaaaca

SEQ ID NO: 122327 - RNA, 14 nt, Human herpesvirus 1
caaacaaaccaaaa

SEQ ID NO: 122328 - RNA, 17 nt, Human herpesvirus 1
caaccccaacuccagac

SEQ ID NO: 122329 - RNA, 13 nt, Human herpesvirus 1
caacaugacccag

SEQ ID NO: 122330 - RNA, 23 nt, Human herpesvirus 1
caauaaacggcaacaaccugauu

SEQ ID NO: 122331 - RNA, 16 nt, Human herpesvirus 1
caauaaaaagacagaa

SEQ ID NO: 122332 - RNA, 13 nt, Human herpesvirus 1
cacuacaccagcc

SEQ ID NO: 122333 - RNA, 13 nt, Human herpesvirus 1
cacuacgaucucg

SEQ ID NO: 122334 - RNA, 18 nt, Human herpesvirus 1
cacgucgcucgaaaacac

SEQ ID NO: 122335 - RNA, 16 nt, Human herpesvirus 1
caccuggugauguugc

SEQ ID NO: 122336 - RNA, 16 nt, Human herpesvirus 1
caccagacauacacca

SEQ ID NO: 122337 - RNA, 18 nt, Human herpesvirus 1
caccagacauacaccacg

SEQ ID NO: 122338 - RNA, 12 nt, Human herpesvirus 1
caccccccaugc

SEQ ID NO: 122339 - RNA, 17 nt, Human herpesvirus 1
cacccacccacucccca

SEQ ID NO: 122340 - RNA, 15 nt, Human herpesvirus 1
cacagaaacaaaacc

SEQ ID NO: 122341 - RNA, 13 nt, Human herpesvirus 1
cacagaacagggc

SEQ ID NO: 122342 - RNA, 22 nt, Human herpesvirus 1
auggcacgaguucaaccucggg

SEQ ID NO: 122343 - RNA, 13 nt, Human herpesvirus 1
auggccccggggc

SEQ ID NO: 122344 - RNA, 15 nt, Human herpesvirus 1
auggcgggacugggc

SEQ ID NO: 122345 - RNA, 14 nt, Human herpesvirus 1
augguuaaaccucu

SEQ ID NO: 122346 - RNA, 12 nt, Human herpesvirus 1
auguaaccauac

SEQ ID NO: 122347 - RNA, 18 nt, Human herpesvirus 1
auguaaccauacccaaac

SEQ ID NO: 122348 - RNA, 23 nt, Human herpesvirus 1
auguguguaaccccccccaaaaa

SEQ ID NO: 122349 - RNA, 18 nt, Human herpesvirus 1
auuaaaaaucgugaguca

SEQ ID NO: 122350 - RNA, 13 nt, Human herpesvirus 1
auuaaaacggaac

SEQ ID NO: 122351 - RNA, 19 nt, Human herpesvirus 1
auuaaaacggaaccaaaca

SEQ ID NO: 122352 - RNA, 15 nt, Human herpesvirus 1
auuaaauacaugcca

SEQ ID NO: 122353 - RNA, 21 nt, Human herpesvirus 1
auuagccagcagacgcugcuc

SEQ ID NO: 122354 - RNA, 19 nt, Human herpesvirus 1
auugcccugagacaagagc

SEQ ID NO: 122355 - RNA, 21 nt, Human herpesvirus 1
auugccgcguugguccucgug

SEQ ID NO: 122356 - RNA, 21 nt, Human herpesvirus 1
auugcgugguaugugacguca

SEQ ID NO: 122357 - RNA, 14 nt, Human herpesvirus 1
caaaagaugcacau

SEQ ID NO: 122358 - RNA, 22 nt, Human herpesvirus 1
caaaagaugcacaugcgguuua

SEQ ID NO: 122359 - RNA, 19 nt, Human herpesvirus 1
caaaacuggucaauaccgc

SEQ ID NO: 122360 - RNA, 19 nt, Human herpesvirus 1
agcuaaucgcgauuuccga

SEQ ID NO: 122361 - RNA, 23 nt, Human herpesvirus 1
agcguguucguggaaccaugacc

SEQ ID NO: 122362 - RNA, 20 nt, Human herpesvirus 1
agcguccgggcgcuuggcau

SEQ ID NO: 122363 - RNA, 20 nt, Human herpesvirus 1
agccuguuguggcucggggc

SEQ ID NO: 122364 - RNA, 20 nt, Human herpesvirus 1
agcgcagaggcggccagaaa

SEQ ID NO: 122365 - RNA, 18 nt, Human herpesvirus 1
agcgaauaaaaaccaaaa

SEQ ID NO: 122366 - RNA, 13 nt, Human herpesvirus 1
agcgcucuugucu

SEQ ID NO: 122367 - RNA, 18 nt, Human herpesvirus 1
agcgggucuuuuguguug

SEQ ID NO: 122368 - RNA, 16 nt, Human herpesvirus 1
agcggcaccaccgggg

SEQ ID NO: 122369 - RNA, 22 nt, Human herpesvirus 1
agcggcaccaccggggccugaa

SEQ ID NO: 122370 - RNA, 15 nt, Human herpesvirus 1
agaugacguacagca

SEQ ID NO: 122371 - RNA, 14 nt, Human herpesvirus 1
agccguaacccaac

SEQ ID NO: 122372 - RNA, 18 nt, Human herpesvirus 1
agccuccccuccaggugc

SEQ ID NO: 122373 - RNA, 13 nt, Human herpesvirus 1
agccuacuacucg

SEQ ID NO: 122374 - RNA, 17 nt, Human herpesvirus 1
agcccuacaccggccac

SEQ ID NO: 122375 - RNA, 14 nt, Human herpesvirus 1
agcccucagagaca

SEQ ID NO: 122376 - RNA, 23 nt, Human herpesvirus 1
agccacugaaacccgaaacgcga

SEQ ID NO: 122377 - RNA, 14 nt, Human herpesvirus 1
agccagcagacgcu

SEQ ID NO: 122378 - RNA, 12 nt, Human herpesvirus 1
agccagggccaa

SEQ ID NO: 122379 - RNA, 15 nt, Human herpesvirus 1
aggcgccuccggggg

SEQ ID NO: 122380 - RNA, 16 nt, Human herpesvirus 1
aggccugggaucccac

SEQ ID NO: 122381 - RNA, 17 nt, Human herpesvirus 1
aggcaggcgucgaucuc

SEQ ID NO: 122382 - RNA, 17 nt, Human herpesvirus 1
aggcaguuaacugucug

SEQ ID NO: 122383 - RNA, 21 nt, Human herpesvirus 1
aggccgccccgaagaggggga

SEQ ID NO: 122384 - RNA, 18 nt, Human herpesvirus 1
aggccaucgccggggacc

SEQ ID NO: 122385 - RNA, 18 nt, Human herpesvirus 1
aggacacccgcgcaugau

SEQ ID NO: 122386 - RNA, 20 nt, Human herpesvirus 1
aggacacccgcgcaugaucu

SEQ ID NO: 122387 - RNA, 17 nt, Human herpesvirus 1
agggcacccaacaacac

SEQ ID NO: 122388 - RNA, 16 nt, Human herpesvirus 1
agggcggccagccgcg

SEQ ID NO: 122389 - RNA, 21 nt, Human herpesvirus 1
agggccuccgaccccagacau

SEQ ID NO: 122390 - RNA, 13 nt, Human herpesvirus 1
agguacuucuaca

SEQ ID NO: 122391 - RNA, 19 nt, Human herpesvirus 1
auaauaaacacacaaucac

SEQ ID NO: 122392 - RNA, 14 nt, Human herpesvirus 1
auaaggacauccac

SEQ ID NO: 122393 - RNA, 12 nt, Human herpesvirus 1
auaaggcccaac

SEQ ID NO: 122394 - RNA, 13 nt, Human herpesvirus 1
auaacgcacugaa

SEQ ID NO: 122395 - RNA, 14 nt, Human herpesvirus 1
auaaagccacugaa

SEQ ID NO: 122396 - RNA, 22 nt, Human herpesvirus 1
auaaagccacugaaacccgaaa

SEQ ID NO: 122397 - RNA, 17 nt, Human herpesvirus 1
agugaaagacacgggca

SEQ ID NO: 122398 - RNA, 17 nt, Human herpesvirus 1
aguuuguggacccaaag

SEQ ID NO: 122399 - RNA, 19 nt, Human herpesvirus 1
aguuuguggacccaaagcc

SEQ ID NO: 122400 - RNA, 19 nt, Human herpesvirus 1
auaaagagccguaacccaa

SEQ ID NO: 122401 - RNA, 13 nt, Human herpesvirus 1
auaaaaaccaaaa

SEQ ID NO: 122402 - RNA, 12 nt, Human herpesvirus 1
auaaaaagaaca

SEQ ID NO: 122403 - RNA, 20 nt, Human herpesvirus 1
auagacccacaggcauccaa

SEQ ID NO: 122404 - RNA, 18 nt, Human herpesvirus 1
aucuccugggggcaccca

SEQ ID NO: 122405 - RNA, 20 nt, Human herpesvirus 1
auccgucgggaggccacaga

SEQ ID NO: 122406 - RNA, 13 nt, Human herpesvirus 1
auccagauuccaa

SEQ ID NO: 122407 - RNA, 12 nt, Human herpesvirus 1
auccuccagacg

SEQ ID NO: 122408 - RNA, 21 nt, Human herpesvirus 1
auccugggaugcggaggggga

SEQ ID NO: 122409 - RNA, 16 nt, Human herpesvirus 1
aucagcguucacccgg

SEQ ID NO: 122410 - RNA, 23 nt, Human herpesvirus 1
aucauaaccacgcccagcgcaga

SEQ ID NO: 122411 - RNA, 18 nt, Human herpesvirus 1
aucaaccccgcccuacac

SEQ ID NO: 122412 - RNA, 20 nt, Human herpesvirus 1
uuauuuaaaaagauauacag

SEQ ID NO: 122413 - RNA, 16 nt, Human herpesvirus 1
uuaacugucuggagac

SEQ ID NO: 122414 - RNA, 23 nt, Human herpesvirus 1
uguuuguggggucggaaccauag

SEQ ID NO: 122415 - RNA, 14 nt, Human herpesvirus 1
uguggacccaaagc

SEQ ID NO: 122416 - RNA, 21 nt, Human herpesvirus 1
uguggagauucgggucuacua

SEQ ID NO: 122417 - RNA, 21 nt, Human herpesvirus 1
uguggcgcgaggggggguccg

SEQ ID NO: 122418 - RNA, 21 nt, Human herpesvirus 1
ugucccgacauuaaccaccug

SEQ ID NO: 122419 - RNA, 16 nt, Human herpesvirus 1
uguccaauccacagac

SEQ ID NO: 122420 - RNA, 14 nt, Human herpesvirus 1
ugggguagugcgau

SEQ ID NO: 122421 - RNA, 23 nt, Human herpesvirus 1
ugggguccggguaaaacaacagc

SEQ ID NO: 122422 - RNA, 22 nt, Human herpesvirus 1
uggugggucguuuguucgggga

SEQ ID NO: 122423 - RNA, 21 nt, Human herpesvirus 1
ugguuccgaccccacaaacag

SEQ ID NO: 122424 - RNA, 14 nt, Human herpesvirus 1
ugguauugcccaac

SEQ ID NO: 122425 - RNA, 23 nt, Human herpesvirus 1
uggucaggagggcgcucagggcg

SEQ ID NO: 122426 - RNA, 22 nt, Human herpesvirus 1
uggucgucgggcgccaaagccc

SEQ ID NO: 122427 - RNA, 19 nt, Human herpesvirus 1
uggucgugcguagcauacc

SEQ ID NO: 122428 - RNA, 20 nt, Human herpesvirus 1
ugcccggaacgaacccaaag

SEQ ID NO: 122429 - RNA, 12 nt, Human herpesvirus 1
ugccauguuggg

SEQ ID NO: 122430 - RNA, 19 nt, Human herpesvirus 1
ugcaguagcguuguuuauu

SEQ ID NO: 122431 - RNA, 16 nt, Human herpesvirus 1
ugcacaacacaaacau

SEQ ID NO: 122432 - RNA, 20 nt, Human herpesvirus 1
ugcacaacacaaacaucugg

SEQ ID NO: 122433 - RNA, 20 nt, Human herpesvirus 1
ugcuaauuaaauacaugcca

SEQ ID NO: 122434 - RNA, 11 nt, Human herpesvirus 1
ugcgugucaaa

SEQ ID NO: 122435 - RNA, 22 nt, Human herpesvirus 1
ugcgugucaaaggcuagcaaau

SEQ ID NO: 122436 - RNA, 20 nt, Human herpesvirus 1
ugcgggcaucggaacacgcc

SEQ ID NO: 122437 - RNA, 19 nt, Human herpesvirus 1
ugcgcacgugauguaggcu

SEQ ID NO: 122438 - RNA, 18 nt, Human herpesvirus 1
ugcgauggacaccgcaga

SEQ ID NO: 122439 - RNA, 11 nt, Human herpesvirus 1
ugcgacacucg

SEQ ID NO: 122440 - RNA, 15 nt, Human herpesvirus 1
ugcuugagucugucc

SEQ ID NO: 122441 - RNA, 17 nt, Human herpesvirus 1
ugaaaacacgcauuuau

SEQ ID NO: 122442 - RNA, 14 nt, Human herpesvirus 1
ugauagacccacag

SEQ ID NO: 122443 - RNA, 17 nt, Human herpesvirus 1
ugauucuugucagggac

SEQ ID NO: 122444 - RNA, 16 nt, Human herpesvirus 1
ugauuaaaacacccca

SEQ ID NO: 122445 - RNA, 13 nt, Human herpesvirus 1
ugauccuuagggg

SEQ ID NO: 122446 - RNA, 15 nt, Human herpesvirus 1
aagccaccaauagac

SEQ ID NO: 122447 - RNA, 12 nt, Human herpesvirus 1
aagcuuggucag

SEQ ID NO: 122448 - RNA, 16 nt, Human herpesvirus 1
aauaaaaacauugccc

SEQ ID NO: 122449 - RNA, 20 nt, Human herpesvirus 1
aauaaaccagguaauaccaa

SEQ ID NO: 122450 - RNA, 22 nt, Human herpesvirus 1
aauaaaccagguaauaccaaau

SEQ ID NO: 122451 - RNA, 23 nt, Human herpesvirus 1
aauaaaccagguaauaccaaaua

SEQ ID NO: 122452 - RNA, 15 nt, Human herpesvirus 1
aauaaagccacugaa

SEQ ID NO: 122453 - RNA, 12 nt, Human herpesvirus 1
aauccccaggac

SEQ ID NO: 122454 - RNA, 18 nt, Human herpesvirus 1
aacuccagaccaccgguc

SEQ ID NO: 122455 - RNA, 13 nt, Human herpesvirus 1
aacggaaccaaac

SEQ ID NO: 122456 - RNA, 12 nt, Human herpesvirus 1
aacggacggggu

SEQ ID NO: 122457 - RNA, 21 nt, Human herpesvirus 1
aacgggacacuuguccggaga

SEQ ID NO: 122458 - RNA, 19 nt, Human herpesvirus 1
uuuuucguccaccaaaguc

SEQ ID NO: 122459 - RNA, 23 nt, Human herpesvirus 1
aacgaccccgcccauggguccca

SEQ ID NO: 122460 - RNA, 20 nt, Human herpesvirus 1
aacgcgacaggccaguaugg

SEQ ID NO: 122461 - RNA, 15 nt, Human herpesvirus 1
aacgacaucuugucg

SEQ ID NO: 122462 - RNA, 16 nt, Human herpesvirus 1
aagaugcgauacaaac

SEQ ID NO: 122463 - RNA, 15 nt, Human herpesvirus 1
aagcaccaacagggg

SEQ ID NO: 122464 - RNA, 19 nt, Human herpesvirus 1
aagcaaagaauggauggga

SEQ ID NO: 122465 - RNA, 17 nt, Human herpesvirus 1
aagagccugccgccuca

SEQ ID NO: 122466 - RNA, 18 nt, Human herpesvirus 1
aagaccacucccgucucg

SEQ ID NO: 122467 - RNA, 17 nt, Human herpesvirus 1
aacacacccccgugacu

SEQ ID NO: 122468 - RNA, 17 nt, Human herpesvirus 1
aacacaaaacacacggg

SEQ ID NO: 122469 - RNA, 15 nt, Human herpesvirus 1
aacagaaaaccgaaa

SEQ ID NO: 122470 - RNA, 12 nt, Human herpesvirus 1
aacaccaacuca

SEQ ID NO: 122471 - RNA, 23 nt, Human herpesvirus 1
uugcccuccccccgcccccggca

SEQ ID NO: 122472 - RNA, 23 nt, Human herpesvirus 1
uuggaaacuguccugucuugggg

SEQ ID NO: 122473 - RNA, 21 nt, Human herpesvirus 1
aacaggcgcggaucaguaccg

SEQ ID NO: 122474 - RNA, 16 nt, Human herpesvirus 1
uuuuauuuacaacaaa

SEQ ID NO: 122475 - RNA, 14 nt, Human herpesvirus 1
uuugguuggguuac

SEQ ID NO: 122476 - RNA, 13 nt, Human herpesvirus 1
uuugguucuuguc

SEQ ID NO: 122477 - RNA, 15 nt, Human herpesvirus 1
uuugggggggguuac

SEQ ID NO: 122478 - RNA, 19 nt, Human herpesvirus 1
uuugggcguugcguggggu

SEQ ID NO: 122479 - RNA, 21 nt, Human herpesvirus 1
uuugggcguugcgugggguca

SEQ ID NO: 122480 - RNA, 23 nt, Human herpesvirus 1
uuguauguccccaaaauaaaaga

SEQ ID NO: 122481 - RNA, 14 nt, Human herpesvirus 1
uuuauuaacaucaa

SEQ ID NO: 122482 - RNA, 17 nt, Human herpesvirus 1
uuuauuggucaaacuca

SEQ ID NO: 122483 - RNA, 12 nt, Human herpesvirus 1
uugugugucaau

SEQ ID NO: 122484 - RNA, 21 nt, Human herpesvirus 1
uuguguugacuuugccucuuc

SEQ ID NO: 122485 - RNA, 19 nt, Human herpesvirus 1
uaauaaauuuuacaaacag

SEQ ID NO: 122486 - RNA, 17 nt, Human herpesvirus 1
uacaggggccauguugg

SEQ ID NO: 122487 - RNA, 12 nt, Human herpesvirus 1
uacacacaggaa

SEQ ID NO: 122488 - RNA, 16 nt, Human herpesvirus 1
uaaaacggaaccaaac

SEQ ID NO: 122489 - RNA, 17 nt, Human herpesvirus 1
uaaaacggaaccaaaca

SEQ ID NO: 122490 - RNA, 15 nt, Human herpesvirus 1
guugauaugcaucuc

SEQ ID NO: 122491 - RNA, 14 nt, Human herpesvirus 1
guucucccuguuca

SEQ ID NO: 122492 - RNA, 15 nt, Human herpesvirus 1
uaaauaaaaaccuaa

SEQ ID NO: 122493 - RNA, 20 nt, Human herpesvirus 1
uaaaccagguaauaccaaau

SEQ ID NO: 122494 - RNA, 22 nt, Human herpesvirus 1
uaaacggcaacaaccugauuaa

SEQ ID NO: 122495 - RNA, 12 nt, Human herpesvirus 1
uaacgcacugaa

SEQ ID NO: 122496 - RNA, 16 nt, Human herpesvirus 1
uaacggcauaugcaaa

SEQ ID NO: 122497 - RNA, 22 nt, Human herpesvirus 1
guaucuaguugauaugcaucuc

SEQ ID NO: 122498 - RNA, 14 nt, Human herpesvirus 1
gucaaacucaggca

SEQ ID NO: 122499 - RNA, 22 nt, Human herpesvirus 1
guauucggacagacucaagcac

SEQ ID NO: 122500 - RNA, 14 nt, Human herpesvirus 1
gucauagaugggau

SEQ ID NO: 122501 - RNA, 11 nt, Human herpesvirus 1
gucauaugcaa

SEQ ID NO: 122502 - RNA, 12 nt, Human herpesvirus 1
gucauaugcaaa

SEQ ID NO: 122503 - RNA, 14 nt, Human herpesvirus 1
gucauaugcaaaug

SEQ ID NO: 122504 - RNA, 23 nt, Human herpesvirus 1
ggggcguuguggcggucggccaa

SEQ ID NO: 122505 - RNA, 22 nt, Human herpesvirus 1
gggggacucacuacccaccgcg

SEQ ID NO: 122506 - RNA, 22 nt, Human herpesvirus 1
ggggccgugcgauggacaccgc

SEQ ID NO: 122507 - RNA, 18 nt, Human herpesvirus 1
gggguaugugauaugcua

SEQ ID NO: 122508 - RNA, 18 nt, Human herpesvirus 1
gggguuuucucuucccgc

SEQ ID NO: 122509 - RNA, 20 nt, Human herpesvirus 1
ggguggaucuuagccucccc

SEQ ID NO: 122510 - RNA, 16 nt, Human herpesvirus 1
gggugggggugggcau

SEQ ID NO: 122511 - RNA, 14 nt, Human herpesvirus 1
ggguguggcggacg

SEQ ID NO: 122512 - RNA, 17 nt, Human herpesvirus 1
ggguguguuuauugggc

SEQ ID NO: 122513 - RNA, 20 nt, Human herpesvirus 1
guagcugggugggguuugug

SEQ ID NO: 122514 - RNA, 18 nt, Human herpesvirus 1
guagcuuuacaaugcaaa

SEQ ID NO: 122515 - RNA, 13 nt, Human herpesvirus 1
guaggaggugcug

SEQ ID NO: 122516 - RNA, 20 nt, Human herpesvirus 1
gucccccgaggccacgugua

SEQ ID NO: 122517 - RNA, 14 nt, Human herpesvirus 1
guccauaccgacca

SEQ ID NO: 122518 - RNA, 17 nt, Human herpesvirus 1
guccauaccgaccacac

SEQ ID NO: 122519 - RNA, 19 nt, Human herpesvirus 1
guccgccaaauaaagccac

SEQ ID NO: 122520 - RNA, 18 nt, Human herpesvirus 1
gucccguuaccaagacca

SEQ ID NO: 122521 - RNA, 12 nt, Human herpesvirus 1
gucuuuuacaca

SEQ ID NO: 122522 - RNA, 19 nt, Human herpesvirus 1
gucuuuuacacagacuguc

SEQ ID NO: 122523 - RNA, 19 nt, Human herpesvirus 1
gugagagaaucccccgugu

SEQ ID NO: 122524 - RNA, 19 nt, Human herpesvirus 1
gucuguuggggacacuggg

SEQ ID NO: 122525 - RNA, 20 nt, Human herpesvirus 1
gucuguuggggacacugggu

SEQ ID NO: 122526 - RNA, 16 nt, Human herpesvirus 1
gugauaguaacgggau

SEQ ID NO: 122527 - RNA, 14 nt, Human herpesvirus 1
gugauccugggaug

SEQ ID NO: 122528 - RNA, 19 nt, Human herpesvirus 1
gugcccauuuacguggcug

SEQ ID NO: 122529 - RNA, 20 nt, Human herpesvirus 1
gugccaauaaacccccaaac

SEQ ID NO: 122530 - RNA, 22 nt, Human herpesvirus 1
guucccaccaacgucuccucca

SEQ ID NO: 122531 - RNA, 20 nt, Human herpesvirus 1
guuaaaccucuggucucaua

SEQ ID NO: 122532 - RNA, 16 nt, Human herpesvirus 1
guggauaaaaagccag

SEQ ID NO: 122533 - RNA, 14 nt, Human herpesvirus 1
guggacccaaagcc

SEQ ID NO: 122534 - RNA, 19 nt, Human herpesvirus 1
guguagccgaucuugaucc

SEQ ID NO: 122535 - RNA, 20 nt, Human herpesvirus 1
guguuguccuucuuugcuca

SEQ ID NO: 122536 - RNA, 15 nt, Human herpesvirus 1
guguugacuuugccu

SEQ ID NO: 122537 - RNA, 15 nt, Human herpesvirus 1
uauuuacaacaaacc

SEQ ID NO: 122538 - RNA, 14 nt, Human herpesvirus 1
uauugggcgcucac

SEQ ID NO: 122539 - RNA, 19 nt, Human herpesvirus 1
uauuggucaaacucaggca

SEQ ID NO: 122540 - RNA, 23 nt, Human herpesvirus 1
uauuaaaucucgucgacaaacag

SEQ ID NO: 122541 - RNA, 15 nt, Human herpesvirus 1
ucaaaggcuagcaaa

SEQ ID NO: 122542 - RNA, 15 nt, Human herpesvirus 1
uauuuauuaacauca

SEQ ID NO: 122543 - RNA, 23 nt, Human herpesvirus 1
ucagggccuccgaccccagacau

SEQ ID NO: 122544 - RNA, 15 nt, Human herpesvirus 1
ucaggucauccuugg

SEQ ID NO: 122545 - RNA, 22 nt, Human herpesvirus 1
uagaagcgcgccgcgacacuca

SEQ ID NO: 122546 - RNA, 13 nt, Human herpesvirus 1
uaucccacucccu

SEQ ID NO: 122547 - RNA, 23 nt, Human herpesvirus 1
uaucccacucccuugaauaaaca

SEQ ID NO: 122548 - RNA, 16 nt, Human herpesvirus 1
uccagcauguuuuuga

SEQ ID NO: 122549 - RNA, 17 nt, Human herpesvirus 1
uccagucaaacucccca

SEQ ID NO: 122550 - RNA, 21 nt, Human herpesvirus 1
ucccaacccccuaagacccac

SEQ ID NO: 122551 - RNA, 19 nt, Human herpesvirus 1
ucccacaaacacaaaacac

SEQ ID NO: 122552 - RNA, 17 nt, Human herpesvirus 1
ucccagaauuuggccag

SEQ ID NO: 122553 - RNA, 23 nt, Human herpesvirus 1
ucccaucgaguauguacugcggc

SEQ ID NO: 122554 - RNA, 15 nt, Human herpesvirus 1
ucccuggaugcccac

SEQ ID NO: 122555 - RNA, 23 nt, Human herpesvirus 1
ucccugucgccucccaacccccu

SEQ ID NO: 122556 - RNA, 18 nt, Human herpesvirus 1
ucccuccuuagcacgauc

SEQ ID NO: 122557 - RNA, 14 nt, Human herpesvirus 1
uccuggggggucca

SEQ ID NO: 122558 - RNA, 19 nt, Human herpesvirus 1
uccugggggguccagucaa

SEQ ID NO: 122559 - RNA, 19 nt, Human herpesvirus 1
uccuggagacgggugagug

SEQ ID NO: 122560 - RNA, 16 nt, Human herpesvirus 1
uccucgcaaaacuggu

SEQ ID NO: 122561 - RNA, 20 nt, Human herpesvirus 1
uccucggcgggcucgggguc

SEQ ID NO: 122562 - RNA, 13 nt, Human herpesvirus 1
uccuuucccguga

SEQ ID NO: 122563 - RNA, 17 nt, Human herpesvirus 1
ucgaucuccucaaacac

SEQ ID NO: 122564 - RNA, 16 nt, Human herpesvirus 1
ucgguagcgggggacg

SEQ ID NO: 122565 - RNA, 15 nt, Human herpesvirus 1
ucguuggucagggcg

SEQ ID NO: 122566 - RNA, 19 nt, Human herpesvirus 1
ucgggccgucguuggucag

SEQ ID NO: 122567 - RNA, 22 nt, Human herpesvirus 1
ucgggggaguugugaucauugc

SEQ ID NO: 122568 - RNA, 18 nt, Human herpesvirus 1
ucgcgaacauaagcuugc

SEQ ID NO: 122569 - RNA, 20 nt, Human herpesvirus 1
ucugguaguuaggacaacga

SEQ ID NO: 122570 - RNA, 20 nt, Human herpesvirus 1
ucuggcguucgucgcccucc

SEQ ID NO: 122571 - RNA, 21 nt, Human herpesvirus 1
ucucugagggcuuugggucca

SEQ ID NO: 122572 - RNA, 17 nt, Human herpesvirus 1
ucucugcgcgcagucug

SEQ ID NO: 122573 - RNA, 15 nt, Human herpesvirus 1
cuggacgucugggaa

SEQ ID NO: 122574 - RNA, 15 nt, Human herpesvirus 1
cuggacgcccgggcg

SEQ ID NO: 122575 - RNA, 18 nt, Human herpesvirus 1
cuggacugagcagacaga

SEQ ID NO: 122576 - RNA, 20 nt, Human herpesvirus 1
cuggagacccuaugguacac

SEQ ID NO: 122577 - RNA, 14 nt, Human herpesvirus 1
cuggaggcaaacac

SEQ ID NO: 122578 - RNA, 15 nt, Human herpesvirus 1
cuggaggcaaacacg

SEQ ID NO: 122579 - RNA, 20 nt, Human herpesvirus 1
cugauucgcgaacauaagcu

SEQ ID NO: 122580 - RNA, 17 nt, Human herpesvirus 1
cuguguuuacacgagcg

SEQ ID NO: 122581 - RNA, 20 nt, Human herpesvirus 1
cuguguauggcgucccaucu

SEQ ID NO: 122582 - RNA, 14 nt, Human herpesvirus 1
cuaugguacacacg

SEQ ID NO: 122583 - RNA, 13 nt, Human herpesvirus 1
cucaaccccggcg

SEQ ID NO: 122584 - RNA, 14 nt, Human herpesvirus 1
cucccaacccccua

SEQ ID NO: 122585 - RNA, 20 nt, Human herpesvirus 1
cuccagccuccccuccaggu

SEQ ID NO: 122586 - RNA, 14 nt, Human herpesvirus 1
cuccagaaaccugu

SEQ ID NO: 122587 - RNA, 21 nt, Human herpesvirus 1
cucauacgggucggugauguc

SEQ ID NO: 122588 - RNA, 21 nt, Human herpesvirus 1
cucaggacaucgguguguccu

SEQ ID NO: 122589 - RNA, 18 nt, Human herpesvirus 1
cucagggccuccgacccc

SEQ ID NO: 122590 - RNA, 19 nt, Human herpesvirus 1
cuccugggggguccaguca

SEQ ID NO: 122591 - RNA, 20 nt, Human herpesvirus 1
cuccugggggguccagucaa

SEQ ID NO: 122592 - RNA, 14 nt, Human herpesvirus 1
cuccccgcacagau

SEQ ID NO: 122593 - RNA, 17 nt, Human herpesvirus 1
cuccccacccacccacu

SEQ ID NO: 122594 - RNA, 22 nt, Human herpesvirus 1
cuccccacccacccacucccca

SEQ ID NO: 122595 - RNA, 14 nt, Human herpesvirus 1
cucgagaugagcca

SEQ ID NO: 122596 - RNA, 16 nt, Human herpesvirus 1
cuccugugagaccagc

SEQ ID NO: 122597 - RNA, 14 nt, Human herpesvirus 1
cuccuuagcacgau

SEQ ID NO: 122598 - RNA, 15 nt, Human herpesvirus 1
cucggcuccccgccg

SEQ ID NO: 122599 - RNA, 17 nt, Human herpesvirus 1
cucgggcaggugcagac

SEQ ID NO: 122600 - RNA, 23 nt, Human herpesvirus 1
cucugaaccaaacuuugggucuc

SEQ ID NO: 122601 - RNA, 22 nt, Human herpesvirus 1
cucuaucccgcccaccgcuggg

SEQ ID NO: 122602 - RNA, 14 nt, Human herpesvirus 1
cucgugugguacac

SEQ ID NO: 122603 - RNA, 20 nt, Human herpesvirus 1
cucgucgggguggcacagaa

SEQ ID NO: 122604 - RNA, 16 nt, Human herpesvirus 1
cucgguggaggcgcau

SEQ ID NO: 122605 - RNA, 20 nt, Human herpesvirus 1
cucgucugacguuugggcua

SEQ ID NO: 122606 - RNA, 12 nt, Human herpesvirus 1
cucgucuuggcc

SEQ ID NO: 122607 - RNA, 12 nt, Human herpesvirus 1
cguuguuuauuc

SEQ ID NO: 122608 - RNA, 20 nt, Human herpesvirus 1
cgugggagugggggugcgug

SEQ ID NO: 122609 - RNA, 17 nt, Human herpesvirus 1
cgugguccuguggagcc

SEQ ID NO: 122610 - RNA, 16 nt, Human herpesvirus 1
cguuugcacaacacaa

SEQ ID NO: 122611 - RNA, 17 nt, Human herpesvirus 1
cuaacgcguuugggggu

SEQ ID NO: 122612 - RNA, 14 nt, Human herpesvirus 1
cuacacacaggaaa

SEQ ID NO: 122613 - RNA, 13 nt, Human herpesvirus 1
cuacaggggccau

SEQ ID NO: 122614 - RNA, 20 nt, Human herpesvirus 1
cuacacccuugugugucaau

SEQ ID NO: 122615 - RNA, 18 nt, Human herpesvirus 1
cuacacgacccucgagau

SEQ ID NO: 122616 - RNA, 23 nt, Human herpesvirus 1
cuacacgacccucgagauccccg

SEQ ID NO: 122617 - RNA, 21 nt, Human herpesvirus 1
cguaccaaacaaacaaaccaa

SEQ ID NO: 122618 - RNA, 11 nt, Human herpesvirus 1
cgucauaugca

SEQ ID NO: 122619 - RNA, 12 nt, Human herpesvirus 1
cgucauaugcaa

SEQ ID NO: 122620 - RNA, 14 nt, Human herpesvirus 1
cgucauaugcaaau

SEQ ID NO: 122621 - RNA, 19 nt, Human herpesvirus 1
cguccauugacacacaagg

SEQ ID NO: 122622 - RNA, 20 nt, Human herpesvirus 1
cgucgaucuccucaaacacc

SEQ ID NO: 122623 - RNA, 19 nt, Human herpesvirus 1
cgucgggaggccacagaaa

SEQ ID NO: 122624 - RNA, 17 nt, Human herpesvirus 1
cgucgggcgccaaagcc

SEQ ID NO: 122625 - RNA, 19 nt, Human herpesvirus 1
cgucgggguggcacagaac

SEQ ID NO: 122626 - RNA, 20 nt, Human herpesvirus 1
cgucugggaccucgggcaug

SEQ ID NO: 122627 - RNA, 19 nt, Human herpesvirus 1
cggucgaagccuacuacuc

SEQ ID NO: 122628 - RNA, 16 nt, Human herpesvirus 1
cgguaaucauaaccac

SEQ ID NO: 122629 - RNA, 23 nt, Human herpesvirus 1
cggucaacgaggguugggggggu

SEQ ID NO: 122630 - RNA, 13 nt, Human herpesvirus 1
cggacucacggcc

SEQ ID NO: 122631 - RNA, 14 nt, Human herpesvirus 1
cgcuuguccccgaa

SEQ ID NO: 122632 - RNA, 12 nt, Human herpesvirus 1
cgcuugugagac

SEQ ID NO: 122633 - RNA, 13 nt, Human herpesvirus 1
cggaaccaaacag

SEQ ID NO: 122634 - RNA, 17 nt, Human herpesvirus 1
cggacgcgcggcgcgag

SEQ ID NO: 122635 - RNA, 22 nt, Human herpesvirus 1
cgcgauguggauaaaaagccag

SEQ ID NO: 122636 - RNA, 18 nt, Human herpesvirus 1
cgccuggucccccgggga

SEQ ID NO: 122637 - RNA, 20 nt, Human herpesvirus 1
cgccugguuugguuggguua

SEQ ID NO: 122638 - RNA, 18 nt, Human herpesvirus 1
cgccuuccuccacgucga

SEQ ID NO: 122639 - RNA, 13 nt, Human herpesvirus 1
cgcgccacacuca

SEQ ID NO: 122640 - RNA, 15 nt, Human herpesvirus 1
cgcugacaaccaccu

SEQ ID NO: 122641 - RNA, 11 nt, Human herpesvirus 1
cgcucagggcg

SEQ ID NO: 122642 - RNA, 13 nt, Human herpesvirus 1
cgcgucauaugca

SEQ ID NO: 122643 - RNA, 14 nt, Human herpesvirus 1
cgcgucauaugcaa

SEQ ID NO: 122644 - RNA, 19 nt, Human herpesvirus 1
cgcggcuugcgggacugaa

SEQ ID NO: 122645 - RNA, 16 nt, Human herpesvirus 1
cgcgcgucccccgaga

SEQ ID NO: 122646 - RNA, 23 nt, Human herpesvirus 1
cgcgcucgucacccgacacugaa

SEQ ID NO: 122647 - RNA, 19 nt, Human herpesvirus 1
cgcgcccacuacaccagcc

SEQ ID NO: 122648 - RNA, 10 nt, Human herpesvirus 1
cgccaaagcc

SEQ ID NO: 122649 - RNA, 15 nt, Human herpesvirus 1
cgccaaauaaagcca

SEQ ID NO: 122650 - RNA, 21 nt, Human herpesvirus 1
cgccaaauaaagccacugaaa

SEQ ID NO: 122651 - RNA, 18 nt, Human herpesvirus 1
cgccauuaagacgcuggg

SEQ ID NO: 122652 - RNA, 15 nt, Human herpesvirus 1
cgccacgcgcggcug

SEQ ID NO: 122653 - RNA, 19 nt, Human herpesvirus 1
cgccccugcgcagauccca

SEQ ID NO: 122654 - RNA, 16 nt, Human herpesvirus 1
cgcccacuacaccagc

SEQ ID NO: 122655 - RNA, 18 nt, Human herpesvirus 1
cgccuaccggccccuggg

SEQ ID NO: 122656 - RNA, 19 nt, Human herpesvirus 1
cgccuaccggccccugggc

SEQ ID NO: 122657 - RNA, 20 nt, Human herpesvirus 1
ccugucgccucccaaccccc

SEQ ID NO: 122658 - RNA, 15 nt, Human herpesvirus 1
ccugucgcacccaca

SEQ ID NO: 122659 - RNA, 19 nt, Human herpesvirus 1
ccugguuuauuuaaaaaga

SEQ ID NO: 122660 - RNA, 23 nt, Human herpesvirus 1
ccugucuuggggcccacccaccc

SEQ ID NO: 122661 - RNA, 20 nt, Human herpesvirus 1
ccuccacgucgaaggcuuuu

SEQ ID NO: 122662 - RNA, 21 nt, Human herpesvirus 1
ccugcggcuggcgcggugccu

SEQ ID NO: 122663 - RNA, 12 nt, Human herpesvirus 1
ccuagggcgggg

SEQ ID NO: 122664 - RNA, 13 nt, Human herpesvirus 1
ccguugcgccuuu

SEQ ID NO: 122665 - RNA, 17 nt, Human herpesvirus 1
ccggccugggccgcgag

SEQ ID NO: 122666 - RNA, 18 nt, Human herpesvirus 1
ccggcuagacccacgggg

SEQ ID NO: 122667 - RNA, 20 nt, Human herpesvirus 1
cccuguuugucgccuggcug

SEQ ID NO: 122668 - RNA, 15 nt, Human herpesvirus 1
cccugugaacacaga

SEQ ID NO: 122669 - RNA, 20 nt, Human herpesvirus 1
cccuucuccgcgugggugau

SEQ ID NO: 122670 - RNA, 17 nt, Human herpesvirus 1
ccggaacgaacccaaag

SEQ ID NO: 122671 - RNA, 19 nt, Human herpesvirus 1
cccuggaugcccaccccca

SEQ ID NO: 122672 - RNA, 16 nt, Human herpesvirus 1
cccugcgcgaugugga

SEQ ID NO: 122673 - RNA, 20 nt, Human herpesvirus 1
cccucgcgggccucgugggc

SEQ ID NO: 122674 - RNA, 12 nt, Human herpesvirus 1
cccucgcacauc

SEQ ID NO: 122675 - RNA, 21 nt, Human herpesvirus 1
ccccggauaugcgcgggguua

SEQ ID NO: 122676 - RNA, 14 nt, Human herpesvirus 1
cccccguguuccca

SEQ ID NO: 122677 - RNA, 21 nt, Human herpesvirus 1
ccccuguuugucgacgagauu

SEQ ID NO: 122678 - RNA, 20 nt, Human herpesvirus 1
cccgacgcgucauaugcaaa

SEQ ID NO: 122679 - RNA, 17 nt, Human herpesvirus 1
cccggggcgggugggcc

SEQ ID NO: 122680 - RNA, 14 nt, Human herpesvirus 1
cccguguuugccca

SEQ ID NO: 122681 - RNA, 11 nt, Human herpesvirus 1
cccuaccccag

SEQ ID NO: 122682 - RNA, 17 nt, Human herpesvirus 1
cccuaggaggccgccac

SEQ ID NO: 122683 - RNA, 16 nt, Human herpesvirus 1
cccgcccucacagggc

SEQ ID NO: 122684 - RNA, 17 nt, Human herpesvirus 1
cccgccuccgcgcagga

SEQ ID NO: 122685 - RNA, 18 nt, Human herpesvirus 1
cccgggacccaugaagca

SEQ ID NO: 122686 - RNA, 23 nt, Human herpesvirus 1
cccggcggcgcgcucaaccaccg

SEQ ID NO: 122687 - RNA, 12 nt, Human herpesvirus 1
ccccccaugucc

SEQ ID NO: 122688 - RNA, 21 nt, Human herpesvirus 1
ccccacgggcgccacgguggu

SEQ ID NO: 122689 - RNA, 19 nt, Human herpesvirus 1
cccaucgaguauguacugc

SEQ ID NO: 122690 - RNA, 17 nt, Human herpesvirus 1
cccauuaucccauuccu

SEQ ID NO: 122691 - RNA, 11 nt, Human herpesvirus 1
cccauggguug

SEQ ID NO: 122692 - RNA, 22 nt, Human herpesvirus 1
cccaguaacaugcgcacgugau

SEQ ID NO: 122693 - RNA, 12 nt, Human herpesvirus 1
cccaguggguuu

SEQ ID NO: 122694 - RNA, 22 nt, Human herpesvirus 1
cccagcaccguuaccaccgaua

SEQ ID NO: 122695 - RNA, 13 nt, Human herpesvirus 1
cccagcauaccua

SEQ ID NO: 122696 - RNA, 15 nt, Human herpesvirus 1
cccagcauaccuaaa

SEQ ID NO: 122697 - RNA, 19 nt, Human herpesvirus 1
cccacuggggucuggguug

SEQ ID NO: 122698 - RNA, 18 nt, Human herpesvirus 1
ccacaaacacaaaacaca

SEQ ID NO: 122699 - RNA, 19 nt, Human herpesvirus 1
ccacaaacacaaaacacac

SEQ ID NO: 122700 - RNA, 15 nt, Human herpesvirus 1
ccagguaauaccaaa

SEQ ID NO: 122701 - RNA, 16 nt, Human herpesvirus 1
ccagguaauaccaaau

SEQ ID NO: 122702 - RNA, 18 nt, Human herpesvirus 1
ccaggucggcgaccgcca

SEQ ID NO: 122703 - RNA, 22 nt, Human herpesvirus 1
ccauauaaagcgagucuggaag

SEQ ID NO: 122704 - RNA, 11 nt, Human herpesvirus 1
ccaugucuccg

SEQ ID NO: 122705 - RNA, 21 nt, Human herpesvirus 1
caugcccgggacccaugaagc

SEQ ID NO: 122706 - RNA, 18 nt, Human herpesvirus 1
caugcggaaagcaagaac

SEQ ID NO: 122707 - RNA, 20 nt, Human herpesvirus 1
caucugagagacgaacaaau

SEQ ID NO: 122708 - RNA, 13 nt, Human herpesvirus 1
cauagaugggauc

SEQ ID NO: 122709 - RNA, 15 nt, Human herpesvirus 1
ccaaacucauccucc

SEQ ID NO: 122710 - RNA, 14 nt, Human herpesvirus 1
ccaaauaaagccac

SEQ ID NO: 122711 - RNA, 19 nt, Human herpesvirus 1
ccaaauacagcauggcgcc

SEQ ID NO: 122712 - RNA, 18 nt, Human herpesvirus 1
ccaacucucgcaccaucc

SEQ ID NO: 122713 - RNA, 19 nt, Human herpesvirus 1
ccaauaaacccccaaacac

SEQ ID NO: 122714 - RNA, 14 nt, Human herpesvirus 1
ccaaggugucuccu

SEQ ID NO: 122715 - RNA, 21 nt, Human herpesvirus 1
ccaagaaucccggccaagagg

SEQ ID NO: 122716 - RNA, 21 nt, Human herpesvirus 1
cauuuauugacccaaaacaca

SEQ ID NO: 122717 - RNA, 22 nt, Human herpesvirus 1
cauuuauugacccaaaacacac

SEQ ID NO: 122718 - RNA, 16 nt, Human herpesvirus 1
cagacucaagcacaca

SEQ ID NO: 122719 - RNA, 21 nt, Human herpesvirus 1
caggccuggcuauccggagaa

SEQ ID NO: 122720 - RNA, 14 nt, Human herpesvirus 1
caggcgguggagaa

SEQ ID NO: 122721 - RNA, 17 nt, Human herpesvirus 1
caggccaucgccgggga

SEQ ID NO: 122722 - RNA, 12 nt, Human herpesvirus 1
caggccccggug

SEQ ID NO: 122723 - RNA, 14 nt, Human herpesvirus 1
caggcccgccgcca

SEQ ID NO: 122724 - RNA, 22 nt, Human herpesvirus 1
cagacagaaaauguaaccauac

SEQ ID NO: 122725 - RNA, 15 nt, Human herpesvirus 1
cagggcgcccccgcg

SEQ ID NO: 122726 - RNA, 15 nt, Human herpesvirus 1
cagucaaacucccca

SEQ ID NO: 122727 - RNA, 19 nt, Human herpesvirus 1
cauaaacaacuacacacag

SEQ ID NO: 122728 - RNA, 22 nt, Human herpesvirus 1
cauaagguccguccgguccucu

SEQ ID NO: 122729 - RNA, 20 nt, Human herpesvirus 1
caguggcuucauguggauaa

SEQ ID NO: 122730 - RNA, 15 nt, Human herpesvirus 1
caguuaaauacaugc

SEQ ID NO: 122731 - RNA, 15 nt, Human herpesvirus 1
gccaugcacaccagc

SEQ ID NO: 122732 - RNA, 19 nt, Human herpesvirus 1
gccauggcgggacugggca

SEQ ID NO: 122733 - RNA, 22 nt, Human herpesvirus 1
gccagcucggacaccagcagcu

SEQ ID NO: 122734 - RNA, 16 nt, Human herpesvirus 1
gcccgccccucgccac

SEQ ID NO: 122735 - RNA, 14 nt, Human herpesvirus 1
gcccuccaccaacg

SEQ ID NO: 122736 - RNA, 15 nt, Human herpesvirus 1
gcccacuacaccagc

SEQ ID NO: 122737 - RNA, 13 nt, Human herpesvirus 1
gcauaugcaaauu

SEQ ID NO: 122738 - RNA, 20 nt, Human herpesvirus 1
gcauaccuggguguguuuau

SEQ ID NO: 122739 - RNA, 18 nt, Human herpesvirus 1
gccaagaaucccggccaa

SEQ ID NO: 122740 - RNA, 16 nt, Human herpesvirus 1
gccaaauaaagccacu

SEQ ID NO: 122741 - RNA, 13 nt, Human herpesvirus 1
gcgaacgggggcc

SEQ ID NO: 122742 - RNA, 15 nt, Human herpesvirus 1
gcgcauauccggggg

SEQ ID NO: 122743 - RNA, 18 nt, Human herpesvirus 1
gcgcagaggcggccagaa

SEQ ID NO: 122744 - RNA, 20 nt, Human herpesvirus 1
gcgauguggauaaaaagcca

SEQ ID NO: 122745 - RNA, 21 nt, Human herpesvirus 1
gcgauguggauaaaaagccag

SEQ ID NO: 122746 - RNA, 22 nt, Human herpesvirus 1
gcgauguggauaaaaagccagc

SEQ ID NO: 122747 - RNA, 15 nt, Human herpesvirus 1
gcgaugaggggcacc

SEQ ID NO: 122748 - RNA, 13 nt, Human herpesvirus 1
gcgauggacaccg

SEQ ID NO: 122749 - RNA, 21 nt, Human herpesvirus 1
gcgaggggggagggggcauua

SEQ ID NO: 122750 - RNA, 20 nt, Human herpesvirus 1
gcgaggggggguccgaugaa

SEQ ID NO: 122751 - RNA, 18 nt, Human herpesvirus 1
gcgagguagauggccaua

SEQ ID NO: 122752 - RNA, 15 nt, Human herpesvirus 1
gccugaacaaacaaa

SEQ ID NO: 122753 - RNA, 18 nt, Human herpesvirus 1
gccucgugggcacuuucc

SEQ ID NO: 122754 - RNA, 14 nt, Human herpesvirus 1
gccucucacacagc

SEQ ID NO: 122755 - RNA, 17 nt, Human herpesvirus 1
gccucggucaccccaau

SEQ ID NO: 122756 - RNA, 22 nt, Human herpesvirus 1
gccucgguccaccgcauacucc

SEQ ID NO: 122757 - RNA, 20 nt, Human herpesvirus 1
gccucgagggucacaggaac

SEQ ID NO: 122758 - RNA, 13 nt, Human herpesvirus 1
gccguaacccaac

SEQ ID NO: 122759 - RNA, 18 nt, Human herpesvirus 1
gccguaacccaaccaaac

SEQ ID NO: 122760 - RNA, 18 nt, Human herpesvirus 1
gccgcgguuuaccgccac

SEQ ID NO: 122761 - RNA, 13 nt, Human herpesvirus 1
gcccuguaccgac

SEQ ID NO: 122762 - RNA, 18 nt, Human herpesvirus 1
gcccuguaugacagcggg

SEQ ID NO: 122763 - RNA, 18 nt, Human herpesvirus 1
gccggacgcgcggcgcga

SEQ ID NO: 122764 - RNA, 16 nt, Human herpesvirus 1
gccggcaugcacccca

SEQ ID NO: 122765 - RNA, 18 nt, Human herpesvirus 1
gccggcaugcaccccaga

SEQ ID NO: 122766 - RNA, 15 nt, Human herpesvirus 1
gccgggcgacccaga

SEQ ID NO: 122767 - RNA, 23 nt, Human herpesvirus 1
gcaguccacgggggggagcacaa

SEQ ID NO: 122768 - RNA, 21 nt, Human herpesvirus 1
gcaggcgccuccggggguccg

SEQ ID NO: 122769 - RNA, 15 nt, Human herpesvirus 1
gcagccguccagaca

SEQ ID NO: 122770 - RNA, 21 nt, Human herpesvirus 1
gcaggauuucgcgcaggugau

SEQ ID NO: 122771 - RNA, 15 nt, Human herpesvirus 1
gcacuuuccccaugc

SEQ ID NO: 122772 - RNA, 17 nt, Human herpesvirus 1
gcacuuuccccaugcga

SEQ ID NO: 122773 - RNA, 18 nt, Human herpesvirus 1
gcagaccuauguguuuca

SEQ ID NO: 122774 - RNA, 19 nt, Human herpesvirus 1
gcacuuccuauaagacucu

SEQ ID NO: 122775 - RNA, 20 nt, Human herpesvirus 1
gcacuuccuauaagacucuc

SEQ ID NO: 122776 - RNA, 18 nt, Human herpesvirus 1
gcacguauucggacagac

SEQ ID NO: 122777 - RNA, 21 nt, Human herpesvirus 1
gcacguauucggacagacuca

SEQ ID NO: 122778 - RNA, 20 nt, Human herpesvirus 1
gcacgaguucaaccucgggu

SEQ ID NO: 122779 - RNA, 12 nt, Human herpesvirus 1
gauccagauucc

SEQ ID NO: 122780 - RNA, 19 nt, Human herpesvirus 1
gcacacccccauccggugg

SEQ ID NO: 122781 - RNA, 19 nt, Human herpesvirus 1
gcaccaccgacucucccac

SEQ ID NO: 122782 - RNA, 23 nt, Human herpesvirus 1
gcacaugcgguuuaacacccgug

SEQ ID NO: 122783 - RNA, 20 nt, Human herpesvirus 1
gcaccacggguauaaggaca

SEQ ID NO: 122784 - RNA, 16 nt, Human herpesvirus 1
gcaccagaaaccaggu

SEQ ID NO: 122785 - RNA, 24 nt, Human herpesvirus 1
gcacccggccucucacacagcauc

SEQ ID NO: 122786 - RNA, 14 nt, Human herpesvirus 1
ggaaagacggucca

SEQ ID NO: 122787 - RNA, 22 nt, Human herpesvirus 1
ggaaacuugccggucgccgugc

SEQ ID NO: 122788 - RNA, 15 nt, Human herpesvirus 1
gcuuguuuguguucc

SEQ ID NO: 122789 - RNA, 14 nt, Human herpesvirus 1
gcuguccuuucuca

SEQ ID NO: 122790 - RNA, 13 nt, Human herpesvirus 1
gcugugaugaagc

SEQ ID NO: 122791 - RNA, 18 nt, Human herpesvirus 1
gcuguggccucaccugac

SEQ ID NO: 122792 - RNA, 17 nt, Human herpesvirus 1
gcuaugcagccccgugu

SEQ ID NO: 122793 - RNA, 13 nt, Human herpesvirus 1
gcucgucugggac

SEQ ID NO: 122794 - RNA, 13 nt, Human herpesvirus 1
gcucgucuuggcc

SEQ ID NO: 122795 - RNA, 13 nt, Human herpesvirus 1
gcgccucccgggg

SEQ ID NO: 122796 - RNA, 17 nt, Human herpesvirus 1
gcgccuccggggguccg

SEQ ID NO: 122797 - RNA, 14 nt, Human herpesvirus 1
gcgcaugaucuccg

SEQ ID NO: 122798 - RNA, 17 nt, Human herpesvirus 1
gcgccaggucggcgacc

SEQ ID NO: 122799 - RNA, 21 nt, Human herpesvirus 1
gcgccauggcgggacugggca

SEQ ID NO: 122800 - RNA, 17 nt, Human herpesvirus 1
gcgcccacuacaccagc

SEQ ID NO: 122801 - RNA, 14 nt, Human herpesvirus 1
ggcacuuuccccau

SEQ ID NO: 122802 - RNA, 14 nt, Human herpesvirus 1
ggccaccucgccca

SEQ ID NO: 122803 - RNA, 22 nt, Human herpesvirus 1
ggccacagaaacaaaaccgggu

SEQ ID NO: 122804 - RNA, 18 nt, Human herpesvirus 1
ggccacucacgcaucccc

SEQ ID NO: 122805 - RNA, 14 nt, Human herpesvirus 1
ggacucacggccgg

SEQ ID NO: 122806 - RNA, 16 nt, Human herpesvirus 1
ggauggccugggcaug

SEQ ID NO: 122807 - RNA, 21 nt, Human herpesvirus 1
ggacacuggguucuccuggaa

SEQ ID NO: 122808 - RNA, 16 nt, Human herpesvirus 1
ggcuggucagcacggc

SEQ ID NO: 122809 - RNA, 18 nt, Human herpesvirus 1
gggagggaaagcaaagag

SEQ ID NO: 122810 - RNA, 14 nt, Human herpesvirus 1
ggcucggggcgggg

SEQ ID NO: 122811 - RNA, 15 nt, Human herpesvirus 1
ggcuggaggcaaaca

SEQ ID NO: 122812 - RNA, 19 nt, Human herpesvirus 1
ggccucgagggucacagga

SEQ ID NO: 122813 - RNA, 20 nt, Human herpesvirus 1
ggccucgagggucacaggaa

SEQ ID NO: 122814 - RNA, 15 nt, Human herpesvirus 1
ggcgauaucaggggc

SEQ ID NO: 122815 - RNA, 12 nt, Human herpesvirus 1
ggcgacccagau

SEQ ID NO: 122816 - RNA, 22 nt, Human herpesvirus 1
gggcgucccacacucucugggc

SEQ ID NO: 122817 - RNA, 15 nt, Human herpesvirus 1
gggcgucaccaugca

SEQ ID NO: 122818 - RNA, 21 nt, Human herpesvirus 1
gggcgcuugugagacccgaag

SEQ ID NO: 122819 - RNA, 14 nt, Human herpesvirus 1
gggcggccaugccg

SEQ ID NO: 122820 - RNA, 23 nt, Human herpesvirus 1
gggcgcauccccccuuuugcacu

SEQ ID NO: 122821 - RNA, 15 nt, Human herpesvirus 1
gggcugcgugucaaa

SEQ ID NO: 122822 - RNA, 21 nt, Human herpesvirus 1
gggcgacccagauguuuacuu

SEQ ID NO: 122823 - RNA, 18 nt, Human herpesvirus 1
gggccucgcugaccagcg

SEQ ID NO: 122824 - RNA, 13 nt, Human herpesvirus 1
gggauacauggaa

SEQ ID NO: 122825 - RNA, 23 nt, Human herpesvirus 1
gggaucggacgccacacaccaga

SEQ ID NO: 122826 - RNA, 13 nt, Human herpesvirus 1
aaauacaugccac

SEQ ID NO: 122827 - RNA, 17 nt, Human herpesvirus 1
aaauacaugcccgggac

SEQ ID NO: 122828 - RNA, 13 nt, Human herpesvirus 1
aaauacagcaugg

SEQ ID NO: 122829 - RNA, 20 nt, Human herpesvirus 1
gaccacaccaacgcacgagc

SEQ ID NO: 122830 - RNA, 12 nt, Human herpesvirus 1
aaauaaagccac

SEQ ID NO: 122831 - RNA, 23 nt, Human herpesvirus 1
gaccacgccccuuucccccuguu

SEQ ID NO: 122832 - RNA, 15 nt, Human herpesvirus 1
gacaacaaacaacca

SEQ ID NO: 122833 - RNA, 14 nt, Human herpesvirus 1
gacauuaaccaccu

SEQ ID NO: 122834 - RNA, 12 nt, Human herpesvirus 1
gacaucuugucg

SEQ ID NO: 122835 - RNA, 13 nt, Human herpesvirus 1
aacaaacaaacca

SEQ ID NO: 122836 - RNA, 17 nt, Human herpesvirus 1
gacgcgucauaugcaaa

SEQ ID NO: 122837 - RNA, 14 nt, Human herpesvirus 1
gacgcgcggcgcga

SEQ ID NO: 122838 - RNA, 11 nt, Human herpesvirus 1
gacgcaauaaa

SEQ ID NO: 122839 - RNA, 23 nt, Human herpesvirus 1
gacgcaauaaacggcaacaaccu

SEQ ID NO: 122840 - RNA, 21 nt, Human herpesvirus 1
gacgccgguccgcugugccau

SEQ ID NO: 122841 - RNA, 21 nt, Human herpesvirus 1
gacgagaaacacgguggcgcg

SEQ ID NO: 122842 - RNA, 18 nt, Human herpesvirus 1
gacgaacucguggacgaa

SEQ ID NO: 122843 - RNA, 11 nt, Human herpesvirus 1
gaccuugcccc

SEQ ID NO: 122844 - RNA, 14 nt, Human herpesvirus 1
gacgacaccguggu

SEQ ID NO: 122845 - RNA, 17 nt, Human herpesvirus 1
gacgucgccccuguggc

SEQ ID NO: 122846 - RNA, 12 nt, Human herpesvirus 1
aacaaaccaaaa

SEQ ID NO: 122847 - RNA, 13 nt, Human herpesvirus 1
aacaaaccaaaag

SEQ ID NO: 122848 - RNA, 13 nt, Human herpesvirus 1
aacaaaccacaga

SEQ ID NO: 122849 - RNA, 15 nt, Human herpesvirus 1
gacgguccacgucac

SEQ ID NO: 122850 - RNA, 12 nt, Human herpesvirus 1
gacggggaccgg

SEQ ID NO: 122851 - RNA, 16 nt, Human herpesvirus 1
gacggcgucucccggg

SEQ ID NO: 122852 - RNA, 16 nt, Human herpesvirus 1
gacggcggaccuggcg

SEQ ID NO: 122853 - RNA, 15 nt, Human herpesvirus 1
gagaucacgccuuaa

SEQ ID NO: 122854 - RNA, 22 nt, Human herpesvirus 1
gagcacaaacgugcucugccac

SEQ ID NO: 122855 - RNA, 14 nt, Human herpesvirus 1
gauagcagauguga

SEQ ID NO: 122856 - RNA, 13 nt, Human herpesvirus 1
gagucuggaaggg

SEQ ID NO: 122857 - RNA, 16 nt, Human herpesvirus 1
gaguccggaacacccc

SEQ ID NO: 122858 - RNA, 16 nt, Human herpesvirus 1
gagucuucggggcccg

SEQ ID NO: 122859 - RNA, 15 nt, Human herpesvirus 1
gaguaccgcgagcuc

SEQ ID NO: 122860 - RNA, 15 nt, Human herpesvirus 1
gagcuucgcuuugug

SEQ ID NO: 122861 - RNA, 23 nt, Human herpesvirus 1
gagcuucgcuuugugggggacca

SEQ ID NO: 122862 - RNA, 21 nt, Human herpesvirus 1
aaaccccccaucacaggucgu

SEQ ID NO: 122863 - RNA, 11 nt, Human herpesvirus 1
aaagcaaagag

SEQ ID NO: 122864 - RNA, 19 nt, Human herpesvirus 1
gaagagggggaccccgggg

SEQ ID NO: 122865 - RNA, 20 nt, Human herpesvirus 1
gaacucguggacgaacacgg

SEQ ID NO: 122866 - RNA, 17 nt, Human herpesvirus 1
gaaacggccaacggacg

SEQ ID NO: 122867 - RNA, 21 nt, Human herpesvirus 1
gaaaccguaacggcauaugca

SEQ ID NO: 122868 - RNA, 22 nt, Human herpesvirus 1
gaaaccguaacggcauaugcaa

SEQ ID NO: 122869 - RNA, 11 nt, Human herpesvirus 1
gaaacugacau

SEQ ID NO: 122870 - RNA, 13 nt, Human herpesvirus 1
gaaaagccccggg

SEQ ID NO: 122871 - RNA, 13 nt, Human herpesvirus 1
cuuuuguguuggc

SEQ ID NO: 122872 - RNA, 19 nt, Human herpesvirus 1
cuuuuuaucgcacgugauu

SEQ ID NO: 122873 - RNA, 23 nt, Human herpesvirus 1
gaaaaaaagcucggguuggccaa

SEQ ID NO: 122874 - RNA, 17 nt, Human herpesvirus 1
cuuucccgugacaaaac

SEQ ID NO: 122875 - RNA, 23 nt, Human herpesvirus 1
cuuucuucccacacacacaaaag

SEQ ID NO: 122876 - RNA, 20 nt, Human herpesvirus 1
cuuuccuuucccgugacaaa

SEQ ID NO: 122877 - RNA, 17 nt, Human herpesvirus 1
uuuugugccuaccgcuu

SEQ ID NO: 122878 - RNA, 14 nt, Human herpesvirus 1
uuuggcaucauguc

SEQ ID NO: 122879 - RNA, 14 nt, Human herpesvirus 1
uggaaauagcaaca

SEQ ID NO: 122880 - RNA, 15 nt, Human herpesvirus 1
ugcuuguuuguguuc

SEQ ID NO: 122881 - RNA, 15 nt, Human herpesvirus 1
uggauaaaaagccag

SEQ ID NO: 122882 - RNA, 16 nt, Human herpesvirus 1
uggauaaaaagccagc

SEQ ID NO: 122883 - RNA, 19 nt, Human herpesvirus 1
uggagauucgggucuacua

SEQ ID NO: 122884 - RNA, 23 nt, Human herpesvirus 1
uggagcaaaacgccucccccuga

SEQ ID NO: 122885 - RNA, 14 nt, Human herpesvirus 1
uggacccaaagccc

SEQ ID NO: 122886 - RNA, 18 nt, Human herpesvirus 1
uggacugagcagacagac

SEQ ID NO: 122887 - RNA, 19 nt, Human herpesvirus 1
uggagacgggugagugucg

SEQ ID NO: 122888 - RNA, 20 nt, Human herpesvirus 1
ugucccucauuuuacaauaa

SEQ ID NO: 122889 - RNA, 23 nt, Human herpesvirus 1
uggcgcccccccaacgggggacc

SEQ ID NO: 122890 - RNA, 15 nt, Human herpesvirus 1
uggcgccgggggacg

SEQ ID NO: 122891 - RNA, 22 nt, Human herpesvirus 1
uggccgcgcccacuacaccagc

SEQ ID NO: 122892 - RNA, 17 nt, Human herpesvirus 1
uggccgacaacugccug

SEQ ID NO: 122893 - RNA, 18 nt, Human herpesvirus 1
uggcccacgcaaacaaca

SEQ ID NO: 122894 - RNA, 13 nt, Human herpesvirus 1
ugguagauaggca

SEQ ID NO: 122895 - RNA, 14 nt, Human herpesvirus 1
ugggaugggaccuu

SEQ ID NO: 122896 - RNA, 13 nt, Human herpesvirus 1
ugggacccacaga

SEQ ID NO: 122897 - RNA, 18 nt, Human herpesvirus 1
ugggacccacagaccgcc

SEQ ID NO: 122898 - RNA, 14 nt, Human herpesvirus 1
ugggaggaguucag

SEQ ID NO: 122899 - RNA, 13 nt, Human herpesvirus 1
ugggagugggggu

SEQ ID NO: 122900 - RNA, 14 nt, Human herpesvirus 1
ugggauacauggaa

SEQ ID NO: 122901 - RNA, 20 nt, Human herpesvirus 1
uggucuguuucucuccgccc

SEQ ID NO: 122902 - RNA, 20 nt, Human herpesvirus 1
ugguaucuaguugauaugca

SEQ ID NO: 122903 - RNA, 22 nt, Human herpesvirus 1
uggucgggccgucguuggucag

SEQ ID NO: 122904 - RNA, 15 nt, Human herpesvirus 1
uuauuggucaaacuc

SEQ ID NO: 122905 - RNA, 20 nt, Human herpesvirus 1
uuauuggucaaacucaggca

SEQ ID NO: 122906 - RNA, 20 nt, Human herpesvirus 1
uuagccagcagacgcugcuc

SEQ ID NO: 122907 - RNA, 18 nt, Human herpesvirus 1
uguguaaccccccccaaa

SEQ ID NO: 122908 - RNA, 14 nt, Human herpesvirus 1
uuaacgugguccac

SEQ ID NO: 122909 - RNA, 22 nt, Human herpesvirus 1
uugauacccuguuuaugguguc

SEQ ID NO: 122910 - RNA, 14 nt, Human herpesvirus 1
uugccgcguugguc

SEQ ID NO: 122911 - RNA, 18 nt, Human herpesvirus 1
uugcccugagacaagagc

SEQ ID NO: 122912 - RNA, 15 nt, Human herpesvirus 1
uuggaugaaaacacg

SEQ ID NO: 122913 - RNA, 22 nt, Human herpesvirus 1
uccagacgcacagcgagggacc

SEQ ID NO: 122914 - RNA, 19 nt, Human herpesvirus 1
uccacgguaggcccagcau

SEQ ID NO: 122915 - RNA, 21 nt, Human herpesvirus 1
uccagccuccccuccaggugc

SEQ ID NO: 122916 - RNA, 21 nt, Human herpesvirus 1
uccacccccgcccgggucccc

SEQ ID NO: 122917 - RNA, 16 nt, Human herpesvirus 1
uccugguagauaggca

SEQ ID NO: 122918 - RNA, 14 nt, Human herpesvirus 1
uccgacggggaccg

SEQ ID NO: 122919 - RNA, 12 nt, Human herpesvirus 1
uccgaccccaga

SEQ ID NO: 122920 - RNA, 20 nt, Human herpesvirus 1
uccucaccgagccucugugu

SEQ ID NO: 122921 - RNA, 16 nt, Human herpesvirus 1
ucccugucuguguugg

SEQ ID NO: 122922 - RNA, 16 nt, Human herpesvirus 1
ucccucaggucauccu

SEQ ID NO: 122923 - RNA, 15 nt, Human herpesvirus 1
ucccguccauuccca

SEQ ID NO: 122924 - RNA, 23 nt, Human herpesvirus 1
ucacgcgcauccgcaagcuaugc

SEQ ID NO: 122925 - RNA, 20 nt, Human herpesvirus 1
ucagggccuccgaccccaga

SEQ ID NO: 122926 - RNA, 18 nt, Human herpesvirus 1
ucauaaacgcgggguucg

SEQ ID NO: 122927 - RNA, 14 nt, Human herpesvirus 1
ucuuugguaccaug

SEQ ID NO: 122928 - RNA, 21 nt, Human herpesvirus 1
ugagacccaaaguuugguuca

SEQ ID NO: 122929 - RNA, 20 nt, Human herpesvirus 1
ugagacccgaagacgcaaua

SEQ ID NO: 122930 - RNA, 13 nt, Human herpesvirus 1
ugagcagacagac

SEQ ID NO: 122931 - RNA, 14 nt, Human herpesvirus 1
ugcacccagccuuu

SEQ ID NO: 122932 - RNA, 16 nt, Human herpesvirus 1
ucuugucucagggcaa

SEQ ID NO: 122933 - RNA, 13 nt, Human herpesvirus 1
ucuucccacacac

SEQ ID NO: 122934 - RNA, 14 nt, Human herpesvirus 1
ucgccccauacucc

SEQ ID NO: 122935 - RNA, 23 nt, Human herpesvirus 1
ucuacgcgccggccgcacccaca

SEQ ID NO: 122936 - RNA, 18 nt, Human herpesvirus 1
ucuacccguguuugccca

SEQ ID NO: 122937 - RNA, 18 nt, Human herpesvirus 1
ucucgguguuuguguugu

SEQ ID NO: 122938 - RNA, 21 nt, Human herpesvirus 1
ucucugggcgggccgugauuc

SEQ ID NO: 122939 - RNA, 15 nt, Human herpesvirus 1
ucuagcccaguaaca

SEQ ID NO: 122940 - RNA, 16 nt, Human herpesvirus 1
cuaugcagccccgugu

SEQ ID NO: 122941 - RNA, 10 nt, Human herpesvirus 1
cuccagacca

SEQ ID NO: 122942 - RNA, 16 nt, Human herpesvirus 1
cucgagaugagccaga

SEQ ID NO: 122943 - RNA, 15 nt, Human herpesvirus 1
cucugucgauacccc

SEQ ID NO: 122944 - RNA, 13 nt, Human herpesvirus 1
cucggaugacuca

SEQ ID NO: 122945 - RNA, 16 nt, Human herpesvirus 1
cucgugcguuggugug

SEQ ID NO: 122946 - RNA, 17 nt, Human herpesvirus 1
cugacgcgccccaaggc

SEQ ID NO: 122947 - RNA, 17 nt, Human herpesvirus 1
cuggugccggucgugag

SEQ ID NO: 122948 - RNA, 19 nt, Human herpesvirus 1
cuggccgccguaugagauc

SEQ ID NO: 122949 - RNA, 23 nt, Human herpesvirus 1
cuggccgcgcccacuacaccagc

SEQ ID NO: 122950 - RNA, 17 nt, Human herpesvirus 1
cugggaauagagcagaa

SEQ ID NO: 122951 - RNA, 19 nt, Human herpesvirus 1
cugggacaaacgcuuugau

SEQ ID NO: 122952 - RNA, 20 nt, Human herpesvirus 1
cugccccccccaccccagac

SEQ ID NO: 122953 - RNA, 13 nt, Human herpesvirus 1
cugcccauuugac

SEQ ID NO: 122954 - RNA, 16 nt, Human herpesvirus 1
cugccauggauuccgc

SEQ ID NO: 122955 - RNA, 15 nt, Human herpesvirus 1
cugcuguuguaggcg

SEQ ID NO: 122956 - RNA, 22 nt, Human herpesvirus 1
cugcgcauacagaacaccggcg

SEQ ID NO: 122957 - RNA, 12 nt, Human herpesvirus 1
cgcagaucccag

SEQ ID NO: 122958 - RNA, 12 nt, Human herpesvirus 1
cgccaaagcccc

SEQ ID NO: 122959 - RNA, 16 nt, Human herpesvirus 1
cgccaaauaaagccac

SEQ ID NO: 122960 - RNA, 21 nt, Human herpesvirus 1
cgccuuucaguuucauggcca

SEQ ID NO: 122961 - RNA, 22 nt, Human herpesvirus 1
cgccgguauggggcaugaucag

SEQ ID NO: 122962 - RNA, 12 nt, Human herpesvirus 1
cgccgugcuccu

SEQ ID NO: 122963 - RNA, 21 nt, Human herpesvirus 1
cgcgauguggauaaaaagcca

SEQ ID NO: 122964 - RNA, 19 nt, Human herpesvirus 1
cgcgaugaggggcaccaga

SEQ ID NO: 122965 - RNA, 14 nt, Human herpesvirus 1
cgccgccaccagcc

SEQ ID NO: 122966 - RNA, 14 nt, Human herpesvirus 1
cgccgcgacacuca

SEQ ID NO: 122967 - RNA, 12 nt, Human herpesvirus 1
cgcccccggcua

SEQ ID NO: 122968 - RNA, 21 nt, Human herpesvirus 1
cgccacccucucuucccucag

SEQ ID NO: 122969 - RNA, 19 nt, Human herpesvirus 1
cgaucccccgcccccggcu

SEQ ID NO: 122970 - RNA, 15 nt, Human herpesvirus 1
cgauccgacaugucc

SEQ ID NO: 122971 - RNA, 20 nt, Human herpesvirus 1
cgauguggauaaaaagccag

SEQ ID NO: 122972 - RNA, 21 nt, Human herpesvirus 1
cgaggacgggcgaggggcuca

SEQ ID NO: 122973 - RNA, 12 nt, Human herpesvirus 1
cgaggggcggga

SEQ ID NO: 122974 - RNA, 18 nt, Human herpesvirus 1
cgagggucacaggaaccc

SEQ ID NO: 122975 - RNA, 21 nt, Human herpesvirus 1
cgaggucccgugcaacccuua

SEQ ID NO: 122976 - RNA, 15 nt, Human herpesvirus 1
cgaguucccccggca

SEQ ID NO: 122977 - RNA, 21 nt, Human herpesvirus 1
cgagggcgagcucagcuuuua

SEQ ID NO: 122978 - RNA, 15 nt, Human herpesvirus 1
cgaggugcgguuggg

SEQ ID NO: 122979 - RNA, 20 nt, Human herpesvirus 1
cgagggacccgcgggguucu

SEQ ID NO: 122980 - RNA, 12 nt, Human herpesvirus 1
ccuacaccggcc

SEQ ID NO: 122981 - RNA, 19 nt, Human herpesvirus 1
ccuaaaauucaacaaaacu

SEQ ID NO: 122982 - RNA, 11 nt, Human herpesvirus 1
cggcaccaccg

SEQ ID NO: 122983 - RNA, 23 nt, Human herpesvirus 1
cggcacguauucggacagacuca

SEQ ID NO: 122984 - RNA, 16 nt, Human herpesvirus 1
cggcaugcaccccaga

SEQ ID NO: 122985 - RNA, 14 nt, Human herpesvirus 1
cggccaacacgacc

SEQ ID NO: 122986 - RNA, 21 nt, Human herpesvirus 1
cggccaaccagcguccgccga

SEQ ID NO: 122987 - RNA, 16 nt, Human herpesvirus 1
cggccacuggccggga

SEQ ID NO: 122988 - RNA, 16 nt, Human herpesvirus 1
cggccgcgacccaggc

SEQ ID NO: 122989 - RNA, 18 nt, Human herpesvirus 1
cggcggacccccggaggc

SEQ ID NO: 122990 - RNA, 19 nt, Human herpesvirus 1
cggcggaccuggcgaucca

SEQ ID NO: 122991 - RNA, 14 nt, Human herpesvirus 1
cggcgggggcgggg

SEQ ID NO: 122992 - RNA, 19 nt, Human herpesvirus 1
cggcgguaaucauaaccac

SEQ ID NO: 122993 - RNA, 12 nt, Human herpesvirus 1
cgggacugaaua

SEQ ID NO: 122994 - RNA, 16 nt, Human herpesvirus 1
cgggagcuccgcacca

SEQ ID NO: 122995 - RNA, 17 nt, Human herpesvirus 1
cgcgggccucgugggca

SEQ ID NO: 122996 - RNA, 11 nt, Human herpesvirus 1
cgcgucccuga

SEQ ID NO: 122997 - RNA, 12 nt, Human herpesvirus 1
cgcgucccugac

SEQ ID NO: 122998 - RNA, 15 nt, Human herpesvirus 1
cgcgcucaaccaccg

SEQ ID NO: 122999 - RNA, 13 nt, Human herpesvirus 1
cgcucaaccaccg

SEQ ID NO: 123000 - RNA, 13 nt, Human herpesvirus 1
cgcucccccgugu

SEQ ID NO: 123001 - RNA, 12 nt, Human herpesvirus 1
cgcuccugaugu

SEQ ID NO: 123002 - RNA, 16 nt, Human herpesvirus 1
cgcucuugucucaggg

SEQ ID NO: 123003 - RNA, 21 nt, Human herpesvirus 1
cguuccaaggccggugucaua

SEQ ID NO: 123004 - RNA, 13 nt, Human herpesvirus 1
cguguucagggcg

SEQ ID NO: 123005 - RNA, 16 nt, Human herpesvirus 1
cguuucugaccugcac

SEQ ID NO: 123006 - RNA, 14 nt, Human herpesvirus 1
cguuggucagggcg

SEQ ID NO: 123007 - RNA, 20 nt, Human herpesvirus 1
cgugcgugggggcccuggcg

SEQ ID NO: 123008 - RNA, 17 nt, Human herpesvirus 1
cgugcuguugggcggga

SEQ ID NO: 123009 - RNA, 14 nt, Human herpesvirus 1
cgugugguacaccg

SEQ ID NO: 123010 - RNA, 13 nt, Human herpesvirus 1
cgugugguucaug

SEQ ID NO: 123011 - RNA, 19 nt, Human herpesvirus 1
cgugagucacagcgaccgc

SEQ ID NO: 123012 - RNA, 15 nt, Human herpesvirus 1
cgggaggaagccaca

SEQ ID NO: 123013 - RNA, 19 nt, Human herpesvirus 1
cggguuggaugaaaacacg

SEQ ID NO: 123014 - RNA, 16 nt, Human herpesvirus 1
cgguaaacaccaacuc

SEQ ID NO: 123015 - RNA, 17 nt, Human herpesvirus 1
cgguccauuaaagacaa

SEQ ID NO: 123016 - RNA, 20 nt, Human herpesvirus 1
cggugccaauaaacccccaa

SEQ ID NO: 123017 - RNA, 17 nt, Human herpesvirus 1
cguauaacgggggccau

SEQ ID NO: 123018 - RNA, 18 nt, Human herpesvirus 1
cguauaacgggggccaug

SEQ ID NO: 123019 - RNA, 13 nt, Human herpesvirus 1
cgucauaugcaaa

SEQ ID NO: 123020 - RNA, 18 nt, Human herpesvirus 1
cgucccagaauuuggcca

SEQ ID NO: 123021 - RNA, 18 nt, Human herpesvirus 1
cgucaaagggauacacaa

SEQ ID NO: 123022 - RNA, 22 nt, Human herpesvirus 1
gacgucggaggauuacuuuaag

SEQ ID NO: 123023 - RNA, 22 nt, Human herpesvirus 1
gacgggcgguucgccgccacca

SEQ ID NO: 123024 - RNA, 12 nt, Human herpesvirus 1
gacgggugagug

SEQ ID NO: 123025 - RNA, 13 nt, Human herpesvirus 1
gacggcgaccaua

SEQ ID NO: 123026 - RNA, 14 nt, Human herpesvirus 1
gacgcugggacaaa

SEQ ID NO: 123027 - RNA, 17 nt, Human herpesvirus 1
gacggaccugguuacug

SEQ ID NO: 123028 - RNA, 15 nt, Human herpesvirus 1
gacgcgccucccggg

SEQ ID NO: 123029 - RNA, 15 nt, Human herpesvirus 1
gacgcgucauaugca

SEQ ID NO: 123030 - RNA, 16 nt, Human herpesvirus 1
gacgcgucauaugcaa

SEQ ID NO: 123031 - RNA, 19 nt, Human herpesvirus 1
gagacaacgcgacaggcca

SEQ ID NO: 123032 - RNA, 13 nt, Human herpesvirus 1
gagacguccuuaa

SEQ ID NO: 123033 - RNA, 14 nt, Human herpesvirus 1
gagacguccuuaau

SEQ ID NO: 123034 - RNA, 15 nt, Human herpesvirus 1
gacucguagccuaau

SEQ ID NO: 123035 - RNA, 15 nt, Human herpesvirus 1
gacuuccccuuccuc

SEQ ID NO: 123036 - RNA, 18 nt, Human herpesvirus 1
gagagaaucccccguguu

SEQ ID NO: 123037 - RNA, 21 nt, Human herpesvirus 1
gagccgguagugcaggugggc

SEQ ID NO: 123038 - RNA, 20 nt, Human herpesvirus 1
gagccguaacccaaccaaac

SEQ ID NO: 123039 - RNA, 13 nt, Human herpesvirus 1
gaggccacagcgc

SEQ ID NO: 123040 - RNA, 22 nt, Human herpesvirus 1
gaggcgcauaaagggccggugg

SEQ ID NO: 123041 - RNA, 20 nt, Human herpesvirus 1
gaguuuguggacccaaagcc

SEQ ID NO: 123042 - RNA, 19 nt, Human herpesvirus 1
gagucuggaaggggggaaa

SEQ ID NO: 123043 - RNA, 18 nt, Human herpesvirus 1
gaggcguccauugacaca

SEQ ID NO: 123044 - RNA, 22 nt, Human herpesvirus 1
gaguccacgguaggcccagcau

SEQ ID NO: 123045 - RNA, 14 nt, Human herpesvirus 1
gcaauuucaccgcc

SEQ ID NO: 123046 - RNA, 17 nt, Human herpesvirus 1
gcaauucccgcggcccu

SEQ ID NO: 123047 - RNA, 23 nt, Human herpesvirus 1
gcaccgggggcuaaaggguggua

SEQ ID NO: 123048 - RNA, 21 nt, Human herpesvirus 1
gauucgggucuacuacgaguc

SEQ ID NO: 123049 - RNA, 23 nt, Human herpesvirus 1
gauuggcaauguugucucccggu

SEQ ID NO: 123050 - RNA, 17 nt, Human herpesvirus 1
gaugaaaaugaaccaga

SEQ ID NO: 123051 - RNA, 15 nt, Human herpesvirus 1
gaugagccaaccucg

SEQ ID NO: 123052 - RNA, 14 nt, Human herpesvirus 1
gaugaggggcacca

SEQ ID NO: 123053 - RNA, 21 nt, Human herpesvirus 1
gauggaggggcgggugugaua

SEQ ID NO: 123054 - RNA, 16 nt, Human herpesvirus 1
gaugggcuacuaccua

SEQ ID NO: 123055 - RNA, 20 nt, Human herpesvirus 1
gauguccugguagauaggca

SEQ ID NO: 123056 - RNA, 15 nt, Human herpesvirus 1
gauguaggcugguca

SEQ ID NO: 123057 - RNA, 12 nt, Human herpesvirus 1
gauaaugaucaa

SEQ ID NO: 123058 - RNA, 17 nt, Human herpesvirus 1
gaucaccgcgggagcgg

SEQ ID NO: 123059 - RNA, 13 nt, Human herpesvirus 1
gaucagcacgcca

SEQ ID NO: 123060 - RNA, 16 nt, Human herpesvirus 1
cuuugguaccauggga

SEQ ID NO: 123061 - RNA, 18 nt, Human herpesvirus 1
cuuuggucccgugaaagu

SEQ ID NO: 123062 - RNA, 23 nt, Human herpesvirus 1
cuuugggcgggaggaagccacaa

SEQ ID NO: 123063 - RNA, 22 nt, Human herpesvirus 1
cuuuucuuucuucccacacaca

SEQ ID NO: 123064 - RNA, 21 nt, Human herpesvirus 1
cuuuuguguuggcccuaauaa

SEQ ID NO: 123065 - RNA, 19 nt, Human herpesvirus 1
cuuguuccgcuucccggua

SEQ ID NO: 123066 - RNA, 20 nt, Human herpesvirus 1
cuugcggcaagacccgggcg

SEQ ID NO: 123067 - RNA, 22 nt, Human herpesvirus 1
cugugggugcgcgcauggcagc

SEQ ID NO: 123068 - RNA, 14 nt, Human herpesvirus 1
cuugccacucccca

SEQ ID NO: 123069 - RNA, 12 nt, Human herpesvirus 1
cugucuguguug

SEQ ID NO: 123070 - RNA, 22 nt, Human herpesvirus 1
gaaacaagcccgaccaccagac

SEQ ID NO: 123071 - RNA, 16 nt, Human herpesvirus 1
gaaaauguaaccauac

SEQ ID NO: 123072 - RNA, 15 nt, Human herpesvirus 1
gaaaaugaaccagac

SEQ ID NO: 123073 - RNA, 23 nt, Human herpesvirus 1
gaaaccguaacggcauaugcaaa

SEQ ID NO: 123074 - RNA, 17 nt, Human herpesvirus 1
gaaacgacaucuugucg

SEQ ID NO: 123075 - RNA, 19 nt, Human herpesvirus 1
gaaaccccagcauaccuaa

SEQ ID NO: 123076 - RNA, 13 nt, Human herpesvirus 1
gaacgacugggcc

SEQ ID NO: 123077 - RNA, 19 nt, Human herpesvirus 1
gaacacaggcgcuucauag

SEQ ID NO: 123078 - RNA, 23 nt, Human herpesvirus 1
gaacacgggggauucucucacga

SEQ ID NO: 123079 - RNA, 11 nt, Human herpesvirus 1
gaaagccacca

SEQ ID NO: 123080 - RNA, 17 nt, Human herpesvirus 1
gaaucccccguguuccc

SEQ ID NO: 123081 - RNA, 16 nt, Human herpesvirus 1
gacaacugccugaccc

SEQ ID NO: 123082 - RNA, 13 nt, Human herpesvirus 1
gaagcccaaccca

SEQ ID NO: 123083 - RNA, 20 nt, Human herpesvirus 1
gaagguucucgaacgacaaa

SEQ ID NO: 123084 - RNA, 18 nt, Human herpesvirus 1
gaagccacgcccacuuua

SEQ ID NO: 123085 - RNA, 15 nt, Human herpesvirus 1
gaacggacacgcggg

SEQ ID NO: 123086 - RNA, 19 nt, Human herpesvirus 1
uaacugucuggagacccua

SEQ ID NO: 123087 - RNA, 13 nt, Human herpesvirus 1
uaaggccugggau

SEQ ID NO: 123088 - RNA, 13 nt, Human herpesvirus 1
uaagcuuggucag

SEQ ID NO: 123089 - RNA, 15 nt, Human herpesvirus 1
uacugcccauuugac

SEQ ID NO: 123090 - RNA, 17 nt, Human herpesvirus 1
uaccgguagaaccaaaa

SEQ ID NO: 123091 - RNA, 21 nt, Human herpesvirus 1
uagauaggcaggcguuucaga

SEQ ID NO: 123092 - RNA, 20 nt, Human herpesvirus 1
uaguggaggaagaccugcuu

SEQ ID NO: 123093 - RNA, 18 nt, Human herpesvirus 1
uaucauggauaacaacca

SEQ ID NO: 123094 - RNA, 21 nt, Human herpesvirus 1
gugugaguuuguggacccaaa

SEQ ID NO: 123095 - RNA, 22 nt, Human herpesvirus 1
guguggcgcgaggggggguccg

SEQ ID NO: 123096 - RNA, 15 nt, Human herpesvirus 1
gugucgcgaugucuc

SEQ ID NO: 123097 - RNA, 21 nt, Human herpesvirus 1
guguuauuuauuaacaucaaa

SEQ ID NO: 123098 - RNA, 9 nt, Human herpesvirus 1
guguucaca

SEQ ID NO: 123099 - RNA, 23 nt, Human herpesvirus 1
guguucguggaaccaugaccucu

SEQ ID NO: 123100 - RNA, 22 nt, Human herpesvirus 1
gugucccgacauuaaccaccug

SEQ ID NO: 123101 - RNA, 18 nt, Human herpesvirus 1
guggccgacaacugccug

SEQ ID NO: 123102 - RNA, 16 nt, Human herpesvirus 1
gucaaacuccccaaac

SEQ ID NO: 123103 - RNA, 19 nt, Human herpesvirus 1
guccauuaaagacaacaaa

SEQ ID NO: 123104 - RNA, 21 nt, Human herpesvirus 1
guccauuaaagacaacaaaca

SEQ ID NO: 123105 - RNA, 17 nt, Human herpesvirus 1
guggauaaaaagccagc

SEQ ID NO: 123106 - RNA, 23 nt, Human herpesvirus 1
gucccguuaccaagaccaaccca

SEQ ID NO: 123107 - RNA, 17 nt, Human herpesvirus 1
guuauaggccacgcagu

SEQ ID NO: 123108 - RNA, 22 nt, Human herpesvirus 1
guuauuuauuaacaucaaacac

SEQ ID NO: 123109 - RNA, 12 nt, Human herpesvirus 1
guguuguucucg

SEQ ID NO: 123110 - RNA, 13 nt, Human herpesvirus 1
guucccaccaacg

SEQ ID NO: 123111 - RNA, 14 nt, Human herpesvirus 1
uaacggcauaugca

SEQ ID NO: 123112 - RNA, 15 nt, Human herpesvirus 1
uaacggcauaugcaa

SEQ ID NO: 123113 - RNA, 16 nt, Human herpesvirus 1
uaacacccgugguuuu

SEQ ID NO: 123114 - RNA, 22 nt, Human herpesvirus 1
uaaacauacgacacacaggcau

SEQ ID NO: 123115 - RNA, 17 nt, Human herpesvirus 1
uaaacaacuacacacag

SEQ ID NO: 123116 - RNA, 21 nt, Human herpesvirus 1
uaaaccagguaauaccaaaua

SEQ ID NO: 123117 - RNA, 15 nt, Human herpesvirus 1
uaaaaauaaccaaaa

SEQ ID NO: 123118 - RNA, 17 nt, Human herpesvirus 1
uaaacacacccagguau

SEQ ID NO: 123119 - RNA, 21 nt, Human herpesvirus 1
guuuauuaaaacggaaccaaa

SEQ ID NO: 123120 - RNA, 22 nt, Human herpesvirus 1
guuuauuaaaacggaaccaaac

SEQ ID NO: 123121 - RNA, 23 nt, Human herpesvirus 1
guuuuaaucaauaaaagaccaca

SEQ ID NO: 123122 - RNA, 16 nt, Human herpesvirus 1
guuuucuuugugccug

SEQ ID NO: 123123 - RNA, 21 nt, Human herpesvirus 1
guuucuuccuugccacucccc

SEQ ID NO: 123124 - RNA, 13 nt, Human herpesvirus 1
guuucuguguuca

SEQ ID NO: 123125 - RNA, 15 nt, Human herpesvirus 1
guuucuguguucaca

SEQ ID NO: 123126 - RNA, 11 nt, Human herpesvirus 1
guuuccuuugc

SEQ ID NO: 123127 - RNA, 11 nt, Human herpesvirus 1
guuucacugaa

SEQ ID NO: 123128 - RNA, 22 nt, Human herpesvirus 1
gcgaauucggcuuaucguccca

SEQ ID NO: 123129 - RNA, 23 nt, Human herpesvirus 1
gcgaccgucgccgcgggccacgc

SEQ ID NO: 123130 - RNA, 17 nt, Human herpesvirus 1
gcgaauaaaaaccaaaa

SEQ ID NO: 123131 - RNA, 23 nt, Human herpesvirus 1
gccuaauuguccgcgcauccgac

SEQ ID NO: 123132 - RNA, 21 nt, Human herpesvirus 1
gccgucgggcacguacacggg

SEQ ID NO: 123133 - RNA, 16 nt, Human herpesvirus 1
gccgucgggcguccca

SEQ ID NO: 123134 - RNA, 13 nt, Human herpesvirus 1
gccgggcgaccca

SEQ ID NO: 123135 - RNA, 14 nt, Human herpesvirus 1
gccgguauggggca

SEQ ID NO: 123136 - RNA, 17 nt, Human herpesvirus 1
gccuccccuccaggugc

SEQ ID NO: 123137 - RNA, 17 nt, Human herpesvirus 1
gccugaccgcggagaaa

SEQ ID NO: 123138 - RNA, 19 nt, Human herpesvirus 1
gccucgagggucacaggaa

SEQ ID NO: 123139 - RNA, 14 nt, Human herpesvirus 1
gcacguacacgggu

SEQ ID NO: 123140 - RNA, 21 nt, Human herpesvirus 1
gcacggcgucgcugugaugaa

SEQ ID NO: 123141 - RNA, 21 nt, Human herpesvirus 1
gccccuaucgcucgaccucuc

SEQ ID NO: 123142 - RNA, 20 nt, Human herpesvirus 1
gcccgaccgaauaaacugua

SEQ ID NO: 123143 - RNA, 16 nt, Human herpesvirus 1
gcccgggggacucacu

SEQ ID NO: 123144 - RNA, 16 nt, Human herpesvirus 1
gcccggcgaugugggu

SEQ ID NO: 123145 - RNA, 18 nt, Human herpesvirus 1
gcccggaacgaacccaaa

SEQ ID NO: 123146 - RNA, 23 nt, Human herpesvirus 1
gccccgggacaccccccaugcgg

SEQ ID NO: 123147 - RNA, 13 nt, Human herpesvirus 1
gccgaaacggcca

SEQ ID NO: 123148 - RNA, 18 nt, Human herpesvirus 1
gccgaaacggccaugcac

SEQ ID NO: 123149 - RNA, 23 nt, Human herpesvirus 1
gccgaaacggccaugcacaccag

SEQ ID NO: 123150 - RNA, 22 nt, Human herpesvirus 1
gccgccagcgcggcggggcccg

SEQ ID NO: 123151 - RNA, 15 nt, Human herpesvirus 1
gccgaugagccaccg

SEQ ID NO: 123152 - RNA, 15 nt, Human herpesvirus 1
gccgcuuuaucccac

SEQ ID NO: 123153 - RNA, 13 nt, Human herpesvirus 1
gcugcgacacucg

SEQ ID NO: 123154 - RNA, 22 nt, Human herpesvirus 1
gcugcgggguaaacguguuguu

SEQ ID NO: 123155 - RNA, 13 nt, Human herpesvirus 1
gcugcgugucaaa

SEQ ID NO: 123156 - RNA, 21 nt, Human herpesvirus 1
gcucgucgggguggcacagaa

SEQ ID NO: 123157 - RNA, 12 nt, Human herpesvirus 1
gcucgaccucuc

SEQ ID NO: 123158 - RNA, 13 nt, Human herpesvirus 1
gcucgaccucucc

SEQ ID NO: 123159 - RNA, 15 nt, Human herpesvirus 1
gcucccucagcaucc

SEQ ID NO: 123160 - RNA, 17 nt, Human herpesvirus 1
gcucaucgcgacccugu

SEQ ID NO: 123161 - RNA, 11 nt, Human herpesvirus 1
gcguaccaaac

SEQ ID NO: 123162 - RNA, 20 nt, Human herpesvirus 1
gcgguuuaccgccaccagca

SEQ ID NO: 123163 - RNA, 14 nt, Human herpesvirus 1
gcgucauaugcaaa

SEQ ID NO: 123164 - RNA, 22 nt, Human herpesvirus 1
gcgccacacucaccggcggacc

SEQ ID NO: 123165 - RNA, 12 nt, Human herpesvirus 1
gcgccuccgggg

SEQ ID NO: 123166 - RNA, 21 nt, Human herpesvirus 1
gcgccugccccgccacccagu

SEQ ID NO: 123167 - RNA, 15 nt, Human herpesvirus 1
gcgcgacggcggacc

SEQ ID NO: 123168 - RNA, 13 nt, Human herpesvirus 1
gcgcccucgccac

SEQ ID NO: 123169 - RNA, 18 nt, Human herpesvirus 1
gcgcccucuucugcgaga

SEQ ID NO: 123170 - RNA, 14 nt, Human herpesvirus 1
gcgccgccgacucc

SEQ ID NO: 123171 - RNA, 16 nt, Human herpesvirus 1
gcgagagcgcgggacc

SEQ ID NO: 123172 - RNA, 14 nt, Human herpesvirus 1
gcgaguuggcauug

SEQ ID NO: 123173 - RNA, 20 nt, Human herpesvirus 1
gcgagauggccgccccggug

SEQ ID NO: 123174 - RNA, 14 nt, Human herpesvirus 1
gcgauaucaggggc

SEQ ID NO: 123175 - RNA, 17 nt, Human herpesvirus 1
ggaaccaugaccucucg

SEQ ID NO: 123176 - RNA, 12 nt, Human herpesvirus 1
ggauaacaacca

SEQ ID NO: 123177 - RNA, 20 nt, Human herpesvirus 1
ggauuuggggcgcuccugau

SEQ ID NO: 123178 - RNA, 11 nt, Human herpesvirus 1
ggcauggcgca

SEQ ID NO: 123179 - RNA, 22 nt, Human herpesvirus 1
ggcaugcaccccagagguguuc

SEQ ID NO: 123180 - RNA, 13 nt, Human herpesvirus 1
ggcaccacgggua

SEQ ID NO: 123181 - RNA, 15 nt, Human herpesvirus 1
ggcacagaacagggc

SEQ ID NO: 123182 - RNA, 11 nt, Human herpesvirus 1
ggcauaugcaa

SEQ ID NO: 123183 - RNA, 12 nt, Human herpesvirus 1
ggcauaugcaaa

SEQ ID NO: 123184 - RNA, 13 nt, Human herpesvirus 1
ggcauaugcaaau

SEQ ID NO: 123185 - RNA, 18 nt, Human herpesvirus 1
ggcgcgaggggggguccg

SEQ ID NO: 123186 - RNA, 23 nt, Human herpesvirus 1
ggcgccauggcgggacugggcaa

SEQ ID NO: 123187 - RNA, 17 nt, Human herpesvirus 1
ggccaacacaacggacc

SEQ ID NO: 123188 - RNA, 21 nt, Human herpesvirus 1
ggccacgggcugcgugucaaa

SEQ ID NO: 123189 - RNA, 22 nt, Human herpesvirus 1
ggccacgaccgcagacagccag

SEQ ID NO: 123190 - RNA, 15 nt, Human herpesvirus 1
ggccagaaacccggg

SEQ ID NO: 123191 - RNA, 14 nt, Human herpesvirus 1
ggcuguuggugauu

SEQ ID NO: 123192 - RNA, 15 nt, Human herpesvirus 1
ggcgggacugggcaa

SEQ ID NO: 123193 - RNA, 16 nt, Human herpesvirus 1
ggcggagggugguucc

SEQ ID NO: 123194 - RNA, 13 nt, Human herpesvirus 1
ggcggcaggcgcc

SEQ ID NO: 123195 - RNA, 23 nt, Human herpesvirus 1
gggcaggcgccuccggggguccg

SEQ ID NO: 123196 - RNA, 15 nt, Human herpesvirus 1
gggcacgcggugagc

SEQ ID NO: 123197 - RNA, 18 nt, Human herpesvirus 1
gggcaccacacaccagcg

SEQ ID NO: 123198 - RNA, 20 nt, Human herpesvirus 1
gggcacccaaggggccgugc

SEQ ID NO: 123199 - RNA, 16 nt, Human herpesvirus 1
gggaucccacgucccc

SEQ ID NO: 123200 - RNA, 12 nt, Human herpesvirus 1
gggaggggccau

SEQ ID NO: 123201 - RNA, 16 nt, Human herpesvirus 1
gggagcgcucuugucu

SEQ ID NO: 123202 - RNA, 21 nt, Human herpesvirus 1
gggagcgcucuugucucaggg

SEQ ID NO: 123203 - RNA, 22 nt, Human herpesvirus 1
gggaagucacgagguacggggc

SEQ ID NO: 123204 - RNA, 11 nt, Human herpesvirus 1
gggaacccaga

SEQ ID NO: 123205 - RNA, 14 nt, Human herpesvirus 1
gggaaccggggcca

SEQ ID NO: 123206 - RNA, 22 nt, Human herpesvirus 1
ggucuuuuacacagacuguccg

SEQ ID NO: 123207 - RNA, 21 nt, Human herpesvirus 1
gguaccacaggugggugcuuu

SEQ ID NO: 123208 - RNA, 17 nt, Human herpesvirus 1
ggucccgugcaacccuu

SEQ ID NO: 123209 - RNA, 14 nt, Human herpesvirus 1
gguguuuggggguu

SEQ ID NO: 123210 - RNA, 13 nt, Human herpesvirus 1
gguuaaacacaaa

SEQ ID NO: 123211 - RNA, 18 nt, Human herpesvirus 1
gguuauaugcacuuccua

SEQ ID NO: 123212 - RNA, 14 nt, Human herpesvirus 1
ggugucccaggacu

SEQ ID NO: 123213 - RNA, 22 nt, Human herpesvirus 1
gggugugauagacccacaggca

SEQ ID NO: 123214 - RNA, 16 nt, Human herpesvirus 1
ggguggaucuuagccu

SEQ ID NO: 123215 - RNA, 15 nt, Human herpesvirus 1
gggugguacuggugc

SEQ ID NO: 123216 - RNA, 13 nt, Human herpesvirus 1
gguaauaccaaau

SEQ ID NO: 123217 - RNA, 19 nt, Human herpesvirus 1
gguaauuaaaaacuugcaa

SEQ ID NO: 123218 - RNA, 17 nt, Human herpesvirus 1
gggcugcgugucaaagg

SEQ ID NO: 123219 - RNA, 14 nt, Human herpesvirus 1
gggcugucauuccu

SEQ ID NO: 123220 - RNA, 22 nt, Human herpesvirus 1
gggcgcguuugcacaacacaaa

SEQ ID NO: 123221 - RNA, 14 nt, Human herpesvirus 1
gggcucagccagac

SEQ ID NO: 123222 - RNA, 12 nt, Human herpesvirus 1
ggggaggggcca

SEQ ID NO: 123223 - RNA, 15 nt, Human herpesvirus 1
gggcccgacagaccu

SEQ ID NO: 123224 - RNA, 22 nt, Human herpesvirus 1
gggccgcggaggcccccaucca

SEQ ID NO: 123225 - RNA, 18 nt, Human herpesvirus 1
gggccgugauuccucucc

SEQ ID NO: 123226 - RNA, 15 nt, Human herpesvirus 1
gguucgcgaacccuu

SEQ ID NO: 123227 - RNA, 12 nt, Human herpesvirus 1
guaauaccaaau

SEQ ID NO: 123228 - RNA, 19 nt, Human herpesvirus 1
guaaucauaaccacgccca

SEQ ID NO: 123229 - RNA, 15 nt, Human herpesvirus 1
guauaaggacaucca

SEQ ID NO: 123230 - RNA, 16 nt, Human herpesvirus 1
guauaaggacauccac

SEQ ID NO: 123231 - RNA, 14 nt, Human herpesvirus 1
guacuucuacaccu

SEQ ID NO: 123232 - RNA, 20 nt, Human herpesvirus 1
ccaguaacaugcgcacguga

SEQ ID NO: 123233 - RNA, 16 nt, Human herpesvirus 1
ccaggucuugccgugg

SEQ ID NO: 123234 - RNA, 23 nt, Human herpesvirus 1
ccaggucccccacaccaccuacu

SEQ ID NO: 123235 - RNA, 16 nt, Human herpesvirus 1
ccagguccguccagau

SEQ ID NO: 123236 - RNA, 13 nt, Human herpesvirus 1
ccaucccggguua

SEQ ID NO: 123237 - RNA, 13 nt, Human herpesvirus 1
ccaugaccucucg

SEQ ID NO: 123238 - RNA, 14 nt, Human herpesvirus 1
ccaugcacaccagc

SEQ ID NO: 123239 - RNA, 15 nt, Human herpesvirus 1
ccagagguguucacg

SEQ ID NO: 123240 - RNA, 13 nt, Human herpesvirus 1
ccagauguuuacu

SEQ ID NO: 123241 - RNA, 12 nt, Human herpesvirus 1
ccacacaccagc

SEQ ID NO: 123242 - RNA, 22 nt, Human herpesvirus 1
ccacagacacgguuacaguuua

SEQ ID NO: 123243 - RNA, 20 nt, Human herpesvirus 1
ccacagaaacaaaaccgggu

SEQ ID NO: 123244 - RNA, 19 nt, Human herpesvirus 1
cauuuauugacccaaaaca

SEQ ID NO: 123245 - RNA, 16 nt, Human herpesvirus 1
ccaacacgaccaagga

SEQ ID NO: 123246 - RNA, 14 nt, Human herpesvirus 1
caugggaugucuua

SEQ ID NO: 123247 - RNA, 16 nt, Human herpesvirus 1
cauggauaacaaccac

SEQ ID NO: 123248 - RNA, 17 nt, Human herpesvirus 1
caugcgcacgugaugua

SEQ ID NO: 123249 - RNA, 20 nt, Human herpesvirus 1
ccauuuacguggcuggguuu

SEQ ID NO: 123250 - RNA, 16 nt, Human herpesvirus 1
ccauggguugugguua

SEQ ID NO: 123251 - RNA, 14 nt, Human herpesvirus 1
cccaacuccagacc

SEQ ID NO: 123252 - RNA, 14 nt, Human herpesvirus 1
cccacccaccaaga

SEQ ID NO: 123253 - RNA, 21 nt, Human herpesvirus 1
cccacaggcauccaacauaaa

SEQ ID NO: 123254 - RNA, 14 nt, Human herpesvirus 1
cccacacacacaaa

SEQ ID NO: 123255 - RNA, 12 nt, Human herpesvirus 1
cccaaaacacac

SEQ ID NO: 123256 - RNA, 21 nt, Human herpesvirus 1
cccaaaacacacggagcugcu

SEQ ID NO: 123257 - RNA, 22 nt, Human herpesvirus 1
cccaaacucauccuccagacgc

SEQ ID NO: 123258 - RNA, 18 nt, Human herpesvirus 1
cccaacaugacccagacc

SEQ ID NO: 123259 - RNA, 11 nt, Human herpesvirus 1
cccaaagcccu

SEQ ID NO: 123260 - RNA, 21 nt, Human herpesvirus 1
cccagccuuuaacuacauuaa

SEQ ID NO: 123261 - RNA, 19 nt, Human herpesvirus 1
ccccagacgacaucagcug

SEQ ID NO: 123262 - RNA, 20 nt, Human herpesvirus 1
ccccacggucagucugguau

SEQ ID NO: 123263 - RNA, 16 nt, Human herpesvirus 1
ccccacgugaucagca

SEQ ID NO: 123264 - RNA, 13 nt, Human herpesvirus 1
ccccgccacccag

SEQ ID NO: 123265 - RNA, 13 nt, Human herpesvirus 1
cccccgucugggu

SEQ ID NO: 123266 - RNA, 20 nt, Human herpesvirus 1
cccccaacggugucauagau

SEQ ID NO: 123267 - RNA, 18 nt, Human herpesvirus 1
cccggaacgaacccaaag

SEQ ID NO: 123268 - RNA, 15 nt, Human herpesvirus 1
ccggcgggucccgac

SEQ ID NO: 123269 - RNA, 18 nt, Human herpesvirus 1
ccgggacaccccccaugc

SEQ ID NO: 123270 - RNA, 22 nt, Human herpesvirus 1
ccgggacuggguggcggggggu

SEQ ID NO: 123271 - RNA, 16 nt, Human herpesvirus 1
ccgggagcaccacaua

SEQ ID NO: 123272 - RNA, 17 nt, Human herpesvirus 1
ccgucgggcacguacac

SEQ ID NO: 123273 - RNA, 18 nt, Human herpesvirus 1
ccgucguuggucagggcg

SEQ ID NO: 123274 - RNA, 18 nt, Human herpesvirus 1
ccgugcccauuuacgugg

SEQ ID NO: 123275 - RNA, 16 nt, Human herpesvirus 1
ccggcaccaacaacga

SEQ ID NO: 123276 - RNA, 15 nt, Human herpesvirus 1
ccgcgcccucgccac

SEQ ID NO: 123277 - RNA, 18 nt, Human herpesvirus 1
ccggcccauugggcggga

SEQ ID NO: 123278 - RNA, 18 nt, Human herpesvirus 1
ccgccacccgaaccacca

SEQ ID NO: 123279 - RNA, 13 nt, Human herpesvirus 1
ccgcccaaugggc

SEQ ID NO: 123280 - RNA, 16 nt, Human herpesvirus 1
cccgggcacgcgguga

SEQ ID NO: 123281 - RNA, 23 nt, Human herpesvirus 1
ccgagaccccauugggaccaaua

SEQ ID NO: 123282 - RNA, 13 nt, Human herpesvirus 1
ccgcaacuuccca

SEQ ID NO: 123283 - RNA, 15 nt, Human herpesvirus 1
ccgagucuucggggc

SEQ ID NO: 123284 - RNA, 17 nt, Human herpesvirus 1
caggaaagaugcgauac

SEQ ID NO: 123285 - RNA, 16 nt, Human herpesvirus 1
caggaauaccagaaua

SEQ ID NO: 123286 - RNA, 23 nt, Human herpesvirus 1
cagacgagcgcgcuuguccccga

SEQ ID NO: 123287 - RNA, 15 nt, Human herpesvirus 1
cagacucaagcacac

SEQ ID NO: 123288 - RNA, 11 nt, Human herpesvirus 1
cagauagagcu

SEQ ID NO: 123289 - RNA, 12 nt, Human herpesvirus 1
cagauagagcug

SEQ ID NO: 123290 - RNA, 17 nt, Human herpesvirus 1
caccaacgccgauguau

SEQ ID NO: 123291 - RNA, 22 nt, Human herpesvirus 1
cacaugcgguuuaacacccgug

SEQ ID NO: 123292 - RNA, 14 nt, Human herpesvirus 1
caccacacaccagc

SEQ ID NO: 123293 - RNA, 16 nt, Human herpesvirus 1
caccacgccacaacag

SEQ ID NO: 123294 - RNA, 20 nt, Human herpesvirus 1
caccacgccacaacagcccu

SEQ ID NO: 123295 - RNA, 21 nt, Human herpesvirus 1
caguaacaugcgcacgugaug

SEQ ID NO: 123296 - RNA, 13 nt, Human herpesvirus 1
cagguaauaccaa

SEQ ID NO: 123297 - RNA, 14 nt, Human herpesvirus 1
cagguaauaccaaa

SEQ ID NO: 123298 - RNA, 22 nt, Human herpesvirus 1
caggucccccacaccaccuacu

SEQ ID NO: 123299 - RNA, 19 nt, Human herpesvirus 1
cagggccuccgaccccaga

SEQ ID NO: 123300 - RNA, 23 nt, Human herpesvirus 1
cagggccuggugcucgugggccu

SEQ ID NO: 123301 - RNA, 19 nt, Human herpesvirus 1
cauccccccuuuugcacua

SEQ ID NO: 123302 - RNA, 19 nt, Human herpesvirus 1
cauccaacauaaacaacua

SEQ ID NO: 123303 - RNA, 22 nt, Human herpesvirus 1
cauauauacgcuuggagccagc

SEQ ID NO: 123304 - RNA, 15 nt, Human herpesvirus 1
cauaccggacagaug

SEQ ID NO: 123305 - RNA, 19 nt, Human herpesvirus 1
caaauaaagccacugaaac

SEQ ID NO: 123306 - RNA, 16 nt, Human herpesvirus 1
caaauaagacccauug

SEQ ID NO: 123307 - RNA, 20 nt, Human herpesvirus 1
caaauacagcauggcgccac

SEQ ID NO: 123308 - RNA, 16 nt, Human herpesvirus 1
caaaauaauaaacaca

SEQ ID NO: 123309 - RNA, 15 nt, Human herpesvirus 1
caaaagaugcacaug

SEQ ID NO: 123310 - RNA, 15 nt, Human herpesvirus 1
caaaaggcguaccaa

SEQ ID NO: 123311 - RNA, 23 nt, Human herpesvirus 1
auuuuccggcagccguccagaca

SEQ ID NO: 123312 - RNA, 12 nt, Human herpesvirus 1
cacaaacagccc

SEQ ID NO: 123313 - RNA, 21 nt, Human herpesvirus 1
cacaacauccgcggcuucauc

SEQ ID NO: 123314 - RNA, 23 nt, Human herpesvirus 1
cacaaucgcgaccaccccaaaua

SEQ ID NO: 123315 - RNA, 21 nt, Human herpesvirus 1
caagacccgggcgaugagcca

SEQ ID NO: 123316 - RNA, 20 nt, Human herpesvirus 1
caagaaucccggccaagagg

SEQ ID NO: 123317 - RNA, 21 nt, Human herpesvirus 1
caacuucccacccggagcuuu

SEQ ID NO: 123318 - RNA, 21 nt, Human herpesvirus 1
caagagacgucgccccugugg

SEQ ID NO: 123319 - RNA, 20 nt, Human herpesvirus 1
caacggcgggagcuggguua

SEQ ID NO: 123320 - RNA, 17 nt, Human herpesvirus 1
caacccuuaccugcgca

SEQ ID NO: 123321 - RNA, 20 nt, Human herpesvirus 1
caacccacuggggucugggu

SEQ ID NO: 123322 - RNA, 16 nt, Human herpesvirus 1
caaccccaacuccaga

SEQ ID NO: 123323 - RNA, 21 nt, Human herpesvirus 1
caaccccgcccuacacuacac

SEQ ID NO: 123324 - RNA, 20 nt, Human herpesvirus 1
caacugcuccagaaaccugu

SEQ ID NO: 123325 - RNA, 16 nt, Human herpesvirus 1
caacuacacacaggaa

SEQ ID NO: 123326 - RNA, 17 nt, Human herpesvirus 1
auuaaaacggaaccaaa

SEQ ID NO: 123327 - RNA, 18 nt, Human herpesvirus 1
auuaaaacggaaccaaac

SEQ ID NO: 123328 - RNA, 22 nt, Human herpesvirus 1
auguuuuuauuggucaaacuca

SEQ ID NO: 123329 - RNA, 16 nt, Human herpesvirus 1
auggcgggacugggca

SEQ ID NO: 123330 - RNA, 16 nt, Human herpesvirus 1
auggcgucccaucugu

SEQ ID NO: 123331 - RNA, 17 nt, Human herpesvirus 1
aucuucggcgggugucu

SEQ ID NO: 123332 - RNA, 16 nt, Human herpesvirus 1
augagccgguagugca

SEQ ID NO: 123333 - RNA, 19 nt, Human herpesvirus 1
augcucuggggucccuguc

SEQ ID NO: 123334 - RNA, 20 nt, Human herpesvirus 1
augcaccccagagguguuca

SEQ ID NO: 123335 - RNA, 15 nt, Human herpesvirus 1
accgcgagaugucca

SEQ ID NO: 123336 - RNA, 20 nt, Human herpesvirus 1
accgcguguuccccgggagc

SEQ ID NO: 123337 - RNA, 12 nt, Human herpesvirus 1
accgaaccagcc

SEQ ID NO: 123338 - RNA, 15 nt, Human herpesvirus 1
accgcccaaugggcc

SEQ ID NO: 123339 - RNA, 19 nt, Human herpesvirus 1
accgccacaggaauaccag

SEQ ID NO: 123340 - RNA, 14 nt, Human herpesvirus 1
accacacaccagcg

SEQ ID NO: 123341 - RNA, 21 nt, Human herpesvirus 1
acccgaaacggccaacggacg

SEQ ID NO: 123342 - RNA, 19 nt, Human herpesvirus 1
acccgacgcgucauaugca

SEQ ID NO: 123343 - RNA, 20 nt, Human herpesvirus 1
acccgacgcgucauaugcaa

SEQ ID NO: 123344 - RNA, 15 nt, Human herpesvirus 1
acgcgccucccgggg

SEQ ID NO: 123345 - RNA, 12 nt, Human herpesvirus 1
acggcauaugca

SEQ ID NO: 123346 - RNA, 13 nt, Human herpesvirus 1
acggccaacggac

SEQ ID NO: 123347 - RNA, 15 nt, Human herpesvirus 1
acggccgaagccacg

SEQ ID NO: 123348 - RNA, 16 nt, Human herpesvirus 1
acgcgggccccgggga

SEQ ID NO: 123349 - RNA, 14 nt, Human herpesvirus 1
acgcgucauaugca

SEQ ID NO: 123350 - RNA, 21 nt, Human herpesvirus 1
acgagucggugcggacacuac

SEQ ID NO: 123351 - RNA, 12 nt, Human herpesvirus 1
acgcaaacaaca

SEQ ID NO: 123352 - RNA, 14 nt, Human herpesvirus 1
acgacaucuugucg

SEQ ID NO: 123353 - RNA, 17 nt, Human herpesvirus 1
acgacaucuugucguca

SEQ ID NO: 123354 - RNA, 13 nt, Human herpesvirus 1
acgagcgccagcg

SEQ ID NO: 123355 - RNA, 18 nt, Human herpesvirus 1
accugcgcucccucagca

SEQ ID NO: 123356 - RNA, 22 nt, Human herpesvirus 1
accugcggccaacacaacggac

SEQ ID NO: 123357 - RNA, 16 nt, Human herpesvirus 1
acgucuccaagcuuuc

SEQ ID NO: 123358 - RNA, 22 nt, Human herpesvirus 1
acgggggagcgcucuugucuca

SEQ ID NO: 123359 - RNA, 14 nt, Human herpesvirus 1
acggggucccgggc

SEQ ID NO: 123360 - RNA, 14 nt, Human herpesvirus 1
acggcgaccauaag

SEQ ID NO: 123361 - RNA, 22 nt, Human herpesvirus 1
acgggaucggacgccacacacc

SEQ ID NO: 123362 - RNA, 21 nt, Human herpesvirus 1
acuaacccaacguauaaaucc

SEQ ID NO: 123363 - RNA, 22 nt, Human herpesvirus 1
acuccccacccacccacucccc

SEQ ID NO: 123364 - RNA, 19 nt, Human herpesvirus 1
acucccgacaccaccagcu

SEQ ID NO: 123365 - RNA, 14 nt, Human herpesvirus 1
acuuaacacaccaa

SEQ ID NO: 123366 - RNA, 15 nt, Human herpesvirus 1
acuuaacacaccaaa

SEQ ID NO: 123367 - RNA, 16 nt, Human herpesvirus 1
aaugaaccagacccua

SEQ ID NO: 123368 - RNA, 15 nt, Human herpesvirus 1
aaugaggagcucguc

SEQ ID NO: 123369 - RNA, 22 nt, Human herpesvirus 1
acaaaccaccccguaccacccg

SEQ ID NO: 123370 - RNA, 20 nt, Human herpesvirus 1
acaaaaggcguaccaaacaa

SEQ ID NO: 123371 - RNA, 11 nt, Human herpesvirus 1
acaacaaaccc

SEQ ID NO: 123372 - RNA, 12 nt, Human herpesvirus 1
acaaugcaaaag

SEQ ID NO: 123373 - RNA, 16 nt, Human herpesvirus 1
acaauaaagcaccaac

SEQ ID NO: 123374 - RNA, 18 nt, Human herpesvirus 1
acaaccugauuaaguuuu

SEQ ID NO: 123375 - RNA, 16 nt, Human herpesvirus 1
acacaccccccaugcc

SEQ ID NO: 123376 - RNA, 22 nt, Human herpesvirus 1
acacacaaaaggcguaccaaac

SEQ ID NO: 123377 - RNA, 20 nt, Human herpesvirus 1
acacaaaaggcguaccaaac

SEQ ID NO: 123378 - RNA, 16 nt, Human herpesvirus 1
acacccccgugacuca

SEQ ID NO: 123379 - RNA, 16 nt, Human herpesvirus 1
acacccagguaugcua

SEQ ID NO: 123380 - RNA, 16 nt, Human herpesvirus 1
acaucgguguguccuu

SEQ ID NO: 123381 - RNA, 20 nt, Human herpesvirus 1
acaucccaugguaccaaaga

SEQ ID NO: 123382 - RNA, 23 nt, Human herpesvirus 1
acauccagguacccggcggcccg

SEQ ID NO: 123383 - RNA, 13 nt, Human herpesvirus 1
agcaaaacggacu

SEQ ID NO: 123384 - RNA, 22 nt, Human herpesvirus 1
agcaaacgccccgcccacacaa

SEQ ID NO: 123385 - RNA, 13 nt, Human herpesvirus 1
agcaaucagggac

SEQ ID NO: 123386 - RNA, 15 nt, Human herpesvirus 1
agcacaaacgugcuc

SEQ ID NO: 123387 - RNA, 22 nt, Human herpesvirus 1
agcacauccagguacccggcgg

SEQ ID NO: 123388 - RNA, 21 nt, Human herpesvirus 1
agagccguaacccaaccaaac

SEQ ID NO: 123389 - RNA, 10 nt, Human herpesvirus 1
agcauaccua

SEQ ID NO: 123390 - RNA, 20 nt, Human herpesvirus 1
agcauaccuggguguguuua

SEQ ID NO: 123391 - RNA, 16 nt, Human herpesvirus 1
agcauacgcucgggcc

SEQ ID NO: 123392 - RNA, 22 nt, Human herpesvirus 1
agcaugggacccacagaccgcc

SEQ ID NO: 123393 - RNA, 14 nt, Human herpesvirus 1
agccacaaaaugca

SEQ ID NO: 123394 - RNA, 17 nt, Human herpesvirus 1
agccacgcccacuuuau

SEQ ID NO: 123395 - RNA, 19 nt, Human herpesvirus 1
agcguccgggcgcuuggca

SEQ ID NO: 123396 - RNA, 15 nt, Human herpesvirus 1
agcuuuacaaugcaa

SEQ ID NO: 123397 - RNA, 16 nt, Human herpesvirus 1
agcuuuacaaugcaaa

SEQ ID NO: 123398 - RNA, 22 nt, Human herpesvirus 1
agcuuucuuccggccucgauga

SEQ ID NO: 123399 - RNA, 13 nt, Human herpesvirus 1
aggaagaccugcu

SEQ ID NO: 123400 - RNA, 13 nt, Human herpesvirus 1
aggaagccacaaa

SEQ ID NO: 123401 - RNA, 20 nt, Human herpesvirus 1
aggaagccacaaaaugcaaa

SEQ ID NO: 123402 - RNA, 20 nt, Human herpesvirus 1
aggaggugcugcgacacucg

SEQ ID NO: 123403 - RNA, 13 nt, Human herpesvirus 1
auaaggacaucca

SEQ ID NO: 123404 - RNA, 15 nt, Human herpesvirus 1
auaaugaccaccaca

SEQ ID NO: 123405 - RNA, 16 nt, Human herpesvirus 1
auaaugaccaccacaa

SEQ ID NO: 123406 - RNA, 16 nt, Human herpesvirus 1
aguuucgaagcgcuuu

SEQ ID NO: 123407 - RNA, 22 nt, Human herpesvirus 1
aguugggccgggcgacccagau

SEQ ID NO: 123408 - RNA, 20 nt, Human herpesvirus 1
aguuguccggggggauccaa

SEQ ID NO: 123409 - RNA, 20 nt, Human herpesvirus 1
auaaacauacgacacacagg

SEQ ID NO: 123410 - RNA, 23 nt, Human herpesvirus 1
auaaaccagguaauaccaaauaa

SEQ ID NO: 123411 - RNA, 11 nt, Human herpesvirus 1
auaaagccacu

SEQ ID NO: 123412 - RNA, 15 nt, Human herpesvirus 1
auaaagccacugaaa

SEQ ID NO: 123413 - RNA, 21 nt, Human herpesvirus 1
aguccacgggggggagcacaa

SEQ ID NO: 123414 - RNA, 22 nt, Human herpesvirus 1
aguccacgggggggagcacaag

SEQ ID NO: 123415 - RNA, 19 nt, Human herpesvirus 1
aguaccaccccccugugaa

SEQ ID NO: 123416 - RNA, 13 nt, Human herpesvirus 1
aggcggccggggc

SEQ ID NO: 123417 - RNA, 17 nt, Human herpesvirus 1
uggaccuugggccgucg

SEQ ID NO: 123418 - RNA, 20 nt, Human herpesvirus 1
uggacgaacacggggacggc

SEQ ID NO: 123419 - RNA, 21 nt, Human herpesvirus 1
ugcgguccggagccgcgcggc

SEQ ID NO: 123420 - RNA, 23 nt, Human herpesvirus 1
ucgcucucggugcgucugggccc

SEQ ID NO: 123421 - RNA, 22 nt, Human herpesvirus 1
ucggaaccaguucgcgcccgac

SEQ ID NO: 123422 - RNA, 16 nt, Human herpesvirus 1
ucggaaucuccgcguc

SEQ ID NO: 123423 - RNA, 13 nt, Human herpesvirus 1
ucgcggccgcgac

SEQ ID NO: 123424 - RNA, 15 nt, Human herpesvirus 1
ucgcggcuucgcggu

SEQ ID NO: 123425 - RNA, 23 nt, Human herpesvirus 1
ucgcggcuucgcgguggcggucc

SEQ ID NO: 123426 - RNA, 16 nt, Human herpesvirus 1
ucgcgguagcccggcc

SEQ ID NO: 123427 - RNA, 22 nt, Human herpesvirus 1
ucgcguguaauacuugcgcggc

SEQ ID NO: 123428 - RNA, 18 nt, Human herpesvirus 1
ucgcgauuuccgacgaac

SEQ ID NO: 123429 - RNA, 15 nt, Human herpesvirus 1
ucgccugcggcgacc

SEQ ID NO: 123430 - RNA, 13 nt, Human herpesvirus 1
ugggguccgggua

SEQ ID NO: 123431 - RNA, 13 nt, Human herpesvirus 1
uggguccgggccc

SEQ ID NO: 123432 - RNA, 16 nt, Human herpesvirus 1
uggguccgugccggac

SEQ ID NO: 123433 - RNA, 15 nt, Human herpesvirus 1
ugggcggccccggcc

SEQ ID NO: 123434 - RNA, 12 nt, Human herpesvirus 1
uggcuccgggcc

SEQ ID NO: 123435 - RNA, 13 nt, Human herpesvirus 1
uggcuggccgcuc

SEQ ID NO: 123436 - RNA, 15 nt, Human herpesvirus 1
uggacgcccgggcgc

SEQ ID NO: 123437 - RNA, 20 nt, Human herpesvirus 1
uggcccccggacccgggccg

SEQ ID NO: 123438 - RNA, 19 nt, Human herpesvirus 1
uggcgccgccugguccccc

SEQ ID NO: 123439 - RNA, 19 nt, Human herpesvirus 1
uauaaaggcgagagcgcgg

SEQ ID NO: 123440 - RNA, 13 nt, Human herpesvirus 1
uagcgcggccgug

SEQ ID NO: 123441 - RNA, 19 nt, Human herpesvirus 1
uaggaggugcugcgacacu

SEQ ID NO: 123442 - RNA, 14 nt, Human herpesvirus 1
uagccuccccgggc

SEQ ID NO: 123443 - RNA, 15 nt, Human herpesvirus 1
uagccuccccgggcc

SEQ ID NO: 123444 - RNA, 23 nt, Human herpesvirus 1
uaacaucaaacacgcgcgacggg

SEQ ID NO: 123445 - RNA, 20 nt, Human herpesvirus 1
uaaaaaaaaacucaggggau

SEQ ID NO: 123446 - RNA, 19 nt, Human herpesvirus 1
uaagcgucccugggcccug

SEQ ID NO: 123447 - RNA, 22 nt, Human herpesvirus 1
uaagcgucccugggcccuggcc

SEQ ID NO: 123448 - RNA, 23 nt, Human herpesvirus 1
ucaauaccgccgacgccgucgac

SEQ ID NO: 123449 - RNA, 19 nt, Human herpesvirus 1
ucacacagcaucccccgcc

SEQ ID NO: 123450 - RNA, 19 nt, Human herpesvirus 1
ucaccaugcagcgccggac

SEQ ID NO: 123451 - RNA, 21 nt, Human herpesvirus 1
ucaccccaaucccccccgacc

SEQ ID NO: 123452 - RNA, 19 nt, Human herpesvirus 1
ucaccccugucagccgcgc

SEQ ID NO: 123453 - RNA, 17 nt, Human herpesvirus 1
ucaccgguuuccgcgac

SEQ ID NO: 123454 - RNA, 23 nt, Human herpesvirus 1
ucaggcggcggcgcugacggacc

SEQ ID NO: 123455 - RNA, 14 nt, Human herpesvirus 1
ucauaaccacgccc

SEQ ID NO: 123456 - RNA, 14 nt, Human herpesvirus 1
ucgagcagccgcgc

SEQ ID NO: 123457 - RNA, 17 nt, Human herpesvirus 1
ucgccacacccgcgacc

SEQ ID NO: 123458 - RNA, 14 nt, Human herpesvirus 1
ucgccacgucgacc

SEQ ID NO: 123459 - RNA, 17 nt, Human herpesvirus 1
gugaucagcacgccacc

SEQ ID NO: 123460 - RNA, 13 nt, Human herpesvirus 1
guuauaggccacg

SEQ ID NO: 123461 - RNA, 20 nt, Human herpesvirus 1
guucggcgguugaguccgga

SEQ ID NO: 123462 - RNA, 19 nt, Human herpesvirus 1
guguaugucuggugugugg

SEQ ID NO: 123463 - RNA, 17 nt, Human herpesvirus 1
gugguccacucgggccg

SEQ ID NO: 123464 - RNA, 21 nt, Human herpesvirus 1
gucuccgaaagccaccaauag

SEQ ID NO: 123465 - RNA, 19 nt, Human herpesvirus 1
guccgcugugccaucgcgc

SEQ ID NO: 123466 - RNA, 20 nt, Human herpesvirus 1
gucgcaacgccgcaggggag

SEQ ID NO: 123467 - RNA, 15 nt, Human herpesvirus 1
gugccaucacggcca

SEQ ID NO: 123468 - RNA, 18 nt, Human herpesvirus 1
gugccccaaggagggcgc

SEQ ID NO: 123469 - RNA, 14 nt, Human herpesvirus 1
gucgggaggccaca

SEQ ID NO: 123470 - RNA, 19 nt, Human herpesvirus 1
gucccaucugugcggggag

SEQ ID NO: 123471 - RNA, 14 nt, Human herpesvirus 1
gguuuacgcgggca

SEQ ID NO: 123472 - RNA, 12 nt, Human herpesvirus 1
gguguccgcggu

SEQ ID NO: 123473 - RNA, 19 nt, Human herpesvirus 1
ggugucgccugcggcgacc

SEQ ID NO: 123474 - RNA, 16 nt, Human herpesvirus 1
ggugugggucgggucg

SEQ ID NO: 123475 - RNA, 19 nt, Human herpesvirus 1
gggagcggugacgaacgcg

SEQ ID NO: 123476 - RNA, 20 nt, Human herpesvirus 1
gggaggccgcaucgaacgca

SEQ ID NO: 123477 - RNA, 23 nt, Human herpesvirus 1
gggccccuugggagagccaugcg

SEQ ID NO: 123478 - RNA, 14 nt, Human herpesvirus 1
gggcccgcgucggg

SEQ ID NO: 123479 - RNA, 20 nt, Human herpesvirus 1
gggcccggcguacggccugg

SEQ ID NO: 123480 - RNA, 15 nt, Human herpesvirus 1
gggcccuggcgcggg

SEQ ID NO: 123481 - RNA, 16 nt, Human herpesvirus 1
gggccgccacgcgcgg

SEQ ID NO: 123482 - RNA, 14 nt, Human herpesvirus 1
ggugcugcgacacu

SEQ ID NO: 123483 - RNA, 16 nt, Human herpesvirus 1
gggaucggacgccaca

SEQ ID NO: 123484 - RNA, 17 nt, Human herpesvirus 1
ggcgguccugacggcca

SEQ ID NO: 123485 - RNA, 16 nt, Human herpesvirus 1
ggcguggucuagcgac

SEQ ID NO: 123486 - RNA, 18 nt, Human herpesvirus 1
gggcacccaacaacaccg

SEQ ID NO: 123487 - RNA, 20 nt, Human herpesvirus 1
gggcacccaaggggccgugc

SEQ ID NO: 123488 - RNA, 20 nt, Human herpesvirus 1
gggcacccacgcccgcgacc

SEQ ID NO: 123489 - RNA, 20 nt, Human herpesvirus 1
gggccaaccaagagacgucg

SEQ ID NO: 123490 - RNA, 20 nt, Human herpesvirus 1
gggcccacgaucaccgcggg

SEQ ID NO: 123491 - RNA, 18 nt, Human herpesvirus 1
ggcguuguggcggucggc

SEQ ID NO: 123492 - RNA, 17 nt, Human herpesvirus 1
ggcuccagucccggccc

SEQ ID NO: 123493 - RNA, 21 nt, Human herpesvirus 1
ggcucgauggcgggcgaggac

SEQ ID NO: 123494 - RNA, 14 nt, Human herpesvirus 1
ggcucgccagcgac

SEQ ID NO: 123495 - RNA, 21 nt, Human herpesvirus 1
ggcgcuacgaccggugcguug

SEQ ID NO: 123496 - RNA, 18 nt, Human herpesvirus 1
ggcgcucagggcggcgac

SEQ ID NO: 123497 - RNA, 16 nt, Human herpesvirus 1
ggcgcuccucgccgcc

SEQ ID NO: 123498 - RNA, 17 nt, Human herpesvirus 1
ggcagcgcuccgacgac

SEQ ID NO: 123499 - RNA, 22 nt, Human herpesvirus 1
ggcacccaaggggccgugcggg

SEQ ID NO: 123500 - RNA, 16 nt, Human herpesvirus 1
gcgccggacgcgcggc

SEQ ID NO: 123501 - RNA, 14 nt, Human herpesvirus 1
gcgccggugguucg

SEQ ID NO: 123502 - RNA, 15 nt, Human herpesvirus 1
gcgcgccgcgacacu

SEQ ID NO: 123503 - RNA, 16 nt, Human herpesvirus 1
gcgcggaugacggccc

SEQ ID NO: 123504 - RNA, 12 nt, Human herpesvirus 1
gcgcggccgugg

SEQ ID NO: 123505 - RNA, 12 nt, Human herpesvirus 1
ggaggacggcca

SEQ ID NO: 123506 - RNA, 21 nt, Human herpesvirus 1
ggagacgggcgguucgccgcc

SEQ ID NO: 123507 - RNA, 14 nt, Human herpesvirus 1
cauacccaaaccga

SEQ ID NO: 123508 - RNA, 18 nt, Human herpesvirus 1
cauaggaugaacaaacca

SEQ ID NO: 123509 - RNA, 13 nt, Human herpesvirus 1
caucccacccccc

SEQ ID NO: 123510 - RNA, 23 nt, Human herpesvirus 1
cgacaaacagggggaaaggggcg

SEQ ID NO: 123511 - RNA, 18 nt, Human herpesvirus 1
caggcgccuccggggguc

SEQ ID NO: 123512 - RNA, 17 nt, Human herpesvirus 1
caggccaaacgcgggcc

SEQ ID NO: 123513 - RNA, 13 nt, Human herpesvirus 1
caggcgacggcgu

SEQ ID NO: 123514 - RNA, 15 nt, Human herpesvirus 1
caggacuuccccuuc

SEQ ID NO: 123515 - RNA, 15 nt, Human herpesvirus 1
caggagacgggaccg

SEQ ID NO: 123516 - RNA, 22 nt, Human herpesvirus 1
caggcgcugucuccccggggcc

SEQ ID NO: 123517 - RNA, 14 nt, Human herpesvirus 1
cagggcgcccccgc

SEQ ID NO: 123518 - RNA, 16 nt, Human herpesvirus 1
cagggcgggccgccuc

SEQ ID NO: 123519 - RNA, 22 nt, Human herpesvirus 1
cagggcgggccgccucgggggc

SEQ ID NO: 123520 - RNA, 19 nt, Human herpesvirus 1
cgacacugaaaugcccccc

SEQ ID NO: 123521 - RNA, 13 nt, Human herpesvirus 1
cgaccaucacccg

SEQ ID NO: 123522 - RNA, 20 nt, Human herpesvirus 1
cgacccaccaauaaaauuau

SEQ ID NO: 123523 - RNA, 16 nt, Human herpesvirus 1
cgaccggguucccccg

SEQ ID NO: 123524 - RNA, 18 nt, Human herpesvirus 1
cgaccgucgccgcgggcc

SEQ ID NO: 123525 - RNA, 16 nt, Human herpesvirus 1
cgacgacggacggcca

SEQ ID NO: 123526 - RNA, 14 nt, Human herpesvirus 1
cgacggacggccac

SEQ ID NO: 123527 - RNA, 20 nt, Human herpesvirus 1
cgacgucaaagucgugggcg

SEQ ID NO: 123528 - RNA, 23 nt, Human herpesvirus 1
cgagggcgcuuggucgggaggcc

SEQ ID NO: 123529 - RNA, 19 nt, Human herpesvirus 1
cgaggggcgggagggggcg

SEQ ID NO: 123530 - RNA, 16 nt, Human herpesvirus 1
cgagagcgcgggaccg

SEQ ID NO: 123531 - RNA, 13 nt, Human herpesvirus 1
cgaucaccgcgac

SEQ ID NO: 123532 - RNA, 21 nt, Human herpesvirus 1
cgauucuuuuaucccacgcgu

SEQ ID NO: 123533 - RNA, 17 nt, Human herpesvirus 1
cgcaacuucccacccgg

SEQ ID NO: 123534 - RNA, 15 nt, Human herpesvirus 1
cgcaauugcggccac

SEQ ID NO: 123535 - RNA, 15 nt, Human herpesvirus 1
cgcaccgaggggcca

SEQ ID NO: 123536 - RNA, 16 nt, Human herpesvirus 1
cgcagaggcggccaga

SEQ ID NO: 123537 - RNA, 19 nt, Human herpesvirus 1
cgcaccaagccgcucuccg

SEQ ID NO: 123538 - RNA, 16 nt, Human herpesvirus 1
cgcagccuucucccgg

SEQ ID NO: 123539 - RNA, 22 nt, Human herpesvirus 1
cgcagcguccgguuggccgcgc

SEQ ID NO: 123540 - RNA, 19 nt, Human herpesvirus 1
cgcaggcgcugucuccccg

SEQ ID NO: 123541 - RNA, 20 nt, Human herpesvirus 1
cgcaguccacgggggggagc

SEQ ID NO: 123542 - RNA, 16 nt, Human herpesvirus 1
cgcauuggcucggacg

SEQ ID NO: 123543 - RNA, 14 nt, Human herpesvirus 1
cgccacaccacgcc

SEQ ID NO: 123544 - RNA, 19 nt, Human herpesvirus 1
cgccaccagcaucgcgcgc

SEQ ID NO: 123545 - RNA, 13 nt, Human herpesvirus 1
cgccagcgcggcg

SEQ ID NO: 123546 - RNA, 14 nt, Human herpesvirus 1
cgccagggcgcccc

SEQ ID NO: 123547 - RNA, 21 nt, Human herpesvirus 1
cgccagggcgcccccgcgcgg

SEQ ID NO: 123548 - RNA, 18 nt, Human herpesvirus 1
cgccagugcguuccggac

SEQ ID NO: 123549 - RNA, 14 nt, Human herpesvirus 1
cgccaucaaccccg

SEQ ID NO: 123550 - RNA, 20 nt, Human herpesvirus 1
cgcccaaugggccgggccgc

SEQ ID NO: 123551 - RNA, 16 nt, Human herpesvirus 1
cgcccaccgcugggcg

SEQ ID NO: 123552 - RNA, 21 nt, Human herpesvirus 1
cgcccagacgcccuccgagga

SEQ ID NO: 123553 - RNA, 21 nt, Human herpesvirus 1
cgccccaucccgaggccccac

SEQ ID NO: 123554 - RNA, 23 nt, Human herpesvirus 1
cgccccccaaaccauguccggca

SEQ ID NO: 123555 - RNA, 20 nt, Human herpesvirus 1
cgccccgaagagggggaccc

SEQ ID NO: 123556 - RNA, 14 nt, Human herpesvirus 1
cgcccgccccugcg

SEQ ID NO: 123557 - RNA, 15 nt, Human herpesvirus 1
cgcccgccccuggcg

SEQ ID NO: 123558 - RNA, 19 nt, Human herpesvirus 1
cgcccgccccuggcgcccc

SEQ ID NO: 123559 - RNA, 22 nt, Human herpesvirus 1
cgccucacggcagccccagcgc

SEQ ID NO: 123560 - RNA, 21 nt, Human herpesvirus 1
cgccggguagcguacggaccg

SEQ ID NO: 123561 - RNA, 16 nt, Human herpesvirus 1
cgccggacgcgcggcg

SEQ ID NO: 123562 - RNA, 13 nt, Human herpesvirus 1
cgccggggaccgc

SEQ ID NO: 123563 - RNA, 20 nt, Human herpesvirus 1
cgccucccggggggucggca

SEQ ID NO: 123564 - RNA, 13 nt, Human herpesvirus 1
cgccucgggggcg

SEQ ID NO: 123565 - RNA, 16 nt, Human herpesvirus 1
cgccucggucacccca

SEQ ID NO: 123566 - RNA, 22 nt, Human herpesvirus 1
cgccugcguucaucggaccccc

SEQ ID NO: 123567 - RNA, 19 nt, Human herpesvirus 1
cgccgcugacccccaccgc

SEQ ID NO: 123568 - RNA, 16 nt, Human herpesvirus 1
cgccgccugguccccc

SEQ ID NO: 123569 - RNA, 16 nt, Human herpesvirus 1
cgccgcgagauggccg

SEQ ID NO: 123570 - RNA, 19 nt, Human herpesvirus 1
cgccgcgagauggccgccc

SEQ ID NO: 123571 - RNA, 15 nt, Human herpesvirus 1
cgccgcgccccgccg

SEQ ID NO: 123572 - RNA, 18 nt, Human herpesvirus 1
cgccgcgccccgccggcg

SEQ ID NO: 123573 - RNA, 16 nt, Human herpesvirus 1
cgcccggguccccgcg

SEQ ID NO: 123574 - RNA, 17 nt, Human herpesvirus 1
cgcccggguccccgcgg

SEQ ID NO: 123575 - RNA, 22 nt, Human herpesvirus 1
cgcccgucuuuaaccucccccg

SEQ ID NO: 123576 - RNA, 21 nt, Human herpesvirus 1
cgcccucacagggcgggccgc

SEQ ID NO: 123577 - RNA, 13 nt, Human herpesvirus 1
cgccgacucccgg

SEQ ID NO: 123578 - RNA, 18 nt, Human herpesvirus 1
cgccuggggucgcggccg

SEQ ID NO: 123579 - RNA, 23 nt, Human herpesvirus 1
cgccuugcggcagcgcuccgacg

SEQ ID NO: 123580 - RNA, 14 nt, Human herpesvirus 1
cgcgacccaggcgg

SEQ ID NO: 123581 - RNA, 20 nt, Human herpesvirus 1
cgcgaccccauggccgcucc

SEQ ID NO: 123582 - RNA, 15 nt, Human herpesvirus 1
cgcgaccaccccaaa

SEQ ID NO: 123583 - RNA, 12 nt, Human herpesvirus 1
cgcgauccggcc

SEQ ID NO: 123584 - RNA, 17 nt, Human herpesvirus 1
cgcgagauggccgcccc

SEQ ID NO: 123585 - RNA, 22 nt, Human herpesvirus 1
cgcgcauccgucgggaggccac

SEQ ID NO: 123586 - RNA, 16 nt, Human herpesvirus 1
cgcgccaggcccgccg

SEQ ID NO: 123587 - RNA, 15 nt, Human herpesvirus 1
cgcgccccgccggcg

SEQ ID NO: 123588 - RNA, 16 nt, Human herpesvirus 1
cgcgccguuggccccc

SEQ ID NO: 123589 - RNA, 18 nt, Human herpesvirus 1
cgcgccguuggcccccgc

SEQ ID NO: 123590 - RNA, 19 nt, Human herpesvirus 1
cgcgccguuggcccccgcc

SEQ ID NO: 123591 - RNA, 20 nt, Human herpesvirus 1
cgcgcgauagagucgacgac

SEQ ID NO: 123592 - RNA, 14 nt, Human herpesvirus 1
cgcgcgggccguac

SEQ ID NO: 123593 - RNA, 13 nt, Human herpesvirus 1
cgcgcgucccccg

SEQ ID NO: 123594 - RNA, 14 nt, Human herpesvirus 1
cgcgcgucgacguc

SEQ ID NO: 123595 - RNA, 12 nt, Human herpesvirus 1
cgcgcuccuccc

SEQ ID NO: 123596 - RNA, 17 nt, Human herpesvirus 1
cgcggagggcggccagc

SEQ ID NO: 123597 - RNA, 20 nt, Human herpesvirus 1
cgcggcauaacuccgaccgg

SEQ ID NO: 123598 - RNA, 16 nt, Human herpesvirus 1
cgcggcgacaacgcgg

SEQ ID NO: 123599 - RNA, 23 nt, Human herpesvirus 1
cgcucuugggguugacgcugggg

SEQ ID NO: 123600 - RNA, 20 nt, Human herpesvirus 1
cgcugcuccgccuggccugc

SEQ ID NO: 123601 - RNA, 17 nt, Human herpesvirus 1
cgcugugccaucgcgcc

SEQ ID NO: 123602 - RNA, 13 nt, Human herpesvirus 1
cggaggacggcca

SEQ ID NO: 123603 - RNA, 15 nt, Human herpesvirus 1
cggaggacggccagg

SEQ ID NO: 123604 - RNA, 17 nt, Human herpesvirus 1
cggcugcuauccccggg

SEQ ID NO: 123605 - RNA, 17 nt, Human herpesvirus 1
cggcuggccgcgcccgc

SEQ ID NO: 123606 - RNA, 11 nt, Human herpesvirus 1
cgggagggcgu

SEQ ID NO: 123607 - RNA, 20 nt, Human herpesvirus 1
cugccauggauuccgcggcc

SEQ ID NO: 123608 - RNA, 20 nt, Human herpesvirus 1
cugccugacccucuccggga

SEQ ID NO: 123609 - RNA, 23 nt, Human herpesvirus 1
cucuaucccgcccaccgcugggc

SEQ ID NO: 123610 - RNA, 15 nt, Human herpesvirus 1
cugaagccguccgac

SEQ ID NO: 123611 - RNA, 15 nt, Human herpesvirus 1
cugcgcggcgcccgc

SEQ ID NO: 123612 - RNA, 18 nt, Human herpesvirus 1
cugcggacaugcgcccgc

SEQ ID NO: 123613 - RNA, 22 nt, Human herpesvirus 1
cugcggacaugcgcccgcggcc

SEQ ID NO: 123614 - RNA, 12 nt, Human herpesvirus 1
cugcggccggcg

SEQ ID NO: 123615 - RNA, 16 nt, Human herpesvirus 1
cucggcuccccgccgc

SEQ ID NO: 123616 - RNA, 18 nt, Human herpesvirus 1
cucgugcccucgcgggcc

SEQ ID NO: 123617 - RNA, 14 nt, Human herpesvirus 1
cgggggcccugcca

SEQ ID NO: 123618 - RNA, 15 nt, Human herpesvirus 1
cggggaccuugcccc

SEQ ID NO: 123619 - RNA, 19 nt, Human herpesvirus 1
cggggaccuugccccggcc

SEQ ID NO: 123620 - RNA, 22 nt, Human herpesvirus 1
cgggcuacccucacuaucgagg

SEQ ID NO: 123621 - RNA, 18 nt, Human herpesvirus 1
cggggcagagccgcccgu

SEQ ID NO: 123622 - RNA, 22 nt, Human herpesvirus 1
cggggcggggccuuggcggccg

SEQ ID NO: 123623 - RNA, 22 nt, Human herpesvirus 1
cggggcggggguguccgggggc

SEQ ID NO: 123624 - RNA, 17 nt, Human herpesvirus 1
cgggauccucggccagc

SEQ ID NO: 123625 - RNA, 21 nt, Human herpesvirus 1
cgggccacgccacccugcgcg

SEQ ID NO: 123626 - RNA, 17 nt, Human herpesvirus 1
cgggccgccucgggggc

SEQ ID NO: 123627 - RNA, 21 nt, Human herpesvirus 1
cgggccgugauuccucuccgc

SEQ ID NO: 123628 - RNA, 19 nt, Human herpesvirus 1
gacggccagggacgggucg

SEQ ID NO: 123629 - RNA, 23 nt, Human herpesvirus 1
gacggaccuuggucuggcccacg

SEQ ID NO: 123630 - RNA, 22 nt, Human herpesvirus 1
gacucaagcacacacgggggag

SEQ ID NO: 123631 - RNA, 15 nt, Human herpesvirus 1
gacgacggacggcca

SEQ ID NO: 123632 - RNA, 22 nt, Human herpesvirus 1
cugcguuuuuuugcgccggccc

SEQ ID NO: 123633 - RNA, 18 nt, Human herpesvirus 1
cuggccaaucggcggccg

SEQ ID NO: 123634 - RNA, 23 nt, Human herpesvirus 1
cuggcgcccccccaacgggggac

SEQ ID NO: 123635 - RNA, 14 nt, Human herpesvirus 1
gacauccaccaccc

SEQ ID NO: 123636 - RNA, 16 nt, Human herpesvirus 1
gacaugaccgcccgcc

SEQ ID NO: 123637 - RNA, 14 nt, Human herpesvirus 1
gacagggccgugcc

SEQ ID NO: 123638 - RNA, 15 nt, Human herpesvirus 1
gaccagcgcacugcc

SEQ ID NO: 123639 - RNA, 14 nt, Human herpesvirus 1
gacccaccgggccc

SEQ ID NO: 123640 - RNA, 20 nt, Human herpesvirus 1
gaccccauugggaccaauac

SEQ ID NO: 123641 - RNA, 12 nt, Human herpesvirus 1
gacccucuccgg

SEQ ID NO: 123642 - RNA, 17 nt, Human herpesvirus 1
gacccgcgggguucugg

SEQ ID NO: 123643 - RNA, 23 nt, Human herpesvirus 1
gacccuaggaggccgccacgcgc

SEQ ID NO: 123644 - RNA, 15 nt, Human herpesvirus 1
gaccgcgcccucgcc

SEQ ID NO: 123645 - RNA, 23 nt, Human herpesvirus 1
gaccggauggaggagccccugcc

SEQ ID NO: 123646 - RNA, 15 nt, Human herpesvirus 1
gaucccucgcgaggg

SEQ ID NO: 123647 - RNA, 15 nt, Human herpesvirus 1
gauccgcggcgacaa

SEQ ID NO: 123648 - RNA, 15 nt, Human herpesvirus 1
gaggucuccgucacc

SEQ ID NO: 123649 - RNA, 22 nt, Human herpesvirus 1
gagguggacgucggagacgagc

SEQ ID NO: 123650 - RNA, 20 nt, Human herpesvirus 1
gauagacccacaggcaucca

SEQ ID NO: 123651 - RNA, 22 nt, Human herpesvirus 1
gcagcugggaccccggcggccc

SEQ ID NO: 123652 - RNA, 13 nt, Human herpesvirus 1
gcaugcgcgggcu

SEQ ID NO: 123653 - RNA, 19 nt, Human herpesvirus 1
gaugccgugccgcccguug

SEQ ID NO: 123654 - RNA, 17 nt, Human herpesvirus 1
gcagacgcugcuccgcc

SEQ ID NO: 123655 - RNA, 23 nt, Human herpesvirus 1
gcagcguccgguuggccgcgcgg

SEQ ID NO: 123656 - RNA, 16 nt, Human herpesvirus 1
gcgacagcgcgaugag

SEQ ID NO: 123657 - RNA, 22 nt, Human herpesvirus 1
gcgcauuuaaggcguuguugug

SEQ ID NO: 123658 - RNA, 21 nt, Human herpesvirus 1
gcgccacgguggugcaguucg

SEQ ID NO: 123659 - RNA, 21 nt, Human herpesvirus 1
gcgccaggucggcgaccgcca

SEQ ID NO: 123660 - RNA, 13 nt, Human herpesvirus 1
gcgcccgcggcca

SEQ ID NO: 123661 - RNA, 24 nt, Human herpesvirus 1
gccggugguccgccuagccgcagc

SEQ ID NO: 123662 - RNA, 16 nt, Human herpesvirus 1
gccguucugucgggcg

SEQ ID NO: 123663 - RNA, 17 nt, Human herpesvirus 1
gccuauguucgcgggcg

SEQ ID NO: 123664 - RNA, 20 nt, Human herpesvirus 1
gccucugugucagguggccc

SEQ ID NO: 123665 - RNA, 19 nt, Human herpesvirus 1
gccaauccgugucggggag

SEQ ID NO: 123666 - RNA, 22 nt, Human herpesvirus 1
gccagcgcggcggggcccggcc

SEQ ID NO: 123667 - RNA, 19 nt, Human herpesvirus 1
gccagcguaaccuccgggg

SEQ ID NO: 123668 - RNA, 18 nt, Human herpesvirus 1
gccaggucggcgaccgcc

SEQ ID NO: 123669 - RNA, 19 nt, Human herpesvirus 1
gccaggucggcgaccgcca

SEQ ID NO: 123670 - RNA, 16 nt, Human herpesvirus 1
gccaggaccgccugcc

SEQ ID NO: 123671 - RNA, 16 nt, Human herpesvirus 1
gccaguccgcugcacc

SEQ ID NO: 123672 - RNA, 18 nt, Human herpesvirus 1
gcccaaugggccgggccg

SEQ ID NO: 123673 - RNA, 17 nt, Human herpesvirus 1
gcccacccccacccccc

SEQ ID NO: 123674 - RNA, 15 nt, Human herpesvirus 1
gcccagacgcccucc

SEQ ID NO: 123675 - RNA, 20 nt, Human herpesvirus 1
gcccagcgcagaggcggcca

SEQ ID NO: 123676 - RNA, 22 nt, Human herpesvirus 1
gccccgaacccugcgguccgga

SEQ ID NO: 123677 - RNA, 18 nt, Human herpesvirus 1
gccccgaagagggggacc

SEQ ID NO: 123678 - RNA, 20 nt, Human herpesvirus 1
gccccgauggcccuggacgc

SEQ ID NO: 123679 - RNA, 16 nt, Human herpesvirus 1
gccccgccggcgacaa

SEQ ID NO: 123680 - RNA, 18 nt, Human herpesvirus 1
gcccgcgggaggccgccc

SEQ ID NO: 123681 - RNA, 15 nt, Human herpesvirus 1
gcccgcguaaccccg

SEQ ID NO: 123682 - RNA, 22 nt, Human herpesvirus 1
gccggcguuucugaccugcacc

SEQ ID NO: 123683 - RNA, 15 nt, Human herpesvirus 1
auuggcaauguuguc

SEQ ID NO: 123684 - RNA, 12 nt, Human herpesvirus 1
auugggcgggag

SEQ ID NO: 123685 - RNA, 21 nt, Human herpesvirus 1
caaagcugugggcuaaauacc

SEQ ID NO: 123686 - RNA, 13 nt, Human herpesvirus 1
augcccgggaccc

SEQ ID NO: 123687 - RNA, 16 nt, Human herpesvirus 1
augccgcggccauggu

SEQ ID NO: 123688 - RNA, 19 nt, Human herpesvirus 1
auggaguccacgguaggcc

SEQ ID NO: 123689 - RNA, 17 nt, Human herpesvirus 1
augggcggccccggccg

SEQ ID NO: 123690 - RNA, 15 nt, Human herpesvirus 1
augucgcgcgggccg

SEQ ID NO: 123691 - RNA, 21 nt, Human herpesvirus 1
auuauguuacgcccacccccg

SEQ ID NO: 123692 - RNA, 16 nt, Human herpesvirus 1
auucgaggggcgggag

SEQ ID NO: 123693 - RNA, 19 nt, Human herpesvirus 1
agcuuggucaggagggcgc

SEQ ID NO: 123694 - RNA, 20 nt, Human herpesvirus 1
agcugcucgagaugggccag

SEQ ID NO: 123695 - RNA, 15 nt, Human herpesvirus 1
agcguauccaccccc

SEQ ID NO: 123696 - RNA, 16 nt, Human herpesvirus 1
agcucgcggagggcgg

SEQ ID NO: 123697 - RNA, 20 nt, Human herpesvirus 1
auagcgaauaaaaaccaaaa

SEQ ID NO: 123698 - RNA, 22 nt, Human herpesvirus 1
aucgcgggcgccauggcgggac

SEQ ID NO: 123699 - RNA, 23 nt, Human herpesvirus 1
cagcccccccaagcgcccccgcc

SEQ ID NO: 123700 - RNA, 12 nt, Human herpesvirus 1
cagcgccgccgc

SEQ ID NO: 123701 - RNA, 19 nt, Human herpesvirus 1
cacgcgcguccuucuuguc

SEQ ID NO: 123702 - RNA, 20 nt, Human herpesvirus 1
cagcgcggcggggcccggcc

SEQ ID NO: 123703 - RNA, 19 nt, Human herpesvirus 1
cagcguauccacccccgcc

SEQ ID NO: 123704 - RNA, 22 nt, Human herpesvirus 1
caagagguccuggaggggggcg

SEQ ID NO: 123705 - RNA, 13 nt, Human herpesvirus 1
caccgggccgugu

SEQ ID NO: 123706 - RNA, 16 nt, Human herpesvirus 1
caccggugcgcccccc

SEQ ID NO: 123707 - RNA, 11 nt, Human herpesvirus 1
caacaaacccc

SEQ ID NO: 123708 - RNA, 19 nt, Human herpesvirus 1
caaacucguucguaaacac

SEQ ID NO: 123709 - RNA, 16 nt, Human herpesvirus 1
caaccccagggaccuc

SEQ ID NO: 123710 - RNA, 19 nt, Human herpesvirus 1
caccgauagcguccgggcg

SEQ ID NO: 123711 - RNA, 17 nt, Human herpesvirus 1
cacgauggaacgcgggg

SEQ ID NO: 123712 - RNA, 14 nt, Human herpesvirus 1
cacgcacgccgccc

SEQ ID NO: 123713 - RNA, 20 nt, Human herpesvirus 1
cacgcacgccgcccccaaca

SEQ ID NO: 123714 - RNA, 20 nt, Human herpesvirus 1
cacgccuggggucgcggccg

SEQ ID NO: 123715 - RNA, 21 nt, Human herpesvirus 1
cacgccuggggucgcggccgc

SEQ ID NO: 123716 - RNA, 13 nt, Human herpesvirus 1
cacgcgccgccga

SEQ ID NO: 123717 - RNA, 17 nt, Human herpesvirus 1
aaagccccgggccgcgu

SEQ ID NO: 123718 - RNA, 20 nt, Human herpesvirus 1
accgccccccccccgucacc

SEQ ID NO: 123719 - RNA, 14 nt, Human herpesvirus 1
aaacggaaccaaac

SEQ ID NO: 123720 - RNA, 20 nt, Human herpesvirus 1
aaacggccgaagccacgccc

SEQ ID NO: 123721 - RNA, 20 nt, Human herpesvirus 1
aaacgucagacgagcgcgcu

SEQ ID NO: 123722 - RNA, 20 nt, Human herpesvirus 1
accuagggaacccagaguac

SEQ ID NO: 123723 - RNA, 17 nt, Human herpesvirus 1
accgcgguucgcguccc

SEQ ID NO: 123724 - RNA, 17 nt, Human herpesvirus 1
accgcguguuccccggg

SEQ ID NO: 123725 - RNA, 17 nt, Human herpesvirus 1
accggacucacggccgg

SEQ ID NO: 123726 - RNA, 21 nt, Human herpesvirus 1
acgacccucgagauccccggg

SEQ ID NO: 123727 - RNA, 15 nt, Human herpesvirus 1
acgaccgccccggcg

SEQ ID NO: 123728 - RNA, 14 nt, Human herpesvirus 1
accuugccccggcc

SEQ ID NO: 123729 - RNA, 14 nt, Human herpesvirus 1
acgcacgccgcccc

SEQ ID NO: 123730 - RNA, 18 nt, Human herpesvirus 1
acugggcgaccgccggcg

SEQ ID NO: 123731 - RNA, 22 nt, Human herpesvirus 1
acuagccaggagacgggaccgc

SEQ ID NO: 123732 - RNA, 16 nt, Human herpesvirus 1
agcgcgccgcgacacu

SEQ ID NO: 123733 - RNA, 13 nt, Human herpesvirus 1
agcgcgggaccgu

SEQ ID NO: 123734 - RNA, 16 nt, Human herpesvirus 1
acgcacccccccaacg

SEQ ID NO: 123735 - RNA, 20 nt, Human herpesvirus 1
acgcccacuuuauucgcguc

SEQ ID NO: 123736 - RNA, 23 nt, Human herpesvirus 1
acgccggguagcguacggaccgc

SEQ ID NO: 123737 - RNA, 15 nt, Human herpesvirus 1
acgcgaccccauggc

SEQ ID NO: 123738 - RNA, 16 nt, Human herpesvirus 1
acgcgaccgucgccgc

SEQ ID NO: 123739 - RNA, 16 nt, Human herpesvirus 1
acgccuucgccccaca

SEQ ID NO: 123740 - RNA, 19 nt, Human herpesvirus 1
acgcgguauggcugccccc

SEQ ID NO: 123741 - RNA, 14 nt, Human herpesvirus 1
acgcgggccccggg

SEQ ID NO: 123742 - RNA, 17 nt, Human herpesvirus 1
acgcugcuccgccuggc

SEQ ID NO: 123743 - RNA, 22 nt, Human herpesvirus 1
uuucggugucuaacgguccuca

SEQ ID NO: 123744 - RNA, 20 nt, Human herpesvirus 1
uucagggcgacgccgugggc

SEQ ID NO: 123745 - RNA, 13 nt, Human herpesvirus 1
uguugggcgggac

SEQ ID NO: 123746 - RNA, 23 nt, Human herpesvirus 1
uguccccgccgacaagccgcgau

SEQ ID NO: 123747 - RNA, 22 nt, Human herpesvirus 1
uguagggccgcggaggccccca

SEQ ID NO: 123748 - RNA, 15 nt, Human herpesvirus 1
ugcgcgagcaccugc

SEQ ID NO: 123749 - RNA, 16 nt, Human herpesvirus 1
ugccuccaccgggccc

SEQ ID NO: 123750 - RNA, 20 nt, Human herpesvirus 1
ugcccgcggaccaccgggcc

SEQ ID NO: 123751 - RNA, 20 nt, Human herpesvirus 1
ugcccgacagggccgugccc

SEQ ID NO: 123752 - RNA, 18 nt, Human herpesvirus 1
ugcacagccuggccgugc

SEQ ID NO: 123753 - RNA, 21 nt, Human herpesvirus 1
ugcacccccgacgaggugcgc

SEQ ID NO: 123754 - RNA, 20 nt, Human herpesvirus 1
ugacccuaggaggccgccac

SEQ ID NO: 123755 - RNA, 19 nt, Human herpesvirus 1
ugagggcuuuggguccaca

SEQ ID NO: 123756 - RNA, 19 nt, Human herpesvirus 1
ugauaaugaucaagcggcg

SEQ ID NO: 123757 - RNA, 18 nt, Human herpesvirus 1
ugaucagacgagccgcgc

SEQ ID NO: 123758 - RNA, 14 nt, Human herpesvirus 1
ugauccgcggcgac

SEQ ID NO: 123759 - RNA, 19 nt, Human herpesvirus 1
ugauugugucgcagggcgg

SEQ ID NO: 123760 - RNA, 16 nt, Human herpesvirus 1
ugaaaaucgguccccc

SEQ ID NO: 123761 - RNA, 16 nt, Human herpesvirus 1
ucuccgucaccgcgac

SEQ ID NO: 123762 - RNA, 14 nt, Human herpesvirus 1
ucugaucgacgacg

SEQ ID NO: 123763 - RNA, 12 nt, Human herpesvirus 1
ucuccgcccgac

SEQ ID NO: 123764 - RNA, 19 nt, Human herpesvirus 1
ucgggcauggccccggggc

SEQ ID NO: 123765 - RNA, 23 nt, Human herpesvirus 1
ucggggcggggguguccgggggc

SEQ ID NO: 123766 - RNA, 20 nt, Human herpesvirus 1
ucggugcgucugggcccgac

SEQ ID NO: 123767 - RNA, 15 nt, Human herpesvirus 1
ucggguuggccaaga

SEQ ID NO: 123768 - RNA, 14 nt, Human herpesvirus 1
ucguccccuggggc

SEQ ID NO: 123769 - RNA, 21 nt, Human herpesvirus 1
uccccgcgcaugcucuggggu

SEQ ID NO: 123770 - RNA, 17 nt, Human herpesvirus 1
uccccggaggacggcca

SEQ ID NO: 123771 - RNA, 19 nt, Human herpesvirus 1
uccggcaauucccgcggcc

SEQ ID NO: 123772 - RNA, 21 nt, Human herpesvirus 1
uccggcgccgcccgccccugg

SEQ ID NO: 123773 - RNA, 15 nt, Human herpesvirus 1
uccguggccccggcc

SEQ ID NO: 123774 - RNA, 15 nt, Human herpesvirus 1
ucgacgaccugggga

SEQ ID NO: 123775 - RNA, 13 nt, Human herpesvirus 1
ucgacgacggacg

SEQ ID NO: 123776 - RNA, 19 nt, Human herpesvirus 1
ucgacucuaucgcgcgcau

SEQ ID NO: 123777 - RNA, 19 nt, Human herpesvirus 1
ucggccaacacgaccaagg

SEQ ID NO: 123778 - RNA, 19 nt, Human herpesvirus 1
ucggccgccgacgaccugg

SEQ ID NO: 123779 - RNA, 20 nt, Human herpesvirus 1
ggugauguugcccgcggacc

SEQ ID NO: 123780 - RNA, 17 nt, Human herpesvirus 1
uccaggcugucgacgcc

SEQ ID NO: 123781 - RNA, 19 nt, Human herpesvirus 1
ggucguuaugucgcgcggg

SEQ ID NO: 123782 - RNA, 20 nt, Human herpesvirus 1
ucccccggcacgccuggggu

SEQ ID NO: 123783 - RNA, 16 nt, Human herpesvirus 1
uccgagggccgggccc

SEQ ID NO: 123784 - RNA, 15 nt, Human herpesvirus 1
ggucccaccugacgc

SEQ ID NO: 123785 - RNA, 14 nt, Human herpesvirus 1
gguccaaacucccg

SEQ ID NO: 123786 - RNA, 16 nt, Human herpesvirus 1
ggggucaggucugcgg

SEQ ID NO: 123787 - RNA, 20 nt, Human herpesvirus 1
gggucagcuccucgcgcggc

SEQ ID NO: 123788 - RNA, 19 nt, Human herpesvirus 1
gggucgcggccgcgaccca

SEQ ID NO: 123789 - RNA, 22 nt, Human herpesvirus 1
ggccgccagcgcggcggggccc

SEQ ID NO: 123790 - RNA, 17 nt, Human herpesvirus 1
ggccgcgcggcaacaca

SEQ ID NO: 123791 - RNA, 14 nt, Human herpesvirus 1
ggccgcucgguggc

SEQ ID NO: 123792 - RNA, 23 nt, Human herpesvirus 1
ggcgaaccccuuaaccgcccacc

SEQ ID NO: 123793 - RNA, 15 nt, Human herpesvirus 1
ggcgacaacgcgacc

SEQ ID NO: 123794 - RNA, 19 nt, Human herpesvirus 1
ggcgccacaccacgccaca

SEQ ID NO: 123795 - RNA, 22 nt, Human herpesvirus 1
ggcgcccccacccucggguucg

SEQ ID NO: 123796 - RNA, 14 nt, Human herpesvirus 1
ggccguggacggca

SEQ ID NO: 123797 - RNA, 18 nt, Human herpesvirus 1
ggccuaauuguccgcgca

SEQ ID NO: 123798 - RNA, 21 nt, Human herpesvirus 1
ggccucccggaagagccugcc

SEQ ID NO: 123799 - RNA, 20 nt, Human herpesvirus 1
ggccucgccaguuucggucg

SEQ ID NO: 123800 - RNA, 15 nt, Human herpesvirus 1
gggccgggcgaccca

SEQ ID NO: 123801 - RNA, 18 nt, Human herpesvirus 1
gggccucugggucugugc

SEQ ID NO: 123802 - RNA, 17 nt, Human herpesvirus 1
gggccuggugcucgugg

SEQ ID NO: 123803 - RNA, 20 nt, Human herpesvirus 1
gggcgcuuggcaugcgcggg

SEQ ID NO: 123804 - RNA, 23 nt, Human herpesvirus 1
gggcucuacccucuggacgcccg

SEQ ID NO: 123805 - RNA, 17 nt, Human herpesvirus 1
ggggccuuuucgccgcc

SEQ ID NO: 123806 - RNA, 18 nt, Human herpesvirus 1
ggggcgcuuaccgccaca

SEQ ID NO: 123807 - RNA, 10 nt, Human herpesvirus 1
ggggcgggac

SEQ ID NO: 123808 - RNA, 18 nt, Human herpesvirus 1
ggggucgcggccgcgacc

SEQ ID NO: 123809 - RNA, 23 nt, Human herpesvirus 1
cuuuaagcgcugcugcggccagu

SEQ ID NO: 123810 - RNA, 14 nt, Human herpesvirus 1
gaaacucccgcacg

SEQ ID NO: 123811 - RNA, 12 nt, Human herpesvirus 1
gaagagccugcc

SEQ ID NO: 123812 - RNA, 13 nt, Human herpesvirus 1
gaagaggagacga

SEQ ID NO: 123813 - RNA, 18 nt, Human herpesvirus 1
gaagaggaggagggggcc

SEQ ID NO: 123814 - RNA, 19 nt, Human herpesvirus 1
gaacuccccgggccucacg

SEQ ID NO: 123815 - RNA, 22 nt, Human herpesvirus 1
gagcuucgcuuugugggggacc

SEQ ID NO: 123816 - RNA, 23 nt, Human herpesvirus 1
gauuccgguuugggguccgggag

SEQ ID NO: 123817 - RNA, 17 nt, Human herpesvirus 1
gagccugccgccucacg

SEQ ID NO: 123818 - RNA, 14 nt, Human herpesvirus 1
gagcgcaguccacg

SEQ ID NO: 123819 - RNA, 16 nt, Human herpesvirus 1
gagauggccgccccgg

SEQ ID NO: 123820 - RNA, 21 nt, Human herpesvirus 1
gagccccggguuccgcgacca

SEQ ID NO: 123821 - RNA, 14 nt, Human herpesvirus 1
gagccgcgcggcca

SEQ ID NO: 123822 - RNA, 14 nt, Human herpesvirus 1
cugucggccgccga

SEQ ID NO: 123823 - RNA, 14 nt, Human herpesvirus 1
cuuccggccugggg

SEQ ID NO: 123824 - RNA, 21 nt, Human herpesvirus 1
cuguuugucgccuggcuggcc

SEQ ID NO: 123825 - RNA, 20 nt, Human herpesvirus 1
cuucgcuuuccugucggccg

SEQ ID NO: 123826 - RNA, 18 nt, Human herpesvirus 1
cuccgaguucccccggca

SEQ ID NO: 123827 - RNA, 20 nt, Human herpesvirus 1
cucgcaugaagcccccaaca

SEQ ID NO: 123828 - RNA, 15 nt, Human herpesvirus 1
cuccggcgccgcccg

SEQ ID NO: 123829 - RNA, 22 nt, Human herpesvirus 1
cugggcgcuauaaagccgccac

SEQ ID NO: 123830 - RNA, 14 nt, Human herpesvirus 1
cuggguugccggcg

SEQ ID NO: 123831 - RNA, 20 nt, Human herpesvirus 1
cuggguuggcgucgggacca

SEQ ID NO: 123832 - RNA, 16 nt, Human herpesvirus 1
cuggucgaggcggccg

SEQ ID NO: 123833 - RNA, 14 nt, Human herpesvirus 1
cuccaggugcgccu

SEQ ID NO: 123834 - RNA, 21 nt, Human herpesvirus 1
cucccaaccgcgacccuccgg

SEQ ID NO: 123835 - RNA, 19 nt, Human herpesvirus 1
cucccggaagagccugccg

SEQ ID NO: 123836 - RNA, 21 nt, Human herpesvirus 1
cucaagcacacacgggggagc

SEQ ID NO: 123837 - RNA, 17 nt, Human herpesvirus 1
cucaccggcggaccccc

SEQ ID NO: 123838 - RNA, 16 nt, Human herpesvirus 1
cguggugcgucgggcc

SEQ ID NO: 123839 - RNA, 19 nt, Human herpesvirus 1
cguugucuccccgauggcc

SEQ ID NO: 123840 - RNA, 14 nt, Human herpesvirus 1
cguuuguguugugg

SEQ ID NO: 123841 - RNA, 18 nt, Human herpesvirus 1
cuacccgccuacccgcgc

SEQ ID NO: 123842 - RNA, 14 nt, Human herpesvirus 1
cuacgcgccggccg

SEQ ID NO: 123843 - RNA, 19 nt, Human herpesvirus 1
cgguucgccgccaccagcc

SEQ ID NO: 123844 - RNA, 22 nt, Human herpesvirus 1
cguauacagaacauuguuuugg

SEQ ID NO: 123845 - RNA, 16 nt, Human herpesvirus 1
cgucccggcucuccga

SEQ ID NO: 123846 - RNA, 21 nt, Human herpesvirus 1
cguccgccgagucuucggggc

SEQ ID NO: 123847 - RNA, 17 nt, Human herpesvirus 1
cguccgguuggccgcgc

SEQ ID NO: 123848 - RNA, 19 nt, Human herpesvirus 1
cgucgacucuaucgcgcgc

SEQ ID NO: 123849 - RNA, 19 nt, Human herpesvirus 1
cgucgccgcgggccacgcc

SEQ ID NO: 123850 - RNA, 17 nt, Human herpesvirus 1
cgucgcuagaccacgcc

SEQ ID NO: 123851 - RNA, 14 nt, Human herpesvirus 1
cgucguucgggcgg

SEQ ID NO: 123852 - RNA, 17 nt, Human herpesvirus 1
cggugaauaggugcgcc

SEQ ID NO: 123853 - RNA, 12 nt, Human herpesvirus 1
cggguccgcggg

SEQ ID NO: 123854 - RNA, 15 nt, Human herpesvirus 1
cggguucccccggca

SEQ ID NO: 123855 - RNA, 20 nt, Human herpesvirus 1
cggucccagggcuggcacuc

SEQ ID NO: 123856 - RNA, 17 nt, Human herpesvirus 1
cgguuacucggcccccg

SEQ ID NO: 123857 - RNA, 17 nt, Human herpesvirus 1
cggccgcgacccaggcg

SEQ ID NO: 123858 - RNA, 20 nt, Human herpesvirus 1
cggccugggucuuccgcgga

SEQ ID NO: 123859 - RNA, 14 nt, Human herpesvirus 1
cggcgaccgccagc

SEQ ID NO: 123860 - RNA, 16 nt, Human herpesvirus 1
cggcgaccgccagccg

SEQ ID NO: 123861 - RNA, 15 nt, Human herpesvirus 1
cggcggccccuggcg

SEQ ID NO: 123862 - RNA, 14 nt, Human herpesvirus 1
cggcggccgccagc

SEQ ID NO: 123863 - RNA, 16 nt, Human herpesvirus 1
cggcggacccccggag

SEQ ID NO: 123864 - RNA, 16 nt, Human herpesvirus 1
ccucgcgugcgugggg

SEQ ID NO: 123865 - RNA, 20 nt, Human herpesvirus 1
ccugcgguccggagccgcgc

SEQ ID NO: 123866 - RNA, 15 nt, Human herpesvirus 1
ccuuaaccgcuggcu

SEQ ID NO: 123867 - RNA, 14 nt, Human herpesvirus 1
ccugauccgcggcg

SEQ ID NO: 123868 - RNA, 19 nt, Human herpesvirus 1
ccuggguuggcgucgggac

SEQ ID NO: 123869 - RNA, 13 nt, Human herpesvirus 1
ccuugccccggcc

SEQ ID NO: 123870 - RNA, 18 nt, Human herpesvirus 1
cgaacaucuugagggggg

SEQ ID NO: 123871 - RNA, 15 nt, Human herpesvirus 1
cgaacgcggaccccc

SEQ ID NO: 123872 - RNA, 15 nt, Human herpesvirus 1
cgcgggaggccgccc

SEQ ID NO: 123873 - RNA, 16 nt, Human herpesvirus 1
cgcgggaggccgcccc

SEQ ID NO: 123874 - RNA, 19 nt, Human herpesvirus 1
cgcggggacacgauuccgg

SEQ ID NO: 123875 - RNA, 23 nt, Human herpesvirus 1
cgcggggggggcgggcucguccc

SEQ ID NO: 123876 - RNA, 13 nt, Human herpesvirus 1
cgcgggcgacgcc

SEQ ID NO: 123877 - RNA, 15 nt, Human herpesvirus 1
cgcgggcggccaugc

SEQ ID NO: 123878 - RNA, 21 nt, Human herpesvirus 1
cgcgucgaugcucugccgcgc

SEQ ID NO: 123879 - RNA, 15 nt, Human herpesvirus 1
cgcgugcggcuggcc

SEQ ID NO: 123880 - RNA, 22 nt, Human herpesvirus 1
cgcuagccgaucccucgcgagg

SEQ ID NO: 123881 - RNA, 15 nt, Human herpesvirus 1
cggcaggcgacggcg

SEQ ID NO: 123882 - RNA, 18 nt, Human herpesvirus 1
gcuccgcaacgacagcca

SEQ ID NO: 123883 - RNA, 21 nt, Human herpesvirus 1
gcguccgguuggccgcgcggc

SEQ ID NO: 123884 - RNA, 23 nt, Human herpesvirus 1
gcgucgcgacagaacugcguuug

SEQ ID NO: 123885 - RNA, 24 nt, Human herpesvirus 1
gcgucugguuguguguguaugugg

SEQ ID NO: 123886 - RNA, 14 nt, Human herpesvirus 1
gcgugccguccgcc

SEQ ID NO: 123887 - RNA, 13 nt, Human herpesvirus 1
gcgggcgccaugg

SEQ ID NO: 123888 - RNA, 21 nt, Human herpesvirus 1
gcgguucgcgucccgcccacc

SEQ ID NO: 123889 - RNA, 21 nt, Human herpesvirus 1
gcguaccaaacaaacaaacca

SEQ ID NO: 123890 - RNA, 17 nt, Human herpesvirus 1
gcgggguuauaggccac

SEQ ID NO: 123891 - RNA, 16 nt, Human herpesvirus 1
gcgguccugacggcca

SEQ ID NO: 123892 - RNA, 14 nt, Human herpesvirus 1
gcggugccugacgc

SEQ ID NO: 123893 - RNA, 18 nt, Human herpesvirus 1
gcggugcuguuuguuggg

SEQ ID NO: 123894 - RNA, 21 nt, Human herpesvirus 1
gcucgcucgggggggccuccg

SEQ ID NO: 123895 - RNA, 16 nt, Human herpesvirus 1
gcuggccgcgcccgcc

SEQ ID NO: 123896 - RNA, 20 nt, Human herpesvirus 1
gcuucggccguuucuccgcc

SEQ ID NO: 123897 - RNA, 20 nt, Human herpesvirus 1
gcuugccggucggcgggccc

SEQ ID NO: 123898 - RNA, 19 nt, Human herpesvirus 1
ggaccgccugccgcgcgga

SEQ ID NO: 123899 - RNA, 13 nt, Human herpesvirus 1
ggcaggcgacggc

SEQ ID NO: 123900 - RNA, 20 nt, Human herpesvirus 1
ggacccccccucgcgccaca

SEQ ID NO: 123901 - RNA, 17 nt, Human herpesvirus 1
ggccccacgucggucgc

SEQ ID NO: 123902 - RNA, 19 nt, Human herpesvirus 1
ggcccggaacgggaggcca

SEQ ID NO: 123903 - RNA, 16 nt, Human herpesvirus 1
ggccgacacggucgga

SEQ ID NO: 123904 - RNA, 17 nt, Human herpesvirus 1
gcggcgaacgggggccc

SEQ ID NO: 123905 - RNA, 16 nt, Human herpesvirus 1
gcggaaagacggucca

SEQ ID NO: 123906 - RNA, 15 nt, Human herpesvirus 1
gcggacccucucuuc

SEQ ID NO: 123907 - RNA, 14 nt, Human herpesvirus 1
gcggaugacggccc

SEQ ID NO: 123908 - RNA, 14 nt, Human herpesvirus 1
gcggagggcggcca

SEQ ID NO: 123909 - RNA, 15 nt, Human herpesvirus 1
gcgcagaggcggcca

SEQ ID NO: 123910 - RNA, 20 nt, Human herpesvirus 1
gccgcggguauagaucgacg

SEQ ID NO: 123911 - RNA, 15 nt, Human herpesvirus 1
gcgcaauugcggcca

SEQ ID NO: 123912 - RNA, 21 nt, Human herpesvirus 1
gcgcaccuccuccgacgccca

SEQ ID NO: 123913 - RNA, 20 nt, Human herpesvirus 1
gcgcauccgucgggaggcca

SEQ ID NO: 123914 - RNA, 14 nt, Human herpesvirus 1
gcacucccugccgc

SEQ ID NO: 123915 - RNA, 18 nt, Human herpesvirus 1
gcccggaacgggaggcca

SEQ ID NO: 123916 - RNA, 18 nt, Human herpesvirus 1
gcagaaacgcacgcgccg

SEQ ID NO: 123917 - RNA, 13 nt, Human herpesvirus 1
gcccggguccccg

SEQ ID NO: 123918 - RNA, 17 nt, Human herpesvirus 1
gccgacgccgucgacga

SEQ ID NO: 123919 - RNA, 21 nt, Human herpesvirus 1
gcacgcgcgauagagucgacg

SEQ ID NO: 123920 - RNA, 17 nt, Human herpesvirus 1
gcacagaugggacgcca

SEQ ID NO: 123921 - RNA, 22 nt, Human herpesvirus 1
gccgagucuucggggcccggcc

SEQ ID NO: 123922 - RNA, 12 nt, Human herpesvirus 1
gccgccacgcgc

SEQ ID NO: 123923 - RNA, 14 nt, Human herpesvirus 1
cauggugccgaccg

SEQ ID NO: 123924 - RNA, 14 nt, Human herpesvirus 1
caugcccgggaccc

SEQ ID NO: 123925 - RNA, 17 nt, Human herpesvirus 1
caugcgccagggcgccc

SEQ ID NO: 123926 - RNA, 12 nt, Human herpesvirus 1
cauggccaugac

SEQ ID NO: 123927 - RNA, 15 nt, Human herpesvirus 1
cagcagguccgcggu

SEQ ID NO: 123928 - RNA, 16 nt, Human herpesvirus 1
caucgccggggaccgc

SEQ ID NO: 123929 - RNA, 22 nt, Human herpesvirus 1
cagacgaaaagccccgggccgc

SEQ ID NO: 123930 - RNA, 18 nt, Human herpesvirus 1
cagcacgggcggaggcgu

SEQ ID NO: 123931 - RNA, 23 nt, Human herpesvirus 1
cccaacgcgcgcggaugacggcc

SEQ ID NO: 123932 - RNA, 19 nt, Human herpesvirus 1
ccaggcggcgaacgggggc

SEQ ID NO: 123933 - RNA, 16 nt, Human herpesvirus 1
ccagcgcggcggggcc

SEQ ID NO: 123934 - RNA, 21 nt, Human herpesvirus 1
ccacccggagcuuucuuccgg

SEQ ID NO: 123935 - RNA, 11 nt, Human herpesvirus 1
ccaagccggga

SEQ ID NO: 123936 - RNA, 19 nt, Human herpesvirus 1
ccacacagcccucccgacc

SEQ ID NO: 123937 - RNA, 23 nt, Human herpesvirus 1
ccacagcuuuggguucguuccgg

SEQ ID NO: 123938 - RNA, 23 nt, Human herpesvirus 1
ccaccuuccguccccugcccccc

SEQ ID NO: 123939 - RNA, 16 nt, Human herpesvirus 1
ccacgggagccagggc

SEQ ID NO: 123940 - RNA, 17 nt, Human herpesvirus 1
ccacguguagccuggau

SEQ ID NO: 123941 - RNA, 15 nt, Human herpesvirus 1
ccagaggcgcgcgca

SEQ ID NO: 123942 - RNA, 15 nt, Human herpesvirus 1
agggcggccagccgc

SEQ ID NO: 123943 - RNA, 18 nt, Human herpesvirus 1
aggccgaaacggccaugc

SEQ ID NO: 123944 - RNA, 20 nt, Human herpesvirus 1
aggcgcauaaagggccggug

SEQ ID NO: 123945 - RNA, 18 nt, Human herpesvirus 1
aggcgcugucuccccggg

SEQ ID NO: 123946 - RNA, 14 nt, Human herpesvirus 1
agggcgcccccgcg

SEQ ID NO: 123947 - RNA, 19 nt, Human herpesvirus 1
agggcgcucagggcggcga

SEQ ID NO: 123948 - RNA, 11 nt, Human herpesvirus 1
aggggcgggag

SEQ ID NO: 123949 - RNA, 15 nt, Human herpesvirus 1
aggugcugccgccgc

SEQ ID NO: 123950 - RNA, 13 nt, Human herpesvirus 1
aguaccacccccc

SEQ ID NO: 123951 - RNA, 20 nt, Human herpesvirus 1
caagcgcccccgcccuaaca

SEQ ID NO: 123952 - RNA, 15 nt, Human herpesvirus 1
caaggagcgccggcg

SEQ ID NO: 123953 - RNA, 16 nt, Human herpesvirus 1
cacagccuggccgugc

SEQ ID NO: 123954 - RNA, 21 nt, Human herpesvirus 1
cacagcgagggacccgcgggg

SEQ ID NO: 123955 - RNA, 18 nt, Human herpesvirus 1
cacauaugaucgcgggca

SEQ ID NO: 123956 - RNA, 18 nt, Human herpesvirus 1
caccacccaaccccaacu

SEQ ID NO: 123957 - RNA, 15 nt, Human herpesvirus 1
caccacgccacaaca

SEQ ID NO: 123958 - RNA, 20 nt, Human herpesvirus 1
caccccucguggccccgaca

SEQ ID NO: 123959 - RNA, 19 nt, Human herpesvirus 1
cacggauaggggcaggcgg

SEQ ID NO: 123960 - RNA, 20 nt, Human herpesvirus 1
cacggcaaggagcgccggcg

SEQ ID NO: 123961 - RNA, 18 nt, Human herpesvirus 1
cacccaucggggaccugc

SEQ ID NO: 123962 - RNA, 14 nt, Human herpesvirus 1
caccccccacgggc

SEQ ID NO: 123963 - RNA, 16 nt, Human herpesvirus 1
cacggguggccgggcg

SEQ ID NO: 123964 - RNA, 16 nt, Human herpesvirus 1
cacugcccgucgcgcg

SEQ ID NO: 123965 - RNA, 18 nt, Human herpesvirus 1
cacuugcggucuucugcg

SEQ ID NO: 123966 - RNA, 14 nt, Human herpesvirus 1
ccgcgaccaccccg

SEQ ID NO: 123967 - RNA, 22 nt, Human herpesvirus 1
ccgcgacccaccgggcccggcc

SEQ ID NO: 123968 - RNA, 12 nt, Human herpesvirus 1
ccgccgggacgc

SEQ ID NO: 123969 - RNA, 14 nt, Human herpesvirus 1
ccgccguccgaacc

SEQ ID NO: 123970 - RNA, 19 nt, Human herpesvirus 1
ccgccauuaagacgcuggg

SEQ ID NO: 123971 - RNA, 20 nt, Human herpesvirus 1
ccgcccaaugggccgggccg

SEQ ID NO: 123972 - RNA, 21 nt, Human herpesvirus 1
ccgcccaaugggccgggccgc

SEQ ID NO: 123973 - RNA, 18 nt, Human herpesvirus 1
ccgccccccccccgucac

SEQ ID NO: 123974 - RNA, 12 nt, Human herpesvirus 1
ccgcccccggca

SEQ ID NO: 123975 - RNA, 13 nt, Human herpesvirus 1
ccgcccccggcau

SEQ ID NO: 123976 - RNA, 21 nt, Human herpesvirus 1
ccgccccgaagagggggaccc

SEQ ID NO: 123977 - RNA, 21 nt, Human herpesvirus 1
ccgcccucacagggcgggccg

SEQ ID NO: 123978 - RNA, 22 nt, Human herpesvirus 1
ccgcccucacagggcgggccgc

SEQ ID NO: 123979 - RNA, 19 nt, Human herpesvirus 1
ccgcccuguaccgacgggc

SEQ ID NO: 123980 - RNA, 21 nt, Human herpesvirus 1
ccgccgacgccgucgacgagc

SEQ ID NO: 123981 - RNA, 19 nt, Human herpesvirus 1
ccgccgagucuucggggcc

SEQ ID NO: 123982 - RNA, 12 nt, Human herpesvirus 1
ccgcgcgggggc

SEQ ID NO: 123983 - RNA, 14 nt, Human herpesvirus 1
ccgcgcgucccccg

SEQ ID NO: 123984 - RNA, 19 nt, Human herpesvirus 1
ccgcgcgucccccgagacg

SEQ ID NO: 123985 - RNA, 18 nt, Human herpesvirus 1
ccgcgcauauccgggggc

SEQ ID NO: 123986 - RNA, 14 nt, Human herpesvirus 1
ccgcgcauccgacc

SEQ ID NO: 123987 - RNA, 19 nt, Human herpesvirus 1
ccgcgcaugaucuccggac

SEQ ID NO: 123988 - RNA, 18 nt, Human herpesvirus 1
ccgcgccaggcccgccgc

SEQ ID NO: 123989 - RNA, 22 nt, Human herpesvirus 1
ccgcgcaaccaacccacugggg

SEQ ID NO: 123990 - RNA, 15 nt, Human herpesvirus 1
ccgcguuuggccugc

SEQ ID NO: 123991 - RNA, 21 nt, Human herpesvirus 1
ccgcguuuggccugcggcgca

SEQ ID NO: 123992 - RNA, 17 nt, Human herpesvirus 1
ccggaacaccccugggg

SEQ ID NO: 123993 - RNA, 15 nt, Human herpesvirus 1
ccgcgcucgcucggg

SEQ ID NO: 123994 - RNA, 22 nt, Human herpesvirus 1
ccgcgguacagaucggcgccgc

SEQ ID NO: 123995 - RNA, 14 nt, Human herpesvirus 1
ccgcgguccagacc

SEQ ID NO: 123996 - RNA, 15 nt, Human herpesvirus 1
ccgucgccgcgggcc

SEQ ID NO: 123997 - RNA, 15 nt, Human herpesvirus 1
ccgucucugcuacgc

SEQ ID NO: 123998 - RNA, 19 nt, Human herpesvirus 1
ccgugauccuuaggggccg

SEQ ID NO: 123999 - RNA, 18 nt, Human herpesvirus 1
ccgggccucacggggucc

SEQ ID NO: 124000 - RNA, 14 nt, Human herpesvirus 1
ccggggcgucgccc

SEQ ID NO: 124001 - RNA, 18 nt, Human herpesvirus 1
ccggguagcguacggacc

SEQ ID NO: 124002 - RNA, 16 nt, Human herpesvirus 1
ccggagccgcgcggcc

SEQ ID NO: 124003 - RNA, 16 nt, Human herpesvirus 1
ccggagcucgcggcac

SEQ ID NO: 124004 - RNA, 15 nt, Human herpesvirus 1
ccggcacgccugggg

SEQ ID NO: 124005 - RNA, 16 nt, Human herpesvirus 1
ccggccaccucgccca

SEQ ID NO: 124006 - RNA, 20 nt, Human herpesvirus 1
ccggcggccccuggcgccgc

SEQ ID NO: 124007 - RNA, 22 nt, Human herpesvirus 1
ccggcggcgcuccucgccgccc

SEQ ID NO: 124008 - RNA, 23 nt, Human herpesvirus 1
ccggcgggguuauaggccacgca

SEQ ID NO: 124009 - RNA, 13 nt, Human herpesvirus 1
ccggcggucgcgc

SEQ ID NO: 124010 - RNA, 12 nt, Human herpesvirus 1
ccggcgccgccc

SEQ ID NO: 124011 - RNA, 22 nt, Human herpesvirus 1
ccgggacuuuuggaugucgccc

SEQ ID NO: 124012 - RNA, 23 nt, Human herpesvirus 1
cccaucccgaggccccacgucgg

SEQ ID NO: 124013 - RNA, 13 nt, Human herpesvirus 1
cccaucgcgggcg

SEQ ID NO: 124014 - RNA, 16 nt, Human herpesvirus 1
cccaucgcgggcgcca

SEQ ID NO: 124015 - RNA, 20 nt, Human herpesvirus 1
cccaucuacguugcggggcg

SEQ ID NO: 124016 - RNA, 22 nt, Human herpesvirus 1
cccaauaaacguauaucgcuac

SEQ ID NO: 124017 - RNA, 15 nt, Human herpesvirus 1
cccaccccccacggg

SEQ ID NO: 124018 - RNA, 16 nt, Human herpesvirus 1
cccaccggcaccaaca

SEQ ID NO: 124019 - RNA, 21 nt, Human herpesvirus 1
ccccaguggguuuugcggacc

SEQ ID NO: 124020 - RNA, 20 nt, Human herpesvirus 1
ccccauaucgcuucccgacc

SEQ ID NO: 124021 - RNA, 21 nt, Human herpesvirus 1
ccccaucgccgcggcucccgg

SEQ ID NO: 124022 - RNA, 14 nt, Human herpesvirus 1
cccccaucaccccg

SEQ ID NO: 124023 - RNA, 12 nt, Human herpesvirus 1
cccccccacgcc

SEQ ID NO: 124024 - RNA, 13 nt, Human herpesvirus 1
cccccgcccgggu

SEQ ID NO: 124025 - RNA, 16 nt, Human herpesvirus 1
cccccgccucuggggu

SEQ ID NO: 124026 - RNA, 17 nt, Human herpesvirus 1
cccacuggggucugggu

SEQ ID NO: 124027 - RNA, 22 nt, Human herpesvirus 1
cccagaccccgggcgcgcccuc

SEQ ID NO: 124028 - RNA, 18 nt, Human herpesvirus 1
cccccgggcuacacggcc

SEQ ID NO: 124029 - RNA, 20 nt, Human herpesvirus 1
cccccggguuuucccacgcc

SEQ ID NO: 124030 - RNA, 13 nt, Human herpesvirus 1
cccccgucugggu

SEQ ID NO: 124031 - RNA, 13 nt, Human herpesvirus 1
cccccuccccccg

SEQ ID NO: 124032 - RNA, 20 nt, Human herpesvirus 1
cccccuguuugucgacgaga

SEQ ID NO: 124033 - RNA, 16 nt, Human herpesvirus 1
ccccgaacccugcggu

SEQ ID NO: 124034 - RNA, 15 nt, Human herpesvirus 1
ccccgacagcccccc

SEQ ID NO: 124035 - RNA, 15 nt, Human herpesvirus 1
ccccgauggcccucc

SEQ ID NO: 124036 - RNA, 23 nt, Human herpesvirus 1
ccccggguuccgcgaccaccccg

SEQ ID NO: 124037 - RNA, 20 nt, Human herpesvirus 1
cccgaaacuucaucaccccc

SEQ ID NO: 124038 - RNA, 19 nt, Human herpesvirus 1
ccccgcccuuccuuggggu

SEQ ID NO: 124039 - RNA, 12 nt, Human herpesvirus 1
ccccggccccca

SEQ ID NO: 124040 - RNA, 12 nt, Human herpesvirus 1
cccgcccaccgg

SEQ ID NO: 124041 - RNA, 13 nt, Human herpesvirus 1
cccgcccccggca

SEQ ID NO: 124042 - RNA, 13 nt, Human herpesvirus 1
cccgcccccggcu

SEQ ID NO: 124043 - RNA, 15 nt, Human herpesvirus 1
cccgcggaccaccgg

SEQ ID NO: 124044 - RNA, 18 nt, Human herpesvirus 1
cccgcgggguucuggggu

SEQ ID NO: 124045 - RNA, 23 nt, Human herpesvirus 1
ccgcauuuggccgggggcugggg

SEQ ID NO: 124046 - RNA, 13 nt, Human herpesvirus 1
ccgccacgcuggg

SEQ ID NO: 124047 - RNA, 22 nt, Human herpesvirus 1
ccgcaauuucaccgccccagca

SEQ ID NO: 124048 - RNA, 15 nt, Human herpesvirus 1
ccgcauacuccggcc

SEQ ID NO: 124049 - RNA, 18 nt, Human herpesvirus 1
ccgaacugggcgaccgcc

SEQ ID NO: 124050 - RNA, 17 nt, Human herpesvirus 1
ccgaccggguucccccg

SEQ ID NO: 124051 - RNA, 16 nt, Human herpesvirus 1
ccgacgccgucgacga

SEQ ID NO: 124052 - RNA, 20 nt, Human herpesvirus 1
ccgacgcuaaacggccgcgc

SEQ ID NO: 124053 - RNA, 17 nt, Human herpesvirus 1
ccgaucgcagcguccgg

SEQ ID NO: 124054 - RNA, 16 nt, Human herpesvirus 1
ccgaugaacgcaggcg

SEQ ID NO: 124055 - RNA, 14 nt, Human herpesvirus 1
cccggcaccacggg

SEQ ID NO: 124056 - RNA, 18 nt, Human herpesvirus 1
cccggccaccucgcccac

SEQ ID NO: 124057 - RNA, 19 nt, Human herpesvirus 1
cccgugggucuagccgggc

SEQ ID NO: 124058 - RNA, 15 nt, Human herpesvirus 1
cccgugugccgcgcc

SEQ ID NO: 124059 - RNA, 15 nt, Human herpesvirus 1
cccucaaccccggcg

SEQ ID NO: 124060 - RNA, 20 nt, Human herpesvirus 1
cccuccaggcugucgacgcc

SEQ ID NO: 124061 - RNA, 12 nt, Human herpesvirus 1
cccuccuggggg

SEQ ID NO: 124062 - RNA, 12 nt, Human herpesvirus 1
cccucgagaucc

SEQ ID NO: 124063 - RNA, 12 nt, Human herpesvirus 1
cccucgcgggcc

SEQ ID NO: 124064 - RNA, 16 nt, Human herpesvirus 1
cccuguuugucgacga

SEQ ID NO: 124065 - RNA, 19 nt, Human herpesvirus 1
cccuguuugucgccuggcu

SEQ ID NO: 124066 - RNA, 19 nt, Human herpesvirus 1
ccgaaacuucaucaccccc

SEQ ID NO: 124067 - RNA, 15 nt, Human herpesvirus 1
agcccccgggacugc

SEQ ID NO: 124068 - RNA, 12 nt, Human herpesvirus 1
agacgggaccgc

SEQ ID NO: 124069 - RNA, 19 nt, Human herpesvirus 1
agacucucccccaccgccc

SEQ ID NO: 124070 - RNA, 15 nt, Human herpesvirus 1
agagcgcgggaccgu

SEQ ID NO: 124071 - RNA, 23 nt, Human herpesvirus 1
agcccucccgaccgacaccccca

SEQ ID NO: 124072 - RNA, 23 nt, Human herpesvirus 1
agccgcgauuccgagggccgggc

SEQ ID NO: 124073 - RNA, 14 nt, Human herpesvirus 1
agccggccccggca

SEQ ID NO: 124074 - RNA, 23 nt, Human herpesvirus 1
agccggggagagggcccgcggcg

SEQ ID NO: 124075 - RNA, 21 nt, Human herpesvirus 1
agccuauguucgcgggcgacg

SEQ ID NO: 124076 - RNA, 17 nt, Human herpesvirus 1
agaccaagguccgucag

SEQ ID NO: 124077 - RNA, 17 nt, Human herpesvirus 1
agaccacucccgucucg

SEQ ID NO: 124078 - RNA, 23 nt, Human herpesvirus 1
acgggggcccugccacuccggcg

SEQ ID NO: 124079 - RNA, 20 nt, Human herpesvirus 1
acggugaauaggugcgccgc

SEQ ID NO: 124080 - RNA, 23 nt, Human herpesvirus 1
acgucgccccuguggcccuggcg

SEQ ID NO: 124081 - RNA, 23 nt, Human herpesvirus 1
accgaaacccccaaagccgccgc

SEQ ID NO: 124082 - RNA, 13 nt, Human herpesvirus 1
acggcggaccugg

SEQ ID NO: 124083 - RNA, 14 nt, Human herpesvirus 1
acgggcggaggcgu

SEQ ID NO: 124084 - RNA, 23 nt, Human herpesvirus 1
aaucagcguucacccggcggcgc

SEQ ID NO: 124085 - RNA, 19 nt, Human herpesvirus 1
aagcgccccgauggcccug

SEQ ID NO: 124086 - RNA, 14 nt, Human herpesvirus 1
aagcaggccaucgc

SEQ ID NO: 124087 - RNA, 15 nt, Human herpesvirus 1
aagccccgggccgcg

SEQ ID NO: 124088 - RNA, 19 nt, Human herpesvirus 1
aagucgguagcgggggacg

SEQ ID NO: 124089 - RNA, 20 nt, Human herpesvirus 1
accaaaaacaccacagggga

SEQ ID NO: 124090 - RNA, 17 nt, Human herpesvirus 1
accaccacugcacuccc

SEQ ID NO: 124091 - RNA, 15 nt, Human herpesvirus 1
acccaacccccggcc

SEQ ID NO: 124092 - RNA, 16 nt, Human herpesvirus 1
acccacccaccaagac

SEQ ID NO: 124093 - RNA, 14 nt, Human herpesvirus 1
accccagggaccuc

SEQ ID NO: 124094 - RNA, 19 nt, Human herpesvirus 1
acccccgaguucccccggg

SEQ ID NO: 124095 - RNA, 18 nt, Human herpesvirus 1
accccgcaauuugcaccc

SEQ ID NO: 124096 - RNA, 14 nt, Human herpesvirus 1
accccguaccaccc

SEQ ID NO: 124097 - RNA, 20 nt, Human herpesvirus 1
acccgacaacagcccccggg

SEQ ID NO: 124098 - RNA, 16 nt, Human herpesvirus 1
acccgcgacccccggg

SEQ ID NO: 124099 - RNA, 20 nt, Human herpesvirus 1
acccgggccguuucccaccc

SEQ ID NO: 124100 - RNA, 21 nt, Human herpesvirus 1
acacagcccucccgaccgaca

SEQ ID NO: 124101 - RNA, 17 nt, Human herpesvirus 1
acaccacaggggaccgc

SEQ ID NO: 124102 - RNA, 18 nt, Human herpesvirus 1
acaccugcaccacccccg

SEQ ID NO: 124103 - RNA, 18 nt, Human herpesvirus 1
acagggggaaaggggcgu

SEQ ID NO: 124104 - RNA, 23 nt, Human herpesvirus 1
acauaugaucgcgggcaccccac

SEQ ID NO: 124105 - RNA, 16 nt, Human herpesvirus 1
aacuucaucacccccg

SEQ ID NO: 124106 - RNA, 15 nt, Human herpesvirus 1
aacgugcgcgauccc

SEQ ID NO: 124107 - RNA, 16 nt, Human herpesvirus 1
aacgggggggugucgc

SEQ ID NO: 124108 - RNA, 17 nt, Human herpesvirus 1
aaccacccgcaccccca

SEQ ID NO: 124109 - RNA, 20 nt, Human herpesvirus 1
aacggacacgcggggacacg

SEQ ID NO: 124110 - RNA, 14 nt, Homo sapiens
uagaaugagacuua

SEQ ID NO: 124111 - RNA, 11 nt, Homo sapiens
caaaaccaaau

SEQ ID NO: 124112 - RNA, 23 nt, Homo sapiens
cuuagagcuuuaccuaaauauga

SEQ ID NO: 124113 - RNA, 13 nt, Homo sapiens
agguugagggcaa

SEQ ID NO: 124114 - RNA, 18 nt, Homo sapiens
ggguuucaccauguuggc

SEQ ID NO: 124115 - RNA, 18 nt, Homo sapiens
augcuggggacacagcau

SEQ ID NO: 124116 - RNA, 12 nt, Homo sapiens
ugaggguguaua

SEQ ID NO: 124117 - RNA, 17 nt, Homo sapiens
gaugcuggggacacagc

SEQ ID NO: 124118 - RNA, 15 nt, Homo sapiens
gagggaacuguguag

SEQ ID NO: 124119 - RNA, 23 nt, Homo sapiens
accagagaagggcuuggacucaa

SEQ ID NO: 124120 - RNA, 23 nt, Homo sapiens
cuucucugcuaucuagaucugaa

SEQ ID NO: 124121 - RNA, 15 nt, Homo sapiens
aauugggccaaagaa

SEQ ID NO: 124122 - RNA, 22 nt, Homo sapiens
ggagaaauaugguacucauuaa

SEQ ID NO: 124123 - RNA, 20 nt, Homo sapiens
cagagcagagaggcugaaua

SEQ ID NO: 124124 - RNA, 10 nt, Homo sapiens
ucccaaagag

SEQ ID NO: 124125 - RNA, 13 nt, Homo sapiens
caaagaagccagc

SEQ ID NO: 124126 - RNA, 12 nt, Homo sapiens
aauaaagacagg

SEQ ID NO: 124127 - RNA, 14 nt, Homo sapiens
caauguuuuagaau

SEQ ID NO: 124128 - RNA, 15 nt, Homo sapiens
uuacuguccaaagac

SEQ ID NO: 124129 - RNA, 15 nt, Homo sapiens
uuaugaauaguuucc

SEQ ID NO: 124130 - RNA, 18 nt, Homo sapiens
acgugauuuugcuguaga

SEQ ID NO: 124131 - RNA, 14 nt, Homo sapiens
ucaacaaagucacc

SEQ ID NO: 124132 - RNA, 16 nt, Homo sapiens
acugaaccaggccaga

SEQ ID NO: 124133 - RNA, 21 nt, Homo sapiens
guuguuaauaaaaguacaugu

SEQ ID NO: 124134 - RNA, 22 nt, Homo sapiens
uggggacacagcaucagcucaa

SEQ ID NO: 124135 - RNA, 13 nt, Homo sapiens
uuuugcuguagaa

SEQ ID NO: 124136 - RNA, 19 nt, Homo sapiens
uguuaagccauguguucca

SEQ ID NO: 124137 - RNA, 17 nt, Homo sapiens
cuccccuucacucccac

SEQ ID NO: 124138 - RNA, 12 nt, Homo sapiens
uuaagaaauuca

SEQ ID NO: 124139 - RNA, 22 nt, Homo sapiens
aaucaguguuuccaaucugucc

SEQ ID NO: 124140 - RNA, 17 nt, Homo sapiens
ucaugagugcaacugug

SEQ ID NO: 124141 - RNA, 15 nt, Homo sapiens
uuuaauagcgucaua

SEQ ID NO: 124142 - RNA, 18 nt, Homo sapiens
uagaaugagacuuacuuc

SEQ ID NO: 124143 - RNA, 10 nt, Homo sapiens
uaaagacaga

SEQ ID NO: 124144 - RNA, 21 nt, Homo sapiens
aucugccuccccuucacuccc

SEQ ID NO: 124145 - RNA, 15 nt, Homo sapiens
aguguaccagagaag

SEQ ID NO: 124146 - RNA, 22 nt, Homo sapiens
gccauaaaggggagggacucau

SEQ ID NO: 124147 - RNA, 21 nt, Homo sapiens
uaaauguagaaagugauccau

SEQ ID NO: 124148 - RNA, 21 nt, Homo sapiens
aacaaucuugucauacuugaa

SEQ ID NO: 124149 - RNA, 12 nt, Homo sapiens
uuuaaagacaga

SEQ ID NO: 124150 - RNA, 21 nt, Homo sapiens
gauacacaaucugaaacagcu

SEQ ID NO: 124151 - RNA, 16 nt, Homo sapiens
gaacugaacauuccag

SEQ ID NO: 124152 - RNA, 11 nt, Homo sapiens
uuugcuguaga

SEQ ID NO: 124153 - RNA, 23 nt, Homo sapiens
cuuccuccccuguucauucugca

SEQ ID NO: 124154 - RNA, 15 nt, Homo sapiens
aauauagcucaggua

SEQ ID NO: 124155 - RNA, 23 nt, Homo sapiens
acugggacuaaguguaccagaga

SEQ ID NO: 124156 - RNA, 19 nt, Homo sapiens
uauauguauaucacauucc

SEQ ID NO: 124157 - RNA, 20 nt, Homo sapiens
acagugacuccacucugagu

SEQ ID NO: 124158 - RNA, 21 nt, Homo sapiens
cagagucucgcucuguugccc

SEQ ID NO: 124159 - RNA, 15 nt, Homo sapiens
gccccagccuaggaa

SEQ ID NO: 124160 - RNA, 21 nt, Homo sapiens
aaagcuagaaaguguaugugu

SEQ ID NO: 124161 - RNA, 13 nt, Homo sapiens
gugccaucagcuc

SEQ ID NO: 124162 - RNA, 20 nt, Homo sapiens
ucuaagccuucugguuuuau

SEQ ID NO: 124163 - RNA, 19 nt, Homo sapiens
aacugaaugccacucugua

SEQ ID NO: 124164 - RNA, 20 nt, Homo sapiens
ugcuggcaguggaacuaaga

SEQ ID NO: 124165 - RNA, 23 nt, Homo sapiens
aaugagcaaaaccaaauauucca

SEQ ID NO: 124166 - RNA, 17 nt, Homo sapiens
aagcuggagucugucaa

SEQ ID NO: 124167 - RNA, 19 nt, Homo sapiens
caaucaguagccagcaucu

SEQ ID NO: 124168 - RNA, 19 nt, Homo sapiens
agggaacugaacauuccag

SEQ ID NO: 124169 - RNA, 11 nt, Homo sapiens
aagacugacca

SEQ ID NO: 124170 - RNA, 15 nt, Homo sapiens
uucugaaaaaguauc

SEQ ID NO: 124171 - RNA, 23 nt, Homo sapiens
ugaaaagaaucggcaauguuuca

SEQ ID NO: 124172 - RNA, 14 nt, Homo sapiens
uggcucaucucuuu

SEQ ID NO: 124173 - RNA, 10 nt, Homo sapiens
gaaaacagaa

SEQ ID NO: 124174 - RNA, 17 nt, Homo sapiens
cuucugaaaaaguaucc

SEQ ID NO: 124175 - RNA, 16 nt, Homo sapiens
aguugcaauguuuuag

SEQ ID NO: 124176 - RNA, 14 nt, Homo sapiens
aaaaggcagaguac

SEQ ID NO: 124177 - RNA, 18 nt, Homo sapiens
uccugaccucaaguaauc

SEQ ID NO: 124178 - RNA, 16 nt, Homo sapiens
cuauuagcuccacaaa

SEQ ID NO: 124179 - RNA, 16 nt, Homo sapiens
ggaaagccaguuacau

SEQ ID NO: 124180 - RNA, 13 nt, Homo sapiens
aaaugaaagugag

SEQ ID NO: 124181 - RNA, 17 nt, Homo sapiens
aaccguacacuguguuu

SEQ ID NO: 124182 - RNA, 16 nt, Homo sapiens
acugcaacuucugccu

SEQ ID NO: 124183 - RNA, 17 nt, Homo sapiens
agggagugggcuaagca

SEQ ID NO: 124184 - RNA, 20 nt, Homo sapiens
cuggauuacaggcaugugcc

SEQ ID NO: 124185 - RNA, 14 nt, Homo sapiens
uagaauucagucaa

SEQ ID NO: 124186 - RNA, 21 nt, Homo sapiens
ugguuuugcucacaaaagucu

SEQ ID NO: 124187 - RNA, 15 nt, Homo sapiens
guagaaagugaucca

SEQ ID NO: 124188 - RNA, 17 nt, Homo sapiens
uaugacacucuagucaa

SEQ ID NO: 124189 - RNA, 12 nt, Homo sapiens
aaugucuuuauu

SEQ ID NO: 124190 - RNA, 23 nt, Homo sapiens
guucauggauauguuauacugaa

SEQ ID NO: 124191 - RNA, 17 nt, Homo sapiens
ucaaacuccugaccuca

SEQ ID NO: 124192 - RNA, 17 nt, Homo sapiens
uagugaaucacguaaag

SEQ ID NO: 124193 - RNA, 12 nt, Homo sapiens
gacucaagcaag

SEQ ID NO: 124194 - RNA, 22 nt, Homo sapiens
aaacccaguaguggugacugug

SEQ ID NO: 124195 - RNA, 16 nt, Homo sapiens
cuuaaaauagccauaa

SEQ ID NO: 124196 - RNA, 21 nt, Homo sapiens
ccuaaaaggcagaguacaaag

SEQ ID NO: 124197 - RNA, 13 nt, Homo sapiens
uccacaaagccaa

SEQ ID NO: 124198 - RNA, 18 nt, Homo sapiens
auguaagaucguucucug

SEQ ID NO: 124199 - RNA, 20 nt, Homo sapiens
caggguuucaccauguuggc

SEQ ID NO: 124200 - RNA, 21 nt, Homo sapiens
ucaagugauucuccugccuca

SEQ ID NO: 124201 - RNA, 22 nt, Homo sapiens
agcuggagucugucaauguccu

SEQ ID NO: 124202 - RNA, 14 nt, Homo sapiens
acauuuuguauauu

SEQ ID NO: 124203 - RNA, 16 nt, Homo sapiens
acuuacuuaguguuau

SEQ ID NO: 124204 - RNA, 17 nt, Homo sapiens
auuuucuuuuuauacua

SEQ ID NO: 124205 - RNA, 21 nt, Homo sapiens
ugaccugccaggcacacugag

SEQ ID NO: 124206 - RNA, 20 nt, Homo sapiens
uaagaugaaacaucauuuca

SEQ ID NO: 124207 - RNA, 15 nt, Homo sapiens
gauauaaaagacuga

SEQ ID NO: 124208 - RNA, 17 nt, Homo sapiens
cuggccuccaaguccac

SEQ ID NO: 124209 - RNA, 13 nt, Homo sapiens
cacuuuucaaugu

SEQ ID NO: 124210 - RNA, 20 nt, Homo sapiens
guagaaagugauccauacuu

SEQ ID NO: 124211 - RNA, 13 nt, Homo sapiens
gacucuaacagua

SEQ ID NO: 124212 - RNA, 23 nt, Homo sapiens
cauucugcacucagaaaauggca

SEQ ID NO: 124213 - RNA, 19 nt, Homo sapiens
aauucugaauuaagcacag

SEQ ID NO: 124214 - RNA, 22 nt, Homo sapiens
acuuauagaauucagucaaaga

SEQ ID NO: 124215 - RNA, 17 nt, Homo sapiens
cacaaaagucuacuuua

SEQ ID NO: 124216 - RNA, 16 nt, Homo sapiens
aaucucuccauucccg

SEQ ID NO: 124217 - RNA, 17 nt, Homo sapiens
uuuaaaugaaagugaga

SEQ ID NO: 124218 - RNA, 18 nt, Homo sapiens
aacaggaauucugaauua

SEQ ID NO: 124219 - RNA, 18 nt, Homo sapiens
uuaaaccguacacugugu

SEQ ID NO: 124220 - RNA, 14 nt, Homo sapiens
cauuugucaacaaa

SEQ ID NO: 124221 - RNA, 14 nt, Homo sapiens
caaugucuaaaaac

SEQ ID NO: 124222 - RNA, 20 nt, Homo sapiens
cugaccaauauuguacaguu

SEQ ID NO: 124223 - RNA, 22 nt, Homo sapiens
ggcuaagaagugacucuugcaa

SEQ ID NO: 124224 - RNA, 18 nt, Homo sapiens
ucagaaaauggcacuugg

SEQ ID NO: 124225 - RNA, 13 nt, Homo sapiens
guccaaggucucc

SEQ ID NO: 124226 - RNA, 21 nt, Homo sapiens
ugcuguagaagauggcacuua

SEQ ID NO: 124227 - RNA, 22 nt, Homo sapiens
ugauuucagcaccuacagugua

SEQ ID NO: 124228 - RNA, 19 nt, Homo sapiens
cucgagguuucucaaagaa

SEQ ID NO: 124229 - RNA, 16 nt, Homo sapiens
uacuauuuuuacuaau

SEQ ID NO: 124230 - RNA, 17 nt, Homo sapiens
uguuucaaacaaaaagu

SEQ ID NO: 124231 - RNA, 14 nt, Homo sapiens
auugggccaaagaa

SEQ ID NO: 124232 - RNA, 11 nt, Homo sapiens
ccaaggucucc

SEQ ID NO: 124233 - RNA, 20 nt, Homo sapiens
cuaagcacgggccauaugaa

SEQ ID NO: 124234 - RNA, 16 nt, Homo sapiens
acuauugcuugcacaa

SEQ ID NO: 124235 - RNA, 17 nt, Homo sapiens
uagcauuugucaacaaa

SEQ ID NO: 124236 - RNA, 15 nt, Homo sapiens
ucguucucugccuca

SEQ ID NO: 124237 - RNA, 17 nt, Homo sapiens
gucaaagccuugguaaa

SEQ ID NO: 124238 - RNA, 14 nt, Homo sapiens
ugugccaucagcuc

SEQ ID NO: 124239 - RNA, 22 nt, Homo sapiens
caaaaacauucuuacauuuuac

SEQ ID NO: 124240 - RNA, 13 nt, Homo sapiens
agcaaaaccaaau

SEQ ID NO: 124241 - RNA, 14 nt, Homo sapiens
uacuucucugcuau

SEQ ID NO: 124242 - RNA, 19 nt, Homo sapiens
ccucaucuccuaaaaggca

SEQ ID NO: 124243 - RNA, 15 nt, Homo sapiens
acacaaucugaaaca

SEQ ID NO: 124244 - RNA, 15 nt, Homo sapiens
ccauaugaauaacau

SEQ ID NO: 124245 - RNA, 19 nt, Homo sapiens
cacuguguuuuuuuguaua

SEQ ID NO: 124246 - RNA, 15 nt, Homo sapiens
auugaacuuaugcaa

SEQ ID NO: 124247 - RNA, 15 nt, Homo sapiens
aaugacacagucuug

SEQ ID NO: 124248 - RNA, 20 nt, Homo sapiens
auugcagcgauuaauaacag

SEQ ID NO: 124249 - RNA, 13 nt, Homo sapiens
ugcaauguuuuag

SEQ ID NO: 124250 - RNA, 20 nt, Homo sapiens
uggacucaagcaagauuuca

SEQ ID NO: 124251 - RNA, 13 nt, Homo sapiens
gaaacagcuucau

SEQ ID NO: 124252 - RNA, 18 nt, Homo sapiens
ucucgugguaggacugua

SEQ ID NO: 124253 - RNA, 14 nt, Homo sapiens
ccuggcucaucucu

SEQ ID NO: 124254 - RNA, 20 nt, Homo sapiens
gggacuaaguguaccagaga

SEQ ID NO: 124255 - RNA, 12 nt, Homo sapiens
acaaucuuguca

SEQ ID NO: 124256 - RNA, 19 nt, Homo sapiens
guuguuaauaaaaguacau

SEQ ID NO: 124257 - RNA, 21 nt, Homo sapiens
gucucaaacuccugaccucaa

SEQ ID NO: 124258 - RNA, 20 nt, Homo sapiens
agugcaguuuuuuucuuguc

SEQ ID NO: 124259 - RNA, 18 nt, Homo sapiens
cuucuuuacuuaguucaa

SEQ ID NO: 124260 - RNA, 21 nt, Homo sapiens
gaccaauauuguacaguuuuu

SEQ ID NO: 124261 - RNA, 15 nt, Homo sapiens
agagggaaaacagaa

SEQ ID NO: 124262 - RNA, 22 nt, Homo sapiens
ccugaccucaaguaauccaccu

SEQ ID NO: 124263 - RNA, 20 nt, Homo sapiens
cuccugaccucaaguaaucc

SEQ ID NO: 124264 - RNA, 20 nt, Homo sapiens
uaaacuuacuuaguguuaug

SEQ ID NO: 124265 - RNA, 15 nt, Homo sapiens
cacagcaucagcuca

SEQ ID NO: 124266 - RNA, 14 nt, Homo sapiens
auguaucucaggaa

SEQ ID NO: 124267 - RNA, 15 nt, Homo sapiens
gaauguaaugguggc

SEQ ID NO: 124268 - RNA, 23 nt, Homo sapiens
ccaguaguggugacugugggcuc

SEQ ID NO: 124269 - RNA, 16 nt, Homo sapiens
aaguccacaguggaac

SEQ ID NO: 124270 - RNA, 14 nt, Homo sapiens
aggguaaauucucu

SEQ ID NO: 124271 - RNA, 14 nt, Homo sapiens
uguuaacugaaugc

SEQ ID NO: 124272 - RNA, 15 nt, Homo sapiens
ugaaugccacucugu

SEQ ID NO: 124273 - RNA, 22 nt, Homo sapiens
ccauaggaggccaacccaaaau

SEQ ID NO: 124274 - RNA, 16 nt, Homo sapiens
uagaucugaacuccuu

SEQ ID NO: 124275 - RNA, 13 nt, Homo sapiens
gauaugcuguauu

SEQ ID NO: 124276 - RNA, 14 nt, Homo sapiens
auuguagcuaugau

SEQ ID NO: 124277 - RNA, 12 nt, Homo sapiens
uuucccaaagag

SEQ ID NO: 124278 - RNA, 15 nt, Homo sapiens
uggguucaagugauu

SEQ ID NO: 124279 - RNA, 13 nt, Homo sapiens
cagagacugggac

SEQ ID NO: 124280 - RNA, 20 nt, Homo sapiens
cauaaaaguuggcucaggag

SEQ ID NO: 124281 - RNA, 14 nt, Homo sapiens
gccagcaucugccu

SEQ ID NO: 124282 - RNA, 19 nt, Homo sapiens
ucaagugauucuccugccu

SEQ ID NO: 124283 - RNA, 19 nt, Homo sapiens
cuuccuggaggugacacuu

SEQ ID NO: 124284 - RNA, 17 nt, Homo sapiens
gaaaagggaacugaaca

SEQ ID NO: 124285 - RNA, 21 nt, Homo sapiens
ugaugcuggggacacagcauc

SEQ ID NO: 124286 - RNA, 22 nt, Homo sapiens
aauauuccagagacugggacua

SEQ ID NO: 124287 - RNA, 18 nt, Homo sapiens
gcaguuuuuuucuugucu

SEQ ID NO: 124288 - RNA, 23 nt, Homo sapiens
aaaaccguaugagggaacugugu

SEQ ID NO: 124289 - RNA, 21 nt, Homo sapiens
cacugccaaagaacuuggaaa

SEQ ID NO: 124290 - RNA, 18 nt, Homo sapiens
ggaaauagugauuuccac

SEQ ID NO: 124291 - RNA, 17 nt, Homo sapiens
uggcacuuauaaccaaa

SEQ ID NO: 124292 - RNA, 18 nt, Homo sapiens
aauucagggagugggcua

SEQ ID NO: 124293 - RNA, 14 nt, Homo sapiens
uuaaacuuacuuag

SEQ ID NO: 124294 - RNA, 17 nt, Homo sapiens
ucuccuuagaaguggaa

SEQ ID NO: 124295 - RNA, 12 nt, Homo sapiens
ugaacauuccag

SEQ ID NO: 124296 - RNA, 20 nt, Homo sapiens
ucuacugucucaguuuacau

SEQ ID NO: 124297 - RNA, 22 nt, Homo sapiens
uguuucaaacaaaaagucauaa

SEQ ID NO: 124298 - RNA, 17 nt, Homo sapiens
cacauuuuucagauaua

SEQ ID NO: 124299 - RNA, 14 nt, Homo sapiens
uaguaaaagccauc

SEQ ID NO: 124300 - RNA, 20 nt, Homo sapiens
ggcacagcauggagucacag

SEQ ID NO: 124301 - RNA, 22 nt, Homo sapiens
gcuggauuacaggcaugugcca

SEQ ID NO: 124302 - RNA, 15 nt, Homo sapiens
gccaguuacauaaaa

SEQ ID NO: 124303 - RNA, 21 nt, Homo sapiens
auguccuacugagacagcaca

SEQ ID NO: 124304 - RNA, 14 nt, Homo sapiens
accguacacugugu

SEQ ID NO: 124305 - RNA, 22 nt, Homo sapiens
agauucuaauggcuuuauugca

SEQ ID NO: 124306 - RNA, 20 nt, Homo sapiens
ugcagccacuguuaagccau

SEQ ID NO: 124307 - RNA, 16 nt, Homo sapiens
aauuuugucuuuauga

SEQ ID NO: 124308 - RNA, 13 nt, Homo sapiens
ccuccaaguccac

SEQ ID NO: 124309 - RNA, 21 nt, Homo sapiens
uuggacucaagcaagauuuca

SEQ ID NO: 124310 - RNA, 21 nt, Homo sapiens
aaagcccuuaaaaauaugugu

SEQ ID NO: 124311 - RNA, 20 nt, Homo sapiens
ucucaaacuccugaccucaa

SEQ ID NO: 124312 - RNA, 18 nt, Homo sapiens
aaggacacuagaagauuu

SEQ ID NO: 124313 - RNA, 17 nt, Homo sapiens
ugaauuuugucuuuaug

SEQ ID NO: 124314 - RNA, 22 nt, Homo sapiens
uagugaaucacguaaagcuaga

SEQ ID NO: 124315 - RNA, 22 nt, Homo sapiens
caccgcgcccagccucaucucu

SEQ ID NO: 124316 - RNA, 22 nt, Homo sapiens
cuguagaaaagggaacugaaca

SEQ ID NO: 124317 - RNA, 21 nt, Homo sapiens
cuaagaagcagauaauggugu

SEQ ID NO: 124318 - RNA, 19 nt, Homo sapiens
uuucuuucaaagaagccag

SEQ ID NO: 124319 - RNA, 14 nt, Homo sapiens
acguaagacugugu

SEQ ID NO: 124320 - RNA, 17 nt, Homo sapiens
agugagcuccuaagcca

SEQ ID NO: 124321 - RNA, 15 nt, Homo sapiens
cuuacuuaguguuau

SEQ ID NO: 124322 - RNA, 19 nt, Homo sapiens
accuguggccaaguucuua

SEQ ID NO: 124323 - RNA, 23 nt, Homo sapiens
aaaacuucaacguaagacugugu

SEQ ID NO: 124324 - RNA, 18 nt, Homo sapiens
uuaagaaauucacuuccc

SEQ ID NO: 124325 - RNA, 22 nt, Homo sapiens
agaagauggcacuuauaaccaa

SEQ ID NO: 124326 - RNA, 13 nt, Homo sapiens
agagcuuuaccua

SEQ ID NO: 124327 - RNA, 22 nt, Homo sapiens
cuuaagacgugauuuugcugua

SEQ ID NO: 124328 - RNA, 13 nt, Homo sapiens
aaaaugugacuca

SEQ ID NO: 124329 - RNA, 18 nt, Homo sapiens
aaagacaggguuucacca

SEQ ID NO: 124330 - RNA, 17 nt, Homo sapiens
uucuuccaugucuauua

SEQ ID NO: 124331 - RNA, 22 nt, Homo sapiens
uaccuuuuauuuuaauguuucc

SEQ ID NO: 124332 - RNA, 18 nt, Homo sapiens
cucuaacaguaguugcaa

SEQ ID NO: 124333 - RNA, 15 nt, Homo sapiens
cuagucaguuggcua

SEQ ID NO: 124334 - RNA, 22 nt, Homo sapiens
ucagcaccuacaguguacaguc

SEQ ID NO: 124335 - RNA, 19 nt, Homo sapiens
cuuuaauuuuuuacuauuu

SEQ ID NO: 124336 - RNA, 17 nt, Homo sapiens
uuaugaauaguuuccaa

SEQ ID NO: 124337 - RNA, 17 nt, Homo sapiens
ugcuugcacaaaccaau

SEQ ID NO: 124338 - RNA, 14 nt, Homo sapiens
ugagcaaaaccaaa

SEQ ID NO: 124339 - RNA, 16 nt, Homo sapiens
uccuggggaacauaga

SEQ ID NO: 124340 - RNA, 18 nt, Homo sapiens
ggagccccugcucuggug

SEQ ID NO: 124341 - RNA, 19 nt, Homo sapiens
cucugagucccagagccaa

SEQ ID NO: 124342 - RNA, 22 nt, Homo sapiens
gugggcuaagcacgggccauau

SEQ ID NO: 124343 - RNA, 18 nt, Homo sapiens
cgauuaauaacaggcaaa

SEQ ID NO: 124344 - RNA, 19 nt, Homo sapiens
agaaccucgagguuucuca

SEQ ID NO: 124345 - RNA, 20 nt, Homo sapiens
gccagguucugacucuuggc

SEQ ID NO: 124346 - RNA, 22 nt, Homo sapiens
cacagcacaaauuaguuguaua

SEQ ID NO: 124347 - RNA, 18 nt, Homo sapiens
uacuuauagaauucaguc

SEQ ID NO: 124348 - RNA, 20 nt, Homo sapiens
cccaggcuggagugcaauga

SEQ ID NO: 124349 - RNA, 17 nt, Homo sapiens
cuucagucuuuuccaug

SEQ ID NO: 124350 - RNA, 15 nt, Homo sapiens
cuagaguucauggau

SEQ ID NO: 124351 - RNA, 15 nt, Homo sapiens
acaauauacuuguau

SEQ ID NO: 124352 - RNA, 13 nt, Homo sapiens
uucagaaucucuc

SEQ ID NO: 124353 - RNA, 15 nt, Homo sapiens
cucaggcagaucuca

SEQ ID NO: 124354 - RNA, 14 nt, Homo sapiens
ugggagacacugau

SEQ ID NO: 124355 - RNA, 19 nt, Homo sapiens
ggaauuucuguucuuccau

SEQ ID NO: 124356 - RNA, 15 nt, Homo sapiens
cuaguaaaagccauc

SEQ ID NO: 124357 - RNA, 23 nt, Homo sapiens
uguaagaucguucucugccucac

SEQ ID NO: 124358 - RNA, 17 nt, Homo sapiens
ccaaauauuccagagac

SEQ ID NO: 124359 - RNA, 18 nt, Homo sapiens
cauuuguuuuagucugaa

SEQ ID NO: 124360 - RNA, 16 nt, Homo sapiens
uauaaaagacugacca

SEQ ID NO: 124361 - RNA, 21 nt, Homo sapiens
uuaaagcagggauaugcugua

SEQ ID NO: 124362 - RNA, 18 nt, Homo sapiens
gauaaucucuccauuccc

SEQ ID NO: 124363 - RNA, 21 nt, Homo sapiens
ugcccaggcuggagugcaaug

SEQ ID NO: 124364 - RNA, 14 nt, Homo sapiens
uaaccauugucaua

SEQ ID NO: 124365 - RNA, 17 nt, Homo sapiens
agcuggauuacaggcau

SEQ ID NO: 124366 - RNA, 13 nt, Homo sapiens
gcaguggaacuaa

SEQ ID NO: 124367 - RNA, 17 nt, Homo sapiens
uuaaaccguacacugug

SEQ ID NO: 124368 - RNA, 19 nt, Homo sapiens
agccaugggagacacugau

SEQ ID NO: 124369 - RNA, 21 nt, Homo sapiens
augucuuuauuaaauguagaa

SEQ ID NO: 124370 - RNA, 18 nt, Homo sapiens
ucacugcaacuucugccu

SEQ ID NO: 124371 - RNA, 20 nt, Homo sapiens
gcagaugguggagcugaaua

SEQ ID NO: 124372 - RNA, 21 nt, Homo sapiens
guagagagagaaaaguaacug

SEQ ID NO: 124373 - RNA, 19 nt, Homo sapiens
acugggcgcaguuggucuu

SEQ ID NO: 124374 - RNA, 14 nt, Homo sapiens
agaugaaacaucau

SEQ ID NO: 124375 - RNA, 16 nt, Homo sapiens
cauaaaaguuggcuca

SEQ ID NO: 124376 - RNA, 17 nt, Homo sapiens
cuaaguguaccagagaa

SEQ ID NO: 124377 - RNA, 21 nt, Homo sapiens
acugcauaugaaaggacacua

SEQ ID NO: 124378 - RNA, 14 nt, Homo sapiens
uuugaggguguaua

SEQ ID NO: 124379 - RNA, 12 nt, Homo sapiens
ucccacugccaa

SEQ ID NO: 124380 - RNA, 18 nt, Homo sapiens
cagugacuccacucugag

SEQ ID NO: 124381 - RNA, 20 nt, Homo sapiens
aagaaucggcaauguuucaa

SEQ ID NO: 124382 - RNA, 13 nt, Homo sapiens
agaaagugaucca

SEQ ID NO: 124383 - RNA, 18 nt, Homo sapiens
agaagguugagggcaaug

SEQ ID NO: 124384 - RNA, 15 nt, Homo sapiens
acaaagccaaucuca

SEQ ID NO: 124385 - RNA, 22 nt, Homo sapiens
gcacaaaccaauuaaacccagu

SEQ ID NO: 124386 - RNA, 13 nt, Homo sapiens
uccacaguggaac

SEQ ID NO: 124387 - RNA, 12 nt, Homo sapiens
ggaaaauucucu

SEQ ID NO: 124388 - RNA, 15 nt, Homo sapiens
ugcagccacuguuaa

SEQ ID NO: 124389 - RNA, 16 nt, Homo sapiens
uuucauaucacacugu

SEQ ID NO: 124390 - RNA, 19 nt, Homo sapiens
guuucaccauguuggccag

SEQ ID NO: 124391 - RNA, 15 nt, Homo sapiens
cagcaccuacagugu

SEQ ID NO: 124392 - RNA, 18 nt, Homo sapiens
ugcaaugacacagucuug

SEQ ID NO: 124393 - RNA, 19 nt, Homo sapiens
agcaccuacaguguacagu

SEQ ID NO: 124394 - RNA, 21 nt, Homo sapiens
ucugaggcuucuggggcuuca

SEQ ID NO: 124395 - RNA, 15 nt, Homo sapiens
auucuguaguuucac

SEQ ID NO: 124396 - RNA, 21 nt, Homo sapiens
gaaauucacuuccccucuagg

SEQ ID NO: 124397 - RNA, 20 nt, Homo sapiens
gacgugauuuugcuguagaa

SEQ ID NO: 124398 - RNA, 13 nt, Homo sapiens
ugacacagucuug

SEQ ID NO: 124399 - RNA, 21 nt, Homo sapiens
guuuuacuguccaaagacaug

SEQ ID NO: 124400 - RNA, 16 nt, Homo sapiens
agucugauuguagcua

SEQ ID NO: 124401 - RNA, 19 nt, Homo sapiens
aauagugauuuccacagug

SEQ ID NO: 124402 - RNA, 14 nt, Homo sapiens
caguaguugcaaug

SEQ ID NO: 124403 - RNA, 20 nt, Homo sapiens
ugauauguugguagauucua

SEQ ID NO: 124404 - RNA, 20 nt, Homo sapiens
ucauauugaugugugucuag

SEQ ID NO: 124405 - RNA, 16 nt, Homo sapiens
augcaguuuuccuuaa

SEQ ID NO: 124406 - RNA, 16 nt, Homo sapiens
ucaggcagaucucagc

SEQ ID NO: 124407 - RNA, 16 nt, Homo sapiens
ucacguaaagcuagaa

SEQ ID NO: 124408 - RNA, 17 nt, Homo sapiens
aaauaaucaguguuucc

SEQ ID NO: 124409 - RNA, 21 nt, Homo sapiens
aggucuccagagggugaaagc

SEQ ID NO: 124410 - RNA, 18 nt, Homo sapiens
ucuuggguucaagugauu

SEQ ID NO: 124411 - RNA, 22 nt, Homo sapiens
ucuuuaaccacuuuucaauguc

SEQ ID NO: 124412 - RNA, 15 nt, Homo sapiens
gagcuccuaagccau

SEQ ID NO: 124413 - RNA, 13 nt, Homo sapiens
accaggucucaua

SEQ ID NO: 124414 - RNA, 16 nt, Homo sapiens
ugcauucucuagucag

SEQ ID NO: 124415 - RNA, 23 nt, Homo sapiens
uucauggauauguuauacugaac

SEQ ID NO: 124416 - RNA, 23 nt, Homo sapiens
aauuuuauguuuaguugcacaaa

SEQ ID NO: 124417 - RNA, 19 nt, Homo sapiens
caugggagacacugaugua

SEQ ID NO: 124418 - RNA, 19 nt, Homo sapiens
auugcuugcacaaaccaau

SEQ ID NO: 124419 - RNA, 13 nt, Homo sapiens
gcugggauuacag

SEQ ID NO: 124420 - RNA, 21 nt, Homo sapiens
ucauggauauguuauacugaa

SEQ ID NO: 124421 - RNA, 17 nt, Homo sapiens
uuagugcacagcacaaa

SEQ ID NO: 124422 - RNA, 23 nt, Homo sapiens
auauacuuauagaauucagucaa

SEQ ID NO: 124423 - RNA, 15 nt, Homo sapiens
augggagacacugau

SEQ ID NO: 124424 - RNA, 23 nt, Homo sapiens
guggacucuaacaguaguugcaa

SEQ ID NO: 124425 - RNA, 12 nt, Homo sapiens
uaaaaguuggcu

SEQ ID NO: 124426 - RNA, 23 nt, Homo sapiens
caguuggcuaagaagugacucuu

SEQ ID NO: 124427 - RNA, 23 nt, Homo sapiens
gaaaagaaucggcaauguuucaa

SEQ ID NO: 124428 - RNA, 19 nt, Homo sapiens
cgugauuuugcuguagaag

SEQ ID NO: 124429 - RNA, 16 nt, Homo sapiens
agucuuguauuaaguu

SEQ ID NO: 124430 - RNA, 17 nt, Homo sapiens
uaagaagugacucuugc

SEQ ID NO: 124431 - RNA, 17 nt, Homo sapiens
ggcaggaccuguggcca

SEQ ID NO: 124432 - RNA, 16 nt, Homo sapiens
aaaagggaacugaaca

SEQ ID NO: 124433 - RNA, 23 nt, Homo sapiens
agccaccgcgcccagccucaucu

SEQ ID NO: 124434 - RNA, 20 nt, Homo sapiens
uguguuuuuaauaaagacag

SEQ ID NO: 124435 - RNA, 17 nt, Homo sapiens
ugggagacacugaugua

SEQ ID NO: 124436 - RNA, 13 nt, Homo sapiens
gugauauguuggu

SEQ ID NO: 124437 - RNA, 23 nt, Homo sapiens
ucaaaugagaaaaugucuuuauu

SEQ ID NO: 124438 - RNA, 17 nt, Homo sapiens
gaauuucuguucuucca

SEQ ID NO: 124439 - RNA, 17 nt, Homo sapiens
uucaacguaagacugug

SEQ ID NO: 124440 - RNA, 18 nt, Homo sapiens
cagaaagcuagaaagugu

SEQ ID NO: 124441 - RNA, 13 nt, Homo sapiens
gaauuaagcacag

SEQ ID NO: 124442 - RNA, 15 nt, Homo sapiens
aacugaacauuccag

SEQ ID NO: 124443 - RNA, 23 nt, Homo sapiens
ucuuaagacgugauuuugcugua

SEQ ID NO: 124444 - RNA, 21 nt, Homo sapiens
cagguucugacucuuggcaca

SEQ ID NO: 124445 - RNA, 13 nt, Homo sapiens
gucuauuagcucc

SEQ ID NO: 124446 - RNA, 18 nt, Homo sapiens
uccagagacugggacuaa

SEQ ID NO: 124447 - RNA, 15 nt, Homo sapiens
uuuucaaugucuaaa

SEQ ID NO: 124448 - RNA, 10 nt, Homo sapiens
ucauauugau

SEQ ID NO: 124449 - RNA, 13 nt, Homo sapiens
ucccucaaaacaa

SEQ ID NO: 124450 - RNA, 19 nt, Homo sapiens
caaucucaaucccucaaaa

SEQ ID NO: 124451 - RNA, 18 nt, Homo sapiens
ccacccucccacugccaa

SEQ ID NO: 124452 - RNA, 18 nt, Homo sapiens
uccuccccuguucauucu

SEQ ID NO: 124453 - RNA, 18 nt, Homo sapiens
gccacccucccacugcca

SEQ ID NO: 124454 - RNA, 14 nt, Homo sapiens
caauagaaauccaa

SEQ ID NO: 124455 - RNA, 19 nt, Homo sapiens
ccuuggcuaguaaaagcca

SEQ ID NO: 124456 - RNA, 16 nt, Homo sapiens
gaaguuuucuugacuu

SEQ ID NO: 124457 - RNA, 23 nt, Homo sapiens
gucaauguccuacugagacagca

SEQ ID NO: 124458 - RNA, 19 nt, Homo sapiens
accugccaggcacacugag

SEQ ID NO: 124459 - RNA, 14 nt, Homo sapiens
agcuggagucuguc

SEQ ID NO: 124460 - RNA, 13 nt, Homo sapiens
caggcacacugag

SEQ ID NO: 124461 - RNA, 21 nt, Homo sapiens
agcuagcaacauuuguuuuag

SEQ ID NO: 124462 - RNA, 21 nt, Homo sapiens
ucucccagccagguucugacu

SEQ ID NO: 124463 - RNA, 17 nt, Homo sapiens
cauacuagaguucaugg

SEQ ID NO: 124464 - RNA, 23 nt, Homo sapiens
aaaugcugguuuuucaguuuuca

SEQ ID NO: 124465 - RNA, 18 nt, Homo sapiens
gaucguucucugccucac

SEQ ID NO: 124466 - RNA, 18 nt, Homo sapiens
accauuagcauuugucaa

SEQ ID NO: 124467 - RNA, 20 nt, Homo sapiens
cagagucucgcucuguugcc

SEQ ID NO: 124468 - RNA, 13 nt, Homo sapiens
gcuucuuuacuua

SEQ ID NO: 124469 - RNA, 18 nt, Homo sapiens
ugugaaguuuaauugacu

SEQ ID NO: 124470 - RNA, 15 nt, Homo sapiens
uggauuugucuuugg

SEQ ID NO: 124471 - RNA, 16 nt, Homo sapiens
gcuccauucaaaguga

SEQ ID NO: 124472 - RNA, 13 nt, Homo sapiens
aucugaacuccuu

SEQ ID NO: 124473 - RNA, 21 nt, Homo sapiens
cuuuguaaagaaaguggcuug

SEQ ID NO: 124474 - RNA, 15 nt, Homo sapiens
acaguaguugcaaug

SEQ ID NO: 124475 - RNA, 16 nt, Homo sapiens
ugccaggcacacugag

SEQ ID NO: 124476 - RNA, 22 nt, Homo sapiens
augaaucaaucaauucauaucu

SEQ ID NO: 124477 - RNA, 22 nt, Homo sapiens
cugucaauguccuacugagaca

SEQ ID NO: 124478 - RNA, 18 nt, Homo sapiens
uguuguuuucccaaagag

SEQ ID NO: 124479 - RNA, 17 nt, Homo sapiens
ucggcucuggccuccaa

SEQ ID NO: 124480 - RNA, 22 nt, Homo sapiens
ggcugucagauauaaguaacuu

SEQ ID NO: 124481 - RNA, 14 nt, Homo sapiens
gauuuccacaguga

SEQ ID NO: 124482 - RNA, 17 nt, Homo sapiens
uagcuuauacaaaacau

SEQ ID NO: 124483 - RNA, 22 nt, Homo sapiens
uucagucaaagauacacaaucu

SEQ ID NO: 124484 - RNA, 17 nt, Homo sapiens
uccacagugacuccacu

SEQ ID NO: 124485 - RNA, 14 nt, Homo sapiens
ugaauaugccacuu

SEQ ID NO: 124486 - RNA, 15 nt, Homo sapiens
uucuuucaaagaagc

SEQ ID NO: 124487 - RNA, 17 nt, Homo sapiens
cugguggggcugccagg

SEQ ID NO: 124488 - RNA, 19 nt, Homo sapiens
cuccuggaccaggucucau

SEQ ID NO: 124489 - RNA, 12 nt, Homo sapiens
uauuccagagac

SEQ ID NO: 124490 - RNA, 20 nt, Homo sapiens
uaaauuucucuacugucuca

SEQ ID NO: 124491 - RNA, 14 nt, Homo sapiens
ucuaaguaaauaca

SEQ ID NO: 124492 - RNA, 23 nt, Homo sapiens
uaaaaguacauguuaaacuuacu

SEQ ID NO: 124493 - RNA, 20 nt, Homo sapiens
ggcuggagugcaaugacaca

SEQ ID NO: 124494 - RNA, 22 nt, Homo sapiens
guuuaugcauagauaaucucuc

SEQ ID NO: 124495 - RNA, 17 nt, Homo sapiens
acccuucuuuucugacu

SEQ ID NO: 124496 - RNA, 13 nt, Homo sapiens
caguguacagucu

SEQ ID NO: 124497 - RNA, 17 nt, Homo sapiens
gacgugauuuugcugua

SEQ ID NO: 124498 - RNA, 12 nt, Homo sapiens
gcuggagugcaa

SEQ ID NO: 124499 - RNA, 13 nt, Homo sapiens
guguaccagagaa

SEQ ID NO: 124500 - RNA, 22 nt, Homo sapiens
guguuuuuaauaaagacagggu

SEQ ID NO: 124501 - RNA, 21 nt, Homo sapiens
ggaauccuggggaacauagaa

SEQ ID NO: 124502 - RNA, 22 nt, Homo sapiens
caaucaauucauaucuauuuau

SEQ ID NO: 124503 - RNA, 23 nt, Homo sapiens
uaguaaaagccaucuauguauau

SEQ ID NO: 124504 - RNA, 16 nt, Homo sapiens
aaagggagaagaggga

SEQ ID NO: 124505 - RNA, 22 nt, Homo sapiens
cugggauuacagggaugagcca

SEQ ID NO: 124506 - RNA, 20 nt, Homo sapiens
aaggcugugccaucagcucc

SEQ ID NO: 124507 - RNA, 15 nt, Homo sapiens
cuggagucugucaau

SEQ ID NO: 124508 - RNA, 19 nt, Homo sapiens
ugagucccagagccaauca

SEQ ID NO: 124509 - RNA, 21 nt, Homo sapiens
accgcgcccagccucaucucu

SEQ ID NO: 124510 - RNA, 20 nt, Homo sapiens
uugaaguauauucaaccaaa

SEQ ID NO: 124511 - RNA, 20 nt, Homo sapiens
uguuucaaacaaaaagucau

SEQ ID NO: 124512 - RNA, 16 nt, Homo sapiens
aaauauaguucacaau

SEQ ID NO: 124513 - RNA, 20 nt, Homo sapiens
acucuaacaguaguugcaau

SEQ ID NO: 124514 - RNA, 22 nt, Homo sapiens
gcagcgauuaauaacaggcaaa

SEQ ID NO: 124515 - RNA, 22 nt, Homo sapiens
ccauacuagaguucauggauau

SEQ ID NO: 124516 - RNA, 13 nt, Homo sapiens
aaaaacauucuua

SEQ ID NO: 124517 - RNA, 19 nt, Homo sapiens
ccaaagcccaaagugguau

SEQ ID NO: 124518 - RNA, 14 nt, Homo sapiens
ccagagacugggac

SEQ ID NO: 124519 - RNA, 21 nt, Homo sapiens
auaacuuuuuuuuaaguuaca

SEQ ID NO: 124520 - RNA, 22 nt, Homo sapiens
uacuuuuuccuggcucaucucu

SEQ ID NO: 124521 - RNA, 19 nt, Homo sapiens
caccaacuauagaauguau

SEQ ID NO: 124522 - RNA, 13 nt, Homo sapiens
accuacaguguac

SEQ ID NO: 124523 - RNA, 11 nt, Homo sapiens
cacaugcuuuu

SEQ ID NO: 124524 - RNA, 19 nt, Homo sapiens
caaaaccaaauauuccaga

SEQ ID NO: 124525 - RNA, 14 nt, Homo sapiens
aaacaucauuucaa

SEQ ID NO: 124526 - RNA, 16 nt, Homo sapiens
uagcuuauacaaaaca

SEQ ID NO: 124527 - RNA, 16 nt, Homo sapiens
cagcauggagucacag

SEQ ID NO: 124528 - RNA, 14 nt, Homo sapiens
uccaaagacauguu

SEQ ID NO: 124529 - RNA, 19 nt, Homo sapiens
cuuaugcaaauaaccauug

SEQ ID NO: 124530 - RNA, 17 nt, Homo sapiens
guacaaaguaagccaug

SEQ ID NO: 124531 - RNA, 21 nt, Homo sapiens
aggacacuagaagauuuugaa

SEQ ID NO: 124532 - RNA, 20 nt, Homo sapiens
ugcaguuuuuuucuugucua

SEQ ID NO: 124533 - RNA, 22 nt, Homo sapiens
ccauuagcauuugucaacaaag

SEQ ID NO: 124534 - RNA, 13 nt, Homo sapiens
cuaaguaaauaca

SEQ ID NO: 124535 - RNA, 12 nt, Homo sapiens
ccaguuacauaa

SEQ ID NO: 124536 - RNA, 16 nt, Homo sapiens
ucaaagccuugguaaa

SEQ ID NO: 124537 - RNA, 22 nt, Homo sapiens
gcaggauuugggcucuuggaau

SEQ ID NO: 124538 - RNA, 15 nt, Homo sapiens
ccuuagaaguggaag

SEQ ID NO: 124539 - RNA, 13 nt, Homo sapiens
cuaaauaugagcc

SEQ ID NO: 124540 - RNA, 15 nt, Homo sapiens
ucaaaaacauucuua

SEQ ID NO: 124541 - RNA, 15 nt, Homo sapiens
cuguggccaaguucu

SEQ ID NO: 124542 - RNA, 16 nt, Homo sapiens
gugccaucagcuccuu

SEQ ID NO: 124543 - RNA, 19 nt, Homo sapiens
ugccaucuuggacuuguca

SEQ ID NO: 124544 - RNA, 22 nt, Homo sapiens
uacugcuggcaguggaacuaag

SEQ ID NO: 124545 - RNA, 16 nt, Homo sapiens
augagcaaaaccaaau

SEQ ID NO: 124546 - RNA, 24 nt, Homo sapiens
agugagacuuugaggguguauauu

SEQ ID NO: 124547 - RNA, 15 nt, Homo sapiens
uccuguuacaaaaga

SEQ ID NO: 124548 - RNA, 14 nt, Homo sapiens
caucauuucaaucg

SEQ ID NO: 124549 - RNA, 12 nt, Homo sapiens
uuuuauauccac

SEQ ID NO: 124550 - RNA, 16 nt, Homo sapiens
uauugaacuuaugcaa

SEQ ID NO: 124551 - RNA, 22 nt, Homo sapiens
cccgccacccucccacugccaa

SEQ ID NO: 124552 - RNA, 20 nt, Homo sapiens
cuuguuguuuucccaaagag

SEQ ID NO: 124553 - RNA, 18 nt, Homo sapiens
gccagagcaaacagaaaa

SEQ ID NO: 124554 - RNA, 19 nt, Homo sapiens
gacgugauuuugcuguaga

SEQ ID NO: 124555 - RNA, 17 nt, Homo sapiens
guuguuuucccaaagag

SEQ ID NO: 124556 - RNA, 18 nt, Homo sapiens
gacgugauuuugcuguag

SEQ ID NO: 124557 - RNA, 13 nt, Homo sapiens
aaaagacugacca

SEQ ID NO: 124558 - RNA, 18 nt, Homo sapiens
cucccagccagguucuga

SEQ ID NO: 124559 - RNA, 15 nt, Homo sapiens
uaauaaagacagggu

SEQ ID NO: 124560 - RNA, 20 nt, Homo sapiens
ccacagugacuccacucuga

SEQ ID NO: 124561 - RNA, 20 nt, Homo sapiens
ugaaagcuggagucugucaa

SEQ ID NO: 124562 - RNA, 22 nt, Homo sapiens
aguuccgacugccaucuuggac

SEQ ID NO: 124563 - RNA, 19 nt, Homo sapiens
aagggcuuggacucaagca

SEQ ID NO: 124564 - RNA, 13 nt, Homo sapiens
augaaacaucauu

SEQ ID NO: 124565 - RNA, 20 nt, Homo sapiens
gccuccaaguccacagugga

SEQ ID NO: 124566 - RNA, 17 nt, Homo sapiens
cuucuuuuugcuucaaa

SEQ ID NO: 124567 - RNA, 15 nt, Homo sapiens
uaucuaaaaucugcu

SEQ ID NO: 124568 - RNA, 19 nt, Homo sapiens
acaaucuugucauacuuga

SEQ ID NO: 124569 - RNA, 13 nt, Homo sapiens
auucugcacucag

SEQ ID NO: 124570 - RNA, 16 nt, Homo sapiens
aaugccacucuguaau

SEQ ID NO: 124571 - RNA, 20 nt, Homo sapiens
gccacucuguaauugcaaaa

SEQ ID NO: 124572 - RNA, 22 nt, Homo sapiens
guuucauauugaugugugucua

SEQ ID NO: 124573 - RNA, 14 nt, Homo sapiens
guuuaguugcacaa

SEQ ID NO: 124574 - RNA, 21 nt, Homo sapiens
aagauuucagauuugugacca

SEQ ID NO: 124575 - RNA, 15 nt, Homo sapiens
acucaucauuuccau

SEQ ID NO: 124576 - RNA, 16 nt, Homo sapiens
gcccagccucaucucu

SEQ ID NO: 124577 - RNA, 16 nt, Homo sapiens
uagaaaagggaacuga

SEQ ID NO: 124578 - RNA, 15 nt, Homo sapiens
ccaaauuauggcaaa

SEQ ID NO: 124579 - RNA, 16 nt, Homo sapiens
gcagaguacaaaguaa

SEQ ID NO: 124580 - RNA, 17 nt, Homo sapiens
cagguucugacucuugg

SEQ ID NO: 124581 - RNA, 20 nt, Homo sapiens
aaucuuucugcagaaacaga

SEQ ID NO: 124582 - RNA, 19 nt, Homo sapiens
agauaaucucuccauuccc

SEQ ID NO: 124583 - RNA, 13 nt, Homo sapiens
ucuuccaucaccu

SEQ ID NO: 124584 - RNA, 21 nt, Homo sapiens
uaagaagcagauaaugguguu

SEQ ID NO: 124585 - RNA, 20 nt, Homo sapiens
guuaaaauaaaauuguacau

SEQ ID NO: 124586 - RNA, 12 nt, Homo sapiens
aaugaaagugag

SEQ ID NO: 124587 - RNA, 19 nt, Homo sapiens
gagaucuauauauguauaa

SEQ ID NO: 124588 - RNA, 13 nt, Homo sapiens
gucuuguguuucu

SEQ ID NO: 124589 - RNA, 19 nt, Homo sapiens
cacuuagguccaaggucuc

SEQ ID NO: 124590 - RNA, 19 nt, Homo sapiens
agugauucuccugccucag

SEQ ID NO: 124591 - RNA, 16 nt, Homo sapiens
caauauuguacaguuu

SEQ ID NO: 124592 - RNA, 14 nt, Homo sapiens
uagaagauggcacu

SEQ ID NO: 124593 - RNA, 21 nt, Homo sapiens
cagaaucucucuucuuuucaa

SEQ ID NO: 124594 - RNA, 12 nt, Homo sapiens
cacugccaaaga

SEQ ID NO: 124595 - RNA, 14 nt, Homo sapiens
aauagugauuucca

SEQ ID NO: 124596 - RNA, 23 nt, Homo sapiens
uaaaaguuggcucaggagucuua

SEQ ID NO: 124597 - RNA, 17 nt, Homo sapiens
ucaaucccucaaaacaa

SEQ ID NO: 124598 - RNA, 14 nt, Homo sapiens
acaaaguaagccau

SEQ ID NO: 124599 - RNA, 23 nt, Homo sapiens
aagacgugauuuugcuguagaag

SEQ ID NO: 124600 - RNA, 14 nt, Homo sapiens
aagaaacauugccu

SEQ ID NO: 124601 - RNA, 16 nt, Homo sapiens
ucaacaaagucaccca

SEQ ID NO: 124602 - RNA, 15 nt, Homo sapiens
aaauuucucuacugu

SEQ ID NO: 124603 - RNA, 12 nt, Homo sapiens
acacagcaucag

SEQ ID NO: 124604 - RNA, 18 nt, Homo sapiens
aucacauucccauuugcu

SEQ ID NO: 124605 - RNA, 22 nt, Homo sapiens
agagagaaaaguaacuguuuug

SEQ ID NO: 124606 - RNA, 20 nt, Homo sapiens
accguaugagggaacugugu

SEQ ID NO: 124607 - RNA, 15 nt, Homo sapiens
ucuguucuuccauca

SEQ ID NO: 124608 - RNA, 16 nt, Homo sapiens
gauucuccugccucag

SEQ ID NO: 124609 - RNA, 22 nt, Homo sapiens
uaggaagaauuuuuauauccac

SEQ ID NO: 124610 - RNA, 18 nt, Homo sapiens
uuguuauucuguaguuuc

SEQ ID NO: 124611 - RNA, 22 nt, Homo sapiens
uggcuucuuuacuuaguucaag

SEQ ID NO: 124612 - RNA, 20 nt, Homo sapiens
auacuagaguucauggauau

SEQ ID NO: 124613 - RNA, 19 nt, Homo sapiens
ggacuaaguguaccagaga

SEQ ID NO: 124614 - RNA, 22 nt, Homo sapiens
guucauggauauguuauacuga

SEQ ID NO: 124615 - RNA, 21 nt, Homo sapiens
ugccacucuguaauugcaaaa

SEQ ID NO: 124616 - RNA, 18 nt, Homo sapiens
uuuuccuggcucaucucu

SEQ ID NO: 124617 - RNA, 15 nt, Homo sapiens
aguuguuaauaaaag

SEQ ID NO: 124618 - RNA, 22 nt, Homo sapiens
cgaauauaucaguaauuucaga

SEQ ID NO: 124619 - RNA, 22 nt, Homo sapiens
uagucugaacaauauauacuua

SEQ ID NO: 124620 - RNA, 18 nt, Homo sapiens
ccuucuuuuuguucuuca

SEQ ID NO: 124621 - RNA, 23 nt, Homo sapiens
uuauucuguaguuucacucucau

SEQ ID NO: 124622 - RNA, 20 nt, Homo sapiens
cuguucuaaggcugugccau

SEQ ID NO: 124623 - RNA, 13 nt, Homo sapiens
uggagucugucaa

SEQ ID NO: 124624 - RNA, 18 nt, Homo sapiens
cuuuuuuuuaaguuacac

SEQ ID NO: 124625 - RNA, 22 nt, Homo sapiens
ucaaacaaaaagucauaaaagu

SEQ ID NO: 124626 - RNA, 16 nt, Homo sapiens
acucaggcagaucuca

SEQ ID NO: 124627 - RNA, 19 nt, Homo sapiens
cuggcaguggaacuaagaa

SEQ ID NO: 124628 - RNA, 20 nt, Homo sapiens
aagaugaaacaucauuucaa

SEQ ID NO: 124629 - RNA, 19 nt, Homo sapiens
ucgugguaggacuguagaa

SEQ ID NO: 124630 - RNA, 19 nt, Homo sapiens
cccaggcuggagugcaaug

SEQ ID NO: 124631 - RNA, 12 nt, Homo sapiens
gaaccaggccag

SEQ ID NO: 124632 - RNA, 16 nt, Homo sapiens
ugaaguuuaauugacu

SEQ ID NO: 124633 - RNA, 18 nt, Homo sapiens
gucugauuguagcuauga

SEQ ID NO: 124634 - RNA, 23 nt, Homo sapiens
aaugucuuuauuaaauguagaaa

SEQ ID NO: 124635 - RNA, 23 nt, Homo sapiens
cgugaccugccaggcacacugag

SEQ ID NO: 124636 - RNA, 13 nt, Homo sapiens
uaugcacaaacuu

SEQ ID NO: 124637 - RNA, 23 nt, Homo sapiens
caaucaguagccagcaucugccu

SEQ ID NO: 124638 - RNA, 14 nt, Homo sapiens
aaugagacuuacuu

SEQ ID NO: 124639 - RNA, 19 nt, Homo sapiens
uagcggggaggggguuauc

SEQ ID NO: 124640 - RNA, 16 nt, Homo sapiens
uuuaauguuuccuuua

SEQ ID NO: 124641 - RNA, 12 nt, Homo sapiens
uuugcuguagaa

SEQ ID NO: 124642 - RNA, 14 nt, Homo sapiens
uagcuccacaaagc

SEQ ID NO: 124643 - RNA, 17 nt, Homo sapiens
gauuugggcucuuggaa

SEQ ID NO: 124644 - RNA, 17 nt, Homo sapiens
cacccucccacugccaa

SEQ ID NO: 124645 - RNA, 13 nt, Homo sapiens
ucaucauuuccau

SEQ ID NO: 124646 - RNA, 14 nt, Homo sapiens
gcuguagaagaugg

SEQ ID NO: 124647 - RNA, 20 nt, Homo sapiens
auuugcuuagaaagucugau

SEQ ID NO: 124648 - RNA, 15 nt, Homo sapiens
uggcuucuuuacuua

SEQ ID NO: 124649 - RNA, 22 nt, Homo sapiens
ggagucuuagagcuuuaccuaa

SEQ ID NO: 124650 - RNA, 19 nt, Homo sapiens
cuccacaaagccaaucuca

SEQ ID NO: 124651 - RNA, 21 nt, Homo sapiens
uuaaauguagaaagugaucca

SEQ ID NO: 124652 - RNA, 17 nt, Homo sapiens
gucaauguccuacugag

SEQ ID NO: 124653 - RNA, 9 nt, Homo sapiens
aaagugaug

SEQ ID NO: 124654 - RNA, 12 nt, Homo sapiens
augacacagucu

SEQ ID NO: 124655 - RNA, 23 nt, Homo sapiens
cuagugcaguuuuuuucuugucu

SEQ ID NO: 124656 - RNA, 22 nt, Homo sapiens
uuaucauuaaaaggaaagcaga

SEQ ID NO: 124657 - RNA, 22 nt, Homo sapiens
cuagaguucauggauauguuau

SEQ ID NO: 124658 - RNA, 16 nt, Homo sapiens
ggggacacagcaucag

SEQ ID NO: 124659 - RNA, 20 nt, Homo sapiens
cugaacaauauauacuuaua

SEQ ID NO: 124660 - RNA, 18 nt, Homo sapiens
caaucugaaacagcuuca

SEQ ID NO: 124661 - RNA, 17 nt, Homo sapiens
ucaaaacaaucuuguca

SEQ ID NO: 124662 - RNA, 18 nt, Homo sapiens
uaaaccguacacuguguu

SEQ ID NO: 124663 - RNA, 20 nt, Homo sapiens
guuuaugcauagauaaucuc

SEQ ID NO: 124664 - RNA, 14 nt, Homo sapiens
gucauaacuagaac

SEQ ID NO: 124665 - RNA, 16 nt, Homo sapiens
uaauaaaaguacaugu

SEQ ID NO: 124666 - RNA, 16 nt, Homo sapiens
acguaagacuguguaa

SEQ ID NO: 124667 - RNA, 14 nt, Homo sapiens
gacagaagcguaua

SEQ ID NO: 124668 - RNA, 13 nt, Homo sapiens
gagcaaacagaaa

SEQ ID NO: 124669 - RNA, 12 nt, Homo sapiens
cuguccaaagac

SEQ ID NO: 124670 - RNA, 17 nt, Homo sapiens
agccccagccuaggaaa

SEQ ID NO: 124671 - RNA, 22 nt, Homo sapiens
ugagacuuugaggguguauauu

SEQ ID NO: 124672 - RNA, 15 nt, Homo sapiens
gcaggacagcuccug

SEQ ID NO: 124673 - RNA, 14 nt, Homo sapiens
ucuuuggugaacau

SEQ ID NO: 124674 - RNA, 15 nt, Homo sapiens
uucaguuuucaggag

SEQ ID NO: 124675 - RNA, 22 nt, Homo sapiens
cuccuuggcuucuuuacuuagu

SEQ ID NO: 124676 - RNA, 18 nt, Homo sapiens
gcaaacagaaaaagaagg

SEQ ID NO: 124677 - RNA, 21 nt, Homo sapiens
acugccaucuuggacuuguca

SEQ ID NO: 124678 - RNA, 15 nt, Homo sapiens
gcuaguaaaagccau

SEQ ID NO: 124679 - RNA, 11 nt, Homo sapiens
ccacucagguc

SEQ ID NO: 124680 - RNA, 19 nt, Homo sapiens
gaaugagcaaaaccaaaua

SEQ ID NO: 124681 - RNA, 22 nt, Homo sapiens
augaggaauuucuguucuucca

SEQ ID NO: 124682 - RNA, 13 nt, Homo sapiens
aguugcuguaugu

SEQ ID NO: 124683 - RNA, 15 nt, Homo sapiens
uccuccccuguucau

SEQ ID NO: 124684 - RNA, 11 nt, Homo sapiens
uuuaaccaaga

SEQ ID NO: 124685 - RNA, 23 nt, Homo sapiens
ccuaagccaugggagacacugau

SEQ ID NO: 124686 - RNA, 18 nt, Homo sapiens
ccaggcuggagugcaaug

SEQ ID NO: 124687 - RNA, 16 nt, Homo sapiens
uugacauucugaaugc

SEQ ID NO: 124688 - RNA, 21 nt, Homo sapiens
uguuuaugaauaguuuccaaa

SEQ ID NO: 124689 - RNA, 19 nt, Homo sapiens
caauguuucaaacaaaaag

SEQ ID NO: 124690 - RNA, 23 nt, Homo sapiens
gaaaugcugguuuuucaguuuuc

SEQ ID NO: 124691 - RNA, 15 nt, Homo sapiens
ccugccaggcacacu

SEQ ID NO: 124692 - RNA, 21 nt, Homo sapiens
ugugcuucuuaaaauagccau

SEQ ID NO: 124693 - RNA, 20 nt, Homo sapiens
aucugcuagggaauaucaau

SEQ ID NO: 124694 - RNA, 15 nt, Homo sapiens
ucuaaaaacauuugu

SEQ ID NO: 124695 - RNA, 15 nt, Homo sapiens
agcgauuaauaacag

SEQ ID NO: 124696 - RNA, 14 nt, Homo sapiens
aaccuagcuagcaa

SEQ ID NO: 124697 - RNA, 20 nt, Homo sapiens
gcacaaauugggccaaagaa

SEQ ID NO: 124698 - RNA, 17 nt, Homo sapiens
caggcuggagugcaaug

SEQ ID NO: 124699 - RNA, 22 nt, Homo sapiens
acauuuguuuuagucugaacaa

SEQ ID NO: 124700 - RNA, 20 nt, Homo sapiens
ugacacucuagucaaagccu

SEQ ID NO: 124701 - RNA, 19 nt, Homo sapiens
gacuaaguguaccagagaa

SEQ ID NO: 124702 - RNA, 20 nt, Homo sapiens
cucuuggguucaagugauuc

SEQ ID NO: 124703 - RNA, 18 nt, Homo sapiens
acuuuugaaaacaaaaua

SEQ ID NO: 124704 - RNA, 13 nt, Homo sapiens
auguguuccaagg

SEQ ID NO: 124705 - RNA, 16 nt, Homo sapiens
uaaaccguacacugug

SEQ ID NO: 124706 - RNA, 12 nt, Homo sapiens
uggcucaucucu

SEQ ID NO: 124707 - RNA, 22 nt, Homo sapiens
ccucaaaugagaaaaugucuuu

SEQ ID NO: 124708 - RNA, 14 nt, Homo sapiens
aaauucacuucccc

SEQ ID NO: 124709 - RNA, 22 nt, Homo sapiens
aucccucaaaacaaucuuguca

SEQ ID NO: 124710 - RNA, 24 nt, Homo sapiens
cuugguaaaauaaucaguguuucc

SEQ ID NO: 124711 - RNA, 21 nt, Homo sapiens
uuauuaaauguagaaagugau

SEQ ID NO: 124712 - RNA, 16 nt, Homo sapiens
aacuuacuuaguguua

SEQ ID NO: 124713 - RNA, 14 nt, Homo sapiens
ccacaguggaacca

SEQ ID NO: 124714 - RNA, 13 nt, Homo sapiens
aaagaaauuucca

SEQ ID NO: 124715 - RNA, 19 nt, Homo sapiens
agggcuuggacucaagcaa

SEQ ID NO: 124716 - RNA, 14 nt, Homo sapiens
agccaguuacauaa

SEQ ID NO: 124717 - RNA, 20 nt, Homo sapiens
cagccuccugaguagcugga

SEQ ID NO: 124718 - RNA, 21 nt, Homo sapiens
aauguguucggugauuucaga

SEQ ID NO: 124719 - RNA, 13 nt, Homo sapiens
ucuuaagacguga

SEQ ID NO: 124720 - RNA, 23 nt, Homo sapiens
aacaguaguugcaauguuuuaga

SEQ ID NO: 124721 - RNA, 15 nt, Homo sapiens
ugcacaaaccaauua

SEQ ID NO: 124722 - RNA, 20 nt, Homo sapiens
gcacucagaaaauggcacuu

SEQ ID NO: 124723 - RNA, 22 nt, Homo sapiens
uguagagagagaaaaguaacug

SEQ ID NO: 124724 - RNA, 15 nt, Homo sapiens
cacaaauuaguugua

SEQ ID NO: 124725 - RNA, 15 nt, Homo sapiens
acacagcaucagcuc

SEQ ID NO: 124726 - RNA, 21 nt, Homo sapiens
uuauauguauaucacauuccc

SEQ ID NO: 124727 - RNA, 15 nt, Homo sapiens
auacuagaguucaug

SEQ ID NO: 124728 - RNA, 11 nt, Homo sapiens
ugaacauucca

SEQ ID NO: 124729 - RNA, 22 nt, Homo sapiens
ggcuaagcacgggccauaugaa

SEQ ID NO: 124730 - RNA, 15 nt, Homo sapiens
aucuguccuguuaca

SEQ ID NO: 124731 - RNA, 17 nt, Homo sapiens
gaaugagcaaaaccaaa

SEQ ID NO: 124732 - RNA, 22 nt, Homo sapiens
ccauuugcuuagaaagucugau

SEQ ID NO: 124733 - RNA, 15 nt, Homo sapiens
auucuccugccucag

SEQ ID NO: 124734 - RNA, 16 nt, Homo sapiens
uauagaaaugcugguu

SEQ ID NO: 124735 - RNA, 16 nt, Homo sapiens
cccuucuuuucugacu

SEQ ID NO: 124736 - RNA, 16 nt, Homo sapiens
caggcuggagugcaau

SEQ ID NO: 124737 - RNA, 13 nt, Homo sapiens
cucuuggguucaa

SEQ ID NO: 124738 - RNA, 15 nt, Homo sapiens
acagcaucagcucaa

SEQ ID NO: 124739 - RNA, 16 nt, Homo sapiens
ucauuguaaaaagccc

SEQ ID NO: 124740 - RNA, 20 nt, Homo sapiens
aagugagcuccuaagccaug

SEQ ID NO: 124741 - RNA, 13 nt, Homo sapiens
auuuacauugccu

SEQ ID NO: 124742 - RNA, 19 nt, Homo sapiens
uuggauacgacaacuugca

SEQ ID NO: 124743 - RNA, 21 nt, Homo sapiens
caggguuucaccauguuggcc

SEQ ID NO: 124744 - RNA, 18 nt, Homo sapiens
aaccucgagguuucucaa

SEQ ID NO: 124745 - RNA, 13 nt, Homo sapiens
gaacuuaugcaaa

SEQ ID NO: 124746 - RNA, 19 nt, Homo sapiens
gugcugggauuacagggau

SEQ ID NO: 124747 - RNA, 17 nt, Homo sapiens
uuuaauguuuccuuuaa

SEQ ID NO: 124748 - RNA, 11 nt, Homo sapiens
aguaagccaug

SEQ ID NO: 124749 - RNA, 16 nt, Homo sapiens
caacauuuguuuuagu

SEQ ID NO: 124750 - RNA, 15 nt, Homo sapiens
uagaaagaagaugaa

SEQ ID NO: 124751 - RNA, 17 nt, Homo sapiens
acauaaaaguuggcuca

SEQ ID NO: 124752 - RNA, 16 nt, Homo sapiens
ucagcaccuacagugu

SEQ ID NO: 124753 - RNA, 20 nt, Homo sapiens
uagauaaucucuccauuccc

SEQ ID NO: 124754 - RNA, 14 nt, Homo sapiens
ccagccucaucucu

SEQ ID NO: 124755 - RNA, 15 nt, Homo sapiens
aauguagaaagugau

SEQ ID NO: 124756 - RNA, 20 nt, Homo sapiens
gauuuugaaauuuuuauuaa

SEQ ID NO: 124757 - RNA, 18 nt, Homo sapiens
cauauugaugugugucua

SEQ ID NO: 124758 - RNA, 22 nt, Homo sapiens
auauacuuauagaauucaguca

SEQ ID NO: 124759 - RNA, 21 nt, Homo sapiens
ggucagaguuccgacugccau

SEQ ID NO: 124760 - RNA, 14 nt, Homo sapiens
uauacaauauacuu

SEQ ID NO: 124761 - RNA, 17 nt, Homo sapiens
gaacuccuuggcuucuu

SEQ ID NO: 124762 - RNA, 21 nt, Homo sapiens
cugaugcuggggacacagcau

SEQ ID NO: 124763 - RNA, 22 nt, Homo sapiens
gucuuggcucacugcaacuucu

SEQ ID NO: 124764 - RNA, 22 nt, Homo sapiens
aagaugaaugagcaaaaccaaa

SEQ ID NO: 124765 - RNA, 16 nt, Homo sapiens
auaaaaguuggcucag

SEQ ID NO: 124766 - RNA, 15 nt, Homo sapiens
ggaccaggucucaua

SEQ ID NO: 124767 - RNA, 13 nt, Homo sapiens
caacuguggcuua

SEQ ID NO: 124768 - RNA, 16 nt, Homo sapiens
aauaaauucaucagau

SEQ ID NO: 124769 - RNA, 13 nt, Homo sapiens
caaagaaauuucc

SEQ ID NO: 124770 - RNA, 21 nt, Homo sapiens
gauaggguuucuaaugguuau

SEQ ID NO: 124771 - RNA, 17 nt, Homo sapiens
uaacaggagugccacuu

SEQ ID NO: 124772 - RNA, 20 nt, Homo sapiens
uugcccaggcuggagugcaa

SEQ ID NO: 124773 - RNA, 22 nt, Homo sapiens
gaaaaagaagguugagggcaau

SEQ ID NO: 124774 - RNA, 14 nt, Homo sapiens
gcuucugauaugca

SEQ ID NO: 124775 - RNA, 14 nt, Homo sapiens
cacuguuaagccau

SEQ ID NO: 124776 - RNA, 13 nt, Homo sapiens
uucuucuuuuugc

SEQ ID NO: 124777 - RNA, 21 nt, Homo sapiens
ggggacacagcaucagcucaa

SEQ ID NO: 124778 - RNA, 23 nt, Homo sapiens
gucucgugguaggacuguagaaa

SEQ ID NO: 124779 - RNA, 21 nt, Homo sapiens
uacuauuuuuacuaaucuuuc

SEQ ID NO: 124780 - RNA, 14 nt, Homo sapiens
acacagcaucagcu

SEQ ID NO: 124781 - RNA, 15 nt, Homo sapiens
aaaaguuuuguaaau

SEQ ID NO: 124782 - RNA, 20 nt, Homo sapiens
aaagcuggagucugucaaug

SEQ ID NO: 124783 - RNA, 16 nt, Homo sapiens
gccacuguuaagccau

SEQ ID NO: 124784 - RNA, 15 nt, Homo sapiens
uggggacacagcauc

SEQ ID NO: 124785 - RNA, 22 nt, Homo sapiens
uggauuugucuuuggugaacau

SEQ ID NO: 124786 - RNA, 21 nt, Homo sapiens
ucaaguaauccaccugccucg

SEQ ID NO: 124787 - RNA, 18 nt, Homo sapiens
gaugaaacaucauuucaa

SEQ ID NO: 124788 - RNA, 19 nt, Homo sapiens
uaaagaaaaguuuuguaaa

SEQ ID NO: 124789 - RNA, 17 nt, Homo sapiens
ccagagccucaaaugag

SEQ ID NO: 124790 - RNA, 18 nt, Homo sapiens
ccugccaggcacacugag

SEQ ID NO: 124791 - RNA, 15 nt, Homo sapiens
guugcuguaugucuc

SEQ ID NO: 124792 - RNA, 15 nt, Homo sapiens
cuuuuuauacuauua

SEQ ID NO: 124793 - RNA, 23 nt, Homo sapiens
gucucaguuuacauuuuguauau

SEQ ID NO: 124794 - RNA, 22 nt, Homo sapiens
uaaauuucucuacugucucagu

SEQ ID NO: 124795 - RNA, 22 nt, Homo sapiens
gaaaauugggaauaugcacaaa

SEQ ID NO: 124796 - RNA, 13 nt, Homo sapiens
cagcaucagcuca

SEQ ID NO: 124797 - RNA, 22 nt, Homo sapiens
ucauucugcauucucuagucag

SEQ ID NO: 124798 - RNA, 13 nt, Homo sapiens
caguaguugcaau

SEQ ID NO: 124799 - RNA, 18 nt, Homo sapiens
ucauaaaagucacuuuau

SEQ ID NO: 124800 - RNA, 23 nt, Homo sapiens
ccacccccaaauuuucuuuuuau

SEQ ID NO: 124801 - RNA, 11 nt, Homo sapiens
ggcucaucucu

SEQ ID NO: 124802 - RNA, 10 nt, Homo sapiens
gaaaagcagg

SEQ ID NO: 124803 - RNA, 23 nt, Homo sapiens
cuuuggugaacauugcaauagaa

SEQ ID NO: 124804 - RNA, 12 nt, Homo sapiens
aggacuguagaa

SEQ ID NO: 124805 - RNA, 12 nt, Homo sapiens
uguaccagagaa

SEQ ID NO: 124806 - RNA, 18 nt, Homo sapiens
cuuucccuuaaauaacac

SEQ ID NO: 124807 - RNA, 13 nt, Homo sapiens
ggauuacagggau

SEQ ID NO: 124808 - RNA, 20 nt, Homo sapiens
aguuuccaaauuauggcaaa

SEQ ID NO: 124809 - RNA, 15 nt, Homo sapiens
aaccguacacugugu

SEQ ID NO: 124810 - RNA, 12 nt, Homo sapiens
gaguagcuggau

SEQ ID NO: 124811 - RNA, 22 nt, Homo sapiens
agauacacaaucugaaacagcu

SEQ ID NO: 124812 - RNA, 16 nt, Homo sapiens
acaagaacacugaaaa

SEQ ID NO: 124813 - RNA, 13 nt, Homo sapiens
cagaaaaagaagg

SEQ ID NO: 124814 - RNA, 18 nt, Homo sapiens
cuuagagcuuuaccuaaa

SEQ ID NO: 124815 - RNA, 22 nt, Homo sapiens
ucccucaaaacaaucuugucau

SEQ ID NO: 124816 - RNA, 15 nt, Homo sapiens
cucuguaauugcaaa

SEQ ID NO: 124817 - RNA, 15 nt, Homo sapiens
gaaauggggaacuac

SEQ ID NO: 124818 - RNA, 15 nt, Homo sapiens
caaauauuccagaga

SEQ ID NO: 124819 - RNA, 14 nt, Homo sapiens
ccaaauuauggcaa

SEQ ID NO: 124820 - RNA, 12 nt, Homo sapiens
gagcaaacagaa

SEQ ID NO: 124821 - RNA, 22 nt, Homo sapiens
caauauacuuguauagcaguuu

SEQ ID NO: 124822 - RNA, 14 nt, Homo sapiens
acuaagaagcagau

SEQ ID NO: 124823 - RNA, 16 nt, Homo sapiens
uggccuggggcuucug

SEQ ID NO: 124824 - RNA, 20 nt, Homo sapiens
auaaaggggagggacucauc

SEQ ID NO: 124825 - RNA, 21 nt, Homo sapiens
aacuucaacguaagacugugu

SEQ ID NO: 124826 - RNA, 18 nt, Homo sapiens
uucugcauucucuaguca

SEQ ID NO: 124827 - RNA, 15 nt, Homo sapiens
gaaugagacuuacuu

SEQ ID NO: 124828 - RNA, 13 nt, Homo sapiens
uaaauguagaaag

SEQ ID NO: 124829 - RNA, 21 nt, Homo sapiens
gacucaagacuuccagagccu

SEQ ID NO: 124830 - RNA, 17 nt, Homo sapiens
guucuaaggcugugcca

SEQ ID NO: 124831 - RNA, 23 nt, Homo sapiens
uucagucaaagauacacaaucug

SEQ ID NO: 124832 - RNA, 15 nt, Homo sapiens
ucauggauauguuau

SEQ ID NO: 124833 - RNA, 21 nt, Homo sapiens
ugaggaauuucuguucuucca

SEQ ID NO: 124834 - RNA, 14 nt, Homo sapiens
aaacaaucuuguca

SEQ ID NO: 124835 - RNA, 13 nt, Homo sapiens
uguguuucuuuag

SEQ ID NO: 124836 - RNA, 21 nt, Homo sapiens
auuugucaacaaagucaccca

SEQ ID NO: 124837 - RNA, 15 nt, Homo sapiens
guauuaaguuguuaa

SEQ ID NO: 124838 - RNA, 16 nt, Homo sapiens
cauaacaggagugcca

SEQ ID NO: 124839 - RNA, 19 nt, Homo sapiens
uuuucuucuuuuugcuuca

SEQ ID NO: 124840 - RNA, 22 nt, Homo sapiens
aauguuuaugaauaguuuccaa

SEQ ID NO: 124841 - RNA, 21 nt, Homo sapiens
gucuuuggugaacauugcaau

SEQ ID NO: 124842 - RNA, 21 nt, Homo sapiens
gaauuuuuauauccacuaaaa

SEQ ID NO: 124843 - RNA, 15 nt, Homo sapiens
gauucuccugccuca

SEQ ID NO: 124844 - RNA, 15 nt, Homo sapiens
gaaaaguaacuguuu

SEQ ID NO: 124845 - RNA, 16 nt, Homo sapiens
aaagugauccauacuu

SEQ ID NO: 124846 - RNA, 18 nt, Homo sapiens
uagcauuugucaacaaag

SEQ ID NO: 124847 - RNA, 11 nt, Homo sapiens
uugcuguagaa

SEQ ID NO: 124848 - RNA, 13 nt, Homo sapiens
cacugauguauga

SEQ ID NO: 124849 - RNA, 19 nt, Homo sapiens
ccacuauugcuugcacaaa

SEQ ID NO: 124850 - RNA, 12 nt, Homo sapiens
aggccagagcaa

SEQ ID NO: 124851 - RNA, 13 nt, Homo sapiens
ucaaagugagcuc

SEQ ID NO: 124852 - RNA, 18 nt, Homo sapiens
agcucagguagcacuuua

SEQ ID NO: 124853 - RNA, 17 nt, Homo sapiens
uaaaccguacacugugu

SEQ ID NO: 124854 - RNA, 17 nt, Homo sapiens
gcaauggacaaggaagg

SEQ ID NO: 124855 - RNA, 15 nt, Homo sapiens
gaacugaacauucca

SEQ ID NO: 124856 - RNA, 19 nt, Homo sapiens
guagaaaagggaacugaac

SEQ ID NO: 124857 - RNA, 14 nt, Homo sapiens
uacgacaacuugca

SEQ ID NO: 124858 - RNA, 18 nt, Homo sapiens
auuuuucagauauaaaag

SEQ ID NO: 124859 - RNA, 18 nt, Homo sapiens
gaaccaggccagagcaaa

SEQ ID NO: 124860 - RNA, 19 nt, Homo sapiens
agaugaaacaucauuucaa

SEQ ID NO: 124861 - RNA, 16 nt, Homo sapiens
cuuguauagcaguuuc

SEQ ID NO: 124862 - RNA, 17 nt, Homo sapiens
caacaaagucacccacu

SEQ ID NO: 124863 - RNA, 20 nt, Homo sapiens
cagcuguuuaugcauagaua

SEQ ID NO: 124864 - RNA, 23 nt, Homo sapiens
ucagauauaaaagacugaccaau

SEQ ID NO: 124865 - RNA, 11 nt, Homo sapiens
uaaaagccauc

SEQ ID NO: 124866 - RNA, 21 nt, Homo sapiens
guauaaauauguauuuuguca

SEQ ID NO: 124867 - RNA, 16 nt, Homo sapiens
ugagucccagagccaa

SEQ ID NO: 124868 - RNA, 23 nt, Homo sapiens
cacuguuaagccauguguuccaa

SEQ ID NO: 124869 - RNA, 12 nt, Homo sapiens
ggagacacugau

SEQ ID NO: 124870 - RNA, 15 nt, Homo sapiens
uuuuccuguucuuaa

SEQ ID NO: 124871 - RNA, 21 nt, Homo sapiens
gguaaaauaaucaguguuucc

SEQ ID NO: 124872 - RNA, 22 nt, Homo sapiens
aaaauaugacacucuagucaaa

SEQ ID NO: 124873 - RNA, 14 nt, Homo sapiens
ccacugccaaagaa

SEQ ID NO: 124874 - RNA, 18 nt, Homo sapiens
uggcuaguaaaagccauc

SEQ ID NO: 124875 - RNA, 15 nt, Homo sapiens
aagccauguguucca

SEQ ID NO: 124876 - RNA, 17 nt, Homo sapiens
cuuagccaagcaguuuc

SEQ ID NO: 124877 - RNA, 23 nt, Homo sapiens
uccugaccucaaguaauccaccu

SEQ ID NO: 124878 - RNA, 15 nt, Homo sapiens
aguuccgacugccau

SEQ ID NO: 124879 - RNA, 19 nt, Homo sapiens
uuugcuucaaaaacauucu

SEQ ID NO: 124880 - RNA, 16 nt, Homo sapiens
cucaaagaaauuucca

SEQ ID NO: 124881 - RNA, 14 nt, Homo sapiens
ucaucucuuuauuc

SEQ ID NO: 124882 - RNA, 15 nt, Homo sapiens
ugggauuacagggau

SEQ ID NO: 124883 - RNA, 11 nt, Homo sapiens
auaugcacaaa

SEQ ID NO: 124884 - RNA, 19 nt, Homo sapiens
ugaacauugcaauagaaau

SEQ ID NO: 124885 - RNA, 12 nt, Homo sapiens
guucauucugca

SEQ ID NO: 124886 - RNA, 21 nt, Homo sapiens
ggcuucagucuuuuccaugaa

SEQ ID NO: 124887 - RNA, 15 nt, Homo sapiens
aagccauguaucuca

SEQ ID NO: 124888 - RNA, 16 nt, Homo sapiens
uacagucuuguauuaa

SEQ ID NO: 124889 - RNA, 18 nt, Homo sapiens
ugguuuuucaguuuucag

SEQ ID NO: 124890 - RNA, 20 nt, Homo sapiens
gaccugccaggcacacugag

SEQ ID NO: 124891 - RNA, 21 nt, Homo sapiens
cuuguuagugcacagcacaaa

SEQ ID NO: 124892 - RNA, 15 nt, Homo sapiens
aacauugcaauagaa

SEQ ID NO: 124893 - RNA, 21 nt, Homo sapiens
cugaccaauauuguacaguuu

SEQ ID NO: 124894 - RNA, 23 nt, Homo sapiens
aauguaagaucguucucugccuc

SEQ ID NO: 124895 - RNA, 13 nt, Homo sapiens
gaauaugcacaaa

SEQ ID NO: 124896 - RNA, 13 nt, Homo sapiens
aagccuugguaaa

SEQ ID NO: 124897 - RNA, 21 nt, Homo sapiens
uggauuacaggcaugugccac

SEQ ID NO: 124898 - RNA, 17 nt, Homo sapiens
cuucuaaguaaauacaa

SEQ ID NO: 124899 - RNA, 16 nt, Homo sapiens
aggucagucuucuucc

SEQ ID NO: 124900 - RNA, 19 nt, Homo sapiens
aagccauguguuccaaggc

SEQ ID NO: 124901 - RNA, 16 nt, Homo sapiens
agcuagcaacauuugu

SEQ ID NO: 124902 - RNA, 15 nt, Homo sapiens
agggagaagagggaa

SEQ ID NO: 124903 - RNA, 23 nt, Homo sapiens
agucuuguuguuuucccaaagag

SEQ ID NO: 124904 - RNA, 17 nt, Homo sapiens
ucuuaaaauagccauaa

SEQ ID NO: 124905 - RNA, 18 nt, Homo sapiens
aauguccuacugagacag

SEQ ID NO: 124906 - RNA, 23 nt, Homo sapiens
guugauuucagcaccuacagugu

SEQ ID NO: 124907 - RNA, 18 nt, Homo sapiens
uuuaaaugaaagugagac

SEQ ID NO: 124908 - RNA, 12 nt, Homo sapiens
uauuuuuacuaa

SEQ ID NO: 124909 - RNA, 12 nt, Homo sapiens
guacacuguguu

SEQ ID NO: 124910 - RNA, 12 nt, Homo sapiens
uuaacugaaugc

SEQ ID NO: 124911 - RNA, 18 nt, Homo sapiens
aauuucucuacugucuca

SEQ ID NO: 124912 - RNA, 20 nt, Homo sapiens
uuauuaaauguagaaaguga

SEQ ID NO: 124913 - RNA, 19 nt, Homo sapiens
cacagcaucagcucaagac

SEQ ID NO: 124914 - RNA, 15 nt, Homo sapiens
uugcaauguggcuug

SEQ ID NO: 124915 - RNA, 14 nt, Homo sapiens
gcuccuaagccaug

SEQ ID NO: 124916 - RNA, 20 nt, Homo sapiens
ucauacuugaaaauaugaca

SEQ ID NO: 124917 - RNA, 22 nt, Homo sapiens
acagucuuguauuaaguuguua

SEQ ID NO: 124918 - RNA, 13 nt, Homo sapiens
gcaaaaccaaaua

SEQ ID NO: 124919 - RNA, 18 nt, Homo sapiens
ugaaaauaugacacucua

SEQ ID NO: 124920 - RNA, 16 nt, Homo sapiens
acccuucuccuuagaa

SEQ ID NO: 124921 - RNA, 19 nt, Homo sapiens
uacaaaguaagccauguau

SEQ ID NO: 124922 - RNA, 14 nt, Homo sapiens
cucaucauuuccau

SEQ ID NO: 124923 - RNA, 22 nt, Homo sapiens
agcagaugguggagcugaauau

SEQ ID NO: 124924 - RNA, 23 nt, Homo sapiens
uuuauacucaggcagaucucagc

SEQ ID NO: 124925 - RNA, 14 nt, Homo sapiens
ugccaaagaacuug

SEQ ID NO: 124926 - RNA, 22 nt, Homo sapiens
guaagaucguucucugccucac

SEQ ID NO: 124927 - RNA, 11 nt, Homo sapiens
uucaagugauu

SEQ ID NO: 124928 - RNA, 17 nt, Homo sapiens
cuuggguucaagugauu

SEQ ID NO: 124929 - RNA, 13 nt, Homo sapiens
cuucuccuuagaa

SEQ ID NO: 124930 - RNA, 17 nt, Homo sapiens
caaucuguccuguuaca

SEQ ID NO: 124931 - RNA, 21 nt, Homo sapiens
uccacucaggucuguuuuccg

SEQ ID NO: 124932 - RNA, 19 nt, Homo sapiens
uuauacaauauacuuguau

SEQ ID NO: 124933 - RNA, 12 nt, Homo sapiens
ugggccaaagaa

SEQ ID NO: 124934 - RNA, 23 nt, Homo sapiens
aauugggccaaagaaacauugcc

SEQ ID NO: 124935 - RNA, 13 nt, Homo sapiens
agucuucuuccau

SEQ ID NO: 124936 - RNA, 18 nt, Homo sapiens
ggacucaagcaagauuuc

SEQ ID NO: 124937 - RNA, 21 nt, Homo sapiens
aagaauuuuuauauccacuaa

SEQ ID NO: 124938 - RNA, 18 nt, Homo sapiens
ccucccacugccaaagaa

SEQ ID NO: 124939 - RNA, 17 nt, Homo sapiens
ccaggcuggagugcaau

SEQ ID NO: 124940 - RNA, 19 nt, Homo sapiens
uccuaagccaugggagaca

SEQ ID NO: 124941 - RNA, 22 nt, Homo sapiens
gccggggaaggaggccguccau

SEQ ID NO: 124942 - RNA, 16 nt, Homo sapiens
aagaauguuuaugaau

SEQ ID NO: 124943 - RNA, 21 nt, Homo sapiens
uaaaauaaucaguguuuccaa

SEQ ID NO: 124944 - RNA, 16 nt, Homo sapiens
aaaccaaauauuccag

SEQ ID NO: 124945 - RNA, 15 nt, Homo sapiens
ggcuggagugcaaug

SEQ ID NO: 124946 - RNA, 19 nt, Homo sapiens
guuuauacccguuucacau

SEQ ID NO: 124947 - RNA, 20 nt, Homo sapiens
gaaguuuguuuaaaugacag

SEQ ID NO: 124948 - RNA, 14 nt, Homo sapiens
uacuguccaaagac

SEQ ID NO: 124949 - RNA, 15 nt, Homo sapiens
uugagggcaauggac

SEQ ID NO: 124950 - RNA, 15 nt, Homo sapiens
uguuuauagugcucu

SEQ ID NO: 124951 - RNA, 14 nt, Homo sapiens
ucaaaaacauucuu

SEQ ID NO: 124952 - RNA, 18 nt, Homo sapiens
aagagaaguuuucuugac

SEQ ID NO: 124953 - RNA, 16 nt, Homo sapiens
uaacgagaaauagaaa

SEQ ID NO: 124954 - RNA, 12 nt, Homo sapiens
acugagccagca

SEQ ID NO: 124955 - RNA, 11 nt, Homo sapiens
uguccaaagac

SEQ ID NO: 124956 - RNA, 13 nt, Homo sapiens
guuggcucaggag

SEQ ID NO: 124957 - RNA, 22 nt, Homo sapiens
cagucuucuuccaugucuauua

SEQ ID NO: 124958 - RNA, 19 nt, Homo sapiens
gaccugccaggcacacuga

SEQ ID NO: 124959 - RNA, 21 nt, Homo sapiens
aauguggcuugaauguaggua

SEQ ID NO: 124960 - RNA, 18 nt, Homo sapiens
ugguuguauuaaagcagg

SEQ ID NO: 124961 - RNA, 19 nt, Homo sapiens
ugcuucaaaaacauucuua

SEQ ID NO: 124962 - RNA, 22 nt, Homo sapiens
uccuaagccaugggagacacug

SEQ ID NO: 124963 - RNA, 17 nt, Homo sapiens
cuagaguucauggauau

SEQ ID NO: 124964 - RNA, 17 nt, Homo sapiens
cuguaugucucguggua

SEQ ID NO: 124965 - RNA, 16 nt, Homo sapiens
accaauauuguacagu

SEQ ID NO: 124966 - RNA, 17 nt, Homo sapiens
auaugacacucuaguca

SEQ ID NO: 124967 - RNA, 19 nt, Homo sapiens
aguuuacauuuuguauauu

SEQ ID NO: 124968 - RNA, 19 nt, Homo sapiens
aaauuucucuacugucuca

SEQ ID NO: 124969 - RNA, 19 nt, Homo sapiens
uugcuugcacaaaccaauu

SEQ ID NO: 124970 - RNA, 23 nt, Homo sapiens
gauauguuauacugaaccaggcc

SEQ ID NO: 124971 - RNA, 17 nt, Homo sapiens
accuaaauaugagccca

SEQ ID NO: 124972 - RNA, 17 nt, Homo sapiens
agaaaguggcuugaaau

SEQ ID NO: 124973 - RNA, 15 nt, Homo sapiens
augagcaaaaccaaa

SEQ ID NO: 124974 - RNA, 17 nt, Homo sapiens
aucguucucugccucac

SEQ ID NO: 124975 - RNA, 23 nt, Homo sapiens
auacuguuuuacuguccaaagac

SEQ ID NO: 124976 - RNA, 21 nt, Homo sapiens
agacgugauuuugcuguagaa

SEQ ID NO: 124977 - RNA, 21 nt, Homo sapiens
ccauaaaggggagggacucau

SEQ ID NO: 124978 - RNA, 18 nt, Homo sapiens
auugcaauagaaauccaa

SEQ ID NO: 124979 - RNA, 14 nt, Homo sapiens
aucaguguuuccaa

SEQ ID NO: 124980 - RNA, 19 nt, Homo sapiens
agucuuagagcuuuaccua

SEQ ID NO: 124981 - RNA, 11 nt, Homo sapiens
acccucccacu

SEQ ID NO: 124982 - RNA, 23 nt, Homo sapiens
acccuucuccuuagaaguggaag

SEQ ID NO: 124983 - RNA, 23 nt, Homo sapiens
uuaaaaggaaagcagauggugga

SEQ ID NO: 124984 - RNA, 12 nt, Homo sapiens
uaagacugugua

SEQ ID NO: 124985 - RNA, 19 nt, Homo sapiens
cuagcaacauuuguuuuag

SEQ ID NO: 124986 - RNA, 20 nt, Homo sapiens
gucaaagauacacaaucuga

SEQ ID NO: 124987 - RNA, 22 nt, Homo sapiens
uguacaguuuuuauugcuuguu

SEQ ID NO: 124988 - RNA, 13 nt, Homo sapiens
gauacgacaacuu

SEQ ID NO: 124989 - RNA, 20 nt, Homo sapiens
aaaaucaaacaauucaggga

SEQ ID NO: 124990 - RNA, 14 nt, Homo sapiens
guuuucccaaagag

SEQ ID NO: 124991 - RNA, 15 nt, Homo sapiens
aaaacaaucuuguca

SEQ ID NO: 124992 - RNA, 16 nt, Homo sapiens
ugaaugccacucugua

SEQ ID NO: 124993 - RNA, 20 nt, Homo sapiens
guuaaaaguuguguuuugaa

SEQ ID NO: 124994 - RNA, 14 nt, Homo sapiens
aauaaaauuguaca

SEQ ID NO: 124995 - RNA, 16 nt, Homo sapiens
cuaaauaugagcccag

SEQ ID NO: 124996 - RNA, 17 nt, Homo sapiens
gcuccauucaaagugag

SEQ ID NO: 124997 - RNA, 22 nt, Homo sapiens
gguacaguauggggguuguaaa

SEQ ID NO: 124998 - RNA, 13 nt, Homo sapiens
ggguaaauucucu

SEQ ID NO: 124999 - RNA, 11 nt, Homo sapiens
auaguuuccaa

SEQ ID NO: 125000 - RNA, 13 nt, Homo sapiens
uucuuuucugacu

SEQ ID NO: 125001 - RNA, 24 nt, Homo sapiens
aaucccucaaaacaaucuugucau

SEQ ID NO: 125002 - RNA, 15 nt, Homo sapiens
guuuccaaucugucc

SEQ ID NO: 125003 - RNA, 22 nt, Homo sapiens
auuaaauguagaaagugaucca

SEQ ID NO: 125004 - RNA, 16 nt, Homo sapiens
acaauauacuuguaua

SEQ ID NO: 125005 - RNA, 22 nt, Homo sapiens
agccuaggaaagccaguuacau

SEQ ID NO: 125006 - RNA, 13 nt, Homo sapiens
uugaaacuuguau

SEQ ID NO: 125007 - RNA, 23 nt, Homo sapiens
gccuuccuggaggugacacuuga

SEQ ID NO: 125008 - RNA, 21 nt, Homo sapiens
agccaaccuagcuagcaacau

SEQ ID NO: 125009 - RNA, 21 nt, Homo sapiens
aguagcuggauuacaggcaug

SEQ ID NO: 125010 - RNA, 13 nt, Homo sapiens
caaucccucaaaa

SEQ ID NO: 125011 - RNA, 22 nt, Homo sapiens
accagagaagggcuuggacuca

SEQ ID NO: 125012 - RNA, 15 nt, Homo sapiens
aguugggugauaugu

SEQ ID NO: 125013 - RNA, 14 nt, Homo sapiens
ugaaacaucauuuc

SEQ ID NO: 125014 - RNA, 13 nt, Homo sapiens
ccuacugagacag

SEQ ID NO: 125015 - RNA, 22 nt, Homo sapiens
uugcacaaauugggccaaagaa

SEQ ID NO: 125016 - RNA, 12 nt, Homo sapiens
uaguugcuguau

SEQ ID NO: 125017 - RNA, 18 nt, Homo sapiens
acacaaucugaaacagcu

SEQ ID NO: 125018 - RNA, 18 nt, Homo sapiens
guugagggcaauggacaa

SEQ ID NO: 125019 - RNA, 20 nt, Homo sapiens
gucaacaaagucacccacuu

SEQ ID NO: 125020 - RNA, 16 nt, Homo sapiens
ucugcauucucuaguc

SEQ ID NO: 125021 - RNA, 22 nt, Homo sapiens
ucaagacgucacccuccauucu

SEQ ID NO: 125022 - RNA, 21 nt, Homo sapiens
gacgucacccuccauucugca

SEQ ID NO: 125023 - RNA, 22 nt, Homo sapiens
gaauaacauggugugcuucuua

SEQ ID NO: 125024 - RNA, 18 nt, Homo sapiens
aaguaauccaccugccuc

SEQ ID NO: 125025 - RNA, 22 nt, Homo sapiens
ucaaagaaauuuccacucaggu

SEQ ID NO: 125026 - RNA, 22 nt, Homo sapiens
uugucaacaaagucacccacuu

SEQ ID NO: 125027 - RNA, 23 nt, Homo sapiens
ugcuucuuugaaacuuguaugaa

SEQ ID NO: 125028 - RNA, 19 nt, Homo sapiens
cucuugaaaucuguuaaaa

SEQ ID NO: 125029 - RNA, 16 nt, Homo sapiens
ugagacagcacagcca

SEQ ID NO: 125030 - RNA, 13 nt, Homo sapiens
cagccucaucucu

SEQ ID NO: 125031 - RNA, 12 nt, Homo sapiens
guaaaagccauc

SEQ ID NO: 125032 - RNA, 21 nt, Homo sapiens
uggggacacagcaucagcuca

SEQ ID NO: 125033 - RNA, 15 nt, Homo sapiens
gacucaucauuucca

SEQ ID NO: 125034 - RNA, 20 nt, Homo sapiens
uguuaauaaaaguacauguu

SEQ ID NO: 125035 - RNA, 13 nt, Homo sapiens
ucaaaaacauucu

SEQ ID NO: 125036 - RNA, 16 nt, Homo sapiens
acacagcaucagcuca

SEQ ID NO: 125037 - RNA, 20 nt, Homo sapiens
ucugacucuuggcacagcau

SEQ ID NO: 125038 - RNA, 21 nt, Homo sapiens
auucucuagucaguuggcuaa

SEQ ID NO: 125039 - RNA, 19 nt, Homo sapiens
caaagugcugggauuacag

SEQ ID NO: 125040 - RNA, 15 nt, Homo sapiens
ugugggcuccauuca

SEQ ID NO: 125041 - RNA, 20 nt, Homo sapiens
auacuuauagaauucaguca

SEQ ID NO: 125042 - RNA, 13 nt, Homo sapiens
aauauaucaguaa

SEQ ID NO: 125043 - RNA, 16 nt, Homo sapiens
uccuuagaaguggaag

SEQ ID NO: 125044 - RNA, 19 nt, Homo sapiens
agaucguucucugccucac

SEQ ID NO: 125045 - RNA, 18 nt, Homo sapiens
aauugggaauaugcacaa

SEQ ID NO: 125046 - RNA, 21 nt, Homo sapiens
uaagcacgggccauaugaaua

SEQ ID NO: 125047 - RNA, 17 nt, Homo sapiens
guacauguuaaacuuac

SEQ ID NO: 125048 - RNA, 22 nt, Homo sapiens
aaguaagccauguaucucagga

SEQ ID NO: 125049 - RNA, 15 nt, Homo sapiens
ccagagcaaacagaa

SEQ ID NO: 125050 - RNA, 16 nt, Homo sapiens
gacucaucauuuccau

SEQ ID NO: 125051 - RNA, 22 nt, Homo sapiens
aagaaaaguuuuguaaauuucu

SEQ ID NO: 125052 - RNA, 12 nt, Homo sapiens
uaagaugaaaca

SEQ ID NO: 125053 - RNA, 13 nt, Homo sapiens
ggaaccagcccag

SEQ ID NO: 125054 - RNA, 16 nt, Homo sapiens
guggauuggauuuguc

SEQ ID NO: 125055 - RNA, 19 nt, Homo sapiens
guaaauauagcucagguag

SEQ ID NO: 125056 - RNA, 12 nt, Homo sapiens
agugauuuccac

SEQ ID NO: 125057 - RNA, 13 nt, Homo sapiens
cuugcacaaacca

SEQ ID NO: 125058 - RNA, 22 nt, Homo sapiens
uuaaaaaauggacucuugaaau

SEQ ID NO: 125059 - RNA, 21 nt, Homo sapiens
gaguucauggauauguuauac

SEQ ID NO: 125060 - RNA, 22 nt, Homo sapiens
cuuaaaagaaagagaaguuuuc

SEQ ID NO: 125061 - RNA, 22 nt, Homo sapiens
caucugccuccccuucacuccc

SEQ ID NO: 125062 - RNA, 18 nt, Homo sapiens
uucuuucaaagaagccag

SEQ ID NO: 125063 - RNA, 15 nt, Homo sapiens
uacuuuaauguauaa

SEQ ID NO: 125064 - RNA, 15 nt, Homo sapiens
gcuagggaauaucaa

SEQ ID NO: 125065 - RNA, 19 nt, Homo sapiens
cuuuaccuaaauaugagcc

SEQ ID NO: 125066 - RNA, 19 nt, Homo sapiens
cccucuaggaggugaugau

SEQ ID NO: 125067 - RNA, 23 nt, Homo sapiens
uucuaaagauggaaaaaccaccc

SEQ ID NO: 125068 - RNA, 15 nt, Homo sapiens
caaucugaaacagcu

SEQ ID NO: 125069 - RNA, 18 nt, Homo sapiens
cagggagugggcuaagca

SEQ ID NO: 125070 - RNA, 15 nt, Homo sapiens
agccauguaucucag

SEQ ID NO: 125071 - RNA, 20 nt, Homo sapiens
aaugacacagucuuggcuca

SEQ ID NO: 125072 - RNA, 16 nt, Homo sapiens
uuaaaauagccauaaa

SEQ ID NO: 125073 - RNA, 15 nt, Homo sapiens
agucugaacaauaua

SEQ ID NO: 125074 - RNA, 22 nt, Homo sapiens
uagucucuggcaagaugcuuua

SEQ ID NO: 125075 - RNA, 12 nt, Homo sapiens
ugaaacaucauu

SEQ ID NO: 125076 - RNA, 17 nt, Homo sapiens
aauaaccauugucauaa

SEQ ID NO: 125077 - RNA, 22 nt, Homo sapiens
aaugccacucuguaauugcaaa

SEQ ID NO: 125078 - RNA, 18 nt, Homo sapiens
auacugaaccaggccaga

SEQ ID NO: 125079 - RNA, 14 nt, Homo sapiens
aacaucauuucaau

SEQ ID NO: 125080 - RNA, 21 nt, Homo sapiens
agugcaguuuuuuucuugucu

SEQ ID NO: 125081 - RNA, 18 nt, Homo sapiens
ggaacuaagaaagcccuu

SEQ ID NO: 125082 - RNA, 20 nt, Homo sapiens
accaauauuguacaguuuuu

SEQ ID NO: 125083 - RNA, 12 nt, Homo sapiens
gccaagcaguuu

SEQ ID NO: 125084 - RNA, 15 nt, Homo sapiens
cugaccaauauugua

SEQ ID NO: 125085 - RNA, 21 nt, Homo sapiens
uugcccaggcuggagugcaau

SEQ ID NO: 125086 - RNA, 19 nt, Homo sapiens
ugcaguuuuuuucuugucu

SEQ ID NO: 125087 - RNA, 23 nt, Homo sapiens
caguugcagcuguuuuguugaca

SEQ ID NO: 125088 - RNA, 17 nt, Homo sapiens
ucuggccuccaagucca

SEQ ID NO: 125089 - RNA, 20 nt, Homo sapiens
uccuuggcuucuuuacuuag

SEQ ID NO: 125090 - RNA, 17 nt, Homo sapiens
agguuucucaaagaaau

SEQ ID NO: 125091 - RNA, 14 nt, Homo sapiens
cagcuccuggacca

SEQ ID NO: 125092 - RNA, 16 nt, Homo sapiens
acugaauuuugucuuu

SEQ ID NO: 125093 - RNA, 13 nt, Homo sapiens
aggacuguagaaa

SEQ ID NO: 125094 - RNA, 17 nt, Homo sapiens
cuaagcacgggccauau

SEQ ID NO: 125095 - RNA, 15 nt, Homo sapiens
agcugccuguacaca

SEQ ID NO: 125096 - RNA, 14 nt, Homo sapiens
guccacaguggaac

SEQ ID NO: 125097 - RNA, 22 nt, Homo sapiens
ucaagugauucuccugccucag

SEQ ID NO: 125098 - RNA, 21 nt, Homo sapiens
ccauuagcauuugucaacaaa

SEQ ID NO: 125099 - RNA, 18 nt, Homo sapiens
aaagucuacuuuaccuaa

SEQ ID NO: 125100 - RNA, 13 nt, Homo sapiens
aguaaaagccauc

SEQ ID NO: 125101 - RNA, 22 nt, Homo sapiens
aaacauuuguuuguggucuaua

SEQ ID NO: 125102 - RNA, 15 nt, Homo sapiens
cccagccucaucucu

SEQ ID NO: 125103 - RNA, 18 nt, Homo sapiens
ucacagccacuugggaua

SEQ ID NO: 125104 - RNA, 13 nt, Homo sapiens
cuggcucaucucu

SEQ ID NO: 125105 - RNA, 15 nt, Homo sapiens
uaagaaauucacuuc

SEQ ID NO: 125106 - RNA, 14 nt, Homo sapiens
ccaaagugguauag

SEQ ID NO: 125107 - RNA, 22 nt, Homo sapiens
uaaccaaagcccaaagugguau

SEQ ID NO: 125108 - RNA, 20 nt, Homo sapiens
guauauucaaccaaauacuu

SEQ ID NO: 125109 - RNA, 14 nt, Homo sapiens
uuuauugcuuguug

SEQ ID NO: 125110 - RNA, 20 nt, Homo sapiens
ugcccaggcuggagugcaau

SEQ ID NO: 125111 - RNA, 11 nt, Homo sapiens
gaaaacagaaa

SEQ ID NO: 125112 - RNA, 19 nt, Homo sapiens
ucagaguuccgacugccau

SEQ ID NO: 125113 - RNA, 22 nt, Homo sapiens
uagaaccucgagguuucucaaa

SEQ ID NO: 125114 - RNA, 18 nt, Homo sapiens
cuuagguccaaggucucc

SEQ ID NO: 125115 - RNA, 18 nt, Homo sapiens
cuauuuuuuguaaugugu

SEQ ID NO: 125116 - RNA, 18 nt, Homo sapiens
uugugcauaaaaacaaga

SEQ ID NO: 125117 - RNA, 13 nt, Homo sapiens
ugaacauugcaau

SEQ ID NO: 125118 - RNA, 20 nt, Homo sapiens
aaguaaauauagcucaggua

SEQ ID NO: 125119 - RNA, 18 nt, Homo sapiens
accuaaauaugagcccag

SEQ ID NO: 125120 - RNA, 15 nt, Homo sapiens
gguccaaggucucca

SEQ ID NO: 125121 - RNA, 22 nt, Homo sapiens
caaagauacacaaucugaaaca

SEQ ID NO: 125122 - RNA, 19 nt, Homo sapiens
uccauuuacccuucuuuuc

SEQ ID NO: 125123 - RNA, 20 nt, Homo sapiens
cuuuuuccuggcucaucucu

SEQ ID NO: 125124 - RNA, 14 nt, Homo sapiens
cuuaaaauagccau

SEQ ID NO: 125125 - RNA, 12 nt, Homo sapiens
aacuucugccuc

SEQ ID NO: 125126 - RNA, 18 nt, Homo sapiens
uaaugcauguggcacuua

SEQ ID NO: 125127 - RNA, 14 nt, Homo sapiens
ugagaaaaugucuu

SEQ ID NO: 125128 - RNA, 15 nt, Homo sapiens
auagaauucagucaa

SEQ ID NO: 125129 - RNA, 20 nt, Homo sapiens
uacacaaucugaaacagcuu

SEQ ID NO: 125130 - RNA, 14 nt, Homo sapiens
gucugaacaauaua

SEQ ID NO: 125131 - RNA, 22 nt, Homo sapiens
uuaaguuacacauuuuucagau

SEQ ID NO: 125132 - RNA, 14 nt, Homo sapiens
uguagaaagugauc

SEQ ID NO: 125133 - RNA, 21 nt, Homo sapiens
aauuuuauguuuaguugcaca

SEQ ID NO: 125134 - RNA, 21 nt, Homo sapiens
cuaugauuguccguaggccca

SEQ ID NO: 125135 - RNA, 17 nt, Homo sapiens
accuaacgagaaauaga

SEQ ID NO: 125136 - RNA, 18 nt, Homo sapiens
gaauuuggguaugaacag

SEQ ID NO: 125137 - RNA, 12 nt, Homo sapiens
uccccucuagga

SEQ ID NO: 125138 - RNA, 21 nt, Homo sapiens
uaguggugacugugggcucca

SEQ ID NO: 125139 - RNA, 16 nt, Homo sapiens
uguacagucuuguauu

SEQ ID NO: 125140 - RNA, 19 nt, Homo sapiens
ugcuucuuaaaauagccau

SEQ ID NO: 125141 - RNA, 21 nt, Homo sapiens
aaccguaugagggaacugugu

SEQ ID NO: 125142 - RNA, 12 nt, Homo sapiens
aaguaagccaug

SEQ ID NO: 125143 - RNA, 17 nt, Homo sapiens
cugauguagcuuauaca

SEQ ID NO: 125144 - RNA, 14 nt, Homo sapiens
cuggccuccaaguc

SEQ ID NO: 125145 - RNA, 17 nt, Homo sapiens
augagggaacuguguag

SEQ ID NO: 125146 - RNA, 18 nt, Homo sapiens
aauaugacacucuaguca

SEQ ID NO: 125147 - RNA, 18 nt, Homo sapiens
uguugacauucugaaugc

SEQ ID NO: 125148 - RNA, 13 nt, Homo sapiens
ucuuuuugcuuca

SEQ ID NO: 125149 - RNA, 21 nt, Homo sapiens
ugcacaaauugggccaaagaa

SEQ ID NO: 125150 - RNA, 19 nt, Homo sapiens
aaaauggcacuugggggac

SEQ ID NO: 125151 - RNA, 15 nt, Homo sapiens
acaaaguaagccaug

SEQ ID NO: 125152 - RNA, 23 nt, Homo sapiens
gucucauaaugcauguggcacuu

SEQ ID NO: 125153 - RNA, 14 nt, Homo sapiens
acaaucugaaacag

SEQ ID NO: 125154 - RNA, 13 nt, Homo sapiens
gaaaaguuuugua

SEQ ID NO: 125155 - RNA, 22 nt, Homo sapiens
gccuaggaaagccaguuacaua

SEQ ID NO: 125156 - RNA, 18 nt, Homo sapiens
uugcacaaauugggccaa

SEQ ID NO: 125157 - RNA, 15 nt, Homo sapiens
aauagugauuuccac

SEQ ID NO: 125158 - RNA, 14 nt, Homo sapiens
uucuggggcuucag

SEQ ID NO: 125159 - RNA, 22 nt, Homo sapiens
uaugauuguccguaggcccaua

SEQ ID NO: 125160 - RNA, 21 nt, Homo sapiens
auaacauggugugcuucuuaa

SEQ ID NO: 125161 - RNA, 18 nt, Homo sapiens
gcccaggcuggagugcaa

SEQ ID NO: 125162 - RNA, 17 nt, Homo sapiens
auuucucuacugucuca

SEQ ID NO: 125163 - RNA, 16 nt, Homo sapiens
agcuguuuuguugaca

SEQ ID NO: 125164 - RNA, 20 nt, Homo sapiens
gacagcuccuggaccaggcc

SEQ ID NO: 125165 - RNA, 13 nt, Homo sapiens
agaagaugaauga

SEQ ID NO: 125166 - RNA, 15 nt, Homo sapiens
aaggcagaguacaaa

SEQ ID NO: 125167 - RNA, 13 nt, Homo sapiens
acuguccaaagac

SEQ ID NO: 125168 - RNA, 17 nt, Homo sapiens
uugguuuugcucacaaa

SEQ ID NO: 125169 - RNA, 19 nt, Homo sapiens
cugggacuaaguguaccag

SEQ ID NO: 125170 - RNA, 14 nt, Homo sapiens
cacaaucugaaaca

SEQ ID NO: 125171 - RNA, 14 nt, Homo sapiens
caaaguaagccaug

SEQ ID NO: 125172 - RNA, 13 nt, Homo sapiens
gcauucucuaguc

SEQ ID NO: 125173 - RNA, 13 nt, Homo sapiens
gccauaugaauaa

SEQ ID NO: 125174 - RNA, 24 nt, Homo sapiens
ggacagcuccuggaccaggcccau

SEQ ID NO: 125175 - RNA, 19 nt, Homo sapiens
aguauccugcuucugauau

SEQ ID NO: 125176 - RNA, 13 nt, Homo sapiens
ucugaaacagcuu

SEQ ID NO: 125177 - RNA, 23 nt, Homo sapiens
gaagggcuuggacucaagcaaga

SEQ ID NO: 125178 - RNA, 23 nt, Homo sapiens
cagucaaagauacacaaucugaa

SEQ ID NO: 125179 - RNA, 16 nt, Homo sapiens
aacguaagacugugua

SEQ ID NO: 125180 - RNA, 17 nt, Homo sapiens
cucaaagaaauuuccac

SEQ ID NO: 125181 - RNA, 19 nt, Homo sapiens
gacuuugaggguguauauu

SEQ ID NO: 125182 - RNA, 18 nt, Homo sapiens
aaguucuuaguugcugua

SEQ ID NO: 125183 - RNA, 22 nt, Homo sapiens
aacuuggaaauagugauuucca

SEQ ID NO: 125184 - RNA, 21 nt, Homo sapiens
caaucuguccuguuacaaaag

SEQ ID NO: 125185 - RNA, 18 nt, Homo sapiens
cgugaccugccaggcaca

SEQ ID NO: 125186 - RNA, 21 nt, Homo sapiens
ccacugccaaagaacuuggaa

SEQ ID NO: 125187 - RNA, 11 nt, Homo sapiens
agaaguggaag

SEQ ID NO: 125188 - RNA, 16 nt, Homo sapiens
aggcuggagugcaaug

SEQ ID NO: 125189 - RNA, 14 nt, Homo sapiens
ucucucuucuuuuc

SEQ ID NO: 125190 - RNA, 13 nt, Homo sapiens
guaagacugugua

SEQ ID NO: 125191 - RNA, 19 nt, Homo sapiens
cugaguagcuggauuacag

SEQ ID NO: 125192 - RNA, 19 nt, Homo sapiens
accgcaggauuugggcucu

SEQ ID NO: 125193 - RNA, 13 nt, Homo sapiens
cacucagaaaaug

SEQ ID NO: 125194 - RNA, 22 nt, Homo sapiens
ugacucaagacuuccagagccu

SEQ ID NO: 125195 - RNA, 13 nt, Homo sapiens
auuugucaacaaa

SEQ ID NO: 125196 - RNA, 17 nt, Homo sapiens
agucugucaauguccua

SEQ ID NO: 125197 - RNA, 18 nt, Homo sapiens
auauguauaucacauucc

SEQ ID NO: 125198 - RNA, 19 nt, Homo sapiens
cccuguucauucugcauuc

SEQ ID NO: 125199 - RNA, 19 nt, Homo sapiens
uaaguuacacauuuuucag

SEQ ID NO: 125200 - RNA, 14 nt, Homo sapiens
auuucuguucuucc

SEQ ID NO: 125201 - RNA, 20 nt, Homo sapiens
cucgugguaggacuguagaa

SEQ ID NO: 125202 - RNA, 15 nt, Homo sapiens
augaauaguuuccaa

SEQ ID NO: 125203 - RNA, 14 nt, Homo sapiens
ugcacguauuuuaa

SEQ ID NO: 125204 - RNA, 16 nt, Homo sapiens
gcaguggaacuaagaa

SEQ ID NO: 125205 - RNA, 18 nt, Homo sapiens
ugaaguuuaauugacuua

SEQ ID NO: 125206 - RNA, 16 nt, Homo sapiens
gaguuccgacugccau

SEQ ID NO: 125207 - RNA, 16 nt, Homo sapiens
uaaugguuauauguau

SEQ ID NO: 125208 - RNA, 14 nt, Homo sapiens
accuacaguguaca

SEQ ID NO: 125209 - RNA, 13 nt, Homo sapiens
agccucaucucuu

SEQ ID NO: 125210 - RNA, 20 nt, Homo sapiens
ucugccuccccuucacuccc

SEQ ID NO: 125211 - RNA, 23 nt, Homo sapiens
uucagauauaaaagacugaccaa

SEQ ID NO: 125212 - RNA, 17 nt, Homo sapiens
cuaaaaguuaauagggu

SEQ ID NO: 125213 - RNA, 22 nt, Homo sapiens
gugcuucuuaaaauagccauaa

SEQ ID NO: 125214 - RNA, 14 nt, Homo sapiens
uccccuucacuccc

SEQ ID NO: 125215 - RNA, 13 nt, Homo sapiens
ccaggggagaccc

SEQ ID NO: 125216 - RNA, 13 nt, Homo sapiens
uuacuaaucuuuc

SEQ ID NO: 125217 - RNA, 15 nt, Homo sapiens
uguccuguuacaaaa

SEQ ID NO: 125218 - RNA, 17 nt, Homo sapiens
acuuacuucucugcuau

SEQ ID NO: 125219 - RNA, 13 nt, Homo sapiens
caaaguaagccau

SEQ ID NO: 125220 - RNA, 23 nt, Homo sapiens
agaagguugagggcaauggacaa

SEQ ID NO: 125221 - RNA, 19 nt, Homo sapiens
cgugguaggacuguagaaa

SEQ ID NO: 125222 - RNA, 21 nt, Homo sapiens
accuucaguugucucugaugu

SEQ ID NO: 125223 - RNA, 23 nt, Homo sapiens
uuccaaucuguccuguuacaaaa

SEQ ID NO: 125224 - RNA, 21 nt, Homo sapiens
cacuucccacuauugcuugca

SEQ ID NO: 125225 - RNA, 23 nt, Homo sapiens
cauggauauguuauacugaacca

SEQ ID NO: 125226 - RNA, 14 nt, Homo sapiens
ugggauuacaggga

SEQ ID NO: 125227 - RNA, 23 nt, Homo sapiens
agaauauuauuggaaaauucucu

SEQ ID NO: 125228 - RNA, 19 nt, Homo sapiens
agauaaccucaagucacau

SEQ ID NO: 125229 - RNA, 16 nt, Homo sapiens
cacccuccauucugca

SEQ ID NO: 125230 - RNA, 14 nt, Homo sapiens
auaucacauuccca

SEQ ID NO: 125231 - RNA, 14 nt, Homo sapiens
aaaagacugaccaa

SEQ ID NO: 125232 - RNA, 19 nt, Homo sapiens
gccacccucccacugccaa

SEQ ID NO: 125233 - RNA, 15 nt, Homo sapiens
acaaucuugucauac

SEQ ID NO: 125234 - RNA, 21 nt, Homo sapiens
ucaagacgucacccuccauuc

SEQ ID NO: 125235 - RNA, 21 nt, Homo sapiens
uguauuuaaaugaaagugaga

SEQ ID NO: 125236 - RNA, 19 nt, Homo sapiens
cauugcaauagaaauccaa

SEQ ID NO: 125237 - RNA, 22 nt, Homo sapiens
gaaaagaaucggcaauguuuca

SEQ ID NO: 125238 - RNA, 14 nt, Homo sapiens
gcuaauauugcaau

SEQ ID NO: 125239 - RNA, 14 nt, Homo sapiens
caauagauauuuac

SEQ ID NO: 125240 - RNA, 18 nt, Homo sapiens
auaugacacucuagucaa

SEQ ID NO: 125241 - RNA, 17 nt, Homo sapiens
ucagucuuuuccaugaa

SEQ ID NO: 125242 - RNA, 16 nt, Homo sapiens
uuccuccccuguucau

SEQ ID NO: 125243 - RNA, 22 nt, Homo sapiens
uuaccuuuuauuuuaauguuuc

SEQ ID NO: 125244 - RNA, 16 nt, Homo sapiens
uuuacuguccaaagac

SEQ ID NO: 125245 - RNA, 13 nt, Homo sapiens
uggcucaucucuu

SEQ ID NO: 125246 - RNA, 16 nt, Homo sapiens
cuaacaguaguugcaa

SEQ ID NO: 125247 - RNA, 17 nt, Homo sapiens
auucuuacauuuuacuu

SEQ ID NO: 125248 - RNA, 14 nt, Homo sapiens
acugaacauuccag

SEQ ID NO: 125249 - RNA, 13 nt, Homo sapiens
auauacuuauaga

SEQ ID NO: 125250 - RNA, 12 nt, Homo sapiens
agcaucagcuca

SEQ ID NO: 125251 - RNA, 23 nt, Homo sapiens
aaucaguguuuccaaucuguccu

SEQ ID NO: 125252 - RNA, 15 nt, Homo sapiens
auucucuagucaguu

SEQ ID NO: 125253 - RNA, 15 nt, Homo sapiens
cacagucuuggcuca

SEQ ID NO: 125254 - RNA, 20 nt, Homo sapiens
uuaauaggguaaauucucua

SEQ ID NO: 125255 - RNA, 17 nt, Homo sapiens
aggagugccacuucaug

SEQ ID NO: 125256 - RNA, 18 nt, Homo sapiens
accaacuauagaauguau

SEQ ID NO: 125257 - RNA, 18 nt, Homo sapiens
aaaccugaugcuggggac

SEQ ID NO: 125258 - RNA, 21 nt, Homo sapiens
ucuaaggcugugccaucagcu

SEQ ID NO: 125259 - RNA, 12 nt, Homo sapiens
gaccaggucuca

SEQ ID NO: 125260 - RNA, 19 nt, Homo sapiens
agacgugauuuugcuguag

SEQ ID NO: 125261 - RNA, 15 nt, Homo sapiens
aagaauguuuaugaa

SEQ ID NO: 125262 - RNA, 23 nt, Homo sapiens
aaucccucaaaacaaucuuguca

SEQ ID NO: 125263 - RNA, 19 nt, Homo sapiens
acaaaguaagccauguauc

SEQ ID NO: 125264 - RNA, 10 nt, Homo sapiens
ugucuuuauu

SEQ ID NO: 125265 - RNA, 20 nt, Homo sapiens
gacucuaacaguaguugcaa

SEQ ID NO: 125266 - RNA, 13 nt, Homo sapiens
gguuauauguaua

SEQ ID NO: 125267 - RNA, 17 nt, Homo sapiens
agguugagggcaaugga

SEQ ID NO: 125268 - RNA, 14 nt, Homo sapiens
cauaugaauaacau

SEQ ID NO: 125269 - RNA, 14 nt, Homo sapiens
uaaaauagccauaa

SEQ ID NO: 125270 - RNA, 15 nt, Homo sapiens
uuugaggguguauau

SEQ ID NO: 125271 - RNA, 21 nt, Homo sapiens
ccgccacccucccacugccaa

SEQ ID NO: 125272 - RNA, 16 nt, Homo sapiens
uguuauacugaaccag

SEQ ID NO: 125273 - RNA, 17 nt, Homo sapiens
ggcugugccaucagcuc

SEQ ID NO: 125274 - RNA, 17 nt, Homo sapiens
agaugcauccuuucaua

SEQ ID NO: 125275 - RNA, 16 nt, Homo sapiens
augacacucuagucaa

SEQ ID NO: 125276 - RNA, 11 nt, Homo sapiens
uuuaaagacag

SEQ ID NO: 125277 - RNA, 21 nt, Homo sapiens
ugugaccauuagcauuuguca

SEQ ID NO: 125278 - RNA, 13 nt, Homo sapiens
gggagacacugau

SEQ ID NO: 125279 - RNA, 21 nt, Homo sapiens
aaaaagcccuuaaaaauaugu

SEQ ID NO: 125280 - RNA, 20 nt, Homo sapiens
ugaguagcuggauuacaggc

SEQ ID NO: 125281 - RNA, 17 nt, Homo sapiens
ggcacacugagccagca

SEQ ID NO: 125282 - RNA, 21 nt, Homo sapiens
aaugcugguuuuucaguuuuc

SEQ ID NO: 125283 - RNA, 18 nt, Homo sapiens
uccuggggaacauagaac

SEQ ID NO: 125284 - RNA, 16 nt, Homo sapiens
aaaugcugguuuuuca

SEQ ID NO: 125285 - RNA, 17 nt, Homo sapiens
ggcuaguaaaagccauc

SEQ ID NO: 125286 - RNA, 22 nt, Homo sapiens
ugaguagcuggauuacaggcau

SEQ ID NO: 125287 - RNA, 19 nt, Homo sapiens
accaggucucauaaugcau

SEQ ID NO: 125288 - RNA, 18 nt, Homo sapiens
guuuuacuguccaaagac

SEQ ID NO: 125289 - RNA, 16 nt, Homo sapiens
acacaaucugaaacag

SEQ ID NO: 125290 - RNA, 19 nt, Homo sapiens
cauaaugcauguggcacuu

SEQ ID NO: 125291 - RNA, 19 nt, Homo sapiens
gcauuugucaacaaaguca

SEQ ID NO: 125292 - RNA, 22 nt, Homo sapiens
cccucccacugccaaagaacuu

SEQ ID NO: 125293 - RNA, 20 nt, Homo sapiens
caaguucuuaguugcuguau

SEQ ID NO: 125294 - RNA, 16 nt, Homo sapiens
aacaaagucacccacu

SEQ ID NO: 125295 - RNA, 22 nt, Homo sapiens
aagccuugguaaaauaaucagu

SEQ ID NO: 125296 - RNA, 18 nt, Homo sapiens
auuaagaaauucacuucc

SEQ ID NO: 125297 - RNA, 16 nt, Homo sapiens
ccuggaccaggucuca

SEQ ID NO: 125298 - RNA, 16 nt, Homo sapiens
auuuuaauguuuccuu

SEQ ID NO: 125299 - RNA, 15 nt, Homo sapiens
uccacagugacucca

SEQ ID NO: 125300 - RNA, 12 nt, Homo sapiens
auguaucucagg

SEQ ID NO: 125301 - RNA, 12 nt, Homo sapiens
caaaacauuugu

SEQ ID NO: 125302 - RNA, 13 nt, Homo sapiens
cacacuguuaaaa

SEQ ID NO: 125303 - RNA, 23 nt, Homo sapiens
ugggucagaguuccgacugccau

SEQ ID NO: 125304 - RNA, 13 nt, Homo sapiens
ggcaggacagcuc

SEQ ID NO: 125305 - RNA, 19 nt, Homo sapiens
ccucaaaacaaucuuguca

SEQ ID NO: 125306 - RNA, 19 nt, Homo sapiens
uccugaguagcuggauuac

SEQ ID NO: 125307 - RNA, 16 nt, Homo sapiens
aauugcuucaagcauu

SEQ ID NO: 125308 - RNA, 20 nt, Homo sapiens
gaguucauggauauguuaua

SEQ ID NO: 125309 - RNA, 19 nt, Homo sapiens
acacagucuuggcucacug

SEQ ID NO: 125310 - RNA, 16 nt, Homo sapiens
aagguugagggcaaug

SEQ ID NO: 125311 - RNA, 16 nt, Homo sapiens
cuaaguguaccagaga

SEQ ID NO: 125312 - RNA, 21 nt, Homo sapiens
ucaugggguggacucuaacag

SEQ ID NO: 125313 - RNA, 17 nt, Homo sapiens
cauggagucacagccac

SEQ ID NO: 125314 - RNA, 21 nt, Homo sapiens
cccacugccaaagaacuugga

SEQ ID NO: 125315 - RNA, 15 nt, Homo sapiens
agccagguucugacu

SEQ ID NO: 125316 - RNA, 18 nt, Homo sapiens
ggauacgacaacuugcac

SEQ ID NO: 125317 - RNA, 22 nt, Homo sapiens
uguuuccuuuaauuuuuuacua

SEQ ID NO: 125318 - RNA, 20 nt, Homo sapiens
auuagcauuugucaacaaag

SEQ ID NO: 125319 - RNA, 17 nt, Homo sapiens
augguggccuggggcuu

SEQ ID NO: 125320 - RNA, 19 nt, Homo sapiens
uguuuuuaauaaagacagg

SEQ ID NO: 125321 - RNA, 15 nt, Homo sapiens
aauguauuugcuaua

SEQ ID NO: 125322 - RNA, 15 nt, Homo sapiens
guaggugguuuugaa

SEQ ID NO: 125323 - RNA, 13 nt, Homo sapiens
ucaaguaauccac

SEQ ID NO: 125324 - RNA, 16 nt, Homo sapiens
cuucuuuuugcuucaa

SEQ ID NO: 125325 - RNA, 17 nt, Homo sapiens
agauuucagauuuguga

SEQ ID NO: 125326 - RNA, 14 nt, Homo sapiens
gucuuuaaccacuu

SEQ ID NO: 125327 - RNA, 23 nt, Homo sapiens
ugucucgugguaggacuguagaa

SEQ ID NO: 125328 - RNA, 10 nt, Homo sapiens
aaacuuguau

SEQ ID NO: 125329 - RNA, 21 nt, Homo sapiens
auuuuacuuuuuccuggcuca

SEQ ID NO: 125330 - RNA, 14 nt, Homo sapiens
cuuagaaagucuga

SEQ ID NO: 125331 - RNA, 15 nt, Homo sapiens
aaugugacucaagac

SEQ ID NO: 125332 - RNA, 18 nt, Homo sapiens
auuagcuccacaaagcca

SEQ ID NO: 125333 - RNA, 21 nt, Homo sapiens
caugucuauuagcuccacaaa

SEQ ID NO: 125334 - RNA, 21 nt, Homo sapiens
cucugauguagcuuauacaaa

SEQ ID NO: 125335 - RNA, 16 nt, Homo sapiens
gcauuugucaacaaag

SEQ ID NO: 125336 - RNA, 17 nt, Homo sapiens
caguaguggugacugug

SEQ ID NO: 125337 - RNA, 15 nt, Homo sapiens
cagauuauuauugaa

SEQ ID NO: 125338 - RNA, 22 nt, Homo sapiens
ucccuucuuuuuguucuucauc

SEQ ID NO: 125339 - RNA, 22 nt, Homo sapiens
ucaaagugagcuccuaagccau

SEQ ID NO: 125340 - RNA, 15 nt, Homo sapiens
gagugggcuaagcac

SEQ ID NO: 125341 - RNA, 20 nt, Homo sapiens
caggcuggagugcaaugaca

SEQ ID NO: 125342 - RNA, 17 nt, Homo sapiens
aagaucguucucugccu

SEQ ID NO: 125343 - RNA, 15 nt, Homo sapiens
ccuuugccugguaca

SEQ ID NO: 125344 - RNA, 19 nt, Homo sapiens
aggcugugccaucagcucc

SEQ ID NO: 125345 - RNA, 19 nt, Homo sapiens
cuccugaguagcuggauua

SEQ ID NO: 125346 - RNA, 21 nt, Homo sapiens
cauucccguggaacguuuuuc

SEQ ID NO: 125347 - RNA, 19 nt, Homo sapiens
gcccaggcuggagugcaau

SEQ ID NO: 125348 - RNA, 20 nt, Homo sapiens
ucugaaaaaguauccugcuu

SEQ ID NO: 125349 - RNA, 22 nt, Homo sapiens
gcaaaaccaaauauuccagaga

SEQ ID NO: 125350 - RNA, 18 nt, Homo sapiens
uggccaggcuggucucaa

SEQ ID NO: 125351 - RNA, 21 nt, Homo sapiens
uguguuuuuaauaaagacagg

SEQ ID NO: 125352 - RNA, 20 nt, Homo sapiens
gcuuagcuaauauugcaaug

SEQ ID NO: 125353 - RNA, 23 nt, Homo sapiens
gugagacuuugaggguguauauu

SEQ ID NO: 125354 - RNA, 17 nt, Homo sapiens
auccuggggaacauaga

SEQ ID NO: 125355 - RNA, 18 nt, Homo sapiens
ucugcauucucuagucag

SEQ ID NO: 125356 - RNA, 15 nt, Homo sapiens
cuuuauacucaggca

SEQ ID NO: 125357 - RNA, 12 nt, Homo sapiens
gucuuggcucac

SEQ ID NO: 125358 - RNA, 18 nt, Homo sapiens
acaaauugggccaaagaa

SEQ ID NO: 125359 - RNA, 21 nt, Homo sapiens
gcagaguacaaaguaagccau

SEQ ID NO: 125360 - RNA, 23 nt, Homo sapiens
uguauauuuucugugcagccacu

SEQ ID NO: 125361 - RNA, 23 nt, Homo sapiens
ccacuguuaagccauguguucca

SEQ ID NO: 125362 - RNA, 21 nt, Homo sapiens
auagagguucuuuauugcuca

SEQ ID NO: 125363 - RNA, 14 nt, Homo sapiens
aucaguagccagca

SEQ ID NO: 125364 - RNA, 21 nt, Homo sapiens
aaauuaagaaauucacuuccc

SEQ ID NO: 125365 - RNA, 22 nt, Homo sapiens
aaccguaugagggaacugugua

SEQ ID NO: 125366 - RNA, 19 nt, Homo sapiens
guguacagucuuguauuaa

SEQ ID NO: 125367 - RNA, 13 nt, Homo sapiens
gaauaguuuccaa

SEQ ID NO: 125368 - RNA, 20 nt, Homo sapiens
cuauaaaaugagaagucuca

SEQ ID NO: 125369 - RNA, 14 nt, Homo sapiens
agccucaucucuuu

SEQ ID NO: 125370 - RNA, 22 nt, Homo sapiens
caaagaacuuggaaauagugau

SEQ ID NO: 125371 - RNA, 13 nt, Homo sapiens
uguaucucaggaa

SEQ ID NO: 125372 - RNA, 12 nt, Homo sapiens
acuuaguucaag

SEQ ID NO: 125373 - RNA, 12 nt, Homo sapiens
agaaagugaucc

SEQ ID NO: 125374 - RNA, 17 nt, Homo sapiens
guucugguuacuguucu

SEQ ID NO: 125375 - RNA, 19 nt, Homo sapiens
ccaagcaguuucuuucaaa

SEQ ID NO: 125376 - RNA, 21 nt, Homo sapiens
aguauauucaaccaaauacuu

SEQ ID NO: 125377 - RNA, 14 nt, Homo sapiens
uaguggugacugug

SEQ ID NO: 125378 - RNA, 19 nt, Homo sapiens
uguauuuaaaugaaaguga

SEQ ID NO: 125379 - RNA, 22 nt, Homo sapiens
uuaaauguagaaagugauccau

SEQ ID NO: 125380 - RNA, 22 nt, Homo sapiens
guaacuguuuugguuuugcuca

SEQ ID NO: 125381 - RNA, 21 nt, Homo sapiens
caaguucuuaguugcuguaug

SEQ ID NO: 125382 - RNA, 16 nt, Homo sapiens
cugcuucugauaugca

SEQ ID NO: 125383 - RNA, 20 nt, Homo sapiens
aagauggcacuuauaaccaa

SEQ ID NO: 125384 - RNA, 15 nt, Homo sapiens
uaacauggugugcuu

SEQ ID NO: 125385 - RNA, 20 nt, Homo sapiens
cugucaauguccuacugaga

SEQ ID NO: 125386 - RNA, 11 nt, Homo sapiens
aguugcacaaa

SEQ ID NO: 125387 - RNA, 24 nt, Homo sapiens
cauguuggccaggcuggucucaaa

SEQ ID NO: 125388 - RNA, 20 nt, Homo sapiens
uguucugguuacuguucuaa

SEQ ID NO: 125389 - RNA, 20 nt, Homo sapiens
cuccccuguucauucugcau

SEQ ID NO: 125390 - RNA, 21 nt, Homo sapiens
aagggauggaagaaguaaaua

SEQ ID NO: 125391 - RNA, 14 nt, Homo sapiens
aaagaacuuggaaa

SEQ ID NO: 125392 - RNA, 17 nt, Homo sapiens
aucccgucgacguagaa

SEQ ID NO: 125393 - RNA, 18 nt, Homo sapiens
caaggucuccagagggug

SEQ ID NO: 125394 - RNA, 22 nt, Homo sapiens
ugucaauguccuacugagacag

SEQ ID NO: 125395 - RNA, 21 nt, Homo sapiens
acuuuuuccuggcucaucucu

SEQ ID NO: 125396 - RNA, 20 nt, Homo sapiens
gucugaacaauauauacuua

SEQ ID NO: 125397 - RNA, 20 nt, Homo sapiens
gucugucaauguccuacuga

SEQ ID NO: 125398 - RNA, 23 nt, Homo sapiens
aagaauuuuuauauccacuaaaa

SEQ ID NO: 125399 - RNA, 18 nt, Homo sapiens
ccgacugccaucuuggac

SEQ ID NO: 125400 - RNA, 15 nt, Homo sapiens
cagcauggagucaca

SEQ ID NO: 125401 - RNA, 14 nt, Homo sapiens
cuagucaguuggcu

SEQ ID NO: 125402 - RNA, 16 nt, Homo sapiens
gcuaguaaaagccauc

SEQ ID NO: 125403 - RNA, 22 nt, Homo sapiens
uagagaccaguuuucucuggaa

SEQ ID NO: 125404 - RNA, 20 nt, Homo sapiens
agcuuacaagccagcuggag

SEQ ID NO: 125405 - RNA, 20 nt, Homo sapiens
aaaauaaucaguguuuccaa

SEQ ID NO: 125406 - RNA, 16 nt, Homo sapiens
gaaguuuaauugacuu

SEQ ID NO: 125407 - RNA, 16 nt, Homo sapiens
uaugaauaguuuccaa

SEQ ID NO: 125408 - RNA, 13 nt, Homo sapiens
cauuuguuuucac

SEQ ID NO: 125409 - RNA, 21 nt, Homo sapiens
accucgagguuucucaaagaa

SEQ ID NO: 125410 - RNA, 16 nt, Homo sapiens
aagcagguucuuguua

SEQ ID NO: 125411 - RNA, 18 nt, Homo sapiens
cuauaagaugaaacauca

SEQ ID NO: 125412 - RNA, 16 nt, Homo sapiens
ccaggcuggagugcaa

SEQ ID NO: 125413 - RNA, 22 nt, Homo sapiens
ucuaaagauggaaaaaccaccc

SEQ ID NO: 125414 - RNA, 19 nt, Homo sapiens
cagucuuggcucacugcaa

SEQ ID NO: 125415 - RNA, 21 nt, Homo sapiens
ucugccuccccuucacuccca

SEQ ID NO: 125416 - RNA, 22 nt, Homo sapiens
gaaauagugauuuccacaguga

SEQ ID NO: 125417 - RNA, 23 nt, Homo sapiens
cuuuuuuuuuuuuuaaagacaga

SEQ ID NO: 125418 - RNA, 16 nt, Homo sapiens
ucagggagugggcuaa

SEQ ID NO: 125419 - RNA, 16 nt, Homo sapiens
cugugccaucagcucc

SEQ ID NO: 125420 - RNA, 12 nt, Homo sapiens
gguauuuagcca

SEQ ID NO: 125421 - RNA, 23 nt, Homo sapiens
aagacgucacccuccauucugca

SEQ ID NO: 125422 - RNA, 20 nt, Homo sapiens
uuucuugucuauaaagcauu

SEQ ID NO: 125423 - RNA, 19 nt, Homo sapiens
aguuuauacccguuucaca

SEQ ID NO: 125424 - RNA, 13 nt, Homo sapiens
uaauaaagacagg

SEQ ID NO: 125425 - RNA, 21 nt, Homo sapiens
ccugaugcuggggacacagca

SEQ ID NO: 125426 - RNA, 22 nt, Homo sapiens
caggcaugugccacccacccaa

SEQ ID NO: 125427 - RNA, 16 nt, Homo sapiens
gcagagaggcugaaua

SEQ ID NO: 125428 - RNA, 14 nt, Homo sapiens
ugcaauguuuuaga

SEQ ID NO: 125429 - RNA, 15 nt, Homo sapiens
agaaauccaauugga

SEQ ID NO: 125430 - RNA, 16 nt, Homo sapiens
uagaaauccaauugga

SEQ ID NO: 125431 - RNA, 11 nt, Homo sapiens
auucaaaguga

SEQ ID NO: 125432 - RNA, 19 nt, Homo sapiens
uuaaauguagaaagugauc

SEQ ID NO: 125433 - RNA, 22 nt, Homo sapiens
acagcauggagucacagccacu

SEQ ID NO: 125434 - RNA, 16 nt, Homo sapiens
agugauucuccugccu

SEQ ID NO: 125435 - RNA, 23 nt, Homo sapiens
gagacagcacagccaaccuagcu

SEQ ID NO: 125436 - RNA, 12 nt, Homo sapiens
ucugcuagggaa

SEQ ID NO: 125437 - RNA, 20 nt, Homo sapiens
ugucuuuggugaacauugca

SEQ ID NO: 125438 - RNA, 21 nt, Homo sapiens
gacagcacagccaaccuagcu

SEQ ID NO: 125439 - RNA, 13 nt, Homo sapiens
gucacagccacuu

SEQ ID NO: 125440 - RNA, 20 nt, Homo sapiens
uacccguuucacaugcuuuu

SEQ ID NO: 125441 - RNA, 23 nt, Homo sapiens
uaaaaaaaaaaaaaaaagugaug

SEQ ID NO: 125442 - RNA, 13 nt, Homo sapiens
guucucugccuca

SEQ ID NO: 125443 - RNA, 13 nt, Homo sapiens
caaaaccaaauau

SEQ ID NO: 125444 - RNA, 18 nt, Homo sapiens
ccaaguccacaguggaac

SEQ ID NO: 125445 - RNA, 16 nt, Homo sapiens
ugaccugccaggcaca

SEQ ID NO: 125446 - RNA, 18 nt, Homo sapiens
gcgcccagccucaucucu

SEQ ID NO: 125447 - RNA, 14 nt, Homo sapiens
uuauggcaaauuca

SEQ ID NO: 125448 - RNA, 17 nt, Homo sapiens
uaaauauagcucaggua

SEQ ID NO: 125449 - RNA, 14 nt, Homo sapiens
guuccgacugccau

SEQ ID NO: 125450 - RNA, 19 nt, Homo sapiens
acauuuguuguucuguuaa

SEQ ID NO: 125451 - RNA, 23 nt, Homo sapiens
cuuggaauccuggggaacauaga

SEQ ID NO: 125452 - RNA, 16 nt, Homo sapiens
uacaaaguaagccaug

SEQ ID NO: 125453 - RNA, 19 nt, Homo sapiens
gaguacaaaguaagccaug

SEQ ID NO: 125454 - RNA, 23 nt, Homo sapiens
aauaagcaggcgugaccugccag

SEQ ID NO: 125455 - RNA, 16 nt, Homo sapiens
ugcaaugacacagucu

SEQ ID NO: 125456 - RNA, 15 nt, Homo sapiens
agaaagugauccaua

SEQ ID NO: 125457 - RNA, 14 nt, Homo sapiens
uguguuuuuaauaa

SEQ ID NO: 125458 - RNA, 21 nt, Homo sapiens
ugagcaaaaccaaauauucca

SEQ ID NO: 125459 - RNA, 17 nt, Homo sapiens
auucagggagugggcua

SEQ ID NO: 125460 - RNA, 19 nt, Homo sapiens
aggauuugggcucuuggaa

SEQ ID NO: 125461 - RNA, 23 nt, Homo sapiens
ggcagaguacaaaguaagccaug

SEQ ID NO: 125462 - RNA, 19 nt, Homo sapiens
gucugaacaauauauacuu

SEQ ID NO: 125463 - RNA, 15 nt, Homo sapiens
aguucauggauaugu

SEQ ID NO: 125464 - RNA, 17 nt, Homo sapiens
uauugaacuuaugcaaa

SEQ ID NO: 125465 - RNA, 11 nt, Homo sapiens
gccucaucucu

SEQ ID NO: 125466 - RNA, 15 nt, Homo sapiens
uuaaaaauaugugua

SEQ ID NO: 125467 - RNA, 13 nt, Homo sapiens
ugggauuacaggg

SEQ ID NO: 125468 - RNA, 11 nt, Homo sapiens
ggaacugugua

SEQ ID NO: 125469 - RNA, 14 nt, Homo sapiens
ucuuuuccaugaac

SEQ ID NO: 125470 - RNA, 13 nt, Homo sapiens
cuuuauugcucau

SEQ ID NO: 125471 - RNA, 14 nt, Homo sapiens
uacuuaguucaagc

SEQ ID NO: 125472 - RNA, 14 nt, Homo sapiens
cuuccaucaccucc

SEQ ID NO: 125473 - RNA, 16 nt, Homo sapiens
aaguuuaauugacuua

SEQ ID NO: 125474 - RNA, 18 nt, Homo sapiens
cacucuguaauugcaaaa

SEQ ID NO: 125475 - RNA, 18 nt, Homo sapiens
aaguacauguuaaacuua

SEQ ID NO: 125476 - RNA, 16 nt, Homo sapiens
ucaauguccuacugag

SEQ ID NO: 125477 - RNA, 16 nt, Homo sapiens
cccuccauucugcacu

SEQ ID NO: 125478 - RNA, 16 nt, Homo sapiens
gauuuugcuguagaag

SEQ ID NO: 125479 - RNA, 21 nt, Homo sapiens
guauaguuaaccacuaccgaa

SEQ ID NO: 125480 - RNA, 15 nt, Homo sapiens
auaaagacaggguuu

SEQ ID NO: 125481 - RNA, 17 nt, Homo sapiens
ugaaagugagacuuuga

SEQ ID NO: 125482 - RNA, 20 nt, Homo sapiens
aaccaaauacuuuaauguau

SEQ ID NO: 125483 - RNA, 14 nt, Homo sapiens
ggguucaagugauu

SEQ ID NO: 125484 - RNA, 13 nt, Homo sapiens
uggaaccagccca

SEQ ID NO: 125485 - RNA, 17 nt, Homo sapiens
caaacuccugaccucaa

SEQ ID NO: 125486 - RNA, 14 nt, Homo sapiens
aauucaucagauaa

SEQ ID NO: 125487 - RNA, 16 nt, Homo sapiens
gcaauagaaauccaau

SEQ ID NO: 125488 - RNA, 16 nt, Homo sapiens
acccucccacugccaa

SEQ ID NO: 125489 - RNA, 20 nt, Homo sapiens
auuccacaaccugguuugcc

SEQ ID NO: 125490 - RNA, 14 nt, Homo sapiens
acagcaucagcuca

SEQ ID NO: 125491 - RNA, 23 nt, Homo sapiens
uccuggggaacauagaacucaug

SEQ ID NO: 125492 - RNA, 17 nt, Homo sapiens
caaauugggccaaagaa

SEQ ID NO: 125493 - RNA, 21 nt, Homo sapiens
ucugaacaauauauacuuaua

SEQ ID NO: 125494 - RNA, 22 nt, Homo sapiens
cacuuagguccaaggucuccag

SEQ ID NO: 125495 - RNA, 15 nt, Homo sapiens
aggcuucuggggcuu

SEQ ID NO: 125496 - RNA, 22 nt, Homo sapiens
caauauauacuuauagaauuca

SEQ ID NO: 125497 - RNA, 13 nt, Homo sapiens
caucauuuccauu

SEQ ID NO: 125498 - RNA, 18 nt, Homo sapiens
agggcaauggacaaggaa

SEQ ID NO: 125499 - RNA, 18 nt, Homo sapiens
acugaauuuugucuuuau

SEQ ID NO: 125500 - RNA, 13 nt, Homo sapiens
aaacaucauuuca

SEQ ID NO: 125501 - RNA, 13 nt, Homo sapiens
ugauuguagcuau

SEQ ID NO: 125502 - RNA, 14 nt, Homo sapiens
ucucugcuaucuag

SEQ ID NO: 125503 - RNA, 18 nt, Homo sapiens
agcccuuaggaagaauuu

SEQ ID NO: 125504 - RNA, 17 nt, Homo sapiens
ggcucucccagccaggu

SEQ ID NO: 125505 - RNA, 22 nt, Homo sapiens
cuuuaguuuuugugaaguuuaa

SEQ ID NO: 125506 - RNA, 20 nt, Homo sapiens
uuguauuuaaaugaaaguga

SEQ ID NO: 125507 - RNA, 13 nt, Homo sapiens
aauagccauaaag

SEQ ID NO: 125508 - RNA, 18 nt, Homo sapiens
uugcaauguggcuugaau

SEQ ID NO: 125509 - RNA, 19 nt, Homo sapiens
cauuuaagcugccuguaca

SEQ ID NO: 125510 - RNA, 20 nt, Homo sapiens
gaacguuuuuccuguucuua

SEQ ID NO: 125511 - RNA, 19 nt, Homo sapiens
caauauauacuuauagaau

SEQ ID NO: 125512 - RNA, 15 nt, Homo sapiens
uuggugaacauugca

SEQ ID NO: 125513 - RNA, 12 nt, Homo sapiens
auugcuugcaca

SEQ ID NO: 125514 - RNA, 16 nt, Homo sapiens
uuaauaaagacagggu

SEQ ID NO: 125515 - RNA, 15 nt, Homo sapiens
ucuaaaaucugcuag

SEQ ID NO: 125516 - RNA, 21 nt, Homo sapiens
ugagacuuacuucucugcuau

SEQ ID NO: 125517 - RNA, 17 nt, Homo sapiens
auguagaaagugaucca

SEQ ID NO: 125518 - RNA, 18 nt, Homo sapiens
agcuggagucugucaaug

SEQ ID NO: 125519 - RNA, 17 nt, Homo sapiens
caggacagcuccuggac

SEQ ID NO: 125520 - RNA, 16 nt, Homo sapiens
gacacagcaucagcuc

SEQ ID NO: 125521 - RNA, 16 nt, Homo sapiens
auggcaggacagcucc

SEQ ID NO: 125522 - RNA, 17 nt, Homo sapiens
acuuuuuccuggcucau

SEQ ID NO: 125523 - RNA, 18 nt, Homo sapiens
cagaguuccgacugccau

SEQ ID NO: 125524 - RNA, 22 nt, Homo sapiens
gggaaggaggccguccaucccg

SEQ ID NO: 125525 - RNA, 14 nt, Homo sapiens
aaaaaugugacuca

SEQ ID NO: 125526 - RNA, 16 nt, Homo sapiens
aaacagaaaaccugau

SEQ ID NO: 125527 - RNA, 22 nt, Homo sapiens
cuuguuagugcacagcacaaau

SEQ ID NO: 125528 - RNA, 22 nt, Homo sapiens
guaaaauaaucaguguuuccaa

SEQ ID NO: 125529 - RNA, 20 nt, Homo sapiens
uuuuuacuaaucuuucugca

SEQ ID NO: 125530 - RNA, 14 nt, Homo sapiens
caguggaacuaaga

SEQ ID NO: 125531 - RNA, 13 nt, Homo sapiens
ggauuacaggcau

SEQ ID NO: 125532 - RNA, 15 nt, Homo sapiens
aucuaaaaucugcua

SEQ ID NO: 125533 - RNA, 19 nt, Homo sapiens
gucuuuggugaacauugca

SEQ ID NO: 125534 - RNA, 21 nt, Homo sapiens
aaaaguuuuguaaauuucucu

SEQ ID NO: 125535 - RNA, 12 nt, Homo sapiens
acugccaaagaa

SEQ ID NO: 125536 - RNA, 12 nt, Homo sapiens
aaaaugugacuc

SEQ ID NO: 125537 - RNA, 13 nt, Homo sapiens
ugcucacaaaagu

SEQ ID NO: 125538 - RNA, 16 nt, Homo sapiens
aguagcuggauuacag

SEQ ID NO: 125539 - RNA, 21 nt, Homo sapiens
uaagaucguucucugccucac

SEQ ID NO: 125540 - RNA, 13 nt, Homo sapiens
uacuaaucuuucu

SEQ ID NO: 125541 - RNA, 19 nt, Homo sapiens
uuacuuuuuccuggcucau

SEQ ID NO: 125542 - RNA, 16 nt, Homo sapiens
gccagagcaaacagaa

SEQ ID NO: 125543 - RNA, 19 nt, Homo sapiens
augugacucaagacuucca

SEQ ID NO: 125544 - RNA, 15 nt, Homo sapiens
ugcauguggcacuua

SEQ ID NO: 125545 - RNA, 17 nt, Homo sapiens
cugcuagggaauaucaa

SEQ ID NO: 125546 - RNA, 18 nt, Homo sapiens
uggaaauagugauuucca

SEQ ID NO: 125547 - RNA, 18 nt, Homo sapiens
cuugacuuuugaaaacaa

SEQ ID NO: 125548 - RNA, 19 nt, Homo sapiens
accaaauacuuuaauguau

SEQ ID NO: 125549 - RNA, 16 nt, Homo sapiens
gagggaaaacagaaaa

SEQ ID NO: 125550 - RNA, 10 nt, Homo sapiens
aaaagugaug

SEQ ID NO: 125551 - RNA, 11 nt, Homo sapiens
accucaucucc

SEQ ID NO: 125552 - RNA, 15 nt, Homo sapiens
gaccauuagcauuug

SEQ ID NO: 125553 - RNA, 15 nt, Homo sapiens
caaugacacagucuu

SEQ ID NO: 125554 - RNA, 15 nt, Homo sapiens
uccugcuucugauau

SEQ ID NO: 125555 - RNA, 22 nt, Homo sapiens
agcaaaaccaaauauuccagag

SEQ ID NO: 125556 - RNA, 14 nt, Homo sapiens
acagccacuuggga

SEQ ID NO: 125557 - RNA, 14 nt, Homo sapiens
caguguacagucuu

SEQ ID NO: 125558 - RNA, 16 nt, Homo sapiens
uggcaggacagcuccu

SEQ ID NO: 125559 - RNA, 16 nt, Homo sapiens
uucccauuaaagaagu

SEQ ID NO: 125560 - RNA, 20 nt, Homo sapiens
accaaauacuuuaauguaua

SEQ ID NO: 125561 - RNA, 23 nt, Homo sapiens
caggcgugaccugccaggcacac

SEQ ID NO: 125562 - RNA, 21 nt, Homo sapiens
accuaaauaugagcccagaaa

SEQ ID NO: 125563 - RNA, 20 nt, Homo sapiens
uacaguuuuuauugcuuguu

SEQ ID NO: 125564 - RNA, 19 nt, Homo sapiens
cucuggccuccaaguccac

SEQ ID NO: 125565 - RNA, 23 nt, Homo sapiens
ccuaggaaagccaguuacauaaa

SEQ ID NO: 125566 - RNA, 22 nt, Homo sapiens
gcgcaguuggucuuuaaccacu

SEQ ID NO: 125567 - RNA, 12 nt, Homo sapiens
guagaaagugau

SEQ ID NO: 125568 - RNA, 23 nt, Homo sapiens
uguuaagccauguguuccaaggc

SEQ ID NO: 125569 - RNA, 13 nt, Homo sapiens
aagcauucuucaa

SEQ ID NO: 125570 - RNA, 13 nt, Homo sapiens
aaaguaagccaug

SEQ ID NO: 125571 - RNA, 13 nt, Homo sapiens
accaauauuguac

SEQ ID NO: 125572 - RNA, 14 nt, Homo sapiens
uuugucaacaaagu

SEQ ID NO: 125573 - RNA, 21 nt, Homo sapiens
uggcaguggaacuaagaaagc

SEQ ID NO: 125574 - RNA, 20 nt, Homo sapiens
ucagucuuuuccaugaacuu

SEQ ID NO: 125575 - RNA, 18 nt, Homo sapiens
caucccgucgacguagaa

SEQ ID NO: 125576 - RNA, 17 nt, Homo sapiens
aaaaaugugacucaaga

SEQ ID NO: 125577 - RNA, 14 nt, Homo sapiens
uugcucacaaaagu

SEQ ID NO: 125578 - RNA, 15 nt, Homo sapiens
caggcgugaccugcc

SEQ ID NO: 125579 - RNA, 19 nt, Homo sapiens
cucgugguaggacuguaga

SEQ ID NO: 125580 - RNA, 19 nt, Homo sapiens
uccuggaggugacacuuga

SEQ ID NO: 125581 - RNA, 15 nt, Homo sapiens
gcaccuacaguguac

SEQ ID NO: 125582 - RNA, 19 nt, Homo sapiens
auuuuauguuuaguugcac

SEQ ID NO: 125583 - RNA, 12 nt, Homo sapiens
uguagaaaguga

SEQ ID NO: 125584 - RNA, 22 nt, Homo sapiens
ucuuuguaaagaaaguggcuug

SEQ ID NO: 125585 - RNA, 15 nt, Homo sapiens
aaucaguguuuccaa

SEQ ID NO: 125586 - RNA, 22 nt, Homo sapiens
cauuugucaacaaagucaccca

SEQ ID NO: 125587 - RNA, 12 nt, Homo sapiens
agccucaucucu

SEQ ID NO: 125588 - RNA, 20 nt, Homo sapiens
ucuaaagauggaaaaaccac

SEQ ID NO: 125589 - RNA, 22 nt, Homo sapiens
aacauuuguuuuagucugaaca

SEQ ID NO: 125590 - RNA, 19 nt, Homo sapiens
caguaguggugacuguggg

SEQ ID NO: 125591 - RNA, 21 nt, Homo sapiens
gaguuauuuuuauuuauuuaa

SEQ ID NO: 125592 - RNA, 19 nt, Homo sapiens
ucaaaacaaucuugucaua

SEQ ID NO: 125593 - RNA, 11 nt, Homo sapiens
auaaagacagg

SEQ ID NO: 125594 - RNA, 15 nt, Homo sapiens
cuggaccaggucuca

SEQ ID NO: 125595 - RNA, 21 nt, Homo sapiens
augacacucuagucaaagccu

SEQ ID NO: 125596 - RNA, 18 nt, Homo sapiens
acauuuguuuguggucua

SEQ ID NO: 125597 - RNA, 16 nt, Homo sapiens
uaagccauguguucca

SEQ ID NO: 125598 - RNA, 22 nt, Homo sapiens
agacagcacagccaaccuagcu

SEQ ID NO: 125599 - RNA, 18 nt, Homo sapiens
acugccaaagaacuugga

SEQ ID NO: 125600 - RNA, 16 nt, Homo sapiens
cagccagguucugacu

SEQ ID NO: 125601 - RNA, 14 nt, Homo sapiens
uguacagucuugua

SEQ ID NO: 125602 - RNA, 12 nt, Homo sapiens
uucacucccacc

SEQ ID NO: 125603 - RNA, 13 nt, Homo sapiens
gguucaagugauu

SEQ ID NO: 125604 - RNA, 13 nt, Homo sapiens
caaucguaaaauu

SEQ ID NO: 125605 - RNA, 22 nt, Homo sapiens
caaaaccaaauauuccagagac

SEQ ID NO: 125606 - RNA, 21 nt, Homo sapiens
ccuccaaguccacaguggaac

SEQ ID NO: 125607 - RNA, 18 nt, Homo sapiens
guuuacauuuuguauauu

SEQ ID NO: 125608 - RNA, 14 nt, Homo sapiens
uuggaaaaucaaga

SEQ ID NO: 125609 - RNA, 16 nt, Homo sapiens
augagggaacugugua

SEQ ID NO: 125610 - RNA, 12 nt, Homo sapiens
caguguuuccaa

SEQ ID NO: 125611 - RNA, 18 nt, Homo sapiens
augagaaaaugucuuuau

SEQ ID NO: 125612 - RNA, 14 nt, Homo sapiens
acuuauuuauauaa

SEQ ID NO: 125613 - RNA, 19 nt, Homo sapiens
uagugcacagcacaaauua

SEQ ID NO: 125614 - RNA, 17 nt, Homo sapiens
auuugucaacaaaguca

SEQ ID NO: 125615 - RNA, 19 nt, Homo sapiens
uggaaauagugauuuccac

SEQ ID NO: 125616 - RNA, 22 nt, Homo sapiens
ucuaaggcugugccaucagcuc

SEQ ID NO: 125617 - RNA, 22 nt, Homo sapiens
gugaccugccaggcacacugag

SEQ ID NO: 125618 - RNA, 23 nt, Homo sapiens
gcaaaaccaaauauuccagagac

SEQ ID NO: 125619 - RNA, 19 nt, Homo sapiens
uuggcuaguaaaagccauc

SEQ ID NO: 125620 - RNA, 21 nt, Homo sapiens
cacaaucugaaacagcuucau

SEQ ID NO: 125621 - RNA, 20 nt, Homo sapiens
agcuguuuaugcauagauaa

SEQ ID NO: 125622 - RNA, 15 nt, Homo sapiens
gugagaggacucuga

SEQ ID NO: 125623 - RNA, 14 nt, Homo sapiens
uuuucuugucuaua

SEQ ID NO: 125624 - RNA, 16 nt, Homo sapiens
uacaauauacuuguau

SEQ ID NO: 125625 - RNA, 21 nt, Homo sapiens
caaucugaaacagcuucaugg

SEQ ID NO: 125626 - RNA, 18 nt, Homo sapiens
ccaaagaaacauugccuu

SEQ ID NO: 125627 - RNA, 20 nt, Homo sapiens
cgccacccucccacugccaa

SEQ ID NO: 125628 - RNA, 11 nt, Homo sapiens
aguugcuguau

SEQ ID NO: 125629 - RNA, 20 nt, Homo sapiens
gucagaguuccgacugccau

SEQ ID NO: 125630 - RNA, 19 nt, Homo sapiens
aaccaaauauuccagagac

SEQ ID NO: 125631 - RNA, 14 nt, Homo sapiens
caauauacuuguau

SEQ ID NO: 125632 - RNA, 21 nt, Homo sapiens
ccaaguucuuaguugcuguau

SEQ ID NO: 125633 - RNA, 20 nt, Homo sapiens
cuauaagaugaaacaucauu

SEQ ID NO: 125634 - RNA, 22 nt, Homo sapiens
gugccucugggacuggacaauu

SEQ ID NO: 125635 - RNA, 18 nt, Homo sapiens
auaggaggccaacccaaa

SEQ ID NO: 125636 - RNA, 15 nt, Homo sapiens
cuccuuagaagugga

SEQ ID NO: 125637 - RNA, 14 nt, Homo sapiens
gaaacaucauuuca

SEQ ID NO: 125638 - RNA, 20 nt, Homo sapiens
uauacccguuucacaugcuu

SEQ ID NO: 125639 - RNA, 15 nt, Homo sapiens
aauaaccauugucau

SEQ ID NO: 125640 - RNA, 16 nt, Homo sapiens
auccacuaaaaucaaa

SEQ ID NO: 125641 - RNA, 14 nt, Homo sapiens
ugcuguaugucucg

SEQ ID NO: 125642 - RNA, 23 nt, Homo sapiens
acauuuuacuuuuuccuggcuca

SEQ ID NO: 125643 - RNA, 22 nt, Homo sapiens
cugagucccuuagccaagcagu

SEQ ID NO: 125644 - RNA, 23 nt, Homo sapiens
uuacuuuuuccuggcucaucucu

SEQ ID NO: 125645 - RNA, 21 nt, Homo sapiens
guccaucccgucgacguagaa

SEQ ID NO: 125646 - RNA, 21 nt, Homo sapiens
cagagaagggcuuggacucaa

SEQ ID NO: 125647 - RNA, 17 nt, Homo sapiens
agucuuagagcuuuacc

SEQ ID NO: 125648 - RNA, 15 nt, Homo sapiens
cauucugcacucaga

SEQ ID NO: 125649 - RNA, 20 nt, Homo sapiens
uacacauuuuucagauauaa

SEQ ID NO: 125650 - RNA, 16 nt, Homo sapiens
ucaaacaaaaagucau

SEQ ID NO: 125651 - RNA, 12 nt, Homo sapiens
uucucugccuca

SEQ ID NO: 125652 - RNA, 14 nt, Homo sapiens
ccuggggcuucuga

SEQ ID NO: 125653 - RNA, 15 nt, Homo sapiens
cagagccucaaauga

SEQ ID NO: 125654 - RNA, 16 nt, Homo sapiens
cuggcaagaugcuuua

SEQ ID NO: 125655 - RNA, 22 nt, Homo sapiens
ucugauaugcaguuuuccuuaa

SEQ ID NO: 125656 - RNA, 21 nt, Homo sapiens
aauaguuguuauucuguaguu

SEQ ID NO: 125657 - RNA, 18 nt, Homo sapiens
uguagaagauggcacuua

SEQ ID NO: 125658 - RNA, 22 nt, Homo sapiens
aaagccaaucucaaucccucaa

SEQ ID NO: 125659 - RNA, 18 nt, Homo sapiens
aauguagaaagugaucca

SEQ ID NO: 125660 - RNA, 17 nt, Homo sapiens
uuuccaaauuauggcaa

SEQ ID NO: 125661 - RNA, 9 nt, Homo sapiens
aaagacaga

SEQ ID NO: 125662 - RNA, 13 nt, Homo sapiens
uucuccugccuca

SEQ ID NO: 125663 - RNA, 22 nt, Homo sapiens
gacucuauuaaaaucuucaaua

SEQ ID NO: 125664 - RNA, 17 nt, Homo sapiens
ucaauguccuacugaga

SEQ ID NO: 125665 - RNA, 16 nt, Homo sapiens
gucuaaaaacauuugu

SEQ ID NO: 125666 - RNA, 22 nt, Homo sapiens
gcccagacccuucuccuuagaa

SEQ ID NO: 125667 - RNA, 14 nt, Homo sapiens
ugaauaguuuccaa

SEQ ID NO: 125668 - RNA, 13 nt, Homo sapiens
cauuuacauugcc

SEQ ID NO: 125669 - RNA, 10 nt, Homo sapiens
cucacaaaag

SEQ ID NO: 125670 - RNA, 18 nt, Homo sapiens
aucugaaacagcuucaug

SEQ ID NO: 125671 - RNA, 16 nt, Homo sapiens
uuagagcuuuaccuaa

SEQ ID NO: 125672 - RNA, 19 nt, Homo sapiens
gcuucuuugaaacuuguau

SEQ ID NO: 125673 - RNA, 20 nt, Homo sapiens
ucaaaaaaaaaaaaauguga

SEQ ID NO: 125674 - RNA, 18 nt, Homo sapiens
cucaaagaaauuuccacu

SEQ ID NO: 125675 - RNA, 13 nt, Homo sapiens
uccacagugacuc

SEQ ID NO: 125676 - RNA, 20 nt, Homo sapiens
uggggacacagcaucagcuc

SEQ ID NO: 125677 - RNA, 12 nt, Homo sapiens
uuugucuuuaug

SEQ ID NO: 125678 - RNA, 14 nt, Homo sapiens
ucuuaguugcugua

SEQ ID NO: 125679 - RNA, 20 nt, Homo sapiens
agcaacauuuguuuuagucu

SEQ ID NO: 125680 - RNA, 23 nt, Homo sapiens
ugauagagguucuuuauugcuca

SEQ ID NO: 125681 - RNA, 19 nt, Homo sapiens
auuggaccagucagcacag

SEQ ID NO: 125682 - RNA, 16 nt, Homo sapiens
cacagccaaccuagcu

SEQ ID NO: 125683 - RNA, 14 nt, Homo sapiens
agaauaaauacugu

SEQ ID NO: 125684 - RNA, 19 nt, Homo sapiens
cugauguagcuuauacaaa

SEQ ID NO: 125685 - RNA, 14 nt, Homo sapiens
uuaauaaaaguaca

SEQ ID NO: 125686 - RNA, 21 nt, Homo sapiens
gaauucagucaaagauacaca

SEQ ID NO: 125687 - RNA, 22 nt, Homo sapiens
uaagcugccuguacacaacuca

SEQ ID NO: 125688 - RNA, 20 nt, Homo sapiens
augcuggggacacagcauca

SEQ ID NO: 125689 - RNA, 22 nt, Homo sapiens
acacaaucugaaacagcuucau

SEQ ID NO: 125690 - RNA, 18 nt, Homo sapiens
gccaaucaguagccagca

SEQ ID NO: 125691 - RNA, 21 nt, Homo sapiens
ccuuggcuaguaaaagccauc

SEQ ID NO: 125692 - RNA, 12 nt, Homo sapiens
uguaauugcaaa

SEQ ID NO: 125693 - RNA, 21 nt, Homo sapiens
guaaauuucucuacugucuca

SEQ ID NO: 125694 - RNA, 23 nt, Homo sapiens
aaauuuucuuuuuauacuauuaa

SEQ ID NO: 125695 - RNA, 15 nt, Homo sapiens
cuaacaguaguugca

SEQ ID NO: 125696 - RNA, 16 nt, Homo sapiens
uuacauuuuguauauu

SEQ ID NO: 125697 - RNA, 20 nt, Homo sapiens
gcccaggcuggagugcaaug

SEQ ID NO: 125698 - RNA, 17 nt, Homo sapiens
cuccuggaccaggucuc

SEQ ID NO: 125699 - RNA, 12 nt, Homo sapiens
gaaucucucuuc

SEQ ID NO: 125700 - RNA, 18 nt, Homo sapiens
gucacagccacuugggau

SEQ ID NO: 125701 - RNA, 12 nt, Homo sapiens
gcaaaaccaaau

SEQ ID NO: 125702 - RNA, 12 nt, Homo sapiens
uuacauugccuu

SEQ ID NO: 125703 - RNA, 13 nt, Homo sapiens
cagagcaaacaga

SEQ ID NO: 125704 - RNA, 15 nt, Homo sapiens
cccgucgacguagaa

SEQ ID NO: 125705 - RNA, 16 nt, Homo sapiens
uaaucaguguuuccaa

SEQ ID NO: 125706 - RNA, 15 nt, Homo sapiens
ugguuauauguauau

SEQ ID NO: 125707 - RNA, 16 nt, Homo sapiens
caaauauuccagagac

SEQ ID NO: 125708 - RNA, 18 nt, Homo sapiens
ccagagcguguagugaau

SEQ ID NO: 125709 - RNA, 14 nt, Homo sapiens
auagaauucaguca

SEQ ID NO: 125710 - RNA, 21 nt, Homo sapiens
aauguuuuagaaugagacuua

SEQ ID NO: 125711 - RNA, 15 nt, Homo sapiens
ccacugccaaagaac

SEQ ID NO: 125712 - RNA, 15 nt, Homo sapiens
caacaaagucaccca

SEQ ID NO: 125713 - RNA, 19 nt, Homo sapiens
agaaguaaauauagcucag

SEQ ID NO: 125714 - RNA, 17 nt, Homo sapiens
cuucuuuuuguucuuca

SEQ ID NO: 125715 - RNA, 16 nt, Homo sapiens
cuugguaaaauaauca

SEQ ID NO: 125716 - RNA, 19 nt, Homo sapiens
auuaucuaaaaucugcuag

SEQ ID NO: 125717 - RNA, 20 nt, Homo sapiens
gaaaagaaucggcaauguuu

SEQ ID NO: 125718 - RNA, 15 nt, Homo sapiens
cccacccaacuaauu

SEQ ID NO: 125719 - RNA, 23 nt, Homo sapiens
uagugauuuccacagugacucca

SEQ ID NO: 125720 - RNA, 16 nt, Homo sapiens
uuguuuguggucuaua

SEQ ID NO: 125721 - RNA, 20 nt, Homo sapiens
ccaggcuggagugcaaugac

SEQ ID NO: 125722 - RNA, 11 nt, Homo sapiens
agaagaugaau

SEQ ID NO: 125723 - RNA, 19 nt, Homo sapiens
ugaccaauauuguacaguu

SEQ ID NO: 125724 - RNA, 20 nt, Homo sapiens
aaaugagaagucucacugau

SEQ ID NO: 125725 - RNA, 15 nt, Homo sapiens
ccaaagacauguuua

SEQ ID NO: 125726 - RNA, 16 nt, Homo sapiens
gucagucuucuuccau

SEQ ID NO: 125727 - RNA, 21 nt, Homo sapiens
aaaugugacucaagacuucca

SEQ ID NO: 125728 - RNA, 23 nt, Homo sapiens
cacagccaaccuagcuagcaaca

SEQ ID NO: 125729 - RNA, 15 nt, Homo sapiens
uuaaaugaaagugag

SEQ ID NO: 125730 - RNA, 13 nt, Homo sapiens
agcagauaauggu

SEQ ID NO: 125731 - RNA, 23 nt, Homo sapiens
uuacuguucuaaggcugugccau

SEQ ID NO: 125732 - RNA, 14 nt, Homo sapiens
ugacucuuggcaca

SEQ ID NO: 125733 - RNA, 16 nt, Homo sapiens
cgugauuuugcuguag

SEQ ID NO: 125734 - RNA, 17 nt, Homo sapiens
gacucuuggcacagcau

SEQ ID NO: 125735 - RNA, 20 nt, Homo sapiens
ggacuaaguguaccagagaa

SEQ ID NO: 125736 - RNA, 21 nt, Homo sapiens
aaaauuaagaaauucacuucc

SEQ ID NO: 125737 - RNA, 21 nt, Homo sapiens
acuguuuugguuuugcucaca

SEQ ID NO: 125738 - RNA, 14 nt, Homo sapiens
ucuaauggcuuuau

SEQ ID NO: 125739 - RNA, 21 nt, Homo sapiens
aaaucuuuuuuguucaaagau

SEQ ID NO: 125740 - RNA, 15 nt, Homo sapiens
cgacaacuugcacgu

SEQ ID NO: 125741 - RNA, 13 nt, Homo sapiens
uugucaacaaagu

SEQ ID NO: 125742 - RNA, 21 nt, Homo sapiens
uguaaauuucucuacugucuc

SEQ ID NO: 125743 - RNA, 18 nt, Homo sapiens
uuaagccauguguuccaa

SEQ ID NO: 125744 - RNA, 23 nt, Homo sapiens
aacuuggaaauagugauuuccac

SEQ ID NO: 125745 - RNA, 13 nt, Homo sapiens
cagcuguuuaugc

SEQ ID NO: 125746 - RNA, 12 nt, Homo sapiens
acugugggcucc

SEQ ID NO: 125747 - RNA, 18 nt, Homo sapiens
aaaaguauccugcuucug

SEQ ID NO: 125748 - RNA, 22 nt, Homo sapiens
cuguuuugguuuugcucacaaa

SEQ ID NO: 125749 - RNA, 13 nt, Homo sapiens
cuuaguugcugua

SEQ ID NO: 125750 - RNA, 19 nt, Homo sapiens
cauggauauguuauacuga

SEQ ID NO: 125751 - RNA, 19 nt, Homo sapiens
uagugauuuccacagugac

SEQ ID NO: 125752 - RNA, 19 nt, Homo sapiens
gcuucuuaaaauagccaua

SEQ ID NO: 125753 - RNA, 16 nt, Homo sapiens
accgcgcccagccuca

SEQ ID NO: 125754 - RNA, 18 nt, Homo sapiens
agggugaaagcuggaguc

SEQ ID NO: 125755 - RNA, 13 nt, Homo sapiens
cagcuccuggacc

SEQ ID NO: 125756 - RNA, 18 nt, Homo sapiens
caggcgugaccugccagg

SEQ ID NO: 125757 - RNA, 20 nt, Homo sapiens
gagaccccgggagccgggga

SEQ ID NO: 125758 - RNA, 15 nt, Homo sapiens
ccuggcucucccagc

SEQ ID NO: 125759 - RNA, 17 nt, Homo sapiens
cuccacucugaguccca

SEQ ID NO: 125760 - RNA, 16 nt, Homo sapiens
cuccccuucacuccca

SEQ ID NO: 125761 - RNA, 17 nt, Homo sapiens
cuccugccucagccucc

SEQ ID NO: 125762 - RNA, 17 nt, Homo sapiens
gcggccccggccggggu

SEQ ID NO: 125763 - RNA, 22 nt, Homo sapiens
ggacagcuccuggaccaggucu

SEQ ID NO: 125764 - RNA, 20 nt, Homo sapiens
ggcacuuagguccaaggucu

SEQ ID NO: 125765 - RNA, 22 nt, Human herpesvirus 2
aaaaaggaggguauuggccaaa

SEQ ID NO: 125766 - RNA, 12 nt, Human herpesvirus 2
aaaaaacaccaa

SEQ ID NO: 125767 - RNA, 13 nt, Human herpesvirus 2
aaaacaagacgua

SEQ ID NO: 125768 - RNA, 15 nt, Human herpesvirus 2
aaaacaccaacauac

SEQ ID NO: 125769 - RNA, 15 nt, Human herpesvirus 2
aaaaaagaaaccggg

SEQ ID NO: 125770 - RNA, 15 nt, Human herpesvirus 2
aaaacacaagcacac

SEQ ID NO: 125771 - RNA, 13 nt, Human herpesvirus 2
aucaagcccacaa

SEQ ID NO: 125772 - RNA, 18 nt, Human herpesvirus 2
aucaagcccacaacccau

SEQ ID NO: 125773 - RNA, 20 nt, Human herpesvirus 2
auagauuucccaaacacuga

SEQ ID NO: 125774 - RNA, 22 nt, Human herpesvirus 2
auccuccuuagauugacucagc

SEQ ID NO: 125775 - RNA, 14 nt, Human herpesvirus 2
auccggcgaucccc

SEQ ID NO: 125776 - RNA, 12 nt, Human herpesvirus 2
auccacaagcua

SEQ ID NO: 125777 - RNA, 16 nt, Human herpesvirus 2
aucuauugaacucucc

SEQ ID NO: 125778 - RNA, 15 nt, Human herpesvirus 2
aucucucugccgggu

SEQ ID NO: 125779 - RNA, 17 nt, Human herpesvirus 2
auagaagaaaaccacaa

SEQ ID NO: 125780 - RNA, 21 nt, Human herpesvirus 2
auaaagagugagaaccaacca

SEQ ID NO: 125781 - RNA, 15 nt, Human herpesvirus 2
auaaagacuguugau

SEQ ID NO: 125782 - RNA, 16 nt, Human herpesvirus 2
auaaaaaacaccaaca

SEQ ID NO: 125783 - RNA, 16 nt, Human herpesvirus 2
aggucaauagauuucc

SEQ ID NO: 125784 - RNA, 16 nt, Human herpesvirus 2
agggcgggccacgucg

SEQ ID NO: 125785 - RNA, 22 nt, Human herpesvirus 2
aggucagcgaucgccagccgcg

SEQ ID NO: 125786 - RNA, 22 nt, Human herpesvirus 2
agguccuuggaauuccagcagc

SEQ ID NO: 125787 - RNA, 15 nt, Human herpesvirus 2
aguccugggugggug

SEQ ID NO: 125788 - RNA, 17 nt, Human herpesvirus 2
agucgcgccuacgagcc

SEQ ID NO: 125789 - RNA, 21 nt, Human herpesvirus 2
aguacgggggaggaggggggu

SEQ ID NO: 125790 - RNA, 21 nt, Human herpesvirus 2
agcucugccugcacgagcgcc

SEQ ID NO: 125791 - RNA, 21 nt, Human herpesvirus 2
aggacgcgcuaguacccagag

SEQ ID NO: 125792 - RNA, 20 nt, Human herpesvirus 2
aggcccccagacgaagucac

SEQ ID NO: 125793 - RNA, 14 nt, Human herpesvirus 2
aggcccucugggac

SEQ ID NO: 125794 - RNA, 11 nt, Human herpesvirus 2
aggcccggggg

SEQ ID NO: 125795 - RNA, 21 nt, Human herpesvirus 2
agggacgcgcgcgguucugac

SEQ ID NO: 125796 - RNA, 11 nt, Human herpesvirus 2
agcgggggccc

SEQ ID NO: 125797 - RNA, 14 nt, Human herpesvirus 2
agcgggcacucugg

SEQ ID NO: 125798 - RNA, 20 nt, Human herpesvirus 2
agcgguacuucuacaccucc

SEQ ID NO: 125799 - RNA, 22 nt, Human herpesvirus 2
agcgugccaacucgcggcaccg

SEQ ID NO: 125800 - RNA, 15 nt, Human herpesvirus 2
auuaacaacaccaaa

SEQ ID NO: 125801 - RNA, 17 nt, Human herpesvirus 2
auguuguuuucccggga

SEQ ID NO: 125802 - RNA, 16 nt, Human herpesvirus 2
auuaauaaagacuguu

SEQ ID NO: 125803 - RNA, 16 nt, Human herpesvirus 2
auuaaccaaccaacga

SEQ ID NO: 125804 - RNA, 17 nt, Human herpesvirus 2
auguucaaaaauacaca

SEQ ID NO: 125805 - RNA, 12 nt, Human herpesvirus 2
augugccuucca

SEQ ID NO: 125806 - RNA, 18 nt, Human herpesvirus 2
auguccggggcggugaua

SEQ ID NO: 125807 - RNA, 19 nt, Human herpesvirus 2
auguccggggcggugauau

SEQ ID NO: 125808 - RNA, 21 nt, Human herpesvirus 2
augguaauuagaaacuuuuaa

SEQ ID NO: 125809 - RNA, 16 nt, Human herpesvirus 2
augggguagugugucc

SEQ ID NO: 125810 - RNA, 12 nt, Human herpesvirus 2
augggggguccg

SEQ ID NO: 125811 - RNA, 20 nt, Human herpesvirus 2
auggguucggacgaaacaaa

SEQ ID NO: 125812 - RNA, 14 nt, Human herpesvirus 2
auggcucgcggggc

SEQ ID NO: 125813 - RNA, 14 nt, Human herpesvirus 2
auggcguacccggg

SEQ ID NO: 125814 - RNA, 14 nt, Human herpesvirus 2
auggggaagcccua

SEQ ID NO: 125815 - RNA, 17 nt, Human herpesvirus 2
aucuucgccgggugucu

SEQ ID NO: 125816 - RNA, 21 nt, Human herpesvirus 2
caccacguguccccagggagc

SEQ ID NO: 125817 - RNA, 16 nt, Human herpesvirus 2
cacaggcccaccacca

SEQ ID NO: 125818 - RNA, 23 nt, Human herpesvirus 2
cacauacgcacaaacacacgggu

SEQ ID NO: 125819 - RNA, 21 nt, Human herpesvirus 2
cacguucgccccgcagccuau

SEQ ID NO: 125820 - RNA, 20 nt, Human herpesvirus 2
caauaaaaucaaucaaucca

SEQ ID NO: 125821 - RNA, 19 nt, Human herpesvirus 2
caauaaaaaacaccaacau

SEQ ID NO: 125822 - RNA, 23 nt, Human herpesvirus 2
caagugcaguaacccaguuccuc

SEQ ID NO: 125823 - RNA, 12 nt, Human herpesvirus 2
caagaugauaac

SEQ ID NO: 125824 - RNA, 19 nt, Human herpesvirus 2
caauaauaaagcuuuauua

SEQ ID NO: 125825 - RNA, 14 nt, Human herpesvirus 2
caauagauuuccca

SEQ ID NO: 125826 - RNA, 14 nt, Human herpesvirus 2
caauagauuucccc

SEQ ID NO: 125827 - RNA, 16 nt, Human herpesvirus 2
caacccccgacauucc

SEQ ID NO: 125828 - RNA, 13 nt, Human herpesvirus 2
caaccccgucucc

SEQ ID NO: 125829 - RNA, 19 nt, Human herpesvirus 2
caaccgacucccuccgugu

SEQ ID NO: 125830 - RNA, 20 nt, Human herpesvirus 2
caaacaaaaacacaagcaca

SEQ ID NO: 125831 - RNA, 18 nt, Human herpesvirus 2
agagcucgggcuggccga

SEQ ID NO: 125832 - RNA, 16 nt, Human herpesvirus 2
agagcgggcccggggc

SEQ ID NO: 125833 - RNA, 17 nt, Human herpesvirus 2
agacgaaggacccauac

SEQ ID NO: 125834 - RNA, 15 nt, Human herpesvirus 2
agacgaaaacguacc

SEQ ID NO: 125835 - RNA, 20 nt, Human herpesvirus 2
agacgcuguuguuucugggc

SEQ ID NO: 125836 - RNA, 20 nt, Human herpesvirus 2
agacaugauagagggaacaa

SEQ ID NO: 125837 - RNA, 13 nt, Human herpesvirus 2
agacaugugcuaa

SEQ ID NO: 125838 - RNA, 23 nt, Human herpesvirus 2
acuucccccccccuacacaccaa

SEQ ID NO: 125839 - RNA, 13 nt, Human herpesvirus 2
acuucccuaacac

SEQ ID NO: 125840 - RNA, 16 nt, Human herpesvirus 2
agaagagaggcgagaa

SEQ ID NO: 125841 - RNA, 13 nt, Human herpesvirus 2
agaaaggccccca

SEQ ID NO: 125842 - RNA, 14 nt, Human herpesvirus 2
acugggguacugca

SEQ ID NO: 125843 - RNA, 15 nt, Human herpesvirus 2
acugggguacugcac

SEQ ID NO: 125844 - RNA, 15 nt, Human herpesvirus 2
acucagacacaaaag

SEQ ID NO: 125845 - RNA, 19 nt, Human herpesvirus 2
acucguucguaaacaccaa

SEQ ID NO: 125846 - RNA, 13 nt, Human herpesvirus 2
acgcgcgacugcc

SEQ ID NO: 125847 - RNA, 19 nt, Human herpesvirus 2
acgcggcacagguggugca

SEQ ID NO: 125848 - RNA, 15 nt, Human herpesvirus 2
acgugcgucuuccca

SEQ ID NO: 125849 - RNA, 15 nt, Human herpesvirus 2
acgcgaaggcggacc

SEQ ID NO: 125850 - RNA, 16 nt, Human herpesvirus 2
acguuuauucaccaca

SEQ ID NO: 125851 - RNA, 22 nt, Human herpesvirus 2
acacgugggcggcgaaccggua

SEQ ID NO: 125852 - RNA, 18 nt, Human herpesvirus 2
acacguucgccccgcagc

SEQ ID NO: 125853 - RNA, 19 nt, Human herpesvirus 2
acacgcucguugguugguu

SEQ ID NO: 125854 - RNA, 21 nt, Human herpesvirus 2
acagaaaccgaaucuuuucau

SEQ ID NO: 125855 - RNA, 15 nt, Human herpesvirus 2
acaggaagugggggu

SEQ ID NO: 125856 - RNA, 13 nt, Human herpesvirus 2
acaggcccggggc

SEQ ID NO: 125857 - RNA, 17 nt, Human herpesvirus 2
acagacgcggugugagu

SEQ ID NO: 125858 - RNA, 9 nt, Human herpesvirus 2
accccaaac

SEQ ID NO: 125859 - RNA, 20 nt, Human herpesvirus 2
accccagaaccaugauccug

SEQ ID NO: 125860 - RNA, 23 nt, Human herpesvirus 2
acccggcagagagauuuccccag

SEQ ID NO: 125861 - RNA, 15 nt, Human herpesvirus 2
accccccugacucag

SEQ ID NO: 125862 - RNA, 16 nt, Human herpesvirus 2
accccccugacucagg

SEQ ID NO: 125863 - RNA, 14 nt, Human herpesvirus 2
accccgauaguccc

SEQ ID NO: 125864 - RNA, 21 nt, Human herpesvirus 2
accaucccccgagagaugaca

SEQ ID NO: 125865 - RNA, 21 nt, Human herpesvirus 2
accacacauacgaccaaauac

SEQ ID NO: 125866 - RNA, 14 nt, Human herpesvirus 2
accacccaaccaac

SEQ ID NO: 125867 - RNA, 22 nt, Human herpesvirus 2
accaccacccccccacuuuccu

SEQ ID NO: 125868 - RNA, 16 nt, Human herpesvirus 2
accaccagcaccacca

SEQ ID NO: 125869 - RNA, 20 nt, Human herpesvirus 2
acgacugggccgaugugccc

SEQ ID NO: 125870 - RNA, 16 nt, Human herpesvirus 2
acgcaggcccucgcug

SEQ ID NO: 125871 - RNA, 13 nt, Human herpesvirus 2
acgaggccuuccc

SEQ ID NO: 125872 - RNA, 11 nt, Human herpesvirus 2
acgagacagac

SEQ ID NO: 125873 - RNA, 22 nt, Human herpesvirus 2
accugcgcgugcagaacaccgg

SEQ ID NO: 125874 - RNA, 22 nt, Human herpesvirus 2
acccuguggcgggcgcuguaug

SEQ ID NO: 125875 - RNA, 17 nt, Human herpesvirus 2
acccugccccccggcgc

SEQ ID NO: 125876 - RNA, 21 nt, Human herpesvirus 2
accgacuuguuuuacauaaca

SEQ ID NO: 125877 - RNA, 14 nt, Human herpesvirus 2
aagccaccaauaca

SEQ ID NO: 125878 - RNA, 19 nt, Human herpesvirus 2
aagccaccaauacaccaga

SEQ ID NO: 125879 - RNA, 23 nt, Human herpesvirus 2
aagcccacaacccaucccacaau

SEQ ID NO: 125880 - RNA, 13 nt, Human herpesvirus 2
aagcauccucacc

SEQ ID NO: 125881 - RNA, 14 nt, Human herpesvirus 2
aagcgcugcgggga

SEQ ID NO: 125882 - RNA, 19 nt, Human herpesvirus 2
aaggacgggaaagggaaca

SEQ ID NO: 125883 - RNA, 19 nt, Human herpesvirus 2
aaggcccggaagacuacca

SEQ ID NO: 125884 - RNA, 21 nt, Human herpesvirus 2
aauaccacgcgacgaaccagc

SEQ ID NO: 125885 - RNA, 10 nt, Human herpesvirus 2
aagugcagua

SEQ ID NO: 125886 - RNA, 13 nt, Human herpesvirus 2
aauuagcagcuuu

SEQ ID NO: 125887 - RNA, 18 nt, Human herpesvirus 2
acaaaaacacaagcacac

SEQ ID NO: 125888 - RNA, 14 nt, Human herpesvirus 2
aaucuauugaacuc

SEQ ID NO: 125889 - RNA, 14 nt, Human herpesvirus 2
aaucuauugaccuc

SEQ ID NO: 125890 - RNA, 18 nt, Human herpesvirus 2
aauggcuucgggccaaca

SEQ ID NO: 125891 - RNA, 16 nt, Human herpesvirus 2
aaagagaaacaaaaga

SEQ ID NO: 125892 - RNA, 18 nt, Human herpesvirus 2
aaagacaugauagaggga

SEQ ID NO: 125893 - RNA, 21 nt, Human herpesvirus 2
aaagcgcuggcauuaaccaac

SEQ ID NO: 125894 - RNA, 15 nt, Human herpesvirus 2
aaaggaaacaggaau

SEQ ID NO: 125895 - RNA, 17 nt, Human herpesvirus 2
aaaggaccaaaagggaa

SEQ ID NO: 125896 - RNA, 22 nt, Human herpesvirus 2
aaauacauaaaacccacccucg

SEQ ID NO: 125897 - RNA, 17 nt, Human herpesvirus 2
aaauacacgacccgccu

SEQ ID NO: 125898 - RNA, 12 nt, Human herpesvirus 2
aaccaacggaca

SEQ ID NO: 125899 - RNA, 15 nt, Human herpesvirus 2
aaccaaccaacgagc

SEQ ID NO: 125900 - RNA, 13 nt, Human herpesvirus 2
aacagcgauguug

SEQ ID NO: 125901 - RNA, 18 nt, Human herpesvirus 2
aacggucggcgaacacaa

SEQ ID NO: 125902 - RNA, 15 nt, Human herpesvirus 2
aacgucccaaacuca

SEQ ID NO: 125903 - RNA, 17 nt, Human herpesvirus 2
cuuucuggccuuguuga

SEQ ID NO: 125904 - RNA, 12 nt, Human herpesvirus 2
cuuuccacaccc

SEQ ID NO: 125905 - RNA, 19 nt, Human herpesvirus 2
cuuuguuguuggccuuuga

SEQ ID NO: 125906 - RNA, 17 nt, Human herpesvirus 2
cuuuuacccucacccca

SEQ ID NO: 125907 - RNA, 23 nt, Human herpesvirus 2
gaaaaaaggaggguauuggccaa

SEQ ID NO: 125908 - RNA, 21 nt, Human herpesvirus 2
gaaaaaccagacacucagaca

SEQ ID NO: 125909 - RNA, 19 nt, Human herpesvirus 2
gaaaaggaccaaaagggaa

SEQ ID NO: 125910 - RNA, 16 nt, Human herpesvirus 2
gaacugggguacugca

SEQ ID NO: 125911 - RNA, 17 nt, Human herpesvirus 2
gaacugggguacugcac

SEQ ID NO: 125912 - RNA, 16 nt, Human herpesvirus 2
gaacuggguuacugca

SEQ ID NO: 125913 - RNA, 17 nt, Human herpesvirus 2
gaaaucuauugaacucu

SEQ ID NO: 125914 - RNA, 23 nt, Human herpesvirus 2
gaaaggcccccagacgaagucac

SEQ ID NO: 125915 - RNA, 13 nt, Human herpesvirus 2
gaaauaaaggggu

SEQ ID NO: 125916 - RNA, 22 nt, Human herpesvirus 2
gaaauaauccggcgauccccaa

SEQ ID NO: 125917 - RNA, 13 nt, Human herpesvirus 2
gaagaggcggacc

SEQ ID NO: 125918 - RNA, 17 nt, Human herpesvirus 2
gaagaggcggacccagu

SEQ ID NO: 125919 - RNA, 15 nt, Human herpesvirus 2
gaagauaaaccagac

SEQ ID NO: 125920 - RNA, 16 nt, Human herpesvirus 2
gaaggcggacccagac

SEQ ID NO: 125921 - RNA, 22 nt, Human herpesvirus 2
gaaggacauucuucacuacuac

SEQ ID NO: 125922 - RNA, 14 nt, Human herpesvirus 2
gaagacgcacgugc

SEQ ID NO: 125923 - RNA, 22 nt, Human herpesvirus 2
gaagacgacccccgugucgcuc

SEQ ID NO: 125924 - RNA, 16 nt, Human herpesvirus 2
aaagaaagaaacacaa

SEQ ID NO: 125925 - RNA, 15 nt, Human herpesvirus 2
aaagaaauagaagaa

SEQ ID NO: 125926 - RNA, 15 nt, Human herpesvirus 2
aaaccgccaacacca

SEQ ID NO: 125927 - RNA, 19 nt, Human herpesvirus 2
aaaccggucggcgaugucc

SEQ ID NO: 125928 - RNA, 22 nt, Human herpesvirus 2
gaaucugggaagacgcacgugc

SEQ ID NO: 125929 - RNA, 13 nt, Human herpesvirus 2
gagcuucaucacc

SEQ ID NO: 125930 - RNA, 23 nt, Human herpesvirus 2
gaggaaacgcaaaaaaaacaaga

SEQ ID NO: 125931 - RNA, 13 nt, Human herpesvirus 2
gaggaaaugcaga

SEQ ID NO: 125932 - RNA, 18 nt, Human herpesvirus 2
gagucgauugcggggacc

SEQ ID NO: 125933 - RNA, 22 nt, Human herpesvirus 2
gagucgggccccuacucgccau

SEQ ID NO: 125934 - RNA, 17 nt, Human herpesvirus 2
gaguucaauagauuucc

SEQ ID NO: 125935 - RNA, 21 nt, Human herpesvirus 2
gaguucaauagauuucccaaa

SEQ ID NO: 125936 - RNA, 21 nt, Human herpesvirus 2
gagcacaaacgugcucugcca

SEQ ID NO: 125937 - RNA, 20 nt, Human herpesvirus 2
gagaucuuccuguaccugac

SEQ ID NO: 125938 - RNA, 19 nt, Human herpesvirus 2
gagaugucaguccucgggg

SEQ ID NO: 125939 - RNA, 16 nt, Human herpesvirus 2
gagaugugccuuccag

SEQ ID NO: 125940 - RNA, 19 nt, Human herpesvirus 2
aacaaacucguguacaaac

SEQ ID NO: 125941 - RNA, 21 nt, Human herpesvirus 2
aacaaaugcagacaugugcua

SEQ ID NO: 125942 - RNA, 12 nt, Human herpesvirus 2
gacguccagggg

SEQ ID NO: 125943 - RNA, 12 nt, Human herpesvirus 2
gacgaacaggcg

SEQ ID NO: 125944 - RNA, 19 nt, Human herpesvirus 2
gacgaaaacguaccgccuu

SEQ ID NO: 125945 - RNA, 15 nt, Human herpesvirus 2
gacgacggccgccca

SEQ ID NO: 125946 - RNA, 18 nt, Human herpesvirus 2
gacgcgaugggggguccg

SEQ ID NO: 125947 - RNA, 23 nt, Human herpesvirus 2
gacgcgcgcgcccccgacccggg

SEQ ID NO: 125948 - RNA, 17 nt, Human herpesvirus 2
gacgcggcacagguggu

SEQ ID NO: 125949 - RNA, 15 nt, Human herpesvirus 2
aacaaaagaaacggc

SEQ ID NO: 125950 - RNA, 13 nt, Human herpesvirus 2
aacaaaaaccuug

SEQ ID NO: 125951 - RNA, 14 nt, Human herpesvirus 2
aaaucuauugaacu

SEQ ID NO: 125952 - RNA, 15 nt, Human herpesvirus 2
aaaucuauugaacuc

SEQ ID NO: 125953 - RNA, 18 nt, Human herpesvirus 2
gacaugauagagggaaca

SEQ ID NO: 125954 - RNA, 14 nt, Human herpesvirus 2
gacaucaaccaccu

SEQ ID NO: 125955 - RNA, 16 nt, Human herpesvirus 2
gaccaccccaaaaacc

SEQ ID NO: 125956 - RNA, 20 nt, Human herpesvirus 2
aaaucaagcgccgaccagaa

SEQ ID NO: 125957 - RNA, 14 nt, Human herpesvirus 2
gggcaagugcagua

SEQ ID NO: 125958 - RNA, 17 nt, Human herpesvirus 2
gggcagcgugucaaagg

SEQ ID NO: 125959 - RNA, 21 nt, Human herpesvirus 2
gggccccuacucgccauccaa

SEQ ID NO: 125960 - RNA, 21 nt, Human herpesvirus 2
gggccuguucggggcgugucu

SEQ ID NO: 125961 - RNA, 12 nt, Human herpesvirus 2
gggcagugcagu

SEQ ID NO: 125962 - RNA, 14 nt, Human herpesvirus 2
ggggcaagugcagu

SEQ ID NO: 125963 - RNA, 14 nt, Human herpesvirus 2
ggggcagugcagua

SEQ ID NO: 125964 - RNA, 14 nt, Human herpesvirus 2
gggcgugauguuuu

SEQ ID NO: 125965 - RNA, 19 nt, Human herpesvirus 2
ggcgagaggucaauagauu

SEQ ID NO: 125966 - RNA, 14 nt, Human herpesvirus 2
ggcgaggggcggga

SEQ ID NO: 125967 - RNA, 20 nt, Human herpesvirus 2
ggcgauuaacaacaccaaac

SEQ ID NO: 125968 - RNA, 16 nt, Human herpesvirus 2
ggcucgccgugcgcug

SEQ ID NO: 125969 - RNA, 15 nt, Human herpesvirus 2
ggccuuugcuuccuc

SEQ ID NO: 125970 - RNA, 13 nt, Human herpesvirus 2
gggaggcgguggu

SEQ ID NO: 125971 - RNA, 14 nt, Human herpesvirus 2
gggaggauguguuc

SEQ ID NO: 125972 - RNA, 21 nt, Human herpesvirus 2
gggagaguucaauagauuucc

SEQ ID NO: 125973 - RNA, 20 nt, Human herpesvirus 2
ggacacccccccccaucugc

SEQ ID NO: 125974 - RNA, 15 nt, Human herpesvirus 2
ggaccaaaagggaaa

SEQ ID NO: 125975 - RNA, 18 nt, Human herpesvirus 2
ggaugcgggcgggaugau

SEQ ID NO: 125976 - RNA, 12 nt, Human herpesvirus 2
ggaugguggugg

SEQ ID NO: 125977 - RNA, 18 nt, Human herpesvirus 2
ggacggacacggccccga

SEQ ID NO: 125978 - RNA, 13 nt, Human herpesvirus 2
ggcccacuuuccc

SEQ ID NO: 125979 - RNA, 15 nt, Human herpesvirus 2
ggcagagagauuucc

SEQ ID NO: 125980 - RNA, 11 nt, Human herpesvirus 2
ggcagugcagu

SEQ ID NO: 125981 - RNA, 23 nt, Human herpesvirus 2
gcgcccgcguccgacacccgggc

SEQ ID NO: 125982 - RNA, 13 nt, Human herpesvirus 2
gcgccgaucgcag

SEQ ID NO: 125983 - RNA, 13 nt, Human herpesvirus 2
gcgcauggccugc

SEQ ID NO: 125984 - RNA, 19 nt, Human herpesvirus 2
gcgccagacgggccggugg

SEQ ID NO: 125985 - RNA, 19 nt, Human herpesvirus 2
gcgcgcccccgacccgggg

SEQ ID NO: 125986 - RNA, 13 nt, Human herpesvirus 2
gcgccgucgcuac

SEQ ID NO: 125987 - RNA, 20 nt, Human herpesvirus 2
gcuagucuccgaucugcccc

SEQ ID NO: 125988 - RNA, 17 nt, Human herpesvirus 2
gcucucugccuccuucg

SEQ ID NO: 125989 - RNA, 13 nt, Human herpesvirus 2
gcucuccgugccc

SEQ ID NO: 125990 - RNA, 19 nt, Human herpesvirus 2
gcuuagggugugacccccc

SEQ ID NO: 125991 - RNA, 12 nt, Human herpesvirus 2
gcuguuguugua

SEQ ID NO: 125992 - RNA, 19 nt, Human herpesvirus 2
gcuuuauuaucgcacccau

SEQ ID NO: 125993 - RNA, 21 nt, Human herpesvirus 2
ggaaacgcaaaaaaaacaaga

SEQ ID NO: 125994 - RNA, 16 nt, Human herpesvirus 2
ggaaaugggggcgggg

SEQ ID NO: 125995 - RNA, 12 nt, Human herpesvirus 2
ggaagacuacca

SEQ ID NO: 125996 - RNA, 20 nt, Human herpesvirus 2
gcacccauccaucugggagu

SEQ ID NO: 125997 - RNA, 19 nt, Human herpesvirus 2
gcacaaacgugcucugcca

SEQ ID NO: 125998 - RNA, 18 nt, Human herpesvirus 2
gaucagcaaccaggcgcu

SEQ ID NO: 125999 - RNA, 11 nt, Human herpesvirus 2
gcaagugcagu

SEQ ID NO: 126000 - RNA, 12 nt, Human herpesvirus 2
gcaagugcagua

SEQ ID NO: 126001 - RNA, 15 nt, Human herpesvirus 2
gcacgggcccggggc

SEQ ID NO: 126002 - RNA, 15 nt, Human herpesvirus 2
gcaggaucgugugca

SEQ ID NO: 126003 - RNA, 15 nt, Human herpesvirus 2
gcagcuuuuaacggg

SEQ ID NO: 126004 - RNA, 20 nt, Human herpesvirus 2
gcagcucauaaaaaucguga

SEQ ID NO: 126005 - RNA, 14 nt, Human herpesvirus 2
gcaggcuggagcuc

SEQ ID NO: 126006 - RNA, 17 nt, Human herpesvirus 2
gcaguaccccaguuccu

SEQ ID NO: 126007 - RNA, 17 nt, Human herpesvirus 2
gcaguaacccaguuccu

SEQ ID NO: 126008 - RNA, 18 nt, Human herpesvirus 2
gcccuguacgacagcggg

SEQ ID NO: 126009 - RNA, 13 nt, Human herpesvirus 2
gcccugcuguauc

SEQ ID NO: 126010 - RNA, 19 nt, Human herpesvirus 2
gcccuggacccagacacgg

SEQ ID NO: 126011 - RNA, 18 nt, Human herpesvirus 2
gccggggauaaaagccaa

SEQ ID NO: 126012 - RNA, 20 nt, Human herpesvirus 2
gccggguuuuuggcccugua

SEQ ID NO: 126013 - RNA, 16 nt, Human herpesvirus 2
gccucucuucuucccc

SEQ ID NO: 126014 - RNA, 18 nt, Human herpesvirus 2
gcgagaaggaggggggcc

SEQ ID NO: 126015 - RNA, 17 nt, Human herpesvirus 2
gcgagcucggcuucuac

SEQ ID NO: 126016 - RNA, 18 nt, Human herpesvirus 2
gcgaacgaacggucaaua

SEQ ID NO: 126017 - RNA, 19 nt, Human herpesvirus 2
gcgaacgaacggucaauaa

SEQ ID NO: 126018 - RNA, 18 nt, Human herpesvirus 2
gcgaccggucgcuuucca

SEQ ID NO: 126019 - RNA, 14 nt, Human herpesvirus 2
gcgaacgggggauc

SEQ ID NO: 126020 - RNA, 12 nt, Human herpesvirus 2
gccaacucuguc

SEQ ID NO: 126021 - RNA, 14 nt, Human herpesvirus 2
gcccgaccuguuaa

SEQ ID NO: 126022 - RNA, 20 nt, Human herpesvirus 2
gcccgccgccgcaucagucc

SEQ ID NO: 126023 - RNA, 14 nt, Human herpesvirus 2
gcccggcgcucggu

SEQ ID NO: 126024 - RNA, 19 nt, Human herpesvirus 2
gcccggggggggccucggu

SEQ ID NO: 126025 - RNA, 21 nt, Human herpesvirus 2
gccauucccgcuuaugguaau

SEQ ID NO: 126026 - RNA, 23 nt, Human herpesvirus 2
caguuucaccgccccagcaccau

SEQ ID NO: 126027 - RNA, 19 nt, Human herpesvirus 2
cagugggugacagagucuu

SEQ ID NO: 126028 - RNA, 22 nt, Human herpesvirus 2
cauaauaacgauuuuauuacuc

SEQ ID NO: 126029 - RNA, 15 nt, Human herpesvirus 2
caguaccccaguucc

SEQ ID NO: 126030 - RNA, 14 nt, Human herpesvirus 2
cagggccgcugggg

SEQ ID NO: 126031 - RNA, 21 nt, Human herpesvirus 2
caggucccaauaaaacccaga

SEQ ID NO: 126032 - RNA, 16 nt, Human herpesvirus 2
cagacacucagacaca

SEQ ID NO: 126033 - RNA, 13 nt, Human herpesvirus 2
caggcccaccacc

SEQ ID NO: 126034 - RNA, 18 nt, Human herpesvirus 2
caggcccaccaccauccc

SEQ ID NO: 126035 - RNA, 19 nt, Human herpesvirus 2
caggcgcgcgggucccguu

SEQ ID NO: 126036 - RNA, 16 nt, Human herpesvirus 2
cagacucacucgugga

SEQ ID NO: 126037 - RNA, 20 nt, Human herpesvirus 2
cauuucaaauaaaaggcacg

SEQ ID NO: 126038 - RNA, 17 nt, Human herpesvirus 2
cauuucugucuuuauuc

SEQ ID NO: 126039 - RNA, 15 nt, Human herpesvirus 2
ccaauaaacguauca

SEQ ID NO: 126040 - RNA, 23 nt, Human herpesvirus 2
cauauccuccuuagauugacuca

SEQ ID NO: 126041 - RNA, 23 nt, Human herpesvirus 2
caucucucgggggaugguggugg

SEQ ID NO: 126042 - RNA, 22 nt, Human herpesvirus 2
cauguuacaccccccugacuca

SEQ ID NO: 126043 - RNA, 23 nt, Human herpesvirus 2
cauguuacaccccccugacucag

SEQ ID NO: 126044 - RNA, 18 nt, Human herpesvirus 2
caugucuuuccaccacca

SEQ ID NO: 126045 - RNA, 23 nt, Human herpesvirus 2
ccauacuccgauucgaccacaua

SEQ ID NO: 126046 - RNA, 17 nt, Human herpesvirus 2
ccaggaggggggcagug

SEQ ID NO: 126047 - RNA, 18 nt, Human herpesvirus 2
ccacaauggggguuaugg

SEQ ID NO: 126048 - RNA, 19 nt, Human herpesvirus 2
ccagaccugccguaugcua

SEQ ID NO: 126049 - RNA, 22 nt, Human herpesvirus 2
ccagaaacccgggggcgauggu

SEQ ID NO: 126050 - RNA, 17 nt, Human herpesvirus 2
cccagaaccaugauccu

SEQ ID NO: 126051 - RNA, 17 nt, Human herpesvirus 2
cccagacccucacagau

SEQ ID NO: 126052 - RNA, 13 nt, Human herpesvirus 2
cccauacaaauua

SEQ ID NO: 126053 - RNA, 22 nt, Human herpesvirus 2
cccauacaaauuaaauacacga

SEQ ID NO: 126054 - RNA, 17 nt, Human herpesvirus 2
cccagucgcccauacaa

SEQ ID NO: 126055 - RNA, 22 nt, Human herpesvirus 2
cccaggaggggggcagugcagu

SEQ ID NO: 126056 - RNA, 17 nt, Human herpesvirus 2
cccauccaucugggagu

SEQ ID NO: 126057 - RNA, 23 nt, Human herpesvirus 2
ccccagcccgguguguuugccaa

SEQ ID NO: 126058 - RNA, 17 nt, Human herpesvirus 2
cccccaggaggggggca

SEQ ID NO: 126059 - RNA, 17 nt, Human herpesvirus 2
ccccauccccucccgau

SEQ ID NO: 126060 - RNA, 19 nt, Human herpesvirus 2
ccccaaaccuuaacuaaac

SEQ ID NO: 126061 - RNA, 18 nt, Human herpesvirus 2
ccccaaagcgugccaacu

SEQ ID NO: 126062 - RNA, 16 nt, Human herpesvirus 2
ccccaagagacuuccc

SEQ ID NO: 126063 - RNA, 19 nt, Human herpesvirus 2
cccggcagagagauuuccc

SEQ ID NO: 126064 - RNA, 22 nt, Human herpesvirus 2
cccgcacuacgacuacauccgg

SEQ ID NO: 126065 - RNA, 18 nt, Human herpesvirus 2
cccggagucccccggcuc

SEQ ID NO: 126066 - RNA, 23 nt, Human herpesvirus 2
cccuacgucaccuuugauacucu

SEQ ID NO: 126067 - RNA, 16 nt, Human herpesvirus 2
cccgggggggggcaag

SEQ ID NO: 126068 - RNA, 23 nt, Human herpesvirus 2
cccgggggggggcaagugcagua

SEQ ID NO: 126069 - RNA, 21 nt, Human herpesvirus 2
ccccgagagaugacacgacag

SEQ ID NO: 126070 - RNA, 22 nt, Human herpesvirus 2
ccccgggggggggcaagugcag

SEQ ID NO: 126071 - RNA, 23 nt, Human herpesvirus 2
ccccgggggggggcaagugcagu

SEQ ID NO: 126072 - RNA, 21 nt, Human herpesvirus 2
ccccuacgccccccucggcag

SEQ ID NO: 126073 - RNA, 13 nt, Human herpesvirus 2
cccccgucugcca

SEQ ID NO: 126074 - RNA, 16 nt, Human herpesvirus 2
ccccuccccugcguaa

SEQ ID NO: 126075 - RNA, 15 nt, Human herpesvirus 2
cccucgcacauccug

SEQ ID NO: 126076 - RNA, 22 nt, Human herpesvirus 2
cccucgcgcgcauccacaagcu

SEQ ID NO: 126077 - RNA, 23 nt, Human herpesvirus 2
cccucguucugcugcaccggcuc

SEQ ID NO: 126078 - RNA, 17 nt, Human herpesvirus 2
cccucuacccccaccca

SEQ ID NO: 126079 - RNA, 19 nt, Human herpesvirus 2
cccucucaaacaaaaacac

SEQ ID NO: 126080 - RNA, 14 nt, Human herpesvirus 2
cccugacucaggag

SEQ ID NO: 126081 - RNA, 11 nt, Human herpesvirus 2
cccugacucag

SEQ ID NO: 126082 - RNA, 12 nt, Human herpesvirus 2
cccugacucagg

SEQ ID NO: 126083 - RNA, 15 nt, Human herpesvirus 2
cccugcggccaagcu

SEQ ID NO: 126084 - RNA, 14 nt, Human herpesvirus 2
cccugcaaccccua

SEQ ID NO: 126085 - RNA, 12 nt, Human herpesvirus 2
ccggacaaaagu

SEQ ID NO: 126086 - RNA, 23 nt, Human herpesvirus 2
ccggacgcggcacagguggugca

SEQ ID NO: 126087 - RNA, 17 nt, Human herpesvirus 2
ccgcugggggggcgggc

SEQ ID NO: 126088 - RNA, 19 nt, Human herpesvirus 2
cccuucuccuuaaauaaac

SEQ ID NO: 126089 - RNA, 13 nt, Human herpesvirus 2
ccggcgccaugag

SEQ ID NO: 126090 - RNA, 20 nt, Human herpesvirus 2
ccggccccggucgugcgggu

SEQ ID NO: 126091 - RNA, 14 nt, Human herpesvirus 2
ccguuggggaacaa

SEQ ID NO: 126092 - RNA, 14 nt, Human herpesvirus 2
ccuacgcacccucg

SEQ ID NO: 126093 - RNA, 13 nt, Human herpesvirus 2
ccuacacaccaac

SEQ ID NO: 126094 - RNA, 16 nt, Human herpesvirus 2
ccuccgugcuggggaa

SEQ ID NO: 126095 - RNA, 16 nt, Human herpesvirus 2
ccuccguguuagggaa

SEQ ID NO: 126096 - RNA, 22 nt, Human herpesvirus 2
ccucaguguuugggaaaucuau

SEQ ID NO: 126097 - RNA, 13 nt, Human herpesvirus 2
ccugugacgucaa

SEQ ID NO: 126098 - RNA, 21 nt, Human herpesvirus 2
ccuguacgacagcggggaccc

SEQ ID NO: 126099 - RNA, 16 nt, Human herpesvirus 2
aaacaauaaacagcua

SEQ ID NO: 126100 - RNA, 11 nt, Human herpesvirus 2
aaacaaaaaca

SEQ ID NO: 126101 - RNA, 13 nt, Human herpesvirus 2
aaacaaaaacaca

SEQ ID NO: 126102 - RNA, 13 nt, Human herpesvirus 2
aaacaaaaaccuu

SEQ ID NO: 126103 - RNA, 15 nt, Human herpesvirus 2
cgccgggucaugaac

SEQ ID NO: 126104 - RNA, 19 nt, Human herpesvirus 2
cgccgcgacggccccggcc

SEQ ID NO: 126105 - RNA, 14 nt, Human herpesvirus 2
cgccccccccggcg

SEQ ID NO: 126106 - RNA, 14 nt, Human herpesvirus 2
cgcccccucuccca

SEQ ID NO: 126107 - RNA, 14 nt, Human herpesvirus 2
cgccccgcaguuuc

SEQ ID NO: 126108 - RNA, 16 nt, Human herpesvirus 2
cgccagagacccugcc

SEQ ID NO: 126109 - RNA, 17 nt, Human herpesvirus 2
cgccaugcaacgccggg

SEQ ID NO: 126110 - RNA, 16 nt, Human herpesvirus 2
cgccaucgacccggac

SEQ ID NO: 126111 - RNA, 17 nt, Human herpesvirus 2
cgccaauaucaucgaag

SEQ ID NO: 126112 - RNA, 13 nt, Human herpesvirus 2
cgcaugcaaauua

SEQ ID NO: 126113 - RNA, 14 nt, Human herpesvirus 2
cgcauccacaagcu

SEQ ID NO: 126114 - RNA, 15 nt, Human herpesvirus 2
ccugugugcucucaa

SEQ ID NO: 126115 - RNA, 17 nt, Human herpesvirus 2
ccuuaaauaaacacaaa

SEQ ID NO: 126116 - RNA, 17 nt, Human herpesvirus 2
ccuuaaaaggcacccca

SEQ ID NO: 126117 - RNA, 16 nt, Human herpesvirus 2
ccuuagauugacucag

SEQ ID NO: 126118 - RNA, 18 nt, Human herpesvirus 2
cgcacccccgccuacgcg

SEQ ID NO: 126119 - RNA, 19 nt, Human herpesvirus 2
cgcgcccccgacccggggc

SEQ ID NO: 126120 - RNA, 17 nt, Human herpesvirus 2
cgcgcgcgugugugaga

SEQ ID NO: 126121 - RNA, 18 nt, Human herpesvirus 2
cgcggcacagguggugca

SEQ ID NO: 126122 - RNA, 23 nt, Human herpesvirus 2
cgcgcaugguaauuagcaacuuu

SEQ ID NO: 126123 - RNA, 14 nt, Human herpesvirus 2
cgcggcccccgugg

SEQ ID NO: 126124 - RNA, 22 nt, Human herpesvirus 2
cgcggcguuggcgcgcuugcac

SEQ ID NO: 126125 - RNA, 22 nt, Human herpesvirus 2
cgcgggguggggggugugugcc

SEQ ID NO: 126126 - RNA, 14 nt, Human herpesvirus 2
cgcgucacaccaga

SEQ ID NO: 126127 - RNA, 17 nt, Human herpesvirus 2
cgcugcggggaccagcc

SEQ ID NO: 126128 - RNA, 11 nt, Human herpesvirus 2
cgcgaccagcg

SEQ ID NO: 126129 - RNA, 14 nt, Human herpesvirus 2
cgcgaacacaagcu

SEQ ID NO: 126130 - RNA, 15 nt, Human herpesvirus 2
cgcgaacacaagcuc

SEQ ID NO: 126131 - RNA, 22 nt, Human herpesvirus 2
cgccuucccugugauccgcacg

SEQ ID NO: 126132 - RNA, 20 nt, Human herpesvirus 2
cggacgcacggcggacacaa

SEQ ID NO: 126133 - RNA, 21 nt, Human herpesvirus 2
cggacccagucgcccauacaa

SEQ ID NO: 126134 - RNA, 15 nt, Human herpesvirus 2
cggaccccgaccccg

SEQ ID NO: 126135 - RNA, 11 nt, Human herpesvirus 2
cggacguccag

SEQ ID NO: 126136 - RNA, 14 nt, Human herpesvirus 2
cggacguccagggg

SEQ ID NO: 126137 - RNA, 15 nt, Human herpesvirus 2
cggacguccagucaa

SEQ ID NO: 126138 - RNA, 21 nt, Human herpesvirus 2
cggaggaacugggguacugca

SEQ ID NO: 126139 - RNA, 15 nt, Human herpesvirus 2
cggucaauaaaauca

SEQ ID NO: 126140 - RNA, 17 nt, Human herpesvirus 2
cgguaauuagcagcuuu

SEQ ID NO: 126141 - RNA, 16 nt, Human herpesvirus 2
cggucggcgaacacaa

SEQ ID NO: 126142 - RNA, 23 nt, Human herpesvirus 2
cgucucaauaaagccagguuaaa

SEQ ID NO: 126143 - RNA, 13 nt, Human herpesvirus 2
cgucguccagggu

SEQ ID NO: 126144 - RNA, 13 nt, Human herpesvirus 2
cgucgcucucggu

SEQ ID NO: 126145 - RNA, 15 nt, Human herpesvirus 2
cguccugcggcucau

SEQ ID NO: 126146 - RNA, 21 nt, Human herpesvirus 2
cguccguauguuaauugcaau

SEQ ID NO: 126147 - RNA, 13 nt, Human herpesvirus 2
cguccgucucaau

SEQ ID NO: 126148 - RNA, 20 nt, Human herpesvirus 2
cuaccaucgccgaacggugc

SEQ ID NO: 126149 - RNA, 21 nt, Human herpesvirus 2
cguggaggggggggcugguug

SEQ ID NO: 126150 - RNA, 19 nt, Human herpesvirus 2
cguggccgacaacugccug

SEQ ID NO: 126151 - RNA, 21 nt, Human herpesvirus 2
cucucgccgcuccgucaaguc

SEQ ID NO: 126152 - RNA, 23 nt, Human herpesvirus 2
cucugauagcgaauaaagacaga

SEQ ID NO: 126153 - RNA, 15 nt, Human herpesvirus 2
cucucaaacaaaaac

SEQ ID NO: 126154 - RNA, 16 nt, Human herpesvirus 2
cucucaaacaaaaaca

SEQ ID NO: 126155 - RNA, 17 nt, Human herpesvirus 2
cucucaaacaaaaacac

SEQ ID NO: 126156 - RNA, 13 nt, Human herpesvirus 2
cucggcccccggg

SEQ ID NO: 126157 - RNA, 22 nt, Human herpesvirus 2
cucggccggcggagccccggag

SEQ ID NO: 126158 - RNA, 18 nt, Human herpesvirus 2
cucgcacgucgcaugcaa

SEQ ID NO: 126159 - RNA, 20 nt, Human herpesvirus 2
cucgcccccgugccuguugg

SEQ ID NO: 126160 - RNA, 22 nt, Human herpesvirus 2
cuccuucggugcacaagacaca

SEQ ID NO: 126161 - RNA, 13 nt, Human herpesvirus 2
cucaauaaagcca

SEQ ID NO: 126162 - RNA, 14 nt, Human herpesvirus 2
cucaauaaagccag

SEQ ID NO: 126163 - RNA, 14 nt, Human herpesvirus 2
cuuaaaaggcaccc

SEQ ID NO: 126164 - RNA, 16 nt, Human herpesvirus 2
cuggcacgcgccgguu

SEQ ID NO: 126165 - RNA, 19 nt, Human herpesvirus 2
cuguacgggcaaggggcca

SEQ ID NO: 126166 - RNA, 23 nt, Human herpesvirus 2
cugucuuuauucgcuaucagaga

SEQ ID NO: 126167 - RNA, 18 nt, Human herpesvirus 2
cucuguuucgcauaugcc

SEQ ID NO: 126168 - RNA, 12 nt, Human herpesvirus 2
cugcacuugccc

SEQ ID NO: 126169 - RNA, 15 nt, Human herpesvirus 2
cuggagauccccggg

SEQ ID NO: 126170 - RNA, 21 nt, Human herpesvirus 2
cugcucucccguaccccgccg

SEQ ID NO: 126171 - RNA, 13 nt, Human herpesvirus 2
cugcugccccgcg

SEQ ID NO: 126172 - RNA, 20 nt, Human herpesvirus 2
cugcugccccgcgugcagcg

SEQ ID NO: 126173 - RNA, 23 nt, Human herpesvirus 2
cugcggcuggcgcggugccugac

SEQ ID NO: 126174 - RNA, 15 nt, Human herpesvirus 2
cugcggggaccagcc

SEQ ID NO: 126175 - RNA, 13 nt, Human herpesvirus 2
cugcgucguccag

SEQ ID NO: 126176 - RNA, 16 nt, Human herpesvirus 2
cugcgucguccagggu

SEQ ID NO: 126177 - RNA, 21 nt, Human herpesvirus 2
ucucugcguugcgucugacca

SEQ ID NO: 126178 - RNA, 19 nt, Human herpesvirus 2
ucgcgaacgacaaaggggg

SEQ ID NO: 126179 - RNA, 18 nt, Human herpesvirus 2
ucgggcggacguccaggg

SEQ ID NO: 126180 - RNA, 18 nt, Human herpesvirus 2
ucgggggggaaagaaaga

SEQ ID NO: 126181 - RNA, 11 nt, Human herpesvirus 2
ucgcauuugcc

SEQ ID NO: 126182 - RNA, 18 nt, Human herpesvirus 2
ucgccucucuucuucccc

SEQ ID NO: 126183 - RNA, 10 nt, Human herpesvirus 2
ucgccuguug

SEQ ID NO: 126184 - RNA, 13 nt, Human herpesvirus 2
ucgccgccuuccg

SEQ ID NO: 126185 - RNA, 17 nt, Human herpesvirus 2
ucgagaugugccuucca

SEQ ID NO: 126186 - RNA, 20 nt, Human herpesvirus 2
uccucccccguacuauacaa

SEQ ID NO: 126187 - RNA, 22 nt, Human herpesvirus 2
uccuccgugcuggggaaaucuc

SEQ ID NO: 126188 - RNA, 22 nt, Human herpesvirus 2
uccuccguguuagggaagucuc

SEQ ID NO: 126189 - RNA, 17 nt, Human herpesvirus 2
uccuuagauugacucag

SEQ ID NO: 126190 - RNA, 23 nt, Human herpesvirus 2
uccuuaaauaaacacaaaccaca

SEQ ID NO: 126191 - RNA, 23 nt, Human herpesvirus 2
ucccucgcgcgcauccacaagcu

SEQ ID NO: 126192 - RNA, 19 nt, Human herpesvirus 2
ucccccccuacaacagugu

SEQ ID NO: 126193 - RNA, 17 nt, Human herpesvirus 2
uccccaagagacuuccc

SEQ ID NO: 126194 - RNA, 16 nt, Human herpesvirus 2
uccccaccugucgugu

SEQ ID NO: 126195 - RNA, 12 nt, Human herpesvirus 2
uccaccaccagc

SEQ ID NO: 126196 - RNA, 14 nt, Human herpesvirus 2
uccaccgauguauu

SEQ ID NO: 126197 - RNA, 13 nt, Human herpesvirus 2
uaucacauacgca

SEQ ID NO: 126198 - RNA, 23 nt, Human herpesvirus 2
uauggacuuucuggccuuguuga

SEQ ID NO: 126199 - RNA, 16 nt, Human herpesvirus 2
uauaccuugauuuuga

SEQ ID NO: 126200 - RNA, 15 nt, Human herpesvirus 2
ucaggagauaggcau

SEQ ID NO: 126201 - RNA, 23 nt, Human herpesvirus 2
ucaaucgcccgaggcgcauaaag

SEQ ID NO: 126202 - RNA, 19 nt, Human herpesvirus 2
ucaaacgcggacauccggu

SEQ ID NO: 126203 - RNA, 19 nt, Human herpesvirus 2
uauuaaugagguugcauac

SEQ ID NO: 126204 - RNA, 18 nt, Human herpesvirus 2
guguuuaaaacccggggu

SEQ ID NO: 126205 - RNA, 13 nt, Human herpesvirus 2
gugguguuuauuu

SEQ ID NO: 126206 - RNA, 16 nt, Human herpesvirus 2
guguaauggggccgca

SEQ ID NO: 126207 - RNA, 23 nt, Human herpesvirus 2
guguacgcgaaggcggacccaga

SEQ ID NO: 126208 - RNA, 21 nt, Human herpesvirus 2
guggucgggcggacguccagg

SEQ ID NO: 126209 - RNA, 13 nt, Human herpesvirus 2
guggugcacgugu

SEQ ID NO: 126210 - RNA, 19 nt, Human herpesvirus 2
guucaauagauuucccaaa

SEQ ID NO: 126211 - RNA, 20 nt, Human herpesvirus 2
guuccccgagagcccaggga

SEQ ID NO: 126212 - RNA, 17 nt, Human herpesvirus 2
guucgccccgcagccua

SEQ ID NO: 126213 - RNA, 16 nt, Human herpesvirus 2
guucggacgaaacaaa

SEQ ID NO: 126214 - RNA, 21 nt, Human herpesvirus 2
gugccguuggguugggcguua

SEQ ID NO: 126215 - RNA, 18 nt, Human herpesvirus 2
gugccucacgguccucac

SEQ ID NO: 126216 - RNA, 23 nt, Human herpesvirus 2
gugccucacgguccucaccgagc

SEQ ID NO: 126217 - RNA, 19 nt, Human herpesvirus 2
gugcacagccuggccgugc

SEQ ID NO: 126218 - RNA, 16 nt, Human herpesvirus 2
gucugugcgccuuuaa

SEQ ID NO: 126219 - RNA, 15 nt, Human herpesvirus 2
guccguugguucguc

SEQ ID NO: 126220 - RNA, 18 nt, Human herpesvirus 2
guccggggcggugauaug

SEQ ID NO: 126221 - RNA, 21 nt, Human herpesvirus 2
guccgcuccaccgauguauuu

SEQ ID NO: 126222 - RNA, 11 nt, Human herpesvirus 2
guagucuuccg

SEQ ID NO: 126223 - RNA, 16 nt, Human herpesvirus 2
ggguguagggcccaac

SEQ ID NO: 126224 - RNA, 12 nt, Human herpesvirus 2
ggguuacugcac

SEQ ID NO: 126225 - RNA, 14 nt, Human herpesvirus 2
ggguuacugcacuu

SEQ ID NO: 126226 - RNA, 23 nt, Human herpesvirus 2
ggguggcggcuggggaaagggaa

SEQ ID NO: 126227 - RNA, 16 nt, Human herpesvirus 2
gggugaggaagaaaga

SEQ ID NO: 126228 - RNA, 14 nt, Human herpesvirus 2
gggucccuucccaa

SEQ ID NO: 126229 - RNA, 14 nt, Human herpesvirus 2
ggggccugcugugg

SEQ ID NO: 126230 - RNA, 19 nt, Human herpesvirus 2
ggggcgggggugccgugga

SEQ ID NO: 126231 - RNA, 14 nt, Human herpesvirus 2
ggggcgggguuugu

SEQ ID NO: 126232 - RNA, 14 nt, Human herpesvirus 2
gggggaaagaaaga

SEQ ID NO: 126233 - RNA, 11 nt, Human herpesvirus 2
gggggggcaag

SEQ ID NO: 126234 - RNA, 15 nt, Human herpesvirus 2
gucaauagauuuccc

SEQ ID NO: 126235 - RNA, 18 nt, Human herpesvirus 2
gucaauagauuuccccaa

SEQ ID NO: 126236 - RNA, 14 nt, Human herpesvirus 2
guaucuggucuguc

SEQ ID NO: 126237 - RNA, 18 nt, Human herpesvirus 2
guaugcuaauuaaauaca

SEQ ID NO: 126238 - RNA, 21 nt, Human herpesvirus 2
uaagcgcugcggggaccagcc

SEQ ID NO: 126239 - RNA, 20 nt, Human herpesvirus 2
uaaacgaucgcaacuacagu

SEQ ID NO: 126240 - RNA, 23 nt, Human herpesvirus 2
uaaacgccuucccggaacugugu

SEQ ID NO: 126241 - RNA, 20 nt, Human herpesvirus 2
uaaaaguugcguuaacacac

SEQ ID NO: 126242 - RNA, 17 nt, Human herpesvirus 2
uaaagaacgagacagac

SEQ ID NO: 126243 - RNA, 20 nt, Human herpesvirus 2
guucugucgucgcuaucaca

SEQ ID NO: 126244 - RNA, 13 nt, Human herpesvirus 2
guucuccuggacg

SEQ ID NO: 126245 - RNA, 15 nt, Human herpesvirus 2
guugccgggggccau

SEQ ID NO: 126246 - RNA, 21 nt, Human herpesvirus 2
uacaauaaaguuuugugaugc

SEQ ID NO: 126247 - RNA, 22 nt, Human herpesvirus 2
uaauaaagagugagaaccaacc

SEQ ID NO: 126248 - RNA, 15 nt, Human herpesvirus 2
uacugauguguugua

SEQ ID NO: 126249 - RNA, 13 nt, Human herpesvirus 2
aacaacaccaaac

SEQ ID NO: 126250 - RNA, 14 nt, Human herpesvirus 2
aacaacaccaaaca

SEQ ID NO: 126251 - RNA, 23 nt, Human herpesvirus 2
uacgggggaggagggggguggug

SEQ ID NO: 126252 - RNA, 13 nt, Human herpesvirus 2
uacgaggugcugc

SEQ ID NO: 126253 - RNA, 21 nt, Human herpesvirus 2
uugguuuucccguuagcacau

SEQ ID NO: 126254 - RNA, 18 nt, Human herpesvirus 2
uugguccuuuucucuggu

SEQ ID NO: 126255 - RNA, 14 nt, Human herpesvirus 2
uuggccaccaacaa

SEQ ID NO: 126256 - RNA, 11 nt, Human herpesvirus 2
uuggggcuccc

SEQ ID NO: 126257 - RNA, 16 nt, Human herpesvirus 2
uuugggggggggugga

SEQ ID NO: 126258 - RNA, 14 nt, Human herpesvirus 2
uugcuuuuacccac

SEQ ID NO: 126259 - RNA, 14 nt, Human herpesvirus 2
aacaccaaacaauc

SEQ ID NO: 126260 - RNA, 14 nt, Human herpesvirus 2
uucacuacuacgug

SEQ ID NO: 126261 - RNA, 23 nt, Human herpesvirus 2
aagacaugauagagggaacaaag

SEQ ID NO: 126262 - RNA, 23 nt, Human herpesvirus 2
aagacgugucccggggcccucga

SEQ ID NO: 126263 - RNA, 16 nt, Human herpesvirus 2
aagacuaccacgggga

SEQ ID NO: 126264 - RNA, 15 nt, Human herpesvirus 2
aagaggcggacccag

SEQ ID NO: 126265 - RNA, 14 nt, Human herpesvirus 2
aacgcccugcacac

SEQ ID NO: 126266 - RNA, 15 nt, Human herpesvirus 2
uuuuucggugccuca

SEQ ID NO: 126267 - RNA, 15 nt, Human herpesvirus 2
uuuuugugguguuua

SEQ ID NO: 126268 - RNA, 15 nt, Human herpesvirus 2
aacggacaaccgagc

SEQ ID NO: 126269 - RNA, 15 nt, Human herpesvirus 2
aacgcucaguucauc

SEQ ID NO: 126270 - RNA, 13 nt, Human herpesvirus 2
aacuaaaccacag

SEQ ID NO: 126271 - RNA, 13 nt, Human herpesvirus 2
aacucucccggcu

SEQ ID NO: 126272 - RNA, 16 nt, Human herpesvirus 2
aauccccauaccgguc

SEQ ID NO: 126273 - RNA, 12 nt, Human herpesvirus 2
aauaaagccagg

SEQ ID NO: 126274 - RNA, 14 nt, Human herpesvirus 2
aauaaacauuggca

SEQ ID NO: 126275 - RNA, 11 nt, Human herpesvirus 2
aagugcaguaa

SEQ ID NO: 126276 - RNA, 12 nt, Human herpesvirus 2
aauagauuuccc

SEQ ID NO: 126277 - RNA, 18 nt, Human herpesvirus 2
aauagauuucccaaacac

SEQ ID NO: 126278 - RNA, 22 nt, Human herpesvirus 2
aagcuuuauuaucgcacccauc

SEQ ID NO: 126279 - RNA, 20 nt, Human herpesvirus 2
aagcccacaacccaucccac

SEQ ID NO: 126280 - RNA, 17 nt, Human herpesvirus 2
aaggaccaaaagggaaa

SEQ ID NO: 126281 - RNA, 21 nt, Human herpesvirus 2
ugaucguagacgggcucgcca

SEQ ID NO: 126282 - RNA, 19 nt, Human herpesvirus 2
ugauucgcgaacacaagcu

SEQ ID NO: 126283 - RNA, 22 nt, Human herpesvirus 2
ugauuccggccgcgcuaccuca

SEQ ID NO: 126284 - RNA, 22 nt, Human herpesvirus 2
ugaggaacuggguuacugcacu

SEQ ID NO: 126285 - RNA, 15 nt, Human herpesvirus 2
uggaagaggcggacc

SEQ ID NO: 126286 - RNA, 21 nt, Human herpesvirus 2
ugcgcauggccugcgaggugc

SEQ ID NO: 126287 - RNA, 12 nt, Human herpesvirus 2
ugcgggguggug

SEQ ID NO: 126288 - RNA, 14 nt, Human herpesvirus 2
ugcgggugcccaug

SEQ ID NO: 126289 - RNA, 23 nt, Human herpesvirus 2
ugcguccgucucaauaaagccag

SEQ ID NO: 126290 - RNA, 14 nt, Human herpesvirus 2
ugcgucguccaggg

SEQ ID NO: 126291 - RNA, 15 nt, Human herpesvirus 2
ugcgucguccagggu

SEQ ID NO: 126292 - RNA, 11 nt, Human herpesvirus 2
ugcucugccac

SEQ ID NO: 126293 - RNA, 16 nt, Human herpesvirus 2
ugcaguaccccaguuc

SEQ ID NO: 126294 - RNA, 14 nt, Human herpesvirus 2
ugcccccaccccau

SEQ ID NO: 126295 - RNA, 16 nt, Human herpesvirus 2
uggucgggggccacuu

SEQ ID NO: 126296 - RNA, 14 nt, Human herpesvirus 2
uggucacccgggcg

SEQ ID NO: 126297 - RNA, 15 nt, Human herpesvirus 2
uggugcugggguccg

SEQ ID NO: 126298 - RNA, 14 nt, Human herpesvirus 2
ugguggccgaaaga

SEQ ID NO: 126299 - RNA, 14 nt, Human herpesvirus 2
uggugauuaucgac

SEQ ID NO: 126300 - RNA, 13 nt, Human herpesvirus 2
uggugcaguuuga

SEQ ID NO: 126301 - RNA, 13 nt, Human herpesvirus 2
ugggguacugcac

SEQ ID NO: 126302 - RNA, 19 nt, Human herpesvirus 2
ugggggauugugggaaucc

SEQ ID NO: 126303 - RNA, 13 nt, Human herpesvirus 2
uggggaaagggaa

SEQ ID NO: 126304 - RNA, 14 nt, Human herpesvirus 2
uggggaaagggaag

SEQ ID NO: 126305 - RNA, 13 nt, Human herpesvirus 2
uggggaaaucucu

SEQ ID NO: 126306 - RNA, 15 nt, Human herpesvirus 2
uggggaaaucucucu

SEQ ID NO: 126307 - RNA, 23 nt, Human herpesvirus 2
uggcaccguaucagcaccccacc

SEQ ID NO: 126308 - RNA, 11 nt, Human herpesvirus 2
ugucuuuccac

SEQ ID NO: 126309 - RNA, 18 nt, Human herpesvirus 2
ugucgccggcgacaccca

SEQ ID NO: 126310 - RNA, 16 nt, Human herpesvirus 2
uguacgcguaccccuu

SEQ ID NO: 126311 - RNA, 22 nt, Human herpesvirus 2
uguguauaaauaaaaagacacc

SEQ ID NO: 126312 - RNA, 23 nt, Human herpesvirus 2
uguggucgggcggacguccaggg

SEQ ID NO: 126313 - RNA, 15 nt, Human herpesvirus 2
uguuggccaccaaca

SEQ ID NO: 126314 - RNA, 20 nt, Human herpesvirus 2
uguuggccaccaacaacgcu

SEQ ID NO: 126315 - RNA, 17 nt, Human herpesvirus 2
uuaaaaucgugcacaga

SEQ ID NO: 126316 - RNA, 15 nt, Human herpesvirus 2
uuaacaacaccaaac

SEQ ID NO: 126317 - RNA, 15 nt, Human herpesvirus 2
uuaacuaaaccacag

SEQ ID NO: 126318 - RNA, 16 nt, Human herpesvirus 2
uuaacuaaaccacagc

SEQ ID NO: 126319 - RNA, 11 nt, Human herpesvirus 2
uguguuucccc

SEQ ID NO: 126320 - RNA, 21 nt, Human herpesvirus 2
uguuacaccccccugacucag

SEQ ID NO: 126321 - RNA, 16 nt, Human herpesvirus 2
uuacuauccuugccuc

SEQ ID NO: 126322 - RNA, 16 nt, Human herpesvirus 2
uuauaggccacacagu

SEQ ID NO: 126323 - RNA, 19 nt, Human herpesvirus 2
uuuggucguauguguggua

SEQ ID NO: 126324 - RNA, 23 nt, Human herpesvirus 2
uuuggggcggcacuggggugaua

SEQ ID NO: 126325 - RNA, 14 nt, Human herpesvirus 2
uugggaaaucuauu

SEQ ID NO: 126326 - RNA, 10 nt, Human herpesvirus 2
ucucuucccc

SEQ ID NO: 126327 - RNA, 16 nt, Human herpesvirus 2
ucgccgacgccuuccc

SEQ ID NO: 126328 - RNA, 15 nt, Human herpesvirus 2
ucgccaucgugcgcu

SEQ ID NO: 126329 - RNA, 12 nt, Human herpesvirus 2
ucgcccauacaa

SEQ ID NO: 126330 - RNA, 15 nt, Human herpesvirus 2
ucgcccgucccggca

SEQ ID NO: 126331 - RNA, 15 nt, Human herpesvirus 2
ucuuccuguaccuga

SEQ ID NO: 126332 - RNA, 15 nt, Human herpesvirus 2
ucuugugcaccgaag

SEQ ID NO: 126333 - RNA, 22 nt, Human herpesvirus 2
ucuuggggaaaucuauugaccu

SEQ ID NO: 126334 - RNA, 16 nt, Human herpesvirus 2
ucuguguggugaauaa

SEQ ID NO: 126335 - RNA, 15 nt, Human herpesvirus 2
ucuguggguggugau

SEQ ID NO: 126336 - RNA, 17 nt, Human herpesvirus 2
ucuuacccuuuucugca

SEQ ID NO: 126337 - RNA, 22 nt, Human herpesvirus 2
ucuuacccuuuucugcauuucc

SEQ ID NO: 126338 - RNA, 17 nt, Human herpesvirus 2
ucuguuucgcauaugcc

SEQ ID NO: 126339 - RNA, 17 nt, Human herpesvirus 2
ugcaauaaagugguuga

SEQ ID NO: 126340 - RNA, 23 nt, Human herpesvirus 2
ugcaauaaagugguugauuguca

SEQ ID NO: 126341 - RNA, 18 nt, Human herpesvirus 2
ugagaaccaaccaaaaca

SEQ ID NO: 126342 - RNA, 13 nt, Human herpesvirus 2
ucuuuccaccacc

SEQ ID NO: 126343 - RNA, 17 nt, Human herpesvirus 2
ucaguguuugggaaauc

SEQ ID NO: 126344 - RNA, 19 nt, Human herpesvirus 2
ucacccccgggggggggca

SEQ ID NO: 126345 - RNA, 20 nt, Human herpesvirus 2
ucccaaacacugaggaacug

SEQ ID NO: 126346 - RNA, 14 nt, Human herpesvirus 2
uccucaguguuugg

SEQ ID NO: 126347 - RNA, 21 nt, Human herpesvirus 2
uccucccccccccccaaaaaa

SEQ ID NO: 126348 - RNA, 11 nt, Human herpesvirus 2
uccgaccugca

SEQ ID NO: 126349 - RNA, 18 nt, Human herpesvirus 2
uccgacuuccgcauacac

SEQ ID NO: 126350 - RNA, 23 nt, Human herpesvirus 2
uccuuccuccacccccagaaaaa

SEQ ID NO: 126351 - RNA, 20 nt, Human herpesvirus 2
uccuucggugcacaagacac

SEQ ID NO: 126352 - RNA, 13 nt, Human herpesvirus 2
ucgagaugugccu

SEQ ID NO: 126353 - RNA, 18 nt, Human herpesvirus 2
uccacgcccugcuguauc

SEQ ID NO: 126354 - RNA, 21 nt, Human herpesvirus 2
uccagcagcuucccaugacgc

SEQ ID NO: 126355 - RNA, 11 nt, Human herpesvirus 2
uuggccuuccc

SEQ ID NO: 126356 - RNA, 21 nt, Human herpesvirus 2
uucaauaaaaaacaccaacau

SEQ ID NO: 126357 - RNA, 14 nt, Human herpesvirus 2
uucaccacacagaa

SEQ ID NO: 126358 - RNA, 19 nt, Human herpesvirus 2
uucaccaacgacgaugcau

SEQ ID NO: 126359 - RNA, 23 nt, Human herpesvirus 2
uucucugcguugcgucugaccac

SEQ ID NO: 126360 - RNA, 17 nt, Human herpesvirus 2
uucggacgaaacaaacu

SEQ ID NO: 126361 - RNA, 22 nt, Human herpesvirus 2
uucccaaacacugaggaacugg

SEQ ID NO: 126362 - RNA, 19 nt, Human herpesvirus 2
uuccccagcuuucccucca

SEQ ID NO: 126363 - RNA, 20 nt, Human herpesvirus 2
uguguuuugugggacugggg

SEQ ID NO: 126364 - RNA, 11 nt, Human herpesvirus 2
uuaagacagac

SEQ ID NO: 126365 - RNA, 22 nt, Human herpesvirus 2
uguggcggucggccagcacgac

SEQ ID NO: 126366 - RNA, 19 nt, Human herpesvirus 2
uuacccuauacgcgguaug

SEQ ID NO: 126367 - RNA, 22 nt, Human herpesvirus 2
uggucgggcggacguccagggg

SEQ ID NO: 126368 - RNA, 23 nt, Human herpesvirus 2
uggucauggcccuuggacgggug

SEQ ID NO: 126369 - RNA, 23 nt, Human herpesvirus 2
ugggaaggggugggcgugucguu

SEQ ID NO: 126370 - RNA, 14 nt, Human herpesvirus 2
ugggauucauggac

SEQ ID NO: 126371 - RNA, 16 nt, Human herpesvirus 2
ugggauucauggacau

SEQ ID NO: 126372 - RNA, 22 nt, Human herpesvirus 2
uggcccccguacgugggguccg

SEQ ID NO: 126373 - RNA, 16 nt, Human herpesvirus 2
uggccgacaacugccu

SEQ ID NO: 126374 - RNA, 12 nt, Human herpesvirus 2
ugggaaaucuau

SEQ ID NO: 126375 - RNA, 19 nt, Human herpesvirus 2
ugugcgccuuuaagacaga

SEQ ID NO: 126376 - RNA, 16 nt, Human herpesvirus 2
ugugcgggaggggcuu

SEQ ID NO: 126377 - RNA, 21 nt, Human herpesvirus 2
ugugacgcgaugggggguccg

SEQ ID NO: 126378 - RNA, 22 nt, Human herpesvirus 2
uguacaccggcucccccgcgga

SEQ ID NO: 126379 - RNA, 19 nt, Human herpesvirus 2
uggagaagggaaaggaaca

SEQ ID NO: 126380 - RNA, 22 nt, Human herpesvirus 2
uggauagcaaacgugggaugac

SEQ ID NO: 126381 - RNA, 19 nt, Human herpesvirus 2
uggauaacagcuacccgca

SEQ ID NO: 126382 - RNA, 15 nt, Human herpesvirus 2
uggaagcccccggca

SEQ ID NO: 126383 - RNA, 17 nt, Human herpesvirus 2
ugcacguguuugaguca

SEQ ID NO: 126384 - RNA, 15 nt, Human herpesvirus 2
ugcagacaugugcua

SEQ ID NO: 126385 - RNA, 15 nt, Human herpesvirus 2
aguaccccaguuccu

SEQ ID NO: 126386 - RNA, 21 nt, Human herpesvirus 2
aguccguuucgaccccuuuau

SEQ ID NO: 126387 - RNA, 14 nt, Human herpesvirus 2
auaaacgccuuccc

SEQ ID NO: 126388 - RNA, 18 nt, Human herpesvirus 2
auaaagaacgagacagac

SEQ ID NO: 126389 - RNA, 23 nt, Human herpesvirus 2
auaaaccgauguuauuugccuau

SEQ ID NO: 126390 - RNA, 11 nt, Human herpesvirus 2
auaaaagccaa

SEQ ID NO: 126391 - RNA, 16 nt, Human herpesvirus 2
agucuccgaucugccc

SEQ ID NO: 126392 - RNA, 19 nt, Human herpesvirus 2
agucuggucucagacucac

SEQ ID NO: 126393 - RNA, 20 nt, Human herpesvirus 2
aguguuguccguugguuggg

SEQ ID NO: 126394 - RNA, 19 nt, Human herpesvirus 2
auaauccggcgauccccaa

SEQ ID NO: 126395 - RNA, 18 nt, Human herpesvirus 2
auaccacgcgacgaacca

SEQ ID NO: 126396 - RNA, 15 nt, Human herpesvirus 2
auaccagaagucaug

SEQ ID NO: 126397 - RNA, 16 nt, Human herpesvirus 2
auacaaauuaaauaca

SEQ ID NO: 126398 - RNA, 20 nt, Human herpesvirus 2
auacaacaaaaaauaccaca

SEQ ID NO: 126399 - RNA, 19 nt, Human herpesvirus 2
auaagaacaauaaaccugu

SEQ ID NO: 126400 - RNA, 20 nt, Human herpesvirus 2
auaucgugucucgugacugu

SEQ ID NO: 126401 - RNA, 14 nt, Human herpesvirus 2
auaugccgagucac

SEQ ID NO: 126402 - RNA, 14 nt, Human herpesvirus 2
auaugcaaccaaau

SEQ ID NO: 126403 - RNA, 19 nt, Human herpesvirus 2
aggaggggggcagugcagu

SEQ ID NO: 126404 - RNA, 20 nt, Human herpesvirus 2
aggaggggggcagugcagua

SEQ ID NO: 126405 - RNA, 16 nt, Human herpesvirus 2
aggaaggggugggggg

SEQ ID NO: 126406 - RNA, 22 nt, Human herpesvirus 2
aggaucgugugcacgaaaaaga

SEQ ID NO: 126407 - RNA, 15 nt, Human herpesvirus 2
aggcccuggcgcacc

SEQ ID NO: 126408 - RNA, 22 nt, Human herpesvirus 2
aggcccggggggggccucgguc

SEQ ID NO: 126409 - RNA, 17 nt, Human herpesvirus 2
aggaaaggaaacaggaa

SEQ ID NO: 126410 - RNA, 14 nt, Human herpesvirus 2
aggaaagguuggug

SEQ ID NO: 126411 - RNA, 18 nt, Human herpesvirus 2
aggaacugggguacugca

SEQ ID NO: 126412 - RNA, 19 nt, Human herpesvirus 2
aggaacugggguacugcac

SEQ ID NO: 126413 - RNA, 20 nt, Human herpesvirus 2
aggaacugggguacugcacu

SEQ ID NO: 126414 - RNA, 18 nt, Human herpesvirus 2
aggaacuggguuacugca

SEQ ID NO: 126415 - RNA, 19 nt, Human herpesvirus 2
aggaacuggguuacugcac

SEQ ID NO: 126416 - RNA, 19 nt, Human herpesvirus 2
agcgcugcggggaccagcc

SEQ ID NO: 126417 - RNA, 14 nt, Human herpesvirus 2
agcguccugcgcgu

SEQ ID NO: 126418 - RNA, 15 nt, Human herpesvirus 2
agccuagaucuggcg

SEQ ID NO: 126419 - RNA, 20 nt, Human herpesvirus 2
agagacuucccuaacacgga

SEQ ID NO: 126420 - RNA, 15 nt, Human herpesvirus 2
agagcgggcccgggg

SEQ ID NO: 126421 - RNA, 17 nt, Human herpesvirus 2
acuuucccccccacucc

SEQ ID NO: 126422 - RNA, 14 nt, Human herpesvirus 2
agaguucaauagau

SEQ ID NO: 126423 - RNA, 20 nt, Human herpesvirus 2
agaguucaauagauuuccca

SEQ ID NO: 126424 - RNA, 23 nt, Human herpesvirus 2
agcaccaccacccccccacuuuc

SEQ ID NO: 126425 - RNA, 15 nt, Human herpesvirus 2
agcaaaaccgauaga

SEQ ID NO: 126426 - RNA, 18 nt, Human herpesvirus 2
agauuucccaaacacuga

SEQ ID NO: 126427 - RNA, 18 nt, Human herpesvirus 2
agauuuccccagcacgga

SEQ ID NO: 126428 - RNA, 20 nt, Human herpesvirus 2
agauugacucagcacacgau

SEQ ID NO: 126429 - RNA, 18 nt, Human herpesvirus 2
agaugccaguggagccaa

SEQ ID NO: 126430 - RNA, 19 nt, Human herpesvirus 2
acaucgucuuuggugccag

SEQ ID NO: 126431 - RNA, 19 nt, Human herpesvirus 2
acagcaauaaacauuggca

SEQ ID NO: 126432 - RNA, 22 nt, Human herpesvirus 2
acaccagggcauaugcgaaaca

SEQ ID NO: 126433 - RNA, 16 nt, Human herpesvirus 2
acaccccccugacuca

SEQ ID NO: 126434 - RNA, 17 nt, Human herpesvirus 2
acacugaggaacugggu

SEQ ID NO: 126435 - RNA, 12 nt, Human herpesvirus 2
acacacuuuguu

SEQ ID NO: 126436 - RNA, 14 nt, Human herpesvirus 2
acaauaauaaagcu

SEQ ID NO: 126437 - RNA, 14 nt, Human herpesvirus 2
acaacaccaaacaa

SEQ ID NO: 126438 - RNA, 16 nt, Human herpesvirus 2
acaaaugcagacaugu

SEQ ID NO: 126439 - RNA, 20 nt, Human herpesvirus 2
acaaaugcagacaugugcua

SEQ ID NO: 126440 - RNA, 13 nt, Human herpesvirus 2
aaugacacaaaaa

SEQ ID NO: 126441 - RNA, 14 nt, Human herpesvirus 2
aaugacacaaaaau

SEQ ID NO: 126442 - RNA, 16 nt, Human herpesvirus 2
acugucugaaugccac

SEQ ID NO: 126443 - RNA, 19 nt, Human herpesvirus 2
acugucugaaugccacgug

SEQ ID NO: 126444 - RNA, 19 nt, Human herpesvirus 2
acuucauggggugggaugu

SEQ ID NO: 126445 - RNA, 19 nt, Human herpesvirus 2
acuucccuaacacggagga

SEQ ID NO: 126446 - RNA, 16 nt, Human herpesvirus 2
acuccaggagcuucau

SEQ ID NO: 126447 - RNA, 15 nt, Human herpesvirus 2
acuaaaaacacauca

SEQ ID NO: 126448 - RNA, 13 nt, Human herpesvirus 2
acgggcccggggc

SEQ ID NO: 126449 - RNA, 18 nt, Human herpesvirus 2
acgucggggggcacguag

SEQ ID NO: 126450 - RNA, 23 nt, Human herpesvirus 2
acgugacgucaaucgcccgaggc

SEQ ID NO: 126451 - RNA, 14 nt, Human herpesvirus 2
accugccccggcgc

SEQ ID NO: 126452 - RNA, 21 nt, Human herpesvirus 2
accucaccccacgaugaagcg

SEQ ID NO: 126453 - RNA, 20 nt, Human herpesvirus 2
accuggcucgccgugcgcug

SEQ ID NO: 126454 - RNA, 21 nt, Human herpesvirus 2
accugcaggacuucuacggcu

SEQ ID NO: 126455 - RNA, 14 nt, Human herpesvirus 2
acgacuuccucgug

SEQ ID NO: 126456 - RNA, 15 nt, Human herpesvirus 2
acgacccgccucggg

SEQ ID NO: 126457 - RNA, 23 nt, Human herpesvirus 2
acgacccgccucgggccuacgca

SEQ ID NO: 126458 - RNA, 13 nt, Human herpesvirus 2
acgcccugcacac

SEQ ID NO: 126459 - RNA, 16 nt, Human herpesvirus 2
acgcgguauggcugcc

SEQ ID NO: 126460 - RNA, 20 nt, Human herpesvirus 2
acggccgggugacucgccau

SEQ ID NO: 126461 - RNA, 16 nt, Human herpesvirus 2
acggcaacccccgggc

SEQ ID NO: 126462 - RNA, 18 nt, Human herpesvirus 2
acgcggacgucggcgaug

SEQ ID NO: 126463 - RNA, 20 nt, Human herpesvirus 2
acgccuucccggaacugugu

SEQ ID NO: 126464 - RNA, 18 nt, Human herpesvirus 2
accccggcguggagcgcc

SEQ ID NO: 126465 - RNA, 15 nt, Human herpesvirus 2
accccaguuccuccg

SEQ ID NO: 126466 - RNA, 17 nt, Human herpesvirus 2
accccgcccgcuugcau

SEQ ID NO: 126467 - RNA, 21 nt, Human herpesvirus 2
accccgccgcagcucauaaaa

SEQ ID NO: 126468 - RNA, 13 nt, Human herpesvirus 2
accgcgcccgggc

SEQ ID NO: 126469 - RNA, 20 nt, Human herpesvirus 2
acccggcagagagauuuccc

SEQ ID NO: 126470 - RNA, 17 nt, Human herpesvirus 2
accuaauuuuuguguca

SEQ ID NO: 126471 - RNA, 22 nt, Human herpesvirus 2
augcacgccaucgcucccaggu

SEQ ID NO: 126472 - RNA, 12 nt, Human herpesvirus 2
augcagcccaga

SEQ ID NO: 126473 - RNA, 13 nt, Human herpesvirus 2
augcccaguuuua

SEQ ID NO: 126474 - RNA, 22 nt, Human herpesvirus 2
auggccgcgcgcgugugugaga

SEQ ID NO: 126475 - RNA, 16 nt, Human herpesvirus 2
auggccgccccgcagu

SEQ ID NO: 126476 - RNA, 22 nt, Human herpesvirus 2
auggaugggcggggcccggggg

SEQ ID NO: 126477 - RNA, 14 nt, Human herpesvirus 2
augggccgccagca

SEQ ID NO: 126478 - RNA, 17 nt, Human herpesvirus 2
auggggccgcaguguuu

SEQ ID NO: 126479 - RNA, 13 nt, Human herpesvirus 2
auuaaccaaccaa

SEQ ID NO: 126480 - RNA, 14 nt, Human herpesvirus 2
auuaaccaaccaac

SEQ ID NO: 126481 - RNA, 17 nt, Human herpesvirus 2
auucagggaaacagaaa

SEQ ID NO: 126482 - RNA, 16 nt, Human herpesvirus 2
auugaaacguacaaca

SEQ ID NO: 126483 - RNA, 22 nt, Human herpesvirus 2
caacccgcccucgagaugugcc

SEQ ID NO: 126484 - RNA, 14 nt, Human herpesvirus 2
caaccggacaaaag

SEQ ID NO: 126485 - RNA, 11 nt, Human herpesvirus 2
caagugcagua

SEQ ID NO: 126486 - RNA, 12 nt, Human herpesvirus 2
cacagaaacaca

SEQ ID NO: 126487 - RNA, 13 nt, Human herpesvirus 2
caauagauuuccc

SEQ ID NO: 126488 - RNA, 18 nt, Human herpesvirus 2
caauagauuucccaaaca

SEQ ID NO: 126489 - RNA, 21 nt, Human herpesvirus 2
auuuuucguuuggcaaacaca

SEQ ID NO: 126490 - RNA, 16 nt, Human herpesvirus 2
cauacgcacaaacaca

SEQ ID NO: 126491 - RNA, 21 nt, Human herpesvirus 2
cauacgcacaaacacacgggu

SEQ ID NO: 126492 - RNA, 16 nt, Human herpesvirus 2
cauccccggcgccaug

SEQ ID NO: 126493 - RNA, 18 nt, Human herpesvirus 2
caucgaguccgaagaaga

SEQ ID NO: 126494 - RNA, 20 nt, Human herpesvirus 2
caucgccgaacggugcugua

SEQ ID NO: 126495 - RNA, 16 nt, Human herpesvirus 2
caucugcggacuggca

SEQ ID NO: 126496 - RNA, 17 nt, Human herpesvirus 2
cagggggaggugggggg

SEQ ID NO: 126497 - RNA, 16 nt, Human herpesvirus 2
caggggggcaggcggg

SEQ ID NO: 126498 - RNA, 14 nt, Human herpesvirus 2
cagggguuuuuuaa

SEQ ID NO: 126499 - RNA, 13 nt, Human herpesvirus 2
caguaacccaguu

SEQ ID NO: 126500 - RNA, 15 nt, Human herpesvirus 2
caguaacccaguucc

SEQ ID NO: 126501 - RNA, 13 nt, Human herpesvirus 2
caguaccccaguu

SEQ ID NO: 126502 - RNA, 17 nt, Human herpesvirus 2
caguaccccaguuccuc

SEQ ID NO: 126503 - RNA, 23 nt, Human herpesvirus 2
caguugauucgcgaacacaagcu

SEQ ID NO: 126504 - RNA, 14 nt, Human herpesvirus 2
cagugacaguggua

SEQ ID NO: 126505 - RNA, 23 nt, Human herpesvirus 2
caguuccgggaaggcguuuauug

SEQ ID NO: 126506 - RNA, 22 nt, Human herpesvirus 2
caccaacaacgcucaguucauc

SEQ ID NO: 126507 - RNA, 16 nt, Human herpesvirus 2
cagaugcgccuggugg

SEQ ID NO: 126508 - RNA, 21 nt, Human herpesvirus 2
cagcccgguguguuugccaaa

SEQ ID NO: 126509 - RNA, 14 nt, Human herpesvirus 2
caggcccaccacca

SEQ ID NO: 126510 - RNA, 12 nt, Human herpesvirus 2
caggaauggaga

SEQ ID NO: 126511 - RNA, 17 nt, Human herpesvirus 2
caggaccagggacguca

SEQ ID NO: 126512 - RNA, 21 nt, Human herpesvirus 2
caggaggggggcagugcagua

SEQ ID NO: 126513 - RNA, 19 nt, Human herpesvirus 2
ccgaguuguacccucucaa

SEQ ID NO: 126514 - RNA, 19 nt, Human herpesvirus 2
ccgaggaccgcguguaaua

SEQ ID NO: 126515 - RNA, 23 nt, Human herpesvirus 2
ccgauccggccucgggucugcuu

SEQ ID NO: 126516 - RNA, 22 nt, Human herpesvirus 2
ccgauggccgccccgcaguuuc

SEQ ID NO: 126517 - RNA, 14 nt, Human herpesvirus 2
ccgccaacaccagg

SEQ ID NO: 126518 - RNA, 15 nt, Human herpesvirus 2
ccgagacggccauga

SEQ ID NO: 126519 - RNA, 22 nt, Human herpesvirus 2
cccgggggggggcaagugcagu

SEQ ID NO: 126520 - RNA, 14 nt, Human herpesvirus 2
cccgucgcuccggc

SEQ ID NO: 126521 - RNA, 19 nt, Human herpesvirus 2
ccgccggggcgcacaacga

SEQ ID NO: 126522 - RNA, 23 nt, Human herpesvirus 2
ccgccgguugucuucuuuuccac

SEQ ID NO: 126523 - RNA, 16 nt, Human herpesvirus 2
ccgccuugugugguuu

SEQ ID NO: 126524 - RNA, 18 nt, Human herpesvirus 2
ccggcggagccccggagc

SEQ ID NO: 126525 - RNA, 12 nt, Human herpesvirus 2
ccgugucgcucc

SEQ ID NO: 126526 - RNA, 18 nt, Human herpesvirus 2
ccgucucaauaaagccag

SEQ ID NO: 126527 - RNA, 16 nt, Human herpesvirus 2
ccgggcauggguugug

SEQ ID NO: 126528 - RNA, 20 nt, Human herpesvirus 2
ccgggacgcggcauaccucc

SEQ ID NO: 126529 - RNA, 20 nt, Human herpesvirus 2
ccgggaagggggaaaggggg

SEQ ID NO: 126530 - RNA, 19 nt, Human herpesvirus 2
cccggacuccgccccggcg

SEQ ID NO: 126531 - RNA, 20 nt, Human herpesvirus 2
ccccggcccacccccaaacc

SEQ ID NO: 126532 - RNA, 21 nt, Human herpesvirus 2
ccccggcguggagcgccgggc

SEQ ID NO: 126533 - RNA, 15 nt, Human herpesvirus 2
cccccaggggggcuu

SEQ ID NO: 126534 - RNA, 23 nt, Human herpesvirus 2
ccccaggaggggggcagugcagu

SEQ ID NO: 126535 - RNA, 13 nt, Human herpesvirus 2
cccccguggcuca

SEQ ID NO: 126536 - RNA, 12 nt, Human herpesvirus 2
cccccauggcau

SEQ ID NO: 126537 - RNA, 23 nt, Human herpesvirus 2
cccccggccuuugcuuccucgcg

SEQ ID NO: 126538 - RNA, 13 nt, Human herpesvirus 2
ccccgcgagcacc

SEQ ID NO: 126539 - RNA, 19 nt, Human herpesvirus 2
ccccgcgugcagcgcgggc

SEQ ID NO: 126540 - RNA, 17 nt, Human herpesvirus 2
cccccuacacaccaacu

SEQ ID NO: 126541 - RNA, 17 nt, Human herpesvirus 2
cccaacagcgauguugu

SEQ ID NO: 126542 - RNA, 21 nt, Human herpesvirus 2
cccaauggcuucgggccaaca

SEQ ID NO: 126543 - RNA, 16 nt, Human herpesvirus 2
cccaagcguaccaacu

SEQ ID NO: 126544 - RNA, 19 nt, Human herpesvirus 2
caugguaauuagcaacuuu

SEQ ID NO: 126545 - RNA, 11 nt, Human herpesvirus 2
ccaacaccagg

SEQ ID NO: 126546 - RNA, 13 nt, Human herpesvirus 2
ccaauacaccaga

SEQ ID NO: 126547 - RNA, 14 nt, Human herpesvirus 2
ccaauacaccagag

SEQ ID NO: 126548 - RNA, 18 nt, Human herpesvirus 2
ccacagcugcgccagaaa

SEQ ID NO: 126549 - RNA, 22 nt, Human herpesvirus 2
ccauccgacggcaugcagccca

SEQ ID NO: 126550 - RNA, 14 nt, Human herpesvirus 2
ccaguugaaucucg

SEQ ID NO: 126551 - RNA, 22 nt, Human herpesvirus 2
ccagcacggaggaacuggggua

SEQ ID NO: 126552 - RNA, 17 nt, Human herpesvirus 2
ccagcagaugaaucaca

SEQ ID NO: 126553 - RNA, 16 nt, Human herpesvirus 2
guaauuagcaacuuuu

SEQ ID NO: 126554 - RNA, 22 nt, Human herpesvirus 2
guaauuagcaacuuuuaauggg

SEQ ID NO: 126555 - RNA, 13 nt, Human herpesvirus 2
gguucggggccag

SEQ ID NO: 126556 - RNA, 20 nt, Human herpesvirus 2
gggccccgggugcgggaugu

SEQ ID NO: 126557 - RNA, 22 nt, Human herpesvirus 2
gggccccggguucccauuggcc

SEQ ID NO: 126558 - RNA, 18 nt, Human herpesvirus 2
gggccacgucgggguccc

SEQ ID NO: 126559 - RNA, 22 nt, Human herpesvirus 2
gggccgcccggagcggugggga

SEQ ID NO: 126560 - RNA, 22 nt, Human herpesvirus 2
gggccucucgacggagagccgg

SEQ ID NO: 126561 - RNA, 15 nt, Human herpesvirus 2
gggcgcacacgccau

SEQ ID NO: 126562 - RNA, 15 nt, Human herpesvirus 2
gggcgcgcggcgcga

SEQ ID NO: 126563 - RNA, 12 nt, Human herpesvirus 2
ggggacuccccu

SEQ ID NO: 126564 - RNA, 21 nt, Human herpesvirus 2
gggcuuugguguuuuuggcac

SEQ ID NO: 126565 - RNA, 13 nt, Human herpesvirus 2
ggggaaagaaaga

SEQ ID NO: 126566 - RNA, 17 nt, Human herpesvirus 2
gggcguccccggugucu

SEQ ID NO: 126567 - RNA, 20 nt, Human herpesvirus 2
gggcguugccgggggccaug

SEQ ID NO: 126568 - RNA, 19 nt, Human herpesvirus 2
gguaauuagcaacuuuuaa

SEQ ID NO: 126569 - RNA, 17 nt, Human herpesvirus 2
gggugacauucaccccc

SEQ ID NO: 126570 - RNA, 23 nt, Human herpesvirus 2
gguucaauaaaaaacaccaacau

SEQ ID NO: 126571 - RNA, 18 nt, Human herpesvirus 2
gguuauauccacuuccua

SEQ ID NO: 126572 - RNA, 19 nt, Human herpesvirus 2
gguccuggaggggggugcu

SEQ ID NO: 126573 - RNA, 12 nt, Human herpesvirus 2
ggucgggcgggc

SEQ ID NO: 126574 - RNA, 15 nt, Human herpesvirus 2
gggacgacgaccaug

SEQ ID NO: 126575 - RNA, 19 nt, Human herpesvirus 2
gggaaaaccaaccccaaac

SEQ ID NO: 126576 - RNA, 19 nt, Human herpesvirus 2
gggaaagaaagaaacacaa

SEQ ID NO: 126577 - RNA, 21 nt, Human herpesvirus 2
gggaaagaaagagaaacaaaa

SEQ ID NO: 126578 - RNA, 14 nt, Human herpesvirus 2
gggaaaggaaagga

SEQ ID NO: 126579 - RNA, 13 nt, Human herpesvirus 2
gggaaaucucucu

SEQ ID NO: 126580 - RNA, 20 nt, Human herpesvirus 2
ggcuucccgguaugguaauu

SEQ ID NO: 126581 - RNA, 14 nt, Human herpesvirus 2
gggagguaucagug

SEQ ID NO: 126582 - RNA, 13 nt, Human herpesvirus 2
gggcaagugcagu

SEQ ID NO: 126583 - RNA, 23 nt, Human herpesvirus 2
gggccaaauugcgagugugguga

SEQ ID NO: 126584 - RNA, 13 nt, Human herpesvirus 2
gggcagugcagua

SEQ ID NO: 126585 - RNA, 13 nt, Human herpesvirus 2
ggcuccuccgugu

SEQ ID NO: 126586 - RNA, 17 nt, Human herpesvirus 2
ggcuggggaaagggaag

SEQ ID NO: 126587 - RNA, 14 nt, Human herpesvirus 2
ggcugcuggugauu

SEQ ID NO: 126588 - RNA, 17 nt, Human herpesvirus 2
ggccacgucgggguccc

SEQ ID NO: 126589 - RNA, 19 nt, Human herpesvirus 2
ggccaauacccuccuuuuu

SEQ ID NO: 126590 - RNA, 16 nt, Human herpesvirus 2
ggccagcgggggcccg

SEQ ID NO: 126591 - RNA, 17 nt, Human herpesvirus 2
ggcauuaaccaaccaac

SEQ ID NO: 126592 - RNA, 13 nt, Human herpesvirus 2
ggcaagugcagua

SEQ ID NO: 126593 - RNA, 15 nt, Human herpesvirus 2
ggaugauggggacga

SEQ ID NO: 126594 - RNA, 14 nt, Human herpesvirus 2
ggaugggggggaag

SEQ ID NO: 126595 - RNA, 14 nt, Human herpesvirus 2
ggauguuuuugcac

SEQ ID NO: 126596 - RNA, 18 nt, Human herpesvirus 2
ggaugugucgcggggaca

SEQ ID NO: 126597 - RNA, 12 nt, Human herpesvirus 2
ggauucauggac

SEQ ID NO: 126598 - RNA, 14 nt, Human herpesvirus 2
ggaacgcagggugc

SEQ ID NO: 126599 - RNA, 23 nt, Human herpesvirus 2
ggaacugggguacugcacugccc

SEQ ID NO: 126600 - RNA, 23 nt, Human herpesvirus 2
ggaacuggguuacugcacuugcc

SEQ ID NO: 126601 - RNA, 23 nt, Human herpesvirus 2
gcuuugguguuuuuggcaccuug

SEQ ID NO: 126602 - RNA, 19 nt, Human herpesvirus 2
gcgauucccuucgcgaggg

SEQ ID NO: 126603 - RNA, 17 nt, Human herpesvirus 2
gcgaggugcgccagguc

SEQ ID NO: 126604 - RNA, 19 nt, Human herpesvirus 2
gcgccccgcggaccccgcc

SEQ ID NO: 126605 - RNA, 17 nt, Human herpesvirus 2
gcgccgacgaccugcag

SEQ ID NO: 126606 - RNA, 12 nt, Human herpesvirus 2
gcgccaccggcc

SEQ ID NO: 126607 - RNA, 18 nt, Human herpesvirus 2
gcgucugaccacgagcac

SEQ ID NO: 126608 - RNA, 17 nt, Human herpesvirus 2
gcgucacagaacggcuc

SEQ ID NO: 126609 - RNA, 22 nt, Human herpesvirus 2
gcguccgucucaauaaagccag

SEQ ID NO: 126610 - RNA, 13 nt, Human herpesvirus 2
gcgcggcacacau

SEQ ID NO: 126611 - RNA, 16 nt, Human herpesvirus 2
gcgcgcaccugcggga

SEQ ID NO: 126612 - RNA, 18 nt, Human herpesvirus 2
gcgcgcccccgacccggg

SEQ ID NO: 126613 - RNA, 14 nt, Human herpesvirus 2
gcucaucgcacggc

SEQ ID NO: 126614 - RNA, 18 nt, Human herpesvirus 2
gcucuguuucgcauaugc

SEQ ID NO: 126615 - RNA, 15 nt, Human herpesvirus 2
gcucgggcuggccga

SEQ ID NO: 126616 - RNA, 13 nt, Human herpesvirus 2
gcugcggggacca

SEQ ID NO: 126617 - RNA, 16 nt, Human herpesvirus 2
gccgcucguuccucac

SEQ ID NO: 126618 - RNA, 18 nt, Human herpesvirus 2
gccgcgacggccccggcc

SEQ ID NO: 126619 - RNA, 18 nt, Human herpesvirus 2
gccgaaaacgcccugcac

SEQ ID NO: 126620 - RNA, 17 nt, Human herpesvirus 2
gcccucgccgucuuggc

SEQ ID NO: 126621 - RNA, 19 nt, Human herpesvirus 2
gccgacgaccugcagccgg

SEQ ID NO: 126622 - RNA, 20 nt, Human herpesvirus 2
gcccucucgaucccgaagcc

SEQ ID NO: 126623 - RNA, 15 nt, Human herpesvirus 2
gcccuccuaucugga

SEQ ID NO: 126624 - RNA, 19 nt, Human herpesvirus 2
gcccuccugccacgcucac

SEQ ID NO: 126625 - RNA, 16 nt, Human herpesvirus 2
gcccgggguucugggg

SEQ ID NO: 126626 - RNA, 19 nt, Human herpesvirus 2
gccccgugcuccaacuuac

SEQ ID NO: 126627 - RNA, 22 nt, Human herpesvirus 2
gcccccuuuacgccuuuccucc

SEQ ID NO: 126628 - RNA, 18 nt, Human herpesvirus 2
gccccgacaucaaccacc

SEQ ID NO: 126629 - RNA, 13 nt, Human herpesvirus 2
gcccgaacggaag

SEQ ID NO: 126630 - RNA, 19 nt, Human herpesvirus 2
gcccgccagugcaucccag

SEQ ID NO: 126631 - RNA, 12 nt, Human herpesvirus 2
gcccgcggacca

SEQ ID NO: 126632 - RNA, 17 nt, Human herpesvirus 2
gccccucccccggccca

SEQ ID NO: 126633 - RNA, 20 nt, Human herpesvirus 2
gcacggcguugcugcgcuga

SEQ ID NO: 126634 - RNA, 18 nt, Human herpesvirus 2
gcacgggcguccccggug

SEQ ID NO: 126635 - RNA, 14 nt, Human herpesvirus 2
gcagagagauuucc

SEQ ID NO: 126636 - RNA, 14 nt, Human herpesvirus 2
gccuccgcccuccg

SEQ ID NO: 126637 - RNA, 18 nt, Human herpesvirus 2
gccgggcgcgcggcgcga

SEQ ID NO: 126638 - RNA, 14 nt, Human herpesvirus 2
gccggccaaccuca

SEQ ID NO: 126639 - RNA, 14 nt, Human herpesvirus 2
gccgguagugcagg

SEQ ID NO: 126640 - RNA, 15 nt, Human herpesvirus 2
gccgugcgcggcccc

SEQ ID NO: 126641 - RNA, 13 nt, Human herpesvirus 2
gcgaaggcggacc

SEQ ID NO: 126642 - RNA, 13 nt, Human herpesvirus 2
gcgaacacaagcu

SEQ ID NO: 126643 - RNA, 23 nt, Human herpesvirus 2
gcgaccgucgccgccggccacgc

SEQ ID NO: 126644 - RNA, 12 nt, Human herpesvirus 2
gcgacacucccg

SEQ ID NO: 126645 - RNA, 20 nt, Human herpesvirus 2
guuucaccgccccagcacca

SEQ ID NO: 126646 - RNA, 20 nt, Human herpesvirus 2
guuucugguccgccugguca

SEQ ID NO: 126647 - RNA, 22 nt, Human herpesvirus 2
guuugcaccccagaaccaugau

SEQ ID NO: 126648 - RNA, 15 nt, Human herpesvirus 2
guuuauugaccaaau

SEQ ID NO: 126649 - RNA, 19 nt, Human herpesvirus 2
guuggcgcgcuugcacaaa

SEQ ID NO: 126650 - RNA, 21 nt, Human herpesvirus 2
guuggaagaggcggacccagu

SEQ ID NO: 126651 - RNA, 13 nt, Human herpesvirus 2
uaacaacaccaaa

SEQ ID NO: 126652 - RNA, 21 nt, Human herpesvirus 2
guucaauagauuucccaaaca

SEQ ID NO: 126653 - RNA, 12 nt, Human herpesvirus 2
guucggggccag

SEQ ID NO: 126654 - RNA, 15 nt, Human herpesvirus 2
guguuugggaaaucu

SEQ ID NO: 126655 - RNA, 21 nt, Human herpesvirus 2
guuagaaaacgacugcacuuu

SEQ ID NO: 126656 - RNA, 20 nt, Human herpesvirus 2
gucccuuccccaccaccaac

SEQ ID NO: 126657 - RNA, 21 nt, Human herpesvirus 2
gucccaauaaaacccagaccc

SEQ ID NO: 126658 - RNA, 20 nt, Human herpesvirus 2
gucccagaauuuagccagga

SEQ ID NO: 126659 - RNA, 16 nt, Human herpesvirus 2
gucaauagauuucccc

SEQ ID NO: 126660 - RNA, 22 nt, Human herpesvirus 2
gucaauagauuuccccaagaga

SEQ ID NO: 126661 - RNA, 15 nt, Human herpesvirus 2
guggcccuggcggac

SEQ ID NO: 126662 - RNA, 13 nt, Human herpesvirus 2
guggccggcgacc

SEQ ID NO: 126663 - RNA, 11 nt, Human herpesvirus 2
guggcccuccu

SEQ ID NO: 126664 - RNA, 22 nt, Human herpesvirus 2
guguggaugaagauaaaccaga

SEQ ID NO: 126665 - RNA, 19 nt, Human herpesvirus 2
gugugacuagaaaaacaaa

SEQ ID NO: 126666 - RNA, 12 nt, Human herpesvirus 2
uauaccuugauu

SEQ ID NO: 126667 - RNA, 13 nt, Human herpesvirus 2
uagauugacucag

SEQ ID NO: 126668 - RNA, 14 nt, Human herpesvirus 2
uagauugacucagc

SEQ ID NO: 126669 - RNA, 15 nt, Human herpesvirus 2
uagauuucccaaaca

SEQ ID NO: 126670 - RNA, 17 nt, Human herpesvirus 2
uagauuuccccaagaga

SEQ ID NO: 126671 - RNA, 13 nt, Human herpesvirus 2
uagaaacuuuuaa

SEQ ID NO: 126672 - RNA, 19 nt, Human herpesvirus 2
uacgaagcggacaaacccg

SEQ ID NO: 126673 - RNA, 12 nt, Human herpesvirus 2
uacuacguggag

SEQ ID NO: 126674 - RNA, 13 nt, Human herpesvirus 2
uacuagguugucu

SEQ ID NO: 126675 - RNA, 18 nt, Human herpesvirus 2
uaagcgcugcggggacca

SEQ ID NO: 126676 - RNA, 15 nt, Human herpesvirus 2
uacagccuacaucac

SEQ ID NO: 126677 - RNA, 12 nt, Human herpesvirus 2
gaacgccccggg

SEQ ID NO: 126678 - RNA, 21 nt, Human herpesvirus 2
gaaggaacgcccgaaaccaga

SEQ ID NO: 126679 - RNA, 11 nt, Human herpesvirus 2
gaaucugggaa

SEQ ID NO: 126680 - RNA, 22 nt, Human herpesvirus 2
gaacccaauggccgcuccugcc

SEQ ID NO: 126681 - RNA, 15 nt, Human herpesvirus 2
gaacaauaaaccugu

SEQ ID NO: 126682 - RNA, 23 nt, Human herpesvirus 2
gaacaauaaaccugugacgucaa

SEQ ID NO: 126683 - RNA, 17 nt, Human herpesvirus 2
gaaacggcaagaaagac

SEQ ID NO: 126684 - RNA, 21 nt, Human herpesvirus 2
gaaacgcaaaaaaaacaagac

SEQ ID NO: 126685 - RNA, 21 nt, Human herpesvirus 2
gaaacgcguccaaccgauaaa

SEQ ID NO: 126686 - RNA, 20 nt, Human herpesvirus 2
gaaaaggaccaaaagggaaa

SEQ ID NO: 126687 - RNA, 18 nt, Human herpesvirus 2
gaaacacaguuccgggaa

SEQ ID NO: 126688 - RNA, 20 nt, Human herpesvirus 2
cugugcgccuuuaagacaga

SEQ ID NO: 126689 - RNA, 14 nt, Human herpesvirus 2
cuguggcccuggcg

SEQ ID NO: 126690 - RNA, 14 nt, Human herpesvirus 2
cuugccgcccggcg

SEQ ID NO: 126691 - RNA, 13 nt, Human herpesvirus 2
cuuuaagacagac

SEQ ID NO: 126692 - RNA, 15 nt, Human herpesvirus 2
cuuuuucucuucccc

SEQ ID NO: 126693 - RNA, 22 nt, Human herpesvirus 2
cuuugggccguggguacggaca

SEQ ID NO: 126694 - RNA, 22 nt, Human herpesvirus 2
cuuuccuccccucgccuguugu

SEQ ID NO: 126695 - RNA, 18 nt, Human herpesvirus 2
gauagagggaacaaagaa

SEQ ID NO: 126696 - RNA, 19 nt, Human herpesvirus 2
gaugucuaaccgaaauaaa

SEQ ID NO: 126697 - RNA, 13 nt, Human herpesvirus 2
gauguucaaaaau

SEQ ID NO: 126698 - RNA, 18 nt, Human herpesvirus 2
gauucgcgaacacaagcu

SEQ ID NO: 126699 - RNA, 18 nt, Human herpesvirus 2
gauggcccccacacgcga

SEQ ID NO: 126700 - RNA, 13 nt, Human herpesvirus 2
gaugagccgguag

SEQ ID NO: 126701 - RNA, 18 nt, Human herpesvirus 2
gcaccgcgcggaccggcc

SEQ ID NO: 126702 - RNA, 15 nt, Human herpesvirus 2
gcacgacagaccucc

SEQ ID NO: 126703 - RNA, 14 nt, Human herpesvirus 2
gcacgaccagggag

SEQ ID NO: 126704 - RNA, 16 nt, Human herpesvirus 2
gagucugugcggcccu

SEQ ID NO: 126705 - RNA, 13 nt, Human herpesvirus 2
gagugagaaccaa

SEQ ID NO: 126706 - RNA, 12 nt, Human herpesvirus 2
gauaaaagccaa

SEQ ID NO: 126707 - RNA, 21 nt, Human herpesvirus 2
gaggaggggggugguggccga

SEQ ID NO: 126708 - RNA, 16 nt, Human herpesvirus 2
gagccgauccggccuc

SEQ ID NO: 126709 - RNA, 21 nt, Human herpesvirus 2
gagccccugggggacccgacc

SEQ ID NO: 126710 - RNA, 20 nt, Human herpesvirus 2
gagagggggggaaagaaaga

SEQ ID NO: 126711 - RNA, 19 nt, Human herpesvirus 2
gagaggucaauagauuucc

SEQ ID NO: 126712 - RNA, 22 nt, Human herpesvirus 2
gagaccuuuccuuaaaaggcac

SEQ ID NO: 126713 - RNA, 17 nt, Human herpesvirus 2
gagaaggaggggggccu

SEQ ID NO: 126714 - RNA, 21 nt, Human herpesvirus 2
gacgggcgccacgguggugca

SEQ ID NO: 126715 - RNA, 17 nt, Human herpesvirus 2
gacggcggggccccggg

SEQ ID NO: 126716 - RNA, 13 nt, Human herpesvirus 2
gacacacuuuguu

SEQ ID NO: 126717 - RNA, 15 nt, Human herpesvirus 2
gacaccgauguucaa

SEQ ID NO: 126718 - RNA, 14 nt, Human herpesvirus 2
cguauguugguguu

SEQ ID NO: 126719 - RNA, 16 nt, Human herpesvirus 2
cggugggucucggggc

SEQ ID NO: 126720 - RNA, 14 nt, Human herpesvirus 2
cguaggcccggggg

SEQ ID NO: 126721 - RNA, 15 nt, Human herpesvirus 2
cggugcgccccgccg

SEQ ID NO: 126722 - RNA, 19 nt, Human herpesvirus 2
cgggugcgggaugugucgc

SEQ ID NO: 126723 - RNA, 14 nt, Human herpesvirus 2
cgggaggggcggga

SEQ ID NO: 126724 - RNA, 20 nt, Human herpesvirus 2
cgugugguuuguguuuauuu

SEQ ID NO: 126725 - RNA, 16 nt, Human herpesvirus 2
cgugugucucugaaau

SEQ ID NO: 126726 - RNA, 14 nt, Human herpesvirus 2
cgugcuggggaaau

SEQ ID NO: 126727 - RNA, 23 nt, Human herpesvirus 2
cgugcuggggaaaucucucugcc

SEQ ID NO: 126728 - RNA, 23 nt, Human herpesvirus 2
cgcucgcgguaauuagcagcuuu

SEQ ID NO: 126729 - RNA, 14 nt, Human herpesvirus 2
cgcucaguucauca

SEQ ID NO: 126730 - RNA, 15 nt, Human herpesvirus 2
cgcuaucacauacgc

SEQ ID NO: 126731 - RNA, 16 nt, Human herpesvirus 2
cgcuaucacauacgca

SEQ ID NO: 126732 - RNA, 11 nt, Human herpesvirus 2
cgcgggcgggg

SEQ ID NO: 126733 - RNA, 20 nt, Human herpesvirus 2
cgggagccgcggccccgccg

SEQ ID NO: 126734 - RNA, 16 nt, Human herpesvirus 2
cgggaaggacgaaaua

SEQ ID NO: 126735 - RNA, 22 nt, Human herpesvirus 2
cgggacggaaaaaaagggcaaa

SEQ ID NO: 126736 - RNA, 23 nt, Human herpesvirus 2
cggcguuucugaccggcgccgau

SEQ ID NO: 126737 - RNA, 14 nt, Human herpesvirus 2
cggcguuuggccaa

SEQ ID NO: 126738 - RNA, 15 nt, Human herpesvirus 2
cggcucccccgcggc

SEQ ID NO: 126739 - RNA, 15 nt, Human herpesvirus 2
cggcguuggcgcgcu

SEQ ID NO: 126740 - RNA, 19 nt, Human herpesvirus 2
cggcgauuaacaacaccaa

SEQ ID NO: 126741 - RNA, 23 nt, Human herpesvirus 2
cggcccccggagucccccggcuc

SEQ ID NO: 126742 - RNA, 18 nt, Human herpesvirus 2
cggcccgcguccccggcc

SEQ ID NO: 126743 - RNA, 14 nt, Human herpesvirus 2
cggccagcacgacc

SEQ ID NO: 126744 - RNA, 15 nt, Human herpesvirus 2
cggccauccugccca

SEQ ID NO: 126745 - RNA, 21 nt, Human herpesvirus 2
cggccaacgaggaccacgugc

SEQ ID NO: 126746 - RNA, 15 nt, Human herpesvirus 2
cgcuggcgggagcca

SEQ ID NO: 126747 - RNA, 17 nt, Human herpesvirus 2
ccguucucgcauuugcc

SEQ ID NO: 126748 - RNA, 16 nt, Human herpesvirus 2
ccguuggggaacaaca

SEQ ID NO: 126749 - RNA, 18 nt, Human herpesvirus 2
cgacugggccgaugugcc

SEQ ID NO: 126750 - RNA, 13 nt, Human herpesvirus 2
cgaggccuguugg

SEQ ID NO: 126751 - RNA, 21 nt, Human herpesvirus 2
cgagcucggcuucuaccgcuu

SEQ ID NO: 126752 - RNA, 20 nt, Human herpesvirus 2
cgagccgcugugccaggugg

SEQ ID NO: 126753 - RNA, 23 nt, Human herpesvirus 2
cgauguauggcgccuucuucgcc

SEQ ID NO: 126754 - RNA, 23 nt, Human herpesvirus 2
cgauggccgccccgcaguuucac

SEQ ID NO: 126755 - RNA, 23 nt, Human herpesvirus 2
cgaugcauguucggcgucgugag

SEQ ID NO: 126756 - RNA, 12 nt, Human herpesvirus 2
cgccaacgcggg

SEQ ID NO: 126757 - RNA, 21 nt, Human herpesvirus 2
cgccaucgcucccagguugcu

SEQ ID NO: 126758 - RNA, 21 nt, Human herpesvirus 2
cgccccccccggcggggcaug

SEQ ID NO: 126759 - RNA, 14 nt, Human herpesvirus 2
cgccgcuccgcccg

SEQ ID NO: 126760 - RNA, 15 nt, Human herpesvirus 2
cgcgagggcccggcg

SEQ ID NO: 126761 - RNA, 23 nt, Human herpesvirus 2
cgccgguugucuucuuuuccacc

SEQ ID NO: 126762 - RNA, 19 nt, Human herpesvirus 2
cgccuugugugguuuauuc

SEQ ID NO: 126763 - RNA, 15 nt, Human herpesvirus 2
cgcauccacaagcua

SEQ ID NO: 126764 - RNA, 18 nt, Human herpesvirus 2
cgcauacaccccacccua

SEQ ID NO: 126765 - RNA, 19 nt, Human herpesvirus 2
cgcacgggcguccccggug

SEQ ID NO: 126766 - RNA, 19 nt, Human herpesvirus 2
cgcacucgcuuuucccacc

SEQ ID NO: 126767 - RNA, 21 nt, Human herpesvirus 2
cgcacggcggacacaauaaca

SEQ ID NO: 126768 - RNA, 15 nt, Human herpesvirus 2
cgauuguuugguguu

SEQ ID NO: 126769 - RNA, 14 nt, Human herpesvirus 2
cugcgcacgacaga

SEQ ID NO: 126770 - RNA, 20 nt, Human herpesvirus 2
cugccugacccucucgggca

SEQ ID NO: 126771 - RNA, 14 nt, Human herpesvirus 2
cugcccgcggacca

SEQ ID NO: 126772 - RNA, 13 nt, Human herpesvirus 2
cugggaagacgca

SEQ ID NO: 126773 - RNA, 18 nt, Human herpesvirus 2
cugguucgucgcguggua

SEQ ID NO: 126774 - RNA, 14 nt, Human herpesvirus 2
cugguuggauguuu

SEQ ID NO: 126775 - RNA, 14 nt, Human herpesvirus 2
cugacccucucggg

SEQ ID NO: 126776 - RNA, 12 nt, Human herpesvirus 2
cugaccacgagc

SEQ ID NO: 126777 - RNA, 9 nt, Human herpesvirus 2
cucuucccc

SEQ ID NO: 126778 - RNA, 16 nt, Human herpesvirus 2
cugaauuucccgcaga

SEQ ID NO: 126779 - RNA, 23 nt, Human herpesvirus 2
cucgucccccgaggcccccggcc

SEQ ID NO: 126780 - RNA, 20 nt, Human herpesvirus 2
cucgggggccgucccguaga

SEQ ID NO: 126781 - RNA, 19 nt, Human herpesvirus 2
cucucaaacaaaaacacaa

SEQ ID NO: 126782 - RNA, 22 nt, Human herpesvirus 2
cucgaaggagggaaacuaggac

SEQ ID NO: 126783 - RNA, 21 nt, Human herpesvirus 2
cuccuuguuucgccccacgga

SEQ ID NO: 126784 - RNA, 18 nt, Human herpesvirus 2
cucgcccccgugccuguu

SEQ ID NO: 126785 - RNA, 16 nt, Human herpesvirus 2
cucgauggaggcgcau

SEQ ID NO: 126786 - RNA, 21 nt, Human herpesvirus 2
cuccucagcgcggccgugggc

SEQ ID NO: 126787 - RNA, 15 nt, Human herpesvirus 2
cuccugccacgcuca

SEQ ID NO: 126788 - RNA, 14 nt, Human herpesvirus 2
cuccacgcccugcu

SEQ ID NO: 126789 - RNA, 19 nt, Human herpesvirus 2
cucacgggggggcugguuu

SEQ ID NO: 126790 - RNA, 22 nt, Human herpesvirus 2
cuaucaugucuuuccaccacca

SEQ ID NO: 126791 - RNA, 13 nt, Human herpesvirus 2
cuaaaaacacauc

SEQ ID NO: 126792 - RNA, 12 nt, Human herpesvirus 2
uuucugucuuua

SEQ ID NO: 126793 - RNA, 24 nt, Human herpesvirus 2
uuucucugcguugcgucugaccac

SEQ ID NO: 126794 - RNA, 20 nt, Human herpesvirus 2
uuucuuguagggcguuuauu

SEQ ID NO: 126795 - RNA, 17 nt, Human herpesvirus 2
uuucuuuuugccuccca

SEQ ID NO: 126796 - RNA, 14 nt, Human herpesvirus 2
uuugauacucuguu

SEQ ID NO: 126797 - RNA, 23 nt, Human herpesvirus 2
uuucccucccucgccgccuuccg

SEQ ID NO: 126798 - RNA, 15 nt, Human herpesvirus 2
uuuauuucgguuaga

SEQ ID NO: 126799 - RNA, 19 nt, Human herpesvirus 2
uugugcuuuuacccucacc

SEQ ID NO: 126800 - RNA, 23 nt, Human herpesvirus 2
uuguguauaaauaaaaagacacc

SEQ ID NO: 126801 - RNA, 12 nt, Human herpesvirus 2
uugugugguuua

SEQ ID NO: 126802 - RNA, 20 nt, Human herpesvirus 2
uuguuuuuuuugcguuuccu

SEQ ID NO: 126803 - RNA, 15 nt, Human herpesvirus 2
uuguuuuucuaguca

SEQ ID NO: 126804 - RNA, 15 nt, Human herpesvirus 2
uuggggaaaucuauu

SEQ ID NO: 126805 - RNA, 17 nt, Human herpesvirus 2
uuggggggggguggaaa

SEQ ID NO: 126806 - RNA, 17 nt, Human herpesvirus 2
uugggugggacuuggac

SEQ ID NO: 126807 - RNA, 17 nt, Human herpesvirus 2
uuccccgagagcccagg

SEQ ID NO: 126808 - RNA, 17 nt, Human herpesvirus 2
uucccgguaugguaauu

SEQ ID NO: 126809 - RNA, 21 nt, Human herpesvirus 2
uuccucccccccccccaaaaa

SEQ ID NO: 126810 - RNA, 18 nt, Human herpesvirus 2
uuccuccccucgccuguu

SEQ ID NO: 126811 - RNA, 15 nt, Human herpesvirus 2
uuccgcauacacccc

SEQ ID NO: 126812 - RNA, 17 nt, Human herpesvirus 2
uucgccgacgccuuccc

SEQ ID NO: 126813 - RNA, 20 nt, Human herpesvirus 2
uugacuccugggucagcuca

SEQ ID NO: 126814 - RNA, 21 nt, Human herpesvirus 2
uugcaccccagaaccaugauc

SEQ ID NO: 126815 - RNA, 14 nt, Human herpesvirus 2
uucucggaauuuca

SEQ ID NO: 126816 - RNA, 20 nt, Human herpesvirus 2
uuaaauaaacacaaaccaca

SEQ ID NO: 126817 - RNA, 16 nt, Human herpesvirus 2
uuaacaacaccaaaca

SEQ ID NO: 126818 - RNA, 19 nt, Human herpesvirus 2
uuacaccccccugacucag

SEQ ID NO: 126819 - RNA, 14 nt, Human herpesvirus 2
uuagaaacuuuuaa

SEQ ID NO: 126820 - RNA, 23 nt, Human herpesvirus 2
uuagggaagucucuuggggaaau

SEQ ID NO: 126821 - RNA, 17 nt, Human herpesvirus 2
ugugcccgcccccgacg

SEQ ID NO: 126822 - RNA, 20 nt, Human herpesvirus 2
ugugccggggauaaaagcca

SEQ ID NO: 126823 - RNA, 19 nt, Human herpesvirus 2
uguugggucuccgguguga

SEQ ID NO: 126824 - RNA, 17 nt, Human herpesvirus 2
uguuuaaaacccggggu

SEQ ID NO: 126825 - RNA, 22 nt, Human herpesvirus 2
uguuugggaaaucuauugaacu

SEQ ID NO: 126826 - RNA, 16 nt, Human herpesvirus 2
ugggcggcccccggcc

SEQ ID NO: 126827 - RNA, 21 nt, Human herpesvirus 2
ugggccgaugugcccugcaac

SEQ ID NO: 126828 - RNA, 13 nt, Human herpesvirus 2
ugggcguccugcg

SEQ ID NO: 126829 - RNA, 13 nt, Human herpesvirus 2
uggguuacugcac

SEQ ID NO: 126830 - RNA, 12 nt, Human herpesvirus 2
uggggaaaggga

SEQ ID NO: 126831 - RNA, 13 nt, Human herpesvirus 2
uggggaaaucuau

SEQ ID NO: 126832 - RNA, 14 nt, Human herpesvirus 2
ugggguacugcacu

SEQ ID NO: 126833 - RNA, 21 nt, Human herpesvirus 2
uggggggaaaauaaacaccac

SEQ ID NO: 126834 - RNA, 15 nt, Human herpesvirus 2
uggggcugaucugaa

SEQ ID NO: 126835 - RNA, 20 nt, Human herpesvirus 2
uggcggcagcacccagaacg

SEQ ID NO: 126836 - RNA, 17 nt, Human herpesvirus 2
ugucgcguuuguuucuu

SEQ ID NO: 126837 - RNA, 13 nt, Human herpesvirus 2
ugucguguggugu

SEQ ID NO: 126838 - RNA, 17 nt, Human herpesvirus 2
ugucgggugcccggggu

SEQ ID NO: 126839 - RNA, 15 nt, Human herpesvirus 2
uguccggggcgguga

SEQ ID NO: 126840 - RNA, 23 nt, Human herpesvirus 2
uggugggcguugccgggggccau

SEQ ID NO: 126841 - RNA, 16 nt, Human herpesvirus 2
uggugauggggguccu

SEQ ID NO: 126842 - RNA, 20 nt, Human herpesvirus 2
ugguaauuagcaacuuuuaa

SEQ ID NO: 126843 - RNA, 22 nt, Human herpesvirus 2
ugguucaauaaaaaacaccaac

SEQ ID NO: 126844 - RNA, 16 nt, Human herpesvirus 2
ucaucgaaaggguaca

SEQ ID NO: 126845 - RNA, 21 nt, Human herpesvirus 2
ucaucgaaaggguacacaaag

SEQ ID NO: 126846 - RNA, 23 nt, Human herpesvirus 2
ucaucucucgggggaugguggug

SEQ ID NO: 126847 - RNA, 15 nt, Human herpesvirus 2
uccacaagcuaugca

SEQ ID NO: 126848 - RNA, 17 nt, Human herpesvirus 2
uccggaguuagcaaaac

SEQ ID NO: 126849 - RNA, 12 nt, Human herpesvirus 2
uccgggggacug

SEQ ID NO: 126850 - RNA, 15 nt, Human herpesvirus 2
uccggguaaaaaaga

SEQ ID NO: 126851 - RNA, 17 nt, Human herpesvirus 2
uccguuggggaacaaca

SEQ ID NO: 126852 - RNA, 16 nt, Human herpesvirus 2
uccaccaccagcacca

SEQ ID NO: 126853 - RNA, 17 nt, Human herpesvirus 2
ucccaauaaagugcagu

SEQ ID NO: 126854 - RNA, 19 nt, Human herpesvirus 2
ucccgcaagagccugccgu

SEQ ID NO: 126855 - RNA, 14 nt, Human herpesvirus 2
uccccggcgccaug

SEQ ID NO: 126856 - RNA, 13 nt, Human herpesvirus 2
ucccccgggacuu

SEQ ID NO: 126857 - RNA, 16 nt, Human herpesvirus 2
uccccgaaagccacca

SEQ ID NO: 126858 - RNA, 22 nt, Human herpesvirus 2
uccccaccccgcccgcuugcau

SEQ ID NO: 126859 - RNA, 19 nt, Human herpesvirus 2
ucgaaaggguacacaaagc

SEQ ID NO: 126860 - RNA, 16 nt, Human herpesvirus 2
uccugccacccgaaca

SEQ ID NO: 126861 - RNA, 19 nt, Human herpesvirus 2
ucgucgcuaucacauacgc

SEQ ID NO: 126862 - RNA, 22 nt, Human herpesvirus 2
ucguggacaucgaguccgaaga

SEQ ID NO: 126863 - RNA, 18 nt, Human herpesvirus 2
ucgggcaugggcuacuac

SEQ ID NO: 126864 - RNA, 16 nt, Human herpesvirus 2
ucggcgauuaacaaca

SEQ ID NO: 126865 - RNA, 18 nt, Human herpesvirus 2
ucgggucuacuacgaguc

SEQ ID NO: 126866 - RNA, 20 nt, Human herpesvirus 2
ucggugccucacgguccuca

SEQ ID NO: 126867 - RNA, 17 nt, Human herpesvirus 2
ucgugggggacgaggag

SEQ ID NO: 126868 - RNA, 15 nt, Human herpesvirus 2
ucuaacccaguaaca

SEQ ID NO: 126869 - RNA, 19 nt, Human herpesvirus 2
ucucaaacaaaaacacaag

SEQ ID NO: 126870 - RNA, 23 nt, Human herpesvirus 2
ucugcauuuguuuuucuagucac

SEQ ID NO: 126871 - RNA, 14 nt, Human herpesvirus 2
ucuccggugugauu

SEQ ID NO: 126872 - RNA, 21 nt, Human herpesvirus 2
ugauugauuuuauugaccguu

SEQ ID NO: 126873 - RNA, 19 nt, Human herpesvirus 2
ugauagagggaacaaagaa

SEQ ID NO: 126874 - RNA, 16 nt, Human herpesvirus 2
ucugguuuuucugggg

SEQ ID NO: 126875 - RNA, 22 nt, Human herpesvirus 2
ugcaaaugggauucauggacau

SEQ ID NO: 126876 - RNA, 15 nt, Human herpesvirus 2
ugcaaccccuaccug

SEQ ID NO: 126877 - RNA, 16 nt, Human herpesvirus 2
ugcaguaacccaguuc

SEQ ID NO: 126878 - RNA, 17 nt, Human herpesvirus 2
ugcaguaacccaguucc

SEQ ID NO: 126879 - RNA, 21 nt, Human herpesvirus 2
ugcaguaacccaguuccucag

SEQ ID NO: 126880 - RNA, 17 nt, Human herpesvirus 2
ugcaguaccccaguucc

SEQ ID NO: 126881 - RNA, 20 nt, Human herpesvirus 2
ugcaguaccccaguuccucc

SEQ ID NO: 126882 - RNA, 21 nt, Human herpesvirus 2
ugcgaucuccccgcuuacguc

SEQ ID NO: 126883 - RNA, 13 nt, Human herpesvirus 2
ugcgucguccagg

SEQ ID NO: 126884 - RNA, 14 nt, Human herpesvirus 2
ugcguaugugauag

SEQ ID NO: 126885 - RNA, 19 nt, Human herpesvirus 2
ugcccccccucguucugcu

SEQ ID NO: 126886 - RNA, 23 nt, Human herpesvirus 2
ugcccgaccgggcggugcccauc

SEQ ID NO: 126887 - RNA, 15 nt, Human herpesvirus 2
ugcccgaccuguuaa

SEQ ID NO: 126888 - RNA, 18 nt, Human herpesvirus 2
ugccggggauaaaagcca

SEQ ID NO: 126889 - RNA, 19 nt, Human herpesvirus 2
ugccggggauaaaagccaa

SEQ ID NO: 126890 - RNA, 20 nt, Human herpesvirus 2
ugcccucguaggcccggggg

SEQ ID NO: 126891 - RNA, 21 nt, Human herpesvirus 2
ugccuuccaguuccacggcca

SEQ ID NO: 126892 - RNA, 22 nt, Human herpesvirus 2
acuuuaagcgcugcggggacca

SEQ ID NO: 126893 - RNA, 14 nt, Human herpesvirus 2
acuggguuacugca

SEQ ID NO: 126894 - RNA, 15 nt, Human herpesvirus 2
acuggguuacugcac

SEQ ID NO: 126895 - RNA, 18 nt, Human herpesvirus 2
acucucccggcuccuccg

SEQ ID NO: 126896 - RNA, 20 nt, Human herpesvirus 2
acggauucccgcacgugcgu

SEQ ID NO: 126897 - RNA, 23 nt, Human herpesvirus 2
acggaggaacugggguacugcac

SEQ ID NO: 126898 - RNA, 17 nt, Human herpesvirus 2
acggucggcgaacacaa

SEQ ID NO: 126899 - RNA, 11 nt, Human herpesvirus 2
acguccagggg

SEQ ID NO: 126900 - RNA, 16 nt, Human herpesvirus 2
agaaacaaacgcgaca

SEQ ID NO: 126901 - RNA, 14 nt, Human herpesvirus 2
agaaagacucaaga

SEQ ID NO: 126902 - RNA, 14 nt, Human herpesvirus 2
agacguccuugaug

SEQ ID NO: 126903 - RNA, 21 nt, Human herpesvirus 2
agacauggggaacccccagac

SEQ ID NO: 126904 - RNA, 14 nt, Human herpesvirus 2
accggguuccuaua

SEQ ID NO: 126905 - RNA, 20 nt, Human herpesvirus 2
acccuguggcgggcgcugua

SEQ ID NO: 126906 - RNA, 11 nt, Human herpesvirus 2
accccaaccac

SEQ ID NO: 126907 - RNA, 20 nt, Human herpesvirus 2
acccuauacgcgguauggcu

SEQ ID NO: 126908 - RNA, 14 nt, Human herpesvirus 2
acccacccucggug

SEQ ID NO: 126909 - RNA, 19 nt, Human herpesvirus 2
acccaccccccccccaacu

SEQ ID NO: 126910 - RNA, 24 nt, Human herpesvirus 2
accagggcauaugcgaaacagagc

SEQ ID NO: 126911 - RNA, 17 nt, Human herpesvirus 2
acggauaccgacaguga

SEQ ID NO: 126912 - RNA, 20 nt, Human herpesvirus 2
acgccaggccccccgggagc

SEQ ID NO: 126913 - RNA, 23 nt, Human herpesvirus 2
accucgaccaguaggucuguugu

SEQ ID NO: 126914 - RNA, 22 nt, Human herpesvirus 2
acauguuacaccccccugacuc

SEQ ID NO: 126915 - RNA, 16 nt, Human herpesvirus 2
accacggggagggggu

SEQ ID NO: 126916 - RNA, 12 nt, Human herpesvirus 2
accagacacuca

SEQ ID NO: 126917 - RNA, 13 nt, Human herpesvirus 2
accaaaagggaaa

SEQ ID NO: 126918 - RNA, 15 nt, Human herpesvirus 2
accacccaaccaacg

SEQ ID NO: 126919 - RNA, 17 nt, Human herpesvirus 2
accaaccccgucucccu

SEQ ID NO: 126920 - RNA, 17 nt, Human herpesvirus 2
acaggcgcuucaucguc

SEQ ID NO: 126921 - RNA, 13 nt, Human herpesvirus 2
auacucuguuuau

SEQ ID NO: 126922 - RNA, 13 nt, Human herpesvirus 2
auaacaaacagac

SEQ ID NO: 126923 - RNA, 15 nt, Human herpesvirus 2
aucaugucuuuccac

SEQ ID NO: 126924 - RNA, 23 nt, Human herpesvirus 2
aucaugucuuuccaccaccagca

SEQ ID NO: 126925 - RNA, 13 nt, Human herpesvirus 2
auccaucugggag

SEQ ID NO: 126926 - RNA, 18 nt, Human herpesvirus 2
auccaucauccaacaaaa

SEQ ID NO: 126927 - RNA, 11 nt, Human herpesvirus 2
auccacaagcu

SEQ ID NO: 126928 - RNA, 16 nt, Human herpesvirus 2
aucgccgcgccaacgc

SEQ ID NO: 126929 - RNA, 14 nt, Human herpesvirus 2
aucgccggggaccg

SEQ ID NO: 126930 - RNA, 14 nt, Human herpesvirus 2
aucgguaugccguu

SEQ ID NO: 126931 - RNA, 20 nt, Human herpesvirus 2
aucggcgauuaacaacacca

SEQ ID NO: 126932 - RNA, 18 nt, Human herpesvirus 2
aucgucccccgucugcca

SEQ ID NO: 126933 - RNA, 17 nt, Human herpesvirus 2
aucgugguuauuucccc

SEQ ID NO: 126934 - RNA, 15 nt, Human herpesvirus 2
auccucaaacaggcc

SEQ ID NO: 126935 - RNA, 21 nt, Human herpesvirus 2
auccuccuuagauugacucag

SEQ ID NO: 126936 - RNA, 21 nt, Human herpesvirus 2
auccucgggugugcugcuguu

SEQ ID NO: 126937 - RNA, 15 nt, Human herpesvirus 2
aucuauugaccucuc

SEQ ID NO: 126938 - RNA, 23 nt, Human herpesvirus 2
agugcaggugggccgacgugccg

SEQ ID NO: 126939 - RNA, 13 nt, Human herpesvirus 2
auaaaaagacacc

SEQ ID NO: 126940 - RNA, 22 nt, Human herpesvirus 2
auaaaaagacaccgauguucaa

SEQ ID NO: 126941 - RNA, 13 nt, Human herpesvirus 2
auaaaaaacacca

SEQ ID NO: 126942 - RNA, 12 nt, Human herpesvirus 2
agggaagucucu

SEQ ID NO: 126943 - RNA, 16 nt, Human herpesvirus 2
aggggggcagugcagu

SEQ ID NO: 126944 - RNA, 16 nt, Human herpesvirus 2
aggccaagaugauaac

SEQ ID NO: 126945 - RNA, 23 nt, Human herpesvirus 2
aggcuuagucccggguccggggc

SEQ ID NO: 126946 - RNA, 16 nt, Human herpesvirus 2
aggccacucgucgcca

SEQ ID NO: 126947 - RNA, 13 nt, Human herpesvirus 2
aggcguggugaua

SEQ ID NO: 126948 - RNA, 20 nt, Human herpesvirus 2
aggcucauuguucccgccac

SEQ ID NO: 126949 - RNA, 23 nt, Human herpesvirus 2
aggacgucuccaagcucuccgag

SEQ ID NO: 126950 - RNA, 21 nt, Human herpesvirus 2
agcucgcccccgugccuguug

SEQ ID NO: 126951 - RNA, 18 nt, Human herpesvirus 2
agcgcguugguccggggg

SEQ ID NO: 126952 - RNA, 18 nt, Human herpesvirus 2
agcccacaacccauccca

SEQ ID NO: 126953 - RNA, 23 nt, Human herpesvirus 2
agagggggggguggagugggggg

SEQ ID NO: 126954 - RNA, 13 nt, Human herpesvirus 2
agagggaacaaag

SEQ ID NO: 126955 - RNA, 21 nt, Human herpesvirus 2
agaggucaauagauuucccca

SEQ ID NO: 126956 - RNA, 22 nt, Human herpesvirus 2
agaggucaauagauuuccccaa

SEQ ID NO: 126957 - RNA, 23 nt, Human herpesvirus 2
cacggcggacacaauaacaaaca

SEQ ID NO: 126958 - RNA, 13 nt, Human herpesvirus 2
cacggaggaacug

SEQ ID NO: 126959 - RNA, 20 nt, Human herpesvirus 2
cacgccaucgacccggacug

SEQ ID NO: 126960 - RNA, 22 nt, Human herpesvirus 2
cacguccguauguuaauugcaa

SEQ ID NO: 126961 - RNA, 23 nt, Human herpesvirus 2
cacguccguauguuaauugcaau

SEQ ID NO: 126962 - RNA, 23 nt, Human herpesvirus 2
caccgggaccgacuuguuuuaca

SEQ ID NO: 126963 - RNA, 14 nt, Human herpesvirus 2
caccgcaccaccau

SEQ ID NO: 126964 - RNA, 18 nt, Human herpesvirus 2
caccgagccgcugugcca

SEQ ID NO: 126965 - RNA, 14 nt, Human herpesvirus 2
cacucgucgccaac

SEQ ID NO: 126966 - RNA, 21 nt, Human herpesvirus 2
cacuucgugugcuuguguuuu

SEQ ID NO: 126967 - RNA, 9 nt, Human herpesvirus 2
cacuuuccu

SEQ ID NO: 126968 - RNA, 12 nt, Human herpesvirus 2
caacacccggcg

SEQ ID NO: 126969 - RNA, 16 nt, Human herpesvirus 2
caauaaaaucaaucaa

SEQ ID NO: 126970 - RNA, 12 nt, Human herpesvirus 2
caauaaagccag

SEQ ID NO: 126971 - RNA, 15 nt, Human herpesvirus 2
cacccacgacauccg

SEQ ID NO: 126972 - RNA, 23 nt, Human herpesvirus 2
cacccgggccgggugacauucac

SEQ ID NO: 126973 - RNA, 14 nt, Human herpesvirus 2
cacacagaaacaca

SEQ ID NO: 126974 - RNA, 19 nt, Human herpesvirus 2
caauuaauaaagacuguug

SEQ ID NO: 126975 - RNA, 17 nt, Human herpesvirus 2
augucuuuccaccacca

SEQ ID NO: 126976 - RNA, 19 nt, Human herpesvirus 2
augucuuuccaccaccagc

SEQ ID NO: 126977 - RNA, 23 nt, Human herpesvirus 2
auguuacaccccccugacucagg

SEQ ID NO: 126978 - RNA, 22 nt, Human herpesvirus 2
augugugguauuuuuuguugua

SEQ ID NO: 126979 - RNA, 17 nt, Human herpesvirus 2
auucgcgaacacaagcu

SEQ ID NO: 126980 - RNA, 18 nt, Human herpesvirus 2
auucgcgaacacaagcuc

SEQ ID NO: 126981 - RNA, 17 nt, Human herpesvirus 2
auucgaccacauaugca

SEQ ID NO: 126982 - RNA, 15 nt, Human herpesvirus 2
auuagcaacuuuuaa

SEQ ID NO: 126983 - RNA, 17 nt, Human herpesvirus 2
caaaaacacaagcacac

SEQ ID NO: 126984 - RNA, 21 nt, Human herpesvirus 2
auuugucgccggcgacaccca

SEQ ID NO: 126985 - RNA, 16 nt, Human herpesvirus 2
auuguuugguguuguu

SEQ ID NO: 126986 - RNA, 18 nt, Human herpesvirus 2
caacaacgcucaguucau

SEQ ID NO: 126987 - RNA, 22 nt, Human herpesvirus 2
caucuacgacccccgaacagcc

SEQ ID NO: 126988 - RNA, 18 nt, Human herpesvirus 2
caucgucuuuggugccag

SEQ ID NO: 126989 - RNA, 19 nt, Human herpesvirus 2
cagccaccucgacccgucc

SEQ ID NO: 126990 - RNA, 19 nt, Human herpesvirus 2
cagcacggccgggugacuc

SEQ ID NO: 126991 - RNA, 22 nt, Human herpesvirus 2
cagcacggcguugcugcgcuga

SEQ ID NO: 126992 - RNA, 22 nt, Human herpesvirus 2
caguguuugggaaaucuauuga

SEQ ID NO: 126993 - RNA, 14 nt, Human herpesvirus 2
ccagacgaagucac

SEQ ID NO: 126994 - RNA, 21 nt, Human herpesvirus 2
ccaggaggggggcagugcagu

SEQ ID NO: 126995 - RNA, 22 nt, Human herpesvirus 2
ccaggaggggggcagugcagua

SEQ ID NO: 126996 - RNA, 23 nt, Human herpesvirus 2
ccaggaggggggcagugcaguac

SEQ ID NO: 126997 - RNA, 14 nt, Human herpesvirus 2
ccacgucucgggaa

SEQ ID NO: 126998 - RNA, 13 nt, Human herpesvirus 2
ccacccaaccaac

SEQ ID NO: 126999 - RNA, 14 nt, Human herpesvirus 2
ccaaacacugagga

SEQ ID NO: 127000 - RNA, 15 nt, Human herpesvirus 2
cauuaaccaaccaac

SEQ ID NO: 127001 - RNA, 20 nt, Human herpesvirus 2
ccuguggcgggcgcuguaug

SEQ ID NO: 127002 - RNA, 20 nt, Human herpesvirus 2
ccuguuggagccggagcucg

SEQ ID NO: 127003 - RNA, 16 nt, Human herpesvirus 2
ccugggucgggagcag

SEQ ID NO: 127004 - RNA, 21 nt, Human herpesvirus 2
ccugggccgcucguuccucac

SEQ ID NO: 127005 - RNA, 16 nt, Human herpesvirus 2
ccuggcucgccgugcg

SEQ ID NO: 127006 - RNA, 20 nt, Human herpesvirus 2
ccuucccccguuacugaugu

SEQ ID NO: 127007 - RNA, 17 nt, Human herpesvirus 2
ccuuaacuaaaccacag

SEQ ID NO: 127008 - RNA, 15 nt, Human herpesvirus 2
ccuuagauugacuca

SEQ ID NO: 127009 - RNA, 23 nt, Human herpesvirus 2
ccuucaccaacgacgaugcaugu

SEQ ID NO: 127010 - RNA, 14 nt, Human herpesvirus 2
cgaacguguuguug

SEQ ID NO: 127011 - RNA, 17 nt, Human herpesvirus 2
cgaaaggguacacaaag

SEQ ID NO: 127012 - RNA, 18 nt, Human herpesvirus 2
cgaaaggguacacaaagc

SEQ ID NO: 127013 - RNA, 17 nt, Human herpesvirus 2
ccuuggacgggugggcc

SEQ ID NO: 127014 - RNA, 13 nt, Human herpesvirus 2
ccuuuaagacaga

SEQ ID NO: 127015 - RNA, 15 nt, Human herpesvirus 2
ccugcgaauccccca

SEQ ID NO: 127016 - RNA, 18 nt, Human herpesvirus 2
ccugccuccggagaaccc

SEQ ID NO: 127017 - RNA, 19 nt, Human herpesvirus 2
ccucuuugggccgugggua

SEQ ID NO: 127018 - RNA, 20 nt, Human herpesvirus 2
ccucguggggcuggacguuu

SEQ ID NO: 127019 - RNA, 19 nt, Human herpesvirus 2
ccucccccccccccaaaaa

SEQ ID NO: 127020 - RNA, 22 nt, Human herpesvirus 2
ccucucccacacggucggugcc

SEQ ID NO: 127021 - RNA, 23 nt, Human herpesvirus 2
ccucucugaggccucauccggcc

SEQ ID NO: 127022 - RNA, 12 nt, Human herpesvirus 2
ccgcgugcagcg

SEQ ID NO: 127023 - RNA, 24 nt, Human herpesvirus 2
ccgcucgcgguaauuagcagcuuu

SEQ ID NO: 127024 - RNA, 15 nt, Human herpesvirus 2
ccgacgcucucugcc

SEQ ID NO: 127025 - RNA, 13 nt, Human herpesvirus 2
ccgaccgggcggu

SEQ ID NO: 127026 - RNA, 20 nt, Human herpesvirus 2
ccgaccuaauuuuuguguca

SEQ ID NO: 127027 - RNA, 13 nt, Human herpesvirus 2
ccgaaagccacca

SEQ ID NO: 127028 - RNA, 15 nt, Human herpesvirus 2
cccuuuucugcauuu

SEQ ID NO: 127029 - RNA, 13 nt, Human herpesvirus 2
ccuagaucuggcg

SEQ ID NO: 127030 - RNA, 22 nt, Human herpesvirus 2
ccgguuuauugaccaaauucag

SEQ ID NO: 127031 - RNA, 17 nt, Human herpesvirus 2
ccggucucccucuuucc

SEQ ID NO: 127032 - RNA, 15 nt, Human herpesvirus 2
ccggucugugggugg

SEQ ID NO: 127033 - RNA, 22 nt, Human herpesvirus 2
ccgggggggggcaagugcagua

SEQ ID NO: 127034 - RNA, 23 nt, Human herpesvirus 2
ccgggggggggcaagugcaguaa

SEQ ID NO: 127035 - RNA, 15 nt, Human herpesvirus 2
ccggggucggugugg

SEQ ID NO: 127036 - RNA, 14 nt, Human herpesvirus 2
ccgggguucugggg

SEQ ID NO: 127037 - RNA, 18 nt, Human herpesvirus 2
ccguauguuaauugcaau

SEQ ID NO: 127038 - RNA, 13 nt, Human herpesvirus 2
ccguccgaccauc

SEQ ID NO: 127039 - RNA, 12 nt, Human herpesvirus 2
ccccugacucag

SEQ ID NO: 127040 - RNA, 22 nt, Human herpesvirus 2
cccucucgaucccgaagccauc

SEQ ID NO: 127041 - RNA, 19 nt, Human herpesvirus 2
cccucucuccgcaauaaac

SEQ ID NO: 127042 - RNA, 17 nt, Human herpesvirus 2
cccucgagcucuucggc

SEQ ID NO: 127043 - RNA, 13 nt, Human herpesvirus 2
cccuccacggugu

SEQ ID NO: 127044 - RNA, 21 nt, Human herpesvirus 2
cccgcgggcgcgcggggacuc

SEQ ID NO: 127045 - RNA, 16 nt, Human herpesvirus 2
ccaggcgcugcugcgc

SEQ ID NO: 127046 - RNA, 17 nt, Human herpesvirus 2
ccagggcaccacguguc

SEQ ID NO: 127047 - RNA, 18 nt, Human herpesvirus 2
cccaggaggggggcagug

SEQ ID NO: 127048 - RNA, 23 nt, Human herpesvirus 2
cccaggaggggggcagugcagua

SEQ ID NO: 127049 - RNA, 14 nt, Human herpesvirus 2
cccagucgcccaua

SEQ ID NO: 127050 - RNA, 15 nt, Human herpesvirus 2
cccauccgacggcau

SEQ ID NO: 127051 - RNA, 19 nt, Human herpesvirus 2
ccccaaccacccaaccaac

SEQ ID NO: 127052 - RNA, 17 nt, Human herpesvirus 2
gccaguggagccaaacc

SEQ ID NO: 127053 - RNA, 21 nt, Human herpesvirus 2
gccauccccgcgcaugguaau

SEQ ID NO: 127054 - RNA, 18 nt, Human herpesvirus 2
gccagcgggggcccgggg

SEQ ID NO: 127055 - RNA, 18 nt, Human herpesvirus 2
gccagcagaugaaucaca

SEQ ID NO: 127056 - RNA, 19 nt, Human herpesvirus 2
gccaccaauacaccagagc

SEQ ID NO: 127057 - RNA, 20 nt, Human herpesvirus 2
gccacucuccugcgagcccu

SEQ ID NO: 127058 - RNA, 16 nt, Human herpesvirus 2
gccacgucgggguccc

SEQ ID NO: 127059 - RNA, 14 nt, Human herpesvirus 2
gcauuuguuuuucu

SEQ ID NO: 127060 - RNA, 15 nt, Human herpesvirus 2
gccaacgacuuccuc

SEQ ID NO: 127061 - RNA, 17 nt, Human herpesvirus 2
gccaacucgcggcaccg

SEQ ID NO: 127062 - RNA, 23 nt, Human herpesvirus 2
gcaugguaauuagcaacuuuuaa

SEQ ID NO: 127063 - RNA, 18 nt, Human herpesvirus 2
gcauccgaucgaugagcc

SEQ ID NO: 127064 - RNA, 13 nt, Human herpesvirus 2
gcauccacaagcu

SEQ ID NO: 127065 - RNA, 24 nt, Human herpesvirus 2
gcaucggaccccccaucgcgucac

SEQ ID NO: 127066 - RNA, 17 nt, Human herpesvirus 2
gcaugggcuacuaccug

SEQ ID NO: 127067 - RNA, 11 nt, Human herpesvirus 2
gcagugcagua

SEQ ID NO: 127068 - RNA, 17 nt, Human herpesvirus 2
gcagugcaguaccccag

SEQ ID NO: 127069 - RNA, 18 nt, Human herpesvirus 2
gcaggaucgugugcacga

SEQ ID NO: 127070 - RNA, 21 nt, Human herpesvirus 2
gcaggaucucgcgcaggugau

SEQ ID NO: 127071 - RNA, 20 nt, Human herpesvirus 2
gcaguaacccaguuccucag

SEQ ID NO: 127072 - RNA, 13 nt, Human herpesvirus 2
gcacccccgccua

SEQ ID NO: 127073 - RNA, 15 nt, Human herpesvirus 2
gcacagugggugcuc

SEQ ID NO: 127074 - RNA, 19 nt, Human herpesvirus 2
gcacagguggugcacgugu

SEQ ID NO: 127075 - RNA, 15 nt, Human herpesvirus 2
gcacaggcccggggc

SEQ ID NO: 127076 - RNA, 22 nt, Human herpesvirus 2
gaugccggggccguggggcccc

SEQ ID NO: 127077 - RNA, 19 nt, Human herpesvirus 2
gaucgcagcguccggcugg

SEQ ID NO: 127078 - RNA, 22 nt, Human herpesvirus 2
gaggggagcugggcuuguguau

SEQ ID NO: 127079 - RNA, 17 nt, Human herpesvirus 2
gaggggggcagugcagu

SEQ ID NO: 127080 - RNA, 23 nt, Human herpesvirus 2
gaggggggggugaggaagaaaga

SEQ ID NO: 127081 - RNA, 15 nt, Human herpesvirus 2
gaggggggugcugug

SEQ ID NO: 127082 - RNA, 14 nt, Human herpesvirus 2
gaucccuuugugau

SEQ ID NO: 127083 - RNA, 15 nt, Human herpesvirus 2
cuuggggaaaucuau

SEQ ID NO: 127084 - RNA, 17 nt, Human herpesvirus 2
gaaaggguacacaaagc

SEQ ID NO: 127085 - RNA, 17 nt, Human herpesvirus 2
gaaaucuauugaccucu

SEQ ID NO: 127086 - RNA, 18 nt, Human herpesvirus 2
gaaaucuauugaccucuc

SEQ ID NO: 127087 - RNA, 19 nt, Human herpesvirus 2
gaacugggguacugcacug

SEQ ID NO: 127088 - RNA, 17 nt, Human herpesvirus 2
gaacuggguuacugcac

SEQ ID NO: 127089 - RNA, 19 nt, Human herpesvirus 2
gaacuggguuacugcacuu

SEQ ID NO: 127090 - RNA, 14 nt, Human herpesvirus 2
gaauuccagcagcu

SEQ ID NO: 127091 - RNA, 20 nt, Human herpesvirus 2
gacagagucuuuuaaaagac

SEQ ID NO: 127092 - RNA, 21 nt, Human herpesvirus 2
gacagguggggaacguuccau

SEQ ID NO: 127093 - RNA, 14 nt, Human herpesvirus 2
gacagccccggggu

SEQ ID NO: 127094 - RNA, 19 nt, Human herpesvirus 2
gacuccaggagcuucauca

SEQ ID NO: 127095 - RNA, 14 nt, Human herpesvirus 2
gacucaagacgugc

SEQ ID NO: 127096 - RNA, 20 nt, Human herpesvirus 2
gacucaagacgugcgcguga

SEQ ID NO: 127097 - RNA, 17 nt, Human herpesvirus 2
gagaaccaaccaaaaca

SEQ ID NO: 127098 - RNA, 20 nt, Human herpesvirus 2
gagcgccgucgggccccggg

SEQ ID NO: 127099 - RNA, 23 nt, Human herpesvirus 2
gagcuucauuuugugggggccca

SEQ ID NO: 127100 - RNA, 18 nt, Human herpesvirus 2
gacgccaggccccccggg

SEQ ID NO: 127101 - RNA, 23 nt, Human herpesvirus 2
gacgcccggcccauaaacaggcc

SEQ ID NO: 127102 - RNA, 13 nt, Human herpesvirus 2
gacgaaacaaacu

SEQ ID NO: 127103 - RNA, 15 nt, Human herpesvirus 2
gacccguacuacccu

SEQ ID NO: 127104 - RNA, 20 nt, Human herpesvirus 2
gaccucucgccgcuccguca

SEQ ID NO: 127105 - RNA, 14 nt, Human herpesvirus 2
gacaugcaaauggg

SEQ ID NO: 127106 - RNA, 13 nt, Human herpesvirus 2
gaccaaaagggaa

SEQ ID NO: 127107 - RNA, 15 nt, Human herpesvirus 2
gacccauacauuucc

SEQ ID NO: 127108 - RNA, 22 nt, Human herpesvirus 2
gaccaugaaagaaaugggguua

SEQ ID NO: 127109 - RNA, 14 nt, Human herpesvirus 2
cuacuaccugggga

SEQ ID NO: 127110 - RNA, 18 nt, Human herpesvirus 2
cuaucacauacgcacaaa

SEQ ID NO: 127111 - RNA, 23 nt, Human herpesvirus 2
cuaucacauacgcacaaacacac

SEQ ID NO: 127112 - RNA, 15 nt, Human herpesvirus 2
cgaaggcggacccag

SEQ ID NO: 127113 - RNA, 16 nt, Human herpesvirus 2
cgacaucaaccaccuu

SEQ ID NO: 127114 - RNA, 13 nt, Human herpesvirus 2
cggaagacuacca

SEQ ID NO: 127115 - RNA, 19 nt, Human herpesvirus 2
cggagagagggggggaaag

SEQ ID NO: 127116 - RNA, 14 nt, Human herpesvirus 2
cggaggaacugggg

SEQ ID NO: 127117 - RNA, 15 nt, Human herpesvirus 2
cggagucccccggcu

SEQ ID NO: 127118 - RNA, 18 nt, Human herpesvirus 2
cgggccccgugggugggu

SEQ ID NO: 127119 - RNA, 15 nt, Human herpesvirus 2
cgggcugcuggugau

SEQ ID NO: 127120 - RNA, 13 nt, Human herpesvirus 2
cgggcgggcgggg

SEQ ID NO: 127121 - RNA, 20 nt, Human herpesvirus 2
cgggcgggggucgggcgggc

SEQ ID NO: 127122 - RNA, 16 nt, Human herpesvirus 2
cgggcguccccgagcg

SEQ ID NO: 127123 - RNA, 12 nt, Human herpesvirus 2
cggggaccagcc

SEQ ID NO: 127124 - RNA, 16 nt, Human herpesvirus 2
cggggauaaaagccaa

SEQ ID NO: 127125 - RNA, 20 nt, Human herpesvirus 2
cggcaagaccugccccggcg

SEQ ID NO: 127126 - RNA, 19 nt, Human herpesvirus 2
cgucccccacggucaggac

SEQ ID NO: 127127 - RNA, 14 nt, Human herpesvirus 2
cguacaacacauca

SEQ ID NO: 127128 - RNA, 21 nt, Human herpesvirus 2
cguccgucucaauaaagccag

SEQ ID NO: 127129 - RNA, 13 nt, Human herpesvirus 2
cgucuggugugac

SEQ ID NO: 127130 - RNA, 19 nt, Human herpesvirus 2
cgucuccacaaaaauggga

SEQ ID NO: 127131 - RNA, 21 nt, Human herpesvirus 2
cgucucccgggggcgcuuggc

SEQ ID NO: 127132 - RNA, 14 nt, Human herpesvirus 2
cggggggcacgggc

SEQ ID NO: 127133 - RNA, 14 nt, Human herpesvirus 2
cggggccccgggcg

SEQ ID NO: 127134 - RNA, 19 nt, Human herpesvirus 2
cggggcgccccccccgacg

SEQ ID NO: 127135 - RNA, 19 nt, Human herpesvirus 2
cgguuggacgaucccgggc

SEQ ID NO: 127136 - RNA, 16 nt, Human herpesvirus 2
cuaacgggaaaaccaa

SEQ ID NO: 127137 - RNA, 17 nt, Human herpesvirus 2
cgugggccuguggggcc

SEQ ID NO: 127138 - RNA, 14 nt, Human herpesvirus 2
cguguacaaacacg

SEQ ID NO: 127139 - RNA, 19 nt, Human herpesvirus 2
cgugugacuagaaaaacaa

SEQ ID NO: 127140 - RNA, 15 nt, Human herpesvirus 2
cuggggaaagggaag

SEQ ID NO: 127141 - RNA, 14 nt, Human herpesvirus 2
cugggguacugcac

SEQ ID NO: 127142 - RNA, 21 nt, Human herpesvirus 2
cuggagguggucggcggccaa

SEQ ID NO: 127143 - RNA, 15 nt, Human herpesvirus 2
cuggagcucugccug

SEQ ID NO: 127144 - RNA, 18 nt, Human herpesvirus 2
cugcuccccaccccggag

SEQ ID NO: 127145 - RNA, 22 nt, Human herpesvirus 2
cugcgcgugcagaacaccggcg

SEQ ID NO: 127146 - RNA, 21 nt, Human herpesvirus 2
cugcggggcgaacguguuguu

SEQ ID NO: 127147 - RNA, 17 nt, Human herpesvirus 2
cugcguguuuucgggga

SEQ ID NO: 127148 - RNA, 21 nt, Human herpesvirus 2
cugauagcgaauaaagacaga

SEQ ID NO: 127149 - RNA, 16 nt, Human herpesvirus 2
cugaggggaaagcugg

SEQ ID NO: 127150 - RNA, 11 nt, Human herpesvirus 2
cugagugucug

SEQ ID NO: 127151 - RNA, 23 nt, Human herpesvirus 2
cugagugucugguuuuucugggg

SEQ ID NO: 127152 - RNA, 22 nt, Human herpesvirus 2
cugaggaacuggguuacugcac

SEQ ID NO: 127153 - RNA, 17 nt, Human herpesvirus 2
cuccgcaauaaacgccu

SEQ ID NO: 127154 - RNA, 14 nt, Human herpesvirus 2
cuccccucuacccc

SEQ ID NO: 127155 - RNA, 21 nt, Human herpesvirus 2
cuccccgaaagccaccaauac

SEQ ID NO: 127156 - RNA, 21 nt, Human herpesvirus 2
cuccgccaugcaacgccgggc

SEQ ID NO: 127157 - RNA, 20 nt, Human herpesvirus 2
cucucgggggaugguggugg

SEQ ID NO: 127158 - RNA, 15 nt, Human herpesvirus 2
cuucaugggguggga

SEQ ID NO: 127159 - RNA, 18 nt, Human herpesvirus 2
cuucauggggugggaugu

SEQ ID NO: 127160 - RNA, 15 nt, Human herpesvirus 2
cuucgcccaccgauu

SEQ ID NO: 127161 - RNA, 23 nt, Human herpesvirus 2
cuucgccgacgccuucccuguga

SEQ ID NO: 127162 - RNA, 10 nt, Human herpesvirus 2
cuucuucccc

SEQ ID NO: 127163 - RNA, 15 nt, Human herpesvirus 2
cuuagauugacucag

SEQ ID NO: 127164 - RNA, 20 nt, Human herpesvirus 2
cuguucggggcgugucuguc

SEQ ID NO: 127165 - RNA, 16 nt, Human herpesvirus 2
cuguuucgcauaugcc

SEQ ID NO: 127166 - RNA, 15 nt, Human herpesvirus 2
cuuaaauaaacacaa

SEQ ID NO: 127167 - RNA, 16 nt, Human herpesvirus 2
cuuaaauaaacacaaa

SEQ ID NO: 127168 - RNA, 14 nt, Human herpesvirus 2
cugugugcucucaa

SEQ ID NO: 127169 - RNA, 20 nt, Human herpesvirus 2
cuguucccgucgugccgguu

SEQ ID NO: 127170 - RNA, 13 nt, Human herpesvirus 2
uaacccaguuccu

SEQ ID NO: 127171 - RNA, 18 nt, Human herpesvirus 2
uaacacucggcuugcugc

SEQ ID NO: 127172 - RNA, 14 nt, Human herpesvirus 2
guggucguggugcu

SEQ ID NO: 127173 - RNA, 22 nt, Human herpesvirus 2
guggaaagacaugauagaggga

SEQ ID NO: 127174 - RNA, 14 nt, Human herpesvirus 2
uaaagagugagaac

SEQ ID NO: 127175 - RNA, 10 nt, Human herpesvirus 2
uaaaagccaa

SEQ ID NO: 127176 - RNA, 19 nt, Human herpesvirus 2
uaauccggcgauccccaag

SEQ ID NO: 127177 - RNA, 15 nt, Human herpesvirus 2
uaauaaagagugaga

SEQ ID NO: 127178 - RNA, 15 nt, Human herpesvirus 2
uacaacggcauccgu

SEQ ID NO: 127179 - RNA, 15 nt, Human herpesvirus 2
uaccgcggcuucuuc

SEQ ID NO: 127180 - RNA, 21 nt, Human herpesvirus 2
uacccggcagagagauuuccc

SEQ ID NO: 127181 - RNA, 13 nt, Human herpesvirus 2
uaccccaguuccu

SEQ ID NO: 127182 - RNA, 13 nt, Human herpesvirus 2
uacggacaccccc

SEQ ID NO: 127183 - RNA, 20 nt, Human herpesvirus 2
uauaagagcgggcccggggc

SEQ ID NO: 127184 - RNA, 13 nt, Human herpesvirus 2
uagggggggaaac

SEQ ID NO: 127185 - RNA, 11 nt, Human herpesvirus 2
uagcgaugucu

SEQ ID NO: 127186 - RNA, 20 nt, Human herpesvirus 2
uaugcaucucgggguucugg

SEQ ID NO: 127187 - RNA, 19 nt, Human herpesvirus 2
uauugaaacguacaacaca

SEQ ID NO: 127188 - RNA, 21 nt, Human herpesvirus 2
uauuagcaucgggggggguua

SEQ ID NO: 127189 - RNA, 23 nt, Human herpesvirus 2
uauuaugcaucucgggguucugg

SEQ ID NO: 127190 - RNA, 21 nt, Human herpesvirus 2
ucaauaaaaaguaacaaacag

SEQ ID NO: 127191 - RNA, 17 nt, Human herpesvirus 2
ucaauaaaaaacaccaa

SEQ ID NO: 127192 - RNA, 17 nt, Human herpesvirus 2
ucaagcgccgaccagaa

SEQ ID NO: 127193 - RNA, 16 nt, Human herpesvirus 2
ucaaucaauccaucau

SEQ ID NO: 127194 - RNA, 13 nt, Human herpesvirus 2
ucaauagauuucc

SEQ ID NO: 127195 - RNA, 21 nt, Human herpesvirus 2
ggaggcguggugauacaacac

SEQ ID NO: 127196 - RNA, 18 nt, Human herpesvirus 2
ggaggggggcagugcagu

SEQ ID NO: 127197 - RNA, 23 nt, Human herpesvirus 2
ggaggcccucugggacacccaga

SEQ ID NO: 127198 - RNA, 22 nt, Human herpesvirus 2
ggaggagggggggcgggcacga

SEQ ID NO: 127199 - RNA, 14 nt, Human herpesvirus 2
ggaggaaaugcaga

SEQ ID NO: 127200 - RNA, 17 nt, Human herpesvirus 2
ggccgccuccccgcugg

SEQ ID NO: 127201 - RNA, 21 nt, Human herpesvirus 2
ggccgcgacaagacccggcgg

SEQ ID NO: 127202 - RNA, 20 nt, Human herpesvirus 2
ggccgccgcaacacccggcg

SEQ ID NO: 127203 - RNA, 18 nt, Human herpesvirus 2
ggccgaaugacacaaaaa

SEQ ID NO: 127204 - RNA, 19 nt, Human herpesvirus 2
ggcguggagcgccgggccu

SEQ ID NO: 127205 - RNA, 16 nt, Human herpesvirus 2
ggcgacgggcggcugg

SEQ ID NO: 127206 - RNA, 17 nt, Human herpesvirus 2
ggacgacgaccaugggc

SEQ ID NO: 127207 - RNA, 18 nt, Human herpesvirus 2
ggacccccagcccggugu

SEQ ID NO: 127208 - RNA, 16 nt, Human herpesvirus 2
ggaccccgaccccgag

SEQ ID NO: 127209 - RNA, 23 nt, Human herpesvirus 2
ggacccgcggaggaaacgcaaaa

SEQ ID NO: 127210 - RNA, 19 nt, Human herpesvirus 2
ggaaacacaguuccgggaa

SEQ ID NO: 127211 - RNA, 17 nt, Human herpesvirus 2
ggacaaaaguauaccca

SEQ ID NO: 127212 - RNA, 19 nt, Human herpesvirus 2
ggacacgcuugaagggcac

SEQ ID NO: 127213 - RNA, 14 nt, Human herpesvirus 2
ggacagccccgggg

SEQ ID NO: 127214 - RNA, 22 nt, Human herpesvirus 2
gcggggacccgccagagacccu

SEQ ID NO: 127215 - RNA, 17 nt, Human herpesvirus 2
gcguguguguguguuuu

SEQ ID NO: 127216 - RNA, 15 nt, Human herpesvirus 2
gcggacguccagggg

SEQ ID NO: 127217 - RNA, 17 nt, Human herpesvirus 2
gcggcaccgcgcggacc

SEQ ID NO: 127218 - RNA, 14 nt, Human herpesvirus 2
gcggcaugcgcgga

SEQ ID NO: 127219 - RNA, 14 nt, Human herpesvirus 2
gcggccaccccgcc

SEQ ID NO: 127220 - RNA, 14 nt, Human herpesvirus 2
gcggccauccugcc

SEQ ID NO: 127221 - RNA, 14 nt, Human herpesvirus 2
gcggccccgaccca

SEQ ID NO: 127222 - RNA, 15 nt, Human herpesvirus 2
gcggccccggcggcc

SEQ ID NO: 127223 - RNA, 16 nt, Human herpesvirus 2
gcggcccgaggcgacc

SEQ ID NO: 127224 - RNA, 14 nt, Human herpesvirus 2
gcggcucaugaacg

SEQ ID NO: 127225 - RNA, 14 nt, Human herpesvirus 2
gcggcgcacgcggu

SEQ ID NO: 127226 - RNA, 13 nt, Human herpesvirus 2
gccccccucggca

SEQ ID NO: 127227 - RNA, 22 nt, Human herpesvirus 2
gcgcugacggaccucgggguga

SEQ ID NO: 127228 - RNA, 12 nt, Human herpesvirus 2
gcgcugcugcgc

SEQ ID NO: 127229 - RNA, 18 nt, Human herpesvirus 2
gccccccgcgccucgggc

SEQ ID NO: 127230 - RNA, 17 nt, Human herpesvirus 2
gccaucgccggggaccg

SEQ ID NO: 127231 - RNA, 20 nt, Human herpesvirus 2
gccaucgugcgcucgcucuc

SEQ ID NO: 127232 - RNA, 18 nt, Human herpesvirus 2
gcccaacccgagcgaccu

SEQ ID NO: 127233 - RNA, 14 nt, Human herpesvirus 2
gcccaagcggcccg

SEQ ID NO: 127234 - RNA, 20 nt, Human herpesvirus 2
gcccauacaaauuaaauaca

SEQ ID NO: 127235 - RNA, 23 nt, Human herpesvirus 2
gcccacccccaaaccccgguugg

SEQ ID NO: 127236 - RNA, 17 nt, Human herpesvirus 2
gcccaccggcuccaucc

SEQ ID NO: 127237 - RNA, 19 nt, Human herpesvirus 2
gcuaauaaaaaacacugcg

SEQ ID NO: 127238 - RNA, 18 nt, Human herpesvirus 2
gcuggagcgcugguggga

SEQ ID NO: 127239 - RNA, 15 nt, Human herpesvirus 2
gcuggggaaagggaa

SEQ ID NO: 127240 - RNA, 14 nt, Human herpesvirus 2
gugccugacgccgg

SEQ ID NO: 127241 - RNA, 20 nt, Human herpesvirus 2
gugccggggauaaaagccaa

SEQ ID NO: 127242 - RNA, 19 nt, Human herpesvirus 2
gugcaguaacccaguuccu

SEQ ID NO: 127243 - RNA, 20 nt, Human herpesvirus 2
gugcaguaacccaguuccuc

SEQ ID NO: 127244 - RNA, 19 nt, Human herpesvirus 2
gugcaguaccccaguuccu

SEQ ID NO: 127245 - RNA, 20 nt, Human herpesvirus 2
gugcaguaccccaguuccuc

SEQ ID NO: 127246 - RNA, 22 nt, Human herpesvirus 2
gugcacaagacacacacacagg

SEQ ID NO: 127247 - RNA, 20 nt, Human herpesvirus 2
gugacgcgaugggggguccg

SEQ ID NO: 127248 - RNA, 21 nt, Human herpesvirus 2
gucuuuccaccaccagcacca

SEQ ID NO: 127249 - RNA, 18 nt, Human herpesvirus 2
gucugcgucguccagggu

SEQ ID NO: 127250 - RNA, 15 nt, Human herpesvirus 2
gucucugaaauggcg

SEQ ID NO: 127251 - RNA, 18 nt, Human herpesvirus 2
gucuccggugugauuauu

SEQ ID NO: 127252 - RNA, 19 nt, Human herpesvirus 2
gucucuuggggaaaucuau

SEQ ID NO: 127253 - RNA, 15 nt, Human herpesvirus 2
gucucaauaaagcca

SEQ ID NO: 127254 - RNA, 20 nt, Human herpesvirus 2
gucucauaccgguccgugau

SEQ ID NO: 127255 - RNA, 13 nt, Human herpesvirus 2
gucgcaugcaaau

SEQ ID NO: 127256 - RNA, 15 nt, Human herpesvirus 2
gucguccgcggcccc

SEQ ID NO: 127257 - RNA, 16 nt, Human herpesvirus 2
gucguugggcggcccc

SEQ ID NO: 127258 - RNA, 20 nt, Human herpesvirus 2
gucaggaccagggacgucac

SEQ ID NO: 127259 - RNA, 22 nt, Human herpesvirus 2
gucgacguuuauucaccacaca

SEQ ID NO: 127260 - RNA, 23 nt, Human herpesvirus 2
gucgagcgcgccaggaccgccug

SEQ ID NO: 127261 - RNA, 21 nt, Human herpesvirus 2
ggugcuggccaaugccucccc

SEQ ID NO: 127262 - RNA, 15 nt, Human herpesvirus 2
ggugaggaagaaaga

SEQ ID NO: 127263 - RNA, 18 nt, Human herpesvirus 2
ggugauacaacacacccc

SEQ ID NO: 127264 - RNA, 17 nt, Human herpesvirus 2
ggugacccacgccaaca

SEQ ID NO: 127265 - RNA, 12 nt, Human herpesvirus 2
ggcuacuaccug

SEQ ID NO: 127266 - RNA, 12 nt, Human herpesvirus 2
ggcguggugaua

SEQ ID NO: 127267 - RNA, 15 nt, Human herpesvirus 2
ggggauaaaagccaa

SEQ ID NO: 127268 - RNA, 18 nt, Human herpesvirus 2
ggggaucagcaaccaggc

SEQ ID NO: 127269 - RNA, 15 nt, Human herpesvirus 2
ggggcaagugcagua

SEQ ID NO: 127270 - RNA, 22 nt, Human herpesvirus 2
ggggcaccggcaccgggaccga

SEQ ID NO: 127271 - RNA, 13 nt, Human herpesvirus 2
ggggcagugcagu

SEQ ID NO: 127272 - RNA, 20 nt, Human herpesvirus 2
gggucugcuugccccucccc

SEQ ID NO: 127273 - RNA, 18 nt, Human herpesvirus 2
gggggcccgggguucugg

SEQ ID NO: 127274 - RNA, 12 nt, Human herpesvirus 2
gggguacugcac

SEQ ID NO: 127275 - RNA, 18 nt, Human herpesvirus 2
gucagcucaucgcacggc

SEQ ID NO: 127276 - RNA, 17 nt, Human herpesvirus 2
guacaacacaucaguaa

SEQ ID NO: 127277 - RNA, 16 nt, Human herpesvirus 2
guacagccuacaucac

SEQ ID NO: 127278 - RNA, 13 nt, Human herpesvirus 2
aaaaaaccgccaa

SEQ ID NO: 127279 - RNA, 20 nt, Human herpesvirus 2
aaaaagacaccgauguucaa

SEQ ID NO: 127280 - RNA, 14 nt, Human herpesvirus 2
aaaccagacacuca

SEQ ID NO: 127281 - RNA, 11 nt, Human herpesvirus 2
aaacccggggu

SEQ ID NO: 127282 - RNA, 18 nt, Human herpesvirus 2
aaacaaccggacaaaagu

SEQ ID NO: 127283 - RNA, 13 nt, Human herpesvirus 2
aaaauacacauga

SEQ ID NO: 127284 - RNA, 23 nt, Human herpesvirus 2
aaaauaaacgaucgcaacuacag

SEQ ID NO: 127285 - RNA, 17 nt, Human herpesvirus 2
aaaaccgccaacaccag

SEQ ID NO: 127286 - RNA, 14 nt, Human herpesvirus 2
aaaaccaaggcaaa

SEQ ID NO: 127287 - RNA, 15 nt, Human herpesvirus 2
aaaacaaaugcagac

SEQ ID NO: 127288 - RNA, 22 nt, Human herpesvirus 2
aaaacaaaugcagacaugugcu

SEQ ID NO: 127289 - RNA, 15 nt, Human herpesvirus 2
aacaauaaaccugug

SEQ ID NO: 127290 - RNA, 23 nt, Human herpesvirus 2
aacaccguccccgagagccugau

SEQ ID NO: 127291 - RNA, 16 nt, Human herpesvirus 2
aacacaggcgcuucau

SEQ ID NO: 127292 - RNA, 17 nt, Human herpesvirus 2
aacacaggcgcuucauc

SEQ ID NO: 127293 - RNA, 17 nt, Human herpesvirus 2
aacacacaccagcauuu

SEQ ID NO: 127294 - RNA, 11 nt, Human herpesvirus 2
aacacaagcuc

SEQ ID NO: 127295 - RNA, 15 nt, Human herpesvirus 2
aaaucuauugaccuc

SEQ ID NO: 127296 - RNA, 20 nt, Human herpesvirus 2
aaacggucggcgaacacaac

SEQ ID NO: 127297 - RNA, 17 nt, Human herpesvirus 2
aaaggguacacaaagcu

SEQ ID NO: 127298 - RNA, 15 nt, Human herpesvirus 2
aaauaaaaagacacc

SEQ ID NO: 127299 - RNA, 12 nt, Human herpesvirus 2
aaaguauaccca

SEQ ID NO: 127300 - RNA, 18 nt, Human herpesvirus 2
aaauaaacacaaaccaca

SEQ ID NO: 127301 - RNA, 17 nt, Human herpesvirus 2
aagagugagaaccaacc

SEQ ID NO: 127302 - RNA, 14 nt, Human herpesvirus 2
aagauaaaccagac

SEQ ID NO: 127303 - RNA, 16 nt, Human herpesvirus 2
aacugggguacugcac

SEQ ID NO: 127304 - RNA, 17 nt, Human herpesvirus 2
aacuggguuacugcacu

SEQ ID NO: 127305 - RNA, 15 nt, Human herpesvirus 2
aacucguguacaaac

SEQ ID NO: 127306 - RNA, 20 nt, Human herpesvirus 2
aacucguucguaaacaccaa

SEQ ID NO: 127307 - RNA, 19 nt, Human herpesvirus 2
aacaggccaucgccgggga

SEQ ID NO: 127308 - RNA, 18 nt, Human herpesvirus 2
aaccggucggcgaugucc

SEQ ID NO: 127309 - RNA, 18 nt, Human herpesvirus 2
aaucaagcgccgaccaga

SEQ ID NO: 127310 - RNA, 11 nt, Human herpesvirus 2
aauaaagccag

SEQ ID NO: 127311 - RNA, 13 nt, Human herpesvirus 2
acacaaaccacac

SEQ ID NO: 127312 - RNA, 13 nt, Human herpesvirus 2
acaauaacaaaca

SEQ ID NO: 127313 - RNA, 15 nt, Human herpesvirus 2
acaacccaucccaca

SEQ ID NO: 127314 - RNA, 16 nt, Human herpesvirus 2
acaacccaucccacaa

SEQ ID NO: 127315 - RNA, 17 nt, Human herpesvirus 2
acuccaggagcuucauc

SEQ ID NO: 127316 - RNA, 13 nt, Human herpesvirus 2
acgucgggguccc

SEQ ID NO: 127317 - RNA, 17 nt, Human herpesvirus 2
acgucaccgggggcccc

SEQ ID NO: 127318 - RNA, 19 nt, Human herpesvirus 2
acgucucggcccccggggc

SEQ ID NO: 127319 - RNA, 23 nt, Human herpesvirus 2
acugaggaacuggguuacugcac

SEQ ID NO: 127320 - RNA, 21 nt, Human herpesvirus 2
agaaacggcaagaaagacuca

SEQ ID NO: 127321 - RNA, 14 nt, Human herpesvirus 2
agaaagaaacacaa

SEQ ID NO: 127322 - RNA, 16 nt, Human herpesvirus 2
agaacaauaaaccugu

SEQ ID NO: 127323 - RNA, 21 nt, Human herpesvirus 2
agacaccgauguucaaaaaua

SEQ ID NO: 127324 - RNA, 13 nt, Human herpesvirus 2
acuuggacuccgc

SEQ ID NO: 127325 - RNA, 14 nt, Human herpesvirus 2
agaggucaauagau

SEQ ID NO: 127326 - RNA, 18 nt, Human herpesvirus 2
agaggguucgcaaccaca

SEQ ID NO: 127327 - RNA, 19 nt, Human herpesvirus 2
agaugcugcccgcggacca

SEQ ID NO: 127328 - RNA, 12 nt, Human herpesvirus 2
agagagauuucc

SEQ ID NO: 127329 - RNA, 14 nt, Human herpesvirus 2
agagaaacaaaaga

SEQ ID NO: 127330 - RNA, 12 nt, Human herpesvirus 2
agacuucccuaa

SEQ ID NO: 127331 - RNA, 13 nt, Human herpesvirus 2
agauugacucagc

SEQ ID NO: 127332 - RNA, 16 nt, Human herpesvirus 2
acggcgucucccgggg

SEQ ID NO: 127333 - RNA, 17 nt, Human herpesvirus 2
acgggcaaggggccaaa

SEQ ID NO: 127334 - RNA, 17 nt, Human herpesvirus 2
acggcggggccccgggc

SEQ ID NO: 127335 - RNA, 21 nt, Human herpesvirus 2
acgcugucgacgagucucaga

SEQ ID NO: 127336 - RNA, 22 nt, Human herpesvirus 2
acggugcgugcggcccugccuc

SEQ ID NO: 127337 - RNA, 20 nt, Human herpesvirus 2
acggugcuguacaccggcuc

SEQ ID NO: 127338 - RNA, 15 nt, Human herpesvirus 2
acgggcucucgccuc

SEQ ID NO: 127339 - RNA, 15 nt, Human herpesvirus 2
acgcacgugcgggaa

SEQ ID NO: 127340 - RNA, 22 nt, Human herpesvirus 2
accggucgcagggagacggggu

SEQ ID NO: 127341 - RNA, 22 nt, Human herpesvirus 2
accgucccgcccgccagugcau

SEQ ID NO: 127342 - RNA, 19 nt, Human herpesvirus 2
accggcgugugaugauuuc

SEQ ID NO: 127343 - RNA, 17 nt, Human herpesvirus 2
accggcucccccgcgga

SEQ ID NO: 127344 - RNA, 20 nt, Human herpesvirus 2
accgauguucaaaaauacac

SEQ ID NO: 127345 - RNA, 13 nt, Human herpesvirus 2
accgcgaccagcg

SEQ ID NO: 127346 - RNA, 14 nt, Human herpesvirus 2
acccagaccugccg

SEQ ID NO: 127347 - RNA, 17 nt, Human herpesvirus 2
acacaagcucgccguga

SEQ ID NO: 127348 - RNA, 12 nt, Human herpesvirus 2
acacaccaacuc

SEQ ID NO: 127349 - RNA, 17 nt, Human herpesvirus 2
acacaggcccaccacca

SEQ ID NO: 127350 - RNA, 15 nt, Human herpesvirus 2
acacaggcgcuucau

SEQ ID NO: 127351 - RNA, 14 nt, Human herpesvirus 2
acacagaaacacaa

SEQ ID NO: 127352 - RNA, 13 nt, Human herpesvirus 2
acagccccggggu

SEQ ID NO: 127353 - RNA, 22 nt, Human herpesvirus 2
acaguuccguuggggaacaaca

SEQ ID NO: 127354 - RNA, 21 nt, Human herpesvirus 2
acaugauagagggaacaaaga

SEQ ID NO: 127355 - RNA, 12 nt, Human herpesvirus 2
accaaaagggaa

SEQ ID NO: 127356 - RNA, 20 nt, Human herpesvirus 2
accaacaacgcucaguucau

SEQ ID NO: 127357 - RNA, 18 nt, Human herpesvirus 2
accaacgacgaugcaugu

SEQ ID NO: 127358 - RNA, 15 nt, Human herpesvirus 2
accagggaggccaga

SEQ ID NO: 127359 - RNA, 15 nt, Human herpesvirus 2
accagcauguguguu

SEQ ID NO: 127360 - RNA, 18 nt, Human herpesvirus 2
accaguaggucuguugug

SEQ ID NO: 127361 - RNA, 21 nt, Human herpesvirus 2
caagacacacacacaggccca

SEQ ID NO: 127362 - RNA, 13 nt, Human herpesvirus 2
caagcgggcgggg

SEQ ID NO: 127363 - RNA, 18 nt, Human herpesvirus 2
cacaagcucgccgugaag

SEQ ID NO: 127364 - RNA, 18 nt, Human herpesvirus 2
cacaagacacacacacag

SEQ ID NO: 127365 - RNA, 16 nt, Human herpesvirus 2
cacggaggaacugggg

SEQ ID NO: 127366 - RNA, 16 nt, Human herpesvirus 2
caccaauacaccagag

SEQ ID NO: 127367 - RNA, 12 nt, Human herpesvirus 2
caccaacauacg

SEQ ID NO: 127368 - RNA, 16 nt, Human herpesvirus 2
caccgcggacagccag

SEQ ID NO: 127369 - RNA, 13 nt, Human herpesvirus 2
caccgucccgccc

SEQ ID NO: 127370 - RNA, 14 nt, Human herpesvirus 2
cagcgcguccaggu

SEQ ID NO: 127371 - RNA, 16 nt, Human herpesvirus 2
cagcgcguccagguac

SEQ ID NO: 127372 - RNA, 11 nt, Human herpesvirus 2
cagcaccacca

SEQ ID NO: 127373 - RNA, 13 nt, Human herpesvirus 2
cagcagguuuugg

SEQ ID NO: 127374 - RNA, 17 nt, Human herpesvirus 2
cagcauccugaaccgcu

SEQ ID NO: 127375 - RNA, 20 nt, Human herpesvirus 2
cacuccaccccccccucuca

SEQ ID NO: 127376 - RNA, 15 nt, Human herpesvirus 2
cagagagauuucccc

SEQ ID NO: 127377 - RNA, 19 nt, Human herpesvirus 2
cagaaaaaccagacacuca

SEQ ID NO: 127378 - RNA, 21 nt, Human herpesvirus 2
caaaccuuaacuaaaccacag

SEQ ID NO: 127379 - RNA, 15 nt, Human herpesvirus 2
caaacgcggacaucc

SEQ ID NO: 127380 - RNA, 17 nt, Human herpesvirus 2
caaacgucccaaacuca

SEQ ID NO: 127381 - RNA, 19 nt, Human herpesvirus 2
caaaggccagcagaugaau

SEQ ID NO: 127382 - RNA, 16 nt, Human herpesvirus 2
caaaaacaaaaaccuu

SEQ ID NO: 127383 - RNA, 22 nt, Human herpesvirus 2
caaacacugaggaacuggguua

SEQ ID NO: 127384 - RNA, 12 nt, Human herpesvirus 2
caaccuggcaca

SEQ ID NO: 127385 - RNA, 14 nt, Human herpesvirus 2
caacaguacucauc

SEQ ID NO: 127386 - RNA, 20 nt, Human herpesvirus 2
caagaauucccagggcacca

SEQ ID NO: 127387 - RNA, 22 nt, Human herpesvirus 2
auucccgcacgugcgucuuccc

SEQ ID NO: 127388 - RNA, 21 nt, Human herpesvirus 2
auugaccaaauucagggaaac

SEQ ID NO: 127389 - RNA, 13 nt, Human herpesvirus 2
auuuccccagcac

SEQ ID NO: 127390 - RNA, 18 nt, Human herpesvirus 2
agguggggggggggaaag

SEQ ID NO: 127391 - RNA, 18 nt, Human herpesvirus 2
aggaucgugugcacgaaa

SEQ ID NO: 127392 - RNA, 19 nt, Human herpesvirus 2
aggaucucgcgcaggugau

SEQ ID NO: 127393 - RNA, 13 nt, Human herpesvirus 2
aggaggggggcag

SEQ ID NO: 127394 - RNA, 18 nt, Human herpesvirus 2
aggaggggggccucgguc

SEQ ID NO: 127395 - RNA, 22 nt, Human herpesvirus 2
aggcguugugcgggaggggcuu

SEQ ID NO: 127396 - RNA, 20 nt, Human herpesvirus 2
aggaaaaaaaaaacuuuaua

SEQ ID NO: 127397 - RNA, 14 nt, Human herpesvirus 2
aggagcuucaucac

SEQ ID NO: 127398 - RNA, 21 nt, Human herpesvirus 2
aggaacgcccgaaaccagaga

SEQ ID NO: 127399 - RNA, 20 nt, Human herpesvirus 2
aggaacuggguuacugcacu

SEQ ID NO: 127400 - RNA, 13 nt, Human herpesvirus 2
aggaaaugcagaa

SEQ ID NO: 127401 - RNA, 16 nt, Human herpesvirus 2
agcugggcuuguguau

SEQ ID NO: 127402 - RNA, 22 nt, Human herpesvirus 2
aguugauucgcgaacacaagcu

SEQ ID NO: 127403 - RNA, 17 nt, Human herpesvirus 2
aguucaauagauuuccc

SEQ ID NO: 127404 - RNA, 21 nt, Human herpesvirus 2
aguucaucauggauaacagcu

SEQ ID NO: 127405 - RNA, 21 nt, Human herpesvirus 2
auaaacaaacaaccggacaaa

SEQ ID NO: 127406 - RNA, 23 nt, Human herpesvirus 2
auaaaccggggccccgugcucca

SEQ ID NO: 127407 - RNA, 16 nt, Human herpesvirus 2
aguggggggguggugg

SEQ ID NO: 127408 - RNA, 17 nt, Human herpesvirus 2
agugggggggugguggu

SEQ ID NO: 127409 - RNA, 11 nt, Human herpesvirus 2
agugggugcuc

SEQ ID NO: 127410 - RNA, 15 nt, Human herpesvirus 2
aguaacccaguuccu

SEQ ID NO: 127411 - RNA, 18 nt, Human herpesvirus 2
aguaacccaguuccucag

SEQ ID NO: 127412 - RNA, 15 nt, Human herpesvirus 2
aguaacaaacagaga

SEQ ID NO: 127413 - RNA, 15 nt, Human herpesvirus 2
aguacucaucgggac

SEQ ID NO: 127414 - RNA, 15 nt, Human herpesvirus 2
agugcaguaccccag

SEQ ID NO: 127415 - RNA, 20 nt, Human herpesvirus 2
agugagaaccaaccaaaaca

SEQ ID NO: 127416 - RNA, 20 nt, Human herpesvirus 2
aucgcuguauucccuugccc

SEQ ID NO: 127417 - RNA, 19 nt, Human herpesvirus 2
aucgggaaaacggauuccc

SEQ ID NO: 127418 - RNA, 13 nt, Human herpesvirus 2
aucgugugcacga

SEQ ID NO: 127419 - RNA, 18 nt, Human herpesvirus 2
augagccgguagugcagg

SEQ ID NO: 127420 - RNA, 14 nt, Human herpesvirus 2
augacgccucgaug

SEQ ID NO: 127421 - RNA, 15 nt, Human herpesvirus 2
augccuauccccggu

SEQ ID NO: 127422 - RNA, 13 nt, Human herpesvirus 2
augcaaccaaauc

SEQ ID NO: 127423 - RNA, 16 nt, Human herpesvirus 2
aucgcaacuacagucg

SEQ ID NO: 127424 - RNA, 13 nt, Human herpesvirus 2
aucgaaaggguac

SEQ ID NO: 127425 - RNA, 18 nt, Human herpesvirus 2
aucgaaaggguacacaaa

SEQ ID NO: 127426 - RNA, 15 nt, Human herpesvirus 2
aucacauacgcacaa

SEQ ID NO: 127427 - RNA, 14 nt, Human herpesvirus 2
aucaugucuuucca

SEQ ID NO: 127428 - RNA, 22 nt, Human herpesvirus 2
auagcgacgacagaacggacaa

SEQ ID NO: 127429 - RNA, 22 nt, Human herpesvirus 2
auauccuccuuagauugacuca

SEQ ID NO: 127430 - RNA, 15 nt, Human herpesvirus 2
cgaguccgaagaaga

SEQ ID NO: 127431 - RNA, 17 nt, Human herpesvirus 2
cgauguucaaaaauaca

SEQ ID NO: 127432 - RNA, 15 nt, Human herpesvirus 2
cgaucgaugagccgg

SEQ ID NO: 127433 - RNA, 15 nt, Human herpesvirus 2
cgaucgcaacuacag

SEQ ID NO: 127434 - RNA, 20 nt, Human herpesvirus 2
cgaugcuaauaaaaaacacu

SEQ ID NO: 127435 - RNA, 19 nt, Human herpesvirus 2
cgacccaccgcccccgcug

SEQ ID NO: 127436 - RNA, 15 nt, Human herpesvirus 2
cgaccaccccaaaaa

SEQ ID NO: 127437 - RNA, 13 nt, Human herpesvirus 2
cgacgaaccagca

SEQ ID NO: 127438 - RNA, 18 nt, Human herpesvirus 2
cgaccgggcggugcccau

SEQ ID NO: 127439 - RNA, 18 nt, Human herpesvirus 2
cgaccuaauuuuuguguc

SEQ ID NO: 127440 - RNA, 15 nt, Human herpesvirus 2
cgaccccgauagucc

SEQ ID NO: 127441 - RNA, 16 nt, Human herpesvirus 2
cgagagcccagggaac

SEQ ID NO: 127442 - RNA, 14 nt, Human herpesvirus 2
ccuuuucugcauuu

SEQ ID NO: 127443 - RNA, 13 nt, Human herpesvirus 2
ccuucaccaacga

SEQ ID NO: 127444 - RNA, 13 nt, Human herpesvirus 2
ccuuccugucggc

SEQ ID NO: 127445 - RNA, 20 nt, Human herpesvirus 2
ccuccuucggugcacaagac

SEQ ID NO: 127446 - RNA, 19 nt, Human herpesvirus 2
ccucucaaacaaaaacaca

SEQ ID NO: 127447 - RNA, 21 nt, Human herpesvirus 2
ccguggcccuccacgccgugg

SEQ ID NO: 127448 - RNA, 22 nt, Human herpesvirus 2
ccuauaacccacaaacucacac

SEQ ID NO: 127449 - RNA, 23 nt, Human herpesvirus 2
ccguggacggguauaaaggccag

SEQ ID NO: 127450 - RNA, 20 nt, Human herpesvirus 2
ccgcgcucauggccggagaa

SEQ ID NO: 127451 - RNA, 17 nt, Human herpesvirus 2
ccgcggggggcacgggc

SEQ ID NO: 127452 - RNA, 14 nt, Human herpesvirus 2
ccgcucguuccuca

SEQ ID NO: 127453 - RNA, 17 nt, Human herpesvirus 2
ccggggauaaaagccaa

SEQ ID NO: 127454 - RNA, 21 nt, Human herpesvirus 2
ccgggggggggcaagugcagu

SEQ ID NO: 127455 - RNA, 24 nt, Human herpesvirus 2
ccgcgcaugguaauuagcaacuuu

SEQ ID NO: 127456 - RNA, 13 nt, Human herpesvirus 2
ccgccaacaccag

SEQ ID NO: 127457 - RNA, 16 nt, Human herpesvirus 2
ccgccccgcaguuuca

SEQ ID NO: 127458 - RNA, 17 nt, Human herpesvirus 2
ccgcacucgcuuuuccc

SEQ ID NO: 127459 - RNA, 19 nt, Human herpesvirus 2
ccgagcguaucggccagga

SEQ ID NO: 127460 - RNA, 18 nt, Human herpesvirus 2
ccgaggcgccucgggggc

SEQ ID NO: 127461 - RNA, 23 nt, Human herpesvirus 2
ccgaucgaugagccgguagugca

SEQ ID NO: 127462 - RNA, 13 nt, Human herpesvirus 2
cccaccaccaacc

SEQ ID NO: 127463 - RNA, 23 nt, Human herpesvirus 2
cccacgacccaccgcccccgcug

SEQ ID NO: 127464 - RNA, 16 nt, Human herpesvirus 2
caugggcuacuaccug

SEQ ID NO: 127465 - RNA, 19 nt, Human herpesvirus 2
caugauagagggaacaaag

SEQ ID NO: 127466 - RNA, 20 nt, Human herpesvirus 2
caugauagagggaacaaaga

SEQ ID NO: 127467 - RNA, 14 nt, Human herpesvirus 2
cauuccccucucgc

SEQ ID NO: 127468 - RNA, 12 nt, Human herpesvirus 2
caucaggcucau

SEQ ID NO: 127469 - RNA, 15 nt, Human herpesvirus 2
caggagcuucaucac

SEQ ID NO: 127470 - RNA, 20 nt, Human herpesvirus 2
caggaggggggcagugcagu

SEQ ID NO: 127471 - RNA, 14 nt, Human herpesvirus 2
caggaucgugugca

SEQ ID NO: 127472 - RNA, 22 nt, Human herpesvirus 2
cauauugacgucaacccaagug

SEQ ID NO: 127473 - RNA, 15 nt, Human herpesvirus 2
caucgcgucacacca

SEQ ID NO: 127474 - RNA, 13 nt, Human herpesvirus 2
cauccacaagcua

SEQ ID NO: 127475 - RNA, 12 nt, Human herpesvirus 2
ccaucgugcgcu

SEQ ID NO: 127476 - RNA, 12 nt, Human herpesvirus 2
ccauacauuucc

SEQ ID NO: 127477 - RNA, 18 nt, Human herpesvirus 2
ccaacaacgcucaguuca

SEQ ID NO: 127478 - RNA, 11 nt, Human herpesvirus 2
ccaaaagggaa

SEQ ID NO: 127479 - RNA, 21 nt, Human herpesvirus 2
ccaccaacaacgcucaguuca

SEQ ID NO: 127480 - RNA, 15 nt, Human herpesvirus 2
ccacccaaccaacgg

SEQ ID NO: 127481 - RNA, 15 nt, Human herpesvirus 2
ccacccccaaacccc

SEQ ID NO: 127482 - RNA, 13 nt, Human herpesvirus 2
ccacccccagaaa

SEQ ID NO: 127483 - RNA, 20 nt, Human herpesvirus 2
ccaccccccccucucaaaca

SEQ ID NO: 127484 - RNA, 21 nt, Human herpesvirus 2
cuucuccuuaaauaaacacaa

SEQ ID NO: 127485 - RNA, 15 nt, Human herpesvirus 2
cuucccaacacgccu

SEQ ID NO: 127486 - RNA, 19 nt, Human herpesvirus 2
cuucggcggggcaccggca

SEQ ID NO: 127487 - RNA, 19 nt, Human herpesvirus 2
cuuggaggcccucugggac

SEQ ID NO: 127488 - RNA, 23 nt, Human herpesvirus 2
cuucccaugacgccggccggguu

SEQ ID NO: 127489 - RNA, 12 nt, Human herpesvirus 2
cuuauuauuaac

SEQ ID NO: 127490 - RNA, 16 nt, Human herpesvirus 2
cuggcguccccaggcg

SEQ ID NO: 127491 - RNA, 21 nt, Human herpesvirus 2
cuggcauuaaccaaccaacga

SEQ ID NO: 127492 - RNA, 15 nt, Human herpesvirus 2
cugggacacccagau

SEQ ID NO: 127493 - RNA, 15 nt, Human herpesvirus 2
cugggguacugcacu

SEQ ID NO: 127494 - RNA, 16 nt, Human herpesvirus 2
cugggguacugcacug

SEQ ID NO: 127495 - RNA, 14 nt, Human herpesvirus 2
cugggcuuguguau

SEQ ID NO: 127496 - RNA, 14 nt, Human herpesvirus 2
cuggggaaagggaa

SEQ ID NO: 127497 - RNA, 15 nt, Human herpesvirus 2
cuggguuacugcacu

SEQ ID NO: 127498 - RNA, 17 nt, Human herpesvirus 2
cuggguuacugcacuug

SEQ ID NO: 127499 - RNA, 23 nt, Human herpesvirus 2
cuggucauggcccuuggacgggu

SEQ ID NO: 127500 - RNA, 14 nt, Human herpesvirus 2
cuccgccccggcga

SEQ ID NO: 127501 - RNA, 16 nt, Human herpesvirus 2
cuccucggacguccag

SEQ ID NO: 127502 - RNA, 15 nt, Human herpesvirus 2
cucuuggggaaaucu

SEQ ID NO: 127503 - RNA, 20 nt, Human herpesvirus 2
cucuuggggaaaucuauuga

SEQ ID NO: 127504 - RNA, 14 nt, Human herpesvirus 2
cugaggaacugggu

SEQ ID NO: 127505 - RNA, 21 nt, Human herpesvirus 2
cugaggaacuggguuacugca

SEQ ID NO: 127506 - RNA, 15 nt, Human herpesvirus 2
cguugcccccccggg

SEQ ID NO: 127507 - RNA, 16 nt, Human herpesvirus 2
cguugccgggggccau

SEQ ID NO: 127508 - RNA, 23 nt, Human herpesvirus 2
cgguggcgucggcggccccggcg

SEQ ID NO: 127509 - RNA, 16 nt, Human herpesvirus 2
cggguuauaggccaca

SEQ ID NO: 127510 - RNA, 14 nt, Human herpesvirus 2
cgugccccccgacg

SEQ ID NO: 127511 - RNA, 12 nt, Human herpesvirus 2
cguaaacaccaa

SEQ ID NO: 127512 - RNA, 22 nt, Human herpesvirus 2
cggccgccgcaacacccggcgc

SEQ ID NO: 127513 - RNA, 19 nt, Human herpesvirus 2
cggcgccaagcgccccgcg

SEQ ID NO: 127514 - RNA, 19 nt, Human herpesvirus 2
cggcgauguccggggcggu

SEQ ID NO: 127515 - RNA, 16 nt, Human herpesvirus 2
cggcgccgccccgccg

SEQ ID NO: 127516 - RNA, 15 nt, Human herpesvirus 2
cggccauccccggcg

SEQ ID NO: 127517 - RNA, 16 nt, Human herpesvirus 2
cggcaagaaagacuca

SEQ ID NO: 127518 - RNA, 14 nt, Human herpesvirus 2
cggaggcgugguga

SEQ ID NO: 127519 - RNA, 19 nt, Human herpesvirus 2
cgauuguuugguguuguua

SEQ ID NO: 127520 - RNA, 17 nt, Human herpesvirus 2
cgggcgcgcggcgcgag

SEQ ID NO: 127521 - RNA, 22 nt, Human herpesvirus 2
cgggcguccccgagcggcgcau

SEQ ID NO: 127522 - RNA, 15 nt, Human herpesvirus 2
cgggcguccccggug

SEQ ID NO: 127523 - RNA, 20 nt, Human herpesvirus 2
cgggccccaaagcgugccaa

SEQ ID NO: 127524 - RNA, 17 nt, Human herpesvirus 2
cgggccccuacucgcca

SEQ ID NO: 127525 - RNA, 18 nt, Human herpesvirus 2
cgggccgucguuggccag

SEQ ID NO: 127526 - RNA, 19 nt, Human herpesvirus 2
cgggcccggacuccgcccc

SEQ ID NO: 127527 - RNA, 23 nt, Human herpesvirus 2
cgggcccggacuccgccccggcg

SEQ ID NO: 127528 - RNA, 12 nt, Human herpesvirus 2
cgggcccggggc

SEQ ID NO: 127529 - RNA, 11 nt, Human herpesvirus 2
cgggugcccau

SEQ ID NO: 127530 - RNA, 14 nt, Human herpesvirus 2
cgggugcccggggu

SEQ ID NO: 127531 - RNA, 15 nt, Human herpesvirus 2
cggggauaaaagcca

SEQ ID NO: 127532 - RNA, 17 nt, Human herpesvirus 2
cgggggcccgggguucu

SEQ ID NO: 127533 - RNA, 11 nt, Human herpesvirus 2
cgggggcgggg

SEQ ID NO: 127534 - RNA, 20 nt, Human herpesvirus 2
cgggggggggcaagugcagu

SEQ ID NO: 127535 - RNA, 21 nt, Human herpesvirus 2
cgggggggggcaagugcagua

SEQ ID NO: 127536 - RNA, 17 nt, Human herpesvirus 2
cggggguucggggccag

SEQ ID NO: 127537 - RNA, 14 nt, Human herpesvirus 2
cggcgggggcgggg

SEQ ID NO: 127538 - RNA, 14 nt, Human herpesvirus 2
cggcucguggugcu

SEQ ID NO: 127539 - RNA, 17 nt, Human herpesvirus 2
cggcuggggaaagggaa

SEQ ID NO: 127540 - RNA, 14 nt, Human herpesvirus 2
cgggaaccccggcg

SEQ ID NO: 127541 - RNA, 14 nt, Human herpesvirus 2
cucagcacacgauc

SEQ ID NO: 127542 - RNA, 23 nt, Human herpesvirus 2
cuaucagagagugggggcgugag

SEQ ID NO: 127543 - RNA, 15 nt, Human herpesvirus 2
cuaauuaaauacaua

SEQ ID NO: 127544 - RNA, 20 nt, Human herpesvirus 2
cuagaaaaacaaaugcagac

SEQ ID NO: 127545 - RNA, 21 nt, Human herpesvirus 2
gccgaccgccccccccggcgg

SEQ ID NO: 127546 - RNA, 18 nt, Human herpesvirus 2
gccgauccggccucgggu

SEQ ID NO: 127547 - RNA, 15 nt, Human herpesvirus 2
gccgcaacacccggc

SEQ ID NO: 127548 - RNA, 18 nt, Human herpesvirus 2
gccgccccgacucugugu

SEQ ID NO: 127549 - RNA, 17 nt, Human herpesvirus 2
gccgccccgcaguuuca

SEQ ID NO: 127550 - RNA, 20 nt, Human herpesvirus 2
gccgccccgccgcuccgccc

SEQ ID NO: 127551 - RNA, 17 nt, Human herpesvirus 2
gccacucccgcggcccc

SEQ ID NO: 127552 - RNA, 15 nt, Human herpesvirus 2
gccccaccgucucgg

SEQ ID NO: 127553 - RNA, 14 nt, Human herpesvirus 2
gccccgcgucggga

SEQ ID NO: 127554 - RNA, 15 nt, Human herpesvirus 2
gcccccgugccuguu

SEQ ID NO: 127555 - RNA, 14 nt, Human herpesvirus 2
gccccccccagggg

SEQ ID NO: 127556 - RNA, 13 nt, Human herpesvirus 2
gccaccgcgccca

SEQ ID NO: 127557 - RNA, 22 nt, Human herpesvirus 2
gcaugggccgccagcagucggu

SEQ ID NO: 127558 - RNA, 17 nt, Human herpesvirus 2
gcaugggcgacaggcuu

SEQ ID NO: 127559 - RNA, 23 nt, Human herpesvirus 2
gcauccgggguuuccccggccca

SEQ ID NO: 127560 - RNA, 21 nt, Human herpesvirus 2
gcaacaacggcgggccccgug

SEQ ID NO: 127561 - RNA, 19 nt, Human herpesvirus 2
gcaaaugggauucauggac

SEQ ID NO: 127562 - RNA, 22 nt, Human herpesvirus 2
gcgucaugcacgccaucgcucc

SEQ ID NO: 127563 - RNA, 14 nt, Human herpesvirus 2
gcgucggcggcccc

SEQ ID NO: 127564 - RNA, 14 nt, Human herpesvirus 2
gcgucguccagggu

SEQ ID NO: 127565 - RNA, 18 nt, Human herpesvirus 2
gcgugcuuccgcaccccc

SEQ ID NO: 127566 - RNA, 17 nt, Human herpesvirus 2
gcgugccgcagaccacc

SEQ ID NO: 127567 - RNA, 15 nt, Human herpesvirus 2
gcgggggugccgugg

SEQ ID NO: 127568 - RNA, 12 nt, Human herpesvirus 2
gcgggguggugg

SEQ ID NO: 127569 - RNA, 20 nt, Human herpesvirus 2
gcgguuuaccgcgaccagcg

SEQ ID NO: 127570 - RNA, 22 nt, Human herpesvirus 2
gcgguuuaccgcgaccagcguc

SEQ ID NO: 127571 - RNA, 13 nt, Human herpesvirus 2
gcgggaggcggug

SEQ ID NO: 127572 - RNA, 21 nt, Human herpesvirus 2
gcgggcacucuggcgucccca

SEQ ID NO: 127573 - RNA, 13 nt, Human herpesvirus 2
gcggcccccgugg

SEQ ID NO: 127574 - RNA, 23 nt, Human herpesvirus 2
gcggccucuccggccucuucgaa

SEQ ID NO: 127575 - RNA, 22 nt, Human herpesvirus 2
gcgcuacgaccggugcuucgua

SEQ ID NO: 127576 - RNA, 17 nt, Human herpesvirus 2
gcggcacagguggugca

SEQ ID NO: 127577 - RNA, 15 nt, Human herpesvirus 2
gcggaggcgugguga

SEQ ID NO: 127578 - RNA, 15 nt, Human herpesvirus 2
gcggacacaauaaca

SEQ ID NO: 127579 - RNA, 22 nt, Human herpesvirus 2
gcggaccccgcccgcgaccccg

SEQ ID NO: 127580 - RNA, 15 nt, Human herpesvirus 2
gcggaccuuggcgca

SEQ ID NO: 127581 - RNA, 15 nt, Human herpesvirus 2
gcgcugcggggacca

SEQ ID NO: 127582 - RNA, 17 nt, Human herpesvirus 2
gcgcgcgugugugagaa

SEQ ID NO: 127583 - RNA, 21 nt, Human herpesvirus 2
gcucgauuguuugguguuguu

SEQ ID NO: 127584 - RNA, 22 nt, Human herpesvirus 2
gcugcccgcggaccaccgggcc

SEQ ID NO: 127585 - RNA, 23 nt, Human herpesvirus 2
gcuccugcgcacgacagaccucc

SEQ ID NO: 127586 - RNA, 21 nt, Human herpesvirus 2
gcuggagcucugccugcacga

SEQ ID NO: 127587 - RNA, 22 nt, Human herpesvirus 2
gcugcggggcgaacguguuguu

SEQ ID NO: 127588 - RNA, 23 nt, Human herpesvirus 2
gcguugcgcuuuccggcccuccc

SEQ ID NO: 127589 - RNA, 15 nt, Human herpesvirus 2
gcuaaaugacgccuc

SEQ ID NO: 127590 - RNA, 16 nt, Human herpesvirus 2
gcucaugaacgacugg

SEQ ID NO: 127591 - RNA, 11 nt, Human herpesvirus 2
ggcgucugugc

SEQ ID NO: 127592 - RNA, 15 nt, Human herpesvirus 2
ggcgugugucucuga

SEQ ID NO: 127593 - RNA, 17 nt, Human herpesvirus 2
ggcggcccuggagcgcc

SEQ ID NO: 127594 - RNA, 16 nt, Human herpesvirus 2
ggcggcguggccgcga

SEQ ID NO: 127595 - RNA, 21 nt, Human herpesvirus 2
ggccccuacucgccauccaac

SEQ ID NO: 127596 - RNA, 16 nt, Human herpesvirus 2
ggcccggacuccgccc

SEQ ID NO: 127597 - RNA, 17 nt, Human herpesvirus 2
ggccgggugacauucac

SEQ ID NO: 127598 - RNA, 18 nt, Human herpesvirus 2
ggccgcgcgcguguguga

SEQ ID NO: 127599 - RNA, 19 nt, Human herpesvirus 2
ggccggcggucgcauuuuu

SEQ ID NO: 127600 - RNA, 18 nt, Human herpesvirus 2
ggccgagcguaucggcca

SEQ ID NO: 127601 - RNA, 16 nt, Human herpesvirus 2
ggccgcacccacgaca

SEQ ID NO: 127602 - RNA, 21 nt, Human herpesvirus 2
ggcaccacguguccccaggga

SEQ ID NO: 127603 - RNA, 12 nt, Human herpesvirus 2
ggcaagugcagu

SEQ ID NO: 127604 - RNA, 14 nt, Human herpesvirus 2
ggcaagugcaguaa

SEQ ID NO: 127605 - RNA, 22 nt, Human herpesvirus 2
ggcaacccgacggcggggcccc

SEQ ID NO: 127606 - RNA, 15 nt, Human herpesvirus 2
ggcaaacacaccggg

SEQ ID NO: 127607 - RNA, 21 nt, Human herpesvirus 2
gcuucauuuugugggggccca

SEQ ID NO: 127608 - RNA, 16 nt, Human herpesvirus 2
gcuggggaaagggaag

SEQ ID NO: 127609 - RNA, 13 nt, Human herpesvirus 2
gcuggggaaaucu

SEQ ID NO: 127610 - RNA, 13 nt, Human herpesvirus 2
gcuuaugguaauu

SEQ ID NO: 127611 - RNA, 14 nt, Human herpesvirus 2
ggaggcguggugau

SEQ ID NO: 127612 - RNA, 19 nt, Human herpesvirus 2
ggaggggggcagugcagua

SEQ ID NO: 127613 - RNA, 16 nt, Human herpesvirus 2
ggaggaaggaacgaca

SEQ ID NO: 127614 - RNA, 17 nt, Human herpesvirus 2
ggagaguucaauagauu

SEQ ID NO: 127615 - RNA, 23 nt, Human herpesvirus 2
ggucaucgucccccgucugccag

SEQ ID NO: 127616 - RNA, 20 nt, Human herpesvirus 2
gguccgagacggccaugacc

SEQ ID NO: 127617 - RNA, 16 nt, Human herpesvirus 2
ggucggcgaacacaac

SEQ ID NO: 127618 - RNA, 22 nt, Human herpesvirus 2
ggucuccgccaugcaacgccgg

SEQ ID NO: 127619 - RNA, 18 nt, Human herpesvirus 2
ggucucggggccguccug

SEQ ID NO: 127620 - RNA, 16 nt, Human herpesvirus 2
gguggggaacguucca

SEQ ID NO: 127621 - RNA, 18 nt, Human herpesvirus 2
ggugcuguuucagggguu

SEQ ID NO: 127622 - RNA, 11 nt, Human herpesvirus 2
gguacugcacu

SEQ ID NO: 127623 - RNA, 19 nt, Human herpesvirus 2
gguaauuagaaacuuuuaa

SEQ ID NO: 127624 - RNA, 16 nt, Human herpesvirus 2
gguaauuagcaacuuu

SEQ ID NO: 127625 - RNA, 16 nt, Human herpesvirus 2
gguaauuagcagcuuu

SEQ ID NO: 127626 - RNA, 12 nt, Human herpesvirus 2
gggaaaaccaac

SEQ ID NO: 127627 - RNA, 16 nt, Human herpesvirus 2
gggaaaggaaaggaaa

SEQ ID NO: 127628 - RNA, 15 nt, Human herpesvirus 2
guaauauaacuuugg

SEQ ID NO: 127629 - RNA, 16 nt, Human herpesvirus 2
guaauuagaaacuuuu

SEQ ID NO: 127630 - RNA, 23 nt, Human herpesvirus 2
ggugugacgcgaugggggguccg

SEQ ID NO: 127631 - RNA, 15 nt, Human herpesvirus 2
gaucccgggcccuug

SEQ ID NO: 127632 - RNA, 18 nt, Human herpesvirus 2
gauagaccaugaccucuc

SEQ ID NO: 127633 - RNA, 17 nt, Human herpesvirus 2
gaucgcagcguccggcu

SEQ ID NO: 127634 - RNA, 19 nt, Human herpesvirus 2
gagguggcggaggggauca

SEQ ID NO: 127635 - RNA, 17 nt, Human herpesvirus 2
gaugagccgguagugca

SEQ ID NO: 127636 - RNA, 12 nt, Human herpesvirus 2
gauggugguggg

SEQ ID NO: 127637 - RNA, 19 nt, Human herpesvirus 2
gauucauggacauguuaca

SEQ ID NO: 127638 - RNA, 12 nt, Human herpesvirus 2
gauugacucagc

SEQ ID NO: 127639 - RNA, 15 nt, Human herpesvirus 2
gauuaacaacaccaa

SEQ ID NO: 127640 - RNA, 22 nt, Human herpesvirus 2
gauuuccccaagagacuucccu

SEQ ID NO: 127641 - RNA, 21 nt, Human herpesvirus 2
gacuccaggagcuucaucacc

SEQ ID NO: 127642 - RNA, 20 nt, Human herpesvirus 2
gacuuccgugccccuggacu

SEQ ID NO: 127643 - RNA, 14 nt, Human herpesvirus 2
gacguugugcguuu

SEQ ID NO: 127644 - RNA, 13 nt, Human herpesvirus 2
gagacuucccuaa

SEQ ID NO: 127645 - RNA, 15 nt, Human herpesvirus 2
gagccgcacaucccc

SEQ ID NO: 127646 - RNA, 20 nt, Human herpesvirus 2
gagaaacaaaagaaacggca

SEQ ID NO: 127647 - RNA, 16 nt, Human herpesvirus 2
gagaaaaggaccaaaa

SEQ ID NO: 127648 - RNA, 20 nt, Human herpesvirus 2
gagaaaaggaccaaaaggga

SEQ ID NO: 127649 - RNA, 21 nt, Human herpesvirus 2
gagaaaaggaccaaaagggaa

SEQ ID NO: 127650 - RNA, 18 nt, Human herpesvirus 2
gaggggggcagugcagua

SEQ ID NO: 127651 - RNA, 16 nt, Human herpesvirus 2
gaggccucauccggcc

SEQ ID NO: 127652 - RNA, 22 nt, Human herpesvirus 2
gaggccucauccggcccgccaa

SEQ ID NO: 127653 - RNA, 17 nt, Human herpesvirus 2
gagcucccugcggcugg

SEQ ID NO: 127654 - RNA, 14 nt, Human herpesvirus 2
gagcguaucggcca

SEQ ID NO: 127655 - RNA, 18 nt, Human herpesvirus 2
gaggccacucgucgccaa

SEQ ID NO: 127656 - RNA, 15 nt, Human herpesvirus 2
gaaccucgaccagua

SEQ ID NO: 127657 - RNA, 19 nt, Human herpesvirus 2
gaacacaagcucgccguga

SEQ ID NO: 127658 - RNA, 19 nt, Human herpesvirus 2
gaacacaggcgcuucaucg

SEQ ID NO: 127659 - RNA, 16 nt, Human herpesvirus 2
gaacaaaaacaaaaac

SEQ ID NO: 127660 - RNA, 19 nt, Human herpesvirus 2
gaacaaaaacaaaaaccuu

SEQ ID NO: 127661 - RNA, 21 nt, Human herpesvirus 2
cuuuaacagacucucggugau

SEQ ID NO: 127662 - RNA, 21 nt, Human herpesvirus 2
cuuguguauaaauaaaaagac

SEQ ID NO: 127663 - RNA, 15 nt, Human herpesvirus 2
gaacggucuccgcca

SEQ ID NO: 127664 - RNA, 21 nt, Human herpesvirus 2
gaacgccucaccgcgcccggg

SEQ ID NO: 127665 - RNA, 21 nt, Human herpesvirus 2
gaagcgccgcgcgggacccac

SEQ ID NO: 127666 - RNA, 18 nt, Human herpesvirus 2
aaacgcguccaaccgaua

SEQ ID NO: 127667 - RNA, 20 nt, Human herpesvirus 2
aaacgcaaaaaaaacaagac

SEQ ID NO: 127668 - RNA, 15 nt, Human herpesvirus 2
aaauaaacaccacaa

SEQ ID NO: 127669 - RNA, 21 nt, Human herpesvirus 2
gacccaccgcaccaccauacu

SEQ ID NO: 127670 - RNA, 16 nt, Human herpesvirus 2
gaccaugauccggcgg

SEQ ID NO: 127671 - RNA, 16 nt, Human herpesvirus 2
gacccgagcuccgggg

SEQ ID NO: 127672 - RNA, 14 nt, Human herpesvirus 2
gacccgccucgggc

SEQ ID NO: 127673 - RNA, 22 nt, Human herpesvirus 2
gaccgcagucuggucgaggugg

SEQ ID NO: 127674 - RNA, 15 nt, Human herpesvirus 2
gaccagcguccugcg

SEQ ID NO: 127675 - RNA, 12 nt, Human herpesvirus 2
gacagccccggg

SEQ ID NO: 127676 - RNA, 13 nt, Human herpesvirus 2
gacagccccgggg

SEQ ID NO: 127677 - RNA, 11 nt, Human herpesvirus 2
gacacccagau

SEQ ID NO: 127678 - RNA, 18 nt, Human herpesvirus 2
gacaccgauguucaaaaa

SEQ ID NO: 127679 - RNA, 20 nt, Human herpesvirus 2
aaacucguucguaaacacca

SEQ ID NO: 127680 - RNA, 22 nt, Human herpesvirus 2
aaagcgcuggcauuaaccaacc

SEQ ID NO: 127681 - RNA, 20 nt, Human herpesvirus 2
aaagugggggggugguggug

SEQ ID NO: 127682 - RNA, 13 nt, Human herpesvirus 2
aauuagcaacuuu

SEQ ID NO: 127683 - RNA, 17 nt, Human herpesvirus 2
aaguggggggguggugg

SEQ ID NO: 127684 - RNA, 20 nt, Human herpesvirus 2
aaguauggugaaacgcacaa

SEQ ID NO: 127685 - RNA, 16 nt, Human herpesvirus 2
aagacacacacacagg

SEQ ID NO: 127686 - RNA, 23 nt, Human herpesvirus 2
aagcgcuggcauuaaccaaccaa

SEQ ID NO: 127687 - RNA, 17 nt, Human herpesvirus 2
aaggcaaaacaauacca

SEQ ID NO: 127688 - RNA, 19 nt, Human herpesvirus 2
aauaauccggcgaucccca

SEQ ID NO: 127689 - RNA, 22 nt, Human herpesvirus 2
aauaccacgcgacgaaccagca

SEQ ID NO: 127690 - RNA, 17 nt, Human herpesvirus 2
aaccggacaaaaguaua

SEQ ID NO: 127691 - RNA, 14 nt, Human herpesvirus 2
aacugggguacugc

SEQ ID NO: 127692 - RNA, 17 nt, Human herpesvirus 2
aacugggguacugcacu

SEQ ID NO: 127693 - RNA, 18 nt, Human herpesvirus 2
aacugggguacugcacug

SEQ ID NO: 127694 - RNA, 14 nt, Human herpesvirus 2
aacuggguuacugc

SEQ ID NO: 127695 - RNA, 16 nt, Human herpesvirus 2
aacuggguuacugcac

SEQ ID NO: 127696 - RNA, 19 nt, Human herpesvirus 2
aacuggguuacugcacuug

SEQ ID NO: 127697 - RNA, 14 nt, Human herpesvirus 2
aaccacccaaccaa

SEQ ID NO: 127698 - RNA, 18 nt, Human herpesvirus 2
aaccgauguuauuugccu

SEQ ID NO: 127699 - RNA, 16 nt, Human herpesvirus 2
aacccccgacauuccc

SEQ ID NO: 127700 - RNA, 14 nt, Human herpesvirus 2
aaccccaaaccaac

SEQ ID NO: 127701 - RNA, 19 nt, Human herpesvirus 2
aacauuggcaagcaacuca

SEQ ID NO: 127702 - RNA, 16 nt, Human herpesvirus 2
uuuguguguugcugcg

SEQ ID NO: 127703 - RNA, 21 nt, Human herpesvirus 2
uuuuaacgggccgccauuccc

SEQ ID NO: 127704 - RNA, 21 nt, Human herpesvirus 2
uuuuaaugggccggcguuccc

SEQ ID NO: 127705 - RNA, 19 nt, Human herpesvirus 2
uuuucuuucggccaccacc

SEQ ID NO: 127706 - RNA, 23 nt, Human herpesvirus 2
uuuccccagcacggaggaacugg

SEQ ID NO: 127707 - RNA, 17 nt, Human herpesvirus 2
uuuccggcccucccgca

SEQ ID NO: 127708 - RNA, 21 nt, Human herpesvirus 2
uucuuucuggucuuccgggga

SEQ ID NO: 127709 - RNA, 14 nt, Human herpesvirus 2
uuguuuucccggga

SEQ ID NO: 127710 - RNA, 18 nt, Human herpesvirus 2
uuguuuuucuagucacac

SEQ ID NO: 127711 - RNA, 12 nt, Human herpesvirus 2
uuuaagacagac

SEQ ID NO: 127712 - RNA, 13 nt, Human herpesvirus 2
uuuaucgguugga

SEQ ID NO: 127713 - RNA, 14 nt, Human herpesvirus 2
uuuccaccaccagc

SEQ ID NO: 127714 - RNA, 14 nt, Human herpesvirus 2
uggcgcgcuugcac

SEQ ID NO: 127715 - RNA, 22 nt, Human herpesvirus 2
uggcggaaaccgacaugcaaau

SEQ ID NO: 127716 - RNA, 17 nt, Human herpesvirus 2
uggcgccuucuucgccc

SEQ ID NO: 127717 - RNA, 20 nt, Human herpesvirus 2
uggcggcuggggaaagggaa

SEQ ID NO: 127718 - RNA, 19 nt, Human herpesvirus 2
ugggguguuuuucuguugu

SEQ ID NO: 127719 - RNA, 17 nt, Human herpesvirus 2
ugggaugacggaggcca

SEQ ID NO: 127720 - RNA, 16 nt, Human herpesvirus 2
ugguucucguaccccc

SEQ ID NO: 127721 - RNA, 15 nt, Human herpesvirus 2
uggguuaccacaaca

SEQ ID NO: 127722 - RNA, 14 nt, Human herpesvirus 2
uggguuacugcacu

SEQ ID NO: 127723 - RNA, 19 nt, Human herpesvirus 2
uggguuacugcacuugccc

SEQ ID NO: 127724 - RNA, 20 nt, Human herpesvirus 2
uggguuacugcacuugcccc

SEQ ID NO: 127725 - RNA, 20 nt, Human herpesvirus 2
ugguaauuagaaacuuuuaa

SEQ ID NO: 127726 - RNA, 21 nt, Human herpesvirus 2
ugguaauuagaaacuuuuaau

SEQ ID NO: 127727 - RNA, 21 nt, Human herpesvirus 2
ugguaauuagcaacuuuuaau

SEQ ID NO: 127728 - RNA, 16 nt, Human herpesvirus 2
uggagaagggaaagga

SEQ ID NO: 127729 - RNA, 11 nt, Human herpesvirus 2
ugcuggugauu

SEQ ID NO: 127730 - RNA, 13 nt, Human herpesvirus 2
ugcggacuggcag

SEQ ID NO: 127731 - RNA, 14 nt, Human herpesvirus 2
ugcgcuuuccggcc

SEQ ID NO: 127732 - RNA, 23 nt, Human herpesvirus 2
ugcgcuuuccggcccucccgcac

SEQ ID NO: 127733 - RNA, 18 nt, Human herpesvirus 2
ugccguucggaccugggg

SEQ ID NO: 127734 - RNA, 15 nt, Human herpesvirus 2
ugccguggacgggua

SEQ ID NO: 127735 - RNA, 22 nt, Human herpesvirus 2
ugccguaugcuaauuaaauaca

SEQ ID NO: 127736 - RNA, 20 nt, Human herpesvirus 2
ugccuccacgcccugcugua

SEQ ID NO: 127737 - RNA, 13 nt, Human herpesvirus 2
ugcauuuccuccc

SEQ ID NO: 127738 - RNA, 19 nt, Human herpesvirus 2
uuccuccccucgccuguug

SEQ ID NO: 127739 - RNA, 11 nt, Human herpesvirus 2
uuccuccgugc

SEQ ID NO: 127740 - RNA, 23 nt, Human herpesvirus 2
uuccuccuucggugcacaagaca

SEQ ID NO: 127741 - RNA, 18 nt, Human herpesvirus 2
uucccaaacacugaggaa

SEQ ID NO: 127742 - RNA, 14 nt, Human herpesvirus 2
uucccgguauggua

SEQ ID NO: 127743 - RNA, 15 nt, Human herpesvirus 2
uucccgcuuauggua

SEQ ID NO: 127744 - RNA, 18 nt, Human herpesvirus 2
uucccgcuuaugguaauu

SEQ ID NO: 127745 - RNA, 20 nt, Human herpesvirus 2
uucaccacacagaaacacaa

SEQ ID NO: 127746 - RNA, 14 nt, Human herpesvirus 2
uucaauagauuucc

SEQ ID NO: 127747 - RNA, 16 nt, Human herpesvirus 2
uucaauagauuuccca

SEQ ID NO: 127748 - RNA, 20 nt, Human herpesvirus 2
uucaauagauuucccaaaca

SEQ ID NO: 127749 - RNA, 14 nt, Human herpesvirus 2
uuaugcaucucggg

SEQ ID NO: 127750 - RNA, 14 nt, Human herpesvirus 2
uuagauugacucag

SEQ ID NO: 127751 - RNA, 14 nt, Human herpesvirus 2
uuagcaacuuuuaa

SEQ ID NO: 127752 - RNA, 23 nt, Human herpesvirus 2
uuaaauacauaaaacccacccuc

SEQ ID NO: 127753 - RNA, 20 nt, Human herpesvirus 2
ugucggccgcggacgaccug

SEQ ID NO: 127754 - RNA, 14 nt, Human herpesvirus 2
uguuucgcauaugc

SEQ ID NO: 127755 - RNA, 17 nt, Human herpesvirus 2
ucuuggcguuauuucca

SEQ ID NO: 127756 - RNA, 16 nt, Human herpesvirus 2
ugaaacguacaacaca

SEQ ID NO: 127757 - RNA, 18 nt, Human herpesvirus 2
ugaaacguacaacacauc

SEQ ID NO: 127758 - RNA, 13 nt, Human herpesvirus 2
ugaccucucgccc

SEQ ID NO: 127759 - RNA, 16 nt, Human herpesvirus 2
ugacccacgccaacaa

SEQ ID NO: 127760 - RNA, 19 nt, Human herpesvirus 2
uccguauguuaauugcaau

SEQ ID NO: 127761 - RNA, 18 nt, Human herpesvirus 2
uccgucccccguacccac

SEQ ID NO: 127762 - RNA, 15 nt, Human herpesvirus 2
ucguaucgugccugg

SEQ ID NO: 127763 - RNA, 13 nt, Human herpesvirus 2
ucgugugcacgaa

SEQ ID NO: 127764 - RNA, 16 nt, Human herpesvirus 2
ucugcgucguccaggg

SEQ ID NO: 127765 - RNA, 15 nt, Human herpesvirus 2
ucugugcgccuuuaa

SEQ ID NO: 127766 - RNA, 20 nt, Human herpesvirus 2
ucauuccccggauggcaugg

SEQ ID NO: 127767 - RNA, 19 nt, Human herpesvirus 2
ucaugucuuuccaccacca

SEQ ID NO: 127768 - RNA, 18 nt, Human herpesvirus 2
ucccccguacuauacaac

SEQ ID NO: 127769 - RNA, 12 nt, Human herpesvirus 2
ucccaaacacug

SEQ ID NO: 127770 - RNA, 13 nt, Human herpesvirus 2
ucccaaacacuga

SEQ ID NO: 127771 - RNA, 14 nt, Human herpesvirus 2
uccccgaaagccac

SEQ ID NO: 127772 - RNA, 14 nt, Human herpesvirus 2
uccccucgccuguu

SEQ ID NO: 127773 - RNA, 18 nt, Human herpesvirus 2
uccccuccgcucccgccu

SEQ ID NO: 127774 - RNA, 17 nt, Human herpesvirus 2
ucccgcccgccagugca

SEQ ID NO: 127775 - RNA, 18 nt, Human herpesvirus 2
ucccgcccgccagugcau

SEQ ID NO: 127776 - RNA, 12 nt, Human herpesvirus 2
ucccuaacacgg

SEQ ID NO: 127777 - RNA, 14 nt, Human herpesvirus 2
uccgcccuccgcca

SEQ ID NO: 127778 - RNA, 17 nt, Human herpesvirus 2
uccgcccuccgccagcg

SEQ ID NO: 127779 - RNA, 22 nt, Human herpesvirus 2
uccgcgggaggcggugguuucc

SEQ ID NO: 127780 - RNA, 19 nt, Human herpesvirus 2
uccgcgccuccugcucgac

SEQ ID NO: 127781 - RNA, 18 nt, Human herpesvirus 2
ucaauaaaaaacaccaac

SEQ ID NO: 127782 - RNA, 13 nt, Human herpesvirus 2
ucaauaaagccag

SEQ ID NO: 127783 - RNA, 15 nt, Human herpesvirus 2
ucaauagauuuccca

SEQ ID NO: 127784 - RNA, 16 nt, Human herpesvirus 2
ucaauagauuucccca

SEQ ID NO: 127785 - RNA, 18 nt, Human herpesvirus 2
uauugaaacguacaacac

SEQ ID NO: 127786 - RNA, 16 nt, Human herpesvirus 2
guggggaacguuccau

SEQ ID NO: 127787 - RNA, 22 nt, Human herpesvirus 2
guggggagucgggccccuacuc

SEQ ID NO: 127788 - RNA, 21 nt, Human herpesvirus 2
gugggugcuucggggacuuga

SEQ ID NO: 127789 - RNA, 22 nt, Human herpesvirus 2
gugugacgcgaugggggguccg

SEQ ID NO: 127790 - RNA, 15 nt, Human herpesvirus 2
guggggggguggugg

SEQ ID NO: 127791 - RNA, 12 nt, Human herpesvirus 2
guuacugcacuu

SEQ ID NO: 127792 - RNA, 11 nt, Human herpesvirus 2
guggcccucca

SEQ ID NO: 127793 - RNA, 14 nt, Human herpesvirus 2
gugcgucuucccag

SEQ ID NO: 127794 - RNA, 11 nt, Human herpesvirus 2
gucgggguccc

SEQ ID NO: 127795 - RNA, 17 nt, Human herpesvirus 2
gucggccagcacgacca

SEQ ID NO: 127796 - RNA, 15 nt, Human herpesvirus 2
gucgcccauacaaau

SEQ ID NO: 127797 - RNA, 16 nt, Human herpesvirus 2
gucuaacccaguaaca

SEQ ID NO: 127798 - RNA, 16 nt, Human herpesvirus 2
gucucaauaaagccag

SEQ ID NO: 127799 - RNA, 17 nt, Human herpesvirus 2
gucucaauaaagccagg

SEQ ID NO: 127800 - RNA, 13 nt, Human herpesvirus 2
gucuccgguguga

SEQ ID NO: 127801 - RNA, 20 nt, Human herpesvirus 2
gucugaccacgagcacaaac

SEQ ID NO: 127802 - RNA, 17 nt, Human herpesvirus 2
gucugguuuuucugggg

SEQ ID NO: 127803 - RNA, 22 nt, Human herpesvirus 2
guccugugcgggauugcguuuu

SEQ ID NO: 127804 - RNA, 19 nt, Human herpesvirus 2
guugucgggggggauccag

SEQ ID NO: 127805 - RNA, 17 nt, Human herpesvirus 2
guuuaccgcgaccagcg

SEQ ID NO: 127806 - RNA, 15 nt, Human herpesvirus 2
guuguacccucucaa

SEQ ID NO: 127807 - RNA, 17 nt, Human herpesvirus 2
guuauaggccacacagu

SEQ ID NO: 127808 - RNA, 19 nt, Human herpesvirus 2
guuuuacgugacgucaauc

SEQ ID NO: 127809 - RNA, 17 nt, Human herpesvirus 2
guuuucccguuagcaca

SEQ ID NO: 127810 - RNA, 15 nt, Human herpesvirus 2
guuuuucuagucaca

SEQ ID NO: 127811 - RNA, 22 nt, Human herpesvirus 2
guuuuacauaacaguagggggu

SEQ ID NO: 127812 - RNA, 19 nt, Human herpesvirus 2
uacaccccccugacucagg

SEQ ID NO: 127813 - RNA, 12 nt, Human herpesvirus 2
uacacaccaacu

SEQ ID NO: 127814 - RNA, 13 nt, Human herpesvirus 2
uaaccaaccaacg

SEQ ID NO: 127815 - RNA, 14 nt, Human herpesvirus 2
uaccgcgaccagcg

SEQ ID NO: 127816 - RNA, 14 nt, Human herpesvirus 2
uaccacacauacga

SEQ ID NO: 127817 - RNA, 22 nt, Human herpesvirus 2
uacccggcagagagauuucccc

SEQ ID NO: 127818 - RNA, 19 nt, Human herpesvirus 2
uagaaaaacaaaugcagac

SEQ ID NO: 127819 - RNA, 13 nt, Human herpesvirus 2
uagcaacuuuuaa

SEQ ID NO: 127820 - RNA, 19 nt, Human herpesvirus 2
uagcgaugucuaaccgaaa

SEQ ID NO: 127821 - RNA, 18 nt, Human herpesvirus 2
uaggcccggggggggccu

SEQ ID NO: 127822 - RNA, 23 nt, Human herpesvirus 2
uagggaagucucuuggggaaauc

SEQ ID NO: 127823 - RNA, 17 nt, Human herpesvirus 2
uuucggcacccguccuc

SEQ ID NO: 127824 - RNA, 14 nt, Human herpesvirus 2
ugcaagcgggcggg

SEQ ID NO: 127825 - RNA, 17 nt, Human herpesvirus 2
uuagccaccgcgcccac

SEQ ID NO: 127826 - RNA, 17 nt, Human herpesvirus 2
uugggucugcgucgucc

SEQ ID NO: 127827 - RNA, 21 nt, Human herpesvirus 2
ggguaauggaugggcggggcc

SEQ ID NO: 127828 - RNA, 22 nt, Human herpesvirus 2
ggguaauggaugggcggggccc

SEQ ID NO: 127829 - RNA, 21 nt, Human herpesvirus 2
ggggcuccucagcgcggccgu

SEQ ID NO: 127830 - RNA, 17 nt, Human herpesvirus 2
ggggcgcugguggccgc

SEQ ID NO: 127831 - RNA, 13 nt, Human herpesvirus 2
ggggagggcgugg

SEQ ID NO: 127832 - RNA, 21 nt, Human herpesvirus 2
ggggaucugucgccggcgugg

SEQ ID NO: 127833 - RNA, 21 nt, Human herpesvirus 2
ggggcaacgagagacggccgc

SEQ ID NO: 127834 - RNA, 15 nt, Human herpesvirus 2
ggggcccgccgccgc

SEQ ID NO: 127835 - RNA, 19 nt, Human herpesvirus 2
gggcggccagccgcgcgac

SEQ ID NO: 127836 - RNA, 19 nt, Human herpesvirus 2
gggcggcguggccgcgacc

SEQ ID NO: 127837 - RNA, 14 nt, Human herpesvirus 2
gggcguccugcggc

SEQ ID NO: 127838 - RNA, 22 nt, Human herpesvirus 2
gggcguccugcggcagcgcgcc

SEQ ID NO: 127839 - RNA, 20 nt, Human herpesvirus 2
gggcgaaaaggcccggcccg

SEQ ID NO: 127840 - RNA, 17 nt, Human herpesvirus 2
gggcgcgcggcgcgagc

SEQ ID NO: 127841 - RNA, 23 nt, Human herpesvirus 2
ggccgccgcaacacccggcgcca

SEQ ID NO: 127842 - RNA, 15 nt, Human herpesvirus 2
gggcguugccggggg

SEQ ID NO: 127843 - RNA, 20 nt, Human herpesvirus 2
ggggaagcccuacggcggcc

SEQ ID NO: 127844 - RNA, 21 nt, Human herpesvirus 2
ggggaaggaaucgggcgucug

SEQ ID NO: 127845 - RNA, 20 nt, Human herpesvirus 2
ggggacacgcggcgggucgg

SEQ ID NO: 127846 - RNA, 17 nt, Human herpesvirus 2
gggccguucggcaggcc

SEQ ID NO: 127847 - RNA, 16 nt, Human herpesvirus 2
ggccucauccggcccg

SEQ ID NO: 127848 - RNA, 13 nt, Human herpesvirus 2
ggccgugggcguc

SEQ ID NO: 127849 - RNA, 14 nt, Human herpesvirus 2
ggcgaccccgcccc

SEQ ID NO: 127850 - RNA, 17 nt, Human herpesvirus 2
ggcgacgccgcggccga

SEQ ID NO: 127851 - RNA, 16 nt, Human herpesvirus 2
ggccggcggagccccg

SEQ ID NO: 127852 - RNA, 24 nt, Human herpesvirus 2
ggccgggagcguggggcgcgcacc

SEQ ID NO: 127853 - RNA, 15 nt, Human herpesvirus 2
ggccgcgguggcguc

SEQ ID NO: 127854 - RNA, 21 nt, Human herpesvirus 2
ggccgcccaacccgagcgacc

SEQ ID NO: 127855 - RNA, 13 nt, Human herpesvirus 2
ggguucggggcca

SEQ ID NO: 127856 - RNA, 15 nt, Human herpesvirus 2
ggguccgacgaggcc

SEQ ID NO: 127857 - RNA, 21 nt, Human herpesvirus 2
ggggucccgccucccggccgc

SEQ ID NO: 127858 - RNA, 21 nt, Human herpesvirus 2
ggucacaaaaggcacggcgcc

SEQ ID NO: 127859 - RNA, 15 nt, Human herpesvirus 2
ggucaccggggcgcc

SEQ ID NO: 127860 - RNA, 21 nt, Human herpesvirus 2
ggucgcgcuuuuccgccgccg

SEQ ID NO: 127861 - RNA, 19 nt, Human herpesvirus 2
ucccugcggcuggcgcggu

SEQ ID NO: 127862 - RNA, 14 nt, Human herpesvirus 2
uccccuggggcggc

SEQ ID NO: 127863 - RNA, 20 nt, Human herpesvirus 2
ucccgauggccgccccgcag

SEQ ID NO: 127864 - RNA, 22 nt, Human herpesvirus 2
ucccgauguuguguucgccgac

SEQ ID NO: 127865 - RNA, 13 nt, Human herpesvirus 2
ucccgcccgccag

SEQ ID NO: 127866 - RNA, 20 nt, Human herpesvirus 2
ucccggccgccauccccgcg

SEQ ID NO: 127867 - RNA, 23 nt, Human herpesvirus 2
ucccggccgccauccccgcgcau

SEQ ID NO: 127868 - RNA, 19 nt, Human herpesvirus 2
ucccggucggggccgccag

SEQ ID NO: 127869 - RNA, 13 nt, Human herpesvirus 2
ucccccgcggacc

SEQ ID NO: 127870 - RNA, 21 nt, Human herpesvirus 2
ucggccucguggucgggggcc

SEQ ID NO: 127871 - RNA, 19 nt, Human herpesvirus 2
ucggcggaaaugcgcgagc

SEQ ID NO: 127872 - RNA, 11 nt, Human herpesvirus 2
uccggggcggu

SEQ ID NO: 127873 - RNA, 22 nt, Human herpesvirus 2
uccggcggccaccccgccgcag

SEQ ID NO: 127874 - RNA, 14 nt, Human herpesvirus 2
ucgggcggacgucc

SEQ ID NO: 127875 - RNA, 22 nt, Human herpesvirus 2
ucgggggguggcggucgcgucc

SEQ ID NO: 127876 - RNA, 21 nt, Human herpesvirus 2
ucuucgcgggcaggccgcggc

SEQ ID NO: 127877 - RNA, 16 nt, Human herpesvirus 2
ucuuggggucgcgaac

SEQ ID NO: 127878 - RNA, 14 nt, Human herpesvirus 2
ugagccgcgcggcc

SEQ ID NO: 127879 - RNA, 14 nt, Human herpesvirus 2
ugaccggcgccgau

SEQ ID NO: 127880 - RNA, 13 nt, Human herpesvirus 2
ugacgacggcccc

SEQ ID NO: 127881 - RNA, 12 nt, Human herpesvirus 2
gccgccggccac

SEQ ID NO: 127882 - RNA, 22 nt, Human herpesvirus 2
gccgcgacaagacccggcggcg

SEQ ID NO: 127883 - RNA, 17 nt, Human herpesvirus 2
gccgcugggggggcggg

SEQ ID NO: 127884 - RNA, 13 nt, Human herpesvirus 2
gccggaccgggau

SEQ ID NO: 127885 - RNA, 22 nt, Human herpesvirus 2
gcgagaaggaggggggccucgg

SEQ ID NO: 127886 - RNA, 20 nt, Human herpesvirus 2
gcaccgcgcggaccggcccc

SEQ ID NO: 127887 - RNA, 13 nt, Human herpesvirus 2
gcaccggggcggc

SEQ ID NO: 127888 - RNA, 15 nt, Human herpesvirus 2
gcaacacccggcgcc

SEQ ID NO: 127889 - RNA, 16 nt, Human herpesvirus 2
gccgacggcggcgcac

SEQ ID NO: 127890 - RNA, 16 nt, Human herpesvirus 2
gccgacgugccgggga

SEQ ID NO: 127891 - RNA, 21 nt, Human herpesvirus 2
gccgacccgucuagcggccgg

SEQ ID NO: 127892 - RNA, 20 nt, Human herpesvirus 2
gcccucacgucuucgcccac

SEQ ID NO: 127893 - RNA, 23 nt, Human herpesvirus 2
gcccggaccccucaucgccgcgc

SEQ ID NO: 127894 - RNA, 18 nt, Human herpesvirus 2
gcccggacuccgccccgg

SEQ ID NO: 127895 - RNA, 13 nt, Human herpesvirus 2
gcccggcgccgcc

SEQ ID NO: 127896 - RNA, 20 nt, Human herpesvirus 2
gcacguaaaacacgggcgcu

SEQ ID NO: 127897 - RNA, 18 nt, Human herpesvirus 2
gcgcaggggggccgggga

SEQ ID NO: 127898 - RNA, 20 nt, Human herpesvirus 2
gcgacugccuccacgcccug

SEQ ID NO: 127899 - RNA, 15 nt, Human herpesvirus 2
gcgcuuggccgggga

SEQ ID NO: 127900 - RNA, 13 nt, Human herpesvirus 2
gcgcugcggggac

SEQ ID NO: 127901 - RNA, 15 nt, Human herpesvirus 2
gcggacagccagggc

SEQ ID NO: 127902 - RNA, 17 nt, Human herpesvirus 2
gcggaacccgcgggcgc

SEQ ID NO: 127903 - RNA, 20 nt, Human herpesvirus 2
gcggacaaacccgccggggc

SEQ ID NO: 127904 - RNA, 19 nt, Human herpesvirus 2
gcggacuggcagccgggac

SEQ ID NO: 127905 - RNA, 12 nt, Human herpesvirus 2
gcggaggcgugg

SEQ ID NO: 127906 - RNA, 23 nt, Human herpesvirus 2
gcggccccuguuggagccggagc

SEQ ID NO: 127907 - RNA, 14 nt, Human herpesvirus 2
gcggcccuggagcg

SEQ ID NO: 127908 - RNA, 21 nt, Human herpesvirus 2
ggcccgcuucauagcgcgucc

SEQ ID NO: 127909 - RNA, 22 nt, Human herpesvirus 2
ggccgaacgccucaccgcgccc

SEQ ID NO: 127910 - RNA, 14 nt, Human herpesvirus 2
ggcccgaggcgacc

SEQ ID NO: 127911 - RNA, 17 nt, Human herpesvirus 2
ggccccgccccgcccca

SEQ ID NO: 127912 - RNA, 14 nt, Human herpesvirus 2
ggccagcgggggcc

SEQ ID NO: 127913 - RNA, 22 nt, Human herpesvirus 2
ggccaggggggcaggcgggccc

SEQ ID NO: 127914 - RNA, 16 nt, Human herpesvirus 2
ggcaugcgacggcguc

SEQ ID NO: 127915 - RNA, 21 nt, Human herpesvirus 2
ggccaaccucauccgcggcgc

SEQ ID NO: 127916 - RNA, 22 nt, Human herpesvirus 2
ggccaauucuucccggagcgcc

SEQ ID NO: 127917 - RNA, 16 nt, Human herpesvirus 2
ggcaggcgcgcggguc

SEQ ID NO: 127918 - RNA, 16 nt, Human herpesvirus 2
ggacacgcggcggguc

SEQ ID NO: 127919 - RNA, 14 nt, Human herpesvirus 2
ggacgacgggcgcc

SEQ ID NO: 127920 - RNA, 17 nt, Human herpesvirus 2
gcuucgucaacagggcg

SEQ ID NO: 127921 - RNA, 21 nt, Human herpesvirus 2
gcuugccccucccccggccca

SEQ ID NO: 127922 - RNA, 16 nt, Human herpesvirus 2
gcuguucugccgcgcg

SEQ ID NO: 127923 - RNA, 23 nt, Human herpesvirus 2
gcuucaccgagagcgccgucggg

SEQ ID NO: 127924 - RNA, 14 nt, Human herpesvirus 2
gcuggcgccgccgg

SEQ ID NO: 127925 - RNA, 15 nt, Human herpesvirus 2
gcugguggccgcggu

SEQ ID NO: 127926 - RNA, 13 nt, Human herpesvirus 2
gcucgcggggccg

SEQ ID NO: 127927 - RNA, 17 nt, Human herpesvirus 2
gcucccggcccgggccc

SEQ ID NO: 127928 - RNA, 22 nt, Human herpesvirus 2
gcugccccgcgugcagcgcggg

SEQ ID NO: 127929 - RNA, 14 nt, Human herpesvirus 2
gcgggggccggggc

SEQ ID NO: 127930 - RNA, 19 nt, Human herpesvirus 2
gcgguagcggacgcacggc

SEQ ID NO: 127931 - RNA, 15 nt, Human herpesvirus 2
gcgggcccggggccc

SEQ ID NO: 127932 - RNA, 14 nt, Human herpesvirus 2
gcgggaggggcggg

SEQ ID NO: 127933 - RNA, 21 nt, Human herpesvirus 2
gcgggaugugucgcggggaca

SEQ ID NO: 127934 - RNA, 16 nt, Human herpesvirus 2
gcgggcaggccgcggc

SEQ ID NO: 127935 - RNA, 18 nt, Human herpesvirus 2
gcgggcaggccgcggcgc

SEQ ID NO: 127936 - RNA, 21 nt, Human herpesvirus 2
gcgggcgggaugaugcggggc

SEQ ID NO: 127937 - RNA, 15 nt, Human herpesvirus 2
gcgggcgggggucgg

SEQ ID NO: 127938 - RNA, 21 nt, Human herpesvirus 2
gcgggcguccccgagcggcgc

SEQ ID NO: 127939 - RNA, 15 nt, Human herpesvirus 2
gcgggcgcggcacac

SEQ ID NO: 127940 - RNA, 14 nt, Human herpesvirus 2
gcggggcaccggca

SEQ ID NO: 127941 - RNA, 18 nt, Human herpesvirus 2
gcggcuucuucgccgccc

SEQ ID NO: 127942 - RNA, 15 nt, Human herpesvirus 2
gcggcuugcgcgacc

SEQ ID NO: 127943 - RNA, 14 nt, Human herpesvirus 2
gcgggaagcgccgc

SEQ ID NO: 127944 - RNA, 23 nt, Human herpesvirus 2
gcgucguggcauggaagcccccg

SEQ ID NO: 127945 - RNA, 22 nt, Human herpesvirus 2
gcgugcguucuggcggcccugg

SEQ ID NO: 127946 - RNA, 15 nt, Human herpesvirus 2
gcgugcugcugagcc

SEQ ID NO: 127947 - RNA, 16 nt, Human herpesvirus 2
gcgucgggggccgggg

SEQ ID NO: 127948 - RNA, 21 nt, Human herpesvirus 2
gcguauaaaggcaggcgcgcg

SEQ ID NO: 127949 - RNA, 15 nt, Human herpesvirus 2
gcucgaccagcggcc

SEQ ID NO: 127950 - RNA, 14 nt, Human herpesvirus 2
gcguggccgcgacc

SEQ ID NO: 127951 - RNA, 16 nt, Human herpesvirus 2
gcguugccgggggcca

SEQ ID NO: 127952 - RNA, 15 nt, Human herpesvirus 2
cgcucggcaugcgcg

SEQ ID NO: 127953 - RNA, 17 nt, Human herpesvirus 2
cggcaugcagcccagag

SEQ ID NO: 127954 - RNA, 22 nt, Human herpesvirus 2
cggcccgauccgaacggcgcac

SEQ ID NO: 127955 - RNA, 21 nt, Human herpesvirus 2
cggcccgauucuuacggcgcg

SEQ ID NO: 127956 - RNA, 23 nt, Human herpesvirus 2
cgcgggcucguguuccggccgug

SEQ ID NO: 127957 - RNA, 17 nt, Human herpesvirus 2
cgcgugcagcgcgggcg

SEQ ID NO: 127958 - RNA, 13 nt, Human herpesvirus 2
cgcgggcggcgcc

SEQ ID NO: 127959 - RNA, 19 nt, Human herpesvirus 2
cgcggcgccaacgcgggcg

SEQ ID NO: 127960 - RNA, 18 nt, Human herpesvirus 2
ccuuguuggagcggucgc

SEQ ID NO: 127961 - RNA, 17 nt, Human herpesvirus 2
ccuuguuuucggucugg

SEQ ID NO: 127962 - RNA, 14 nt, Human herpesvirus 2
ccuggcucgccgug

SEQ ID NO: 127963 - RNA, 18 nt, Human herpesvirus 2
ccugcagaugcugcccgc

SEQ ID NO: 127964 - RNA, 23 nt, Human herpesvirus 2
ccucgugcgcaugggccgccagc

SEQ ID NO: 127965 - RNA, 18 nt, Human herpesvirus 2
ccucugcccgaccgggcg

SEQ ID NO: 127966 - RNA, 10 nt, Human herpesvirus 2
cgggggucgg

SEQ ID NO: 127967 - RNA, 20 nt, Human herpesvirus 2
cggcgcgggcggcgccgcgc

SEQ ID NO: 127968 - RNA, 16 nt, Human herpesvirus 2
cggccuuucccguggc

SEQ ID NO: 127969 - RNA, 21 nt, Human herpesvirus 2
cggcgaacacugccucggagg

SEQ ID NO: 127970 - RNA, 18 nt, Human herpesvirus 2
cggccggcggagccccgg

SEQ ID NO: 127971 - RNA, 12 nt, Human herpesvirus 2
cggcccuggagc

SEQ ID NO: 127972 - RNA, 12 nt, Human herpesvirus 2
cggccgccgcaa

SEQ ID NO: 127973 - RNA, 14 nt, Human herpesvirus 2
cggugaucgaggug

SEQ ID NO: 127974 - RNA, 22 nt, Human herpesvirus 2
cgguauggcugcccccgcgcac

SEQ ID NO: 127975 - RNA, 19 nt, Human herpesvirus 2
cguggaugccggggccgug

SEQ ID NO: 127976 - RNA, 19 nt, Human herpesvirus 2
cguggcccuccacgccgug

SEQ ID NO: 127977 - RNA, 13 nt, Human herpesvirus 2
cgucccgccacac

SEQ ID NO: 127978 - RNA, 18 nt, Human herpesvirus 2
cgugccaacucgcggcac

SEQ ID NO: 127979 - RNA, 20 nt, Human herpesvirus 2
cgucgcuccggcucccggcc

SEQ ID NO: 127980 - RNA, 15 nt, Human herpesvirus 2
cgucgcccuagaggc

SEQ ID NO: 127981 - RNA, 21 nt, Human herpesvirus 2
cgucgccgaauacgacgccca

SEQ ID NO: 127982 - RNA, 16 nt, Human herpesvirus 2
cgucucgucgccgcuc

SEQ ID NO: 127983 - RNA, 22 nt, Human herpesvirus 2
cguccucacggccaacgaggac

SEQ ID NO: 127984 - RNA, 22 nt, Human herpesvirus 2
cguccugcggcagcgcgccgac

SEQ ID NO: 127985 - RNA, 18 nt, Human herpesvirus 2
cguccggcuggcggcgcg

SEQ ID NO: 127986 - RNA, 22 nt, Human herpesvirus 2
cguccggcuggcggcgcggcac

SEQ ID NO: 127987 - RNA, 15 nt, Human herpesvirus 2
cgucaacagggcgcu

SEQ ID NO: 127988 - RNA, 15 nt, Human herpesvirus 2
cgucacgcaggccgc

SEQ ID NO: 127989 - RNA, 22 nt, Human herpesvirus 2
cuaccgcggcuucuucgccgcc

SEQ ID NO: 127990 - RNA, 18 nt, Human herpesvirus 2
cguuugggggcggacgug

SEQ ID NO: 127991 - RNA, 14 nt, Human herpesvirus 2
cguucccaccgcac

SEQ ID NO: 127992 - RNA, 16 nt, Human herpesvirus 2
cguucggcaggcccgc

SEQ ID NO: 127993 - RNA, 15 nt, Human herpesvirus 2
cguucguucgcccgg

SEQ ID NO: 127994 - RNA, 20 nt, Human herpesvirus 2
cgugucggagcucgacgcac

SEQ ID NO: 127995 - RNA, 21 nt, Human herpesvirus 2
cucccggccauccccggcgcc

SEQ ID NO: 127996 - RNA, 16 nt, Human herpesvirus 2
cucccggcccgccgac

SEQ ID NO: 127997 - RNA, 14 nt, Human herpesvirus 2
cuccccgcuggagc

SEQ ID NO: 127998 - RNA, 13 nt, Human herpesvirus 2
cucccucgccgcc

SEQ ID NO: 127999 - RNA, 20 nt, Human herpesvirus 2
cucccaauucgucaccuggc

SEQ ID NO: 128000 - RNA, 16 nt, Human herpesvirus 2
cucccagugccccgac

SEQ ID NO: 128001 - RNA, 21 nt, Human herpesvirus 2
cuggucacaaaaggcacggcg

SEQ ID NO: 128002 - RNA, 17 nt, Human herpesvirus 2
cuggggcggcggcgucu

SEQ ID NO: 128003 - RNA, 22 nt, Human herpesvirus 2
cuggggcuuccguugcgcgaca

SEQ ID NO: 128004 - RNA, 13 nt, Human herpesvirus 2
cuggcggcgcggc

SEQ ID NO: 128005 - RNA, 22 nt, Human herpesvirus 2
cuggcuggagaccgagcucgug

SEQ ID NO: 128006 - RNA, 16 nt, Human herpesvirus 2
cugggaacucgcccgc

SEQ ID NO: 128007 - RNA, 22 nt, Human herpesvirus 2
cuccgccaugcaacgccgggcg

SEQ ID NO: 128008 - RNA, 18 nt, Human herpesvirus 2
cuccgcaauaaacgccuu

SEQ ID NO: 128009 - RNA, 21 nt, Human herpesvirus 2
cuucggggacuugacggucgc

SEQ ID NO: 128010 - RNA, 20 nt, Human herpesvirus 2
cuucgucguagaucgggucc

SEQ ID NO: 128011 - RNA, 14 nt, Human herpesvirus 2
cuucccccgcccac

SEQ ID NO: 128012 - RNA, 17 nt, Human herpesvirus 2
cuucgcggcggccgcac

SEQ ID NO: 128013 - RNA, 13 nt, Human herpesvirus 2
cugucggccgcgg

SEQ ID NO: 128014 - RNA, 14 nt, Human herpesvirus 2
gagccgcgcggcca

SEQ ID NO: 128015 - RNA, 21 nt, Human herpesvirus 2
gacaccagcagcuugcggggc

SEQ ID NO: 128016 - RNA, 17 nt, Human herpesvirus 2
gagaggcccgccgcgca

SEQ ID NO: 128017 - RNA, 22 nt, Human herpesvirus 2
gaagcccgaacggaaggccucc

SEQ ID NO: 128018 - RNA, 16 nt, Human herpesvirus 2
gaacgccucaccgcgc

SEQ ID NO: 128019 - RNA, 15 nt, Human herpesvirus 2
gaacggucuccgcca

SEQ ID NO: 128020 - RNA, 24 nt, Human herpesvirus 2
gaacgugguguugggcgccggcca

SEQ ID NO: 128021 - RNA, 23 nt, Human herpesvirus 2
gaaccgcuggcuggagaccgagc

SEQ ID NO: 128022 - RNA, 15 nt, Human herpesvirus 2
cuugggggggcgucc

SEQ ID NO: 128023 - RNA, 17 nt, Human herpesvirus 2
accccgauagucccccg

SEQ ID NO: 128024 - RNA, 18 nt, Human herpesvirus 2
acccggacugcagccccg

SEQ ID NO: 128025 - RNA, 17 nt, Human herpesvirus 2
acccgacaacagccccu

SEQ ID NO: 128026 - RNA, 18 nt, Human herpesvirus 2
acccgacaacagccccug

SEQ ID NO: 128027 - RNA, 20 nt, Human herpesvirus 2
acccgccuaccagccccucg

SEQ ID NO: 128028 - RNA, 18 nt, Human herpesvirus 2
acccccgaacagccccug

SEQ ID NO: 128029 - RNA, 15 nt, Human herpesvirus 2
acggccagcgggggc

SEQ ID NO: 128030 - RNA, 23 nt, Human herpesvirus 2
acggccccggccgccuccccgcu

SEQ ID NO: 128031 - RNA, 14 nt, Human herpesvirus 2
agacgaggccgcca

SEQ ID NO: 128032 - RNA, 23 nt, Human herpesvirus 2
aggacaguucauaggccgggagc

SEQ ID NO: 128033 - RNA, 19 nt, Human herpesvirus 2
agagacgaugggagccccg

SEQ ID NO: 128034 - RNA, 18 nt, Human herpesvirus 2
agccaccgucccgcccgc

SEQ ID NO: 128035 - RNA, 13 nt, Human herpesvirus 2
cccggguccgggg

SEQ ID NO: 128036 - RNA, 13 nt, Human herpesvirus 2
cccgucccggcag

SEQ ID NO: 128037 - RNA, 13 nt, Human herpesvirus 2
cccgucugccagg

SEQ ID NO: 128038 - RNA, 21 nt, Human herpesvirus 2
cccggcgaccgccccgcgccg

SEQ ID NO: 128039 - RNA, 22 nt, Human herpesvirus 2
ccgcagccuauguucgcgggcg

SEQ ID NO: 128040 - RNA, 20 nt, Human herpesvirus 2
cccgcguauauauccgcgag

SEQ ID NO: 128041 - RNA, 20 nt, Human herpesvirus 2
cccgcguccgacacccgggc

SEQ ID NO: 128042 - RNA, 17 nt, Human herpesvirus 2
cccgcggaccaccgggc

SEQ ID NO: 128043 - RNA, 15 nt, Human herpesvirus 2
ccccggcggccccgg

SEQ ID NO: 128044 - RNA, 13 nt, Human herpesvirus 2
ccccggcuccgag

SEQ ID NO: 128045 - RNA, 16 nt, Human herpesvirus 2
ccccggggccgucgcg

SEQ ID NO: 128046 - RNA, 12 nt, Human herpesvirus 2
ccccgcgccgcc

SEQ ID NO: 128047 - RNA, 14 nt, Human herpesvirus 2
ccccgcgugcagcg

SEQ ID NO: 128048 - RNA, 17 nt, Human herpesvirus 2
ccccgucugucgccucu

SEQ ID NO: 128049 - RNA, 13 nt, Human herpesvirus 2
cccgagcuccggg

SEQ ID NO: 128050 - RNA, 14 nt, Human herpesvirus 2
ccccgacgcgcgcg

SEQ ID NO: 128051 - RNA, 13 nt, Human herpesvirus 2
cccacggaugccg

SEQ ID NO: 128052 - RNA, 18 nt, Human herpesvirus 2
ccccgaagcggccccgac

SEQ ID NO: 128053 - RNA, 19 nt, Human herpesvirus 2
ccccgaauaccaccggcgu

SEQ ID NO: 128054 - RNA, 16 nt, Human herpesvirus 2
ccccagggagccccgg

SEQ ID NO: 128055 - RNA, 22 nt, Human herpesvirus 2
ccggccaaccucauccgcggcg

SEQ ID NO: 128056 - RNA, 13 nt, Human herpesvirus 2
ccggggggcgugg

SEQ ID NO: 128057 - RNA, 16 nt, Human herpesvirus 2
ccggggggggccucgg

SEQ ID NO: 128058 - RNA, 15 nt, Human herpesvirus 2
ccgggcccggccgcg

SEQ ID NO: 128059 - RNA, 16 nt, Human herpesvirus 2
ccggggacacgcggcg

SEQ ID NO: 128060 - RNA, 12 nt, Human herpesvirus 2
ccguggguacgg

SEQ ID NO: 128061 - RNA, 17 nt, Human herpesvirus 2
ccguguaccucugggcc

SEQ ID NO: 128062 - RNA, 19 nt, Human herpesvirus 2
ccuauaaacucucccccgc

SEQ ID NO: 128063 - RNA, 18 nt, Human herpesvirus 2
ccuccgcccuccgccagc

SEQ ID NO: 128064 - RNA, 19 nt, Human herpesvirus 2
ccucgagcucuucggcugc

SEQ ID NO: 128065 - RNA, 22 nt, Human herpesvirus 2
ccgcgguggcgucggcggcccc

SEQ ID NO: 128066 - RNA, 19 nt, Human herpesvirus 2
ccgcuuuauaggacgcgcu

SEQ ID NO: 128067 - RNA, 22 nt, Human herpesvirus 2
ccgcgaugaccucccggcccgc

SEQ ID NO: 128068 - RNA, 14 nt, Human herpesvirus 2
ccgcgauuccgagg

SEQ ID NO: 128069 - RNA, 12 nt, Human herpesvirus 2
cacggccccgaa

SEQ ID NO: 128070 - RNA, 12 nt, Human herpesvirus 2
aggugcggagcc

SEQ ID NO: 128071 - RNA, 22 nt, Human herpesvirus 2
aggcaggggcagcucgcccccg

SEQ ID NO: 128072 - RNA, 22 nt, Human herpesvirus 2
ccacucgucgccaacggccagc

SEQ ID NO: 128073 - RNA, 12 nt, Human herpesvirus 2
ccagacgcccgc

SEQ ID NO: 128074 - RNA, 19 nt, Human herpesvirus 2
ccagcgcguugguccgggg

SEQ ID NO: 128075 - RNA, 12 nt, Human herpesvirus 2
ccagggcgucgc

SEQ ID NO: 128076 - RNA, 15 nt, Human herpesvirus 2
ccauaacgcgcccgc

SEQ ID NO: 128077 - RNA, 17 nt, Human herpesvirus 2
ccaucgacccggacugc

SEQ ID NO: 128078 - RNA, 18 nt, Human herpesvirus 2
ccaugggccccggucugu

SEQ ID NO: 128079 - RNA, 17 nt, Human herpesvirus 2
ccaugaccucucgccgc

SEQ ID NO: 128080 - RNA, 17 nt, Human herpesvirus 2
ccaugcaacgccgggcg

SEQ ID NO: 128081 - RNA, 16 nt, Human herpesvirus 2
cauccggucgacgucc

SEQ ID NO: 128082 - RNA, 15 nt, Human herpesvirus 2
caugcgacggcgucu

SEQ ID NO: 128083 - RNA, 14 nt, Human herpesvirus 2
cauguucggcgucg

SEQ ID NO: 128084 - RNA, 19 nt, Human herpesvirus 2
cauuugcccgcgggucugc

SEQ ID NO: 128085 - RNA, 14 nt, Human herpesvirus 2
ccaacgacggcguu

SEQ ID NO: 128086 - RNA, 18 nt, Human herpesvirus 2
ccaacgcgggcggucugg

SEQ ID NO: 128087 - RNA, 17 nt, Human herpesvirus 2
uguaaaacgcgggcggg

SEQ ID NO: 128088 - RNA, 18 nt, Human herpesvirus 2
uuuugucguuccuuccuc

SEQ ID NO: 128089 - RNA, 21 nt, Human herpesvirus 2
uggaggcgccucugcccgacc

SEQ ID NO: 128090 - RNA, 15 nt, Human herpesvirus 2
uggccgugcgcggcc

SEQ ID NO: 128091 - RNA, 23 nt, Human herpesvirus 2
ugcggccgacacggucggaauuu

SEQ ID NO: 128092 - RNA, 13 nt, Human herpesvirus 2
uggacugggccgc

SEQ ID NO: 128093 - RNA, 16 nt, Human herpesvirus 2
uggcgucggcggcccc

SEQ ID NO: 128094 - RNA, 22 nt, Human herpesvirus 2
uggcggccgccgcaacacccgg

SEQ ID NO: 128095 - RNA, 22 nt, Human herpesvirus 2
ugggccugugggucugcgccac

SEQ ID NO: 128096 - RNA, 23 nt, Human herpesvirus 2
ugggccugugggucugcgccacc

SEQ ID NO: 128097 - RNA, 14 nt, Human herpesvirus 2
uggcgaggggcggg

SEQ ID NO: 128098 - RNA, 22 nt, Human herpesvirus 2
ugggcgugucguugggcggccc

SEQ ID NO: 128099 - RNA, 14 nt, Human herpesvirus 2
ugggcucggcgucg

SEQ ID NO: 128100 - RNA, 19 nt, Human herpesvirus 2
uggggacgacgggcgcccc

SEQ ID NO: 128101 - RNA, 16 nt, Human herpesvirus 2
uggggagucgggcccc

SEQ ID NO: 128102 - RNA, 16 nt, Human herpesvirus 2
ugggggaacgcgcacc

SEQ ID NO: 128103 - RNA, 12 nt, Human herpesvirus 2
ucgccggggacc

SEQ ID NO: 128104 - RNA, 18 nt, Human herpesvirus 2
ucgcgcuuuuccgccgcc

SEQ ID NO: 128105 - RNA, 12 nt, Human herpesvirus 2
ucgcuccccgcg

SEQ ID NO: 128106 - RNA, 16 nt, Human herpesvirus 2
ucgcggcccggcgcca

SEQ ID NO: 128107 - RNA, 18 nt, Human herpesvirus 2
ucgcggccgcccgcgccg

SEQ ID NO: 128108 - RNA, 16 nt, Human herpesvirus 2
ucggaaagccggcccc

SEQ ID NO: 128109 - RNA, 19 nt, Human herpesvirus 2
ugcggggaccgcaccggac

SEQ ID NO: 128110 - RNA, 13 nt, Human herpesvirus 2
gcgcggacgcggc

SEQ ID NO: 128111 - RNA, 13 nt, Human herpesvirus 2
ggagucgccgccc

SEQ ID NO: 128112 - RNA, 17 nt, Human herpesvirus 2
ggcaacaaagggccucc

SEQ ID NO: 128113 - RNA, 17 nt, Human herpesvirus 2
ggcaacccccgggcguc

SEQ ID NO: 128114 - RNA, 20 nt, Human herpesvirus 2
ggcaacccgacggcggggcc

SEQ ID NO: 128115 - RNA, 18 nt, Human herpesvirus 2
ggaggaaacgcgcgcccc

SEQ ID NO: 128116 - RNA, 23 nt, Human herpesvirus 2
gcgcgacugccuccacgcccugc

SEQ ID NO: 128117 - RNA, 11 nt, Human herpesvirus 2
gcgcgcgcccc

SEQ ID NO: 128118 - RNA, 14 nt, Human herpesvirus 2
gcgccucgggcggc

SEQ ID NO: 128119 - RNA, 14 nt, Human herpesvirus 2
gcgccgucgggccc

SEQ ID NO: 128120 - RNA, 18 nt, Human herpesvirus 2
gcgccgccgcgcgggccc

SEQ ID NO: 128121 - RNA, 23 nt, Human herpesvirus 2
gcgccgcgacggccccggccgcc

SEQ ID NO: 128122 - RNA, 12 nt, Human herpesvirus 2
gcgccgggcgcg

SEQ ID NO: 128123 - RNA, 23 nt, Human herpesvirus 2
ggcgcggugccugacgccggcca

SEQ ID NO: 128124 - RNA, 14 nt, Human herpesvirus 2
ggcagcgcgccgac

SEQ ID NO: 128125 - RNA, 12 nt, Human herpesvirus 2
ggcggcggcguc

SEQ ID NO: 128126 - RNA, 13 nt, Human herpesvirus 2
ggcucgcggggcc

SEQ ID NO: 128127 - RNA, 12 nt, Human herpesvirus 2
ggcuggcggcgc

SEQ ID NO: 128128 - RNA, 12 nt, Human herpesvirus 2
gggcccaggucc

SEQ ID NO: 128129 - RNA, 13 nt, Human herpesvirus 2
gggccccagggcu

SEQ ID NO: 128130 - RNA, 13 nt, Human herpesvirus 2
gggacggccgggc

SEQ ID NO: 128131 - RNA, 23 nt, Human herpesvirus 2
gggagucgggccccuacucgcca

SEQ ID NO: 128132 - RNA, 19 nt, Human herpesvirus 2
gguuccccgagagcccagg

SEQ ID NO: 128133 - RNA, 14 nt, Human herpesvirus 2
guccccgagcggcg

SEQ ID NO: 128134 - RNA, 23 nt, Human herpesvirus 2
gucccgacgauuagccaccgcgc

SEQ ID NO: 128135 - RNA, 21 nt, Human herpesvirus 2
gucccgccugugugcucucaa

SEQ ID NO: 128136 - RNA, 19 nt, Human herpesvirus 2
gucacgcaggccgccccca

SEQ ID NO: 128137 - RNA, 12 nt, Human herpesvirus 2
guacccucucaa

SEQ ID NO: 128138 - RNA, 15 nt, Human herpesvirus 2
guauucccccgcggg

SEQ ID NO: 128139 - RNA, 21 nt, Human herpesvirus 2
gugacucgccauggcggccgc

SEQ ID NO: 128140 - RNA, 19 nt, Human herpesvirus 2
gugacuuggugcgccgccg

SEQ ID NO: 128141 - RNA, 15 nt, Human herpesvirus 2
gugccgucgccgcgc

SEQ ID NO: 128142 - RNA, 23 nt, Human herpesvirus 2
gugccucacgguccucaccgagc

SEQ ID NO: 128143 - RNA, 17 nt, Human herpesvirus 2
gugccccacccccgagc

SEQ ID NO: 128144 - RNA, 15 nt, Human herpesvirus 2
gucugcgccaccggc

SEQ ID NO: 128145 - RNA, 19 nt, Human herpesvirus 2
gucugucgcgacgccgcgg

SEQ ID NO: 128146 - RNA, 23 nt, Human herpesvirus 2
gucuuccggggacacgcggcggg

SEQ ID NO: 128147 - RNA, 20 nt, Human herpesvirus 2
guccuucgcgggggccgggg

SEQ ID NO: 128148 - RNA, 20 nt, Human herpesvirus 2
guccgcgggaagcgccgcgc

SEQ ID NO: 128149 - RNA, 23 nt, Human herpesvirus 2
guccggcggccaccccgccgcag

SEQ ID NO: 128150 - RNA, 17 nt, Human herpesvirus 2
guccgucagcgccgcgg

SEQ ID NO: 128151 - RNA, 23 nt, Human herpesvirus 2
guccuaaggcgccgacggcggcg

SEQ ID NO: 128152 - RNA, 16 nt, Human herpesvirus 2
guccugcggcagcgcg

SEQ ID NO: 128153 - RNA, 16 nt, Human herpesvirus 2
gucguuggccagcgcg

SEQ ID NO: 128154 - RNA, 20 nt, Human herpesvirus 2
gucgcggggacagccccggg

SEQ ID NO: 128155 - RNA, 18 nt, Human herpesvirus 2
gucgcuaacgagcgcgcu

SEQ ID NO: 128156 - RNA, 15 nt, Human herpesvirus 2
gucggagaggcccgc

SEQ ID NO: 128157 - RNA, 19 nt, Human herpesvirus 2
gucgcgcuuuuccgccgcc

SEQ ID NO: 128158 - RNA, 21 nt, Human herpesvirus 2
gucgcgcuuuuccgccgccgg

SEQ ID NO: 128159 - RNA, 20 nt, Human herpesvirus 2
gucggcggccccggcggccc

SEQ ID NO: 128160 - RNA, 22 nt, Human herpesvirus 2
gugggucugcgccaccggccug

SEQ ID NO: 128161 - RNA, 22 nt, Human herpesvirus 2
guggugcaguuugagcagccgc

SEQ ID NO: 128162 - RNA, 20 nt, Human herpesvirus 2
gugcgaccgggcggcgcgcc

SEQ ID NO: 128163 - RNA, 17 nt, Human herpesvirus 2
gugcgcaugggccgcca

SEQ ID NO: 128164 - RNA, 18 nt, Human herpesvirus 2
guugcgcuuuccggcccu

SEQ ID NO: 128165 - RNA, 15 nt, Human herpesvirus 2
guuguagggccgcgg

SEQ ID NO: 128166 - RNA, 18 nt, Human herpesvirus 2
guuguaguuguccgcggg

SEQ ID NO: 128167 - RNA, 19 nt, Human herpesvirus 2
guucuuggcgcgcgcggcg

SEQ ID NO: 128168 - RNA, 23 nt, Human herpesvirus 2
guugaaccggcgagggcggccuc

SEQ ID NO: 128169 - RNA, 17 nt, Human herpesvirus 2
ucaucgggaaucucggg

SEQ ID NO: 128170 - RNA, 14 nt, Human herpesvirus 2
ucaguccgcgcggg

SEQ ID NO: 128171 - RNA, 18 nt, Human herpesvirus 2
ucacgagguuuggggcgg

SEQ ID NO: 128172 - RNA, 19 nt, Human herpesvirus 2
ucacccgggcgccggggcc

SEQ ID NO: 128173 - RNA, 20 nt, Human herpesvirus 2
ucacaccagacggcgggacc

SEQ ID NO: 128174 - RNA, 14 nt, Human herpesvirus 2
uauuagcaucgggg

SEQ ID NO: 128175 - RNA, 17 nt, Human herpesvirus 2
uaagcgcugcggggacc

SEQ ID NO: 128176 - RNA, 15 nt, Human herpesvirus 2
uaccugacgcggccc

SEQ ID NO: 128177 - RNA, 12 nt, Human herpesvirus 2
uacgggggcggg

SEQ ID NO: 128178 - RNA, 23 nt, Human herpesvirus 2
uaguccgcgccuccugcucgacc

SEQ ID NO: 128179 - RNA, 19 nt, Human herpesvirus 2
gccgggaaccccggcgugg

SEQ ID NO: 128180 - RNA, 20 nt, Human herpesvirus 2
gccggggagggcagggccgc

SEQ ID NO: 128181 - RNA, 17 nt, Human herpesvirus 2
gccggggcggccccgau

SEQ ID NO: 128182 - RNA, 19 nt, Human herpesvirus 2
gcccgcguccccggcccuc

SEQ ID NO: 128183 - RNA, 15 nt, Human herpesvirus 2
gcccgcgaccccccg

SEQ ID NO: 128184 - RNA, 20 nt, Human herpesvirus 2
gcccgcgccgcgacggcccc

SEQ ID NO: 128185 - RNA, 21 nt, Human herpesvirus 2
gccccgauauucaagcccgcg

SEQ ID NO: 128186 - RNA, 13 nt, Human herpesvirus 2
gcccgcggaccac

SEQ ID NO: 128187 - RNA, 15 nt, Human herpesvirus 2
gcccgccaacccccg

SEQ ID NO: 128188 - RNA, 15 nt, Human herpesvirus 2
gcccgcccgccgccc

SEQ ID NO: 128189 - RNA, 17 nt, Human herpesvirus 2
gccccgcgugcagcgcg

SEQ ID NO: 128190 - RNA, 23 nt, Human herpesvirus 2
gccccgcgugcagcgcgggcgac

SEQ ID NO: 128191 - RNA, 14 nt, Human herpesvirus 2
gccccggcggcccc

SEQ ID NO: 128192 - RNA, 16 nt, Human herpesvirus 2
gccauucggccgcggc

SEQ ID NO: 128193 - RNA, 20 nt, Human herpesvirus 2
gccccacgucaccgggggcc

SEQ ID NO: 128194 - RNA, 15 nt, Human herpesvirus 2
gccccagagcccccc

SEQ ID NO: 128195 - RNA, 18 nt, Human herpesvirus 2
gccccagggggcggcgcc

SEQ ID NO: 128196 - RNA, 14 nt, Human herpesvirus 2
gccccccgggagcc

SEQ ID NO: 128197 - RNA, 15 nt, Human herpesvirus 2
gcccccgacgggcgc

SEQ ID NO: 128198 - RNA, 19 nt, Human herpesvirus 2
gcccccgcuggcgggagcc

SEQ ID NO: 128199 - RNA, 12 nt, Human herpesvirus 2
gcccccggggcc

SEQ ID NO: 128200 - RNA, 15 nt, Human herpesvirus 2
gccucgggcggcgug

SEQ ID NO: 128201 - RNA, 17 nt, Human herpesvirus 2
gccuggaucggcgucgg

SEQ ID NO: 128202 - RNA, 16 nt, Human herpesvirus 2
gccugguggucgucgg

SEQ ID NO: 128203 - RNA, 20 nt, Human herpesvirus 2
gccugugggucugcgccacc

SEQ ID NO: 128204 - RNA, 20 nt, Human herpesvirus 2
gcgaacauaggcugcggggc

SEQ ID NO: 128205 - RNA, 15 nt, Human herpesvirus 2
gccgugcgcggcccc

SEQ ID NO: 128206 - RNA, 19 nt, Human herpesvirus 2
gcgcccccgacccggggcc

SEQ ID NO: 128207 - RNA, 17 nt, Human herpesvirus 2
gcgcccccggccgcggu

SEQ ID NO: 128208 - RNA, 15 nt, Human herpesvirus 2
gcgccccgccggggc

SEQ ID NO: 128209 - RNA, 17 nt, Human herpesvirus 2
gcgccaacgcgggcguc

SEQ ID NO: 128210 - RNA, 15 nt, Human herpesvirus 2
gcgccaagcgccccg

SEQ ID NO: 128211 - RNA, 22 nt, Human herpesvirus 2
gcgaccccgccccccgacgcca

SEQ ID NO: 128212 - RNA, 19 nt, Human herpesvirus 2
gcgaaccgguagccggggc

SEQ ID NO: 128213 - RNA, 16 nt, Human herpesvirus 2
gcgaccgucgccgccg

SEQ ID NO: 128214 - RNA, 13 nt, Human herpesvirus 2
gcgacgccgcggc

SEQ ID NO: 128215 - RNA, 24 nt, Human herpesvirus 2
gaugaccucccggcccgccgacca

SEQ ID NO: 128216 - RNA, 15 nt, Human herpesvirus 2
gcagcuucaccgaga

SEQ ID NO: 128217 - RNA, 21 nt, Human herpesvirus 2
gacucggugcguuccagcgcg

SEQ ID NO: 128218 - RNA, 21 nt, Human herpesvirus 2
gagguccgucagcgccgcggc

SEQ ID NO: 128219 - RNA, 21 nt, Human herpesvirus 2
gaggccucauccggcccgcca

SEQ ID NO: 128220 - RNA, 17 nt, Human herpesvirus 2
gaggcuguccgccgggc

SEQ ID NO: 128221 - RNA, 16 nt, Human herpesvirus 2
gagggcccggcgccgc

SEQ ID NO: 128222 - RNA, 18 nt, Human herpesvirus 2
gagggcccggcgccgccc

SEQ ID NO: 128223 - RNA, 23 nt, Human herpesvirus 2
gagggccgcagccauucggccgc

SEQ ID NO: 128224 - RNA, 15 nt, Human herpesvirus 2
gaccugcagccggcg

SEQ ID NO: 128225 - RNA, 18 nt, Human herpesvirus 2
gaccugccccggcgcguc

SEQ ID NO: 128226 - RNA, 21 nt, Human herpesvirus 2
gaccgccccccccggcggggc

SEQ ID NO: 128227 - RNA, 19 nt, Human herpesvirus 2
gacccugccccccggcgcg

SEQ ID NO: 128228 - RNA, 18 nt, Human herpesvirus 2
gacccuguggcgggcgcu

SEQ ID NO: 128229 - RNA, 16 nt, Human herpesvirus 2
gaccccgaccccgagc

SEQ ID NO: 128230 - RNA, 14 nt, Human herpesvirus 2
gacccagucgccca

SEQ ID NO: 128231 - RNA, 20 nt, Human herpesvirus 2
gaccacccuaaggaugcccg

SEQ ID NO: 128232 - RNA, 16 nt, Human herpesvirus 2
gaccaccggccgaggc

SEQ ID NO: 128233 - RNA, 16 nt, Human herpesvirus 2
gacacgcgcccggggc

SEQ ID NO: 128234 - RNA, 20 nt, Human herpesvirus 2
cuggacccagacacggugcg

SEQ ID NO: 128235 - RNA, 15 nt, Human herpesvirus 2
gaccgucgccgccgg

SEQ ID NO: 128236 - RNA, 14 nt, Human herpesvirus 2
gacgcgaggcgcgg

SEQ ID NO: 128237 - RNA, 22 nt, Human herpesvirus 2
gacgaugcauguucggcgucgu

SEQ ID NO: 128238 - RNA, 16 nt, Human herpesvirus 2
gacgcggcgauggccg

SEQ ID NO: 128239 - RNA, 18 nt, Human herpesvirus 2
gacgcggggucgagcgcg

SEQ ID NO: 128240 - RNA, 23 nt, Human herpesvirus 2
gacucacucguggaugccggggc

SEQ ID NO: 128241 - RNA, 23 nt, Human herpesvirus 2
gacgggugggccuagccgugggc

SEQ ID NO: 128242 - RNA, 14 nt, Human herpesvirus 2
gacgcccggcccau

SEQ ID NO: 128243 - RNA, 12 nt, Human herpesvirus 2
gacggccgcgga

SEQ ID NO: 128244 - RNA, 16 nt, Human herpesvirus 2
gacggcaccgccgggc

SEQ ID NO: 128245 - RNA, 17 nt, Human herpesvirus 2
cgggcgaaaaggcccgg

SEQ ID NO: 128246 - RNA, 15 nt, Human herpesvirus 2
cgggcgacgccgcgg

SEQ ID NO: 128247 - RNA, 14 nt, Human herpesvirus 2
cgggcgggggucgg

SEQ ID NO: 128248 - RNA, 17 nt, Human herpesvirus 2
cgggcgggggucgggcg

SEQ ID NO: 128249 - RNA, 21 nt, Human herpesvirus 2
cgggauccuccgccagcucgg

SEQ ID NO: 128250 - RNA, 19 nt, Human herpesvirus 2
cgggggacgggccgcccgg

SEQ ID NO: 128251 - RNA, 22 nt, Human herpesvirus 2
cgggggaucugucgccggcgug

SEQ ID NO: 128252 - RNA, 22 nt, Human herpesvirus 2
cgggcguuauaagccgccgcac

SEQ ID NO: 128253 - RNA, 13 nt, Human herpesvirus 2
cggggacgcacgg

SEQ ID NO: 128254 - RNA, 18 nt, Human herpesvirus 2
cgggggcggugacgcccg

SEQ ID NO: 128255 - RNA, 14 nt, Human herpesvirus 2
cucgcggcggcucc

SEQ ID NO: 128256 - RNA, 16 nt, Human herpesvirus 2
cucguuccucacgggg

SEQ ID NO: 128257 - RNA, 17 nt, Human herpesvirus 2
cucugcccgaccgggcg

SEQ ID NO: 128258 - RNA, 17 nt, Human herpesvirus 2
cucugccugcacgagcg

SEQ ID NO: 128259 - RNA, 16 nt, Human herpesvirus 2
cugcggacuggcagcc

SEQ ID NO: 128260 - RNA, 16 nt, Human herpesvirus 2
cugccggacgcggcac

SEQ ID NO: 128261 - RNA, 19 nt, Human herpesvirus 2
cugcgcauggccugcgagg

SEQ ID NO: 128262 - RNA, 17 nt, Human herpesvirus 2
cggcaaccccagggcgu

SEQ ID NO: 128263 - RNA, 16 nt, Human herpesvirus 2
cggcgucuagcucgcg

SEQ ID NO: 128264 - RNA, 23 nt, Human herpesvirus 2
cggagucccccggcuccgaguug

SEQ ID NO: 128265 - RNA, 12 nt, Human herpesvirus 2
cggaccuccggg

SEQ ID NO: 128266 - RNA, 16 nt, Human herpesvirus 2
cggacugcagccccgg

SEQ ID NO: 128267 - RNA, 15 nt, Human herpesvirus 2
cgcggacgccgggcg

SEQ ID NO: 128268 - RNA, 20 nt, Human herpesvirus 2
cgcgcaucucuggcuccagg

SEQ ID NO: 128269 - RNA, 18 nt, Human herpesvirus 2
cgcccuuccgcguccgcg

SEQ ID NO: 128270 - RNA, 12 nt, Human herpesvirus 2
cgccgccccgac

SEQ ID NO: 128271 - RNA, 22 nt, Human herpesvirus 2
cgccgcgggggaggcgcgcgcg

SEQ ID NO: 128272 - RNA, 19 nt, Human herpesvirus 2
cgccgggaaccccggcgug

SEQ ID NO: 128273 - RNA, 20 nt, Human herpesvirus 2
cgccgggcgcgcccaccggu

SEQ ID NO: 128274 - RNA, 18 nt, Human herpesvirus 2
cgccgggcgcgcggcgcg

SEQ ID NO: 128275 - RNA, 22 nt, Human herpesvirus 2
cgccggccaaccgcgcgccgcc

SEQ ID NO: 128276 - RNA, 17 nt, Human herpesvirus 2
cgccgacggcggcgcac

SEQ ID NO: 128277 - RNA, 16 nt, Human herpesvirus 2
cgccgggucaugaacg

SEQ ID NO: 128278 - RNA, 18 nt, Human herpesvirus 2
cgccuccccgcuggagcc

SEQ ID NO: 128279 - RNA, 15 nt, Human herpesvirus 2
cgccucccggccgcc

SEQ ID NO: 128280 - RNA, 17 nt, Human herpesvirus 2
cgcccaagcggcccgag

SEQ ID NO: 128281 - RNA, 12 nt, Human herpesvirus 2
cgcccgccccag

SEQ ID NO: 128282 - RNA, 13 nt, Human herpesvirus 2
cgcccgcgugccg

SEQ ID NO: 128283 - RNA, 23 nt, Human herpesvirus 2
cgccccgccccaccccgccccac

SEQ ID NO: 128284 - RNA, 16 nt, Human herpesvirus 2
cgccccccgucccgag

SEQ ID NO: 128285 - RNA, 16 nt, Human herpesvirus 2
cgcccccacccccgag

SEQ ID NO: 128286 - RNA, 14 nt, Human herpesvirus 2
cgccaucgugcgcu

SEQ ID NO: 128287 - RNA, 21 nt, Human herpesvirus 2
cgccaugcaacgccgggcgcg

SEQ ID NO: 128288 - RNA, 16 nt, Human herpesvirus 2
cgccaagcgccccgcg

SEQ ID NO: 128289 - RNA, 13 nt, Human herpesvirus 2
cgcagcggcgucc

SEQ ID NO: 128290 - RNA, 22 nt, Human herpesvirus 2
cgcacguacguucugccccgcg

SEQ ID NO: 128291 - RNA, 18 nt, Human herpesvirus 2
cgcaacaacggcgggccc

SEQ ID NO: 128292 - RNA, 15 nt, Human herpesvirus 2
cgagggcgagcucgg

SEQ ID NO: 128293 - RNA, 14 nt, Human herpesvirus 2
cgaucugccccgac

SEQ ID NO: 128294 - RNA, 14 nt, Human herpesvirus 2
cgacugucgugccg

SEQ ID NO: 128295 - RNA, 17 nt, Human herpesvirus 2
cgacuuccucgugcgca

SEQ ID NO: 128296 - RNA, 16 nt, Human herpesvirus 2
cgacgcguacguggcg

SEQ ID NO: 128297 - RNA, 13 nt, Human herpesvirus 2
cgaccucgucgcg

SEQ ID NO: 128298 - RNA, 18 nt, Human herpesvirus 2
cgaccagcguccugcgcg

SEQ ID NO: 128299 - RNA, 21 nt, Human herpesvirus 2
cgaccccgccccccgacgcca

SEQ ID NO: 128300 - RNA, 18 nt, Human herpesvirus 2
cgaccgccccgcgccggc

SEQ ID NO: 128301 - RNA, 20 nt, Human herpesvirus 2
cgacagcggggacccgggcg

SEQ ID NO: 128302 - RNA, 14 nt, Human herpesvirus 2
cgacacccgggccc

SEQ ID NO: 128303 - RNA, 17 nt, Human herpesvirus 2
cagggggcggcgccggc

SEQ ID NO: 128304 - RNA, 23 nt, Human herpesvirus 2
caggggggcuuggacugggagcc

SEQ ID NO: 128305 - RNA, 13 nt, Human herpesvirus 2
cauacgcggcgug

SEQ ID NO: 128306 - RNA, 22 nt, Human herpesvirus 2
cagggccuggcgauccugggcc

SEQ ID NO: 128307 - RNA, 24 nt, Human herpesvirus 2
acgccuccggaagagagcgccccg

SEQ ID NO: 128308 - RNA, 20 nt, Human herpesvirus 2
acgcgguauggcugcccccg

SEQ ID NO: 128309 - RNA, 19 nt, Human herpesvirus 2
acgcgguauuguacccccg

SEQ ID NO: 128310 - RNA, 13 nt, Human herpesvirus 2
acgugugcccgcc

SEQ ID NO: 128311 - RNA, 21 nt, Human herpesvirus 2
acgcgcgacugccuccacgcc

SEQ ID NO: 128312 - RNA, 17 nt, Human herpesvirus 2
acgcgaccgucgccgcc

SEQ ID NO: 128313 - RNA, 13 nt, Human herpesvirus 2
acgccgaugccca

SEQ ID NO: 128314 - RNA, 17 nt, Human herpesvirus 2
agcggcccgaggcgacc

SEQ ID NO: 128315 - RNA, 21 nt, Human herpesvirus 2
agcgggggaggggggagaugg

SEQ ID NO: 128316 - RNA, 17 nt, Human herpesvirus 2
acuggcagccgggacga

SEQ ID NO: 128317 - RNA, 16 nt, Human herpesvirus 2
accgcugucgcccccg

SEQ ID NO: 128318 - RNA, 14 nt, Human herpesvirus 2
accgcgcgccgccg

SEQ ID NO: 128319 - RNA, 20 nt, Human herpesvirus 2
accgcggcuucuucgccgcc

SEQ ID NO: 128320 - RNA, 20 nt, Human herpesvirus 2
aaacccgccggggcuucgug

SEQ ID NO: 128321 - RNA, 19 nt, Human herpesvirus 2
aacaacacguucgccccgc

SEQ ID NO: 128322 - RNA, 20 nt, Human herpesvirus 2
caccuggcucgccgugcgcu

SEQ ID NO: 128323 - RNA, 13 nt, Human herpesvirus 2
caacguccgggcg

SEQ ID NO: 128324 - RNA, 19 nt, Human herpesvirus 2
cacccugcguuccgugcgg

SEQ ID NO: 128325 - RNA, 15 nt, Human herpesvirus 2
cacccugggucggga

SEQ ID NO: 128326 - RNA, 13 nt, Human herpesvirus 2
cagccccuggggc

SEQ ID NO: 128327 - RNA, 22 nt, Human herpesvirus 2
cagccccuggggcugucgggcg

SEQ ID NO: 128328 - RNA, 18 nt, Human herpesvirus 2
auaggcugcggggcgaac

SEQ ID NO: 128329 - RNA, 17 nt, Human herpesvirus 2
agcguccggcuggcggc

SEQ ID NO: 128330 - RNA, 13 nt, Human herpesvirus 2
agcucccugcggc

SEQ ID NO: 128331 - RNA, 17 nt, Human herpesvirus 2
agcguggggcgcgcacc

SEQ ID NO: 128332 - RNA, 15 nt, Human herpesvirus 2
agcugcucgcgcacc

SEQ ID NO: 128333 - RNA, 17 nt, Human herpesvirus 2
agcugguaucggcgacc

SEQ ID NO: 128334 - RNA, 16 nt, Human herpesvirus 2
auucgggggucgggcg

SEQ ID NO: 128335 - RNA, 21 nt, Human herpesvirus 2
caaagggggaauacgugcgcu

SEQ ID NO: 128336 - RNA, 20 nt, Human herpesvirus 2
caaaccccgguuggggcggg

SEQ ID NO: 128337 - RNA, 20 nt, Homo sapiens
acagugacuccacucugagu

SEQ ID NO: 128338 - RNA, 22 nt, Homo sapiens
ucaaagaaauuuccacucaggu

SEQ ID NO: 128339 - RNA, 18 nt, Homo sapiens
uccuggggaacauagaac

SEQ ID NO: 128340 - RNA, 19 nt, Homo sapiens
acauuuguuguucuguuaa

SEQ ID NO: 128341 - RNA, 22 nt, Homo sapiens
gugcuucuuaaaauagccauaa

SEQ ID NO: 128342 - RNA, 21 nt, Homo sapiens
aaaaagcccuuaaaaauaugu

SEQ ID NO: 128343 - RNA, 23 nt, Homo sapiens
aaugagcaaaaccaaauauucca

SEQ ID NO: 128344 - RNA, 21 nt, Homo sapiens
ccgccacccucccacugccaa

SEQ ID NO: 128345 - RNA, 23 nt, Homo sapiens
caguuggcuaagaagugacucuu

SEQ ID NO: 128346 - RNA, 19 nt, Homo sapiens
aggauuugggcucuuggaa

SEQ ID NO: 128347 - RNA, 12 nt, Homo sapiens
uauuccagagac

SEQ ID NO: 128348 - RNA, 23 nt, Homo sapiens
cuucucugcuaucuagaucugaa

SEQ ID NO: 128349 - RNA, 22 nt, Homo sapiens
uggggacacagcaucagcucaa

SEQ ID NO: 128350 - RNA, 15 nt, Homo sapiens
cuggagucugucaau

SEQ ID NO: 128351 - RNA, 12 nt, Homo sapiens
gguauuuagcca

SEQ ID NO: 128352 - RNA, 15 nt, Homo sapiens
ugugggcuccauuca

SEQ ID NO: 128353 - RNA, 23 nt, Homo sapiens
ugaaaagaaucggcaauguuuca

SEQ ID NO: 128354 - RNA, 16 nt, Homo sapiens
uagaaaagggaacuga

SEQ ID NO: 128355 - RNA, 21 nt, Homo sapiens
cuaagaagcagauaauggugu

SEQ ID NO: 128356 - RNA, 12 nt, Homo sapiens
agcaucagcuca

SEQ ID NO: 128357 - RNA, 13 nt, Homo sapiens
gauaugcuguauu

SEQ ID NO: 128358 - RNA, 20 nt, Homo sapiens
uugaaguauauucaaccaaa

SEQ ID NO: 128359 - RNA, 14 nt, Homo sapiens
aaaaggcagaguac

SEQ ID NO: 128360 - RNA, 14 nt, Homo sapiens
cacaaucugaaaca

SEQ ID NO: 128361 - RNA, 14 nt, Homo sapiens
caauguuuuagaau

SEQ ID NO: 128362 - RNA, 18 nt, Homo sapiens
aaguaauccaccugccuc

SEQ ID NO: 128363 - RNA, 12 nt, Homo sapiens
agugauuuccac

SEQ ID NO: 128364 - RNA, 19 nt, Homo sapiens
agggaacugaacauuccag

SEQ ID NO: 128365 - RNA, 13 nt, Homo sapiens
aauauaucaguaa

SEQ ID NO: 128366 - RNA, 19 nt, Homo sapiens
cuuccuggaggugacacuu

SEQ ID NO: 128367 - RNA, 17 nt, Homo sapiens
accuaacgagaaauaga

SEQ ID NO: 128368 - RNA, 19 nt, Homo sapiens
caaagugcugggauuacag

SEQ ID NO: 128369 - RNA, 23 nt, Homo sapiens
uuccaaucuguccuguuacaaaa

SEQ ID NO: 128370 - RNA, 16 nt, Homo sapiens
ucaggcagaucucagc

SEQ ID NO: 128371 - RNA, 13 nt, Homo sapiens
gccauaugaauaa

SEQ ID NO: 128372 - RNA, 14 nt, Homo sapiens
ugcacguauuuuaa

SEQ ID NO: 128373 - RNA, 23 nt, Homo sapiens
aagacgugauuuugcuguagaag

SEQ ID NO: 128374 - RNA, 12 nt, Homo sapiens
uaagacugugua

SEQ ID NO: 128375 - RNA, 17 nt, Homo sapiens
ucaaucccucaaaacaa

SEQ ID NO: 128376 - RNA, 14 nt, Homo sapiens
ucuaaguaaauaca

SEQ ID NO: 128377 - RNA, 21 nt, Homo sapiens
cagagucucgcucuguugccc

SEQ ID NO: 128378 - RNA, 16 nt, Homo sapiens
uacuauuuuuacuaau

SEQ ID NO: 128379 - RNA, 16 nt, Homo sapiens
acaauauacuuguaua

SEQ ID NO: 128380 - RNA, 16 nt, Homo sapiens
aaucucuccauucccg

SEQ ID NO: 128381 - RNA, 12 nt, Homo sapiens
uuaagaaauuca

SEQ ID NO: 128382 - RNA, 19 nt, Homo sapiens
aacugaaugccacucugua

SEQ ID NO: 128383 - RNA, 18 nt, Homo sapiens
uuaagaaauucacuuccc

SEQ ID NO: 128384 - RNA, 22 nt, Homo sapiens
uugcacaaauugggccaaagaa

SEQ ID NO: 128385 - RNA, 15 nt, Homo sapiens
acaaagccaaucuca

SEQ ID NO: 128386 - RNA, 13 nt, Homo sapiens
agaaagugaucca

SEQ ID NO: 128387 - RNA, 22 nt, Homo sapiens
ucaagacgucacccuccauucu

SEQ ID NO: 128388 - RNA, 20 nt, Homo sapiens
aaggcugugccaucagcucc

SEQ ID NO: 128389 - RNA, 13 nt, Homo sapiens
caaucccucaaaa

SEQ ID NO: 128390 - RNA, 18 nt, Homo sapiens
acgugauuuugcuguaga

SEQ ID NO: 128391 - RNA, 20 nt, Homo sapiens
ugcuggcaguggaacuaaga

SEQ ID NO: 128392 - RNA, 18 nt, Homo sapiens
ugcaaugacacagucuug

SEQ ID NO: 128393 - RNA, 23 nt, Homo sapiens
gaagggcuuggacucaagcaaga

SEQ ID NO: 128394 - RNA, 17 nt, Homo sapiens
ggcuaguaaaagccauc

SEQ ID NO: 128395 - RNA, 18 nt, Homo sapiens
augcuggggacacagcau

SEQ ID NO: 128396 - RNA, 11 nt, Homo sapiens
auaguuuccaa

SEQ ID NO: 128397 - RNA, 14 nt, Homo sapiens
aauaaaauuguaca

SEQ ID NO: 128398 - RNA, 22 nt, Homo sapiens
aguuccgacugccaucuuggac

SEQ ID NO: 128399 - RNA, 12 nt, Homo sapiens
ugaaacaucauu

SEQ ID NO: 128400 - RNA, 20 nt, Homo sapiens
caggguuucaccauguuggc

SEQ ID NO: 128401 - RNA, 20 nt, Homo sapiens
guuaaaaguuguguuuugaa

SEQ ID NO: 128402 - RNA, 13 nt, Homo sapiens
cagccucaucucu

SEQ ID NO: 128403 - RNA, 16 nt, Homo sapiens
caauauuguacaguuu

SEQ ID NO: 128404 - RNA, 22 nt, Homo sapiens
uccuaagccaugggagacacug

SEQ ID NO: 128405 - RNA, 18 nt, Homo sapiens
aagagaaguuuucuugac

SEQ ID NO: 128406 - RNA, 15 nt, Homo sapiens
ggcuggagugcaaug

SEQ ID NO: 128407 - RNA, 14 nt, Homo sapiens
uggcucaucucuuu

SEQ ID NO: 128408 - RNA, 13 nt, Homo sapiens
ccuacugagacag

SEQ ID NO: 128409 - RNA, 20 nt, Homo sapiens
agcuuacaagccagcuggag

SEQ ID NO: 128410 - RNA, 10 nt, Homo sapiens
ucccaaagag

SEQ ID NO: 128411 - RNA, 20 nt, Homo sapiens
cugaccaauauuguacaguu

SEQ ID NO: 128412 - RNA, 19 nt, Homo sapiens
uguauuuaaaugaaaguga

SEQ ID NO: 128413 - RNA, 18 nt, Homo sapiens
ucauaaaagucacuuuau

SEQ ID NO: 128414 - RNA, 21 nt, Homo sapiens
aguagcuggauuacaggcaug

SEQ ID NO: 128415 - RNA, 18 nt, Homo sapiens
gcgcccagccucaucucu

SEQ ID NO: 128416 - RNA, 19 nt, Homo sapiens
guuuauacccguuucacau

SEQ ID NO: 128417 - RNA, 23 nt, Homo sapiens
cauucugcacucagaaaauggca

SEQ ID NO: 128418 - RNA, 18 nt, Homo sapiens
aaaccugaugcuggggac

SEQ ID NO: 128419 - RNA, 15 nt, Homo sapiens
guuuccaaucugucc

SEQ ID NO: 128420 - RNA, 15 nt, Homo sapiens
cagcauggagucaca

SEQ ID NO: 128421 - RNA, 19 nt, Homo sapiens
ugcuucuuaaaauagccau

SEQ ID NO: 128422 - RNA, 20 nt, Homo sapiens
guagaaagugauccauacuu

SEQ ID NO: 128423 - RNA, 17 nt, Homo sapiens
ugaaagugagacuuuga

SEQ ID NO: 128424 - RNA, 16 nt, Homo sapiens
aaauauaguucacaau

SEQ ID NO: 128425 - RNA, 17 nt, Homo sapiens
agaaaguggcuugaaau

SEQ ID NO: 128426 - RNA, 15 nt, Homo sapiens
uggauuugucuuugg

SEQ ID NO: 128427 - RNA, 21 nt, Homo sapiens
accuucaguugucucugaugu

SEQ ID NO: 128428 - RNA, 13 nt, Homo sapiens
cuaaguaaauaca

SEQ ID NO: 128429 - RNA, 18 nt, Homo sapiens
auguaagaucguucucug

SEQ ID NO: 128430 - RNA, 16 nt, Homo sapiens
ggaaagccaguuacau

SEQ ID NO: 128431 - RNA, 15 nt, Homo sapiens
aauagugauuuccac

SEQ ID NO: 128432 - RNA, 18 nt, Homo sapiens
auugcaauagaaauccaa

SEQ ID NO: 128433 - RNA, 19 nt, Homo sapiens
aaauuucucuacugucuca

SEQ ID NO: 128434 - RNA, 17 nt, Homo sapiens
cuaagcacgggccauau

SEQ ID NO: 128435 - RNA, 17 nt, Homo sapiens
guacauguuaaacuuac

SEQ ID NO: 128436 - RNA, 18 nt, Homo sapiens
auacugaaccaggccaga

SEQ ID NO: 128437 - RNA, 13 nt, Homo sapiens
ucccucaaaacaa

SEQ ID NO: 128438 - RNA, 17 nt, Homo sapiens
uuaaaccguacacugug

SEQ ID NO: 128439 - RNA, 22 nt, Homo sapiens
ugaguagcuggauuacaggcau

SEQ ID NO: 128440 - RNA, 23 nt, Homo sapiens
agaauauuauuggaaaauucucu

SEQ ID NO: 128441 - RNA, 14 nt, Homo sapiens
uacuuaguucaagc

SEQ ID NO: 128442 - RNA, 17 nt, Homo sapiens
ucaaacuccugaccuca

SEQ ID NO: 128443 - RNA, 15 nt, Homo sapiens
ucaaaaacauucuua

SEQ ID NO: 128444 - RNA, 19 nt, Homo sapiens
cucuugaaaucuguuaaaa

SEQ ID NO: 128445 - RNA, 22 nt, Homo sapiens
ucauucugcauucucuagucag

SEQ ID NO: 128446 - RNA, 15 nt, Homo sapiens
aauguauuugcuaua

SEQ ID NO: 128447 - RNA, 18 nt, Homo sapiens
uguuguuuucccaaagag

SEQ ID NO: 128448 - RNA, 21 nt, Homo sapiens
ccuaaaaggcagaguacaaag

SEQ ID NO: 128449 - RNA, 16 nt, Homo sapiens
aaguuuaauugacuua

SEQ ID NO: 128450 - RNA, 19 nt, Homo sapiens
ccaagcaguuucuuucaaa

SEQ ID NO: 128451 - RNA, 17 nt, Homo sapiens
cugguggggcugccagg

SEQ ID NO: 128452 - RNA, 18 nt, Homo sapiens
uuaaaccguacacugugu

SEQ ID NO: 128453 - RNA, 11 nt, Homo sapiens
acccucccacu

SEQ ID NO: 128454 - RNA, 13 nt, Homo sapiens
ucaaguaauccac

SEQ ID NO: 128455 - RNA, 13 nt, Homo sapiens
ugaacauugcaau

SEQ ID NO: 128456 - RNA, 15 nt, Homo sapiens
uucuuucaaagaagc

SEQ ID NO: 128457 - RNA, 22 nt, Homo sapiens
aaacauuuguuuguggucuaua

SEQ ID NO: 128458 - RNA, 13 nt, Homo sapiens
accaggucucaua

SEQ ID NO: 128459 - RNA, 20 nt, Homo sapiens
aaguaaauauagcucaggua

SEQ ID NO: 128460 - RNA, 22 nt, Homo sapiens
auuaaauguagaaagugaucca

SEQ ID NO: 128461 - RNA, 16 nt, Homo sapiens
cacccuccauucugca

SEQ ID NO: 128462 - RNA, 15 nt, Homo sapiens
cccagccucaucucu

SEQ ID NO: 128463 - RNA, 23 nt, Homo sapiens
ucuuaagacgugauuuugcugua

SEQ ID NO: 128464 - RNA, 21 nt, Homo sapiens
uguauuuaaaugaaagugaga

SEQ ID NO: 128465 - RNA, 19 nt, Homo sapiens
caaucaguagccagcaucu

SEQ ID NO: 128466 - RNA, 16 nt, Homo sapiens
cuucuuuuugcuucaa

SEQ ID NO: 128467 - RNA, 13 nt, Homo sapiens
aucugaacuccuu

SEQ ID NO: 128468 - RNA, 20 nt, Homo sapiens
cccaggcuggagugcaauga

SEQ ID NO: 128469 - RNA, 19 nt, Homo sapiens
ucaagugauucuccugccu

SEQ ID NO: 128470 - RNA, 19 nt, Homo sapiens
auuuuauguuuaguugcac

SEQ ID NO: 128471 - RNA, 18 nt, Homo sapiens
uccuccccuguucauucu

SEQ ID NO: 128472 - RNA, 22 nt, Homo sapiens
gugggcuaagcacgggccauau

SEQ ID NO: 128473 - RNA, 15 nt, Homo sapiens
cacagcaucagcuca

SEQ ID NO: 128474 - RNA, 22 nt, Homo sapiens
cugggauuacagggaugagcca

SEQ ID NO: 128475 - RNA, 17 nt, Homo sapiens
aauaaccauugucauaa

SEQ ID NO: 128476 - RNA, 21 nt, Homo sapiens
uuggacucaagcaagauuuca

SEQ ID NO: 128477 - RNA, 17 nt, Homo sapiens
acccuucuuuucugacu

SEQ ID NO: 128478 - RNA, 17 nt, Homo sapiens
agguuucucaaagaaau

SEQ ID NO: 128479 - RNA, 14 nt, Homo sapiens
uuugaggguguaua

SEQ ID NO: 128480 - RNA, 18 nt, Homo sapiens
ucacugcaacuucugccu

SEQ ID NO: 128481 - RNA, 19 nt, Homo sapiens
ugcaguuuuuuucuugucu

SEQ ID NO: 128482 - RNA, 15 nt, Homo sapiens
gugagaggacucuga

SEQ ID NO: 128483 - RNA, 13 nt, Homo sapiens
ugacacagucuug

SEQ ID NO: 128484 - RNA, 17 nt, Homo sapiens
uucuuccaugucuauua

SEQ ID NO: 128485 - RNA, 17 nt, Homo sapiens
gaaugagcaaaaccaaa

SEQ ID NO: 128486 - RNA, 18 nt, Homo sapiens
aauaugacacucuaguca

SEQ ID NO: 128487 - RNA, 16 nt, Homo sapiens
aaguccacaguggaac

SEQ ID NO: 128488 - RNA, 21 nt, Homo sapiens
acugcauaugaaaggacacua

SEQ ID NO: 128489 - RNA, 13 nt, Homo sapiens
gggagacacugau

SEQ ID NO: 128490 - RNA, 13 nt, Homo sapiens
cacucagaaaaug

SEQ ID NO: 128491 - RNA, 16 nt, Homo sapiens
uaauaaaaguacaugu

SEQ ID NO: 128492 - RNA, 15 nt, Homo sapiens
cuagucaguuggcua

SEQ ID NO: 128493 - RNA, 21 nt, Homo sapiens
guagagagagaaaaguaacug

SEQ ID NO: 128494 - RNA, 17 nt, Homo sapiens
agguugagggcaaugga

SEQ ID NO: 128495 - RNA, 17 nt, Homo sapiens
cauacuagaguucaugg

SEQ ID NO: 128496 - RNA, 18 nt, Homo sapiens
caucccgucgacguagaa

SEQ ID NO: 128497 - RNA, 22 nt, Homo sapiens
ccucaaaugagaaaaugucuuu

SEQ ID NO: 128498 - RNA, 13 nt, Homo sapiens
auauacuuauaga

SEQ ID NO: 128499 - RNA, 22 nt, Homo sapiens
aucccucaaaacaaucuuguca

SEQ ID NO: 128500 - RNA, 13 nt, Homo sapiens
ugcucacaaaagu

SEQ ID NO: 128501 - RNA, 21 nt, Homo sapiens
ucugaggcuucuggggcuuca

SEQ ID NO: 128502 - RNA, 20 nt, Homo sapiens
guauauucaaccaaauacuu

SEQ ID NO: 128503 - RNA, 16 nt, Homo sapiens
acugaaccaggccaga

SEQ ID NO: 128504 - RNA, 23 nt, Homo sapiens
uucagauauaaaagacugaccaa

SEQ ID NO: 128505 - RNA, 17 nt, Homo sapiens
auaugacacucuaguca

SEQ ID NO: 128506 - RNA, 17 nt, Homo sapiens
caaacuccugaccucaa

SEQ ID NO: 128507 - RNA, 23 nt, Homo sapiens
uucagucaaagauacacaaucug

SEQ ID NO: 128508 - RNA, 12 nt, Homo sapiens
agccucaucucu

SEQ ID NO: 128509 - RNA, 14 nt, Homo sapiens
aaacaucauuucaa

SEQ ID NO: 128510 - RNA, 19 nt, Homo sapiens
ggaauuucuguucuuccau

SEQ ID NO: 128511 - RNA, 22 nt, Homo sapiens
uaugauuguccguaggcccaua

SEQ ID NO: 128512 - RNA, 18 nt, Homo sapiens
aaagucuacuuuaccuaa

SEQ ID NO: 128513 - RNA, 11 nt, Homo sapiens
uuuaaagacag

SEQ ID NO: 128514 - RNA, 22 nt, Homo sapiens
cuguagaaaagggaacugaaca

SEQ ID NO: 128515 - RNA, 19 nt, Homo sapiens
gccacccucccacugccaa

SEQ ID NO: 128516 - RNA, 21 nt, Homo sapiens
acugccaucuuggacuuguca

SEQ ID NO: 128517 - RNA, 20 nt, Homo sapiens
aaugacacagucuuggcuca

SEQ ID NO: 128518 - RNA, 22 nt, Homo sapiens
gcagcgauuaauaacaggcaaa

SEQ ID NO: 128519 - RNA, 13 nt, Homo sapiens
aggacuguagaaa

SEQ ID NO: 128520 - RNA, 22 nt, Homo sapiens
uagucucuggcaagaugcuuua

SEQ ID NO: 128521 - RNA, 19 nt, Homo sapiens
ccaaagcccaaagugguau

SEQ ID NO: 128522 - RNA, 22 nt, Homo sapiens
uuaccuuuuauuuuaauguuuc

SEQ ID NO: 128523 - RNA, 15 nt, Homo sapiens
acaaucuugucauac

SEQ ID NO: 128524 - RNA, 18 nt, Homo sapiens
agcuggagucugucaaug

SEQ ID NO: 128525 - RNA, 15 nt, Homo sapiens
uuaugaauaguuucc

SEQ ID NO: 128526 - RNA, 11 nt, Homo sapiens
uuuaaccaaga

SEQ ID NO: 128527 - RNA, 19 nt, Homo sapiens
gcauuugucaacaaaguca

SEQ ID NO: 128528 - RNA, 13 nt, Homo sapiens
gaaacagcuucau

SEQ ID NO: 128529 - RNA, 20 nt, Homo sapiens
ccacagugacuccacucuga

SEQ ID NO: 128530 - RNA, 20 nt, Homo sapiens
ugaaagcuggagucugucaa

SEQ ID NO: 128531 - RNA, 17 nt, Homo sapiens
ggcacacugagccagca

SEQ ID NO: 128532 - RNA, 15 nt, Homo sapiens
uguuuauagugcucu

SEQ ID NO: 128533 - RNA, 19 nt, Homo sapiens
cauuuaagcugccuguaca

SEQ ID NO: 128534 - RNA, 16 nt, Homo sapiens
cuuaaaauagccauaa

SEQ ID NO: 128535 - RNA, 23 nt, Homo sapiens
acccuucuccuuagaaguggaag

SEQ ID NO: 128536 - RNA, 23 nt, Homo sapiens
uuaaaaggaaagcagauggugga

SEQ ID NO: 128537 - RNA, 11 nt, Homo sapiens
ccaaggucucc

SEQ ID NO: 128538 - RNA, 18 nt, Homo sapiens
agcccuuaggaagaauuu

SEQ ID NO: 128539 - RNA, 16 nt, Homo sapiens
uaacgagaaauagaaa

SEQ ID NO: 128540 - RNA, 11 nt, Homo sapiens
uguccaaagac

SEQ ID NO: 128541 - RNA, 19 nt, Homo sapiens
cuccugaguagcuggauua

SEQ ID NO: 128542 - RNA, 14 nt, Homo sapiens
uacuucucugcuau

SEQ ID NO: 128543 - RNA, 20 nt, Homo sapiens
uguuaauaaaaguacauguu

SEQ ID NO: 128544 - RNA, 14 nt, Homo sapiens
ugggauuacaggga

SEQ ID NO: 128545 - RNA, 13 nt, Homo sapiens
guguaccagagaa

SEQ ID NO: 128546 - RNA, 16 nt, Homo sapiens
uuccuccccuguucau

SEQ ID NO: 128547 - RNA, 15 nt, Homo sapiens
agcugccuguacaca

SEQ ID NO: 128548 - RNA, 17 nt, Homo sapiens
gacgugauuuugcugua

SEQ ID NO: 128549 - RNA, 16 nt, Homo sapiens
accaauauuguacagu

SEQ ID NO: 128550 - RNA, 16 nt, Homo sapiens
uuuacuguccaaagac

SEQ ID NO: 128551 - RNA, 23 nt, Homo sapiens
cauggauauguuauacugaacca

SEQ ID NO: 128552 - RNA, 10 nt, Homo sapiens
gaaaacagaa

SEQ ID NO: 128553 - RNA, 20 nt, Homo sapiens
uuguauuuaaaugaaaguga

SEQ ID NO: 128554 - RNA, 21 nt, Homo sapiens
gucucaaacuccugaccucaa

SEQ ID NO: 128555 - RNA, 15 nt, Homo sapiens
aauguagaaagugau

SEQ ID NO: 128556 - RNA, 20 nt, Homo sapiens
aaccaaauacuuuaauguau

SEQ ID NO: 128557 - RNA, 17 nt, Homo sapiens
uagcauuugucaacaaa

SEQ ID NO: 128558 - RNA, 20 nt, Homo sapiens
uuaauaggguaaauucucua

SEQ ID NO: 128559 - RNA, 21 nt, Homo sapiens
accgcgcccagccucaucucu

SEQ ID NO: 128560 - RNA, 23 nt, Homo sapiens
uaaaaguacauguuaaacuuacu

SEQ ID NO: 128561 - RNA, 23 nt, Homo sapiens
auauacuuauagaauucagucaa

SEQ ID NO: 128562 - RNA, 16 nt, Homo sapiens
caggcuggagugcaau

SEQ ID NO: 128563 - RNA, 16 nt, Homo sapiens
cuaaauaugagcccag

SEQ ID NO: 128564 - RNA, 15 nt, Homo sapiens
ccuuagaaguggaag

SEQ ID NO: 128565 - RNA, 13 nt, Homo sapiens
gguucaagugauu

SEQ ID NO: 128566 - RNA, 20 nt, Homo sapiens
auugcagcgauuaauaacag

SEQ ID NO: 128567 - RNA, 12 nt, Homo sapiens
uucacucccacc

SEQ ID NO: 128568 - RNA, 14 nt, Homo sapiens
cauaugaauaacau

SEQ ID NO: 128569 - RNA, 19 nt, Homo sapiens
ugagucccagagccaauca

SEQ ID NO: 128570 - RNA, 18 nt, Homo sapiens
uugcaauguggcuugaau

SEQ ID NO: 128571 - RNA, 19 nt, Homo sapiens
agacgugauuuugcuguag

SEQ ID NO: 128572 - RNA, 16 nt, Homo sapiens
aaaugcugguuuuuca

SEQ ID NO: 128573 - RNA, 18 nt, Homo sapiens
accauuagcauuugucaa

SEQ ID NO: 128574 - RNA, 21 nt, Homo sapiens
aaugcugguuuuucaguuuuc

SEQ ID NO: 128575 - RNA, 18 nt, Homo sapiens
guugagggcaauggacaa

SEQ ID NO: 128576 - RNA, 23 nt, Homo sapiens
uaguaaaagccaucuauguauau

SEQ ID NO: 128577 - RNA, 12 nt, Homo sapiens
ccaguuacauaa

SEQ ID NO: 128578 - RNA, 22 nt, Homo sapiens
aagccuugguaaaauaaucagu

SEQ ID NO: 128579 - RNA, 11 nt, Homo sapiens
ugaacauucca

SEQ ID NO: 128580 - RNA, 11 nt, Homo sapiens
cacaugcuuuu

SEQ ID NO: 128581 - RNA, 20 nt, Homo sapiens
uggacucaagcaagauuuca

SEQ ID NO: 128582 - RNA, 21 nt, Homo sapiens
aucugccuccccuucacuccc

SEQ ID NO: 128583 - RNA, 13 nt, Homo sapiens
gcugggauuacag

SEQ ID NO: 128584 - RNA, 21 nt, Homo sapiens
ucuaaggcugugccaucagcu

SEQ ID NO: 128585 - RNA, 16 nt, Homo sapiens
ucauuguaaaaagccc

SEQ ID NO: 128586 - RNA, 11 nt, Homo sapiens
auaaagacagg

SEQ ID NO: 128587 - RNA, 13 nt, Homo sapiens
ggguaaauucucu

SEQ ID NO: 128588 - RNA, 20 nt, Homo sapiens
gaaguuuguuuaaaugacag

SEQ ID NO: 128589 - RNA, 12 nt, Homo sapiens
guagaaagugau

SEQ ID NO: 128590 - RNA, 13 nt, Homo sapiens
ugcaauguuuuag

SEQ ID NO: 128591 - RNA, 13 nt, Homo sapiens
accuacaguguac

SEQ ID NO: 128592 - RNA, 14 nt, Homo sapiens
auaucacauuccca

SEQ ID NO: 128593 - RNA, 19 nt, Homo sapiens
aguuuacauuuuguauauu

SEQ ID NO: 128594 - RNA, 21 nt, Homo sapiens
aauguggcuugaauguaggua

SEQ ID NO: 128595 - RNA, 22 nt, Homo sapiens
guuuaugcauagauaaucucuc

SEQ ID NO: 128596 - RNA, 13 nt, Homo sapiens
cuaaauaugagcc

SEQ ID NO: 128597 - RNA, 11 nt, Homo sapiens
uuugcuguaga

SEQ ID NO: 128598 - RNA, 17 nt, Homo sapiens
uguuucaaacaaaaagu

SEQ ID NO: 128599 - RNA, 19 nt, Homo sapiens
ccucaucuccuaaaaggca

SEQ ID NO: 128600 - RNA, 18 nt, Homo sapiens
cuauuuuuuguaaugugu

SEQ ID NO: 128601 - RNA, 20 nt, Homo sapiens
gacgugauuuugcuguagaa

SEQ ID NO: 128602 - RNA, 18 nt, Homo sapiens
aaagacaggguuucacca

SEQ ID NO: 128603 - RNA, 23 nt, Homo sapiens
ccaguaguggugacugugggcuc

SEQ ID NO: 128604 - RNA, 15 nt, Homo sapiens
cuaacaguaguugca

SEQ ID NO: 128605 - RNA, 17 nt, Homo sapiens
ucuccuuagaaguggaa

SEQ ID NO: 128606 - RNA, 20 nt, Homo sapiens
ggcacagcauggagucacag

SEQ ID NO: 128607 - RNA, 22 nt, Homo sapiens
cuuaagacgugauuuugcugua

SEQ ID NO: 128608 - RNA, 19 nt, Homo sapiens
cugggacuaaguguaccag

SEQ ID NO: 128609 - RNA, 14 nt, Homo sapiens
gccagcaucugccu

SEQ ID NO: 128610 - RNA, 18 nt, Homo sapiens
gcccaggcuggagugcaa

SEQ ID NO: 128611 - RNA, 13 nt, Homo sapiens
ccaggggagaccc

SEQ ID NO: 128612 - RNA, 15 nt, Homo sapiens
gagcuccuaagccau

SEQ ID NO: 128613 - RNA, 20 nt, Homo sapiens
ucugccuccccuucacuccc

SEQ ID NO: 128614 - RNA, 20 nt, Homo sapiens
uaaacuuacuuaguguuaug

SEQ ID NO: 128615 - RNA, 20 nt, Homo sapiens
cuccugaccucaaguaaucc

SEQ ID NO: 128616 - RNA, 16 nt, Homo sapiens
augcaguuuuccuuaa

SEQ ID NO: 128617 - RNA, 17 nt, Homo sapiens
aaauaaucaguguuucc

SEQ ID NO: 128618 - RNA, 17 nt, Homo sapiens
ugcuugcacaaaccaau

SEQ ID NO: 128619 - RNA, 14 nt, Homo sapiens
auguaucucaggaa

SEQ ID NO: 128620 - RNA, 12 nt, Homo sapiens
ggaaaauucucu

SEQ ID NO: 128621 - RNA, 16 nt, Homo sapiens
ucacguaaagcuagaa

SEQ ID NO: 128622 - RNA, 15 nt, Homo sapiens
auugaacuuaugcaa

SEQ ID NO: 128623 - RNA, 20 nt, Homo sapiens
ucauauugaugugugucuag

SEQ ID NO: 128624 - RNA, 22 nt, Homo sapiens
cccucccacugccaaagaacuu

SEQ ID NO: 128625 - RNA, 21 nt, Homo sapiens
ugaugcuggggacacagcauc

SEQ ID NO: 128626 - RNA, 17 nt, Homo sapiens
gaaaagggaacugaaca

SEQ ID NO: 128627 - RNA, 12 nt, Homo sapiens
uuucccaaagag

SEQ ID NO: 128628 - RNA, 15 nt, Homo sapiens
gagugggcuaagcac

SEQ ID NO: 128629 - RNA, 18 nt, Homo sapiens
uugcacaaauugggccaa

SEQ ID NO: 128630 - RNA, 15 nt, Homo sapiens
auucuguaguuucac

SEQ ID NO: 128631 - RNA, 19 nt, Homo sapiens
caugggagacacugaugua

SEQ ID NO: 128632 - RNA, 22 nt, Homo sapiens
aaugccacucuguaauugcaaa

SEQ ID NO: 128633 - RNA, 18 nt, Homo sapiens
ugaaguuuaauugacuua

SEQ ID NO: 128634 - RNA, 13 nt, Homo sapiens
ucaaaaacauucu

SEQ ID NO: 128635 - RNA, 13 nt, Homo sapiens
cacugauguauga

SEQ ID NO: 128636 - RNA, 16 nt, Homo sapiens
acugaauuuugucuuu

SEQ ID NO: 128637 - RNA, 18 nt, Homo sapiens
uccagagacugggacuaa

SEQ ID NO: 128638 - RNA, 20 nt, Homo sapiens
gucaaagauacacaaucuga

SEQ ID NO: 128639 - RNA, 13 nt, Homo sapiens
ucuuuuugcuuca

SEQ ID NO: 128640 - RNA, 22 nt, Homo sapiens
agaagauggcacuuauaaccaa

SEQ ID NO: 128641 - RNA, 22 nt, Homo sapiens
aaguaagccauguaucucagga

SEQ ID NO: 128642 - RNA, 23 nt, Homo sapiens
ugggucagaguuccgacugccau

SEQ ID NO: 128643 - RNA, 18 nt, Homo sapiens
auuaagaaauucacuucc

SEQ ID NO: 128644 - RNA, 15 nt, Homo sapiens
uccacagugacucca

SEQ ID NO: 128645 - RNA, 20 nt, Homo sapiens
ugcccaggcuggagugcaau

SEQ ID NO: 128646 - RNA, 19 nt, Homo sapiens
uccuaagccaugggagaca

SEQ ID NO: 128647 - RNA, 13 nt, Homo sapiens
agagcuuuaccua

SEQ ID NO: 128648 - RNA, 13 nt, Homo sapiens
agucuucuuccau

SEQ ID NO: 128649 - RNA, 18 nt, Homo sapiens
ucacagccacuugggaua

SEQ ID NO: 128650 - RNA, 19 nt, Homo sapiens
accuguggccaaguucuua

SEQ ID NO: 128651 - RNA, 23 nt, Homo sapiens
cacagccaaccuagcuagcaaca

SEQ ID NO: 128652 - RNA, 21 nt, Homo sapiens
aaaucuuuuuuguucaaagau

SEQ ID NO: 128653 - RNA, 23 nt, Homo sapiens
aaaacuucaacguaagacugugu

SEQ ID NO: 128654 - RNA, 21 nt, Homo sapiens
gaauucagucaaagauacaca

SEQ ID NO: 128655 - RNA, 15 nt, Homo sapiens
ugaaugccacucugu

SEQ ID NO: 128656 - RNA, 13 nt, Homo sapiens
uucuccugccuca

SEQ ID NO: 128657 - RNA, 16 nt, Homo sapiens
acuauugcuugcacaa

SEQ ID NO: 128658 - RNA, 23 nt, Homo sapiens
uuacuguucuaaggcugugccau

SEQ ID NO: 128659 - RNA, 13 nt, Homo sapiens
uucagaaucucuc

SEQ ID NO: 128660 - RNA, 16 nt, Homo sapiens
uagaucugaacuccuu

SEQ ID NO: 128661 - RNA, 18 nt, Homo sapiens
auauguauaucacauucc

SEQ ID NO: 128662 - RNA, 21 nt, Homo sapiens
cccacugccaaagaacuugga

SEQ ID NO: 128663 - RNA, 14 nt, Homo sapiens
accuacaguguaca

SEQ ID NO: 128664 - RNA, 16 nt, Homo sapiens
uaaugguuauauguau

SEQ ID NO: 128665 - RNA, 18 nt, Homo sapiens
gcaguuuuuuucuugucu

SEQ ID NO: 128666 - RNA, 14 nt, Homo sapiens
ugugccaucagcuc

SEQ ID NO: 128667 - RNA, 20 nt, Homo sapiens
ugauauguugguagauucua

SEQ ID NO: 128668 - RNA, 20 nt, Homo sapiens
aaaaucaaacaauucaggga

SEQ ID NO: 128669 - RNA, 17 nt, Homo sapiens
uuaugaauaguuuccaa

SEQ ID NO: 128670 - RNA, 21 nt, Homo sapiens
caaucuguccuguuacaaaag

SEQ ID NO: 128671 - RNA, 22 nt, Homo sapiens
caccgcgcccagccucaucucu

SEQ ID NO: 128672 - RNA, 20 nt, Homo sapiens
ggacuaaguguaccagagaa

SEQ ID NO: 128673 - RNA, 15 nt, Homo sapiens
aguugggugauaugu

SEQ ID NO: 128674 - RNA, 16 nt, Homo sapiens
gcuccauucaaaguga

SEQ ID NO: 128675 - RNA, 15 nt, Homo sapiens
gaauguaaugguggc

SEQ ID NO: 128676 - RNA, 14 nt, Homo sapiens
uguuaacugaaugc

SEQ ID NO: 128677 - RNA, 19 nt, Homo sapiens
ccuuggcuaguaaaagcca

SEQ ID NO: 128678 - RNA, 21 nt, Homo sapiens
agcuagcaacauuuguuuuag

SEQ ID NO: 128679 - RNA, 20 nt, Homo sapiens
ucucaaacuccugaccucaa

SEQ ID NO: 128680 - RNA, 15 nt, Homo sapiens
uaagaaauucacuuc

SEQ ID NO: 128681 - RNA, 18 nt, Homo sapiens
ccacccucccacugccaa

SEQ ID NO: 128682 - RNA, 17 nt, Homo sapiens
gcaauggacaaggaagg

SEQ ID NO: 128683 - RNA, 22 nt, Homo sapiens
ugacucaagacuuccagagccu

SEQ ID NO: 128684 - RNA, 21 nt, Homo sapiens
ccacugccaaagaacuuggaa

SEQ ID NO: 128685 - RNA, 18 nt, Homo sapiens
aaguucuuaguugcugua

SEQ ID NO: 128686 - RNA, 22 nt, Homo sapiens
ccauaggaggccaacccaaaau

SEQ ID NO: 128687 - RNA, 19 nt, Homo sapiens
ucagaguuccgacugccau

SEQ ID NO: 128688 - RNA, 18 nt, Homo sapiens
ggaaauagugauuuccac

SEQ ID NO: 128689 - RNA, 21 nt, Homo sapiens
ccuuggcuaguaaaagccauc

SEQ ID NO: 128690 - RNA, 13 nt, Homo sapiens
aguaaaagccauc

SEQ ID NO: 128691 - RNA, 17 nt, Homo sapiens
ugaauuuugucuuuaug

SEQ ID NO: 128692 - RNA, 16 nt, Homo sapiens
aacguaagacugugua

SEQ ID NO: 128693 - RNA, 13 nt, Homo sapiens
uccacaaagccaa

SEQ ID NO: 128694 - RNA, 20 nt, Homo sapiens
cagagcagagaggcugaaua

SEQ ID NO: 128695 - RNA, 22 nt, Homo sapiens
ucaagugauucuccugccucag

SEQ ID NO: 128696 - RNA, 15 nt, Homo sapiens
guaggugguuuugaa

SEQ ID NO: 128697 - RNA, 15 nt, Homo sapiens
cccacccaacuaauu

SEQ ID NO: 128698 - RNA, 15 nt, Homo sapiens
gaacugaacauucca

SEQ ID NO: 128699 - RNA, 20 nt, Homo sapiens
gccagguucugacucuuggc

SEQ ID NO: 128700 - RNA, 23 nt, Homo sapiens
uguaagaucguucucugccucac

SEQ ID NO: 128701 - RNA, 12 nt, Homo sapiens
uguaauugcaaa

SEQ ID NO: 128702 - RNA, 20 nt, Homo sapiens
cauaaaaguuggcucaggag

SEQ ID NO: 128703 - RNA, 14 nt, Homo sapiens
cuuagaaagucuga

SEQ ID NO: 128704 - RNA, 18 nt, Homo sapiens
cagaaagcuagaaagugu

SEQ ID NO: 128705 - RNA, 16 nt, Homo sapiens
uuagagcuuuaccuaa

SEQ ID NO: 128706 - RNA, 21 nt, Homo sapiens
aaccguaugagggaacugugu

SEQ ID NO: 128707 - RNA, 19 nt, Homo sapiens
agaaccucgagguuucuca

SEQ ID NO: 128708 - RNA, 23 nt, Homo sapiens
guggacucuaacaguaguugcaa

SEQ ID NO: 128709 - RNA, 13 nt, Homo sapiens
cagaaaaagaagg

SEQ ID NO: 128710 - RNA, 20 nt, Homo sapiens
auuagcauuugucaacaaag

SEQ ID NO: 128711 - RNA, 16 nt, Homo sapiens
gaaguuuucuugacuu

SEQ ID NO: 128712 - RNA, 12 nt, Homo sapiens
uguaccagagaa

SEQ ID NO: 128713 - RNA, 15 nt, Homo sapiens
gaaaaguaacuguuu

SEQ ID NO: 128714 - RNA, 20 nt, Homo sapiens
gaguucauggauauguuaua

SEQ ID NO: 128715 - RNA, 22 nt, Homo sapiens
gcaaaaccaaauauuccagaga

SEQ ID NO: 128716 - RNA, 20 nt, Homo sapiens
cagagucucgcucuguugcc

SEQ ID NO: 128717 - RNA, 16 nt, Homo sapiens
auuuuaauguuuccuu

SEQ ID NO: 128718 - RNA, 16 nt, Homo sapiens
ugccaggcacacugag

SEQ ID NO: 128719 - RNA, 15 nt, Homo sapiens
acaauauacuuguau

SEQ ID NO: 128720 - RNA, 15 nt, Homo sapiens
cagauuauuauugaa

SEQ ID NO: 128721 - RNA, 19 nt, Homo sapiens
cgugauuuugcuguagaag

SEQ ID NO: 128722 - RNA, 19 nt, Homo sapiens
uccauuuacccuucuuuuc

SEQ ID NO: 128723 - RNA, 15 nt, Homo sapiens
cagcaccuacagugu

SEQ ID NO: 128724 - RNA, 13 nt, Homo sapiens
cuggcucaucucu

SEQ ID NO: 128725 - RNA, 15 nt, Homo sapiens
ugcauguggcacuua

SEQ ID NO: 128726 - RNA, 13 nt, Homo sapiens
acuguccaaagac

SEQ ID NO: 128727 - RNA, 16 nt, Homo sapiens
uauaaaagacugacca

SEQ ID NO: 128728 - RNA, 18 nt, Homo sapiens
acacaaucugaaacagcu

SEQ ID NO: 128729 - RNA, 13 nt, Homo sapiens
cacacuguuaaaa

SEQ ID NO: 128730 - RNA, 14 nt, Homo sapiens
uaaccauugucaua

SEQ ID NO: 128731 - RNA, 13 nt, Homo sapiens
gcaguggaacuaa

SEQ ID NO: 128732 - RNA, 22 nt, Homo sapiens
gcaggauuugggcucuuggaau

SEQ ID NO: 128733 - RNA, 18 nt, Homo sapiens
uccugaccucaaguaauc

SEQ ID NO: 128734 - RNA, 21 nt, Homo sapiens
gaguucauggauauguuauac

SEQ ID NO: 128735 - RNA, 19 nt, Homo sapiens
aaaauggcacuugggggac

SEQ ID NO: 128736 - RNA, 12 nt, Homo sapiens
uaaaaguuggcu

SEQ ID NO: 128737 - RNA, 20 nt, Homo sapiens
caaguucuuaguugcuguau

SEQ ID NO: 128738 - RNA, 17 nt, Homo sapiens
ucuggccuccaagucca

SEQ ID NO: 128739 - RNA, 18 nt, Homo sapiens
cucuaacaguaguugcaa

SEQ ID NO: 128740 - RNA, 16 nt, Homo sapiens
ugcauucucuagucag

SEQ ID NO: 128741 - RNA, 16 nt, Homo sapiens
aacaaagucacccacu

SEQ ID NO: 128742 - RNA, 21 nt, Homo sapiens
agccaaccuagcuagcaacau

SEQ ID NO: 128743 - RNA, 14 nt, Homo sapiens
caguguacagucuu

SEQ ID NO: 128744 - RNA, 23 nt, Homo sapiens
gucaauguccuacugagacagca

SEQ ID NO: 128745 - RNA, 21 nt, Homo sapiens
ucauggauauguuauacugaa

SEQ ID NO: 128746 - RNA, 24 nt, Homo sapiens
aaucccucaaaacaaucuugucau

SEQ ID NO: 128747 - RNA, 20 nt, Homo sapiens
ucugaaaaaguauccugcuu

SEQ ID NO: 128748 - RNA, 17 nt, Homo sapiens
agggagugggcuaagca

SEQ ID NO: 128749 - RNA, 14 nt, Homo sapiens
uuuauugcuuguug

SEQ ID NO: 128750 - RNA, 11 nt, Homo sapiens
uaaaagccauc

SEQ ID NO: 128751 - RNA, 19 nt, Homo sapiens
cucuggccuccaaguccac

SEQ ID NO: 128752 - RNA, 18 nt, Homo sapiens
cucaaagaaauuuccacu

SEQ ID NO: 128753 - RNA, 22 nt, Homo sapiens
ucuuuguaaagaaaguggcuug

SEQ ID NO: 128754 - RNA, 19 nt, Homo sapiens
ugaccaauauuguacaguu

SEQ ID NO: 128755 - RNA, 20 nt, Homo sapiens
gucugaacaauauauacuua

SEQ ID NO: 128756 - RNA, 20 nt, Homo sapiens
auuugcuuagaaagucugau

SEQ ID NO: 128757 - RNA, 16 nt, Homo sapiens
gcccagccucaucucu

SEQ ID NO: 128758 - RNA, 23 nt, Homo sapiens
uguuaagccauguguuccaaggc

SEQ ID NO: 128759 - RNA, 23 nt, Homo sapiens
caggcgugaccugccaggcacac

SEQ ID NO: 128760 - RNA, 23 nt, Homo sapiens
gcaaaaccaaauauuccagagac

SEQ ID NO: 128761 - RNA, 21 nt, Homo sapiens
aauaguuguuauucuguaguu

SEQ ID NO: 128762 - RNA, 14 nt, Homo sapiens
ucuuuggugaacau

SEQ ID NO: 128763 - RNA, 13 nt, Homo sapiens
cauuuacauugcc

SEQ ID NO: 128764 - RNA, 15 nt, Homo sapiens
aaucaguguuuccaa

SEQ ID NO: 128765 - RNA, 19 nt, Homo sapiens
agggcuuggacucaagcaa

SEQ ID NO: 128766 - RNA, 12 nt, Homo sapiens
aggccagagcaa

SEQ ID NO: 128767 - RNA, 14 nt, Homo sapiens
ccacugccaaagaa

SEQ ID NO: 128768 - RNA, 22 nt, Homo sapiens
cauuugucaacaaagucaccca

SEQ ID NO: 128769 - RNA, 21 nt, Homo sapiens
ugugcuucuuaaaauagccau

SEQ ID NO: 128770 - RNA, 15 nt, Homo sapiens
gcaggacagcuccug

SEQ ID NO: 128771 - RNA, 21 nt, Homo sapiens
augacacucuagucaaagccu

SEQ ID NO: 128772 - RNA, 21 nt, Homo sapiens
aauguguucggugauuucaga

SEQ ID NO: 128773 - RNA, 14 nt, Homo sapiens
ucuuaguugcugua

SEQ ID NO: 128774 - RNA, 23 nt, Homo sapiens
ccuaggaaagccaguuacauaaa

SEQ ID NO: 128775 - RNA, 14 nt, Homo sapiens
caaaguaagccaug

SEQ ID NO: 128776 - RNA, 21 nt, Homo sapiens
uggauuacaggcaugugccac

SEQ ID NO: 128777 - RNA, 20 nt, Homo sapiens
cugaacaauauauacuuaua

SEQ ID NO: 128778 - RNA, 20 nt, Homo sapiens
ucaaaaaaaaaaaaauguga

SEQ ID NO: 128779 - RNA, 16 nt, Homo sapiens
acguaagacuguguaa

SEQ ID NO: 128780 - RNA, 19 nt, Homo sapiens
agucuuagagcuuuaccua

SEQ ID NO: 128781 - RNA, 13 nt, Homo sapiens
guccaaggucucc

SEQ ID NO: 128782 - RNA, 11 nt, Homo sapiens
gccucaucucu

SEQ ID NO: 128783 - RNA, 20 nt, Homo sapiens
uacacauuuuucagauauaa

SEQ ID NO: 128784 - RNA, 18 nt, Homo sapiens
caaggucuccagagggug

SEQ ID NO: 128785 - RNA, 13 nt, Homo sapiens
ucugaaacagcuu

SEQ ID NO: 128786 - RNA, 22 nt, Homo sapiens
gcacaaaccaauuaaacccagu

SEQ ID NO: 128787 - RNA, 18 nt, Homo sapiens
auuuuucagauauaaaag

SEQ ID NO: 128788 - RNA, 16 nt, Homo sapiens
gucuaaaaacauuugu

SEQ ID NO: 128789 - RNA, 11 nt, Homo sapiens
aguugcacaaa

SEQ ID NO: 128790 - RNA, 18 nt, Homo sapiens
aauguagaaagugaucca

SEQ ID NO: 128791 - RNA, 14 nt, Homo sapiens
ccuggggcuucuga

SEQ ID NO: 128792 - RNA, 22 nt, Homo sapiens
aacuuggaaauagugauuucca

SEQ ID NO: 128793 - RNA, 13 nt, Homo sapiens
caaucguaaaauu

SEQ ID NO: 128794 - RNA, 21 nt, Homo sapiens
cuaugauuguccguaggccca

SEQ ID NO: 128795 - RNA, 21 nt, Homo sapiens
uuauuaaauguagaaagugau

SEQ ID NO: 128796 - RNA, 23 nt, Homo sapiens
cgugaccugccaggcacacugag

SEQ ID NO: 128797 - RNA, 21 nt, Homo sapiens
aauuuuauguuuaguugcaca

SEQ ID NO: 128798 - RNA, 21 nt, Homo sapiens
caaucugaaacagcuucaugg

SEQ ID NO: 128799 - RNA, 13 nt, Homo sapiens
ggauuacagggau

SEQ ID NO: 128800 - RNA, 19 nt, Homo sapiens
agauaaucucuccauuccc

SEQ ID NO: 128801 - RNA, 16 nt, Homo sapiens
uggcaggacagcuccu

SEQ ID NO: 128802 - RNA, 16 nt, Homo sapiens
uucccauuaaagaagu

SEQ ID NO: 128803 - RNA, 14 nt, Homo sapiens
uacgacaacuugca

SEQ ID NO: 128804 - RNA, 13 nt, Homo sapiens
gaauaugcacaaa

SEQ ID NO: 128805 - RNA, 18 nt, Homo sapiens
uugugcauaaaaacaaga

SEQ ID NO: 128806 - RNA, 15 nt, Homo sapiens
gguccaaggucucca

SEQ ID NO: 128807 - RNA, 22 nt, Homo sapiens
gacucuauuaaaaucuucaaua

SEQ ID NO: 128808 - RNA, 14 nt, Homo sapiens
cuagucaguuggcu

SEQ ID NO: 128809 - RNA, 14 nt, Homo sapiens
acguaagacugugu

SEQ ID NO: 128810 - RNA, 18 nt, Homo sapiens
uuuuccuggcucaucucu

SEQ ID NO: 128811 - RNA, 18 nt, Homo sapiens
cuuagguccaaggucucc

SEQ ID NO: 128812 - RNA, 17 nt, Homo sapiens
aucccgucgacguagaa

SEQ ID NO: 128813 - RNA, 19 nt, Homo sapiens
guagaaaagggaacugaac

SEQ ID NO: 128814 - RNA, 16 nt, Homo sapiens
cucaaagaaauuucca

SEQ ID NO: 128815 - RNA, 17 nt, Homo sapiens
auuugucaacaaaguca

SEQ ID NO: 128816 - RNA, 14 nt, Homo sapiens
uuauggcaaauuca

SEQ ID NO: 128817 - RNA, 16 nt, Homo sapiens
uacagucuuguauuaa

SEQ ID NO: 128818 - RNA, 13 nt, Homo sapiens
ccuccaaguccac

SEQ ID NO: 128819 - RNA, 22 nt, Homo sapiens
ggcuaagcacgggccauaugaa

SEQ ID NO: 128820 - RNA, 16 nt, Homo sapiens
auccacuaaaaucaaa

SEQ ID NO: 128821 - RNA, 18 nt, Homo sapiens
gaauuuggguaugaacag

SEQ ID NO: 128822 - RNA, 19 nt, Homo sapiens
caauguuucaaacaaaaag

SEQ ID NO: 128823 - RNA, 20 nt, Homo sapiens
aucugcuagggaauaucaau

SEQ ID NO: 128824 - RNA, 14 nt, Homo sapiens
ugcuguaugucucg

SEQ ID NO: 128825 - RNA, 20 nt, Homo sapiens
gaaaagaaucggcaauguuu

SEQ ID NO: 128826 - RNA, 16 nt, Homo sapiens
acucaggcagaucuca

SEQ ID NO: 128827 - RNA, 20 nt, Homo sapiens
ucuacugucucaguuuacau

SEQ ID NO: 128828 - RNA, 12 nt, Homo sapiens
uccccucuagga

SEQ ID NO: 128829 - RNA, 18 nt, Homo sapiens
accuaaauaugagcccag

SEQ ID NO: 128830 - RNA, 12 nt, Homo sapiens
uucucugccuca

SEQ ID NO: 128831 - RNA, 18 nt, Homo sapiens
ucugcauucucuagucag

SEQ ID NO: 128832 - RNA, 16 nt, Homo sapiens
uauugaacuuaugcaa

SEQ ID NO: 128833 - RNA, 11 nt, Homo sapiens
uugcuguagaa

SEQ ID NO: 128834 - RNA, 17 nt, Homo sapiens
caacaaagucacccacu

SEQ ID NO: 128835 - RNA, 16 nt, Homo sapiens
ucaaacaaaaagucau

SEQ ID NO: 128836 - RNA, 19 nt, Homo sapiens
accaaauacuuuaauguau

SEQ ID NO: 128837 - RNA, 12 nt, Homo sapiens
gccaagcaguuu

SEQ ID NO: 128838 - RNA, 14 nt, Homo sapiens
ugagcaaaaccaaa

SEQ ID NO: 128839 - RNA, 18 nt, Homo sapiens
aaaaguauccugcuucug

SEQ ID NO: 128840 - RNA, 15 nt, Homo sapiens
caacaaagucaccca

SEQ ID NO: 128841 - RNA, 14 nt, Homo sapiens
cucaucauuuccau

SEQ ID NO: 128842 - RNA, 16 nt, Homo sapiens
gucagucuucuuccau

SEQ ID NO: 128843 - RNA, 21 nt, Homo sapiens
guccaucccgucgacguagaa

SEQ ID NO: 128844 - RNA, 15 nt, Homo sapiens
caaugacacagucuu

SEQ ID NO: 128845 - RNA, 12 nt, Homo sapiens
gaaucucucuuc

SEQ ID NO: 128846 - RNA, 18 nt, Homo sapiens
ggacucaagcaagauuuc

SEQ ID NO: 128847 - RNA, 14 nt, Homo sapiens
auagaauucaguca

SEQ ID NO: 128848 - RNA, 13 nt, Homo sapiens
cagcuguuuaugc

SEQ ID NO: 128849 - RNA, 14 nt, Homo sapiens
cuuaaaauagccau

SEQ ID NO: 128850 - RNA, 20 nt, Homo sapiens
cagcuguuuaugcauagaua

SEQ ID NO: 128851 - RNA, 21 nt, Homo sapiens
uuaaagcagggauaugcugua

SEQ ID NO: 128852 - RNA, 23 nt, Homo sapiens
aagaauuuuuauauccacuaaaa

SEQ ID NO: 128853 - RNA, 15 nt, Homo sapiens
aacauugcaauagaa

SEQ ID NO: 128854 - RNA, 15 nt, Homo sapiens
gaccauuagcauuug

SEQ ID NO: 128855 - RNA, 13 nt, Homo sapiens
caucauuuccauu

SEQ ID NO: 128856 - RNA, 15 nt, Homo sapiens
ccaaagacauguuua

SEQ ID NO: 128857 - RNA, 20 nt, Homo sapiens
uuauuaaauguagaaaguga

SEQ ID NO: 128858 - RNA, 15 nt, Homo sapiens
acaaaguaagccaug

SEQ ID NO: 128859 - RNA, 21 nt, Homo sapiens
guuuuacuguccaaagacaug

SEQ ID NO: 128860 - RNA, 23 nt, Homo sapiens
guugauuucagcaccuacagugu

SEQ ID NO: 128861 - RNA, 13 nt, Homo sapiens
aagccuugguaaa

SEQ ID NO: 128862 - RNA, 18 nt, Homo sapiens
cuuucccuuaaauaacac

SEQ ID NO: 128863 - RNA, 13 nt, Homo sapiens
cuuaguugcugua

SEQ ID NO: 128864 - RNA, 21 nt, Homo sapiens
uguaaauuucucuacugucuc

SEQ ID NO: 128865 - RNA, 19 nt, Homo sapiens
agugauucuccugccucag

SEQ ID NO: 128866 - RNA, 19 nt, Homo sapiens
cacagcaucagcucaagac

SEQ ID NO: 128867 - RNA, 20 nt, Homo sapiens
aagauggcacuuauaaccaa

SEQ ID NO: 128868 - RNA, 22 nt, Homo sapiens
cuccuuggcuucuuuacuuagu

SEQ ID NO: 128869 - RNA, 21 nt, Homo sapiens
ccuccaaguccacaguggaac

SEQ ID NO: 128870 - RNA, 20 nt, Homo sapiens
ucauacuugaaaauaugaca

SEQ ID NO: 128871 - RNA, 22 nt, Homo sapiens
caaaaccaaauauuccagagac

SEQ ID NO: 128872 - RNA, 18 nt, Homo sapiens
auuagcuccacaaagcca

SEQ ID NO: 128873 - RNA, 15 nt, Homo sapiens
ugcacaaaccaauua

SEQ ID NO: 128874 - RNA, 22 nt, Homo sapiens
augaaucaaucaauucauaucu

SEQ ID NO: 128875 - RNA, 22 nt, Homo sapiens
ucaaagugagcuccuaagccau

SEQ ID NO: 128876 - RNA, 16 nt, Homo sapiens
ugagucccagagccaa

SEQ ID NO: 128877 - RNA, 12 nt, Homo sapiens
uuugucuuuaug

SEQ ID NO: 128878 - RNA, 19 nt, Homo sapiens
accugccaggcacacugag

SEQ ID NO: 128879 - RNA, 20 nt, Homo sapiens
gcccaggcuggagugcaaug

SEQ ID NO: 128880 - RNA, 17 nt, Homo sapiens
ucaaaacaaucuuguca

SEQ ID NO: 128881 - RNA, 15 nt, Homo sapiens
auaaagacaggguuu

SEQ ID NO: 128882 - RNA, 13 nt, Homo sapiens
uucuucuuuuugc

SEQ ID NO: 128883 - RNA, 13 nt, Homo sapiens
aaagaaauuucca

SEQ ID NO: 128884 - RNA, 22 nt, Homo sapiens
ugagacuuugaggguguauauu

SEQ ID NO: 128885 - RNA, 10 nt, Homo sapiens
aaacuuguau

SEQ ID NO: 128886 - RNA, 13 nt, Homo sapiens
aguugcuguaugu

SEQ ID NO: 128887 - RNA, 16 nt, Homo sapiens
agucugauuguagcua

SEQ ID NO: 128888 - RNA, 15 nt, Homo sapiens
aguuccgacugccau

SEQ ID NO: 128889 - RNA, 15 nt, Homo sapiens
aaaaguuuuguaaau

SEQ ID NO: 128890 - RNA, 16 nt, Homo sapiens
aggucagucuucuucc

SEQ ID NO: 128891 - RNA, 20 nt, Homo sapiens
agcuguuuaugcauagauaa

SEQ ID NO: 128892 - RNA, 14 nt, Homo sapiens
ugccaaagaacuug

SEQ ID NO: 128893 - RNA, 13 nt, Homo sapiens
uguguuucuuuag

SEQ ID NO: 128894 - RNA, 14 nt, Homo sapiens
agcuggagucuguc

SEQ ID NO: 128895 - RNA, 14 nt, Homo sapiens
gcuccuaagccaug

SEQ ID NO: 128896 - RNA, 12 nt, Homo sapiens
gcaaaaccaaau

SEQ ID NO: 128897 - RNA, 19 nt, Homo sapiens
aaccaaauauuccagagac

SEQ ID NO: 128898 - RNA, 19 nt, Homo sapiens
uaaagaaaaguuuuguaaa

SEQ ID NO: 128899 - RNA, 22 nt, Homo sapiens
acagucuuguauuaaguuguua

SEQ ID NO: 128900 - RNA, 20 nt, Homo sapiens
accaaauacuuuaauguaua

SEQ ID NO: 128901 - RNA, 17 nt, Homo sapiens
guacaaaguaagccaug

SEQ ID NO: 128902 - RNA, 15 nt, Homo sapiens
acacagcaucagcuc

SEQ ID NO: 128903 - RNA, 21 nt, Homo sapiens
gaauuuuuauauccacuaaaa

SEQ ID NO: 128904 - RNA, 15 nt, Homo sapiens
gaaugagacuuacuu

SEQ ID NO: 128905 - RNA, 18 nt, Homo sapiens
ccaaagaaacauugccuu

SEQ ID NO: 128906 - RNA, 21 nt, Homo sapiens
uccacucaggucuguuuuccg

SEQ ID NO: 128907 - RNA, 21 nt, Homo sapiens
cacaaucugaaacagcuucau

SEQ ID NO: 128908 - RNA, 17 nt, Homo sapiens
cuccuggaccaggucuc

SEQ ID NO: 128909 - RNA, 22 nt, Homo sapiens
acacaaucugaaacagcuucau

SEQ ID NO: 128910 - RNA, 18 nt, Homo sapiens
auaggaggccaacccaaa

SEQ ID NO: 128911 - RNA, 20 nt, Homo sapiens
gucagaguuccgacugccau

SEQ ID NO: 128912 - RNA, 16 nt, Homo sapiens
agucuuguauuaaguu

SEQ ID NO: 128913 - RNA, 22 nt, Homo sapiens
gcgcaguuggucuuuaaccacu

SEQ ID NO: 128914 - RNA, 16 nt, Homo sapiens
uaaucaguguuuccaa

SEQ ID NO: 128915 - RNA, 22 nt, Homo sapiens
uaagcugccuguacacaacuca

SEQ ID NO: 128916 - RNA, 12 nt, Homo sapiens
uggcucaucucu

SEQ ID NO: 128917 - RNA, 17 nt, Homo sapiens
uaagaagugacucuugc

SEQ ID NO: 128918 - RNA, 23 nt, Homo sapiens
gaaaugcugguuuuucaguuuuc

SEQ ID NO: 128919 - RNA, 21 nt, Homo sapiens
aaaauuaagaaauucacuucc

SEQ ID NO: 128920 - RNA, 22 nt, Homo sapiens
auauacuuauagaauucaguca

SEQ ID NO: 128921 - RNA, 19 nt, Homo sapiens
cucgugguaggacuguaga

SEQ ID NO: 128922 - RNA, 20 nt, Homo sapiens
auuccacaaccugguuugcc

SEQ ID NO: 128923 - RNA, 15 nt, Homo sapiens
ucuaaaaucugcuag

SEQ ID NO: 128924 - RNA, 18 nt, Homo sapiens
caaucugaaacagcuuca

SEQ ID NO: 128925 - RNA, 14 nt, Homo sapiens
acuuauuuauauaa

SEQ ID NO: 128926 - RNA, 11 nt, Homo sapiens
ccacucagguc

SEQ ID NO: 128927 - RNA, 22 nt, Homo sapiens
cugagucccuuagccaagcagu

SEQ ID NO: 128928 - RNA, 23 nt, Homo sapiens
uucauggauauguuauacugaac

SEQ ID NO: 128929 - RNA, 16 nt, Homo sapiens
uuguuuguggucuaua

SEQ ID NO: 128930 - RNA, 18 nt, Homo sapiens
augagaaaaugucuuuau

SEQ ID NO: 128931 - RNA, 12 nt, Homo sapiens
gaguagcuggau

SEQ ID NO: 128932 - RNA, 18 nt, Homo sapiens
cagaguuccgacugccau

SEQ ID NO: 128933 - RNA, 15 nt, Homo sapiens
uucaguuuucaggag

SEQ ID NO: 128934 - RNA, 14 nt, Homo sapiens
aaauucacuucccc

SEQ ID NO: 128935 - RNA, 15 nt, Homo sapiens
aucuaaaaucugcua

SEQ ID NO: 128936 - RNA, 20 nt, Homo sapiens
gcacaaauugggccaaagaa

SEQ ID NO: 128937 - RNA, 14 nt, Homo sapiens
caauauacuuguau

SEQ ID NO: 128938 - RNA, 14 nt, Homo sapiens
uuugucaacaaagu

SEQ ID NO: 128939 - RNA, 23 nt, Homo sapiens
cuuuggugaacauugcaauagaa

SEQ ID NO: 128940 - RNA, 13 nt, Homo sapiens
accaauauuguac

SEQ ID NO: 128941 - RNA, 23 nt, Homo sapiens
cacuguuaagccauguguuccaa

SEQ ID NO: 128942 - RNA, 21 nt, Homo sapiens
uuauauguauaucacauuccc

SEQ ID NO: 128943 - RNA, 15 nt, Homo sapiens
cuggaccaggucuca

SEQ ID NO: 128944 - RNA, 18 nt, Homo sapiens
uaaaccguacacuguguu

SEQ ID NO: 128945 - RNA, 18 nt, Homo sapiens
cagggagugggcuaagca

SEQ ID NO: 128946 - RNA, 22 nt, Homo sapiens
ucugauaugcaguuuuccuuaa

SEQ ID NO: 128947 - RNA, 22 nt, Homo sapiens
gcccagacccuucuccuuagaa

SEQ ID NO: 128948 - RNA, 13 nt, Homo sapiens
gagcaaacagaaa

SEQ ID NO: 128949 - RNA, 15 nt, Homo sapiens
cauucugcacucaga

SEQ ID NO: 128950 - RNA, 15 nt, Homo sapiens
aucuguccuguuaca

SEQ ID NO: 128951 - RNA, 20 nt, Homo sapiens
ucuaaagauggaaaaaccac

SEQ ID NO: 128952 - RNA, 14 nt, Homo sapiens
ccacaguggaacca

SEQ ID NO: 128953 - RNA, 17 nt, Homo sapiens
ucuuaaaauagccauaa

SEQ ID NO: 128954 - RNA, 17 nt, Homo sapiens
agccccagccuaggaaa

SEQ ID NO: 128955 - RNA, 18 nt, Homo sapiens
ugaaaauaugacacucua

SEQ ID NO: 128956 - RNA, 19 nt, Homo sapiens
aggcugugccaucagcucc

SEQ ID NO: 128957 - RNA, 15 nt, Homo sapiens
ccugccaggcacacu

SEQ ID NO: 128958 - RNA, 19 nt, Homo sapiens
uagugcacagcacaaauua

SEQ ID NO: 128959 - RNA, 22 nt, Homo sapiens
guaagaucguucucugccucac

SEQ ID NO: 128960 - RNA, 20 nt, Homo sapiens
gauuuugaaauuuuuauuaa

SEQ ID NO: 128961 - RNA, 16 nt, Homo sapiens
aauugcuucaagcauu

SEQ ID NO: 128962 - RNA, 13 nt, Homo sapiens
aagcauucuucaa

SEQ ID NO: 128963 - RNA, 14 nt, Homo sapiens
ccaaagugguauag

SEQ ID NO: 128964 - RNA, 15 nt, Homo sapiens
augggagacacugau

SEQ ID NO: 128965 - RNA, 22 nt, Homo sapiens
gaaaaagaagguugagggcaau

SEQ ID NO: 128966 - RNA, 12 nt, Homo sapiens
caguguuuccaa

SEQ ID NO: 128967 - RNA, 19 nt, Homo sapiens
caguaguggugacuguggg

SEQ ID NO: 128968 - RNA, 17 nt, Homo sapiens
acuuuuuccuggcucau

SEQ ID NO: 128969 - RNA, 23 nt, Homo sapiens
caaucaguagccagcaucugccu

SEQ ID NO: 128970 - RNA, 23 nt, Homo sapiens
gucucgugguaggacuguagaaa

SEQ ID NO: 128971 - RNA, 16 nt, Homo sapiens
gcagagaggcugaaua

SEQ ID NO: 128972 - RNA, 21 nt, Homo sapiens
accucgagguuucucaaagaa

SEQ ID NO: 128973 - RNA, 17 nt, Homo sapiens
ccagagccucaaaugag

SEQ ID NO: 128974 - RNA, 20 nt, Homo sapiens
gcuuagcuaauauugcaaug

SEQ ID NO: 128975 - RNA, 12 nt, Homo sapiens
aauaaagacagg

SEQ ID NO: 128976 - RNA, 23 nt, Homo sapiens
ggcagaguacaaaguaagccaug

SEQ ID NO: 128977 - RNA, 22 nt, Homo sapiens
uggauuugucuuuggugaacau

SEQ ID NO: 128978 - RNA, 21 nt, Homo sapiens
gauaggguuucuaaugguuau

SEQ ID NO: 128979 - RNA, 13 nt, Homo sapiens
uaaauguagaaag

SEQ ID NO: 128980 - RNA, 13 nt, Homo sapiens
aaaaacauucuua

SEQ ID NO: 128981 - RNA, 20 nt, Homo sapiens
uugcccaggcuggagugcaa

SEQ ID NO: 128982 - RNA, 21 nt, Homo sapiens
cagaaucucucuucuuuucaa

SEQ ID NO: 128983 - RNA, 21 nt, Homo sapiens
ucaaguaauccaccugccucg

SEQ ID NO: 128984 - RNA, 23 nt, Homo sapiens
uguauauuuucugugcagccacu

SEQ ID NO: 128985 - RNA, 11 nt, Homo sapiens
ggaacugugua

SEQ ID NO: 128986 - RNA, 20 nt, Homo sapiens
ugaguagcuggauuacaggc

SEQ ID NO: 128987 - RNA, 14 nt, Homo sapiens
uagaagauggcacu

SEQ ID NO: 128988 - RNA, 21 nt, Homo sapiens
auagagguucuuuauugcuca

SEQ ID NO: 128989 - RNA, 19 nt, Homo sapiens
cacuuagguccaaggucuc

SEQ ID NO: 128990 - RNA, 20 nt, Homo sapiens
auacuagaguucauggauau

SEQ ID NO: 128991 - RNA, 12 nt, Homo sapiens
auugcuugcaca

SEQ ID NO: 128992 - RNA, 13 nt, Homo sapiens
cuuuauugcucau

SEQ ID NO: 128993 - RNA, 16 nt, Homo sapiens
uuaauaaagacagggu

SEQ ID NO: 128994 - RNA, 22 nt, Homo sapiens
gaaauagugauuuccacaguga

SEQ ID NO: 128995 - RNA, 18 nt, Homo sapiens
acaaauugggccaaagaa

SEQ ID NO: 128996 - RNA, 22 nt, Homo sapiens
gugaccugccaggcacacugag

SEQ ID NO: 128997 - RNA, 12 nt, Homo sapiens
guaaaagccauc

SEQ ID NO: 128998 - RNA, 22 nt, Homo sapiens
cuuuaguuuuugugaaguuuaa

SEQ ID NO: 128999 - RNA, 23 nt, Homo sapiens
gugagacuuugaggguguauauu

SEQ ID NO: 129000 - RNA, 22 nt, Homo sapiens
caaucaauucauaucuauuuau

SEQ ID NO: 129001 - RNA, 14 nt, Homo sapiens
uugcucacaaaagu

SEQ ID NO: 129002 - RNA, 18 nt, Homo sapiens
ccugccaggcacacugag

SEQ ID NO: 129003 - RNA, 19 nt, Homo sapiens
cgugguaggacuguagaaa

SEQ ID NO: 129004 - RNA, 22 nt, Homo sapiens
agagagaaaaguaacuguuuug

SEQ ID NO: 129005 - RNA, 21 nt, Homo sapiens
ccaaguucuuaguugcuguau

SEQ ID NO: 129006 - RNA, 20 nt, Homo sapiens
gucugucaauguccuacuga

SEQ ID NO: 129007 - RNA, 23 nt, Homo sapiens
cuuagagcuuuaccuaaauauga

SEQ ID NO: 129008 - RNA, 17 nt, Homo sapiens
auccuggggaacauaga

SEQ ID NO: 129009 - RNA, 19 nt, Homo sapiens
gacgugauuuugcuguaga

SEQ ID NO: 129010 - RNA, 20 nt, Homo sapiens
ggcuggagugcaaugacaca

SEQ ID NO: 129011 - RNA, 13 nt, Homo sapiens
caguguacagucu

SEQ ID NO: 129012 - RNA, 22 nt, Homo sapiens
gaaaauugggaauaugcacaaa

SEQ ID NO: 129013 - RNA, 22 nt, Homo sapiens
gaauaacauggugugcuucuua

SEQ ID NO: 129014 - RNA, 15 nt, Homo sapiens
uaauaaagacagggu

SEQ ID NO: 129015 - RNA, 12 nt, Homo sapiens
acacagcaucag

SEQ ID NO: 129016 - RNA, 16 nt, Homo sapiens
gccacuguuaagccau

SEQ ID NO: 129017 - RNA, 11 nt, Homo sapiens
aguugcuguau

SEQ ID NO: 129018 - RNA, 16 nt, Homo sapiens
gaaguuuaauugacuu

SEQ ID NO: 129019 - RNA, 16 nt, Homo sapiens
gacacagcaucagcuc

SEQ ID NO: 129020 - RNA, 13 nt, Homo sapiens
guucucugccuca

SEQ ID NO: 129021 - RNA, 20 nt, Homo sapiens
uagauaaucucuccauuccc

SEQ ID NO: 129022 - RNA, 16 nt, Homo sapiens
ucagggagugggcuaa

SEQ ID NO: 129023 - RNA, 15 nt, Homo sapiens
cccgucgacguagaa

SEQ ID NO: 129024 - RNA, 20 nt, Homo sapiens
guuaaaauaaaauuguacau

SEQ ID NO: 129025 - RNA, 17 nt, Homo sapiens
uuuaauguuuccuuuaa

SEQ ID NO: 129026 - RNA, 21 nt, Homo sapiens
ucugaacaauauauacuuaua

SEQ ID NO: 129027 - RNA, 18 nt, Homo sapiens
gucugauuguagcuauga

SEQ ID NO: 129028 - RNA, 12 nt, Homo sapiens
ggagacacugau

SEQ ID NO: 129029 - RNA, 13 nt, Homo sapiens
uguaucucaggaa

SEQ ID NO: 129030 - RNA, 14 nt, Homo sapiens
uagaauucagucaa

SEQ ID NO: 129031 - RNA, 14 nt, Homo sapiens
aagaaacauugccu

SEQ ID NO: 129032 - RNA, 21 nt, Homo sapiens
cugaugcuggggacacagcau

SEQ ID NO: 129033 - RNA, 23 nt, Homo sapiens
uaaaaaaaaaaaaaaaagugaug

SEQ ID NO: 129034 - RNA, 15 nt, Homo sapiens
aaugacacagucuug

SEQ ID NO: 129035 - RNA, 22 nt, Homo sapiens
uaggaagaauuuuuauauccac

SEQ ID NO: 129036 - RNA, 21 nt, Homo sapiens
uaagaagcagauaaugguguu

SEQ ID NO: 129037 - RNA, 15 nt, Homo sapiens
augagcaaaaccaaa

SEQ ID NO: 129038 - RNA, 13 nt, Homo sapiens
uggagucugucaa

SEQ ID NO: 129039 - RNA, 22 nt, Homo sapiens
aaagccaaucucaaucccucaa

SEQ ID NO: 129040 - RNA, 16 nt, Homo sapiens
ugcaaugacacagucu

SEQ ID NO: 129041 - RNA, 21 nt, Homo sapiens
acuguuuugguuuugcucaca

SEQ ID NO: 129042 - RNA, 19 nt, Homo sapiens
cccaggcuggagugcaaug

SEQ ID NO: 129043 - RNA, 19 nt, Homo sapiens
uagugauuuccacagugac

SEQ ID NO: 129044 - RNA, 21 nt, Homo sapiens
aagaauuuuuauauccacuaa

SEQ ID NO: 129045 - RNA, 18 nt, Homo sapiens
ugguuguauuaaagcagg

SEQ ID NO: 129046 - RNA, 16 nt, Homo sapiens
cugcuucugauaugca

SEQ ID NO: 129047 - RNA, 14 nt, Homo sapiens
ucucugcuaucuag

SEQ ID NO: 129048 - RNA, 14 nt, Homo sapiens
gcuucugauaugca

SEQ ID NO: 129049 - RNA, 17 nt, Homo sapiens
cuucuuuuugcuucaaa

SEQ ID NO: 129050 - RNA, 22 nt, Homo sapiens
gggaaggaggccguccaucccg

SEQ ID NO: 129051 - RNA, 18 nt, Homo sapiens
uuuaaaugaaagugagac

SEQ ID NO: 129052 - RNA, 17 nt, Homo sapiens
gucaauguccuacugag

SEQ ID NO: 129053 - RNA, 16 nt, Homo sapiens
uaugaauaguuuccaa

SEQ ID NO: 129054 - RNA, 22 nt, Homo sapiens
caauauauacuuauagaauuca

SEQ ID NO: 129055 - RNA, 16 nt, Homo sapiens
ugaaguuuaauugacu

SEQ ID NO: 129056 - RNA, 17 nt, Homo sapiens
gucaaagccuugguaaa

SEQ ID NO: 129057 - RNA, 15 nt, Homo sapiens
uuaaaaauaugugua

SEQ ID NO: 129058 - RNA, 13 nt, Homo sapiens
uaauaaagacagg

SEQ ID NO: 129059 - RNA, 23 nt, Homo sapiens
cuuggaauccuggggaacauaga

SEQ ID NO: 129060 - RNA, 22 nt, Homo sapiens
ucaaacaaaaagucauaaaagu

SEQ ID NO: 129061 - RNA, 23 nt, Homo sapiens
guucauggauauguuauacugaa

SEQ ID NO: 129062 - RNA, 16 nt, Homo sapiens
gcaauagaaauccaau

SEQ ID NO: 129063 - RNA, 18 nt, Homo sapiens
cuauaagaugaaacauca

SEQ ID NO: 129064 - RNA, 21 nt, Homo sapiens
agacgugauuuugcuguagaa

SEQ ID NO: 129065 - RNA, 21 nt, Homo sapiens
gacagcacagccaaccuagcu

SEQ ID NO: 129066 - RNA, 24 nt, Homo sapiens
cauguuggccaggcuggucucaaa

SEQ ID NO: 129067 - RNA, 17 nt, Homo sapiens
cagguucugacucuugg

SEQ ID NO: 129068 - RNA, 15 nt, Homo sapiens
uagaaagaagaugaa

SEQ ID NO: 129069 - RNA, 13 nt, Homo sapiens
gucacagccacuu

SEQ ID NO: 129070 - RNA, 18 nt, Homo sapiens
ccuucuuuuuguucuuca

SEQ ID NO: 129071 - RNA, 22 nt, Homo sapiens
guuucauauugaugugugucua

SEQ ID NO: 129072 - RNA, 20 nt, Homo sapiens
uuucuugucuauaaagcauu

SEQ ID NO: 129073 - RNA, 23 nt, Homo sapiens
aagacgucacccuccauucugca

SEQ ID NO: 129074 - RNA, 16 nt, Homo sapiens
augagcaaaaccaaau

SEQ ID NO: 129075 - RNA, 20 nt, Homo sapiens
cuguucuaaggcugugccau

SEQ ID NO: 129076 - RNA, 19 nt, Homo sapiens
cuccacaaagccaaucuca

SEQ ID NO: 129077 - RNA, 22 nt, Homo sapiens
caggcaugugccacccacccaa

SEQ ID NO: 129078 - RNA, 23 nt, Homo sapiens
aaauuuucuuuuuauacuauuaa

SEQ ID NO: 129079 - RNA, 22 nt, Homo sapiens
augaggaauuucuguucuucca

SEQ ID NO: 129080 - RNA, 14 nt, Homo sapiens
guuccgacugccau

SEQ ID NO: 129081 - RNA, 14 nt, Homo sapiens
uguguuuuuaauaa

SEQ ID NO: 129082 - RNA, 15 nt, Homo sapiens
acagcaucagcucaa

SEQ ID NO: 129083 - RNA, 18 nt, Homo sapiens
aaguacauguuaaacuua

SEQ ID NO: 129084 - RNA, 22 nt, Homo sapiens
ugucaauguccuacugagacag

SEQ ID NO: 129085 - RNA, 22 nt, Homo sapiens
acagcauggagucacagccacu

SEQ ID NO: 129086 - RNA, 22 nt, Homo sapiens
guaaaauaaucaguguuuccaa

SEQ ID NO: 129087 - RNA, 14 nt, Homo sapiens
gcuguagaagaugg

SEQ ID NO: 129088 - RNA, 16 nt, Homo sapiens
uugacauucugaaugc

SEQ ID NO: 129089 - RNA, 14 nt, Homo sapiens
aaugagacuuacuu

SEQ ID NO: 129090 - RNA, 13 nt, Homo sapiens
ucaucauuuccau

SEQ ID NO: 129091 - RNA, 19 nt, Homo sapiens
cuggcaguggaacuaagaa

SEQ ID NO: 129092 - RNA, 13 nt, Homo sapiens
ggaaccagcccag

SEQ ID NO: 129093 - RNA, 9 nt, Homo sapiens
aaagugaug

SEQ ID NO: 129094 - RNA, 19 nt, Homo sapiens
gaguacaaaguaagccaug

SEQ ID NO: 129095 - RNA, 13 nt, Homo sapiens
auucugcacucag

SEQ ID NO: 129096 - RNA, 13 nt, Homo sapiens
cauuuguuuucac

SEQ ID NO: 129097 - RNA, 12 nt, Homo sapiens
uuuuauauccac

SEQ ID NO: 129098 - RNA, 15 nt, Homo sapiens
uggcuucuuuacuua

SEQ ID NO: 129099 - RNA, 17 nt, Homo sapiens
cacccucccacugccaa

SEQ ID NO: 129100 - RNA, 12 nt, Homo sapiens
augacacagucu

SEQ ID NO: 129101 - RNA, 13 nt, Homo sapiens
caacuguggcuua

SEQ ID NO: 129102 - RNA, 20 nt, Homo sapiens
cuauaaaaugagaagucuca

SEQ ID NO: 129103 - RNA, 14 nt, Homo sapiens
acacagcaucagcu

SEQ ID NO: 129104 - RNA, 20 nt, Homo sapiens
cugucaauguccuacugaga

SEQ ID NO: 129105 - RNA, 22 nt, Homo sapiens
agcagaugguggagcugaauau

SEQ ID NO: 129106 - RNA, 19 nt, Homo sapiens
gcuucuuaaaauagccaua

SEQ ID NO: 129107 - RNA, 14 nt, Homo sapiens
ugcaauguuuuaga

SEQ ID NO: 129108 - RNA, 14 nt, Homo sapiens
uaguggugacugug

SEQ ID NO: 129109 - RNA, 18 nt, Homo sapiens
aauugggaauaugcacaa

SEQ ID NO: 129110 - RNA, 22 nt, Homo sapiens
uagucugaacaauauauacuua

SEQ ID NO: 129111 - RNA, 15 nt, Homo sapiens
uaucuaaaaucugcu

SEQ ID NO: 129112 - RNA, 16 nt, Homo sapiens
uuuaauguuuccuuua

SEQ ID NO: 129113 - RNA, 14 nt, Homo sapiens
ccagccucaucucu

SEQ ID NO: 129114 - RNA, 17 nt, Homo sapiens
ggcucucccagccaggu

SEQ ID NO: 129115 - RNA, 14 nt, Homo sapiens
acuaagaagcagau

SEQ ID NO: 129116 - RNA, 20 nt, Homo sapiens
aaagcuggagucugucaaug

SEQ ID NO: 129117 - RNA, 21 nt, Homo sapiens
ggggacacagcaucagcucaa

SEQ ID NO: 129118 - RNA, 16 nt, Homo sapiens
gcuaguaaaagccauc

SEQ ID NO: 129119 - RNA, 21 nt, Homo sapiens
aacuucaacguaagacugugu

SEQ ID NO: 129120 - RNA, 19 nt, Homo sapiens
guaaauauagcucagguag

SEQ ID NO: 129121 - RNA, 21 nt, Homo sapiens
aguauauucaaccaaauacuu

SEQ ID NO: 129122 - RNA, 13 nt, Homo sapiens
caaaaccaaauau

SEQ ID NO: 129123 - RNA, 15 nt, Homo sapiens
aagccauguguucca

SEQ ID NO: 129124 - RNA, 12 nt, Homo sapiens
aaaaugugacuc

SEQ ID NO: 129125 - RNA, 15 nt, Homo sapiens
cuuuauacucaggca

SEQ ID NO: 129126 - RNA, 23 nt, Homo sapiens
uaaaaguuggcucaggagucuua

SEQ ID NO: 129127 - RNA, 16 nt, Homo sapiens
ugaccugccaggcaca

SEQ ID NO: 129128 - RNA, 23 nt, Homo sapiens
aaucccucaaaacaaucuuguca

SEQ ID NO: 129129 - RNA, 15 nt, Homo sapiens
uuggugaacauugca

SEQ ID NO: 129130 - RNA, 13 nt, Homo sapiens
cagcaucagcuca

SEQ ID NO: 129131 - RNA, 13 nt, Homo sapiens
ugggauuacaggg

SEQ ID NO: 129132 - RNA, 14 nt, Homo sapiens
caguggaacuaaga

SEQ ID NO: 129133 - RNA, 22 nt, Homo sapiens
aagaugaaugagcaaaaccaaa

SEQ ID NO: 129134 - RNA, 21 nt, Homo sapiens
uaaauguagaaagugauccau

SEQ ID NO: 129135 - RNA, 12 nt, Homo sapiens
aaugaaagugag

SEQ ID NO: 129136 - RNA, 17 nt, Homo sapiens
auguagaaagugaucca

SEQ ID NO: 129137 - RNA, 18 nt, Homo sapiens
gaugaaacaucauuucaa

SEQ ID NO: 129138 - RNA, 22 nt, Homo sapiens
acuuauagaauucagucaaaga

SEQ ID NO: 129139 - RNA, 23 nt, Homo sapiens
uccuggggaacauagaacucaug

SEQ ID NO: 129140 - RNA, 13 nt, Homo sapiens
ugauuguagcuau

SEQ ID NO: 129141 - RNA, 21 nt, Homo sapiens
ggcuucagucuuuuccaugaa

SEQ ID NO: 129142 - RNA, 22 nt, Homo sapiens
guaacuguuuugguuuugcuca

SEQ ID NO: 129143 - RNA, 19 nt, Homo sapiens
gugcugggauuacagggau

SEQ ID NO: 129144 - RNA, 12 nt, Homo sapiens
acuuaguucaag

SEQ ID NO: 129145 - RNA, 21 nt, Homo sapiens
uguuuaugaauaguuuccaaa

SEQ ID NO: 129146 - RNA, 18 nt, Homo sapiens
aaccucgagguuucucaa

SEQ ID NO: 129147 - RNA, 18 nt, Homo sapiens
gucacagccacuugggau

SEQ ID NO: 129148 - RNA, 15 nt, Homo sapiens
aggcuucuggggcuu

SEQ ID NO: 129149 - RNA, 13 nt, Homo sapiens
caguaguugcaau

SEQ ID NO: 129150 - RNA, 20 nt, Homo sapiens
aagugagcuccuaagccaug

SEQ ID NO: 129151 - RNA, 17 nt, Homo sapiens
caggacagcuccuggac

SEQ ID NO: 129152 - RNA, 22 nt, Homo sapiens
cccgccacccucccacugccaa

SEQ ID NO: 129153 - RNA, 19 nt, Homo sapiens
gucuuuggugaacauugca

SEQ ID NO: 129154 - RNA, 13 nt, Homo sapiens
caaagaaauuucc

SEQ ID NO: 129155 - RNA, 10 nt, Homo sapiens
gaaaagcagg

SEQ ID NO: 129156 - RNA, 12 nt, Homo sapiens
uuugcuguagaa

SEQ ID NO: 129157 - RNA, 21 nt, Homo sapiens
acuuuuuccuggcucaucucu

SEQ ID NO: 129158 - RNA, 16 nt, Homo sapiens
uagcuuauacaaaaca

SEQ ID NO: 129159 - RNA, 23 nt, Homo sapiens
uuauucuguaguuucacucucau

SEQ ID NO: 129160 - RNA, 16 nt, Homo sapiens
gaacugaacauuccag

SEQ ID NO: 129161 - RNA, 14 nt, Homo sapiens
gauuuccacaguga

SEQ ID NO: 129162 - RNA, 19 nt, Homo sapiens
cauugcaauagaaauccaa

SEQ ID NO: 129163 - RNA, 19 nt, Homo sapiens
guuucaccauguuggccag

SEQ ID NO: 129164 - RNA, 17 nt, Homo sapiens
uccacagugacuccacu

SEQ ID NO: 129165 - RNA, 12 nt, Homo sapiens
uaguugcuguau

SEQ ID NO: 129166 - RNA, 14 nt, Homo sapiens
uccaaagacauguu

SEQ ID NO: 129167 - RNA, 22 nt, Homo sapiens
uuaucauuaaaaggaaagcaga

SEQ ID NO: 129168 - RNA, 17 nt, Homo sapiens
aggagugccacuucaug

SEQ ID NO: 129169 - RNA, 20 nt, Homo sapiens
acucuaacaguaguugcaau

SEQ ID NO: 129170 - RNA, 18 nt, Homo sapiens
guuuuacuguccaaagac

SEQ ID NO: 129171 - RNA, 14 nt, Homo sapiens
uaaaauagccauaa

SEQ ID NO: 129172 - RNA, 18 nt, Homo sapiens
uguugacauucugaaugc

SEQ ID NO: 129173 - RNA, 14 nt, Homo sapiens
acauuuuguauauu

SEQ ID NO: 129174 - RNA, 15 nt, Homo sapiens
gacucaucauuucca

SEQ ID NO: 129175 - RNA, 22 nt, Homo sapiens
ggagucuuagagcuuuaccuaa

SEQ ID NO: 129176 - RNA, 21 nt, Homo sapiens
auucucuagucaguuggcuaa

SEQ ID NO: 129177 - RNA, 22 nt, Homo sapiens
aagaaaaguuuuguaaauuucu

SEQ ID NO: 129178 - RNA, 21 nt, Homo sapiens
uaagcacgggccauaugaaua

SEQ ID NO: 129179 - RNA, 13 nt, Homo sapiens
uugaaacuuguau

SEQ ID NO: 129180 - RNA, 19 nt, Homo sapiens
uauauguauaucacauucc

SEQ ID NO: 129181 - RNA, 16 nt, Homo sapiens
cagcauggagucacag

SEQ ID NO: 129182 - RNA, 13 nt, Homo sapiens
aaaaugugacuca

SEQ ID NO: 129183 - RNA, 15 nt, Homo sapiens
ugcagccacuguuaa

SEQ ID NO: 129184 - RNA, 15 nt, Homo sapiens
guagaaagugaucca

SEQ ID NO: 129185 - RNA, 20 nt, Homo sapiens
uaaauuucucuacugucuca

SEQ ID NO: 129186 - RNA, 15 nt, Homo sapiens
uuacuguccaaagac

SEQ ID NO: 129187 - RNA, 17 nt, Homo sapiens
auuuucuuuuuauacua

SEQ ID NO: 129188 - RNA, 14 nt, Homo sapiens
acaaucugaaacag

SEQ ID NO: 129189 - RNA, 22 nt, Homo sapiens
accagagaagggcuuggacuca

SEQ ID NO: 129190 - RNA, 21 nt, Homo sapiens
ccugaugcuggggacacagca

SEQ ID NO: 129191 - RNA, 23 nt, Homo sapiens
cuagugcaguuuuuuucuugucu

SEQ ID NO: 129192 - RNA, 23 nt, Homo sapiens
acugggacuaaguguaccagaga

SEQ ID NO: 129193 - RNA, 13 nt, Homo sapiens
uggcucaucucuu

SEQ ID NO: 129194 - RNA, 23 nt, Homo sapiens
uagugauuuccacagugacucca

SEQ ID NO: 129195 - RNA, 12 nt, Homo sapiens
uuuaaagacaga

SEQ ID NO: 129196 - RNA, 21 nt, Homo sapiens
aacaaucuugucauacuugaa

SEQ ID NO: 129197 - RNA, 19 nt, Homo sapiens
aauucugaauuaagcacag

SEQ ID NO: 129198 - RNA, 20 nt, Homo sapiens
auacuuauagaauucaguca

SEQ ID NO: 129199 - RNA, 15 nt, Homo sapiens
aaaacaaucuuguca

SEQ ID NO: 129200 - RNA, 14 nt, Homo sapiens
ugaaacaucauuuc

SEQ ID NO: 129201 - RNA, 20 nt, Homo sapiens
accguaugagggaacugugu

SEQ ID NO: 129202 - RNA, 13 nt, Homo sapiens
gauacgacaacuu

SEQ ID NO: 129203 - RNA, 15 nt, Homo sapiens
gccccagccuaggaa

SEQ ID NO: 129204 - RNA, 13 nt, Homo sapiens
agguugagggcaa

SEQ ID NO: 129205 - RNA, 23 nt, Homo sapiens
aaucaguguuuccaaucuguccu

SEQ ID NO: 129206 - RNA, 22 nt, Homo sapiens
gguacaguauggggguuguaaa

SEQ ID NO: 129207 - RNA, 15 nt, Homo sapiens
uccuguuacaaaaga

SEQ ID NO: 129208 - RNA, 18 nt, Homo sapiens
agaagguugagggcaaug

SEQ ID NO: 129209 - RNA, 17 nt, Homo sapiens
gaugcuggggacacagc

SEQ ID NO: 129210 - RNA, 13 nt, Homo sapiens
cuugcacaaacca

SEQ ID NO: 129211 - RNA, 21 nt, Homo sapiens
cacugccaaagaacuuggaaa

SEQ ID NO: 129212 - RNA, 21 nt, Homo sapiens
uggggacacagcaucagcuca

SEQ ID NO: 129213 - RNA, 10 nt, Homo sapiens
ugucuuuauu

SEQ ID NO: 129214 - RNA, 20 nt, Homo sapiens
cuaagcacgggccauaugaa

SEQ ID NO: 129215 - RNA, 15 nt, Homo sapiens
cugaccaauauugua

SEQ ID NO: 129216 - RNA, 18 nt, Homo sapiens
accaacuauagaauguau

SEQ ID NO: 129217 - RNA, 21 nt, Homo sapiens
ucaagugauucuccugccuca

SEQ ID NO: 129218 - RNA, 16 nt, Homo sapiens
ccaggcuggagugcaa

SEQ ID NO: 129219 - RNA, 15 nt, Homo sapiens
cuuacuuaguguuau

SEQ ID NO: 129220 - RNA, 16 nt, Homo sapiens
aguugcaauguuuuag

SEQ ID NO: 129221 - RNA, 22 nt, Homo sapiens
guguuuuuaauaaagacagggu

SEQ ID NO: 129222 - RNA, 22 nt, Homo sapiens
caucugccuccccuucacuccc

SEQ ID NO: 129223 - RNA, 17 nt, Homo sapiens
aagcuggagucugucaa

SEQ ID NO: 129224 - RNA, 22 nt, Homo sapiens
agccuaggaaagccaguuacau

SEQ ID NO: 129225 - RNA, 15 nt, Homo sapiens
cuaguaaaagccauc

SEQ ID NO: 129226 - RNA, 13 nt, Homo sapiens
agcaaaaccaaau

SEQ ID NO: 129227 - RNA, 20 nt, Homo sapiens
gggacuaaguguaccagaga

SEQ ID NO: 129228 - RNA, 19 nt, Homo sapiens
gaccugccaggcacacuga

SEQ ID NO: 129229 - RNA, 13 nt, Homo sapiens
guuggcucaggag

SEQ ID NO: 129230 - RNA, 18 nt, Homo sapiens
ggaacuaagaaagcccuu

SEQ ID NO: 129231 - RNA, 15 nt, Homo sapiens
acacaaucugaaaca

SEQ ID NO: 129232 - RNA, 14 nt, Homo sapiens
guccacaguggaac

SEQ ID NO: 129233 - RNA, 16 nt, Homo sapiens
uacaaaguaagccaug

SEQ ID NO: 129234 - RNA, 17 nt, Homo sapiens
cuccccuucacucccac

SEQ ID NO: 129235 - RNA, 12 nt, Homo sapiens
aacuucugccuc

SEQ ID NO: 129236 - RNA, 22 nt, Homo sapiens
caaagauacacaaucugaaaca

SEQ ID NO: 129237 - RNA, 20 nt, Homo sapiens
ucugacucuuggcacagcau

SEQ ID NO: 129238 - RNA, 22 nt, Homo sapiens
agcuggagucugucaauguccu

SEQ ID NO: 129239 - RNA, 22 nt, Homo sapiens
cuuaaaagaaagagaaguuuuc

SEQ ID NO: 129240 - RNA, 23 nt, Homo sapiens
ccacccccaaauuuucuuuuuau

SEQ ID NO: 129241 - RNA, 14 nt, Homo sapiens
acaaaguaagccau

SEQ ID NO: 129242 - RNA, 12 nt, Homo sapiens
aaugucuuuauu

SEQ ID NO: 129243 - RNA, 13 nt, Homo sapiens
gaaaaguuuugua

SEQ ID NO: 129244 - RNA, 16 nt, Homo sapiens
agugauucuccugccu

SEQ ID NO: 129245 - RNA, 13 nt, Homo sapiens
gacucuaacagua

SEQ ID NO: 129246 - RNA, 14 nt, Homo sapiens
caucauuucaaucg

SEQ ID NO: 129247 - RNA, 22 nt, Homo sapiens
uaaauuucucuacugucucagu

SEQ ID NO: 129248 - RNA, 14 nt, Homo sapiens
ccuggcucaucucu

SEQ ID NO: 129249 - RNA, 15 nt, Homo sapiens
auucucuagucaguu

SEQ ID NO: 129250 - RNA, 23 nt, Homo sapiens
gucucauaaugcauguggcacuu

SEQ ID NO: 129251 - RNA, 14 nt, Homo sapiens
uacuguccaaagac

SEQ ID NO: 129252 - RNA, 17 nt, Homo sapiens
ucaugagugcaacugug

SEQ ID NO: 129253 - RNA, 22 nt, Homo sapiens
cagucuucuuccaugucuauua

SEQ ID NO: 129254 - RNA, 14 nt, Homo sapiens
guuuucccaaagag

SEQ ID NO: 129255 - RNA, 13 nt, Homo sapiens
cacuuuucaaugu

SEQ ID NO: 129256 - RNA, 19 nt, Homo sapiens
cuagcaacauuuguuuuag

SEQ ID NO: 129257 - RNA, 20 nt, Homo sapiens
uacccguuucacaugcuuuu

SEQ ID NO: 129258 - RNA, 23 nt, Homo sapiens
cuuccuccccuguucauucugca

SEQ ID NO: 129259 - RNA, 19 nt, Homo sapiens
ugcuucaaaaacauucuua

SEQ ID NO: 129260 - RNA, 19 nt, Homo sapiens
guuguuaauaaaaguacau

SEQ ID NO: 129261 - RNA, 19 nt, Homo sapiens
gagaucuauauauguauaa

SEQ ID NO: 129262 - RNA, 22 nt, Homo sapiens
uuaaauguagaaagugauccau

SEQ ID NO: 129263 - RNA, 16 nt, Homo sapiens
uccuuagaaguggaag

SEQ ID NO: 129264 - RNA, 13 nt, Homo sapiens
ucuuccaucaccu

SEQ ID NO: 129265 - RNA, 21 nt, Homo sapiens
ucucccagccagguucugacu

SEQ ID NO: 129266 - RNA, 22 nt, Homo sapiens
cacuuagguccaaggucuccag

SEQ ID NO: 129267 - RNA, 19 nt, Homo sapiens
uugcuugcacaaaccaauu

SEQ ID NO: 129268 - RNA, 12 nt, Homo sapiens
uaagaugaaaca

SEQ ID NO: 129269 - RNA, 21 nt, Homo sapiens
ugguuuugcucacaaaagucu

SEQ ID NO: 129270 - RNA, 23 nt, Homo sapiens
accagagaagggcuuggacucaa

SEQ ID NO: 129271 - RNA, 23 nt, Homo sapiens
caguugcagcuguuuuguugaca

SEQ ID NO: 129272 - RNA, 19 nt, Homo sapiens
agcaccuacaguguacagu

SEQ ID NO: 129273 - RNA, 17 nt, Homo sapiens
auucuuacauuuuacuu

SEQ ID NO: 129274 - RNA, 17 nt, Homo sapiens
agcuggauuacaggcau

SEQ ID NO: 129275 - RNA, 14 nt, Homo sapiens
aaaagacugaccaa

SEQ ID NO: 129276 - RNA, 18 nt, Homo sapiens
uggccaggcuggucucaa

SEQ ID NO: 129277 - RNA, 14 nt, Homo sapiens
caaugucuaaaaac

SEQ ID NO: 129278 - RNA, 16 nt, Homo sapiens
gacucaucauuuccau

SEQ ID NO: 129279 - RNA, 17 nt, Homo sapiens
aagaucguucucugccu

SEQ ID NO: 129280 - RNA, 16 nt, Homo sapiens
acacagcaucagcuca

SEQ ID NO: 129281 - RNA, 16 nt, Homo sapiens
gauuuugcuguagaag

SEQ ID NO: 129282 - RNA, 16 nt, Homo sapiens
ugagacagcacagcca

SEQ ID NO: 129283 - RNA, 19 nt, Homo sapiens
cucgagguuucucaaagaa

SEQ ID NO: 129284 - RNA, 16 nt, Homo sapiens
aauaaauucaucagau

SEQ ID NO: 129285 - RNA, 19 nt, Homo sapiens
agauaaccucaagucacau

SEQ ID NO: 129286 - RNA, 22 nt, Homo sapiens
ugauuucagcaccuacagugua

SEQ ID NO: 129287 - RNA, 23 nt, Homo sapiens
agaagguugagggcaauggacaa

SEQ ID NO: 129288 - RNA, 15 nt, Homo sapiens
ccuuugccugguaca

SEQ ID NO: 129289 - RNA, 14 nt, Homo sapiens
ccagagacugggac

SEQ ID NO: 129290 - RNA, 23 nt, Homo sapiens
aaaugcugguuuuucaguuuuca

SEQ ID NO: 129291 - RNA, 19 nt, Homo sapiens
acugggcgcaguuggucuu

SEQ ID NO: 129292 - RNA, 21 nt, Homo sapiens
ugaccugccaggcacacugag

SEQ ID NO: 129293 - RNA, 22 nt, Homo sapiens
ggcuaagaagugacucuugcaa

SEQ ID NO: 129294 - RNA, 15 nt, Homo sapiens
cucaggcagaucuca

SEQ ID NO: 129295 - RNA, 14 nt, Homo sapiens
aucaguguuuccaa

SEQ ID NO: 129296 - RNA, 19 nt, Homo sapiens
accaggucucauaaugcau

SEQ ID NO: 129297 - RNA, 16 nt, Homo sapiens
guggauuggauuuguc

SEQ ID NO: 129298 - RNA, 19 nt, Homo sapiens
caccaacuauagaauguau

SEQ ID NO: 129299 - RNA, 19 nt, Homo sapiens
cacuguguuuuuuuguaua

SEQ ID NO: 129300 - RNA, 14 nt, Homo sapiens
auugggccaaagaa

SEQ ID NO: 129301 - RNA, 17 nt, Homo sapiens
acuuacuucucugcuau

SEQ ID NO: 129302 - RNA, 15 nt, Homo sapiens
uggggacacagcauc

SEQ ID NO: 129303 - RNA, 15 nt, Homo sapiens
ucguucucugccuca

SEQ ID NO: 129304 - RNA, 18 nt, Homo sapiens
cauuuguuuuagucugaa

SEQ ID NO: 129305 - RNA, 15 nt, Homo sapiens
uucugaaaaaguauc

SEQ ID NO: 129306 - RNA, 22 nt, Homo sapiens
uguuuccuuuaauuuuuuacua

SEQ ID NO: 129307 - RNA, 17 nt, Homo sapiens
cuagaguucauggauau

SEQ ID NO: 129308 - RNA, 16 nt, Homo sapiens
cauaaaaguuggcuca

SEQ ID NO: 129309 - RNA, 17 nt, Homo sapiens
cacaaaagucuacuuua

SEQ ID NO: 129310 - RNA, 21 nt, Homo sapiens
aaauuaagaaauucacuuccc

SEQ ID NO: 129311 - RNA, 14 nt, Homo sapiens
gcuaauauugcaau

SEQ ID NO: 129312 - RNA, 21 nt, Homo sapiens
cucugauguagcuuauacaaa

SEQ ID NO: 129313 - RNA, 17 nt, Homo sapiens
cuaaguguaccagagaa

SEQ ID NO: 129314 - RNA, 13 nt, Homo sapiens
caaaguaagccau

SEQ ID NO: 129315 - RNA, 14 nt, Homo sapiens
ugaauaugccacuu

SEQ ID NO: 129316 - RNA, 21 nt, Homo sapiens
ggucagaguuccgacugccau

SEQ ID NO: 129317 - RNA, 11 nt, Homo sapiens
aagacugacca

SEQ ID NO: 129318 - RNA, 15 nt, Homo sapiens
uacuuuaauguauaa

SEQ ID NO: 129319 - RNA, 17 nt, Homo sapiens
augguggccuggggcuu

SEQ ID NO: 129320 - RNA, 22 nt, Homo sapiens
uugucaacaaagucacccacuu

SEQ ID NO: 129321 - RNA, 17 nt, Homo sapiens
cuguaugucucguggua

SEQ ID NO: 129322 - RNA, 21 nt, Homo sapiens
caaguucuuaguugcuguaug

SEQ ID NO: 129323 - RNA, 10 nt, Homo sapiens
uaaagacaga

SEQ ID NO: 129324 - RNA, 20 nt, Homo sapiens
uguuucaaacaaaaagucau

SEQ ID NO: 129325 - RNA, 17 nt, Homo sapiens
accuaaauaugagccca

SEQ ID NO: 129326 - RNA, 12 nt, Homo sapiens
acugagccagca

SEQ ID NO: 129327 - RNA, 21 nt, Homo sapiens
uugcccaggcuggagugcaau

SEQ ID NO: 129328 - RNA, 17 nt, Homo sapiens
cuggccuccaaguccac

SEQ ID NO: 129329 - RNA, 22 nt, Homo sapiens
ccauacuagaguucauggauau

SEQ ID NO: 129330 - RNA, 12 nt, Homo sapiens
gucuuggcucac

SEQ ID NO: 129331 - RNA, 21 nt, Homo sapiens
auaacuuuuuuuuaaguuaca

SEQ ID NO: 129332 - RNA, 22 nt, Homo sapiens
aaucaguguuuccaaucugucc

SEQ ID NO: 129333 - RNA, 22 nt, Homo sapiens
ggagaaauaugguacucauuaa

SEQ ID NO: 129334 - RNA, 21 nt, Homo sapiens
guuguuaauaaaaguacaugu

SEQ ID NO: 129335 - RNA, 12 nt, Homo sapiens
gaccaggucuca

SEQ ID NO: 129336 - RNA, 15 nt, Homo sapiens
aauugggccaaagaa

SEQ ID NO: 129337 - RNA, 22 nt, Homo sapiens
aaacccaguaguggugacugug

SEQ ID NO: 129338 - RNA, 13 nt, Homo sapiens
uuuugcuguagaa

SEQ ID NO: 129339 - RNA, 19 nt, Homo sapiens
cuccuggaccaggucucau

SEQ ID NO: 129340 - RNA, 14 nt, Homo sapiens
uuggaaaaucaaga

SEQ ID NO: 129341 - RNA, 14 nt, Homo sapiens
cauuugucaacaaa

SEQ ID NO: 129342 - RNA, 15 nt, Homo sapiens
cacagucuuggcuca

SEQ ID NO: 129343 - RNA, 21 nt, Homo sapiens
ggaauccuggggaacauagaa

SEQ ID NO: 129344 - RNA, 16 nt, Homo sapiens
cuaaguguaccagaga

SEQ ID NO: 129345 - RNA, 22 nt, Homo sapiens
uucagucaaagauacacaaucu

SEQ ID NO: 129346 - RNA, 13 nt, Homo sapiens
gguuauauguaua

SEQ ID NO: 129347 - RNA, 15 nt, Homo sapiens
agcgauuaauaacag

SEQ ID NO: 129348 - RNA, 22 nt, Homo sapiens
ccauuagcauuugucaacaaag

SEQ ID NO: 129349 - RNA, 15 nt, Homo sapiens
uugagggcaauggac

SEQ ID NO: 129350 - RNA, 21 nt, Homo sapiens
ccauaaaggggagggacucau

SEQ ID NO: 129351 - RNA, 16 nt, Homo sapiens
cuaacaguaguugcaa

SEQ ID NO: 129352 - RNA, 17 nt, Homo sapiens
uagcuuauacaaaacau

SEQ ID NO: 129353 - RNA, 22 nt, Homo sapiens
gaaaagaaucggcaauguuuca

SEQ ID NO: 129354 - RNA, 19 nt, Homo sapiens
uguuaagccauguguucca

SEQ ID NO: 129355 - RNA, 16 nt, Homo sapiens
aagaauguuuaugaau

SEQ ID NO: 129356 - RNA, 20 nt, Homo sapiens
gacucuaacaguaguugcaa

SEQ ID NO: 129357 - RNA, 16 nt, Homo sapiens
ucugcauucucuaguc

SEQ ID NO: 129358 - RNA, 20 nt, Homo sapiens
uuuuuacuaaucuuucugca

SEQ ID NO: 129359 - RNA, 18 nt, Homo sapiens
aacaggaauucugaauua

SEQ ID NO: 129360 - RNA, 15 nt, Homo sapiens
uuugaggguguauau

SEQ ID NO: 129361 - RNA, 16 nt, Homo sapiens
uguuauacugaaccag

SEQ ID NO: 129362 - RNA, 17 nt, Homo sapiens
ucagucuuuuccaugaa

SEQ ID NO: 129363 - RNA, 15 nt, Homo sapiens
aauauagcucaggua

SEQ ID NO: 129364 - RNA, 21 nt, Homo sapiens
aggacacuagaagauuuugaa

SEQ ID NO: 129365 - RNA, 13 nt, Homo sapiens
caaagaagccagc

SEQ ID NO: 129366 - RNA, 12 nt, Homo sapiens
ugaggguguaua

SEQ ID NO: 129367 - RNA, 14 nt, Homo sapiens
acugaacauuccag

SEQ ID NO: 129368 - RNA, 21 nt, Homo sapiens
caggguuucaccauguuggcc

SEQ ID NO: 129369 - RNA, 15 nt, Homo sapiens
aagaauguuuaugaa

SEQ ID NO: 129370 - RNA, 17 nt, Homo sapiens
uagugaaucacguaaag

SEQ ID NO: 129371 - RNA, 13 nt, Homo sapiens
aaaguaagccaug

SEQ ID NO: 129372 - RNA, 15 nt, Homo sapiens
cacaaauuaguugua

SEQ ID NO: 129373 - RNA, 16 nt, Homo sapiens
uaaaccguacacugug

SEQ ID NO: 129374 - RNA, 23 nt, Homo sapiens
gauauguuauacugaaccaggcc

SEQ ID NO: 129375 - RNA, 18 nt, Homo sapiens
uagaaugagacuuacuuc

SEQ ID NO: 129376 - RNA, 22 nt, Homo sapiens
uguacaguuuuuauugcuuguu

SEQ ID NO: 129377 - RNA, 19 nt, Homo sapiens
caaaaccaaauauuccaga

SEQ ID NO: 129378 - RNA, 21 nt, Homo sapiens
cacuucccacuauugcuugca

SEQ ID NO: 129379 - RNA, 20 nt, Homo sapiens
gucaacaaagucacccacuu

SEQ ID NO: 129380 - RNA, 17 nt, Homo sapiens
ggcaggaccuguggcca

SEQ ID NO: 129381 - RNA, 20 nt, Homo sapiens
accaauauuguacaguuuuu

SEQ ID NO: 129382 - RNA, 22 nt, Homo sapiens
agauacacaaucugaaacagcu

SEQ ID NO: 129383 - RNA, 20 nt, Homo sapiens
cgccacccucccacugccaa

SEQ ID NO: 129384 - RNA, 18 nt, Homo sapiens
cuuagagcuuuaccuaaa

SEQ ID NO: 129385 - RNA, 18 nt, Homo sapiens
cgauuaauaacaggcaaa

SEQ ID NO: 129386 - RNA, 14 nt, Homo sapiens
uaguaaaagccauc

SEQ ID NO: 129387 - RNA, 14 nt, Homo sapiens
caguaguugcaaug

SEQ ID NO: 129388 - RNA, 17 nt, Homo sapiens
cuaaaaguuaauagggu

SEQ ID NO: 129389 - RNA, 19 nt, Homo sapiens
cccucuaggaggugaugau

SEQ ID NO: 129390 - RNA, 15 nt, Homo sapiens
cuccuuagaagugga

SEQ ID NO: 129391 - RNA, 17 nt, Homo sapiens
agauuucagauuuguga

SEQ ID NO: 129392 - RNA, 13 nt, Homo sapiens
uucuuuucugacu

SEQ ID NO: 129393 - RNA, 15 nt, Homo sapiens
gagggaacuguguag

SEQ ID NO: 129394 - RNA, 16 nt, Homo sapiens
agcuguuuuguugaca

SEQ ID NO: 129395 - RNA, 13 nt, Homo sapiens
gcuucuuuacuua

SEQ ID NO: 129396 - RNA, 15 nt, Homo sapiens
aaggcagaguacaaa

SEQ ID NO: 129397 - RNA, 20 nt, Homo sapiens
gacagcuccuggaccaggcc

SEQ ID NO: 129398 - RNA, 17 nt, Homo sapiens
cauggagucacagccac

SEQ ID NO: 129399 - RNA, 23 nt, Homo sapiens
agccaccgcgcccagccucaucu

SEQ ID NO: 129400 - RNA, 16 nt, Homo sapiens
aaaagggaacugaaca

SEQ ID NO: 129401 - RNA, 15 nt, Homo sapiens
aacugaacauuccag

SEQ ID NO: 129402 - RNA, 16 nt, Homo sapiens
uguacagucuuguauu

SEQ ID NO: 129403 - RNA, 17 nt, Homo sapiens
ggcugugccaucagcuc

SEQ ID NO: 129404 - RNA, 14 nt, Homo sapiens
uagaaugagacuua

SEQ ID NO: 129405 - RNA, 21 nt, Homo sapiens
caugucuauuagcuccacaaa

SEQ ID NO: 129406 - RNA, 23 nt, Homo sapiens
uucuaaagauggaaaaaccaccc

SEQ ID NO: 129407 - RNA, 16 nt, Homo sapiens
acugcaacuucugccu

SEQ ID NO: 129408 - RNA, 19 nt, Homo sapiens
agaugaaacaucauuucaa

SEQ ID NO: 129409 - RNA, 12 nt, Homo sapiens
ucccacugccaa

SEQ ID NO: 129410 - RNA, 20 nt, Homo sapiens
ugcagccacuguuaagccau

SEQ ID NO: 129411 - RNA, 12 nt, Homo sapiens
caaaacauuugu

SEQ ID NO: 129412 - RNA, 21 nt, Homo sapiens
gaaauucacuuccccucuagg

SEQ ID NO: 129413 - RNA, 18 nt, Homo sapiens
cagugacuccacucugag

SEQ ID NO: 129414 - RNA, 20 nt, Homo sapiens
cuuuuuccuggcucaucucu

SEQ ID NO: 129415 - RNA, 17 nt, Homo sapiens
gcuccauucaaagugag

SEQ ID NO: 129416 - RNA, 14 nt, Homo sapiens
aggguaaauucucu

SEQ ID NO: 129417 - RNA, 21 nt, Homo sapiens
gauacacaaucugaaacagcu

SEQ ID NO: 129418 - RNA, 22 nt, Homo sapiens
uacuuuuuccuggcucaucucu

SEQ ID NO: 129419 - RNA, 14 nt, Homo sapiens
ugggagacacugau

SEQ ID NO: 129420 - RNA, 18 nt, Homo sapiens
ggagccccugcucuggug

SEQ ID NO: 129421 - RNA, 20 nt, Homo sapiens
agugcaguuuuuuucuuguc

SEQ ID NO: 129422 - RNA, 19 nt, Homo sapiens
cuuuaccuaaauaugagcc

SEQ ID NO: 129423 - RNA, 22 nt, Homo sapiens
cacagcacaaauuaguuguaua

SEQ ID NO: 129424 - RNA, 19 nt, Homo sapiens
aguauccugcuucugauau

SEQ ID NO: 129425 - RNA, 14 nt, Homo sapiens
cagcuccuggacca

SEQ ID NO: 129426 - RNA, 22 nt, Homo sapiens
uguagagagagaaaaguaacug

SEQ ID NO: 129427 - RNA, 15 nt, Homo sapiens
guauuaaguuguuaa

SEQ ID NO: 129428 - RNA, 14 nt, Homo sapiens
accguacacugugu

SEQ ID NO: 129429 - RNA, 14 nt, Homo sapiens
ucaacaaagucacc

SEQ ID NO: 129430 - RNA, 21 nt, Homo sapiens
ccauuagcauuugucaacaaa

SEQ ID NO: 129431 - RNA, 21 nt, Homo sapiens
ugugaccauuagcauuuguca

SEQ ID NO: 129432 - RNA, 21 nt, Homo sapiens
ugcacaaauugggccaaagaa

SEQ ID NO: 129433 - RNA, 16 nt, Homo sapiens
uggccuggggcuucug

SEQ ID NO: 129434 - RNA, 17 nt, Homo sapiens
ccaaauauuccagagac

SEQ ID NO: 129435 - RNA, 23 nt, Homo sapiens
aacaguaguugcaauguuuuaga

SEQ ID NO: 129436 - RNA, 14 nt, Homo sapiens
uucuggggcuucag

SEQ ID NO: 129437 - RNA, 14 nt, Homo sapiens
caauagaaauccaa

SEQ ID NO: 129438 - RNA, 19 nt, Homo sapiens
cuuuaauuuuuuacuauuu

SEQ ID NO: 129439 - RNA, 18 nt, Homo sapiens
uacuuauagaauucaguc

SEQ ID NO: 129440 - RNA, 11 nt, Homo sapiens
agaaguggaag

SEQ ID NO: 129441 - RNA, 22 nt, Homo sapiens
uguuucaaacaaaaagucauaa

SEQ ID NO: 129442 - RNA, 22 nt, Homo sapiens
ucagcaccuacaguguacaguc

SEQ ID NO: 129443 - RNA, 18 nt, Homo sapiens
aauucagggagugggcua

SEQ ID NO: 129444 - RNA, 14 nt, Homo sapiens
agccaguuacauaa

SEQ ID NO: 129445 - RNA, 17 nt, Homo sapiens
agaugcauccuuucaua

SEQ ID NO: 129446 - RNA, 17 nt, Homo sapiens
aucguucucugccucac

SEQ ID NO: 129447 - RNA, 18 nt, Homo sapiens
gaaccaggccagagcaaa

SEQ ID NO: 129448 - RNA, 12 nt, Homo sapiens
gacucaagcaag

SEQ ID NO: 129449 - RNA, 17 nt, Homo sapiens
ucggcucuggccuccaa

SEQ ID NO: 129450 - RNA, 18 nt, Homo sapiens
ugguuuuucaguuuucag

SEQ ID NO: 129451 - RNA, 22 nt, Homo sapiens
ccugaccucaaguaauccaccu

SEQ ID NO: 129452 - RNA, 20 nt, Homo sapiens
agcaacauuuguuuuagucu

SEQ ID NO: 129453 - RNA, 14 nt, Homo sapiens
ucucucuucuuuuc

SEQ ID NO: 129454 - RNA, 17 nt, Homo sapiens
cucaaagaaauuuccac

SEQ ID NO: 129455 - RNA, 19 nt, Homo sapiens
uaaguuacacauuuuucag

SEQ ID NO: 129456 - RNA, 14 nt, Homo sapiens
auuucuguucuucc

SEQ ID NO: 129457 - RNA, 15 nt, Homo sapiens
caaucugaaacagcu

SEQ ID NO: 129458 - RNA, 19 nt, Homo sapiens
agaucguucucugccucac

SEQ ID NO: 129459 - RNA, 15 nt, Homo sapiens
augaauaguuuccaa

SEQ ID NO: 129460 - RNA, 16 nt, Homo sapiens
cuauuagcuccacaaa

SEQ ID NO: 129461 - RNA, 15 nt, Homo sapiens
ccauaugaauaacau

SEQ ID NO: 129462 - RNA, 22 nt, Homo sapiens
uaaccaaagcccaaagugguau

SEQ ID NO: 129463 - RNA, 17 nt, Homo sapiens
ccaggcuggagugcaau

SEQ ID NO: 129464 - RNA, 19 nt, Homo sapiens
uggaaauagugauuuccac

SEQ ID NO: 129465 - RNA, 19 nt, Homo sapiens
agccaugggagacacugau

SEQ ID NO: 129466 - RNA, 20 nt, Homo sapiens
gcagaugguggagcugaaua

SEQ ID NO: 129467 - RNA, 22 nt, Homo sapiens
cuguuuugguuuugcucacaaa

SEQ ID NO: 129468 - RNA, 18 nt, Homo sapiens
aaggacacuagaagauuu

SEQ ID NO: 129469 - RNA, 16 nt, Homo sapiens
acuuacuuaguguuau

SEQ ID NO: 129470 - RNA, 20 nt, Homo sapiens
uaagaugaaacaucauuuca

SEQ ID NO: 129471 - RNA, 12 nt, Homo sapiens
ugggccaaagaa

SEQ ID NO: 129472 - RNA, 22 nt, Homo sapiens
gcuggauuacaggcaugugcca

SEQ ID NO: 129473 - RNA, 17 nt, Homo sapiens
cacauuuuucagauaua

SEQ ID NO: 129474 - RNA, 13 nt, Homo sapiens
gugccaucagcuc

SEQ ID NO: 129475 - RNA, 19 nt, Homo sapiens
ccucaaaacaaucuuguca

SEQ ID NO: 129476 - RNA, 12 nt, Homo sapiens
uauuuuuacuaa

SEQ ID NO: 129477 - RNA, 12 nt, Homo sapiens
ugaacauuccag

SEQ ID NO: 129478 - RNA, 19 nt, Homo sapiens
agaaguaaauauagcucag

SEQ ID NO: 129479 - RNA, 14 nt, Homo sapiens
uuaaacuuacuuag

SEQ ID NO: 129480 - RNA, 11 nt, Homo sapiens
gaaaacagaaa

SEQ ID NO: 129481 - RNA, 14 nt, Homo sapiens
auuguagcuaugau

SEQ ID NO: 129482 - RNA, 13 nt, Homo sapiens
gugauauguuggu

SEQ ID NO: 129483 - RNA, 17 nt, Homo sapiens
uucaacguaagacugug

SEQ ID NO: 129484 - RNA, 13 nt, Homo sapiens
aaaugaaagugag

SEQ ID NO: 129485 - RNA, 17 nt, Homo sapiens
uugguuuugcucacaaa

SEQ ID NO: 129486 - RNA, 19 nt, Homo sapiens
uguuuuuaauaaagacagg

SEQ ID NO: 129487 - RNA, 15 nt, Homo sapiens
aaugugacucaagac

SEQ ID NO: 129488 - RNA, 13 nt, Homo sapiens
uacuaaucuuucu

SEQ ID NO: 129489 - RNA, 19 nt, Homo sapiens
aauagugauuuccacagug

SEQ ID NO: 129490 - RNA, 17 nt, Homo sapiens
gaauuucuguucuucca

SEQ ID NO: 129491 - RNA, 17 nt, Homo sapiens
uuagugcacagcacaaa

SEQ ID NO: 129492 - RNA, 18 nt, Homo sapiens
aauguccuacugagacag

SEQ ID NO: 129493 - RNA, 23 nt, Homo sapiens
ugucucgugguaggacuguagaa

SEQ ID NO: 129494 - RNA, 13 nt, Homo sapiens
caggcacacugag

SEQ ID NO: 129495 - RNA, 23 nt, Homo sapiens
gaaaagaaucggcaauguuucaa

SEQ ID NO: 129496 - RNA, 16 nt, Homo sapiens
aagguugagggcaaug

SEQ ID NO: 129497 - RNA, 13 nt, Homo sapiens
gcauucucuaguc

SEQ ID NO: 129498 - RNA, 10 nt, Homo sapiens
ucauauugau

SEQ ID NO: 129499 - RNA, 21 nt, Homo sapiens
guauaaauauguauuuuguca

SEQ ID NO: 129500 - RNA, 20 nt, Homo sapiens
uccuuggcuucuuuacuuag

SEQ ID NO: 129501 - RNA, 13 nt, Homo sapiens
gaauuaagcacag

SEQ ID NO: 129502 - RNA, 21 nt, Homo sapiens
cauucccguggaacguuuuuc

SEQ ID NO: 129503 - RNA, 18 nt, Homo sapiens
uucuuucaaagaagccag

SEQ ID NO: 129504 - RNA, 21 nt, Homo sapiens
gacgucacccuccauucugca

SEQ ID NO: 129505 - RNA, 22 nt, Homo sapiens
ggcugucagauauaaguaacuu

SEQ ID NO: 129506 - RNA, 15 nt, Homo sapiens
agccagguucugacu

SEQ ID NO: 129507 - RNA, 16 nt, Homo sapiens
uuaaaauagccauaaa

SEQ ID NO: 129508 - RNA, 16 nt, Homo sapiens
acacaaucugaaacag

SEQ ID NO: 129509 - RNA, 15 nt, Homo sapiens
uuuucaaugucuaaa

SEQ ID NO: 129510 - RNA, 19 nt, Homo sapiens
uccugaguagcuggauuac

SEQ ID NO: 129511 - RNA, 15 nt, Homo sapiens
ccagagcaaacagaa

SEQ ID NO: 129512 - RNA, 15 nt, Homo sapiens
gcuagggaauaucaa

SEQ ID NO: 129513 - RNA, 20 nt, Homo sapiens
caggcuggagugcaaugaca

SEQ ID NO: 129514 - RNA, 16 nt, Homo sapiens
ccuggaccaggucuca

SEQ ID NO: 129515 - RNA, 15 nt, Homo sapiens
agucugaacaauaua

SEQ ID NO: 129516 - RNA, 15 nt, Homo sapiens
uugcaauguggcuug

SEQ ID NO: 129517 - RNA, 15 nt, Homo sapiens
agccauguaucucag

SEQ ID NO: 129518 - RNA, 15 nt, Homo sapiens
aguguaccagagaag

SEQ ID NO: 129519 - RNA, 21 nt, Homo sapiens
ucaugggguggacucuaacag

SEQ ID NO: 129520 - RNA, 18 nt, Homo sapiens
ggguuucaccauguuggc

SEQ ID NO: 129521 - RNA, 21 nt, Homo sapiens
cuuuguaaagaaaguggcuug

SEQ ID NO: 129522 - RNA, 19 nt, Homo sapiens
gcccaggcuggagugcaau

SEQ ID NO: 129523 - RNA, 21 nt, Homo sapiens
aaagcuagaaaguguaugugu

SEQ ID NO: 129524 - RNA, 18 nt, Homo sapiens
uaaugcauguggcacuua

SEQ ID NO: 129525 - RNA, 18 nt, Homo sapiens
ugugaaguuuaauugacu

SEQ ID NO: 129526 - RNA, 14 nt, Homo sapiens
uuuucuugucuaua

SEQ ID NO: 129527 - RNA, 14 nt, Homo sapiens
agaugaaacaucau

SEQ ID NO: 129528 - RNA, 18 nt, Homo sapiens
gccacccucccacugcca

SEQ ID NO: 129529 - RNA, 21 nt, Homo sapiens
auaacauggugugcuucuuaa

SEQ ID NO: 129530 - RNA, 17 nt, Homo sapiens
ugggagacacugaugua

SEQ ID NO: 129531 - RNA, 13 nt, Homo sapiens
ggcaggacagcuc

SEQ ID NO: 129532 - RNA, 17 nt, Homo sapiens
agucugucaauguccua

SEQ ID NO: 129533 - RNA, 21 nt, Homo sapiens
auguccuacugagacagcaca

SEQ ID NO: 129534 - RNA, 22 nt, Homo sapiens
gccggggaaggaggccguccau

SEQ ID NO: 129535 - RNA, 22 nt, Homo sapiens
agauucuaauggcuuuauugca

SEQ ID NO: 129536 - RNA, 15 nt, Homo sapiens
cuagaguucauggau

SEQ ID NO: 129537 - RNA, 13 nt, Homo sapiens
agccucaucucuu

SEQ ID NO: 129538 - RNA, 19 nt, Homo sapiens
auugcuugcacaaaccaau

SEQ ID NO: 129539 - RNA, 17 nt, Homo sapiens
aaccguacacuguguuu

SEQ ID NO: 129540 - RNA, 13 nt, Homo sapiens
cagagacugggac

SEQ ID NO: 129541 - RNA, 17 nt, Homo sapiens
uggcacuuauaaccaaa

SEQ ID NO: 129542 - RNA, 23 nt, Homo sapiens
aaaaccguaugagggaacugugu

SEQ ID NO: 129543 - RNA, 22 nt, Homo sapiens
aauauuccagagacugggacua

SEQ ID NO: 129544 - RNA, 14 nt, Homo sapiens
uccccuucacuccc

SEQ ID NO: 129545 - RNA, 23 nt, Homo sapiens
auacuguuuuacuguccaaagac

SEQ ID NO: 129546 - RNA, 15 nt, Homo sapiens
acaguaguugcaaug

SEQ ID NO: 129547 - RNA, 17 nt, Homo sapiens
auuucucuacugucuca

SEQ ID NO: 129548 - RNA, 16 nt, Homo sapiens
gcauuugucaacaaag

SEQ ID NO: 129549 - RNA, 13 nt, Homo sapiens
uuacuaaucuuuc

SEQ ID NO: 129550 - RNA, 14 nt, Homo sapiens
aacaucauuucaau

SEQ ID NO: 129551 - RNA, 20 nt, Homo sapiens
cucgugguaggacuguagaa

SEQ ID NO: 129552 - RNA, 20 nt, Homo sapiens
uacacaaucugaaacagcuu

SEQ ID NO: 129553 - RNA, 23 nt, Homo sapiens
aauuuuauguuuaguugcacaaa

SEQ ID NO: 129554 - RNA, 18 nt, Homo sapiens
ccucccacugccaaagaa

SEQ ID NO: 129555 - RNA, 19 nt, Homo sapiens
cccuguucauucugcauuc

SEQ ID NO: 129556 - RNA, 17 nt, Homo sapiens
caguaguggugacugug

SEQ ID NO: 129557 - RNA, 21 nt, Homo sapiens
ugcccaggcuggagugcaaug

SEQ ID NO: 129558 - RNA, 23 nt, Homo sapiens
aacuuggaaauagugauuuccac

SEQ ID NO: 129559 - RNA, 22 nt, Homo sapiens
gccuaggaaagccaguuacaua

SEQ ID NO: 129560 - RNA, 22 nt, Homo sapiens
ucccuucuuuuuguucuucauc

SEQ ID NO: 129561 - RNA, 18 nt, Homo sapiens
cuucuuuacuuaguucaa

SEQ ID NO: 129562 - RNA, 16 nt, Homo sapiens
uuucauaucacacugu

SEQ ID NO: 129563 - RNA, 21 nt, Homo sapiens
gaccaauauuguacaguuuuu

SEQ ID NO: 129564 - RNA, 14 nt, Homo sapiens
cuggccuccaaguc

SEQ ID NO: 129565 - RNA, 21 nt, Homo sapiens
ugcuguagaagauggcacuua

SEQ ID NO: 129566 - RNA, 22 nt, Homo sapiens
ucuuuaaccacuuuucaauguc

SEQ ID NO: 129567 - RNA, 15 nt, Homo sapiens
uggguucaagugauu

SEQ ID NO: 129568 - RNA, 23 nt, Homo sapiens
ucaaaugagaaaaugucuuuauu

SEQ ID NO: 129569 - RNA, 20 nt, Homo sapiens
cuggauuacaggcaugugcc

SEQ ID NO: 129570 - RNA, 19 nt, Homo sapiens
gacuuugaggguguauauu

SEQ ID NO: 129571 - RNA, 24 nt, Homo sapiens
ggacagcuccuggaccaggcccau

SEQ ID NO: 129572 - RNA, 16 nt, Homo sapiens
gcaguggaacuaagaa

SEQ ID NO: 129573 - RNA, 14 nt, Homo sapiens
gucuuuaaccacuu

SEQ ID NO: 129574 - RNA, 12 nt, Homo sapiens
aaguaagccaug

SEQ ID NO: 129575 - RNA, 13 nt, Homo sapiens
auuugucaacaaa

SEQ ID NO: 129576 - RNA, 18 nt, Homo sapiens
cgugaccugccaggcaca

SEQ ID NO: 129577 - RNA, 16 nt, Homo sapiens
aaaccaaauauuccag

SEQ ID NO: 129578 - RNA, 16 nt, Homo sapiens
ugaaugccacucugua

SEQ ID NO: 129579 - RNA, 22 nt, Homo sapiens
cugucaauguccuacugagaca

SEQ ID NO: 129580 - RNA, 17 nt, Homo sapiens
augagggaacuguguag

SEQ ID NO: 129581 - RNA, 20 nt, Homo sapiens
uguguuuuuaauaaagacag

SEQ ID NO: 129582 - RNA, 16 nt, Homo sapiens
aggcuggagugcaaug

SEQ ID NO: 129583 - RNA, 21 nt, Homo sapiens
auuuuacuuuuuccuggcuca

SEQ ID NO: 129584 - RNA, 16 nt, Homo sapiens
uccuggggaacauaga

SEQ ID NO: 129585 - RNA, 16 nt, Homo sapiens
gaguuccgacugccau

SEQ ID NO: 129586 - RNA, 23 nt, Homo sapiens
cagucaaagauacacaaucugaa

SEQ ID NO: 129587 - RNA, 17 nt, Homo sapiens
uuuaaaugaaagugaga

SEQ ID NO: 129588 - RNA, 21 nt, Homo sapiens
aaagcccuuaaaaauaugugu

SEQ ID NO: 129589 - RNA, 16 nt, Homo sapiens
aauuuugucuuuauga

SEQ ID NO: 129590 - RNA, 19 nt, Homo sapiens
uuucuuucaaagaagccag

SEQ ID NO: 129591 - RNA, 17 nt, Homo sapiens
cugauguagcuuauaca

SEQ ID NO: 129592 - RNA, 17 nt, Homo sapiens
agugagcuccuaagcca

SEQ ID NO: 129593 - RNA, 14 nt, Homo sapiens
uguagaaagugauc

SEQ ID NO: 129594 - RNA, 13 nt, Homo sapiens
guaagacugugua

SEQ ID NO: 129595 - RNA, 18 nt, Homo sapiens
gauaaucucuccauuccc

SEQ ID NO: 129596 - RNA, 15 nt, Homo sapiens
gccaguuacauaaaa

SEQ ID NO: 129597 - RNA, 14 nt, Homo sapiens
ucaaaaacauucuu

SEQ ID NO: 129598 - RNA, 19 nt, Homo sapiens
cugaguagcuggauuacag

SEQ ID NO: 129599 - RNA, 12 nt, Homo sapiens
uguagaaaguga

SEQ ID NO: 129600 - RNA, 22 nt, Homo sapiens
uaccuuuuauuuuaauguuucc

SEQ ID NO: 129601 - RNA, 14 nt, Homo sapiens
gucauaacuagaac

SEQ ID NO: 129602 - RNA, 18 nt, Homo sapiens
uucugcauucucuaguca

SEQ ID NO: 129603 - RNA, 18 nt, Homo sapiens
ccaaguccacaguggaac

SEQ ID NO: 129604 - RNA, 20 nt, Homo sapiens
uggggacacagcaucagcuc

SEQ ID NO: 129605 - RNA, 19 nt, Homo sapiens
accgcaggauuugggcucu

SEQ ID NO: 129606 - RNA, 14 nt, Homo sapiens
ucaucucuuuauuc

SEQ ID NO: 129607 - RNA, 21 nt, Homo sapiens
gaguuauuuuuauuuauuuaa

SEQ ID NO: 129608 - RNA, 15 nt, Homo sapiens
cagagccucaaauga

SEQ ID NO: 129609 - RNA, 22 nt, Homo sapiens
uagugaaucacguaaagcuaga

SEQ ID NO: 129610 - RNA, 23 nt, Homo sapiens
aauaagcaggcgugaccugccag

SEQ ID NO: 129611 - RNA, 21 nt, Homo sapiens
ucugccuccccuucacuccca

SEQ ID NO: 129612 - RNA, 16 nt, Homo sapiens
cauaacaggagugcca

SEQ ID NO: 129613 - RNA, 23 nt, Homo sapiens
uccugaccucaaguaauccaccu

SEQ ID NO: 129614 - RNA, 13 nt, Homo sapiens
uccacaguggaac

SEQ ID NO: 129615 - RNA, 23 nt, Homo sapiens
ucagauauaaaagacugaccaau

SEQ ID NO: 129616 - RNA, 21 nt, Homo sapiens
aggucuccagagggugaaagc

SEQ ID NO: 129617 - RNA, 18 nt, Homo sapiens
guuuacauuuuguauauu

SEQ ID NO: 129618 - RNA, 15 nt, Homo sapiens
agagggaaaacagaa

SEQ ID NO: 129619 - RNA, 23 nt, Homo sapiens
acauuuuacuuuuuccuggcuca

SEQ ID NO: 129620 - RNA, 18 nt, Homo sapiens
uggaaauagugauuucca

SEQ ID NO: 129621 - RNA, 18 nt, Homo sapiens
aauuucucuacugucuca

SEQ ID NO: 129622 - RNA, 13 nt, Homo sapiens
ucaaagugagcuc

SEQ ID NO: 129623 - RNA, 18 nt, Homo sapiens
agcucagguagcacuuua

SEQ ID NO: 129624 - RNA, 22 nt, Homo sapiens
uagaaccucgagguuucucaaa

SEQ ID NO: 129625 - RNA, 20 nt, Homo sapiens
cucuuggguucaagugauuc

SEQ ID NO: 129626 - RNA, 17 nt, Homo sapiens
uuuccaaauuauggcaa

SEQ ID NO: 129627 - RNA, 20 nt, Homo sapiens
guuuaugcauagauaaucuc

SEQ ID NO: 129628 - RNA, 15 nt, Homo sapiens
auacuagaguucaug

SEQ ID NO: 129629 - RNA, 12 nt, Homo sapiens
uuaacugaaugc

SEQ ID NO: 129630 - RNA, 14 nt, Homo sapiens
acagccacuuggga

SEQ ID NO: 129631 - RNA, 23 nt, Homo sapiens
agucuuguuguuuucccaaagag

SEQ ID NO: 129632 - RNA, 18 nt, Homo sapiens
ccgacugccaucuuggac

SEQ ID NO: 129633 - RNA, 18 nt, Homo sapiens
acugccaaagaacuugga

SEQ ID NO: 129634 - RNA, 15 nt, Homo sapiens
aauaaccauugucau

SEQ ID NO: 129635 - RNA, 16 nt, Homo sapiens
auggcaggacagcucc

SEQ ID NO: 129636 - RNA, 17 nt, Homo sapiens
cuucagucuuuuccaug

SEQ ID NO: 129637 - RNA, 19 nt, Homo sapiens
cugauguagcuuauacaaa

SEQ ID NO: 129638 - RNA, 16 nt, Homo sapiens
cuugguaaaauaauca

SEQ ID NO: 129639 - RNA, 23 nt, Homo sapiens
aauguaagaucguucucugccuc

SEQ ID NO: 129640 - RNA, 11 nt, Homo sapiens
accucaucucc

SEQ ID NO: 129641 - RNA, 11 nt, Homo sapiens
auucaaaguga

SEQ ID NO: 129642 - RNA, 20 nt, Homo sapiens
aaaauaaucaguguuuccaa

SEQ ID NO: 129643 - RNA, 12 nt, Homo sapiens
aggacuguagaa

SEQ ID NO: 129644 - RNA, 20 nt, Homo sapiens
uacaguuuuuauugcuuguu

SEQ ID NO: 129645 - RNA, 16 nt, Homo sapiens
cacagccaaccuagcu

SEQ ID NO: 129646 - RNA, 14 nt, Homo sapiens
ucuuuuccaugaac

SEQ ID NO: 129647 - RNA, 16 nt, Homo sapiens
cgugauuuugcuguag

SEQ ID NO: 129648 - RNA, 20 nt, Homo sapiens
augcuggggacacagcauca

SEQ ID NO: 129649 - RNA, 21 nt, Homo sapiens
agugcaguuuuuuucuugucu

SEQ ID NO: 129650 - RNA, 15 nt, Homo sapiens
auagaauucagucaa

SEQ ID NO: 129651 - RNA, 16 nt, Homo sapiens
acccuucuccuuagaa

SEQ ID NO: 129652 - RNA, 14 nt, Homo sapiens
ucuaauggcuuuau

SEQ ID NO: 129653 - RNA, 17 nt, Homo sapiens
guucugguuacuguucu

SEQ ID NO: 129654 - RNA, 23 nt, Homo sapiens
ugauagagguucuuuauugcuca

SEQ ID NO: 129655 - RNA, 17 nt, Homo sapiens
caaucuguccuguuaca

SEQ ID NO: 129656 - RNA, 21 nt, Homo sapiens
auuugucaacaaagucaccca

SEQ ID NO: 129657 - RNA, 13 nt, Homo sapiens
cuucuccuuagaa

SEQ ID NO: 129658 - RNA, 22 nt, Homo sapiens
ucuaaggcugugccaucagcuc

SEQ ID NO: 129659 - RNA, 17 nt, Homo sapiens
cugcuagggaauaucaa

SEQ ID NO: 129660 - RNA, 18 nt, Homo sapiens
uuaagccauguguuccaa

SEQ ID NO: 129661 - RNA, 20 nt, Homo sapiens
gcacucagaaaauggcacuu

SEQ ID NO: 129662 - RNA, 18 nt, Homo sapiens
uagcauuugucaacaaag

SEQ ID NO: 129663 - RNA, 15 nt, Homo sapiens
aaccguacacugugu

SEQ ID NO: 129664 - RNA, 22 nt, Homo sapiens
uuaaguuacacauuuuucagau

SEQ ID NO: 129665 - RNA, 17 nt, Homo sapiens
cuuagccaagcaguuuc

SEQ ID NO: 129666 - RNA, 16 nt, Homo sapiens
ucaacaaagucaccca

SEQ ID NO: 129667 - RNA, 12 nt, Homo sapiens
guucauucugca

SEQ ID NO: 129668 - RNA, 15 nt, Homo sapiens
ucuguucuuccauca

SEQ ID NO: 129669 - RNA, 14 nt, Homo sapiens
gucugaacaauaua

SEQ ID NO: 129670 - RNA, 20 nt, Homo sapiens
uauacccguuucacaugcuu

SEQ ID NO: 129671 - RNA, 18 nt, Homo sapiens
ucuuggguucaagugauu

SEQ ID NO: 129672 - RNA, 19 nt, Homo sapiens
gcuucuuugaaacuuguau

SEQ ID NO: 129673 - RNA, 19 nt, Homo sapiens
cucugagucccagagccaa

SEQ ID NO: 129674 - RNA, 15 nt, Homo sapiens
caaauauuccagaga

SEQ ID NO: 129675 - RNA, 21 nt, Homo sapiens
augucuuuauuaaauguagaa

SEQ ID NO: 129676 - RNA, 11 nt, Homo sapiens
uucaagugauu

SEQ ID NO: 129677 - RNA, 21 nt, Homo sapiens
gacucaagacuuccagagccu

SEQ ID NO: 129678 - RNA, 20 nt, Homo sapiens
aagaaucggcaauguuucaa

SEQ ID NO: 129679 - RNA, 16 nt, Homo sapiens
gccagagcaaacagaa

SEQ ID NO: 129680 - RNA, 19 nt, Homo sapiens
uuacuuuuuccuggcucau

SEQ ID NO: 129681 - RNA, 18 nt, Homo sapiens
uguagaagauggcacuua

SEQ ID NO: 129682 - RNA, 16 nt, Homo sapiens
cuuguauagcaguuuc

SEQ ID NO: 129683 - RNA, 19 nt, Homo sapiens
cauggauauguuauacuga

SEQ ID NO: 129684 - RNA, 15 nt, Homo sapiens
cgacaacuugcacgu

SEQ ID NO: 129685 - RNA, 20 nt, Homo sapiens
aguuuccaaauuauggcaaa

SEQ ID NO: 129686 - RNA, 22 nt, Homo sapiens
caauauacuuguauagcaguuu

SEQ ID NO: 129687 - RNA, 15 nt, Homo sapiens
uccugcuucugauau

SEQ ID NO: 129688 - RNA, 23 nt, Homo sapiens
uuuauacucaggcagaucucagc

SEQ ID NO: 129689 - RNA, 21 nt, Homo sapiens
cuuguuagugcacagcacaaa

SEQ ID NO: 129690 - RNA, 11 nt, Homo sapiens
agaagaugaau

SEQ ID NO: 129691 - RNA, 19 nt, Homo sapiens
caaucucaaucccucaaaa

SEQ ID NO: 129692 - RNA, 21 nt, Homo sapiens
uaguggugacugugggcucca

SEQ ID NO: 129693 - RNA, 9 nt, Homo sapiens
aaagacaga

SEQ ID NO: 129694 - RNA, 18 nt, Homo sapiens
gacgugauuuugcuguag

SEQ ID NO: 129695 - RNA, 12 nt, Homo sapiens
guacacuguguu

SEQ ID NO: 129696 - RNA, 14 nt, Homo sapiens
ugaauaguuuccaa

SEQ ID NO: 129697 - RNA, 15 nt, Homo sapiens
ugguuauauguauau

SEQ ID NO: 129698 - RNA, 16 nt, Homo sapiens
caaauauuccagagac

SEQ ID NO: 129699 - RNA, 16 nt, Homo sapiens
gagggaaaacagaaaa

SEQ ID NO: 129700 - RNA, 17 nt, Homo sapiens
cuucuaaguaaauacaa

SEQ ID NO: 129701 - RNA, 15 nt, Homo sapiens
uuaaaugaaagugag

SEQ ID NO: 129702 - RNA, 13 nt, Homo sapiens
agcagauaauggu

SEQ ID NO: 129703 - RNA, 22 nt, Homo sapiens
aauguuuaugaauaguuuccaa

SEQ ID NO: 129704 - RNA, 13 nt, Homo sapiens
gcaaaaccaaaua

SEQ ID NO: 129705 - RNA, 13 nt, Homo sapiens
gucuauuagcucc

SEQ ID NO: 129706 - RNA, 14 nt, Homo sapiens
ugagaaaaugucuu

SEQ ID NO: 129707 - RNA, 16 nt, Homo sapiens
uuacauuuuguauauu

SEQ ID NO: 129708 - RNA, 17 nt, Homo sapiens
agucuuagagcuuuacc

SEQ ID NO: 129709 - RNA, 19 nt, Homo sapiens
uuauacaauauacuuguau

SEQ ID NO: 129710 - RNA, 13 nt, Homo sapiens
agaagaugaauga

SEQ ID NO: 129711 - RNA, 20 nt, Homo sapiens
uguucugguuacuguucuaa

SEQ ID NO: 129712 - RNA, 13 nt, Homo sapiens
gucuuguguuucu

SEQ ID NO: 129713 - RNA, 20 nt, Homo sapiens
auaaaggggagggacucauc

SEQ ID NO: 129714 - RNA, 10 nt, Homo sapiens
cucacaaaag

SEQ ID NO: 129715 - RNA, 18 nt, Homo sapiens
acauuuguuuguggucua

SEQ ID NO: 129716 - RNA, 21 nt, Homo sapiens
guaaauuucucuacugucuca

SEQ ID NO: 129717 - RNA, 18 nt, Homo sapiens
ggauacgacaacuugcac

SEQ ID NO: 129718 - RNA, 18 nt, Homo sapiens
cauauugaugugugucua

SEQ ID NO: 129719 - RNA, 15 nt, Homo sapiens
uaacauggugugcuu

SEQ ID NO: 129720 - RNA, 15 nt, Homo sapiens
uccuccccuguucau

SEQ ID NO: 129721 - RNA, 21 nt, Homo sapiens
cagagaagggcuuggacucaa

SEQ ID NO: 129722 - RNA, 19 nt, Homo sapiens
cauaaugcauguggcacuu

SEQ ID NO: 129723 - RNA, 22 nt, Homo sapiens
acauuuguuuuagucugaacaa

SEQ ID NO: 129724 - RNA, 22 nt, Homo sapiens
cuuguuagugcacagcacaaau

SEQ ID NO: 129725 - RNA, 14 nt, Homo sapiens
aaccuagcuagcaa

SEQ ID NO: 129726 - RNA, 21 nt, Homo sapiens
aaaugugacucaagacuucca

SEQ ID NO: 129727 - RNA, 16 nt, Homo sapiens
acccucccacugccaa

SEQ ID NO: 129728 - RNA, 16 nt, Homo sapiens
cagccagguucugacu

SEQ ID NO: 129729 - RNA, 19 nt, Homo sapiens
gacuaaguguaccagagaa

SEQ ID NO: 129730 - RNA, 13 nt, Homo sapiens
auguguuccaagg

SEQ ID NO: 129731 - RNA, 11 nt, Homo sapiens
auaugcacaaa

SEQ ID NO: 129732 - RNA, 17 nt, Homo sapiens
caggcuggagugcaaug

SEQ ID NO: 129733 - RNA, 18 nt, Homo sapiens
gcaaacagaaaaagaagg

SEQ ID NO: 129734 - RNA, 16 nt, Homo sapiens
cuggcaagaugcuuua

SEQ ID NO: 129735 - RNA, 15 nt, Homo sapiens
gcaccuacaguguac

SEQ ID NO: 129736 - RNA, 14 nt, Homo sapiens
aauucaucagauaa

SEQ ID NO: 129737 - RNA, 16 nt, Homo sapiens
aaagugauccauacuu

SEQ ID NO: 129738 - RNA, 15 nt, Homo sapiens
gcuaguaaaagccau

SEQ ID NO: 129739 - RNA, 18 nt, Homo sapiens
ccagagcguguagugaau

SEQ ID NO: 129740 - RNA, 14 nt, Homo sapiens
aucaguagccagca

SEQ ID NO: 129741 - RNA, 21 nt, Homo sapiens
uaagaucguucucugccucac

SEQ ID NO: 129742 - RNA, 13 nt, Homo sapiens
aauagccauaaag

SEQ ID NO: 129743 - RNA, 15 nt, Homo sapiens
cucuguaauugcaaa

SEQ ID NO: 129744 - RNA, 14 nt, Homo sapiens
agccucaucucuuu

SEQ ID NO: 129745 - RNA, 13 nt, Homo sapiens
gaauaguuuccaa

SEQ ID NO: 129746 - RNA, 22 nt, Homo sapiens
agcaaaaccaaauauuccagag

SEQ ID NO: 129747 - RNA, 15 nt, Homo sapiens
ggaccaggucucaua

SEQ ID NO: 129748 - RNA, 17 nt, Homo sapiens
caaauugggccaaagaa

SEQ ID NO: 129749 - RNA, 22 nt, Homo sapiens
aaaauaugacacucuagucaaa

SEQ ID NO: 129750 - RNA, 21 nt, Homo sapiens
gcagaguacaaaguaagccau

SEQ ID NO: 129751 - RNA, 13 nt, Homo sapiens
gaacuuaugcaaa

SEQ ID NO: 129752 - RNA, 13 nt, Homo sapiens
uggaaccagccca

SEQ ID NO: 129753 - RNA, 12 nt, Homo sapiens
gagcaaacagaa

SEQ ID NO: 129754 - RNA, 17 nt, Homo sapiens
auucagggagugggcua

SEQ ID NO: 129755 - RNA, 18 nt, Homo sapiens
cacucuguaauugcaaaa

SEQ ID NO: 129756 - RNA, 22 nt, Homo sapiens
aaccguaugagggaacugugua

SEQ ID NO: 129757 - RNA, 16 nt, Homo sapiens
ucaaagccuugguaaa

SEQ ID NO: 129758 - RNA, 22 nt, Homo sapiens
gccauaaaggggagggacucau

SEQ ID NO: 129759 - RNA, 11 nt, Homo sapiens
aguaagccaug

SEQ ID NO: 129760 - RNA, 20 nt, Homo sapiens
cuccccuguucauucugcau

SEQ ID NO: 129761 - RNA, 15 nt, Homo sapiens
cuguggccaaguucu

SEQ ID NO: 129762 - RNA, 20 nt, Homo sapiens
cuauaagaugaaacaucauu

SEQ ID NO: 129763 - RNA, 15 nt, Homo sapiens
uuuuccuguucuuaa

SEQ ID NO: 129764 - RNA, 21 nt, Homo sapiens
gguaaaauaaucaguguuucc

SEQ ID NO: 129765 - RNA, 23 nt, Homo sapiens
gucucaguuuacauuuuguauau

SEQ ID NO: 129766 - RNA, 12 nt, Homo sapiens
agaaagugaucc

SEQ ID NO: 129767 - RNA, 19 nt, Homo sapiens
uuggauacgacaacuugca

SEQ ID NO: 129768 - RNA, 14 nt, Homo sapiens
guuuaguugcacaa

SEQ ID NO: 129769 - RNA, 23 nt, Homo sapiens
gagacagcacagccaaccuagcu

SEQ ID NO: 129770 - RNA, 22 nt, Homo sapiens
uacugcuggcaguggaacuaag

SEQ ID NO: 129771 - RNA, 13 nt, Homo sapiens
augaaacaucauu

SEQ ID NO: 129772 - RNA, 21 nt, Homo sapiens
aaaaguuuuguaaauuucucu

SEQ ID NO: 129773 - RNA, 19 nt, Homo sapiens
uuggcuaguaaaagccauc

SEQ ID NO: 129774 - RNA, 19 nt, Homo sapiens
ccacuauugcuugcacaaa

SEQ ID NO: 129775 - RNA, 20 nt, Homo sapiens
gccuccaaguccacagugga

SEQ ID NO: 129776 - RNA, 22 nt, Homo sapiens
gugccucugggacuggacaauu

SEQ ID NO: 129777 - RNA, 19 nt, Homo sapiens
aagggcuuggacucaagca

SEQ ID NO: 129778 - RNA, 16 nt, Homo sapiens
uaagccauguguucca

SEQ ID NO: 129779 - RNA, 12 nt, Homo sapiens
ucugcuagggaa

SEQ ID NO: 129780 - RNA, 10 nt, Homo sapiens
aaaagugaug

SEQ ID NO: 129781 - RNA, 14 nt, Homo sapiens
gacagaagcguaua

SEQ ID NO: 129782 - RNA, 20 nt, Homo sapiens
ucagucuuuuccaugaacuu

SEQ ID NO: 129783 - RNA, 20 nt, Homo sapiens
ugcaguuuuuuucuugucua

SEQ ID NO: 129784 - RNA, 16 nt, Homo sapiens
cugugccaucagcucc

SEQ ID NO: 129785 - RNA, 16 nt, Homo sapiens
uagaaauccaauugga

SEQ ID NO: 129786 - RNA, 19 nt, Homo sapiens
ugccaucuuggacuuguca

SEQ ID NO: 129787 - RNA, 17 nt, Homo sapiens
uaacaggagugccacuu

SEQ ID NO: 129788 - RNA, 13 nt, Homo sapiens
aaaagacugacca

SEQ ID NO: 129789 - RNA, 23 nt, Homo sapiens
uuacuuuuuccuggcucaucucu

SEQ ID NO: 129790 - RNA, 15 nt, Homo sapiens
guugcuguaugucuc

SEQ ID NO: 129791 - RNA, 15 nt, Homo sapiens
cuuuuuauacuauua

SEQ ID NO: 129792 - RNA, 14 nt, Homo sapiens
cacuguuaagccau

SEQ ID NO: 129793 - RNA, 22 nt, Homo sapiens
cgaauauaucaguaauuucaga

SEQ ID NO: 129794 - RNA, 18 nt, Homo sapiens
gccagagcaaacagaaaa

SEQ ID NO: 129795 - RNA, 16 nt, Homo sapiens
aaugccacucuguaau

SEQ ID NO: 129796 - RNA, 12 nt, Homo sapiens
gcuggagugcaa

SEQ ID NO: 129797 - RNA, 11 nt, Homo sapiens
caaaaccaaau

SEQ ID NO: 129798 - RNA, 18 nt, Homo sapiens
uuguuauucuguaguuuc

SEQ ID NO: 129799 - RNA, 15 nt, Homo sapiens
uuuaauagcgucaua

SEQ ID NO: 129800 - RNA, 14 nt, Homo sapiens
ugacucuuggcaca

SEQ ID NO: 129801 - RNA, 17 nt, Homo sapiens
cuucuuuuuguucuuca

SEQ ID NO: 129802 - RNA, 18 nt, Homo sapiens
gaucguucucugccucac

SEQ ID NO: 129803 - RNA, 12 nt, Homo sapiens
auguaucucagg

SEQ ID NO: 129804 - RNA, 14 nt, Homo sapiens
ccaaauuauggcaa

SEQ ID NO: 129805 - RNA, 11 nt, Homo sapiens
ggcucaucucu

SEQ ID NO: 129806 - RNA, 15 nt, Homo sapiens
aagccauguaucuca

SEQ ID NO: 129807 - RNA, 19 nt, Homo sapiens
acaaucuugucauacuuga

SEQ ID NO: 129808 - RNA, 15 nt, Homo sapiens
agggagaagagggaa

SEQ ID NO: 129809 - RNA, 13 nt, Homo sapiens
cagagcaaacaga

SEQ ID NO: 129810 - RNA, 19 nt, Homo sapiens
uuugcuucaaaaacauucu

SEQ ID NO: 129811 - RNA, 12 nt, Homo sapiens
acugugggcucc

SEQ ID NO: 129812 - RNA, 22 nt, Homo sapiens
agacagcacagccaaccuagcu

SEQ ID NO: 129813 - RNA, 17 nt, Homo sapiens
cuuggguucaagugauu

SEQ ID NO: 129814 - RNA, 18 nt, Homo sapiens
cuugacuuuugaaaacaa

SEQ ID NO: 129815 - RNA, 15 nt, Homo sapiens
gaaauggggaacuac

SEQ ID NO: 129816 - RNA, 20 nt, Homo sapiens
aaaugagaagucucacugau

SEQ ID NO: 129817 - RNA, 19 nt, Homo sapiens
uccuggaggugacacuuga

SEQ ID NO: 129818 - RNA, 14 nt, Homo sapiens
gaaacaucauuuca

SEQ ID NO: 129819 - RNA, 21 nt, Homo sapiens
accuaaauaugagcccagaaa

SEQ ID NO: 129820 - RNA, 21 nt, Homo sapiens
uguguuuuuaauaaagacagg

SEQ ID NO: 129821 - RNA, 21 nt, Homo sapiens
gucuuuggugaacauugcaau

SEQ ID NO: 129822 - RNA, 12 nt, Homo sapiens
cuguccaaagac

SEQ ID NO: 129823 - RNA, 16 nt, Homo sapiens
augagggaacugugua

SEQ ID NO: 129824 - RNA, 14 nt, Homo sapiens
uguacagucuugua

SEQ ID NO: 129825 - RNA, 16 nt, Homo sapiens
aaagggagaagaggga

SEQ ID NO: 129826 - RNA, 21 nt, Homo sapiens
aauguuuuagaaugagacuua

SEQ ID NO: 129827 - RNA, 20 nt, Homo sapiens
ugacacucuagucaaagccu

SEQ ID NO: 129828 - RNA, 16 nt, Homo sapiens
cccuucuuuucugacu

SEQ ID NO: 129829 - RNA, 19 nt, Homo sapiens
auuaucuaaaaucugcuag

SEQ ID NO: 129830 - RNA, 15 nt, Homo sapiens
ucuaaaaacauuugu

SEQ ID NO: 129831 - RNA, 19 nt, Homo sapiens
uuuucuucuuuuugcuuca

SEQ ID NO: 129832 - RNA, 15 nt, Homo sapiens
caggcgugaccugcc

SEQ ID NO: 129833 - RNA, 17 nt, Homo sapiens
aaaaaugugacucaaga

SEQ ID NO: 129834 - RNA, 19 nt, Homo sapiens
auuggaccagucagcacag

SEQ ID NO: 129835 - RNA, 13 nt, Homo sapiens
ggauuacaggcau

SEQ ID NO: 129836 - RNA, 20 nt, Homo sapiens
cagccuccugaguagcugga

SEQ ID NO: 129837 - RNA, 15 nt, Homo sapiens
gauucuccugccuca

SEQ ID NO: 129838 - RNA, 18 nt, Homo sapiens
auaugacacucuagucaa

SEQ ID NO: 129839 - RNA, 19 nt, Homo sapiens
augugacucaagacuucca

SEQ ID NO: 129840 - RNA, 14 nt, Homo sapiens
caauagauauuuac

SEQ ID NO: 129841 - RNA, 21 nt, Homo sapiens
guauaguuaaccacuaccgaa

SEQ ID NO: 129842 - RNA, 14 nt, Homo sapiens
agaauaaauacugu

SEQ ID NO: 129843 - RNA, 13 nt, Homo sapiens
uugucaacaaagu

SEQ ID NO: 129844 - RNA, 14 nt, Homo sapiens
aaacaaucuuguca

SEQ ID NO: 129845 - RNA, 18 nt, Homo sapiens
acuuuugaaaacaaaaua

SEQ ID NO: 129846 - RNA, 24 nt, Homo sapiens
cuugguaaaauaaucaguguuucc

SEQ ID NO: 129847 - RNA, 19 nt, Homo sapiens
ucaaaacaaucuugucaua

SEQ ID NO: 129848 - RNA, 16 nt, Homo sapiens
uacaauauacuuguau

SEQ ID NO: 129849 - RNA, 19 nt, Homo sapiens
acaaaguaagccauguauc

SEQ ID NO: 129850 - RNA, 16 nt, Homo sapiens
gugccaucagcuccuu

SEQ ID NO: 129851 - RNA, 16 nt, Homo sapiens
gcagaguacaaaguaa

SEQ ID NO: 129852 - RNA, 19 nt, Homo sapiens
gucugaacaauauauacuu

SEQ ID NO: 129853 - RNA, 21 nt, Homo sapiens
ucaagacgucacccuccauuc

SEQ ID NO: 129854 - RNA, 13 nt, Homo sapiens
ucuuaagacguga

SEQ ID NO: 129855 - RNA, 22 nt, Homo sapiens
aacauuuguuuuagucugaaca

SEQ ID NO: 129856 - RNA, 16 nt, Homo sapiens
aacuuacuuaguguua

SEQ ID NO: 129857 - RNA, 15 nt, Homo sapiens
ccacugccaaagaac

SEQ ID NO: 129858 - RNA, 19 nt, Homo sapiens
acacagucuuggcucacug

SEQ ID NO: 129859 - RNA, 16 nt, Homo sapiens
acaagaacacugaaaa

SEQ ID NO: 129860 - RNA, 17 nt, Homo sapiens
guucuaaggcugugcca

SEQ ID NO: 129861 - RNA, 19 nt, Homo sapiens
cuuaugcaaauaaccauug

SEQ ID NO: 129862 - RNA, 16 nt, Homo sapiens
aguagcuggauuacag

SEQ ID NO: 129863 - RNA, 21 nt, Homo sapiens
uggcaguggaacuaagaaagc

SEQ ID NO: 129864 - RNA, 21 nt, Homo sapiens
cagguucugacucuuggcaca

SEQ ID NO: 129865 - RNA, 15 nt, Homo sapiens
uguccuguuacaaaa

SEQ ID NO: 129866 - RNA, 21 nt, Homo sapiens
ugaggaauuucuguucuucca

SEQ ID NO: 129867 - RNA, 21 nt, Homo sapiens
uuaaauguagaaagugaucca

SEQ ID NO: 129868 - RNA, 17 nt, Homo sapiens
gacucuuggcacagcau

SEQ ID NO: 129869 - RNA, 15 nt, Homo sapiens
ccaaauuauggcaaa

SEQ ID NO: 129870 - RNA, 22 nt, Homo sapiens
ucuaaagauggaaaaaccaccc

SEQ ID NO: 129871 - RNA, 23 nt, Homo sapiens
ugcuucuuugaaacuuguaugaa

SEQ ID NO: 129872 - RNA, 22 nt, Homo sapiens
cuagaguucauggauauguuau

SEQ ID NO: 129873 - RNA, 17 nt, Homo sapiens
gaacuccuuggcuucuu

SEQ ID NO: 129874 - RNA, 12 nt, Homo sapiens
cacugccaaaga

SEQ ID NO: 129875 - RNA, 16 nt, Homo sapiens
ggggacacagcaucag

SEQ ID NO: 129876 - RNA, 14 nt, Homo sapiens
acagcaucagcuca

SEQ ID NO: 129877 - RNA, 19 nt, Homo sapiens
ggacuaaguguaccagaga

SEQ ID NO: 129878 - RNA, 19 nt, Homo sapiens
cagucuuggcucacugcaa

SEQ ID NO: 129879 - RNA, 16 nt, Homo sapiens
gauucuccugccucag

SEQ ID NO: 129880 - RNA, 16 nt, Homo sapiens
aagcagguucuuguua

SEQ ID NO: 129881 - RNA, 20 nt, Homo sapiens
ugucuuuggugaacauugca

SEQ ID NO: 129882 - RNA, 24 nt, Homo sapiens
agugagacuuugaggguguauauu

SEQ ID NO: 129883 - RNA, 12 nt, Homo sapiens
gaaccaggccag

SEQ ID NO: 129884 - RNA, 18 nt, Homo sapiens
ccaggcuggagugcaaug

SEQ ID NO: 129885 - RNA, 21 nt, Homo sapiens
aagauuucagauuugugacca

SEQ ID NO: 129886 - RNA, 23 nt, Homo sapiens
aauugggccaaagaaacauugcc

SEQ ID NO: 129887 - RNA, 18 nt, Homo sapiens
ucagaaaauggcacuugg

SEQ ID NO: 129888 - RNA, 20 nt, Homo sapiens
gccacucuguaauugcaaaa

SEQ ID NO: 129889 - RNA, 16 nt, Homo sapiens
ucagcaccuacagugu

SEQ ID NO: 129890 - RNA, 20 nt, Homo sapiens
cuuguuguuuucccaaagag

SEQ ID NO: 129891 - RNA, 20 nt, Homo sapiens
aagaugaaacaucauuucaa

SEQ ID NO: 129892 - RNA, 22 nt, Homo sapiens
guucauggauauguuauacuga

SEQ ID NO: 129893 - RNA, 18 nt, Homo sapiens
cucccagccagguucuga

SEQ ID NO: 129894 - RNA, 21 nt, Homo sapiens
cugaccaauauuguacaguuu

SEQ ID NO: 129895 - RNA, 22 nt, Homo sapiens
caaaaacauucuuacauuuuac

SEQ ID NO: 129896 - RNA, 17 nt, Homo sapiens
uaaauauagcucaggua

SEQ ID NO: 129897 - RNA, 12 nt, Homo sapiens
acugccaaagaa

SEQ ID NO: 129898 - RNA, 22 nt, Homo sapiens
uggcuucuuuacuuaguucaag

SEQ ID NO: 129899 - RNA, 16 nt, Homo sapiens
cccuccauucugcacu

SEQ ID NO: 129900 - RNA, 14 nt, Homo sapiens
uauacaauauacuu

SEQ ID NO: 129901 - RNA, 14 nt, Homo sapiens
uuaauaaaaguaca

SEQ ID NO: 129902 - RNA, 21 nt, Homo sapiens
uaaaauaaucaguguuuccaa

SEQ ID NO: 129903 - RNA, 14 nt, Homo sapiens
ggguucaagugauu

SEQ ID NO: 129904 - RNA, 19 nt, Homo sapiens
uacaaaguaagccauguau

SEQ ID NO: 129905 - RNA, 21 nt, Homo sapiens
ugagcaaaaccaaauauucca

SEQ ID NO: 129906 - RNA, 22 nt, Homo sapiens
uagagaccaguuuucucuggaa

SEQ ID NO: 129907 - RNA, 22 nt, Homo sapiens
gucuuggcucacugcaacuucu

SEQ ID NO: 129908 - RNA, 14 nt, Homo sapiens
uagcuccacaaagc

SEQ ID NO: 129909 - RNA, 15 nt, Homo sapiens
acucaucauuuccau

SEQ ID NO: 129910 - RNA, 20 nt, Homo sapiens
aaucuuucugcagaaacaga

SEQ ID NO: 129911 - RNA, 18 nt, Homo sapiens
aucacauucccauuugcu

SEQ ID NO: 129912 - RNA, 21 nt, Homo sapiens
aagggauggaagaaguaaaua

SEQ ID NO: 129913 - RNA, 18 nt, Homo sapiens
acugaauuuugucuuuau

SEQ ID NO: 129914 - RNA, 16 nt, Homo sapiens
ucaauguccuacugag

SEQ ID NO: 129915 - RNA, 14 nt, Homo sapiens
aaagaacuuggaaa

SEQ ID NO: 129916 - RNA, 21 nt, Homo sapiens
ugccacucuguaauugcaaaa

SEQ ID NO: 129917 - RNA, 14 nt, Homo sapiens
cuuccaucaccucc

SEQ ID NO: 129918 - RNA, 22 nt, Homo sapiens
ccauuugcuuagaaagucugau

SEQ ID NO: 129919 - RNA, 15 nt, Homo sapiens
aguuguuaauaaaag

SEQ ID NO: 129920 - RNA, 23 nt, Homo sapiens
gccuuccuggaggugacacuuga

SEQ ID NO: 129921 - RNA, 19 nt, Homo sapiens
ucgugguaggacuguagaa

SEQ ID NO: 129922 - RNA, 18 nt, Homo sapiens
agggcaauggacaaggaa

SEQ ID NO: 129923 - RNA, 13 nt, Homo sapiens
cucuuggguucaa

SEQ ID NO: 129924 - RNA, 23 nt, Homo sapiens
cuuuuuuuuuuuuuaaagacaga

SEQ ID NO: 129925 - RNA, 16 nt, Homo sapiens
uauagaaaugcugguu

SEQ ID NO: 129926 - RNA, 17 nt, Homo sapiens
uauugaacuuaugcaaa

SEQ ID NO: 129927 - RNA, 17 nt, Homo sapiens
gauuugggcucuuggaa

SEQ ID NO: 129928 - RNA, 15 nt, Homo sapiens
agaaauccaauugga

SEQ ID NO: 129929 - RNA, 19 nt, Homo sapiens
aagccauguguuccaaggc

SEQ ID NO: 129930 - RNA, 18 nt, Homo sapiens
ucucgugguaggacugua

SEQ ID NO: 129931 - RNA, 12 nt, Homo sapiens
uuacauugccuu

SEQ ID NO: 129932 - RNA, 19 nt, Homo sapiens
caauauauacuuauagaau

SEQ ID NO: 129933 - RNA, 20 nt, Homo sapiens
ccaggcuggagugcaaugac

SEQ ID NO: 129934 - RNA, 15 nt, Homo sapiens
aguucauggauaugu

SEQ ID NO: 129935 - RNA, 20 nt, Homo sapiens
gaacguuuuuccuguucuua

SEQ ID NO: 129936 - RNA, 19 nt, Homo sapiens
gaaugagcaaaaccaaaua

SEQ ID NO: 129937 - RNA, 15 nt, Homo sapiens
agaaagugauccaua

SEQ ID NO: 129938 - RNA, 13 nt, Homo sapiens
aaacaucauuuca

SEQ ID NO: 129939 - RNA, 16 nt, Homo sapiens
aaacagaaaaccugau

SEQ ID NO: 129940 - RNA, 12 nt, Homo sapiens
acaaucuuguca

SEQ ID NO: 129941 - RNA, 20 nt, Homo sapiens
ucuaagccuucugguuuuau

SEQ ID NO: 129942 - RNA, 23 nt, Homo sapiens
aaugucuuuauuaaauguagaaa

SEQ ID NO: 129943 - RNA, 15 nt, Homo sapiens
ugggauuacagggau

SEQ ID NO: 129944 - RNA, 23 nt, Homo sapiens
ccacuguuaagccauguguucca

SEQ ID NO: 129945 - RNA, 19 nt, Homo sapiens
aguuuauacccguuucaca

SEQ ID NO: 129946 - RNA, 16 nt, Homo sapiens
augacacucuagucaa

SEQ ID NO: 129947 - RNA, 21 nt, Homo sapiens
ugagacuuacuucucugcuau

SEQ ID NO: 129948 - RNA, 15 nt, Homo sapiens
gauauaaaagacuga

SEQ ID NO: 129949 - RNA, 15 nt, Homo sapiens
auucuccugccucag

SEQ ID NO: 129950 - RNA, 13 nt, Homo sapiens
auuuacauugccu

SEQ ID NO: 129951 - RNA, 22 nt, Homo sapiens
caaagaacuuggaaauagugau

SEQ ID NO: 129952 - RNA, 15 nt, Homo sapiens
aaauuucucuacugu

SEQ ID NO: 129953 - RNA, 19 nt, Homo sapiens
uuaaauguagaaagugauc

SEQ ID NO: 129954 - RNA, 16 nt, Homo sapiens
agcuagcaacauuugu

SEQ ID NO: 129955 - RNA, 21 nt, Homo sapiens
uacuauuuuuacuaaucuuuc

SEQ ID NO: 129956 - RNA, 23 nt, Homo sapiens
ccuaagccaugggagacacugau

SEQ ID NO: 129957 - RNA, 19 nt, Homo sapiens
ugaacauugcaauagaaau

SEQ ID NO: 129958 - RNA, 15 nt, Homo sapiens
ucauggauauguuau

SEQ ID NO: 129959 - RNA, 14 nt, Homo sapiens
aaaaaugugacuca

SEQ ID NO: 129960 - RNA, 14 nt, Homo sapiens
aauagugauuucca

SEQ ID NO: 129961 - RNA, 17 nt, Homo sapiens
cuucugaaaaaguaucc

SEQ ID NO: 129962 - RNA, 19 nt, Homo sapiens
uagcggggaggggguuauc

SEQ ID NO: 129963 - RNA, 18 nt, Homo sapiens
uggcuaguaaaagccauc

SEQ ID NO: 129964 - RNA, 13 nt, Homo sapiens
uaugcacaaacuu

SEQ ID NO: 129965 - RNA, 20 nt, Homo sapiens
gaccugccaggcacacugag

SEQ ID NO: 129966 - RNA, 19 nt, Homo sapiens
guguacagucuuguauuaa

SEQ ID NO: 129967 - RNA, 16 nt, Homo sapiens
caacauuuguuuuagu

SEQ ID NO: 129968 - RNA, 17 nt, Homo sapiens
uaugacacucuagucaa

SEQ ID NO: 129969 - RNA, 17 nt, Homo sapiens
ucaauguccuacugaga

SEQ ID NO: 129970 - RNA, 18 nt, Homo sapiens
cuuuuuuuuaaguuacac

SEQ ID NO: 129971 - RNA, 16 nt, Homo sapiens
auaaaaguuggcucag

SEQ ID NO: 129972 - RNA, 17 nt, Homo sapiens
uaaaccguacacugugu

SEQ ID NO: 129973 - RNA, 22 nt, Homo sapiens
ucccucaaaacaaucuugucau

SEQ ID NO: 129974 - RNA, 13 nt, Homo sapiens
uccacagugacuc

SEQ ID NO: 129975 - RNA, 18 nt, Homo sapiens
gccaaucaguagccagca

SEQ ID NO: 129976 - RNA, 18 nt, Homo sapiens
aucugaaacagcuucaug

SEQ ID NO: 129977 - RNA, 22 nt, Homo sapiens
uuaaaaaauggacucuugaaau

SEQ ID NO: 129978 - RNA, 17 nt, Homo sapiens
acauaaaaguuggcuca

SEQ ID NO: 129979 - RNA, 17 nt, Homo sapiens
guuguuuucccaaagag

SEQ ID NO: 129980 - RNA, 10 nt, Homo sapiens
uuugggcucu

SEQ ID NO: 129981 - RNA, 17 nt, Homo sapiens
uggugacugugggcucc

SEQ ID NO: 129982 - RNA, 11 nt, Homo sapiens
aaauaaauuau

SEQ ID NO: 129983 - RNA, 17 nt, Homo sapiens
aauuuuuauuaaauuau

SEQ ID NO: 129984 - RNA, 23 nt, Human herpesvirus 3
aaaaauaauuccgguugugccaa

SEQ ID NO: 129985 - RNA, 20 nt, Human herpesvirus 3
aaaaauaccuuuuucaugcu

SEQ ID NO: 129986 - RNA, 22 nt, Human herpesvirus 3
aaaaauaauguuggguauuuau

SEQ ID NO: 129987 - RNA, 18 nt, Human herpesvirus 3
aaaacaguacgcuuuuau

SEQ ID NO: 129988 - RNA, 23 nt, Human herpesvirus 3
aaaaauuuguguuuuuaucugca

SEQ ID NO: 129989 - RNA, 16 nt, Human herpesvirus 3
aaaacacacaccagac

SEQ ID NO: 129990 - RNA, 17 nt, Human herpesvirus 3
aaaaauguugucugcca

SEQ ID NO: 129991 - RNA, 12 nt, Human herpesvirus 3
aaaagacugugu

SEQ ID NO: 129992 - RNA, 21 nt, Human herpesvirus 3
aaaacguacguuuaacccgcg

SEQ ID NO: 129993 - RNA, 12 nt, Human herpesvirus 3
aaaacgugcaug

SEQ ID NO: 129994 - RNA, 13 nt, Human herpesvirus 3
aaaacguuuuaaa

SEQ ID NO: 129995 - RNA, 14 nt, Human herpesvirus 3
aacguauucucuac

SEQ ID NO: 129996 - RNA, 23 nt, Human herpesvirus 3
aacgcuguuguugcuaguauuuu

SEQ ID NO: 129997 - RNA, 23 nt, Human herpesvirus 3
aacguggccauuacuaaagcuau

SEQ ID NO: 129998 - RNA, 13 nt, Human herpesvirus 3
aacguuaucuuua

SEQ ID NO: 129999 - RNA, 16 nt, Human herpesvirus 3
aacgugauuacuacaa

SEQ ID NO: 130000 - RNA, 17 nt, Human herpesvirus 3
aacguugaacaccauuu

SEQ ID NO: 130001 - RNA, 15 nt, Human herpesvirus 3
aacguuuuaguaaaa

SEQ ID NO: 130002 - RNA, 17 nt, Human herpesvirus 3
aacuuaacaaacauaua

SEQ ID NO: 130003 - RNA, 18 nt, Human herpesvirus 3
aaccauagacuguucuac

SEQ ID NO: 130004 - RNA, 21 nt, Human herpesvirus 3
aaccauagaggugugugcaca

SEQ ID NO: 130005 - RNA, 19 nt, Human herpesvirus 3
aaccacggugauuaauggu

SEQ ID NO: 130006 - RNA, 17 nt, Human herpesvirus 3
aaccagcguuccgcgga

SEQ ID NO: 130007 - RNA, 18 nt, Human herpesvirus 3
aacccaagacgacauuaa

SEQ ID NO: 130008 - RNA, 20 nt, Human herpesvirus 3
aacccaagguguaaauacug

SEQ ID NO: 130009 - RNA, 22 nt, Human herpesvirus 3
aaccuucgcggggaaacgauua

SEQ ID NO: 130010 - RNA, 13 nt, Human herpesvirus 3
aacgcugcugaca

SEQ ID NO: 130011 - RNA, 19 nt, Human herpesvirus 3
aacgcuggcauuuccaaac

SEQ ID NO: 130012 - RNA, 22 nt, Human herpesvirus 3
aacgcuggcauuuccaaacaca

SEQ ID NO: 130013 - RNA, 15 nt, Human herpesvirus 3
aaccuuaccacccau

SEQ ID NO: 130014 - RNA, 15 nt, Human herpesvirus 3
aacagcgacuauguu

SEQ ID NO: 130015 - RNA, 21 nt, Human herpesvirus 3
aacauccauccgauaauacca

SEQ ID NO: 130016 - RNA, 14 nt, Human herpesvirus 3
aacauccacagucu

SEQ ID NO: 130017 - RNA, 12 nt, Human herpesvirus 3
aacauccgugaa

SEQ ID NO: 130018 - RNA, 14 nt, Human herpesvirus 3
aacaugcauggaau

SEQ ID NO: 130019 - RNA, 15 nt, Human herpesvirus 3
aacauggcuaugcca

SEQ ID NO: 130020 - RNA, 17 nt, Human herpesvirus 3
aacauggcuaugccauu

SEQ ID NO: 130021 - RNA, 19 nt, Human herpesvirus 3
aaccaaagacgacuaugua

SEQ ID NO: 130022 - RNA, 14 nt, Human herpesvirus 3
aaccacaaccaagc

SEQ ID NO: 130023 - RNA, 20 nt, Human herpesvirus 3
aacauuugcgaugccguuua

SEQ ID NO: 130024 - RNA, 19 nt, Human herpesvirus 3
aacagaggacgccgauaaa

SEQ ID NO: 130025 - RNA, 22 nt, Human herpesvirus 3
aacagauuuccccggaaauaua

SEQ ID NO: 130026 - RNA, 14 nt, Human herpesvirus 3
aacaaaacccacgu

SEQ ID NO: 130027 - RNA, 20 nt, Human herpesvirus 3
aacaaacacucuacgcauuu

SEQ ID NO: 130028 - RNA, 22 nt, Human herpesvirus 3
aacaaacacucuacgcauuuac

SEQ ID NO: 130029 - RNA, 20 nt, Human herpesvirus 3
aaauugggggauuugggaga

SEQ ID NO: 130030 - RNA, 18 nt, Human herpesvirus 3
aaauugcgcgaguuccca

SEQ ID NO: 130031 - RNA, 23 nt, Human herpesvirus 3
aaauacgguucaaaggcauuacc

SEQ ID NO: 130032 - RNA, 18 nt, Human herpesvirus 3
aaaggccgagcugguaua

SEQ ID NO: 130033 - RNA, 21 nt, Human herpesvirus 3
aaaggcauuugugucccauuu

SEQ ID NO: 130034 - RNA, 12 nt, Human herpesvirus 3
aaagcggacaca

SEQ ID NO: 130035 - RNA, 13 nt, Human herpesvirus 3
aaagcggacacau

SEQ ID NO: 130036 - RNA, 16 nt, Human herpesvirus 3
aaaucuccgguuuuaa

SEQ ID NO: 130037 - RNA, 14 nt, Human herpesvirus 3
aaauauaaaauaac

SEQ ID NO: 130038 - RNA, 23 nt, Human herpesvirus 3
aaauauaaauuuuuugugucguu

SEQ ID NO: 130039 - RNA, 14 nt, Human herpesvirus 3
aaauaggguacaaa

SEQ ID NO: 130040 - RNA, 22 nt, Human herpesvirus 3
aaaugcggcggccguugccgca

SEQ ID NO: 130041 - RNA, 18 nt, Human herpesvirus 3
aaauucgcacaccuuccu

SEQ ID NO: 130042 - RNA, 13 nt, Human herpesvirus 3
aaauucaacuaau

SEQ ID NO: 130043 - RNA, 18 nt, Human herpesvirus 3
aaagagccauuuccauuu

SEQ ID NO: 130044 - RNA, 19 nt, Human herpesvirus 3
aaacugaauuuaacauagc

SEQ ID NO: 130045 - RNA, 21 nt, Human herpesvirus 3
aaagacagcccgugugauguu

SEQ ID NO: 130046 - RNA, 19 nt, Human herpesvirus 3
aaaagcguguaaaucauca

SEQ ID NO: 130047 - RNA, 14 nt, Human herpesvirus 3
aaaaucuauuauca

SEQ ID NO: 130048 - RNA, 22 nt, Human herpesvirus 3
aauggcgaccacgacagcagua

SEQ ID NO: 130049 - RNA, 16 nt, Human herpesvirus 3
aauggaguuaccacgg

SEQ ID NO: 130050 - RNA, 22 nt, Human herpesvirus 3
aaugguguuuggugcacucuac

SEQ ID NO: 130051 - RNA, 16 nt, Human herpesvirus 3
aaugcacugaaccaca

SEQ ID NO: 130052 - RNA, 17 nt, Human herpesvirus 3
aaugcaacccugucauc

SEQ ID NO: 130053 - RNA, 19 nt, Human herpesvirus 3
aaugauguaaccuacacaa

SEQ ID NO: 130054 - RNA, 23 nt, Human herpesvirus 3
aaucguugcggguacaauacgua

SEQ ID NO: 130055 - RNA, 21 nt, Human herpesvirus 3
aaucggugucagaaucuucau

SEQ ID NO: 130056 - RNA, 23 nt, Human herpesvirus 3
aaucguacgauuagaaccaacuc

SEQ ID NO: 130057 - RNA, 18 nt, Human herpesvirus 3
aaucguaguaaaacggaa

SEQ ID NO: 130058 - RNA, 17 nt, Human herpesvirus 3
aaucguuuaucacugug

SEQ ID NO: 130059 - RNA, 21 nt, Human herpesvirus 3
aaucgcgauguuuuuaaucca

SEQ ID NO: 130060 - RNA, 19 nt, Human herpesvirus 3
aauauauggcgccauccau

SEQ ID NO: 130061 - RNA, 16 nt, Human herpesvirus 3
aauauaaauaacauaa

SEQ ID NO: 130062 - RNA, 20 nt, Human herpesvirus 3
aauauaaauaacauaaccaa

SEQ ID NO: 130063 - RNA, 11 nt, Human herpesvirus 3
aauaggugaua

SEQ ID NO: 130064 - RNA, 14 nt, Human herpesvirus 3
aauagagaguuaau

SEQ ID NO: 130065 - RNA, 15 nt, Human herpesvirus 3
aauuuucguaagcaa

SEQ ID NO: 130066 - RNA, 18 nt, Human herpesvirus 3
aauuggccguuuguauca

SEQ ID NO: 130067 - RNA, 20 nt, Human herpesvirus 3
aauuugugcggcgagaauuu

SEQ ID NO: 130068 - RNA, 22 nt, Human herpesvirus 3
aauuuguguuuuuaucugcaau

SEQ ID NO: 130069 - RNA, 15 nt, Human herpesvirus 3
aauuauaacugcuac

SEQ ID NO: 130070 - RNA, 19 nt, Human herpesvirus 3
aauguaauaaaaugauaua

SEQ ID NO: 130071 - RNA, 21 nt, Human herpesvirus 3
aauguaguggcguagguagau

SEQ ID NO: 130072 - RNA, 13 nt, Human herpesvirus 3
aauuaccguacaa

SEQ ID NO: 130073 - RNA, 17 nt, Human herpesvirus 3
aauuaccguacaacaag

SEQ ID NO: 130074 - RNA, 19 nt, Human herpesvirus 3
aaguuguuggcgcaugcca

SEQ ID NO: 130075 - RNA, 16 nt, Human herpesvirus 3
aauacaauaaacauaa

SEQ ID NO: 130076 - RNA, 14 nt, Human herpesvirus 3
aauacacacuaccu

SEQ ID NO: 130077 - RNA, 22 nt, Human herpesvirus 3
aauacuaagccucuguacaaca

SEQ ID NO: 130078 - RNA, 20 nt, Human herpesvirus 3
aauaccuauuucaugcuugu

SEQ ID NO: 130079 - RNA, 22 nt, Human herpesvirus 3
aauaccuuuuucaugcuuguca

SEQ ID NO: 130080 - RNA, 15 nt, Human herpesvirus 3
aaggcccauaucccc

SEQ ID NO: 130081 - RNA, 22 nt, Human herpesvirus 3
aaggcauugggcccuccggggc

SEQ ID NO: 130082 - RNA, 19 nt, Human herpesvirus 3
aaggcgacgguauauuaca

SEQ ID NO: 130083 - RNA, 22 nt, Human herpesvirus 3
aaggaucuccacguagcaaagc

SEQ ID NO: 130084 - RNA, 18 nt, Human herpesvirus 3
aaggacacgaucuaaagc

SEQ ID NO: 130085 - RNA, 18 nt, Human herpesvirus 3
aaggaauacaucauuccg

SEQ ID NO: 130086 - RNA, 18 nt, Human herpesvirus 3
aagucacuauaaacguau

SEQ ID NO: 130087 - RNA, 19 nt, Human herpesvirus 3
aaggcgugaaagcuaccac

SEQ ID NO: 130088 - RNA, 13 nt, Human herpesvirus 3
aagucguuuauau

SEQ ID NO: 130089 - RNA, 13 nt, Human herpesvirus 3
aagugacuauauu

SEQ ID NO: 130090 - RNA, 13 nt, Human herpesvirus 3
aagccguucugug

SEQ ID NO: 130091 - RNA, 19 nt, Human herpesvirus 3
aagccucuguacaacacaa

SEQ ID NO: 130092 - RNA, 15 nt, Human herpesvirus 3
aagccaacgucgcca

SEQ ID NO: 130093 - RNA, 15 nt, Human herpesvirus 3
aagcugccgucaaug

SEQ ID NO: 130094 - RNA, 15 nt, Human herpesvirus 3
aagcguguaaaucau

SEQ ID NO: 130095 - RNA, 15 nt, Human herpesvirus 3
aagcguuaccacagu

SEQ ID NO: 130096 - RNA, 14 nt, Human herpesvirus 3
aagcuaccaccaca

SEQ ID NO: 130097 - RNA, 14 nt, Human herpesvirus 3
aagcuauacacaag

SEQ ID NO: 130098 - RNA, 20 nt, Human herpesvirus 3
aagcuauuggcuccacucca

SEQ ID NO: 130099 - RNA, 21 nt, Human herpesvirus 3
aagcauauacacauccuggac

SEQ ID NO: 130100 - RNA, 17 nt, Human herpesvirus 3
aacuuguguguaccaua

SEQ ID NO: 130101 - RNA, 15 nt, Human herpesvirus 3
aacuucaguacuuaa

SEQ ID NO: 130102 - RNA, 14 nt, Human herpesvirus 3
aacuuccccauaca

SEQ ID NO: 130103 - RNA, 20 nt, Human herpesvirus 3
accuaguauuuacguaugua

SEQ ID NO: 130104 - RNA, 21 nt, Human herpesvirus 3
acccugauaaacccugauaaa

SEQ ID NO: 130105 - RNA, 21 nt, Human herpesvirus 3
acccugucaucagacaugauu

SEQ ID NO: 130106 - RNA, 18 nt, Human herpesvirus 3
accgacccagacgugucu

SEQ ID NO: 130107 - RNA, 14 nt, Human herpesvirus 3
acccuacgacuucu

SEQ ID NO: 130108 - RNA, 15 nt, Human herpesvirus 3
accugaguguugcua

SEQ ID NO: 130109 - RNA, 21 nt, Human herpesvirus 3
acgacuuuuaaacgccagugg

SEQ ID NO: 130110 - RNA, 13 nt, Human herpesvirus 3
acgagaauauucc

SEQ ID NO: 130111 - RNA, 18 nt, Human herpesvirus 3
acgacgugagggugaccg

SEQ ID NO: 130112 - RNA, 20 nt, Human herpesvirus 3
accaccacaaucgcccgaaa

SEQ ID NO: 130113 - RNA, 23 nt, Human herpesvirus 3
accaucaucugauuugcaaacau

SEQ ID NO: 130114 - RNA, 13 nt, Human herpesvirus 3
accaucuggacag

SEQ ID NO: 130115 - RNA, 16 nt, Human herpesvirus 3
accauagacuguucua

SEQ ID NO: 130116 - RNA, 15 nt, Human herpesvirus 3
accacuaagaacuuu

SEQ ID NO: 130117 - RNA, 16 nt, Human herpesvirus 3
accacuaagaacuuua

SEQ ID NO: 130118 - RNA, 22 nt, Human herpesvirus 3
accacguguugcuguuguccaa

SEQ ID NO: 130119 - RNA, 12 nt, Human herpesvirus 3
acccccucuuaa

SEQ ID NO: 130120 - RNA, 17 nt, Human herpesvirus 3
accccaguaaucucacu

SEQ ID NO: 130121 - RNA, 21 nt, Human herpesvirus 3
accccuugauuuuaucaauug

SEQ ID NO: 130122 - RNA, 18 nt, Human herpesvirus 3
acccauacauauguucca

SEQ ID NO: 130123 - RNA, 21 nt, Human herpesvirus 3
acccagcuguccggacuccag

SEQ ID NO: 130124 - RNA, 15 nt, Human herpesvirus 3
accaugauuugaugu

SEQ ID NO: 130125 - RNA, 21 nt, Human herpesvirus 3
accaugauuugauguuuuuau

SEQ ID NO: 130126 - RNA, 12 nt, Human herpesvirus 3
acagacuuuguc

SEQ ID NO: 130127 - RNA, 22 nt, Human herpesvirus 3
acagaggacgccgauaaaucca

SEQ ID NO: 130128 - RNA, 19 nt, Human herpesvirus 3
acauaacauccauccgaua

SEQ ID NO: 130129 - RNA, 20 nt, Human herpesvirus 3
acauaacauccauccgauaa

SEQ ID NO: 130130 - RNA, 16 nt, Human herpesvirus 3
acauaccgacaguaaa

SEQ ID NO: 130131 - RNA, 14 nt, Human herpesvirus 3
acauagauacucca

SEQ ID NO: 130132 - RNA, 14 nt, Human herpesvirus 3
acauacaacaugau

SEQ ID NO: 130133 - RNA, 16 nt, Human herpesvirus 3
acauacuaauuuguau

SEQ ID NO: 130134 - RNA, 15 nt, Human herpesvirus 3
acauccuggacacag

SEQ ID NO: 130135 - RNA, 22 nt, Human herpesvirus 3
acauccuuuaaucccgccuuua

SEQ ID NO: 130136 - RNA, 15 nt, Human herpesvirus 3
acaucgcugaugcca

SEQ ID NO: 130137 - RNA, 17 nt, Human herpesvirus 3
acaucgcugaugccaga

SEQ ID NO: 130138 - RNA, 12 nt, Human herpesvirus 3
acaucgugcuug

SEQ ID NO: 130139 - RNA, 20 nt, Human herpesvirus 3
acaugaauauauagccuuua

SEQ ID NO: 130140 - RNA, 20 nt, Human herpesvirus 3
acacgccgcaacaacccauc

SEQ ID NO: 130141 - RNA, 20 nt, Human herpesvirus 3
acaccuuuuuucgauuguac

SEQ ID NO: 130142 - RNA, 16 nt, Human herpesvirus 3
acaccgcugugcugua

SEQ ID NO: 130143 - RNA, 19 nt, Human herpesvirus 3
acaagauauaauuugucca

SEQ ID NO: 130144 - RNA, 14 nt, Human herpesvirus 3
acacccgacuuccu

SEQ ID NO: 130145 - RNA, 17 nt, Human herpesvirus 3
acacccauacauauguu

SEQ ID NO: 130146 - RNA, 12 nt, Human herpesvirus 3
acacccagcugu

SEQ ID NO: 130147 - RNA, 23 nt, Human herpesvirus 3
acaccagaaucucuucauaugua

SEQ ID NO: 130148 - RNA, 21 nt, Human herpesvirus 3
acaacgucuagaacuguguau

SEQ ID NO: 130149 - RNA, 13 nt, Human herpesvirus 3
acaagaaaccaug

SEQ ID NO: 130150 - RNA, 14 nt, Human herpesvirus 3
acaagaaguuauau

SEQ ID NO: 130151 - RNA, 17 nt, Human herpesvirus 3
acaagaaguuauaugaa

SEQ ID NO: 130152 - RNA, 18 nt, Human herpesvirus 3
acuaaagguauacuugga

SEQ ID NO: 130153 - RNA, 18 nt, Human herpesvirus 3
acguuuguguugugacuu

SEQ ID NO: 130154 - RNA, 19 nt, Human herpesvirus 3
acguuuuuuuuguuagguu

SEQ ID NO: 130155 - RNA, 16 nt, Human herpesvirus 3
acgccgcaacaaccca

SEQ ID NO: 130156 - RNA, 14 nt, Human herpesvirus 3
acgccgacaugccu

SEQ ID NO: 130157 - RNA, 15 nt, Human herpesvirus 3
acgcauuugaugaau

SEQ ID NO: 130158 - RNA, 20 nt, Human herpesvirus 3
acguggaaucguaguaaaac

SEQ ID NO: 130159 - RNA, 19 nt, Human herpesvirus 3
acuacaugcggugcuguuu

SEQ ID NO: 130160 - RNA, 16 nt, Human herpesvirus 3
acuacauggagugugu

SEQ ID NO: 130161 - RNA, 19 nt, Human herpesvirus 3
acuacauggaguguguuac

SEQ ID NO: 130162 - RNA, 21 nt, Human herpesvirus 3
acuacacccaguacguugcau

SEQ ID NO: 130163 - RNA, 15 nt, Human herpesvirus 3
acuaauauaaauaac

SEQ ID NO: 130164 - RNA, 11 nt, Human herpesvirus 3
acuaauguugu

SEQ ID NO: 130165 - RNA, 16 nt, Human herpesvirus 3
acuaauguuguucaga

SEQ ID NO: 130166 - RNA, 18 nt, Human herpesvirus 3
acuacugcugcaagcccu

SEQ ID NO: 130167 - RNA, 14 nt, Human herpesvirus 3
acuauaaguuaaca

SEQ ID NO: 130168 - RNA, 14 nt, Human herpesvirus 3
acuauaugcguuuu

SEQ ID NO: 130169 - RNA, 15 nt, Human herpesvirus 3
acucuacgcauuuac

SEQ ID NO: 130170 - RNA, 13 nt, Human herpesvirus 3
acucgcguacaaa

SEQ ID NO: 130171 - RNA, 18 nt, Human herpesvirus 3
acuauuugugaagacuuu

SEQ ID NO: 130172 - RNA, 14 nt, Human herpesvirus 3
acuauguagguaag

SEQ ID NO: 130173 - RNA, 18 nt, Human herpesvirus 3
acuaugguaaaaaccgcu

SEQ ID NO: 130174 - RNA, 19 nt, Human herpesvirus 3
acugguguucuauuuccca

SEQ ID NO: 130175 - RNA, 20 nt, Human herpesvirus 3
acugguguucuauuucccaa

SEQ ID NO: 130176 - RNA, 12 nt, Human herpesvirus 3
acugcagauaca

SEQ ID NO: 130177 - RNA, 15 nt, Human herpesvirus 3
acugcuacaacggaa

SEQ ID NO: 130178 - RNA, 21 nt, Human herpesvirus 3
agaagccccaacgaguguaug

SEQ ID NO: 130179 - RNA, 16 nt, Human herpesvirus 3
agaagcguuaccacag

SEQ ID NO: 130180 - RNA, 14 nt, Human herpesvirus 3
agaagguucacuaa

SEQ ID NO: 130181 - RNA, 12 nt, Human herpesvirus 3
agaagguuuaaa

SEQ ID NO: 130182 - RNA, 18 nt, Human herpesvirus 3
acugugaagcguuauacg

SEQ ID NO: 130183 - RNA, 20 nt, Human herpesvirus 3
acugugaagcguuauacgug

SEQ ID NO: 130184 - RNA, 13 nt, Human herpesvirus 3
acuuauuaugcaa

SEQ ID NO: 130185 - RNA, 21 nt, Human herpesvirus 3
acuuuucaucauacgcauuua

SEQ ID NO: 130186 - RNA, 22 nt, Human herpesvirus 3
acuuuucaucauacgcauuuac

SEQ ID NO: 130187 - RNA, 14 nt, Human herpesvirus 3
acuuuuaaacgcca

SEQ ID NO: 130188 - RNA, 15 nt, Human herpesvirus 3
agacauggccgugaa

SEQ ID NO: 130189 - RNA, 22 nt, Human herpesvirus 3
agacaucccucguuuauggaaa

SEQ ID NO: 130190 - RNA, 22 nt, Human herpesvirus 3
agaauguaauucgugugcaaua

SEQ ID NO: 130191 - RNA, 21 nt, Human herpesvirus 3
agacagcccgugugauguuac

SEQ ID NO: 130192 - RNA, 20 nt, Human herpesvirus 3
agaauauuccgaccguaaua

SEQ ID NO: 130193 - RNA, 22 nt, Human herpesvirus 3
agaauauuccgaccguaauaug

SEQ ID NO: 130194 - RNA, 18 nt, Human herpesvirus 3
agagauccaauacaucaa

SEQ ID NO: 130195 - RNA, 19 nt, Human herpesvirus 3
agagcgccuaaauaugcua

SEQ ID NO: 130196 - RNA, 15 nt, Human herpesvirus 3
agagcccacacaauc

SEQ ID NO: 130197 - RNA, 23 nt, Human herpesvirus 3
agagcccacacaaucagaagaua

SEQ ID NO: 130198 - RNA, 14 nt, Human herpesvirus 3
agagcuguccauga

SEQ ID NO: 130199 - RNA, 12 nt, Human herpesvirus 3
caaaauggaugc

SEQ ID NO: 130200 - RNA, 22 nt, Human herpesvirus 3
caaaauguuaaacccugauaaa

SEQ ID NO: 130201 - RNA, 14 nt, Human herpesvirus 3
caaaauugggacga

SEQ ID NO: 130202 - RNA, 15 nt, Human herpesvirus 3
caaaauaaaacaaug

SEQ ID NO: 130203 - RNA, 14 nt, Human herpesvirus 3
caaauuauccaaug

SEQ ID NO: 130204 - RNA, 13 nt, Human herpesvirus 3
caaacacauuacg

SEQ ID NO: 130205 - RNA, 15 nt, Human herpesvirus 3
caaauucaacuaaug

SEQ ID NO: 130206 - RNA, 21 nt, Human herpesvirus 3
caacaaccgucgucuaucgca

SEQ ID NO: 130207 - RNA, 16 nt, Human herpesvirus 3
caacaaggauaaaaca

SEQ ID NO: 130208 - RNA, 16 nt, Human herpesvirus 3
caacuaauguuguuca

SEQ ID NO: 130209 - RNA, 17 nt, Human herpesvirus 3
caacauuuacaguaaua

SEQ ID NO: 130210 - RNA, 14 nt, Human herpesvirus 3
caacauggcuacaa

SEQ ID NO: 130211 - RNA, 18 nt, Human herpesvirus 3
caacuuccccauacacua

SEQ ID NO: 130212 - RNA, 12 nt, Human herpesvirus 3
caacugauuaca

SEQ ID NO: 130213 - RNA, 17 nt, Human herpesvirus 3
caacugauuacauuuca

SEQ ID NO: 130214 - RNA, 18 nt, Human herpesvirus 3
caacugauuacauuucau

SEQ ID NO: 130215 - RNA, 16 nt, Human herpesvirus 3
caauccgucaacugca

SEQ ID NO: 130216 - RNA, 18 nt, Human herpesvirus 3
caaucgaaaaaaggugua

SEQ ID NO: 130217 - RNA, 15 nt, Human herpesvirus 3
caauauuuuguuaau

SEQ ID NO: 130218 - RNA, 16 nt, Human herpesvirus 3
caauauuuuguuaaua

SEQ ID NO: 130219 - RNA, 18 nt, Human herpesvirus 3
caauaucagccgcucgcu

SEQ ID NO: 130220 - RNA, 12 nt, Human herpesvirus 3
caagaguuuucu

SEQ ID NO: 130221 - RNA, 18 nt, Human herpesvirus 3
caagaguuuucuccaaaa

SEQ ID NO: 130222 - RNA, 17 nt, Human herpesvirus 3
caagguguaaauacugc

SEQ ID NO: 130223 - RNA, 16 nt, Human herpesvirus 3
caagucgcaacgcugc

SEQ ID NO: 130224 - RNA, 20 nt, Human herpesvirus 3
caagucaauauuacauauuc

SEQ ID NO: 130225 - RNA, 15 nt, Human herpesvirus 3
caaguuuaacauuuc

SEQ ID NO: 130226 - RNA, 14 nt, Human herpesvirus 3
caaguugcauguua

SEQ ID NO: 130227 - RNA, 15 nt, Human herpesvirus 3
caauaaaauggauau

SEQ ID NO: 130228 - RNA, 18 nt, Human herpesvirus 3
caauaaaacaaacauuca

SEQ ID NO: 130229 - RNA, 22 nt, Human herpesvirus 3
cacguuuguguugugacuugac

SEQ ID NO: 130230 - RNA, 23 nt, Human herpesvirus 3
cacguuuguguugugacuugacg

SEQ ID NO: 130231 - RNA, 20 nt, Human herpesvirus 3
cacuaaaaucacuuugauau

SEQ ID NO: 130232 - RNA, 20 nt, Human herpesvirus 3
cacuaaauaaaauacaccuu

SEQ ID NO: 130233 - RNA, 16 nt, Human herpesvirus 3
cacucuacgcauuuac

SEQ ID NO: 130234 - RNA, 20 nt, Human herpesvirus 3
cacugaaccacaaccaagcu

SEQ ID NO: 130235 - RNA, 13 nt, Human herpesvirus 3
cacgugguauuau

SEQ ID NO: 130236 - RNA, 12 nt, Human herpesvirus 3
cacgacaccgcu

SEQ ID NO: 130237 - RNA, 20 nt, Human herpesvirus 3
cagaacgaucacaacagaca

SEQ ID NO: 130238 - RNA, 21 nt, Human herpesvirus 3
cagaacgaucacaacagacaa

SEQ ID NO: 130239 - RNA, 14 nt, Human herpesvirus 3
cacugcauuuacau

SEQ ID NO: 130240 - RNA, 24 nt, Human herpesvirus 3
cacugcauuuacaucuuguccaac

SEQ ID NO: 130241 - RNA, 12 nt, Human herpesvirus 3
cacugguggaua

SEQ ID NO: 130242 - RNA, 13 nt, Human herpesvirus 3
cacuggacuuuac

SEQ ID NO: 130243 - RNA, 19 nt, Human herpesvirus 3
cagaaacgccccuccuaaa

SEQ ID NO: 130244 - RNA, 22 nt, Human herpesvirus 3
cagaaacguuuuuaguuuuuau

SEQ ID NO: 130245 - RNA, 18 nt, Human herpesvirus 3
cagaaacaucaaccggaa

SEQ ID NO: 130246 - RNA, 15 nt, Human herpesvirus 3
cagaaagauugcagu

SEQ ID NO: 130247 - RNA, 17 nt, Human herpesvirus 3
cacaguccggacaauua

SEQ ID NO: 130248 - RNA, 16 nt, Human herpesvirus 3
cacagccuuagaguca

SEQ ID NO: 130249 - RNA, 15 nt, Human herpesvirus 3
caccacguguugcug

SEQ ID NO: 130250 - RNA, 12 nt, Human herpesvirus 3
cacaugaauaua

SEQ ID NO: 130251 - RNA, 18 nt, Human herpesvirus 3
cacccccguugcuuuaau

SEQ ID NO: 130252 - RNA, 16 nt, Human herpesvirus 3
caaugaacaguuaugu

SEQ ID NO: 130253 - RNA, 13 nt, Human herpesvirus 3
caaugacagugau

SEQ ID NO: 130254 - RNA, 21 nt, Human herpesvirus 3
caaugagaugagaaaaauaau

SEQ ID NO: 130255 - RNA, 15 nt, Human herpesvirus 3
caaugagcgguggua

SEQ ID NO: 130256 - RNA, 18 nt, Human herpesvirus 3
caaugcacugaaccacaa

SEQ ID NO: 130257 - RNA, 16 nt, Human herpesvirus 3
aucuuacguaacacca

SEQ ID NO: 130258 - RNA, 13 nt, Human herpesvirus 3
auggcuugucguc

SEQ ID NO: 130259 - RNA, 23 nt, Human herpesvirus 3
auggccucugcuucaauuccaac

SEQ ID NO: 130260 - RNA, 20 nt, Human herpesvirus 3
auggcgaccacgacagcagu

SEQ ID NO: 130261 - RNA, 15 nt, Human herpesvirus 3
augguaguuaccaaa

SEQ ID NO: 130262 - RNA, 20 nt, Human herpesvirus 3
augguuaauaauagugacaa

SEQ ID NO: 130263 - RNA, 22 nt, Human herpesvirus 3
augguuaauaauagugacaaac

SEQ ID NO: 130264 - RNA, 19 nt, Human herpesvirus 3
auggucagacugccguaaa

SEQ ID NO: 130265 - RNA, 22 nt, Human herpesvirus 3
auggugaaagagcuguccauga

SEQ ID NO: 130266 - RNA, 22 nt, Human herpesvirus 3
augguguuuggugcacucuacc

SEQ ID NO: 130267 - RNA, 22 nt, Human herpesvirus 3
auguaauaaaaugauauacaca

SEQ ID NO: 130268 - RNA, 14 nt, Human herpesvirus 3
auguaaccuacaca

SEQ ID NO: 130269 - RNA, 12 nt, Human herpesvirus 3
auguacguguau

SEQ ID NO: 130270 - RNA, 17 nt, Human herpesvirus 3
auguagcaucggauauu

SEQ ID NO: 130271 - RNA, 23 nt, Human herpesvirus 3
auguaguggcguagguagaugca

SEQ ID NO: 130272 - RNA, 18 nt, Human herpesvirus 3
auguuccaauggauggca

SEQ ID NO: 130273 - RNA, 14 nt, Human herpesvirus 3
auguuccacucuac

SEQ ID NO: 130274 - RNA, 14 nt, Human herpesvirus 3
auguuacgugaaug

SEQ ID NO: 130275 - RNA, 19 nt, Human herpesvirus 3
auguguauuacguuacuca

SEQ ID NO: 130276 - RNA, 17 nt, Human herpesvirus 3
auguguaguucauaguc

SEQ ID NO: 130277 - RNA, 19 nt, Human herpesvirus 3
auuaacaggauuugcuuau

SEQ ID NO: 130278 - RNA, 20 nt, Human herpesvirus 3
auuaacaggauuugcuuaua

SEQ ID NO: 130279 - RNA, 15 nt, Human herpesvirus 3
auuaacguugaacac

SEQ ID NO: 130280 - RNA, 15 nt, Human herpesvirus 3
auuaaugcaaccauc

SEQ ID NO: 130281 - RNA, 15 nt, Human herpesvirus 3
auguuuaaagacagc

SEQ ID NO: 130282 - RNA, 17 nt, Human herpesvirus 3
auguuuuuuaugucaga

SEQ ID NO: 130283 - RNA, 16 nt, Human herpesvirus 3
auuuuuccucuggggu

SEQ ID NO: 130284 - RNA, 20 nt, Human herpesvirus 3
caaaacauaagacguugcau

SEQ ID NO: 130285 - RNA, 17 nt, Human herpesvirus 3
auuuugcucguauauac

SEQ ID NO: 130286 - RNA, 22 nt, Human herpesvirus 3
auuuugcucguauauacauguu

SEQ ID NO: 130287 - RNA, 22 nt, Human herpesvirus 3
auuuugcgcgauauucucccaa

SEQ ID NO: 130288 - RNA, 16 nt, Human herpesvirus 3
auuuugucgggacaca

SEQ ID NO: 130289 - RNA, 22 nt, Human herpesvirus 3
auuuuuaauacgguucaugaca

SEQ ID NO: 130290 - RNA, 24 nt, Human herpesvirus 3
auuuuuaaucauuaagcauauuua

SEQ ID NO: 130291 - RNA, 22 nt, Human herpesvirus 3
auuuuuaaucauuauacaccac

SEQ ID NO: 130292 - RNA, 19 nt, Human herpesvirus 3
auuugacggugcccuggga

SEQ ID NO: 130293 - RNA, 22 nt, Human herpesvirus 3
auuugcgaugccguuuaugucc

SEQ ID NO: 130294 - RNA, 15 nt, Human herpesvirus 3
auuugcuaccagacg

SEQ ID NO: 130295 - RNA, 19 nt, Human herpesvirus 3
auuuacaaugacagugaua

SEQ ID NO: 130296 - RNA, 14 nt, Human herpesvirus 3
auuuaaacuaaaga

SEQ ID NO: 130297 - RNA, 14 nt, Human herpesvirus 3
auuuaaauguguag

SEQ ID NO: 130298 - RNA, 17 nt, Human herpesvirus 3
auuggcaucuuacuuga

SEQ ID NO: 130299 - RNA, 19 nt, Human herpesvirus 3
auuggcaucuuacuugaga

SEQ ID NO: 130300 - RNA, 20 nt, Human herpesvirus 3
auuggcgguauauuaauuaa

SEQ ID NO: 130301 - RNA, 15 nt, Human herpesvirus 3
auuggucaagaucca

SEQ ID NO: 130302 - RNA, 15 nt, Human herpesvirus 3
auucucccaaaacau

SEQ ID NO: 130303 - RNA, 17 nt, Human herpesvirus 3
auucuccuucuccagug

SEQ ID NO: 130304 - RNA, 15 nt, Human herpesvirus 3
auucuauuaacaaua

SEQ ID NO: 130305 - RNA, 14 nt, Human herpesvirus 3
auucgugugcaaua

SEQ ID NO: 130306 - RNA, 18 nt, Human herpesvirus 3
auucuaacaacucuggag

SEQ ID NO: 130307 - RNA, 14 nt, Human herpesvirus 3
auucuacagauuua

SEQ ID NO: 130308 - RNA, 23 nt, Human herpesvirus 3
auucuacagauuuauuuuuacau

SEQ ID NO: 130309 - RNA, 19 nt, Human herpesvirus 3
auucggcgcggaugcauuu

SEQ ID NO: 130310 - RNA, 21 nt, Human herpesvirus 3
auucggcgcggaugcauuuau

SEQ ID NO: 130311 - RNA, 19 nt, Human herpesvirus 3
auucgccuuuuacaugauc

SEQ ID NO: 130312 - RNA, 13 nt, Human herpesvirus 3
auucgcgaauaau

SEQ ID NO: 130313 - RNA, 22 nt, Human herpesvirus 3
auuagacggcggguuuugauaa

SEQ ID NO: 130314 - RNA, 17 nt, Human herpesvirus 3
auuacuaaagcuauuaa

SEQ ID NO: 130315 - RNA, 16 nt, Human herpesvirus 3
auuacuacauugaaca

SEQ ID NO: 130316 - RNA, 16 nt, Human herpesvirus 3
auuacccgauauugua

SEQ ID NO: 130317 - RNA, 16 nt, Human herpesvirus 3
auuacccuaucccagu

SEQ ID NO: 130318 - RNA, 20 nt, Human herpesvirus 3
auuaccgcccccguguuacu

SEQ ID NO: 130319 - RNA, 17 nt, Human herpesvirus 3
auuacgcguugugauau

SEQ ID NO: 130320 - RNA, 16 nt, Human herpesvirus 3
auuacauugcuuucaa

SEQ ID NO: 130321 - RNA, 20 nt, Human herpesvirus 3
auuaccaacuguauguaaau

SEQ ID NO: 130322 - RNA, 16 nt, Human herpesvirus 3
agcuauagauaauuca

SEQ ID NO: 130323 - RNA, 20 nt, Human herpesvirus 3
agcuauuaaugguacaagaa

SEQ ID NO: 130324 - RNA, 20 nt, Human herpesvirus 3
agcuauggacgcaacgcaga

SEQ ID NO: 130325 - RNA, 22 nt, Human herpesvirus 3
agcggugucguguuaaacaaac

SEQ ID NO: 130326 - RNA, 19 nt, Human herpesvirus 3
agcgccguuauagcagggg

SEQ ID NO: 130327 - RNA, 21 nt, Human herpesvirus 3
agcgcugucgucauauuacau

SEQ ID NO: 130328 - RNA, 11 nt, Human herpesvirus 3
agcggacacau

SEQ ID NO: 130329 - RNA, 16 nt, Human herpesvirus 3
agcgccaaaauggaug

SEQ ID NO: 130330 - RNA, 15 nt, Human herpesvirus 3
agccuugugaugggu

SEQ ID NO: 130331 - RNA, 14 nt, Human herpesvirus 3
agccauuuccauuu

SEQ ID NO: 130332 - RNA, 17 nt, Human herpesvirus 3
agcccgauaacauggaa

SEQ ID NO: 130333 - RNA, 21 nt, Human herpesvirus 3
agccuauaaauucuacaacau

SEQ ID NO: 130334 - RNA, 18 nt, Human herpesvirus 3
agaugauuaucaauacuu

SEQ ID NO: 130335 - RNA, 19 nt, Human herpesvirus 3
agauaagacccggugauca

SEQ ID NO: 130336 - RNA, 19 nt, Human herpesvirus 3
agauaauucaugguugugg

SEQ ID NO: 130337 - RNA, 14 nt, Human herpesvirus 3
agauacuaugguaa

SEQ ID NO: 130338 - RNA, 12 nt, Human herpesvirus 3
agauacguggaa

SEQ ID NO: 130339 - RNA, 19 nt, Human herpesvirus 3
agauacaggcaacugcaaa

SEQ ID NO: 130340 - RNA, 20 nt, Human herpesvirus 3
agauacuccacggggucuac

SEQ ID NO: 130341 - RNA, 16 nt, Human herpesvirus 3
aggcgaggacuccaca

SEQ ID NO: 130342 - RNA, 15 nt, Human herpesvirus 3
aggccggagugucca

SEQ ID NO: 130343 - RNA, 20 nt, Human herpesvirus 3
aggacaguugguuucaggcu

SEQ ID NO: 130344 - RNA, 19 nt, Human herpesvirus 3
aggaugugucggaaacccu

SEQ ID NO: 130345 - RNA, 16 nt, Human herpesvirus 3
agcucguuuuaugaga

SEQ ID NO: 130346 - RNA, 15 nt, Human herpesvirus 3
agcucuguaugcuga

SEQ ID NO: 130347 - RNA, 16 nt, Human herpesvirus 3
agcugccgucaaugca

SEQ ID NO: 130348 - RNA, 15 nt, Human herpesvirus 3
aguacguugcauaac

SEQ ID NO: 130349 - RNA, 16 nt, Human herpesvirus 3
aguacuacacccagua

SEQ ID NO: 130350 - RNA, 15 nt, Human herpesvirus 3
agucaaagucuucaa

SEQ ID NO: 130351 - RNA, 18 nt, Human herpesvirus 3
agucaaauucaacuaaug

SEQ ID NO: 130352 - RNA, 21 nt, Human herpesvirus 3
agucagauauuauuaacuuac

SEQ ID NO: 130353 - RNA, 21 nt, Human herpesvirus 3
agucacgccccauuacaacaa

SEQ ID NO: 130354 - RNA, 12 nt, Human herpesvirus 3
agucuacaauau

SEQ ID NO: 130355 - RNA, 21 nt, Human herpesvirus 3
aguccggacaauuaacacaga

SEQ ID NO: 130356 - RNA, 16 nt, Human herpesvirus 3
aguccaguggacagua

SEQ ID NO: 130357 - RNA, 19 nt, Human herpesvirus 3
agguccauuuaacaauccc

SEQ ID NO: 130358 - RNA, 15 nt, Human herpesvirus 3
aguaacuuaacaaac

SEQ ID NO: 130359 - RNA, 19 nt, Human herpesvirus 3
aguaacuuaacaaacauau

SEQ ID NO: 130360 - RNA, 20 nt, Human herpesvirus 3
aguaacuuaacaaacauaua

SEQ ID NO: 130361 - RNA, 10 nt, Human herpesvirus 3
aguacagggc

SEQ ID NO: 130362 - RNA, 14 nt, Human herpesvirus 3
aggucaacauacau

SEQ ID NO: 130363 - RNA, 21 nt, Human herpesvirus 3
agguauaugucaacauuuaca

SEQ ID NO: 130364 - RNA, 15 nt, Human herpesvirus 3
auaaaaaauaauucc

SEQ ID NO: 130365 - RNA, 15 nt, Human herpesvirus 3
aguuuuagcgguggu

SEQ ID NO: 130366 - RNA, 16 nt, Human herpesvirus 3
aguuuuuaaaguugca

SEQ ID NO: 130367 - RNA, 14 nt, Human herpesvirus 3
auaaacuguuuaaa

SEQ ID NO: 130368 - RNA, 15 nt, Human herpesvirus 3
auaaaacguuuuaaa

SEQ ID NO: 130369 - RNA, 16 nt, Human herpesvirus 3
auaaaaacacaaccag

SEQ ID NO: 130370 - RNA, 19 nt, Human herpesvirus 3
auaaaaacauacaccagaa

SEQ ID NO: 130371 - RNA, 18 nt, Human herpesvirus 3
agucuguggauuccauca

SEQ ID NO: 130372 - RNA, 15 nt, Human herpesvirus 3
agucugaccauuuac

SEQ ID NO: 130373 - RNA, 10 nt, Human herpesvirus 3
auaaagggaa

SEQ ID NO: 130374 - RNA, 17 nt, Human herpesvirus 3
auaacguugcggugaua

SEQ ID NO: 130375 - RNA, 16 nt, Human herpesvirus 3
auaaauguguauuaua

SEQ ID NO: 130376 - RNA, 15 nt, Human herpesvirus 3
auaaauguacuauaa

SEQ ID NO: 130377 - RNA, 17 nt, Human herpesvirus 3
auaaauguacuauaauu

SEQ ID NO: 130378 - RNA, 15 nt, Human herpesvirus 3
auaagacccggugau

SEQ ID NO: 130379 - RNA, 20 nt, Human herpesvirus 3
auaagcucuguaugcugaua

SEQ ID NO: 130380 - RNA, 16 nt, Human herpesvirus 3
auaauuauauccauaa

SEQ ID NO: 130381 - RNA, 19 nt, Human herpesvirus 3
auaauuccgguugugccaa

SEQ ID NO: 130382 - RNA, 17 nt, Human herpesvirus 3
auagacuguucuacuga

SEQ ID NO: 130383 - RNA, 18 nt, Human herpesvirus 3
auacgguucaugacauua

SEQ ID NO: 130384 - RNA, 23 nt, Human herpesvirus 3
auacuaagccucuguacaacaca

SEQ ID NO: 130385 - RNA, 15 nt, Human herpesvirus 3
auacacauugucaua

SEQ ID NO: 130386 - RNA, 17 nt, Human herpesvirus 3
auacacauugucauacu

SEQ ID NO: 130387 - RNA, 22 nt, Human herpesvirus 3
auacaaucgucuuuuaaauuca

SEQ ID NO: 130388 - RNA, 13 nt, Human herpesvirus 3
auacaacaugauc

SEQ ID NO: 130389 - RNA, 20 nt, Human herpesvirus 3
auacaacgggagcuuccgaa

SEQ ID NO: 130390 - RNA, 17 nt, Human herpesvirus 3
auacgccgacaugccug

SEQ ID NO: 130391 - RNA, 17 nt, Human herpesvirus 3
auaccuauuucaugcuu

SEQ ID NO: 130392 - RNA, 17 nt, Human herpesvirus 3
auacgaucagaugauaa

SEQ ID NO: 130393 - RNA, 12 nt, Human herpesvirus 3
auacgaugauuu

SEQ ID NO: 130394 - RNA, 17 nt, Human herpesvirus 3
auaccuuuuucaugcuu

SEQ ID NO: 130395 - RNA, 20 nt, Human herpesvirus 3
auaccuuuuucaugcuuguc

SEQ ID NO: 130396 - RNA, 15 nt, Human herpesvirus 3
auaccgacaguaaaa

SEQ ID NO: 130397 - RNA, 18 nt, Human herpesvirus 3
aucucuucauauguaauu

SEQ ID NO: 130398 - RNA, 15 nt, Human herpesvirus 3
aucugguaaauguua

SEQ ID NO: 130399 - RNA, 13 nt, Human herpesvirus 3
aucugcauuacag

SEQ ID NO: 130400 - RNA, 15 nt, Human herpesvirus 3
aucugcauuacagaa

SEQ ID NO: 130401 - RNA, 12 nt, Human herpesvirus 3
aucuauauacac

SEQ ID NO: 130402 - RNA, 20 nt, Human herpesvirus 3
aucucgacguccaaguccaa

SEQ ID NO: 130403 - RNA, 18 nt, Human herpesvirus 3
auccaauuaaagcccaca

SEQ ID NO: 130404 - RNA, 17 nt, Human herpesvirus 3
auccaacuguuuacaua

SEQ ID NO: 130405 - RNA, 15 nt, Human herpesvirus 3
auccggcaugcauug

SEQ ID NO: 130406 - RNA, 21 nt, Human herpesvirus 3
auccgucaacugcaacaugca

SEQ ID NO: 130407 - RNA, 16 nt, Human herpesvirus 3
auccacgguauuccaa

SEQ ID NO: 130408 - RNA, 16 nt, Human herpesvirus 3
auccguuauggaguuc

SEQ ID NO: 130409 - RNA, 20 nt, Human herpesvirus 3
auccuagaagcguuaccaca

SEQ ID NO: 130410 - RNA, 12 nt, Human herpesvirus 3
auaucucauacu

SEQ ID NO: 130411 - RNA, 13 nt, Human herpesvirus 3
auaucuguuacau

SEQ ID NO: 130412 - RNA, 16 nt, Human herpesvirus 3
auaucuguuacauuuc

SEQ ID NO: 130413 - RNA, 17 nt, Human herpesvirus 3
auaucuguuacauuucg

SEQ ID NO: 130414 - RNA, 15 nt, Human herpesvirus 3
auaugcgcauggaau

SEQ ID NO: 130415 - RNA, 14 nt, Human herpesvirus 3
auaugauacauaaa

SEQ ID NO: 130416 - RNA, 14 nt, Human herpesvirus 3
auauuggauuugaa

SEQ ID NO: 130417 - RNA, 18 nt, Human herpesvirus 3
auauuuauacaagcauaa

SEQ ID NO: 130418 - RNA, 20 nt, Human herpesvirus 3
auauuuauacaagcauaaca

SEQ ID NO: 130419 - RNA, 15 nt, Human herpesvirus 3
auauuuuacauacaa

SEQ ID NO: 130420 - RNA, 19 nt, Human herpesvirus 3
auauuuuugucuaccacua

SEQ ID NO: 130421 - RNA, 14 nt, Human herpesvirus 3
aucaguugggauaa

SEQ ID NO: 130422 - RNA, 13 nt, Human herpesvirus 3
aucauaagcgcag

SEQ ID NO: 130423 - RNA, 20 nt, Human herpesvirus 3
aucagaagauauaacccggu

SEQ ID NO: 130424 - RNA, 20 nt, Human herpesvirus 3
aucagagaagcuauacacaa

SEQ ID NO: 130425 - RNA, 11 nt, Human herpesvirus 3
uuauauacaaa

SEQ ID NO: 130426 - RNA, 18 nt, Human herpesvirus 3
uuauuuuuuccguauuaa

SEQ ID NO: 130427 - RNA, 20 nt, Human herpesvirus 3
uuauuucaauauuuauacaa

SEQ ID NO: 130428 - RNA, 16 nt, Human herpesvirus 3
uucaaaggacauuuau

SEQ ID NO: 130429 - RNA, 19 nt, Human herpesvirus 3
uuauaaucuccagugccag

SEQ ID NO: 130430 - RNA, 23 nt, Human herpesvirus 3
uuauaaauguguauuauauguca

SEQ ID NO: 130431 - RNA, 13 nt, Human herpesvirus 3
uuauaacugcuac

SEQ ID NO: 130432 - RNA, 19 nt, Human herpesvirus 3
uuauaacugcuacaacgga

SEQ ID NO: 130433 - RNA, 20 nt, Human herpesvirus 3
uuauaacuuuaaggaucgcu

SEQ ID NO: 130434 - RNA, 21 nt, Human herpesvirus 3
uuauaaaucguuuaucacugu

SEQ ID NO: 130435 - RNA, 20 nt, Human herpesvirus 3
uuacucuauaaguauggagu

SEQ ID NO: 130436 - RNA, 21 nt, Human herpesvirus 3
uuacacgggaaacuauuccaa

SEQ ID NO: 130437 - RNA, 15 nt, Human herpesvirus 3
uuacugugaauguuu

SEQ ID NO: 130438 - RNA, 22 nt, Human herpesvirus 3
uuaagaaucuccuaacuauaag

SEQ ID NO: 130439 - RNA, 20 nt, Human herpesvirus 3
uuaauugguuggucggucaa

SEQ ID NO: 130440 - RNA, 15 nt, Human herpesvirus 3
uuaauuguacccauc

SEQ ID NO: 130441 - RNA, 16 nt, Human herpesvirus 3
uuaauuuuauauacaa

SEQ ID NO: 130442 - RNA, 19 nt, Human herpesvirus 3
uuacaacccguggugaauu

SEQ ID NO: 130443 - RNA, 18 nt, Human herpesvirus 3
uguuacgugaaugggauc

SEQ ID NO: 130444 - RNA, 19 nt, Human herpesvirus 3
uguuacuuggaaacaccca

SEQ ID NO: 130445 - RNA, 17 nt, Human herpesvirus 3
uguuagggauacaagcu

SEQ ID NO: 130446 - RNA, 14 nt, Human herpesvirus 3
uguuaaacccugau

SEQ ID NO: 130447 - RNA, 17 nt, Human herpesvirus 3
uguuaacgucgacguua

SEQ ID NO: 130448 - RNA, 20 nt, Human herpesvirus 3
uguguuuuaauuccaauauu

SEQ ID NO: 130449 - RNA, 15 nt, Human herpesvirus 3
uguucugcauaagcu

SEQ ID NO: 130450 - RNA, 13 nt, Human herpesvirus 3
uguucuauuuccc

SEQ ID NO: 130451 - RNA, 18 nt, Human herpesvirus 3
uguucuauuucccaacgc

SEQ ID NO: 130452 - RNA, 21 nt, Human herpesvirus 3
uuaacaggauuugcuuauacu

SEQ ID NO: 130453 - RNA, 13 nt, Human herpesvirus 3
uuaacaaacauau

SEQ ID NO: 130454 - RNA, 22 nt, Human herpesvirus 3
uuaacacgacaccgcuuaacaa

SEQ ID NO: 130455 - RNA, 17 nt, Human herpesvirus 3
uguuggcgcaugccauu

SEQ ID NO: 130456 - RNA, 19 nt, Human herpesvirus 3
uguugcgguuguuguccag

SEQ ID NO: 130457 - RNA, 18 nt, Human herpesvirus 3
uguuguaaagcagacuga

SEQ ID NO: 130458 - RNA, 23 nt, Human herpesvirus 3
uguuuguuuaacacgacaccgcu

SEQ ID NO: 130459 - RNA, 15 nt, Human herpesvirus 3
uguuuugaauuauua

SEQ ID NO: 130460 - RNA, 12 nt, Human herpesvirus 3
uuaaaaaagccg

SEQ ID NO: 130461 - RNA, 18 nt, Human herpesvirus 3
uuaaaaauauuacgagac

SEQ ID NO: 130462 - RNA, 16 nt, Human herpesvirus 3
uguguaccgccauuau

SEQ ID NO: 130463 - RNA, 14 nt, Human herpesvirus 3
ugugggacagcuaa

SEQ ID NO: 130464 - RNA, 15 nt, Human herpesvirus 3
uguggacgcauuuga

SEQ ID NO: 130465 - RNA, 12 nt, Human herpesvirus 3
uguggauuuauc

SEQ ID NO: 130466 - RNA, 21 nt, Human herpesvirus 3
ugugcccgcauaagauguacu

SEQ ID NO: 130467 - RNA, 14 nt, Human herpesvirus 3
ugugcaucccccau

SEQ ID NO: 130468 - RNA, 13 nt, Human herpesvirus 3
ugugacguuauau

SEQ ID NO: 130469 - RNA, 15 nt, Human herpesvirus 3
ugugauaugagggga

SEQ ID NO: 130470 - RNA, 15 nt, Human herpesvirus 3
uguaccucuaccgca

SEQ ID NO: 130471 - RNA, 22 nt, Human herpesvirus 3
ugucagguuauccaacuguuua

SEQ ID NO: 130472 - RNA, 18 nt, Human herpesvirus 3
uguaauucgugugcaaua

SEQ ID NO: 130473 - RNA, 21 nt, Human herpesvirus 3
uguaauucgugugcaauaacc

SEQ ID NO: 130474 - RNA, 18 nt, Human herpesvirus 3
ugucccauuuugugauuu

SEQ ID NO: 130475 - RNA, 16 nt, Human herpesvirus 3
uguccgacaugcacug

SEQ ID NO: 130476 - RNA, 18 nt, Human herpesvirus 3
uguccccucugguauauu

SEQ ID NO: 130477 - RNA, 18 nt, Human herpesvirus 3
uggauccggcaugcauug

SEQ ID NO: 130478 - RNA, 20 nt, Human herpesvirus 3
uggacagugcuugacugugc

SEQ ID NO: 130479 - RNA, 21 nt, Human herpesvirus 3
uggugcgacaaaggcauuugu

SEQ ID NO: 130480 - RNA, 23 nt, Human herpesvirus 3
uggugauucaagugagguguccu

SEQ ID NO: 130481 - RNA, 20 nt, Human herpesvirus 3
uggugcacucuaccaaaaaa

SEQ ID NO: 130482 - RNA, 11 nt, Human herpesvirus 3
ugguguuacau

SEQ ID NO: 130483 - RNA, 15 nt, Human herpesvirus 3
ugguauauuuguaug

SEQ ID NO: 130484 - RNA, 20 nt, Human herpesvirus 3
uggucuuccuugggcuguua

SEQ ID NO: 130485 - RNA, 22 nt, Human herpesvirus 3
ugccgaaauuaccguacaacaa

SEQ ID NO: 130486 - RNA, 23 nt, Human herpesvirus 3
ugccgaaauuaccguacaacaag

SEQ ID NO: 130487 - RNA, 22 nt, Human herpesvirus 3
ugccgagacugacccuaugaca

SEQ ID NO: 130488 - RNA, 19 nt, Human herpesvirus 3
ugcgaagcugccgucaaug

SEQ ID NO: 130489 - RNA, 21 nt, Human herpesvirus 3
ugcgaagcugccgucaaugca

SEQ ID NO: 130490 - RNA, 23 nt, Human herpesvirus 3
ugcgaagcugccgucaaugcaac

SEQ ID NO: 130491 - RNA, 14 nt, Human herpesvirus 3
ugccauuugagaua

SEQ ID NO: 130492 - RNA, 22 nt, Human herpesvirus 3
ugccaucuuccacgggucaugc

SEQ ID NO: 130493 - RNA, 13 nt, Human herpesvirus 3
ugccacauuuacc

SEQ ID NO: 130494 - RNA, 19 nt, Human herpesvirus 3
ugcacugaaccacaaccaa

SEQ ID NO: 130495 - RNA, 17 nt, Human herpesvirus 3
ugcacaacaaaagcuau

SEQ ID NO: 130496 - RNA, 22 nt, Human herpesvirus 3
ugcacaauccacagauuccucc

SEQ ID NO: 130497 - RNA, 13 nt, Human herpesvirus 3
ugcauaagcucug

SEQ ID NO: 130498 - RNA, 14 nt, Human herpesvirus 3
ugcauauccagcaa

SEQ ID NO: 130499 - RNA, 17 nt, Human herpesvirus 3
ugcauauccagcaaugu

SEQ ID NO: 130500 - RNA, 17 nt, Human herpesvirus 3
ugcucguauauacaugu

SEQ ID NO: 130501 - RNA, 22 nt, Human herpesvirus 3
ugcuccugaagacuccaguaua

SEQ ID NO: 130502 - RNA, 16 nt, Human herpesvirus 3
ugcguuucugucgaug

SEQ ID NO: 130503 - RNA, 19 nt, Human herpesvirus 3
ugcgucauuuauuaccaca

SEQ ID NO: 130504 - RNA, 19 nt, Human herpesvirus 3
ugcgggcuugcuguucuca

SEQ ID NO: 130505 - RNA, 14 nt, Human herpesvirus 3
ugcgaugcauuaac

SEQ ID NO: 130506 - RNA, 21 nt, Human herpesvirus 3
ugcgaauucuuagaaaagcca

SEQ ID NO: 130507 - RNA, 15 nt, Human herpesvirus 3
ugcgauguauacugg

SEQ ID NO: 130508 - RNA, 16 nt, Human herpesvirus 3
ugcgcaaaauguuaaa

SEQ ID NO: 130509 - RNA, 20 nt, Human herpesvirus 3
ugcuuuauuaccaacuguau

SEQ ID NO: 130510 - RNA, 17 nt, Human herpesvirus 3
ugcuugucaaaacauac

SEQ ID NO: 130511 - RNA, 15 nt, Human herpesvirus 3
uggaauuaaugcaac

SEQ ID NO: 130512 - RNA, 16 nt, Human herpesvirus 3
uggaauuaauggagua

SEQ ID NO: 130513 - RNA, 13 nt, Human herpesvirus 3
ugcuugacugugc

SEQ ID NO: 130514 - RNA, 17 nt, Human herpesvirus 3
ugcuuguaaaacauauc

SEQ ID NO: 130515 - RNA, 18 nt, Human herpesvirus 3
ugcuuguaaaacauauca

SEQ ID NO: 130516 - RNA, 20 nt, Human herpesvirus 3
ugcuuguaaaacauaucaau

SEQ ID NO: 130517 - RNA, 22 nt, Human herpesvirus 3
ugagggugaccggcgggguccc

SEQ ID NO: 130518 - RNA, 18 nt, Human herpesvirus 3
ugagggauggaugucuua

SEQ ID NO: 130519 - RNA, 16 nt, Human herpesvirus 3
ugauacacauaugcac

SEQ ID NO: 130520 - RNA, 19 nt, Human herpesvirus 3
ugaaaaccuggguguguua

SEQ ID NO: 130521 - RNA, 14 nt, Human herpesvirus 3
ucuuuuacaacgua

SEQ ID NO: 130522 - RNA, 18 nt, Human herpesvirus 3
ugagccguauaacccacu

SEQ ID NO: 130523 - RNA, 23 nt, Human herpesvirus 3
ugagauacacauggauaggucau

SEQ ID NO: 130524 - RNA, 16 nt, Human herpesvirus 3
ugagauguugggucag

SEQ ID NO: 130525 - RNA, 21 nt, Human herpesvirus 3
ugauucaagugagguguccug

SEQ ID NO: 130526 - RNA, 18 nt, Human herpesvirus 3
ugauuaucaauacuugga

SEQ ID NO: 130527 - RNA, 12 nt, Human herpesvirus 3
ugauuugcccac

SEQ ID NO: 130528 - RNA, 16 nt, Human herpesvirus 3
ugcaacaugcauggaa

SEQ ID NO: 130529 - RNA, 13 nt, Human herpesvirus 3
ugcaaccacggug

SEQ ID NO: 130530 - RNA, 19 nt, Human herpesvirus 3
ugaucguccuucaacacac

SEQ ID NO: 130531 - RNA, 16 nt, Human herpesvirus 3
ugaucgcucguauaac

SEQ ID NO: 130532 - RNA, 20 nt, Human herpesvirus 3
ugaucaccgggucuuaucua

SEQ ID NO: 130533 - RNA, 18 nt, Human herpesvirus 3
ugauauaagguguuaaua

SEQ ID NO: 130534 - RNA, 17 nt, Human herpesvirus 3
ugauagcgccaaaaugg

SEQ ID NO: 130535 - RNA, 22 nt, Human herpesvirus 3
ugauguucccccggcguggcaa

SEQ ID NO: 130536 - RNA, 13 nt, Human herpesvirus 3
ugaugaaaaccug

SEQ ID NO: 130537 - RNA, 15 nt, Human herpesvirus 3
ugaugaaaaccuggg

SEQ ID NO: 130538 - RNA, 22 nt, Human herpesvirus 3
aaggaaaugccuuaaacaucca

SEQ ID NO: 130539 - RNA, 21 nt, Human herpesvirus 3
aagguguauuuuauuuaguga

SEQ ID NO: 130540 - RNA, 23 nt, Human herpesvirus 3
aagguauuuuuuuagaauacaau

SEQ ID NO: 130541 - RNA, 15 nt, Human herpesvirus 3
aagguguuucagugg

SEQ ID NO: 130542 - RNA, 20 nt, Human herpesvirus 3
aagguuuauuuacuuuacaa

SEQ ID NO: 130543 - RNA, 18 nt, Human herpesvirus 3
aagcccacacgcggguga

SEQ ID NO: 130544 - RNA, 18 nt, Human herpesvirus 3
aagcucuguaugcugaua

SEQ ID NO: 130545 - RNA, 15 nt, Human herpesvirus 3
aauaguuuugguaca

SEQ ID NO: 130546 - RNA, 23 nt, Human herpesvirus 3
aauagugacaaacguguguauaa

SEQ ID NO: 130547 - RNA, 22 nt, Human herpesvirus 3
aauagagcgccuaaauaugcua

SEQ ID NO: 130548 - RNA, 16 nt, Human herpesvirus 3
aauaaaaugauauaca

SEQ ID NO: 130549 - RNA, 14 nt, Human herpesvirus 3
aagugcauauccag

SEQ ID NO: 130550 - RNA, 18 nt, Human herpesvirus 3
aauaaaaagucacuauaa

SEQ ID NO: 130551 - RNA, 22 nt, Human herpesvirus 3
aauaaacgaugacacaacccgc

SEQ ID NO: 130552 - RNA, 22 nt, Human herpesvirus 3
aauaaaagguuuauuuacuuua

SEQ ID NO: 130553 - RNA, 17 nt, Human herpesvirus 3
aauccgguauacaugaa

SEQ ID NO: 130554 - RNA, 22 nt, Human herpesvirus 3
aauccuagaagcguuaccacag

SEQ ID NO: 130555 - RNA, 14 nt, Human herpesvirus 3
aauccuuaucuugc

SEQ ID NO: 130556 - RNA, 15 nt, Human herpesvirus 3
aauccuuaucuugca

SEQ ID NO: 130557 - RNA, 16 nt, Human herpesvirus 3
aauccuuaucuugcau

SEQ ID NO: 130558 - RNA, 22 nt, Human herpesvirus 3
aauccgucaacugcaacaugca

SEQ ID NO: 130559 - RNA, 20 nt, Human herpesvirus 3
aaucgcguuguuuccugugu

SEQ ID NO: 130560 - RNA, 20 nt, Human herpesvirus 3
aaucguugcggguacaauac

SEQ ID NO: 130561 - RNA, 17 nt, Human herpesvirus 3
aaucaauccaaggaugu

SEQ ID NO: 130562 - RNA, 15 nt, Human herpesvirus 3
aauauaaauaacaua

SEQ ID NO: 130563 - RNA, 13 nt, Human herpesvirus 3
aacucucuuauau

SEQ ID NO: 130564 - RNA, 15 nt, Human herpesvirus 3
aacucuuuucccaaa

SEQ ID NO: 130565 - RNA, 19 nt, Human herpesvirus 3
aacuuaacaaacauauaau

SEQ ID NO: 130566 - RNA, 17 nt, Human herpesvirus 3
aacucaugugggaaaua

SEQ ID NO: 130567 - RNA, 18 nt, Human herpesvirus 3
aacucgccuccacugcau

SEQ ID NO: 130568 - RNA, 21 nt, Human herpesvirus 3
aacguuuuaguaaaauaccau

SEQ ID NO: 130569 - RNA, 15 nt, Human herpesvirus 3
aacgucauccaugcu

SEQ ID NO: 130570 - RNA, 19 nt, Human herpesvirus 3
aacguaugggcguguucau

SEQ ID NO: 130571 - RNA, 19 nt, Human herpesvirus 3
aacguauucuauuaacaau

SEQ ID NO: 130572 - RNA, 16 nt, Human herpesvirus 3
aacguauucucuacaa

SEQ ID NO: 130573 - RNA, 17 nt, Human herpesvirus 3
aacggguuuugggugca

SEQ ID NO: 130574 - RNA, 19 nt, Human herpesvirus 3
aacggaagaugaacuaaua

SEQ ID NO: 130575 - RNA, 15 nt, Human herpesvirus 3
aacgcuggcauuucc

SEQ ID NO: 130576 - RNA, 15 nt, Human herpesvirus 3
aacgcguacgugccu

SEQ ID NO: 130577 - RNA, 19 nt, Human herpesvirus 3
aacggucgcguguacgaaa

SEQ ID NO: 130578 - RNA, 20 nt, Human herpesvirus 3
uuuuuucccguccccaaaug

SEQ ID NO: 130579 - RNA, 15 nt, Human herpesvirus 3
aacauccuaguacag

SEQ ID NO: 130580 - RNA, 18 nt, Human herpesvirus 3
aacauccuaguacagaua

SEQ ID NO: 130581 - RNA, 15 nt, Human herpesvirus 3
aacgaucacaacaga

SEQ ID NO: 130582 - RNA, 16 nt, Human herpesvirus 3
aacgauuuuacagaaa

SEQ ID NO: 130583 - RNA, 17 nt, Human herpesvirus 3
aacgagagauccaauac

SEQ ID NO: 130584 - RNA, 21 nt, Human herpesvirus 3
aagaguuagcauccaaauuaa

SEQ ID NO: 130585 - RNA, 16 nt, Human herpesvirus 3
aagauaggguguauac

SEQ ID NO: 130586 - RNA, 17 nt, Human herpesvirus 3
aagaugauuaucaauac

SEQ ID NO: 130587 - RNA, 16 nt, Human herpesvirus 3
aagacuaacauuuauc

SEQ ID NO: 130588 - RNA, 16 nt, Human herpesvirus 3
aagacguccacacagc

SEQ ID NO: 130589 - RNA, 13 nt, Human herpesvirus 3
aagagaacuguga

SEQ ID NO: 130590 - RNA, 23 nt, Human herpesvirus 3
aagacuguuggguggugccauuc

SEQ ID NO: 130591 - RNA, 16 nt, Human herpesvirus 3
aagacuccaguauacc

SEQ ID NO: 130592 - RNA, 16 nt, Human herpesvirus 3
aacuuaauacagaguc

SEQ ID NO: 130593 - RNA, 15 nt, Human herpesvirus 3
uucacuggacuuuac

SEQ ID NO: 130594 - RNA, 20 nt, Human herpesvirus 3
uucacuggacuuuaccggau

SEQ ID NO: 130595 - RNA, 11 nt, Human herpesvirus 3
uucaacuaaug

SEQ ID NO: 130596 - RNA, 18 nt, Human herpesvirus 3
uucagaacgauuuuacag

SEQ ID NO: 130597 - RNA, 16 nt, Human herpesvirus 3
uucagcggacgcugcu

SEQ ID NO: 130598 - RNA, 16 nt, Human herpesvirus 3
uucagcuuacagucca

SEQ ID NO: 130599 - RNA, 13 nt, Human herpesvirus 3
uugaagacuuuga

SEQ ID NO: 130600 - RNA, 20 nt, Human herpesvirus 3
uugaagacuuugacuuugau

SEQ ID NO: 130601 - RNA, 15 nt, Human herpesvirus 3
uugaaccaaauccac

SEQ ID NO: 130602 - RNA, 15 nt, Human herpesvirus 3
uugaauggugauuca

SEQ ID NO: 130603 - RNA, 21 nt, Human herpesvirus 3
uugaaggguggaauuguggag

SEQ ID NO: 130604 - RNA, 13 nt, Human herpesvirus 3
aacacacccauac

SEQ ID NO: 130605 - RNA, 15 nt, Human herpesvirus 3
uugauaaagggaauc

SEQ ID NO: 130606 - RNA, 11 nt, Human herpesvirus 3
uugauggaugu

SEQ ID NO: 130607 - RNA, 14 nt, Human herpesvirus 3
uugacaacauuuaa

SEQ ID NO: 130608 - RNA, 14 nt, Human herpesvirus 3
aacacaucuacugu

SEQ ID NO: 130609 - RNA, 15 nt, Human herpesvirus 3
aacacauuacguucu

SEQ ID NO: 130610 - RNA, 21 nt, Human herpesvirus 3
aacaccuguuuacacuugaau

SEQ ID NO: 130611 - RNA, 21 nt, Human herpesvirus 3
aacacccauacauauguucca

SEQ ID NO: 130612 - RNA, 18 nt, Human herpesvirus 3
aacaccgccccaccauca

SEQ ID NO: 130613 - RNA, 18 nt, Human herpesvirus 3
aacacucuacgcauuuac

SEQ ID NO: 130614 - RNA, 19 nt, Human herpesvirus 3
aacacgccgcaacaaccca

SEQ ID NO: 130615 - RNA, 13 nt, Human herpesvirus 3
aacacguaauugu

SEQ ID NO: 130616 - RNA, 15 nt, Human herpesvirus 3
aacacguaauuguca

SEQ ID NO: 130617 - RNA, 19 nt, Human herpesvirus 3
uugccaucuuccacggguc

SEQ ID NO: 130618 - RNA, 13 nt, Human herpesvirus 3
uugcagcguacaa

SEQ ID NO: 130619 - RNA, 22 nt, Human herpesvirus 3
uugcaucguggaccguguucga

SEQ ID NO: 130620 - RNA, 20 nt, Human herpesvirus 3
uugcuuuaauacgacuuuua

SEQ ID NO: 130621 - RNA, 15 nt, Human herpesvirus 3
uugcuuucaaaccaa

SEQ ID NO: 130622 - RNA, 18 nt, Human herpesvirus 3
uuggcaucuuacuugaga

SEQ ID NO: 130623 - RNA, 13 nt, Human herpesvirus 3
uugcuguucucau

SEQ ID NO: 130624 - RNA, 14 nt, Human herpesvirus 3
uugcuguuguccaa

SEQ ID NO: 130625 - RNA, 19 nt, Human herpesvirus 3
uugcggaccccagagcauu

SEQ ID NO: 130626 - RNA, 15 nt, Human herpesvirus 3
uugcggaucccaaaa

SEQ ID NO: 130627 - RNA, 16 nt, Human herpesvirus 3
uugcgguuguugucca

SEQ ID NO: 130628 - RNA, 14 nt, Human herpesvirus 3
uugcgugauauuau

SEQ ID NO: 130629 - RNA, 22 nt, Human herpesvirus 3
uugcgaauucuuagaaaagcca

SEQ ID NO: 130630 - RNA, 13 nt, Human herpesvirus 3
uugcgacauaccg

SEQ ID NO: 130631 - RNA, 17 nt, Human herpesvirus 3
uuucucgugggacuaca

SEQ ID NO: 130632 - RNA, 15 nt, Human herpesvirus 3
uuuggaaacacuccc

SEQ ID NO: 130633 - RNA, 18 nt, Human herpesvirus 3
uuucguuuugguguuaca

SEQ ID NO: 130634 - RNA, 21 nt, Human herpesvirus 3
uuucaauauuuauacaagcau

SEQ ID NO: 130635 - RNA, 13 nt, Human herpesvirus 3
uuuuauuacauuc

SEQ ID NO: 130636 - RNA, 15 nt, Human herpesvirus 3
uuuuauuuuaaggau

SEQ ID NO: 130637 - RNA, 13 nt, Human herpesvirus 3
uuuuaucauugaa

SEQ ID NO: 130638 - RNA, 16 nt, Human herpesvirus 3
uuuuaccuuauguguu

SEQ ID NO: 130639 - RNA, 20 nt, Human herpesvirus 3
uuugucgcucuaaugcagug

SEQ ID NO: 130640 - RNA, 21 nt, Human herpesvirus 3
uuuguaaagggguuguuauca

SEQ ID NO: 130641 - RNA, 15 nt, Human herpesvirus 3
aacaggauuugcuua

SEQ ID NO: 130642 - RNA, 15 nt, Human herpesvirus 3
uuuucaugcuuguca

SEQ ID NO: 130643 - RNA, 22 nt, Human herpesvirus 3
uugggggcgggguagacugugg

SEQ ID NO: 130644 - RNA, 22 nt, Human herpesvirus 3
uugggacuccaagggacccgca

SEQ ID NO: 130645 - RNA, 15 nt, Human herpesvirus 3
uuggcgcaugccauu

SEQ ID NO: 130646 - RNA, 14 nt, Human herpesvirus 3
uuggugauguagca

SEQ ID NO: 130647 - RNA, 22 nt, Human herpesvirus 3
uuguaaaaacggauauuaacac

SEQ ID NO: 130648 - RNA, 20 nt, Human herpesvirus 3
uuguaaaacauaucaauuua

SEQ ID NO: 130649 - RNA, 18 nt, Human herpesvirus 3
uuguaccucuaccgcacc

SEQ ID NO: 130650 - RNA, 17 nt, Human herpesvirus 3
uuguggaguuucccaua

SEQ ID NO: 130651 - RNA, 19 nt, Human herpesvirus 3
uuguggauccggcaugcau

SEQ ID NO: 130652 - RNA, 19 nt, Human herpesvirus 3
uuguauuguaguacagggc

SEQ ID NO: 130653 - RNA, 14 nt, Human herpesvirus 3
uugucaaaacauac

SEQ ID NO: 130654 - RNA, 16 nt, Human herpesvirus 3
uugugucggucucucc

SEQ ID NO: 130655 - RNA, 19 nt, Human herpesvirus 3
uuguucugggaacacguaa

SEQ ID NO: 130656 - RNA, 19 nt, Human herpesvirus 3
uuguuuaacacgacaccgc

SEQ ID NO: 130657 - RNA, 14 nt, Human herpesvirus 3
uuuauuuacuuuac

SEQ ID NO: 130658 - RNA, 21 nt, Human herpesvirus 3
uuucaauaaauguacuauaau

SEQ ID NO: 130659 - RNA, 16 nt, Human herpesvirus 3
uuucaaaccaauaucu

SEQ ID NO: 130660 - RNA, 13 nt, Human herpesvirus 3
uuuauguccuggg

SEQ ID NO: 130661 - RNA, 13 nt, Human herpesvirus 3
uuuauuaucccag

SEQ ID NO: 130662 - RNA, 14 nt, Human herpesvirus 3
uuuacgucugccca

SEQ ID NO: 130663 - RNA, 14 nt, Human herpesvirus 3
uuuaccaguguaug

SEQ ID NO: 130664 - RNA, 18 nt, Human herpesvirus 3
uacgcaugugcugucgua

SEQ ID NO: 130665 - RNA, 22 nt, Human herpesvirus 3
uacgcggguuuuuguaaagggg

SEQ ID NO: 130666 - RNA, 15 nt, Human herpesvirus 3
uaccuauuucaugcu

SEQ ID NO: 130667 - RNA, 23 nt, Human herpesvirus 3
uaccucggccgcuacccgaaagc

SEQ ID NO: 130668 - RNA, 19 nt, Human herpesvirus 3
uacauugcuuucaaaccaa

SEQ ID NO: 130669 - RNA, 21 nt, Human herpesvirus 3
uacauugcuuucaaaccaaua

SEQ ID NO: 130670 - RNA, 23 nt, Human herpesvirus 3
uacauuagaguguuuaacaacca

SEQ ID NO: 130671 - RNA, 14 nt, Human herpesvirus 3
uacauugaacaaga

SEQ ID NO: 130672 - RNA, 16 nt, Human herpesvirus 3
uacaugauccacguaa

SEQ ID NO: 130673 - RNA, 21 nt, Human herpesvirus 3
uacgcuuuuauccgguguaug

SEQ ID NO: 130674 - RNA, 13 nt, Human herpesvirus 3
uacuauuugugaa

SEQ ID NO: 130675 - RNA, 21 nt, Human herpesvirus 3
uacguuauccguuauggaguu

SEQ ID NO: 130676 - RNA, 20 nt, Human herpesvirus 3
aacaacucgugucucuggaa

SEQ ID NO: 130677 - RNA, 20 nt, Human herpesvirus 3
aacaacgcguacgugccuag

SEQ ID NO: 130678 - RNA, 23 nt, Human herpesvirus 3
uacuccuuuaaauuuuacuuaau

SEQ ID NO: 130679 - RNA, 17 nt, Human herpesvirus 3
uaauaauuauauccaua

SEQ ID NO: 130680 - RNA, 14 nt, Human herpesvirus 3
uaauacaugcuuug

SEQ ID NO: 130681 - RNA, 21 nt, Human herpesvirus 3
uaauacaugcuuugguuauac

SEQ ID NO: 130682 - RNA, 14 nt, Human herpesvirus 3
uaaguggggguuua

SEQ ID NO: 130683 - RNA, 17 nt, Human herpesvirus 3
uaaguuuuugugucuag

SEQ ID NO: 130684 - RNA, 19 nt, Human herpesvirus 3
uaauaaaauauuguauaaa

SEQ ID NO: 130685 - RNA, 14 nt, Human herpesvirus 3
uaaguccuguaaca

SEQ ID NO: 130686 - RNA, 14 nt, Human herpesvirus 3
uaagugacuauauu

SEQ ID NO: 130687 - RNA, 16 nt, Human herpesvirus 3
uaauuccgccuauagc

SEQ ID NO: 130688 - RNA, 17 nt, Human herpesvirus 3
uaauuccgguugugcca

SEQ ID NO: 130689 - RNA, 23 nt, Human herpesvirus 3
uaauucggcgcggaugcauuuau

SEQ ID NO: 130690 - RNA, 16 nt, Human herpesvirus 3
uaauucgugugcaaua

SEQ ID NO: 130691 - RNA, 23 nt, Human herpesvirus 3
uaauucgugugcaauaaccucag

SEQ ID NO: 130692 - RNA, 22 nt, Human herpesvirus 3
uacaacauuggcggaagauaca

SEQ ID NO: 130693 - RNA, 13 nt, Human herpesvirus 3
uaauuauauccau

SEQ ID NO: 130694 - RNA, 19 nt, Human herpesvirus 3
uacagacauacacugguaa

SEQ ID NO: 130695 - RNA, 17 nt, Human herpesvirus 3
uacaauugucuguauau

SEQ ID NO: 130696 - RNA, 22 nt, Human herpesvirus 3
uacaaugcgccguauaugguau

SEQ ID NO: 130697 - RNA, 20 nt, Human herpesvirus 3
uacaauauuguagaacuaac

SEQ ID NO: 130698 - RNA, 16 nt, Human herpesvirus 3
uacaauacguaaaugu

SEQ ID NO: 130699 - RNA, 16 nt, Human herpesvirus 3
uacagcugccgggaaa

SEQ ID NO: 130700 - RNA, 17 nt, Human herpesvirus 3
uacagcugccgggaaaa

SEQ ID NO: 130701 - RNA, 13 nt, Human herpesvirus 3
uacauacaaguga

SEQ ID NO: 130702 - RNA, 16 nt, Human herpesvirus 3
uacauauguuccacuc

SEQ ID NO: 130703 - RNA, 21 nt, Human herpesvirus 3
guugccgcauuagacaaccuu

SEQ ID NO: 130704 - RNA, 15 nt, Human herpesvirus 3
guugcgaauguaaua

SEQ ID NO: 130705 - RNA, 19 nt, Human herpesvirus 3
guugccccgguucggugau

SEQ ID NO: 130706 - RNA, 14 nt, Human herpesvirus 3
uaaaagccguuaaa

SEQ ID NO: 130707 - RNA, 20 nt, Human herpesvirus 3
uaaaagacagucgugguuug

SEQ ID NO: 130708 - RNA, 21 nt, Human herpesvirus 3
uaaaagguuuauuuacuuuac

SEQ ID NO: 130709 - RNA, 17 nt, Human herpesvirus 3
uaaaaguacuacugcug

SEQ ID NO: 130710 - RNA, 16 nt, Human herpesvirus 3
guucuucacuggacuu

SEQ ID NO: 130711 - RNA, 19 nt, Human herpesvirus 3
guucucguacguccaugac

SEQ ID NO: 130712 - RNA, 12 nt, Human herpesvirus 3
guucuacugacu

SEQ ID NO: 130713 - RNA, 13 nt, Human herpesvirus 3
guucuacugacuu

SEQ ID NO: 130714 - RNA, 17 nt, Human herpesvirus 3
uaaagguccauuuaaca

SEQ ID NO: 130715 - RNA, 15 nt, Human herpesvirus 3
uaaagguuuauuccg

SEQ ID NO: 130716 - RNA, 15 nt, Human herpesvirus 3
uaaauaacaugucac

SEQ ID NO: 130717 - RNA, 13 nt, Human herpesvirus 3
uaaauaugcuaua

SEQ ID NO: 130718 - RNA, 15 nt, Human herpesvirus 3
uaaauaugcuauaua

SEQ ID NO: 130719 - RNA, 23 nt, Human herpesvirus 3
uaaauaugcuauauaacgccucc

SEQ ID NO: 130720 - RNA, 23 nt, Human herpesvirus 3
uaaauaguaccacgugguauuau

SEQ ID NO: 130721 - RNA, 13 nt, Human herpesvirus 3
uaaaaguuacacu

SEQ ID NO: 130722 - RNA, 13 nt, Human herpesvirus 3
uaaacgcauuaau

SEQ ID NO: 130723 - RNA, 22 nt, Human herpesvirus 3
uaaacguucuaauaaaaacauc

SEQ ID NO: 130724 - RNA, 23 nt, Human herpesvirus 3
uaagacccaaugucccaaggaua

SEQ ID NO: 130725 - RNA, 17 nt, Human herpesvirus 3
uaagaagugcauaucca

SEQ ID NO: 130726 - RNA, 19 nt, Human herpesvirus 3
uaagacguccacacagccu

SEQ ID NO: 130727 - RNA, 16 nt, Human herpesvirus 3
uaagacguugcauaug

SEQ ID NO: 130728 - RNA, 17 nt, Human herpesvirus 3
uaacuugggucagacag

SEQ ID NO: 130729 - RNA, 13 nt, Human herpesvirus 3
uaacuuaacaaac

SEQ ID NO: 130730 - RNA, 17 nt, Human herpesvirus 3
uaacuuaacaaacauau

SEQ ID NO: 130731 - RNA, 21 nt, Human herpesvirus 3
uaaccugucgagcaugugcaa

SEQ ID NO: 130732 - RNA, 14 nt, Human herpesvirus 3
uaacauaaccaaua

SEQ ID NO: 130733 - RNA, 21 nt, Human herpesvirus 3
uaacauaccccaggccuugaa

SEQ ID NO: 130734 - RNA, 20 nt, Human herpesvirus 3
uaacgucgaccggugacuac

SEQ ID NO: 130735 - RNA, 13 nt, Human herpesvirus 3
uaaauauuacccc

SEQ ID NO: 130736 - RNA, 23 nt, Human herpesvirus 3
uaaauauuaccccagagauugug

SEQ ID NO: 130737 - RNA, 16 nt, Human herpesvirus 3
uaacaacucucuuaua

SEQ ID NO: 130738 - RNA, 21 nt, Human herpesvirus 3
uaacaauugagauacacaugg

SEQ ID NO: 130739 - RNA, 19 nt, Human herpesvirus 3
uaacagcccgauaacaugg

SEQ ID NO: 130740 - RNA, 23 nt, Human herpesvirus 3
uaacagaauuuuuuacgaugaua

SEQ ID NO: 130741 - RNA, 15 nt, Human herpesvirus 3
guaugccacauuuac

SEQ ID NO: 130742 - RNA, 23 nt, Human herpesvirus 3
guauuauacauaaccgauuuacc

SEQ ID NO: 130743 - RNA, 23 nt, Human herpesvirus 3
guauuacagacauacacugguaa

SEQ ID NO: 130744 - RNA, 17 nt, Human herpesvirus 3
guauaugucaacauuua

SEQ ID NO: 130745 - RNA, 18 nt, Human herpesvirus 3
guauauuaugcguuuaau

SEQ ID NO: 130746 - RNA, 22 nt, Human herpesvirus 3
guaucaauaaauuuacauaacc

SEQ ID NO: 130747 - RNA, 21 nt, Human herpesvirus 3
guauucuguaaaggaucucca

SEQ ID NO: 130748 - RNA, 23 nt, Human herpesvirus 3
gucaaagucuucaaagaacucug

SEQ ID NO: 130749 - RNA, 22 nt, Human herpesvirus 3
gucaacacgggcugaagaguuu

SEQ ID NO: 130750 - RNA, 22 nt, Human herpesvirus 3
gucaaccaauugguauacacac

SEQ ID NO: 130751 - RNA, 14 nt, Human herpesvirus 3
gucaccaaagccaa

SEQ ID NO: 130752 - RNA, 15 nt, Human herpesvirus 3
gucagauauuuugca

SEQ ID NO: 130753 - RNA, 20 nt, Human herpesvirus 3
gucagauauuuugcagccau

SEQ ID NO: 130754 - RNA, 15 nt, Human herpesvirus 3
gucaggucugucaug

SEQ ID NO: 130755 - RNA, 21 nt, Human herpesvirus 3
ggggcgggguagacuguggca

SEQ ID NO: 130756 - RNA, 20 nt, Human herpesvirus 3
ggguccaucaaacacacaga

SEQ ID NO: 130757 - RNA, 13 nt, Human herpesvirus 3
gggucgguucuga

SEQ ID NO: 130758 - RNA, 20 nt, Human herpesvirus 3
gggucuccagaguacagggu

SEQ ID NO: 130759 - RNA, 21 nt, Human herpesvirus 3
ggguacaaacgcgcaauguuu

SEQ ID NO: 130760 - RNA, 22 nt, Human herpesvirus 3
gggucaagaucaauggcgguga

SEQ ID NO: 130761 - RNA, 20 nt, Human herpesvirus 3
ggguaaaacacacaccagac

SEQ ID NO: 130762 - RNA, 19 nt, Human herpesvirus 3
guacguguaugcuguuauc

SEQ ID NO: 130763 - RNA, 12 nt, Human herpesvirus 3
guaguacagggc

SEQ ID NO: 130764 - RNA, 19 nt, Human herpesvirus 3
guaggggaugggggucgca

SEQ ID NO: 130765 - RNA, 20 nt, Human herpesvirus 3
guauacacacccaccccaga

SEQ ID NO: 130766 - RNA, 15 nt, Human herpesvirus 3
guauaauaccgguga

SEQ ID NO: 130767 - RNA, 15 nt, Human herpesvirus 3
guagcaucggauauu

SEQ ID NO: 130768 - RNA, 19 nt, Human herpesvirus 3
guacugcagauacagcaua

SEQ ID NO: 130769 - RNA, 22 nt, Human herpesvirus 3
guacuuguaaacccccaagcaa

SEQ ID NO: 130770 - RNA, 16 nt, Human herpesvirus 3
guagaauuuacagugu

SEQ ID NO: 130771 - RNA, 11 nt, Human herpesvirus 3
guagacugugg

SEQ ID NO: 130772 - RNA, 12 nt, Human herpesvirus 3
guagacuguggc

SEQ ID NO: 130773 - RNA, 17 nt, Human herpesvirus 3
guccccucugguauauu

SEQ ID NO: 130774 - RNA, 17 nt, Human herpesvirus 3
guccauuuaacaauccc

SEQ ID NO: 130775 - RNA, 14 nt, Human herpesvirus 3
gucccaaugagaug

SEQ ID NO: 130776 - RNA, 20 nt, Human herpesvirus 3
gucuucugucaaguugcaug

SEQ ID NO: 130777 - RNA, 21 nt, Human herpesvirus 3
gucuucugucaaguugcaugu

SEQ ID NO: 130778 - RNA, 14 nt, Human herpesvirus 3
gucuuuuaaauuca

SEQ ID NO: 130779 - RNA, 13 nt, Human herpesvirus 3
gugaggaaaaaga

SEQ ID NO: 130780 - RNA, 23 nt, Human herpesvirus 3
gucuugcgauacgaugauuuuca

SEQ ID NO: 130781 - RNA, 18 nt, Human herpesvirus 3
gucuugacaacauuuaaa

SEQ ID NO: 130782 - RNA, 17 nt, Human herpesvirus 3
gugauauuauauacugg

SEQ ID NO: 130783 - RNA, 14 nt, Human herpesvirus 3
guucuaaaacacug

SEQ ID NO: 130784 - RNA, 19 nt, Human herpesvirus 3
guucccgcacacguuuaca

SEQ ID NO: 130785 - RNA, 14 nt, Human herpesvirus 3
guuauuacauuuaa

SEQ ID NO: 130786 - RNA, 19 nt, Human herpesvirus 3
guuaugcuuuuuaugcaua

SEQ ID NO: 130787 - RNA, 19 nt, Human herpesvirus 3
guuaaauaacaugucacau

SEQ ID NO: 130788 - RNA, 20 nt, Human herpesvirus 3
guuaaauuuauaaaacacuc

SEQ ID NO: 130789 - RNA, 12 nt, Human herpesvirus 3
guuaacaccgcc

SEQ ID NO: 130790 - RNA, 13 nt, Human herpesvirus 3
guuaauacagugu

SEQ ID NO: 130791 - RNA, 21 nt, Human herpesvirus 3
guggugccauucuccacguga

SEQ ID NO: 130792 - RNA, 22 nt, Human herpesvirus 3
guggugccauucuccacgugag

SEQ ID NO: 130793 - RNA, 12 nt, Human herpesvirus 3
gugguaccaaaa

SEQ ID NO: 130794 - RNA, 18 nt, Human herpesvirus 3
guggauccggcaugcauu

SEQ ID NO: 130795 - RNA, 19 nt, Human herpesvirus 3
guggauccggcaugcauug

SEQ ID NO: 130796 - RNA, 23 nt, Human herpesvirus 3
guguaccauagaugaacacauuu

SEQ ID NO: 130797 - RNA, 13 nt, Human herpesvirus 3
guguaaaucauca

SEQ ID NO: 130798 - RNA, 19 nt, Human herpesvirus 3
guguccccucugguauauu

SEQ ID NO: 130799 - RNA, 19 nt, Human herpesvirus 3
guguugcggggaugauccc

SEQ ID NO: 130800 - RNA, 19 nt, Human herpesvirus 3
uauuaacaccuguuuacac

SEQ ID NO: 130801 - RNA, 20 nt, Human herpesvirus 3
uauuaacaggauuugcuuau

SEQ ID NO: 130802 - RNA, 21 nt, Human herpesvirus 3
uauguaaauuaugaucauuaa

SEQ ID NO: 130803 - RNA, 22 nt, Human herpesvirus 3
uauucaccauuacuacauugaa

SEQ ID NO: 130804 - RNA, 14 nt, Human herpesvirus 3
uauuauacauaacc

SEQ ID NO: 130805 - RNA, 21 nt, Human herpesvirus 3
uauuaucgggcgacaauccaa

SEQ ID NO: 130806 - RNA, 21 nt, Human herpesvirus 3
ucaaagaacucugaguucaaa

SEQ ID NO: 130807 - RNA, 13 nt, Human herpesvirus 3
uauuuagugauua

SEQ ID NO: 130808 - RNA, 20 nt, Human herpesvirus 3
uauuuauacaccucuacggg

SEQ ID NO: 130809 - RNA, 23 nt, Human herpesvirus 3
uauuucccaacgcauaaccagcg

SEQ ID NO: 130810 - RNA, 14 nt, Human herpesvirus 3
ucaacgacauacau

SEQ ID NO: 130811 - RNA, 15 nt, Human herpesvirus 3
ucaacgacauacauu

SEQ ID NO: 130812 - RNA, 14 nt, Human herpesvirus 3
ucaaauaacugaac

SEQ ID NO: 130813 - RNA, 15 nt, Human herpesvirus 3
ucaaugaaacaguaa

SEQ ID NO: 130814 - RNA, 12 nt, Human herpesvirus 3
ucaaugcaacua

SEQ ID NO: 130815 - RNA, 15 nt, Human herpesvirus 3
ucaccgaacauggac

SEQ ID NO: 130816 - RNA, 19 nt, Human herpesvirus 3
ucaccgauugggcaaauga

SEQ ID NO: 130817 - RNA, 13 nt, Human herpesvirus 3
ucaggucugucau

SEQ ID NO: 130818 - RNA, 14 nt, Human herpesvirus 3
ucaggucugucaug

SEQ ID NO: 130819 - RNA, 15 nt, Human herpesvirus 3
ucaggucuguuuacc

SEQ ID NO: 130820 - RNA, 16 nt, Human herpesvirus 3
ucagaaagauugcagu

SEQ ID NO: 130821 - RNA, 19 nt, Human herpesvirus 3
ucagaaagauugcagucau

SEQ ID NO: 130822 - RNA, 18 nt, Human herpesvirus 3
ucagagaagcuauacaca

SEQ ID NO: 130823 - RNA, 19 nt, Human herpesvirus 3
uauacauaaccgauuuacc

SEQ ID NO: 130824 - RNA, 17 nt, Human herpesvirus 3
uauacguagaauuuaca

SEQ ID NO: 130825 - RNA, 18 nt, Human herpesvirus 3
uauacguagaauuuacag

SEQ ID NO: 130826 - RNA, 23 nt, Human herpesvirus 3
uauacguuucaaauaacugaaca

SEQ ID NO: 130827 - RNA, 19 nt, Human herpesvirus 3
uauacuacuuauuaugcaa

SEQ ID NO: 130828 - RNA, 23 nt, Human herpesvirus 3
uauacaccaccccuugauuuuau

SEQ ID NO: 130829 - RNA, 23 nt, Human herpesvirus 3
uauacaacacgaugcgcugguau

SEQ ID NO: 130830 - RNA, 21 nt, Human herpesvirus 3
uauagucaaauucaacuaaug

SEQ ID NO: 130831 - RNA, 13 nt, Human herpesvirus 3
uauagcugucacu

SEQ ID NO: 130832 - RNA, 18 nt, Human herpesvirus 3
uauauaacaauugagaua

SEQ ID NO: 130833 - RNA, 19 nt, Human herpesvirus 3
uauauauguaacguuugua

SEQ ID NO: 130834 - RNA, 17 nt, Human herpesvirus 3
uauauaugucaccaaag

SEQ ID NO: 130835 - RNA, 23 nt, Human herpesvirus 3
uauauacaaaauaaaaacauaca

SEQ ID NO: 130836 - RNA, 22 nt, Human herpesvirus 3
uauacuuggagaugcaaccaag

SEQ ID NO: 130837 - RNA, 22 nt, Human herpesvirus 3
uauagcccccaacuuccccaua

SEQ ID NO: 130838 - RNA, 13 nt, Human herpesvirus 3
uauauguucaaca

SEQ ID NO: 130839 - RNA, 15 nt, Human herpesvirus 3
uauaugucaccaaag

SEQ ID NO: 130840 - RNA, 23 nt, Human herpesvirus 3
uauaugcgucauuuauuaccaca

SEQ ID NO: 130841 - RNA, 15 nt, Human herpesvirus 3
uauauuuuacauaca

SEQ ID NO: 130842 - RNA, 17 nt, Human herpesvirus 3
uauauuuuacauacaaa

SEQ ID NO: 130843 - RNA, 18 nt, Human herpesvirus 3
uauauuuuauguugauau

SEQ ID NO: 130844 - RNA, 15 nt, Human herpesvirus 3
uaucaacgacauaca

SEQ ID NO: 130845 - RNA, 19 nt, Human herpesvirus 3
uaucaacgacauacauuag

SEQ ID NO: 130846 - RNA, 14 nt, Human herpesvirus 3
uauguaccauuuga

SEQ ID NO: 130847 - RNA, 16 nt, Human herpesvirus 3
uaugggauuauggaag

SEQ ID NO: 130848 - RNA, 15 nt, Human herpesvirus 3
uaugacauaugcgca

SEQ ID NO: 130849 - RNA, 15 nt, Human herpesvirus 3
uaucuuugcugucaa

SEQ ID NO: 130850 - RNA, 18 nt, Human herpesvirus 3
uaugauauaagguguuaa

SEQ ID NO: 130851 - RNA, 20 nt, Human herpesvirus 3
uaugaucauuaaacgugcau

SEQ ID NO: 130852 - RNA, 15 nt, Human herpesvirus 3
uaugagaguuuacaa

SEQ ID NO: 130853 - RNA, 14 nt, Human herpesvirus 3
uauccaagaugaaa

SEQ ID NO: 130854 - RNA, 21 nt, Human herpesvirus 3
uaucccccuucaaacggauac

SEQ ID NO: 130855 - RNA, 22 nt, Human herpesvirus 3
uaucccguuuaauuguacccau

SEQ ID NO: 130856 - RNA, 23 nt, Human herpesvirus 3
uauccauugccguauuaaccuac

SEQ ID NO: 130857 - RNA, 20 nt, Human herpesvirus 3
uaucaggagauacuauggua

SEQ ID NO: 130858 - RNA, 19 nt, Human herpesvirus 3
uaucauugaagaugauuau

SEQ ID NO: 130859 - RNA, 15 nt, Human herpesvirus 3
uaucgcaauguuuuc

SEQ ID NO: 130860 - RNA, 21 nt, Human herpesvirus 3
uaucgggcgacaauccaauag

SEQ ID NO: 130861 - RNA, 11 nt, Human herpesvirus 3
uccacagucug

SEQ ID NO: 130862 - RNA, 16 nt, Human herpesvirus 3
uccacagucugcuuua

SEQ ID NO: 130863 - RNA, 15 nt, Human herpesvirus 3
uccacauaacaucca

SEQ ID NO: 130864 - RNA, 15 nt, Human herpesvirus 3
uccacagauuccucc

SEQ ID NO: 130865 - RNA, 16 nt, Human herpesvirus 3
ucauccguccaaacag

SEQ ID NO: 130866 - RNA, 16 nt, Human herpesvirus 3
ucaucgaaaagacugu

SEQ ID NO: 130867 - RNA, 14 nt, Human herpesvirus 3
ucaucugauuugca

SEQ ID NO: 130868 - RNA, 22 nt, Human herpesvirus 3
ucccccgaucucugguauacuu

SEQ ID NO: 130869 - RNA, 12 nt, Human herpesvirus 3
ucccacauguau

SEQ ID NO: 130870 - RNA, 15 nt, Human herpesvirus 3
ucccacauguauaaa

SEQ ID NO: 130871 - RNA, 21 nt, Human herpesvirus 3
ucccaauacacccgacuuccu

SEQ ID NO: 130872 - RNA, 20 nt, Human herpesvirus 3
ucccaaggauagauaucaca

SEQ ID NO: 130873 - RNA, 17 nt, Human herpesvirus 3
uccaggcgagacuugau

SEQ ID NO: 130874 - RNA, 19 nt, Human herpesvirus 3
uccaggcgaggacuccaca

SEQ ID NO: 130875 - RNA, 13 nt, Human herpesvirus 3
uccuuaaaauaaa

SEQ ID NO: 130876 - RNA, 14 nt, Human herpesvirus 3
uccugugucuuuaa

SEQ ID NO: 130877 - RNA, 13 nt, Human herpesvirus 3
uccucuguuacau

SEQ ID NO: 130878 - RNA, 13 nt, Human herpesvirus 3
uccgaaagcaguc

SEQ ID NO: 130879 - RNA, 15 nt, Human herpesvirus 3
uccgauaauaccaaa

SEQ ID NO: 130880 - RNA, 22 nt, Human herpesvirus 3
ucgaucauacgccgacaugccu

SEQ ID NO: 130881 - RNA, 18 nt, Human herpesvirus 3
ucgacccguuauaaucuc

SEQ ID NO: 130882 - RNA, 15 nt, Human herpesvirus 3
ucgaaaaaaggugua

SEQ ID NO: 130883 - RNA, 18 nt, Human herpesvirus 3
uccuuggacuaacaaagu

SEQ ID NO: 130884 - RNA, 16 nt, Human herpesvirus 3
uccuuucaauauucca

SEQ ID NO: 130885 - RNA, 22 nt, Human herpesvirus 3
ucgccuuaaccgcgacagccaa

SEQ ID NO: 130886 - RNA, 20 nt, Human herpesvirus 3
ucgcaugccccccucccuca

SEQ ID NO: 130887 - RNA, 22 nt, Human herpesvirus 3
ucgggcuuuucccccacauaca

SEQ ID NO: 130888 - RNA, 20 nt, Human herpesvirus 3
ucggcguccucuguuacauu

SEQ ID NO: 130889 - RNA, 21 nt, Human herpesvirus 3
ucggcgauggccgucuugaau

SEQ ID NO: 130890 - RNA, 20 nt, Human herpesvirus 3
ucguugguuagaaagcgauu

SEQ ID NO: 130891 - RNA, 21 nt, Human herpesvirus 3
ucguuuaacaaaauagucuac

SEQ ID NO: 130892 - RNA, 18 nt, Human herpesvirus 3
ucguuuuugcauaugaca

SEQ ID NO: 130893 - RNA, 13 nt, Human herpesvirus 3
ucuaaaacacugu

SEQ ID NO: 130894 - RNA, 14 nt, Human herpesvirus 3
ucggucugauagcg

SEQ ID NO: 130895 - RNA, 22 nt, Human herpesvirus 3
ucuaaguaccgggauaucucau

SEQ ID NO: 130896 - RNA, 16 nt, Human herpesvirus 3
ucuaauaaaaacauca

SEQ ID NO: 130897 - RNA, 24 nt, Human herpesvirus 3
ucuaacguuuuaguaaaauaccau

SEQ ID NO: 130898 - RNA, 23 nt, Human herpesvirus 3
ucuaacaaugcacugaaccacaa

SEQ ID NO: 130899 - RNA, 20 nt, Human herpesvirus 3
ucuaacaguacgcaugugcu

SEQ ID NO: 130900 - RNA, 22 nt, Human herpesvirus 3
ucuaaacguggccauuacuaaa

SEQ ID NO: 130901 - RNA, 18 nt, Human herpesvirus 3
ucuaucggaugacucuau

SEQ ID NO: 130902 - RNA, 18 nt, Human herpesvirus 3
ucuauaaguggggguuua

SEQ ID NO: 130903 - RNA, 17 nt, Human herpesvirus 3
ucuauaugauucaagua

SEQ ID NO: 130904 - RNA, 21 nt, Human herpesvirus 3
ucuagaugacacgaauaggug

SEQ ID NO: 130905 - RNA, 23 nt, Human herpesvirus 3
ucucuggaauaaaacguuuuaaa

SEQ ID NO: 130906 - RNA, 14 nt, Human herpesvirus 3
ucucuggaccccca

SEQ ID NO: 130907 - RNA, 22 nt, Human herpesvirus 3
ucucgacguccaaguccaauca

SEQ ID NO: 130908 - RNA, 12 nt, Human herpesvirus 3
ucucguaaaggu

SEQ ID NO: 130909 - RNA, 17 nt, Human herpesvirus 3
ucucgugggacuacaag

SEQ ID NO: 130910 - RNA, 16 nt, Human herpesvirus 3
ucucguacguccauga

SEQ ID NO: 130911 - RNA, 16 nt, Human herpesvirus 3
ucuccagugccaguga

SEQ ID NO: 130912 - RNA, 16 nt, Human herpesvirus 3
ucuccauuacgcauca

SEQ ID NO: 130913 - RNA, 14 nt, Human herpesvirus 3
ucuccaaccauuca

SEQ ID NO: 130914 - RNA, 12 nt, Human herpesvirus 3
ucuccgguuuua

SEQ ID NO: 130915 - RNA, 14 nt, Human herpesvirus 3
ucuuaacguugaug

SEQ ID NO: 130916 - RNA, 13 nt, Human herpesvirus 3
ucuguaauggagg

SEQ ID NO: 130917 - RNA, 12 nt, Human herpesvirus 3
ucuguacaacac

SEQ ID NO: 130918 - RNA, 14 nt, Human herpesvirus 3
cugcuaaccauaga

SEQ ID NO: 130919 - RNA, 20 nt, Human herpesvirus 3
cugcgaagcugccgucaaug

SEQ ID NO: 130920 - RNA, 19 nt, Human herpesvirus 3
cugcgcagauguacgugua

SEQ ID NO: 130921 - RNA, 23 nt, Human herpesvirus 3
cuggagaaccgcgucuaugucga

SEQ ID NO: 130922 - RNA, 13 nt, Human herpesvirus 3
cuggaguacuaca

SEQ ID NO: 130923 - RNA, 15 nt, Human herpesvirus 3
cugcagacaccauga

SEQ ID NO: 130924 - RNA, 11 nt, Human herpesvirus 3
cucuguuacau

SEQ ID NO: 130925 - RNA, 15 nt, Human herpesvirus 3
cucuguacaacacaa

SEQ ID NO: 130926 - RNA, 14 nt, Human herpesvirus 3
cucuuauauaugua

SEQ ID NO: 130927 - RNA, 14 nt, Human herpesvirus 3
cugucuguggggga

SEQ ID NO: 130928 - RNA, 22 nt, Human herpesvirus 3
cugugacaaauucccccggggc

SEQ ID NO: 130929 - RNA, 15 nt, Human herpesvirus 3
cuguuuuuacccuau

SEQ ID NO: 130930 - RNA, 13 nt, Human herpesvirus 3
cuguuggguggug

SEQ ID NO: 130931 - RNA, 21 nt, Human herpesvirus 3
cuguuuaaaaauacgugcgua

SEQ ID NO: 130932 - RNA, 14 nt, Human herpesvirus 3
cuguuaauaaaaua

SEQ ID NO: 130933 - RNA, 21 nt, Human herpesvirus 3
cuguuagaauaguaaauaccu

SEQ ID NO: 130934 - RNA, 14 nt, Human herpesvirus 3
cuguuacauucuca

SEQ ID NO: 130935 - RNA, 22 nt, Human herpesvirus 3
cucagcugugaguuuaggguuu

SEQ ID NO: 130936 - RNA, 13 nt, Human herpesvirus 3
cuccagaacgcca

SEQ ID NO: 130937 - RNA, 14 nt, Human herpesvirus 3
cuccagaguacagg

SEQ ID NO: 130938 - RNA, 15 nt, Human herpesvirus 3
cuccaucacgauaaa

SEQ ID NO: 130939 - RNA, 15 nt, Human herpesvirus 3
cuauuaaugguacaa

SEQ ID NO: 130940 - RNA, 19 nt, Human herpesvirus 3
cucgaaggcgggaauuucc

SEQ ID NO: 130941 - RNA, 18 nt, Human herpesvirus 3
cucgacguccaaguccaa

SEQ ID NO: 130942 - RNA, 16 nt, Human herpesvirus 3
cucgcggcuucuguaa

SEQ ID NO: 130943 - RNA, 19 nt, Human herpesvirus 3
cucgaugugauacaaugag

SEQ ID NO: 130944 - RNA, 21 nt, Human herpesvirus 3
cucggcguauguggguaggua

SEQ ID NO: 130945 - RNA, 13 nt, Human herpesvirus 3
cucuacgcauuua

SEQ ID NO: 130946 - RNA, 17 nt, Human herpesvirus 3
cucugcuucaauuccaa

SEQ ID NO: 130947 - RNA, 22 nt, Human herpesvirus 3
cucuaauggaguaacuguccca

SEQ ID NO: 130948 - RNA, 16 nt, Human herpesvirus 3
cgugguauuaugaaca

SEQ ID NO: 130949 - RNA, 15 nt, Human herpesvirus 3
cgugguuagauaccu

SEQ ID NO: 130950 - RNA, 15 nt, Human herpesvirus 3
cguuugcacaaucca

SEQ ID NO: 130951 - RNA, 16 nt, Human herpesvirus 3
cguuuugguguuacau

SEQ ID NO: 130952 - RNA, 15 nt, Human herpesvirus 3
cguuuuuauacguau

SEQ ID NO: 130953 - RNA, 12 nt, Human herpesvirus 3
cuaaaacacugu

SEQ ID NO: 130954 - RNA, 14 nt, Human herpesvirus 3
cuaaaacacuguca

SEQ ID NO: 130955 - RNA, 16 nt, Human herpesvirus 3
cguuguggaaagguau

SEQ ID NO: 130956 - RNA, 16 nt, Human herpesvirus 3
cguuguucugcauaag

SEQ ID NO: 130957 - RNA, 14 nt, Human herpesvirus 3
cguuuuaaaagccg

SEQ ID NO: 130958 - RNA, 20 nt, Human herpesvirus 3
cguuuuaugagaguuuacaa

SEQ ID NO: 130959 - RNA, 16 nt, Human herpesvirus 3
cuaaaauuuggaaaca

SEQ ID NO: 130960 - RNA, 21 nt, Human herpesvirus 3
cuaaacguggccauuacuaaa

SEQ ID NO: 130961 - RNA, 22 nt, Human herpesvirus 3
cuaaacguggccauuacuaaag

SEQ ID NO: 130962 - RNA, 22 nt, Human herpesvirus 3
cuaaagcuauuaaugguacaag

SEQ ID NO: 130963 - RNA, 15 nt, Human herpesvirus 3
cuacaucgugcuuga

SEQ ID NO: 130964 - RNA, 16 nt, Human herpesvirus 3
cuacaccuuugcauga

SEQ ID NO: 130965 - RNA, 19 nt, Human herpesvirus 3
cuacacccaguacguugca

SEQ ID NO: 130966 - RNA, 15 nt, Human herpesvirus 3
cuacagaagacauca

SEQ ID NO: 130967 - RNA, 20 nt, Human herpesvirus 3
cuaauaacaauuuaacauac

SEQ ID NO: 130968 - RNA, 22 nt, Human herpesvirus 3
cuaagucagauauuauuaacuu

SEQ ID NO: 130969 - RNA, 17 nt, Human herpesvirus 3
cuaauaaaaauguaaua

SEQ ID NO: 130970 - RNA, 20 nt, Human herpesvirus 3
cguccgauguuccaauggau

SEQ ID NO: 130971 - RNA, 21 nt, Human herpesvirus 3
cguccgauguuccaauggaug

SEQ ID NO: 130972 - RNA, 17 nt, Human herpesvirus 3
cgucagaagguucacua

SEQ ID NO: 130973 - RNA, 20 nt, Human herpesvirus 3
cgucgaguuccgauguugga

SEQ ID NO: 130974 - RNA, 14 nt, Human herpesvirus 3
cgucucggggugua

SEQ ID NO: 130975 - RNA, 14 nt, Human herpesvirus 3
cgucaacugcaaca

SEQ ID NO: 130976 - RNA, 13 nt, Human herpesvirus 3
cguauuguguaau

SEQ ID NO: 130977 - RNA, 20 nt, Human herpesvirus 3
cguaugaaucccgauuugga

SEQ ID NO: 130978 - RNA, 22 nt, Human herpesvirus 3
cggucgcguguacgaaaaccgc

SEQ ID NO: 130979 - RNA, 23 nt, Human herpesvirus 3
cgguaccccaaggcccauauccc

SEQ ID NO: 130980 - RNA, 16 nt, Human herpesvirus 3
cggaagaugacuuuga

SEQ ID NO: 130981 - RNA, 17 nt, Human herpesvirus 3
cgcgaauaaacgacaca

SEQ ID NO: 130982 - RNA, 22 nt, Human herpesvirus 3
cgcgacccugggauguuuuaca

SEQ ID NO: 130983 - RNA, 19 nt, Human herpesvirus 3
cgccuggccccuugaacca

SEQ ID NO: 130984 - RNA, 20 nt, Human herpesvirus 3
aaacacgccgcaacaaccca

SEQ ID NO: 130985 - RNA, 15 nt, Human herpesvirus 3
aaacagagaucucug

SEQ ID NO: 130986 - RNA, 14 nt, Human herpesvirus 3
aaaccacuguucca

SEQ ID NO: 130987 - RNA, 18 nt, Human herpesvirus 3
aaaccaaacacgccuuuu

SEQ ID NO: 130988 - RNA, 18 nt, Human herpesvirus 3
aaacauccacagucugcu

SEQ ID NO: 130989 - RNA, 18 nt, Human herpesvirus 3
aaacaucugcauuacaga

SEQ ID NO: 130990 - RNA, 16 nt, Human herpesvirus 3
cgcuacccgaaagccc

SEQ ID NO: 130991 - RNA, 23 nt, Human herpesvirus 3
cgcuagaacgugcguuauacuug

SEQ ID NO: 130992 - RNA, 21 nt, Human herpesvirus 3
cgcugucgucauauuacauua

SEQ ID NO: 130993 - RNA, 13 nt, Human herpesvirus 3
cgcugugugcaua

SEQ ID NO: 130994 - RNA, 16 nt, Human herpesvirus 3
cgcuucccgaaagccc

SEQ ID NO: 130995 - RNA, 18 nt, Human herpesvirus 3
cgcuaagucagauauuau

SEQ ID NO: 130996 - RNA, 16 nt, Human herpesvirus 3
cgcgggucaauggagu

SEQ ID NO: 130997 - RNA, 14 nt, Human herpesvirus 3
cgcggcuucuguaa

SEQ ID NO: 130998 - RNA, 13 nt, Human herpesvirus 3
cgcgucaaaaagc

SEQ ID NO: 130999 - RNA, 13 nt, Human herpesvirus 3
ccuuaaaauuugu

SEQ ID NO: 131000 - RNA, 13 nt, Human herpesvirus 3
cgccaaaauggau

SEQ ID NO: 131001 - RNA, 11 nt, Human herpesvirus 3
cgcaugccauu

SEQ ID NO: 131002 - RNA, 12 nt, Human herpesvirus 3
cgcaugccauug

SEQ ID NO: 131003 - RNA, 23 nt, Human herpesvirus 3
cgcaugcgggcuugcuguucuca

SEQ ID NO: 131004 - RNA, 15 nt, Human herpesvirus 3
cgccgauaaauccac

SEQ ID NO: 131005 - RNA, 13 nt, Human herpesvirus 3
cgccuaguuauuc

SEQ ID NO: 131006 - RNA, 16 nt, Human herpesvirus 3
cgccuccacugcauuu

SEQ ID NO: 131007 - RNA, 17 nt, Human herpesvirus 3
cgccuccacugcauuua

SEQ ID NO: 131008 - RNA, 15 nt, Human herpesvirus 3
aaacaaugaaccauu

SEQ ID NO: 131009 - RNA, 13 nt, Human herpesvirus 3
ccugugucuuuaa

SEQ ID NO: 131010 - RNA, 15 nt, Human herpesvirus 3
ccuguaauauagugu

SEQ ID NO: 131011 - RNA, 12 nt, Human herpesvirus 3
aaaauucuaaca

SEQ ID NO: 131012 - RNA, 19 nt, Human herpesvirus 3
ccuaguauuuacguaugua

SEQ ID NO: 131013 - RNA, 16 nt, Human herpesvirus 3
ccucccccggcucaca

SEQ ID NO: 131014 - RNA, 21 nt, Human herpesvirus 3
ccugcaagcgguuuagcauuu

SEQ ID NO: 131015 - RNA, 14 nt, Human herpesvirus 3
ccuacacaacaccc

SEQ ID NO: 131016 - RNA, 23 nt, Human herpesvirus 3
ccguuuaauuguacccaucuuca

SEQ ID NO: 131017 - RNA, 20 nt, Human herpesvirus 3
ccggcgaacgugauuugccc

SEQ ID NO: 131018 - RNA, 19 nt, Human herpesvirus 3
ccgugugguaugaaucucu

SEQ ID NO: 131019 - RNA, 22 nt, Human herpesvirus 3
ccguguuacuuggaaacaccca

SEQ ID NO: 131020 - RNA, 20 nt, Human herpesvirus 3
ccguuauauuuuacauacaa

SEQ ID NO: 131021 - RNA, 22 nt, Human herpesvirus 3
cccuguugcgguuguuguccag

SEQ ID NO: 131022 - RNA, 22 nt, Human herpesvirus 3
cccuucaaacggauacuacuaa

SEQ ID NO: 131023 - RNA, 18 nt, Human herpesvirus 3
ccggaaauauaacauaca

SEQ ID NO: 131024 - RNA, 18 nt, Human herpesvirus 3
ccggacaauuaacacaga

SEQ ID NO: 131025 - RNA, 14 nt, Human herpesvirus 3
cccccgcgauuuau

SEQ ID NO: 131026 - RNA, 11 nt, Human herpesvirus 3
cccgguauuau

SEQ ID NO: 131027 - RNA, 20 nt, Human herpesvirus 3
cccgugguuagauaccuaag

SEQ ID NO: 131028 - RNA, 15 nt, Human herpesvirus 3
cccuaucguuuauuu

SEQ ID NO: 131029 - RNA, 17 nt, Human herpesvirus 3
cccgccauaaacagaga

SEQ ID NO: 131030 - RNA, 12 nt, Human herpesvirus 3
ccccaagaguuu

SEQ ID NO: 131031 - RNA, 15 nt, Human herpesvirus 3
cccauuguaugaauu

SEQ ID NO: 131032 - RNA, 14 nt, Human herpesvirus 3
cccauccuuaaaau

SEQ ID NO: 131033 - RNA, 21 nt, Human herpesvirus 3
cccauccuuaaaauaaaaggu

SEQ ID NO: 131034 - RNA, 14 nt, Human herpesvirus 3
cccauuuugugauu

SEQ ID NO: 131035 - RNA, 19 nt, Human herpesvirus 3
cccauuuugugauuuuagc

SEQ ID NO: 131036 - RNA, 14 nt, Human herpesvirus 3
cccaguaaucucac

SEQ ID NO: 131037 - RNA, 20 nt, Human herpesvirus 3
ccagaaacgccccuccuaaa

SEQ ID NO: 131038 - RNA, 16 nt, Human herpesvirus 3
ccagaacgaucacaac

SEQ ID NO: 131039 - RNA, 12 nt, Human herpesvirus 3
ccagaacgccau

SEQ ID NO: 131040 - RNA, 16 nt, Human herpesvirus 3
ccagaagaacuagcua

SEQ ID NO: 131041 - RNA, 23 nt, Human herpesvirus 3
ccagaagaacuagcuaccguuag

SEQ ID NO: 131042 - RNA, 15 nt, Human herpesvirus 3
ccagaaucucuucau

SEQ ID NO: 131043 - RNA, 21 nt, Human herpesvirus 3
ccagaagcauuuacaccgugg

SEQ ID NO: 131044 - RNA, 18 nt, Human herpesvirus 3
ccagcuguccggacucca

SEQ ID NO: 131045 - RNA, 21 nt, Human herpesvirus 3
ccagaguacaggguaucuaag

SEQ ID NO: 131046 - RNA, 15 nt, Human herpesvirus 3
ccagcguugccacgc

SEQ ID NO: 131047 - RNA, 19 nt, Human herpesvirus 3
ccauagaggugugugcaca

SEQ ID NO: 131048 - RNA, 16 nt, Human herpesvirus 3
ccaguacguugcauaa

SEQ ID NO: 131049 - RNA, 17 nt, Human herpesvirus 3
ccauaugaccuguaaua

SEQ ID NO: 131050 - RNA, 18 nt, Human herpesvirus 3
ccaucagaucaucugaca

SEQ ID NO: 131051 - RNA, 22 nt, Human herpesvirus 3
ccaucaucugauuugcaaacau

SEQ ID NO: 131052 - RNA, 14 nt, Human herpesvirus 3
ccauguggguuggg

SEQ ID NO: 131053 - RNA, 19 nt, Human herpesvirus 3
ccaugucuacgugguacca

SEQ ID NO: 131054 - RNA, 15 nt, Human herpesvirus 3
ccauuacgcaucaca

SEQ ID NO: 131055 - RNA, 12 nt, Human herpesvirus 3
ccauuugagaua

SEQ ID NO: 131056 - RNA, 19 nt, Human herpesvirus 3
cauuaaaaguuuacgugua

SEQ ID NO: 131057 - RNA, 22 nt, Human herpesvirus 3
cauuaaaaguuuacguguauau

SEQ ID NO: 131058 - RNA, 22 nt, Human herpesvirus 3
cauuaacccacgggguccccac

SEQ ID NO: 131059 - RNA, 17 nt, Human herpesvirus 3
cauguuuucccaugucu

SEQ ID NO: 131060 - RNA, 14 nt, Human herpesvirus 3
cauaugcauaucau

SEQ ID NO: 131061 - RNA, 18 nt, Human herpesvirus 3
cauaugcauaucauaaau

SEQ ID NO: 131062 - RNA, 14 nt, Human herpesvirus 3
caucgucucgugua

SEQ ID NO: 131063 - RNA, 16 nt, Human herpesvirus 3
caucguggaccguguu

SEQ ID NO: 131064 - RNA, 17 nt, Human herpesvirus 3
cauauauggacauccau

SEQ ID NO: 131065 - RNA, 15 nt, Human herpesvirus 3
cauauauacccaucg

SEQ ID NO: 131066 - RNA, 18 nt, Human herpesvirus 3
cauauauacccaucguca

SEQ ID NO: 131067 - RNA, 14 nt, Human herpesvirus 3
cauauacacauccu

SEQ ID NO: 131068 - RNA, 14 nt, Human herpesvirus 3
cauaggguugcgau

SEQ ID NO: 131069 - RNA, 12 nt, Human herpesvirus 3
ccaauagaaacu

SEQ ID NO: 131070 - RNA, 16 nt, Human herpesvirus 3
ccaagcgcucuucaau

SEQ ID NO: 131071 - RNA, 16 nt, Human herpesvirus 3
ccaacucuuuucccaa

SEQ ID NO: 131072 - RNA, 22 nt, Human herpesvirus 3
ccaacuccuguuuuugcaaggc

SEQ ID NO: 131073 - RNA, 13 nt, Human herpesvirus 3
ccaacugauuaca

SEQ ID NO: 131074 - RNA, 18 nt, Human herpesvirus 3
ccaacugauuacauuuca

SEQ ID NO: 131075 - RNA, 18 nt, Human herpesvirus 3
ccaacuguuuacauagau

SEQ ID NO: 131076 - RNA, 15 nt, Human herpesvirus 3
ccaagacgacauuaa

SEQ ID NO: 131077 - RNA, 19 nt, Human herpesvirus 3
cauuucaauaaauguacua

SEQ ID NO: 131078 - RNA, 18 nt, Human herpesvirus 3
cauuuauuaccacauccu

SEQ ID NO: 131079 - RNA, 16 nt, Human herpesvirus 3
cauuugauacguuguu

SEQ ID NO: 131080 - RNA, 21 nt, Human herpesvirus 3
cauuugauacguuguucaugg

SEQ ID NO: 131081 - RNA, 14 nt, Human herpesvirus 3
ccaaaccacuguuc

SEQ ID NO: 131082 - RNA, 15 nt, Human herpesvirus 3
ccaaacagcaccaau

SEQ ID NO: 131083 - RNA, 17 nt, Human herpesvirus 3
ccaaacagcaccaauau

SEQ ID NO: 131084 - RNA, 22 nt, Human herpesvirus 3
cauuaagccuguuaauaaaaua

SEQ ID NO: 131085 - RNA, 14 nt, Human herpesvirus 3
cauuacuacauuga

SEQ ID NO: 131086 - RNA, 14 nt, Human herpesvirus 3
cauuaaucgcugau

SEQ ID NO: 131087 - RNA, 18 nt, Human herpesvirus 3
cauuacagaaaugugagg

SEQ ID NO: 131088 - RNA, 16 nt, Human herpesvirus 3
cauuuaaaaauccauu

SEQ ID NO: 131089 - RNA, 18 nt, Human herpesvirus 3
cauuuaacaaucccgggg

SEQ ID NO: 131090 - RNA, 22 nt, Human herpesvirus 3
cauuagaguguuuaacaaccau

SEQ ID NO: 131091 - RNA, 22 nt, Human herpesvirus 3
caggccggaguguccagauaua

SEQ ID NO: 131092 - RNA, 15 nt, Human herpesvirus 3
cagacaagcuuauuu

SEQ ID NO: 131093 - RNA, 14 nt, Human herpesvirus 3
cagacaccaugacg

SEQ ID NO: 131094 - RNA, 20 nt, Human herpesvirus 3
caggucaaaacgcugaccca

SEQ ID NO: 131095 - RNA, 14 nt, Human herpesvirus 3
caguacgcuuuuau

SEQ ID NO: 131096 - RNA, 21 nt, Human herpesvirus 3
caguagaggguccaucaaaca

SEQ ID NO: 131097 - RNA, 15 nt, Human herpesvirus 3
caguagauguguugc

SEQ ID NO: 131098 - RNA, 16 nt, Human herpesvirus 3
caguaguuucauguag

SEQ ID NO: 131099 - RNA, 14 nt, Human herpesvirus 3
cagguuuuacuuuu

SEQ ID NO: 131100 - RNA, 13 nt, Human herpesvirus 3
caguaacuuaaca

SEQ ID NO: 131101 - RNA, 18 nt, Human herpesvirus 3
caguaacuuaacaaacau

SEQ ID NO: 131102 - RNA, 17 nt, Human herpesvirus 3
cauaaggaaaugcaaua

SEQ ID NO: 131103 - RNA, 16 nt, Human herpesvirus 3
cauaagacguugcaua

SEQ ID NO: 131104 - RNA, 17 nt, Human herpesvirus 3
cauaagacguugcauau

SEQ ID NO: 131105 - RNA, 18 nt, Human herpesvirus 3
cauaagacguugcauaug

SEQ ID NO: 131106 - RNA, 14 nt, Human herpesvirus 3
cauaaccgauuuac

SEQ ID NO: 131107 - RNA, 19 nt, Human herpesvirus 3
cauaaccgauuuaccgugu

SEQ ID NO: 131108 - RNA, 16 nt, Human herpesvirus 3
cauaaaaaauaauucc

SEQ ID NO: 131109 - RNA, 22 nt, Human herpesvirus 3
cauaaacccuccggcaucucca

SEQ ID NO: 131110 - RNA, 14 nt, Human herpesvirus 3
cauaaugcaaauac

SEQ ID NO: 131111 - RNA, 18 nt, Human herpesvirus 3
cauaauaugauacauaaa

SEQ ID NO: 131112 - RNA, 13 nt, Human herpesvirus 3
cauacaucauaaa

SEQ ID NO: 131113 - RNA, 16 nt, Human herpesvirus 3
cauacaucauaaaccc

SEQ ID NO: 131114 - RNA, 15 nt, Human herpesvirus 3
cauaccgacaguaaa

SEQ ID NO: 131115 - RNA, 23 nt, Human herpesvirus 3
caguguuuagugggaguggagua

SEQ ID NO: 131116 - RNA, 16 nt, Human herpesvirus 3
cagugcuugacugugc

SEQ ID NO: 131117 - RNA, 14 nt, Human herpesvirus 3
caguugaaccaaau

SEQ ID NO: 131118 - RNA, 22 nt, Human herpesvirus 3
caguccggacaauuaacacaga

SEQ ID NO: 131119 - RNA, 18 nt, Human herpesvirus 3
cagucugaccauuuacca

SEQ ID NO: 131120 - RNA, 19 nt, Human herpesvirus 3
cagucugcuuuauuaccaa

SEQ ID NO: 131121 - RNA, 18 nt, Human herpesvirus 3
cagugcgcuucaagucuc

SEQ ID NO: 131122 - RNA, 16 nt, Human herpesvirus 3
gccaugccgccgucaa

SEQ ID NO: 131123 - RNA, 14 nt, Human herpesvirus 3
gccaugagcaucuc

SEQ ID NO: 131124 - RNA, 22 nt, Human herpesvirus 3
gccagccaacacaguguucaga

SEQ ID NO: 131125 - RNA, 13 nt, Human herpesvirus 3
gcccacacaauca

SEQ ID NO: 131126 - RNA, 21 nt, Human herpesvirus 3
gccaauaaaagcagacauccc

SEQ ID NO: 131127 - RNA, 23 nt, Human herpesvirus 3
gcauauacacauccuggacacag

SEQ ID NO: 131128 - RNA, 16 nt, Human herpesvirus 3
gcauaagauguacugu

SEQ ID NO: 131129 - RNA, 19 nt, Human herpesvirus 3
gcauaacguugcggugaua

SEQ ID NO: 131130 - RNA, 16 nt, Human herpesvirus 3
gcauuugugucccauu

SEQ ID NO: 131131 - RNA, 13 nt, Human herpesvirus 3
gcauuugaugaau

SEQ ID NO: 131132 - RNA, 23 nt, Human herpesvirus 3
gcgaagcugccgucaaugcaacu

SEQ ID NO: 131133 - RNA, 17 nt, Human herpesvirus 3
gcgaccacgacagcagu

SEQ ID NO: 131134 - RNA, 19 nt, Human herpesvirus 3
gcgauggccgucuugaauc

SEQ ID NO: 131135 - RNA, 22 nt, Human herpesvirus 3
gccugcaagcgguuuagcauuu

SEQ ID NO: 131136 - RNA, 13 nt, Human herpesvirus 3
gccgguacacagc

SEQ ID NO: 131137 - RNA, 23 nt, Human herpesvirus 3
gcccucucgcggcccccucgaga

SEQ ID NO: 131138 - RNA, 16 nt, Human herpesvirus 3
gccgcuucccgaaagc

SEQ ID NO: 131139 - RNA, 22 nt, Human herpesvirus 3
gcaggcuuuaggaaucaagaca

SEQ ID NO: 131140 - RNA, 19 nt, Human herpesvirus 3
gcacugaaccacaaccaag

SEQ ID NO: 131141 - RNA, 22 nt, Human herpesvirus 3
gcagaugaucugguaaauguua

SEQ ID NO: 131142 - RNA, 18 nt, Human herpesvirus 3
gcaagcauauacacaucc

SEQ ID NO: 131143 - RNA, 23 nt, Human herpesvirus 3
gcaauauuacuuaaaacguugug

SEQ ID NO: 131144 - RNA, 19 nt, Human herpesvirus 3
gaucaccgggucuuaucua

SEQ ID NO: 131145 - RNA, 16 nt, Human herpesvirus 3
gcacaacaaaagcuau

SEQ ID NO: 131146 - RNA, 14 nt, Human herpesvirus 3
gcaauugucagaua

SEQ ID NO: 131147 - RNA, 13 nt, Human herpesvirus 3
gcaauucccagua

SEQ ID NO: 131148 - RNA, 15 nt, Human herpesvirus 3
gcaauucccaguaaa

SEQ ID NO: 131149 - RNA, 16 nt, Human herpesvirus 3
ggaagaugaacuaaua

SEQ ID NO: 131150 - RNA, 21 nt, Human herpesvirus 3
ggaagcaauugcggcuuacac

SEQ ID NO: 131151 - RNA, 23 nt, Human herpesvirus 3
ggaauuaaugcaacccugucauc

SEQ ID NO: 131152 - RNA, 16 nt, Human herpesvirus 3
ggaauuacuccuuuaa

SEQ ID NO: 131153 - RNA, 14 nt, Human herpesvirus 3
ggaaaguuguuggc

SEQ ID NO: 131154 - RNA, 18 nt, Human herpesvirus 3
ggaaacuguuggucuucc

SEQ ID NO: 131155 - RNA, 18 nt, Human herpesvirus 3
gcuuuucccccacauaca

SEQ ID NO: 131156 - RNA, 22 nt, Human herpesvirus 3
ggaaacccucaagaauguaauu

SEQ ID NO: 131157 - RNA, 16 nt, Human herpesvirus 3
ggaaaacuuaugucaa

SEQ ID NO: 131158 - RNA, 15 nt, Human herpesvirus 3
ggaaaaucuauuauc

SEQ ID NO: 131159 - RNA, 16 nt, Human herpesvirus 3
gcuuguaaaacauauc

SEQ ID NO: 131160 - RNA, 20 nt, Human herpesvirus 3
gcuuauauuuuacauacaaa

SEQ ID NO: 131161 - RNA, 16 nt, Human herpesvirus 3
gcuugucaaaacauac

SEQ ID NO: 131162 - RNA, 14 nt, Human herpesvirus 3
gcucguauauacau

SEQ ID NO: 131163 - RNA, 14 nt, Human herpesvirus 3
gcucuaaugcagug

SEQ ID NO: 131164 - RNA, 16 nt, Human herpesvirus 3
gcucuguaugcugaua

SEQ ID NO: 131165 - RNA, 15 nt, Human herpesvirus 3
gcucugcaaauacaa

SEQ ID NO: 131166 - RNA, 21 nt, Human herpesvirus 3
gcugucgucauauuacauuaa

SEQ ID NO: 131167 - RNA, 12 nt, Human herpesvirus 3
gcugauacauaa

SEQ ID NO: 131168 - RNA, 22 nt, Human herpesvirus 3
gcuacuuuauauauauguucca

SEQ ID NO: 131169 - RNA, 22 nt, Human herpesvirus 3
gcucguuguaccguuugcacaa

SEQ ID NO: 131170 - RNA, 23 nt, Human herpesvirus 3
gcucguuuuaugagaguuuacaa

SEQ ID NO: 131171 - RNA, 11 nt, Human herpesvirus 3
gcuaugccauu

SEQ ID NO: 131172 - RNA, 19 nt, Human herpesvirus 3
gcgccaauaaaagcagaca

SEQ ID NO: 131173 - RNA, 14 nt, Human herpesvirus 3
gcgccaaaauggau

SEQ ID NO: 131174 - RNA, 12 nt, Human herpesvirus 3
gcgcaugccauu

SEQ ID NO: 131175 - RNA, 13 nt, Human herpesvirus 3
gcgcaugccauug

SEQ ID NO: 131176 - RNA, 20 nt, Human herpesvirus 3
gcgcccggcggaccccggga

SEQ ID NO: 131177 - RNA, 16 nt, Human herpesvirus 3
ggcauaccgaaugcga

SEQ ID NO: 131178 - RNA, 17 nt, Human herpesvirus 3
ggcauaccgaaugcgau

SEQ ID NO: 131179 - RNA, 18 nt, Human herpesvirus 3
ggcacgcugugugcauaa

SEQ ID NO: 131180 - RNA, 14 nt, Human herpesvirus 3
ggauuugggagaaa

SEQ ID NO: 131181 - RNA, 15 nt, Human herpesvirus 3
ggauucagaugguuu

SEQ ID NO: 131182 - RNA, 18 nt, Human herpesvirus 3
ggccagcguaauacaugc

SEQ ID NO: 131183 - RNA, 22 nt, Human herpesvirus 3
ggaugcaccgguccaacacucc

SEQ ID NO: 131184 - RNA, 14 nt, Human herpesvirus 3
ggacauaugucugc

SEQ ID NO: 131185 - RNA, 13 nt, Human herpesvirus 3
ggacacuacucag

SEQ ID NO: 131186 - RNA, 11 nt, Human herpesvirus 3
ggacaguaguu

SEQ ID NO: 131187 - RNA, 15 nt, Human herpesvirus 3
ggacaguugguuuca

SEQ ID NO: 131188 - RNA, 18 nt, Human herpesvirus 3
ggacaaaccccacgcaac

SEQ ID NO: 131189 - RNA, 15 nt, Human herpesvirus 3
gggagcaaacuaaag

SEQ ID NO: 131190 - RNA, 18 nt, Human herpesvirus 3
gggagccgcggccagugc

SEQ ID NO: 131191 - RNA, 19 nt, Human herpesvirus 3
ggcuguauugagaaaacca

SEQ ID NO: 131192 - RNA, 23 nt, Human herpesvirus 3
ggcuguauugagaaaaccaaaga

SEQ ID NO: 131193 - RNA, 20 nt, Human herpesvirus 3
ggcuuaaaacguacguuuaa

SEQ ID NO: 131194 - RNA, 20 nt, Human herpesvirus 3
ggcuuaacgagagauccaau

SEQ ID NO: 131195 - RNA, 23 nt, Human herpesvirus 3
ggcuuacacccccguugcuuuaa

SEQ ID NO: 131196 - RNA, 21 nt, Human herpesvirus 3
ggcuuaaucgugccaauuauu

SEQ ID NO: 131197 - RNA, 17 nt, Human herpesvirus 3
ggccuugggacaucaac

SEQ ID NO: 131198 - RNA, 14 nt, Human herpesvirus 3
ggggacgacgugag

SEQ ID NO: 131199 - RNA, 14 nt, Human herpesvirus 3
gggauuugggagaa

SEQ ID NO: 131200 - RNA, 12 nt, Human herpesvirus 3
gggaucuuccaa

SEQ ID NO: 131201 - RNA, 17 nt, Human herpesvirus 3
aaauacgucccuaaguu

SEQ ID NO: 131202 - RNA, 21 nt, Human herpesvirus 3
aaauacgucccuaaguuugcc

SEQ ID NO: 131203 - RNA, 13 nt, Human herpesvirus 3
aaauacuaagccu

SEQ ID NO: 131204 - RNA, 21 nt, Human herpesvirus 3
aaauacuaagccucuguacaa

SEQ ID NO: 131205 - RNA, 20 nt, Human herpesvirus 3
aaauacacccgccaugagca

SEQ ID NO: 131206 - RNA, 15 nt, Human herpesvirus 3
aaauaacgccuuaaa

SEQ ID NO: 131207 - RNA, 11 nt, Human herpesvirus 3
aaauacaauaa

SEQ ID NO: 131208 - RNA, 19 nt, Human herpesvirus 3
aaauaccuuuuucaugcuu

SEQ ID NO: 131209 - RNA, 21 nt, Human herpesvirus 3
aaauaccuuuuucaugcuugu

SEQ ID NO: 131210 - RNA, 21 nt, Human herpesvirus 3
aaauaccuauuucaugcuugu

SEQ ID NO: 131211 - RNA, 14 nt, Human herpesvirus 3
gacaucaaccagug

SEQ ID NO: 131212 - RNA, 22 nt, Human herpesvirus 3
gacauaauuaaugcaaccauca

SEQ ID NO: 131213 - RNA, 19 nt, Human herpesvirus 3
gacagugcuugacugugcu

SEQ ID NO: 131214 - RNA, 20 nt, Human herpesvirus 3
gacagugcuugacugugcuc

SEQ ID NO: 131215 - RNA, 16 nt, Human herpesvirus 3
gacauggccgugaaug

SEQ ID NO: 131216 - RNA, 12 nt, Human herpesvirus 3
gacaacauuuaa

SEQ ID NO: 131217 - RNA, 17 nt, Human herpesvirus 3
gaauuguggaguuuccc

SEQ ID NO: 131218 - RNA, 20 nt, Human herpesvirus 3
gaauuuacaguguucuccug

SEQ ID NO: 131219 - RNA, 17 nt, Human herpesvirus 3
aaauuaccguacaacaa

SEQ ID NO: 131220 - RNA, 21 nt, Human herpesvirus 3
aaauugggggauuugggagaa

SEQ ID NO: 131221 - RNA, 16 nt, Human herpesvirus 3
aaauuuaaaacauaca

SEQ ID NO: 131222 - RNA, 17 nt, Human herpesvirus 3
gacgcgaacaccgcugu

SEQ ID NO: 131223 - RNA, 14 nt, Human herpesvirus 3
gacgaccccuguca

SEQ ID NO: 131224 - RNA, 22 nt, Human herpesvirus 3
gacgaaccuucggaugacuuug

SEQ ID NO: 131225 - RNA, 23 nt, Human herpesvirus 3
gacguagccguagccuugugaug

SEQ ID NO: 131226 - RNA, 18 nt, Human herpesvirus 3
gagaauuucuaugugcag

SEQ ID NO: 131227 - RNA, 12 nt, Human herpesvirus 3
gagaacugugaa

SEQ ID NO: 131228 - RNA, 21 nt, Human herpesvirus 3
aacaaagccugccgccugcaa

SEQ ID NO: 131229 - RNA, 13 nt, Human herpesvirus 3
gagauagacccag

SEQ ID NO: 131230 - RNA, 17 nt, Human herpesvirus 3
gagcaguccaugguuuu

SEQ ID NO: 131231 - RNA, 22 nt, Human herpesvirus 3
gaguuaauuuugucgggacaca

SEQ ID NO: 131232 - RNA, 14 nt, Human herpesvirus 3
gagugguaauauua

SEQ ID NO: 131233 - RNA, 15 nt, Human herpesvirus 3
gaguguaugcguauu

SEQ ID NO: 131234 - RNA, 20 nt, Human herpesvirus 3
gaguguguuacucaaccagc

SEQ ID NO: 131235 - RNA, 19 nt, Human herpesvirus 3
gaguuccgauguuggacaa

SEQ ID NO: 131236 - RNA, 18 nt, Human herpesvirus 3
gauauucaccauuacuac

SEQ ID NO: 131237 - RNA, 23 nt, Human herpesvirus 3
gauaucacaccaauuauaacugc

SEQ ID NO: 131238 - RNA, 17 nt, Human herpesvirus 3
gaguacuacacccagua

SEQ ID NO: 131239 - RNA, 18 nt, Human herpesvirus 3
gaguauauuaugcguuua

SEQ ID NO: 131240 - RNA, 18 nt, Human herpesvirus 3
gagucauuuucauagacg

SEQ ID NO: 131241 - RNA, 16 nt, Human herpesvirus 3
gaaucuuaaaccugac

SEQ ID NO: 131242 - RNA, 23 nt, Human herpesvirus 3
gaaugcgauucgcggcaguuaua

SEQ ID NO: 131243 - RNA, 23 nt, Human herpesvirus 3
gaaucgcuuauuuaaacuaaaga

SEQ ID NO: 131244 - RNA, 18 nt, Human herpesvirus 3
gaaucgucuaacauuaac

SEQ ID NO: 131245 - RNA, 19 nt, Human herpesvirus 3
aaacccuccggcaucucca

SEQ ID NO: 131246 - RNA, 16 nt, Human herpesvirus 3
aaaccauguuuuccca

SEQ ID NO: 131247 - RNA, 15 nt, Human herpesvirus 3
gaauuaaaaaagccg

SEQ ID NO: 131248 - RNA, 20 nt, Human herpesvirus 3
gaauuacaacgcauauuucc

SEQ ID NO: 131249 - RNA, 18 nt, Human herpesvirus 3
gaauguaauaaaaugaua

SEQ ID NO: 131250 - RNA, 21 nt, Human herpesvirus 3
gaauguaauaaaaugauauac

SEQ ID NO: 131251 - RNA, 15 nt, Human herpesvirus 3
aaaccguauauaaca

SEQ ID NO: 131252 - RNA, 16 nt, Human herpesvirus 3
aaagaaaacauugcag

SEQ ID NO: 131253 - RNA, 16 nt, Human herpesvirus 3
aaagaauuaaaaaagc

SEQ ID NO: 131254 - RNA, 18 nt, Human herpesvirus 3
aaagaauuaaaaaagccg

SEQ ID NO: 131255 - RNA, 24 nt, Human herpesvirus 3
aaagauucuccccccgcgauuuau

SEQ ID NO: 131256 - RNA, 13 nt, Human herpesvirus 3
gaagacaacguau

SEQ ID NO: 131257 - RNA, 13 nt, Human herpesvirus 3
gaagacuccagua

SEQ ID NO: 131258 - RNA, 16 nt, Human herpesvirus 3
gaagauaggguguaua

SEQ ID NO: 131259 - RNA, 16 nt, Human herpesvirus 3
gaagacuuugacuuug

SEQ ID NO: 131260 - RNA, 19 nt, Human herpesvirus 3
gaagacuuugacuuugaug

SEQ ID NO: 131261 - RNA, 20 nt, Human herpesvirus 3
gaaauaacggucgcguguac

SEQ ID NO: 131262 - RNA, 18 nt, Human herpesvirus 3
gaaagcagucaacccauc

SEQ ID NO: 131263 - RNA, 12 nt, Human herpesvirus 3
gaaauaguuuca

SEQ ID NO: 131264 - RNA, 23 nt, Human herpesvirus 3
gaaaguuguuggcgcaugccauu

SEQ ID NO: 131265 - RNA, 15 nt, Human herpesvirus 3
gaaagguauauguca

SEQ ID NO: 131266 - RNA, 23 nt, Human herpesvirus 3
gaaauguaaucaguugggauaaa

SEQ ID NO: 131267 - RNA, 20 nt, Human herpesvirus 3
gaacucugaguucaaagcaa

SEQ ID NO: 131268 - RNA, 22 nt, Human herpesvirus 3
gaaaaaaaaaaaacaacgauua

SEQ ID NO: 131269 - RNA, 21 nt, Human herpesvirus 3
gaaacgcuuugaagcuguuuu

SEQ ID NO: 131270 - RNA, 20 nt, Human herpesvirus 3
gaaacccucaagaauguaau

SEQ ID NO: 131271 - RNA, 13 nt, Human herpesvirus 3
gaaagauugcagu

SEQ ID NO: 131272 - RNA, 17 nt, Human herpesvirus 3
gaaagauugcagucauu

SEQ ID NO: 131273 - RNA, 23 nt, Human herpesvirus 3
gaaaaucgacaucguuuguuucu

SEQ ID NO: 131274 - RNA, 17 nt, Human herpesvirus 3
gaaaccauguuuuccca

SEQ ID NO: 131275 - RNA, 12 nt, Human herpesvirus 3
cuuuuacaugau

SEQ ID NO: 131276 - RNA, 20 nt, Human herpesvirus 3
cuuuuacaugauccacguaa

SEQ ID NO: 131277 - RNA, 21 nt, Human herpesvirus 3
cuuuucaucauacgcauuuac

SEQ ID NO: 131278 - RNA, 14 nt, Human herpesvirus 3
cuuuucccaaaagg

SEQ ID NO: 131279 - RNA, 21 nt, Human herpesvirus 3
cuuuucccaaaaggauauuca

SEQ ID NO: 131280 - RNA, 22 nt, Human herpesvirus 3
cuuuuguuuguggacuuaccuu

SEQ ID NO: 131281 - RNA, 21 nt, Human herpesvirus 3
cuuugucgcucuaaugcagug

SEQ ID NO: 131282 - RNA, 20 nt, Human herpesvirus 3
cuuuggaccacggcuaauaa

SEQ ID NO: 131283 - RNA, 18 nt, Human herpesvirus 3
cuuuuaaagcaucuauau

SEQ ID NO: 131284 - RNA, 13 nt, Human herpesvirus 3
cuuugacuuugau

SEQ ID NO: 131285 - RNA, 22 nt, Human herpesvirus 3
cuuugaagacuuugacuuugau

SEQ ID NO: 131286 - RNA, 12 nt, Human herpesvirus 3
cuuaacaaacau

SEQ ID NO: 131287 - RNA, 13 nt, Human herpesvirus 3
cuuaacaaacaua

SEQ ID NO: 131288 - RNA, 16 nt, Human herpesvirus 3
cuuaacaaacauauaa

SEQ ID NO: 131289 - RNA, 19 nt, Human herpesvirus 3
cuuaaaggccgagcuggua

SEQ ID NO: 131290 - RNA, 19 nt, Human herpesvirus 3
uuuuugcaucagccuccac

SEQ ID NO: 131291 - RNA, 17 nt, Human herpesvirus 3
uuuuucggguacauagu

SEQ ID NO: 131292 - RNA, 16 nt, Human herpesvirus 3
uuuugucgggacacaa

SEQ ID NO: 131293 - RNA, 19 nt, Human herpesvirus 3
uuuuguuuccgaauuuugc

SEQ ID NO: 131294 - RNA, 20 nt, Human herpesvirus 3
uuuugcuccugaagacucca

SEQ ID NO: 131295 - RNA, 15 nt, Human herpesvirus 3
uuggcggaagauaca

SEQ ID NO: 131296 - RNA, 19 nt, Human herpesvirus 3
uuguacaauugucuguaua

SEQ ID NO: 131297 - RNA, 16 nt, Human herpesvirus 3
uuggcgcaugccauug

SEQ ID NO: 131298 - RNA, 12 nt, Human herpesvirus 3
uugucaaaacau

SEQ ID NO: 131299 - RNA, 13 nt, Human herpesvirus 3
uugucaaaacaua

SEQ ID NO: 131300 - RNA, 12 nt, Human herpesvirus 3
uuguaguacagg

SEQ ID NO: 131301 - RNA, 14 nt, Human herpesvirus 3
uuguaguacagggc

SEQ ID NO: 131302 - RNA, 16 nt, Human herpesvirus 3
uuugcucguauauaca

SEQ ID NO: 131303 - RNA, 9 nt, Human herpesvirus 3
uugucauaa

SEQ ID NO: 131304 - RNA, 14 nt, Human herpesvirus 3
uuguccaacuguau

SEQ ID NO: 131305 - RNA, 19 nt, Human herpesvirus 3
uuguccacgcgcgugucua

SEQ ID NO: 131306 - RNA, 19 nt, Human herpesvirus 3
uuuuaaagcaucuauauga

SEQ ID NO: 131307 - RNA, 14 nt, Human herpesvirus 3
uuuuaaauguuguc

SEQ ID NO: 131308 - RNA, 16 nt, Human herpesvirus 3
uuuuaaauguugucaa

SEQ ID NO: 131309 - RNA, 21 nt, Human herpesvirus 3
uuuuacaggccggagugucca

SEQ ID NO: 131310 - RNA, 22 nt, Human herpesvirus 3
uuuuacaggccggaguguccag

SEQ ID NO: 131311 - RNA, 16 nt, Human herpesvirus 3
uuuuagaauacaaucg

SEQ ID NO: 131312 - RNA, 23 nt, Human herpesvirus 3
uuuuaguaguguugaauggugau

SEQ ID NO: 131313 - RNA, 14 nt, Human herpesvirus 3
uuuuaugagaguuu

SEQ ID NO: 131314 - RNA, 22 nt, Human herpesvirus 3
uuuucagcaaguuuaacauuuc

SEQ ID NO: 131315 - RNA, 20 nt, Human herpesvirus 3
uuuucaucauacgcauuuac

SEQ ID NO: 131316 - RNA, 22 nt, Human herpesvirus 3
uuuucaugcuugucaaaacaua

SEQ ID NO: 131317 - RNA, 15 nt, Human herpesvirus 3
uuuucugcucaugga

SEQ ID NO: 131318 - RNA, 14 nt, Human herpesvirus 3
uuuugcauaugaca

SEQ ID NO: 131319 - RNA, 21 nt, Human herpesvirus 3
ugcacgcaucaaucugagaag

SEQ ID NO: 131320 - RNA, 14 nt, Human herpesvirus 3
ugcuucaauuccaa

SEQ ID NO: 131321 - RNA, 19 nt, Human herpesvirus 3
ugcuuguaaaacauaucaa

SEQ ID NO: 131322 - RNA, 19 nt, Human herpesvirus 3
ugcuugucaaaacauacua

SEQ ID NO: 131323 - RNA, 21 nt, Human herpesvirus 3
ugcuugucaaaacauacuaau

SEQ ID NO: 131324 - RNA, 17 nt, Human herpesvirus 3
ugcuuggggguuuacaa

SEQ ID NO: 131325 - RNA, 23 nt, Human herpesvirus 3
ugcuuggggguuuacaaguacaa

SEQ ID NO: 131326 - RNA, 22 nt, Human herpesvirus 3
ugcugauacauaaacacagagu

SEQ ID NO: 131327 - RNA, 15 nt, Human herpesvirus 3
ugcucugcaaauaca

SEQ ID NO: 131328 - RNA, 19 nt, Human herpesvirus 3
ugcucugcaaauacaauaa

SEQ ID NO: 131329 - RNA, 18 nt, Human herpesvirus 3
ugcugggggacgacguga

SEQ ID NO: 131330 - RNA, 23 nt, Human herpesvirus 3
ugcuggguuauuuaacaucccag

SEQ ID NO: 131331 - RNA, 17 nt, Human herpesvirus 3
uggaaugggagcucuuu

SEQ ID NO: 131332 - RNA, 16 nt, Human herpesvirus 3
uggaaucguaguaaaa

SEQ ID NO: 131333 - RNA, 21 nt, Human herpesvirus 3
uggaaucguaguaaaacggaa

SEQ ID NO: 131334 - RNA, 13 nt, Human herpesvirus 3
uggaaacuguugg

SEQ ID NO: 131335 - RNA, 22 nt, Human herpesvirus 3
uggauauagcgcugucgucaua

SEQ ID NO: 131336 - RNA, 22 nt, Human herpesvirus 3
uggauaugggauuauggaaguc

SEQ ID NO: 131337 - RNA, 18 nt, Human herpesvirus 3
uggaguauauuagcacua

SEQ ID NO: 131338 - RNA, 16 nt, Human herpesvirus 3
uggagaugcaaccaag

SEQ ID NO: 131339 - RNA, 17 nt, Human herpesvirus 3
uggagcguacugcagau

SEQ ID NO: 131340 - RNA, 16 nt, Human herpesvirus 3
uggacuuaccuuuauu

SEQ ID NO: 131341 - RNA, 22 nt, Human herpesvirus 3
uggacuugaaaaaucauuauga

SEQ ID NO: 131342 - RNA, 14 nt, Human herpesvirus 3
uggacuuuaccgga

SEQ ID NO: 131343 - RNA, 18 nt, Human herpesvirus 3
uggacaucgcugaugcca

SEQ ID NO: 131344 - RNA, 21 nt, Human herpesvirus 3
uggacauugcggaucccaaaa

SEQ ID NO: 131345 - RNA, 16 nt, Human herpesvirus 3
uggacgcaacgcagau

SEQ ID NO: 131346 - RNA, 13 nt, Human herpesvirus 3
uggacgcauuuga

SEQ ID NO: 131347 - RNA, 18 nt, Human herpesvirus 3
uguacaauugucuguaua

SEQ ID NO: 131348 - RNA, 17 nt, Human herpesvirus 3
uguaauucgugugcaau

SEQ ID NO: 131349 - RNA, 20 nt, Human herpesvirus 3
uguaauuuaggaaccgaaca

SEQ ID NO: 131350 - RNA, 17 nt, Human herpesvirus 3
uguaaucaguugggaua

SEQ ID NO: 131351 - RNA, 17 nt, Human herpesvirus 3
uguaaaauaaacugaau

SEQ ID NO: 131352 - RNA, 15 nt, Human herpesvirus 3
uguaaaggaucucca

SEQ ID NO: 131353 - RNA, 22 nt, Human herpesvirus 3
uguaacagaggacgccgauaaa

SEQ ID NO: 131354 - RNA, 20 nt, Human herpesvirus 3
uguaacaugcgcuacuaugu

SEQ ID NO: 131355 - RNA, 15 nt, Human herpesvirus 3
uguacguaaccauau

SEQ ID NO: 131356 - RNA, 20 nt, Human herpesvirus 3
uguacgcuccagaacgccau

SEQ ID NO: 131357 - RNA, 16 nt, Human herpesvirus 3
uguaccguuugcacaa

SEQ ID NO: 131358 - RNA, 23 nt, Human herpesvirus 3
uguacuuguaaacccccaagcaa

SEQ ID NO: 131359 - RNA, 23 nt, Human herpesvirus 3
ugucacauauuauaaacuguuua

SEQ ID NO: 131360 - RNA, 14 nt, Human herpesvirus 3
ugucaccaaagcca

SEQ ID NO: 131361 - RNA, 22 nt, Human herpesvirus 3
uguggagcguacugcagauaca

SEQ ID NO: 131362 - RNA, 20 nt, Human herpesvirus 3
uguggaaagguauaugucaa

SEQ ID NO: 131363 - RNA, 15 nt, Human herpesvirus 3
uguccccucugguau

SEQ ID NO: 131364 - RNA, 21 nt, Human herpesvirus 3
ugucccgcuaacgugauuacu

SEQ ID NO: 131365 - RNA, 14 nt, Human herpesvirus 3
uggcgcaugccauu

SEQ ID NO: 131366 - RNA, 21 nt, Human herpesvirus 3
uggccuugggacaucaaccag

SEQ ID NO: 131367 - RNA, 15 nt, Human herpesvirus 3
uggcauuaaacccac

SEQ ID NO: 131368 - RNA, 16 nt, Human herpesvirus 3
uggaugaagauugucc

SEQ ID NO: 131369 - RNA, 21 nt, Human herpesvirus 3
ugguacauuaaucgcugauaa

SEQ ID NO: 131370 - RNA, 20 nt, Human herpesvirus 3
ugguagcaauucccaguaaa

SEQ ID NO: 131371 - RNA, 18 nt, Human herpesvirus 3
ugggaagccguaaucaau

SEQ ID NO: 131372 - RNA, 14 nt, Human herpesvirus 3
ugggacuacaagca

SEQ ID NO: 131373 - RNA, 14 nt, Human herpesvirus 3
uggucuuguuugaa

SEQ ID NO: 131374 - RNA, 14 nt, Human herpesvirus 3
uguaaaacauauca

SEQ ID NO: 131375 - RNA, 15 nt, Human herpesvirus 3
uguaaaacauaucaa

SEQ ID NO: 131376 - RNA, 16 nt, Human herpesvirus 3
uuaccacccauaaaaa

SEQ ID NO: 131377 - RNA, 13 nt, Human herpesvirus 3
uuaccguacaaca

SEQ ID NO: 131378 - RNA, 23 nt, Human herpesvirus 3
uuaccguguuuacggcagucuga

SEQ ID NO: 131379 - RNA, 20 nt, Human herpesvirus 3
uuacauugcuuucaaaccaa

SEQ ID NO: 131380 - RNA, 14 nt, Human herpesvirus 3
uuaauuaauggaua

SEQ ID NO: 131381 - RNA, 21 nt, Human herpesvirus 3
uuaauaggcgcuacuuuauau

SEQ ID NO: 131382 - RNA, 17 nt, Human herpesvirus 3
uuaauacgguucaugac

SEQ ID NO: 131383 - RNA, 12 nt, Human herpesvirus 3
uuaauguaucug

SEQ ID NO: 131384 - RNA, 22 nt, Human herpesvirus 3
uuaaugguggaccgguuguaug

SEQ ID NO: 131385 - RNA, 19 nt, Human herpesvirus 3
uuaaugcaaccaucagauc

SEQ ID NO: 131386 - RNA, 14 nt, Human herpesvirus 3
ugugggaaacauca

SEQ ID NO: 131387 - RNA, 23 nt, Human herpesvirus 3
uguguaccauagaugaacacauu

SEQ ID NO: 131388 - RNA, 18 nt, Human herpesvirus 3
ugugucccauuuugugau

SEQ ID NO: 131389 - RNA, 23 nt, Human herpesvirus 3
uguguguaccauagaugaacaca

SEQ ID NO: 131390 - RNA, 19 nt, Human herpesvirus 3
uuaagacauggccgugaau

SEQ ID NO: 131391 - RNA, 20 nt, Human herpesvirus 3
uuaagacauggccgugaaug

SEQ ID NO: 131392 - RNA, 18 nt, Human herpesvirus 3
uguguuuuuaucugcaau

SEQ ID NO: 131393 - RNA, 14 nt, Human herpesvirus 3
uguguuuuuauuaa

SEQ ID NO: 131394 - RNA, 17 nt, Human herpesvirus 3
uguuaauaaccauauau

SEQ ID NO: 131395 - RNA, 14 nt, Human herpesvirus 3
uuagcauccaaauu

SEQ ID NO: 131396 - RNA, 17 nt, Human herpesvirus 3
uuagauuuaaaaccaau

SEQ ID NO: 131397 - RNA, 23 nt, Human herpesvirus 3
uuagaggcauaccgaaugcgauu

SEQ ID NO: 131398 - RNA, 17 nt, Human herpesvirus 3
uuacguauguaccagua

SEQ ID NO: 131399 - RNA, 17 nt, Human herpesvirus 3
uuauauauauguuccau

SEQ ID NO: 131400 - RNA, 19 nt, Human herpesvirus 3
uuauauucacaugcaguua

SEQ ID NO: 131401 - RNA, 20 nt, Human herpesvirus 3
uuaucaacgacauacauuag

SEQ ID NO: 131402 - RNA, 13 nt, Human herpesvirus 3
uuauaugucacau

SEQ ID NO: 131403 - RNA, 15 nt, Human herpesvirus 3
uuaucccacauguau

SEQ ID NO: 131404 - RNA, 18 nt, Human herpesvirus 3
uuauaauccuuaucuugc

SEQ ID NO: 131405 - RNA, 13 nt, Human herpesvirus 3
uuauacguuucaa

SEQ ID NO: 131406 - RNA, 21 nt, Human herpesvirus 3
uuauacccgauaauauacaaa

SEQ ID NO: 131407 - RNA, 22 nt, Human herpesvirus 3
uuauagacacgcuacagaagac

SEQ ID NO: 131408 - RNA, 14 nt, Human herpesvirus 3
uuauuguauauaca

SEQ ID NO: 131409 - RNA, 16 nt, Human herpesvirus 3
uuauuuagugauuaca

SEQ ID NO: 131410 - RNA, 18 nt, Human herpesvirus 3
uuauucucgcuugcagcu

SEQ ID NO: 131411 - RNA, 19 nt, Human herpesvirus 3
uuauuccaacgcccggcga

SEQ ID NO: 131412 - RNA, 16 nt, Human herpesvirus 3
uuaucucgacguccaa

SEQ ID NO: 131413 - RNA, 18 nt, Human herpesvirus 3
uuaucugcaaucauaaau

SEQ ID NO: 131414 - RNA, 21 nt, Human herpesvirus 3
uuaugaugguaguuaccaaag

SEQ ID NO: 131415 - RNA, 19 nt, Human herpesvirus 3
uuccccacaccguuuaccu

SEQ ID NO: 131416 - RNA, 21 nt, Human herpesvirus 3
uucccaacgcauaaccagcga

SEQ ID NO: 131417 - RNA, 20 nt, Human herpesvirus 3
uucggcgcggaugcauuuau

SEQ ID NO: 131418 - RNA, 19 nt, Human herpesvirus 3
uuccacgggucaugcaggc

SEQ ID NO: 131419 - RNA, 18 nt, Human herpesvirus 3
uucuaccaacgcacuguu

SEQ ID NO: 131420 - RNA, 19 nt, Human herpesvirus 3
uucuacaccuuugcaugac

SEQ ID NO: 131421 - RNA, 14 nt, Human herpesvirus 3
uucgguugguggua

SEQ ID NO: 131422 - RNA, 22 nt, Human herpesvirus 3
uucguaagcaauaaaauggaua

SEQ ID NO: 131423 - RNA, 13 nt, Human herpesvirus 3
uucgugugcaaua

SEQ ID NO: 131424 - RNA, 13 nt, Human herpesvirus 3
uuccaacuggaaa

SEQ ID NO: 131425 - RNA, 19 nt, Human herpesvirus 3
uuccaacuggaaaugugcu

SEQ ID NO: 131426 - RNA, 16 nt, Human herpesvirus 3
uuccaaauuaucccgu

SEQ ID NO: 131427 - RNA, 21 nt, Human herpesvirus 3
uucacgccaguugacuuuguu

SEQ ID NO: 131428 - RNA, 16 nt, Human herpesvirus 3
uucaauauuuauacaa

SEQ ID NO: 131429 - RNA, 17 nt, Human herpesvirus 3
uucaauauuuauacaag

SEQ ID NO: 131430 - RNA, 22 nt, Human herpesvirus 3
uucaauauuuauacaagcauaa

SEQ ID NO: 131431 - RNA, 19 nt, Human herpesvirus 3
uucaaugauggacuugaaa

SEQ ID NO: 131432 - RNA, 18 nt, Human herpesvirus 3
uucaagucucaaugaaac

SEQ ID NO: 131433 - RNA, 21 nt, Human herpesvirus 3
uucaaguuaaauaacauguca

SEQ ID NO: 131434 - RNA, 19 nt, Human herpesvirus 3
uucaaguaaauaugugcau

SEQ ID NO: 131435 - RNA, 19 nt, Human herpesvirus 3
uucaaacggauacuacuaa

SEQ ID NO: 131436 - RNA, 14 nt, Human herpesvirus 3
uucaaaggacauuu

SEQ ID NO: 131437 - RNA, 12 nt, Human herpesvirus 3
uucaaaggcauu

SEQ ID NO: 131438 - RNA, 15 nt, Human herpesvirus 3
uuggagcuacacgug

SEQ ID NO: 131439 - RNA, 14 nt, Human herpesvirus 3
uuggacuaacaaag

SEQ ID NO: 131440 - RNA, 12 nt, Human herpesvirus 3
uucuuguucccg

SEQ ID NO: 131441 - RNA, 15 nt, Human herpesvirus 3
uucuuguucccgcac

SEQ ID NO: 131442 - RNA, 15 nt, Human herpesvirus 3
uucuuagaaaagcca

SEQ ID NO: 131443 - RNA, 17 nt, Human herpesvirus 3
uucugcauaagcucugu

SEQ ID NO: 131444 - RNA, 19 nt, Human herpesvirus 3
uucugcauaagcucuguau

SEQ ID NO: 131445 - RNA, 13 nt, Human herpesvirus 3
uccagcaucaucu

SEQ ID NO: 131446 - RNA, 21 nt, Human herpesvirus 3
uccagauugucccguguguga

SEQ ID NO: 131447 - RNA, 23 nt, Human herpesvirus 3
uccaggcauggggggaguguuuc

SEQ ID NO: 131448 - RNA, 13 nt, Human herpesvirus 3
uccacuuacagga

SEQ ID NO: 131449 - RNA, 19 nt, Human herpesvirus 3
uccacuuauccaacaaauu

SEQ ID NO: 131450 - RNA, 12 nt, Human herpesvirus 3
uccagaguacag

SEQ ID NO: 131451 - RNA, 13 nt, Human herpesvirus 3
uccagaguacagg

SEQ ID NO: 131452 - RNA, 22 nt, Human herpesvirus 3
uccauaggggggguuacauaaa

SEQ ID NO: 131453 - RNA, 22 nt, Human herpesvirus 3
uccacgcgcgugucuauaguca

SEQ ID NO: 131454 - RNA, 18 nt, Human herpesvirus 3
uccaaaugcgcaaaaugu

SEQ ID NO: 131455 - RNA, 22 nt, Human herpesvirus 3
uccaaccgacccagacgugucu

SEQ ID NO: 131456 - RNA, 17 nt, Human herpesvirus 3
ucauuuucauagacgua

SEQ ID NO: 131457 - RNA, 17 nt, Human herpesvirus 3
ucauuuauuaccacauc

SEQ ID NO: 131458 - RNA, 20 nt, Human herpesvirus 3
ucauauauacccaucgucaa

SEQ ID NO: 131459 - RNA, 13 nt, Human herpesvirus 3
ucgagcuucacug

SEQ ID NO: 131460 - RNA, 21 nt, Human herpesvirus 3
ucgauuagucuguaauggagg

SEQ ID NO: 131461 - RNA, 10 nt, Human herpesvirus 3
ucgauuucaa

SEQ ID NO: 131462 - RNA, 15 nt, Human herpesvirus 3
uccuuacccauauga

SEQ ID NO: 131463 - RNA, 16 nt, Human herpesvirus 3
uccuucaacacaccca

SEQ ID NO: 131464 - RNA, 19 nt, Human herpesvirus 3
uccuagaagcguuaccaca

SEQ ID NO: 131465 - RNA, 22 nt, Human herpesvirus 3
uccauuaaaaguuuacguguau

SEQ ID NO: 131466 - RNA, 20 nt, Human herpesvirus 3
ucccgucauagcaaauacaa

SEQ ID NO: 131467 - RNA, 21 nt, Human herpesvirus 3
ucccgucauagcaaauacaaa

SEQ ID NO: 131468 - RNA, 23 nt, Human herpesvirus 3
ucccuguugcgguuguuguccag

SEQ ID NO: 131469 - RNA, 15 nt, Human herpesvirus 3
ucaccgauugggcaa

SEQ ID NO: 131470 - RNA, 17 nt, Human herpesvirus 3
ucacgcucaaugaacag

SEQ ID NO: 131471 - RNA, 17 nt, Human herpesvirus 3
ucacuauaaacguauuc

SEQ ID NO: 131472 - RNA, 20 nt, Human herpesvirus 3
uaugggauuauggaagucca

SEQ ID NO: 131473 - RNA, 14 nt, Human herpesvirus 3
uaugcgucauuuau

SEQ ID NO: 131474 - RNA, 17 nt, Human herpesvirus 3
uauccugcgcagaugua

SEQ ID NO: 131475 - RNA, 13 nt, Human herpesvirus 3
ucauaauaugaua

SEQ ID NO: 131476 - RNA, 15 nt, Human herpesvirus 3
ucaggucugucaugu

SEQ ID NO: 131477 - RNA, 19 nt, Human herpesvirus 3
ucagucuaaaaauaauguu

SEQ ID NO: 131478 - RNA, 13 nt, Human herpesvirus 3
ucagaaacacuug

SEQ ID NO: 131479 - RNA, 12 nt, Human herpesvirus 3
ucagaagauaua

SEQ ID NO: 131480 - RNA, 13 nt, Human herpesvirus 3
ucagaagauauaa

SEQ ID NO: 131481 - RNA, 23 nt, Human herpesvirus 3
ucagacugccguaaacacgguaa

SEQ ID NO: 131482 - RNA, 15 nt, Human herpesvirus 3
ucagaucaucugaca

SEQ ID NO: 131483 - RNA, 14 nt, Human herpesvirus 3
ucagagaagcuaua

SEQ ID NO: 131484 - RNA, 23 nt, Human herpesvirus 3
ucagagguauuuuauuauauucu

SEQ ID NO: 131485 - RNA, 19 nt, Human herpesvirus 3
ucagcaaguuuaacauuuc

SEQ ID NO: 131486 - RNA, 19 nt, Human herpesvirus 3
ucuuucagguugaacugcu

SEQ ID NO: 131487 - RNA, 21 nt, Human herpesvirus 3
ucuuugaucccagcaacccca

SEQ ID NO: 131488 - RNA, 21 nt, Human herpesvirus 3
ugaacagcaacggaugcauag

SEQ ID NO: 131489 - RNA, 20 nt, Human herpesvirus 3
ugaagacuuugacuuugaug

SEQ ID NO: 131490 - RNA, 17 nt, Human herpesvirus 3
ugaagaaggacaguugg

SEQ ID NO: 131491 - RNA, 17 nt, Human herpesvirus 3
ugaacaguuuauaauca

SEQ ID NO: 131492 - RNA, 15 nt, Human herpesvirus 3
ugaacgguaccccaa

SEQ ID NO: 131493 - RNA, 18 nt, Human herpesvirus 3
ugaauuauuaaacuuaag

SEQ ID NO: 131494 - RNA, 14 nt, Human herpesvirus 3
ugaauuuaacauag

SEQ ID NO: 131495 - RNA, 22 nt, Human herpesvirus 3
ugacaaaaugacaacgguuuca

SEQ ID NO: 131496 - RNA, 20 nt, Human herpesvirus 3
ugaauuucacguauugugua

SEQ ID NO: 131497 - RNA, 16 nt, Human herpesvirus 3
ugacucccuccaaucg

SEQ ID NO: 131498 - RNA, 22 nt, Human herpesvirus 3
ugacuugacgcgaacaccgcug

SEQ ID NO: 131499 - RNA, 19 nt, Human herpesvirus 3
ugacuuugaugagaaugua

SEQ ID NO: 131500 - RNA, 13 nt, Human herpesvirus 3
ugagaauguaaca

SEQ ID NO: 131501 - RNA, 14 nt, Human herpesvirus 3
ugagcaucucugga

SEQ ID NO: 131502 - RNA, 21 nt, Human herpesvirus 3
ugagaugagcagcgcagucua

SEQ ID NO: 131503 - RNA, 17 nt, Human herpesvirus 3
ugauauaagguguuaau

SEQ ID NO: 131504 - RNA, 19 nt, Human herpesvirus 3
ugauccacguaauuugccc

SEQ ID NO: 131505 - RNA, 15 nt, Human herpesvirus 3
ugcaccgguccaaca

SEQ ID NO: 131506 - RNA, 16 nt, Human herpesvirus 3
ugcacaacaaaagcua

SEQ ID NO: 131507 - RNA, 20 nt, Human herpesvirus 3
ugcacaacaaaagcuauaua

SEQ ID NO: 131508 - RNA, 23 nt, Human herpesvirus 3
ugaugaucccaauaaacggcaua

SEQ ID NO: 131509 - RNA, 15 nt, Human herpesvirus 3
ugaucugguaaaugu

SEQ ID NO: 131510 - RNA, 15 nt, Human herpesvirus 3
ugauguagcaucgga

SEQ ID NO: 131511 - RNA, 15 nt, Human herpesvirus 3
ugauggacuugaaaa

SEQ ID NO: 131512 - RNA, 18 nt, Human herpesvirus 3
ucuuaacgggguuauuau

SEQ ID NO: 131513 - RNA, 15 nt, Human herpesvirus 3
ucuuaacguugauga

SEQ ID NO: 131514 - RNA, 15 nt, Human herpesvirus 3
ucuguuacauucuca

SEQ ID NO: 131515 - RNA, 14 nt, Human herpesvirus 3
ucuuacuugagauu

SEQ ID NO: 131516 - RNA, 23 nt, Human herpesvirus 3
ucugauagcgccaaaauggaugc

SEQ ID NO: 131517 - RNA, 13 nt, Human herpesvirus 3
ucugaccauuuac

SEQ ID NO: 131518 - RNA, 22 nt, Human herpesvirus 3
ucuuuaagacguccacacagcc

SEQ ID NO: 131519 - RNA, 22 nt, Human herpesvirus 3
ucuuuaauaggcgcuacuuuau

SEQ ID NO: 131520 - RNA, 14 nt, Human herpesvirus 3
ucuucauauguaau

SEQ ID NO: 131521 - RNA, 12 nt, Human herpesvirus 3
ucgcccccgugg

SEQ ID NO: 131522 - RNA, 18 nt, Human herpesvirus 3
ucgcaacacaucuacugu

SEQ ID NO: 131523 - RNA, 14 nt, Human herpesvirus 3
ucuacaacauuggc

SEQ ID NO: 131524 - RNA, 22 nt, Human herpesvirus 3
ucuacaccuaacuuuacuguua

SEQ ID NO: 131525 - RNA, 13 nt, Human herpesvirus 3
ucuacgcauuuac

SEQ ID NO: 131526 - RNA, 13 nt, Human herpesvirus 3
ucuacagauuuau

SEQ ID NO: 131527 - RNA, 22 nt, Human herpesvirus 3
ucuacgugguaccaaaaacaca

SEQ ID NO: 131528 - RNA, 23 nt, Human herpesvirus 3
ucuagaugauguugauauccaag

SEQ ID NO: 131529 - RNA, 17 nt, Human herpesvirus 3
ucuauaaguauggagug

SEQ ID NO: 131530 - RNA, 14 nt, Human herpesvirus 3
ucuaucgcacauca

SEQ ID NO: 131531 - RNA, 22 nt, Human herpesvirus 3
cguuuguauuuauacaccucua

SEQ ID NO: 131532 - RNA, 20 nt, Human herpesvirus 3
cguuuccuagccacacccac

SEQ ID NO: 131533 - RNA, 20 nt, Human herpesvirus 3
cguuuguguugugacuugac

SEQ ID NO: 131534 - RNA, 19 nt, Human herpesvirus 3
cguuuuaguaaaauaccau

SEQ ID NO: 131535 - RNA, 12 nt, Human herpesvirus 3
cguuuuuccaca

SEQ ID NO: 131536 - RNA, 16 nt, Human herpesvirus 3
cuaacucagcugugag

SEQ ID NO: 131537 - RNA, 21 nt, Human herpesvirus 3
cuaauauaaauaacauaacca

SEQ ID NO: 131538 - RNA, 19 nt, Human herpesvirus 3
cuagaacgugcguuauacu

SEQ ID NO: 131539 - RNA, 17 nt, Human herpesvirus 3
cuaauaaaaacaucaaa

SEQ ID NO: 131540 - RNA, 18 nt, Human herpesvirus 3
cuaauaaacgaugacaca

SEQ ID NO: 131541 - RNA, 16 nt, Human herpesvirus 3
cuagauuuuaccuuau

SEQ ID NO: 131542 - RNA, 22 nt, Human herpesvirus 3
cuagauuuuaccuuauguguua

SEQ ID NO: 131543 - RNA, 23 nt, Human herpesvirus 3
cuagauuuuaccuuauguguuau

SEQ ID NO: 131544 - RNA, 15 nt, Human herpesvirus 3
cuaugccauuugaga

SEQ ID NO: 131545 - RNA, 17 nt, Human herpesvirus 3
cuaugccauuugagaua

SEQ ID NO: 131546 - RNA, 12 nt, Human herpesvirus 3
cuauguaccauu

SEQ ID NO: 131547 - RNA, 13 nt, Human herpesvirus 3
cucaauacuuguc

SEQ ID NO: 131548 - RNA, 14 nt, Human herpesvirus 3
cuauuccaaaaugg

SEQ ID NO: 131549 - RNA, 22 nt, Human herpesvirus 3
cuccguuacgggggugugguua

SEQ ID NO: 131550 - RNA, 13 nt, Human herpesvirus 3
cuccuaacuauaa

SEQ ID NO: 131551 - RNA, 19 nt, Human herpesvirus 3
cucgccuccacugcauuua

SEQ ID NO: 131552 - RNA, 12 nt, Human herpesvirus 3
cucgacguccaa

SEQ ID NO: 131553 - RNA, 16 nt, Human herpesvirus 3
cucuguuacauucuca

SEQ ID NO: 131554 - RNA, 12 nt, Human herpesvirus 3
cucgugggacua

SEQ ID NO: 131555 - RNA, 15 nt, Human herpesvirus 3
cucguauauacaugu

SEQ ID NO: 131556 - RNA, 18 nt, Human herpesvirus 3
cucguguagucuuugauc

SEQ ID NO: 131557 - RNA, 22 nt, Human herpesvirus 3
cucgugucuuuuuuugaugucu

SEQ ID NO: 131558 - RNA, 14 nt, Human herpesvirus 3
cucuaacaaugcac

SEQ ID NO: 131559 - RNA, 22 nt, Human herpesvirus 3
cucuaacaaugcacugaaccac

SEQ ID NO: 131560 - RNA, 15 nt, Human herpesvirus 3
cucuuauauauguaa

SEQ ID NO: 131561 - RNA, 13 nt, Human herpesvirus 3
cucuguuguauca

SEQ ID NO: 131562 - RNA, 14 nt, Human herpesvirus 3
cucuguuguaucac

SEQ ID NO: 131563 - RNA, 14 nt, Human herpesvirus 3
cugaccauuuacca

SEQ ID NO: 131564 - RNA, 21 nt, Human herpesvirus 3
cuguaaaaaccauggacaguc

SEQ ID NO: 131565 - RNA, 16 nt, Human herpesvirus 3
cuggcuuaacagugcc

SEQ ID NO: 131566 - RNA, 18 nt, Human herpesvirus 3
cuggaaaugugcugucaa

SEQ ID NO: 131567 - RNA, 18 nt, Human herpesvirus 3
cuggcauuuccaaacaca

SEQ ID NO: 131568 - RNA, 20 nt, Human herpesvirus 3
cugccguggaccccuguauu

SEQ ID NO: 131569 - RNA, 22 nt, Human herpesvirus 3
cugcaaggcucaucaacguuaa

SEQ ID NO: 131570 - RNA, 20 nt, Human herpesvirus 3
cgcauggccaagguuuugga

SEQ ID NO: 131571 - RNA, 21 nt, Human herpesvirus 3
cgccuuuaauuaccucuguca

SEQ ID NO: 131572 - RNA, 21 nt, Human herpesvirus 3
cgccuggccccuugaaccacu

SEQ ID NO: 131573 - RNA, 17 nt, Human herpesvirus 3
cgccuuuuaugaaugua

SEQ ID NO: 131574 - RNA, 15 nt, Human herpesvirus 3
cgcccuaaauuacaa

SEQ ID NO: 131575 - RNA, 15 nt, Human herpesvirus 3
cgcccccguguuacu

SEQ ID NO: 131576 - RNA, 15 nt, Human herpesvirus 3
cgaugaaguaguggc

SEQ ID NO: 131577 - RNA, 17 nt, Human herpesvirus 3
cgauggggaucuuccaa

SEQ ID NO: 131578 - RNA, 20 nt, Human herpesvirus 3
cgauggggaucuuccaauau

SEQ ID NO: 131579 - RNA, 22 nt, Human herpesvirus 3
cgauguuuuuaauccaauguuu

SEQ ID NO: 131580 - RNA, 18 nt, Human herpesvirus 3
cgauagaauuuucacucu

SEQ ID NO: 131581 - RNA, 15 nt, Human herpesvirus 3
cgaguuuguggggga

SEQ ID NO: 131582 - RNA, 23 nt, Human herpesvirus 3
cgagaagggggauuuacaaugac

SEQ ID NO: 131583 - RNA, 19 nt, Human herpesvirus 3
ccuagaagcguuaccacag

SEQ ID NO: 131584 - RNA, 15 nt, Human herpesvirus 3
cgacgugagggugac

SEQ ID NO: 131585 - RNA, 12 nt, Human herpesvirus 3
cggcaugcauug

SEQ ID NO: 131586 - RNA, 20 nt, Human herpesvirus 3
cggccgcuacccgaaagccc

SEQ ID NO: 131587 - RNA, 16 nt, Human herpesvirus 3
cggccuguauaugauc

SEQ ID NO: 131588 - RNA, 16 nt, Human herpesvirus 3
cggcgaagacaacgua

SEQ ID NO: 131589 - RNA, 16 nt, Human herpesvirus 3
cggcgcggaugcauuu

SEQ ID NO: 131590 - RNA, 18 nt, Human herpesvirus 3
cggcgugucccaaacagc

SEQ ID NO: 131591 - RNA, 21 nt, Human herpesvirus 3
cggcgagaauuucuaugugca

SEQ ID NO: 131592 - RNA, 14 nt, Human herpesvirus 3
cggcguccucuguu

SEQ ID NO: 131593 - RNA, 18 nt, Human herpesvirus 3
cggcguccucuguuacau

SEQ ID NO: 131594 - RNA, 21 nt, Human herpesvirus 3
cggcguccucuguuacauucu

SEQ ID NO: 131595 - RNA, 23 nt, Human herpesvirus 3
cgggagcuuccgaaagcagucaa

SEQ ID NO: 131596 - RNA, 12 nt, Human herpesvirus 3
cgcguacgugcc

SEQ ID NO: 131597 - RNA, 16 nt, Human herpesvirus 3
cgcgugagggauggau

SEQ ID NO: 131598 - RNA, 14 nt, Human herpesvirus 3
cgcgcggacuguuu

SEQ ID NO: 131599 - RNA, 17 nt, Human herpesvirus 3
cgcuacccgaaagcccg

SEQ ID NO: 131600 - RNA, 18 nt, Human herpesvirus 3
cgcuauuuucaguauuaa

SEQ ID NO: 131601 - RNA, 14 nt, Human herpesvirus 3
cgcuggcauuucca

SEQ ID NO: 131602 - RNA, 18 nt, Human herpesvirus 3
cguguuaaacaaacagaa

SEQ ID NO: 131603 - RNA, 14 nt, Human herpesvirus 3
cgugaggaaaaaga

SEQ ID NO: 131604 - RNA, 16 nt, Human herpesvirus 3
cgugacagaaacauca

SEQ ID NO: 131605 - RNA, 17 nt, Human herpesvirus 3
cguuguguggauuuauc

SEQ ID NO: 131606 - RNA, 20 nt, Human herpesvirus 3
cguuuauaucuguuacauuu

SEQ ID NO: 131607 - RNA, 13 nt, Human herpesvirus 3
cguugcauaaccu

SEQ ID NO: 131608 - RNA, 23 nt, Human herpesvirus 3
cguuacuacauggaguguguuac

SEQ ID NO: 131609 - RNA, 21 nt, Human herpesvirus 3
cguuagaggcuuaaucgugcc

SEQ ID NO: 131610 - RNA, 19 nt, Human herpesvirus 3
cgggugaguguacguaaua

SEQ ID NO: 131611 - RNA, 19 nt, Human herpesvirus 3
cgguccaacacuccgccga

SEQ ID NO: 131612 - RNA, 19 nt, Human herpesvirus 3
cgguggaauuaauggagua

SEQ ID NO: 131613 - RNA, 21 nt, Human herpesvirus 3
cggugaucaccgaaccggggc

SEQ ID NO: 131614 - RNA, 17 nt, Human herpesvirus 3
cguauuggcgagccauu

SEQ ID NO: 131615 - RNA, 19 nt, Human herpesvirus 3
cgucaaaaauagcuguaaa

SEQ ID NO: 131616 - RNA, 14 nt, Human herpesvirus 3
cgucagggggugga

SEQ ID NO: 131617 - RNA, 13 nt, Human herpesvirus 3
cgucccauuuaaa

SEQ ID NO: 131618 - RNA, 19 nt, Human herpesvirus 3
gacacgcucucgcuguuag

SEQ ID NO: 131619 - RNA, 20 nt, Human herpesvirus 3
gacacaguccggacaauuaa

SEQ ID NO: 131620 - RNA, 19 nt, Human herpesvirus 3
gacaccacguguugcuguu

SEQ ID NO: 131621 - RNA, 22 nt, Human herpesvirus 3
gacaccacguguugcuguuguc

SEQ ID NO: 131622 - RNA, 16 nt, Human herpesvirus 3
gacacaaaaaauuuau

SEQ ID NO: 131623 - RNA, 16 nt, Human herpesvirus 3
gacucugcgaugcauu

SEQ ID NO: 131624 - RNA, 19 nt, Human herpesvirus 3
gagcccacacaaucagaag

SEQ ID NO: 131625 - RNA, 15 nt, Human herpesvirus 3
gaggccuacgaggcu

SEQ ID NO: 131626 - RNA, 18 nt, Human herpesvirus 3
gauaaauguuagucuuga

SEQ ID NO: 131627 - RNA, 13 nt, Human herpesvirus 3
gagugguaauauu

SEQ ID NO: 131628 - RNA, 16 nt, Human herpesvirus 3
gaguguuuaacaacca

SEQ ID NO: 131629 - RNA, 22 nt, Human herpesvirus 3
gagugaucgauguaacaccaaa

SEQ ID NO: 131630 - RNA, 20 nt, Human herpesvirus 3
gagugaaucuuaaaccugac

SEQ ID NO: 131631 - RNA, 17 nt, Human herpesvirus 3
gcaauuccgucucugau

SEQ ID NO: 131632 - RNA, 16 nt, Human herpesvirus 3
gcaauugcggcuuaca

SEQ ID NO: 131633 - RNA, 19 nt, Human herpesvirus 3
gcacaacaaaagcuauaua

SEQ ID NO: 131634 - RNA, 17 nt, Human herpesvirus 3
gcacaauccacagauuc

SEQ ID NO: 131635 - RNA, 22 nt, Human herpesvirus 3
gcaaguaacagcgacuauguuu

SEQ ID NO: 131636 - RNA, 20 nt, Human herpesvirus 3
gcaaggggaucgucaguaaa

SEQ ID NO: 131637 - RNA, 20 nt, Human herpesvirus 3
gcaagcccuccgguccaugc

SEQ ID NO: 131638 - RNA, 16 nt, Human herpesvirus 3
gcaaguuuaacauuuc

SEQ ID NO: 131639 - RNA, 16 nt, Human herpesvirus 3
gcaacacaucuacugu

SEQ ID NO: 131640 - RNA, 12 nt, Human herpesvirus 3
gcaacaacccau

SEQ ID NO: 131641 - RNA, 15 nt, Human herpesvirus 3
gcaaagcuacacuuu

SEQ ID NO: 131642 - RNA, 20 nt, Human herpesvirus 3
gcaaauacaauaaacauaac

SEQ ID NO: 131643 - RNA, 21 nt, Human herpesvirus 3
gauggacuugaaaaaucauua

SEQ ID NO: 131644 - RNA, 18 nt, Human herpesvirus 3
gaugacuuugcauuggaa

SEQ ID NO: 131645 - RNA, 23 nt, Human herpesvirus 3
gaugacuuugcauuggaagucac

SEQ ID NO: 131646 - RNA, 15 nt, Human herpesvirus 3
gaugagaauguaaca

SEQ ID NO: 131647 - RNA, 16 nt, Human herpesvirus 3
gaugacacaacccgca

SEQ ID NO: 131648 - RNA, 16 nt, Human herpesvirus 3
gauguaaccuacacaa

SEQ ID NO: 131649 - RNA, 22 nt, Human herpesvirus 3
gauguacugugucucucaaaaa

SEQ ID NO: 131650 - RNA, 15 nt, Human herpesvirus 3
gauucggaaugcccg

SEQ ID NO: 131651 - RNA, 16 nt, Human herpesvirus 3
gauguuccaauggaug

SEQ ID NO: 131652 - RNA, 23 nt, Human herpesvirus 3
gaugguuguucucggucuggaau

SEQ ID NO: 131653 - RNA, 14 nt, Human herpesvirus 3
gaucacaacagaca

SEQ ID NO: 131654 - RNA, 13 nt, Human herpesvirus 3
gaucacuccaaac

SEQ ID NO: 131655 - RNA, 18 nt, Human herpesvirus 3
gaucaugaacaaacacuc

SEQ ID NO: 131656 - RNA, 21 nt, Human herpesvirus 3
gaucauuuucuuaacauugua

SEQ ID NO: 131657 - RNA, 17 nt, Human herpesvirus 3
gauacacauugucauac

SEQ ID NO: 131658 - RNA, 13 nt, Human herpesvirus 3
gauacguggaauc

SEQ ID NO: 131659 - RNA, 21 nt, Human herpesvirus 3
gauacccccgcgcaccaggcu

SEQ ID NO: 131660 - RNA, 20 nt, Human herpesvirus 3
gauacccucaaacacggguu

SEQ ID NO: 131661 - RNA, 21 nt, Human herpesvirus 3
cuuuggaccacggcuaauaaa

SEQ ID NO: 131662 - RNA, 19 nt, Human herpesvirus 3
cuuuuaauuugaagacacc

SEQ ID NO: 131663 - RNA, 21 nt, Human herpesvirus 3
cuuuuaaagcaucuauaugau

SEQ ID NO: 131664 - RNA, 18 nt, Human herpesvirus 3
cuuuucccccacauacaa

SEQ ID NO: 131665 - RNA, 21 nt, Human herpesvirus 3
gaaaaauaauagucaauguuu

SEQ ID NO: 131666 - RNA, 20 nt, Human herpesvirus 3
cuuuaauaggcgcuacuuua

SEQ ID NO: 131667 - RNA, 21 nt, Human herpesvirus 3
cuuuacaacccguggugaauu

SEQ ID NO: 131668 - RNA, 16 nt, Human herpesvirus 3
cuuuacagaggguauu

SEQ ID NO: 131669 - RNA, 18 nt, Human herpesvirus 3
cuuuaauuaccucuguca

SEQ ID NO: 131670 - RNA, 14 nt, Human herpesvirus 3
cuuucaaaccaaua

SEQ ID NO: 131671 - RNA, 21 nt, Human herpesvirus 3
cuuucagguugaacugcuacg

SEQ ID NO: 131672 - RNA, 14 nt, Human herpesvirus 3
cuugucaaaacaua

SEQ ID NO: 131673 - RNA, 15 nt, Human herpesvirus 3
cuugucaaaacauac

SEQ ID NO: 131674 - RNA, 17 nt, Human herpesvirus 3
cuugucaaaacauacua

SEQ ID NO: 131675 - RNA, 19 nt, Human herpesvirus 3
cuugucgcgcguguaugca

SEQ ID NO: 131676 - RNA, 16 nt, Human herpesvirus 3
cuugcaccacaccauc

SEQ ID NO: 131677 - RNA, 16 nt, Human herpesvirus 3
cugugggacagcuaac

SEQ ID NO: 131678 - RNA, 23 nt, Human herpesvirus 3
cugugggggccacaauaacauaa

SEQ ID NO: 131679 - RNA, 15 nt, Human herpesvirus 3
cuguaugcugauaca

SEQ ID NO: 131680 - RNA, 16 nt, Human herpesvirus 3
cugucuugguuuauaa

SEQ ID NO: 131681 - RNA, 21 nt, Human herpesvirus 3
cugugaggcuauuauauuucc

SEQ ID NO: 131682 - RNA, 18 nt, Human herpesvirus 3
gaaaaucgucccauuuaa

SEQ ID NO: 131683 - RNA, 12 nt, Human herpesvirus 3
gaacaaacacuc

SEQ ID NO: 131684 - RNA, 23 nt, Human herpesvirus 3
gaaccgccgguggucuuguuuga

SEQ ID NO: 131685 - RNA, 22 nt, Human herpesvirus 3
gaaccgaacauccuaguacaga

SEQ ID NO: 131686 - RNA, 21 nt, Human herpesvirus 3
gaaagagcuguccaugaugaa

SEQ ID NO: 131687 - RNA, 16 nt, Human herpesvirus 3
gaaacuuaauacagag

SEQ ID NO: 131688 - RNA, 14 nt, Human herpesvirus 3
gaaaugugcuguca

SEQ ID NO: 131689 - RNA, 20 nt, Human herpesvirus 3
gacaagaacuuugcauguuu

SEQ ID NO: 131690 - RNA, 14 nt, Human herpesvirus 3
gacaaacgugugua

SEQ ID NO: 131691 - RNA, 16 nt, Human herpesvirus 3
gaagcuauacacaagu

SEQ ID NO: 131692 - RNA, 16 nt, Human herpesvirus 3
gaagcugccgucaaug

SEQ ID NO: 131693 - RNA, 13 nt, Human herpesvirus 3
gaagaugaacuaa

SEQ ID NO: 131694 - RNA, 14 nt, Human herpesvirus 3
gaagaugaacuaau

SEQ ID NO: 131695 - RNA, 22 nt, Human herpesvirus 3
uacagcauauaauccacgguau

SEQ ID NO: 131696 - RNA, 21 nt, Human herpesvirus 3
uacagauuuauuuuuacauuu

SEQ ID NO: 131697 - RNA, 18 nt, Human herpesvirus 3
uacacauccuggacacag

SEQ ID NO: 131698 - RNA, 15 nt, Human herpesvirus 3
uacaggcaacugcaa

SEQ ID NO: 131699 - RNA, 23 nt, Human herpesvirus 3
uacaggccggaguguccagauau

SEQ ID NO: 131700 - RNA, 23 nt, Human herpesvirus 3
uacaguaaacguccgauguucca

SEQ ID NO: 131701 - RNA, 17 nt, Human herpesvirus 3
uacaaugagcgguggua

SEQ ID NO: 131702 - RNA, 16 nt, Human herpesvirus 3
uaauuuuacaauauca

SEQ ID NO: 131703 - RNA, 13 nt, Human herpesvirus 3
uacaaaaauuuga

SEQ ID NO: 131704 - RNA, 20 nt, Human herpesvirus 3
uaauuugaagacaccuaucc

SEQ ID NO: 131705 - RNA, 19 nt, Human herpesvirus 3
uaauuugccccaaaccacu

SEQ ID NO: 131706 - RNA, 20 nt, Human herpesvirus 3
uaauuugccccaaaccacug

SEQ ID NO: 131707 - RNA, 17 nt, Human herpesvirus 3
uaagccucuguacaaca

SEQ ID NO: 131708 - RNA, 18 nt, Human herpesvirus 3
uaagccucuguacaacac

SEQ ID NO: 131709 - RNA, 18 nt, Human herpesvirus 3
uaacuuaacaaacauaua

SEQ ID NO: 131710 - RNA, 14 nt, Human herpesvirus 3
uaacuuuacuguua

SEQ ID NO: 131711 - RNA, 22 nt, Human herpesvirus 3
uaaggcaaggaaaagguuuugg

SEQ ID NO: 131712 - RNA, 14 nt, Human herpesvirus 3
uaauuguacccauc

SEQ ID NO: 131713 - RNA, 13 nt, Human herpesvirus 3
uaauucgugugca

SEQ ID NO: 131714 - RNA, 22 nt, Human herpesvirus 3
uaauucgugugcaauaaccuca

SEQ ID NO: 131715 - RNA, 19 nt, Human herpesvirus 3
uaauuccgguugugccaau

SEQ ID NO: 131716 - RNA, 14 nt, Human herpesvirus 3
uacuacaacggaau

SEQ ID NO: 131717 - RNA, 20 nt, Human herpesvirus 3
uacuacauggaguguguuac

SEQ ID NO: 131718 - RNA, 15 nt, Human herpesvirus 3
uaccuuuuucaugcu

SEQ ID NO: 131719 - RNA, 15 nt, Human herpesvirus 3
uacgaaaacgugcau

SEQ ID NO: 131720 - RNA, 17 nt, Human herpesvirus 3
uacguguaugcuguuau

SEQ ID NO: 131721 - RNA, 16 nt, Human herpesvirus 3
uacguuucaaauaacu

SEQ ID NO: 131722 - RNA, 21 nt, Human herpesvirus 3
uacuaagccucuguacaacac

SEQ ID NO: 131723 - RNA, 16 nt, Human herpesvirus 3
uacuuagcggacaugc

SEQ ID NO: 131724 - RNA, 22 nt, Human herpesvirus 3
uacuggggaggggcaggcugua

SEQ ID NO: 131725 - RNA, 11 nt, Human herpesvirus 3
uaccggugaag

SEQ ID NO: 131726 - RNA, 13 nt, Human herpesvirus 3
uaccguacaacaa

SEQ ID NO: 131727 - RNA, 20 nt, Human herpesvirus 3
uacauucucaucaaagucaa

SEQ ID NO: 131728 - RNA, 18 nt, Human herpesvirus 3
uacauucgcaacacaucu

SEQ ID NO: 131729 - RNA, 14 nt, Human herpesvirus 3
uaccucugucaggu

SEQ ID NO: 131730 - RNA, 15 nt, Human herpesvirus 3
uacaugaacugccaa

SEQ ID NO: 131731 - RNA, 16 nt, Human herpesvirus 3
uacauuaaucgcugau

SEQ ID NO: 131732 - RNA, 21 nt, Human herpesvirus 3
uacauauguuccacucuacau

SEQ ID NO: 131733 - RNA, 12 nt, Human herpesvirus 3
uacaucuuucag

SEQ ID NO: 131734 - RNA, 16 nt, Human herpesvirus 3
uacauaaccgauuuac

SEQ ID NO: 131735 - RNA, 17 nt, Human herpesvirus 3
uacauaaccgauuuacc

SEQ ID NO: 131736 - RNA, 20 nt, Human herpesvirus 3
uacauacaaacuugugugua

SEQ ID NO: 131737 - RNA, 21 nt, Human herpesvirus 3
uacauaaacacagagucugua

SEQ ID NO: 131738 - RNA, 16 nt, Human herpesvirus 3
uacauagauacuccac

SEQ ID NO: 131739 - RNA, 17 nt, Human herpesvirus 3
uagaaagcgauuuuauc

SEQ ID NO: 131740 - RNA, 13 nt, Human herpesvirus 3
uagaacguuuauc

SEQ ID NO: 131741 - RNA, 22 nt, Human herpesvirus 3
uagacuguuuuucugcucaugg

SEQ ID NO: 131742 - RNA, 19 nt, Human herpesvirus 3
uagaauuuacaguguucuc

SEQ ID NO: 131743 - RNA, 15 nt, Human herpesvirus 3
uagaauuuucacucu

SEQ ID NO: 131744 - RNA, 22 nt, Human herpesvirus 3
uagaaucggagacucgugguca

SEQ ID NO: 131745 - RNA, 23 nt, Human herpesvirus 3
uagcuaccguuagaggcuuaauc

SEQ ID NO: 131746 - RNA, 18 nt, Human herpesvirus 3
uagaguguuuaacaacca

SEQ ID NO: 131747 - RNA, 18 nt, Human herpesvirus 3
uagagaaagcggacacau

SEQ ID NO: 131748 - RNA, 15 nt, Human herpesvirus 3
uauacccgauaauau

SEQ ID NO: 131749 - RNA, 20 nt, Human herpesvirus 3
uauacccgauaauauacaaa

SEQ ID NO: 131750 - RNA, 15 nt, Human herpesvirus 3
uauaccggaguauaa

SEQ ID NO: 131751 - RNA, 15 nt, Human herpesvirus 3
uauacaccguguaac

SEQ ID NO: 131752 - RNA, 21 nt, Human herpesvirus 3
uagucaauguuuaaagacagc

SEQ ID NO: 131753 - RNA, 19 nt, Human herpesvirus 3
uagucaaauucaacuaaug

SEQ ID NO: 131754 - RNA, 22 nt, Human herpesvirus 3
uagcuguaaaaaccauggacag

SEQ ID NO: 131755 - RNA, 19 nt, Human herpesvirus 3
uaggaacgcgacaugaccg

SEQ ID NO: 131756 - RNA, 21 nt, Human herpesvirus 3
uaucauugaagaugauuauca

SEQ ID NO: 131757 - RNA, 22 nt, Human herpesvirus 3
uaucauugaagaugauuaucaa

SEQ ID NO: 131758 - RNA, 16 nt, Human herpesvirus 3
uauccaagaugaaaua

SEQ ID NO: 131759 - RNA, 13 nt, Human herpesvirus 3
uauccaaugggga

SEQ ID NO: 131760 - RNA, 15 nt, Human herpesvirus 3
uaucccggauuuuau

SEQ ID NO: 131761 - RNA, 19 nt, Human herpesvirus 3
uaucccggauuuuauauua

SEQ ID NO: 131762 - RNA, 13 nt, Human herpesvirus 3
uaucccacaugua

SEQ ID NO: 131763 - RNA, 12 nt, Human herpesvirus 3
uauauguucaac

SEQ ID NO: 131764 - RNA, 21 nt, Human herpesvirus 3
uauaucuuccgugugguccau

SEQ ID NO: 131765 - RNA, 17 nt, Human herpesvirus 3
uauaucuggaacccaag

SEQ ID NO: 131766 - RNA, 15 nt, Human herpesvirus 3
uauauggacauccau

SEQ ID NO: 131767 - RNA, 14 nt, Human herpesvirus 3
uauauuagcacuau

SEQ ID NO: 131768 - RNA, 13 nt, Human herpesvirus 3
uauauucacaugc

SEQ ID NO: 131769 - RNA, 19 nt, Human herpesvirus 3
uauacgcucuucugauauu

SEQ ID NO: 131770 - RNA, 15 nt, Human herpesvirus 3
uauagacacgcuaca

SEQ ID NO: 131771 - RNA, 19 nt, Human herpesvirus 3
uauauaagggagucuacaa

SEQ ID NO: 131772 - RNA, 21 nt, Human herpesvirus 3
uauauacaacacgaugcgcug

SEQ ID NO: 131773 - RNA, 15 nt, Human herpesvirus 3
uauauauauguucca

SEQ ID NO: 131774 - RNA, 16 nt, Human herpesvirus 3
gugugcaauaaccuca

SEQ ID NO: 131775 - RNA, 19 nt, Human herpesvirus 3
gugucccauuuugugauuu

SEQ ID NO: 131776 - RNA, 13 nt, Human herpesvirus 3
guguccugugauc

SEQ ID NO: 131777 - RNA, 21 nt, Human herpesvirus 3
gugucuacuuagcggacaugc

SEQ ID NO: 131778 - RNA, 22 nt, Human herpesvirus 3
guguuacuuggaaacacccaua

SEQ ID NO: 131779 - RNA, 18 nt, Human herpesvirus 3
guguucauauauacccau

SEQ ID NO: 131780 - RNA, 17 nt, Human herpesvirus 3
guguaaaguuugaacau

SEQ ID NO: 131781 - RNA, 11 nt, Human herpesvirus 3
gucaauggagu

SEQ ID NO: 131782 - RNA, 15 nt, Human herpesvirus 3
gucaaauucaacuaa

SEQ ID NO: 131783 - RNA, 15 nt, Human herpesvirus 3
gucccauuuugugau

SEQ ID NO: 131784 - RNA, 17 nt, Human herpesvirus 3
gucccauuuugugauuu

SEQ ID NO: 131785 - RNA, 23 nt, Human herpesvirus 3
guccggaagaguuagcauccaaa

SEQ ID NO: 131786 - RNA, 12 nt, Human herpesvirus 3
guggaguuuccc

SEQ ID NO: 131787 - RNA, 19 nt, Human herpesvirus 3
guggauuauauccaucaag

SEQ ID NO: 131788 - RNA, 19 nt, Human herpesvirus 3
guggagcguacugcagaua

SEQ ID NO: 131789 - RNA, 21 nt, Human herpesvirus 3
guggaauuaauggaguauauu

SEQ ID NO: 131790 - RNA, 22 nt, Human herpesvirus 3
guggaccguguucgaucccaaa

SEQ ID NO: 131791 - RNA, 13 nt, Human herpesvirus 3
guggaccuuugca

SEQ ID NO: 131792 - RNA, 14 nt, Human herpesvirus 3
guuagaugcauauu

SEQ ID NO: 131793 - RNA, 16 nt, Human herpesvirus 3
guuauuccggacaaua

SEQ ID NO: 131794 - RNA, 15 nt, Human herpesvirus 3
guuauggacuaggca

SEQ ID NO: 131795 - RNA, 17 nt, Human herpesvirus 3
guuauaaguaugcaguc

SEQ ID NO: 131796 - RNA, 14 nt, Human herpesvirus 3
guuaucaacgacau

SEQ ID NO: 131797 - RNA, 22 nt, Human herpesvirus 3
guguuuauuauaaauguguauu

SEQ ID NO: 131798 - RNA, 15 nt, Human herpesvirus 3
guguucgaucccaaa

SEQ ID NO: 131799 - RNA, 14 nt, Human herpesvirus 3
guuaauuuuacaau

SEQ ID NO: 131800 - RNA, 16 nt, Human herpesvirus 3
guuaauacaguguuua

SEQ ID NO: 131801 - RNA, 22 nt, Human herpesvirus 3
guuaagaggauaggugucuuca

SEQ ID NO: 131802 - RNA, 22 nt, Human herpesvirus 3
guuaauaaaaacacaaccaguc

SEQ ID NO: 131803 - RNA, 16 nt, Human herpesvirus 3
guuaacagcagucuca

SEQ ID NO: 131804 - RNA, 15 nt, Human herpesvirus 3
guucuaaaacacugu

SEQ ID NO: 131805 - RNA, 20 nt, Human herpesvirus 3
guucuaauaaaaacaucaaa

SEQ ID NO: 131806 - RNA, 19 nt, Human herpesvirus 3
guucuaccaacgcacuguu

SEQ ID NO: 131807 - RNA, 20 nt, Human herpesvirus 3
guucuaccaacgcacuguuc

SEQ ID NO: 131808 - RNA, 18 nt, Human herpesvirus 3
guucuuugaagacuuuga

SEQ ID NO: 131809 - RNA, 20 nt, Human herpesvirus 3
guucaaagcaacgguuucuc

SEQ ID NO: 131810 - RNA, 13 nt, Human herpesvirus 3
guucaaaggcauu

SEQ ID NO: 131811 - RNA, 23 nt, Human herpesvirus 3
guucaacaaaugcgcguuccaaa

SEQ ID NO: 131812 - RNA, 18 nt, Human herpesvirus 3
guucauuuuauuauccca

SEQ ID NO: 131813 - RNA, 22 nt, Human herpesvirus 3
guuccaaauuauccaaugggga

SEQ ID NO: 131814 - RNA, 14 nt, Human herpesvirus 3
uaacaaacauauaa

SEQ ID NO: 131815 - RNA, 18 nt, Human herpesvirus 3
uaaauuuaaaacauacac

SEQ ID NO: 131816 - RNA, 14 nt, Human herpesvirus 3
uaaauaugugcauc

SEQ ID NO: 131817 - RNA, 16 nt, Human herpesvirus 3
uaaauguugucaagac

SEQ ID NO: 131818 - RNA, 14 nt, Human herpesvirus 3
uaaauguacuauaa

SEQ ID NO: 131819 - RNA, 20 nt, Human herpesvirus 3
uaaauguguauuauauguca

SEQ ID NO: 131820 - RNA, 15 nt, Human herpesvirus 3
uaacaccuguuuaca

SEQ ID NO: 131821 - RNA, 17 nt, Human herpesvirus 3
uaacgugauuacuacaa

SEQ ID NO: 131822 - RNA, 16 nt, Human herpesvirus 3
uaacguugaacaccau

SEQ ID NO: 131823 - RNA, 13 nt, Human herpesvirus 3
uaacucagcugug

SEQ ID NO: 131824 - RNA, 21 nt, Human herpesvirus 3
uaaaauuuggaaacacuccca

SEQ ID NO: 131825 - RNA, 14 nt, Human herpesvirus 3
uaaaagacuaauaa

SEQ ID NO: 131826 - RNA, 13 nt, Human herpesvirus 3
uaaaaauguaaua

SEQ ID NO: 131827 - RNA, 13 nt, Human herpesvirus 3
uaaaacacuguca

SEQ ID NO: 131828 - RNA, 15 nt, Human herpesvirus 3
uaaacauaacagucu

SEQ ID NO: 131829 - RNA, 16 nt, Human herpesvirus 3
uaaacauccacagucu

SEQ ID NO: 131830 - RNA, 17 nt, Human herpesvirus 3
guugcgauaacugcgau

SEQ ID NO: 131831 - RNA, 16 nt, Human herpesvirus 3
guuggcgcaugccauu

SEQ ID NO: 131832 - RNA, 15 nt, Human herpesvirus 3
guugguuacugugaa

SEQ ID NO: 131833 - RNA, 13 nt, Human herpesvirus 3
guugcggugauau

SEQ ID NO: 131834 - RNA, 16 nt, Human herpesvirus 3
guugcgguuguugucc

SEQ ID NO: 131835 - RNA, 18 nt, Human herpesvirus 3
guuuauuauaaaugugua

SEQ ID NO: 131836 - RNA, 17 nt, Human herpesvirus 3
guuucaaauaacugaac

SEQ ID NO: 131837 - RNA, 17 nt, Human herpesvirus 3
guuuaucccccuucaaa

SEQ ID NO: 131838 - RNA, 18 nt, Human herpesvirus 3
guuuauaauccuuaucuu

SEQ ID NO: 131839 - RNA, 19 nt, Human herpesvirus 3
guuuauaauggcugcugaa

SEQ ID NO: 131840 - RNA, 17 nt, Human herpesvirus 3
guuuauaucuguuacau

SEQ ID NO: 131841 - RNA, 22 nt, Human herpesvirus 3
guuuaccugcgguauucuguaa

SEQ ID NO: 131842 - RNA, 21 nt, Human herpesvirus 3
guuuacccgguauuauguaua

SEQ ID NO: 131843 - RNA, 20 nt, Human herpesvirus 3
guuguuuccugugucuuuaa

SEQ ID NO: 131844 - RNA, 20 nt, Human herpesvirus 3
guuguuguccagaagacccc

SEQ ID NO: 131845 - RNA, 17 nt, Human herpesvirus 3
guugugucccgacaaaa

SEQ ID NO: 131846 - RNA, 17 nt, Human herpesvirus 3
guuugaaguguucuaaa

SEQ ID NO: 131847 - RNA, 20 nt, Human herpesvirus 3
guuucauauguugagucauu

SEQ ID NO: 131848 - RNA, 22 nt, Human herpesvirus 3
guuuugaauuauuaaacuuaag

SEQ ID NO: 131849 - RNA, 19 nt, Human herpesvirus 3
guuuuaaguccuguaacau

SEQ ID NO: 131850 - RNA, 16 nt, Human herpesvirus 3
guuuguuuugaucaca

SEQ ID NO: 131851 - RNA, 23 nt, Human herpesvirus 3
guuuggugcacucuaccaaaaaa

SEQ ID NO: 131852 - RNA, 14 nt, Human herpesvirus 3
guuuuaauuccaau

SEQ ID NO: 131853 - RNA, 12 nt, Human herpesvirus 3
guuuuaguaaaa

SEQ ID NO: 131854 - RNA, 18 nt, Human herpesvirus 3
gcgaagcugccgucaaug

SEQ ID NO: 131855 - RNA, 18 nt, Human herpesvirus 3
gcgaacgugauuugccca

SEQ ID NO: 131856 - RNA, 20 nt, Human herpesvirus 3
gcgaauaauacacacuaccu

SEQ ID NO: 131857 - RNA, 14 nt, Human herpesvirus 3
gccuuugcgaugua

SEQ ID NO: 131858 - RNA, 22 nt, Human herpesvirus 3
gccuuuuaugaauguaauacuu

SEQ ID NO: 131859 - RNA, 18 nt, Human herpesvirus 3
gccucugcuucaauucca

SEQ ID NO: 131860 - RNA, 19 nt, Human herpesvirus 3
gccguuguggaaagguaua

SEQ ID NO: 131861 - RNA, 14 nt, Human herpesvirus 3
gccgucaaugcaac

SEQ ID NO: 131862 - RNA, 13 nt, Human herpesvirus 3
gccgucgcgccca

SEQ ID NO: 131863 - RNA, 18 nt, Human herpesvirus 3
gccucuguacaacacaaa

SEQ ID NO: 131864 - RNA, 15 nt, Human herpesvirus 3
gcagauacagcauau

SEQ ID NO: 131865 - RNA, 16 nt, Human herpesvirus 3
gcagauacagcauaua

SEQ ID NO: 131866 - RNA, 15 nt, Human herpesvirus 3
gcccgaaaacuuugg

SEQ ID NO: 131867 - RNA, 14 nt, Human herpesvirus 3
gcccguuguguuuu

SEQ ID NO: 131868 - RNA, 13 nt, Human herpesvirus 3
gcccuaaauuaca

SEQ ID NO: 131869 - RNA, 17 nt, Human herpesvirus 3
gccgcuacccgaaagcc

SEQ ID NO: 131870 - RNA, 16 nt, Human herpesvirus 3
gccgcgggcggugauc

SEQ ID NO: 131871 - RNA, 17 nt, Human herpesvirus 3
gccgcuucccgaaagcc

SEQ ID NO: 131872 - RNA, 18 nt, Human herpesvirus 3
gcugucgucauauuacau

SEQ ID NO: 131873 - RNA, 18 nt, Human herpesvirus 3
gcuguuguugcuaguauu

SEQ ID NO: 131874 - RNA, 19 nt, Human herpesvirus 3
gcuguuagaggcauaccga

SEQ ID NO: 131875 - RNA, 23 nt, Human herpesvirus 3
gcuuacaguccaguggacaguaa

SEQ ID NO: 131876 - RNA, 13 nt, Human herpesvirus 3
gcuucaauuccaa

SEQ ID NO: 131877 - RNA, 16 nt, Human herpesvirus 3
gcuucaccgguauuau

SEQ ID NO: 131878 - RNA, 14 nt, Human herpesvirus 3
gcuucaagucucaa

SEQ ID NO: 131879 - RNA, 22 nt, Human herpesvirus 3
gcuuggggguuuacaaguacaa

SEQ ID NO: 131880 - RNA, 12 nt, Human herpesvirus 3
gcuaugccauuu

SEQ ID NO: 131881 - RNA, 21 nt, Human herpesvirus 3
gcucccauuccaaaugcgcaa

SEQ ID NO: 131882 - RNA, 22 nt, Human herpesvirus 3
gcggucucccggaugaacagua

SEQ ID NO: 131883 - RNA, 19 nt, Human herpesvirus 3
gcgguugugucggucucuc

SEQ ID NO: 131884 - RNA, 14 nt, Human herpesvirus 3
gcguacgugccuag

SEQ ID NO: 131885 - RNA, 15 nt, Human herpesvirus 3
gcuagaacgugcguu

SEQ ID NO: 131886 - RNA, 17 nt, Human herpesvirus 3
gcgucuguguauaucau

SEQ ID NO: 131887 - RNA, 15 nt, Human herpesvirus 3
gcuacgucgauguga

SEQ ID NO: 131888 - RNA, 15 nt, Human herpesvirus 3
gcgcccaccucggcc

SEQ ID NO: 131889 - RNA, 14 nt, Human herpesvirus 3
gcgcccggcggacc

SEQ ID NO: 131890 - RNA, 11 nt, Human herpesvirus 3
ggaacaucaga

SEQ ID NO: 131891 - RNA, 15 nt, Human herpesvirus 3
ggauaaaacacggga

SEQ ID NO: 131892 - RNA, 15 nt, Human herpesvirus 3
ggauaggugucuuca

SEQ ID NO: 131893 - RNA, 20 nt, Human herpesvirus 3
ggauuuuuaaauguugucaa

SEQ ID NO: 131894 - RNA, 19 nt, Human herpesvirus 3
ggaucauuccaacuggaaa

SEQ ID NO: 131895 - RNA, 17 nt, Human herpesvirus 3
ggauccggcaugcauug

SEQ ID NO: 131896 - RNA, 17 nt, Human herpesvirus 3
ggcgcugaagggugcau

SEQ ID NO: 131897 - RNA, 15 nt, Human herpesvirus 3
ggcgcggaugcauuu

SEQ ID NO: 131898 - RNA, 20 nt, Human herpesvirus 3
ggcuggcgugguuauuacau

SEQ ID NO: 131899 - RNA, 20 nt, Human herpesvirus 3
gggauuuccacuuacaggac

SEQ ID NO: 131900 - RNA, 18 nt, Human herpesvirus 3
gggcaaaugaugaagcua

SEQ ID NO: 131901 - RNA, 13 nt, Human herpesvirus 3
gggaucauuccaa

SEQ ID NO: 131902 - RNA, 14 nt, Human herpesvirus 3
gggagaacaccaga

SEQ ID NO: 131903 - RNA, 17 nt, Human herpesvirus 3
gggaggugggguguuaa

SEQ ID NO: 131904 - RNA, 20 nt, Human herpesvirus 3
ggcuuuucccccacauacaa

SEQ ID NO: 131905 - RNA, 13 nt, Human herpesvirus 3
gguccaucaaaca

SEQ ID NO: 131906 - RNA, 13 nt, Human herpesvirus 3
gguguuucagugg

SEQ ID NO: 131907 - RNA, 17 nt, Human herpesvirus 3
gguuaauaauagugaca

SEQ ID NO: 131908 - RNA, 23 nt, Human herpesvirus 3
gguuauuauggaaucgucuaaca

SEQ ID NO: 131909 - RNA, 14 nt, Human herpesvirus 3
gguucaugacauua

SEQ ID NO: 131910 - RNA, 16 nt, Human herpesvirus 3
gguucaguaacuuaac

SEQ ID NO: 131911 - RNA, 21 nt, Human herpesvirus 3
gguucaguaacuuaacaaaca

SEQ ID NO: 131912 - RNA, 12 nt, Human herpesvirus 3
ggugugguuaug

SEQ ID NO: 131913 - RNA, 19 nt, Human herpesvirus 3
gguguugugaucuauuaac

SEQ ID NO: 131914 - RNA, 22 nt, Human herpesvirus 3
gguguauacggugggggugccu

SEQ ID NO: 131915 - RNA, 21 nt, Human herpesvirus 3
gguguauuuuauuuagugauu

SEQ ID NO: 131916 - RNA, 19 nt, Human herpesvirus 3
ggguugcgauaacugcgau

SEQ ID NO: 131917 - RNA, 21 nt, Human herpesvirus 3
ggguugggauuacgaaccaua

SEQ ID NO: 131918 - RNA, 18 nt, Human herpesvirus 3
gguacaagaaaccauguu

SEQ ID NO: 131919 - RNA, 19 nt, Human herpesvirus 3
gguaaccaucuagaugaca

SEQ ID NO: 131920 - RNA, 22 nt, Human herpesvirus 3
gggcgggauuacauugcuuuca

SEQ ID NO: 131921 - RNA, 13 nt, Human herpesvirus 3
gguucuucacugg

SEQ ID NO: 131922 - RNA, 17 nt, Human herpesvirus 3
gguuguguuuuuauuaa

SEQ ID NO: 131923 - RNA, 12 nt, Human herpesvirus 3
gguuuaauuuca

SEQ ID NO: 131924 - RNA, 18 nt, Human herpesvirus 3
guaagaagugcauaucca

SEQ ID NO: 131925 - RNA, 21 nt, Human herpesvirus 3
guaacuuaacaaacauauaau

SEQ ID NO: 131926 - RNA, 19 nt, Human herpesvirus 3
guaaaaacggauauuaaca

SEQ ID NO: 131927 - RNA, 22 nt, Human herpesvirus 3
gguuuucguuuugguguuacau

SEQ ID NO: 131928 - RNA, 15 nt, Human herpesvirus 3
guaaucucacuguuu

SEQ ID NO: 131929 - RNA, 14 nt, Human herpesvirus 3
guauaaaaacacgc

SEQ ID NO: 131930 - RNA, 18 nt, Human herpesvirus 3
guauaaaaacacgcaugc

SEQ ID NO: 131931 - RNA, 17 nt, Human herpesvirus 3
guauaaaauucuaacaa

SEQ ID NO: 131932 - RNA, 14 nt, Human herpesvirus 3
guacuacacccagu

SEQ ID NO: 131933 - RNA, 18 nt, Human herpesvirus 3
guacugcagauacagcau

SEQ ID NO: 131934 - RNA, 22 nt, Human herpesvirus 3
guauacacacccaccccagaua

SEQ ID NO: 131935 - RNA, 15 nt, Human herpesvirus 3
guauaugagccguau

SEQ ID NO: 131936 - RNA, 20 nt, Human herpesvirus 3
guauaugguaugucugucau

SEQ ID NO: 131937 - RNA, 19 nt, Human herpesvirus 3
gucaaaaagccugugacaa

SEQ ID NO: 131938 - RNA, 16 nt, Human herpesvirus 3
gucaaaacauacuaau

SEQ ID NO: 131939 - RNA, 18 nt, Human herpesvirus 3
guauuuuuuuagaauaca

SEQ ID NO: 131940 - RNA, 15 nt, Human herpesvirus 3
guauugcuguuguuu

SEQ ID NO: 131941 - RNA, 14 nt, Human herpesvirus 3
guauaucauuuuau

SEQ ID NO: 131942 - RNA, 21 nt, Human herpesvirus 3
guauaucauuuuauuacauuc

SEQ ID NO: 131943 - RNA, 17 nt, Human herpesvirus 3
ccaugaugaaaaccugg

SEQ ID NO: 131944 - RNA, 16 nt, Human herpesvirus 3
ccacauacaacaugau

SEQ ID NO: 131945 - RNA, 12 nt, Human herpesvirus 3
ccagaguacagg

SEQ ID NO: 131946 - RNA, 14 nt, Human herpesvirus 3
ccagaguacagggu

SEQ ID NO: 131947 - RNA, 19 nt, Human herpesvirus 3
ccagauauaaacaauuuac

SEQ ID NO: 131948 - RNA, 11 nt, Human herpesvirus 3
ccacaaccaag

SEQ ID NO: 131949 - RNA, 19 nt, Human herpesvirus 3
ccaacgcuuugaucuucaa

SEQ ID NO: 131950 - RNA, 18 nt, Human herpesvirus 3
ccaacgcacuguucuuua

SEQ ID NO: 131951 - RNA, 21 nt, Human herpesvirus 3
ccaauagccgccagauguaca

SEQ ID NO: 131952 - RNA, 14 nt, Human herpesvirus 3
ccaacacaguguuc

SEQ ID NO: 131953 - RNA, 20 nt, Human herpesvirus 3
cauuuccaaacacauuacgu

SEQ ID NO: 131954 - RNA, 20 nt, Human herpesvirus 3
cauuucaauaaauguacuau

SEQ ID NO: 131955 - RNA, 23 nt, Human herpesvirus 3
cauuugugccgcaagcauauaca

SEQ ID NO: 131956 - RNA, 15 nt, Human herpesvirus 3
cauggcuaugccauu

SEQ ID NO: 131957 - RNA, 16 nt, Human herpesvirus 3
cauggcuaugccauuu

SEQ ID NO: 131958 - RNA, 22 nt, Human herpesvirus 3
cauggguuuuuagaauuuccaa

SEQ ID NO: 131959 - RNA, 15 nt, Human herpesvirus 3
cauggaguguguuac

SEQ ID NO: 131960 - RNA, 21 nt, Human herpesvirus 3
caugcguuuuuuauuuuuaca

SEQ ID NO: 131961 - RNA, 15 nt, Human herpesvirus 3
caugcucgacagguu

SEQ ID NO: 131962 - RNA, 17 nt, Human herpesvirus 3
caugcuuguaaaacaua

SEQ ID NO: 131963 - RNA, 20 nt, Human herpesvirus 3
caugcuuguaaaacauauca

SEQ ID NO: 131964 - RNA, 21 nt, Human herpesvirus 3
caugcuuguaaaacauaucaa

SEQ ID NO: 131965 - RNA, 12 nt, Human herpesvirus 3
caugcuugucaa

SEQ ID NO: 131966 - RNA, 15 nt, Human herpesvirus 3
caugcuugucaaaac

SEQ ID NO: 131967 - RNA, 18 nt, Human herpesvirus 3
caugcuugucaaaacaua

SEQ ID NO: 131968 - RNA, 21 nt, Human herpesvirus 3
caugcuugucaaaacauacua

SEQ ID NO: 131969 - RNA, 21 nt, Human herpesvirus 3
caugcgggcuugcuguucuca

SEQ ID NO: 131970 - RNA, 17 nt, Human herpesvirus 3
caugcauggaaucacca

SEQ ID NO: 131971 - RNA, 20 nt, Human herpesvirus 3
cccaaggauagauaucacac

SEQ ID NO: 131972 - RNA, 14 nt, Human herpesvirus 3
cccaacgaguguau

SEQ ID NO: 131973 - RNA, 20 nt, Human herpesvirus 3
cccaacugauuacauuucau

SEQ ID NO: 131974 - RNA, 19 nt, Human herpesvirus 3
cccaacuggcgucuacugu

SEQ ID NO: 131975 - RNA, 13 nt, Human herpesvirus 3
cccacacaaucag

SEQ ID NO: 131976 - RNA, 11 nt, Human herpesvirus 3
cccacauguau

SEQ ID NO: 131977 - RNA, 17 nt, Human herpesvirus 3
ccauuacuacauugaac

SEQ ID NO: 131978 - RNA, 23 nt, Human herpesvirus 3
ccauuauuuuaauuacaucgcaa

SEQ ID NO: 131979 - RNA, 19 nt, Human herpesvirus 3
ccauuaaagagccauuucc

SEQ ID NO: 131980 - RNA, 20 nt, Human herpesvirus 3
ccccgacacgcggccuguau

SEQ ID NO: 131981 - RNA, 15 nt, Human herpesvirus 3
cccccguugcuuuaa

SEQ ID NO: 131982 - RNA, 19 nt, Human herpesvirus 3
ccccaggccuugaaauaua

SEQ ID NO: 131983 - RNA, 18 nt, Human herpesvirus 3
ccccguguuacuuggaaa

SEQ ID NO: 131984 - RNA, 22 nt, Human herpesvirus 3
cccggcggaaacaucugcauua

SEQ ID NO: 131985 - RNA, 14 nt, Human herpesvirus 3
cccacuguuugauc

SEQ ID NO: 131986 - RNA, 15 nt, Human herpesvirus 3
ccggcucacagagcu

SEQ ID NO: 131987 - RNA, 14 nt, Human herpesvirus 3
ccgggauaucucau

SEQ ID NO: 131988 - RNA, 13 nt, Human herpesvirus 3
ccggcaugcauug

SEQ ID NO: 131989 - RNA, 16 nt, Human herpesvirus 3
ccgcccuaaauuacaa

SEQ ID NO: 131990 - RNA, 19 nt, Human herpesvirus 3
ccgagaagggggauuuaca

SEQ ID NO: 131991 - RNA, 20 nt, Human herpesvirus 3
ccgagaagggggauuuacaa

SEQ ID NO: 131992 - RNA, 22 nt, Human herpesvirus 3
ccgagacugacccuaugacaug

SEQ ID NO: 131993 - RNA, 23 nt, Human herpesvirus 3
ccgccaacaggcuccacaaucgu

SEQ ID NO: 131994 - RNA, 19 nt, Human herpesvirus 3
ccgcaucgucucguguagu

SEQ ID NO: 131995 - RNA, 16 nt, Human herpesvirus 3
ccgauguuccaaugga

SEQ ID NO: 131996 - RNA, 17 nt, Human herpesvirus 3
caggagauacuauggua

SEQ ID NO: 131997 - RNA, 15 nt, Human herpesvirus 3
caggcgagacuugau

SEQ ID NO: 131998 - RNA, 21 nt, Human herpesvirus 3
caggcgcguuuguuugucucg

SEQ ID NO: 131999 - RNA, 12 nt, Human herpesvirus 3
cagggcaauggg

SEQ ID NO: 132000 - RNA, 14 nt, Human herpesvirus 3
cagggcaaugggaa

SEQ ID NO: 132001 - RNA, 20 nt, Human herpesvirus 3
caggcuguacguaaccauau

SEQ ID NO: 132002 - RNA, 22 nt, Human herpesvirus 3
cagcugugaguuuaggguuuaa

SEQ ID NO: 132003 - RNA, 21 nt, Human herpesvirus 3
cagaugaucugguaaauguua

SEQ ID NO: 132004 - RNA, 23 nt, Human herpesvirus 3
cagaugguuuaucucgacgucca

SEQ ID NO: 132005 - RNA, 17 nt, Human herpesvirus 3
cagauauaaacaauuua

SEQ ID NO: 132006 - RNA, 13 nt, Human herpesvirus 3
cagacaucccucg

SEQ ID NO: 132007 - RNA, 23 nt, Human herpesvirus 3
cagacaguggcggauaacugccu

SEQ ID NO: 132008 - RNA, 23 nt, Human herpesvirus 3
cacauuuuccccuuuagcuauag

SEQ ID NO: 132009 - RNA, 22 nt, Human herpesvirus 3
cacauuuucgguggaagcaauu

SEQ ID NO: 132010 - RNA, 12 nt, Human herpesvirus 3
caccaaagccaa

SEQ ID NO: 132011 - RNA, 15 nt, Human herpesvirus 3
cacauuacuguacag

SEQ ID NO: 132012 - RNA, 17 nt, Human herpesvirus 3
cacauuagcaaaauugg

SEQ ID NO: 132013 - RNA, 18 nt, Human herpesvirus 3
caccaauuauaacugcua

SEQ ID NO: 132014 - RNA, 15 nt, Human herpesvirus 3
caguuccguuuggaa

SEQ ID NO: 132015 - RNA, 18 nt, Human herpesvirus 3
cagucuaggcaaucguaa

SEQ ID NO: 132016 - RNA, 21 nt, Human herpesvirus 3
cagucguguuuuuaauagaga

SEQ ID NO: 132017 - RNA, 17 nt, Human herpesvirus 3
cagucauuuuuuuuaca

SEQ ID NO: 132018 - RNA, 21 nt, Human herpesvirus 3
caguugacuuuguuugcugca

SEQ ID NO: 132019 - RNA, 19 nt, Human herpesvirus 3
cauaauuaaugcaaccauc

SEQ ID NO: 132020 - RNA, 16 nt, Human herpesvirus 3
caguacgcaugugcug

SEQ ID NO: 132021 - RNA, 14 nt, Human herpesvirus 3
caguaacuuaacaa

SEQ ID NO: 132022 - RNA, 15 nt, Human herpesvirus 3
caguaacuuaacaaa

SEQ ID NO: 132023 - RNA, 16 nt, Human herpesvirus 3
caguacguugcauaac

SEQ ID NO: 132024 - RNA, 19 nt, Human herpesvirus 3
caguagauguguugcgaau

SEQ ID NO: 132025 - RNA, 13 nt, Human herpesvirus 3
cagucaacccauc

SEQ ID NO: 132026 - RNA, 22 nt, Human herpesvirus 3
cagguuauccaacuguuuacau

SEQ ID NO: 132027 - RNA, 17 nt, Human herpesvirus 3
cagguuuuacuuuucgu

SEQ ID NO: 132028 - RNA, 22 nt, Human herpesvirus 3
caguaaaaauguugucugccaa

SEQ ID NO: 132029 - RNA, 23 nt, Human herpesvirus 3
caguaaaaauguugucugccaaa

SEQ ID NO: 132030 - RNA, 13 nt, Human herpesvirus 3
caguaaaagauuc

SEQ ID NO: 132031 - RNA, 13 nt, Human herpesvirus 3
caggucugucaug

SEQ ID NO: 132032 - RNA, 14 nt, Human herpesvirus 3
caugaacaaacacu

SEQ ID NO: 132033 - RNA, 22 nt, Human herpesvirus 3
caucuuccacgggucaugcagg

SEQ ID NO: 132034 - RNA, 17 nt, Human herpesvirus 3
caucgacguucaccaaa

SEQ ID NO: 132035 - RNA, 15 nt, Human herpesvirus 3
caucgaaaagacugu

SEQ ID NO: 132036 - RNA, 14 nt, Human herpesvirus 3
cauccugcucugca

SEQ ID NO: 132037 - RNA, 21 nt, Human herpesvirus 3
cauccauccgauaauaccaaa

SEQ ID NO: 132038 - RNA, 17 nt, Human herpesvirus 3
cauccaugggccaaucc

SEQ ID NO: 132039 - RNA, 13 nt, Human herpesvirus 3
cauacgcauuuac

SEQ ID NO: 132040 - RNA, 14 nt, Human herpesvirus 3
cauacgcauuuacg

SEQ ID NO: 132041 - RNA, 16 nt, Human herpesvirus 3
cauacgccgacaugcc

SEQ ID NO: 132042 - RNA, 18 nt, Human herpesvirus 3
cauacgccgacaugccug

SEQ ID NO: 132043 - RNA, 21 nt, Human herpesvirus 3
cauacgcgaauaaacgacaca

SEQ ID NO: 132044 - RNA, 16 nt, Human herpesvirus 3
cauauauggacaucca

SEQ ID NO: 132045 - RNA, 13 nt, Human herpesvirus 3
cauauaugggaaa

SEQ ID NO: 132046 - RNA, 19 nt, Human herpesvirus 3
cauauccagcaauguugaa

SEQ ID NO: 132047 - RNA, 15 nt, Human herpesvirus 3
caucauacgcauuua

SEQ ID NO: 132048 - RNA, 17 nt, Human herpesvirus 3
auuuuucgguguuacca

SEQ ID NO: 132049 - RNA, 20 nt, Human herpesvirus 3
auuuuuaaucauuaagcaua

SEQ ID NO: 132050 - RNA, 19 nt, Human herpesvirus 3
caaaaaagcguguaaauca

SEQ ID NO: 132051 - RNA, 15 nt, Human herpesvirus 3
auuuucguaagcaau

SEQ ID NO: 132052 - RNA, 23 nt, Human herpesvirus 3
auuucuacaccuuugcaugacaa

SEQ ID NO: 132053 - RNA, 17 nt, Human herpesvirus 3
auuuccacuuacaggac

SEQ ID NO: 132054 - RNA, 18 nt, Human herpesvirus 3
auugcagcguacaaguuu

SEQ ID NO: 132055 - RNA, 20 nt, Human herpesvirus 3
auugcagcguacaaguuuaa

SEQ ID NO: 132056 - RNA, 14 nt, Human herpesvirus 3
auugccguauuaac

SEQ ID NO: 132057 - RNA, 18 nt, Human herpesvirus 3
auugccguauuaaccuac

SEQ ID NO: 132058 - RNA, 19 nt, Human herpesvirus 3
auuuccacauaacauccau

SEQ ID NO: 132059 - RNA, 18 nt, Human herpesvirus 3
caaagaacucugaguuca

SEQ ID NO: 132060 - RNA, 14 nt, Human herpesvirus 3
caaacuugugugua

SEQ ID NO: 132061 - RNA, 20 nt, Human herpesvirus 3
caaagcuacacuuuuugcau

SEQ ID NO: 132062 - RNA, 23 nt, Human herpesvirus 3
caaauaaaaguauuacauucaua

SEQ ID NO: 132063 - RNA, 18 nt, Human herpesvirus 3
caacaggcuccacaaucg

SEQ ID NO: 132064 - RNA, 14 nt, Human herpesvirus 3
caaauaacugaaca

SEQ ID NO: 132065 - RNA, 15 nt, Human herpesvirus 3
caaauaacugaacau

SEQ ID NO: 132066 - RNA, 22 nt, Human herpesvirus 3
caaagggccucuaacaaugcac

SEQ ID NO: 132067 - RNA, 18 nt, Human herpesvirus 3
caacauggcuaugccauu

SEQ ID NO: 132068 - RNA, 16 nt, Human herpesvirus 3
caaccaugauuugaug

SEQ ID NO: 132069 - RNA, 18 nt, Human herpesvirus 3
caaccaugauuugauguu

SEQ ID NO: 132070 - RNA, 18 nt, Human herpesvirus 3
caaccauucagcuuacag

SEQ ID NO: 132071 - RNA, 15 nt, Human herpesvirus 3
caaccagucuaguua

SEQ ID NO: 132072 - RNA, 12 nt, Human herpesvirus 3
caaccaucagau

SEQ ID NO: 132073 - RNA, 22 nt, Human herpesvirus 3
caaccaaacgcgucuguguaua

SEQ ID NO: 132074 - RNA, 21 nt, Human herpesvirus 3
caaccacaccgguggaauuaa

SEQ ID NO: 132075 - RNA, 21 nt, Human herpesvirus 3
caaguuuauacguacaucuuu

SEQ ID NO: 132076 - RNA, 20 nt, Human herpesvirus 3
caauaaaacaaacauucaca

SEQ ID NO: 132077 - RNA, 21 nt, Human herpesvirus 3
caauaaaacaaacauucacag

SEQ ID NO: 132078 - RNA, 22 nt, Human herpesvirus 3
caauaaaacaaacauucacagu

SEQ ID NO: 132079 - RNA, 22 nt, Human herpesvirus 3
caauaugucacggagaacguau

SEQ ID NO: 132080 - RNA, 12 nt, Human herpesvirus 3
caaucaauccaa

SEQ ID NO: 132081 - RNA, 15 nt, Human herpesvirus 3
caaucaauccaagga

SEQ ID NO: 132082 - RNA, 17 nt, Human herpesvirus 3
caauugagauacacaug

SEQ ID NO: 132083 - RNA, 14 nt, Human herpesvirus 3
caauuuaacauacc

SEQ ID NO: 132084 - RNA, 16 nt, Human herpesvirus 3
cacagaacggucuuuc

SEQ ID NO: 132085 - RNA, 19 nt, Human herpesvirus 3
cacaucuacugucuugaca

SEQ ID NO: 132086 - RNA, 20 nt, Human herpesvirus 3
cacaugaauauauagccuuu

SEQ ID NO: 132087 - RNA, 22 nt, Human herpesvirus 3
cacaacgucuagaacuguguau

SEQ ID NO: 132088 - RNA, 15 nt, Human herpesvirus 3
cacaacaaaagcuau

SEQ ID NO: 132089 - RNA, 18 nt, Human herpesvirus 3
caaguggaugauauuuua

SEQ ID NO: 132090 - RNA, 19 nt, Human herpesvirus 3
caaguggaugauauuuuaa

SEQ ID NO: 132091 - RNA, 21 nt, Human herpesvirus 3
caaguggucguuuguauuuaa

SEQ ID NO: 132092 - RNA, 22 nt, Human herpesvirus 3
caagugagguguccugugaucg

SEQ ID NO: 132093 - RNA, 18 nt, Human herpesvirus 3
caaguuaaauaacauguc

SEQ ID NO: 132094 - RNA, 18 nt, Human herpesvirus 3
caaguaaauaugugcauc

SEQ ID NO: 132095 - RNA, 13 nt, Human herpesvirus 3
caaguccaaucaa

SEQ ID NO: 132096 - RNA, 17 nt, Human herpesvirus 3
caagacuaacauuuauc

SEQ ID NO: 132097 - RNA, 20 nt, Human herpesvirus 3
caaguagagcccacacaauc

SEQ ID NO: 132098 - RNA, 15 nt, Human herpesvirus 3
caacuuccccauaca

SEQ ID NO: 132099 - RNA, 20 nt, Human herpesvirus 3
caagaacuuugcauguuuac

SEQ ID NO: 132100 - RNA, 17 nt, Human herpesvirus 3
caacccauccgagugaa

SEQ ID NO: 132101 - RNA, 16 nt, Human herpesvirus 3
caacgguuggcuuaaa

SEQ ID NO: 132102 - RNA, 13 nt, Human herpesvirus 3
caacgcagauuac

SEQ ID NO: 132103 - RNA, 19 nt, Human herpesvirus 3
caacgcguacgugccuagg

SEQ ID NO: 132104 - RNA, 13 nt, Human herpesvirus 3
caacgacauacau

SEQ ID NO: 132105 - RNA, 20 nt, Human herpesvirus 3
caacugcaaacacgcaauug

SEQ ID NO: 132106 - RNA, 17 nt, Human herpesvirus 3
auucuuagaaaagccag

SEQ ID NO: 132107 - RNA, 15 nt, Human herpesvirus 3
auugagaaaaccaaa

SEQ ID NO: 132108 - RNA, 13 nt, Human herpesvirus 3
auucacaugcagu

SEQ ID NO: 132109 - RNA, 12 nt, Human herpesvirus 3
auucaacuaaug

SEQ ID NO: 132110 - RNA, 19 nt, Human herpesvirus 3
auucaagacuaacauuuau

SEQ ID NO: 132111 - RNA, 16 nt, Human herpesvirus 3
auuauuuucuguguau

SEQ ID NO: 132112 - RNA, 16 nt, Human herpesvirus 3
auucaaaggacauuua

SEQ ID NO: 132113 - RNA, 23 nt, Human herpesvirus 3
auuaacaggauuugcuuauacuu

SEQ ID NO: 132114 - RNA, 21 nt, Human herpesvirus 3
auuaagaaucuccuaacuaua

SEQ ID NO: 132115 - RNA, 16 nt, Human herpesvirus 3
auuaaaagccguuaaa

SEQ ID NO: 132116 - RNA, 13 nt, Human herpesvirus 3
auuaaaguauuug

SEQ ID NO: 132117 - RNA, 15 nt, Human herpesvirus 3
auuaaauaaacuaua

SEQ ID NO: 132118 - RNA, 23 nt, Human herpesvirus 3
auuaaacgugcauuuuaaaaaua

SEQ ID NO: 132119 - RNA, 13 nt, Human herpesvirus 3
auuauguauaaua

SEQ ID NO: 132120 - RNA, 21 nt, Human herpesvirus 3
auuaaugcaacccugucauca

SEQ ID NO: 132121 - RNA, 11 nt, Human herpesvirus 3
auuauauccau

SEQ ID NO: 132122 - RNA, 20 nt, Human herpesvirus 3
augggguuaggcggguucuu

SEQ ID NO: 132123 - RNA, 20 nt, Human herpesvirus 3
augggcgggauuacauugcu

SEQ ID NO: 132124 - RNA, 18 nt, Human herpesvirus 3
auguauauacgagcaaaa

SEQ ID NO: 132125 - RNA, 19 nt, Human herpesvirus 3
auguauaaaauucuaacaa

SEQ ID NO: 132126 - RNA, 20 nt, Human herpesvirus 3
auguacugugucucucaaaa

SEQ ID NO: 132127 - RNA, 12 nt, Human herpesvirus 3
auguugauaucc

SEQ ID NO: 132128 - RNA, 19 nt, Human herpesvirus 3
auguugaacgguaccccaa

SEQ ID NO: 132129 - RNA, 19 nt, Human herpesvirus 3
auguuccacucuacaucaa

SEQ ID NO: 132130 - RNA, 12 nt, Human herpesvirus 3
augucagauaag

SEQ ID NO: 132131 - RNA, 21 nt, Human herpesvirus 3
auggaucagaaagauugcagu

SEQ ID NO: 132132 - RNA, 15 nt, Human herpesvirus 3
auggacuugaaaaau

SEQ ID NO: 132133 - RNA, 15 nt, Human herpesvirus 3
auggaauuaaugcaa

SEQ ID NO: 132134 - RNA, 18 nt, Human herpesvirus 3
auggccaacauccgugaa

SEQ ID NO: 132135 - RNA, 18 nt, Human herpesvirus 3
augccagaagcauuuaca

SEQ ID NO: 132136 - RNA, 13 nt, Human herpesvirus 3
augccacauuuac

SEQ ID NO: 132137 - RNA, 16 nt, Human herpesvirus 3
augcgcaaaauguuaa

SEQ ID NO: 132138 - RNA, 15 nt, Human herpesvirus 3
augcugauacauaaa

SEQ ID NO: 132139 - RNA, 14 nt, Human herpesvirus 3
augcuguuuuuacc

SEQ ID NO: 132140 - RNA, 17 nt, Human herpesvirus 3
augcuuguaaaacauau

SEQ ID NO: 132141 - RNA, 20 nt, Human herpesvirus 3
augcgggcuugcuguucuca

SEQ ID NO: 132142 - RNA, 14 nt, Human herpesvirus 3
augcagucggguca

SEQ ID NO: 132143 - RNA, 19 nt, Human herpesvirus 3
augcagucgggucauuaua

SEQ ID NO: 132144 - RNA, 15 nt, Human herpesvirus 3
augauguaaccuaca

SEQ ID NO: 132145 - RNA, 17 nt, Human herpesvirus 3
augauuaucaauacuug

SEQ ID NO: 132146 - RNA, 14 nt, Human herpesvirus 3
augcaacccuguca

SEQ ID NO: 132147 - RNA, 17 nt, Human herpesvirus 3
augagcagcgcagucua

SEQ ID NO: 132148 - RNA, 17 nt, Human herpesvirus 3
augaggggaaggauuaa

SEQ ID NO: 132149 - RNA, 13 nt, Human herpesvirus 3
augauaacagccu

SEQ ID NO: 132150 - RNA, 14 nt, Human herpesvirus 3
augacuuugaagac

SEQ ID NO: 132151 - RNA, 21 nt, Human herpesvirus 3
augacaacgguuucauguccc

SEQ ID NO: 132152 - RNA, 18 nt, Human herpesvirus 3
aucacaggggguauuuau

SEQ ID NO: 132153 - RNA, 21 nt, Human herpesvirus 3
aucuucacgcucaaugaacag

SEQ ID NO: 132154 - RNA, 20 nt, Human herpesvirus 3
augaacaaacacucuacgca

SEQ ID NO: 132155 - RNA, 18 nt, Human herpesvirus 3
augaaaaaagugucuguc

SEQ ID NO: 132156 - RNA, 16 nt, Human herpesvirus 3
augaacagcaacggau

SEQ ID NO: 132157 - RNA, 19 nt, Human herpesvirus 3
augaacagcaacggaugca

SEQ ID NO: 132158 - RNA, 11 nt, Human herpesvirus 3
augaacuaaua

SEQ ID NO: 132159 - RNA, 13 nt, Human herpesvirus 3
acccggucugcuc

SEQ ID NO: 132160 - RNA, 16 nt, Human herpesvirus 3
accgcaaugcugaugu

SEQ ID NO: 132161 - RNA, 22 nt, Human herpesvirus 3
accacaaucgcccgaaaacuuu

SEQ ID NO: 132162 - RNA, 17 nt, Human herpesvirus 3
acauuguugguucuacu

SEQ ID NO: 132163 - RNA, 22 nt, Human herpesvirus 3
acauuuaucccaacugauuaca

SEQ ID NO: 132164 - RNA, 16 nt, Human herpesvirus 3
accaauugguauacac

SEQ ID NO: 132165 - RNA, 19 nt, Human herpesvirus 3
acgccuggccccuugaacc

SEQ ID NO: 132166 - RNA, 21 nt, Human herpesvirus 3
acgccuggccccuugaaccac

SEQ ID NO: 132167 - RNA, 13 nt, Human herpesvirus 3
acgccugugaaau

SEQ ID NO: 132168 - RNA, 18 nt, Human herpesvirus 3
acgcggcgggcuguugua

SEQ ID NO: 132169 - RNA, 16 nt, Human herpesvirus 3
acgcgucuguguauau

SEQ ID NO: 132170 - RNA, 21 nt, Human herpesvirus 3
acgcguaaaucuuaugauggu

SEQ ID NO: 132171 - RNA, 14 nt, Human herpesvirus 3
acgcguacgugccu

SEQ ID NO: 132172 - RNA, 18 nt, Human herpesvirus 3
acgcuacagaagacauca

SEQ ID NO: 132173 - RNA, 22 nt, Human herpesvirus 3
acgauuaacguugaacaccauu

SEQ ID NO: 132174 - RNA, 22 nt, Human herpesvirus 3
acgccgcccacgagugaucgau

SEQ ID NO: 132175 - RNA, 15 nt, Human herpesvirus 3
acgccgcaacaaccc

SEQ ID NO: 132176 - RNA, 13 nt, Human herpesvirus 3
acgagagauccaa

SEQ ID NO: 132177 - RNA, 18 nt, Human herpesvirus 3
acgagagcaguccauggu

SEQ ID NO: 132178 - RNA, 12 nt, Human herpesvirus 3
accuguuuacac

SEQ ID NO: 132179 - RNA, 21 nt, Human herpesvirus 3
accuguuagaauaguaaauac

SEQ ID NO: 132180 - RNA, 17 nt, Human herpesvirus 3
accuuaacucaaccgcc

SEQ ID NO: 132181 - RNA, 15 nt, Human herpesvirus 3
accuggucaccgugu

SEQ ID NO: 132182 - RNA, 14 nt, Human herpesvirus 3
acgugauuugccca

SEQ ID NO: 132183 - RNA, 15 nt, Human herpesvirus 3
acgugcaugcguuuu

SEQ ID NO: 132184 - RNA, 18 nt, Human herpesvirus 3
acgugguaccaaaaacac

SEQ ID NO: 132185 - RNA, 12 nt, Human herpesvirus 3
acguucaccaaa

SEQ ID NO: 132186 - RNA, 22 nt, Human herpesvirus 3
acguucuaauaaaaacaucaaa

SEQ ID NO: 132187 - RNA, 16 nt, Human herpesvirus 3
acguuuguaaaccacu

SEQ ID NO: 132188 - RNA, 21 nt, Human herpesvirus 3
acguuuguguugugacuugac

SEQ ID NO: 132189 - RNA, 13 nt, Human herpesvirus 3
acguuuuaguaaa

SEQ ID NO: 132190 - RNA, 22 nt, Human herpesvirus 3
acguccgauguuccaauggaug

SEQ ID NO: 132191 - RNA, 23 nt, Human herpesvirus 3
acggcuuuuaauuugaagacacc

SEQ ID NO: 132192 - RNA, 17 nt, Human herpesvirus 3
acuaaagguauacuugg

SEQ ID NO: 132193 - RNA, 20 nt, Human herpesvirus 3
acuacacccaguacguugca

SEQ ID NO: 132194 - RNA, 17 nt, Human herpesvirus 3
acguuuuuggauggccu

SEQ ID NO: 132195 - RNA, 14 nt, Human herpesvirus 3
acuaauauucuaca

SEQ ID NO: 132196 - RNA, 21 nt, Human herpesvirus 3
acuaauauucuacagauuuau

SEQ ID NO: 132197 - RNA, 22 nt, Human herpesvirus 3
acuaagccucuguacaacacaa

SEQ ID NO: 132198 - RNA, 18 nt, Human herpesvirus 3
acuacauggaguguguua

SEQ ID NO: 132199 - RNA, 14 nt, Human herpesvirus 3
acucccuccaaucg

SEQ ID NO: 132200 - RNA, 14 nt, Human herpesvirus 3
acuauuugugaaga

SEQ ID NO: 132201 - RNA, 19 nt, Human herpesvirus 3
acuauuugugaagacuuua

SEQ ID NO: 132202 - RNA, 20 nt, Human herpesvirus 3
acuauuugugaagacuuuau

SEQ ID NO: 132203 - RNA, 21 nt, Human herpesvirus 3
acuccuuuaaauuuuacuuaa

SEQ ID NO: 132204 - RNA, 19 nt, Human herpesvirus 3
acugccguaaacacgguaa

SEQ ID NO: 132205 - RNA, 14 nt, Human herpesvirus 3
acuucaguacuuaa

SEQ ID NO: 132206 - RNA, 22 nt, Human herpesvirus 3
acuuaagacauggccgugaaug

SEQ ID NO: 132207 - RNA, 20 nt, Human herpesvirus 3
acuucuugaagcguuuccag

SEQ ID NO: 132208 - RNA, 19 nt, Human herpesvirus 3
acuugaaaaaucauuauga

SEQ ID NO: 132209 - RNA, 16 nt, Human herpesvirus 3
acuuaacaaacauaua

SEQ ID NO: 132210 - RNA, 16 nt, Human herpesvirus 3
acuguuugacaguucg

SEQ ID NO: 132211 - RNA, 23 nt, Human herpesvirus 3
acuguuccaggcgagacuugaua

SEQ ID NO: 132212 - RNA, 23 nt, Human herpesvirus 3
acuguuuaaaaauacgugcguau

SEQ ID NO: 132213 - RNA, 15 nt, Human herpesvirus 3
acuguuuacauagau

SEQ ID NO: 132214 - RNA, 15 nt, Human herpesvirus 3
acuguucuacugacu

SEQ ID NO: 132215 - RNA, 17 nt, Human herpesvirus 3
aauuugccccaaaccac

SEQ ID NO: 132216 - RNA, 18 nt, Human herpesvirus 3
aauuugccccaaaccacu

SEQ ID NO: 132217 - RNA, 22 nt, Human herpesvirus 3
aauuugccccaaaccacuguuc

SEQ ID NO: 132218 - RNA, 20 nt, Human herpesvirus 3
aaugaccgcaaugcugaugu

SEQ ID NO: 132219 - RNA, 18 nt, Human herpesvirus 3
aauuuugucgggacacaa

SEQ ID NO: 132220 - RNA, 23 nt, Human herpesvirus 3
acaaaaaaaaaaaaaccaaacac

SEQ ID NO: 132221 - RNA, 16 nt, Human herpesvirus 3
aauuuuuauacguuuc

SEQ ID NO: 132222 - RNA, 12 nt, Human herpesvirus 3
aauuuuacuuaa

SEQ ID NO: 132223 - RNA, 17 nt, Human herpesvirus 3
acaaauugugacguuau

SEQ ID NO: 132224 - RNA, 18 nt, Human herpesvirus 3
acaaauuucugauguucc

SEQ ID NO: 132225 - RNA, 21 nt, Human herpesvirus 3
acaaacacucuacgcauuuac

SEQ ID NO: 132226 - RNA, 14 nt, Human herpesvirus 3
acaauaacauaagg

SEQ ID NO: 132227 - RNA, 14 nt, Human herpesvirus 3
acaaguacaaccca

SEQ ID NO: 132228 - RNA, 20 nt, Human herpesvirus 3
acaaucgcccgaaaacuuug

SEQ ID NO: 132229 - RNA, 19 nt, Human herpesvirus 3
acaacucuggagucuccaa

SEQ ID NO: 132230 - RNA, 16 nt, Human herpesvirus 3
acaacucgugucucug

SEQ ID NO: 132231 - RNA, 18 nt, Human herpesvirus 3
acaacauggcuaugccau

SEQ ID NO: 132232 - RNA, 14 nt, Human herpesvirus 3
acaagcgguugugg

SEQ ID NO: 132233 - RNA, 15 nt, Human herpesvirus 3
acaaggauaaaacac

SEQ ID NO: 132234 - RNA, 12 nt, Human herpesvirus 3
acaagagugcau

SEQ ID NO: 132235 - RNA, 22 nt, Human herpesvirus 3
acaagaacuuugcauguuuaca

SEQ ID NO: 132236 - RNA, 19 nt, Human herpesvirus 3
acacacgccgguacaauua

SEQ ID NO: 132237 - RNA, 11 nt, Human herpesvirus 3
acacacuaccu

SEQ ID NO: 132238 - RNA, 22 nt, Human herpesvirus 3
acacauuugugccgcaagcaua

SEQ ID NO: 132239 - RNA, 15 nt, Human herpesvirus 3
acacauuacguucuc

SEQ ID NO: 132240 - RNA, 17 nt, Human herpesvirus 3
acaauugagauacacau

SEQ ID NO: 132241 - RNA, 13 nt, Human herpesvirus 3
acacaaccagucu

SEQ ID NO: 132242 - RNA, 22 nt, Human herpesvirus 3
acacaaccagucuaguuacauu

SEQ ID NO: 132243 - RNA, 18 nt, Human herpesvirus 3
acacaaucagaagauaua

SEQ ID NO: 132244 - RNA, 16 nt, Human herpesvirus 3
acacucuacgcauuua

SEQ ID NO: 132245 - RNA, 17 nt, Human herpesvirus 3
acacucuacgcauuuac

SEQ ID NO: 132246 - RNA, 14 nt, Human herpesvirus 3
acaccgcugugcug

SEQ ID NO: 132247 - RNA, 20 nt, Human herpesvirus 3
acacucacguuuguguugug

SEQ ID NO: 132248 - RNA, 15 nt, Human herpesvirus 3
acaggcuccacaauc

SEQ ID NO: 132249 - RNA, 21 nt, Human herpesvirus 3
acaucgugcuugaauugccau

SEQ ID NO: 132250 - RNA, 19 nt, Human herpesvirus 3
acaucguuuguuucuuuau

SEQ ID NO: 132251 - RNA, 16 nt, Human herpesvirus 3
acauugcggaucccaa

SEQ ID NO: 132252 - RNA, 13 nt, Human herpesvirus 3
acauucacaguaa

SEQ ID NO: 132253 - RNA, 12 nt, Human herpesvirus 3
acauccgugaaa

SEQ ID NO: 132254 - RNA, 14 nt, Human herpesvirus 3
acauccuaguacag

SEQ ID NO: 132255 - RNA, 14 nt, Human herpesvirus 3
acauccuggacaca

SEQ ID NO: 132256 - RNA, 23 nt, Human herpesvirus 3
acauaugcgcauggaauuaaugc

SEQ ID NO: 132257 - RNA, 19 nt, Human herpesvirus 3
acaucaaccggaacaguau

SEQ ID NO: 132258 - RNA, 12 nt, Human herpesvirus 3
acaucaacgcga

SEQ ID NO: 132259 - RNA, 17 nt, Human herpesvirus 3
agaugagcagcgcaguc

SEQ ID NO: 132260 - RNA, 17 nt, Human herpesvirus 3
agaugaacuaauauucu

SEQ ID NO: 132261 - RNA, 19 nt, Human herpesvirus 3
agaugaacuaauauucuac

SEQ ID NO: 132262 - RNA, 17 nt, Human herpesvirus 3
agaugaaauaguuucau

SEQ ID NO: 132263 - RNA, 22 nt, Human herpesvirus 3
agaugguuaauaauagugacaa

SEQ ID NO: 132264 - RNA, 12 nt, Human herpesvirus 3
agauguacaccc

SEQ ID NO: 132265 - RNA, 18 nt, Human herpesvirus 3
agcaauucccaguaaaca

SEQ ID NO: 132266 - RNA, 21 nt, Human herpesvirus 3
agcaauucccaguaaacaaca

SEQ ID NO: 132267 - RNA, 17 nt, Human herpesvirus 3
agcaauaaaauggauau

SEQ ID NO: 132268 - RNA, 22 nt, Human herpesvirus 3
agaguuagcauccaaauuaacc

SEQ ID NO: 132269 - RNA, 20 nt, Human herpesvirus 3
agauacagcauauaauccac

SEQ ID NO: 132270 - RNA, 21 nt, Human herpesvirus 3
agauacuaugguaaaaaccgc

SEQ ID NO: 132271 - RNA, 20 nt, Human herpesvirus 3
agauauaauuuguccauauc

SEQ ID NO: 132272 - RNA, 22 nt, Human herpesvirus 3
acuuuggcggucauuuccacaa

SEQ ID NO: 132273 - RNA, 18 nt, Human herpesvirus 3
acuuuuaaacgccagugg

SEQ ID NO: 132274 - RNA, 16 nt, Human herpesvirus 3
agagcucccauuccaa

SEQ ID NO: 132275 - RNA, 17 nt, Human herpesvirus 3
agagcaguccaugguuu

SEQ ID NO: 132276 - RNA, 21 nt, Human herpesvirus 3
agccguauaacccacuuuaau

SEQ ID NO: 132277 - RNA, 13 nt, Human herpesvirus 3
agccugugacaaa

SEQ ID NO: 132278 - RNA, 18 nt, Human herpesvirus 3
agccaacacaguguucag

SEQ ID NO: 132279 - RNA, 15 nt, Human herpesvirus 3
agcauuugcgaauuc

SEQ ID NO: 132280 - RNA, 16 nt, Human herpesvirus 3
agcauaaggaaaugca

SEQ ID NO: 132281 - RNA, 21 nt, Human herpesvirus 3
agcguacugcagauacagcau

SEQ ID NO: 132282 - RNA, 15 nt, Human herpesvirus 3
aggauagauaucaca

SEQ ID NO: 132283 - RNA, 14 nt, Human herpesvirus 3
aggauggguuguug

SEQ ID NO: 132284 - RNA, 15 nt, Human herpesvirus 3
auaugauucaaguaa

SEQ ID NO: 132285 - RNA, 22 nt, Human herpesvirus 3
auaugacggcccccuggacaug

SEQ ID NO: 132286 - RNA, 12 nt, Human herpesvirus 3
auaugacauaug

SEQ ID NO: 132287 - RNA, 19 nt, Human herpesvirus 3
auaugaagcaaggggaucg

SEQ ID NO: 132288 - RNA, 17 nt, Human herpesvirus 3
auaucuggaacccaagg

SEQ ID NO: 132289 - RNA, 18 nt, Human herpesvirus 3
auaugguaugucugucau

SEQ ID NO: 132290 - RNA, 15 nt, Human herpesvirus 3
auaugucacauauua

SEQ ID NO: 132291 - RNA, 17 nt, Human herpesvirus 3
aucacaacagacaagcu

SEQ ID NO: 132292 - RNA, 12 nt, Human herpesvirus 3
aucaauauguca

SEQ ID NO: 132293 - RNA, 16 nt, Human herpesvirus 3
auauuaccccgccaua

SEQ ID NO: 132294 - RNA, 20 nt, Human herpesvirus 3
auauuaccccgccauaaaca

SEQ ID NO: 132295 - RNA, 19 nt, Human herpesvirus 3
auaucgucuaauaccacag

SEQ ID NO: 132296 - RNA, 14 nt, Human herpesvirus 3
auauccugcgcaga

SEQ ID NO: 132297 - RNA, 14 nt, Human herpesvirus 3
auauaaauaacaua

SEQ ID NO: 132298 - RNA, 17 nt, Human herpesvirus 3
auaguuauuguauauac

SEQ ID NO: 132299 - RNA, 22 nt, Human herpesvirus 3
auaggguugcgauaacugcgau

SEQ ID NO: 132300 - RNA, 16 nt, Human herpesvirus 3
auaccgccuuuaauua

SEQ ID NO: 132301 - RNA, 16 nt, Human herpesvirus 3
auaccauauauggaca

SEQ ID NO: 132302 - RNA, 22 nt, Human herpesvirus 3
auaagauguacugugucucuca

SEQ ID NO: 132303 - RNA, 18 nt, Human herpesvirus 3
auaacguugcggugauau

SEQ ID NO: 132304 - RNA, 18 nt, Human herpesvirus 3
auaaccuguccauuugca

SEQ ID NO: 132305 - RNA, 21 nt, Human herpesvirus 3
auaaccuguccauuugcauuu

SEQ ID NO: 132306 - RNA, 18 nt, Human herpesvirus 3
auaacagucuaacaguac

SEQ ID NO: 132307 - RNA, 23 nt, Human herpesvirus 3
auaaccggguggguggcauuaaa

SEQ ID NO: 132308 - RNA, 21 nt, Human herpesvirus 3
auaagguguuaauaaccauau

SEQ ID NO: 132309 - RNA, 23 nt, Human herpesvirus 3
auaagcucuguaugcugauacau

SEQ ID NO: 132310 - RNA, 18 nt, Human herpesvirus 3
auaagggagucuacaaua

SEQ ID NO: 132311 - RNA, 14 nt, Human herpesvirus 3
auaaguauggagug

SEQ ID NO: 132312 - RNA, 21 nt, Human herpesvirus 3
auaaguggggguuuaauuuca

SEQ ID NO: 132313 - RNA, 14 nt, Human herpesvirus 3
auaauacacacuac

SEQ ID NO: 132314 - RNA, 13 nt, Human herpesvirus 3
auaauagucaaug

SEQ ID NO: 132315 - RNA, 13 nt, Human herpesvirus 3
auaauaugauaca

SEQ ID NO: 132316 - RNA, 15 nt, Human herpesvirus 3
auaauauuuacacgu

SEQ ID NO: 132317 - RNA, 18 nt, Human herpesvirus 3
auacaacacgaugcgcug

SEQ ID NO: 132318 - RNA, 19 nt, Human herpesvirus 3
auacaacgggagcuuccga

SEQ ID NO: 132319 - RNA, 16 nt, Human herpesvirus 3
auacaagcuccuguga

SEQ ID NO: 132320 - RNA, 13 nt, Human herpesvirus 3
auacaagcauaac

SEQ ID NO: 132321 - RNA, 12 nt, Human herpesvirus 3
auacaagguguu

SEQ ID NO: 132322 - RNA, 13 nt, Human herpesvirus 3
auacaagguguuu

SEQ ID NO: 132323 - RNA, 19 nt, Human herpesvirus 3
auacaaaauaaaaacauac

SEQ ID NO: 132324 - RNA, 16 nt, Human herpesvirus 3
auacaauaaacauaac

SEQ ID NO: 132325 - RNA, 23 nt, Human herpesvirus 3
auaauccuuaucuugcauguguc

SEQ ID NO: 132326 - RNA, 15 nt, Human herpesvirus 3
auaauggcugcugaa

SEQ ID NO: 132327 - RNA, 22 nt, Human herpesvirus 3
auaauguuggguauuuauaauu

SEQ ID NO: 132328 - RNA, 17 nt, Human herpesvirus 3
auaauuguucagucuaa

SEQ ID NO: 132329 - RNA, 20 nt, Human herpesvirus 3
auaauuaaugcaaccaucag

SEQ ID NO: 132330 - RNA, 14 nt, Human herpesvirus 3
aguguucauuuuau

SEQ ID NO: 132331 - RNA, 15 nt, Human herpesvirus 3
aguguucuaaaacac

SEQ ID NO: 132332 - RNA, 16 nt, Human herpesvirus 3
aguguucuaaaacacu

SEQ ID NO: 132333 - RNA, 16 nt, Human herpesvirus 3
aguguuuaacaaccau

SEQ ID NO: 132334 - RNA, 13 nt, Human herpesvirus 3
agugucguuucca

SEQ ID NO: 132335 - RNA, 17 nt, Human herpesvirus 3
aguuaaaucguuuaaca

SEQ ID NO: 132336 - RNA, 16 nt, Human herpesvirus 3
agucugaccauuuacc

SEQ ID NO: 132337 - RNA, 13 nt, Human herpesvirus 3
agucuucugucaa

SEQ ID NO: 132338 - RNA, 19 nt, Human herpesvirus 3
agucuguaucgcuaucaga

SEQ ID NO: 132339 - RNA, 20 nt, Human herpesvirus 3
auaaacaagucaauauuaca

SEQ ID NO: 132340 - RNA, 17 nt, Human herpesvirus 3
auaaaagcagacauccc

SEQ ID NO: 132341 - RNA, 20 nt, Human herpesvirus 3
auaaaccgauuaugucaaca

SEQ ID NO: 132342 - RNA, 14 nt, Human herpesvirus 3
auaaacgacacaaa

SEQ ID NO: 132343 - RNA, 13 nt, Human herpesvirus 3
auaaaccaacucc

SEQ ID NO: 132344 - RNA, 15 nt, Human herpesvirus 3
auaaaccaacuccug

SEQ ID NO: 132345 - RNA, 17 nt, Human herpesvirus 3
auaaacugaauuuaaca

SEQ ID NO: 132346 - RNA, 16 nt, Human herpesvirus 3
auaacaccgcucugcg

SEQ ID NO: 132347 - RNA, 15 nt, Human herpesvirus 3
aguuuaggguuuaaa

SEQ ID NO: 132348 - RNA, 12 nt, Human herpesvirus 3
agucgucagggg

SEQ ID NO: 132349 - RNA, 22 nt, Human herpesvirus 3
agucuaacaguacgcaugugcu

SEQ ID NO: 132350 - RNA, 15 nt, Human herpesvirus 3
agucgcaacgcugcu

SEQ ID NO: 132351 - RNA, 13 nt, Human herpesvirus 3
aguagaaaaucga

SEQ ID NO: 132352 - RNA, 17 nt, Human herpesvirus 3
aguauuuuccuuaugua

SEQ ID NO: 132353 - RNA, 21 nt, Human herpesvirus 3
aguauuuuccuuauguaaaag

SEQ ID NO: 132354 - RNA, 14 nt, Human herpesvirus 3
agucaaauucaacu

SEQ ID NO: 132355 - RNA, 14 nt, Human herpesvirus 3
agucaauguuuaaa

SEQ ID NO: 132356 - RNA, 19 nt, Human herpesvirus 3
aguaccgggauaucucaua

SEQ ID NO: 132357 - RNA, 14 nt, Human herpesvirus 3
aguacuacacccag

SEQ ID NO: 132358 - RNA, 16 nt, Human herpesvirus 3
aguaccacgugguauu

SEQ ID NO: 132359 - RNA, 15 nt, Human herpesvirus 3
aguacaggguaucua

SEQ ID NO: 132360 - RNA, 20 nt, Human herpesvirus 3
agguuauccaacuguuuaca

SEQ ID NO: 132361 - RNA, 21 nt, Human herpesvirus 3
agguuaaauuuauaaaacacu

SEQ ID NO: 132362 - RNA, 14 nt, Human herpesvirus 3
agguuacauggggu

SEQ ID NO: 132363 - RNA, 16 nt, Human herpesvirus 3
agguguaaauacugcc

SEQ ID NO: 132364 - RNA, 13 nt, Human herpesvirus 3
aaaaacguuucug

SEQ ID NO: 132365 - RNA, 12 nt, Human herpesvirus 3
aaaaaagugucu

SEQ ID NO: 132366 - RNA, 19 nt, Human herpesvirus 3
aaaaacaguacgcuuuuau

SEQ ID NO: 132367 - RNA, 21 nt, Human herpesvirus 3
aaaaagucacuauaaacguau

SEQ ID NO: 132368 - RNA, 11 nt, Human herpesvirus 3
aaaaauaccug

SEQ ID NO: 132369 - RNA, 13 nt, Human herpesvirus 3
aaaaauaccugag

SEQ ID NO: 132370 - RNA, 19 nt, Human herpesvirus 3
aaaaauguugucugccaaa

SEQ ID NO: 132371 - RNA, 16 nt, Human herpesvirus 3
aaaacaaacauucaca

SEQ ID NO: 132372 - RNA, 20 nt, Human herpesvirus 3
aaaaaugcggcggccguugc

SEQ ID NO: 132373 - RNA, 15 nt, Human herpesvirus 3
aaaaauucaaaauac

SEQ ID NO: 132374 - RNA, 15 nt, Human herpesvirus 3
aaaacgaaaaccuuc

SEQ ID NO: 132375 - RNA, 16 nt, Human herpesvirus 3
aaaaccgcuauuucua

SEQ ID NO: 132376 - RNA, 22 nt, Human herpesvirus 3
aaaacgcguuuuguaccucuac

SEQ ID NO: 132377 - RNA, 16 nt, Human herpesvirus 3
aaaaccuuaccaccca

SEQ ID NO: 132378 - RNA, 21 nt, Human herpesvirus 3
aaaacguuguguuuuaagugu

SEQ ID NO: 132379 - RNA, 17 nt, Human herpesvirus 3
aaaaguuuacguguaua

SEQ ID NO: 132380 - RNA, 22 nt, Human herpesvirus 3
aaaaguacgcguauaucucgca

SEQ ID NO: 132381 - RNA, 22 nt, Human herpesvirus 3
aaaauaauagucaauguuuaaa

SEQ ID NO: 132382 - RNA, 22 nt, Human herpesvirus 3
aaaauaauuccgguugugccaa

SEQ ID NO: 132383 - RNA, 20 nt, Human herpesvirus 3
aaaauguugucugccaaacg

SEQ ID NO: 132384 - RNA, 19 nt, Human herpesvirus 3
aaaagguuuauuuacuuua

SEQ ID NO: 132385 - RNA, 13 nt, Human herpesvirus 3
aaacaaacauuca

SEQ ID NO: 132386 - RNA, 19 nt, Human herpesvirus 3
aaaauugcgcgaguuccca

SEQ ID NO: 132387 - RNA, 17 nt, Human herpesvirus 3
aaaauucuaacaacucu

SEQ ID NO: 132388 - RNA, 15 nt, Human herpesvirus 3
aaacacacaccagac

SEQ ID NO: 132389 - RNA, 14 nt, Human herpesvirus 3
aaacacaaccaguc

SEQ ID NO: 132390 - RNA, 20 nt, Human herpesvirus 3
aaacacggaauccgguauac

SEQ ID NO: 132391 - RNA, 21 nt, Human herpesvirus 3
aaacacggaauccgguauaca

SEQ ID NO: 132392 - RNA, 17 nt, Human herpesvirus 3
aaacccugauaaacccu

SEQ ID NO: 132393 - RNA, 13 nt, Human herpesvirus 3
aaacccacaagua

SEQ ID NO: 132394 - RNA, 18 nt, Human herpesvirus 3
aaaccccacuaccgccag

SEQ ID NO: 132395 - RNA, 14 nt, Human herpesvirus 3
aaacccccaagcaa

SEQ ID NO: 132396 - RNA, 17 nt, Human herpesvirus 3
aaaccggaacaccaaga

SEQ ID NO: 132397 - RNA, 17 nt, Human herpesvirus 3
aaaccaauaucuuugca

SEQ ID NO: 132398 - RNA, 14 nt, Human herpesvirus 3
aaacauacaccgga

SEQ ID NO: 132399 - RNA, 16 nt, Human herpesvirus 3
auauuaacacgauuaa

SEQ ID NO: 132400 - RNA, 17 nt, Human herpesvirus 3
auauuaacacgauuaac

SEQ ID NO: 132401 - RNA, 13 nt, Human herpesvirus 3
auauuagcacuau

SEQ ID NO: 132402 - RNA, 14 nt, Human herpesvirus 3
auauuagcacuauc

SEQ ID NO: 132403 - RNA, 20 nt, Human herpesvirus 3
auauguucagcagcuuaaca

SEQ ID NO: 132404 - RNA, 18 nt, Human herpesvirus 3
auauguuccacucuacau

SEQ ID NO: 132405 - RNA, 21 nt, Human herpesvirus 3
auaucgucuaauaccacagac

SEQ ID NO: 132406 - RNA, 17 nt, Human herpesvirus 3
auaucauuuuauuacau

SEQ ID NO: 132407 - RNA, 23 nt, Human herpesvirus 3
auauaagguguuaauaaccauau

SEQ ID NO: 132408 - RNA, 22 nt, Human herpesvirus 3
auauacaaaauaaaaacauaca

SEQ ID NO: 132409 - RNA, 18 nt, Human herpesvirus 3
auauaacaauugagauac

SEQ ID NO: 132410 - RNA, 13 nt, Human herpesvirus 3
auauaacauacau

SEQ ID NO: 132411 - RNA, 20 nt, Human herpesvirus 3
auauacgcucuucugauauu

SEQ ID NO: 132412 - RNA, 14 nt, Human herpesvirus 3
auauauauguucca

SEQ ID NO: 132413 - RNA, 18 nt, Human herpesvirus 3
auauauggcgccauccau

SEQ ID NO: 132414 - RNA, 22 nt, Human herpesvirus 3
auagccgccagauguacaccca

SEQ ID NO: 132415 - RNA, 16 nt, Human herpesvirus 3
auagcuguaaaaacca

SEQ ID NO: 132416 - RNA, 12 nt, Human herpesvirus 3
auagcugucacu

SEQ ID NO: 132417 - RNA, 20 nt, Human herpesvirus 3
auaauggcugcugaagcuga

SEQ ID NO: 132418 - RNA, 14 nt, Human herpesvirus 3
auaauguuggguau

SEQ ID NO: 132419 - RNA, 14 nt, Human herpesvirus 3
auaguaaauaccua

SEQ ID NO: 132420 - RNA, 17 nt, Human herpesvirus 3
aucaucgaaaagacugu

SEQ ID NO: 132421 - RNA, 19 nt, Human herpesvirus 3
aucaucgaaaagacugugu

SEQ ID NO: 132422 - RNA, 22 nt, Human herpesvirus 3
aucaccgggucuuaucuauaua

SEQ ID NO: 132423 - RNA, 16 nt, Human herpesvirus 3
auauucuacagauuua

SEQ ID NO: 132424 - RNA, 16 nt, Human herpesvirus 3
auauucacaugcaguu

SEQ ID NO: 132425 - RNA, 22 nt, Human herpesvirus 3
auauguaacguuuguaaaccac

SEQ ID NO: 132426 - RNA, 16 nt, Human herpesvirus 3
aucgaaaaaaggugua

SEQ ID NO: 132427 - RNA, 17 nt, Human herpesvirus 3
aucccacauguauaaaa

SEQ ID NO: 132428 - RNA, 16 nt, Human herpesvirus 3
aucccaaauuuuaaac

SEQ ID NO: 132429 - RNA, 13 nt, Human herpesvirus 3
aucccccuucaaa

SEQ ID NO: 132430 - RNA, 16 nt, Human herpesvirus 3
aucauuaaacgugcau

SEQ ID NO: 132431 - RNA, 20 nt, Human herpesvirus 3
auccauccgauaauaccaaa

SEQ ID NO: 132432 - RNA, 19 nt, Human herpesvirus 3
auccauuuuuccucugggg

SEQ ID NO: 132433 - RNA, 22 nt, Human herpesvirus 3
augcaaccaucagaucaucuga

SEQ ID NO: 132434 - RNA, 19 nt, Human herpesvirus 3
augcacaacaaaagcuaua

SEQ ID NO: 132435 - RNA, 20 nt, Human herpesvirus 3
augcacaacaaaagcuauau

SEQ ID NO: 132436 - RNA, 15 nt, Human herpesvirus 3
augaggguggcagaa

SEQ ID NO: 132437 - RNA, 21 nt, Human herpesvirus 3
augaggguggcagaagguuua

SEQ ID NO: 132438 - RNA, 19 nt, Human herpesvirus 3
augaucugguaaauguuaa

SEQ ID NO: 132439 - RNA, 14 nt, Human herpesvirus 3
augaucccaauaaa

SEQ ID NO: 132440 - RNA, 18 nt, Human herpesvirus 3
augauguaaccuacacaa

SEQ ID NO: 132441 - RNA, 19 nt, Human herpesvirus 3
augauguaaccuacacaac

SEQ ID NO: 132442 - RNA, 13 nt, Human herpesvirus 3
augccauuugaga

SEQ ID NO: 132443 - RNA, 21 nt, Human herpesvirus 3
augccauuuggacacuacuca

SEQ ID NO: 132444 - RNA, 15 nt, Human herpesvirus 3
augccagaagcauuu

SEQ ID NO: 132445 - RNA, 17 nt, Human herpesvirus 3
augccagaagcauuuac

SEQ ID NO: 132446 - RNA, 16 nt, Human herpesvirus 3
augcaucguagguaua

SEQ ID NO: 132447 - RNA, 21 nt, Human herpesvirus 3
augcguuuuuuauuuuuacaa

SEQ ID NO: 132448 - RNA, 15 nt, Human herpesvirus 3
augccucggaugcac

SEQ ID NO: 132449 - RNA, 21 nt, Human herpesvirus 3
augcgggcuugcuguucucau

SEQ ID NO: 132450 - RNA, 24 nt, Human herpesvirus 3
augacggcccccuggacauguguu

SEQ ID NO: 132451 - RNA, 14 nt, Human herpesvirus 3
augagaguuuacaa

SEQ ID NO: 132452 - RNA, 18 nt, Human herpesvirus 3
augagcggugguaugauc

SEQ ID NO: 132453 - RNA, 19 nt, Human herpesvirus 3
augacacgaauaggugaua

SEQ ID NO: 132454 - RNA, 20 nt, Human herpesvirus 3
augaagauagguuagaacac

SEQ ID NO: 132455 - RNA, 18 nt, Human herpesvirus 3
augaacugccaauauaca

SEQ ID NO: 132456 - RNA, 20 nt, Human herpesvirus 3
augaagcuauuggcuccacu

SEQ ID NO: 132457 - RNA, 15 nt, Human herpesvirus 3
aucgucccauuuaaa

SEQ ID NO: 132458 - RNA, 18 nt, Human herpesvirus 3
aucgggcgacaauccaau

SEQ ID NO: 132459 - RNA, 13 nt, Human herpesvirus 3
aucguagguauaa

SEQ ID NO: 132460 - RNA, 19 nt, Human herpesvirus 3
aucggcggcagaugaucug

SEQ ID NO: 132461 - RNA, 20 nt, Human herpesvirus 3
aucggcguccucuguuacau

SEQ ID NO: 132462 - RNA, 16 nt, Human herpesvirus 3
aucggaagaugacuuu

SEQ ID NO: 132463 - RNA, 16 nt, Human herpesvirus 3
aucgcggggguugugc

SEQ ID NO: 132464 - RNA, 23 nt, Human herpesvirus 3
aucuaauaacaauuuaacauacc

SEQ ID NO: 132465 - RNA, 14 nt, Human herpesvirus 3
augaaauaguuuca

SEQ ID NO: 132466 - RNA, 22 nt, Human herpesvirus 3
augaacaaacacucuacgcauu

SEQ ID NO: 132467 - RNA, 20 nt, Human herpesvirus 3
aguauauuagcacuaucguc

SEQ ID NO: 132468 - RNA, 17 nt, Human herpesvirus 3
aguauaccggaguauaa

SEQ ID NO: 132469 - RNA, 13 nt, Human herpesvirus 3
agugcauauccag

SEQ ID NO: 132470 - RNA, 16 nt, Human herpesvirus 3
agugaucgauguaaca

SEQ ID NO: 132471 - RNA, 15 nt, Human herpesvirus 3
aguaacagcccgaua

SEQ ID NO: 132472 - RNA, 16 nt, Human herpesvirus 3
aguaacagcgacuaug

SEQ ID NO: 132473 - RNA, 19 nt, Human herpesvirus 3
aguaaacguccgauguucc

SEQ ID NO: 132474 - RNA, 21 nt, Human herpesvirus 3
aguaaauaccuauuucaugcu

SEQ ID NO: 132475 - RNA, 15 nt, Human herpesvirus 3
agugcuugacugugc

SEQ ID NO: 132476 - RNA, 18 nt, Human herpesvirus 3
aguuacacgguguauaua

SEQ ID NO: 132477 - RNA, 14 nt, Human herpesvirus 3
aguuauaugaagca

SEQ ID NO: 132478 - RNA, 20 nt, Human herpesvirus 3
auaaacccugauaaacguuc

SEQ ID NO: 132479 - RNA, 15 nt, Human herpesvirus 3
auaaacgaugacaca

SEQ ID NO: 132480 - RNA, 13 nt, Human herpesvirus 3
auaaacguauaaa

SEQ ID NO: 132481 - RNA, 12 nt, Human herpesvirus 3
auaaacuauaug

SEQ ID NO: 132482 - RNA, 21 nt, Human herpesvirus 3
auaaacugaauuuaacauagc

SEQ ID NO: 132483 - RNA, 21 nt, Human herpesvirus 3
auaaacccuccggcaucucca

SEQ ID NO: 132484 - RNA, 15 nt, Human herpesvirus 3
auaauacacacuacc

SEQ ID NO: 132485 - RNA, 12 nt, Human herpesvirus 3
auaauaccaaac

SEQ ID NO: 132486 - RNA, 17 nt, Human herpesvirus 3
auaauaugauacauaaa

SEQ ID NO: 132487 - RNA, 15 nt, Human herpesvirus 3
auaacauaaccaaua

SEQ ID NO: 132488 - RNA, 19 nt, Human herpesvirus 3
auaacauacaucauaaacc

SEQ ID NO: 132489 - RNA, 15 nt, Human herpesvirus 3
auaacaugggauuuc

SEQ ID NO: 132490 - RNA, 17 nt, Human herpesvirus 3
aguucuuugaagacuuu

SEQ ID NO: 132491 - RNA, 20 nt, Human herpesvirus 3
aguuguuggcgcaugccauu

SEQ ID NO: 132492 - RNA, 21 nt, Human herpesvirus 3
agcuguaaaaaccauggacag

SEQ ID NO: 132493 - RNA, 21 nt, Human herpesvirus 3
agcuguccaugaugaaaaccu

SEQ ID NO: 132494 - RNA, 20 nt, Human herpesvirus 3
agcugucccacagaacauac

SEQ ID NO: 132495 - RNA, 23 nt, Human herpesvirus 3
agcuguccggacuccagcaucau

SEQ ID NO: 132496 - RNA, 12 nt, Human herpesvirus 3
aggaaaaagagg

SEQ ID NO: 132497 - RNA, 23 nt, Human herpesvirus 3
agcuugucgcgcguguaugcaca

SEQ ID NO: 132498 - RNA, 19 nt, Human herpesvirus 3
agcuuccgaaagcagucaa

SEQ ID NO: 132499 - RNA, 12 nt, Human herpesvirus 3
agcuugcaaguu

SEQ ID NO: 132500 - RNA, 13 nt, Human herpesvirus 3
aggcuccacaauc

SEQ ID NO: 132501 - RNA, 16 nt, Human herpesvirus 3
aggcugaggguucagu

SEQ ID NO: 132502 - RNA, 19 nt, Human herpesvirus 3
aggcugcaaaacggcugua

SEQ ID NO: 132503 - RNA, 17 nt, Human herpesvirus 3
agggggaaggaaaugcc

SEQ ID NO: 132504 - RNA, 21 nt, Human herpesvirus 3
aggggggggcgcgucugccac

SEQ ID NO: 132505 - RNA, 14 nt, Human herpesvirus 3
aggauagauaucac

SEQ ID NO: 132506 - RNA, 17 nt, Human herpesvirus 3
aggugggggguguugcg

SEQ ID NO: 132507 - RNA, 18 nt, Human herpesvirus 3
aggucuacagcacccuuu

SEQ ID NO: 132508 - RNA, 19 nt, Human herpesvirus 3
agguucuugggacuccaag

SEQ ID NO: 132509 - RNA, 23 nt, Human herpesvirus 3
agguuuauuuacuuuacaacccg

SEQ ID NO: 132510 - RNA, 23 nt, Human herpesvirus 3
agguuuucguuuugguguuacau

SEQ ID NO: 132511 - RNA, 21 nt, Human herpesvirus 3
aguaaaaauguugucugccaa

SEQ ID NO: 132512 - RNA, 12 nt, Human herpesvirus 3
aggucugucaug

SEQ ID NO: 132513 - RNA, 20 nt, Human herpesvirus 3
aggguacaaacgcgcaaugu

SEQ ID NO: 132514 - RNA, 22 nt, Human herpesvirus 3
aggguacaaacgcgcaauguuu

SEQ ID NO: 132515 - RNA, 20 nt, Human herpesvirus 3
aggggucuccagaguacagg

SEQ ID NO: 132516 - RNA, 22 nt, Human herpesvirus 3
aggggucuccagaguacagggu

SEQ ID NO: 132517 - RNA, 17 nt, Human herpesvirus 3
auuuccaaacacauuac

SEQ ID NO: 132518 - RNA, 23 nt, Human herpesvirus 3
auuucaugcuuguaaaacauauc

SEQ ID NO: 132519 - RNA, 14 nt, Human herpesvirus 3
auuucuaugugcag

SEQ ID NO: 132520 - RNA, 12 nt, Human herpesvirus 3
auuucugauguu

SEQ ID NO: 132521 - RNA, 14 nt, Human herpesvirus 3
auuuauaaaacacu

SEQ ID NO: 132522 - RNA, 15 nt, Human herpesvirus 3
auuuauaaaacacuc

SEQ ID NO: 132523 - RNA, 16 nt, Human herpesvirus 3
auuuauaaaacacuca

SEQ ID NO: 132524 - RNA, 13 nt, Human herpesvirus 3
auuuacuuuacaa

SEQ ID NO: 132525 - RNA, 17 nt, Human herpesvirus 3
auuguguuuauaacgua

SEQ ID NO: 132526 - RNA, 19 nt, Human herpesvirus 3
auuuagugauuacaucaau

SEQ ID NO: 132527 - RNA, 21 nt, Human herpesvirus 3
auuuaucccaacugauuacau

SEQ ID NO: 132528 - RNA, 16 nt, Human herpesvirus 3
auuuauuaaagcuguu

SEQ ID NO: 132529 - RNA, 22 nt, Human herpesvirus 3
auugaaggguggaauuguggag

SEQ ID NO: 132530 - RNA, 17 nt, Human herpesvirus 3
auucgacgcaaaaauuc

SEQ ID NO: 132531 - RNA, 13 nt, Human herpesvirus 3
auuguaguacagg

SEQ ID NO: 132532 - RNA, 17 nt, Human herpesvirus 3
auugguugauuggguua

SEQ ID NO: 132533 - RNA, 18 nt, Human herpesvirus 3
auugucagauauuuugca

SEQ ID NO: 132534 - RNA, 15 nt, Human herpesvirus 3
auugucccgugugug

SEQ ID NO: 132535 - RNA, 23 nt, Human herpesvirus 3
auuccgagggucgccuguaauau

SEQ ID NO: 132536 - RNA, 19 nt, Human herpesvirus 3
auuccaaccgacccagacg

SEQ ID NO: 132537 - RNA, 22 nt, Human herpesvirus 3
auucccccggggcggucauaua

SEQ ID NO: 132538 - RNA, 15 nt, Human herpesvirus 3
auucacgccaguuga

SEQ ID NO: 132539 - RNA, 20 nt, Human herpesvirus 3
auuaucgggcgacaauccaa

SEQ ID NO: 132540 - RNA, 23 nt, Human herpesvirus 3
auuauuaccgguaccaugggaga

SEQ ID NO: 132541 - RNA, 20 nt, Human herpesvirus 3
auggaaucgucuaacauuaa

SEQ ID NO: 132542 - RNA, 21 nt, Human herpesvirus 3
auggaauuacaacgcauauuu

SEQ ID NO: 132543 - RNA, 13 nt, Human herpesvirus 3
caagaaguuauau

SEQ ID NO: 132544 - RNA, 23 nt, Human herpesvirus 3
caacuuuugcuuauauuuuacau

SEQ ID NO: 132545 - RNA, 22 nt, Human herpesvirus 3
caaccuggucaccguguggaca

SEQ ID NO: 132546 - RNA, 16 nt, Human herpesvirus 3
caaccuucaaguuaaa

SEQ ID NO: 132547 - RNA, 18 nt, Human herpesvirus 3
caacgcuggcauuuccaa

SEQ ID NO: 132548 - RNA, 16 nt, Human herpesvirus 3
caaauaacgccuuaaa

SEQ ID NO: 132549 - RNA, 20 nt, Human herpesvirus 3
caaauaaaaguauuacauuc

SEQ ID NO: 132550 - RNA, 22 nt, Human herpesvirus 3
caaauaaaaguauuacauucau

SEQ ID NO: 132551 - RNA, 19 nt, Human herpesvirus 3
caacacccgguucuaccaa

SEQ ID NO: 132552 - RNA, 17 nt, Human herpesvirus 3
caacacaucuacugucu

SEQ ID NO: 132553 - RNA, 18 nt, Human herpesvirus 3
caaacacucuacgcauuu

SEQ ID NO: 132554 - RNA, 23 nt, Human herpesvirus 3
caaacagcaccaauaugccauca

SEQ ID NO: 132555 - RNA, 22 nt, Human herpesvirus 3
auuuuaagguauggaguucgga

SEQ ID NO: 132556 - RNA, 15 nt, Human herpesvirus 3
auuuuaaaaauaccu

SEQ ID NO: 132557 - RNA, 15 nt, Human herpesvirus 3
auuuuacagaaaaua

SEQ ID NO: 132558 - RNA, 13 nt, Human herpesvirus 3
auuuuacauacaa

SEQ ID NO: 132559 - RNA, 11 nt, Human herpesvirus 3
auuuuacuuaa

SEQ ID NO: 132560 - RNA, 22 nt, Human herpesvirus 3
auuuuacuuaauguacccacaa

SEQ ID NO: 132561 - RNA, 16 nt, Human herpesvirus 3
auuuuauagacacgcu

SEQ ID NO: 132562 - RNA, 15 nt, Human herpesvirus 3
auuuuauauacaaaa

SEQ ID NO: 132563 - RNA, 22 nt, Human herpesvirus 3
auuuuauguugauauuuuccaa

SEQ ID NO: 132564 - RNA, 22 nt, Human herpesvirus 3
caaaaaaaaaaaaaccaaacac

SEQ ID NO: 132565 - RNA, 13 nt, Human herpesvirus 3
auuuuuuuuacag

SEQ ID NO: 132566 - RNA, 21 nt, Human herpesvirus 3
caaaccguuuguuuugaucac

SEQ ID NO: 132567 - RNA, 20 nt, Human herpesvirus 3
caaacuccuccuauauccca

SEQ ID NO: 132568 - RNA, 22 nt, Human herpesvirus 3
caaacuaaagguauacuuggag

SEQ ID NO: 132569 - RNA, 23 nt, Human herpesvirus 3
cagagacucugcgaugcauuaac

SEQ ID NO: 132570 - RNA, 16 nt, Human herpesvirus 3
cagaugauaacagccu

SEQ ID NO: 132571 - RNA, 13 nt, Human herpesvirus 3
cagauacagcaua

SEQ ID NO: 132572 - RNA, 23 nt, Human herpesvirus 3
cagauacguggaaucguaguaaa

SEQ ID NO: 132573 - RNA, 19 nt, Human herpesvirus 3
cagauauuuugcagccaug

SEQ ID NO: 132574 - RNA, 12 nt, Human herpesvirus 3
cagaguacaggg

SEQ ID NO: 132575 - RNA, 16 nt, Human herpesvirus 3
cagagucuucugucaa

SEQ ID NO: 132576 - RNA, 13 nt, Human herpesvirus 3
cagcaaguuuaac

SEQ ID NO: 132577 - RNA, 17 nt, Human herpesvirus 3
cagauguacguguaugc

SEQ ID NO: 132578 - RNA, 20 nt, Human herpesvirus 3
cagauuuccccggaaauaua

SEQ ID NO: 132579 - RNA, 23 nt, Human herpesvirus 3
cagccuuagagucauccccgugc

SEQ ID NO: 132580 - RNA, 12 nt, Human herpesvirus 3
cagccagccaaa

SEQ ID NO: 132581 - RNA, 15 nt, Human herpesvirus 3
cagcggguauuuuua

SEQ ID NO: 132582 - RNA, 22 nt, Human herpesvirus 3
cagcuaaccugucgagcaugug

SEQ ID NO: 132583 - RNA, 14 nt, Human herpesvirus 3
cagcuuacagucca

SEQ ID NO: 132584 - RNA, 21 nt, Human herpesvirus 3
cagcuuacaguccaguggaca

SEQ ID NO: 132585 - RNA, 12 nt, Human herpesvirus 3
caccgguauuau

SEQ ID NO: 132586 - RNA, 14 nt, Human herpesvirus 3
caccgguccaacac

SEQ ID NO: 132587 - RNA, 18 nt, Human herpesvirus 3
caccgcugugcuguaaga

SEQ ID NO: 132588 - RNA, 21 nt, Human herpesvirus 3
cacccgguaugccacauuuac

SEQ ID NO: 132589 - RNA, 12 nt, Human herpesvirus 3
cacauugucaua

SEQ ID NO: 132590 - RNA, 13 nt, Human herpesvirus 3
cacauugucauac

SEQ ID NO: 132591 - RNA, 19 nt, Human herpesvirus 3
cacggaauccgguauacau

SEQ ID NO: 132592 - RNA, 23 nt, Human herpesvirus 3
cacguaauuugccccaaaccacu

SEQ ID NO: 132593 - RNA, 12 nt, Human herpesvirus 3
caauugucugua

SEQ ID NO: 132594 - RNA, 20 nt, Human herpesvirus 3
cacacaccagacguguaccg

SEQ ID NO: 132595 - RNA, 13 nt, Human herpesvirus 3
cacaaucagaaga

SEQ ID NO: 132596 - RNA, 15 nt, Human herpesvirus 3
caagcgguuuagcau

SEQ ID NO: 132597 - RNA, 22 nt, Human herpesvirus 3
caagcuauggacgcaacgcaga

SEQ ID NO: 132598 - RNA, 15 nt, Human herpesvirus 3
caaggauagauauca

SEQ ID NO: 132599 - RNA, 17 nt, Human herpesvirus 3
caaggauagauaucaca

SEQ ID NO: 132600 - RNA, 14 nt, Human herpesvirus 3
caagguauccccca

SEQ ID NO: 132601 - RNA, 12 nt, Human herpesvirus 3
caauuaacacag

SEQ ID NO: 132602 - RNA, 22 nt, Human herpesvirus 3
caauguuuuaauuuuauauaca

SEQ ID NO: 132603 - RNA, 21 nt, Human herpesvirus 3
accaguaaaaagaugauacac

SEQ ID NO: 132604 - RNA, 20 nt, Human herpesvirus 3
accauuacuacauugaacaa

SEQ ID NO: 132605 - RNA, 17 nt, Human herpesvirus 3
accaacgcuuugaucuu

SEQ ID NO: 132606 - RNA, 22 nt, Human herpesvirus 3
accaauaugccaucaauaucag

SEQ ID NO: 132607 - RNA, 18 nt, Human herpesvirus 3
accaauugguauacacac

SEQ ID NO: 132608 - RNA, 16 nt, Human herpesvirus 3
accagaacgaucacaa

SEQ ID NO: 132609 - RNA, 17 nt, Human herpesvirus 3
accacaaccaagcuaug

SEQ ID NO: 132610 - RNA, 20 nt, Human herpesvirus 3
acauuugugccgcaagcaua

SEQ ID NO: 132611 - RNA, 21 nt, Human herpesvirus 3
acauuuaaaaauccauuaaag

SEQ ID NO: 132612 - RNA, 21 nt, Human herpesvirus 3
acauuuacaguaauauauuaa

SEQ ID NO: 132613 - RNA, 21 nt, Human herpesvirus 3
acauuuaauguuuuaguagaa

SEQ ID NO: 132614 - RNA, 22 nt, Human herpesvirus 3
acauuuaccgcggauagcauaa

SEQ ID NO: 132615 - RNA, 13 nt, Human herpesvirus 3
acaugauugaugg

SEQ ID NO: 132616 - RNA, 16 nt, Human herpesvirus 3
acaugauccacguaau

SEQ ID NO: 132617 - RNA, 14 nt, Human herpesvirus 3
acauggccgugaau

SEQ ID NO: 132618 - RNA, 17 nt, Human herpesvirus 3
acauggcuaugccauuu

SEQ ID NO: 132619 - RNA, 20 nt, Human herpesvirus 3
acaguggcggauaacugccu

SEQ ID NO: 132620 - RNA, 20 nt, Human herpesvirus 3
acagcggauaucgucuaaua

SEQ ID NO: 132621 - RNA, 21 nt, Human herpesvirus 3
acauaaacacagagucuguau

SEQ ID NO: 132622 - RNA, 23 nt, Human herpesvirus 3
acauauguuccacucuacaucaa

SEQ ID NO: 132623 - RNA, 17 nt, Human herpesvirus 3
acaucaaccaguggaau

SEQ ID NO: 132624 - RNA, 14 nt, Human herpesvirus 3
acacauugucauac

SEQ ID NO: 132625 - RNA, 20 nt, Human herpesvirus 3
acacacgccgguacaauuac

SEQ ID NO: 132626 - RNA, 20 nt, Human herpesvirus 3
acacaguccggacaauuaac

SEQ ID NO: 132627 - RNA, 22 nt, Human herpesvirus 3
acccaccccagauauuguccaa

SEQ ID NO: 132628 - RNA, 20 nt, Human herpesvirus 3
acccaauagccgccagaugu

SEQ ID NO: 132629 - RNA, 23 nt, Human herpesvirus 3
acccaauagccgccagauguaca

SEQ ID NO: 132630 - RNA, 17 nt, Human herpesvirus 3
accgcgggucaauggag

SEQ ID NO: 132631 - RNA, 15 nt, Human herpesvirus 3
accgcgacagccaau

SEQ ID NO: 132632 - RNA, 23 nt, Human herpesvirus 3
accgauguuguggagaacuuauc

SEQ ID NO: 132633 - RNA, 16 nt, Human herpesvirus 3
accgcuauuucuacac

SEQ ID NO: 132634 - RNA, 23 nt, Human herpesvirus 3
accguauauaacaauugagauac

SEQ ID NO: 132635 - RNA, 13 nt, Human herpesvirus 3
accguacaacaag

SEQ ID NO: 132636 - RNA, 18 nt, Human herpesvirus 3
accgguaccaugggagac

SEQ ID NO: 132637 - RNA, 17 nt, Human herpesvirus 3
accgguccaacacuccg

SEQ ID NO: 132638 - RNA, 21 nt, Human herpesvirus 3
accgguggaauuaauggagua

SEQ ID NO: 132639 - RNA, 19 nt, Human herpesvirus 3
accucggccgcuucccgaa

SEQ ID NO: 132640 - RNA, 23 nt, Human herpesvirus 3
accgugggagccgcggccagugc

SEQ ID NO: 132641 - RNA, 16 nt, Human herpesvirus 3
accguuuuaguagugu

SEQ ID NO: 132642 - RNA, 17 nt, Human herpesvirus 3
accuuccgguaccccau

SEQ ID NO: 132643 - RNA, 20 nt, Human herpesvirus 3
acgaaccuucggaugacuuu

SEQ ID NO: 132644 - RNA, 23 nt, Human herpesvirus 3
acgaaccuucggaugacuuugca

SEQ ID NO: 132645 - RNA, 17 nt, Human herpesvirus 3
acgaacuuaaagagccg

SEQ ID NO: 132646 - RNA, 16 nt, Human herpesvirus 3
acgcguacgugccuag

SEQ ID NO: 132647 - RNA, 12 nt, Human herpesvirus 3
acgcuacauccg

SEQ ID NO: 132648 - RNA, 15 nt, Human herpesvirus 3
acgcuggcauuucca

SEQ ID NO: 132649 - RNA, 14 nt, Human herpesvirus 3
acgaaggcacggaa

SEQ ID NO: 132650 - RNA, 19 nt, Human herpesvirus 3
acgauacgccgaacggcca

SEQ ID NO: 132651 - RNA, 20 nt, Human herpesvirus 3
acgauaaauggucuaaauac

SEQ ID NO: 132652 - RNA, 17 nt, Human herpesvirus 3
acguacguuuaacccgc

SEQ ID NO: 132653 - RNA, 14 nt, Human herpesvirus 3
acgguuugugcacu

SEQ ID NO: 132654 - RNA, 15 nt, Human herpesvirus 3
acgguucaaaggcau

SEQ ID NO: 132655 - RNA, 17 nt, Human herpesvirus 3
acggaaggcgugaaagc

SEQ ID NO: 132656 - RNA, 19 nt, Human herpesvirus 3
acggcaacaauggcgacca

SEQ ID NO: 132657 - RNA, 20 nt, Human herpesvirus 3
acggauauuaacacgauuaa

SEQ ID NO: 132658 - RNA, 17 nt, Human herpesvirus 3
acggccauguuugccga

SEQ ID NO: 132659 - RNA, 23 nt, Human herpesvirus 3
agaugguuaauaauagugacaaa

SEQ ID NO: 132660 - RNA, 14 nt, Human herpesvirus 3
agauguacguguau

SEQ ID NO: 132661 - RNA, 16 nt, Human herpesvirus 3
agcaaauacaaagaca

SEQ ID NO: 132662 - RNA, 19 nt, Human herpesvirus 3
agcaaaauaaaacaaugaa

SEQ ID NO: 132663 - RNA, 18 nt, Human herpesvirus 3
agcacccuuuuguaaaaa

SEQ ID NO: 132664 - RNA, 16 nt, Human herpesvirus 3
agcaauucccaguaaa

SEQ ID NO: 132665 - RNA, 17 nt, Human herpesvirus 3
agcaaguuuaacauuuc

SEQ ID NO: 132666 - RNA, 20 nt, Human herpesvirus 3
agcaauaaaacaaacauuca

SEQ ID NO: 132667 - RNA, 15 nt, Human herpesvirus 3
agacuaacauuuauc

SEQ ID NO: 132668 - RNA, 18 nt, Human herpesvirus 3
agacugacccuaugacau

SEQ ID NO: 132669 - RNA, 18 nt, Human herpesvirus 3
agaucaauaugucacgga

SEQ ID NO: 132670 - RNA, 15 nt, Human herpesvirus 3
agauaggguguauac

SEQ ID NO: 132671 - RNA, 23 nt, Human herpesvirus 3
agaggguauugcuguuguuuaua

SEQ ID NO: 132672 - RNA, 20 nt, Human herpesvirus 3
agagucacgccccauuacaa

SEQ ID NO: 132673 - RNA, 20 nt, Human herpesvirus 3
acuugcauuacccuauccca

SEQ ID NO: 132674 - RNA, 16 nt, Human herpesvirus 3
acuugauacccucaaa

SEQ ID NO: 132675 - RNA, 21 nt, Human herpesvirus 3
acuugauacccucaaacacgg

SEQ ID NO: 132676 - RNA, 16 nt, Human herpesvirus 3
acuuuaauuccucuaa

SEQ ID NO: 132677 - RNA, 16 nt, Human herpesvirus 3
acuuuacaacccgugg

SEQ ID NO: 132678 - RNA, 22 nt, Human herpesvirus 3
acuuuacaacccguggugaauu

SEQ ID NO: 132679 - RNA, 22 nt, Human herpesvirus 3
acuuguaaacccccaagcaaua

SEQ ID NO: 132680 - RNA, 13 nt, Human herpesvirus 3
agacaccaugacg

SEQ ID NO: 132681 - RNA, 24 nt, Human herpesvirus 3
agaacacacgccgguacaauuacc

SEQ ID NO: 132682 - RNA, 18 nt, Human herpesvirus 3
agaaccgacccaggacau

SEQ ID NO: 132683 - RNA, 21 nt, Human herpesvirus 3
acugacuuuucaucauacgca

SEQ ID NO: 132684 - RNA, 15 nt, Human herpesvirus 3
acugugucucucaaa

SEQ ID NO: 132685 - RNA, 22 nt, Human herpesvirus 3
acuguuccaggcgagacuugau

SEQ ID NO: 132686 - RNA, 18 nt, Human herpesvirus 3
acuguuuaaauaguacca

SEQ ID NO: 132687 - RNA, 20 nt, Human herpesvirus 3
acuuacccuccguaucccug

SEQ ID NO: 132688 - RNA, 22 nt, Human herpesvirus 3
acuugaaaaaucauuaugagca

SEQ ID NO: 132689 - RNA, 15 nt, Human herpesvirus 3
acgugauuacuacaa

SEQ ID NO: 132690 - RNA, 13 nt, Human herpesvirus 3
acgugauuugccc

SEQ ID NO: 132691 - RNA, 18 nt, Human herpesvirus 3
acgugcccugagcauuuc

SEQ ID NO: 132692 - RNA, 17 nt, Human herpesvirus 3
acgucguuauauucaca

SEQ ID NO: 132693 - RNA, 21 nt, Human herpesvirus 3
acguccggguuaauuuuacaa

SEQ ID NO: 132694 - RNA, 17 nt, Human herpesvirus 3
acuccacggggucuaca

SEQ ID NO: 132695 - RNA, 18 nt, Human herpesvirus 3
acaacccguggugaauuu

SEQ ID NO: 132696 - RNA, 21 nt, Human herpesvirus 3
acaacgauuauuuucugugua

SEQ ID NO: 132697 - RNA, 16 nt, Human herpesvirus 3
acaaacguguguauaa

SEQ ID NO: 132698 - RNA, 20 nt, Human herpesvirus 3
acaacacccgguucuaccaa

SEQ ID NO: 132699 - RNA, 11 nt, Human herpesvirus 3
acaaacaaagc

SEQ ID NO: 132700 - RNA, 13 nt, Human herpesvirus 3
acaaacacucuac

SEQ ID NO: 132701 - RNA, 13 nt, Human herpesvirus 3
acaaacauucaca

SEQ ID NO: 132702 - RNA, 15 nt, Human herpesvirus 3
acaauaaacauaaca

SEQ ID NO: 132703 - RNA, 23 nt, Human herpesvirus 3
acaaucagaagauauaacccggu

SEQ ID NO: 132704 - RNA, 13 nt, Human herpesvirus 3
acaauaucacguc

SEQ ID NO: 132705 - RNA, 19 nt, Human herpesvirus 3
acaauauuguagaacuaac

SEQ ID NO: 132706 - RNA, 21 nt, Human herpesvirus 3
acaauugagauacacauggau

SEQ ID NO: 132707 - RNA, 22 nt, Human herpesvirus 3
acaauuauuagcguaauauaac

SEQ ID NO: 132708 - RNA, 22 nt, Human herpesvirus 3
acaaucgcccgaaaacuuuggu

SEQ ID NO: 132709 - RNA, 14 nt, Human herpesvirus 3
acaaugacagugau

SEQ ID NO: 132710 - RNA, 15 nt, Human herpesvirus 3
aauuacaacgcauau

SEQ ID NO: 132711 - RNA, 15 nt, Human herpesvirus 3
aauuaaugcaaccau

SEQ ID NO: 132712 - RNA, 16 nt, Human herpesvirus 3
aauuaaugcaaccauc

SEQ ID NO: 132713 - RNA, 22 nt, Human herpesvirus 3
aauuaaugcaacccugucauca

SEQ ID NO: 132714 - RNA, 16 nt, Human herpesvirus 3
aauguugucugccaaa

SEQ ID NO: 132715 - RNA, 16 nt, Human herpesvirus 3
aauguuuuaguagaaa

SEQ ID NO: 132716 - RNA, 18 nt, Human herpesvirus 3
aauguuaaacccugauaa

SEQ ID NO: 132717 - RNA, 14 nt, Human herpesvirus 3
aaucucguaaaggu

SEQ ID NO: 132718 - RNA, 15 nt, Human herpesvirus 3
aaucuuaaaccugac

SEQ ID NO: 132719 - RNA, 15 nt, Human herpesvirus 3
aauucgugugcaaua

SEQ ID NO: 132720 - RNA, 20 nt, Human herpesvirus 3
aauucggcgcggaugcauuu

SEQ ID NO: 132721 - RNA, 22 nt, Human herpesvirus 3
aauucggcgcggaugcauuuau

SEQ ID NO: 132722 - RNA, 17 nt, Human herpesvirus 3
aauucuuagaaaagcca

SEQ ID NO: 132723 - RNA, 21 nt, Human herpesvirus 3
aauuccgccuauagcugucac

SEQ ID NO: 132724 - RNA, 22 nt, Human herpesvirus 3
aauuccgccuauagcugucacu

SEQ ID NO: 132725 - RNA, 19 nt, Human herpesvirus 3
aauuccgguugugccaaua

SEQ ID NO: 132726 - RNA, 20 nt, Human herpesvirus 3
acaaaacgcguuuuguaccu

SEQ ID NO: 132727 - RNA, 19 nt, Human herpesvirus 3
aauuuguauuuuuaaucau

SEQ ID NO: 132728 - RNA, 14 nt, Human herpesvirus 3
aauuuauaaaacac

SEQ ID NO: 132729 - RNA, 15 nt, Human herpesvirus 3
aauuguucugggaac

SEQ ID NO: 132730 - RNA, 17 nt, Human herpesvirus 3
aauuguucugggaacac

SEQ ID NO: 132731 - RNA, 12 nt, Human herpesvirus 3
aauaacugaaca

SEQ ID NO: 132732 - RNA, 17 nt, Human herpesvirus 3
aauaauacacacuaccu

SEQ ID NO: 132733 - RNA, 21 nt, Human herpesvirus 3
aauaauuccgguugugccaau

SEQ ID NO: 132734 - RNA, 22 nt, Human herpesvirus 3
aauaauuccgguugugccaaua

SEQ ID NO: 132735 - RNA, 23 nt, Human herpesvirus 3
aauaauuccgguugugccaauac

SEQ ID NO: 132736 - RNA, 17 nt, Human herpesvirus 3
aauaauuuuaaggcaag

SEQ ID NO: 132737 - RNA, 22 nt, Human herpesvirus 3
aauauuaaaagccgccaagccu

SEQ ID NO: 132738 - RNA, 13 nt, Human herpesvirus 3
aauauuugaucca

SEQ ID NO: 132739 - RNA, 16 nt, Human herpesvirus 3
aauauuguagaacuaa

SEQ ID NO: 132740 - RNA, 22 nt, Human herpesvirus 3
aauauuguagaacuaacucagc

SEQ ID NO: 132741 - RNA, 20 nt, Human herpesvirus 3
aaucauuaugagcaucuaga

SEQ ID NO: 132742 - RNA, 18 nt, Human herpesvirus 3
aauccacgguauuccaaa

SEQ ID NO: 132743 - RNA, 12 nt, Human herpesvirus 3
aauccaauguuu

SEQ ID NO: 132744 - RNA, 18 nt, Human herpesvirus 3
aauccaauguuugauauc

SEQ ID NO: 132745 - RNA, 15 nt, Human herpesvirus 3
aaucaguugggauaa

SEQ ID NO: 132746 - RNA, 22 nt, Human herpesvirus 3
aaucaugguugguuacugugaa

SEQ ID NO: 132747 - RNA, 15 nt, Human herpesvirus 3
aaguauuacauucau

SEQ ID NO: 132748 - RNA, 15 nt, Human herpesvirus 3
aauaaacgaugacac

SEQ ID NO: 132749 - RNA, 23 nt, Human herpesvirus 3
aauaaaagcccuguagagcgcau

SEQ ID NO: 132750 - RNA, 13 nt, Human herpesvirus 3
aagguguaaauac

SEQ ID NO: 132751 - RNA, 21 nt, Human herpesvirus 3
aagguuaaauuuauaaaacac

SEQ ID NO: 132752 - RNA, 18 nt, Human herpesvirus 3
aaguagagcccacacaau

SEQ ID NO: 132753 - RNA, 21 nt, Human herpesvirus 3
aaguaccgggauaucucauac

SEQ ID NO: 132754 - RNA, 14 nt, Human herpesvirus 3
aagcaauaccaaga

SEQ ID NO: 132755 - RNA, 16 nt, Human herpesvirus 3
aagggagucuacaaua

SEQ ID NO: 132756 - RNA, 13 nt, Human herpesvirus 3
aaggguacgccac

SEQ ID NO: 132757 - RNA, 22 nt, Human herpesvirus 3
aagcaaggggaucgucaguaaa

SEQ ID NO: 132758 - RNA, 13 nt, Human herpesvirus 3
aagauguacugug

SEQ ID NO: 132759 - RNA, 15 nt, Human herpesvirus 3
aagaucaauggcggu

SEQ ID NO: 132760 - RNA, 17 nt, Human herpesvirus 3
aagaugaaauaguuuca

SEQ ID NO: 132761 - RNA, 17 nt, Human herpesvirus 3
aaccgauuuaccguguu

SEQ ID NO: 132762 - RNA, 14 nt, Human herpesvirus 3
aacccccaagcaau

SEQ ID NO: 132763 - RNA, 22 nt, Human herpesvirus 3
aacccaucgacccguuauaauc

SEQ ID NO: 132764 - RNA, 15 nt, Human herpesvirus 3
aacccccgugacucc

SEQ ID NO: 132765 - RNA, 20 nt, Human herpesvirus 3
aaccccugcgacucgcucua

SEQ ID NO: 132766 - RNA, 21 nt, Human herpesvirus 3
aacaggcguguuuauguacau

SEQ ID NO: 132767 - RNA, 15 nt, Human herpesvirus 3
aacaggcuccacaau

SEQ ID NO: 132768 - RNA, 16 nt, Human herpesvirus 3
aacaguacgcuuuuau

SEQ ID NO: 132769 - RNA, 17 nt, Human herpesvirus 3
aacagucuaacaguacg

SEQ ID NO: 132770 - RNA, 23 nt, Human herpesvirus 3
aacauaagacguugcauaugcau

SEQ ID NO: 132771 - RNA, 20 nt, Human herpesvirus 3
aacucugaguucaaagcaac

SEQ ID NO: 132772 - RNA, 15 nt, Human herpesvirus 3
aacucuguuguauca

SEQ ID NO: 132773 - RNA, 12 nt, Human herpesvirus 3
aacugaauuuaa

SEQ ID NO: 132774 - RNA, 14 nt, Human herpesvirus 3
aacugaauuuaaca

SEQ ID NO: 132775 - RNA, 14 nt, Human herpesvirus 3
aacuauuccaaaau

SEQ ID NO: 132776 - RNA, 18 nt, Human herpesvirus 3
aacgacacaaaaaauuua

SEQ ID NO: 132777 - RNA, 16 nt, Human herpesvirus 3
aacgaugccugagguu

SEQ ID NO: 132778 - RNA, 14 nt, Human herpesvirus 3
aacgcgcaauguuu

SEQ ID NO: 132779 - RNA, 20 nt, Human herpesvirus 3
aacgccaguggaccuuugca

SEQ ID NO: 132780 - RNA, 21 nt, Human herpesvirus 3
aacgccaguggaccuuugcaa

SEQ ID NO: 132781 - RNA, 22 nt, Human herpesvirus 3
aacuuaaauaaaaccuuaccac

SEQ ID NO: 132782 - RNA, 20 nt, Human herpesvirus 3
aacuuugcauguuuacaaac

SEQ ID NO: 132783 - RNA, 14 nt, Human herpesvirus 3
aacugauuacauuu

SEQ ID NO: 132784 - RNA, 16 nt, Human herpesvirus 3
aacugcuacaacggaa

SEQ ID NO: 132785 - RNA, 14 nt, Human herpesvirus 3
aagaaaacauugca

SEQ ID NO: 132786 - RNA, 17 nt, Human herpesvirus 3
aagacaaacuggauaca

SEQ ID NO: 132787 - RNA, 17 nt, Human herpesvirus 3
aagauaggguguauacg

SEQ ID NO: 132788 - RNA, 22 nt, Human herpesvirus 3
aagauauaacccggucugcuca

SEQ ID NO: 132789 - RNA, 15 nt, Human herpesvirus 3
aagaggccccaaggu

SEQ ID NO: 132790 - RNA, 14 nt, Human herpesvirus 3
aagagcuguccaug

SEQ ID NO: 132791 - RNA, 17 nt, Human herpesvirus 3
aagacaucgaugaagua

SEQ ID NO: 132792 - RNA, 20 nt, Human herpesvirus 3
aagacuguuggguggugcca

SEQ ID NO: 132793 - RNA, 16 nt, Human herpesvirus 3
aagacuuuaugaauuu

SEQ ID NO: 132794 - RNA, 19 nt, Human herpesvirus 3
aagacuuugacuuugauga

SEQ ID NO: 132795 - RNA, 21 nt, Human herpesvirus 3
aaauaaauuuaaaacauacac

SEQ ID NO: 132796 - RNA, 14 nt, Human herpesvirus 3
aaauaacaugucac

SEQ ID NO: 132797 - RNA, 23 nt, Human herpesvirus 3
aaauaugugcaucccccauugua

SEQ ID NO: 132798 - RNA, 16 nt, Human herpesvirus 3
aaaucacuuugauaua

SEQ ID NO: 132799 - RNA, 14 nt, Human herpesvirus 3
aaauauuguauaaa

SEQ ID NO: 132800 - RNA, 19 nt, Human herpesvirus 3
aaauauuguauaaauugug

SEQ ID NO: 132801 - RNA, 16 nt, Human herpesvirus 3
aaaguauuacauucau

SEQ ID NO: 132802 - RNA, 21 nt, Human herpesvirus 3
aaaguauuacauucauaaaag

SEQ ID NO: 132803 - RNA, 21 nt, Human herpesvirus 3
aaaguuguuggcgcaugccau

SEQ ID NO: 132804 - RNA, 23 nt, Human herpesvirus 3
aaaguuguuggcgcaugccauug

SEQ ID NO: 132805 - RNA, 16 nt, Human herpesvirus 3
aaagggccucuaacaa

SEQ ID NO: 132806 - RNA, 22 nt, Human herpesvirus 3
aaaggguggacguuuuuccaca

SEQ ID NO: 132807 - RNA, 19 nt, Human herpesvirus 3
aaagguccauuuaacaauc

SEQ ID NO: 132808 - RNA, 14 nt, Human herpesvirus 3
aaagguauauguca

SEQ ID NO: 132809 - RNA, 19 nt, Human herpesvirus 3
aaagguuucguugcacaug

SEQ ID NO: 132810 - RNA, 23 nt, Human herpesvirus 3
aaacguacguuuaacccgcguau

SEQ ID NO: 132811 - RNA, 23 nt, Human herpesvirus 3
aaacguagcgucccuaccaguug

SEQ ID NO: 132812 - RNA, 16 nt, Human herpesvirus 3
aaacggauauuaacac

SEQ ID NO: 132813 - RNA, 22 nt, Human herpesvirus 3
aaacuaauaaacgaugacacaa

SEQ ID NO: 132814 - RNA, 13 nt, Human herpesvirus 3
aaacgaaaaccuu

SEQ ID NO: 132815 - RNA, 17 nt, Human herpesvirus 3
aaaucgguuauguauaa

SEQ ID NO: 132816 - RNA, 15 nt, Human herpesvirus 3
aaaucguccacugga

SEQ ID NO: 132817 - RNA, 14 nt, Human herpesvirus 3
aaaucgucccauuu

SEQ ID NO: 132818 - RNA, 13 nt, Human herpesvirus 3
aaaucguuuaaca

SEQ ID NO: 132819 - RNA, 12 nt, Human herpesvirus 3
aaauccacacaa

SEQ ID NO: 132820 - RNA, 22 nt, Human herpesvirus 3
aaaugguguuuggugcacucua

SEQ ID NO: 132821 - RNA, 13 nt, Human herpesvirus 3
aaauguguaguuc

SEQ ID NO: 132822 - RNA, 21 nt, Human herpesvirus 3
aaauguguauuauaugucaca

SEQ ID NO: 132823 - RNA, 24 nt, Human herpesvirus 3
aacaagacgcgugaaauguaacua

SEQ ID NO: 132824 - RNA, 22 nt, Human herpesvirus 3
aacaacucucuuauauauguaa

SEQ ID NO: 132825 - RNA, 20 nt, Human herpesvirus 3
aacaacucuggagucuccaa

SEQ ID NO: 132826 - RNA, 11 nt, Human herpesvirus 3
aacaaccauaa

SEQ ID NO: 132827 - RNA, 19 nt, Human herpesvirus 3
aaauuaacccaagacgaca

SEQ ID NO: 132828 - RNA, 21 nt, Human herpesvirus 3
aacacaucuacugucuugaca

SEQ ID NO: 132829 - RNA, 12 nt, Human herpesvirus 3
aacacaaccagu

SEQ ID NO: 132830 - RNA, 13 nt, Human herpesvirus 3
aacacaaccaguc

SEQ ID NO: 132831 - RNA, 20 nt, Human herpesvirus 3
aacaauugagauacacaugg

SEQ ID NO: 132832 - RNA, 14 nt, Human herpesvirus 3
aacaaugaaccauu

SEQ ID NO: 132833 - RNA, 15 nt, Human herpesvirus 3
aacaaugaaccauua

SEQ ID NO: 132834 - RNA, 23 nt, Human herpesvirus 3
aacaaucccggggguacuugcac

SEQ ID NO: 132835 - RNA, 22 nt, Human herpesvirus 3
uaggguaaccaucuagaugaca

SEQ ID NO: 132836 - RNA, 23 nt, Human herpesvirus 3
uaggguacaaacgcgcaauguuu

SEQ ID NO: 132837 - RNA, 18 nt, Human herpesvirus 3
uagguaagaagugcauau

SEQ ID NO: 132838 - RNA, 21 nt, Human herpesvirus 3
uagguaagaagugcauaucca

SEQ ID NO: 132839 - RNA, 22 nt, Human herpesvirus 3
uagguaagaagugcauauccag

SEQ ID NO: 132840 - RNA, 14 nt, Human herpesvirus 3
uaggucaacauaca

SEQ ID NO: 132841 - RNA, 18 nt, Human herpesvirus 3
uagugauuacaucaauac

SEQ ID NO: 132842 - RNA, 17 nt, Human herpesvirus 3
uaguaaaauaccauugu

SEQ ID NO: 132843 - RNA, 13 nt, Human herpesvirus 3
uagguuacauggg

SEQ ID NO: 132844 - RNA, 19 nt, Human herpesvirus 3
uagguucggcaaaucuaac

SEQ ID NO: 132845 - RNA, 22 nt, Human herpesvirus 3
uagucggaaguccggcgugucc

SEQ ID NO: 132846 - RNA, 20 nt, Human herpesvirus 3
uaguccuuacccauaugacc

SEQ ID NO: 132847 - RNA, 17 nt, Human herpesvirus 3
uagcaauucccaguaaa

SEQ ID NO: 132848 - RNA, 11 nt, Human herpesvirus 3
uagcauuuuaa

SEQ ID NO: 132849 - RNA, 22 nt, Human herpesvirus 3
uagccagccaacacaguguuca

SEQ ID NO: 132850 - RNA, 15 nt, Human herpesvirus 3
uagccgccagaugua

SEQ ID NO: 132851 - RNA, 12 nt, Human herpesvirus 3
uagauaccuaag

SEQ ID NO: 132852 - RNA, 20 nt, Human herpesvirus 3
uagauaucacaccaauuaua

SEQ ID NO: 132853 - RNA, 20 nt, Human herpesvirus 3
uacuuggagaugcaaccaag

SEQ ID NO: 132854 - RNA, 10 nt, Human herpesvirus 3
uagacugugg

SEQ ID NO: 132855 - RNA, 12 nt, Human herpesvirus 3
uagacuguucua

SEQ ID NO: 132856 - RNA, 16 nt, Human herpesvirus 3
uagacuguucuacuga

SEQ ID NO: 132857 - RNA, 15 nt, Human herpesvirus 3
uacccucaaacacgg

SEQ ID NO: 132858 - RNA, 23 nt, Human herpesvirus 3
uacccgaaagcccgaucccgccg

SEQ ID NO: 132859 - RNA, 16 nt, Human herpesvirus 3
uaccaugggagacuug

SEQ ID NO: 132860 - RNA, 12 nt, Human herpesvirus 3
uaccaacuguau

SEQ ID NO: 132861 - RNA, 15 nt, Human herpesvirus 3
uaccaacuguaugua

SEQ ID NO: 132862 - RNA, 23 nt, Human herpesvirus 3
uaccaacuguauguaaauuauga

SEQ ID NO: 132863 - RNA, 13 nt, Human herpesvirus 3
uacacgguguaua

SEQ ID NO: 132864 - RNA, 21 nt, Human herpesvirus 3
uacacgggaaacuauuccaaa

SEQ ID NO: 132865 - RNA, 16 nt, Human herpesvirus 3
uacuacuaauauugcc

SEQ ID NO: 132866 - RNA, 14 nt, Human herpesvirus 3
uacuaauauaaaua

SEQ ID NO: 132867 - RNA, 22 nt, Human herpesvirus 3
aacaaucccggggguacuugca

SEQ ID NO: 132868 - RNA, 20 nt, Human herpesvirus 3
aacaaugcacugaaccacaa

SEQ ID NO: 132869 - RNA, 15 nt, Human herpesvirus 3
uaacauuuugcgcau

SEQ ID NO: 132870 - RNA, 22 nt, Human herpesvirus 3
uaacauuaacgcgcuacaacaa

SEQ ID NO: 132871 - RNA, 19 nt, Human herpesvirus 3
uaacauuuaucccaacuga

SEQ ID NO: 132872 - RNA, 18 nt, Human herpesvirus 3
uaaccaucuagaugacac

SEQ ID NO: 132873 - RNA, 19 nt, Human herpesvirus 3
uaacccaagacgacauuaa

SEQ ID NO: 132874 - RNA, 20 nt, Human herpesvirus 3
uaaccggguggguggcauua

SEQ ID NO: 132875 - RNA, 13 nt, Human herpesvirus 3
uaaccgauuuacc

SEQ ID NO: 132876 - RNA, 20 nt, Human herpesvirus 3
uaaucaguugcuaccaaaca

SEQ ID NO: 132877 - RNA, 14 nt, Human herpesvirus 3
uaaucaauuugacg

SEQ ID NO: 132878 - RNA, 16 nt, Human herpesvirus 3
uaauauucuacagauu

SEQ ID NO: 132879 - RNA, 17 nt, Human herpesvirus 3
uaauccaauguuugaua

SEQ ID NO: 132880 - RNA, 15 nt, Human herpesvirus 3
uaaucccgccuuuau

SEQ ID NO: 132881 - RNA, 19 nt, Human herpesvirus 3
uacacccccguugcuuuaa

SEQ ID NO: 132882 - RNA, 23 nt, Human herpesvirus 3
uacaccuaacuuuacuguuaggg

SEQ ID NO: 132883 - RNA, 16 nt, Human herpesvirus 3
uacaaauuucugaugu

SEQ ID NO: 132884 - RNA, 20 nt, Human herpesvirus 3
uacaaacuuguguguaccau

SEQ ID NO: 132885 - RNA, 24 nt, Human herpesvirus 3
uaauuuaggaaccgaacauccuag

SEQ ID NO: 132886 - RNA, 18 nt, Human herpesvirus 3
uaauuugccccaaaccac

SEQ ID NO: 132887 - RNA, 17 nt, Human herpesvirus 3
uaauuuucguaagcaau

SEQ ID NO: 132888 - RNA, 19 nt, Human herpesvirus 3
uaauuuugucgggacacaa

SEQ ID NO: 132889 - RNA, 14 nt, Human herpesvirus 3
uaaugguacaagaa

SEQ ID NO: 132890 - RNA, 21 nt, Human herpesvirus 3
guuuuaaaagccguucuguga

SEQ ID NO: 132891 - RNA, 23 nt, Human herpesvirus 3
guuuguaucaauaaauuuacaua

SEQ ID NO: 132892 - RNA, 16 nt, Human herpesvirus 3
guuuguauuuauacac

SEQ ID NO: 132893 - RNA, 15 nt, Human herpesvirus 3
guuuugguguuacau

SEQ ID NO: 132894 - RNA, 20 nt, Human herpesvirus 3
guuuucguuuugguguuaca

SEQ ID NO: 132895 - RNA, 22 nt, Human herpesvirus 3
guuuucguuuugguguuacauc

SEQ ID NO: 132896 - RNA, 13 nt, Human herpesvirus 3
guuuuaguagaaa

SEQ ID NO: 132897 - RNA, 13 nt, Human herpesvirus 3
guuauauucacau

SEQ ID NO: 132898 - RNA, 17 nt, Human herpesvirus 3
guuauauuuuacauaca

SEQ ID NO: 132899 - RNA, 18 nt, Human herpesvirus 3
guuauccaacuguuuaca

SEQ ID NO: 132900 - RNA, 17 nt, Human herpesvirus 3
guuaugauauaaggugu

SEQ ID NO: 132901 - RNA, 14 nt, Human herpesvirus 3
guugcuaguauuuu

SEQ ID NO: 132902 - RNA, 17 nt, Human herpesvirus 3
guuguaccguuugcaca

SEQ ID NO: 132903 - RNA, 18 nt, Human herpesvirus 3
guuguaccguuugcacaa

SEQ ID NO: 132904 - RNA, 15 nt, Human herpesvirus 3
guugguuaacaccgc

SEQ ID NO: 132905 - RNA, 22 nt, Human herpesvirus 3
guugggggcgggguagacugug

SEQ ID NO: 132906 - RNA, 23 nt, Human herpesvirus 3
guugggggcgggguagacugugg

SEQ ID NO: 132907 - RNA, 13 nt, Human herpesvirus 3
guugcuguugucc

SEQ ID NO: 132908 - RNA, 15 nt, Human herpesvirus 3
guuuacacuugaauc

SEQ ID NO: 132909 - RNA, 18 nt, Human herpesvirus 3
guuuaucaggguuuaaca

SEQ ID NO: 132910 - RNA, 17 nt, Human herpesvirus 3
guuuaucccacauguau

SEQ ID NO: 132911 - RNA, 15 nt, Human herpesvirus 3
guuuaugaacagcaa

SEQ ID NO: 132912 - RNA, 21 nt, Human herpesvirus 3
guuuaaaaauacgugcguauu

SEQ ID NO: 132913 - RNA, 18 nt, Human herpesvirus 3
guuuaacauuuugcgcau

SEQ ID NO: 132914 - RNA, 18 nt, Human herpesvirus 3
uaaaaacauaacaccaga

SEQ ID NO: 132915 - RNA, 18 nt, Human herpesvirus 3
uaaaaauguugucugcca

SEQ ID NO: 132916 - RNA, 21 nt, Human herpesvirus 3
uaaaaauguugucugccaaac

SEQ ID NO: 132917 - RNA, 15 nt, Human herpesvirus 3
uaaaacaaacauuca

SEQ ID NO: 132918 - RNA, 16 nt, Human herpesvirus 3
uaaaacaaugaaccau

SEQ ID NO: 132919 - RNA, 23 nt, Human herpesvirus 3
uaaaacaggcguguuuauguaca

SEQ ID NO: 132920 - RNA, 21 nt, Human herpesvirus 3
uaaacaacauggcuaugccau

SEQ ID NO: 132921 - RNA, 22 nt, Human herpesvirus 3
uaaacaacauggcuaugccauu

SEQ ID NO: 132922 - RNA, 17 nt, Human herpesvirus 3
uaaacauccacagucug

SEQ ID NO: 132923 - RNA, 16 nt, Human herpesvirus 3
uaaacauaacagucua

SEQ ID NO: 132924 - RNA, 23 nt, Human herpesvirus 3
uaaacagagaucucuguuacuua

SEQ ID NO: 132925 - RNA, 19 nt, Human herpesvirus 3
uaaaaugauauacacagac

SEQ ID NO: 132926 - RNA, 18 nt, Human herpesvirus 3
uaaaauucgcacaccuuc

SEQ ID NO: 132927 - RNA, 14 nt, Human herpesvirus 3
uaaaauucuaacaa

SEQ ID NO: 132928 - RNA, 15 nt, Human herpesvirus 3
uaaagagccauuucc

SEQ ID NO: 132929 - RNA, 21 nt, Human herpesvirus 3
uaaaggcacgcugugugcaua

SEQ ID NO: 132930 - RNA, 20 nt, Human herpesvirus 3
uaacaucccagcggggauca

SEQ ID NO: 132931 - RNA, 17 nt, Human herpesvirus 3
uaaauuucaaugaugga

SEQ ID NO: 132932 - RNA, 17 nt, Human herpesvirus 3
uaaaucguuuaucacug

SEQ ID NO: 132933 - RNA, 13 nt, Human herpesvirus 3
uaaauguguauua

SEQ ID NO: 132934 - RNA, 16 nt, Human herpesvirus 3
guccuuacccauauga

SEQ ID NO: 132935 - RNA, 15 nt, Human herpesvirus 3
guaccguuugcacaa

SEQ ID NO: 132936 - RNA, 20 nt, Human herpesvirus 3
guaccaguaaaaagaugaua

SEQ ID NO: 132937 - RNA, 14 nt, Human herpesvirus 3
guaccaugggagac

SEQ ID NO: 132938 - RNA, 23 nt, Human herpesvirus 3
guaccauuugauacguuguucau

SEQ ID NO: 132939 - RNA, 15 nt, Human herpesvirus 3
guaccacgugguauu

SEQ ID NO: 132940 - RNA, 15 nt, Human herpesvirus 3
gucuaauaccacaga

SEQ ID NO: 132941 - RNA, 15 nt, Human herpesvirus 3
gucguuauauucaca

SEQ ID NO: 132942 - RNA, 20 nt, Human herpesvirus 3
gucguuauauucacaugcag

SEQ ID NO: 132943 - RNA, 18 nt, Human herpesvirus 3
gucuaccacuaagaacuu

SEQ ID NO: 132944 - RNA, 23 nt, Human herpesvirus 3
gucuacgugguaccaaaaacaca

SEQ ID NO: 132945 - RNA, 12 nt, Human herpesvirus 3
gucggucucucc

SEQ ID NO: 132946 - RNA, 13 nt, Human herpesvirus 3
gucgucugaugug

SEQ ID NO: 132947 - RNA, 12 nt, Human herpesvirus 3
gugaagacuuua

SEQ ID NO: 132948 - RNA, 21 nt, Human herpesvirus 3
gugaagacuuuaugaauuugc

SEQ ID NO: 132949 - RNA, 19 nt, Human herpesvirus 3
gugacagaccggcuguuga

SEQ ID NO: 132950 - RNA, 14 nt, Human herpesvirus 3
gugacagacuuugu

SEQ ID NO: 132951 - RNA, 15 nt, Human herpesvirus 3
gugcugucaaccaua

SEQ ID NO: 132952 - RNA, 22 nt, Human herpesvirus 3
guuacucaugugucuccauuac

SEQ ID NO: 132953 - RNA, 11 nt, Human herpesvirus 3
guuacauucuc

SEQ ID NO: 132954 - RNA, 17 nt, Human herpesvirus 3
guuaccauggugcgauu

SEQ ID NO: 132955 - RNA, 13 nt, Human herpesvirus 3
guuagacagagaa

SEQ ID NO: 132956 - RNA, 12 nt, Human herpesvirus 3
guguucauuuua

SEQ ID NO: 132957 - RNA, 20 nt, Human herpesvirus 3
guguuagacagagaauuaau

SEQ ID NO: 132958 - RNA, 15 nt, Human herpesvirus 3
gugugcaauaaccuc

SEQ ID NO: 132959 - RNA, 21 nt, Human herpesvirus 3
gugugcauaacguugcgguga

SEQ ID NO: 132960 - RNA, 13 nt, Human herpesvirus 3
gugggaguggagu

SEQ ID NO: 132961 - RNA, 16 nt, Human herpesvirus 3
uauugagaaaaccaaa

SEQ ID NO: 132962 - RNA, 23 nt, Human herpesvirus 3
uauuccgcccggauaauguccua

SEQ ID NO: 132963 - RNA, 19 nt, Human herpesvirus 3
uauuccggagccuaaauac

SEQ ID NO: 132964 - RNA, 22 nt, Human herpesvirus 3
uauaauauuaacaggauuugcu

SEQ ID NO: 132965 - RNA, 22 nt, Human herpesvirus 3
uauaaucaguugcuaccaaaca

SEQ ID NO: 132966 - RNA, 18 nt, Human herpesvirus 3
uauaaucuccagugccag

SEQ ID NO: 132967 - RNA, 13 nt, Human herpesvirus 3
uauaacguauaac

SEQ ID NO: 132968 - RNA, 18 nt, Human herpesvirus 3
uauaacccggucugcuca

SEQ ID NO: 132969 - RNA, 12 nt, Human herpesvirus 3
uauaacauacau

SEQ ID NO: 132970 - RNA, 14 nt, Human herpesvirus 3
uauaagggagucua

SEQ ID NO: 132971 - RNA, 17 nt, Human herpesvirus 3
uauaaggggcuugagau

SEQ ID NO: 132972 - RNA, 24 nt, Human herpesvirus 3
uauaaauguguauuauaugucaca

SEQ ID NO: 132973 - RNA, 11 nt, Human herpesvirus 3
uauaaaacacu

SEQ ID NO: 132974 - RNA, 12 nt, Human herpesvirus 3
uauaaaacacuc

SEQ ID NO: 132975 - RNA, 16 nt, Human herpesvirus 3
ucaaauucaacuaaug

SEQ ID NO: 132976 - RNA, 12 nt, Human herpesvirus 3
ucaaaacauacu

SEQ ID NO: 132977 - RNA, 18 nt, Human herpesvirus 3
ucaacauuuacaguaaua

SEQ ID NO: 132978 - RNA, 23 nt, Human herpesvirus 3
ucaacaaaugcgcguuccaaauu

SEQ ID NO: 132979 - RNA, 14 nt, Human herpesvirus 3
uauuuucaguauua

SEQ ID NO: 132980 - RNA, 13 nt, Human herpesvirus 3
uauuuuacauaca

SEQ ID NO: 132981 - RNA, 15 nt, Human herpesvirus 3
ucaaccaauugguau

SEQ ID NO: 132982 - RNA, 21 nt, Human herpesvirus 3
ucaauauuuauacaagcauaa

SEQ ID NO: 132983 - RNA, 13 nt, Human herpesvirus 3
ucacaacagacaa

SEQ ID NO: 132984 - RNA, 23 nt, Human herpesvirus 3
ucacguuuguguugugacuugac

SEQ ID NO: 132985 - RNA, 14 nt, Human herpesvirus 3
ucacuauaaaaaca

SEQ ID NO: 132986 - RNA, 13 nt, Human herpesvirus 3
ucaccaaagccaa

SEQ ID NO: 132987 - RNA, 14 nt, Human herpesvirus 3
uccgcgcucaauca

SEQ ID NO: 132988 - RNA, 14 nt, Human herpesvirus 3
uccggcaucuccau

SEQ ID NO: 132989 - RNA, 16 nt, Human herpesvirus 3
uccggcaucuccauca

SEQ ID NO: 132990 - RNA, 20 nt, Human herpesvirus 3
ucccguguccccucugguau

SEQ ID NO: 132991 - RNA, 16 nt, Human herpesvirus 3
ucccgccuuuaucucc

SEQ ID NO: 132992 - RNA, 16 nt, Human herpesvirus 3
uccccugaugaugguu

SEQ ID NO: 132993 - RNA, 22 nt, Human herpesvirus 3
uccccggaaauauaacauacau

SEQ ID NO: 132994 - RNA, 14 nt, Human herpesvirus 3
uccccguacccgcu

SEQ ID NO: 132995 - RNA, 14 nt, Human herpesvirus 3
uccauuuaacaauc

SEQ ID NO: 132996 - RNA, 15 nt, Human herpesvirus 3
uccagaguacagggu

SEQ ID NO: 132997 - RNA, 15 nt, Human herpesvirus 3
uccacucuacaucaa

SEQ ID NO: 132998 - RNA, 15 nt, Human herpesvirus 3
uccacugcauuuaca

SEQ ID NO: 132999 - RNA, 20 nt, Human herpesvirus 3
uccaugggccaauccgucaa

SEQ ID NO: 133000 - RNA, 17 nt, Human herpesvirus 3
uccauuaaagagccauu

SEQ ID NO: 133001 - RNA, 15 nt, Human herpesvirus 3
uccacgggucaugca

SEQ ID NO: 133002 - RNA, 12 nt, Human herpesvirus 3
uccacuuaucca

SEQ ID NO: 133003 - RNA, 15 nt, Human herpesvirus 3
uccacuuauccaaca

SEQ ID NO: 133004 - RNA, 17 nt, Human herpesvirus 3
uccacuuauccaacaaa

SEQ ID NO: 133005 - RNA, 13 nt, Human herpesvirus 3
uccaauacaucaa

SEQ ID NO: 133006 - RNA, 22 nt, Human herpesvirus 3
uccaaucaaaaaagcguguaaa

SEQ ID NO: 133007 - RNA, 19 nt, Human herpesvirus 3
uccaacuguaucuguaugu

SEQ ID NO: 133008 - RNA, 24 nt, Human herpesvirus 3
uccaacuguuuacauagauacucc

SEQ ID NO: 133009 - RNA, 22 nt, Human herpesvirus 3
ucauuacgacacggaaacguuc

SEQ ID NO: 133010 - RNA, 17 nt, Human herpesvirus 3
ucauuaugagcaucuag

SEQ ID NO: 133011 - RNA, 18 nt, Human herpesvirus 3
ucaugcuugucaaaacau

SEQ ID NO: 133012 - RNA, 21 nt, Human herpesvirus 3
ucaugcuugucaaaacauacu

SEQ ID NO: 133013 - RNA, 22 nt, Human herpesvirus 3
ucaugcuugucaaaacauacua

SEQ ID NO: 133014 - RNA, 20 nt, Human herpesvirus 3
uccaaaugauguaaccuaca

SEQ ID NO: 133015 - RNA, 21 nt, Human herpesvirus 3
uccaaauuaacccaagacgac

SEQ ID NO: 133016 - RNA, 18 nt, Human herpesvirus 3
ucaguaaauuucaaugau

SEQ ID NO: 133017 - RNA, 18 nt, Human herpesvirus 3
ucaguaacuuaacaaaca

SEQ ID NO: 133018 - RNA, 19 nt, Human herpesvirus 3
ucaucacccgugagauuau

SEQ ID NO: 133019 - RNA, 17 nt, Human herpesvirus 3
ucaucauacgcauuuac

SEQ ID NO: 133020 - RNA, 15 nt, Human herpesvirus 3
ucauauauacccauc

SEQ ID NO: 133021 - RNA, 14 nt, Human herpesvirus 3
ucauacgcauuuac

SEQ ID NO: 133022 - RNA, 18 nt, Human herpesvirus 3
ucugugggggaguggggu

SEQ ID NO: 133023 - RNA, 13 nt, Human herpesvirus 3
ucuguuacauuuc

SEQ ID NO: 133024 - RNA, 14 nt, Human herpesvirus 3
ucuguuacauuucg

SEQ ID NO: 133025 - RNA, 20 nt, Human herpesvirus 3
ucuuaaaauauaaaauaacc

SEQ ID NO: 133026 - RNA, 17 nt, Human herpesvirus 3
ucuucauccccugauga

SEQ ID NO: 133027 - RNA, 20 nt, Human herpesvirus 3
ucugccguggaccccuguau

SEQ ID NO: 133028 - RNA, 20 nt, Human herpesvirus 3
ucugauucggguaaaacaca

SEQ ID NO: 133029 - RNA, 22 nt, Human herpesvirus 3
ucugauucggguaaaacacaca

SEQ ID NO: 133030 - RNA, 20 nt, Human herpesvirus 3
ucugucauguuuaagaacau

SEQ ID NO: 133031 - RNA, 11 nt, Human herpesvirus 3
ucuaugugcag

SEQ ID NO: 133032 - RNA, 13 nt, Human herpesvirus 3
ucuauuaucagga

SEQ ID NO: 133033 - RNA, 11 nt, Human herpesvirus 3
ucucuucauau

SEQ ID NO: 133034 - RNA, 19 nt, Human herpesvirus 3
ucugagaagcaacaugaca

SEQ ID NO: 133035 - RNA, 16 nt, Human herpesvirus 3
ucugaguucaaagcaa

SEQ ID NO: 133036 - RNA, 18 nt, Human herpesvirus 3
ucuacgcacauuagcaaa

SEQ ID NO: 133037 - RNA, 15 nt, Human herpesvirus 3
ucuacgugguaccaa

SEQ ID NO: 133038 - RNA, 22 nt, Human herpesvirus 3
ucuacagcacccuuuuguaaaa

SEQ ID NO: 133039 - RNA, 14 nt, Human herpesvirus 3
uccguuauggaguu

SEQ ID NO: 133040 - RNA, 20 nt, Human herpesvirus 3
uccuagccacacccacaaag

SEQ ID NO: 133041 - RNA, 18 nt, Human herpesvirus 3
ucgcguguacgaaaaccg

SEQ ID NO: 133042 - RNA, 16 nt, Human herpesvirus 3
ucgcuguuagaggcau

SEQ ID NO: 133043 - RNA, 22 nt, Human herpesvirus 3
ucgcgauguuuuuaauccaaug

SEQ ID NO: 133044 - RNA, 17 nt, Human herpesvirus 3
ugacccugcuaaccaua

SEQ ID NO: 133045 - RNA, 19 nt, Human herpesvirus 3
ugaccaacgcuuugaucuu

SEQ ID NO: 133046 - RNA, 18 nt, Human herpesvirus 3
ugacagaccggcuguuga

SEQ ID NO: 133047 - RNA, 14 nt, Human herpesvirus 3
ugacaacauuuaaa

SEQ ID NO: 133048 - RNA, 14 nt, Human herpesvirus 3
ugacaaaaugacaa

SEQ ID NO: 133049 - RNA, 19 nt, Human herpesvirus 3
ugacaaauucccccggggc

SEQ ID NO: 133050 - RNA, 16 nt, Human herpesvirus 3
ugaauuauuaaacuua

SEQ ID NO: 133051 - RNA, 16 nt, Human herpesvirus 3
ugaaugggaucuuccg

SEQ ID NO: 133052 - RNA, 22 nt, Human herpesvirus 3
ugaaguguucuaaaacacuguc

SEQ ID NO: 133053 - RNA, 16 nt, Human herpesvirus 3
ugaagacuccaguaua

SEQ ID NO: 133054 - RNA, 17 nt, Human herpesvirus 3
ugaagacuccaguauac

SEQ ID NO: 133055 - RNA, 14 nt, Human herpesvirus 3
ugaaacgucguuau

SEQ ID NO: 133056 - RNA, 19 nt, Human herpesvirus 3
ugaaacgucguuauauuca

SEQ ID NO: 133057 - RNA, 11 nt, Human herpesvirus 3
ugaaagcuacc

SEQ ID NO: 133058 - RNA, 18 nt, Human herpesvirus 3
ugaaagagcuguccauga

SEQ ID NO: 133059 - RNA, 16 nt, Human herpesvirus 3
ugaaauauaucuuccg

SEQ ID NO: 133060 - RNA, 13 nt, Human herpesvirus 3
ugaacaaacacuc

SEQ ID NO: 133061 - RNA, 13 nt, Human herpesvirus 3
ugaaauguaauca

SEQ ID NO: 133062 - RNA, 15 nt, Human herpesvirus 3
ugaacaagagugcau

SEQ ID NO: 133063 - RNA, 13 nt, Human herpesvirus 3
ugaaccaaaucca

SEQ ID NO: 133064 - RNA, 12 nt, Human herpesvirus 3
ugaaccacaacc

SEQ ID NO: 133065 - RNA, 17 nt, Human herpesvirus 3
ugaagacaaacuggaua

SEQ ID NO: 133066 - RNA, 14 nt, Human herpesvirus 3
ucuugcguaccaua

SEQ ID NO: 133067 - RNA, 15 nt, Human herpesvirus 3
ucuugcguaccauaa

SEQ ID NO: 133068 - RNA, 17 nt, Human herpesvirus 3
ucuugcguaccauaaug

SEQ ID NO: 133069 - RNA, 22 nt, Human herpesvirus 3
ucuugcgucuguuuugggguca

SEQ ID NO: 133070 - RNA, 21 nt, Human herpesvirus 3
ucuuccucuuuggaccacggc

SEQ ID NO: 133071 - RNA, 22 nt, Human herpesvirus 3
ucuuguccaacuguaucuguau

SEQ ID NO: 133072 - RNA, 15 nt, Human herpesvirus 3
ucuuguuugaacgac

SEQ ID NO: 133073 - RNA, 18 nt, Human herpesvirus 3
uguuucacgcuuccuuaa

SEQ ID NO: 133074 - RNA, 18 nt, Human herpesvirus 3
uguugugucccgacaaaa

SEQ ID NO: 133075 - RNA, 15 nt, Human herpesvirus 3
uguuuaacaaccaua

SEQ ID NO: 133076 - RNA, 12 nt, Human herpesvirus 3
ugucugccaaac

SEQ ID NO: 133077 - RNA, 13 nt, Human herpesvirus 3
uguugucugccaa

SEQ ID NO: 133078 - RNA, 19 nt, Human herpesvirus 3
ugucgucauauuacauuaa

SEQ ID NO: 133079 - RNA, 16 nt, Human herpesvirus 3
ugucuccaaccauuca

SEQ ID NO: 133080 - RNA, 22 nt, Human herpesvirus 3
ugucaagacaguagauguguug

SEQ ID NO: 133081 - RNA, 15 nt, Human herpesvirus 3
ugucacgacaaaaac

SEQ ID NO: 133082 - RNA, 14 nt, Human herpesvirus 3
ugucgcgcguguau

SEQ ID NO: 133083 - RNA, 19 nt, Human herpesvirus 3
ugucggaaacccucaagaa

SEQ ID NO: 133084 - RNA, 20 nt, Human herpesvirus 3
uuaaauaguaccacguggua

SEQ ID NO: 133085 - RNA, 18 nt, Human herpesvirus 3
uuaaacguauucuauuaa

SEQ ID NO: 133086 - RNA, 17 nt, Human herpesvirus 3
uuaaagcaucuauauga

SEQ ID NO: 133087 - RNA, 16 nt, Human herpesvirus 3
uguuugccgagacuga

SEQ ID NO: 133088 - RNA, 21 nt, Human herpesvirus 3
uuaaacaacauggcuaugcca

SEQ ID NO: 133089 - RNA, 18 nt, Human herpesvirus 3
uuaaacccacaaguaccc

SEQ ID NO: 133090 - RNA, 17 nt, Human herpesvirus 3
uuaaacccacauuuucc

SEQ ID NO: 133091 - RNA, 15 nt, Human herpesvirus 3
uuaauaaaaacacaa

SEQ ID NO: 133092 - RNA, 20 nt, Human herpesvirus 3
uuaauacgcggucugccgug

SEQ ID NO: 133093 - RNA, 20 nt, Human herpesvirus 3
uuaauaggcauaaacacgga

SEQ ID NO: 133094 - RNA, 18 nt, Human herpesvirus 3
uuagcacuaucgucucaa

SEQ ID NO: 133095 - RNA, 15 nt, Human herpesvirus 3
uuagaguguuuaaca

SEQ ID NO: 133096 - RNA, 20 nt, Human herpesvirus 3
uuagaguguuuaacaaccau

SEQ ID NO: 133097 - RNA, 16 nt, Human herpesvirus 3
uuagaggguagagggu

SEQ ID NO: 133098 - RNA, 13 nt, Human herpesvirus 3
uuacuacauugaa

SEQ ID NO: 133099 - RNA, 16 nt, Human herpesvirus 3
uuacuacauugaacaa

SEQ ID NO: 133100 - RNA, 14 nt, Human herpesvirus 3
uuaccguacaacaa

SEQ ID NO: 133101 - RNA, 16 nt, Human herpesvirus 3
uuaauccgcgcucaau

SEQ ID NO: 133102 - RNA, 23 nt, Human herpesvirus 3
uuaaucgaacauuguugguucua

SEQ ID NO: 133103 - RNA, 15 nt, Human herpesvirus 3
uuacaugauccacgu

SEQ ID NO: 133104 - RNA, 23 nt, Human herpesvirus 3
uuauguccugggucgguucugac

SEQ ID NO: 133105 - RNA, 12 nt, Human herpesvirus 3
uuauggguggua

SEQ ID NO: 133106 - RNA, 12 nt, Human herpesvirus 3
uuauuacauucg

SEQ ID NO: 133107 - RNA, 13 nt, Human herpesvirus 3
uuaucuauauaca

SEQ ID NO: 133108 - RNA, 14 nt, Human herpesvirus 3
uuaugagaguuuac

SEQ ID NO: 133109 - RNA, 17 nt, Human herpesvirus 3
uuaugaacagcaacgga

SEQ ID NO: 133110 - RNA, 23 nt, Human herpesvirus 3
uuaugaacagcaacggaugcaua

SEQ ID NO: 133111 - RNA, 14 nt, Human herpesvirus 3
uuaugaacaguuua

SEQ ID NO: 133112 - RNA, 23 nt, Human herpesvirus 3
uuaucacugugcccgcauaagau

SEQ ID NO: 133113 - RNA, 23 nt, Human herpesvirus 3
uuaucauugaagaugauuaucaa

SEQ ID NO: 133114 - RNA, 16 nt, Human herpesvirus 3
uuauauuuuacauaca

SEQ ID NO: 133115 - RNA, 10 nt, Human herpesvirus 3
uuauauccau

SEQ ID NO: 133116 - RNA, 13 nt, Human herpesvirus 3
uuauauccaucaa

SEQ ID NO: 133117 - RNA, 16 nt, Human herpesvirus 3
uuaucaacgacauaca

SEQ ID NO: 133118 - RNA, 17 nt, Human herpesvirus 3
uuaucaacgacauacau

SEQ ID NO: 133119 - RNA, 21 nt, Human herpesvirus 3
uuaucaauuguuuaugugauu

SEQ ID NO: 133120 - RNA, 20 nt, Human herpesvirus 3
uucaauaaauguacuauaau

SEQ ID NO: 133121 - RNA, 22 nt, Human herpesvirus 3
uucaccagagucuucugucaag

SEQ ID NO: 133122 - RNA, 21 nt, Human herpesvirus 3
uucaccgguauuauacauaac

SEQ ID NO: 133123 - RNA, 13 nt, Human herpesvirus 3
uucacaugcaguu

SEQ ID NO: 133124 - RNA, 15 nt, Human herpesvirus 3
uucauauauacccau

SEQ ID NO: 133125 - RNA, 16 nt, Human herpesvirus 3
uucauauauacccauc

SEQ ID NO: 133126 - RNA, 16 nt, Human herpesvirus 3
uucaguaacuuaacaa

SEQ ID NO: 133127 - RNA, 23 nt, Human herpesvirus 3
uucaguaacuuaacaaacauaua

SEQ ID NO: 133128 - RNA, 15 nt, Human herpesvirus 3
uucaugcuuguaaaa

SEQ ID NO: 133129 - RNA, 21 nt, Human herpesvirus 3
uucaugcuuguaaaacauauc

SEQ ID NO: 133130 - RNA, 22 nt, Human herpesvirus 3
uucaugcuuguaaaacauauca

SEQ ID NO: 133131 - RNA, 16 nt, Human herpesvirus 3
uucaugcuugucaaaa

SEQ ID NO: 133132 - RNA, 23 nt, Human herpesvirus 3
uucaugcuugucaaaacauacua

SEQ ID NO: 133133 - RNA, 17 nt, Human herpesvirus 3
uuccccuuuagcuauag

SEQ ID NO: 133134 - RNA, 23 nt, Human herpesvirus 3
uucccgaaagcccgaucccgccg

SEQ ID NO: 133135 - RNA, 15 nt, Human herpesvirus 3
uucccccacauacaa

SEQ ID NO: 133136 - RNA, 18 nt, Human herpesvirus 3
uucccaaaaggauauuca

SEQ ID NO: 133137 - RNA, 16 nt, Human herpesvirus 3
uuccaaccgacccaga

SEQ ID NO: 133138 - RNA, 13 nt, Human herpesvirus 3
uuccaauggaugg

SEQ ID NO: 133139 - RNA, 18 nt, Human herpesvirus 3
uuccaggcgagacuugau

SEQ ID NO: 133140 - RNA, 22 nt, Human herpesvirus 3
uuccaggcugaggguucaguaa

SEQ ID NO: 133141 - RNA, 21 nt, Human herpesvirus 3
uuccaauauuugauccacaac

SEQ ID NO: 133142 - RNA, 16 nt, Human herpesvirus 3
uuccacccccucuuaa

SEQ ID NO: 133143 - RNA, 15 nt, Human herpesvirus 3
uuccacuuacaggac

SEQ ID NO: 133144 - RNA, 15 nt, Human herpesvirus 3
uuccuuuuccagcga

SEQ ID NO: 133145 - RNA, 19 nt, Human herpesvirus 3
uucgaggaaaacuuauguc

SEQ ID NO: 133146 - RNA, 18 nt, Human herpesvirus 3
uucguuuugguguuacau

SEQ ID NO: 133147 - RNA, 12 nt, Human herpesvirus 3
uucuaaaacacu

SEQ ID NO: 133148 - RNA, 14 nt, Human herpesvirus 3
uucuaaaacacugu

SEQ ID NO: 133149 - RNA, 18 nt, Human herpesvirus 3
uucggcgcggaugcauuu

SEQ ID NO: 133150 - RNA, 14 nt, Human herpesvirus 3
uucucuaacgcaau

SEQ ID NO: 133151 - RNA, 16 nt, Human herpesvirus 3
uucucaucaaagucaa

SEQ ID NO: 133152 - RNA, 19 nt, Human herpesvirus 3
uucuguaaaggaucuccac

SEQ ID NO: 133153 - RNA, 11 nt, Human herpesvirus 3
uucugcauaag

SEQ ID NO: 133154 - RNA, 23 nt, Human herpesvirus 3
ugcauuuauuaucgggcgacaau

SEQ ID NO: 133155 - RNA, 18 nt, Human herpesvirus 3
ugcauuuuaaaaauaccu

SEQ ID NO: 133156 - RNA, 18 nt, Human herpesvirus 3
ugcaucgagguuguccac

SEQ ID NO: 133157 - RNA, 22 nt, Human herpesvirus 3
ugcaucgcauaggguguuauaa

SEQ ID NO: 133158 - RNA, 14 nt, Human herpesvirus 3
ugccugagguuuag

SEQ ID NO: 133159 - RNA, 20 nt, Human herpesvirus 3
ugccgucaaugcaacuauua

SEQ ID NO: 133160 - RNA, 22 nt, Human herpesvirus 3
ugccuaggaacgcgacaugacc

SEQ ID NO: 133161 - RNA, 17 nt, Human herpesvirus 3
ugcgccguauaugguau

SEQ ID NO: 133162 - RNA, 18 nt, Human herpesvirus 3
ugacggcccccuggacau

SEQ ID NO: 133163 - RNA, 12 nt, Human herpesvirus 3
ugacuauauucc

SEQ ID NO: 133164 - RNA, 16 nt, Human herpesvirus 3
ugcagcgcgcaaauua

SEQ ID NO: 133165 - RNA, 18 nt, Human herpesvirus 3
ugcacuuuuaaagcaucu

SEQ ID NO: 133166 - RNA, 16 nt, Human herpesvirus 3
ugcuacgucgauguga

SEQ ID NO: 133167 - RNA, 13 nt, Human herpesvirus 3
ugcucauggaauu

SEQ ID NO: 133168 - RNA, 20 nt, Human herpesvirus 3
uggagaaccgcgucuauguc

SEQ ID NO: 133169 - RNA, 19 nt, Human herpesvirus 3
uggacuguuuaacggaaga

SEQ ID NO: 133170 - RNA, 23 nt, Human herpesvirus 3
uggacuguuuaacggaagaugaa

SEQ ID NO: 133171 - RNA, 16 nt, Human herpesvirus 3
ugcuuauauuuuacau

SEQ ID NO: 133172 - RNA, 11 nt, Human herpesvirus 3
ugcuguucuca

SEQ ID NO: 133173 - RNA, 23 nt, Human herpesvirus 3
uggaaacaacaacacagccuuag

SEQ ID NO: 133174 - RNA, 12 nt, Human herpesvirus 3
uggaaaugugcu

SEQ ID NO: 133175 - RNA, 18 nt, Human herpesvirus 3
ugguacaagaaaccaugu

SEQ ID NO: 133176 - RNA, 15 nt, Human herpesvirus 3
ugguuuuuauugacu

SEQ ID NO: 133177 - RNA, 23 nt, Human herpesvirus 3
ugggguucggaauuaucacggga

SEQ ID NO: 133178 - RNA, 16 nt, Human herpesvirus 3
uguaaccuacacaaca

SEQ ID NO: 133179 - RNA, 16 nt, Human herpesvirus 3
uguaaaggaucuccac

SEQ ID NO: 133180 - RNA, 12 nt, Human herpesvirus 3
uguaguacaggg

SEQ ID NO: 133181 - RNA, 13 nt, Human herpesvirus 3
uguaguacagggc

SEQ ID NO: 133182 - RNA, 15 nt, Human herpesvirus 3
uguaugcacaacaaa

SEQ ID NO: 133183 - RNA, 18 nt, Human herpesvirus 3
uguaugcugauacauaaa

SEQ ID NO: 133184 - RNA, 12 nt, Human herpesvirus 3
uguaucuguaug

SEQ ID NO: 133185 - RNA, 15 nt, Human herpesvirus 3
uguaucuuugcuguc

SEQ ID NO: 133186 - RNA, 21 nt, Human herpesvirus 3
uguaugcaaccacggugauua

SEQ ID NO: 133187 - RNA, 17 nt, Human herpesvirus 3
uguauuauaugucacau

SEQ ID NO: 133188 - RNA, 15 nt, Human herpesvirus 3
uguauuguaguacag

SEQ ID NO: 133189 - RNA, 16 nt, Human herpesvirus 3
uguauuguaguacagg

SEQ ID NO: 133190 - RNA, 22 nt, Human herpesvirus 3
uguauuuggguguugugaucua

SEQ ID NO: 133191 - RNA, 16 nt, Human herpesvirus 3
uguauaaggggcuuga

SEQ ID NO: 133192 - RNA, 15 nt, Human herpesvirus 3
uguagucuuugaucc

SEQ ID NO: 133193 - RNA, 23 nt, Human herpesvirus 3
uguauauacaacacgaugcgcug

SEQ ID NO: 133194 - RNA, 23 nt, Human herpesvirus 3
uguauauagauaagacccgguga

SEQ ID NO: 133195 - RNA, 13 nt, Human herpesvirus 3
uggcuaugccauu

SEQ ID NO: 133196 - RNA, 14 nt, Human herpesvirus 3
uggcuaugccauuu

SEQ ID NO: 133197 - RNA, 20 nt, Human herpesvirus 3
uggcuaugccauuugagaua

SEQ ID NO: 133198 - RNA, 15 nt, Human herpesvirus 3
uggagcguacugcag

SEQ ID NO: 133199 - RNA, 12 nt, Human herpesvirus 3
uuucaugcuugu

SEQ ID NO: 133200 - RNA, 19 nt, Human herpesvirus 3
uuucaugcuuguaaaacau

SEQ ID NO: 133201 - RNA, 20 nt, Human herpesvirus 3
uuucaugcuugucaaaacau

SEQ ID NO: 133202 - RNA, 20 nt, Human herpesvirus 3
uuuccaaauaacgccuuaaa

SEQ ID NO: 133203 - RNA, 22 nt, Human herpesvirus 3
uuuauauauauguuccaucuaa

SEQ ID NO: 133204 - RNA, 19 nt, Human herpesvirus 3
uuuauaucuguuacauuuc

SEQ ID NO: 133205 - RNA, 17 nt, Human herpesvirus 3
uuuaucaggguuuaaca

SEQ ID NO: 133206 - RNA, 15 nt, Human herpesvirus 3
uuuaaucggugucag

SEQ ID NO: 133207 - RNA, 18 nt, Human herpesvirus 3
uuuaauacccagcuaaaa

SEQ ID NO: 133208 - RNA, 18 nt, Human herpesvirus 3
uuuauacguaugucauca

SEQ ID NO: 133209 - RNA, 22 nt, Human herpesvirus 3
uuuauacccccgacacgcggcc

SEQ ID NO: 133210 - RNA, 16 nt, Human herpesvirus 3
uuuaggguuuaaaggu

SEQ ID NO: 133211 - RNA, 17 nt, Human herpesvirus 3
uuuaaauuuuacuuaau

SEQ ID NO: 133212 - RNA, 13 nt, Human herpesvirus 3
uuuaacaaccaua

SEQ ID NO: 133213 - RNA, 18 nt, Human herpesvirus 3
uucuugaagcguuuccag

SEQ ID NO: 133214 - RNA, 20 nt, Human herpesvirus 3
uuguccaacuguaucuguau

SEQ ID NO: 133215 - RNA, 15 nt, Human herpesvirus 3
uugucaaaacauacu

SEQ ID NO: 133216 - RNA, 16 nt, Human herpesvirus 3
uuucccccacauacaa

SEQ ID NO: 133217 - RNA, 17 nt, Human herpesvirus 3
uuuccgcuguacaccgc

SEQ ID NO: 133218 - RNA, 20 nt, Human herpesvirus 3
uuugcaauuccgucucugau

SEQ ID NO: 133219 - RNA, 22 nt, Human herpesvirus 3
uuugaguuaagagggcguauga

SEQ ID NO: 133220 - RNA, 20 nt, Human herpesvirus 3
uuugauuacgcguugugaua

SEQ ID NO: 133221 - RNA, 19 nt, Human herpesvirus 3
uuugcgcguuccuuuucca

SEQ ID NO: 133222 - RNA, 15 nt, Human herpesvirus 3
uuugaagacuuugac

SEQ ID NO: 133223 - RNA, 16 nt, Human herpesvirus 3
uuuucuuaacauugua

SEQ ID NO: 133224 - RNA, 18 nt, Human herpesvirus 3
uuuuaauuuuauauacaa

SEQ ID NO: 133225 - RNA, 17 nt, Human herpesvirus 3
uuuucccccacauacaa

SEQ ID NO: 133226 - RNA, 14 nt, Human herpesvirus 3
uuuuaauuccaaua

SEQ ID NO: 133227 - RNA, 20 nt, Human herpesvirus 3
uuuguuucuuuaucaguuga

SEQ ID NO: 133228 - RNA, 13 nt, Human herpesvirus 3
uuuguuuugauca

SEQ ID NO: 133229 - RNA, 19 nt, Human herpesvirus 3
uuuguguugugacuugacg

SEQ ID NO: 133230 - RNA, 14 nt, Human herpesvirus 3
aacauuuaucccaa

SEQ ID NO: 133231 - RNA, 17 nt, Human herpesvirus 3
aaccaaacgacuccagc

SEQ ID NO: 133232 - RNA, 12 nt, Human herpesvirus 3
aaccaacucgga

SEQ ID NO: 133233 - RNA, 13 nt, Human herpesvirus 3
aacauggcuacaa

SEQ ID NO: 133234 - RNA, 14 nt, Human herpesvirus 3
uuuugcaaggcgua

SEQ ID NO: 133235 - RNA, 14 nt, Human herpesvirus 3
aacagcaccaauau

SEQ ID NO: 133236 - RNA, 17 nt, Human herpesvirus 3
aaccccacgcaacauuu

SEQ ID NO: 133237 - RNA, 13 nt, Human herpesvirus 3
aacccacauuuuc

SEQ ID NO: 133238 - RNA, 17 nt, Human herpesvirus 3
aaccgauuaugucaaca

SEQ ID NO: 133239 - RNA, 21 nt, Human herpesvirus 3
aaccgauuaugucaacauggc

SEQ ID NO: 133240 - RNA, 17 nt, Human herpesvirus 3
aaccauagacuguucua

SEQ ID NO: 133241 - RNA, 22 nt, Human herpesvirus 3
aaccauagacuguucuacugac

SEQ ID NO: 133242 - RNA, 21 nt, Human herpesvirus 3
aaccauaauuaucugucuugg

SEQ ID NO: 133243 - RNA, 21 nt, Human herpesvirus 3
aaccauguuuucccaugucua

SEQ ID NO: 133244 - RNA, 20 nt, Human herpesvirus 3
aacugccaauauacacggac

SEQ ID NO: 133245 - RNA, 16 nt, Human herpesvirus 3
aacugauuacauuuca

SEQ ID NO: 133246 - RNA, 20 nt, Human herpesvirus 3
aacugcaaacacgcaauugu

SEQ ID NO: 133247 - RNA, 19 nt, Human herpesvirus 3
aagaaauacuuccaucuac

SEQ ID NO: 133248 - RNA, 15 nt, Human herpesvirus 3
aagaaaacauugcag

SEQ ID NO: 133249 - RNA, 21 nt, Human herpesvirus 3
aaccggguggguggcauuaaa

SEQ ID NO: 133250 - RNA, 22 nt, Human herpesvirus 3
aaccuggucaccguguggacau

SEQ ID NO: 133251 - RNA, 20 nt, Human herpesvirus 3
aacuaauauucuacagauuu

SEQ ID NO: 133252 - RNA, 21 nt, Human herpesvirus 3
aacuaauaaacgaugacacaa

SEQ ID NO: 133253 - RNA, 18 nt, Human herpesvirus 3
aauacaaagacaauuauu

SEQ ID NO: 133254 - RNA, 18 nt, Human herpesvirus 3
aauaauuccgguugugcc

SEQ ID NO: 133255 - RNA, 20 nt, Human herpesvirus 3
aauaauuccgguugugccaa

SEQ ID NO: 133256 - RNA, 14 nt, Human herpesvirus 3
aauaacauaaccaa

SEQ ID NO: 133257 - RNA, 15 nt, Human herpesvirus 3
aaguuauaugaagca

SEQ ID NO: 133258 - RNA, 15 nt, Human herpesvirus 3
aauaccuuuuucaug

SEQ ID NO: 133259 - RNA, 17 nt, Human herpesvirus 3
aauaccuuuuucaugcu

SEQ ID NO: 133260 - RNA, 20 nt, Human herpesvirus 3
aauaccuuuuucaugcuugu

SEQ ID NO: 133261 - RNA, 14 nt, Human herpesvirus 3
aauaccuauuucau

SEQ ID NO: 133262 - RNA, 15 nt, Human herpesvirus 3
aauaccuauuucaug

SEQ ID NO: 133263 - RNA, 17 nt, Human herpesvirus 3
aauaccuauuucaugcu

SEQ ID NO: 133264 - RNA, 21 nt, Human herpesvirus 3
aauaccuauuucaugcuugua

SEQ ID NO: 133265 - RNA, 18 nt, Human herpesvirus 3
aauacuaagccucuguac

SEQ ID NO: 133266 - RNA, 16 nt, Human herpesvirus 3
aauaugauacauaaaa

SEQ ID NO: 133267 - RNA, 18 nt, Human herpesvirus 3
aaucagagaagcuauaca

SEQ ID NO: 133268 - RNA, 13 nt, Human herpesvirus 3
aauaugccaucaa

SEQ ID NO: 133269 - RNA, 23 nt, Human herpesvirus 3
aauauuaacaggauuugcuuaua

SEQ ID NO: 133270 - RNA, 13 nt, Human herpesvirus 3
aagccucuguaca

SEQ ID NO: 133271 - RNA, 12 nt, Human herpesvirus 3
aaguauuuuccu

SEQ ID NO: 133272 - RNA, 21 nt, Human herpesvirus 3
aaguguucuaaaacacuguca

SEQ ID NO: 133273 - RNA, 21 nt, Human herpesvirus 3
aagucagauauuauuaacuua

SEQ ID NO: 133274 - RNA, 22 nt, Human herpesvirus 3
aaggcguaaaauucgcacaccu

SEQ ID NO: 133275 - RNA, 18 nt, Human herpesvirus 3
aaggcgugaaagcuacca

SEQ ID NO: 133276 - RNA, 20 nt, Human herpesvirus 3
aaggcacgcugugugcauaa

SEQ ID NO: 133277 - RNA, 15 nt, Human herpesvirus 3
aauuaccguacaaca

SEQ ID NO: 133278 - RNA, 18 nt, Human herpesvirus 3
aauuaccguacaacaaga

SEQ ID NO: 133279 - RNA, 16 nt, Human herpesvirus 3
aauuaauggaguauau

SEQ ID NO: 133280 - RNA, 13 nt, Human herpesvirus 3
aauuauauccaua

SEQ ID NO: 133281 - RNA, 12 nt, Human herpesvirus 3
aauuaacacaga

SEQ ID NO: 133282 - RNA, 22 nt, Human herpesvirus 3
aauuaacccaagacgacauuaa

SEQ ID NO: 133283 - RNA, 21 nt, Human herpesvirus 3
aauguuuugaaauacuaauau

SEQ ID NO: 133284 - RNA, 17 nt, Human herpesvirus 3
aauguugucugccaaac

SEQ ID NO: 133285 - RNA, 21 nt, Human herpesvirus 3
aauguguauuacguuacucau

SEQ ID NO: 133286 - RNA, 19 nt, Human herpesvirus 3
aauguuaaacccugauaaa

SEQ ID NO: 133287 - RNA, 23 nt, Human herpesvirus 3
aauucgugugcaauaaccucagc

SEQ ID NO: 133288 - RNA, 16 nt, Human herpesvirus 3
aauuaucugucuuggu

SEQ ID NO: 133289 - RNA, 14 nt, Human herpesvirus 3
aauuguacccaucu

SEQ ID NO: 133290 - RNA, 13 nt, Human herpesvirus 3
aauugucuguaua

SEQ ID NO: 133291 - RNA, 20 nt, Human herpesvirus 3
aauguaauucgugugcaaua

SEQ ID NO: 133292 - RNA, 12 nt, Human herpesvirus 3
aauggugauuca

SEQ ID NO: 133293 - RNA, 20 nt, Human herpesvirus 3
aaugguguuuggugcacucu

SEQ ID NO: 133294 - RNA, 22 nt, Human herpesvirus 3
aaugucccaaggauagauauca

SEQ ID NO: 133295 - RNA, 22 nt, Human herpesvirus 3
aauggaucagaaagauugcagu

SEQ ID NO: 133296 - RNA, 16 nt, Human herpesvirus 3
aaugccagcguugcca

SEQ ID NO: 133297 - RNA, 14 nt, Human herpesvirus 3
aaucauuaugagca

SEQ ID NO: 133298 - RNA, 14 nt, Human herpesvirus 3
aaucuauuaucagg

SEQ ID NO: 133299 - RNA, 16 nt, Human herpesvirus 3
aaugcaacccugucau

SEQ ID NO: 133300 - RNA, 14 nt, Human herpesvirus 3
aaugcacugaacca

SEQ ID NO: 133301 - RNA, 17 nt, Human herpesvirus 3
aaugcacugaaccacaa

SEQ ID NO: 133302 - RNA, 22 nt, Human herpesvirus 3
aaugccauuuggacacuacuca

SEQ ID NO: 133303 - RNA, 15 nt, Human herpesvirus 3
aaugauauacacaga

SEQ ID NO: 133304 - RNA, 15 nt, Human herpesvirus 3
aaugauggacuugaa

SEQ ID NO: 133305 - RNA, 21 nt, Human herpesvirus 3
aaagguccauuuaacaauccc

SEQ ID NO: 133306 - RNA, 23 nt, Human herpesvirus 3
aaaggauauucaccauuacuaca

SEQ ID NO: 133307 - RNA, 18 nt, Human herpesvirus 3
aaagccguucugugaguu

SEQ ID NO: 133308 - RNA, 12 nt, Human herpesvirus 3
aaagccugugac

SEQ ID NO: 133309 - RNA, 19 nt, Human herpesvirus 3
aaacuccuccuauauccca

SEQ ID NO: 133310 - RNA, 16 nt, Human herpesvirus 3
aaacucuguuguauca

SEQ ID NO: 133311 - RNA, 19 nt, Human herpesvirus 3
aaacgucguuauauucaca

SEQ ID NO: 133312 - RNA, 17 nt, Human herpesvirus 3
aaacguggccauuacua

SEQ ID NO: 133313 - RNA, 23 nt, Human herpesvirus 3
aaacguucuaauaaaaacaucaa

SEQ ID NO: 133314 - RNA, 18 nt, Human herpesvirus 3
gacaccgcuuaacaaaaa

SEQ ID NO: 133315 - RNA, 22 nt, Human herpesvirus 3
gacacaaaaaauuuauauuuaa

SEQ ID NO: 133316 - RNA, 18 nt, Human herpesvirus 3
gacacaguccggacaauu

SEQ ID NO: 133317 - RNA, 15 nt, Human herpesvirus 3
aaagucuucaaagaa

SEQ ID NO: 133318 - RNA, 22 nt, Human herpesvirus 3
aaaguuguuggcgcaugccauu

SEQ ID NO: 133319 - RNA, 12 nt, Human herpesvirus 3
gacaccaugacg

SEQ ID NO: 133320 - RNA, 12 nt, Human herpesvirus 3
gaccccugucac

SEQ ID NO: 133321 - RNA, 17 nt, Human herpesvirus 3
gaccauuuaccagugua

SEQ ID NO: 133322 - RNA, 16 nt, Human herpesvirus 3
aaauacuuccaucuac

SEQ ID NO: 133323 - RNA, 15 nt, Human herpesvirus 3
aaauaaacguauaaa

SEQ ID NO: 133324 - RNA, 20 nt, Human herpesvirus 3
aaacgcacacucgauuucaa

SEQ ID NO: 133325 - RNA, 16 nt, Human herpesvirus 3
aaacgacacaaaaaau

SEQ ID NO: 133326 - RNA, 14 nt, Human herpesvirus 3
aaacgaaaaccuuc

SEQ ID NO: 133327 - RNA, 21 nt, Human herpesvirus 3
gaauauuccgaccguaauaug

SEQ ID NO: 133328 - RNA, 16 nt, Human herpesvirus 3
gaauaguaaauaccua

SEQ ID NO: 133329 - RNA, 13 nt, Human herpesvirus 3
gaauaauacacac

SEQ ID NO: 133330 - RNA, 18 nt, Human herpesvirus 3
gaauaauacacacuaccu

SEQ ID NO: 133331 - RNA, 13 nt, Human herpesvirus 3
gaagcauuuacac

SEQ ID NO: 133332 - RNA, 19 nt, Human herpesvirus 3
gaagccccaacgaguguau

SEQ ID NO: 133333 - RNA, 22 nt, Human herpesvirus 3
gaaguguucuaaaacacuguca

SEQ ID NO: 133334 - RNA, 18 nt, Human herpesvirus 3
gaacgaucacaacagaca

SEQ ID NO: 133335 - RNA, 21 nt, Human herpesvirus 3
gaacgucgucgucugauguga

SEQ ID NO: 133336 - RNA, 22 nt, Human herpesvirus 3
gaacgugauuugcccacaccua

SEQ ID NO: 133337 - RNA, 15 nt, Human herpesvirus 3
gaacuaauauucuac

SEQ ID NO: 133338 - RNA, 21 nt, Human herpesvirus 3
cuugucgcgcguguaugcaca

SEQ ID NO: 133339 - RNA, 23 nt, Human herpesvirus 3
cuugucgcgcguguaugcacaac

SEQ ID NO: 133340 - RNA, 16 nt, Human herpesvirus 3
cuugucaaaacauacu

SEQ ID NO: 133341 - RNA, 20 nt, Human herpesvirus 3
cuuuacaagauauaauuugu

SEQ ID NO: 133342 - RNA, 15 nt, Human herpesvirus 3
cuuuaauuccucuaa

SEQ ID NO: 133343 - RNA, 18 nt, Human herpesvirus 3
cuuuauauauauguucca

SEQ ID NO: 133344 - RNA, 16 nt, Human herpesvirus 3
cuuuaucucccuaaaa

SEQ ID NO: 133345 - RNA, 17 nt, Human herpesvirus 3
cuuuaucucccuaaaac

SEQ ID NO: 133346 - RNA, 20 nt, Human herpesvirus 3
cuuuaucugaaaagaccgac

SEQ ID NO: 133347 - RNA, 18 nt, Human herpesvirus 3
gaacacguuaucggucaa

SEQ ID NO: 133348 - RNA, 20 nt, Human herpesvirus 3
gaaccgacccaggacauaaa

SEQ ID NO: 133349 - RNA, 19 nt, Human herpesvirus 3
gaggaugaggguggcagaa

SEQ ID NO: 133350 - RNA, 15 nt, Human herpesvirus 3
gaggauaggugucuu

SEQ ID NO: 133351 - RNA, 16 nt, Human herpesvirus 3
gagcguacugcagaua

SEQ ID NO: 133352 - RNA, 17 nt, Human herpesvirus 3
gagcuccagaugcgauu

SEQ ID NO: 133353 - RNA, 23 nt, Human herpesvirus 3
gagcucccauuccaaaugcgcaa

SEQ ID NO: 133354 - RNA, 17 nt, Human herpesvirus 3
gaggcgugucacgacaa

SEQ ID NO: 133355 - RNA, 19 nt, Human herpesvirus 3
gaggguggcagaagguuua

SEQ ID NO: 133356 - RNA, 16 nt, Human herpesvirus 3
gagaaagcggacacau

SEQ ID NO: 133357 - RNA, 16 nt, Human herpesvirus 3
gagaaauguacccaua

SEQ ID NO: 133358 - RNA, 12 nt, Human herpesvirus 3
gagaacaccaga

SEQ ID NO: 133359 - RNA, 21 nt, Human herpesvirus 3
gagacucugcgaugcauuaac

SEQ ID NO: 133360 - RNA, 22 nt, Human herpesvirus 3
gagacuugucauguuggacaaa

SEQ ID NO: 133361 - RNA, 23 nt, Human herpesvirus 3
gagacuugucauguuggacaaag

SEQ ID NO: 133362 - RNA, 16 nt, Human herpesvirus 3
gacguuuuuccacaau

SEQ ID NO: 133363 - RNA, 23 nt, Human herpesvirus 3
aaauguaguggcguagguagaug

SEQ ID NO: 133364 - RNA, 16 nt, Human herpesvirus 3
aaauaugcuauauaac

SEQ ID NO: 133365 - RNA, 13 nt, Human herpesvirus 3
aaaugauauacac

SEQ ID NO: 133366 - RNA, 16 nt, Human herpesvirus 3
gacuuccuauauacag

SEQ ID NO: 133367 - RNA, 15 nt, Human herpesvirus 3
gacuuaguacgauag

SEQ ID NO: 133368 - RNA, 21 nt, Human herpesvirus 3
gacugccguaaacacgguaaa

SEQ ID NO: 133369 - RNA, 17 nt, Human herpesvirus 3
gacuccagcaucaucug

SEQ ID NO: 133370 - RNA, 20 nt, Human herpesvirus 3
gauuuaugucgcuacuccag

SEQ ID NO: 133371 - RNA, 13 nt, Human herpesvirus 3
gauuacauuucau

SEQ ID NO: 133372 - RNA, 17 nt, Human herpesvirus 3
gauuacgcucaauacuu

SEQ ID NO: 133373 - RNA, 11 nt, Human herpesvirus 3
gauuacguuac

SEQ ID NO: 133374 - RNA, 16 nt, Human herpesvirus 3
gauguauucuggugau

SEQ ID NO: 133375 - RNA, 22 nt, Human herpesvirus 3
gaugugaaaaaggccgguugug

SEQ ID NO: 133376 - RNA, 23 nt, Human herpesvirus 3
gaugugauacaaugagcgguggu

SEQ ID NO: 133377 - RNA, 19 nt, Human herpesvirus 3
gaugugucggaaacccuca

SEQ ID NO: 133378 - RNA, 21 nt, Human herpesvirus 3
gauguuuuuaauccaauguuu

SEQ ID NO: 133379 - RNA, 21 nt, Human herpesvirus 3
gauucgcggcaguuauaacac

SEQ ID NO: 133380 - RNA, 21 nt, Human herpesvirus 3
gauucuccccccgcgauuuau

SEQ ID NO: 133381 - RNA, 16 nt, Human herpesvirus 3
gauuauuuucugugua

SEQ ID NO: 133382 - RNA, 19 nt, Human herpesvirus 3
gauuagucuguaauggagg

SEQ ID NO: 133383 - RNA, 12 nt, Human herpesvirus 3
gauuauauccau

SEQ ID NO: 133384 - RNA, 22 nt, Human herpesvirus 3
gaugguuaauaauagugacaaa

SEQ ID NO: 133385 - RNA, 15 nt, Human herpesvirus 3
gaugaucccaauaaa

SEQ ID NO: 133386 - RNA, 11 nt, Human herpesvirus 3
gaugacuuuga

SEQ ID NO: 133387 - RNA, 21 nt, Human herpesvirus 3
gauacuacaucgugcuugaau

SEQ ID NO: 133388 - RNA, 15 nt, Human herpesvirus 3
gauacguuguucaug

SEQ ID NO: 133389 - RNA, 13 nt, Human herpesvirus 3
gauacauaaacac

SEQ ID NO: 133390 - RNA, 17 nt, Human herpesvirus 3
gaucgcggggguugugc

SEQ ID NO: 133391 - RNA, 15 nt, Human herpesvirus 3
gauccggcaugcauu

SEQ ID NO: 133392 - RNA, 13 nt, Human herpesvirus 3
gguguuggugugg

SEQ ID NO: 133393 - RNA, 17 nt, Human herpesvirus 3
gguguuucagugguauu

SEQ ID NO: 133394 - RNA, 19 nt, Human herpesvirus 3
gguguauuuuauuuaguga

SEQ ID NO: 133395 - RNA, 15 nt, Human herpesvirus 3
gguugcgauaacugc

SEQ ID NO: 133396 - RNA, 14 nt, Human herpesvirus 3
gguuagaugcauau

SEQ ID NO: 133397 - RNA, 17 nt, Human herpesvirus 3
gguucagcggacgcugc

SEQ ID NO: 133398 - RNA, 14 nt, Human herpesvirus 3
gguuugcaaccuua

SEQ ID NO: 133399 - RNA, 17 nt, Human herpesvirus 3
gguuucuccguugcacg

SEQ ID NO: 133400 - RNA, 18 nt, Human herpesvirus 3
gguuucuccguugcacgu

SEQ ID NO: 133401 - RNA, 14 nt, Human herpesvirus 3
gguuuagcauuuua

SEQ ID NO: 133402 - RNA, 19 nt, Human herpesvirus 3
gguuuaacauuuugcgcau

SEQ ID NO: 133403 - RNA, 17 nt, Human herpesvirus 3
guaaaauaccauuguac

SEQ ID NO: 133404 - RNA, 18 nt, Human herpesvirus 3
guaaaauaccauuguaca

SEQ ID NO: 133405 - RNA, 17 nt, Human herpesvirus 3
guaaaaaccauggacag

SEQ ID NO: 133406 - RNA, 14 nt, Human herpesvirus 3
guaaaaacuuuaca

SEQ ID NO: 133407 - RNA, 15 nt, Human herpesvirus 3
guaaaaacuuuacag

SEQ ID NO: 133408 - RNA, 17 nt, Human herpesvirus 3
guaauucgugugcaaua

SEQ ID NO: 133409 - RNA, 22 nt, Human herpesvirus 3
guaagugcggcuucaccagagu

SEQ ID NO: 133410 - RNA, 15 nt, Human herpesvirus 3
guaauagauucgccu

SEQ ID NO: 133411 - RNA, 15 nt, Human herpesvirus 3
guaauaaaaugauau

SEQ ID NO: 133412 - RNA, 13 nt, Human herpesvirus 3
guaacguuuguaa

SEQ ID NO: 133413 - RNA, 22 nt, Human herpesvirus 3
guaacgguuuacccgguauuau

SEQ ID NO: 133414 - RNA, 19 nt, Human herpesvirus 3
guaacaugcgcuacuaugu

SEQ ID NO: 133415 - RNA, 13 nt, Human herpesvirus 3
guaaccuacacaa

SEQ ID NO: 133416 - RNA, 14 nt, Human herpesvirus 3
guaaaccguauaua

SEQ ID NO: 133417 - RNA, 19 nt, Human herpesvirus 3
guaaacguccgauguucca

SEQ ID NO: 133418 - RNA, 12 nt, Human herpesvirus 3
guaaaguuugaa

SEQ ID NO: 133419 - RNA, 14 nt, Human herpesvirus 3
gggacgacgugagg

SEQ ID NO: 133420 - RNA, 21 nt, Human herpesvirus 3
gggacccgcagcccagguacg

SEQ ID NO: 133421 - RNA, 19 nt, Human herpesvirus 3
ggguuuaacauuuugcgca

SEQ ID NO: 133422 - RNA, 20 nt, Human herpesvirus 3
ggguuuaacauuuugcgcau

SEQ ID NO: 133423 - RNA, 20 nt, Human herpesvirus 3
gguacaaacgcgcaauguuu

SEQ ID NO: 133424 - RNA, 20 nt, Human herpesvirus 3
gguacauuaaucgcugauaa

SEQ ID NO: 133425 - RNA, 15 nt, Human herpesvirus 3
gguaccaaaaacaca

SEQ ID NO: 133426 - RNA, 16 nt, Human herpesvirus 3
gguaccaaaaacacag

SEQ ID NO: 133427 - RNA, 19 nt, Human herpesvirus 3
gguaucaucuauugacgaa

SEQ ID NO: 133428 - RNA, 18 nt, Human herpesvirus 3
gguauacaugaacugcca

SEQ ID NO: 133429 - RNA, 13 nt, Human herpesvirus 3
ggucaacauacau

SEQ ID NO: 133430 - RNA, 19 nt, Human herpesvirus 3
gguaucguuagaugcccuc

SEQ ID NO: 133431 - RNA, 12 nt, Human herpesvirus 3
gguggcauuaaa

SEQ ID NO: 133432 - RNA, 20 nt, Human herpesvirus 3
ggugcaucgcauaggguguu

SEQ ID NO: 133433 - RNA, 15 nt, Human herpesvirus 3
ggugaguguacguaa

SEQ ID NO: 133434 - RNA, 18 nt, Human herpesvirus 3
ggugaugaaaucagagaa

SEQ ID NO: 133435 - RNA, 14 nt, Human herpesvirus 3
ggugaagaaggaca

SEQ ID NO: 133436 - RNA, 18 nt, Human herpesvirus 3
ggugaccggcgggguccc

SEQ ID NO: 133437 - RNA, 16 nt, Human herpesvirus 3
ggucguuuguauuuaa

SEQ ID NO: 133438 - RNA, 13 nt, Human herpesvirus 3
ggucugccguauu

SEQ ID NO: 133439 - RNA, 15 nt, Human herpesvirus 3
ggucugucauguuua

SEQ ID NO: 133440 - RNA, 20 nt, Human herpesvirus 3
ggucuuccuugggcuguuag

SEQ ID NO: 133441 - RNA, 17 nt, Human herpesvirus 3
ggauauuaaucgaacau

SEQ ID NO: 133442 - RNA, 18 nt, Human herpesvirus 3
gcuucaccagagucuucu

SEQ ID NO: 133443 - RNA, 17 nt, Human herpesvirus 3
gcuuccgaaagcaguca

SEQ ID NO: 133444 - RNA, 14 nt, Human herpesvirus 3
gcuugaauugccau

SEQ ID NO: 133445 - RNA, 21 nt, Human herpesvirus 3
ggacuuuaccggaucaugaac

SEQ ID NO: 133446 - RNA, 16 nt, Human herpesvirus 3
ggcaaauaggguacaa

SEQ ID NO: 133447 - RNA, 22 nt, Human herpesvirus 3
ggaucagaaagauugcagucau

SEQ ID NO: 133448 - RNA, 22 nt, Human herpesvirus 3
ggccgcuacccgaaagcccgau

SEQ ID NO: 133449 - RNA, 12 nt, Human herpesvirus 3
ggccgcuucccg

SEQ ID NO: 133450 - RNA, 22 nt, Human herpesvirus 3
ggccgcuucccgaaagcccgau

SEQ ID NO: 133451 - RNA, 16 nt, Human herpesvirus 3
ggcguagguagaugca

SEQ ID NO: 133452 - RNA, 18 nt, Human herpesvirus 3
ggcgucaggucugucaug

SEQ ID NO: 133453 - RNA, 17 nt, Human herpesvirus 3
ggcguccucuguuacau

SEQ ID NO: 133454 - RNA, 20 nt, Human herpesvirus 3
ggcuaacuguuugacaguuc

SEQ ID NO: 133455 - RNA, 12 nt, Human herpesvirus 3
ggcuaugccauu

SEQ ID NO: 133456 - RNA, 15 nt, Human herpesvirus 3
ggcuugagaugagca

SEQ ID NO: 133457 - RNA, 17 nt, Human herpesvirus 3
gcuauuuucaguauuaa

SEQ ID NO: 133458 - RNA, 19 nt, Human herpesvirus 3
gcuauuaaugguacaagaa

SEQ ID NO: 133459 - RNA, 14 nt, Human herpesvirus 3
gcugcugaagcuga

SEQ ID NO: 133460 - RNA, 14 nt, Human herpesvirus 3
gcuggcauuuccaa

SEQ ID NO: 133461 - RNA, 19 nt, Human herpesvirus 3
gcuggcauuuccaaacaca

SEQ ID NO: 133462 - RNA, 21 nt, Human herpesvirus 3
gcuccugugaggcuauuauau

SEQ ID NO: 133463 - RNA, 19 nt, Human herpesvirus 3
gcugccgucaaugcaacua

SEQ ID NO: 133464 - RNA, 15 nt, Human herpesvirus 3
gccuuuccgugacag

SEQ ID NO: 133465 - RNA, 15 nt, Human herpesvirus 3
gccuugggacaucaa

SEQ ID NO: 133466 - RNA, 14 nt, Human herpesvirus 3
gcggaugcauuuau

SEQ ID NO: 133467 - RNA, 14 nt, Human herpesvirus 3
gcgcggaugcauuu

SEQ ID NO: 133468 - RNA, 18 nt, Human herpesvirus 3
gcgggaugcaaacccauc

SEQ ID NO: 133469 - RNA, 19 nt, Human herpesvirus 3
gcguaaaauucgcacaccu

SEQ ID NO: 133470 - RNA, 20 nt, Human herpesvirus 3
gcguaaaauucgcacaccuu

SEQ ID NO: 133471 - RNA, 18 nt, Human herpesvirus 3
gcgggccuucgaugcgug

SEQ ID NO: 133472 - RNA, 21 nt, Human herpesvirus 3
gcguguauacaaacaaagccu

SEQ ID NO: 133473 - RNA, 15 nt, Human herpesvirus 3
gcguguaugcacaac

SEQ ID NO: 133474 - RNA, 14 nt, Human herpesvirus 3
gcgucuaugucgaa

SEQ ID NO: 133475 - RNA, 20 nt, Human herpesvirus 3
gcguaugaaauguaaucagu

SEQ ID NO: 133476 - RNA, 16 nt, Human herpesvirus 3
gcguccucuguuacau

SEQ ID NO: 133477 - RNA, 16 nt, Human herpesvirus 3
gcaaagcuacacuuuu

SEQ ID NO: 133478 - RNA, 18 nt, Human herpesvirus 3
gcaacacaucuacugucu

SEQ ID NO: 133479 - RNA, 22 nt, Human herpesvirus 3
gcaaccaucagaucaucugaca

SEQ ID NO: 133480 - RNA, 14 nt, Human herpesvirus 3
gcaacccugucauc

SEQ ID NO: 133481 - RNA, 14 nt, Human herpesvirus 3
gcaucguagguaua

SEQ ID NO: 133482 - RNA, 14 nt, Human herpesvirus 3
gcaacgcagauuac

SEQ ID NO: 133483 - RNA, 21 nt, Human herpesvirus 3
gcaugcgggcuugcuguucuc

SEQ ID NO: 133484 - RNA, 23 nt, Human herpesvirus 3
gcauuaacaacgcguacgugccu

SEQ ID NO: 133485 - RNA, 12 nt, Human herpesvirus 3
gccacauuuacc

SEQ ID NO: 133486 - RNA, 16 nt, Human herpesvirus 3
gccacaauaacauaag

SEQ ID NO: 133487 - RNA, 14 nt, Human herpesvirus 3
gcauuuccaaacac

SEQ ID NO: 133488 - RNA, 18 nt, Human herpesvirus 3
gccccgguucggugauca

SEQ ID NO: 133489 - RNA, 15 nt, Human herpesvirus 3
gccccaaaccacugu

SEQ ID NO: 133490 - RNA, 20 nt, Human herpesvirus 3
gcccccaacuuccccauaca

SEQ ID NO: 133491 - RNA, 14 nt, Human herpesvirus 3
gccauaaacagaga

SEQ ID NO: 133492 - RNA, 23 nt, Human herpesvirus 3
gccauaaacagagaucucuguua

SEQ ID NO: 133493 - RNA, 23 nt, Human herpesvirus 3
gccaucuggaguacuacacccag

SEQ ID NO: 133494 - RNA, 13 nt, Human herpesvirus 3
gccgucaaugcaa

SEQ ID NO: 133495 - RNA, 13 nt, Human herpesvirus 3
gccgcaacaaccc

SEQ ID NO: 133496 - RNA, 16 nt, Human herpesvirus 3
gccgcaacaacccauc

SEQ ID NO: 133497 - RNA, 14 nt, Human herpesvirus 3
gccgacaugccugg

SEQ ID NO: 133498 - RNA, 15 nt, Human herpesvirus 3
cuagaacgugcguua

SEQ ID NO: 133499 - RNA, 20 nt, Human herpesvirus 3
cuagaagaugguuaauaaua

SEQ ID NO: 133500 - RNA, 18 nt, Human herpesvirus 3
cuagaagcguuaccacag

SEQ ID NO: 133501 - RNA, 22 nt, Human herpesvirus 3
cuagaagcguuaccacaguucc

SEQ ID NO: 133502 - RNA, 23 nt, Human herpesvirus 3
cuagaugauguugauauccaaga

SEQ ID NO: 133503 - RNA, 23 nt, Human herpesvirus 3
cuaauuuguauuuuuaaucauua

SEQ ID NO: 133504 - RNA, 23 nt, Human herpesvirus 3
cuacaagcaagcguuaucacguc

SEQ ID NO: 133505 - RNA, 18 nt, Human herpesvirus 3
cuaggaacgcgacaugac

SEQ ID NO: 133506 - RNA, 21 nt, Human herpesvirus 3
cuauaaaaacauaacaccaga

SEQ ID NO: 133507 - RNA, 14 nt, Human herpesvirus 3
cuaguuacauuuca

SEQ ID NO: 133508 - RNA, 21 nt, Human herpesvirus 3
cuauagucaaauucaacuaau

SEQ ID NO: 133509 - RNA, 13 nt, Human herpesvirus 3
cuaugccauuuga

SEQ ID NO: 133510 - RNA, 16 nt, Human herpesvirus 3
cuauuggucguaaggg

SEQ ID NO: 133511 - RNA, 15 nt, Human herpesvirus 3
cuauuuucaguauua

SEQ ID NO: 133512 - RNA, 20 nt, Human herpesvirus 3
cucaugugggaaauacgucc

SEQ ID NO: 133513 - RNA, 20 nt, Human herpesvirus 3
cuccaaucgcguuaccaaac

SEQ ID NO: 133514 - RNA, 21 nt, Human herpesvirus 3
cucccuguugcgguuguuguc

SEQ ID NO: 133515 - RNA, 22 nt, Human herpesvirus 3
cggcuuuuaauuugaagacacc

SEQ ID NO: 133516 - RNA, 20 nt, Human herpesvirus 3
cgggauuacauugcuuucaa

SEQ ID NO: 133517 - RNA, 17 nt, Human herpesvirus 3
cgggaugcaaacccauc

SEQ ID NO: 133518 - RNA, 17 nt, Human herpesvirus 3
cggcuucuguaaggggg

SEQ ID NO: 133519 - RNA, 23 nt, Human herpesvirus 3
cggcguccucuguuacauucuca

SEQ ID NO: 133520 - RNA, 15 nt, Human herpesvirus 3
cgggguagacugugg

SEQ ID NO: 133521 - RNA, 14 nt, Human herpesvirus 3
cgggugaguguacg

SEQ ID NO: 133522 - RNA, 22 nt, Human herpesvirus 3
cgggcuguauugagaaaaccaa

SEQ ID NO: 133523 - RNA, 15 nt, Human herpesvirus 3
cgggcuguuguaaag

SEQ ID NO: 133524 - RNA, 15 nt, Human herpesvirus 3
cgggcuuuuccccca

SEQ ID NO: 133525 - RNA, 17 nt, Human herpesvirus 3
cgauuuuaucauugaag

SEQ ID NO: 133526 - RNA, 17 nt, Human herpesvirus 3
cgcaacgcugcugacaa

SEQ ID NO: 133527 - RNA, 20 nt, Human herpesvirus 3
cggaugccgacgucguuuga

SEQ ID NO: 133528 - RNA, 15 nt, Human herpesvirus 3
cggagguuauugucc

SEQ ID NO: 133529 - RNA, 22 nt, Human herpesvirus 3
cggaguaaccggggcauccugc

SEQ ID NO: 133530 - RNA, 14 nt, Human herpesvirus 3
cggcagaugaucug

SEQ ID NO: 133531 - RNA, 20 nt, Human herpesvirus 3
cggccgcuucccgaaagccc

SEQ ID NO: 133532 - RNA, 22 nt, Human herpesvirus 3
cguaauuugccccaaaccacug

SEQ ID NO: 133533 - RNA, 13 nt, Human herpesvirus 3
cguacaaauuucu

SEQ ID NO: 133534 - RNA, 12 nt, Human herpesvirus 3
cguacaacaaga

SEQ ID NO: 133535 - RNA, 17 nt, Human herpesvirus 3
cguaauauaacagaauu

SEQ ID NO: 133536 - RNA, 19 nt, Human herpesvirus 3
cgguuucuccguugcacgu

SEQ ID NO: 133537 - RNA, 20 nt, Human herpesvirus 3
cgguuguggacgcauuugau

SEQ ID NO: 133538 - RNA, 13 nt, Human herpesvirus 3
cguugaacaccau

SEQ ID NO: 133539 - RNA, 23 nt, Human herpesvirus 3
cguuguaccguuugcacaaucca

SEQ ID NO: 133540 - RNA, 11 nt, Human herpesvirus 3
cguugugauau

SEQ ID NO: 133541 - RNA, 17 nt, Human herpesvirus 3
cuaaagguauacuugga

SEQ ID NO: 133542 - RNA, 11 nt, Human herpesvirus 3
cgugugcaaua

SEQ ID NO: 133543 - RNA, 17 nt, Human herpesvirus 3
cguucuaauaaaaacau

SEQ ID NO: 133544 - RNA, 23 nt, Human herpesvirus 3
cguucgaauccuagaagcguuac

SEQ ID NO: 133545 - RNA, 19 nt, Human herpesvirus 3
cguuauauuuuacauacaa

SEQ ID NO: 133546 - RNA, 11 nt, Human herpesvirus 3
cuaacauuuau

SEQ ID NO: 133547 - RNA, 15 nt, Human herpesvirus 3
cuaacauuuauccca

SEQ ID NO: 133548 - RNA, 20 nt, Human herpesvirus 3
cuaauauucuacagauuuau

SEQ ID NO: 133549 - RNA, 16 nt, Human herpesvirus 3
cuaaccauaaugcaaa

SEQ ID NO: 133550 - RNA, 20 nt, Human herpesvirus 3
cuaaccauagacuguucuac

SEQ ID NO: 133551 - RNA, 23 nt, Human herpesvirus 3
cugaggguucaguaacuuaacaa

SEQ ID NO: 133552 - RNA, 17 nt, Human herpesvirus 3
cugaguucaaagcaacg

SEQ ID NO: 133553 - RNA, 19 nt, Human herpesvirus 3
cugagaagcaacaugacaa

SEQ ID NO: 133554 - RNA, 19 nt, Human herpesvirus 3
cugagauguugggucagaa

SEQ ID NO: 133555 - RNA, 17 nt, Human herpesvirus 3
cugacgaagagaacugu

SEQ ID NO: 133556 - RNA, 20 nt, Human herpesvirus 3
cugacgaagagaacugugaa

SEQ ID NO: 133557 - RNA, 18 nt, Human herpesvirus 3
cugaccauuuaccagugu

SEQ ID NO: 133558 - RNA, 23 nt, Human herpesvirus 3
cucuugcguaccauaauguuuuc

SEQ ID NO: 133559 - RNA, 13 nt, Human herpesvirus 3
cucuucaauguug

SEQ ID NO: 133560 - RNA, 14 nt, Human herpesvirus 3
cucuucaauguugc

SEQ ID NO: 133561 - RNA, 18 nt, Human herpesvirus 3
cuguaggucaacauacau

SEQ ID NO: 133562 - RNA, 18 nt, Human herpesvirus 3
cuggguugcgacauaccg

SEQ ID NO: 133563 - RNA, 21 nt, Human herpesvirus 3
cugggguauccggaaacacac

SEQ ID NO: 133564 - RNA, 20 nt, Human herpesvirus 3
cugggaacacguaauuguca

SEQ ID NO: 133565 - RNA, 13 nt, Human herpesvirus 3
cugauacuagcau

SEQ ID NO: 133566 - RNA, 17 nt, Human herpesvirus 3
cugaugccagaagcauu

SEQ ID NO: 133567 - RNA, 19 nt, Human herpesvirus 3
cugcauuacagaaauguga

SEQ ID NO: 133568 - RNA, 20 nt, Human herpesvirus 3
cugcuuuauuaccaacugua

SEQ ID NO: 133569 - RNA, 19 nt, Human herpesvirus 3
cugccaauauacacggaca

SEQ ID NO: 133570 - RNA, 20 nt, Human herpesvirus 3
cuucaagggcgaccacguga

SEQ ID NO: 133571 - RNA, 13 nt, Human herpesvirus 3
cuucaaguuaaau

SEQ ID NO: 133572 - RNA, 21 nt, Human herpesvirus 3
cuucaaguuaaauaacauguc

SEQ ID NO: 133573 - RNA, 17 nt, Human herpesvirus 3
cuucaacacacccauac

SEQ ID NO: 133574 - RNA, 23 nt, Human herpesvirus 3
cuucaacacacccauacagugac

SEQ ID NO: 133575 - RNA, 12 nt, Human herpesvirus 3
cuucacuggacu

SEQ ID NO: 133576 - RNA, 14 nt, Human herpesvirus 3
cugucaaguugcau

SEQ ID NO: 133577 - RNA, 13 nt, Human herpesvirus 3
cuuagaaaagcca

SEQ ID NO: 133578 - RNA, 14 nt, Human herpesvirus 3
cuuagaucaauaug

SEQ ID NO: 133579 - RNA, 17 nt, Human herpesvirus 3
cuuagaucaauauguca

SEQ ID NO: 133580 - RNA, 14 nt, Human herpesvirus 3
cuuguaaaacauau

SEQ ID NO: 133581 - RNA, 20 nt, Human herpesvirus 3
cuuggggguuuacaaguaca

SEQ ID NO: 133582 - RNA, 20 nt, Human herpesvirus 3
cuugaucgcggggguugugc

SEQ ID NO: 133583 - RNA, 20 nt, Human herpesvirus 3
cuugauacccucaaacacgg

SEQ ID NO: 133584 - RNA, 15 nt, Human herpesvirus 3
cuugacaacauuuaa

SEQ ID NO: 133585 - RNA, 18 nt, Human herpesvirus 3
cuugaaucugucuuuacg

SEQ ID NO: 133586 - RNA, 17 nt, Human herpesvirus 3
cuugacugugcucccug

SEQ ID NO: 133587 - RNA, 18 nt, Human herpesvirus 3
cuucggaugacuuugcau

SEQ ID NO: 133588 - RNA, 22 nt, Human herpesvirus 3
cuuccgaaaacaguugauguau

SEQ ID NO: 133589 - RNA, 15 nt, Human herpesvirus 3
cuuccguguggucca

SEQ ID NO: 133590 - RNA, 18 nt, Human herpesvirus 3
cuuccgcuaagucagaua

SEQ ID NO: 133591 - RNA, 19 nt, Human herpesvirus 3
cuucuugaagcguuuccag

SEQ ID NO: 133592 - RNA, 16 nt, Human herpesvirus 3
ccaccaucaucugauu

SEQ ID NO: 133593 - RNA, 15 nt, Human herpesvirus 3
aaaauguugucugcc

SEQ ID NO: 133594 - RNA, 18 nt, Human herpesvirus 3
aaaauguugucugccaaa

SEQ ID NO: 133595 - RNA, 18 nt, Human herpesvirus 3
aaaauuaaaacauugcug

SEQ ID NO: 133596 - RNA, 12 nt, Human herpesvirus 3
aaaaugauauac

SEQ ID NO: 133597 - RNA, 21 nt, Human herpesvirus 3
ccacauuuuccccuuuagcua

SEQ ID NO: 133598 - RNA, 16 nt, Human herpesvirus 3
aaaaucgucccauuua

SEQ ID NO: 133599 - RNA, 17 nt, Human herpesvirus 3
ccaaaauggaugcaaga

SEQ ID NO: 133600 - RNA, 11 nt, Human herpesvirus 3
ccaaaaacaca

SEQ ID NO: 133601 - RNA, 17 nt, Human herpesvirus 3
ccaaaaacacaguugau

SEQ ID NO: 133602 - RNA, 22 nt, Human herpesvirus 3
ccaaaaagaauuaaaaaagccg

SEQ ID NO: 133603 - RNA, 13 nt, Human herpesvirus 3
ccaacgaguguau

SEQ ID NO: 133604 - RNA, 13 nt, Human herpesvirus 3
ccacagucugcuu

SEQ ID NO: 133605 - RNA, 13 nt, Human herpesvirus 3
ccauacagugacc

SEQ ID NO: 133606 - RNA, 22 nt, Human herpesvirus 3
ccaucuaauaacaauuuaacau

SEQ ID NO: 133607 - RNA, 18 nt, Human herpesvirus 3
ccagucuaguuacauuuc

SEQ ID NO: 133608 - RNA, 15 nt, Human herpesvirus 3
cccaaccugcaaggc

SEQ ID NO: 133609 - RNA, 19 nt, Human herpesvirus 3
cccaacgaguguaugcgua

SEQ ID NO: 133610 - RNA, 20 nt, Human herpesvirus 3
cccaacgaguguaugcguau

SEQ ID NO: 133611 - RNA, 18 nt, Human herpesvirus 3
cccaacugauuacauuuc

SEQ ID NO: 133612 - RNA, 13 nt, Human herpesvirus 3
ccacgcuacaucc

SEQ ID NO: 133613 - RNA, 19 nt, Human herpesvirus 3
ccaguauaccggaguauaa

SEQ ID NO: 133614 - RNA, 13 nt, Human herpesvirus 3
ccacuuacaggac

SEQ ID NO: 133615 - RNA, 16 nt, Human herpesvirus 3
cauccacagucugcuu

SEQ ID NO: 133616 - RNA, 24 nt, Human herpesvirus 3
cauccaaauuaacccaagacgaca

SEQ ID NO: 133617 - RNA, 18 nt, Human herpesvirus 3
cauccgauaauaccaaac

SEQ ID NO: 133618 - RNA, 22 nt, Human herpesvirus 3
cauccgauaauaccaaacccca

SEQ ID NO: 133619 - RNA, 17 nt, Human herpesvirus 3
cauccugcucugcaaau

SEQ ID NO: 133620 - RNA, 14 nt, Human herpesvirus 3
cauccuggacacag

SEQ ID NO: 133621 - RNA, 17 nt, Human herpesvirus 3
cauccguccaaacagug

SEQ ID NO: 133622 - RNA, 22 nt, Human herpesvirus 3
cauccucgcgguccguuucaua

SEQ ID NO: 133623 - RNA, 15 nt, Human herpesvirus 3
caucgagguugucca

SEQ ID NO: 133624 - RNA, 14 nt, Human herpesvirus 3
caucuuacuugaga

SEQ ID NO: 133625 - RNA, 16 nt, Human herpesvirus 3
caucuuacuugagauu

SEQ ID NO: 133626 - RNA, 19 nt, Human herpesvirus 3
caugacaacggaaaacacg

SEQ ID NO: 133627 - RNA, 12 nt, Human herpesvirus 3
caucaaagucaa

SEQ ID NO: 133628 - RNA, 21 nt, Human herpesvirus 3
caucaaagucaaagucuucaa

SEQ ID NO: 133629 - RNA, 19 nt, Human herpesvirus 3
cauauguuccacucuacau

SEQ ID NO: 133630 - RNA, 15 nt, Human herpesvirus 3
caucaucugauuugc

SEQ ID NO: 133631 - RNA, 17 nt, Human herpesvirus 3
caucaucugauuugcaa

SEQ ID NO: 133632 - RNA, 20 nt, Human herpesvirus 3
cauuccaacuggaaaugugc

SEQ ID NO: 133633 - RNA, 17 nt, Human herpesvirus 3
cauugaagaugauuauc

SEQ ID NO: 133634 - RNA, 13 nt, Human herpesvirus 3
cauugcuucaaug

SEQ ID NO: 133635 - RNA, 12 nt, Human herpesvirus 3
cauugcuuucaa

SEQ ID NO: 133636 - RNA, 17 nt, Human herpesvirus 3
cauuguugguucuacug

SEQ ID NO: 133637 - RNA, 14 nt, Human herpesvirus 3
cauuuuacaguaaa

SEQ ID NO: 133638 - RNA, 18 nt, Human herpesvirus 3
cauuuuccccuuuagcua

SEQ ID NO: 133639 - RNA, 16 nt, Human herpesvirus 3
caugaugaaaaccugg

SEQ ID NO: 133640 - RNA, 20 nt, Human herpesvirus 3
cauggcuaugccauuugaga

SEQ ID NO: 133641 - RNA, 23 nt, Human herpesvirus 3
cauguauaaaauucuaacaacuc

SEQ ID NO: 133642 - RNA, 20 nt, Human herpesvirus 3
caugguugugggaaacauca

SEQ ID NO: 133643 - RNA, 23 nt, Human herpesvirus 3
cccacgauaaauggucuaaauac

SEQ ID NO: 133644 - RNA, 11 nt, Human herpesvirus 3
cccacauacaa

SEQ ID NO: 133645 - RNA, 13 nt, Human herpesvirus 3
cccacauuacugu

SEQ ID NO: 133646 - RNA, 18 nt, Human herpesvirus 3
cccaccaucaucugauuu

SEQ ID NO: 133647 - RNA, 23 nt, Human herpesvirus 3
ccgauauuguauuguaguacagg

SEQ ID NO: 133648 - RNA, 14 nt, Human herpesvirus 3
ccgauaauaccaaa

SEQ ID NO: 133649 - RNA, 15 nt, Human herpesvirus 3
ccgauaauaccaaac

SEQ ID NO: 133650 - RNA, 11 nt, Human herpesvirus 3
ccgacaugcac

SEQ ID NO: 133651 - RNA, 15 nt, Human herpesvirus 3
ccgccagauguacac

SEQ ID NO: 133652 - RNA, 19 nt, Human herpesvirus 3
ccggguggguggcauuaaa

SEQ ID NO: 133653 - RNA, 20 nt, Human herpesvirus 3
ccgggaucguggccuuggga

SEQ ID NO: 133654 - RNA, 17 nt, Human herpesvirus 3
ccuauuucaugcuugua

SEQ ID NO: 133655 - RNA, 16 nt, Human herpesvirus 3
ccgucaaugcaacuau

SEQ ID NO: 133656 - RNA, 16 nt, Human herpesvirus 3
ccggguuuuacguuaa

SEQ ID NO: 133657 - RNA, 18 nt, Human herpesvirus 3
ccgguaugccacauuuac

SEQ ID NO: 133658 - RNA, 14 nt, Human herpesvirus 3
ccugagguuuagca

SEQ ID NO: 133659 - RNA, 16 nt, Human herpesvirus 3
ccucuguacaacacaa

SEQ ID NO: 133660 - RNA, 16 nt, Human herpesvirus 3
ccuggccccuugaacc

SEQ ID NO: 133661 - RNA, 15 nt, Human herpesvirus 3
ccuggacacaguccg

SEQ ID NO: 133662 - RNA, 13 nt, Human herpesvirus 3
cgaaaagacugug

SEQ ID NO: 133663 - RNA, 14 nt, Human herpesvirus 3
cgaaaagacugugu

SEQ ID NO: 133664 - RNA, 18 nt, Human herpesvirus 3
cgaaggcgggaauuucca

SEQ ID NO: 133665 - RNA, 15 nt, Human herpesvirus 3
cgaaucguugguuag

SEQ ID NO: 133666 - RNA, 16 nt, Human herpesvirus 3
cgaagagaacugugaa

SEQ ID NO: 133667 - RNA, 17 nt, Human herpesvirus 3
cgaagcugccgucaaug

SEQ ID NO: 133668 - RNA, 15 nt, Human herpesvirus 3
cgaaaucguccacug

SEQ ID NO: 133669 - RNA, 20 nt, Human herpesvirus 3
cgagagauccaauacaucaa

SEQ ID NO: 133670 - RNA, 18 nt, Human herpesvirus 3
cgaccccaagaguuuucu

SEQ ID NO: 133671 - RNA, 16 nt, Human herpesvirus 3
cgacagcaguaagggu

SEQ ID NO: 133672 - RNA, 14 nt, Human herpesvirus 3
cgacaauccaauag

SEQ ID NO: 133673 - RNA, 21 nt, Human herpesvirus 3
cgaucauacgccgacaugccu

SEQ ID NO: 133674 - RNA, 18 nt, Human herpesvirus 3
cgauguuccaauggaugg

SEQ ID NO: 133675 - RNA, 17 nt, Human herpesvirus 3
cgaugugauacaaugag

SEQ ID NO: 133676 - RNA, 14 nt, Human herpesvirus 3
cgauuagucuguaa

SEQ ID NO: 133677 - RNA, 15 nt, Human herpesvirus 3
uuugaugagaaugua

SEQ ID NO: 133678 - RNA, 21 nt, Human herpesvirus 3
uuugauuacgcguugugauau

SEQ ID NO: 133679 - RNA, 15 nt, Human herpesvirus 3
uuugccccaaaccac

SEQ ID NO: 133680 - RNA, 18 nt, Human herpesvirus 3
uuugccccaaaccacugu

SEQ ID NO: 133681 - RNA, 21 nt, Human herpesvirus 3
uuugaaguguucuaaaacacu

SEQ ID NO: 133682 - RNA, 20 nt, Human herpesvirus 3
uuugaaucaucguaaacgua

SEQ ID NO: 133683 - RNA, 15 nt, Human herpesvirus 3
uuucugcucauggaa

SEQ ID NO: 133684 - RNA, 22 nt, Human herpesvirus 3
ugccucggaugcaccgguccaa

SEQ ID NO: 133685 - RNA, 18 nt, Human herpesvirus 3
ugccguauuuugcauaau

SEQ ID NO: 133686 - RNA, 16 nt, Human herpesvirus 3
ugccgucaaugcaacu

SEQ ID NO: 133687 - RNA, 23 nt, Human herpesvirus 3
ugccggcgaacgugauuugccca

SEQ ID NO: 133688 - RNA, 20 nt, Human herpesvirus 3
ugccguggaccccuguauua

SEQ ID NO: 133689 - RNA, 14 nt, Human herpesvirus 3
ugccccaaaccacu

SEQ ID NO: 133690 - RNA, 11 nt, Human herpesvirus 3
ugcgugauauu

SEQ ID NO: 133691 - RNA, 15 nt, Human herpesvirus 3
ugcggugcuguuuga

SEQ ID NO: 133692 - RNA, 13 nt, Human herpesvirus 3
ugcgcagauguac

SEQ ID NO: 133693 - RNA, 15 nt, Human herpesvirus 3
ugcauaagcucugua

SEQ ID NO: 133694 - RNA, 19 nt, Human herpesvirus 3
ugcauaucauaaauauuac

SEQ ID NO: 133695 - RNA, 21 nt, Human herpesvirus 3
ugcauauccagcaauguugaa

SEQ ID NO: 133696 - RNA, 17 nt, Human herpesvirus 3
ugauuugcaaacauauc

SEQ ID NO: 133697 - RNA, 16 nt, Human herpesvirus 3
ugccagaagcauuuac

SEQ ID NO: 133698 - RNA, 19 nt, Human herpesvirus 3
ugccauuuggacacuacuc

SEQ ID NO: 133699 - RNA, 16 nt, Human herpesvirus 3
ugcauaugacauaugc

SEQ ID NO: 133700 - RNA, 19 nt, Human herpesvirus 3
ugcaucccccauuguauga

SEQ ID NO: 133701 - RNA, 19 nt, Human herpesvirus 3
ugcauguguccguauguca

SEQ ID NO: 133702 - RNA, 22 nt, Human herpesvirus 3
ugcauguuaacgucgacguuau

SEQ ID NO: 133703 - RNA, 22 nt, Human herpesvirus 3
ugcauguuggcucggucugaua

SEQ ID NO: 133704 - RNA, 21 nt, Human herpesvirus 3
ucuguaauggaggugaacaga

SEQ ID NO: 133705 - RNA, 21 nt, Human herpesvirus 3
ucuggaguacuacacccagua

SEQ ID NO: 133706 - RNA, 17 nt, Human herpesvirus 3
ucuggagucuccaaaug

SEQ ID NO: 133707 - RNA, 13 nt, Human herpesvirus 3
ugaaaacguaaua

SEQ ID NO: 133708 - RNA, 15 nt, Human herpesvirus 3
ugaaaagaccgacag

SEQ ID NO: 133709 - RNA, 13 nt, Human herpesvirus 3
ugaaaaaucauua

SEQ ID NO: 133710 - RNA, 20 nt, Human herpesvirus 3
ugaaaaucgucccauuuaaa

SEQ ID NO: 133711 - RNA, 13 nt, Human herpesvirus 3
ugaaacaguaaaa

SEQ ID NO: 133712 - RNA, 17 nt, Human herpesvirus 3
ugaaacgucguuauauu

SEQ ID NO: 133713 - RNA, 20 nt, Human herpesvirus 3
ugaaacgucguuauauucac

SEQ ID NO: 133714 - RNA, 22 nt, Human herpesvirus 3
ugaaacgucguuauauucacau

SEQ ID NO: 133715 - RNA, 16 nt, Human herpesvirus 3
ugaaagagcuguccau

SEQ ID NO: 133716 - RNA, 19 nt, Human herpesvirus 3
ugaaagagcuguccaugau

SEQ ID NO: 133717 - RNA, 14 nt, Human herpesvirus 3
ugaaagcuaccacc

SEQ ID NO: 133718 - RNA, 20 nt, Human herpesvirus 3
ugaaguguucuaaaacacug

SEQ ID NO: 133719 - RNA, 17 nt, Human herpesvirus 3
ugaaugggaucuuccgc

SEQ ID NO: 133720 - RNA, 13 nt, Human herpesvirus 3
ugauuacuacaac

SEQ ID NO: 133721 - RNA, 19 nt, Human herpesvirus 3
ugauucggguaaaacacac

SEQ ID NO: 133722 - RNA, 22 nt, Human herpesvirus 3
ugauucuauauuaauaaaagac

SEQ ID NO: 133723 - RNA, 18 nt, Human herpesvirus 3
ugauaacagccuuuacuc

SEQ ID NO: 133724 - RNA, 12 nt, Human herpesvirus 3
ugauaaagggaa

SEQ ID NO: 133725 - RNA, 14 nt, Human herpesvirus 3
ugagggauggaugu

SEQ ID NO: 133726 - RNA, 15 nt, Human herpesvirus 3
ugaccgcuauuuuca

SEQ ID NO: 133727 - RNA, 13 nt, Human herpesvirus 3
ugacccuaugaca

SEQ ID NO: 133728 - RNA, 20 nt, Human herpesvirus 3
ugacccuaugacaugguuaa

SEQ ID NO: 133729 - RNA, 18 nt, Human herpesvirus 3
ugacccaccccacaugaa

SEQ ID NO: 133730 - RNA, 19 nt, Human herpesvirus 3
ugacccaccccacaugaau

SEQ ID NO: 133731 - RNA, 18 nt, Human herpesvirus 3
ugaccaacgcuuugaucu

SEQ ID NO: 133732 - RNA, 14 nt, Human herpesvirus 3
ucucccggaugaac

SEQ ID NO: 133733 - RNA, 19 nt, Human herpesvirus 3
ucuccauuacgcaucacag

SEQ ID NO: 133734 - RNA, 17 nt, Human herpesvirus 3
ucuccagaguacagggu

SEQ ID NO: 133735 - RNA, 17 nt, Human herpesvirus 3
ucuccacguagcaaagc

SEQ ID NO: 133736 - RNA, 18 nt, Human herpesvirus 3
ucuccccccgcgauuuau

SEQ ID NO: 133737 - RNA, 16 nt, Human herpesvirus 3
ucucaucaaagucaaa

SEQ ID NO: 133738 - RNA, 17 nt, Human herpesvirus 3
ucuccaaaugauguaac

SEQ ID NO: 133739 - RNA, 21 nt, Human herpesvirus 3
ucugcaaucauaaaugcaagu

SEQ ID NO: 133740 - RNA, 23 nt, Human herpesvirus 3
ucugcgaagcugccgucaaugca

SEQ ID NO: 133741 - RNA, 14 nt, Human herpesvirus 3
ucucaaaacuuaag

SEQ ID NO: 133742 - RNA, 22 nt, Human herpesvirus 3
ucuaauaaaaacaucaaaucau

SEQ ID NO: 133743 - RNA, 12 nt, Human herpesvirus 3
ucuaaaacacug

SEQ ID NO: 133744 - RNA, 15 nt, Human herpesvirus 3
ucuaaaacacuguca

SEQ ID NO: 133745 - RNA, 12 nt, Human herpesvirus 3
ucgugugcaaua

SEQ ID NO: 133746 - RNA, 15 nt, Human herpesvirus 3
ucguuauauucacau

SEQ ID NO: 133747 - RNA, 14 nt, Human herpesvirus 3
ucguuuaucacugu

SEQ ID NO: 133748 - RNA, 18 nt, Human herpesvirus 3
ucguuuugguguuacauc

SEQ ID NO: 133749 - RNA, 18 nt, Human herpesvirus 3
ucggucuggaauaauaua

SEQ ID NO: 133750 - RNA, 20 nt, Human herpesvirus 3
ucggguaaaacacacaccag

SEQ ID NO: 133751 - RNA, 17 nt, Human herpesvirus 3
ucggcgcggaugcauuu

SEQ ID NO: 133752 - RNA, 23 nt, Human herpesvirus 3
ucggaaacccucaagaauguaau

SEQ ID NO: 133753 - RNA, 20 nt, Human herpesvirus 3
ucggaugacuuugcauugga

SEQ ID NO: 133754 - RNA, 16 nt, Human herpesvirus 3
ucgguuagaugcauau

SEQ ID NO: 133755 - RNA, 21 nt, Human herpesvirus 3
ucgaaggcgggaauuuccaca

SEQ ID NO: 133756 - RNA, 16 nt, Human herpesvirus 3
ucgcgguccguuucau

SEQ ID NO: 133757 - RNA, 17 nt, Human herpesvirus 3
ucgcucguauaacagcu

SEQ ID NO: 133758 - RNA, 14 nt, Human herpesvirus 3
ucccauuuaaaguc

SEQ ID NO: 133759 - RNA, 14 nt, Human herpesvirus 3
ucccccacauacaa

SEQ ID NO: 133760 - RNA, 14 nt, Human herpesvirus 3
ucccgaaagcccga

SEQ ID NO: 133761 - RNA, 23 nt, Human herpesvirus 3
ucccgcuaacgugauuacuacaa

SEQ ID NO: 133762 - RNA, 21 nt, Human herpesvirus 3
uccgguauacaugaacugcca

SEQ ID NO: 133763 - RNA, 15 nt, Human herpesvirus 3
uccgugggguguuua

SEQ ID NO: 133764 - RNA, 23 nt, Human herpesvirus 3
uccgugaaauuucuacgcacauu

SEQ ID NO: 133765 - RNA, 14 nt, Human herpesvirus 3
uccgucaacugcaa

SEQ ID NO: 133766 - RNA, 14 nt, Human herpesvirus 3
uccggcaugcauug

SEQ ID NO: 133767 - RNA, 21 nt, Human herpesvirus 3
uccgccuauagcugucacugu

SEQ ID NO: 133768 - RNA, 21 nt, Human herpesvirus 3
uccgagggucgccuguaauau

SEQ ID NO: 133769 - RNA, 21 nt, Human herpesvirus 3
uccgaucgguuagaugcauau

SEQ ID NO: 133770 - RNA, 16 nt, Human herpesvirus 3
uccgauguuccaaugg

SEQ ID NO: 133771 - RNA, 18 nt, Human herpesvirus 3
uccgauguuccaauggau

SEQ ID NO: 133772 - RNA, 18 nt, Human herpesvirus 3
uccacaauuuaacaaacc

SEQ ID NO: 133773 - RNA, 15 nt, Human herpesvirus 3
ucauugaagaugauu

SEQ ID NO: 133774 - RNA, 12 nt, Human herpesvirus 3
ucauuaagcaua

SEQ ID NO: 133775 - RNA, 15 nt, Human herpesvirus 3
ucauuaaacgugcau

SEQ ID NO: 133776 - RNA, 15 nt, Human herpesvirus 3
ucaucugauuugcaa

SEQ ID NO: 133777 - RNA, 13 nt, Human herpesvirus 3
ucaugcuuguaaa

SEQ ID NO: 133778 - RNA, 17 nt, Human herpesvirus 3
ucaugcuuguaaaacau

SEQ ID NO: 133779 - RNA, 21 nt, Human herpesvirus 3
ucaugcuuguaaaacauauca

SEQ ID NO: 133780 - RNA, 12 nt, Human herpesvirus 3
ucaugcuuguca

SEQ ID NO: 133781 - RNA, 13 nt, Human herpesvirus 3
ucaugcuugucaa

SEQ ID NO: 133782 - RNA, 23 nt, Human herpesvirus 3
ucaugcuugucaaaacauacuaa

SEQ ID NO: 133783 - RNA, 14 nt, Human herpesvirus 3
ucaucauacgcauu

SEQ ID NO: 133784 - RNA, 14 nt, Human herpesvirus 3
ucaucaacguuaag

SEQ ID NO: 133785 - RNA, 21 nt, Human herpesvirus 3
ucacacaccccaguaaucuca

SEQ ID NO: 133786 - RNA, 19 nt, Human herpesvirus 3
ucacaaauuacuuacccuc

SEQ ID NO: 133787 - RNA, 22 nt, Human herpesvirus 3
ugguuagagaaagcggacacau

SEQ ID NO: 133788 - RNA, 15 nt, Human herpesvirus 3
ugguuagauaccuaa

SEQ ID NO: 133789 - RNA, 16 nt, Human herpesvirus 3
uguagcaucggauauu

SEQ ID NO: 133790 - RNA, 19 nt, Human herpesvirus 3
uguaucaauaaauuuacau

SEQ ID NO: 133791 - RNA, 21 nt, Human herpesvirus 3
uguaucaauaaauuuacauaa

SEQ ID NO: 133792 - RNA, 22 nt, Human herpesvirus 3
uguauaauaaaaagucacuaua

SEQ ID NO: 133793 - RNA, 20 nt, Human herpesvirus 3
ugucaacauggcuacaagga

SEQ ID NO: 133794 - RNA, 20 nt, Human herpesvirus 3
ugucaauaauaauuauaucc

SEQ ID NO: 133795 - RNA, 21 nt, Human herpesvirus 3
ugucaauaauaauuauaucca

SEQ ID NO: 133796 - RNA, 23 nt, Human herpesvirus 3
uguaugcacaacaaaagcuauau

SEQ ID NO: 133797 - RNA, 21 nt, Human herpesvirus 3
uguauguaaaauaaacugaau

SEQ ID NO: 133798 - RNA, 21 nt, Human herpesvirus 3
uguauuuuauuuagugauuac

SEQ ID NO: 133799 - RNA, 14 nt, Human herpesvirus 3
ugucaaaacauacu

SEQ ID NO: 133800 - RNA, 15 nt, Human herpesvirus 3
ugucaaaacauacua

SEQ ID NO: 133801 - RNA, 16 nt, Human herpesvirus 3
ugucaaaacauacuaa

SEQ ID NO: 133802 - RNA, 18 nt, Human herpesvirus 3
ugucuacgugguaccaaa

SEQ ID NO: 133803 - RNA, 21 nt, Human herpesvirus 3
ugucuacuuagcggacaugcu

SEQ ID NO: 133804 - RNA, 17 nt, Human herpesvirus 3
ugugacguuauauaucc

SEQ ID NO: 133805 - RNA, 18 nt, Human herpesvirus 3
ugugauacuacaucgugc

SEQ ID NO: 133806 - RNA, 17 nt, Human herpesvirus 3
ugucgcgcguguaugca

SEQ ID NO: 133807 - RNA, 22 nt, Human herpesvirus 3
ugucgaugauacacauaugcac

SEQ ID NO: 133808 - RNA, 18 nt, Human herpesvirus 3
uggcuaugccauuugaga

SEQ ID NO: 133809 - RNA, 21 nt, Human herpesvirus 3
ugcuaaccauagacuguucua

SEQ ID NO: 133810 - RNA, 22 nt, Human herpesvirus 3
ugcuaaccauagacuguucuac

SEQ ID NO: 133811 - RNA, 20 nt, Human herpesvirus 3
ugcuacgucgaugugaucca

SEQ ID NO: 133812 - RNA, 14 nt, Human herpesvirus 3
uggauuauauccau

SEQ ID NO: 133813 - RNA, 23 nt, Human herpesvirus 3
ugggucugccguauuuugcauaa

SEQ ID NO: 133814 - RNA, 19 nt, Human herpesvirus 3
ugggugcaugggauuuuaa

SEQ ID NO: 133815 - RNA, 18 nt, Human herpesvirus 3
ugggcgggauuacauugc

SEQ ID NO: 133816 - RNA, 18 nt, Human herpesvirus 3
uguuuuaauuccaauauu

SEQ ID NO: 133817 - RNA, 17 nt, Human herpesvirus 3
uguuuacggcagucuga

SEQ ID NO: 133818 - RNA, 20 nt, Human herpesvirus 3
uguuuaugugauucuauauu

SEQ ID NO: 133819 - RNA, 15 nt, Human herpesvirus 3
uguuguugcuaguau

SEQ ID NO: 133820 - RNA, 13 nt, Human herpesvirus 3
uguuuaagaacau

SEQ ID NO: 133821 - RNA, 16 nt, Human herpesvirus 3
uguuuaacaaccauaa

SEQ ID NO: 133822 - RNA, 15 nt, Human herpesvirus 3
uguuuacacuugaau

SEQ ID NO: 133823 - RNA, 17 nt, Human herpesvirus 3
uguugguuaacaccgcc

SEQ ID NO: 133824 - RNA, 16 nt, Human herpesvirus 3
uguugcuguuguccaa

SEQ ID NO: 133825 - RNA, 20 nt, Human herpesvirus 3
uuaaacauccacagucugcu

SEQ ID NO: 133826 - RNA, 24 nt, Human herpesvirus 3
uuaaacaaauacgaucagaugaua

SEQ ID NO: 133827 - RNA, 23 nt, Human herpesvirus 3
uuaaacaacauggcuaugccauu

SEQ ID NO: 133828 - RNA, 19 nt, Human herpesvirus 3
uuaaaacaaguggaugaua

SEQ ID NO: 133829 - RNA, 22 nt, Human herpesvirus 3
uguuauaaaucguuuaucacug

SEQ ID NO: 133830 - RNA, 21 nt, Human herpesvirus 3
ugugaucuauuaacaggaccu

SEQ ID NO: 133831 - RNA, 22 nt, Human herpesvirus 3
uguucccgcacacguuuacacg

SEQ ID NO: 133832 - RNA, 16 nt, Human herpesvirus 3
uguuaucgauuguccc

SEQ ID NO: 133833 - RNA, 18 nt, Human herpesvirus 3
uguucucauuucuagguu

SEQ ID NO: 133834 - RNA, 18 nt, Human herpesvirus 3
uguucuccugcaggccau

SEQ ID NO: 133835 - RNA, 14 nt, Human herpesvirus 3
uguucuaaaacacu

SEQ ID NO: 133836 - RNA, 14 nt, Human herpesvirus 3
uguucuauuuccca

SEQ ID NO: 133837 - RNA, 15 nt, Human herpesvirus 3
uguucuauuucccaa

SEQ ID NO: 133838 - RNA, 21 nt, Human herpesvirus 3
uuacaggccggaguguccaga

SEQ ID NO: 133839 - RNA, 14 nt, Human herpesvirus 3
uuacauagauacuc

SEQ ID NO: 133840 - RNA, 11 nt, Human herpesvirus 3
uuacuuuacaa

SEQ ID NO: 133841 - RNA, 17 nt, Human herpesvirus 3
uuaauuuuacaauauca

SEQ ID NO: 133842 - RNA, 17 nt, Human herpesvirus 3
uuaaccgcgacagccaa

SEQ ID NO: 133843 - RNA, 14 nt, Human herpesvirus 3
uuaacaaaauaguc

SEQ ID NO: 133844 - RNA, 21 nt, Human herpesvirus 3
uuaaauaacaugucacaucau

SEQ ID NO: 133845 - RNA, 17 nt, Human herpesvirus 3
uuaaagagccauuucca

SEQ ID NO: 133846 - RNA, 20 nt, Human herpesvirus 3
uugaagacaucgaugaagua

SEQ ID NO: 133847 - RNA, 19 nt, Human herpesvirus 3
uugaagauaggguguauac

SEQ ID NO: 133848 - RNA, 22 nt, Human herpesvirus 3
uugaaguguucuaaaacacugu

SEQ ID NO: 133849 - RNA, 23 nt, Human herpesvirus 3
uugaaguuuucagcaaguuuaac

SEQ ID NO: 133850 - RNA, 20 nt, Human herpesvirus 3
uugaaacgucguuauauuca

SEQ ID NO: 133851 - RNA, 22 nt, Human herpesvirus 3
uugagauagagguauuguuacc

SEQ ID NO: 133852 - RNA, 14 nt, Human herpesvirus 3
uugagauuuggaua

SEQ ID NO: 133853 - RNA, 11 nt, Human herpesvirus 3
uugcuguucuc

SEQ ID NO: 133854 - RNA, 13 nt, Human herpesvirus 3
uugcuguugucca

SEQ ID NO: 133855 - RNA, 20 nt, Human herpesvirus 3
uugccacgccgggggaacau

SEQ ID NO: 133856 - RNA, 23 nt, Human herpesvirus 3
uugcauuacccuaucccaguauu

SEQ ID NO: 133857 - RNA, 19 nt, Human herpesvirus 3
uugcauaauauuuacacgu

SEQ ID NO: 133858 - RNA, 14 nt, Human herpesvirus 3
uucgaauuguucug

SEQ ID NO: 133859 - RNA, 22 nt, Human herpesvirus 3
uuccccggaaauauaacauaca

SEQ ID NO: 133860 - RNA, 22 nt, Human herpesvirus 3
uuccgaaagcagucaacccauc

SEQ ID NO: 133861 - RNA, 15 nt, Human herpesvirus 3
uuccgaaucucguaa

SEQ ID NO: 133862 - RNA, 20 nt, Human herpesvirus 3
uucacuaaaaucacuuugau

SEQ ID NO: 133863 - RNA, 14 nt, Human herpesvirus 3
uucagucuaaaaau

SEQ ID NO: 133864 - RNA, 13 nt, Human herpesvirus 3
uucaguacuuaaa

SEQ ID NO: 133865 - RNA, 18 nt, Human herpesvirus 3
uucauuuuauuaucccag

SEQ ID NO: 133866 - RNA, 22 nt, Human herpesvirus 3
uucaugcuugucaaaacauacu

SEQ ID NO: 133867 - RNA, 16 nt, Human herpesvirus 3
uuggguguugugaucu

SEQ ID NO: 133868 - RNA, 22 nt, Human herpesvirus 3
uuggguauuuauaauuaccgcc

SEQ ID NO: 133869 - RNA, 19 nt, Human herpesvirus 3
uugguaaaaacuuuacaga

SEQ ID NO: 133870 - RNA, 13 nt, Human herpesvirus 3
uugggacaucaac

SEQ ID NO: 133871 - RNA, 16 nt, Human herpesvirus 3
uugcuuucaaaccaau

SEQ ID NO: 133872 - RNA, 14 nt, Human herpesvirus 3
uugguuacugugaa

SEQ ID NO: 133873 - RNA, 23 nt, Human herpesvirus 3
uugguuagagaaagcggacacau

SEQ ID NO: 133874 - RNA, 15 nt, Human herpesvirus 3
uuguaaaacauauca

SEQ ID NO: 133875 - RNA, 23 nt, Human herpesvirus 3
uuuaaaaauaccugaguguugcu

SEQ ID NO: 133876 - RNA, 23 nt, Human herpesvirus 3
uuguucuggguugcgacauaccg

SEQ ID NO: 133877 - RNA, 19 nt, Human herpesvirus 3
uuguuggcgcaugccauug

SEQ ID NO: 133878 - RNA, 21 nt, Human herpesvirus 3
uuguuggcgcaugccauuggc

SEQ ID NO: 133879 - RNA, 14 nt, Human herpesvirus 3
uuguugugucccga

SEQ ID NO: 133880 - RNA, 13 nt, Human herpesvirus 3
uuguggugaagaa

SEQ ID NO: 133881 - RNA, 16 nt, Human herpesvirus 3
uuguggacgcauuuga

SEQ ID NO: 133882 - RNA, 14 nt, Human herpesvirus 3
uuguggacuuaccu

SEQ ID NO: 133883 - RNA, 15 nt, Human herpesvirus 3
uuguggaguuuccca

SEQ ID NO: 133884 - RNA, 21 nt, Human herpesvirus 3
uuguggauccggcaugcauug

SEQ ID NO: 133885 - RNA, 15 nt, Human herpesvirus 3
uuuaagugacuauau

SEQ ID NO: 133886 - RNA, 20 nt, Human herpesvirus 3
uuuaagacguccacacagcc

SEQ ID NO: 133887 - RNA, 20 nt, Human herpesvirus 3
uuuaacggaagaugaacuaa

SEQ ID NO: 133888 - RNA, 20 nt, Human herpesvirus 3
uuuaacauaccccaggccuu

SEQ ID NO: 133889 - RNA, 17 nt, Human herpesvirus 3
uuuaacccgcguauuau

SEQ ID NO: 133890 - RNA, 12 nt, Human herpesvirus 3
uuuauuaccaca

SEQ ID NO: 133891 - RNA, 19 nt, Human herpesvirus 3
uuuauuaaagcuguuucuc

SEQ ID NO: 133892 - RNA, 21 nt, Human herpesvirus 3
uuuaucaauuguuuaugugau

SEQ ID NO: 133893 - RNA, 20 nt, Human herpesvirus 3
uuuauauucacgccaguuga

SEQ ID NO: 133894 - RNA, 14 nt, Human herpesvirus 3
uuuauauacaaaau

SEQ ID NO: 133895 - RNA, 20 nt, Human herpesvirus 3
uuuaucauugaagaugauua

SEQ ID NO: 133896 - RNA, 15 nt, Human herpesvirus 3
uuuauacguauguca

SEQ ID NO: 133897 - RNA, 18 nt, Human herpesvirus 3
uuuauaauuaugugucua

SEQ ID NO: 133898 - RNA, 13 nt, Human herpesvirus 3
uuuauaaaacacu

SEQ ID NO: 133899 - RNA, 18 nt, Human herpesvirus 3
uuuacguauguaccagua

SEQ ID NO: 133900 - RNA, 17 nt, Human herpesvirus 3
uuuacguguauaucuaa

SEQ ID NO: 133901 - RNA, 14 nt, Human herpesvirus 3
uuuagaauuuccaa

SEQ ID NO: 133902 - RNA, 19 nt, Human herpesvirus 3
uuuagcuauagauaauuca

SEQ ID NO: 133903 - RNA, 15 nt, Human herpesvirus 3
uuuaggaaucaagac

SEQ ID NO: 133904 - RNA, 19 nt, Human herpesvirus 3
uuucccaaaaggauauuca

SEQ ID NO: 133905 - RNA, 21 nt, Human herpesvirus 3
uuucaugcuugucaaaacaua

SEQ ID NO: 133906 - RNA, 14 nt, Human herpesvirus 3
uuucauuaggauga

SEQ ID NO: 133907 - RNA, 13 nt, Human herpesvirus 3
uuucauauguuga

SEQ ID NO: 133908 - RNA, 14 nt, Human herpesvirus 3
uuuccgaauuuugc

SEQ ID NO: 133909 - RNA, 17 nt, Human herpesvirus 3
uuuccuagccacaccca

SEQ ID NO: 133910 - RNA, 21 nt, Human herpesvirus 3
guacacgauucggaaugcccg

SEQ ID NO: 133911 - RNA, 15 nt, Human herpesvirus 3
guacagauacgugga

SEQ ID NO: 133912 - RNA, 20 nt, Human herpesvirus 3
guaacagcgacuauguuugc

SEQ ID NO: 133913 - RNA, 21 nt, Human herpesvirus 3
guaauuugccccaaaccacug

SEQ ID NO: 133914 - RNA, 22 nt, Human herpesvirus 3
guaccauuugauacguuguuca

SEQ ID NO: 133915 - RNA, 21 nt, Human herpesvirus 3
guaccccaaggcccauauccc

SEQ ID NO: 133916 - RNA, 12 nt, Human herpesvirus 3
guaccacguggu

SEQ ID NO: 133917 - RNA, 13 nt, Human herpesvirus 3
guacaucuuucag

SEQ ID NO: 133918 - RNA, 17 nt, Human herpesvirus 3
guacauuaaaguauuug

SEQ ID NO: 133919 - RNA, 14 nt, Human herpesvirus 3
guaccaaaaacaca

SEQ ID NO: 133920 - RNA, 17 nt, Human herpesvirus 3
guaccaaaaacacaguu

SEQ ID NO: 133921 - RNA, 12 nt, Human herpesvirus 3
guagccagccaa

SEQ ID NO: 133922 - RNA, 23 nt, Human herpesvirus 3
guagccagccaacacaguguuca

SEQ ID NO: 133923 - RNA, 19 nt, Human herpesvirus 3
guagagcccacacaaucag

SEQ ID NO: 133924 - RNA, 15 nt, Human herpesvirus 3
guauuauacauaacc

SEQ ID NO: 133925 - RNA, 15 nt, Human herpesvirus 3
guauuauaugucaca

SEQ ID NO: 133926 - RNA, 21 nt, Human herpesvirus 3
guauucucuacaauacuuuau

SEQ ID NO: 133927 - RNA, 17 nt, Human herpesvirus 3
guaugaucguccuucaa

SEQ ID NO: 133928 - RNA, 22 nt, Human herpesvirus 3
guauuacagacauacacuggua

SEQ ID NO: 133929 - RNA, 15 nt, Human herpesvirus 3
guauccgaagccuuu

SEQ ID NO: 133930 - RNA, 16 nt, Human herpesvirus 3
guauccggaaacacac

SEQ ID NO: 133931 - RNA, 15 nt, Human herpesvirus 3
guaggucaacauaca

SEQ ID NO: 133932 - RNA, 15 nt, Human herpesvirus 3
guaggaauaaacugu

SEQ ID NO: 133933 - RNA, 17 nt, Human herpesvirus 3
gggguggaucacuccaa

SEQ ID NO: 133934 - RNA, 13 nt, Human herpesvirus 3
gggucaauggagu

SEQ ID NO: 133935 - RNA, 13 nt, Human herpesvirus 3
gguagacuguggc

SEQ ID NO: 133936 - RNA, 16 nt, Human herpesvirus 3
ggggaugggggucgca

SEQ ID NO: 133937 - RNA, 16 nt, Human herpesvirus 3
ggcguuucguuuguau

SEQ ID NO: 133938 - RNA, 13 nt, Human herpesvirus 3
ggcuaugccauuu

SEQ ID NO: 133939 - RNA, 19 nt, Human herpesvirus 3
ggugagaauaccaaaaaga

SEQ ID NO: 133940 - RNA, 20 nt, Human herpesvirus 3
gguauuccaaacgaaggcac

SEQ ID NO: 133941 - RNA, 20 nt, Human herpesvirus 3
ggucaaguuuauacguacau

SEQ ID NO: 133942 - RNA, 15 nt, Human herpesvirus 3
guaaaacauaucaau

SEQ ID NO: 133943 - RNA, 21 nt, Human herpesvirus 3
ggugccauucuccacgugagg

SEQ ID NO: 133944 - RNA, 21 nt, Human herpesvirus 3
ggugcgauuuaaccaccaaaa

SEQ ID NO: 133945 - RNA, 13 nt, Human herpesvirus 3
ggugcaugggauu

SEQ ID NO: 133946 - RNA, 14 nt, Human herpesvirus 3
guaaaauaaacuga

SEQ ID NO: 133947 - RNA, 18 nt, Human herpesvirus 3
guaaaauaaacugaauuu

SEQ ID NO: 133948 - RNA, 21 nt, Human herpesvirus 3
guaaaauugcgcgaguuccca

SEQ ID NO: 133949 - RNA, 24 nt, Human herpesvirus 3
guaaaggcacgcugugugcauaac

SEQ ID NO: 133950 - RNA, 17 nt, Human herpesvirus 3
guaaagguccauuuaac

SEQ ID NO: 133951 - RNA, 18 nt, Human herpesvirus 3
guccucuguuacauucuc

SEQ ID NO: 133952 - RNA, 20 nt, Human herpesvirus 3
guccuucaacacacccauac

SEQ ID NO: 133953 - RNA, 16 nt, Human herpesvirus 3
gucuccaaccauucag

SEQ ID NO: 133954 - RNA, 15 nt, Human herpesvirus 3
gucuccagaguacag

SEQ ID NO: 133955 - RNA, 22 nt, Human herpesvirus 3
gucugauagcgccaaaauggau

SEQ ID NO: 133956 - RNA, 16 nt, Human herpesvirus 3
gucugaccauuuacca

SEQ ID NO: 133957 - RNA, 15 nt, Human herpesvirus 3
gucugacgugguaag

SEQ ID NO: 133958 - RNA, 22 nt, Human herpesvirus 3
gucuggaauaauauauggcgcc

SEQ ID NO: 133959 - RNA, 22 nt, Human herpesvirus 3
gucugcucuucuacgagaauau

SEQ ID NO: 133960 - RNA, 15 nt, Human herpesvirus 3
gucugcuuuauuacc

SEQ ID NO: 133961 - RNA, 14 nt, Human herpesvirus 3
gucuguaauggagg

SEQ ID NO: 133962 - RNA, 21 nt, Human herpesvirus 3
gugacccugcuaaccauagac

SEQ ID NO: 133963 - RNA, 21 nt, Human herpesvirus 3
gugauacaaugagcgguggua

SEQ ID NO: 133964 - RNA, 18 nt, Human herpesvirus 3
gugagguguccugugauc

SEQ ID NO: 133965 - RNA, 22 nt, Human herpesvirus 3
gugcauauccagcaauguugaa

SEQ ID NO: 133966 - RNA, 20 nt, Human herpesvirus 3
gugcaucccccauuguauga

SEQ ID NO: 133967 - RNA, 22 nt, Human herpesvirus 3
gugcguauuggcgagccauuuu

SEQ ID NO: 133968 - RNA, 14 nt, Human herpesvirus 3
gugcgggguuggug

SEQ ID NO: 133969 - RNA, 13 nt, Human herpesvirus 3
gugcggucucccg

SEQ ID NO: 133970 - RNA, 15 nt, Human herpesvirus 3
gcuguacguaaccau

SEQ ID NO: 133971 - RNA, 12 nt, Human herpesvirus 3
gcuguacaccgc

SEQ ID NO: 133972 - RNA, 20 nt, Human herpesvirus 3
gcuguauugagaaaaccaaa

SEQ ID NO: 133973 - RNA, 15 nt, Human herpesvirus 3
gcuugagaugagcag

SEQ ID NO: 133974 - RNA, 14 nt, Human herpesvirus 3
gcuugcuguucuca

SEQ ID NO: 133975 - RNA, 14 nt, Human herpesvirus 3
gcuugcagcuuguc

SEQ ID NO: 133976 - RNA, 15 nt, Human herpesvirus 3
gcucaaucaauccaa

SEQ ID NO: 133977 - RNA, 18 nt, Human herpesvirus 3
gcuauuggcuccacucca

SEQ ID NO: 133978 - RNA, 13 nt, Human herpesvirus 3
gcugaauuucacg

SEQ ID NO: 133979 - RNA, 13 nt, Human herpesvirus 3
gcugauacauaaa

SEQ ID NO: 133980 - RNA, 21 nt, Human herpesvirus 3
gcccaccucggccgcuucccg

SEQ ID NO: 133981 - RNA, 18 nt, Human herpesvirus 3
gccauuacuaaagcuauu

SEQ ID NO: 133982 - RNA, 18 nt, Human herpesvirus 3
gcccccuggacauguguu

SEQ ID NO: 133983 - RNA, 21 nt, Human herpesvirus 3
gcccccaacuuccccauacac

SEQ ID NO: 133984 - RNA, 24 nt, Human herpesvirus 3
gcguuguucugcauaagcucugua

SEQ ID NO: 133985 - RNA, 16 nt, Human herpesvirus 3
gcguuuuguaccucua

SEQ ID NO: 133986 - RNA, 17 nt, Human herpesvirus 3
gcuaaccauaaugcaaa

SEQ ID NO: 133987 - RNA, 10 nt, Human herpesvirus 3
ggacaguagu

SEQ ID NO: 133988 - RNA, 19 nt, Human herpesvirus 3
ggaauuuaggaggcugcaa

SEQ ID NO: 133989 - RNA, 14 nt, Human herpesvirus 3
ggaaucgucuaaca

SEQ ID NO: 133990 - RNA, 16 nt, Human herpesvirus 3
ggaaucuacggauacg

SEQ ID NO: 133991 - RNA, 15 nt, Human herpesvirus 3
ggaaggaaaugccuu

SEQ ID NO: 133992 - RNA, 22 nt, Human herpesvirus 3
ggaaaguuguuggcgcaugcca

SEQ ID NO: 133993 - RNA, 23 nt, Human herpesvirus 3
ggaaaguuguuggcgcaugccau

SEQ ID NO: 133994 - RNA, 15 nt, Human herpesvirus 3
ggaaacuauuccaaa

SEQ ID NO: 133995 - RNA, 23 nt, Human herpesvirus 3
ggacaguuaauaaaccuguggug

SEQ ID NO: 133996 - RNA, 14 nt, Human herpesvirus 3
ggacauaaacggca

SEQ ID NO: 133997 - RNA, 14 nt, Human herpesvirus 3
ggacuuuaccggau

SEQ ID NO: 133998 - RNA, 13 nt, Human herpesvirus 3
ggcgagacuugau

SEQ ID NO: 133999 - RNA, 13 nt, Human herpesvirus 3
ggcgaccacguga

SEQ ID NO: 134000 - RNA, 18 nt, Human herpesvirus 3
ggcgugucacgacaaaaa

SEQ ID NO: 134001 - RNA, 21 nt, Human herpesvirus 3
ggcguguuuuuuugucauaaa

SEQ ID NO: 134002 - RNA, 21 nt, Human herpesvirus 3
ggccgcuacccgaaagcccga

SEQ ID NO: 134003 - RNA, 21 nt, Human herpesvirus 3
ggccgcuucccgaaagcccga

SEQ ID NO: 134004 - RNA, 16 nt, Human herpesvirus 3
ggaggucuacagcacc

SEQ ID NO: 134005 - RNA, 20 nt, Human herpesvirus 3
ggagggggaaggaaaugccu

SEQ ID NO: 134006 - RNA, 13 nt, Human herpesvirus 3
ggagugggguguu

SEQ ID NO: 134007 - RNA, 15 nt, Human herpesvirus 3
ggaguguccagauau

SEQ ID NO: 134008 - RNA, 18 nt, Human herpesvirus 3
ggaguucaaaagaauuuu

SEQ ID NO: 134009 - RNA, 22 nt, Human herpesvirus 3
ggcacgcgggcuguauugagaa

SEQ ID NO: 134010 - RNA, 13 nt, Human herpesvirus 3
ggcagaagguuua

SEQ ID NO: 134011 - RNA, 18 nt, Human herpesvirus 3
ggcauaccgaaugcgauu

SEQ ID NO: 134012 - RNA, 18 nt, Human herpesvirus 3
ucaauauuuauacaagca

SEQ ID NO: 134013 - RNA, 13 nt, Human herpesvirus 3
ucaauggcgguga

SEQ ID NO: 134014 - RNA, 12 nt, Human herpesvirus 3
ucaaguugcaug

SEQ ID NO: 134015 - RNA, 22 nt, Human herpesvirus 3
ucaagugagguguccugugauc

SEQ ID NO: 134016 - RNA, 14 nt, Human herpesvirus 3
ucaauaaauguacu

SEQ ID NO: 134017 - RNA, 21 nt, Human herpesvirus 3
ucaaacgaugccugagguuua

SEQ ID NO: 134018 - RNA, 14 nt, Human herpesvirus 3
ucaaagucuucaaa

SEQ ID NO: 134019 - RNA, 16 nt, Human herpesvirus 3
ucaaagucuucaaaga

SEQ ID NO: 134020 - RNA, 22 nt, Human herpesvirus 3
ucaacacgggcugaagaguuuc

SEQ ID NO: 134021 - RNA, 11 nt, Human herpesvirus 3
ucaacauacau

SEQ ID NO: 134022 - RNA, 18 nt, Human herpesvirus 3
ucaacgcucuuugggauu

SEQ ID NO: 134023 - RNA, 16 nt, Human herpesvirus 3
uauuauaugucacaua

SEQ ID NO: 134024 - RNA, 22 nt, Human herpesvirus 3
uauuaucaggagauacuauggu

SEQ ID NO: 134025 - RNA, 14 nt, Human herpesvirus 3
uauuaaugguacaa

SEQ ID NO: 134026 - RNA, 15 nt, Human herpesvirus 3
uauuaccaacuguau

SEQ ID NO: 134027 - RNA, 12 nt, Human herpesvirus 3
uauuacauuuaa

SEQ ID NO: 134028 - RNA, 16 nt, Human herpesvirus 3
uauuauaaauguguau

SEQ ID NO: 134029 - RNA, 17 nt, Human herpesvirus 3
uauugagaaaaccaaag

SEQ ID NO: 134030 - RNA, 19 nt, Human herpesvirus 3
uauugagaaaaccaaagac

SEQ ID NO: 134031 - RNA, 16 nt, Human herpesvirus 3
uauucuuuuggggaca

SEQ ID NO: 134032 - RNA, 17 nt, Human herpesvirus 3
uauucuacagauuuauu

SEQ ID NO: 134033 - RNA, 19 nt, Human herpesvirus 3
uauuggucaagauccauac

SEQ ID NO: 134034 - RNA, 18 nt, Human herpesvirus 3
uauuggcuccacuccagg

SEQ ID NO: 134035 - RNA, 15 nt, Human herpesvirus 3
uauuucaugcuugua

SEQ ID NO: 134036 - RNA, 15 nt, Human herpesvirus 3
uauuuaaacuaaaga

SEQ ID NO: 134037 - RNA, 11 nt, Human herpesvirus 3
uauuucccaac

SEQ ID NO: 134038 - RNA, 14 nt, Human herpesvirus 3
uauuuuauauaggu

SEQ ID NO: 134039 - RNA, 21 nt, Human herpesvirus 3
uauuuguugguuaacaccgcc

SEQ ID NO: 134040 - RNA, 22 nt, Human herpesvirus 3
uauuuuuaaucauuaagcauau

SEQ ID NO: 134041 - RNA, 15 nt, Human herpesvirus 3
uauuuugcagccaug

SEQ ID NO: 134042 - RNA, 15 nt, Human herpesvirus 3
uauuuugcauaauau

SEQ ID NO: 134043 - RNA, 13 nt, Human herpesvirus 3
uauuuucugugua

SEQ ID NO: 134044 - RNA, 13 nt, Human herpesvirus 3
uaugugauucuau

SEQ ID NO: 134045 - RNA, 12 nt, Human herpesvirus 3
uauuaaagcugu

SEQ ID NO: 134046 - RNA, 16 nt, Human herpesvirus 3
uauuaaauaaacuaua

SEQ ID NO: 134047 - RNA, 14 nt, Human herpesvirus 3
uaucuuugcaauuc

SEQ ID NO: 134048 - RNA, 15 nt, Human herpesvirus 3
uaugaacgccuguga

SEQ ID NO: 134049 - RNA, 18 nt, Human herpesvirus 3
uaucuuccguguggucca

SEQ ID NO: 134050 - RNA, 20 nt, Human herpesvirus 3
uaugaucguccuucaacaca

SEQ ID NO: 134051 - RNA, 15 nt, Human herpesvirus 3
uaucuggaacccaag

SEQ ID NO: 134052 - RNA, 21 nt, Human herpesvirus 3
uaucuggaacccaagguguaa

SEQ ID NO: 134053 - RNA, 17 nt, Human herpesvirus 3
uaucggcggcagaugau

SEQ ID NO: 134054 - RNA, 13 nt, Human herpesvirus 3
uauaaucuccagu

SEQ ID NO: 134055 - RNA, 16 nt, Human herpesvirus 3
uauacaagcauaacau

SEQ ID NO: 134056 - RNA, 14 nt, Human herpesvirus 3
uauacaaacaaagc

SEQ ID NO: 134057 - RNA, 23 nt, Human herpesvirus 3
uauaauuacgcaguaacgguuua

SEQ ID NO: 134058 - RNA, 16 nt, Human herpesvirus 3
uaucaauaaauuuaca

SEQ ID NO: 134059 - RNA, 21 nt, Human herpesvirus 3
uagccgucagaagguucacua

SEQ ID NO: 134060 - RNA, 15 nt, Human herpesvirus 3
uagccacacccacaa

SEQ ID NO: 134061 - RNA, 18 nt, Human herpesvirus 3
uagccacacccacaaagg

SEQ ID NO: 134062 - RNA, 15 nt, Human herpesvirus 3
uaggggggguuacau

SEQ ID NO: 134063 - RNA, 12 nt, Human herpesvirus 3
uagguagaugca

SEQ ID NO: 134064 - RNA, 14 nt, Human herpesvirus 3
uagguagaugcauc

SEQ ID NO: 134065 - RNA, 22 nt, Human herpesvirus 3
uauaaguggggguuuaauuuca

SEQ ID NO: 134066 - RNA, 14 nt, Human herpesvirus 3
uauaacggcgauca

SEQ ID NO: 134067 - RNA, 18 nt, Human herpesvirus 3
uauaaauucuacaacauu

SEQ ID NO: 134068 - RNA, 13 nt, Human herpesvirus 3
uauaaaacacuca

SEQ ID NO: 134069 - RNA, 16 nt, Human herpesvirus 3
uauaaauguguauuau

SEQ ID NO: 134070 - RNA, 22 nt, Human herpesvirus 3
uauaaauguguauuauauguca

SEQ ID NO: 134071 - RNA, 23 nt, Human herpesvirus 3
uauaaauguguauuauaugucac

SEQ ID NO: 134072 - RNA, 21 nt, Human herpesvirus 3
uauaaacggccgaaaacggag

SEQ ID NO: 134073 - RNA, 16 nt, Human herpesvirus 3
uauaaacguauucucu

SEQ ID NO: 134074 - RNA, 16 nt, Human herpesvirus 3
uaguaccacgugguau

SEQ ID NO: 134075 - RNA, 15 nt, Human herpesvirus 3
uagguuuugucuuaa

SEQ ID NO: 134076 - RNA, 15 nt, Human herpesvirus 3
uaggucaacauacau

SEQ ID NO: 134077 - RNA, 21 nt, Human herpesvirus 3
uacgcggguuuuuguaaaggg

SEQ ID NO: 134078 - RNA, 11 nt, Human herpesvirus 3
uacgcacauua

SEQ ID NO: 134079 - RNA, 14 nt, Human herpesvirus 3
uacgccgacaugcc

SEQ ID NO: 134080 - RNA, 15 nt, Human herpesvirus 3
uacgccgacaugccu

SEQ ID NO: 134081 - RNA, 16 nt, Human herpesvirus 3
uacgccgacaugccug

SEQ ID NO: 134082 - RNA, 19 nt, Human herpesvirus 3
uacguagaauuuacagugu

SEQ ID NO: 134083 - RNA, 17 nt, Human herpesvirus 3
uacccgauaauauacaa

SEQ ID NO: 134084 - RNA, 16 nt, Human herpesvirus 3
uacccuauaggcuuua

SEQ ID NO: 134085 - RNA, 20 nt, Human herpesvirus 3
uaccccaaggcccauauccc

SEQ ID NO: 134086 - RNA, 20 nt, Human herpesvirus 3
uaccggaucaugaacaaaca

SEQ ID NO: 134087 - RNA, 23 nt, Human herpesvirus 3
uacacccgguaugccacauuuac

SEQ ID NO: 134088 - RNA, 14 nt, Human herpesvirus 3
uacaagcauaacau

SEQ ID NO: 134089 - RNA, 21 nt, Human herpesvirus 3
uacacauccuggacacagucc

SEQ ID NO: 134090 - RNA, 16 nt, Human herpesvirus 3
uacaccuuugcaugac

SEQ ID NO: 134091 - RNA, 18 nt, Human herpesvirus 3
uaccacuaagaacuuuau

SEQ ID NO: 134092 - RNA, 19 nt, Human herpesvirus 3
uaccacggcgauuauaugu

SEQ ID NO: 134093 - RNA, 21 nt, Human herpesvirus 3
uaccacgugguauuaugaaca

SEQ ID NO: 134094 - RNA, 15 nt, Human herpesvirus 3
uaccauagaugaaca

SEQ ID NO: 134095 - RNA, 15 nt, Human herpesvirus 3
uacauugcuuucaaa

SEQ ID NO: 134096 - RNA, 23 nt, Human herpesvirus 3
uacaacaaccgucgucuaucgca

SEQ ID NO: 134097 - RNA, 14 nt, Human herpesvirus 3
uaauuauauccaua

SEQ ID NO: 134098 - RNA, 19 nt, Human herpesvirus 3
uaauuaaugcaaccaucag

SEQ ID NO: 134099 - RNA, 20 nt, Human herpesvirus 3
uaaugguacaagaaaccaug

SEQ ID NO: 134100 - RNA, 19 nt, Human herpesvirus 3
uaaugcaacccugucauca

SEQ ID NO: 134101 - RNA, 15 nt, Human herpesvirus 3
uaaucuccagugcca

SEQ ID NO: 134102 - RNA, 19 nt, Human herpesvirus 3
uaauaaauaaacguauaaa

SEQ ID NO: 134103 - RNA, 18 nt, Human herpesvirus 3
uaauaaaaacacaaccag

SEQ ID NO: 134104 - RNA, 21 nt, Human herpesvirus 3
uaauacgguucaugacauuau

SEQ ID NO: 134105 - RNA, 15 nt, Human herpesvirus 3
uaauccuuaucuugc

SEQ ID NO: 134106 - RNA, 13 nt, Human herpesvirus 3
uaaucgaacauug

SEQ ID NO: 134107 - RNA, 13 nt, Human herpesvirus 3
uaauccaauguuu

SEQ ID NO: 134108 - RNA, 18 nt, Human herpesvirus 3
uaauccacgguauuccaa

SEQ ID NO: 134109 - RNA, 15 nt, Human herpesvirus 3
uaaucauuaagcaua

SEQ ID NO: 134110 - RNA, 19 nt, Human herpesvirus 3
uaauauuaacaggauuugc

SEQ ID NO: 134111 - RNA, 20 nt, Human herpesvirus 3
uaauauaaauaacauaacca

SEQ ID NO: 134112 - RNA, 12 nt, Human herpesvirus 3
uaauagucaaug

SEQ ID NO: 134113 - RNA, 19 nt, Human herpesvirus 3
uaauauauggcgccaucca

SEQ ID NO: 134114 - RNA, 20 nt, Human herpesvirus 3
uaauauauggcgccauccau

SEQ ID NO: 134115 - RNA, 16 nt, Human herpesvirus 3
uaaaagcguacuguuu

SEQ ID NO: 134116 - RNA, 16 nt, Human herpesvirus 3
uaaaaucacuuugaua

SEQ ID NO: 134117 - RNA, 17 nt, Human herpesvirus 3
uaaaaucacuuugauau

SEQ ID NO: 134118 - RNA, 17 nt, Human herpesvirus 3
uaaacguauucuauuaa

SEQ ID NO: 134119 - RNA, 23 nt, Human herpesvirus 3
uaaacgugcauuuuaaaaauacc

SEQ ID NO: 134120 - RNA, 10 nt, Human herpesvirus 3
uaaacuauau

SEQ ID NO: 134121 - RNA, 21 nt, Human herpesvirus 3
uaaacuguuuaaauaguacca

SEQ ID NO: 134122 - RNA, 11 nt, Human herpesvirus 3
uaaaaaagccg

SEQ ID NO: 134123 - RNA, 21 nt, Human herpesvirus 3
guuuuuauuagaacguuuauc

SEQ ID NO: 134124 - RNA, 13 nt, Human herpesvirus 3
uaaaaacuuuaca

SEQ ID NO: 134125 - RNA, 17 nt, Human herpesvirus 3
uaaaaagaugauacaca

SEQ ID NO: 134126 - RNA, 12 nt, Human herpesvirus 3
uaaaaacauaca

SEQ ID NO: 134127 - RNA, 16 nt, Human herpesvirus 3
uaaaaacggauauuaa

SEQ ID NO: 134128 - RNA, 22 nt, Human herpesvirus 3
uaaauaguaccacgugguauua

SEQ ID NO: 134129 - RNA, 13 nt, Human herpesvirus 3
uaaauaacauguc

SEQ ID NO: 134130 - RNA, 20 nt, Human herpesvirus 3
uaaauaccuauuucaugcuu

SEQ ID NO: 134131 - RNA, 22 nt, Human herpesvirus 3
uaaagguuuauuccggagccua

SEQ ID NO: 134132 - RNA, 23 nt, Human herpesvirus 3
uaaagucguuuauaucuguuaca

SEQ ID NO: 134133 - RNA, 18 nt, Human herpesvirus 3
uaaauaaaaccuuaccac

SEQ ID NO: 134134 - RNA, 15 nt, Human herpesvirus 3
uaaauaaacuauaug

SEQ ID NO: 134135 - RNA, 14 nt, Human herpesvirus 3
uaaccauaaugcaa

SEQ ID NO: 134136 - RNA, 18 nt, Human herpesvirus 3
uaaccauagacuguucua

SEQ ID NO: 134137 - RNA, 19 nt, Human herpesvirus 3
uaacccccgaggcaguuca

SEQ ID NO: 134138 - RNA, 16 nt, Human herpesvirus 3
uaacccggucugcuca

SEQ ID NO: 134139 - RNA, 23 nt, Human herpesvirus 3
uaaccggcgaacuucaguacuua

SEQ ID NO: 134140 - RNA, 22 nt, Human herpesvirus 3
uaaccggguggguggcauuaaa

SEQ ID NO: 134141 - RNA, 18 nt, Human herpesvirus 3
uaacaugcgcuacuaugu

SEQ ID NO: 134142 - RNA, 16 nt, Human herpesvirus 3
uaacagcgacuauguu

SEQ ID NO: 134143 - RNA, 23 nt, Human herpesvirus 3
uaacaggaccugugcaagacgau

SEQ ID NO: 134144 - RNA, 18 nt, Human herpesvirus 3
uaacaggauuugcuuaua

SEQ ID NO: 134145 - RNA, 17 nt, Human herpesvirus 3
uaacagucuaacaguac

SEQ ID NO: 134146 - RNA, 18 nt, Human herpesvirus 3
uaacauaccccaggccuu

SEQ ID NO: 134147 - RNA, 18 nt, Human herpesvirus 3
uaagaagugcauauccag

SEQ ID NO: 134148 - RNA, 17 nt, Human herpesvirus 3
uaagacguccacacagc

SEQ ID NO: 134149 - RNA, 16 nt, Human herpesvirus 3
uaaccuguccauuugc

SEQ ID NO: 134150 - RNA, 13 nt, Human herpesvirus 3
uaaccuacacaac

SEQ ID NO: 134151 - RNA, 20 nt, Human herpesvirus 3
uaacggaagaugaacuaaua

SEQ ID NO: 134152 - RNA, 17 nt, Human herpesvirus 3
uaagggagucuacaaua

SEQ ID NO: 134153 - RNA, 20 nt, Human herpesvirus 3
uaagaggauaggugucuuca

SEQ ID NO: 134154 - RNA, 16 nt, Human herpesvirus 3
uaagauguacuguguc

SEQ ID NO: 134155 - RNA, 22 nt, Human herpesvirus 3
cuguuccaggcgagacuugaua

SEQ ID NO: 134156 - RNA, 19 nt, Human herpesvirus 3
cuguuaauaaaauauugua

SEQ ID NO: 134157 - RNA, 18 nt, Human herpesvirus 3
cugucgucauauuacauu

SEQ ID NO: 134158 - RNA, 23 nt, Human herpesvirus 3
cuuaaaggccgagcugguauaca

SEQ ID NO: 134159 - RNA, 13 nt, Human herpesvirus 3
cuguuuguuguua

SEQ ID NO: 134160 - RNA, 11 nt, Human herpesvirus 3
cuguuuacacu

SEQ ID NO: 134161 - RNA, 19 nt, Human herpesvirus 3
cuguucuuuaagacgucca

SEQ ID NO: 134162 - RNA, 13 nt, Human herpesvirus 3
cuuagaucaauau

SEQ ID NO: 134163 - RNA, 14 nt, Human herpesvirus 3
cuuaaggcggugac

SEQ ID NO: 134164 - RNA, 14 nt, Human herpesvirus 3
cuuaacgagagauc

SEQ ID NO: 134165 - RNA, 22 nt, Human herpesvirus 3
cuuaacagugccagugcuccca

SEQ ID NO: 134166 - RNA, 11 nt, Human herpesvirus 3
cuuacaccccc

SEQ ID NO: 134167 - RNA, 12 nt, Human herpesvirus 3
cuugaauugcca

SEQ ID NO: 134168 - RNA, 14 nt, Human herpesvirus 3
cuugacaacauuua

SEQ ID NO: 134169 - RNA, 17 nt, Human herpesvirus 3
cuucggaugacuuugca

SEQ ID NO: 134170 - RNA, 14 nt, Human herpesvirus 3
cuucaguacuuaaa

SEQ ID NO: 134171 - RNA, 12 nt, Human herpesvirus 3
cuucaccagagu

SEQ ID NO: 134172 - RNA, 16 nt, Human herpesvirus 3
cuuccgcuaagucaga

SEQ ID NO: 134173 - RNA, 15 nt, Human herpesvirus 3
cuucccgaaagcccg

SEQ ID NO: 134174 - RNA, 18 nt, Human herpesvirus 3
cuucaaagaacucugagu

SEQ ID NO: 134175 - RNA, 17 nt, Human herpesvirus 3
cucucuaacccaacucu

SEQ ID NO: 134176 - RNA, 17 nt, Human herpesvirus 3
cucugcgaugcauuaac

SEQ ID NO: 134177 - RNA, 21 nt, Human herpesvirus 3
cucugauucggguaaaacaca

SEQ ID NO: 134178 - RNA, 24 nt, Human herpesvirus 3
cucccuguugcgguuguuguccag

SEQ ID NO: 134179 - RNA, 20 nt, Human herpesvirus 3
cucccauuccaaaugcgcaa

SEQ ID NO: 134180 - RNA, 15 nt, Human herpesvirus 3
cugaguucaaagcaa

SEQ ID NO: 134181 - RNA, 14 nt, Human herpesvirus 3
cugauagcgccaaa

SEQ ID NO: 134182 - RNA, 19 nt, Human herpesvirus 3
cugauagcgccaaaaugga

SEQ ID NO: 134183 - RNA, 13 nt, Human herpesvirus 3
cugauaaacccug

SEQ ID NO: 134184 - RNA, 23 nt, Human herpesvirus 3
cugaagcugacgaagagaacugu

SEQ ID NO: 134185 - RNA, 17 nt, Human herpesvirus 3
cugaagacuccaguaua

SEQ ID NO: 134186 - RNA, 19 nt, Human herpesvirus 3
cugaaaaucgucccauuua

SEQ ID NO: 134187 - RNA, 13 nt, Human herpesvirus 3
cugcuaaccauag

SEQ ID NO: 134188 - RNA, 16 nt, Human herpesvirus 3
cugcucugcaaauaca

SEQ ID NO: 134189 - RNA, 20 nt, Human herpesvirus 3
cugcauaagcucuguaugcu

SEQ ID NO: 134190 - RNA, 20 nt, Human herpesvirus 3
cuggauaugggauuauggaa

SEQ ID NO: 134191 - RNA, 15 nt, Human herpesvirus 3
cuggguuauuuaaca

SEQ ID NO: 134192 - RNA, 18 nt, Human herpesvirus 3
cuguauugagaaaaccaa

SEQ ID NO: 134193 - RNA, 13 nt, Human herpesvirus 3
cugucaaccauag

SEQ ID NO: 134194 - RNA, 14 nt, Human herpesvirus 3
cugucaucagacau

SEQ ID NO: 134195 - RNA, 13 nt, Human herpesvirus 3
cugucagaaacac

SEQ ID NO: 134196 - RNA, 15 nt, Human herpesvirus 3
cguguauaagagggc

SEQ ID NO: 134197 - RNA, 18 nt, Human herpesvirus 3
cgugguuauuacauuuaa

SEQ ID NO: 134198 - RNA, 18 nt, Human herpesvirus 3
cgugguaccaaaaacaca

SEQ ID NO: 134199 - RNA, 18 nt, Human herpesvirus 3
cuaacgugauuacuacaa

SEQ ID NO: 134200 - RNA, 22 nt, Human herpesvirus 3
cuaacguuuuaguaaaauacca

SEQ ID NO: 134201 - RNA, 23 nt, Human herpesvirus 3
cuaacguuuuaguaaaauaccau

SEQ ID NO: 134202 - RNA, 20 nt, Human herpesvirus 3
cuaaauuacaaaaauuugag

SEQ ID NO: 134203 - RNA, 21 nt, Human herpesvirus 3
cuaaauuacaaaaauuugaga

SEQ ID NO: 134204 - RNA, 17 nt, Human herpesvirus 3
cgguucaaaggcauuac

SEQ ID NO: 134205 - RNA, 16 nt, Human herpesvirus 3
cgucuguguauaucau

SEQ ID NO: 134206 - RNA, 13 nt, Human herpesvirus 3
cgucuaacauuaa

SEQ ID NO: 134207 - RNA, 16 nt, Human herpesvirus 3
cgucucaaaacuuaag

SEQ ID NO: 134208 - RNA, 14 nt, Human herpesvirus 3
cguccgauguucca

SEQ ID NO: 134209 - RNA, 18 nt, Human herpesvirus 3
cguccucuguuacauucu

SEQ ID NO: 134210 - RNA, 21 nt, Human herpesvirus 3
cggauagcauaaggaaaugca

SEQ ID NO: 134211 - RNA, 15 nt, Human herpesvirus 3
cggaugcauaggguu

SEQ ID NO: 134212 - RNA, 17 nt, Human herpesvirus 3
cgggcuugcuguucuca

SEQ ID NO: 134213 - RNA, 22 nt, Human herpesvirus 3
cgggcuuuucccccacauacaa

SEQ ID NO: 134214 - RNA, 23 nt, Human herpesvirus 3
cggaagauacaggcaacugcaaa

SEQ ID NO: 134215 - RNA, 17 nt, Human herpesvirus 3
cggaagaugaacuaaua

SEQ ID NO: 134216 - RNA, 18 nt, Human herpesvirus 3
cggacaauuaacacagaa

SEQ ID NO: 134217 - RNA, 17 nt, Human herpesvirus 3
cggaaauauaacauaca

SEQ ID NO: 134218 - RNA, 20 nt, Human herpesvirus 3
cgaagcugccgucaaugcaa

SEQ ID NO: 134219 - RNA, 19 nt, Human herpesvirus 3
cgaauucuuagaaaagcca

SEQ ID NO: 134220 - RNA, 23 nt, Human herpesvirus 3
cuauuucaugcuuguaaaacaua

SEQ ID NO: 134221 - RNA, 20 nt, Human herpesvirus 3
cuauaaaaacauaacaccag

SEQ ID NO: 134222 - RNA, 22 nt, Human herpesvirus 3
cuauaucccacgauaaaugguc

SEQ ID NO: 134223 - RNA, 20 nt, Human herpesvirus 3
cucauaauaugauacauaaa

SEQ ID NO: 134224 - RNA, 12 nt, Human herpesvirus 3
cucacugcuaua

SEQ ID NO: 134225 - RNA, 15 nt, Human herpesvirus 3
cuacgugguaccaaa

SEQ ID NO: 134226 - RNA, 16 nt, Human herpesvirus 3
cuacgugguaccaaaa

SEQ ID NO: 134227 - RNA, 16 nt, Human herpesvirus 3
cuacucccacccacug

SEQ ID NO: 134228 - RNA, 18 nt, Human herpesvirus 3
cuacaacggaaaauguag

SEQ ID NO: 134229 - RNA, 20 nt, Human herpesvirus 3
cuacaacggaaaauguagug

SEQ ID NO: 134230 - RNA, 14 nt, Human herpesvirus 3
cuaauguuguucag

SEQ ID NO: 134231 - RNA, 13 nt, Human herpesvirus 3
cuacagauuuauu

SEQ ID NO: 134232 - RNA, 17 nt, Human herpesvirus 3
cuacaugcggugcuguu

SEQ ID NO: 134233 - RNA, 20 nt, Human herpesvirus 3
gaccaacgcuuugaucuuca

SEQ ID NO: 134234 - RNA, 14 nt, Human herpesvirus 3
gaccacgugagcuu

SEQ ID NO: 134235 - RNA, 13 nt, Human herpesvirus 3
gacaugcacugca

SEQ ID NO: 134236 - RNA, 15 nt, Human herpesvirus 3
gacaugcacugcauc

SEQ ID NO: 134237 - RNA, 21 nt, Human herpesvirus 3
gacaugauugauggauguuua

SEQ ID NO: 134238 - RNA, 17 nt, Human herpesvirus 3
gacaucgcugaugccag

SEQ ID NO: 134239 - RNA, 16 nt, Human herpesvirus 3
gacauaauuaaugcaa

SEQ ID NO: 134240 - RNA, 20 nt, Human herpesvirus 3
gacauaugucugcucuucua

SEQ ID NO: 134241 - RNA, 19 nt, Human herpesvirus 3
gaccgcuggaugaagauug

SEQ ID NO: 134242 - RNA, 17 nt, Human herpesvirus 3
gacccugcuaaccauag

SEQ ID NO: 134243 - RNA, 12 nt, Human herpesvirus 3
gacuacaagcaa

SEQ ID NO: 134244 - RNA, 18 nt, Human herpesvirus 3
gacguuauacaagguguu

SEQ ID NO: 134245 - RNA, 17 nt, Human herpesvirus 3
gacguuauauaucccaa

SEQ ID NO: 134246 - RNA, 13 nt, Human herpesvirus 3
gacuaacauuuau

SEQ ID NO: 134247 - RNA, 22 nt, Human herpesvirus 3
gagcgcauuggcaucuuacuug

SEQ ID NO: 134248 - RNA, 21 nt, Human herpesvirus 3
gagcggucuguguaccgccau

SEQ ID NO: 134249 - RNA, 22 nt, Human herpesvirus 3
gacuuuucaucauacgcauuua

SEQ ID NO: 134250 - RNA, 19 nt, Human herpesvirus 3
gacuugacgcgaacaccgc

SEQ ID NO: 134251 - RNA, 17 nt, Human herpesvirus 3
gacagugcuugacugug

SEQ ID NO: 134252 - RNA, 18 nt, Human herpesvirus 3
gacagugcuugacugugc

SEQ ID NO: 134253 - RNA, 22 nt, Human herpesvirus 3
gacaguggcggauaacugccug

SEQ ID NO: 134254 - RNA, 23 nt, Human herpesvirus 3
gacagauucaagacuaacauuua

SEQ ID NO: 134255 - RNA, 18 nt, Human herpesvirus 3
gaauucuuagaaaagcca

SEQ ID NO: 134256 - RNA, 16 nt, Human herpesvirus 3
gaauuucuaugugcag

SEQ ID NO: 134257 - RNA, 21 nt, Human herpesvirus 3
gaauugaugaucccaauaaac

SEQ ID NO: 134258 - RNA, 16 nt, Human herpesvirus 3
gaauuuacaguguucu

SEQ ID NO: 134259 - RNA, 21 nt, Human herpesvirus 3
gaauguaauucgugugcaaua

SEQ ID NO: 134260 - RNA, 20 nt, Human herpesvirus 3
gaaguguucuaaaacacugu

SEQ ID NO: 134261 - RNA, 16 nt, Human herpesvirus 3
gaauaaacgacacaaa

SEQ ID NO: 134262 - RNA, 15 nt, Human herpesvirus 3
gaagugcauauccag

SEQ ID NO: 134263 - RNA, 22 nt, Human herpesvirus 3
gaaugcgauucgcggcaguuau

SEQ ID NO: 134264 - RNA, 21 nt, Human herpesvirus 3
gaauaccaaaaagaauuaaaa

SEQ ID NO: 134265 - RNA, 21 nt, Human herpesvirus 3
gaauaauuuuaaggcaaggaa

SEQ ID NO: 134266 - RNA, 15 nt, Human herpesvirus 3
gaagagaacugugaa

SEQ ID NO: 134267 - RNA, 16 nt, Human herpesvirus 3
gaagaaggacaguugg

SEQ ID NO: 134268 - RNA, 14 nt, Human herpesvirus 3
gaacucgccuccac

SEQ ID NO: 134269 - RNA, 15 nt, Human herpesvirus 3
gaacuacugaacucc

SEQ ID NO: 134270 - RNA, 22 nt, Human herpesvirus 3
gaacguuuccuagccacaccca

SEQ ID NO: 134271 - RNA, 19 nt, Human herpesvirus 3
gaaaucguccacuuaucca

SEQ ID NO: 134272 - RNA, 22 nt, Human herpesvirus 3
gaaaucguccacuuauccaaca

SEQ ID NO: 134273 - RNA, 18 nt, Human herpesvirus 3
gaaaugccuuaaacaucc

SEQ ID NO: 134274 - RNA, 19 nt, Human herpesvirus 3
gaaaugccuuaaacaucca

SEQ ID NO: 134275 - RNA, 16 nt, Human herpesvirus 3
gaaaugcaauauuacu

SEQ ID NO: 134276 - RNA, 19 nt, Human herpesvirus 3
gaacagcaacggaugcaua

SEQ ID NO: 134277 - RNA, 15 nt, Human herpesvirus 3
gaaauauaacauaca

SEQ ID NO: 134278 - RNA, 16 nt, Human herpesvirus 3
gaaauaaaaacuaaaa

SEQ ID NO: 134279 - RNA, 19 nt, Human herpesvirus 3
cuugguaaaaacuuuacag

SEQ ID NO: 134280 - RNA, 20 nt, Human herpesvirus 3
cuugguaaaaacuuuacaga

SEQ ID NO: 134281 - RNA, 13 nt, Human herpesvirus 3
cuuguaaaacaua

SEQ ID NO: 134282 - RNA, 16 nt, Human herpesvirus 3
cuuguaaaacauauca

SEQ ID NO: 134283 - RNA, 11 nt, Human herpesvirus 3
cuugacugugc

SEQ ID NO: 134284 - RNA, 17 nt, Human herpesvirus 3
cuuggaaacacccauac

SEQ ID NO: 134285 - RNA, 13 nt, Human herpesvirus 3
cuuggagaugcaa

SEQ ID NO: 134286 - RNA, 23 nt, Human herpesvirus 3
gaucccgccgucgcgcccaccuc

SEQ ID NO: 134287 - RNA, 21 nt, Human herpesvirus 3
gauauuguauuguaguacagg

SEQ ID NO: 134288 - RNA, 19 nt, Human herpesvirus 3
gauagcgccaaaauggaug

SEQ ID NO: 134289 - RNA, 16 nt, Human herpesvirus 3
gauauaagguguuaau

SEQ ID NO: 134290 - RNA, 12 nt, Human herpesvirus 3
gauaucuuaacg

SEQ ID NO: 134291 - RNA, 15 nt, Human herpesvirus 3
gauauaauuugucca

SEQ ID NO: 134292 - RNA, 22 nt, Human herpesvirus 3
gagguaaccgguuugaagccac

SEQ ID NO: 134293 - RNA, 20 nt, Human herpesvirus 3
gauagcauaaggaaaugcaa

SEQ ID NO: 134294 - RNA, 22 nt, Human herpesvirus 3
gauagauaucacaccaauuaua

SEQ ID NO: 134295 - RNA, 16 nt, Human herpesvirus 3
gauccggcaugcauug

SEQ ID NO: 134296 - RNA, 18 nt, Human herpesvirus 3
gaucggcgcucuguguuu

SEQ ID NO: 134297 - RNA, 15 nt, Human herpesvirus 3
gaugauuaucaauac

SEQ ID NO: 134298 - RNA, 21 nt, Human herpesvirus 3
gaugcaccgguccaacacucc

SEQ ID NO: 134299 - RNA, 22 nt, Human herpesvirus 3
gauuaagaaucuccuaacuaua

SEQ ID NO: 134300 - RNA, 19 nt, Human herpesvirus 3
gcacaucauccguccaaac

SEQ ID NO: 134301 - RNA, 16 nt, Human herpesvirus 3
gcaccaauaugccauc

SEQ ID NO: 134302 - RNA, 13 nt, Human herpesvirus 3
gcacauuagcaaa

SEQ ID NO: 134303 - RNA, 11 nt, Human herpesvirus 3
gcacucuacca

SEQ ID NO: 134304 - RNA, 18 nt, Human herpesvirus 3
gcacuuuuaaagcaucua

SEQ ID NO: 134305 - RNA, 23 nt, Human herpesvirus 3
gcaacgguuucuccguugcacgu

SEQ ID NO: 134306 - RNA, 16 nt, Human herpesvirus 3
gcaacaugcauggaau

SEQ ID NO: 134307 - RNA, 22 nt, Human herpesvirus 3
gauuuggaaaaaaauacguuaa

SEQ ID NO: 134308 - RNA, 20 nt, Human herpesvirus 3
gauuuuaccuuauguguuau

SEQ ID NO: 134309 - RNA, 21 nt, Human herpesvirus 3
gauuuuaccuuauguguuauu

SEQ ID NO: 134310 - RNA, 21 nt, Human herpesvirus 3
gauuucaacggcuuccgaaaa

SEQ ID NO: 134311 - RNA, 17 nt, Human herpesvirus 3
gauuacuacaacggaau

SEQ ID NO: 134312 - RNA, 17 nt, Human herpesvirus 3
gauucaaaggacauuua

SEQ ID NO: 134313 - RNA, 22 nt, Human herpesvirus 3
gauucaagugagguguccugug

SEQ ID NO: 134314 - RNA, 15 nt, Human herpesvirus 3
gcagguuuuacuuuu

SEQ ID NO: 134315 - RNA, 15 nt, Human herpesvirus 3
gcauaagauguacug

SEQ ID NO: 134316 - RNA, 15 nt, Human herpesvirus 3
gcauaagcucuguau

SEQ ID NO: 134317 - RNA, 20 nt, Human herpesvirus 3
gcaucacaggggguauuuau

SEQ ID NO: 134318 - RNA, 11 nt, Human herpesvirus 3
gcaugccauug

SEQ ID NO: 134319 - RNA, 17 nt, Human herpesvirus 3
gcauuacagaaauguga

SEQ ID NO: 134320 - RNA, 19 nt, Human herpesvirus 3
gcauuacccgauauuguau

SEQ ID NO: 134321 - RNA, 18 nt, Human herpesvirus 3
gccaacauccgugaaauu

SEQ ID NO: 134322 - RNA, 15 nt, Human herpesvirus 3
gccagaagcauuuac

SEQ ID NO: 134323 - RNA, 14 nt, Human herpesvirus 3
gccaggcaagccaa

SEQ ID NO: 134324 - RNA, 14 nt, Human herpesvirus 3
ccccaacgacguuu

SEQ ID NO: 134325 - RNA, 13 nt, Human herpesvirus 3
cccauacagugac

SEQ ID NO: 134326 - RNA, 13 nt, Human herpesvirus 3
cccaguaaucuca

SEQ ID NO: 134327 - RNA, 16 nt, Human herpesvirus 3
ccauacauauguucca

SEQ ID NO: 134328 - RNA, 22 nt, Human herpesvirus 3
ccauauauaagggagucuacaa

SEQ ID NO: 134329 - RNA, 15 nt, Human herpesvirus 3
ccauagacuguucua

SEQ ID NO: 134330 - RNA, 13 nt, Human herpesvirus 3
cccucggacauaa

SEQ ID NO: 134331 - RNA, 21 nt, Human herpesvirus 3
cccugcuaaccauagacuguu

SEQ ID NO: 134332 - RNA, 13 nt, Human herpesvirus 3
ccguacaacaaga

SEQ ID NO: 134333 - RNA, 15 nt, Human herpesvirus 3
ccgguacacagcauu

SEQ ID NO: 134334 - RNA, 16 nt, Human herpesvirus 3
ccuauaaauucuacaa

SEQ ID NO: 134335 - RNA, 13 nt, Human herpesvirus 3
ccuauuucaugcu

SEQ ID NO: 134336 - RNA, 14 nt, Human herpesvirus 3
ccuauuucaugcuu

SEQ ID NO: 134337 - RNA, 17 nt, Human herpesvirus 3
ccgaaucucguaaaggu

SEQ ID NO: 134338 - RNA, 20 nt, Human herpesvirus 3
ccgcucgcugagcuccagau

SEQ ID NO: 134339 - RNA, 18 nt, Human herpesvirus 3
ccucugcuucaauuccaa

SEQ ID NO: 134340 - RNA, 17 nt, Human herpesvirus 3
ccucuguacaacacaaa

SEQ ID NO: 134341 - RNA, 20 nt, Human herpesvirus 3
ccucggaugcaccgguccaa

SEQ ID NO: 134342 - RNA, 18 nt, Human herpesvirus 3
ccucggccgcuucccgaa

SEQ ID NO: 134343 - RNA, 14 nt, Human herpesvirus 3
ccucuaacaaugca

SEQ ID NO: 134344 - RNA, 15 nt, Human herpesvirus 3
ccucauucguuuagc

SEQ ID NO: 134345 - RNA, 23 nt, Human herpesvirus 3
ccuccguuacgggggugugguua

SEQ ID NO: 134346 - RNA, 14 nt, Human herpesvirus 3
ccugaguguugcua

SEQ ID NO: 134347 - RNA, 17 nt, Human herpesvirus 3
ccugaguguugcuauug

SEQ ID NO: 134348 - RNA, 19 nt, Human herpesvirus 3
ccugcuaaccauagacugu

SEQ ID NO: 134349 - RNA, 15 nt, Human herpesvirus 3
ccuggacauugcgga

SEQ ID NO: 134350 - RNA, 17 nt, Human herpesvirus 3
ccugcucugcaaauaca

SEQ ID NO: 134351 - RNA, 24 nt, Human herpesvirus 3
ccuuuacaagauauaauuugucca

SEQ ID NO: 134352 - RNA, 18 nt, Human herpesvirus 3
ccuuugcgauguauacug

SEQ ID NO: 134353 - RNA, 21 nt, Human herpesvirus 3
ccuuuagcuauagauaauuca

SEQ ID NO: 134354 - RNA, 20 nt, Human herpesvirus 3
ccuugggacaucaaccagug

SEQ ID NO: 134355 - RNA, 16 nt, Human herpesvirus 3
cgaacgugauuugccc

SEQ ID NO: 134356 - RNA, 12 nt, Human herpesvirus 3
cgaaaagacugu

SEQ ID NO: 134357 - RNA, 13 nt, Human herpesvirus 3
ccuuuuucaugcu

SEQ ID NO: 134358 - RNA, 14 nt, Human herpesvirus 3
ccuuuuucaugcuu

SEQ ID NO: 134359 - RNA, 17 nt, Human herpesvirus 3
ccuuuuucaugcuuguc

SEQ ID NO: 134360 - RNA, 12 nt, Human herpesvirus 3
ccuuuuacauga

SEQ ID NO: 134361 - RNA, 13 nt, Human herpesvirus 3
ccuuauguguuau

SEQ ID NO: 134362 - RNA, 21 nt, Human herpesvirus 3
ccuuacccauaugaccuguaa

SEQ ID NO: 134363 - RNA, 13 nt, Human herpesvirus 3
ccuggcuuaacag

SEQ ID NO: 134364 - RNA, 20 nt, Human herpesvirus 3
ccuggcuuaacagugccagu

SEQ ID NO: 134365 - RNA, 15 nt, Human herpesvirus 3
ccuguugguggguga

SEQ ID NO: 134366 - RNA, 14 nt, Human herpesvirus 3
ccuguccauuugca

SEQ ID NO: 134367 - RNA, 13 nt, Human herpesvirus 3
cauuaauaagucg

SEQ ID NO: 134368 - RNA, 15 nt, Human herpesvirus 3
cauuaaucgcugaua

SEQ ID NO: 134369 - RNA, 22 nt, Human herpesvirus 3
cauuaacaacgcguacgugccu

SEQ ID NO: 134370 - RNA, 16 nt, Human herpesvirus 3
cauuagcaaaauuggg

SEQ ID NO: 134371 - RNA, 21 nt, Human herpesvirus 3
cauuauaaaccgauuauguca

SEQ ID NO: 134372 - RNA, 18 nt, Human herpesvirus 3
cauugaacaagagugcau

SEQ ID NO: 134373 - RNA, 15 nt, Human herpesvirus 3
cauugaagaugauua

SEQ ID NO: 134374 - RNA, 21 nt, Human herpesvirus 3
cauucgcaacacaucuacugu

SEQ ID NO: 134375 - RNA, 12 nt, Human herpesvirus 3
cauuaugagcau

SEQ ID NO: 134376 - RNA, 15 nt, Human herpesvirus 3
cauuccaacuggaaa

SEQ ID NO: 134377 - RNA, 22 nt, Human herpesvirus 3
cauuccaacuggaaaugugcug

SEQ ID NO: 134378 - RNA, 20 nt, Human herpesvirus 3
cauuuuuauuuguuuugaau

SEQ ID NO: 134379 - RNA, 19 nt, Human herpesvirus 3
ccaacugauuacauuucau

SEQ ID NO: 134380 - RNA, 21 nt, Human herpesvirus 3
ccaacugauuacauuucauac

SEQ ID NO: 134381 - RNA, 16 nt, Human herpesvirus 3
ccaacgguuggcuuaa

SEQ ID NO: 134382 - RNA, 17 nt, Human herpesvirus 3
ccaacgguuggcuuaaa

SEQ ID NO: 134383 - RNA, 21 nt, Human herpesvirus 3
cauuuaaagucguuuauaucu

SEQ ID NO: 134384 - RNA, 12 nt, Human herpesvirus 3
cauuuaacaauc

SEQ ID NO: 134385 - RNA, 19 nt, Human herpesvirus 3
cauugccguauuaaccuac

SEQ ID NO: 134386 - RNA, 15 nt, Human herpesvirus 3
ccacccccucuuaaa

SEQ ID NO: 134387 - RNA, 18 nt, Human herpesvirus 3
ccaauaaacggcauagac

SEQ ID NO: 134388 - RNA, 17 nt, Human herpesvirus 3
ccaagcuauggacgcaa

SEQ ID NO: 134389 - RNA, 16 nt, Human herpesvirus 3
ccaaggauagauauca

SEQ ID NO: 134390 - RNA, 16 nt, Human herpesvirus 3
ccacgugagcuugcaa

SEQ ID NO: 134391 - RNA, 16 nt, Human herpesvirus 3
ccacguagcaaagcua

SEQ ID NO: 134392 - RNA, 22 nt, Human herpesvirus 3
ccacguagcaaagcuacacuuu

SEQ ID NO: 134393 - RNA, 14 nt, Human herpesvirus 3
ccacgugguauuau

SEQ ID NO: 134394 - RNA, 14 nt, Human herpesvirus 3
ccacgacagcagua

SEQ ID NO: 134395 - RNA, 22 nt, Human herpesvirus 3
ccacgacagcaguaagggugag

SEQ ID NO: 134396 - RNA, 15 nt, Human herpesvirus 3
ccaccucggccgcuu

SEQ ID NO: 134397 - RNA, 17 nt, Human herpesvirus 3
ccaggcgaggacuccac

SEQ ID NO: 134398 - RNA, 14 nt, Human herpesvirus 3
ccacuuacaggaca

SEQ ID NO: 134399 - RNA, 18 nt, Human herpesvirus 3
cauaacaccagaaucucu

SEQ ID NO: 134400 - RNA, 12 nt, Human herpesvirus 3
cauaacagucua

SEQ ID NO: 134401 - RNA, 18 nt, Human herpesvirus 3
cauaacagucuaacagua

SEQ ID NO: 134402 - RNA, 16 nt, Human herpesvirus 3
cauaaccgauuuaccg

SEQ ID NO: 134403 - RNA, 23 nt, Human herpesvirus 3
cauaaauauuaccccgccauaaa

SEQ ID NO: 134404 - RNA, 20 nt, Human herpesvirus 3
cauaagacguugcauaugca

SEQ ID NO: 134405 - RNA, 18 nt, Human herpesvirus 3
cagcaaguuuaacauuuc

SEQ ID NO: 134406 - RNA, 15 nt, Human herpesvirus 3
cagcaauguuuuaau

SEQ ID NO: 134407 - RNA, 16 nt, Human herpesvirus 3
cagauuuauuuuuaca

SEQ ID NO: 134408 - RNA, 14 nt, Human herpesvirus 3
cagugcucccaagg

SEQ ID NO: 134409 - RNA, 13 nt, Human herpesvirus 3
cagcagucucacg

SEQ ID NO: 134410 - RNA, 23 nt, Human herpesvirus 3
caucgucaaaaauagcuguaaaa

SEQ ID NO: 134411 - RNA, 17 nt, Human herpesvirus 3
caucaccgaacauggac

SEQ ID NO: 134412 - RNA, 13 nt, Human herpesvirus 3
caucuauaugauu

SEQ ID NO: 134413 - RNA, 19 nt, Human herpesvirus 3
caucacaggggguauuuau

SEQ ID NO: 134414 - RNA, 22 nt, Human herpesvirus 3
cauaggguugcgauaacugcga

SEQ ID NO: 134415 - RNA, 14 nt, Human herpesvirus 3
cauagcguggguuu

SEQ ID NO: 134416 - RNA, 16 nt, Human herpesvirus 3
caugauugauggaugu

SEQ ID NO: 134417 - RNA, 16 nt, Human herpesvirus 3
caucugauuugcaaac

SEQ ID NO: 134418 - RNA, 19 nt, Human herpesvirus 3
cauguauaauaaaaaguca

SEQ ID NO: 134419 - RNA, 23 nt, Human herpesvirus 3
caugugacuaaacacgcccauug

SEQ ID NO: 134420 - RNA, 12 nt, Human herpesvirus 3
caacaacccauc

SEQ ID NO: 134421 - RNA, 21 nt, Human herpesvirus 3
caacaacccauccuuaaaaua

SEQ ID NO: 134422 - RNA, 22 nt, Human herpesvirus 3
caaaucaugguugguuacugug

SEQ ID NO: 134423 - RNA, 15 nt, Human herpesvirus 3
caaacguguguauaa

SEQ ID NO: 134424 - RNA, 15 nt, Human herpesvirus 3
caaacgcgucugugu

SEQ ID NO: 134425 - RNA, 18 nt, Human herpesvirus 3
caaacgcgucuguguaua

SEQ ID NO: 134426 - RNA, 19 nt, Human herpesvirus 3
caaaccccacgcaacauuu

SEQ ID NO: 134427 - RNA, 16 nt, Human herpesvirus 3
caaaaauagcuguaaa

SEQ ID NO: 134428 - RNA, 23 nt, Human herpesvirus 3
caaaaauucaucugccguuucau

SEQ ID NO: 134429 - RNA, 22 nt, Human herpesvirus 3
caaaauuaacucgcguacaaau

SEQ ID NO: 134430 - RNA, 17 nt, Human herpesvirus 3
caaaacggcuguagguc

SEQ ID NO: 134431 - RNA, 21 nt, Human herpesvirus 3
caaaacggcuguaggucaaca

SEQ ID NO: 134432 - RNA, 20 nt, Human herpesvirus 3
caaaauggaucagaaagauu

SEQ ID NO: 134433 - RNA, 16 nt, Human herpesvirus 3
caaaauggaugcaaga

SEQ ID NO: 134434 - RNA, 21 nt, Human herpesvirus 3
caaacacucuacgcauuuacg

SEQ ID NO: 134435 - RNA, 13 nt, Human herpesvirus 3
caaacaaagccug

SEQ ID NO: 134436 - RNA, 13 nt, Human herpesvirus 3
caaacauucacag

SEQ ID NO: 134437 - RNA, 22 nt, Human herpesvirus 3
caaacacgcaauugucagauau

SEQ ID NO: 134438 - RNA, 22 nt, Human herpesvirus 3
auuguagcgcaaguaacagcga

SEQ ID NO: 134439 - RNA, 19 nt, Human herpesvirus 3
auuggcuccacuccaggcg

SEQ ID NO: 134440 - RNA, 14 nt, Human herpesvirus 3
auugucccgugugu

SEQ ID NO: 134441 - RNA, 20 nt, Human herpesvirus 3
auuguauuguaguacagggc

SEQ ID NO: 134442 - RNA, 16 nt, Human herpesvirus 3
auuguagaacuaacuc

SEQ ID NO: 134443 - RNA, 15 nt, Human herpesvirus 3
auuguaguacagggc

SEQ ID NO: 134444 - RNA, 14 nt, Human herpesvirus 3
auuuacaaugacag

SEQ ID NO: 134445 - RNA, 13 nt, Human herpesvirus 3
auuuacaccgugg

SEQ ID NO: 134446 - RNA, 14 nt, Human herpesvirus 3
auuuaaaacauaca

SEQ ID NO: 134447 - RNA, 14 nt, Human herpesvirus 3
auuuaaaggucuga

SEQ ID NO: 134448 - RNA, 17 nt, Human herpesvirus 3
auuugugaagacuuuau

SEQ ID NO: 134449 - RNA, 18 nt, Human herpesvirus 3
auuugugccgcaagcaua

SEQ ID NO: 134450 - RNA, 17 nt, Human herpesvirus 3
auuuggacacuacucag

SEQ ID NO: 134451 - RNA, 15 nt, Human herpesvirus 3
auuugcccacaccua

SEQ ID NO: 134452 - RNA, 17 nt, Human herpesvirus 3
auuugccccaaaccacu

SEQ ID NO: 134453 - RNA, 18 nt, Human herpesvirus 3
auuugccccaaaccacug

SEQ ID NO: 134454 - RNA, 19 nt, Human herpesvirus 3
auuucaauauuuauacaag

SEQ ID NO: 134455 - RNA, 14 nt, Human herpesvirus 3
auuuaugucgcuac

SEQ ID NO: 134456 - RNA, 23 nt, Human herpesvirus 3
auuuaucggcguccucuguuaca

SEQ ID NO: 134457 - RNA, 15 nt, Human herpesvirus 3
auuuauacaagcaua

SEQ ID NO: 134458 - RNA, 21 nt, Human herpesvirus 3
auuucaugcuuguaaaacaua

SEQ ID NO: 134459 - RNA, 20 nt, Human herpesvirus 3
auuagcacuaucgucucaaa

SEQ ID NO: 134460 - RNA, 21 nt, Human herpesvirus 3
auuacguuacucaugugucuc

SEQ ID NO: 134461 - RNA, 14 nt, Human herpesvirus 3
auuacuguacagcu

SEQ ID NO: 134462 - RNA, 15 nt, Human herpesvirus 3
auuagaacguuuauc

SEQ ID NO: 134463 - RNA, 14 nt, Human herpesvirus 3
auuauaacugcuac

SEQ ID NO: 134464 - RNA, 20 nt, Human herpesvirus 3
auuauaacugcuacaacgga

SEQ ID NO: 134465 - RNA, 15 nt, Human herpesvirus 3
auuccaaccgaccca

SEQ ID NO: 134466 - RNA, 15 nt, Human herpesvirus 3
auuccgguugugcca

SEQ ID NO: 134467 - RNA, 22 nt, Human herpesvirus 3
auuccgcccgaaucaaccacac

SEQ ID NO: 134468 - RNA, 18 nt, Human herpesvirus 3
auucgacgcaaaaauuca

SEQ ID NO: 134469 - RNA, 17 nt, Human herpesvirus 3
auucgcaacacaucuac

SEQ ID NO: 134470 - RNA, 16 nt, Human herpesvirus 3
auucggguaaaacaca

SEQ ID NO: 134471 - RNA, 22 nt, Human herpesvirus 3
auucuauauuaauaaaagacua

SEQ ID NO: 134472 - RNA, 15 nt, Human herpesvirus 3
auucgugugcaauaa

SEQ ID NO: 134473 - RNA, 20 nt, Human herpesvirus 3
auuggcggaagauacaggca

SEQ ID NO: 134474 - RNA, 13 nt, Human herpesvirus 3
auuggauuugaaa

SEQ ID NO: 134475 - RNA, 14 nt, Human herpesvirus 3
auugguauacacac

SEQ ID NO: 134476 - RNA, 19 nt, Human herpesvirus 3
auuggacugcguuauuuaa

SEQ ID NO: 134477 - RNA, 21 nt, Human herpesvirus 3
auuaccgguaccaugggagac

SEQ ID NO: 134478 - RNA, 15 nt, Human herpesvirus 3
auuaccguacaacaa

SEQ ID NO: 134479 - RNA, 11 nt, Human herpesvirus 3
auuacauuuaa

SEQ ID NO: 134480 - RNA, 15 nt, Human herpesvirus 3
auuacauauucuguu

SEQ ID NO: 134481 - RNA, 17 nt, Human herpesvirus 3
augucuuauuccaacgc

SEQ ID NO: 134482 - RNA, 18 nt, Human herpesvirus 3
auguggagcguacugcag

SEQ ID NO: 134483 - RNA, 22 nt, Human herpesvirus 3
augugcucuaaagucccauaua

SEQ ID NO: 134484 - RNA, 19 nt, Human herpesvirus 3
auguguauuauaugucaca

SEQ ID NO: 134485 - RNA, 20 nt, Human herpesvirus 3
augucgcuacuccaggcaug

SEQ ID NO: 134486 - RNA, 18 nt, Human herpesvirus 3
augguugguuacugugaa

SEQ ID NO: 134487 - RNA, 14 nt, Human herpesvirus 3
augguaaaaaccgc

SEQ ID NO: 134488 - RNA, 13 nt, Human herpesvirus 3
aucuggaaggcau

SEQ ID NO: 134489 - RNA, 13 nt, Human herpesvirus 3
caauuaacacaga

SEQ ID NO: 134490 - RNA, 17 nt, Human herpesvirus 3
caauuauaacugcuaca

SEQ ID NO: 134491 - RNA, 19 nt, Human herpesvirus 3
caaugccauuuggacacua

SEQ ID NO: 134492 - RNA, 20 nt, Human herpesvirus 3
cacaccaauuauaacugcua

SEQ ID NO: 134493 - RNA, 19 nt, Human herpesvirus 3
cacacgacacgauaccccc

SEQ ID NO: 134494 - RNA, 13 nt, Human herpesvirus 3
cacccgccaugag

SEQ ID NO: 134495 - RNA, 14 nt, Human herpesvirus 3
cacccgccaugagc

SEQ ID NO: 134496 - RNA, 14 nt, Human herpesvirus 3
cacccccucuuaaa

SEQ ID NO: 134497 - RNA, 18 nt, Human herpesvirus 3
caccccagauauugucca

SEQ ID NO: 134498 - RNA, 18 nt, Human herpesvirus 3
cacccaguacguugcaua

SEQ ID NO: 134499 - RNA, 21 nt, Human herpesvirus 3
caccaucaucugauuugcaaa

SEQ ID NO: 134500 - RNA, 18 nt, Human herpesvirus 3
cacauaugcacgcaucaa

SEQ ID NO: 134501 - RNA, 18 nt, Human herpesvirus 3
cacaguccggacaauuaa

SEQ ID NO: 134502 - RNA, 21 nt, Human herpesvirus 3
cacaguccggacaauuaacac

SEQ ID NO: 134503 - RNA, 18 nt, Human herpesvirus 3
cacacgggccguguggua

SEQ ID NO: 134504 - RNA, 23 nt, Human herpesvirus 3
cacaguuccguuuggaaacaaca

SEQ ID NO: 134505 - RNA, 22 nt, Human herpesvirus 3
cacaguuggggccgauucuccu

SEQ ID NO: 134506 - RNA, 23 nt, Human herpesvirus 3
caauaaacggcauagacgcacag

SEQ ID NO: 134507 - RNA, 15 nt, Human herpesvirus 3
caaggucugucccuu

SEQ ID NO: 134508 - RNA, 19 nt, Human herpesvirus 3
caauacacccgacuuccua

SEQ ID NO: 134509 - RNA, 17 nt, Human herpesvirus 3
caauacgcucgacaaua

SEQ ID NO: 134510 - RNA, 19 nt, Human herpesvirus 3
caauccgucaacugcaaca

SEQ ID NO: 134511 - RNA, 16 nt, Human herpesvirus 3
caaucguaagacuguu

SEQ ID NO: 134512 - RNA, 15 nt, Human herpesvirus 3
caaugcacugaacca

SEQ ID NO: 134513 - RNA, 15 nt, Human herpesvirus 3
caaugaaacaguaaa

SEQ ID NO: 134514 - RNA, 22 nt, Human herpesvirus 3
caacacgggcugaagaguuucu

SEQ ID NO: 134515 - RNA, 18 nt, Human herpesvirus 3
caagaugaaauaguuuca

SEQ ID NO: 134516 - RNA, 18 nt, Human herpesvirus 3
caagaucaauggcgguga

SEQ ID NO: 134517 - RNA, 22 nt, Human herpesvirus 3
caagcaauaaaacaaacauuca

SEQ ID NO: 134518 - RNA, 18 nt, Human herpesvirus 3
caagcccuccgguccaug

SEQ ID NO: 134519 - RNA, 15 nt, Human herpesvirus 3
caaggcccauauccc

SEQ ID NO: 134520 - RNA, 18 nt, Human herpesvirus 3
cagaaacguuuuuaguuu

SEQ ID NO: 134521 - RNA, 21 nt, Human herpesvirus 3
cagaggguauugcuguuguuu

SEQ ID NO: 134522 - RNA, 13 nt, Human herpesvirus 3
cagauguacaccc

SEQ ID NO: 134523 - RNA, 22 nt, Human herpesvirus 3
cagauucaagacuaacauuuau

SEQ ID NO: 134524 - RNA, 22 nt, Human herpesvirus 3
cagagcauccgucuugcgauac

SEQ ID NO: 134525 - RNA, 22 nt, Human herpesvirus 3
cacuguuccaggcgagacuuga

SEQ ID NO: 134526 - RNA, 23 nt, Human herpesvirus 3
cacugcauuuacaucuuguccaa

SEQ ID NO: 134527 - RNA, 15 nt, Human herpesvirus 3
cacucuacgcauuua

SEQ ID NO: 134528 - RNA, 13 nt, Human herpesvirus 3
cacugaaccacaa

SEQ ID NO: 134529 - RNA, 21 nt, Human herpesvirus 3
cacucaacguuuuuggauggc

SEQ ID NO: 134530 - RNA, 14 nt, Human herpesvirus 3
caccucggccgcuu

SEQ ID NO: 134531 - RNA, 15 nt, Human herpesvirus 3
cacgaauaggugaua

SEQ ID NO: 134532 - RNA, 15 nt, Human herpesvirus 3
cacgaugcgcuggua

SEQ ID NO: 134533 - RNA, 19 nt, Human herpesvirus 3
cacgugagcuugcaaguua

SEQ ID NO: 134534 - RNA, 14 nt, Human herpesvirus 3
cacgguauuccaaa

SEQ ID NO: 134535 - RNA, 21 nt, Human herpesvirus 3
cacguuuguguugugacuuga

SEQ ID NO: 134536 - RNA, 20 nt, Human herpesvirus 3
cacguguugcuguuguccaa

SEQ ID NO: 134537 - RNA, 15 nt, Human herpesvirus 3
cacguuaucggucaa

SEQ ID NO: 134538 - RNA, 15 nt, Human herpesvirus 3
cacggaacacguuau

SEQ ID NO: 134539 - RNA, 18 nt, Human herpesvirus 3
cacgggaaacuauuccaa

SEQ ID NO: 134540 - RNA, 17 nt, Human herpesvirus 3
cacggccaggcaagcca

SEQ ID NO: 134541 - RNA, 14 nt, Human herpesvirus 3
agagggugcugguu

SEQ ID NO: 134542 - RNA, 21 nt, Human herpesvirus 3
agcccagguacgcgucaaaaa

SEQ ID NO: 134543 - RNA, 12 nt, Human herpesvirus 3
agaguacagggu

SEQ ID NO: 134544 - RNA, 12 nt, Human herpesvirus 3
agcccgaucccg

SEQ ID NO: 134545 - RNA, 13 nt, Human herpesvirus 3
agccuugugaugg

SEQ ID NO: 134546 - RNA, 15 nt, Human herpesvirus 3
agccgcggccagugc

SEQ ID NO: 134547 - RNA, 16 nt, Human herpesvirus 3
agcuauauaugucacc

SEQ ID NO: 134548 - RNA, 11 nt, Human herpesvirus 3
agcgccaaaau

SEQ ID NO: 134549 - RNA, 22 nt, Human herpesvirus 3
aggaccccccgaugauucagac

SEQ ID NO: 134550 - RNA, 20 nt, Human herpesvirus 3
agcuuaacaacauauacgaa

SEQ ID NO: 134551 - RNA, 17 nt, Human herpesvirus 3
agcuguccaugaugaaa

SEQ ID NO: 134552 - RNA, 14 nt, Human herpesvirus 3
agcugugaguuuag

SEQ ID NO: 134553 - RNA, 18 nt, Human herpesvirus 3
agcuguaaaaaccaugga

SEQ ID NO: 134554 - RNA, 14 nt, Human herpesvirus 3
agcugccgggaaaa

SEQ ID NO: 134555 - RNA, 19 nt, Human herpesvirus 3
aggcuguacguaaccauau

SEQ ID NO: 134556 - RNA, 16 nt, Human herpesvirus 3
aggcauaaacacggaa

SEQ ID NO: 134557 - RNA, 20 nt, Human herpesvirus 3
aggguugcgauaacugcgau

SEQ ID NO: 134558 - RNA, 15 nt, Human herpesvirus 3
agguaagaagugcau

SEQ ID NO: 134559 - RNA, 18 nt, Human herpesvirus 3
agguaagaagugcauauc

SEQ ID NO: 134560 - RNA, 20 nt, Human herpesvirus 3
agguaagaagugcauaucca

SEQ ID NO: 134561 - RNA, 15 nt, Human herpesvirus 3
agggggggguuccgu

SEQ ID NO: 134562 - RNA, 15 nt, Human herpesvirus 3
aggggaucgucagua

SEQ ID NO: 134563 - RNA, 19 nt, Human herpesvirus 3
aggggaugggggucgcaac

SEQ ID NO: 134564 - RNA, 15 nt, Human herpesvirus 3
aggguagagggugcu

SEQ ID NO: 134565 - RNA, 15 nt, Human herpesvirus 3
aggguaucuaaguac

SEQ ID NO: 134566 - RNA, 21 nt, Human herpesvirus 3
aggcuuuaggaaucaagacag

SEQ ID NO: 134567 - RNA, 18 nt, Human herpesvirus 3
agguauaugucaacauuu

SEQ ID NO: 134568 - RNA, 13 nt, Human herpesvirus 3
agguauggaguuc

SEQ ID NO: 134569 - RNA, 17 nt, Human herpesvirus 3
aguaaacaacaguagga

SEQ ID NO: 134570 - RNA, 20 nt, Human herpesvirus 3
aguaaacguccgauguucca

SEQ ID NO: 134571 - RNA, 17 nt, Human herpesvirus 3
agguuuauuuacuuuac

SEQ ID NO: 134572 - RNA, 17 nt, Human herpesvirus 3
aggugaacagauuuccc

SEQ ID NO: 134573 - RNA, 13 nt, Human herpesvirus 3
aggucugucaugu

SEQ ID NO: 134574 - RNA, 17 nt, Human herpesvirus 3
agguccauuuaacaauc

SEQ ID NO: 134575 - RNA, 20 nt, Human herpesvirus 3
aguaaccggggcauccugcu

SEQ ID NO: 134576 - RNA, 15 nt, Human herpesvirus 3
aguaaauaugugcau

SEQ ID NO: 134577 - RNA, 19 nt, Human herpesvirus 3
aguaacugucccaauacac

SEQ ID NO: 134578 - RNA, 16 nt, Human herpesvirus 3
aguagagcccacacaa

SEQ ID NO: 134579 - RNA, 13 nt, Human herpesvirus 3
auaaaaacauaac

SEQ ID NO: 134580 - RNA, 12 nt, Human herpesvirus 3
auaaaaacauac

SEQ ID NO: 134581 - RNA, 13 nt, Human herpesvirus 3
auaaaaacauaca

SEQ ID NO: 134582 - RNA, 14 nt, Human herpesvirus 3
aguuccguuuggaa

SEQ ID NO: 134583 - RNA, 16 nt, Human herpesvirus 3
aguugaaccaaaucca

SEQ ID NO: 134584 - RNA, 17 nt, Human herpesvirus 3
aguugaaccaaauccac

SEQ ID NO: 134585 - RNA, 20 nt, Human herpesvirus 3
aguuaugauauaagguguua

SEQ ID NO: 134586 - RNA, 17 nt, Human herpesvirus 3
aguuauuguauauacaa

SEQ ID NO: 134587 - RNA, 17 nt, Human herpesvirus 3
aguguacgcggaucuuu

SEQ ID NO: 134588 - RNA, 15 nt, Human herpesvirus 3
aguguccagauauaa

SEQ ID NO: 134589 - RNA, 19 nt, Human herpesvirus 3
agugagguguccugugauc

SEQ ID NO: 134590 - RNA, 16 nt, Human herpesvirus 3
agugcuugacugugcu

SEQ ID NO: 134591 - RNA, 13 nt, Human herpesvirus 3
aguggggguuuaa

SEQ ID NO: 134592 - RNA, 23 nt, Human herpesvirus 3
aucugaucguauugcuggguuau

SEQ ID NO: 134593 - RNA, 15 nt, Human herpesvirus 3
aucucccguuuuuau

SEQ ID NO: 134594 - RNA, 13 nt, Human herpesvirus 3
auccuggacacag

SEQ ID NO: 134595 - RNA, 18 nt, Human herpesvirus 3
auccuuaaaauaaaaggu

SEQ ID NO: 134596 - RNA, 17 nt, Human herpesvirus 3
aucgucuaauaccacag

SEQ ID NO: 134597 - RNA, 22 nt, Human herpesvirus 3
aucguccuucaacacacccaua

SEQ ID NO: 134598 - RNA, 18 nt, Human herpesvirus 3
aucggauauuggauuuga

SEQ ID NO: 134599 - RNA, 22 nt, Human herpesvirus 3
aucguaugccucggaugcaccg

SEQ ID NO: 134600 - RNA, 16 nt, Human herpesvirus 3
aucgucaaaaauagcu

SEQ ID NO: 134601 - RNA, 12 nt, Human herpesvirus 3
auccaacaaauu

SEQ ID NO: 134602 - RNA, 17 nt, Human herpesvirus 3
auccacgguauuccaaa

SEQ ID NO: 134603 - RNA, 17 nt, Human herpesvirus 3
aucccccgaucucuggu

SEQ ID NO: 134604 - RNA, 20 nt, Human herpesvirus 3
aucccgccuuuaucucccua

SEQ ID NO: 134605 - RNA, 17 nt, Human herpesvirus 3
auccauugccguauuaa

SEQ ID NO: 134606 - RNA, 13 nt, Human herpesvirus 3
aucccacauguau

SEQ ID NO: 134607 - RNA, 23 nt, Human herpesvirus 3
auccgagugaaucuuaaaccuga

SEQ ID NO: 134608 - RNA, 21 nt, Human herpesvirus 3
aucaugguugguuacugugaa

SEQ ID NO: 134609 - RNA, 15 nt, Human herpesvirus 3
aucauacgcauuuac

SEQ ID NO: 134610 - RNA, 13 nt, Human herpesvirus 3
aucagagaagcua

SEQ ID NO: 134611 - RNA, 15 nt, Human herpesvirus 3
aucagagaagcuaua

SEQ ID NO: 134612 - RNA, 14 nt, Human herpesvirus 3
aucacuuugauaua

SEQ ID NO: 134613 - RNA, 22 nt, Human herpesvirus 3
aucagaaagauugcagucauuu

SEQ ID NO: 134614 - RNA, 16 nt, Human herpesvirus 3
aucagaucaucugaca

SEQ ID NO: 134615 - RNA, 19 nt, Human herpesvirus 3
auaacaauuuaacauaccc

SEQ ID NO: 134616 - RNA, 21 nt, Human herpesvirus 3
auaaauggucuaaauacuuca

SEQ ID NO: 134617 - RNA, 21 nt, Human herpesvirus 3
auaaauuguguuuauaacgua

SEQ ID NO: 134618 - RNA, 17 nt, Human herpesvirus 3
auaaauuuaaaacauac

SEQ ID NO: 134619 - RNA, 18 nt, Human herpesvirus 3
auaaaucguuuaucacug

SEQ ID NO: 134620 - RNA, 18 nt, Human herpesvirus 3
auaaaucuuacguaacac

SEQ ID NO: 134621 - RNA, 14 nt, Human herpesvirus 3
auaaauaacauaac

SEQ ID NO: 134622 - RNA, 15 nt, Human herpesvirus 3
auaaaacaaacauuc

SEQ ID NO: 134623 - RNA, 15 nt, Human herpesvirus 3
auaaaguauuguaga

SEQ ID NO: 134624 - RNA, 14 nt, Human herpesvirus 3
auacacacuaccuu

SEQ ID NO: 134625 - RNA, 19 nt, Human herpesvirus 3
auacacacccaccccagau

SEQ ID NO: 134626 - RNA, 16 nt, Human herpesvirus 3
auacacauccuggaca

SEQ ID NO: 134627 - RNA, 19 nt, Human herpesvirus 3
auacacauggauaggucau

SEQ ID NO: 134628 - RNA, 13 nt, Human herpesvirus 3
auacauauguucc

SEQ ID NO: 134629 - RNA, 16 nt, Human herpesvirus 3
auacaggcaacugcaa

SEQ ID NO: 134630 - RNA, 20 nt, Human herpesvirus 3
auacuaugguaaaaaccgcu

SEQ ID NO: 134631 - RNA, 21 nt, Human herpesvirus 3
auacuagcauauguucagcag

SEQ ID NO: 134632 - RNA, 16 nt, Human herpesvirus 3
auacguuucaaauaac

SEQ ID NO: 134633 - RNA, 17 nt, Human herpesvirus 3
auacuaagccucuguac

SEQ ID NO: 134634 - RNA, 18 nt, Human herpesvirus 3
auacuaagccucuguaca

SEQ ID NO: 134635 - RNA, 22 nt, Human herpesvirus 3
auacguacaucuuucagguuga

SEQ ID NO: 134636 - RNA, 23 nt, Human herpesvirus 3
auacgacuuuuaaacgccagugg

SEQ ID NO: 134637 - RNA, 14 nt, Human herpesvirus 3
auacgucucggggu

SEQ ID NO: 134638 - RNA, 16 nt, Human herpesvirus 3
auacuuggacuguuua

SEQ ID NO: 134639 - RNA, 15 nt, Human herpesvirus 3
auacuuggagaugca

SEQ ID NO: 134640 - RNA, 22 nt, Human herpesvirus 3
auacuuggagaugcaaccaagg

SEQ ID NO: 134641 - RNA, 13 nt, Human herpesvirus 3
auagauacuccac

SEQ ID NO: 134642 - RNA, 18 nt, Human herpesvirus 3
aucaaccggaacaguauc

SEQ ID NO: 134643 - RNA, 14 nt, Human herpesvirus 3
aucaacgacauaca

SEQ ID NO: 134644 - RNA, 16 nt, Human herpesvirus 3
auauuguagaacuaac

SEQ ID NO: 134645 - RNA, 20 nt, Human herpesvirus 3
auauuguauuguaguacagg

SEQ ID NO: 134646 - RNA, 20 nt, Human herpesvirus 3
auauuuuuaaucauuauaca

SEQ ID NO: 134647 - RNA, 20 nt, Human herpesvirus 3
auagcgccaaaauggaugca

SEQ ID NO: 134648 - RNA, 17 nt, Human herpesvirus 3
auagccgccagauguac

SEQ ID NO: 134649 - RNA, 23 nt, Human herpesvirus 3
auagcuguaaaaaccauggacag

SEQ ID NO: 134650 - RNA, 22 nt, Human herpesvirus 3
auagcaggggucuccagaguac

SEQ ID NO: 134651 - RNA, 20 nt, Human herpesvirus 3
auauacaaaauaaaaacaua

SEQ ID NO: 134652 - RNA, 17 nt, Human herpesvirus 3
auauacguagaauuuac

SEQ ID NO: 134653 - RNA, 15 nt, Human herpesvirus 3
auauaauauuaacag

SEQ ID NO: 134654 - RNA, 16 nt, Human herpesvirus 3
auauagugugucucca

SEQ ID NO: 134655 - RNA, 20 nt, Human herpesvirus 3
acaguccggacaauuaacac

SEQ ID NO: 134656 - RNA, 19 nt, Human herpesvirus 3
acaggacaaaccccacgca

SEQ ID NO: 134657 - RNA, 18 nt, Human herpesvirus 3
acagucuaacaguacgca

SEQ ID NO: 134658 - RNA, 20 nt, Human herpesvirus 3
acagugcgcuucaagucuca

SEQ ID NO: 134659 - RNA, 17 nt, Human herpesvirus 3
acagagaucucuguuac

SEQ ID NO: 134660 - RNA, 22 nt, Human herpesvirus 3
acagaauuuuuuacgaugauau

SEQ ID NO: 134661 - RNA, 17 nt, Human herpesvirus 3
acagacauacacuggua

SEQ ID NO: 134662 - RNA, 13 nt, Human herpesvirus 3
acacgugcuuauu

SEQ ID NO: 134663 - RNA, 22 nt, Human herpesvirus 3
aauuuaacauaccccaggccuu

SEQ ID NO: 134664 - RNA, 21 nt, Human herpesvirus 3
aauuuacgugcccugagcauu

SEQ ID NO: 134665 - RNA, 15 nt, Human herpesvirus 3
aauuuauaaaacacu

SEQ ID NO: 134666 - RNA, 19 nt, Human herpesvirus 3
aauuuauauuuuuaaucau

SEQ ID NO: 134667 - RNA, 13 nt, Human herpesvirus 3
acacgacaccgcu

SEQ ID NO: 134668 - RNA, 19 nt, Human herpesvirus 3
aauuucuacgcacauuagc

SEQ ID NO: 134669 - RNA, 21 nt, Human herpesvirus 3
aauuucuacgcacauuagcaa

SEQ ID NO: 134670 - RNA, 14 nt, Human herpesvirus 3
acacgggucauccc

SEQ ID NO: 134671 - RNA, 20 nt, Human herpesvirus 3
acacggaauccgguauacau

SEQ ID NO: 134672 - RNA, 11 nt, Human herpesvirus 3
accaacuguau

SEQ ID NO: 134673 - RNA, 19 nt, Human herpesvirus 3
accacgugguauuaugaac

SEQ ID NO: 134674 - RNA, 13 nt, Human herpesvirus 3
accacguguugcu

SEQ ID NO: 134675 - RNA, 19 nt, Human herpesvirus 3
accacguguugcuguuguc

SEQ ID NO: 134676 - RNA, 18 nt, Human herpesvirus 3
accacuguuccaggcgag

SEQ ID NO: 134677 - RNA, 23 nt, Human herpesvirus 3
acauuagaguguuuaacaaccau

SEQ ID NO: 134678 - RNA, 16 nt, Human herpesvirus 3
acauuagcaaaauugg

SEQ ID NO: 134679 - RNA, 15 nt, Human herpesvirus 3
acauggccgugaaug

SEQ ID NO: 134680 - RNA, 16 nt, Human herpesvirus 3
acauggaguguguuac

SEQ ID NO: 134681 - RNA, 22 nt, Human herpesvirus 3
acaugccuggcuuaacagugcc

SEQ ID NO: 134682 - RNA, 23 nt, Human herpesvirus 3
acaugaauauauagccuuuauaa

SEQ ID NO: 134683 - RNA, 13 nt, Human herpesvirus 3
acaugagugugug

SEQ ID NO: 134684 - RNA, 14 nt, Human herpesvirus 3
acaugcaguuaaaa

SEQ ID NO: 134685 - RNA, 19 nt, Human herpesvirus 3
acauaaaaauucaaaauac

SEQ ID NO: 134686 - RNA, 16 nt, Human herpesvirus 3
acauaaccgauuuacc

SEQ ID NO: 134687 - RNA, 15 nt, Human herpesvirus 3
accuaacuuuacugu

SEQ ID NO: 134688 - RNA, 18 nt, Human herpesvirus 3
accuuccgguaccccaua

SEQ ID NO: 134689 - RNA, 23 nt, Human herpesvirus 3
acgcaugcgggcuugcuguucuc

SEQ ID NO: 134690 - RNA, 21 nt, Human herpesvirus 3
acgaacuugggcggagacaau

SEQ ID NO: 134691 - RNA, 13 nt, Human herpesvirus 3
acgcuuugaucuu

SEQ ID NO: 134692 - RNA, 20 nt, Human herpesvirus 3
acggaacacguuaucgguca

SEQ ID NO: 134693 - RNA, 15 nt, Human herpesvirus 3
acggaagaugaacua

SEQ ID NO: 134694 - RNA, 14 nt, Human herpesvirus 3
acgcucaauacuug

SEQ ID NO: 134695 - RNA, 14 nt, Human herpesvirus 3
acgccccauuacaa

SEQ ID NO: 134696 - RNA, 14 nt, Human herpesvirus 3
accauagacuguuc

SEQ ID NO: 134697 - RNA, 13 nt, Human herpesvirus 3
accauagaugaac

SEQ ID NO: 134698 - RNA, 23 nt, Human herpesvirus 3
accauauauaagggagucuacaa

SEQ ID NO: 134699 - RNA, 14 nt, Human herpesvirus 3
accauauauggaca

SEQ ID NO: 134700 - RNA, 20 nt, Human herpesvirus 3
accaucgggggggacuugca

SEQ ID NO: 134701 - RNA, 19 nt, Human herpesvirus 3
acccaccccacaugaauau

SEQ ID NO: 134702 - RNA, 23 nt, Human herpesvirus 3
acccaagguguaaauacugcccc

SEQ ID NO: 134703 - RNA, 22 nt, Human herpesvirus 3
accauuuuauagacacgcuaca

SEQ ID NO: 134704 - RNA, 20 nt, Human herpesvirus 3
acccuauaggcuuuaacccu

SEQ ID NO: 134705 - RNA, 13 nt, Human herpesvirus 3
acccuacgacuuc

SEQ ID NO: 134706 - RNA, 14 nt, Human herpesvirus 3
acccucaaacacgg

SEQ ID NO: 134707 - RNA, 15 nt, Human herpesvirus 3
accccaagaguuuuc

SEQ ID NO: 134708 - RNA, 19 nt, Human herpesvirus 3
accccaaggcccauauccc

SEQ ID NO: 134709 - RNA, 12 nt, Human herpesvirus 3
accccacaugaa

SEQ ID NO: 134710 - RNA, 17 nt, Human herpesvirus 3
acccauaugaccuguaa

SEQ ID NO: 134711 - RNA, 19 nt, Human herpesvirus 3
acccaguacguugcauaac

SEQ ID NO: 134712 - RNA, 20 nt, Human herpesvirus 3
accggguggguggcauuaaa

SEQ ID NO: 134713 - RNA, 12 nt, Human herpesvirus 3
accggaguauaa

SEQ ID NO: 134714 - RNA, 15 nt, Human herpesvirus 3
accggaucaugaaca

SEQ ID NO: 134715 - RNA, 19 nt, Human herpesvirus 3
acccugggauguuuuacag

SEQ ID NO: 134716 - RNA, 15 nt, Human herpesvirus 3
acccugcgucaucga

SEQ ID NO: 134717 - RNA, 15 nt, Human herpesvirus 3
acccugcuaaccaua

SEQ ID NO: 134718 - RNA, 17 nt, Human herpesvirus 3
agacauggccgugaaug

SEQ ID NO: 134719 - RNA, 18 nt, Human herpesvirus 3
agacguccacacagccuc

SEQ ID NO: 134720 - RNA, 16 nt, Human herpesvirus 3
agacggcggguuuuga

SEQ ID NO: 134721 - RNA, 14 nt, Human herpesvirus 3
agacguauguucug

SEQ ID NO: 134722 - RNA, 14 nt, Human herpesvirus 3
agacgacauuaaac

SEQ ID NO: 134723 - RNA, 20 nt, Human herpesvirus 3
agacucugcgaugcauuaac

SEQ ID NO: 134724 - RNA, 16 nt, Human herpesvirus 3
agacuuugacuuugau

SEQ ID NO: 134725 - RNA, 24 nt, Human herpesvirus 3
agagaaagcggacacauuugugcc

SEQ ID NO: 134726 - RNA, 20 nt, Human herpesvirus 3
agagaagcuauacacaaguc

SEQ ID NO: 134727 - RNA, 15 nt, Human herpesvirus 3
agaaagcgauuuuau

SEQ ID NO: 134728 - RNA, 15 nt, Human herpesvirus 3
agaaagcggacacau

SEQ ID NO: 134729 - RNA, 14 nt, Human herpesvirus 3
agaaagauugcagu

SEQ ID NO: 134730 - RNA, 18 nt, Human herpesvirus 3
agaaagauugcagucauu

SEQ ID NO: 134731 - RNA, 19 nt, Human herpesvirus 3
agaacauacgucucggggu

SEQ ID NO: 134732 - RNA, 14 nt, Human herpesvirus 3
agaauuaaaaaagc

SEQ ID NO: 134733 - RNA, 15 nt, Human herpesvirus 3
agaagugcauaucca

SEQ ID NO: 134734 - RNA, 14 nt, Human herpesvirus 3
agaacguuuaucag

SEQ ID NO: 134735 - RNA, 14 nt, Human herpesvirus 3
agaacgaucacaac

SEQ ID NO: 134736 - RNA, 12 nt, Human herpesvirus 3
agaagacaucac

SEQ ID NO: 134737 - RNA, 16 nt, Human herpesvirus 3
agaagggggauuuaca

SEQ ID NO: 134738 - RNA, 15 nt, Human herpesvirus 3
agaagcaacaugaca

SEQ ID NO: 134739 - RNA, 16 nt, Human herpesvirus 3
acuauauuccgagggu

SEQ ID NO: 134740 - RNA, 21 nt, Human herpesvirus 3
acuauaaacguauucucuaca

SEQ ID NO: 134741 - RNA, 23 nt, Human herpesvirus 3
acggucgcguguacgaaaaccgc

SEQ ID NO: 134742 - RNA, 17 nt, Human herpesvirus 3
acgguauauuacaaaga

SEQ ID NO: 134743 - RNA, 21 nt, Human herpesvirus 3
acguccacacagccucaggag

SEQ ID NO: 134744 - RNA, 23 nt, Human herpesvirus 3
acguaauagauucgccuuuuaca

SEQ ID NO: 134745 - RNA, 21 nt, Human herpesvirus 3
acguaauuugccccaaaccac

SEQ ID NO: 134746 - RNA, 20 nt, Human herpesvirus 3
acguagcaaagcuacacuuu

SEQ ID NO: 134747 - RNA, 16 nt, Human herpesvirus 3
acucucacugcuauag

SEQ ID NO: 134748 - RNA, 14 nt, Human herpesvirus 3
acucuacgcauuua

SEQ ID NO: 134749 - RNA, 18 nt, Human herpesvirus 3
acucugcgaugcauuaac

SEQ ID NO: 134750 - RNA, 17 nt, Human herpesvirus 3
acuguacagcugagaug

SEQ ID NO: 134751 - RNA, 17 nt, Human herpesvirus 3
acugaauuuaacauagc

SEQ ID NO: 134752 - RNA, 22 nt, Human herpesvirus 3
acugaacauuuuucgguguuac

SEQ ID NO: 134753 - RNA, 13 nt, Human herpesvirus 3
agaaaacauugca

SEQ ID NO: 134754 - RNA, 23 nt, Human herpesvirus 3
agaaaagccagcugaagucugug

SEQ ID NO: 134755 - RNA, 16 nt, Human herpesvirus 3
acuugcaccacaccau

SEQ ID NO: 134756 - RNA, 19 nt, Human herpesvirus 3
acuugggcggagacaauua

SEQ ID NO: 134757 - RNA, 15 nt, Human herpesvirus 3
acuuuacaacccgug

SEQ ID NO: 134758 - RNA, 19 nt, Human herpesvirus 3
uuaagacguccacacagcc

SEQ ID NO: 134759 - RNA, 19 nt, Human herpesvirus 3
ucgucguucgaauccuaga

SEQ ID NO: 134760 - RNA, 19 nt, Human herpesvirus 3
ucccccacauacaacauga

SEQ ID NO: 134761 - RNA, 16 nt, Human herpesvirus 3
ggugacguuccggggu

SEQ ID NO: 134762 - RNA, 17 nt, Human herpesvirus 3
cuuugguuauacgggga

SEQ ID NO: 134763 - RNA, 19 nt, Human herpesvirus 3
cuccguaucccugucuuca

SEQ ID NO: 134764 - RNA, 15 nt, Human herpesvirus 3
cuccaucacgauaaa

SEQ ID NO: 134765 - RNA, 20 nt, Human herpesvirus 3
cucccucauaauaugauaca

SEQ ID NO: 134766 - RNA, 16 nt, Human herpesvirus 3
ccuuaaacaacauggc

SEQ ID NO: 134767 - RNA, 21 nt, Human herpesvirus 3
aguacaggguaucuaaguacc

SEQ ID NO: 134768 - RNA, 17 nt, Human herpesvirus 3
ccguuuggaaacaacaa

SEQ ID NO: 134769 - RNA, 14 nt, Human herpesvirus 3
cccgaaagcccgau

SEQ ID NO: 134770 - RNA, 21 nt, Human herpesvirus 3
aagcgcuccgcccuaaauuac

SEQ ID NO: 134771 - RNA, 16 nt, Human herpesvirus 3
uguaaccuacacaaca

SEQ ID NO: 134772 - RNA, 18 nt, Human herpesvirus 3
ggcuguaggucaacauac

SEQ ID NO: 134773 - RNA, 16 nt, Human herpesvirus 3
gcaguuauaacacggg

SEQ ID NO: 134774 - RNA, 23 nt, Human herpesvirus 3
aaacaucaaccggaacaguaucc

SEQ ID NO: 134775 - RNA, 16 nt, Human herpesvirus 3
acuguauguaaauuau

SEQ ID NO: 134776 - RNA, 9 nt, Homo sapiens
aaagacaga

SEQ ID NO: 134777 - RNA, 22 nt, Homo sapiens
agauacacaaucugaaacagcu

SEQ ID NO: 134778 - RNA, 20 nt, Homo sapiens
auuugcuuagaaagucugau

SEQ ID NO: 134779 - RNA, 17 nt, Homo sapiens
auccuggggaacauaga

SEQ ID NO: 134780 - RNA, 15 nt, Homo sapiens
cacagcaucagcuca

SEQ ID NO: 134781 - RNA, 20 nt, Homo sapiens
gucagaguuccgacugccau

SEQ ID NO: 134782 - RNA, 13 nt, Homo sapiens
uacuaaucuuucu

SEQ ID NO: 134783 - RNA, 19 nt, Homo sapiens
aaaauggcacuugggggac

SEQ ID NO: 134784 - RNA, 17 nt, Homo sapiens
auuugucaacaaaguca

SEQ ID NO: 134785 - RNA, 17 nt, Homo sapiens
cuucuaaguaaauacaa

SEQ ID NO: 134786 - RNA, 23 nt, Homo sapiens
caggcgugaccugccaggcacac

SEQ ID NO: 134787 - RNA, 11 nt, Homo sapiens
aguugcuguau

SEQ ID NO: 134788 - RNA, 19 nt, Homo sapiens
caugggagacacugaugua

SEQ ID NO: 134789 - RNA, 19 nt, Homo sapiens
gucugaacaauauauacuu

SEQ ID NO: 134790 - RNA, 16 nt, Homo sapiens
caaauauuccagagac

SEQ ID NO: 134791 - RNA, 19 nt, Homo sapiens
aagggcuuggacucaagca

SEQ ID NO: 134792 - RNA, 23 nt, Homo sapiens
uucagucaaagauacacaaucug

SEQ ID NO: 134793 - RNA, 21 nt, Homo sapiens
ugugcuucuuaaaauagccau

SEQ ID NO: 134794 - RNA, 19 nt, Homo sapiens
cacagcaucagcucaagac

SEQ ID NO: 134795 - RNA, 18 nt, Homo sapiens
acugccaaagaacuugga

SEQ ID NO: 134796 - RNA, 14 nt, Homo sapiens
ccacugccaaagaa

SEQ ID NO: 134797 - RNA, 12 nt, Homo sapiens
guacacuguguu

SEQ ID NO: 134798 - RNA, 22 nt, Homo sapiens
agagagaaaaguaacuguuuug

SEQ ID NO: 134799 - RNA, 14 nt, Homo sapiens
uuauggcaaauuca

SEQ ID NO: 134800 - RNA, 14 nt, Homo sapiens
uuaauaaaaguaca

SEQ ID NO: 134801 - RNA, 18 nt, Homo sapiens
cauuuguuuuagucugaa

SEQ ID NO: 134802 - RNA, 15 nt, Homo sapiens
caggcgugaccugcc

SEQ ID NO: 134803 - RNA, 18 nt, Homo sapiens
ccaaagaaacauugccuu

SEQ ID NO: 134804 - RNA, 21 nt, Homo sapiens
ucugccuccccuucacuccca

SEQ ID NO: 134805 - RNA, 20 nt, Homo sapiens
ugacacucuagucaaagccu

SEQ ID NO: 134806 - RNA, 16 nt, Homo sapiens
acaagaacacugaaaa

SEQ ID NO: 134807 - RNA, 12 nt, Homo sapiens
aaaaugugacuc

SEQ ID NO: 134808 - RNA, 19 nt, Homo sapiens
ccacuauugcuugcacaaa

SEQ ID NO: 134809 - RNA, 16 nt, Homo sapiens
uuacauuuuguauauu

SEQ ID NO: 134810 - RNA, 20 nt, Homo sapiens
ucagucuuuuccaugaacuu

SEQ ID NO: 134811 - RNA, 13 nt, Homo sapiens
cuucuccuuagaa

SEQ ID NO: 134812 - RNA, 16 nt, Homo sapiens
ucaaacaaaaagucau

SEQ ID NO: 134813 - RNA, 14 nt, Homo sapiens
aggguaaauucucu

SEQ ID NO: 134814 - RNA, 18 nt, Homo sapiens
ucacugcaacuucugccu

SEQ ID NO: 134815 - RNA, 14 nt, Homo sapiens
ucuuaguugcugua

SEQ ID NO: 134816 - RNA, 15 nt, Homo sapiens
ucuaaaaacauuugu

SEQ ID NO: 134817 - RNA, 18 nt, Homo sapiens
ugaaaauaugacacucua

SEQ ID NO: 134818 - RNA, 16 nt, Homo sapiens
uuguuuguggucuaua

SEQ ID NO: 134819 - RNA, 19 nt, Homo sapiens
uuauacaauauacuuguau

SEQ ID NO: 134820 - RNA, 18 nt, Homo sapiens
uuguuauucuguaguuuc

SEQ ID NO: 134821 - RNA, 17 nt, Homo sapiens
aaaaaugugacucaaga

SEQ ID NO: 134822 - RNA, 21 nt, Homo sapiens
uuaaagcagggauaugcugua

SEQ ID NO: 134823 - RNA, 21 nt, Homo sapiens
auaacauggugugcuucuuaa

SEQ ID NO: 134824 - RNA, 18 nt, Homo sapiens
ccucccacugccaaagaa

SEQ ID NO: 134825 - RNA, 20 nt, Homo sapiens
aguuuccaaauuauggcaaa

SEQ ID NO: 134826 - RNA, 12 nt, Homo sapiens
guagaaagugau

SEQ ID NO: 134827 - RNA, 20 nt, Homo sapiens
gcuuagcuaauauugcaaug

SEQ ID NO: 134828 - RNA, 16 nt, Homo sapiens
cuuguauagcaguuuc

SEQ ID NO: 134829 - RNA, 18 nt, Homo sapiens
cucaaagaaauuuccacu

SEQ ID NO: 134830 - RNA, 22 nt, Homo sapiens
aucccucaaaacaaucuuguca

SEQ ID NO: 134831 - RNA, 21 nt, Homo sapiens
gaauuuuuauauccacuaaaa

SEQ ID NO: 134832 - RNA, 11 nt, Homo sapiens
uucaagugauu

SEQ ID NO: 134833 - RNA, 20 nt, Homo sapiens
guuuaugcauagauaaucuc

SEQ ID NO: 134834 - RNA, 14 nt, Homo sapiens
caaaguaagccaug

SEQ ID NO: 134835 - RNA, 15 nt, Homo sapiens
agccauguaucucag

SEQ ID NO: 134836 - RNA, 20 nt, Homo sapiens
uggggacacagcaucagcuc

SEQ ID NO: 134837 - RNA, 23 nt, Homo sapiens
guugauuucagcaccuacagugu

SEQ ID NO: 134838 - RNA, 13 nt, Homo sapiens
aagccuugguaaa

SEQ ID NO: 134839 - RNA, 11 nt, Homo sapiens
ugaacauucca

SEQ ID NO: 134840 - RNA, 16 nt, Homo sapiens
gcagagaggcugaaua

SEQ ID NO: 134841 - RNA, 19 nt, Homo sapiens
cugaguagcuggauuacag

SEQ ID NO: 134842 - RNA, 12 nt, Homo sapiens
uucucugccuca

SEQ ID NO: 134843 - RNA, 20 nt, Homo sapiens
cagcuguuuaugcauagaua

SEQ ID NO: 134844 - RNA, 15 nt, Homo sapiens
cucuguaauugcaaa

SEQ ID NO: 134845 - RNA, 13 nt, Homo sapiens
ucuuaagacguga

SEQ ID NO: 134846 - RNA, 20 nt, Homo sapiens
ccacagugacuccacucuga

SEQ ID NO: 134847 - RNA, 21 nt, Homo sapiens
ggucagaguuccgacugccau

SEQ ID NO: 134848 - RNA, 23 nt, Homo sapiens
aaaacuucaacguaagacugugu

SEQ ID NO: 134849 - RNA, 22 nt, Homo sapiens
caaaaccaaauauuccagagac

SEQ ID NO: 134850 - RNA, 23 nt, Homo sapiens
cacuguuaagccauguguuccaa

SEQ ID NO: 134851 - RNA, 16 nt, Homo sapiens
uuagagcuuuaccuaa

SEQ ID NO: 134852 - RNA, 16 nt, Homo sapiens
aauaaauucaucagau

SEQ ID NO: 134853 - RNA, 17 nt, Homo sapiens
ucuuaaaauagccauaa

SEQ ID NO: 134854 - RNA, 14 nt, Homo sapiens
ugacucuuggcaca

SEQ ID NO: 134855 - RNA, 13 nt, Homo sapiens
aguugcuguaugu

SEQ ID NO: 134856 - RNA, 17 nt, Homo sapiens
ucaaaacaaucuuguca

SEQ ID NO: 134857 - RNA, 12 nt, Homo sapiens
caguguuuccaa

SEQ ID NO: 134858 - RNA, 13 nt, Homo sapiens
ggguaaauucucu

SEQ ID NO: 134859 - RNA, 13 nt, Homo sapiens
uugucaacaaagu

SEQ ID NO: 134860 - RNA, 17 nt, Homo sapiens
aucccgucgacguagaa

SEQ ID NO: 134861 - RNA, 14 nt, Homo sapiens
ucuaauggcuuuau

SEQ ID NO: 134862 - RNA, 19 nt, Homo sapiens
auugcuugcacaaaccaau

SEQ ID NO: 134863 - RNA, 14 nt, Homo sapiens
guccacaguggaac

SEQ ID NO: 134864 - RNA, 18 nt, Homo sapiens
gaauuuggguaugaacag

SEQ ID NO: 134865 - RNA, 20 nt, Homo sapiens
gaacguuuuuccuguucuua

SEQ ID NO: 134866 - RNA, 22 nt, Homo sapiens
agcaaaaccaaauauuccagag

SEQ ID NO: 134867 - RNA, 21 nt, Homo sapiens
aaaucuuuuuuguucaaagau

SEQ ID NO: 134868 - RNA, 13 nt, Homo sapiens
cacucagaaaaug

SEQ ID NO: 134869 - RNA, 20 nt, Homo sapiens
cucuuggguucaagugauuc

SEQ ID NO: 134870 - RNA, 12 nt, Homo sapiens
ugaacauuccag

SEQ ID NO: 134871 - RNA, 16 nt, Homo sapiens
ugagucccagagccaa

SEQ ID NO: 134872 - RNA, 19 nt, Homo sapiens
caguaguggugacuguggg

SEQ ID NO: 134873 - RNA, 17 nt, Homo sapiens
gacgugauuuugcugua

SEQ ID NO: 134874 - RNA, 15 nt, Homo sapiens
ugcacaaaccaauua

SEQ ID NO: 134875 - RNA, 11 nt, Homo sapiens
auaugcacaaa

SEQ ID NO: 134876 - RNA, 16 nt, Homo sapiens
uggcaggacagcuccu

SEQ ID NO: 134877 - RNA, 16 nt, Homo sapiens
uucccauuaaagaagu

SEQ ID NO: 134878 - RNA, 14 nt, Homo sapiens
acagccacuuggga

SEQ ID NO: 134879 - RNA, 15 nt, Homo sapiens
cuccuuagaagugga

SEQ ID NO: 134880 - RNA, 14 nt, Homo sapiens
ugagaaaaugucuu

SEQ ID NO: 134881 - RNA, 19 nt, Homo sapiens
uuacuuuuuccuggcucau

SEQ ID NO: 134882 - RNA, 22 nt, Homo sapiens
cgaauauaucaguaauuucaga

SEQ ID NO: 134883 - RNA, 19 nt, Homo sapiens
cagucuuggcucacugcaa

SEQ ID NO: 134884 - RNA, 23 nt, Homo sapiens
aauguaagaucguucucugccuc

SEQ ID NO: 134885 - RNA, 15 nt, Homo sapiens
aauaaccauugucau

SEQ ID NO: 134886 - RNA, 20 nt, Homo sapiens
ccaggcuggagugcaaugac

SEQ ID NO: 134887 - RNA, 13 nt, Homo sapiens
auuuacauugccu

SEQ ID NO: 134888 - RNA, 16 nt, Homo sapiens
ugaaguuuaauugacu

SEQ ID NO: 134889 - RNA, 13 nt, Homo sapiens
gagcaaacagaaa

SEQ ID NO: 134890 - RNA, 20 nt, Homo sapiens
aagugagcuccuaagccaug

SEQ ID NO: 134891 - RNA, 15 nt, Homo sapiens
ugaaugccacucugu

SEQ ID NO: 134892 - RNA, 14 nt, Homo sapiens
uaguaaaagccauc

SEQ ID NO: 134893 - RNA, 18 nt, Homo sapiens
ccagagcguguagugaau

SEQ ID NO: 134894 - RNA, 16 nt, Homo sapiens
gagggaaaacagaaaa

SEQ ID NO: 134895 - RNA, 11 nt, Homo sapiens
auucaaaguga

SEQ ID NO: 134896 - RNA, 21 nt, Homo sapiens
uaagaucguucucugccucac

SEQ ID NO: 134897 - RNA, 21 nt, Homo sapiens
caaucugaaacagcuucaugg

SEQ ID NO: 134898 - RNA, 18 nt, Homo sapiens
cuucuuuacuuaguucaa

SEQ ID NO: 134899 - RNA, 15 nt, Homo sapiens
ugguuauauguauau

SEQ ID NO: 134900 - RNA, 20 nt, Homo sapiens
ucugaaaaaguauccugcuu

SEQ ID NO: 134901 - RNA, 14 nt, Homo sapiens
acuaagaagcagau

SEQ ID NO: 134902 - RNA, 17 nt, Homo sapiens
caaauugggccaaagaa

SEQ ID NO: 134903 - RNA, 22 nt, Homo sapiens
caccgcgcccagccucaucucu

SEQ ID NO: 134904 - RNA, 11 nt, Homo sapiens
accucaucucc

SEQ ID NO: 134905 - RNA, 16 nt, Homo sapiens
uaagccauguguucca

SEQ ID NO: 134906 - RNA, 16 nt, Homo sapiens
cacagccaaccuagcu

SEQ ID NO: 134907 - RNA, 23 nt, Homo sapiens
uccugaccucaaguaauccaccu

SEQ ID NO: 134908 - RNA, 15 nt, Homo sapiens
ggaccaggucucaua

SEQ ID NO: 134909 - RNA, 13 nt, Homo sapiens
cagagacugggac

SEQ ID NO: 134910 - RNA, 13 nt, Homo sapiens
agagcuuuaccua

SEQ ID NO: 134911 - RNA, 15 nt, Homo sapiens
auucuccugccucag

SEQ ID NO: 134912 - RNA, 13 nt, Homo sapiens
cuuaguugcugua

SEQ ID NO: 134913 - RNA, 20 nt, Homo sapiens
uaaacuuacuuaguguuaug

SEQ ID NO: 134914 - RNA, 16 nt, Homo sapiens
agucugauuguagcua

SEQ ID NO: 134915 - RNA, 16 nt, Homo sapiens
gccagagcaaacagaa

SEQ ID NO: 134916 - RNA, 14 nt, Homo sapiens
aaauucacuucccc

SEQ ID NO: 134917 - RNA, 23 nt, Homo sapiens
acauuuuacuuuuuccuggcuca

SEQ ID NO: 134918 - RNA, 21 nt, Homo sapiens
agugcaguuuuuuucuugucu

SEQ ID NO: 134919 - RNA, 13 nt, Homo sapiens
acuguccaaagac

SEQ ID NO: 134920 - RNA, 17 nt, Homo sapiens
cuaaaaguuaauagggu

SEQ ID NO: 134921 - RNA, 15 nt, Homo sapiens
aaccguacacugugu

SEQ ID NO: 134922 - RNA, 13 nt, Homo sapiens
aagcauucuucaa

SEQ ID NO: 134923 - RNA, 20 nt, Homo sapiens
ucugccuccccuucacuccc

SEQ ID NO: 134924 - RNA, 13 nt, Homo sapiens
guguaccagagaa

SEQ ID NO: 134925 - RNA, 23 nt, Homo sapiens
aaugagcaaaaccaaauauucca

SEQ ID NO: 134926 - RNA, 15 nt, Homo sapiens
uggguucaagugauu

SEQ ID NO: 134927 - RNA, 16 nt, Homo sapiens
agcuguuuuguugaca

SEQ ID NO: 134928 - RNA, 14 nt, Homo sapiens
uuggaaaaucaaga

SEQ ID NO: 134929 - RNA, 23 nt, Homo sapiens
aaucaguguuuccaaucuguccu

SEQ ID NO: 134930 - RNA, 21 nt, Homo sapiens
uuauauguauaucacauuccc

SEQ ID NO: 134931 - RNA, 22 nt, Homo sapiens
aacuuggaaauagugauuucca

SEQ ID NO: 134932 - RNA, 16 nt, Homo sapiens
gucagucuucuuccau

SEQ ID NO: 134933 - RNA, 18 nt, Homo sapiens
uggaaauagugauuucca

SEQ ID NO: 134934 - RNA, 19 nt, Homo sapiens
cucugagucccagagccaa

SEQ ID NO: 134935 - RNA, 17 nt, Homo sapiens
uucuuccaugucuauua

SEQ ID NO: 134936 - RNA, 16 nt, Homo sapiens
gcuccauucaaaguga

SEQ ID NO: 134937 - RNA, 13 nt, Homo sapiens
gcuucuuuacuua

SEQ ID NO: 134938 - RNA, 15 nt, Homo sapiens
cagcaccuacagugu

SEQ ID NO: 134939 - RNA, 13 nt, Homo sapiens
gccauaugaauaa

SEQ ID NO: 134940 - RNA, 17 nt, Homo sapiens
cugcuagggaauaucaa

SEQ ID NO: 134941 - RNA, 20 nt, Homo sapiens
caaguucuuaguugcuguau

SEQ ID NO: 134942 - RNA, 19 nt, Homo sapiens
aauagugauuuccacagug

SEQ ID NO: 134943 - RNA, 16 nt, Homo sapiens
cuucuuuuugcuucaa

SEQ ID NO: 134944 - RNA, 17 nt, Homo sapiens
ggcuaguaaaagccauc

SEQ ID NO: 134945 - RNA, 15 nt, Homo sapiens
agagggaaaacagaa

SEQ ID NO: 134946 - RNA, 18 nt, Homo sapiens
ucuuggguucaagugauu

SEQ ID NO: 134947 - RNA, 12 nt, Homo sapiens
auguaucucagg

SEQ ID NO: 134948 - RNA, 13 nt, Homo sapiens
cacuuuucaaugu

SEQ ID NO: 134949 - RNA, 20 nt, Homo sapiens
ucuacugucucaguuuacau

SEQ ID NO: 134950 - RNA, 19 nt, Homo sapiens
ugagucccagagccaauca

SEQ ID NO: 134951 - RNA, 22 nt, Homo sapiens
agaagauggcacuuauaaccaa

SEQ ID NO: 134952 - RNA, 23 nt, Homo sapiens
ugauagagguucuuuauugcuca

SEQ ID NO: 134953 - RNA, 23 nt, Homo sapiens
caguugcagcuguuuuguugaca

SEQ ID NO: 134954 - RNA, 12 nt, Homo sapiens
uaaaaguuggcu

SEQ ID NO: 134955 - RNA, 15 nt, Homo sapiens
aacugaacauuccag

SEQ ID NO: 134956 - RNA, 15 nt, Homo sapiens
aguguaccagagaag

SEQ ID NO: 134957 - RNA, 16 nt, Homo sapiens
cuugguaaaauaauca

SEQ ID NO: 134958 - RNA, 19 nt, Homo sapiens
cugauguagcuuauacaaa

SEQ ID NO: 134959 - RNA, 13 nt, Homo sapiens
ccaggggagaccc

SEQ ID NO: 134960 - RNA, 21 nt, Homo sapiens
ugguuuugcucacaaaagucu

SEQ ID NO: 134961 - RNA, 18 nt, Homo sapiens
cgugaccugccaggcaca

SEQ ID NO: 134962 - RNA, 19 nt, Homo sapiens
caccaacuauagaauguau

SEQ ID NO: 134963 - RNA, 21 nt, Homo sapiens
gaccaauauuguacaguuuuu

SEQ ID NO: 134964 - RNA, 21 nt, Homo sapiens
ucucccagccagguucugacu

SEQ ID NO: 134965 - RNA, 10 nt, Homo sapiens
aaacuuguau

SEQ ID NO: 134966 - RNA, 14 nt, Homo sapiens
aacaucauuucaau

SEQ ID NO: 134967 - RNA, 14 nt, Homo sapiens
cuuagaaagucuga

SEQ ID NO: 134968 - RNA, 13 nt, Homo sapiens
agucuucuuccau

SEQ ID NO: 134969 - RNA, 17 nt, Homo sapiens
ugaauuuugucuuuaug

SEQ ID NO: 134970 - RNA, 12 nt, Homo sapiens
uuaagaaauuca

SEQ ID NO: 134971 - RNA, 18 nt, Homo sapiens
accaacuauagaauguau

SEQ ID NO: 134972 - RNA, 18 nt, Homo sapiens
aaguucuuaguugcugua

SEQ ID NO: 134973 - RNA, 21 nt, Homo sapiens
ugcccaggcuggagugcaaug

SEQ ID NO: 134974 - RNA, 22 nt, Homo sapiens
gcuggauuacaggcaugugcca

SEQ ID NO: 134975 - RNA, 21 nt, Homo sapiens
aaaugugacucaagacuucca

SEQ ID NO: 134976 - RNA, 13 nt, Homo sapiens
gaauuaagcacag

SEQ ID NO: 134977 - RNA, 13 nt, Homo sapiens
agaaagugaucca

SEQ ID NO: 134978 - RNA, 18 nt, Homo sapiens
uccagagacugggacuaa

SEQ ID NO: 134979 - RNA, 20 nt, Homo sapiens
agcaacauuuguuuuagucu

SEQ ID NO: 134980 - RNA, 16 nt, Homo sapiens
uaaugguuauauguau

SEQ ID NO: 134981 - RNA, 20 nt, Homo sapiens
gucaaagauacacaaucuga

SEQ ID NO: 134982 - RNA, 13 nt, Homo sapiens
ucaaaaacauucu

SEQ ID NO: 134983 - RNA, 19 nt, Homo sapiens
uaaguuacacauuuuucag

SEQ ID NO: 134984 - RNA, 19 nt, Homo sapiens
agaucguucucugccucac

SEQ ID NO: 134985 - RNA, 15 nt, Homo sapiens
aauguauuugcuaua

SEQ ID NO: 134986 - RNA, 13 nt, Homo sapiens
cagaaaaagaagg

SEQ ID NO: 134987 - RNA, 11 nt, Homo sapiens
gaaaacagaaa

SEQ ID NO: 134988 - RNA, 23 nt, Homo sapiens
uuacuguucuaaggcugugccau

SEQ ID NO: 134989 - RNA, 22 nt, Homo sapiens
agauucuaauggcuuuauugca

SEQ ID NO: 134990 - RNA, 19 nt, Homo sapiens
ucagaguuccgacugccau

SEQ ID NO: 134991 - RNA, 20 nt, Homo sapiens
ggacuaaguguaccagagaa

SEQ ID NO: 134992 - RNA, 15 nt, Homo sapiens
cccacccaacuaauu

SEQ ID NO: 134993 - RNA, 18 nt, Homo sapiens
uguuguuuucccaaagag

SEQ ID NO: 134994 - RNA, 15 nt, Homo sapiens
cuagaguucauggau

SEQ ID NO: 134995 - RNA, 22 nt, Homo sapiens
aauauuccagagacugggacua

SEQ ID NO: 134996 - RNA, 20 nt, Homo sapiens
ugcccaggcuggagugcaau

SEQ ID NO: 134997 - RNA, 14 nt, Homo sapiens
gcuccuaagccaug

SEQ ID NO: 134998 - RNA, 17 nt, Homo sapiens
cacauuuuucagauaua

SEQ ID NO: 134999 - RNA, 21 nt, Homo sapiens
aauuuuauguuuaguugcaca

SEQ ID NO: 135000 - RNA, 18 nt, Homo sapiens
gaaccaggccagagcaaa

SEQ ID NO: 135001 - RNA, 15 nt, Homo sapiens
cuaacaguaguugca

SEQ ID NO: 135002 - RNA, 15 nt, Homo sapiens
acacaaucugaaaca

SEQ ID NO: 135003 - RNA, 16 nt, Homo sapiens
augcaguuuuccuuaa

SEQ ID NO: 135004 - RNA, 22 nt, Homo sapiens
gacucuauuaaaaucuucaaua

SEQ ID NO: 135005 - RNA, 12 nt, Homo sapiens
uccccucuagga

SEQ ID NO: 135006 - RNA, 21 nt, Homo sapiens
ccacugccaaagaacuuggaa

SEQ ID NO: 135007 - RNA, 22 nt, Homo sapiens
aaugccacucuguaauugcaaa

SEQ ID NO: 135008 - RNA, 16 nt, Homo sapiens
aaaccaaauauuccag

SEQ ID NO: 135009 - RNA, 21 nt, Homo sapiens
gaguucauggauauguuauac

SEQ ID NO: 135010 - RNA, 16 nt, Homo sapiens
aguugcaauguuuuag

SEQ ID NO: 135011 - RNA, 15 nt, Homo sapiens
cugaccaauauugua

SEQ ID NO: 135012 - RNA, 17 nt, Homo sapiens
agggagugggcuaagca

SEQ ID NO: 135013 - RNA, 15 nt, Homo sapiens
uugcaauguggcuug

SEQ ID NO: 135014 - RNA, 17 nt, Homo sapiens
gcaauggacaaggaagg

SEQ ID NO: 135015 - RNA, 13 nt, Homo sapiens
gucuauuagcucc

SEQ ID NO: 135016 - RNA, 20 nt, Homo sapiens
gaguucauggauauguuaua

SEQ ID NO: 135017 - RNA, 13 nt, Homo sapiens
guaagacugugua

SEQ ID NO: 135018 - RNA, 15 nt, Homo sapiens
uccacagugacucca

SEQ ID NO: 135019 - RNA, 18 nt, Homo sapiens
aaggacacuagaagauuu

SEQ ID NO: 135020 - RNA, 14 nt, Homo sapiens
auuguagcuaugau

SEQ ID NO: 135021 - RNA, 15 nt, Homo sapiens
guaggugguuuugaa

SEQ ID NO: 135022 - RNA, 13 nt, Homo sapiens
gugauauguuggu

SEQ ID NO: 135023 - RNA, 22 nt, Homo sapiens
uagaaccucgagguuucucaaa

SEQ ID NO: 135024 - RNA, 20 nt, Homo sapiens
auuagcauuugucaacaaag

SEQ ID NO: 135025 - RNA, 20 nt, Homo sapiens
gcagaugguggagcugaaua

SEQ ID NO: 135026 - RNA, 22 nt, Homo sapiens
cuguagaaaagggaacugaaca

SEQ ID NO: 135027 - RNA, 13 nt, Homo sapiens
aaaugaaagugag

SEQ ID NO: 135028 - RNA, 21 nt, Homo sapiens
aaagcuagaaaguguaugugu

SEQ ID NO: 135029 - RNA, 21 nt, Homo sapiens
ugaugcuggggacacagcauc

SEQ ID NO: 135030 - RNA, 19 nt, Homo sapiens
uguuuuuaauaaagacagg

SEQ ID NO: 135031 - RNA, 13 nt, Homo sapiens
uccacaguggaac

SEQ ID NO: 135032 - RNA, 17 nt, Homo sapiens
uguuucaaacaaaaagu

SEQ ID NO: 135033 - RNA, 23 nt, Homo sapiens
aaaaccguaugagggaacugugu

SEQ ID NO: 135034 - RNA, 14 nt, Homo sapiens
uacgacaacuugca

SEQ ID NO: 135035 - RNA, 21 nt, Homo sapiens
aaagcccuuaaaaauaugugu

SEQ ID NO: 135036 - RNA, 18 nt, Homo sapiens
gcccaggcuggagugcaa

SEQ ID NO: 135037 - RNA, 23 nt, Homo sapiens
auacuguuuuacuguccaaagac

SEQ ID NO: 135038 - RNA, 22 nt, Homo sapiens
gccuaggaaagccaguuacaua

SEQ ID NO: 135039 - RNA, 21 nt, Homo sapiens
ugcacaaauugggccaaagaa

SEQ ID NO: 135040 - RNA, 17 nt, Homo sapiens
uuaugaauaguuuccaa

SEQ ID NO: 135041 - RNA, 14 nt, Homo sapiens
cuggccuccaaguc

SEQ ID NO: 135042 - RNA, 21 nt, Homo sapiens
cccacugccaaagaacuugga

SEQ ID NO: 135043 - RNA, 22 nt, Homo sapiens
uuaaguuacacauuuuucagau

SEQ ID NO: 135044 - RNA, 14 nt, Homo sapiens
uguagaaagugauc

SEQ ID NO: 135045 - RNA, 19 nt, Homo sapiens
uggaaauagugauuuccac

SEQ ID NO: 135046 - RNA, 19 nt, Homo sapiens
agccaugggagacacugau

SEQ ID NO: 135047 - RNA, 16 nt, Homo sapiens
ugaaugccacucugua

SEQ ID NO: 135048 - RNA, 18 nt, Homo sapiens
ucacagccacuugggaua

SEQ ID NO: 135049 - RNA, 22 nt, Homo sapiens
cccucccacugccaaagaacuu

SEQ ID NO: 135050 - RNA, 17 nt, Homo sapiens
ugcuugcacaaaccaau

SEQ ID NO: 135051 - RNA, 20 nt, Homo sapiens
uguguuuuuaauaaagacag

SEQ ID NO: 135052 - RNA, 15 nt, Homo sapiens
cuaguaaaagccauc

SEQ ID NO: 135053 - RNA, 24 nt, Homo sapiens
ggacagcuccuggaccaggcccau

SEQ ID NO: 135054 - RNA, 13 nt, Homo sapiens
cagccucaucucu

SEQ ID NO: 135055 - RNA, 20 nt, Homo sapiens
ucauauugaugugugucuag

SEQ ID NO: 135056 - RNA, 12 nt, Homo sapiens
ggaaaauucucu

SEQ ID NO: 135057 - RNA, 15 nt, Homo sapiens
auugaacuuaugcaa

SEQ ID NO: 135058 - RNA, 19 nt, Homo sapiens
cuuuaauuuuuuacuauuu

SEQ ID NO: 135059 - RNA, 13 nt, Homo sapiens
uucagaaucucuc

SEQ ID NO: 135060 - RNA, 13 nt, Homo sapiens
ugacacagucuug

SEQ ID NO: 135061 - RNA, 16 nt, Homo sapiens
aaguccacaguggaac

SEQ ID NO: 135062 - RNA, 19 nt, Homo sapiens
uuucuuucaaagaagccag

SEQ ID NO: 135063 - RNA, 17 nt, Homo sapiens
cugauguagcuuauaca

SEQ ID NO: 135064 - RNA, 22 nt, Homo sapiens
ucccuucuuuuuguucuucauc

SEQ ID NO: 135065 - RNA, 13 nt, Homo sapiens
ggcaggacagcuc

SEQ ID NO: 135066 - RNA, 21 nt, Homo sapiens
gaauucagucaaagauacaca

SEQ ID NO: 135067 - RNA, 23 nt, Homo sapiens
aacuuggaaauagugauuuccac

SEQ ID NO: 135068 - RNA, 21 nt, Homo sapiens
auuuuacuuuuuccuggcuca

SEQ ID NO: 135069 - RNA, 14 nt, Homo sapiens
gucugaacaauaua

SEQ ID NO: 135070 - RNA, 20 nt, Homo sapiens
gccagguucugacucuuggc

SEQ ID NO: 135071 - RNA, 17 nt, Homo sapiens
aaccguacacuguguuu

SEQ ID NO: 135072 - RNA, 12 nt, Homo sapiens
ucccacugccaa

SEQ ID NO: 135073 - RNA, 12 nt, Homo sapiens
gacucaagcaag

SEQ ID NO: 135074 - RNA, 20 nt, Homo sapiens
aaaaucaaacaauucaggga

SEQ ID NO: 135075 - RNA, 16 nt, Homo sapiens
gcauuugucaacaaag

SEQ ID NO: 135076 - RNA, 18 nt, Homo sapiens
cuauuuuuuguaaugugu

SEQ ID NO: 135077 - RNA, 16 nt, Homo sapiens
aaugccacucuguaau

SEQ ID NO: 135078 - RNA, 23 nt, Homo sapiens
uguuaagccauguguuccaaggc

SEQ ID NO: 135079 - RNA, 16 nt, Homo sapiens
cucaaagaaauuucca

SEQ ID NO: 135080 - RNA, 17 nt, Homo sapiens
guucuaaggcugugcca

SEQ ID NO: 135081 - RNA, 14 nt, Homo sapiens
agccucaucucuuu

SEQ ID NO: 135082 - RNA, 19 nt, Homo sapiens
guagaaaagggaacugaac

SEQ ID NO: 135083 - RNA, 18 nt, Homo sapiens
auaggaggccaacccaaa

SEQ ID NO: 135084 - RNA, 21 nt, Homo sapiens
cucugauguagcuuauacaaa

SEQ ID NO: 135085 - RNA, 16 nt, Homo sapiens
caggcuggagugcaau

SEQ ID NO: 135086 - RNA, 15 nt, Homo sapiens
ccuuagaaguggaag

SEQ ID NO: 135087 - RNA, 19 nt, Homo sapiens
uuuucuucuuuuugcuuca

SEQ ID NO: 135088 - RNA, 17 nt, Homo sapiens
cuucuuuuuguucuuca

SEQ ID NO: 135089 - RNA, 17 nt, Homo sapiens
uagugaaucacguaaag

SEQ ID NO: 135090 - RNA, 22 nt, Homo sapiens
gcccagacccuucuccuuagaa

SEQ ID NO: 135091 - RNA, 22 nt, Homo sapiens
gcgcaguuggucuuuaaccacu

SEQ ID NO: 135092 - RNA, 21 nt, Homo sapiens
caaguucuuaguugcuguaug

SEQ ID NO: 135093 - RNA, 12 nt, Homo sapiens
acugugggcucc

SEQ ID NO: 135094 - RNA, 17 nt, Homo sapiens
cuuagccaagcaguuuc

SEQ ID NO: 135095 - RNA, 17 nt, Homo sapiens
cuaagcacgggccauau

SEQ ID NO: 135096 - RNA, 17 nt, Homo sapiens
ggcaggaccuguggcca

SEQ ID NO: 135097 - RNA, 14 nt, Homo sapiens
agccaguuacauaa

SEQ ID NO: 135098 - RNA, 15 nt, Homo sapiens
guauuaaguuguuaa

SEQ ID NO: 135099 - RNA, 15 nt, Homo sapiens
acacagcaucagcuc

SEQ ID NO: 135100 - RNA, 19 nt, Homo sapiens
augugacucaagacuucca

SEQ ID NO: 135101 - RNA, 22 nt, Homo sapiens
ucugauaugcaguuuuccuuaa

SEQ ID NO: 135102 - RNA, 15 nt, Homo sapiens
cauucugcacucaga

SEQ ID NO: 135103 - RNA, 15 nt, Homo sapiens
caaugacacagucuu

SEQ ID NO: 135104 - RNA, 16 nt, Homo sapiens
uacaauauacuuguau

SEQ ID NO: 135105 - RNA, 18 nt, Homo sapiens
aauuucucuacugucuca

SEQ ID NO: 135106 - RNA, 20 nt, Homo sapiens
auuccacaaccugguuugcc

SEQ ID NO: 135107 - RNA, 20 nt, Homo sapiens
cgccacccucccacugccaa

SEQ ID NO: 135108 - RNA, 21 nt, Homo sapiens
guuguuaauaaaaguacaugu

SEQ ID NO: 135109 - RNA, 15 nt, Homo sapiens
cuuuauacucaggca

SEQ ID NO: 135110 - RNA, 21 nt, Homo sapiens
aauguuuuagaaugagacuua

SEQ ID NO: 135111 - RNA, 10 nt, Homo sapiens
uaaagacaga

SEQ ID NO: 135112 - RNA, 14 nt, Homo sapiens
aaacaaucuuguca

SEQ ID NO: 135113 - RNA, 15 nt, Homo sapiens
agcugccuguacaca

SEQ ID NO: 135114 - RNA, 16 nt, Homo sapiens
aacuuacuuaguguua

SEQ ID NO: 135115 - RNA, 18 nt, Homo sapiens
gcaaacagaaaaagaagg

SEQ ID NO: 135116 - RNA, 18 nt, Homo sapiens
cuugacuuuugaaaacaa

SEQ ID NO: 135117 - RNA, 15 nt, Homo sapiens
cuggagucugucaau

SEQ ID NO: 135118 - RNA, 14 nt, Homo sapiens
acuuauuuauauaa

SEQ ID NO: 135119 - RNA, 16 nt, Homo sapiens
aacaaagucacccacu

SEQ ID NO: 135120 - RNA, 18 nt, Homo sapiens
uguagaagauggcacuua

SEQ ID NO: 135121 - RNA, 15 nt, Homo sapiens
cucaggcagaucuca

SEQ ID NO: 135122 - RNA, 15 nt, Homo sapiens
gcuaguaaaagccau

SEQ ID NO: 135123 - RNA, 12 nt, Homo sapiens
cuguccaaagac

SEQ ID NO: 135124 - RNA, 14 nt, Homo sapiens
ugcuguaugucucg

SEQ ID NO: 135125 - RNA, 16 nt, Homo sapiens
aaaagggaacugaaca

SEQ ID NO: 135126 - RNA, 15 nt, Homo sapiens
uuuuccuguucuuaa

SEQ ID NO: 135127 - RNA, 23 nt, Homo sapiens
uuuauacucaggcagaucucagc

SEQ ID NO: 135128 - RNA, 18 nt, Homo sapiens
augagaaaaugucuuuau

SEQ ID NO: 135129 - RNA, 17 nt, Homo sapiens
cuaaguguaccagagaa

SEQ ID NO: 135130 - RNA, 16 nt, Homo sapiens
agcuagcaacauuugu

SEQ ID NO: 135131 - RNA, 18 nt, Homo sapiens
cagaaagcuagaaagugu

SEQ ID NO: 135132 - RNA, 19 nt, Homo sapiens
uccuggaggugacacuuga

SEQ ID NO: 135133 - RNA, 21 nt, Homo sapiens
aaauuaagaaauucacuuccc

SEQ ID NO: 135134 - RNA, 17 nt, Homo sapiens
uuagugcacagcacaaa

SEQ ID NO: 135135 - RNA, 14 nt, Homo sapiens
caauauacuuguau

SEQ ID NO: 135136 - RNA, 13 nt, Homo sapiens
ucaaguaauccac

SEQ ID NO: 135137 - RNA, 23 nt, Homo sapiens
uuacuuuuuccuggcucaucucu

SEQ ID NO: 135138 - RNA, 22 nt, Homo sapiens
agcagaugguggagcugaauau

SEQ ID NO: 135139 - RNA, 14 nt, Homo sapiens
ccaaagugguauag

SEQ ID NO: 135140 - RNA, 22 nt, Homo sapiens
ccauuagcauuugucaacaaag

SEQ ID NO: 135141 - RNA, 19 nt, Homo sapiens
gcauuugucaacaaaguca

SEQ ID NO: 135142 - RNA, 19 nt, Homo sapiens
acugggcgcaguuggucuu

SEQ ID NO: 135143 - RNA, 21 nt, Homo sapiens
augucuuuauuaaauguagaa

SEQ ID NO: 135144 - RNA, 16 nt, Homo sapiens
cauaacaggagugcca

SEQ ID NO: 135145 - RNA, 22 nt, Homo sapiens
uuaccuuuuauuuuaauguuuc

SEQ ID NO: 135146 - RNA, 21 nt, Homo sapiens
aaaauuaagaaauucacuucc

SEQ ID NO: 135147 - RNA, 15 nt, Homo sapiens
aagccauguaucuca

SEQ ID NO: 135148 - RNA, 18 nt, Homo sapiens
uucugcauucucuaguca

SEQ ID NO: 135149 - RNA, 14 nt, Homo sapiens
ucaucucuuuauuc

SEQ ID NO: 135150 - RNA, 23 nt, Homo sapiens
ccuaggaaagccaguuacauaaa

SEQ ID NO: 135151 - RNA, 15 nt, Homo sapiens
agggagaagagggaa

SEQ ID NO: 135152 - RNA, 22 nt, Homo sapiens
gaaaaagaagguugagggcaau

SEQ ID NO: 135153 - RNA, 21 nt, Homo sapiens
cauucccguggaacguuuuuc

SEQ ID NO: 135154 - RNA, 19 nt, Homo sapiens
auuuuauguuuaguugcac

SEQ ID NO: 135155 - RNA, 22 nt, Homo sapiens
gugggcuaagcacgggccauau

SEQ ID NO: 135156 - RNA, 23 nt, Homo sapiens
gcaaaaccaaauauuccagagac

SEQ ID NO: 135157 - RNA, 18 nt, Homo sapiens
ugcaaugacacagucuug

SEQ ID NO: 135158 - RNA, 20 nt, Homo sapiens
cagccuccugaguagcugga

SEQ ID NO: 135159 - RNA, 23 nt, Homo sapiens
cagucaaagauacacaaucugaa

SEQ ID NO: 135160 - RNA, 17 nt, Homo sapiens
gaugcuggggacacagc

SEQ ID NO: 135161 - RNA, 23 nt, Homo sapiens
uagugauuuccacagugacucca

SEQ ID NO: 135162 - RNA, 19 nt, Homo sapiens
cuuaugcaaauaaccauug

SEQ ID NO: 135163 - RNA, 21 nt, Homo sapiens
guagagagagaaaaguaacug

SEQ ID NO: 135164 - RNA, 12 nt, Homo sapiens
uguagaaaguga

SEQ ID NO: 135165 - RNA, 21 nt, Homo sapiens
aauguguucggugauuucaga

SEQ ID NO: 135166 - RNA, 13 nt, Homo sapiens
aaaaugugacuca

SEQ ID NO: 135167 - RNA, 23 nt, Homo sapiens
gucucauaaugcauguggcacuu

SEQ ID NO: 135168 - RNA, 16 nt, Homo sapiens
cgugauuuugcuguag

SEQ ID NO: 135169 - RNA, 17 nt, Homo sapiens
gaaugagcaaaaccaaa

SEQ ID NO: 135170 - RNA, 14 nt, Homo sapiens
cacaaucugaaaca

SEQ ID NO: 135171 - RNA, 14 nt, Homo sapiens
aaaaggcagaguac

SEQ ID NO: 135172 - RNA, 15 nt, Homo sapiens
ucuaaaaucugcuag

SEQ ID NO: 135173 - RNA, 15 nt, Homo sapiens
ugugggcuccauuca

SEQ ID NO: 135174 - RNA, 16 nt, Homo sapiens
acguaagacuguguaa

SEQ ID NO: 135175 - RNA, 15 nt, Homo sapiens
gguccaaggucucca

SEQ ID NO: 135176 - RNA, 13 nt, Homo sapiens
aaaguaagccaug

SEQ ID NO: 135177 - RNA, 19 nt, Homo sapiens
aacugaaugccacucugua

SEQ ID NO: 135178 - RNA, 22 nt, Homo sapiens
gugcuucuuaaaauagccauaa

SEQ ID NO: 135179 - RNA, 15 nt, Homo sapiens
auacuagaguucaug

SEQ ID NO: 135180 - RNA, 22 nt, Homo sapiens
ggcugucagauauaaguaacuu

SEQ ID NO: 135181 - RNA, 13 nt, Homo sapiens
ugaacauugcaau

SEQ ID NO: 135182 - RNA, 16 nt, Homo sapiens
gcaguggaacuaagaa

SEQ ID NO: 135183 - RNA, 12 nt, Homo sapiens
aacuucugccuc

SEQ ID NO: 135184 - RNA, 16 nt, Homo sapiens
aaaugcugguuuuuca

SEQ ID NO: 135185 - RNA, 23 nt, Homo sapiens
uucagauauaaaagacugaccaa

SEQ ID NO: 135186 - RNA, 19 nt, Homo sapiens
gccacccucccacugccaa

SEQ ID NO: 135187 - RNA, 11 nt, Homo sapiens
auaguuuccaa

SEQ ID NO: 135188 - RNA, 18 nt, Homo sapiens
gauaaucucuccauuccc

SEQ ID NO: 135189 - RNA, 13 nt, Homo sapiens
ccuacugagacag

SEQ ID NO: 135190 - RNA, 14 nt, Homo sapiens
auguaucucaggaa

SEQ ID NO: 135191 - RNA, 20 nt, Homo sapiens
agugcaguuuuuuucuuguc

SEQ ID NO: 135192 - RNA, 14 nt, Homo sapiens
acguaagacugugu

SEQ ID NO: 135193 - RNA, 18 nt, Homo sapiens
uacuuauagaauucaguc

SEQ ID NO: 135194 - RNA, 12 nt, Homo sapiens
uguaccagagaa

SEQ ID NO: 135195 - RNA, 21 nt, Homo sapiens
acugcauaugaaaggacacua

SEQ ID NO: 135196 - RNA, 24 nt, Homo sapiens
aaucccucaaaacaaucuugucau

SEQ ID NO: 135197 - RNA, 23 nt, Homo sapiens
ccaguaguggugacugugggcuc

SEQ ID NO: 135198 - RNA, 17 nt, Homo sapiens
ucuggccuccaagucca

SEQ ID NO: 135199 - RNA, 13 nt, Homo sapiens
ggauuacagggau

SEQ ID NO: 135200 - RNA, 15 nt, Homo sapiens
agucugaacaauaua

SEQ ID NO: 135201 - RNA, 14 nt, Homo sapiens
ugaauaguuuccaa

SEQ ID NO: 135202 - RNA, 21 nt, Homo sapiens
uggauuacaggcaugugccac

SEQ ID NO: 135203 - RNA, 21 nt, Homo sapiens
accgcgcccagccucaucucu

SEQ ID NO: 135204 - RNA, 14 nt, Homo sapiens
agaugaaacaucau

SEQ ID NO: 135205 - RNA, 18 nt, Homo sapiens
gccacccucccacugcca

SEQ ID NO: 135206 - RNA, 19 nt, Homo sapiens
cgugauuuugcuguagaag

SEQ ID NO: 135207 - RNA, 17 nt, Homo sapiens
uggcacuuauaaccaaa

SEQ ID NO: 135208 - RNA, 13 nt, Homo sapiens
agaagaugaauga

SEQ ID NO: 135209 - RNA, 14 nt, Homo sapiens
uuuauugcuuguug

SEQ ID NO: 135210 - RNA, 17 nt, Homo sapiens
gaauuucuguucuucca

SEQ ID NO: 135211 - RNA, 22 nt, Homo sapiens
uagugaaucacguaaagcuaga

SEQ ID NO: 135212 - RNA, 23 nt, Homo sapiens
gucaauguccuacugagacagca

SEQ ID NO: 135213 - RNA, 22 nt, Homo sapiens
cuuaaaagaaagagaaguuuuc

SEQ ID NO: 135214 - RNA, 23 nt, Homo sapiens
gagacagcacagccaaccuagcu

SEQ ID NO: 135215 - RNA, 15 nt, Homo sapiens
uccuguuacaaaaga

SEQ ID NO: 135216 - RNA, 20 nt, Homo sapiens
uauacccguuucacaugcuu

SEQ ID NO: 135217 - RNA, 22 nt, Homo sapiens
caaucaauucauaucuauuuau

SEQ ID NO: 135218 - RNA, 18 nt, Homo sapiens
cauauugaugugugucua

SEQ ID NO: 135219 - RNA, 16 nt, Homo sapiens
uuuaauguuuccuuua

SEQ ID NO: 135220 - RNA, 23 nt, Homo sapiens
aaugucuuuauuaaauguagaaa

SEQ ID NO: 135221 - RNA, 14 nt, Homo sapiens
auagaauucaguca

SEQ ID NO: 135222 - RNA, 17 nt, Homo sapiens
cuagaguucauggauau

SEQ ID NO: 135223 - RNA, 13 nt, Homo sapiens
caaaaccaaauau

SEQ ID NO: 135224 - RNA, 18 nt, Homo sapiens
uuaagccauguguuccaa

SEQ ID NO: 135225 - RNA, 18 nt, Homo sapiens
ugguuguauuaaagcagg

SEQ ID NO: 135226 - RNA, 23 nt, Homo sapiens
uaaaaguuggcucaggagucuua

SEQ ID NO: 135227 - RNA, 11 nt, Homo sapiens
ggaacugugua

SEQ ID NO: 135228 - RNA, 20 nt, Homo sapiens
ggcuggagugcaaugacaca

SEQ ID NO: 135229 - RNA, 16 nt, Homo sapiens
uauugaacuuaugcaa

SEQ ID NO: 135230 - RNA, 12 nt, Homo sapiens
gcaaaaccaaau

SEQ ID NO: 135231 - RNA, 23 nt, Homo sapiens
uuccaaucuguccuguuacaaaa

SEQ ID NO: 135232 - RNA, 16 nt, Homo sapiens
aagcagguucuuguua

SEQ ID NO: 135233 - RNA, 18 nt, Homo sapiens
gccagagcaaacagaaaa

SEQ ID NO: 135234 - RNA, 21 nt, Homo sapiens
uguuuaugaauaguuuccaaa

SEQ ID NO: 135235 - RNA, 15 nt, Homo sapiens
aaaacaaucuuguca

SEQ ID NO: 135236 - RNA, 13 nt, Homo sapiens
ggaaccagcccag

SEQ ID NO: 135237 - RNA, 22 nt, Homo sapiens
cacuuagguccaaggucuccag

SEQ ID NO: 135238 - RNA, 23 nt, Homo sapiens
uccuggggaacauagaacucaug

SEQ ID NO: 135239 - RNA, 12 nt, Homo sapiens
gcuggagugcaa

SEQ ID NO: 135240 - RNA, 17 nt, Homo sapiens
caggacagcuccuggac

SEQ ID NO: 135241 - RNA, 16 nt, Homo sapiens
cagccagguucugacu

SEQ ID NO: 135242 - RNA, 21 nt, Homo sapiens
guccaucccgucgacguagaa

SEQ ID NO: 135243 - RNA, 14 nt, Homo sapiens
cuuccaucaccucc

SEQ ID NO: 135244 - RNA, 18 nt, Homo sapiens
aaccucgagguuucucaa

SEQ ID NO: 135245 - RNA, 17 nt, Homo sapiens
gucaauguccuacugag

SEQ ID NO: 135246 - RNA, 14 nt, Homo sapiens
uguguuuuuaauaa

SEQ ID NO: 135247 - RNA, 18 nt, Homo sapiens
acugaauuuugucuuuau

SEQ ID NO: 135248 - RNA, 18 nt, Homo sapiens
ucucgugguaggacugua

SEQ ID NO: 135249 - RNA, 17 nt, Homo sapiens
ucaauguccuacugaga

SEQ ID NO: 135250 - RNA, 19 nt, Homo sapiens
ugaacauugcaauagaaau

SEQ ID NO: 135251 - RNA, 20 nt, Homo sapiens
gaccugccaggcacacugag

SEQ ID NO: 135252 - RNA, 17 nt, Homo sapiens
acauaaaaguuggcuca

SEQ ID NO: 135253 - RNA, 16 nt, Homo sapiens
uaugaauaguuuccaa

SEQ ID NO: 135254 - RNA, 16 nt, Homo sapiens
ugcaaugacacagucu

SEQ ID NO: 135255 - RNA, 18 nt, Homo sapiens
uggcuaguaaaagccauc

SEQ ID NO: 135256 - RNA, 13 nt, Homo sapiens
caucauuuccauu

SEQ ID NO: 135257 - RNA, 22 nt, Homo sapiens
caauauauacuuauagaauuca

SEQ ID NO: 135258 - RNA, 18 nt, Homo sapiens
auugcaauagaaauccaa

SEQ ID NO: 135259 - RNA, 22 nt, Homo sapiens
uagucugaacaauauauacuua

SEQ ID NO: 135260 - RNA, 12 nt, Homo sapiens
uuacauugccuu

SEQ ID NO: 135261 - RNA, 15 nt, Homo sapiens
cuguggccaaguucu

SEQ ID NO: 135262 - RNA, 15 nt, Homo sapiens
gaccauuagcauuug

SEQ ID NO: 135263 - RNA, 22 nt, Homo sapiens
guaaaauaaucaguguuuccaa

SEQ ID NO: 135264 - RNA, 19 nt, Homo sapiens
gcuucuuaaaauagccaua

SEQ ID NO: 135265 - RNA, 18 nt, Homo sapiens
cuuuuuuuuaaguuacac

SEQ ID NO: 135266 - RNA, 22 nt, Homo sapiens
uuaaaaaauggacucuugaaau

SEQ ID NO: 135267 - RNA, 22 nt, Homo sapiens
acagucuuguauuaaguuguua

SEQ ID NO: 135268 - RNA, 19 nt, Homo sapiens
gaguacaaaguaagccaug

SEQ ID NO: 135269 - RNA, 20 nt, Homo sapiens
ucuaagccuucugguuuuau

SEQ ID NO: 135270 - RNA, 17 nt, Homo sapiens
ggcucucccagccaggu

SEQ ID NO: 135271 - RNA, 15 nt, Homo sapiens
aaaaguuuuguaaau

SEQ ID NO: 135272 - RNA, 17 nt, Homo sapiens
uaugacacucuagucaa

SEQ ID NO: 135273 - RNA, 14 nt, Homo sapiens
ucucugcuaucuag

SEQ ID NO: 135274 - RNA, 24 nt, Homo sapiens
agugagacuuugaggguguauauu

SEQ ID NO: 135275 - RNA, 21 nt, Homo sapiens
acuguuuugguuuugcucaca

SEQ ID NO: 135276 - RNA, 16 nt, Homo sapiens
uagaaauccaauugga

SEQ ID NO: 135277 - RNA, 22 nt, Homo sapiens
uggauuugucuuuggugaacau

SEQ ID NO: 135278 - RNA, 23 nt, Homo sapiens
ugcuucuuugaaacuuguaugaa

SEQ ID NO: 135279 - RNA, 15 nt, Homo sapiens
ugggauuacagggau

SEQ ID NO: 135280 - RNA, 22 nt, Homo sapiens
gggaaggaggccguccaucccg

SEQ ID NO: 135281 - RNA, 16 nt, Homo sapiens
gccacuguuaagccau

SEQ ID NO: 135282 - RNA, 16 nt, Homo sapiens
ucagcaccuacagugu

SEQ ID NO: 135283 - RNA, 19 nt, Homo sapiens
caaagugcugggauuacag

SEQ ID NO: 135284 - RNA, 15 nt, Homo sapiens
aaugacacagucuug

SEQ ID NO: 135285 - RNA, 14 nt, Homo sapiens
cuagucaguuggcu

SEQ ID NO: 135286 - RNA, 17 nt, Homo sapiens
gucaaagccuugguaaa

SEQ ID NO: 135287 - RNA, 23 nt, Homo sapiens
guucauggauauguuauacugaa

SEQ ID NO: 135288 - RNA, 21 nt, Homo sapiens
uggggacacagcaucagcuca

SEQ ID NO: 135289 - RNA, 12 nt, Homo sapiens
ggagacacugau

SEQ ID NO: 135290 - RNA, 16 nt, Homo sapiens
gcaauagaaauccaau

SEQ ID NO: 135291 - RNA, 16 nt, Homo sapiens
uugacauucugaaugc

SEQ ID NO: 135292 - RNA, 22 nt, Homo sapiens
acagcauggagucacagccacu

SEQ ID NO: 135293 - RNA, 23 nt, Homo sapiens
ccacuguuaagccauguguucca

SEQ ID NO: 135294 - RNA, 15 nt, Homo sapiens
augagcaaaaccaaa

SEQ ID NO: 135295 - RNA, 19 nt, Homo sapiens
gacgugauuuugcuguaga

SEQ ID NO: 135296 - RNA, 22 nt, Homo sapiens
aaagccaaucucaaucccucaa

SEQ ID NO: 135297 - RNA, 17 nt, Homo sapiens
cuucuuuuugcuucaaa

SEQ ID NO: 135298 - RNA, 19 nt, Homo sapiens
uagugauuuccacagugac

SEQ ID NO: 135299 - RNA, 21 nt, Homo sapiens
ucugaacaauauauacuuaua

SEQ ID NO: 135300 - RNA, 23 nt, Homo sapiens
gccuuccuggaggugacacuuga

SEQ ID NO: 135301 - RNA, 18 nt, Homo sapiens
uuuaaaugaaagugagac

SEQ ID NO: 135302 - RNA, 13 nt, Homo sapiens
ucaaagugagcuc

SEQ ID NO: 135303 - RNA, 17 nt, Homo sapiens
gacucuuggcacagcau

SEQ ID NO: 135304 - RNA, 13 nt, Homo sapiens
uggagucugucaa

SEQ ID NO: 135305 - RNA, 22 nt, Homo sapiens
aaccguaugagggaacugugua

SEQ ID NO: 135306 - RNA, 16 nt, Homo sapiens
ucagggagugggcuaa

SEQ ID NO: 135307 - RNA, 22 nt, Homo sapiens
gucuuggcucacugcaacuucu

SEQ ID NO: 135308 - RNA, 14 nt, Homo sapiens
ggguucaagugauu

SEQ ID NO: 135309 - RNA, 19 nt, Homo sapiens
aaauuucucuacugucuca

SEQ ID NO: 135310 - RNA, 21 nt, Homo sapiens
gcagaguacaaaguaagccau

SEQ ID NO: 135311 - RNA, 12 nt, Homo sapiens
acugccaaagaa

SEQ ID NO: 135312 - RNA, 20 nt, Homo sapiens
aaagcuggagucugucaaug

SEQ ID NO: 135313 - RNA, 22 nt, Homo sapiens
gccauaaaggggagggacucau

SEQ ID NO: 135314 - RNA, 15 nt, Homo sapiens
uagaaagaagaugaa

SEQ ID NO: 135315 - RNA, 13 nt, Homo sapiens
uguaucucaggaa

SEQ ID NO: 135316 - RNA, 18 nt, Homo sapiens
auuuuucagauauaaaag

SEQ ID NO: 135317 - RNA, 14 nt, Homo sapiens
acagcaucagcuca

SEQ ID NO: 135318 - RNA, 21 nt, Homo sapiens
aaaaguuuuguaaauuucucu

SEQ ID NO: 135319 - RNA, 18 nt, Homo sapiens
aauugggaauaugcacaa

SEQ ID NO: 135320 - RNA, 13 nt, Homo sapiens
uaauaaagacagg

SEQ ID NO: 135321 - RNA, 12 nt, Homo sapiens
uuugcuguagaa

SEQ ID NO: 135322 - RNA, 12 nt, Homo sapiens
guucauucugca

SEQ ID NO: 135323 - RNA, 15 nt, Homo sapiens
aaauuucucuacugu

SEQ ID NO: 135324 - RNA, 20 nt, Homo sapiens
aagaugaaacaucauuucaa

SEQ ID NO: 135325 - RNA, 20 nt, Homo sapiens
acucuaacaguaguugcaau

SEQ ID NO: 135326 - RNA, 22 nt, Homo sapiens
caaagaacuuggaaauagugau

SEQ ID NO: 135327 - RNA, 22 nt, Homo sapiens
guucauggauauguuauacuga

SEQ ID NO: 135328 - RNA, 23 nt, Homo sapiens
gucucgugguaggacuguagaaa

SEQ ID NO: 135329 - RNA, 12 nt, Homo sapiens
gaguagcuggau

SEQ ID NO: 135330 - RNA, 18 nt, Homo sapiens
ccuucuuuuuguucuuca

SEQ ID NO: 135331 - RNA, 14 nt, Homo sapiens
gacagaagcguaua

SEQ ID NO: 135332 - RNA, 16 nt, Homo sapiens
uuaauaaagacagggu

SEQ ID NO: 135333 - RNA, 16 nt, Homo sapiens
augacacucuagucaa

SEQ ID NO: 135334 - RNA, 21 nt, Homo sapiens
aguauauucaaccaaauacuu

SEQ ID NO: 135335 - RNA, 15 nt, Homo sapiens
aguuccgacugccau

SEQ ID NO: 135336 - RNA, 17 nt, Homo sapiens
auuuucuuuuuauacua

SEQ ID NO: 135337 - RNA, 22 nt, Homo sapiens
gaaauagugauuuccacaguga

SEQ ID NO: 135338 - RNA, 19 nt, Homo sapiens
cauugcaauagaaauccaa

SEQ ID NO: 135339 - RNA, 13 nt, Homo sapiens
caaagaaauuucc

SEQ ID NO: 135340 - RNA, 22 nt, Homo sapiens
uaggaagaauuuuuauauccac

SEQ ID NO: 135341 - RNA, 15 nt, Homo sapiens
gacucaucauuucca

SEQ ID NO: 135342 - RNA, 22 nt, Homo sapiens
ucuaaagauggaaaaaccaccc

SEQ ID NO: 135343 - RNA, 19 nt, Homo sapiens
cucgugguaggacuguaga

SEQ ID NO: 135344 - RNA, 11 nt, Homo sapiens
auaaagacagg

SEQ ID NO: 135345 - RNA, 23 nt, Homo sapiens
uguauauuuucugugcagccacu

SEQ ID NO: 135346 - RNA, 18 nt, Homo sapiens
ccaggcuggagugcaaug

SEQ ID NO: 135347 - RNA, 20 nt, Homo sapiens
aaaauaaucaguguuuccaa

SEQ ID NO: 135348 - RNA, 14 nt, Homo sapiens
ccacaguggaacca

SEQ ID NO: 135349 - RNA, 22 nt, Homo sapiens
aagccuugguaaaauaaucagu

SEQ ID NO: 135350 - RNA, 21 nt, Homo sapiens
ccaaguucuuaguugcuguau

SEQ ID NO: 135351 - RNA, 12 nt, Homo sapiens
aggacuguagaa

SEQ ID NO: 135352 - RNA, 14 nt, Homo sapiens
ucuuuuccaugaac

SEQ ID NO: 135353 - RNA, 22 nt, Homo sapiens
ggagucuuagagcuuuaccuaa

SEQ ID NO: 135354 - RNA, 16 nt, Homo sapiens
gcagaguacaaaguaa

SEQ ID NO: 135355 - RNA, 17 nt, Homo sapiens
guacaaaguaagccaug

SEQ ID NO: 135356 - RNA, 21 nt, Homo sapiens
ugaggaauuucuguucuucca

SEQ ID NO: 135357 - RNA, 14 nt, Homo sapiens
cauuugucaacaaa

SEQ ID NO: 135358 - RNA, 16 nt, Homo sapiens
acucaggcagaucuca

SEQ ID NO: 135359 - RNA, 20 nt, Homo sapiens
uugaaguauauucaaccaaa

SEQ ID NO: 135360 - RNA, 18 nt, Homo sapiens
ccugccaggcacacugag

SEQ ID NO: 135361 - RNA, 23 nt, Homo sapiens
ggcagaguacaaaguaagccaug

SEQ ID NO: 135362 - RNA, 15 nt, Homo sapiens
acagcaucagcucaa

SEQ ID NO: 135363 - RNA, 17 nt, Homo sapiens
uuuccaaauuauggcaa

SEQ ID NO: 135364 - RNA, 15 nt, Homo sapiens
auucucuagucaguu

SEQ ID NO: 135365 - RNA, 19 nt, Homo sapiens
aaccaaauauuccagagac

SEQ ID NO: 135366 - RNA, 22 nt, Homo sapiens
ucuaaggcugugccaucagcuc

SEQ ID NO: 135367 - RNA, 21 nt, Homo sapiens
acuuuuuccuggcucaucucu

SEQ ID NO: 135368 - RNA, 14 nt, Homo sapiens
ccuggggcuucuga

SEQ ID NO: 135369 - RNA, 20 nt, Homo sapiens
ugcaguuuuuuucuugucua

SEQ ID NO: 135370 - RNA, 23 nt, Homo sapiens
accagagaagggcuuggacucaa

SEQ ID NO: 135371 - RNA, 12 nt, Homo sapiens
agcaucagcuca

SEQ ID NO: 135372 - RNA, 18 nt, Homo sapiens
aucacauucccauuugcu

SEQ ID NO: 135373 - RNA, 13 nt, Homo sapiens
gcugggauuacag

SEQ ID NO: 135374 - RNA, 15 nt, Homo sapiens
cuuuuuauacuauua

SEQ ID NO: 135375 - RNA, 13 nt, Homo sapiens
uugaaacuuguau

SEQ ID NO: 135376 - RNA, 22 nt, Homo sapiens
gaaaauugggaauaugcacaaa

SEQ ID NO: 135377 - RNA, 15 nt, Homo sapiens
cacaaauuaguugua

SEQ ID NO: 135378 - RNA, 12 nt, Homo sapiens
acuuaguucaag

SEQ ID NO: 135379 - RNA, 15 nt, Homo sapiens
uugagggcaauggac

SEQ ID NO: 135380 - RNA, 16 nt, Homo sapiens
ucugcauucucuaguc

SEQ ID NO: 135381 - RNA, 19 nt, Homo sapiens
cucuggccuccaaguccac

SEQ ID NO: 135382 - RNA, 22 nt, Homo sapiens
uguagagagagaaaaguaacug

SEQ ID NO: 135383 - RNA, 21 nt, Homo sapiens
augacacucuagucaaagccu

SEQ ID NO: 135384 - RNA, 19 nt, Homo sapiens
acauuuguuguucuguuaa

SEQ ID NO: 135385 - RNA, 19 nt, Homo sapiens
aggauuugggcucuuggaa

SEQ ID NO: 135386 - RNA, 17 nt, Homo sapiens
ucaaucccucaaaacaa

SEQ ID NO: 135387 - RNA, 14 nt, Homo sapiens
acaaaguaagccau

SEQ ID NO: 135388 - RNA, 22 nt, Homo sapiens
aauguuuaugaauaguuuccaa

SEQ ID NO: 135389 - RNA, 15 nt, Homo sapiens
caaauauuccagaga

SEQ ID NO: 135390 - RNA, 17 nt, Homo sapiens
uagcauuugucaacaaa

SEQ ID NO: 135391 - RNA, 19 nt, Homo sapiens
cgugguaggacuguagaaa

SEQ ID NO: 135392 - RNA, 16 nt, Homo sapiens
cuaacaguaguugcaa

SEQ ID NO: 135393 - RNA, 16 nt, Homo sapiens
aagaauguuuaugaau

SEQ ID NO: 135394 - RNA, 18 nt, Homo sapiens
acuuuugaaaacaaaaua

SEQ ID NO: 135395 - RNA, 14 nt, Homo sapiens
aaaagacugaccaa

SEQ ID NO: 135396 - RNA, 21 nt, Homo sapiens
uggcaguggaacuaagaaagc

SEQ ID NO: 135397 - RNA, 23 nt, Homo sapiens
acccuucuccuuagaaguggaag

SEQ ID NO: 135398 - RNA, 16 nt, Homo sapiens
aaauauaguucacaau

SEQ ID NO: 135399 - RNA, 23 nt, Homo sapiens
gauauguuauacugaaccaggcc

SEQ ID NO: 135400 - RNA, 14 nt, Homo sapiens
acugaacauuccag

SEQ ID NO: 135401 - RNA, 22 nt, Homo sapiens
ucaagacgucacccuccauucu

SEQ ID NO: 135402 - RNA, 14 nt, Homo sapiens
ccagagacugggac

SEQ ID NO: 135403 - RNA, 16 nt, Homo sapiens
acacagcaucagcuca

SEQ ID NO: 135404 - RNA, 18 nt, Homo sapiens
ucauaaaagucacuuuau

SEQ ID NO: 135405 - RNA, 21 nt, Homo sapiens
accuucaguugucucugaugu

SEQ ID NO: 135406 - RNA, 15 nt, Homo sapiens
gauauaaaagacuga

SEQ ID NO: 135407 - RNA, 18 nt, Homo sapiens
acauuuguuuguggucua

SEQ ID NO: 135408 - RNA, 16 nt, Homo sapiens
aaagggagaagaggga

SEQ ID NO: 135409 - RNA, 22 nt, Homo sapiens
aacauuuguuuuagucugaaca

SEQ ID NO: 135410 - RNA, 14 nt, Homo sapiens
auaucacauuccca

SEQ ID NO: 135411 - RNA, 16 nt, Homo sapiens
agucuuguauuaaguu

SEQ ID NO: 135412 - RNA, 22 nt, Homo sapiens
guuuaugcauagauaaucucuc

SEQ ID NO: 135413 - RNA, 15 nt, Homo sapiens
ccagagcaaacagaa

SEQ ID NO: 135414 - RNA, 19 nt, Homo sapiens
cucuugaaaucuguuaaaa

SEQ ID NO: 135415 - RNA, 14 nt, Homo sapiens
ccuggcucaucucu

SEQ ID NO: 135416 - RNA, 18 nt, Homo sapiens
uccugaccucaaguaauc

SEQ ID NO: 135417 - RNA, 22 nt, Homo sapiens
uccuaagccaugggagacacug

SEQ ID NO: 135418 - RNA, 19 nt, Homo sapiens
gucuuuggugaacauugca

SEQ ID NO: 135419 - RNA, 22 nt, Homo sapiens
acuuauagaauucagucaaaga

SEQ ID NO: 135420 - RNA, 16 nt, Homo sapiens
auuuuaauguuuccuu

SEQ ID NO: 135421 - RNA, 20 nt, Homo sapiens
agcuuacaagccagcuggag

SEQ ID NO: 135422 - RNA, 23 nt, Homo sapiens
uucauggauauguuauacugaac

SEQ ID NO: 135423 - RNA, 18 nt, Homo sapiens
acacaaucugaaacagcu

SEQ ID NO: 135424 - RNA, 13 nt, Homo sapiens
cuaaauaugagcc

SEQ ID NO: 135425 - RNA, 19 nt, Homo sapiens
ugcaguuuuuuucuugucu

SEQ ID NO: 135426 - RNA, 22 nt, Homo sapiens
gaaaagaaucggcaauguuuca

SEQ ID NO: 135427 - RNA, 21 nt, Homo sapiens
ucauggauauguuauacugaa

SEQ ID NO: 135428 - RNA, 13 nt, Homo sapiens
ugcaauguuuuag

SEQ ID NO: 135429 - RNA, 18 nt, Homo sapiens
acaaauugggccaaagaa

SEQ ID NO: 135430 - RNA, 21 nt, Homo sapiens
gucuuuggugaacauugcaau

SEQ ID NO: 135431 - RNA, 22 nt, Homo sapiens
ggagaaauaugguacucauuaa

SEQ ID NO: 135432 - RNA, 14 nt, Homo sapiens
uacuucucugcuau

SEQ ID NO: 135433 - RNA, 22 nt, Homo sapiens
aaacccaguaguggugacugug

SEQ ID NO: 135434 - RNA, 22 nt, Homo sapiens
uacuuuuuccuggcucaucucu

SEQ ID NO: 135435 - RNA, 22 nt, Homo sapiens
uugucaacaaagucacccacuu

SEQ ID NO: 135436 - RNA, 16 nt, Homo sapiens
accaauauuguacagu

SEQ ID NO: 135437 - RNA, 12 nt, Homo sapiens
gaccaggucuca

SEQ ID NO: 135438 - RNA, 18 nt, Homo sapiens
aaguaauccaccugccuc

SEQ ID NO: 135439 - RNA, 21 nt, Homo sapiens
ccauaaaggggagggacucau

SEQ ID NO: 135440 - RNA, 20 nt, Homo sapiens
gacucuaacaguaguugcaa

SEQ ID NO: 135441 - RNA, 17 nt, Homo sapiens
guucugguuacuguucu

SEQ ID NO: 135442 - RNA, 15 nt, Homo sapiens
aauugggccaaagaa

SEQ ID NO: 135443 - RNA, 15 nt, Homo sapiens
uaacauggugugcuu

SEQ ID NO: 135444 - RNA, 19 nt, Homo sapiens
aauucugaauuaagcacag

SEQ ID NO: 135445 - RNA, 21 nt, Homo sapiens
gucucaaacuccugaccucaa

SEQ ID NO: 135446 - RNA, 19 nt, Homo sapiens
cacuguguuuuuuuguaua

SEQ ID NO: 135447 - RNA, 17 nt, Homo sapiens
agaugcauccuuucaua

SEQ ID NO: 135448 - RNA, 18 nt, Homo sapiens
acgugauuuugcuguaga

SEQ ID NO: 135449 - RNA, 15 nt, Homo sapiens
aucuaaaaucugcua

SEQ ID NO: 135450 - RNA, 14 nt, Homo sapiens
aucaguguuuccaa

SEQ ID NO: 135451 - RNA, 13 nt, Homo sapiens
cuugcacaaacca

SEQ ID NO: 135452 - RNA, 16 nt, Homo sapiens
cccuucuuuucugacu

SEQ ID NO: 135453 - RNA, 19 nt, Homo sapiens
agggaacugaacauuccag

SEQ ID NO: 135454 - RNA, 18 nt, Homo sapiens
uuaaaccguacacugugu

SEQ ID NO: 135455 - RNA, 21 nt, Homo sapiens
aauguggcuugaauguaggua

SEQ ID NO: 135456 - RNA, 23 nt, Homo sapiens
cuuagagcuuuaccuaaauauga

SEQ ID NO: 135457 - RNA, 14 nt, Homo sapiens
cauaugaauaacau

SEQ ID NO: 135458 - RNA, 14 nt, Homo sapiens
ccaaauuauggcaa

SEQ ID NO: 135459 - RNA, 18 nt, Homo sapiens
ggauacgacaacuugcac

SEQ ID NO: 135460 - RNA, 23 nt, Homo sapiens
acugggacuaaguguaccagaga

SEQ ID NO: 135461 - RNA, 17 nt, Homo sapiens
gcuccauucaaagugag

SEQ ID NO: 135462 - RNA, 12 nt, Homo sapiens
ugaggguguaua

SEQ ID NO: 135463 - RNA, 16 nt, Homo sapiens
uaacgagaaauagaaa

SEQ ID NO: 135464 - RNA, 20 nt, Homo sapiens
auacuuauagaauucaguca

SEQ ID NO: 135465 - RNA, 17 nt, Homo sapiens
accuaaauaugagccca

SEQ ID NO: 135466 - RNA, 16 nt, Homo sapiens
uagcuuauacaaaaca

SEQ ID NO: 135467 - RNA, 20 nt, Homo sapiens
accaaauacuuuaauguaua

SEQ ID NO: 135468 - RNA, 13 nt, Homo sapiens
accaauauuguac

SEQ ID NO: 135469 - RNA, 12 nt, Homo sapiens
agugauuuccac

SEQ ID NO: 135470 - RNA, 22 nt, Homo sapiens
aaucaguguuuccaaucugucc

SEQ ID NO: 135471 - RNA, 12 nt, Homo sapiens
ccaguuacauaa

SEQ ID NO: 135472 - RNA, 21 nt, Homo sapiens
gauacacaaucugaaacagcu

SEQ ID NO: 135473 - RNA, 11 nt, Homo sapiens
agaaguggaag

SEQ ID NO: 135474 - RNA, 18 nt, Homo sapiens
uuaagaaauucacuuccc

SEQ ID NO: 135475 - RNA, 20 nt, Homo sapiens
guuaaaaguuguguuuugaa

SEQ ID NO: 135476 - RNA, 13 nt, Homo sapiens
uggcucaucucuu

SEQ ID NO: 135477 - RNA, 19 nt, Homo sapiens
accuguggccaaguucuua

SEQ ID NO: 135478 - RNA, 12 nt, Homo sapiens
uuuaaagacaga

SEQ ID NO: 135479 - RNA, 20 nt, Homo sapiens
ucucaaacuccugaccucaa

SEQ ID NO: 135480 - RNA, 23 nt, Homo sapiens
agaauauuauuggaaaauucucu

SEQ ID NO: 135481 - RNA, 22 nt, Homo sapiens
ggcuaagaagugacucuugcaa

SEQ ID NO: 135482 - RNA, 16 nt, Homo sapiens
uuuacuguccaaagac

SEQ ID NO: 135483 - RNA, 19 nt, Homo sapiens
gacuaaguguaccagagaa

SEQ ID NO: 135484 - RNA, 17 nt, Homo sapiens
ucagucuuuuccaugaa

SEQ ID NO: 135485 - RNA, 20 nt, Homo sapiens
uguuaauaaaaguacauguu

SEQ ID NO: 135486 - RNA, 19 nt, Homo sapiens
ccaagcaguuucuuucaaa

SEQ ID NO: 135487 - RNA, 17 nt, Homo sapiens
cuggccuccaaguccac

SEQ ID NO: 135488 - RNA, 14 nt, Homo sapiens
caaugucuaaaaac

SEQ ID NO: 135489 - RNA, 23 nt, Homo sapiens
caguuggcuaagaagugacucuu

SEQ ID NO: 135490 - RNA, 20 nt, Homo sapiens
gcacaaauugggccaaagaa

SEQ ID NO: 135491 - RNA, 20 nt, Homo sapiens
uacccguuucacaugcuuuu

SEQ ID NO: 135492 - RNA, 11 nt, Homo sapiens
aagacugacca

SEQ ID NO: 135493 - RNA, 19 nt, Homo sapiens
cucgagguuucucaaagaa

SEQ ID NO: 135494 - RNA, 23 nt, Homo sapiens
ccacccccaaauuuucuuuuuau

SEQ ID NO: 135495 - RNA, 22 nt, Homo sapiens
accagagaagggcuuggacuca

SEQ ID NO: 135496 - RNA, 20 nt, Homo sapiens
ugaaagcuggagucugucaa

SEQ ID NO: 135497 - RNA, 15 nt, Homo sapiens
uguuuauagugcucu

SEQ ID NO: 135498 - RNA, 13 nt, Homo sapiens
accuacaguguac

SEQ ID NO: 135499 - RNA, 15 nt, Homo sapiens
uaauaaagacagggu

SEQ ID NO: 135500 - RNA, 17 nt, Homo sapiens
ggcacacugagccagca

SEQ ID NO: 135501 - RNA, 10 nt, Homo sapiens
gaaaacagaa

SEQ ID NO: 135502 - RNA, 13 nt, Homo sapiens
uucuuuucugacu

SEQ ID NO: 135503 - RNA, 22 nt, Homo sapiens
ccauuugcuuagaaagucugau

SEQ ID NO: 135504 - RNA, 21 nt, Homo sapiens
uugcccaggcuggagugcaau

SEQ ID NO: 135505 - RNA, 11 nt, Homo sapiens
ccaaggucucc

SEQ ID NO: 135506 - RNA, 15 nt, Homo sapiens
ccuuugccugguaca

SEQ ID NO: 135507 - RNA, 22 nt, Homo sapiens
ugacucaagacuuccagagccu

SEQ ID NO: 135508 - RNA, 17 nt, Homo sapiens
ucggcucuggccuccaa

SEQ ID NO: 135509 - RNA, 21 nt, Homo sapiens
cuaagaagcagauaauggugu

SEQ ID NO: 135510 - RNA, 10 nt, Homo sapiens
ucccaaagag

SEQ ID NO: 135511 - RNA, 16 nt, Homo sapiens
caauauuguacaguuu

SEQ ID NO: 135512 - RNA, 23 nt, Homo sapiens
aaucccucaaaacaaucuuguca

SEQ ID NO: 135513 - RNA, 19 nt, Homo sapiens
cuccuggaccaggucucau

SEQ ID NO: 135514 - RNA, 20 nt, Homo sapiens
cugaccaauauuguacaguu

SEQ ID NO: 135515 - RNA, 15 nt, Homo sapiens
cuagucaguuggcua

SEQ ID NO: 135516 - RNA, 21 nt, Homo sapiens
cacugccaaagaacuuggaaa

SEQ ID NO: 135517 - RNA, 16 nt, Homo sapiens
ccaggcuggagugcaa

SEQ ID NO: 135518 - RNA, 18 nt, Homo sapiens
ugaaguuuaauugacuua

SEQ ID NO: 135519 - RNA, 14 nt, Homo sapiens
uaaaauagccauaa

SEQ ID NO: 135520 - RNA, 18 nt, Homo sapiens
uaaugcauguggcacuua

SEQ ID NO: 135521 - RNA, 14 nt, Homo sapiens
accuacaguguaca

SEQ ID NO: 135522 - RNA, 22 nt, Homo sapiens
gcaggauuugggcucuuggaau

SEQ ID NO: 135523 - RNA, 14 nt, Homo sapiens
guuuaguugcacaa

SEQ ID NO: 135524 - RNA, 20 nt, Homo sapiens
cuaagcacgggccauaugaa

SEQ ID NO: 135525 - RNA, 19 nt, Homo sapiens
cuuccuggaggugacacuu

SEQ ID NO: 135526 - RNA, 13 nt, Homo sapiens
caguguacagucu

SEQ ID NO: 135527 - RNA, 15 nt, Homo sapiens
gcuagggaauaucaa

SEQ ID NO: 135528 - RNA, 13 nt, Homo sapiens
agguugagggcaa

SEQ ID NO: 135529 - RNA, 14 nt, Homo sapiens
uacuguccaaagac

SEQ ID NO: 135530 - RNA, 18 nt, Homo sapiens
aaaccugaugcuggggac

SEQ ID NO: 135531 - RNA, 22 nt, Homo sapiens
cugggauuacagggaugagcca

SEQ ID NO: 135532 - RNA, 13 nt, Homo sapiens
gaacuuaugcaaa

SEQ ID NO: 135533 - RNA, 23 nt, Homo sapiens
ugucucgugguaggacuguagaa

SEQ ID NO: 135534 - RNA, 13 nt, Homo sapiens
gacucuaacagua

SEQ ID NO: 135535 - RNA, 12 nt, Homo sapiens
aaugucuuuauu

SEQ ID NO: 135536 - RNA, 19 nt, Homo sapiens
uauauguauaucacauucc

SEQ ID NO: 135537 - RNA, 19 nt, Homo sapiens
agcaccuacaguguacagu

SEQ ID NO: 135538 - RNA, 15 nt, Homo sapiens
aauagugauuuccac

SEQ ID NO: 135539 - RNA, 13 nt, Homo sapiens
aaaaacauucuua

SEQ ID NO: 135540 - RNA, 19 nt, Homo sapiens
uugcuugcacaaaccaauu

SEQ ID NO: 135541 - RNA, 19 nt, Homo sapiens
acaaaguaagccauguauc

SEQ ID NO: 135542 - RNA, 17 nt, Homo sapiens
aagcuggagucugucaa

SEQ ID NO: 135543 - RNA, 16 nt, Homo sapiens
gcuaguaaaagccauc

SEQ ID NO: 135544 - RNA, 20 nt, Homo sapiens
uaaauuucucuacugucuca

SEQ ID NO: 135545 - RNA, 18 nt, Homo sapiens
gaugaaacaucauuucaa

SEQ ID NO: 135546 - RNA, 20 nt, Homo sapiens
aaugacacagucuuggcuca

SEQ ID NO: 135547 - RNA, 22 nt, Homo sapiens
ucaaagaaauuuccacucaggu

SEQ ID NO: 135548 - RNA, 22 nt, Homo sapiens
gcagcgauuaauaacaggcaaa

SEQ ID NO: 135549 - RNA, 22 nt, Homo sapiens
uggcuucuuuacuuaguucaag

SEQ ID NO: 135550 - RNA, 15 nt, Homo sapiens
aggcuucuggggcuu

SEQ ID NO: 135551 - RNA, 14 nt, Homo sapiens
uagaaugagacuua

SEQ ID NO: 135552 - RNA, 16 nt, Homo sapiens
gacucaucauuuccau

SEQ ID NO: 135553 - RNA, 22 nt, Homo sapiens
cagucuucuuccaugucuauua

SEQ ID NO: 135554 - RNA, 23 nt, Homo sapiens
cuuccuccccuguucauucugca

SEQ ID NO: 135555 - RNA, 13 nt, Homo sapiens
guuggcucaggag

SEQ ID NO: 135556 - RNA, 19 nt, Homo sapiens
cuuuaccuaaauaugagcc

SEQ ID NO: 135557 - RNA, 17 nt, Homo sapiens
agccccagccuaggaaa

SEQ ID NO: 135558 - RNA, 13 nt, Homo sapiens
aggacuguagaaa

SEQ ID NO: 135559 - RNA, 22 nt, Homo sapiens
agcuggagucugucaauguccu

SEQ ID NO: 135560 - RNA, 18 nt, Homo sapiens
uagaaugagacuuacuuc

SEQ ID NO: 135561 - RNA, 15 nt, Homo sapiens
cagcauggagucaca

SEQ ID NO: 135562 - RNA, 19 nt, Homo sapiens
ugcuucuuaaaauagccau

SEQ ID NO: 135563 - RNA, 18 nt, Homo sapiens
gcaguuuuuuucuugucu

SEQ ID NO: 135564 - RNA, 20 nt, Homo sapiens
auugcagcgauuaauaacag

SEQ ID NO: 135565 - RNA, 19 nt, Homo sapiens
ucaagugauucuccugccu

SEQ ID NO: 135566 - RNA, 12 nt, Homo sapiens
uguaauugcaaa

SEQ ID NO: 135567 - RNA, 19 nt, Homo sapiens
cugggacuaaguguaccag

SEQ ID NO: 135568 - RNA, 13 nt, Homo sapiens
auuugucaacaaa

SEQ ID NO: 135569 - RNA, 15 nt, Homo sapiens
acaguaguugcaaug

SEQ ID NO: 135570 - RNA, 19 nt, Homo sapiens
agaaguaaauauagcucag

SEQ ID NO: 135571 - RNA, 18 nt, Homo sapiens
aaagacaggguuucacca

SEQ ID NO: 135572 - RNA, 13 nt, Homo sapiens
uccacaaagccaa

SEQ ID NO: 135573 - RNA, 14 nt, Homo sapiens
uagaagauggcacu

SEQ ID NO: 135574 - RNA, 13 nt, Homo sapiens
gaauaguuuccaa

SEQ ID NO: 135575 - RNA, 20 nt, Homo sapiens
guagaaagugauccauacuu

SEQ ID NO: 135576 - RNA, 17 nt, Homo sapiens
aauaaccauugucauaa

SEQ ID NO: 135577 - RNA, 21 nt, Homo sapiens
cagaaucucucuucuuuucaa

SEQ ID NO: 135578 - RNA, 13 nt, Homo sapiens
caaagaagccagc

SEQ ID NO: 135579 - RNA, 18 nt, Homo sapiens
uguugacauucugaaugc

SEQ ID NO: 135580 - RNA, 11 nt, Homo sapiens
caaaaccaaau

SEQ ID NO: 135581 - RNA, 19 nt, Homo sapiens
cuagcaacauuuguuuuag

SEQ ID NO: 135582 - RNA, 16 nt, Homo sapiens
cugugccaucagcucc

SEQ ID NO: 135583 - RNA, 13 nt, Homo sapiens
cauuuguuuucac

SEQ ID NO: 135584 - RNA, 21 nt, Homo sapiens
ucaagugauucuccugccuca

SEQ ID NO: 135585 - RNA, 16 nt, Homo sapiens
gugccaucagcuccuu

SEQ ID NO: 135586 - RNA, 21 nt, Homo sapiens
ucugaggcuucuggggcuuca

SEQ ID NO: 135587 - RNA, 23 nt, Homo sapiens
cauucugcacucagaaaauggca

SEQ ID NO: 135588 - RNA, 14 nt, Homo sapiens
uuugaggguguaua

SEQ ID NO: 135589 - RNA, 14 nt, Homo sapiens
caguaguugcaaug

SEQ ID NO: 135590 - RNA, 12 nt, Homo sapiens
agaaagugaucc

SEQ ID NO: 135591 - RNA, 18 nt, Homo sapiens
uccuggggaacauagaac

SEQ ID NO: 135592 - RNA, 15 nt, Homo sapiens
aagaauguuuaugaa

SEQ ID NO: 135593 - RNA, 19 nt, Homo sapiens
uguuaagccauguguucca

SEQ ID NO: 135594 - RNA, 22 nt, Homo sapiens
caaaaacauucuuacauuuuac

SEQ ID NO: 135595 - RNA, 15 nt, Homo sapiens
guagaaagugaucca

SEQ ID NO: 135596 - RNA, 13 nt, Homo sapiens
accaggucucaua

SEQ ID NO: 135597 - RNA, 13 nt, Homo sapiens
aauauaucaguaa

SEQ ID NO: 135598 - RNA, 22 nt, Homo sapiens
cuagaguucauggauauguuau

SEQ ID NO: 135599 - RNA, 14 nt, Homo sapiens
uccaaagacauguu

SEQ ID NO: 135600 - RNA, 18 nt, Homo sapiens
aaagucuacuuuaccuaa

SEQ ID NO: 135601 - RNA, 21 nt, Homo sapiens
ucaagacgucacccuccauuc

SEQ ID NO: 135602 - RNA, 15 nt, Homo sapiens
cuuacuuaguguuau

SEQ ID NO: 135603 - RNA, 18 nt, Homo sapiens
ggagccccugcucuggug

SEQ ID NO: 135604 - RNA, 14 nt, Homo sapiens
uugcucacaaaagu

SEQ ID NO: 135605 - RNA, 23 nt, Homo sapiens
aauaagcaggcgugaccugccag

SEQ ID NO: 135606 - RNA, 19 nt, Homo sapiens
ugaccaauauuguacaguu

SEQ ID NO: 135607 - RNA, 18 nt, Homo sapiens
cuuagagcuuuaccuaaa

SEQ ID NO: 135608 - RNA, 18 nt, Homo sapiens
guuuacauuuuguauauu

SEQ ID NO: 135609 - RNA, 19 nt, Homo sapiens
ucaaaacaaucuugucaua

SEQ ID NO: 135610 - RNA, 18 nt, Homo sapiens
cgauuaauaacaggcaaa

SEQ ID NO: 135611 - RNA, 18 nt, Homo sapiens
uuuuccuggcucaucucu

SEQ ID NO: 135612 - RNA, 14 nt, Homo sapiens
ucuuuggugaacau

SEQ ID NO: 135613 - RNA, 22 nt, Homo sapiens
agacagcacagccaaccuagcu

SEQ ID NO: 135614 - RNA, 19 nt, Homo sapiens
caauauauacuuauagaau

SEQ ID NO: 135615 - RNA, 17 nt, Homo sapiens
agucuuagagcuuuacc

SEQ ID NO: 135616 - RNA, 21 nt, Homo sapiens
aagggauggaagaaguaaaua

SEQ ID NO: 135617 - RNA, 16 nt, Homo sapiens
uaauaaaaguacaugu

SEQ ID NO: 135618 - RNA, 13 nt, Homo sapiens
aguaaaagccauc

SEQ ID NO: 135619 - RNA, 20 nt, Homo sapiens
uugcccaggcuggagugcaa

SEQ ID NO: 135620 - RNA, 21 nt, Homo sapiens
uaguggugacugugggcucca

SEQ ID NO: 135621 - RNA, 20 nt, Homo sapiens
uuauuaaauguagaaaguga

SEQ ID NO: 135622 - RNA, 15 nt, Homo sapiens
aacauugcaauagaa

SEQ ID NO: 135623 - RNA, 13 nt, Homo sapiens
caggcacacugag

SEQ ID NO: 135624 - RNA, 14 nt, Homo sapiens
gucauaacuagaac

SEQ ID NO: 135625 - RNA, 21 nt, Homo sapiens
gaaauucacuuccccucuagg

SEQ ID NO: 135626 - RNA, 20 nt, Homo sapiens
gucugaacaauauauacuua

SEQ ID NO: 135627 - RNA, 13 nt, Homo sapiens
ugcucacaaaagu

SEQ ID NO: 135628 - RNA, 16 nt, Homo sapiens
aggucagucuucuucc

SEQ ID NO: 135629 - RNA, 20 nt, Homo sapiens
cugaacaauauauacuuaua

SEQ ID NO: 135630 - RNA, 21 nt, Homo sapiens
cuuguuagugcacagcacaaa

SEQ ID NO: 135631 - RNA, 23 nt, Homo sapiens
cauggauauguuauacugaacca

SEQ ID NO: 135632 - RNA, 18 nt, Homo sapiens
caaucugaaacagcuuca

SEQ ID NO: 135633 - RNA, 20 nt, Homo sapiens
cuauaagaugaaacaucauu

SEQ ID NO: 135634 - RNA, 18 nt, Homo sapiens
gucugauuguagcuauga

SEQ ID NO: 135635 - RNA, 14 nt, Homo sapiens
caauagaaauccaa

SEQ ID NO: 135636 - RNA, 21 nt, Homo sapiens
gguaaaauaaucaguguuucc

SEQ ID NO: 135637 - RNA, 15 nt, Homo sapiens
aagccauguguucca

SEQ ID NO: 135638 - RNA, 18 nt, Homo sapiens
cucccagccagguucuga

SEQ ID NO: 135639 - RNA, 12 nt, Homo sapiens
agccucaucucu

SEQ ID NO: 135640 - RNA, 22 nt, Homo sapiens
gugaccugccaggcacacugag

SEQ ID NO: 135641 - RNA, 15 nt, Homo sapiens
ccaaauuauggcaaa

SEQ ID NO: 135642 - RNA, 22 nt, Homo sapiens
ucuuuaaccacuuuucaauguc

SEQ ID NO: 135643 - RNA, 18 nt, Homo sapiens
uagcauuugucaacaaag

SEQ ID NO: 135644 - RNA, 11 nt, Homo sapiens
uugcuguagaa

SEQ ID NO: 135645 - RNA, 15 nt, Homo sapiens
gcaggacagcuccug

SEQ ID NO: 135646 - RNA, 21 nt, Homo sapiens
auagagguucuuuauugcuca

SEQ ID NO: 135647 - RNA, 22 nt, Homo sapiens
acauuuguuuuagucugaacaa

SEQ ID NO: 135648 - RNA, 21 nt, Homo sapiens
uguaaauuucucuacugucuc

SEQ ID NO: 135649 - RNA, 20 nt, Homo sapiens
gcacucagaaaauggcacuu

SEQ ID NO: 135650 - RNA, 22 nt, Homo sapiens
gcacaaaccaauuaaacccagu

SEQ ID NO: 135651 - RNA, 18 nt, Homo sapiens
ccgacugccaucuuggac

SEQ ID NO: 135652 - RNA, 19 nt, Homo sapiens
uuggauacgacaacuugca

SEQ ID NO: 135653 - RNA, 19 nt, Homo sapiens
accaaauacuuuaauguau

SEQ ID NO: 135654 - RNA, 14 nt, Homo sapiens
aaccuagcuagcaa

SEQ ID NO: 135655 - RNA, 24 nt, Homo sapiens
cauguuggccaggcuggucucaaa

SEQ ID NO: 135656 - RNA, 15 nt, Homo sapiens
agaaauccaauugga

SEQ ID NO: 135657 - RNA, 23 nt, Homo sapiens
gucucaguuuacauuuuguauau

SEQ ID NO: 135658 - RNA, 20 nt, Homo sapiens
aucugcuagggaauaucaau

SEQ ID NO: 135659 - RNA, 14 nt, Homo sapiens
ugagcaaaaccaaa

SEQ ID NO: 135660 - RNA, 20 nt, Homo sapiens
cuauaaaaugagaagucuca

SEQ ID NO: 135661 - RNA, 22 nt, Homo sapiens
caauauacuuguauagcaguuu

SEQ ID NO: 135662 - RNA, 12 nt, Homo sapiens
aaugaaagugag

SEQ ID NO: 135663 - RNA, 20 nt, Homo sapiens
agcuguuuaugcauagauaa

SEQ ID NO: 135664 - RNA, 20 nt, Homo sapiens
gaaaagaaucggcaauguuu

SEQ ID NO: 135665 - RNA, 20 nt, Homo sapiens
uacaguuuuuauugcuuguu

SEQ ID NO: 135666 - RNA, 20 nt, Homo sapiens
augcuggggacacagcauca

SEQ ID NO: 135667 - RNA, 19 nt, Homo sapiens
gcuucuuugaaacuuguau

SEQ ID NO: 135668 - RNA, 20 nt, Homo sapiens
gccuccaaguccacagugga

SEQ ID NO: 135669 - RNA, 17 nt, Homo sapiens
cugguggggcugccagg

SEQ ID NO: 135670 - RNA, 18 nt, Homo sapiens
gucacagccacuugggau

SEQ ID NO: 135671 - RNA, 14 nt, Homo sapiens
aaaaaugugacuca

SEQ ID NO: 135672 - RNA, 22 nt, Homo sapiens
acacaaucugaaacagcuucau

SEQ ID NO: 135673 - RNA, 15 nt, Homo sapiens
gaaugagacuuacuu

SEQ ID NO: 135674 - RNA, 17 nt, Homo sapiens
caggcuggagugcaaug

SEQ ID NO: 135675 - RNA, 13 nt, Homo sapiens
gcaaaaccaaaua

SEQ ID NO: 135676 - RNA, 15 nt, Homo sapiens
gcaccuacaguguac

SEQ ID NO: 135677 - RNA, 16 nt, Homo sapiens
acacaaucugaaacag

SEQ ID NO: 135678 - RNA, 18 nt, Homo sapiens
agcuggagucugucaaug

SEQ ID NO: 135679 - RNA, 14 nt, Homo sapiens
agaauaaauacugu

SEQ ID NO: 135680 - RNA, 17 nt, Homo sapiens
uucaacguaagacugug

SEQ ID NO: 135681 - RNA, 21 nt, Homo sapiens
aggacacuagaagauuuugaa

SEQ ID NO: 135682 - RNA, 16 nt, Homo sapiens
aaagugauccauacuu

SEQ ID NO: 135683 - RNA, 16 nt, Homo sapiens
uuccuccccuguucau

SEQ ID NO: 135684 - RNA, 16 nt, Homo sapiens
aguagcuggauuacag

SEQ ID NO: 135685 - RNA, 13 nt, Homo sapiens
ucccucaaaacaa

SEQ ID NO: 135686 - RNA, 20 nt, Homo sapiens
uuuuuacuaaucuuucugca

SEQ ID NO: 135687 - RNA, 21 nt, Homo sapiens
uccacucaggucuguuuuccg

SEQ ID NO: 135688 - RNA, 21 nt, Homo sapiens
guaaauuucucuacugucuca

SEQ ID NO: 135689 - RNA, 21 nt, Homo sapiens
caggguuucaccauguuggcc

SEQ ID NO: 135690 - RNA, 17 nt, Homo sapiens
caaacuccugaccucaa

SEQ ID NO: 135691 - RNA, 13 nt, Homo sapiens
cagagcaaacaga

SEQ ID NO: 135692 - RNA, 14 nt, Homo sapiens
ugaauaugccacuu

SEQ ID NO: 135693 - RNA, 19 nt, Homo sapiens
cauuuaagcugccuguaca

SEQ ID NO: 135694 - RNA, 16 nt, Homo sapiens
cuggcaagaugcuuua

SEQ ID NO: 135695 - RNA, 15 nt, Homo sapiens
aauguagaaagugau

SEQ ID NO: 135696 - RNA, 18 nt, Homo sapiens
ugguuuuucaguuuucag

SEQ ID NO: 135697 - RNA, 13 nt, Homo sapiens
uggaaccagccca

SEQ ID NO: 135698 - RNA, 16 nt, Homo sapiens
ugccaggcacacugag

SEQ ID NO: 135699 - RNA, 13 nt, Homo sapiens
uccacagugacuc

SEQ ID NO: 135700 - RNA, 18 nt, Homo sapiens
caucccgucgacguagaa

SEQ ID NO: 135701 - RNA, 21 nt, Homo sapiens
ccuuggcuaguaaaagccauc

SEQ ID NO: 135702 - RNA, 16 nt, Homo sapiens
uggccuggggcuucug

SEQ ID NO: 135703 - RNA, 16 nt, Homo sapiens
uauagaaaugcugguu

SEQ ID NO: 135704 - RNA, 19 nt, Homo sapiens
accgcaggauuugggcucu

SEQ ID NO: 135705 - RNA, 20 nt, Homo sapiens
aagaaucggcaauguuucaa

SEQ ID NO: 135706 - RNA, 22 nt, Homo sapiens
ggcuaagcacgggccauaugaa

SEQ ID NO: 135707 - RNA, 18 nt, Homo sapiens
gccaaucaguagccagca

SEQ ID NO: 135708 - RNA, 22 nt, Homo sapiens
cuuuaguuuuugugaaguuuaa

SEQ ID NO: 135709 - RNA, 19 nt, Homo sapiens
uuggcuaguaaaagccauc

SEQ ID NO: 135710 - RNA, 15 nt, Homo sapiens
aaucaguguuuccaa

SEQ ID NO: 135711 - RNA, 15 nt, Homo sapiens
caacaaagucaccca

SEQ ID NO: 135712 - RNA, 19 nt, Homo sapiens
agugauucuccugccucag

SEQ ID NO: 135713 - RNA, 22 nt, Homo sapiens
ccucaaaugagaaaaugucuuu

SEQ ID NO: 135714 - RNA, 18 nt, Homo sapiens
auuaagaaauucacuucc

SEQ ID NO: 135715 - RNA, 18 nt, Homo sapiens
cucuaacaguaguugcaa

SEQ ID NO: 135716 - RNA, 20 nt, Homo sapiens
ucuaaagauggaaaaaccac

SEQ ID NO: 135717 - RNA, 15 nt, Homo sapiens
acaaaguaagccaug

SEQ ID NO: 135718 - RNA, 20 nt, Homo sapiens
uuguauuuaaaugaaaguga

SEQ ID NO: 135719 - RNA, 21 nt, Homo sapiens
caugucuauuagcuccacaaa

SEQ ID NO: 135720 - RNA, 16 nt, Homo sapiens
uagaucugaacuccuu

SEQ ID NO: 135721 - RNA, 15 nt, Homo sapiens
aaggcagaguacaaa

SEQ ID NO: 135722 - RNA, 10 nt, Homo sapiens
gaaaagcagg

SEQ ID NO: 135723 - RNA, 23 nt, Homo sapiens
agucuuguuguuuucccaaagag

SEQ ID NO: 135724 - RNA, 16 nt, Homo sapiens
acccuucuccuuagaa

SEQ ID NO: 135725 - RNA, 13 nt, Homo sapiens
caaucguaaaauu

SEQ ID NO: 135726 - RNA, 15 nt, Homo sapiens
aucuguccuguuaca

SEQ ID NO: 135727 - RNA, 22 nt, Homo sapiens
gugccucugggacuggacaauu

SEQ ID NO: 135728 - RNA, 21 nt, Homo sapiens
gacucaagacuuccagagccu

SEQ ID NO: 135729 - RNA, 19 nt, Homo sapiens
cacuuagguccaaggucuc

SEQ ID NO: 135730 - RNA, 16 nt, Homo sapiens
ugaccugccaggcaca

SEQ ID NO: 135731 - RNA, 16 nt, Homo sapiens
auggcaggacagcucc

SEQ ID NO: 135732 - RNA, 14 nt, Homo sapiens
caguguacagucuu

SEQ ID NO: 135733 - RNA, 14 nt, Homo sapiens
cucaucauuuccau

SEQ ID NO: 135734 - RNA, 23 nt, Homo sapiens
aaaugcugguuuuucaguuuuca

SEQ ID NO: 135735 - RNA, 13 nt, Homo sapiens
uuacuaaucuuuc

SEQ ID NO: 135736 - RNA, 14 nt, Homo sapiens
ugccaaagaacuug

SEQ ID NO: 135737 - RNA, 14 nt, Homo sapiens
uuaaacuuacuuag

SEQ ID NO: 135738 - RNA, 21 nt, Homo sapiens
ugcuguagaagauggcacuua

SEQ ID NO: 135739 - RNA, 20 nt, Homo sapiens
uaagaugaaacaucauuuca

SEQ ID NO: 135740 - RNA, 14 nt, Homo sapiens
ucaaaaacauucuu

SEQ ID NO: 135741 - RNA, 18 nt, Homo sapiens
cuuagguccaaggucucc

SEQ ID NO: 135742 - RNA, 23 nt, Homo sapiens
ugggucagaguuccgacugccau

SEQ ID NO: 135743 - RNA, 18 nt, Homo sapiens
uugugcauaaaaacaaga

SEQ ID NO: 135744 - RNA, 17 nt, Homo sapiens
caguaguggugacugug

SEQ ID NO: 135745 - RNA, 22 nt, Homo sapiens
uaugauuguccguaggcccaua

SEQ ID NO: 135746 - RNA, 16 nt, Homo sapiens
aaucucuccauucccg

SEQ ID NO: 135747 - RNA, 22 nt, Homo sapiens
uagucucuggcaagaugcuuua

SEQ ID NO: 135748 - RNA, 21 nt, Homo sapiens
aggucuccagagggugaaagc

SEQ ID NO: 135749 - RNA, 19 nt, Homo sapiens
ccucaaaacaaucuuguca

SEQ ID NO: 135750 - RNA, 22 nt, Homo sapiens
aaguaagccauguaucucagga

SEQ ID NO: 135751 - RNA, 14 nt, Homo sapiens
acaaucugaaacag

SEQ ID NO: 135752 - RNA, 22 nt, Homo sapiens
ucagcaccuacaguguacaguc

SEQ ID NO: 135753 - RNA, 16 nt, Homo sapiens
ucacguaaagcuagaa

SEQ ID NO: 135754 - RNA, 18 nt, Homo sapiens
aauguagaaagugaucca

SEQ ID NO: 135755 - RNA, 16 nt, Homo sapiens
ucaggcagaucucagc

SEQ ID NO: 135756 - RNA, 16 nt, Homo sapiens
uuucauaucacacugu

SEQ ID NO: 135757 - RNA, 22 nt, Homo sapiens
gccggggaaggaggccguccau

SEQ ID NO: 135758 - RNA, 20 nt, Homo sapiens
uacacaaucugaaacagcuu

SEQ ID NO: 135759 - RNA, 13 nt, Homo sapiens
uucuccugccuca

SEQ ID NO: 135760 - RNA, 20 nt, Homo sapiens
gcccaggcuggagugcaaug

SEQ ID NO: 135761 - RNA, 15 nt, Homo sapiens
gagugggcuaagcac

SEQ ID NO: 135762 - RNA, 12 nt, Homo sapiens
ugggccaaagaa

SEQ ID NO: 135763 - RNA, 17 nt, Homo sapiens
ccaggcuggagugcaau

SEQ ID NO: 135764 - RNA, 15 nt, Homo sapiens
auucuguaguuucac

SEQ ID NO: 135765 - RNA, 18 nt, Homo sapiens
agaagguugagggcaaug

SEQ ID NO: 135766 - RNA, 23 nt, Homo sapiens
ucaaaugagaaaaugucuuuauu

SEQ ID NO: 135767 - RNA, 20 nt, Homo sapiens
gacgugauuuugcuguagaa

SEQ ID NO: 135768 - RNA, 22 nt, Homo sapiens
cugucaauguccuacugagaca

SEQ ID NO: 135769 - RNA, 18 nt, Homo sapiens
uugcacaaauugggccaa

SEQ ID NO: 135770 - RNA, 14 nt, Homo sapiens
ugugccaucagcuc

SEQ ID NO: 135771 - RNA, 20 nt, Homo sapiens
ugauauguugguagauucua

SEQ ID NO: 135772 - RNA, 21 nt, Homo sapiens
aguagcuggauuacaggcaug

SEQ ID NO: 135773 - RNA, 12 nt, Homo sapiens
aaguaagccaug

SEQ ID NO: 135774 - RNA, 15 nt, Homo sapiens
acaaagccaaucuca

SEQ ID NO: 135775 - RNA, 20 nt, Homo sapiens
accaauauuguacaguuuuu

SEQ ID NO: 135776 - RNA, 17 nt, Homo sapiens
augagggaacuguguag

SEQ ID NO: 135777 - RNA, 13 nt, Homo sapiens
cacugauguauga

SEQ ID NO: 135778 - RNA, 17 nt, Homo sapiens
ucuccuuagaaguggaa

SEQ ID NO: 135779 - RNA, 19 nt, Homo sapiens
guuucaccauguuggccag

SEQ ID NO: 135780 - RNA, 19 nt, Homo sapiens
caaucaguagccagcaucu

SEQ ID NO: 135781 - RNA, 16 nt, Homo sapiens
acugaauuuugucuuu

SEQ ID NO: 135782 - RNA, 17 nt, Homo sapiens
caacaaagucacccacu

SEQ ID NO: 135783 - RNA, 14 nt, Homo sapiens
uaaccauugucaua

SEQ ID NO: 135784 - RNA, 16 nt, Homo sapiens
uccuggggaacauaga

SEQ ID NO: 135785 - RNA, 16 nt, Homo sapiens
acuauugcuugcacaa

SEQ ID NO: 135786 - RNA, 20 nt, Homo sapiens
cuggauuacaggcaugugcc

SEQ ID NO: 135787 - RNA, 21 nt, Homo sapiens
cuaugauuguccguaggccca

SEQ ID NO: 135788 - RNA, 19 nt, Homo sapiens
agaugaaacaucauuucaa

SEQ ID NO: 135789 - RNA, 19 nt, Homo sapiens
cccuguucauucugcauuc

SEQ ID NO: 135790 - RNA, 16 nt, Homo sapiens
aggcuggagugcaaug

SEQ ID NO: 135791 - RNA, 22 nt, Homo sapiens
cuuaagacgugauuuugcugua

SEQ ID NO: 135792 - RNA, 18 nt, Homo sapiens
ccacccucccacugccaa

SEQ ID NO: 135793 - RNA, 14 nt, Homo sapiens
ucucucuucuuuuc

SEQ ID NO: 135794 - RNA, 19 nt, Homo sapiens
ccuuggcuaguaaaagcca

SEQ ID NO: 135795 - RNA, 20 nt, Homo sapiens
ucugacucuuggcacagcau

SEQ ID NO: 135796 - RNA, 19 nt, Homo sapiens
gaccugccaggcacacuga

SEQ ID NO: 135797 - RNA, 14 nt, Homo sapiens
gucuuuaaccacuu

SEQ ID NO: 135798 - RNA, 19 nt, Homo sapiens
agucuuagagcuuuaccua

SEQ ID NO: 135799 - RNA, 12 nt, Homo sapiens
gccaagcaguuu

SEQ ID NO: 135800 - RNA, 19 nt, Homo sapiens
gacuuugaggguguauauu

SEQ ID NO: 135801 - RNA, 20 nt, Homo sapiens
aaguaaauauagcucaggua

SEQ ID NO: 135802 - RNA, 16 nt, Homo sapiens
uauaaaagacugacca

SEQ ID NO: 135803 - RNA, 13 nt, Homo sapiens
gcauucucuaguc

SEQ ID NO: 135804 - RNA, 18 nt, Homo sapiens
ggaacuaagaaagcccuu

SEQ ID NO: 135805 - RNA, 16 nt, Homo sapiens
aacguaagacugugua

SEQ ID NO: 135806 - RNA, 19 nt, Homo sapiens
ccucaucuccuaaaaggca

SEQ ID NO: 135807 - RNA, 16 nt, Homo sapiens
ugcauucucuagucag

SEQ ID NO: 135808 - RNA, 21 nt, Homo sapiens
agcuagcaacauuuguuuuag

SEQ ID NO: 135809 - RNA, 17 nt, Homo sapiens
cucaaagaaauuuccac

SEQ ID NO: 135810 - RNA, 15 nt, Homo sapiens
gaauguaaugguggc

SEQ ID NO: 135811 - RNA, 15 nt, Homo sapiens
ugcauguggcacuua

SEQ ID NO: 135812 - RNA, 18 nt, Homo sapiens
aaaaguauccugcuucug

SEQ ID NO: 135813 - RNA, 17 nt, Homo sapiens
accuaacgagaaauaga

SEQ ID NO: 135814 - RNA, 23 nt, Homo sapiens
ucuuaagacgugauuuugcugua

SEQ ID NO: 135815 - RNA, 16 nt, Homo sapiens
aagguugagggcaaug

SEQ ID NO: 135816 - RNA, 13 nt, Homo sapiens
aucugaacuccuu

SEQ ID NO: 135817 - RNA, 15 nt, Homo sapiens
auagaauucagucaa

SEQ ID NO: 135818 - RNA, 13 nt, Homo sapiens
agccucaucucuu

SEQ ID NO: 135819 - RNA, 14 nt, Homo sapiens
uucuggggcuucag

SEQ ID NO: 135820 - RNA, 17 nt, Homo sapiens
aagaucguucucugccu

SEQ ID NO: 135821 - RNA, 11 nt, Homo sapiens
agaagaugaau

SEQ ID NO: 135822 - RNA, 18 nt, Homo sapiens
auuagcuccacaaagcca

SEQ ID NO: 135823 - RNA, 14 nt, Homo sapiens
aauaaaauuguaca

SEQ ID NO: 135824 - RNA, 18 nt, Homo sapiens
accuaaauaugagcccag

SEQ ID NO: 135825 - RNA, 20 nt, Homo sapiens
gacagcuccuggaccaggcc

SEQ ID NO: 135826 - RNA, 13 nt, Homo sapiens
guccaaggucucc

SEQ ID NO: 135827 - RNA, 23 nt, Homo sapiens
aacaguaguugcaauguuuuaga

SEQ ID NO: 135828 - RNA, 22 nt, Homo sapiens
uguuucaaacaaaaagucauaa

SEQ ID NO: 135829 - RNA, 17 nt, Homo sapiens
agauuucagauuuguga

SEQ ID NO: 135830 - RNA, 17 nt, Homo sapiens
ggcugugccaucagcuc

SEQ ID NO: 135831 - RNA, 13 nt, Homo sapiens
gggagacacugau

SEQ ID NO: 135832 - RNA, 17 nt, Homo sapiens
aucguucucugccucac

SEQ ID NO: 135833 - RNA, 13 nt, Homo sapiens
ucuuuuugcuuca

SEQ ID NO: 135834 - RNA, 22 nt, Homo sapiens
ucuuuguaaagaaaguggcuug

SEQ ID NO: 135835 - RNA, 15 nt, Homo sapiens
cagauuauuauugaa

SEQ ID NO: 135836 - RNA, 16 nt, Homo sapiens
ccuggaccaggucuca

SEQ ID NO: 135837 - RNA, 13 nt, Homo sapiens
agcagauaauggu

SEQ ID NO: 135838 - RNA, 16 nt, Homo sapiens
uacuauuuuuacuaau

SEQ ID NO: 135839 - RNA, 21 nt, Homo sapiens
uuggacucaagcaagauuuca

SEQ ID NO: 135840 - RNA, 12 nt, Homo sapiens
gaaucucucuuc

SEQ ID NO: 135841 - RNA, 23 nt, Homo sapiens
agccaccgcgcccagccucaucu

SEQ ID NO: 135842 - RNA, 13 nt, Homo sapiens
gaaacagcuucau

SEQ ID NO: 135843 - RNA, 16 nt, Homo sapiens
uguacagucuuguauu

SEQ ID NO: 135844 - RNA, 14 nt, Homo sapiens
cuuaaaauagccau

SEQ ID NO: 135845 - RNA, 15 nt, Homo sapiens
caaucugaaacagcu

SEQ ID NO: 135846 - RNA, 23 nt, Homo sapiens
uguaagaucguucucugccucac

SEQ ID NO: 135847 - RNA, 20 nt, Homo sapiens
ucauacuugaaaauaugaca

SEQ ID NO: 135848 - RNA, 20 nt, Homo sapiens
cauaaaaguuggcucaggag

SEQ ID NO: 135849 - RNA, 16 nt, Homo sapiens
cuauuagcuccacaaa

SEQ ID NO: 135850 - RNA, 14 nt, Homo sapiens
auuucuguucuucc

SEQ ID NO: 135851 - RNA, 23 nt, Homo sapiens
cacagccaaccuagcuagcaaca

SEQ ID NO: 135852 - RNA, 21 nt, Homo sapiens
auguccuacugagacagcaca

SEQ ID NO: 135853 - RNA, 12 nt, Homo sapiens
uuucccaaagag

SEQ ID NO: 135854 - RNA, 12 nt, Homo sapiens
ugaaacaucauu

SEQ ID NO: 135855 - RNA, 13 nt, Homo sapiens
cuggcucaucucu

SEQ ID NO: 135856 - RNA, 23 nt, Homo sapiens
aauuuuauguuuaguugcacaaa

SEQ ID NO: 135857 - RNA, 17 nt, Homo sapiens
uuuaaaugaaagugaga

SEQ ID NO: 135858 - RNA, 20 nt, Homo sapiens
cagagcagagaggcugaaua

SEQ ID NO: 135859 - RNA, 16 nt, Homo sapiens
gaguuccgacugccau

SEQ ID NO: 135860 - RNA, 17 nt, Homo sapiens
agucugucaauguccua

SEQ ID NO: 135861 - RNA, 15 nt, Homo sapiens
uaagaaauucacuuc

SEQ ID NO: 135862 - RNA, 15 nt, Homo sapiens
aguugggugauaugu

SEQ ID NO: 135863 - RNA, 17 nt, Homo sapiens
agugagcuccuaagcca

SEQ ID NO: 135864 - RNA, 14 nt, Homo sapiens
uguuaacugaaugc

SEQ ID NO: 135865 - RNA, 20 nt, Homo sapiens
cucgugguaggacuguagaa

SEQ ID NO: 135866 - RNA, 15 nt, Homo sapiens
gaacugaacauucca

SEQ ID NO: 135867 - RNA, 15 nt, Homo sapiens
uggauuugucuuugg

SEQ ID NO: 135868 - RNA, 13 nt, Homo sapiens
gugccaucagcuc

SEQ ID NO: 135869 - RNA, 16 nt, Homo sapiens
acuuacuuaguguuau

SEQ ID NO: 135870 - RNA, 18 nt, Homo sapiens
ggaaauagugauuuccac

SEQ ID NO: 135871 - RNA, 21 nt, Homo sapiens
guauaaauauguauuuuguca

SEQ ID NO: 135872 - RNA, 18 nt, Homo sapiens
aauguccuacugagacag

SEQ ID NO: 135873 - RNA, 15 nt, Homo sapiens
augaauaguuuccaa

SEQ ID NO: 135874 - RNA, 22 nt, Homo sapiens
uaaccaaagcccaaagugguau

SEQ ID NO: 135875 - RNA, 18 nt, Homo sapiens
auaugacacucuagucaa

SEQ ID NO: 135876 - RNA, 20 nt, Homo sapiens
caggcuggagugcaaugaca

SEQ ID NO: 135877 - RNA, 18 nt, Homo sapiens
guuuuacuguccaaagac

SEQ ID NO: 135878 - RNA, 13 nt, Homo sapiens
gauaugcuguauu

SEQ ID NO: 135879 - RNA, 22 nt, Homo sapiens
ccauaggaggccaacccaaaau

SEQ ID NO: 135880 - RNA, 12 nt, Homo sapiens
aggccagagcaa

SEQ ID NO: 135881 - RNA, 22 nt, Homo sapiens
aaacauuuguuuguggucuaua

SEQ ID NO: 135882 - RNA, 18 nt, Homo sapiens
agcucagguagcacuuua

SEQ ID NO: 135883 - RNA, 11 nt, Homo sapiens
uuuaaagacag

SEQ ID NO: 135884 - RNA, 13 nt, Homo sapiens
gaaaaguuuugua

SEQ ID NO: 135885 - RNA, 14 nt, Homo sapiens
aaacaucauuucaa

SEQ ID NO: 135886 - RNA, 22 nt, Homo sapiens
uggggacacagcaucagcucaa

SEQ ID NO: 135887 - RNA, 18 nt, Homo sapiens
aauaugacacucuaguca

SEQ ID NO: 135888 - RNA, 17 nt, Homo sapiens
aggagugccacuucaug

SEQ ID NO: 135889 - RNA, 16 nt, Homo sapiens
uuaaaauagccauaaa

SEQ ID NO: 135890 - RNA, 15 nt, Homo sapiens
ugcagccacuguuaa

SEQ ID NO: 135891 - RNA, 12 nt, Homo sapiens
uaguugcuguau

SEQ ID NO: 135892 - RNA, 18 nt, Homo sapiens
aauucagggagugggcua

SEQ ID NO: 135893 - RNA, 15 nt, Homo sapiens
gccaguuacauaaaa

SEQ ID NO: 135894 - RNA, 22 nt, Homo sapiens
ucaagugauucuccugccucag

SEQ ID NO: 135895 - RNA, 17 nt, Homo sapiens
cauacuagaguucaugg

SEQ ID NO: 135896 - RNA, 16 nt, Homo sapiens
ucauuguaaaaagccc

SEQ ID NO: 135897 - RNA, 20 nt, Homo sapiens
guauauucaaccaaauacuu

SEQ ID NO: 135898 - RNA, 22 nt, Homo sapiens
uaccuuuuauuuuaauguuucc

SEQ ID NO: 135899 - RNA, 19 nt, Homo sapiens
aggcugugccaucagcucc

SEQ ID NO: 135900 - RNA, 21 nt, Homo sapiens
guuuuacuguccaaagacaug

SEQ ID NO: 135901 - RNA, 15 nt, Homo sapiens
aaugugacucaagac

SEQ ID NO: 135902 - RNA, 21 nt, Homo sapiens
ugugaccauuagcauuuguca

SEQ ID NO: 135903 - RNA, 18 nt, Homo sapiens
uccuccccuguucauucu

SEQ ID NO: 135904 - RNA, 22 nt, Homo sapiens
cacagcacaaauuaguuguaua

SEQ ID NO: 135905 - RNA, 16 nt, Homo sapiens
ggaaagccaguuacau

SEQ ID NO: 135906 - RNA, 19 nt, Homo sapiens
agaaccucgagguuucuca

SEQ ID NO: 135907 - RNA, 14 nt, Homo sapiens
ucaacaaagucacc

SEQ ID NO: 135908 - RNA, 21 nt, Homo sapiens
cacaaucugaaacagcuucau

SEQ ID NO: 135909 - RNA, 24 nt, Homo sapiens
cuugguaaaauaaucaguguuucc

SEQ ID NO: 135910 - RNA, 20 nt, Homo sapiens
uccuuggcuucuuuacuuag

SEQ ID NO: 135911 - RNA, 14 nt, Homo sapiens
caauagauauuuac

SEQ ID NO: 135912 - RNA, 21 nt, Homo sapiens
aaccguaugagggaacugugu

SEQ ID NO: 135913 - RNA, 16 nt, Homo sapiens
uccuuagaaguggaag

SEQ ID NO: 135914 - RNA, 12 nt, Homo sapiens
gucuuggcucac

SEQ ID NO: 135915 - RNA, 14 nt, Homo sapiens
uuuucuugucuaua

SEQ ID NO: 135916 - RNA, 12 nt, Homo sapiens
uaagaugaaaca

SEQ ID NO: 135917 - RNA, 16 nt, Homo sapiens
augagggaacugugua

SEQ ID NO: 135918 - RNA, 15 nt, Homo sapiens
gaaaaguaacuguuu

SEQ ID NO: 135919 - RNA, 15 nt, Homo sapiens
agccagguucugacu

SEQ ID NO: 135920 - RNA, 23 nt, Homo sapiens
gaaaagaaucggcaauguuucaa

SEQ ID NO: 135921 - RNA, 20 nt, Homo sapiens
cagagucucgcucuguugcc

SEQ ID NO: 135922 - RNA, 11 nt, Homo sapiens
ccacucagguc

SEQ ID NO: 135923 - RNA, 17 nt, Homo sapiens
gaaaagggaacugaaca

SEQ ID NO: 135924 - RNA, 13 nt, Homo sapiens
ccuccaaguccac

SEQ ID NO: 135925 - RNA, 13 nt, Homo sapiens
ucugaaacagcuu

SEQ ID NO: 135926 - RNA, 21 nt, Homo sapiens
caaucuguccuguuacaaaag

SEQ ID NO: 135927 - RNA, 21 nt, Homo sapiens
cacuucccacuauugcuugca

SEQ ID NO: 135928 - RNA, 23 nt, Homo sapiens
guggacucuaacaguaguugcaa

SEQ ID NO: 135929 - RNA, 21 nt, Homo sapiens
ucaugggguggacucuaacag

SEQ ID NO: 135930 - RNA, 20 nt, Homo sapiens
auaaaggggagggacucauc

SEQ ID NO: 135931 - RNA, 19 nt, Homo sapiens
gcccaggcuggagugcaau

SEQ ID NO: 135932 - RNA, 15 nt, Homo sapiens
agcgauuaauaacag

SEQ ID NO: 135933 - RNA, 20 nt, Homo sapiens
cuccugaccucaaguaaucc

SEQ ID NO: 135934 - RNA, 15 nt, Homo sapiens
augggagacacugau

SEQ ID NO: 135935 - RNA, 17 nt, Homo sapiens
aaauaaucaguguuucc

SEQ ID NO: 135936 - RNA, 21 nt, Homo sapiens
acugccaucuuggacuuguca

SEQ ID NO: 135937 - RNA, 15 nt, Homo sapiens
guuuccaaucugucc

SEQ ID NO: 135938 - RNA, 17 nt, Homo sapiens
ccaaauauuccagagac

SEQ ID NO: 135939 - RNA, 22 nt, Homo sapiens
cuguuuugguuuugcucacaaa

SEQ ID NO: 135940 - RNA, 15 nt, Homo sapiens
acaauauacuuguau

SEQ ID NO: 135941 - RNA, 19 nt, Homo sapiens
aguauccugcuucugauau

SEQ ID NO: 135942 - RNA, 21 nt, Homo sapiens
uaagcacgggccauaugaaua

SEQ ID NO: 135943 - RNA, 22 nt, Homo sapiens
caaagauacacaaucugaaaca

SEQ ID NO: 135944 - RNA, 14 nt, Homo sapiens
ugggagacacugau

SEQ ID NO: 135945 - RNA, 12 nt, Homo sapiens
uggcucaucucu

SEQ ID NO: 135946 - RNA, 20 nt, Homo sapiens
acagugacuccacucugagu

SEQ ID NO: 135947 - RNA, 21 nt, Homo sapiens
aucugccuccccuucacuccc

SEQ ID NO: 135948 - RNA, 18 nt, Homo sapiens
ggguuucaccauguuggc

SEQ ID NO: 135949 - RNA, 17 nt, Homo sapiens
uaagaagugacucuugc

SEQ ID NO: 135950 - RNA, 17 nt, Homo sapiens
cuccuggaccaggucuc

SEQ ID NO: 135951 - RNA, 19 nt, Homo sapiens
auuggaccagucagcacag

SEQ ID NO: 135952 - RNA, 18 nt, Homo sapiens
accauuagcauuugucaa

SEQ ID NO: 135953 - RNA, 23 nt, Homo sapiens
auauacuuauagaauucagucaa

SEQ ID NO: 135954 - RNA, 19 nt, Homo sapiens
uuugcuucaaaaacauucu

SEQ ID NO: 135955 - RNA, 18 nt, Homo sapiens
gaucguucucugccucac

SEQ ID NO: 135956 - RNA, 18 nt, Homo sapiens
uugcaauguggcuugaau

SEQ ID NO: 135957 - RNA, 22 nt, Homo sapiens
uugcacaaauugggccaaagaa

SEQ ID NO: 135958 - RNA, 16 nt, Homo sapiens
uacagucuuguauuaa

SEQ ID NO: 135959 - RNA, 18 nt, Homo sapiens
cagggagugggcuaagca

SEQ ID NO: 135960 - RNA, 10 nt, Homo sapiens
aaaagugaug

SEQ ID NO: 135961 - RNA, 15 nt, Homo sapiens
cccagccucaucucu

SEQ ID NO: 135962 - RNA, 22 nt, Homo sapiens
cauuugucaacaaagucaccca

SEQ ID NO: 135963 - RNA, 22 nt, Homo sapiens
uguuuccuuuaauuuuuuacua

SEQ ID NO: 135964 - RNA, 15 nt, Homo sapiens
uggggacacagcauc

SEQ ID NO: 135965 - RNA, 19 nt, Homo sapiens
agggcuuggacucaagcaa

SEQ ID NO: 135966 - RNA, 13 nt, Homo sapiens
cauuuacauugcc

SEQ ID NO: 135967 - RNA, 22 nt, Homo sapiens
guaagaucguucucugccucac

SEQ ID NO: 135968 - RNA, 22 nt, Homo sapiens
augaaucaaucaauucauaucu

SEQ ID NO: 135969 - RNA, 10 nt, Homo sapiens
cucacaaaag

SEQ ID NO: 135970 - RNA, 17 nt, Homo sapiens
agguuucucaaagaaau

SEQ ID NO: 135971 - RNA, 13 nt, Homo sapiens
gaauaugcacaaa

SEQ ID NO: 135972 - RNA, 22 nt, Homo sapiens
cugagucccuuagccaagcagu

SEQ ID NO: 135973 - RNA, 16 nt, Homo sapiens
gauuuugcuguagaag

SEQ ID NO: 135974 - RNA, 14 nt, Homo sapiens
gaaacaucauuuca

SEQ ID NO: 135975 - RNA, 11 nt, Homo sapiens
uaaaagccauc

SEQ ID NO: 135976 - RNA, 12 nt, Homo sapiens
uuugucuuuaug

SEQ ID NO: 135977 - RNA, 19 nt, Homo sapiens
uagugcacagcacaaauua

SEQ ID NO: 135978 - RNA, 16 nt, Homo sapiens
uaaucaguguuuccaa

SEQ ID NO: 135979 - RNA, 14 nt, Homo sapiens
uuugucaacaaagu

SEQ ID NO: 135980 - RNA, 21 nt, Homo sapiens
cagagaagggcuuggacucaa

SEQ ID NO: 135981 - RNA, 15 nt, Homo sapiens
ccacugccaaagaac

SEQ ID NO: 135982 - RNA, 22 nt, Homo sapiens
uaagcugccuguacacaacuca

SEQ ID NO: 135983 - RNA, 15 nt, Homo sapiens
uuaugaauaguuucc

SEQ ID NO: 135984 - RNA, 19 nt, Homo sapiens
auuaucuaaaaucugcuag

SEQ ID NO: 135985 - RNA, 23 nt, Homo sapiens
cuuuggugaacauugcaauagaa

SEQ ID NO: 135986 - RNA, 20 nt, Homo sapiens
aaaugagaagucucacugau

SEQ ID NO: 135987 - RNA, 22 nt, Homo sapiens
uacugcuggcaguggaacuaag

SEQ ID NO: 135988 - RNA, 20 nt, Homo sapiens
cccaggcuggagugcaauga

SEQ ID NO: 135989 - RNA, 15 nt, Homo sapiens
cgacaacuugcacgu

SEQ ID NO: 135990 - RNA, 15 nt, Homo sapiens
gugagaggacucuga

SEQ ID NO: 135991 - RNA, 17 nt, Homo sapiens
cuucagucuuuuccaug

SEQ ID NO: 135992 - RNA, 22 nt, Homo sapiens
uaaauuucucuacugucucagu

SEQ ID NO: 135993 - RNA, 19 nt, Homo sapiens
cauggauauguuauacuga

SEQ ID NO: 135994 - RNA, 21 nt, Homo sapiens
ccuccaaguccacaguggaac

SEQ ID NO: 135995 - RNA, 17 nt, Homo sapiens
auucuuacauuuuacuu

SEQ ID NO: 135996 - RNA, 21 nt, Homo sapiens
accuaaauaugagcccagaaa

SEQ ID NO: 135997 - RNA, 17 nt, Homo sapiens
auguagaaagugaucca

SEQ ID NO: 135998 - RNA, 21 nt, Homo sapiens
uguguuuuuaauaaagacagg

SEQ ID NO: 135999 - RNA, 22 nt, Homo sapiens
cuccuuggcuucuuuacuuagu

SEQ ID NO: 136000 - RNA, 15 nt, Homo sapiens
ucaaaaacauucuua

SEQ ID NO: 136001 - RNA, 23 nt, Homo sapiens
gaaaugcugguuuuucaguuuuc

SEQ ID NO: 136002 - RNA, 18 nt, Homo sapiens
cagaguuccgacugccau

SEQ ID NO: 136003 - RNA, 15 nt, Homo sapiens
ccaaagacauguuua

SEQ ID NO: 136004 - RNA, 23 nt, Homo sapiens
uucuaaagauggaaaaaccaccc

SEQ ID NO: 136005 - RNA, 17 nt, Homo sapiens
cuuggguucaagugauu

SEQ ID NO: 136006 - RNA, 22 nt, Homo sapiens
cuuguuagugcacagcacaaau

SEQ ID NO: 136007 - RNA, 13 nt, Homo sapiens
uaaauguagaaag

SEQ ID NO: 136008 - RNA, 19 nt, Homo sapiens
ucgugguaggacuguagaa

SEQ ID NO: 136009 - RNA, 15 nt, Homo sapiens
aguucauggauaugu

SEQ ID NO: 136010 - RNA, 18 nt, Homo sapiens
agggcaauggacaaggaa

SEQ ID NO: 136011 - RNA, 21 nt, Homo sapiens
aauaguuguuauucuguaguu

SEQ ID NO: 136012 - RNA, 14 nt, Homo sapiens
aauucaucagauaa

SEQ ID NO: 136013 - RNA, 15 nt, Homo sapiens
uuggugaacauugca

SEQ ID NO: 136014 - RNA, 13 nt, Homo sapiens
auucugcacucag

SEQ ID NO: 136015 - RNA, 19 nt, Homo sapiens
cuggcaguggaacuaagaa

SEQ ID NO: 136016 - RNA, 12 nt, Homo sapiens
uuuuauauccac

SEQ ID NO: 136017 - RNA, 15 nt, Homo sapiens
aguuguuaauaaaag

SEQ ID NO: 136018 - RNA, 17 nt, Homo sapiens
ucaaacuccugaccuca

SEQ ID NO: 136019 - RNA, 19 nt, Homo sapiens
aguuuauacccguuucaca

SEQ ID NO: 136020 - RNA, 14 nt, Homo sapiens
uaguggugacugug

SEQ ID NO: 136021 - RNA, 19 nt, Homo sapiens
guaaauauagcucagguag

SEQ ID NO: 136022 - RNA, 16 nt, Homo sapiens
gaaguuuaauugacuu

SEQ ID NO: 136023 - RNA, 13 nt, Homo sapiens
ucaucauuuccau

SEQ ID NO: 136024 - RNA, 16 nt, Homo sapiens
acccucccacugccaa

SEQ ID NO: 136025 - RNA, 13 nt, Homo sapiens
cucuuggguucaa

SEQ ID NO: 136026 - RNA, 18 nt, Homo sapiens
augcuggggacacagcau

SEQ ID NO: 136027 - RNA, 21 nt, Homo sapiens
gaguuauuuuuauuuauuuaa

SEQ ID NO: 136028 - RNA, 10 nt, Homo sapiens
ugucuuuauu

SEQ ID NO: 136029 - RNA, 18 nt, Homo sapiens
ggacucaagcaagauuuc

SEQ ID NO: 136030 - RNA, 23 nt, Homo sapiens
agaagguugagggcaauggacaa

SEQ ID NO: 136031 - RNA, 13 nt, Homo sapiens
agcaaaaccaaau

SEQ ID NO: 136032 - RNA, 11 nt, Homo sapiens
aguaagccaug

SEQ ID NO: 136033 - RNA, 15 nt, Homo sapiens
auaaagacaggguuu

SEQ ID NO: 136034 - RNA, 18 nt, Homo sapiens
agcccuuaggaagaauuu

SEQ ID NO: 136035 - RNA, 16 nt, Homo sapiens
aaguuuaauugacuua

SEQ ID NO: 136036 - RNA, 18 nt, Homo sapiens
gacgugauuuugcuguag

SEQ ID NO: 136037 - RNA, 11 nt, Homo sapiens
gccucaucucu

SEQ ID NO: 136038 - RNA, 15 nt, Homo sapiens
uucaguuuucaggag

SEQ ID NO: 136039 - RNA, 13 nt, Homo sapiens
cagcuguuuaugc

SEQ ID NO: 136040 - RNA, 11 nt, Homo sapiens
aguugcacaaa

SEQ ID NO: 136041 - RNA, 15 nt, Homo sapiens
ggcuggagugcaaug

SEQ ID NO: 136042 - RNA, 16 nt, Homo sapiens
agugauucuccugccu

SEQ ID NO: 136043 - RNA, 13 nt, Homo sapiens
caacuguggcuua

SEQ ID NO: 136044 - RNA, 13 nt, Homo sapiens
aaagaaauuucca

SEQ ID NO: 136045 - RNA, 14 nt, Homo sapiens
auugggccaaagaa

SEQ ID NO: 136046 - RNA, 23 nt, Homo sapiens
cuuuuuuuuuuuuuaaagacaga

SEQ ID NO: 136047 - RNA, 19 nt, Homo sapiens
uguauuuaaaugaaaguga

SEQ ID NO: 136048 - RNA, 17 nt, Homo sapiens
caaucuguccuguuaca

SEQ ID NO: 136049 - RNA, 13 nt, Homo sapiens
ugauuguagcuau

SEQ ID NO: 136050 - RNA, 20 nt, Homo sapiens
uuucuugucuauaaagcauu

SEQ ID NO: 136051 - RNA, 21 nt, Homo sapiens
ugccacucuguaauugcaaaa

SEQ ID NO: 136052 - RNA, 15 nt, Homo sapiens
uuaaaugaaagugag

SEQ ID NO: 136053 - RNA, 22 nt, Homo sapiens
ucaaacaaaaagucauaaaagu

SEQ ID NO: 136054 - RNA, 21 nt, Homo sapiens
uaaaauaaucaguguuuccaa

SEQ ID NO: 136055 - RNA, 14 nt, Homo sapiens
uauacaauauacuu

SEQ ID NO: 136056 - RNA, 20 nt, Homo sapiens
cugucaauguccuacugaga

SEQ ID NO: 136057 - RNA, 20 nt, Homo sapiens
ucaaaaaaaaaaaaauguga

SEQ ID NO: 136058 - RNA, 19 nt, Homo sapiens
uaaagaaaaguuuuguaaa

SEQ ID NO: 136059 - RNA, 21 nt, Homo sapiens
ggcuucagucuuuuccaugaa

SEQ ID NO: 136060 - RNA, 21 nt, Homo sapiens
uuaaauguagaaagugaucca

SEQ ID NO: 136061 - RNA, 23 nt, Homo sapiens
aaauuuucuuuuuauacuauuaa

SEQ ID NO: 136062 - RNA, 22 nt, Homo sapiens
aaaauaugacacucuagucaaa

SEQ ID NO: 136063 - RNA, 20 nt, Homo sapiens
cuuguuguuuucccaaagag

SEQ ID NO: 136064 - RNA, 22 nt, Homo sapiens
augaggaauuucuguucuucca

SEQ ID NO: 136065 - RNA, 15 nt, Homo sapiens
agaaagugauccaua

SEQ ID NO: 136066 - RNA, 15 nt, Homo sapiens
uaucuaaaaucugcu

SEQ ID NO: 136067 - RNA, 15 nt, Homo sapiens
acucaucauuuccau

SEQ ID NO: 136068 - RNA, 20 nt, Homo sapiens
ugcuggcaguggaacuaaga

SEQ ID NO: 136069 - RNA, 16 nt, Homo sapiens
ggggacacagcaucag

SEQ ID NO: 136070 - RNA, 19 nt, Homo sapiens
gugcugggauuacagggau

SEQ ID NO: 136071 - RNA, 14 nt, Homo sapiens
uagcuccacaaagc

SEQ ID NO: 136072 - RNA, 19 nt, Homo sapiens
guguacagucuuguauuaa

SEQ ID NO: 136073 - RNA, 19 nt, Homo sapiens
aagccauguguuccaaggc

SEQ ID NO: 136074 - RNA, 16 nt, Homo sapiens
auaaaaguuggcucag

SEQ ID NO: 136075 - RNA, 12 nt, Homo sapiens
acaaucuuguca

SEQ ID NO: 136076 - RNA, 19 nt, Homo sapiens
uacaaaguaagccauguau

SEQ ID NO: 136077 - RNA, 18 nt, Homo sapiens
auguaagaucguucucug

SEQ ID NO: 136078 - RNA, 17 nt, Homo sapiens
cuucugaaaaaguaucc

SEQ ID NO: 136079 - RNA, 17 nt, Homo sapiens
uaaaccguacacugugu

SEQ ID NO: 136080 - RNA, 19 nt, Homo sapiens
gaaugagcaaaaccaaaua

SEQ ID NO: 136081 - RNA, 16 nt, Homo sapiens
gauucuccugccucag

SEQ ID NO: 136082 - RNA, 20 nt, Homo sapiens
gccacucuguaauugcaaaa

SEQ ID NO: 136083 - RNA, 15 nt, Homo sapiens
ucuguucuuccauca

SEQ ID NO: 136084 - RNA, 13 nt, Homo sapiens
guucucugccuca

SEQ ID NO: 136085 - RNA, 17 nt, Homo sapiens
gaacuccuuggcuucuu

SEQ ID NO: 136086 - RNA, 21 nt, Homo sapiens
ugagcaaaaccaaauauucca

SEQ ID NO: 136087 - RNA, 23 nt, Homo sapiens
uaaaaaaaaaaaaaaaagugaug

SEQ ID NO: 136088 - RNA, 19 nt, Homo sapiens
cuccacaaagccaaucuca

SEQ ID NO: 136089 - RNA, 17 nt, Homo sapiens
cagguucugacucuugg

SEQ ID NO: 136090 - RNA, 12 nt, Homo sapiens
ucugcuagggaa

SEQ ID NO: 136091 - RNA, 21 nt, Homo sapiens
gacagcacagccaaccuagcu

SEQ ID NO: 136092 - RNA, 12 nt, Homo sapiens
acacagcaucag

SEQ ID NO: 136093 - RNA, 18 nt, Homo sapiens
aucugaaacagcuucaug

SEQ ID NO: 136094 - RNA, 14 nt, Homo sapiens
gcuucugauaugca

SEQ ID NO: 136095 - RNA, 23 nt, Homo sapiens
aauugggccaaagaaacauugcc

SEQ ID NO: 136096 - RNA, 20 nt, Homo sapiens
ugucuuuggugaacauugca

SEQ ID NO: 136097 - RNA, 21 nt, Homo sapiens
aagauuucagauuugugacca

SEQ ID NO: 136098 - RNA, 14 nt, Homo sapiens
acacagcaucagcu

SEQ ID NO: 136099 - RNA, 15 nt, Homo sapiens
guugcuguaugucuc

SEQ ID NO: 136100 - RNA, 22 nt, Homo sapiens
aagaaaaguuuuguaaauuucu

SEQ ID NO: 136101 - RNA, 21 nt, Homo sapiens
gauaggguuucuaaugguuau

SEQ ID NO: 136102 - RNA, 16 nt, Homo sapiens
cccuccauucugcacu

SEQ ID NO: 136103 - RNA, 18 nt, Homo sapiens
ccaaguccacaguggaac

SEQ ID NO: 136104 - RNA, 16 nt, Homo sapiens
gucuaaaaacauuugu

SEQ ID NO: 136105 - RNA, 23 nt, Homo sapiens
cuuggaauccuggggaacauaga

SEQ ID NO: 136106 - RNA, 16 nt, Homo sapiens
gacacagcaucagcuc

SEQ ID NO: 136107 - RNA, 18 nt, Homo sapiens
ucagaaaauggcacuugg

SEQ ID NO: 136108 - RNA, 16 nt, Homo sapiens
augagcaaaaccaaau

SEQ ID NO: 136109 - RNA, 21 nt, Homo sapiens
ucaaguaauccaccugccucg

SEQ ID NO: 136110 - RNA, 20 nt, Homo sapiens
uagauaaucucuccauuccc

SEQ ID NO: 136111 - RNA, 15 nt, Homo sapiens
cccgucgacguagaa

SEQ ID NO: 136112 - RNA, 14 nt, Homo sapiens
gcuguagaagaugg

SEQ ID NO: 136113 - RNA, 21 nt, Homo sapiens
agacgugauuuugcuguagaa

SEQ ID NO: 136114 - RNA, 14 nt, Homo sapiens
uagaauucagucaa

SEQ ID NO: 136115 - RNA, 21 nt, Homo sapiens
uaagaagcagauaaugguguu

SEQ ID NO: 136116 - RNA, 12 nt, Homo sapiens
cacugccaaaga

SEQ ID NO: 136117 - RNA, 23 nt, Homo sapiens
ucagauauaaaagacugaccaau

SEQ ID NO: 136118 - RNA, 22 nt, Homo sapiens
guuucauauugaugugugucua

SEQ ID NO: 136119 - RNA, 17 nt, Homo sapiens
ccagagccucaaaugag

SEQ ID NO: 136120 - RNA, 21 nt, Homo sapiens
cugaugcuggggacacagcau

SEQ ID NO: 136121 - RNA, 18 nt, Homo sapiens
aaguacauguuaaacuua

SEQ ID NO: 136122 - RNA, 20 nt, Homo sapiens
guuaaaauaaaauuguacau

SEQ ID NO: 136123 - RNA, 14 nt, Homo sapiens
aagaaacauugccu

SEQ ID NO: 136124 - RNA, 16 nt, Homo sapiens
ucaacaaagucaccca

SEQ ID NO: 136125 - RNA, 21 nt, Homo sapiens
cugaccaauauuguacaguuu

SEQ ID NO: 136126 - RNA, 17 nt, Homo sapiens
uaaauauagcucaggua

SEQ ID NO: 136127 - RNA, 16 nt, Homo sapiens
cugcuucugauaugca

SEQ ID NO: 136128 - RNA, 17 nt, Homo sapiens
uaacaggagugccacuu

SEQ ID NO: 136129 - RNA, 9 nt, Homo sapiens
aaagugaug

SEQ ID NO: 136130 - RNA, 14 nt, Homo sapiens
guuccgacugccau

SEQ ID NO: 136131 - RNA, 17 nt, Homo sapiens
guuguuuucccaaagag

SEQ ID NO: 136132 - RNA, 22 nt, Homo sapiens
uagagaccaguuuucucuggaa

SEQ ID NO: 136133 - RNA, 14 nt, Homo sapiens
aaugagacuuacuu

SEQ ID NO: 136134 - RNA, 19 nt, Homo sapiens
uagcggggaggggguuauc

SEQ ID NO: 136135 - RNA, 14 nt, Homo sapiens
caguggaacuaaga

SEQ ID NO: 136136 - RNA, 15 nt, Homo sapiens
uggcuucuuuacuua

SEQ ID NO: 136137 - RNA, 18 nt, Homo sapiens
caaggucuccagagggug

SEQ ID NO: 136138 - RNA, 15 nt, Homo sapiens
uuaaaaauaugugua

SEQ ID NO: 136139 - RNA, 19 nt, Homo sapiens
ugccaucuuggacuuguca

SEQ ID NO: 136140 - RNA, 20 nt, Homo sapiens
aaucuuucugcagaaacaga

SEQ ID NO: 136141 - RNA, 17 nt, Homo sapiens
uuuaauguuuccuuuaa

SEQ ID NO: 136142 - RNA, 13 nt, Homo sapiens
aaaagacugacca

SEQ ID NO: 136143 - RNA, 14 nt, Homo sapiens
cacuguuaagccau

SEQ ID NO: 136144 - RNA, 17 nt, Homo sapiens
guacauguuaaacuuac

SEQ ID NO: 136145 - RNA, 16 nt, Homo sapiens
cuaaguguaccagaga

SEQ ID NO: 136146 - RNA, 13 nt, Homo sapiens
uucuucuuuuugc

SEQ ID NO: 136147 - RNA, 20 nt, Homo sapiens
gauuuugaaauuuuuauuaa

SEQ ID NO: 136148 - RNA, 17 nt, Homo sapiens
agaaaguggcuugaaau

SEQ ID NO: 136149 - RNA, 16 nt, Homo sapiens
cuuaaaauagccauaa

SEQ ID NO: 136150 - RNA, 21 nt, Homo sapiens
ugaccugccaggcacacugag

SEQ ID NO: 136151 - RNA, 14 nt, Homo sapiens
uacuuaguucaagc

SEQ ID NO: 136152 - RNA, 12 nt, Homo sapiens
aauaaagacagg

SEQ ID NO: 136153 - RNA, 15 nt, Homo sapiens
uuuaauagcgucaua

SEQ ID NO: 136154 - RNA, 22 nt, Homo sapiens
ucaaagugagcuccuaagccau

SEQ ID NO: 136155 - RNA, 20 nt, Homo sapiens
aaggcugugccaucagcucc

SEQ ID NO: 136156 - RNA, 18 nt, Homo sapiens
uggccaggcuggucucaa

SEQ ID NO: 136157 - RNA, 11 nt, Homo sapiens
acccucccacu

SEQ ID NO: 136158 - RNA, 13 nt, Homo sapiens
gucuuguguuucu

SEQ ID NO: 136159 - RNA, 20 nt, Homo sapiens
ugaguagcuggauuacaggc

SEQ ID NO: 136160 - RNA, 13 nt, Homo sapiens
cuaaguaaauaca

SEQ ID NO: 136161 - RNA, 16 nt, Homo sapiens
uagaaaagggaacuga

SEQ ID NO: 136162 - RNA, 13 nt, Homo sapiens
ucuuccaucaccu

SEQ ID NO: 136163 - RNA, 20 nt, Homo sapiens
uacacauuuuucagauauaa

SEQ ID NO: 136164 - RNA, 17 nt, Homo sapiens
uccacagugacuccacu

SEQ ID NO: 136165 - RNA, 23 nt, Homo sapiens
cuucucugcuaucuagaucugaa

SEQ ID NO: 136166 - RNA, 16 nt, Homo sapiens
gcccagccucaucucu

SEQ ID NO: 136167 - RNA, 14 nt, Homo sapiens
cagcuccuggacca

SEQ ID NO: 136168 - RNA, 15 nt, Homo sapiens
cagagccucaaauga

SEQ ID NO: 136169 - RNA, 19 nt, Homo sapiens
accugccaggcacacugag

SEQ ID NO: 136170 - RNA, 22 nt, Homo sapiens
ucauucugcauucucuagucag

SEQ ID NO: 136171 - RNA, 15 nt, Homo sapiens
uuacuguccaaagac

SEQ ID NO: 136172 - RNA, 17 nt, Homo sapiens
ugaaagugagacuuuga

SEQ ID NO: 136173 - RNA, 18 nt, Homo sapiens
guugagggcaauggacaa

SEQ ID NO: 136174 - RNA, 13 nt, Homo sapiens
augaaacaucauu

SEQ ID NO: 136175 - RNA, 15 nt, Homo sapiens
acaaucuugucauac

SEQ ID NO: 136176 - RNA, 16 nt, Homo sapiens
cauaaaaguuggcuca

SEQ ID NO: 136177 - RNA, 11 nt, Homo sapiens
ggcucaucucu

SEQ ID NO: 136178 - RNA, 12 nt, Homo sapiens
acugagccagca

SEQ ID NO: 136179 - RNA, 14 nt, Homo sapiens
aucaguagccagca

SEQ ID NO: 136180 - RNA, 22 nt, Homo sapiens
ccauacuagaguucauggauau

SEQ ID NO: 136181 - RNA, 15 nt, Homo sapiens
gccccagccuaggaa

SEQ ID NO: 136182 - RNA, 20 nt, Homo sapiens
aaccaaauacuuuaauguau

SEQ ID NO: 136183 - RNA, 13 nt, Homo sapiens
auauacuuauaga

SEQ ID NO: 136184 - RNA, 16 nt, Homo sapiens
acugaaccaggccaga

SEQ ID NO: 136185 - RNA, 13 nt, Homo sapiens
gguuauauguaua

SEQ ID NO: 136186 - RNA, 22 nt, Homo sapiens
ugauuucagcaccuacagugua

SEQ ID NO: 136187 - RNA, 17 nt, Homo sapiens
cuguaugucucguggua

SEQ ID NO: 136188 - RNA, 13 nt, Homo sapiens
uuuugcuguagaa

SEQ ID NO: 136189 - RNA, 18 nt, Homo sapiens
aagagaaguuuucuugac

SEQ ID NO: 136190 - RNA, 13 nt, Homo sapiens
auguguuccaagg

SEQ ID NO: 136191 - RNA, 14 nt, Homo sapiens
ccagccucaucucu

SEQ ID NO: 136192 - RNA, 17 nt, Homo sapiens
cacaaaagucuacuuua

SEQ ID NO: 136193 - RNA, 20 nt, Homo sapiens
uggacucaagcaagauuuca

SEQ ID NO: 136194 - RNA, 10 nt, Homo sapiens
ucauauugau

SEQ ID NO: 136195 - RNA, 11 nt, Homo sapiens
uuugcuguaga

SEQ ID NO: 136196 - RNA, 19 nt, Homo sapiens
cccucuaggaggugaugau

SEQ ID NO: 136197 - RNA, 20 nt, Homo sapiens
cuccccuguucauucugcau

SEQ ID NO: 136198 - RNA, 22 nt, Homo sapiens
uguacaguuuuuauugcuuguu

SEQ ID NO: 136199 - RNA, 20 nt, Homo sapiens
uuaauaggguaaauucucua

SEQ ID NO: 136200 - RNA, 17 nt, Homo sapiens
augguggccuggggcuu

SEQ ID NO: 136201 - RNA, 15 nt, Homo sapiens
cacagucuuggcuca

SEQ ID NO: 136202 - RNA, 22 nt, Homo sapiens
caucugccuccccuucacuccc

SEQ ID NO: 136203 - RNA, 21 nt, Homo sapiens
agccaaccuagcuagcaacau

SEQ ID NO: 136204 - RNA, 19 nt, Homo sapiens
aguuuacauuuuguauauu

SEQ ID NO: 136205 - RNA, 20 nt, Homo sapiens
gucaacaaagucacccacuu

SEQ ID NO: 136206 - RNA, 13 nt, Homo sapiens
gcaguggaacuaa

SEQ ID NO: 136207 - RNA, 15 nt, Homo sapiens
aauauagcucaggua

SEQ ID NO: 136208 - RNA, 11 nt, Homo sapiens
uguccaaagac

SEQ ID NO: 136209 - RNA, 23 nt, Homo sapiens
aagaauuuuuauauccacuaaaa

SEQ ID NO: 136210 - RNA, 13 nt, Homo sapiens
aauagccauaaag

SEQ ID NO: 136211 - RNA, 20 nt, Homo sapiens
auacuagaguucauggauau

SEQ ID NO: 136212 - RNA, 19 nt, Homo sapiens
caaaaccaaauauuccaga

SEQ ID NO: 136213 - RNA, 18 nt, Homo sapiens
cuuucccuuaaauaacac

SEQ ID NO: 136214 - RNA, 12 nt, Homo sapiens
auugcuugcaca

SEQ ID NO: 136215 - RNA, 16 nt, Homo sapiens
uaaaccguacacugug

SEQ ID NO: 136216 - RNA, 15 nt, Homo sapiens
gaaauggggaacuac

SEQ ID NO: 136217 - RNA, 12 nt, Homo sapiens
uaagacugugua

SEQ ID NO: 136218 - RNA, 22 nt, Homo sapiens
aguuccgacugccaucuuggac

SEQ ID NO: 136219 - RNA, 21 nt, Homo sapiens
uaaauguagaaagugauccau

SEQ ID NO: 136220 - RNA, 22 nt, Homo sapiens
ucccucaaaacaaucuugucau

SEQ ID NO: 136221 - RNA, 21 nt, Homo sapiens
aacuucaacguaagacugugu

SEQ ID NO: 136222 - RNA, 12 nt, Homo sapiens
uuaacugaaugc

SEQ ID NO: 136223 - RNA, 15 nt, Homo sapiens
cuggaccaggucuca

SEQ ID NO: 136224 - RNA, 22 nt, Homo sapiens
caggcaugugccacccacccaa

SEQ ID NO: 136225 - RNA, 15 nt, Homo sapiens
gauucuccugccuca

SEQ ID NO: 136226 - RNA, 13 nt, Homo sapiens
caguaguugcaau

SEQ ID NO: 136227 - RNA, 14 nt, Homo sapiens
aaagaacuuggaaa

SEQ ID NO: 136228 - RNA, 14 nt, Homo sapiens
ucuaaguaaauaca

SEQ ID NO: 136229 - RNA, 14 nt, Homo sapiens
caauguuuuagaau

SEQ ID NO: 136230 - RNA, 16 nt, Homo sapiens
caacauuuguuuuagu

SEQ ID NO: 136231 - RNA, 16 nt, Homo sapiens
ucaauguccuacugag

SEQ ID NO: 136232 - RNA, 20 nt, Homo sapiens
uguucugguuacuguucuaa

SEQ ID NO: 136233 - RNA, 16 nt, Homo sapiens
auccacuaaaaucaaa

SEQ ID NO: 136234 - RNA, 14 nt, Homo sapiens
uggcucaucucuuu

SEQ ID NO: 136235 - RNA, 19 nt, Homo sapiens
cccaggcuggagugcaaug

SEQ ID NO: 136236 - RNA, 21 nt, Homo sapiens
auucucuagucaguuggcuaa

SEQ ID NO: 136237 - RNA, 15 nt, Homo sapiens
uccugcuucugauau

SEQ ID NO: 136238 - RNA, 22 nt, Homo sapiens
guaacuguuuugguuuugcuca

SEQ ID NO: 136239 - RNA, 13 nt, Homo sapiens
cuuuauugcucau

SEQ ID NO: 136240 - RNA, 22 nt, Homo sapiens
cccgccacccucccacugccaa

SEQ ID NO: 136241 - RNA, 17 nt, Homo sapiens
auucagggagugggcua

SEQ ID NO: 136242 - RNA, 20 nt, Homo sapiens
gucugucaauguccuacuga

SEQ ID NO: 136243 - RNA, 12 nt, Homo sapiens
augacacagucu

SEQ ID NO: 136244 - RNA, 13 nt, Homo sapiens
gucacagccacuu

SEQ ID NO: 136245 - RNA, 23 nt, Homo sapiens
cgugaccugccaggcacacugag

SEQ ID NO: 136246 - RNA, 19 nt, Homo sapiens
agauaaucucuccauuccc

SEQ ID NO: 136247 - RNA, 13 nt, Homo sapiens
gguucaagugauu

SEQ ID NO: 136248 - RNA, 18 nt, Homo sapiens
uaaaccguacacuguguu

SEQ ID NO: 136249 - RNA, 19 nt, Homo sapiens
ggacuaaguguaccagaga

SEQ ID NO: 136250 - RNA, 15 nt, Homo sapiens
ucauggauauguuau

SEQ ID NO: 136251 - RNA, 21 nt, Homo sapiens
aagaauuuuuauauccacuaa

SEQ ID NO: 136252 - RNA, 17 nt, Homo sapiens
acuuuuuccuggcucau

SEQ ID NO: 136253 - RNA, 12 nt, Homo sapiens
uucacucccacc

SEQ ID NO: 136254 - RNA, 15 nt, Homo sapiens
ccugccaggcacacu

SEQ ID NO: 136255 - RNA, 19 nt, Homo sapiens
uuaaauguagaaagugauc

SEQ ID NO: 136256 - RNA, 19 nt, Homo sapiens
caauguuucaaacaaaaag

SEQ ID NO: 136257 - RNA, 12 nt, Homo sapiens
gagcaaacagaa

SEQ ID NO: 136258 - RNA, 14 nt, Homo sapiens
caucauuucaaucg

SEQ ID NO: 136259 - RNA, 18 nt, Homo sapiens
ucugcauucucuagucag

SEQ ID NO: 136260 - RNA, 23 nt, Homo sapiens
aagacgucacccuccauucugca

SEQ ID NO: 136261 - RNA, 23 nt, Homo sapiens
ccuaagccaugggagacacugau

SEQ ID NO: 136262 - RNA, 13 nt, Homo sapiens
aaacaucauuuca

SEQ ID NO: 136263 - RNA, 22 nt, Homo sapiens
aagaugaaugagcaaaaccaaa

SEQ ID NO: 136264 - RNA, 20 nt, Homo sapiens
uguuucaaacaaaaagucau

SEQ ID NO: 136265 - RNA, 18 nt, Homo sapiens
gcgcccagccucaucucu

SEQ ID NO: 136266 - RNA, 21 nt, Homo sapiens
auuugucaacaaagucaccca

SEQ ID NO: 136267 - RNA, 18 nt, Homo sapiens
cuauaagaugaaacauca

SEQ ID NO: 136268 - RNA, 12 nt, Homo sapiens
gaaccaggccag

SEQ ID NO: 136269 - RNA, 20 nt, Homo sapiens
caggguuucaccauguuggc

SEQ ID NO: 136270 - RNA, 11 nt, Homo sapiens
uuuaaccaaga

SEQ ID NO: 136271 - RNA, 16 nt, Homo sapiens
aaacagaaaaccugau

SEQ ID NO: 136272 - RNA, 21 nt, Homo sapiens
uuauuaaauguagaaagugau

SEQ ID NO: 136273 - RNA, 16 nt, Homo sapiens
ucaaagccuugguaaa

SEQ ID NO: 136274 - RNA, 16 nt, Homo sapiens
uacaaaguaagccaug

SEQ ID NO: 136275 - RNA, 13 nt, Homo sapiens
ugggauuacaggg

SEQ ID NO: 136276 - RNA, 19 nt, Homo sapiens
agauaaccucaagucacau

SEQ ID NO: 136277 - RNA, 21 nt, Homo sapiens
ugagacuuacuucucugcuau

SEQ ID NO: 136278 - RNA, 19 nt, Homo sapiens
uccugaguagcuggauuac

SEQ ID NO: 136279 - RNA, 19 nt, Homo sapiens
ugcuucaaaaacauucuua

SEQ ID NO: 136280 - RNA, 19 nt, Homo sapiens
acaaucuugucauacuuga

SEQ ID NO: 136281 - RNA, 21 nt, Homo sapiens
cagguucugacucuuggcaca

SEQ ID NO: 136282 - RNA, 19 nt, Homo sapiens
cuccugaguagcuggauua

SEQ ID NO: 136283 - RNA, 15 nt, Homo sapiens
uucugaaaaaguauc

SEQ ID NO: 136284 - RNA, 16 nt, Homo sapiens
ugagacagcacagcca

SEQ ID NO: 136285 - RNA, 20 nt, Homo sapiens
gaaguuuguuuaaaugacag

SEQ ID NO: 136286 - RNA, 14 nt, Homo sapiens
ugggauuacaggga

SEQ ID NO: 136287 - RNA, 21 nt, Homo sapiens
ucuaaggcugugccaucagcu

SEQ ID NO: 136288 - RNA, 17 nt, Homo sapiens
agcuggauuacaggcau

SEQ ID NO: 136289 - RNA, 21 nt, Homo sapiens
guauaguuaaccacuaccgaa

SEQ ID NO: 136290 - RNA, 15 nt, Homo sapiens
uacuuuaauguauaa

SEQ ID NO: 136291 - RNA, 19 nt, Homo sapiens
ccaaagcccaaagugguau

SEQ ID NO: 136292 - RNA, 19 nt, Homo sapiens
accaggucucauaaugcau

SEQ ID NO: 136293 - RNA, 22 nt, Homo sapiens
ugaguagcuggauuacaggcau

SEQ ID NO: 136294 - RNA, 17 nt, Homo sapiens
uuaaaccguacacugug

SEQ ID NO: 136295 - RNA, 23 nt, Homo sapiens
uuaaaaggaaagcagauggugga

SEQ ID NO: 136296 - RNA, 14 nt, Homo sapiens
gcuaauauugcaau

SEQ ID NO: 136297 - RNA, 14 nt, Homo sapiens
uguacagucuugua

SEQ ID NO: 136298 - RNA, 22 nt, Homo sapiens
ugagacuuugaggguguauauu

SEQ ID NO: 136299 - RNA, 23 nt, Homo sapiens
ugaaaagaaucggcaauguuuca

SEQ ID NO: 136300 - RNA, 19 nt, Homo sapiens
caaucucaaucccucaaaa

SEQ ID NO: 136301 - RNA, 15 nt, Homo sapiens
uucuuucaaagaagc

SEQ ID NO: 136302 - RNA, 13 nt, Homo sapiens
cacacuguuaaaa

SEQ ID NO: 136303 - RNA, 22 nt, Homo sapiens
auauacuuauagaauucaguca

SEQ ID NO: 136304 - RNA, 15 nt, Homo sapiens
uccuccccuguucau

SEQ ID NO: 136305 - RNA, 14 nt, Homo sapiens
ugaaacaucauuuc

SEQ ID NO: 136306 - RNA, 19 nt, Homo sapiens
acacagucuuggcucacug

SEQ ID NO: 136307 - RNA, 22 nt, Homo sapiens
uucagucaaagauacacaaucu

SEQ ID NO: 136308 - RNA, 20 nt, Homo sapiens
aagauggcacuuauaaccaa

SEQ ID NO: 136309 - RNA, 16 nt, Homo sapiens
guggauuggauuuguc

SEQ ID NO: 136310 - RNA, 18 nt, Homo sapiens
auacugaaccaggccaga

SEQ ID NO: 136311 - RNA, 22 nt, Homo sapiens
uuaaauguagaaagugauccau

SEQ ID NO: 136312 - RNA, 14 nt, Homo sapiens
agcuggagucuguc

SEQ ID NO: 136313 - RNA, 13 nt, Homo sapiens
ggauuacaggcau

SEQ ID NO: 136314 - RNA, 19 nt, Homo sapiens
gagaucuauauauguauaa

SEQ ID NO: 136315 - RNA, 21 nt, Homo sapiens
ggaauccuggggaacauagaa

SEQ ID NO: 136316 - RNA, 14 nt, Homo sapiens
gauuuccacaguga

SEQ ID NO: 136317 - RNA, 17 nt, Homo sapiens
acccuucuuuucugacu

SEQ ID NO: 136318 - RNA, 19 nt, Homo sapiens
agacgugauuuugcuguag

SEQ ID NO: 136319 - RNA, 13 nt, Homo sapiens
uguguuucuuuag

SEQ ID NO: 136320 - RNA, 17 nt, Homo sapiens
cauggagucacagccac

SEQ ID NO: 136321 - RNA, 21 nt, Homo sapiens
aaaaagcccuuaaaaauaugu

SEQ ID NO: 136322 - RNA, 21 nt, Homo sapiens
ccgccacccucccacugccaa

SEQ ID NO: 136323 - RNA, 16 nt, Homo sapiens
acugcaacuucugccu

SEQ ID NO: 136324 - RNA, 20 nt, Homo sapiens
ugcagccacuguuaagccau

SEQ ID NO: 136325 - RNA, 21 nt, Homo sapiens
ccuaaaaggcagaguacaaag

SEQ ID NO: 136326 - RNA, 22 nt, Homo sapiens
gguacaguauggggguuguaaa

SEQ ID NO: 136327 - RNA, 17 nt, Homo sapiens
cacccucccacugccaa

SEQ ID NO: 136328 - RNA, 15 nt, Homo sapiens
gagggaacuguguag

SEQ ID NO: 136329 - RNA, 23 nt, Homo sapiens
caaucaguagccagcaucugccu

SEQ ID NO: 136330 - RNA, 17 nt, Homo sapiens
agguugagggcaaugga

SEQ ID NO: 136331 - RNA, 14 nt, Homo sapiens
ugcaauguuuuaga

SEQ ID NO: 136332 - RNA, 14 nt, Homo sapiens
ugcacguauuuuaa

SEQ ID NO: 136333 - RNA, 13 nt, Homo sapiens
uaugcacaaacuu

SEQ ID NO: 136334 - RNA, 18 nt, Homo sapiens
ugugaaguuuaauugacu

SEQ ID NO: 136335 - RNA, 16 nt, Homo sapiens
cagcauggagucacag

SEQ ID NO: 136336 - RNA, 17 nt, Homo sapiens
acuuacuucucugcuau

SEQ ID NO: 136337 - RNA, 21 nt, Homo sapiens
aacaaucuugucauacuugaa

SEQ ID NO: 136338 - RNA, 17 nt, Homo sapiens
gauuugggcucuuggaa

SEQ ID NO: 136339 - RNA, 17 nt, Homo sapiens
uauugaacuuaugcaaa

SEQ ID NO: 136340 - RNA, 20 nt, Homo sapiens
accguaugagggaacugugu

SEQ ID NO: 136341 - RNA, 17 nt, Homo sapiens
ugggagacacugaugua

SEQ ID NO: 136342 - RNA, 22 nt, Homo sapiens
auuaaauguagaaagugaucca

SEQ ID NO: 136343 - RNA, 22 nt, Homo sapiens
guguuuuuaauaaagacagggu

SEQ ID NO: 136344 - RNA, 19 nt, Homo sapiens
uccauuuacccuucuuuuc

SEQ ID NO: 136345 - RNA, 13 nt, Homo sapiens
gauacgacaacuu

SEQ ID NO: 136346 - RNA, 19 nt, Homo sapiens
cauaaugcauguggcacuu

SEQ ID NO: 136347 - RNA, 19 nt, Homo sapiens
uccuaagccaugggagaca

SEQ ID NO: 136348 - RNA, 18 nt, Homo sapiens
auauguauaucacauucc

SEQ ID NO: 136349 - RNA, 21 nt, Homo sapiens
uguauuuaaaugaaagugaga

SEQ ID NO: 136350 - RNA, 17 nt, Homo sapiens
uugguuuugcucacaaa

SEQ ID NO: 136351 - RNA, 15 nt, Homo sapiens
gagcuccuaagccau

SEQ ID NO: 136352 - RNA, 18 nt, Homo sapiens
uucuuucaaagaagccag

SEQ ID NO: 136353 - RNA, 12 nt, Homo sapiens
uauuccagagac

SEQ ID NO: 136354 - RNA, 14 nt, Homo sapiens
uccccuucacuccc

SEQ ID NO: 136355 - RNA, 14 nt, Homo sapiens
accguacacugugu

SEQ ID NO: 136356 - RNA, 14 nt, Homo sapiens
acauuuuguauauu

SEQ ID NO: 136357 - RNA, 16 nt, Homo sapiens
cuaaauaugagcccag

SEQ ID NO: 136358 - RNA, 21 nt, Homo sapiens
accucgagguuucucaaagaa

SEQ ID NO: 136359 - RNA, 15 nt, Homo sapiens
uuuucaaugucuaaa

SEQ ID NO: 136360 - RNA, 17 nt, Homo sapiens
cuccccuucacucccac

SEQ ID NO: 136361 - RNA, 23 nt, Homo sapiens
uaaaaguacauguuaaacuuacu

SEQ ID NO: 136362 - RNA, 20 nt, Homo sapiens
ggcacagcauggagucacag

SEQ ID NO: 136363 - RNA, 14 nt, Homo sapiens
gccagcaucugccu

SEQ ID NO: 136364 - RNA, 23 nt, Homo sapiens
uaguaaaagccaucuauguauau

SEQ ID NO: 136365 - RNA, 12 nt, Homo sapiens
guaaaagccauc

SEQ ID NO: 136366 - RNA, 21 nt, Homo sapiens
ggggacacagcaucagcucaa

SEQ ID NO: 136367 - RNA, 13 nt, Homo sapiens
cagcaucagcuca

SEQ ID NO: 136368 - RNA, 14 nt, Homo sapiens
guuuucccaaagag

SEQ ID NO: 136369 - RNA, 23 nt, Homo sapiens
aagacgugauuuugcuguagaag

SEQ ID NO: 136370 - RNA, 16 nt, Homo sapiens
acaauauacuuguaua

SEQ ID NO: 136371 - RNA, 23 nt, Homo sapiens
cuagugcaguuuuuuucuugucu

SEQ ID NO: 136372 - RNA, 22 nt, Homo sapiens
gcaaaaccaaauauuccagaga

SEQ ID NO: 136373 - RNA, 19 nt, Homo sapiens
guuuauacccguuucacau

SEQ ID NO: 136374 - RNA, 15 nt, Homo sapiens
ccauaugaauaacau

SEQ ID NO: 136375 - RNA, 17 nt, Homo sapiens
ucaugagugcaacugug

SEQ ID NO: 136376 - RNA, 21 nt, Homo sapiens
uacuauuuuuacuaaucuuuc

SEQ ID NO: 136377 - RNA, 13 nt, Homo sapiens
caaaguaagccau

SEQ ID NO: 136378 - RNA, 15 nt, Homo sapiens
ucguucucugccuca

SEQ ID NO: 136379 - RNA, 21 nt, Homo sapiens
cuuuguaaagaaaguggcuug

SEQ ID NO: 136380 - RNA, 18 nt, Homo sapiens
cacucuguaauugcaaaa

SEQ ID NO: 136381 - RNA, 19 nt, Homo sapiens
guuguuaauaaaaguacau

SEQ ID NO: 136382 - RNA, 21 nt, Homo sapiens
auaacuuuuuuuuaaguuaca

SEQ ID NO: 136383 - RNA, 16 nt, Homo sapiens
gaaguuuucuugacuu

SEQ ID NO: 136384 - RNA, 20 nt, Homo sapiens
gggacuaaguguaccagaga

SEQ ID NO: 136385 - RNA, 23 nt, Homo sapiens
gaagggcuuggacucaagcaaga

SEQ ID NO: 136386 - RNA, 20 nt, Homo sapiens
cuguucuaaggcugugccau

SEQ ID NO: 136387 - RNA, 16 nt, Homo sapiens
cacccuccauucugca

SEQ ID NO: 136388 - RNA, 21 nt, Homo sapiens
aaugcugguuuuucaguuuuc

SEQ ID NO: 136389 - RNA, 22 nt, Homo sapiens
ugucaauguccuacugagacag

SEQ ID NO: 136390 - RNA, 22 nt, Homo sapiens
uuaucauuaaaaggaaagcaga

SEQ ID NO: 136391 - RNA, 18 nt, Homo sapiens
aacaggaauucugaauua

SEQ ID NO: 136392 - RNA, 17 nt, Homo sapiens
auaugacacucuaguca

SEQ ID NO: 136393 - RNA, 20 nt, Homo sapiens
cuuuuuccuggcucaucucu

SEQ ID NO: 136394 - RNA, 22 nt, Homo sapiens
gaauaacauggugugcuucuua

SEQ ID NO: 136395 - RNA, 21 nt, Homo sapiens
gacgucacccuccauucugca

SEQ ID NO: 136396 - RNA, 16 nt, Homo sapiens
uguuauacugaaccag

SEQ ID NO: 136397 - RNA, 15 nt, Homo sapiens
uuugaggguguauau

SEQ ID NO: 136398 - RNA, 19 nt, Homo sapiens
ggaauuucuguucuuccau

SEQ ID NO: 136399 - RNA, 14 nt, Homo sapiens
aauagugauuucca

SEQ ID NO: 136400 - RNA, 12 nt, Homo sapiens
caaaacauuugu

SEQ ID NO: 136401 - RNA, 23 nt, Homo sapiens
uuauucuguaguuucacucucau

SEQ ID NO: 136402 - RNA, 21 nt, Homo sapiens
cagagucucgcucuguugccc

SEQ ID NO: 136403 - RNA, 22 nt, Homo sapiens
agccuaggaaagccaguuacau

SEQ ID NO: 136404 - RNA, 22 nt, Homo sapiens
ccugaccucaaguaauccaccu

SEQ ID NO: 136405 - RNA, 15 nt, Homo sapiens
uguccuguuacaaaa

SEQ ID NO: 136406 - RNA, 16 nt, Homo sapiens
gaacugaacauuccag

SEQ ID NO: 136407 - RNA, 13 nt, Homo sapiens
caaucccucaaaa

SEQ ID NO: 136408 - RNA, 12 nt, Homo sapiens
gguauuuagcca

SEQ ID NO: 136409 - RNA, 11 nt, Homo sapiens
cacaugcuuuu

SEQ ID NO: 136410 - RNA, 16 nt, Homo sapiens
aauuuugucuuuauga

SEQ ID NO: 136411 - RNA, 21 nt, Homo sapiens
ccauuagcauuugucaacaaa

SEQ ID NO: 136412 - RNA, 18 nt, Homo sapiens
cagugacuccacucugag

SEQ ID NO: 136413 - RNA, 17 nt, Homo sapiens
uagcuuauacaaaacau

SEQ ID NO: 136414 - RNA, 23 nt, Homo sapiens
gugagacuuugaggguguauauu

SEQ ID NO: 136415 - RNA, 21 nt, Homo sapiens
ccugaugcuggggacacagca

SEQ ID NO: 136416 - RNA, 16 nt, Homo sapiens
aauugcuucaagcauu

SEQ ID NO: 136417 - RNA, 12 nt, Homo sapiens
uauuuuuacuaa

SEQ ID NO: 136418 - RNA, 17 nt, Homo sapiens
auuucucuacugucuca

SEQ ID NO: 136419 - RNA, 21 nt, Homo sapiens
uggggcugccaggggagaccc

SEQ ID NO: 136420 - RNA, 16 nt, Homo sapiens
uuuucucucccuccuu

SEQ ID NO: 136421 - RNA, 14 nt, Homo sapiens
ggggaaggaggccg

SEQ ID NO: 136422 - RNA, 12 nt, Homo sapiens
gcuuggacucaa

SEQ ID NO: 136423 - RNA, 22 nt, Homo sapiens
gccauaaaggggagggacucau

SEQ ID NO: 136424 - RNA, 18 nt, Human herpesvirus 4 (Epstein-Barr virus)
aaaaacuugagucucucg

SEQ ID NO: 136425 - RNA, 19 nt, Human herpesvirus 4 (Epstein-Barr virus)
aaaacucacaggacauguu

SEQ ID NO: 136426 - RNA, 16 nt, Human herpesvirus 4 (Epstein-Barr virus)
aaaacucugcauggag

SEQ ID NO: 136427 - RNA, 23 nt, Human herpesvirus 4 (Epstein-Barr virus)
aaaaccggcgagacuuggaccaa

SEQ ID NO: 136428 - RNA, 16 nt, Human herpesvirus 4 (Epstein-Barr virus)
aaaacccccgugcgau

SEQ ID NO: 136429 - RNA, 15 nt, Human herpesvirus 4 (Epstein-Barr virus)
aaaacuugagucucu

SEQ ID NO: 136430 - RNA, 18 nt, Human herpesvirus 4 (Epstein-Barr virus)
aaaaaugcaacaauagaa

SEQ ID NO: 136431 - RNA, 19 nt, Human herpesvirus 4 (Epstein-Barr virus)
aaaacauuagcgacauuua

SEQ ID NO: 136432 - RNA, 15 nt, Human herpesvirus 4 (Epstein-Barr virus)
aucagaccacccgga

SEQ ID NO: 136433 - RNA, 15 nt, Human herpesvirus 4 (Epstein-Barr virus)
aucagaaauuugcac

SEQ ID NO: 136434 - RNA, 13 nt, Human herpesvirus 4 (Epstein-Barr virus)
aucagcaucgcuu

SEQ ID NO: 136435 - RNA, 13 nt, Human herpesvirus 4 (Epstein-Barr virus)
auauuuuccauuu

SEQ ID NO: 136436 - RNA, 19 nt, Human herpesvirus 4 (Epstein-Barr virus)
auaugaugaggacucugaa

SEQ ID NO: 136437 - RNA, 15 nt, Human herpesvirus 4 (Epstein-Barr virus)
auaucuggaggucuu

SEQ ID NO: 136438 - RNA, 14 nt, Human herpesvirus 4 (Epstein-Barr virus)
auccuagagggaca

SEQ ID NO: 136439 - RNA, 12 nt, Human herpesvirus 4 (Epstein-Barr virus)
auccuguacaaa

SEQ ID NO: 136440 - RNA, 22 nt, Human herpesvirus 4 (Epstein-Barr virus)
aucuacuuauuggagaugcucu

SEQ ID NO: 136441 - RNA, 18 nt, Human herpesvirus 4 (Epstein-Barr virus)
aucuacccaacagucuuc

SEQ ID NO: 136442 - RNA, 19 nt, Human herpesvirus 4 (Epstein-Barr virus)
aucuacaacaaaacuggug

SEQ ID NO: 136443 - RNA, 13 nt, Human herpesvirus 4 (Epstein-Barr virus)
auccacaccaucc

SEQ ID NO: 136444 - RNA, 23 nt, Human herpesvirus 4 (Epstein-Barr virus)
auccacagccccacucuugccuc

SEQ ID NO: 136445 - RNA, 18 nt, Human herpesvirus 4 (Epstein-Barr virus)
aucuccaucagggccagg

SEQ ID NO: 136446 - RNA, 14 nt, Human herpesvirus 4 (Epstein-Barr virus)
aucucagggacaac

SEQ ID NO: 136447 - RNA, 22 nt, Human herpesvirus 4 (Epstein-Barr virus)
aucugcuucuggaccgugccau

SEQ ID NO: 136448 - RNA, 23 nt, Human herpesvirus 4 (Epstein-Barr virus)
aucugcuucuggaccgugccauc

SEQ ID NO: 136449 - RNA, 21 nt, Human herpesvirus 4 (Epstein-Barr virus)
aucuggauguauuaccaugga

SEQ ID NO: 136450 - RNA, 19 nt, Human herpesvirus 4 (Epstein-Barr virus)
auaccgagauguacauaau

SEQ ID NO: 136451 - RNA, 14 nt, Human herpesvirus 4 (Epstein-Barr virus)
auacggcuuuccag

SEQ ID NO: 136452 - RNA, 19 nt, Human herpesvirus 4 (Epstein-Barr virus)
auacagcagcuggauguac

SEQ ID NO: 136453 - RNA, 15 nt, Human herpesvirus 4 (Epstein-Barr virus)
auacgucgaugggca

SEQ ID NO: 136454 - RNA, 13 nt, Human herpesvirus 4 (Epstein-Barr virus)
auagaaguggaaa

SEQ ID NO: 136455 - RNA, 18 nt, Human herpesvirus 4 (Epstein-Barr virus)
auaaggcucugaagcaac

SEQ ID NO: 136456 - RNA, 21 nt, Human herpesvirus 4 (Epstein-Barr virus)
auaaauccccaguagacauca

SEQ ID NO: 136457 - RNA, 14 nt, Human herpesvirus 4 (Epstein-Barr virus)
auaaagucgaugua

SEQ ID NO: 136458 - RNA, 20 nt, Human herpesvirus 4 (Epstein-Barr virus)
agucucgccaucuacccaac

SEQ ID NO: 136459 - RNA, 22 nt, Human herpesvirus 4 (Epstein-Barr virus)
agucuacucgaccagcacgugg

SEQ ID NO: 136460 - RNA, 13 nt, Human herpesvirus 4 (Epstein-Barr virus)
agucuauccagga

SEQ ID NO: 136461 - RNA, 18 nt, Human herpesvirus 4 (Epstein-Barr virus)
agucuuugcaauuugccu

SEQ ID NO: 136462 - RNA, 22 nt, Human herpesvirus 4 (Epstein-Barr virus)
aguuucuuuccgcggugguggc

SEQ ID NO: 136463 - RNA, 16 nt, Human herpesvirus 4 (Epstein-Barr virus)
auaaaacccugaccau

SEQ ID NO: 136464 - RNA, 21 nt, Human herpesvirus 4 (Epstein-Barr virus)
auaaaacccugaccaucacau

SEQ ID NO: 136465 - RNA, 18 nt, Human herpesvirus 4 (Epstein-Barr virus)
aguuuucccuuccuuuaa

SEQ ID NO: 136466 - RNA, 18 nt, Human herpesvirus 4 (Epstein-Barr virus)
agguacuaacacgcaaua

SEQ ID NO: 136467 - RNA, 17 nt, Human herpesvirus 4 (Epstein-Barr virus)
aggucaaagaacaaggc

SEQ ID NO: 136468 - RNA, 16 nt, Human herpesvirus 4 (Epstein-Barr virus)
aggggaaucucugcca

SEQ ID NO: 136469 - RNA, 16 nt, Human herpesvirus 4 (Epstein-Barr virus)
agguaaaacugccaca

SEQ ID NO: 136470 - RNA, 22 nt, Human herpesvirus 4 (Epstein-Barr virus)
agguaacucacuaaacauugca

SEQ ID NO: 136471 - RNA, 19 nt, Human herpesvirus 4 (Epstein-Barr virus)
aguaccugcgucucauucc

SEQ ID NO: 136472 - RNA, 22 nt, Human herpesvirus 4 (Epstein-Barr virus)
aguaccuguccauucacagggg

SEQ ID NO: 136473 - RNA, 13 nt, Human herpesvirus 4 (Epstein-Barr virus)
aguaccacaagcu

SEQ ID NO: 136474 - RNA, 13 nt, Human herpesvirus 4 (Epstein-Barr virus)
aguacacuagcug

SEQ ID NO: 136475 - RNA, 18 nt, Human herpesvirus 4 (Epstein-Barr virus)
agucccaacaacuuccaa

SEQ ID NO: 136476 - RNA, 21 nt, Human herpesvirus 4 (Epstein-Barr virus)
agucccaacaacuuccaacgc

SEQ ID NO: 136477 - RNA, 22 nt, Human herpesvirus 4 (Epstein-Barr virus)
aguccaaacagcuaauuucuac

SEQ ID NO: 136478 - RNA, 13 nt, Human herpesvirus 4 (Epstein-Barr virus)
agucgaagcucuu

SEQ ID NO: 136479 - RNA, 21 nt, Human herpesvirus 4 (Epstein-Barr virus)
agucggugggcgguccuccac

SEQ ID NO: 136480 - RNA, 22 nt, Human herpesvirus 4 (Epstein-Barr virus)
agucacgggacauuaaccucaa

SEQ ID NO: 136481 - RNA, 19 nt, Human herpesvirus 4 (Epstein-Barr virus)
agucacaccccacggccau

SEQ ID NO: 136482 - RNA, 14 nt, Human herpesvirus 4 (Epstein-Barr virus)
agucagauugccuu

SEQ ID NO: 136483 - RNA, 21 nt, Human herpesvirus 4 (Epstein-Barr virus)
agucaaaauucgcgaugcuau

SEQ ID NO: 136484 - RNA, 16 nt, Human herpesvirus 4 (Epstein-Barr virus)
aggacacgugacaugu

SEQ ID NO: 136485 - RNA, 18 nt, Human herpesvirus 4 (Epstein-Barr virus)
aggacacgugacaugucc

SEQ ID NO: 136486 - RNA, 13 nt, Human herpesvirus 4 (Epstein-Barr virus)
aggacacugccaa

SEQ ID NO: 136487 - RNA, 17 nt, Human herpesvirus 4 (Epstein-Barr virus)
aggacaagacagucaca

SEQ ID NO: 136488 - RNA, 20 nt, Human herpesvirus 4 (Epstein-Barr virus)
agcucuacaaccccuuccac

SEQ ID NO: 136489 - RNA, 21 nt, Human herpesvirus 4 (Epstein-Barr virus)
aggauggcccugcaaacugac

SEQ ID NO: 136490 - RNA, 17 nt, Human herpesvirus 4 (Epstein-Barr virus)
aggagcgggaggggcag

SEQ ID NO: 136491 - RNA, 19 nt, Human herpesvirus 4 (Epstein-Barr virus)
aggcacaacggcugugacu

SEQ ID NO: 136492 - RNA, 19 nt, Human herpesvirus 4 (Epstein-Barr virus)
aggacccccgcgucacugu

SEQ ID NO: 136493 - RNA, 16 nt, Human herpesvirus 4 (Epstein-Barr virus)
aggaccugggagggcc

SEQ ID NO: 136494 - RNA, 15 nt, Human herpesvirus 4 (Epstein-Barr virus)
aggaccuggugguga

SEQ ID NO: 136495 - RNA, 22 nt, Human herpesvirus 4 (Epstein-Barr virus)
aggagcccgggccagcauucua

SEQ ID NO: 136496 - RNA, 17 nt, Human herpesvirus 4 (Epstein-Barr virus)
aggagcagggcccagug

SEQ ID NO: 136497 - RNA, 23 nt, Human herpesvirus 4 (Epstein-Barr virus)
aggccgccuauggggccugugac

SEQ ID NO: 136498 - RNA, 15 nt, Human herpesvirus 4 (Epstein-Barr virus)
aggccagagacgagc

SEQ ID NO: 136499 - RNA, 17 nt, Human herpesvirus 4 (Epstein-Barr virus)
aggccagcuaacugccu

SEQ ID NO: 136500 - RNA, 19 nt, Human herpesvirus 4 (Epstein-Barr virus)
aggcaguagaggacaccca

SEQ ID NO: 136501 - RNA, 13 nt, Human herpesvirus 4 (Epstein-Barr virus)
aggcagucuccac

SEQ ID NO: 136502 - RNA, 21 nt, Human herpesvirus 4 (Epstein-Barr virus)
aggcaggcgcuguuauggcca

SEQ ID NO: 136503 - RNA, 12 nt, Human herpesvirus 4 (Epstein-Barr virus)
aggcuugccaaa

SEQ ID NO: 136504 - RNA, 23 nt, Human herpesvirus 4 (Epstein-Barr virus)
aggccuuuuuggcgugguggcau

SEQ ID NO: 136505 - RNA, 19 nt, Human herpesvirus 4 (Epstein-Barr virus)
aggccucacgaucuucaag

SEQ ID NO: 136506 - RNA, 15 nt, Human herpesvirus 4 (Epstein-Barr virus)
aggccucccagucua

SEQ ID NO: 136507 - RNA, 20 nt, Human herpesvirus 4 (Epstein-Barr virus)
aggccucccagucuauccag

SEQ ID NO: 136508 - RNA, 12 nt, Human herpesvirus 4 (Epstein-Barr virus)
aggccgcugcca

SEQ ID NO: 136509 - RNA, 13 nt, Human herpesvirus 4 (Epstein-Barr virus)
agggacuuguccu

SEQ ID NO: 136510 - RNA, 22 nt, Human herpesvirus 4 (Epstein-Barr virus)
agggagaacaauuccccgggga

SEQ ID NO: 136511 - RNA, 20 nt, Human herpesvirus 4 (Epstein-Barr virus)
agggagacguuugaguccaa

SEQ ID NO: 136512 - RNA, 20 nt, Human herpesvirus 4 (Epstein-Barr virus)
aggcgacaguaacacagggu

SEQ ID NO: 136513 - RNA, 15 nt, Human herpesvirus 4 (Epstein-Barr virus)
agggauaugaaggug

SEQ ID NO: 136514 - RNA, 23 nt, Human herpesvirus 4 (Epstein-Barr virus)
agggcccagugcacccagguggu

SEQ ID NO: 136515 - RNA, 16 nt, Human herpesvirus 4 (Epstein-Barr virus)
agggcagacaccaccu

SEQ ID NO: 136516 - RNA, 13 nt, Human herpesvirus 4 (Epstein-Barr virus)
agauccaacuccg

SEQ ID NO: 136517 - RNA, 11 nt, Human herpesvirus 4 (Epstein-Barr virus)
agaucuucuca

SEQ ID NO: 136518 - RNA, 17 nt, Human herpesvirus 4 (Epstein-Barr virus)
agaucuucucaccgugg

SEQ ID NO: 136519 - RNA, 19 nt, Human herpesvirus 4 (Epstein-Barr virus)
agaucucagaauugucacu

SEQ ID NO: 136520 - RNA, 15 nt, Human herpesvirus 4 (Epstein-Barr virus)
agccacgacauugau

SEQ ID NO: 136521 - RNA, 16 nt, Human herpesvirus 4 (Epstein-Barr virus)
agccacauucuggaac

SEQ ID NO: 136522 - RNA, 16 nt, Human herpesvirus 4 (Epstein-Barr virus)
agccacacaaucagcc

SEQ ID NO: 136523 - RNA, 22 nt, Human herpesvirus 4 (Epstein-Barr virus)
agaugauaaugaugaggagcac

SEQ ID NO: 136524 - RNA, 17 nt, Human herpesvirus 4 (Epstein-Barr virus)
agaugaaagucuauacg

SEQ ID NO: 136525 - RNA, 18 nt, Human herpesvirus 4 (Epstein-Barr virus)
agaugaacacccccauac

SEQ ID NO: 136526 - RNA, 18 nt, Human herpesvirus 4 (Epstein-Barr virus)
agaugaccaugauggugc

SEQ ID NO: 136527 - RNA, 19 nt, Human herpesvirus 4 (Epstein-Barr virus)
agaugaccaugauggugca

SEQ ID NO: 136528 - RNA, 12 nt, Human herpesvirus 4 (Epstein-Barr virus)
agcauucuauca

SEQ ID NO: 136529 - RNA, 12 nt, Human herpesvirus 4 (Epstein-Barr virus)
agccuacccaug

SEQ ID NO: 136530 - RNA, 13 nt, Human herpesvirus 4 (Epstein-Barr virus)
agccugacucuca

SEQ ID NO: 136531 - RNA, 14 nt, Human herpesvirus 4 (Epstein-Barr virus)
agccugagccacac

SEQ ID NO: 136532 - RNA, 15 nt, Human herpesvirus 4 (Epstein-Barr virus)
agccugcccauccau

SEQ ID NO: 136533 - RNA, 15 nt, Human herpesvirus 4 (Epstein-Barr virus)
agccggggguugcuu

SEQ ID NO: 136534 - RNA, 22 nt, Human herpesvirus 4 (Epstein-Barr virus)
agccgugucuccugacgccaau

SEQ ID NO: 136535 - RNA, 23 nt, Human herpesvirus 4 (Epstein-Barr virus)
agcccauucucguccaucucgau

SEQ ID NO: 136536 - RNA, 15 nt, Human herpesvirus 4 (Epstein-Barr virus)
agcccgccagccacc

SEQ ID NO: 136537 - RNA, 22 nt, Human herpesvirus 4 (Epstein-Barr virus)
agccaggcucgcggaagagccc

SEQ ID NO: 136538 - RNA, 15 nt, Human herpesvirus 4 (Epstein-Barr virus)
agccccacucuugcc

SEQ ID NO: 136539 - RNA, 16 nt, Human herpesvirus 4 (Epstein-Barr virus)
agccccacucuugccu

SEQ ID NO: 136540 - RNA, 12 nt, Human herpesvirus 4 (Epstein-Barr virus)
agcccuccucag

SEQ ID NO: 136541 - RNA, 22 nt, Human herpesvirus 4 (Epstein-Barr virus)
agccccaugcuuacucaaucca

SEQ ID NO: 136542 - RNA, 23 nt, Human herpesvirus 4 (Epstein-Barr virus)
agccccaugcuuacucaauccau

SEQ ID NO: 136543 - RNA, 20 nt, Human herpesvirus 4 (Epstein-Barr virus)
agcccaagaagaagcccacc

SEQ ID NO: 136544 - RNA, 15 nt, Human herpesvirus 4 (Epstein-Barr virus)
agccaccggccaagg

SEQ ID NO: 136545 - RNA, 20 nt, Human herpesvirus 4 (Epstein-Barr virus)
agccagagaggcccacugca

SEQ ID NO: 136546 - RNA, 21 nt, Human herpesvirus 4 (Epstein-Barr virus)
agcgaagaacacuccacagau

SEQ ID NO: 136547 - RNA, 14 nt, Human herpesvirus 4 (Epstein-Barr virus)
agcgcacccgggga

SEQ ID NO: 136548 - RNA, 17 nt, Human herpesvirus 4 (Epstein-Barr virus)
agcgacgaggaugaagc

SEQ ID NO: 136549 - RNA, 23 nt, Human herpesvirus 4 (Epstein-Barr virus)
agcgcugggggugucaacaaaga

SEQ ID NO: 136550 - RNA, 21 nt, Human herpesvirus 4 (Epstein-Barr virus)
agcgccuugaucuucuucucc

SEQ ID NO: 136551 - RNA, 18 nt, Human herpesvirus 4 (Epstein-Barr virus)
agcggguggaggagcucc

SEQ ID NO: 136552 - RNA, 15 nt, Human herpesvirus 4 (Epstein-Barr virus)
agcgggccugagucc

SEQ ID NO: 136553 - RNA, 19 nt, Human herpesvirus 4 (Epstein-Barr virus)
agcuauauucaccuugagg

SEQ ID NO: 136554 - RNA, 21 nt, Human herpesvirus 4 (Epstein-Barr virus)
agcucacuuucaguggaugca

SEQ ID NO: 136555 - RNA, 16 nt, Human herpesvirus 4 (Epstein-Barr virus)
agcuccuuugccuugu

SEQ ID NO: 136556 - RNA, 22 nt, Human herpesvirus 4 (Epstein-Barr virus)
agcgucgcauacggcuuuccag

SEQ ID NO: 136557 - RNA, 15 nt, Human herpesvirus 4 (Epstein-Barr virus)
agcggucucagacac

SEQ ID NO: 136558 - RNA, 13 nt, Human herpesvirus 4 (Epstein-Barr virus)
agcuaacuguaca

SEQ ID NO: 136559 - RNA, 16 nt, Human herpesvirus 4 (Epstein-Barr virus)
agcuaacuguacauac

SEQ ID NO: 136560 - RNA, 17 nt, Human herpesvirus 4 (Epstein-Barr virus)
agcuaacaggacauguu

SEQ ID NO: 136561 - RNA, 18 nt, Human herpesvirus 4 (Epstein-Barr virus)
agcuacaccggccagugg

SEQ ID NO: 136562 - RNA, 23 nt, Human herpesvirus 4 (Epstein-Barr virus)
agcuacacucuggggucucaggc

SEQ ID NO: 136563 - RNA, 23 nt, Human herpesvirus 4 (Epstein-Barr virus)
auuacuggucuuuuaugagccau

SEQ ID NO: 136564 - RNA, 16 nt, Human herpesvirus 4 (Epstein-Barr virus)
auucgcgaugcuauaa

SEQ ID NO: 136565 - RNA, 21 nt, Human herpesvirus 4 (Epstein-Barr virus)
auuauagcucuggcacugcua

SEQ ID NO: 136566 - RNA, 20 nt, Human herpesvirus 4 (Epstein-Barr virus)
auuagggccuuuucccucau

SEQ ID NO: 136567 - RNA, 18 nt, Human herpesvirus 4 (Epstein-Barr virus)
auucucuucuguuugcau

SEQ ID NO: 136568 - RNA, 13 nt, Human herpesvirus 4 (Epstein-Barr virus)
auucugagcacca

SEQ ID NO: 136569 - RNA, 14 nt, Human herpesvirus 4 (Epstein-Barr virus)
auucugagcaccaa

SEQ ID NO: 136570 - RNA, 13 nt, Human herpesvirus 4 (Epstein-Barr virus)
auugaucacuacu

SEQ ID NO: 136571 - RNA, 22 nt, Human herpesvirus 4 (Epstein-Barr virus)
auugccucuuguguucuugccg

SEQ ID NO: 136572 - RNA, 16 nt, Human herpesvirus 4 (Epstein-Barr virus)
auuggaaaagggccca

SEQ ID NO: 136573 - RNA, 17 nt, Human herpesvirus 4 (Epstein-Barr virus)
auugcuguuuuugccaa

SEQ ID NO: 136574 - RNA, 19 nt, Human herpesvirus 4 (Epstein-Barr virus)
auugcuguuuuugccaaau

SEQ ID NO: 136575 - RNA, 16 nt, Human herpesvirus 4 (Epstein-Barr virus)
auugcucucguugcca

SEQ ID NO: 136576 - RNA, 18 nt, Human herpesvirus 4 (Epstein-Barr virus)
auugcucucguugccaaa

SEQ ID NO: 136577 - RNA, 14 nt, Human herpesvirus 4 (Epstein-Barr virus)
auugggugaccacu

SEQ ID NO: 136578 - RNA, 18 nt, Human herpesvirus 4 (Epstein-Barr virus)
auugguaccagaagaguc

SEQ ID NO: 136579 - RNA, 21 nt, Human herpesvirus 4 (Epstein-Barr virus)
auugguaccagaagagucaua

SEQ ID NO: 136580 - RNA, 21 nt, Human herpesvirus 4 (Epstein-Barr virus)
auuggcaugggcgggacaauc

SEQ ID NO: 136581 - RNA, 19 nt, Human herpesvirus 4 (Epstein-Barr virus)
auuggcugcaaagggaccc

SEQ ID NO: 136582 - RNA, 21 nt, Human herpesvirus 4 (Epstein-Barr virus)
auuucuggccaucugucuugu

SEQ ID NO: 136583 - RNA, 18 nt, Human herpesvirus 4 (Epstein-Barr virus)
auuugaggaggcacacaa

SEQ ID NO: 136584 - RNA, 19 nt, Human herpesvirus 4 (Epstein-Barr virus)
auuugaggaggcacacaaa

SEQ ID NO: 136585 - RNA, 22 nt, Human herpesvirus 4 (Epstein-Barr virus)
auuugaucuuugacugacacau

SEQ ID NO: 136586 - RNA, 17 nt, Human herpesvirus 4 (Epstein-Barr virus)
auuuugggcacacuuaa

SEQ ID NO: 136587 - RNA, 21 nt, Human herpesvirus 4 (Epstein-Barr virus)
auuugcugacauauguacaau

SEQ ID NO: 136588 - RNA, 22 nt, Human herpesvirus 4 (Epstein-Barr virus)
auuuggaggaagaguaccccag

SEQ ID NO: 136589 - RNA, 21 nt, Human herpesvirus 4 (Epstein-Barr virus)
caaaacugguggacucuauug

SEQ ID NO: 136590 - RNA, 15 nt, Human herpesvirus 4 (Epstein-Barr virus)
caaaacuauaccaaa

SEQ ID NO: 136591 - RNA, 20 nt, Human herpesvirus 4 (Epstein-Barr virus)
caaaacucacaggacauguu

SEQ ID NO: 136592 - RNA, 17 nt, Human herpesvirus 4 (Epstein-Barr virus)
auguuucuguggcugcc

SEQ ID NO: 136593 - RNA, 16 nt, Human herpesvirus 4 (Epstein-Barr virus)
auguuucccuccaagc

SEQ ID NO: 136594 - RNA, 17 nt, Human herpesvirus 4 (Epstein-Barr virus)
auguuuggguuauugac

SEQ ID NO: 136595 - RNA, 14 nt, Human herpesvirus 4 (Epstein-Barr virus)
auuaacuaagcuua

SEQ ID NO: 136596 - RNA, 18 nt, Human herpesvirus 4 (Epstein-Barr virus)
augugguuuguauggcua

SEQ ID NO: 136597 - RNA, 21 nt, Human herpesvirus 4 (Epstein-Barr virus)
auguuauccacaccaucccaa

SEQ ID NO: 136598 - RNA, 23 nt, Human herpesvirus 4 (Epstein-Barr virus)
auguucucgugcaagcagcaccu

SEQ ID NO: 136599 - RNA, 21 nt, Human herpesvirus 4 (Epstein-Barr virus)
auguucucuaacuguguccca

SEQ ID NO: 136600 - RNA, 12 nt, Human herpesvirus 4 (Epstein-Barr virus)
auguccuguggu

SEQ ID NO: 136601 - RNA, 13 nt, Human herpesvirus 4 (Epstein-Barr virus)
auguccacugagc

SEQ ID NO: 136602 - RNA, 18 nt, Human herpesvirus 4 (Epstein-Barr virus)
augugaccgucuacauca

SEQ ID NO: 136603 - RNA, 15 nt, Human herpesvirus 4 (Epstein-Barr virus)
augugcaaauguggu

SEQ ID NO: 136604 - RNA, 11 nt, Human herpesvirus 4 (Epstein-Barr virus)
auguagcuaua

SEQ ID NO: 136605 - RNA, 17 nt, Human herpesvirus 4 (Epstein-Barr virus)
auguaugccauggccau

SEQ ID NO: 136606 - RNA, 15 nt, Human herpesvirus 4 (Epstein-Barr virus)
auguacaacuaccug

SEQ ID NO: 136607 - RNA, 14 nt, Human herpesvirus 4 (Epstein-Barr virus)
auguacaaugagag

SEQ ID NO: 136608 - RNA, 15 nt, Human herpesvirus 4 (Epstein-Barr virus)
augguggcuucuuag

SEQ ID NO: 136609 - RNA, 20 nt, Human herpesvirus 4 (Epstein-Barr virus)
auggugcagaggaugagacc

SEQ ID NO: 136610 - RNA, 17 nt, Human herpesvirus 4 (Epstein-Barr virus)
augguacggaugaucac

SEQ ID NO: 136611 - RNA, 21 nt, Human herpesvirus 4 (Epstein-Barr virus)
augguacggugauaacugaca

SEQ ID NO: 136612 - RNA, 15 nt, Human herpesvirus 4 (Epstein-Barr virus)
auggguuaccaggca

SEQ ID NO: 136613 - RNA, 20 nt, Human herpesvirus 4 (Epstein-Barr virus)
auggggguggcgaaucugac

SEQ ID NO: 136614 - RNA, 15 nt, Human herpesvirus 4 (Epstein-Barr virus)
auggggguuggagaa

SEQ ID NO: 136615 - RNA, 19 nt, Human herpesvirus 4 (Epstein-Barr virus)
auggccauucgacaggcca

SEQ ID NO: 136616 - RNA, 11 nt, Human herpesvirus 4 (Epstein-Barr virus)
auggccucaaa

SEQ ID NO: 136617 - RNA, 17 nt, Human herpesvirus 4 (Epstein-Barr virus)
auggcgccguuugacug

SEQ ID NO: 136618 - RNA, 17 nt, Human herpesvirus 4 (Epstein-Barr virus)
auggcggggccuugucu

SEQ ID NO: 136619 - RNA, 19 nt, Human herpesvirus 4 (Epstein-Barr virus)
augggggaaaccugcgaaa

SEQ ID NO: 136620 - RNA, 19 nt, Human herpesvirus 4 (Epstein-Barr virus)
auggggccaggacgcugcu

SEQ ID NO: 136621 - RNA, 23 nt, Human herpesvirus 4 (Epstein-Barr virus)
augggcgggacaaucgcaauaua

SEQ ID NO: 136622 - RNA, 19 nt, Human herpesvirus 4 (Epstein-Barr virus)
augggaauaacaagggaag

SEQ ID NO: 136623 - RNA, 22 nt, Human herpesvirus 4 (Epstein-Barr virus)
aucugucucuaacaguucacuu

SEQ ID NO: 136624 - RNA, 13 nt, Human herpesvirus 4 (Epstein-Barr virus)
aucugucuuguca

SEQ ID NO: 136625 - RNA, 18 nt, Human herpesvirus 4 (Epstein-Barr virus)
aucuggcuggggcauuaa

SEQ ID NO: 136626 - RNA, 18 nt, Human herpesvirus 4 (Epstein-Barr virus)
auggagggcagcgaagaa

SEQ ID NO: 136627 - RNA, 20 nt, Human herpesvirus 4 (Epstein-Barr virus)
auggcacacgccagagacaa

SEQ ID NO: 136628 - RNA, 14 nt, Human herpesvirus 4 (Epstein-Barr virus)
auggccagcuuuga

SEQ ID NO: 136629 - RNA, 23 nt, Human herpesvirus 4 (Epstein-Barr virus)
auggccaugauacucaucuguga

SEQ ID NO: 136630 - RNA, 15 nt, Human herpesvirus 4 (Epstein-Barr virus)
caaugauugaggcaa

SEQ ID NO: 136631 - RNA, 15 nt, Human herpesvirus 4 (Epstein-Barr virus)
caaugacccacucca

SEQ ID NO: 136632 - RNA, 18 nt, Human herpesvirus 4 (Epstein-Barr virus)
caaugacccacuccagug

SEQ ID NO: 136633 - RNA, 14 nt, Human herpesvirus 4 (Epstein-Barr virus)
caaucucggcuguu

SEQ ID NO: 136634 - RNA, 23 nt, Human herpesvirus 4 (Epstein-Barr virus)
caaucucggcuguuuguacuucu

SEQ ID NO: 136635 - RNA, 18 nt, Human herpesvirus 4 (Epstein-Barr virus)
cacagaacaucacugcca

SEQ ID NO: 136636 - RNA, 19 nt, Human herpesvirus 4 (Epstein-Barr virus)
cacagaacaucacugccac

SEQ ID NO: 136637 - RNA, 19 nt, Human herpesvirus 4 (Epstein-Barr virus)
cacacguggcuuccagaga

SEQ ID NO: 136638 - RNA, 16 nt, Human herpesvirus 4 (Epstein-Barr virus)
caauguaucccaaaua

SEQ ID NO: 136639 - RNA, 13 nt, Human herpesvirus 4 (Epstein-Barr virus)
caccuaagaaugg

SEQ ID NO: 136640 - RNA, 19 nt, Human herpesvirus 4 (Epstein-Barr virus)
caccuaagaaugggagcaa

SEQ ID NO: 136641 - RNA, 14 nt, Human herpesvirus 4 (Epstein-Barr virus)
caccccacggccau

SEQ ID NO: 136642 - RNA, 14 nt, Human herpesvirus 4 (Epstein-Barr virus)
caccaucaauguca

SEQ ID NO: 136643 - RNA, 14 nt, Human herpesvirus 4 (Epstein-Barr virus)
cacaucuggaccag

SEQ ID NO: 136644 - RNA, 17 nt, Human herpesvirus 4 (Epstein-Barr virus)
cacaucuggaccagaag

SEQ ID NO: 136645 - RNA, 18 nt, Human herpesvirus 4 (Epstein-Barr virus)
caccacuaagguuacugc

SEQ ID NO: 136646 - RNA, 14 nt, Human herpesvirus 4 (Epstein-Barr virus)
caccagaggccaca

SEQ ID NO: 136647 - RNA, 15 nt, Human herpesvirus 4 (Epstein-Barr virus)
caccagccccagcca

SEQ ID NO: 136648 - RNA, 21 nt, Human herpesvirus 4 (Epstein-Barr virus)
caccagcuaacaggacauguu

SEQ ID NO: 136649 - RNA, 16 nt, Human herpesvirus 4 (Epstein-Barr virus)
caccauagcaugucac

SEQ ID NO: 136650 - RNA, 14 nt, Human herpesvirus 4 (Epstein-Barr virus)
cacaggacauguuu

SEQ ID NO: 136651 - RNA, 20 nt, Human herpesvirus 4 (Epstein-Barr virus)
cacagauuagaagaugaugc

SEQ ID NO: 136652 - RNA, 18 nt, Human herpesvirus 4 (Epstein-Barr virus)
cacuggacacacauggca

SEQ ID NO: 136653 - RNA, 18 nt, Human herpesvirus 4 (Epstein-Barr virus)
cacugcuagcgucacuga

SEQ ID NO: 136654 - RNA, 15 nt, Human herpesvirus 4 (Epstein-Barr virus)
cacugaugagucuga

SEQ ID NO: 136655 - RNA, 16 nt, Human herpesvirus 4 (Epstein-Barr virus)
cacugaugagucugac

SEQ ID NO: 136656 - RNA, 22 nt, Human herpesvirus 4 (Epstein-Barr virus)
cacugaugagucugacuacuca

SEQ ID NO: 136657 - RNA, 12 nt, Human herpesvirus 4 (Epstein-Barr virus)
cagaagagucau

SEQ ID NO: 136658 - RNA, 16 nt, Human herpesvirus 4 (Epstein-Barr virus)
caccuugaggugccac

SEQ ID NO: 136659 - RNA, 17 nt, Human herpesvirus 4 (Epstein-Barr virus)
caccuugaggugccaca

SEQ ID NO: 136660 - RNA, 23 nt, Human herpesvirus 4 (Epstein-Barr virus)
caccugacccauaccaggugccu

SEQ ID NO: 136661 - RNA, 18 nt, Human herpesvirus 4 (Epstein-Barr virus)
caccuggguacccaaacc

SEQ ID NO: 136662 - RNA, 18 nt, Human herpesvirus 4 (Epstein-Barr virus)
caccuguguaaccucacu

SEQ ID NO: 136663 - RNA, 22 nt, Human herpesvirus 4 (Epstein-Barr virus)
caccuguguaaccucacuguaa

SEQ ID NO: 136664 - RNA, 22 nt, Human herpesvirus 4 (Epstein-Barr virus)
caccuaugccaauccaugccaa

SEQ ID NO: 136665 - RNA, 14 nt, Human herpesvirus 4 (Epstein-Barr virus)
caccuaugugaccg

SEQ ID NO: 136666 - RNA, 16 nt, Human herpesvirus 4 (Epstein-Barr virus)
cacucuggggucucag

SEQ ID NO: 136667 - RNA, 18 nt, Human herpesvirus 4 (Epstein-Barr virus)
cacucuggggucucaggc

SEQ ID NO: 136668 - RNA, 19 nt, Human herpesvirus 4 (Epstein-Barr virus)
cacucuggggucucaggcc

SEQ ID NO: 136669 - RNA, 21 nt, Human herpesvirus 4 (Epstein-Barr virus)
cacuaagguuacugcacagaa

SEQ ID NO: 136670 - RNA, 17 nt, Human herpesvirus 4 (Epstein-Barr virus)
cacgugggucucauggg

SEQ ID NO: 136671 - RNA, 14 nt, Human herpesvirus 4 (Epstein-Barr virus)
cacuaaacauugca

SEQ ID NO: 136672 - RNA, 18 nt, Human herpesvirus 4 (Epstein-Barr virus)
caauaaaaugaaaccuuu

SEQ ID NO: 136673 - RNA, 15 nt, Human herpesvirus 4 (Epstein-Barr virus)
caaguguuuccagac

SEQ ID NO: 136674 - RNA, 22 nt, Human herpesvirus 4 (Epstein-Barr virus)
caagguucggaaaucuguugac

SEQ ID NO: 136675 - RNA, 19 nt, Human herpesvirus 4 (Epstein-Barr virus)
caagugcuaugaccaugcc

SEQ ID NO: 136676 - RNA, 18 nt, Human herpesvirus 4 (Epstein-Barr virus)
caaguggcgguggaacac

SEQ ID NO: 136677 - RNA, 16 nt, Human herpesvirus 4 (Epstein-Barr virus)
caauccgaaagcacuu

SEQ ID NO: 136678 - RNA, 13 nt, Human herpesvirus 4 (Epstein-Barr virus)
caauagacagaaa

SEQ ID NO: 136679 - RNA, 19 nt, Human herpesvirus 4 (Epstein-Barr virus)
caacuccucuuacaccaga

SEQ ID NO: 136680 - RNA, 20 nt, Human herpesvirus 4 (Epstein-Barr virus)
caacucccccaaacaugucc

SEQ ID NO: 136681 - RNA, 22 nt, Human herpesvirus 4 (Epstein-Barr virus)
caacugcuauucugagcaccaa

SEQ ID NO: 136682 - RNA, 12 nt, Human herpesvirus 4 (Epstein-Barr virus)
caaccaauguau

SEQ ID NO: 136683 - RNA, 13 nt, Human herpesvirus 4 (Epstein-Barr virus)
caacaacuaugug

SEQ ID NO: 136684 - RNA, 16 nt, Human herpesvirus 4 (Epstein-Barr virus)
caacaacuauguguau

SEQ ID NO: 136685 - RNA, 21 nt, Human herpesvirus 4 (Epstein-Barr virus)
caacaacaagguaaguaauuu

SEQ ID NO: 136686 - RNA, 16 nt, Human herpesvirus 4 (Epstein-Barr virus)
caacaaagaacuuuga

SEQ ID NO: 136687 - RNA, 22 nt, Human herpesvirus 4 (Epstein-Barr virus)
caacaaagcccgaugcccaguu

SEQ ID NO: 136688 - RNA, 15 nt, Human herpesvirus 4 (Epstein-Barr virus)
caaauucuacgauga

SEQ ID NO: 136689 - RNA, 15 nt, Human herpesvirus 4 (Epstein-Barr virus)
agagucccuccucac

SEQ ID NO: 136690 - RNA, 19 nt, Human herpesvirus 4 (Epstein-Barr virus)
agagccucugccacaaggc

SEQ ID NO: 136691 - RNA, 17 nt, Human herpesvirus 4 (Epstein-Barr virus)
agagcggguggaggagc

SEQ ID NO: 136692 - RNA, 19 nt, Human herpesvirus 4 (Epstein-Barr virus)
agagcggguggaggagcuc

SEQ ID NO: 136693 - RNA, 22 nt, Human herpesvirus 4 (Epstein-Barr virus)
agagcuggaugguguuggagac

SEQ ID NO: 136694 - RNA, 19 nt, Human herpesvirus 4 (Epstein-Barr virus)
agagaucuggggccaagga

SEQ ID NO: 136695 - RNA, 15 nt, Human herpesvirus 4 (Epstein-Barr virus)
agacgcgauggcaca

SEQ ID NO: 136696 - RNA, 17 nt, Human herpesvirus 4 (Epstein-Barr virus)
agaccuaauaaaggccu

SEQ ID NO: 136697 - RNA, 22 nt, Human herpesvirus 4 (Epstein-Barr virus)
agaaucuccugugcuucagcag

SEQ ID NO: 136698 - RNA, 13 nt, Human herpesvirus 4 (Epstein-Barr virus)
agacagaaauugg

SEQ ID NO: 136699 - RNA, 12 nt, Human herpesvirus 4 (Epstein-Barr virus)
agaaugugguaa

SEQ ID NO: 136700 - RNA, 16 nt, Human herpesvirus 4 (Epstein-Barr virus)
agacagguaacucacu

SEQ ID NO: 136701 - RNA, 21 nt, Human herpesvirus 4 (Epstein-Barr virus)
agaccaguuuuucggauccca

SEQ ID NO: 136702 - RNA, 12 nt, Human herpesvirus 4 (Epstein-Barr virus)
acuuauagcaug

SEQ ID NO: 136703 - RNA, 13 nt, Human herpesvirus 4 (Epstein-Barr virus)
acuuccucugcuu

SEQ ID NO: 136704 - RNA, 16 nt, Human herpesvirus 4 (Epstein-Barr virus)
acuucagcuccagggc

SEQ ID NO: 136705 - RNA, 19 nt, Human herpesvirus 4 (Epstein-Barr virus)
agaagucggccacagggga

SEQ ID NO: 136706 - RNA, 21 nt, Human herpesvirus 4 (Epstein-Barr virus)
agaaguggaaacccucaguca

SEQ ID NO: 136707 - RNA, 13 nt, Human herpesvirus 4 (Epstein-Barr virus)
agaaguugguggu

SEQ ID NO: 136708 - RNA, 15 nt, Human herpesvirus 4 (Epstein-Barr virus)
agaaguugguggugg

SEQ ID NO: 136709 - RNA, 18 nt, Human herpesvirus 4 (Epstein-Barr virus)
agaagcgccgguacuugu

SEQ ID NO: 136710 - RNA, 13 nt, Human herpesvirus 4 (Epstein-Barr virus)
agaaauccagcuu

SEQ ID NO: 136711 - RNA, 16 nt, Human herpesvirus 4 (Epstein-Barr virus)
agaagacuccugccug

SEQ ID NO: 136712 - RNA, 19 nt, Human herpesvirus 4 (Epstein-Barr virus)
agaaauugggugaccacug

SEQ ID NO: 136713 - RNA, 12 nt, Human herpesvirus 4 (Epstein-Barr virus)
agaaauuugcac

SEQ ID NO: 136714 - RNA, 13 nt, Human herpesvirus 4 (Epstein-Barr virus)
agaaauuugcacu

SEQ ID NO: 136715 - RNA, 18 nt, Human herpesvirus 4 (Epstein-Barr virus)
acugcuagcgucacugau

SEQ ID NO: 136716 - RNA, 12 nt, Human herpesvirus 4 (Epstein-Barr virus)
acugcgaugagg

SEQ ID NO: 136717 - RNA, 19 nt, Human herpesvirus 4 (Epstein-Barr virus)
acugcgggugucucaagcu

SEQ ID NO: 136718 - RNA, 15 nt, Human herpesvirus 4 (Epstein-Barr virus)
acucuggggucucag

SEQ ID NO: 136719 - RNA, 14 nt, Human herpesvirus 4 (Epstein-Barr virus)
acuggggugcagac

SEQ ID NO: 136720 - RNA, 20 nt, Human herpesvirus 4 (Epstein-Barr virus)
acuggucuuuuaugagccau

SEQ ID NO: 136721 - RNA, 17 nt, Human herpesvirus 4 (Epstein-Barr virus)
acugggacaacugucac

SEQ ID NO: 136722 - RNA, 16 nt, Human herpesvirus 4 (Epstein-Barr virus)
acuggcuggauucuac

SEQ ID NO: 136723 - RNA, 19 nt, Human herpesvirus 4 (Epstein-Barr virus)
acuggaugcaggaccuaga

SEQ ID NO: 136724 - RNA, 20 nt, Human herpesvirus 4 (Epstein-Barr virus)
acuggcaaagggcaugcuug

SEQ ID NO: 136725 - RNA, 20 nt, Human herpesvirus 4 (Epstein-Barr virus)
acuaugcaugagccacaggc

SEQ ID NO: 136726 - RNA, 16 nt, Human herpesvirus 4 (Epstein-Barr virus)
acucaacguggucucc

SEQ ID NO: 136727 - RNA, 22 nt, Human herpesvirus 4 (Epstein-Barr virus)
acucagaccccgaggcugaugu

SEQ ID NO: 136728 - RNA, 16 nt, Human herpesvirus 4 (Epstein-Barr virus)
acucgaaacuauggca

SEQ ID NO: 136729 - RNA, 23 nt, Human herpesvirus 4 (Epstein-Barr virus)
acucgaagcggucucagacacca

SEQ ID NO: 136730 - RNA, 16 nt, Human herpesvirus 4 (Epstein-Barr virus)
acucaggccaccgucu

SEQ ID NO: 136731 - RNA, 24 nt, Human herpesvirus 4 (Epstein-Barr virus)
acucaccaagauuguuccagguca

SEQ ID NO: 136732 - RNA, 13 nt, Human herpesvirus 4 (Epstein-Barr virus)
acucacaggacau

SEQ ID NO: 136733 - RNA, 12 nt, Human herpesvirus 4 (Epstein-Barr virus)
acucuccacucc

SEQ ID NO: 136734 - RNA, 19 nt, Human herpesvirus 4 (Epstein-Barr virus)
acucggcuagccugacuaa

SEQ ID NO: 136735 - RNA, 17 nt, Human herpesvirus 4 (Epstein-Barr virus)
acuaucacccauggcca

SEQ ID NO: 136736 - RNA, 14 nt, Human herpesvirus 4 (Epstein-Barr virus)
acuaucacguguaa

SEQ ID NO: 136737 - RNA, 22 nt, Human herpesvirus 4 (Epstein-Barr virus)
acuaucacguguaacuugacgu

SEQ ID NO: 136738 - RNA, 19 nt, Human herpesvirus 4 (Epstein-Barr virus)
acuagcuguuugcucuauu

SEQ ID NO: 136739 - RNA, 16 nt, Human herpesvirus 4 (Epstein-Barr virus)
acuaagguuacugcac

SEQ ID NO: 136740 - RNA, 12 nt, Human herpesvirus 4 (Epstein-Barr virus)
acuacaccaguc

SEQ ID NO: 136741 - RNA, 11 nt, Human herpesvirus 4 (Epstein-Barr virus)
acuacaccauc

SEQ ID NO: 136742 - RNA, 12 nt, Human herpesvirus 4 (Epstein-Barr virus)
acuacaccauca

SEQ ID NO: 136743 - RNA, 17 nt, Human herpesvirus 4 (Epstein-Barr virus)
acuaaccuuaacaccug

SEQ ID NO: 136744 - RNA, 15 nt, Human herpesvirus 4 (Epstein-Barr virus)
acuacccgcaaugaa

SEQ ID NO: 136745 - RNA, 19 nt, Human herpesvirus 4 (Epstein-Barr virus)
acuaccugucugauugcac

SEQ ID NO: 136746 - RNA, 22 nt, Human herpesvirus 4 (Epstein-Barr virus)
acuacaccgagcagaaggccau

SEQ ID NO: 136747 - RNA, 16 nt, Human herpesvirus 4 (Epstein-Barr virus)
acguggguuucugccc

SEQ ID NO: 136748 - RNA, 15 nt, Human herpesvirus 4 (Epstein-Barr virus)
acgugcgugaucaug

SEQ ID NO: 136749 - RNA, 14 nt, Human herpesvirus 4 (Epstein-Barr virus)
acgcaggauguuca

SEQ ID NO: 136750 - RNA, 20 nt, Human herpesvirus 4 (Epstein-Barr virus)
acuaaacauugcaccuugcc

SEQ ID NO: 136751 - RNA, 18 nt, Human herpesvirus 4 (Epstein-Barr virus)
acuaaccaugccaucucu

SEQ ID NO: 136752 - RNA, 15 nt, Human herpesvirus 4 (Epstein-Barr virus)
acguuccuggccaug

SEQ ID NO: 136753 - RNA, 18 nt, Human herpesvirus 4 (Epstein-Barr virus)
acguuugaguccaaacag

SEQ ID NO: 136754 - RNA, 12 nt, Human herpesvirus 4 (Epstein-Barr virus)
acaacugucaca

SEQ ID NO: 136755 - RNA, 20 nt, Human herpesvirus 4 (Epstein-Barr virus)
acaacuuccaacgcauccac

SEQ ID NO: 136756 - RNA, 21 nt, Human herpesvirus 4 (Epstein-Barr virus)
acaacuaccugucugauugca

SEQ ID NO: 136757 - RNA, 11 nt, Human herpesvirus 4 (Epstein-Barr virus)
acaacugcuau

SEQ ID NO: 136758 - RNA, 17 nt, Human herpesvirus 4 (Epstein-Barr virus)
acaccagacauggugua

SEQ ID NO: 136759 - RNA, 21 nt, Human herpesvirus 4 (Epstein-Barr virus)
acaccauguuucgugcccucu

SEQ ID NO: 136760 - RNA, 23 nt, Human herpesvirus 4 (Epstein-Barr virus)
acaccaucccaauucacaucuca

SEQ ID NO: 136761 - RNA, 19 nt, Human herpesvirus 4 (Epstein-Barr virus)
acacccaucuggaguucaa

SEQ ID NO: 136762 - RNA, 14 nt, Human herpesvirus 4 (Epstein-Barr virus)
acaccccugagaac

SEQ ID NO: 136763 - RNA, 17 nt, Human herpesvirus 4 (Epstein-Barr virus)
acacccacccugcacac

SEQ ID NO: 136764 - RNA, 19 nt, Human herpesvirus 4 (Epstein-Barr virus)
acaccgagcagaaggccau

SEQ ID NO: 136765 - RNA, 18 nt, Human herpesvirus 4 (Epstein-Barr virus)
acaagagccggacgaugg

SEQ ID NO: 136766 - RNA, 14 nt, Human herpesvirus 4 (Epstein-Barr virus)
acaagacagucaca

SEQ ID NO: 136767 - RNA, 19 nt, Human herpesvirus 4 (Epstein-Barr virus)
acaagacagucacauugca

SEQ ID NO: 136768 - RNA, 12 nt, Human herpesvirus 4 (Epstein-Barr virus)
acaccgucaaca

SEQ ID NO: 136769 - RNA, 12 nt, Human herpesvirus 4 (Epstein-Barr virus)
acacgagccaua

SEQ ID NO: 136770 - RNA, 16 nt, Human herpesvirus 4 (Epstein-Barr virus)
acacgccagagacaag

SEQ ID NO: 136771 - RNA, 21 nt, Human herpesvirus 4 (Epstein-Barr virus)
acacgccugucauucuaucaa

SEQ ID NO: 136772 - RNA, 14 nt, Human herpesvirus 4 (Epstein-Barr virus)
acacggcucuguca

SEQ ID NO: 136773 - RNA, 12 nt, Human herpesvirus 4 (Epstein-Barr virus)
acacuacaauaa

SEQ ID NO: 136774 - RNA, 18 nt, Human herpesvirus 4 (Epstein-Barr virus)
acacuacaauaaacccaa

SEQ ID NO: 136775 - RNA, 21 nt, Human herpesvirus 4 (Epstein-Barr virus)
acacugaugagucugacuacu

SEQ ID NO: 136776 - RNA, 15 nt, Human herpesvirus 4 (Epstein-Barr virus)
acaucugguuagcag

SEQ ID NO: 136777 - RNA, 21 nt, Human herpesvirus 4 (Epstein-Barr virus)
acaucugguuagcagguugau

SEQ ID NO: 136778 - RNA, 21 nt, Human herpesvirus 4 (Epstein-Barr virus)
acaucucagggacaacagguc

SEQ ID NO: 136779 - RNA, 19 nt, Human herpesvirus 4 (Epstein-Barr virus)
acauuaaagccuccucgca

SEQ ID NO: 136780 - RNA, 14 nt, Human herpesvirus 4 (Epstein-Barr virus)
acauggugucugua

SEQ ID NO: 136781 - RNA, 22 nt, Human herpesvirus 4 (Epstein-Barr virus)
acauguuugggggaguuggcau

SEQ ID NO: 136782 - RNA, 13 nt, Human herpesvirus 4 (Epstein-Barr virus)
acauuaaccucaa

SEQ ID NO: 136783 - RNA, 19 nt, Human herpesvirus 4 (Epstein-Barr virus)
acauuaaccucaaccacaa

SEQ ID NO: 136784 - RNA, 20 nt, Human herpesvirus 4 (Epstein-Barr virus)
acauaauguaugccauggcc

SEQ ID NO: 136785 - RNA, 14 nt, Human herpesvirus 4 (Epstein-Barr virus)
acauaaacaugguu

SEQ ID NO: 136786 - RNA, 15 nt, Human herpesvirus 4 (Epstein-Barr virus)
acauaaacaugguuu

SEQ ID NO: 136787 - RNA, 19 nt, Human herpesvirus 4 (Epstein-Barr virus)
acaguacucggcuagccug

SEQ ID NO: 136788 - RNA, 12 nt, Human herpesvirus 4 (Epstein-Barr virus)
acaguaccacaa

SEQ ID NO: 136789 - RNA, 15 nt, Human herpesvirus 4 (Epstein-Barr virus)
acaguaccacaagcu

SEQ ID NO: 136790 - RNA, 19 nt, Human herpesvirus 4 (Epstein-Barr virus)
acaggacaagacagucaca

SEQ ID NO: 136791 - RNA, 21 nt, Human herpesvirus 4 (Epstein-Barr virus)
acaggacaagaugucacucuu

SEQ ID NO: 136792 - RNA, 22 nt, Human herpesvirus 4 (Epstein-Barr virus)
acaggacauguuugggggaguu

SEQ ID NO: 136793 - RNA, 18 nt, Human herpesvirus 4 (Epstein-Barr virus)
acagggguauguggugcc

SEQ ID NO: 136794 - RNA, 22 nt, Human herpesvirus 4 (Epstein-Barr virus)
acagggacaucuacguguucca

SEQ ID NO: 136795 - RNA, 21 nt, Human herpesvirus 4 (Epstein-Barr virus)
acagaggaggcuggugccuug

SEQ ID NO: 136796 - RNA, 13 nt, Human herpesvirus 4 (Epstein-Barr virus)
acagaggcuggau

SEQ ID NO: 136797 - RNA, 19 nt, Human herpesvirus 4 (Epstein-Barr virus)
acagaggcuggaugcagcg

SEQ ID NO: 136798 - RNA, 22 nt, Human herpesvirus 4 (Epstein-Barr virus)
acagagcaucagaugagacuuu

SEQ ID NO: 136799 - RNA, 15 nt, Human herpesvirus 4 (Epstein-Barr virus)
acagauugucuucca

SEQ ID NO: 136800 - RNA, 13 nt, Human herpesvirus 4 (Epstein-Barr virus)
acagaucugacca

SEQ ID NO: 136801 - RNA, 15 nt, Human herpesvirus 4 (Epstein-Barr virus)
accaugccaucucug

SEQ ID NO: 136802 - RNA, 22 nt, Human herpesvirus 4 (Epstein-Barr virus)
accaugcgaccggguagaccac

SEQ ID NO: 136803 - RNA, 15 nt, Human herpesvirus 4 (Epstein-Barr virus)
acccagguggucuua

SEQ ID NO: 136804 - RNA, 16 nt, Human herpesvirus 4 (Epstein-Barr virus)
acccagggguggcagu

SEQ ID NO: 136805 - RNA, 21 nt, Human herpesvirus 4 (Epstein-Barr virus)
acccagggguggcaguggaug

SEQ ID NO: 136806 - RNA, 16 nt, Human herpesvirus 4 (Epstein-Barr virus)
accauggucgaugaac

SEQ ID NO: 136807 - RNA, 14 nt, Human herpesvirus 4 (Epstein-Barr virus)
acccagccacuuac

SEQ ID NO: 136808 - RNA, 22 nt, Human herpesvirus 4 (Epstein-Barr virus)
acccagccacuuacagcacauu

SEQ ID NO: 136809 - RNA, 17 nt, Human herpesvirus 4 (Epstein-Barr virus)
acccaucuggaguucaa

SEQ ID NO: 136810 - RNA, 22 nt, Human herpesvirus 4 (Epstein-Barr virus)
acccaucuggaguucaaccuaa

SEQ ID NO: 136811 - RNA, 15 nt, Human herpesvirus 4 (Epstein-Barr virus)
acccauguugucacg

SEQ ID NO: 136812 - RNA, 23 nt, Human herpesvirus 4 (Epstein-Barr virus)
accccaaggaaggcuugccaaaa

SEQ ID NO: 136813 - RNA, 17 nt, Human herpesvirus 4 (Epstein-Barr virus)
accccagacaggagaug

SEQ ID NO: 136814 - RNA, 18 nt, Human herpesvirus 4 (Epstein-Barr virus)
acccggaccaaugccaaa

SEQ ID NO: 136815 - RNA, 16 nt, Human herpesvirus 4 (Epstein-Barr virus)
acccccuggagccagc

SEQ ID NO: 136816 - RNA, 19 nt, Human herpesvirus 4 (Epstein-Barr virus)
acccccggcucucaggccu

SEQ ID NO: 136817 - RNA, 15 nt, Human herpesvirus 4 (Epstein-Barr virus)
accccuggcuuccac

SEQ ID NO: 136818 - RNA, 18 nt, Human herpesvirus 4 (Epstein-Barr virus)
accccuggcuuccacuca

SEQ ID NO: 136819 - RNA, 17 nt, Human herpesvirus 4 (Epstein-Barr virus)
accccccucugauggug

SEQ ID NO: 136820 - RNA, 14 nt, Human herpesvirus 4 (Epstein-Barr virus)
acccccgugcgaug

SEQ ID NO: 136821 - RNA, 19 nt, Human herpesvirus 4 (Epstein-Barr virus)
accacucgaaacuauggca

SEQ ID NO: 136822 - RNA, 21 nt, Human herpesvirus 4 (Epstein-Barr virus)
accagucuacgaccuugacca

SEQ ID NO: 136823 - RNA, 16 nt, Human herpesvirus 4 (Epstein-Barr virus)
accauagcaugucaca

SEQ ID NO: 136824 - RNA, 17 nt, Human herpesvirus 4 (Epstein-Barr virus)
accaucaaugucaccac

SEQ ID NO: 136825 - RNA, 20 nt, Human herpesvirus 4 (Epstein-Barr virus)
accaucaaugucaccacuaa

SEQ ID NO: 136826 - RNA, 16 nt, Human herpesvirus 4 (Epstein-Barr virus)
accaucccaauucaca

SEQ ID NO: 136827 - RNA, 10 nt, Human herpesvirus 4 (Epstein-Barr virus)
accacacagc

SEQ ID NO: 136828 - RNA, 15 nt, Human herpesvirus 4 (Epstein-Barr virus)
acauugaucacuacu

SEQ ID NO: 136829 - RNA, 19 nt, Human herpesvirus 4 (Epstein-Barr virus)
acauucacugggacaacug

SEQ ID NO: 136830 - RNA, 19 nt, Human herpesvirus 4 (Epstein-Barr virus)
acauuagcgacauuuaccu

SEQ ID NO: 136831 - RNA, 17 nt, Human herpesvirus 4 (Epstein-Barr virus)
acgagcgcaucgucucc

SEQ ID NO: 136832 - RNA, 13 nt, Human herpesvirus 4 (Epstein-Barr virus)
acgagagcaugcc

SEQ ID NO: 136833 - RNA, 14 nt, Human herpesvirus 4 (Epstein-Barr virus)
acgagagcaugcca

SEQ ID NO: 136834 - RNA, 15 nt, Human herpesvirus 4 (Epstein-Barr virus)
acgaggacggggaag

SEQ ID NO: 136835 - RNA, 16 nt, Human herpesvirus 4 (Epstein-Barr virus)
accugagccugagcca

SEQ ID NO: 136836 - RNA, 13 nt, Human herpesvirus 4 (Epstein-Barr virus)
accugaugaguca

SEQ ID NO: 136837 - RNA, 18 nt, Human herpesvirus 4 (Epstein-Barr virus)
accugcgucucauuccca

SEQ ID NO: 136838 - RNA, 21 nt, Human herpesvirus 4 (Epstein-Barr virus)
accugcacgagaccccugggc

SEQ ID NO: 136839 - RNA, 19 nt, Human herpesvirus 4 (Epstein-Barr virus)
accugcagggcuucacuag

SEQ ID NO: 136840 - RNA, 17 nt, Human herpesvirus 4 (Epstein-Barr virus)
accugcucucucuggag

SEQ ID NO: 136841 - RNA, 20 nt, Human herpesvirus 4 (Epstein-Barr virus)
accuggacauagaggggcau

SEQ ID NO: 136842 - RNA, 16 nt, Human herpesvirus 4 (Epstein-Barr virus)
accuggagacuacuaa

SEQ ID NO: 136843 - RNA, 19 nt, Human herpesvirus 4 (Epstein-Barr virus)
accuggagacuacuaagcu

SEQ ID NO: 136844 - RNA, 15 nt, Human herpesvirus 4 (Epstein-Barr virus)
accuggcucaggucc

SEQ ID NO: 136845 - RNA, 15 nt, Human herpesvirus 4 (Epstein-Barr virus)
accuguguaaccuca

SEQ ID NO: 136846 - RNA, 23 nt, Human herpesvirus 4 (Epstein-Barr virus)
acccucagucacgggacauuaac

SEQ ID NO: 136847 - RNA, 15 nt, Human herpesvirus 4 (Epstein-Barr virus)
acccucauugugcug

SEQ ID NO: 136848 - RNA, 18 nt, Human herpesvirus 4 (Epstein-Barr virus)
acccucauugugcugaag

SEQ ID NO: 136849 - RNA, 20 nt, Human herpesvirus 4 (Epstein-Barr virus)
acccuugcccucuccagcaa

SEQ ID NO: 136850 - RNA, 18 nt, Human herpesvirus 4 (Epstein-Barr virus)
acccuuuccuaagaccua

SEQ ID NO: 136851 - RNA, 16 nt, Human herpesvirus 4 (Epstein-Barr virus)
acccuggggcaacaga

SEQ ID NO: 136852 - RNA, 14 nt, Human herpesvirus 4 (Epstein-Barr virus)
acccugguacagga

SEQ ID NO: 136853 - RNA, 14 nt, Human herpesvirus 4 (Epstein-Barr virus)
acccugcauggcca

SEQ ID NO: 136854 - RNA, 23 nt, Human herpesvirus 4 (Epstein-Barr virus)
accuaugugaccgucuacaucaa

SEQ ID NO: 136855 - RNA, 14 nt, Human herpesvirus 4 (Epstein-Barr virus)
accuaucuguaugu

SEQ ID NO: 136856 - RNA, 19 nt, Human herpesvirus 4 (Epstein-Barr virus)
accuaugccaauccaugcc

SEQ ID NO: 136857 - RNA, 21 nt, Human herpesvirus 4 (Epstein-Barr virus)
accuaugccaauccaugccaa

SEQ ID NO: 136858 - RNA, 13 nt, Human herpesvirus 4 (Epstein-Barr virus)
accucaacauauu

SEQ ID NO: 136859 - RNA, 13 nt, Human herpesvirus 4 (Epstein-Barr virus)
accucaaccacaa

SEQ ID NO: 136860 - RNA, 17 nt, Human herpesvirus 4 (Epstein-Barr virus)
accgagcagaaggccau

SEQ ID NO: 136861 - RNA, 15 nt, Human herpesvirus 4 (Epstein-Barr virus)
accuaaauuuagcac

SEQ ID NO: 136862 - RNA, 18 nt, Human herpesvirus 4 (Epstein-Barr virus)
accuacaggacaagacag

SEQ ID NO: 136863 - RNA, 22 nt, Human herpesvirus 4 (Epstein-Barr virus)
accuacaugaauguuacccuca

SEQ ID NO: 136864 - RNA, 16 nt, Human herpesvirus 4 (Epstein-Barr virus)
aacuuggaggcugcua

SEQ ID NO: 136865 - RNA, 18 nt, Human herpesvirus 4 (Epstein-Barr virus)
aacuuggaggcugcuaag

SEQ ID NO: 136866 - RNA, 17 nt, Human herpesvirus 4 (Epstein-Barr virus)
aacuugggggcaggcua

SEQ ID NO: 136867 - RNA, 18 nt, Human herpesvirus 4 (Epstein-Barr virus)
aacuuccaacgcauccac

SEQ ID NO: 136868 - RNA, 20 nt, Human herpesvirus 4 (Epstein-Barr virus)
aacuuccaacgcauccacca

SEQ ID NO: 136869 - RNA, 23 nt, Human herpesvirus 4 (Epstein-Barr virus)
aacuuccaacgcauccaccauca

SEQ ID NO: 136870 - RNA, 23 nt, Human herpesvirus 4 (Epstein-Barr virus)
aagaacugggaugaacccugggg

SEQ ID NO: 136871 - RNA, 20 nt, Human herpesvirus 4 (Epstein-Barr virus)
aagaagcccaccuaugugac

SEQ ID NO: 136872 - RNA, 16 nt, Human herpesvirus 4 (Epstein-Barr virus)
aagcaggggugaugaa

SEQ ID NO: 136873 - RNA, 23 nt, Human herpesvirus 4 (Epstein-Barr virus)
aagcguuggaugcaguccuccgc

SEQ ID NO: 136874 - RNA, 16 nt, Human herpesvirus 4 (Epstein-Barr virus)
aagcugcaccuggaca

SEQ ID NO: 136875 - RNA, 17 nt, Human herpesvirus 4 (Epstein-Barr virus)
aagcuccuuugccuugu

SEQ ID NO: 136876 - RNA, 16 nt, Human herpesvirus 4 (Epstein-Barr virus)
aagcgggccugagucc

SEQ ID NO: 136877 - RNA, 19 nt, Human herpesvirus 4 (Epstein-Barr virus)
aagucgguguccaggugug

SEQ ID NO: 136878 - RNA, 23 nt, Human herpesvirus 4 (Epstein-Barr virus)
aagucgguguccagguguggaaa

SEQ ID NO: 136879 - RNA, 23 nt, Human herpesvirus 4 (Epstein-Barr virus)
aaguccugcacuauauucuccag

SEQ ID NO: 136880 - RNA, 23 nt, Human herpesvirus 4 (Epstein-Barr virus)
aaggcgugggugucagaccugaa

SEQ ID NO: 136881 - RNA, 13 nt, Human herpesvirus 4 (Epstein-Barr virus)
aaggcuugccaaa

SEQ ID NO: 136882 - RNA, 14 nt, Human herpesvirus 4 (Epstein-Barr virus)
aaggcuugccaaaa

SEQ ID NO: 136883 - RNA, 18 nt, Human herpesvirus 4 (Epstein-Barr virus)
aaggaaggcuugccaaaa

SEQ ID NO: 136884 - RNA, 22 nt, Human herpesvirus 4 (Epstein-Barr virus)
aaggacagggggacucuagaca

SEQ ID NO: 136885 - RNA, 16 nt, Human herpesvirus 4 (Epstein-Barr virus)
aaggcggugggaucau

SEQ ID NO: 136886 - RNA, 13 nt, Human herpesvirus 4 (Epstein-Barr virus)
aaguugguggugg

SEQ ID NO: 136887 - RNA, 16 nt, Human herpesvirus 4 (Epstein-Barr virus)
aaguuagaguccaaug

SEQ ID NO: 136888 - RNA, 22 nt, Human herpesvirus 4 (Epstein-Barr virus)
aaguuacgccuaaaggcgcagu

SEQ ID NO: 136889 - RNA, 14 nt, Human herpesvirus 4 (Epstein-Barr virus)
aauguaucccaaau

SEQ ID NO: 136890 - RNA, 22 nt, Human herpesvirus 4 (Epstein-Barr virus)
aauguaccucauagacacaccu

SEQ ID NO: 136891 - RNA, 21 nt, Human herpesvirus 4 (Epstein-Barr virus)
aauugucaauaaagauggauu

SEQ ID NO: 136892 - RNA, 15 nt, Human herpesvirus 4 (Epstein-Barr virus)
aauugucacugagaa

SEQ ID NO: 136893 - RNA, 20 nt, Human herpesvirus 4 (Epstein-Barr virus)
acaaagagguaaaacugcca

SEQ ID NO: 136894 - RNA, 22 nt, Human herpesvirus 4 (Epstein-Barr virus)
acaaagagguaaaacugccaca

SEQ ID NO: 136895 - RNA, 13 nt, Human herpesvirus 4 (Epstein-Barr virus)
aauagcuucugca

SEQ ID NO: 136896 - RNA, 18 nt, Human herpesvirus 4 (Epstein-Barr virus)
aauauauuuuccauuuca

SEQ ID NO: 136897 - RNA, 21 nt, Human herpesvirus 4 (Epstein-Barr virus)
aaucgcagcucuaacuuggca

SEQ ID NO: 136898 - RNA, 18 nt, Human herpesvirus 4 (Epstein-Barr virus)
aaugagcggggagauaau

SEQ ID NO: 136899 - RNA, 17 nt, Human herpesvirus 4 (Epstein-Barr virus)
aaugcgccgucauucca

SEQ ID NO: 136900 - RNA, 14 nt, Human herpesvirus 4 (Epstein-Barr virus)
aaugcaccuugacu

SEQ ID NO: 136901 - RNA, 16 nt, Human herpesvirus 4 (Epstein-Barr virus)
aaacucugcauggaga

SEQ ID NO: 136902 - RNA, 15 nt, Human herpesvirus 4 (Epstein-Barr virus)
aaagagccaugguga

SEQ ID NO: 136903 - RNA, 14 nt, Human herpesvirus 4 (Epstein-Barr virus)
aaagacuauguucu

SEQ ID NO: 136904 - RNA, 22 nt, Human herpesvirus 4 (Epstein-Barr virus)
aaagauggauuugaaaguggua

SEQ ID NO: 136905 - RNA, 17 nt, Human herpesvirus 4 (Epstein-Barr virus)
aaauucgcgaugcuaua

SEQ ID NO: 136906 - RNA, 16 nt, Human herpesvirus 4 (Epstein-Barr virus)
aaauucuccugccugc

SEQ ID NO: 136907 - RNA, 11 nt, Human herpesvirus 4 (Epstein-Barr virus)
aaaugaugaau

SEQ ID NO: 136908 - RNA, 22 nt, Human herpesvirus 4 (Epstein-Barr virus)
aaagcgggccugaguccaacau

SEQ ID NO: 136909 - RNA, 18 nt, Human herpesvirus 4 (Epstein-Barr virus)
aaauuggugccuugcucu

SEQ ID NO: 136910 - RNA, 18 nt, Human herpesvirus 4 (Epstein-Barr virus)
aaauuugcugacauaugu

SEQ ID NO: 136911 - RNA, 21 nt, Human herpesvirus 4 (Epstein-Barr virus)
aacagcauccuuuauaugaaa

SEQ ID NO: 136912 - RNA, 16 nt, Human herpesvirus 4 (Epstein-Barr virus)
aacauuuuaaacaugc

SEQ ID NO: 136913 - RNA, 13 nt, Human herpesvirus 4 (Epstein-Barr virus)
aaccacaacugcu

SEQ ID NO: 136914 - RNA, 16 nt, Human herpesvirus 4 (Epstein-Barr virus)
aaccuggagucugcau

SEQ ID NO: 136915 - RNA, 15 nt, Human herpesvirus 4 (Epstein-Barr virus)
aaccugccucucuua

SEQ ID NO: 136916 - RNA, 18 nt, Human herpesvirus 4 (Epstein-Barr virus)
aacccaccgcaaccgcug

SEQ ID NO: 136917 - RNA, 16 nt, Human herpesvirus 4 (Epstein-Barr virus)
aaccagcuggucauca

SEQ ID NO: 136918 - RNA, 22 nt, Human herpesvirus 4 (Epstein-Barr virus)
aaccagcuggucaucagccgcu

SEQ ID NO: 136919 - RNA, 14 nt, Human herpesvirus 4 (Epstein-Barr virus)
aacuaagcuuauga

SEQ ID NO: 136920 - RNA, 21 nt, Human herpesvirus 4 (Epstein-Barr virus)
aacgugacaggcacaacggcu

SEQ ID NO: 136921 - RNA, 13 nt, Human herpesvirus 4 (Epstein-Barr virus)
aacgugauggugc

SEQ ID NO: 136922 - RNA, 18 nt, Human herpesvirus 4 (Epstein-Barr virus)
aacggugauuaggcacug

SEQ ID NO: 136923 - RNA, 14 nt, Human herpesvirus 4 (Epstein-Barr virus)
cuuaaucuagcuca

SEQ ID NO: 136924 - RNA, 12 nt, Human herpesvirus 4 (Epstein-Barr virus)
cuuuccaguucc

SEQ ID NO: 136925 - RNA, 21 nt, Human herpesvirus 4 (Epstein-Barr virus)
cuuucaguggaugcaucguag

SEQ ID NO: 136926 - RNA, 22 nt, Human herpesvirus 4 (Epstein-Barr virus)
cuuuccuagaaacugugccaug

SEQ ID NO: 136927 - RNA, 16 nt, Human herpesvirus 4 (Epstein-Barr virus)
cuuaccugcgucuguu

SEQ ID NO: 136928 - RNA, 15 nt, Human herpesvirus 4 (Epstein-Barr virus)
cuuugccggcaucca

SEQ ID NO: 136929 - RNA, 14 nt, Human herpesvirus 4 (Epstein-Barr virus)
cuuugucuuugcca

SEQ ID NO: 136930 - RNA, 23 nt, Human herpesvirus 4 (Epstein-Barr virus)
cuuuuaccccagucccaacccaa

SEQ ID NO: 136931 - RNA, 22 nt, Human herpesvirus 4 (Epstein-Barr virus)
gaaacacagcucuggcaguuau

SEQ ID NO: 136932 - RNA, 21 nt, Human herpesvirus 4 (Epstein-Barr virus)
gaaaaucgcagcaggguccaa

SEQ ID NO: 136933 - RNA, 16 nt, Human herpesvirus 4 (Epstein-Barr virus)
gaaagagccaugguga

SEQ ID NO: 136934 - RNA, 13 nt, Human herpesvirus 4 (Epstein-Barr virus)
gaaagcacuuuga

SEQ ID NO: 136935 - RNA, 21 nt, Human herpesvirus 4 (Epstein-Barr virus)
gaaagaugucaaacauggugu

SEQ ID NO: 136936 - RNA, 20 nt, Human herpesvirus 4 (Epstein-Barr virus)
gaaacuaugcaugagccaca

SEQ ID NO: 136937 - RNA, 20 nt, Human herpesvirus 4 (Epstein-Barr virus)
cuuuuuccaguggcauggga

SEQ ID NO: 136938 - RNA, 14 nt, Human herpesvirus 4 (Epstein-Barr virus)
cuuuuuggugaaau

SEQ ID NO: 136939 - RNA, 22 nt, Human herpesvirus 4 (Epstein-Barr virus)
gaaaaagguuuagcuauuccac

SEQ ID NO: 136940 - RNA, 18 nt, Human herpesvirus 4 (Epstein-Barr virus)
gaaaaggcccuaauucag

SEQ ID NO: 136941 - RNA, 22 nt, Human herpesvirus 4 (Epstein-Barr virus)
gaaaacugccuccuccucuuuu

SEQ ID NO: 136942 - RNA, 19 nt, Human herpesvirus 4 (Epstein-Barr virus)
gaaaacauuagcgacauuu

SEQ ID NO: 136943 - RNA, 19 nt, Human herpesvirus 4 (Epstein-Barr virus)
gaaaaccggcgagacuugg

SEQ ID NO: 136944 - RNA, 17 nt, Human herpesvirus 4 (Epstein-Barr virus)
gaacugacgcuccagga

SEQ ID NO: 136945 - RNA, 23 nt, Human herpesvirus 4 (Epstein-Barr virus)
gaacuguacuaaauuugcugaca

SEQ ID NO: 136946 - RNA, 19 nt, Human herpesvirus 4 (Epstein-Barr virus)
gaaaugcgccgucauucca

SEQ ID NO: 136947 - RNA, 21 nt, Human herpesvirus 4 (Epstein-Barr virus)
gaaagucuauacggccacaac

SEQ ID NO: 136948 - RNA, 16 nt, Human herpesvirus 4 (Epstein-Barr virus)
gaaagggcauguggug

SEQ ID NO: 136949 - RNA, 19 nt, Human herpesvirus 4 (Epstein-Barr virus)
gaagaguaccccagugacg

SEQ ID NO: 136950 - RNA, 15 nt, Human herpesvirus 4 (Epstein-Barr virus)
gaagcuggacgugaa

SEQ ID NO: 136951 - RNA, 15 nt, Human herpesvirus 4 (Epstein-Barr virus)
gaaggagagcuggau

SEQ ID NO: 136952 - RNA, 16 nt, Human herpesvirus 4 (Epstein-Barr virus)
gaagacuccugccuga

SEQ ID NO: 136953 - RNA, 17 nt, Human herpesvirus 4 (Epstein-Barr virus)
gaagacccaucugaggg

SEQ ID NO: 136954 - RNA, 12 nt, Human herpesvirus 4 (Epstein-Barr virus)
gaagacauggcc

SEQ ID NO: 136955 - RNA, 14 nt, Human herpesvirus 4 (Epstein-Barr virus)
gaacuuucuugaac

SEQ ID NO: 136956 - RNA, 18 nt, Human herpesvirus 4 (Epstein-Barr virus)
gaauugcuguuuuugcca

SEQ ID NO: 136957 - RNA, 14 nt, Human herpesvirus 4 (Epstein-Barr virus)
gaauuggguuaaga

SEQ ID NO: 136958 - RNA, 20 nt, Human herpesvirus 4 (Epstein-Barr virus)
aaagagguaaaacugccaca

SEQ ID NO: 136959 - RNA, 16 nt, Human herpesvirus 4 (Epstein-Barr virus)
aaagaacaaggccaag

SEQ ID NO: 136960 - RNA, 15 nt, Human herpesvirus 4 (Epstein-Barr virus)
gaauguaacacuacu

SEQ ID NO: 136961 - RNA, 19 nt, Human herpesvirus 4 (Epstein-Barr virus)
gaauguagccccuaggccu

SEQ ID NO: 136962 - RNA, 13 nt, Human herpesvirus 4 (Epstein-Barr virus)
gaauuagggccuu

SEQ ID NO: 136963 - RNA, 21 nt, Human herpesvirus 4 (Epstein-Barr virus)
gaauuagggccuuuucccuca

SEQ ID NO: 136964 - RNA, 12 nt, Human herpesvirus 4 (Epstein-Barr virus)
gaaggcuugcca

SEQ ID NO: 136965 - RNA, 14 nt, Human herpesvirus 4 (Epstein-Barr virus)
gaaggcuugccaaa

SEQ ID NO: 136966 - RNA, 20 nt, Human herpesvirus 4 (Epstein-Barr virus)
gaaugaacacucauggugug

SEQ ID NO: 136967 - RNA, 15 nt, Human herpesvirus 4 (Epstein-Barr virus)
gaguccaaggcccaa

SEQ ID NO: 136968 - RNA, 19 nt, Human herpesvirus 4 (Epstein-Barr virus)
gagucaguuacacacacag

SEQ ID NO: 136969 - RNA, 21 nt, Human herpesvirus 4 (Epstein-Barr virus)
gaguaccugcgucucauuccc

SEQ ID NO: 136970 - RNA, 15 nt, Human herpesvirus 4 (Epstein-Barr virus)
gaguaauugcagugg

SEQ ID NO: 136971 - RNA, 17 nt, Human herpesvirus 4 (Epstein-Barr virus)
gagucuggacguggcug

SEQ ID NO: 136972 - RNA, 21 nt, Human herpesvirus 4 (Epstein-Barr virus)
gagucuacucgaccagcacgu

SEQ ID NO: 136973 - RNA, 15 nt, Human herpesvirus 4 (Epstein-Barr virus)
gagucugacuacuca

SEQ ID NO: 136974 - RNA, 14 nt, Human herpesvirus 4 (Epstein-Barr virus)
gagucccuccucac

SEQ ID NO: 136975 - RNA, 22 nt, Human herpesvirus 4 (Epstein-Barr virus)
gagugacacugaugagucugac

SEQ ID NO: 136976 - RNA, 18 nt, Human herpesvirus 4 (Epstein-Barr virus)
gaguggcagaaucaccag

SEQ ID NO: 136977 - RNA, 13 nt, Human herpesvirus 4 (Epstein-Barr virus)
gaggaacggugau

SEQ ID NO: 136978 - RNA, 21 nt, Human herpesvirus 4 (Epstein-Barr virus)
gagcucuacaaccccuuccac

SEQ ID NO: 136979 - RNA, 15 nt, Human herpesvirus 4 (Epstein-Barr virus)
gagcccgacgaacuc

SEQ ID NO: 136980 - RNA, 19 nt, Human herpesvirus 4 (Epstein-Barr virus)
gagcccggccuacgagcgc

SEQ ID NO: 136981 - RNA, 20 nt, Human herpesvirus 4 (Epstein-Barr virus)
gauaucccugcugucucuga

SEQ ID NO: 136982 - RNA, 21 nt, Human herpesvirus 4 (Epstein-Barr virus)
gauaucccugcugucucugaa

SEQ ID NO: 136983 - RNA, 17 nt, Human herpesvirus 4 (Epstein-Barr virus)
gauagggaccagaggac

SEQ ID NO: 136984 - RNA, 20 nt, Human herpesvirus 4 (Epstein-Barr virus)
gauauagcucugcacaggcu

SEQ ID NO: 136985 - RNA, 20 nt, Human herpesvirus 4 (Epstein-Barr virus)
gaguugaugaaaggggccga

SEQ ID NO: 136986 - RNA, 14 nt, Human herpesvirus 4 (Epstein-Barr virus)
gauaagaaacacgc

SEQ ID NO: 136987 - RNA, 14 nt, Human herpesvirus 4 (Epstein-Barr virus)
gagauugccaagau

SEQ ID NO: 136988 - RNA, 12 nt, Human herpesvirus 4 (Epstein-Barr virus)
gagcaaccagcu

SEQ ID NO: 136989 - RNA, 20 nt, Human herpesvirus 4 (Epstein-Barr virus)
gagcaugagcuccucuccaa

SEQ ID NO: 136990 - RNA, 12 nt, Human herpesvirus 4 (Epstein-Barr virus)
gagcaugaucag

SEQ ID NO: 136991 - RNA, 15 nt, Human herpesvirus 4 (Epstein-Barr virus)
gagcaugcaggucag

SEQ ID NO: 136992 - RNA, 23 nt, Human herpesvirus 4 (Epstein-Barr virus)
gagccaccacagcacaagugauu

SEQ ID NO: 136993 - RNA, 16 nt, Human herpesvirus 4 (Epstein-Barr virus)
gagcccauucucgucc

SEQ ID NO: 136994 - RNA, 19 nt, Human herpesvirus 4 (Epstein-Barr virus)
gagccccacaaacaccagu

SEQ ID NO: 136995 - RNA, 14 nt, Human herpesvirus 4 (Epstein-Barr virus)
gagauaauguacag

SEQ ID NO: 136996 - RNA, 11 nt, Human herpesvirus 4 (Epstein-Barr virus)
gagaugcucug

SEQ ID NO: 136997 - RNA, 19 nt, Human herpesvirus 4 (Epstein-Barr virus)
gagauggcgccguuugacu

SEQ ID NO: 136998 - RNA, 15 nt, Human herpesvirus 4 (Epstein-Barr virus)
gagaugauaaugaug

SEQ ID NO: 136999 - RNA, 16 nt, Human herpesvirus 4 (Epstein-Barr virus)
gagaugauaaugauga

SEQ ID NO: 137000 - RNA, 12 nt, Human herpesvirus 4 (Epstein-Barr virus)
gagaugauucau

SEQ ID NO: 137001 - RNA, 12 nt, Human herpesvirus 4 (Epstein-Barr virus)
gagaucuucuca

SEQ ID NO: 137002 - RNA, 21 nt, Human herpesvirus 4 (Epstein-Barr virus)
aacaaagcccgaugcccaguu

SEQ ID NO: 137003 - RNA, 16 nt, Human herpesvirus 4 (Epstein-Barr virus)
gacggcaucaugcgug

SEQ ID NO: 137004 - RNA, 20 nt, Human herpesvirus 4 (Epstein-Barr virus)
gagaacugacgcuccaggau

SEQ ID NO: 137005 - RNA, 18 nt, Human herpesvirus 4 (Epstein-Barr virus)
gagaaguggggagggcac

SEQ ID NO: 137006 - RNA, 13 nt, Human herpesvirus 4 (Epstein-Barr virus)
gagaacccggcgg

SEQ ID NO: 137007 - RNA, 19 nt, Human herpesvirus 4 (Epstein-Barr virus)
gacgagcaugaaacccggg

SEQ ID NO: 137008 - RNA, 22 nt, Human herpesvirus 4 (Epstein-Barr virus)
gacgcgacauguuucuggugag

SEQ ID NO: 137009 - RNA, 11 nt, Human herpesvirus 4 (Epstein-Barr virus)
gacgccaaugc

SEQ ID NO: 137010 - RNA, 12 nt, Human herpesvirus 4 (Epstein-Barr virus)
gacgccaaugcu

SEQ ID NO: 137011 - RNA, 20 nt, Human herpesvirus 4 (Epstein-Barr virus)
aaauuuuuauugacuuuaua

SEQ ID NO: 137012 - RNA, 20 nt, Human herpesvirus 4 (Epstein-Barr virus)
gaccuuaacauccgagaccu

SEQ ID NO: 137013 - RNA, 20 nt, Human herpesvirus 4 (Epstein-Barr virus)
gaccugggagggccaucgca

SEQ ID NO: 137014 - RNA, 13 nt, Human herpesvirus 4 (Epstein-Barr virus)
aaaucucaguccc

SEQ ID NO: 137015 - RNA, 23 nt, Human herpesvirus 4 (Epstein-Barr virus)
aaaucucagucccaccacaaagg

SEQ ID NO: 137016 - RNA, 22 nt, Human herpesvirus 4 (Epstein-Barr virus)
aaaugaacccagggguggcagu

SEQ ID NO: 137017 - RNA, 19 nt, Human herpesvirus 4 (Epstein-Barr virus)
aaaugugcagcuucuccag

SEQ ID NO: 137018 - RNA, 18 nt, Human herpesvirus 4 (Epstein-Barr virus)
gaauuuauacccagugag

SEQ ID NO: 137019 - RNA, 23 nt, Human herpesvirus 4 (Epstein-Barr virus)
gaauugucacugagaaucuccug

SEQ ID NO: 137020 - RNA, 16 nt, Human herpesvirus 4 (Epstein-Barr virus)
gacaagacagucacau

SEQ ID NO: 137021 - RNA, 15 nt, Human herpesvirus 4 (Epstein-Barr virus)
gacaugguguagaca

SEQ ID NO: 137022 - RNA, 18 nt, Human herpesvirus 4 (Epstein-Barr virus)
gacauuaaccucaaccac

SEQ ID NO: 137023 - RNA, 16 nt, Human herpesvirus 4 (Epstein-Barr virus)
gacauguuucugguga

SEQ ID NO: 137024 - RNA, 22 nt, Human herpesvirus 4 (Epstein-Barr virus)
gacauguuuggggaguuagcau

SEQ ID NO: 137025 - RNA, 19 nt, Human herpesvirus 4 (Epstein-Barr virus)
gacaugcagacuccagguu

SEQ ID NO: 137026 - RNA, 15 nt, Human herpesvirus 4 (Epstein-Barr virus)
gacaugagcauggaa

SEQ ID NO: 137027 - RNA, 22 nt, Human herpesvirus 4 (Epstein-Barr virus)
gacaucugggaguguagaggug

SEQ ID NO: 137028 - RNA, 14 nt, Human herpesvirus 4 (Epstein-Barr virus)
gaccagcacguggg

SEQ ID NO: 137029 - RNA, 13 nt, Human herpesvirus 4 (Epstein-Barr virus)
gaccaaugccaaa

SEQ ID NO: 137030 - RNA, 22 nt, Human herpesvirus 4 (Epstein-Barr virus)
gaccaaugccaaagcugaagaa

SEQ ID NO: 137031 - RNA, 13 nt, Human herpesvirus 4 (Epstein-Barr virus)
gaccaagcuacca

SEQ ID NO: 137032 - RNA, 17 nt, Human herpesvirus 4 (Epstein-Barr virus)
gaccaagcuaccagagu

SEQ ID NO: 137033 - RNA, 22 nt, Human herpesvirus 4 (Epstein-Barr virus)
gacauuucucauaauggugccu

SEQ ID NO: 137034 - RNA, 16 nt, Human herpesvirus 4 (Epstein-Barr virus)
gacauucacugggaca

SEQ ID NO: 137035 - RNA, 11 nt, Human herpesvirus 4 (Epstein-Barr virus)
gggaugagcug

SEQ ID NO: 137036 - RNA, 13 nt, Human herpesvirus 4 (Epstein-Barr virus)
gggcagacaccac

SEQ ID NO: 137037 - RNA, 15 nt, Human herpesvirus 4 (Epstein-Barr virus)
gggccacacagccug

SEQ ID NO: 137038 - RNA, 12 nt, Human herpesvirus 4 (Epstein-Barr virus)
gggcgauaccuu

SEQ ID NO: 137039 - RNA, 14 nt, Human herpesvirus 4 (Epstein-Barr virus)
gggccagcauucua

SEQ ID NO: 137040 - RNA, 20 nt, Human herpesvirus 4 (Epstein-Barr virus)
gggccagguacaggaccugg

SEQ ID NO: 137041 - RNA, 12 nt, Human herpesvirus 4 (Epstein-Barr virus)
gggccagucucc

SEQ ID NO: 137042 - RNA, 19 nt, Human herpesvirus 4 (Epstein-Barr virus)
ggggagaugaccaugaugg

SEQ ID NO: 137043 - RNA, 12 nt, Human herpesvirus 4 (Epstein-Barr virus)
gggcucucagga

SEQ ID NO: 137044 - RNA, 14 nt, Human herpesvirus 4 (Epstein-Barr virus)
gggcggcucaggau

SEQ ID NO: 137045 - RNA, 18 nt, Human herpesvirus 4 (Epstein-Barr virus)
gggcggugaucagggaga

SEQ ID NO: 137046 - RNA, 15 nt, Human herpesvirus 4 (Epstein-Barr virus)
ggcgaagauucccaa

SEQ ID NO: 137047 - RNA, 23 nt, Human herpesvirus 4 (Epstein-Barr virus)
ggcgaagggugggggugggugca

SEQ ID NO: 137048 - RNA, 23 nt, Human herpesvirus 4 (Epstein-Barr virus)
ggccuuggcuauggucauggcca

SEQ ID NO: 137049 - RNA, 18 nt, Human herpesvirus 4 (Epstein-Barr virus)
ggccuuacuccccuaccc

SEQ ID NO: 137050 - RNA, 12 nt, Human herpesvirus 4 (Epstein-Barr virus)
ggccuggugcca

SEQ ID NO: 137051 - RNA, 13 nt, Human herpesvirus 4 (Epstein-Barr virus)
ggccucgugcaac

SEQ ID NO: 137052 - RNA, 15 nt, Human herpesvirus 4 (Epstein-Barr virus)
ggccucuggggucca

SEQ ID NO: 137053 - RNA, 13 nt, Human herpesvirus 4 (Epstein-Barr virus)
ggccugcaccagu

SEQ ID NO: 137054 - RNA, 18 nt, Human herpesvirus 4 (Epstein-Barr virus)
ggccuccauccagugggg

SEQ ID NO: 137055 - RNA, 21 nt, Human herpesvirus 4 (Epstein-Barr virus)
ggccucccagucuauccagga

SEQ ID NO: 137056 - RNA, 20 nt, Human herpesvirus 4 (Epstein-Barr virus)
ggcgauaccuugggcaucau

SEQ ID NO: 137057 - RNA, 20 nt, Human herpesvirus 4 (Epstein-Barr virus)
ggcgacaguaacacagggug

SEQ ID NO: 137058 - RNA, 17 nt, Human herpesvirus 4 (Epstein-Barr virus)
gggacuucuucagggga

SEQ ID NO: 137059 - RNA, 22 nt, Human herpesvirus 4 (Epstein-Barr virus)
ggcugguggccugggaggugcu

SEQ ID NO: 137060 - RNA, 12 nt, Human herpesvirus 4 (Epstein-Barr virus)
gggagaugacca

SEQ ID NO: 137061 - RNA, 21 nt, Human herpesvirus 4 (Epstein-Barr virus)
gggagauguuauccacaccau

SEQ ID NO: 137062 - RNA, 21 nt, Human herpesvirus 4 (Epstein-Barr virus)
ggcuggaugcccucaugcgcc

SEQ ID NO: 137063 - RNA, 16 nt, Human herpesvirus 4 (Epstein-Barr virus)
ggcuggcaaagauccc

SEQ ID NO: 137064 - RNA, 18 nt, Human herpesvirus 4 (Epstein-Barr virus)
ggcuggccgccguggcca

SEQ ID NO: 137065 - RNA, 21 nt, Human herpesvirus 4 (Epstein-Barr virus)
ggcugccgaagcagauggcga

SEQ ID NO: 137066 - RNA, 20 nt, Human herpesvirus 4 (Epstein-Barr virus)
ggcugacacagacuuggccu

SEQ ID NO: 137067 - RNA, 12 nt, Human herpesvirus 4 (Epstein-Barr virus)
ggcugagaccau

SEQ ID NO: 137068 - RNA, 15 nt, Human herpesvirus 4 (Epstein-Barr virus)
ggcucugcacaggag

SEQ ID NO: 137069 - RNA, 15 nt, Human herpesvirus 4 (Epstein-Barr virus)
ggcucugucaguuau

SEQ ID NO: 137070 - RNA, 13 nt, Human herpesvirus 4 (Epstein-Barr virus)
ggaauucuuccag

SEQ ID NO: 137071 - RNA, 14 nt, Human herpesvirus 4 (Epstein-Barr virus)
ggacacacauggca

SEQ ID NO: 137072 - RNA, 19 nt, Human herpesvirus 4 (Epstein-Barr virus)
ggacagggcggcgaugaac

SEQ ID NO: 137073 - RNA, 16 nt, Human herpesvirus 4 (Epstein-Barr virus)
ggacauagaggggcau

SEQ ID NO: 137074 - RNA, 19 nt, Human herpesvirus 4 (Epstein-Barr virus)
ggacauagaggggcaugcu

SEQ ID NO: 137075 - RNA, 20 nt, Human herpesvirus 4 (Epstein-Barr virus)
ggacauagaggggcaugcuu

SEQ ID NO: 137076 - RNA, 14 nt, Human herpesvirus 4 (Epstein-Barr virus)
ggaccgaacugaug

SEQ ID NO: 137077 - RNA, 17 nt, Human herpesvirus 4 (Epstein-Barr virus)
ggaugacaccauggccu

SEQ ID NO: 137078 - RNA, 19 nt, Human herpesvirus 4 (Epstein-Barr virus)
ggaugaacccuggggcaac

SEQ ID NO: 137079 - RNA, 16 nt, Human herpesvirus 4 (Epstein-Barr virus)
ggauggaaagggcaug

SEQ ID NO: 137080 - RNA, 13 nt, Human herpesvirus 4 (Epstein-Barr virus)
ggaugcaucuaag

SEQ ID NO: 137081 - RNA, 16 nt, Human herpesvirus 4 (Epstein-Barr virus)
ggauggggucauuuau

SEQ ID NO: 137082 - RNA, 21 nt, Human herpesvirus 4 (Epstein-Barr virus)
ggauggcccugcaaacugaca

SEQ ID NO: 137083 - RNA, 16 nt, Human herpesvirus 4 (Epstein-Barr virus)
ggccagagacgagcug

SEQ ID NO: 137084 - RNA, 22 nt, Human herpesvirus 4 (Epstein-Barr virus)
ggccagcauucuaucagcuuaa

SEQ ID NO: 137085 - RNA, 15 nt, Human herpesvirus 4 (Epstein-Barr virus)
ggccaucgcaagcuc

SEQ ID NO: 137086 - RNA, 19 nt, Human herpesvirus 4 (Epstein-Barr virus)
ggccaugauacucaucugu

SEQ ID NO: 137087 - RNA, 18 nt, Human herpesvirus 4 (Epstein-Barr virus)
ggccauucgacaggccau

SEQ ID NO: 137088 - RNA, 13 nt, Human herpesvirus 4 (Epstein-Barr virus)
ggcccacuggaug

SEQ ID NO: 137089 - RNA, 23 nt, Human herpesvirus 4 (Epstein-Barr virus)
ggcccaguugacggacgugccca

SEQ ID NO: 137090 - RNA, 12 nt, Human herpesvirus 4 (Epstein-Barr virus)
ggccacaggugc

SEQ ID NO: 137091 - RNA, 15 nt, Human herpesvirus 4 (Epstein-Barr virus)
ggccacacuggggac

SEQ ID NO: 137092 - RNA, 19 nt, Human herpesvirus 4 (Epstein-Barr virus)
ggccaccuucuccaucucc

SEQ ID NO: 137093 - RNA, 12 nt, Human herpesvirus 4 (Epstein-Barr virus)
ggcauguguacu

SEQ ID NO: 137094 - RNA, 16 nt, Human herpesvirus 4 (Epstein-Barr virus)
ggcauguguacuuguc

SEQ ID NO: 137095 - RNA, 15 nt, Human herpesvirus 4 (Epstein-Barr virus)
ggcauuaauguccag

SEQ ID NO: 137096 - RNA, 18 nt, Human herpesvirus 4 (Epstein-Barr virus)
ggcauuaauguccagugg

SEQ ID NO: 137097 - RNA, 20 nt, Human herpesvirus 4 (Epstein-Barr virus)
ggcagugauaagucaugaca

SEQ ID NO: 137098 - RNA, 13 nt, Human herpesvirus 4 (Epstein-Barr virus)
ggcaucaugcgug

SEQ ID NO: 137099 - RNA, 21 nt, Human herpesvirus 4 (Epstein-Barr virus)
ggcauccagugcgucagcaac

SEQ ID NO: 137100 - RNA, 13 nt, Human herpesvirus 4 (Epstein-Barr virus)
ggcauccuucaga

SEQ ID NO: 137101 - RNA, 15 nt, Human herpesvirus 4 (Epstein-Barr virus)
ggcacgagauggccc

SEQ ID NO: 137102 - RNA, 20 nt, Human herpesvirus 4 (Epstein-Barr virus)
ggcacugcuagcgucacuga

SEQ ID NO: 137103 - RNA, 13 nt, Human herpesvirus 4 (Epstein-Barr virus)
ggcagacaccacc

SEQ ID NO: 137104 - RNA, 20 nt, Human herpesvirus 4 (Epstein-Barr virus)
ggcagacaccaccugcucgu

SEQ ID NO: 137105 - RNA, 21 nt, Human herpesvirus 4 (Epstein-Barr virus)
ggcacguuuaccagugugcca

SEQ ID NO: 137106 - RNA, 20 nt, Human herpesvirus 4 (Epstein-Barr virus)
ggcaggcgcuguuauggcca

SEQ ID NO: 137107 - RNA, 15 nt, Human herpesvirus 4 (Epstein-Barr virus)
ggcaggcuacaacag

SEQ ID NO: 137108 - RNA, 23 nt, Human herpesvirus 4 (Epstein-Barr virus)
ggcagguccgugagaacuuucuu

SEQ ID NO: 137109 - RNA, 18 nt, Human herpesvirus 4 (Epstein-Barr virus)
gcgccgcagggguggugg

SEQ ID NO: 137110 - RNA, 22 nt, Human herpesvirus 4 (Epstein-Barr virus)
gcgccgccagcauggcagccgg

SEQ ID NO: 137111 - RNA, 13 nt, Human herpesvirus 4 (Epstein-Barr virus)
gcgccugcuccac

SEQ ID NO: 137112 - RNA, 22 nt, Human herpesvirus 4 (Epstein-Barr virus)
gcuaugaccaugcccagacuca

SEQ ID NO: 137113 - RNA, 20 nt, Human herpesvirus 4 (Epstein-Barr virus)
gcuauguggaaaugagggaa

SEQ ID NO: 137114 - RNA, 23 nt, Human herpesvirus 4 (Epstein-Barr virus)
gcuauauucaccuugaggugcca

SEQ ID NO: 137115 - RNA, 19 nt, Human herpesvirus 4 (Epstein-Barr virus)
gcuacuuuguguuccuaaa

SEQ ID NO: 137116 - RNA, 18 nt, Human herpesvirus 4 (Epstein-Barr virus)
gcuaggugccgacaccgg

SEQ ID NO: 137117 - RNA, 17 nt, Human herpesvirus 4 (Epstein-Barr virus)
gcuaguugguccagggu

SEQ ID NO: 137118 - RNA, 14 nt, Human herpesvirus 4 (Epstein-Barr virus)
gcuagcgucacuga

SEQ ID NO: 137119 - RNA, 22 nt, Human herpesvirus 4 (Epstein-Barr virus)
gcuagccuccgcgcuaaucgcu

SEQ ID NO: 137120 - RNA, 17 nt, Human herpesvirus 4 (Epstein-Barr virus)
gcugacggaaaucugcu

SEQ ID NO: 137121 - RNA, 18 nt, Human herpesvirus 4 (Epstein-Barr virus)
gcugcagagguucaggga

SEQ ID NO: 137122 - RNA, 17 nt, Human herpesvirus 4 (Epstein-Barr virus)
gcugagaaccugcugcu

SEQ ID NO: 137123 - RNA, 18 nt, Human herpesvirus 4 (Epstein-Barr virus)
gcugagaaccugcugcua

SEQ ID NO: 137124 - RNA, 14 nt, Human herpesvirus 4 (Epstein-Barr virus)
gcugagcgugugca

SEQ ID NO: 137125 - RNA, 16 nt, Human herpesvirus 4 (Epstein-Barr virus)
gcugcagguaaaccuu

SEQ ID NO: 137126 - RNA, 14 nt, Human herpesvirus 4 (Epstein-Barr virus)
gcucuggcacugcu

SEQ ID NO: 137127 - RNA, 15 nt, Human herpesvirus 4 (Epstein-Barr virus)
gcucuggcacugcua

SEQ ID NO: 137128 - RNA, 19 nt, Human herpesvirus 4 (Epstein-Barr virus)
gcucuucauguccacugag

SEQ ID NO: 137129 - RNA, 15 nt, Human herpesvirus 4 (Epstein-Barr virus)
gcugaaccagaauaa

SEQ ID NO: 137130 - RNA, 18 nt, Human herpesvirus 4 (Epstein-Barr virus)
gcucucuaucuacaacaa

SEQ ID NO: 137131 - RNA, 22 nt, Human herpesvirus 4 (Epstein-Barr virus)
gcucucagcacuuugccagcaa

SEQ ID NO: 137132 - RNA, 14 nt, Human herpesvirus 4 (Epstein-Barr virus)
gcucucgcacucuu

SEQ ID NO: 137133 - RNA, 22 nt, Human herpesvirus 4 (Epstein-Barr virus)
gcuugugaucauggaaaccacu

SEQ ID NO: 137134 - RNA, 20 nt, Human herpesvirus 4 (Epstein-Barr virus)
gcuuuagccuggccuccuua

SEQ ID NO: 137135 - RNA, 15 nt, Human herpesvirus 4 (Epstein-Barr virus)
gcuugggcuguggua

SEQ ID NO: 137136 - RNA, 16 nt, Human herpesvirus 4 (Epstein-Barr virus)
gcuuaaaaaugugcag

SEQ ID NO: 137137 - RNA, 17 nt, Human herpesvirus 4 (Epstein-Barr virus)
gcugugacuacaccauc

SEQ ID NO: 137138 - RNA, 16 nt, Human herpesvirus 4 (Epstein-Barr virus)
gcugugguaaccggug

SEQ ID NO: 137139 - RNA, 18 nt, Human herpesvirus 4 (Epstein-Barr virus)
gcuguguacgugccucag

SEQ ID NO: 137140 - RNA, 21 nt, Human herpesvirus 4 (Epstein-Barr virus)
gcuuacagccagagagaucau

SEQ ID NO: 137141 - RNA, 18 nt, Human herpesvirus 4 (Epstein-Barr virus)
gcuuacucaauccauuau

SEQ ID NO: 137142 - RNA, 15 nt, Human herpesvirus 4 (Epstein-Barr virus)
ggaaaaucucgcuca

SEQ ID NO: 137143 - RNA, 19 nt, Human herpesvirus 4 (Epstein-Barr virus)
ggaaaaucucgcucagagc

SEQ ID NO: 137144 - RNA, 19 nt, Human herpesvirus 4 (Epstein-Barr virus)
ggaaaccugcgaaacuugg

SEQ ID NO: 137145 - RNA, 14 nt, Human herpesvirus 4 (Epstein-Barr virus)
gcuuuucuccucag

SEQ ID NO: 137146 - RNA, 23 nt, Human herpesvirus 4 (Epstein-Barr virus)
ggaacuccgcccaggucuugcca

SEQ ID NO: 137147 - RNA, 16 nt, Human herpesvirus 4 (Epstein-Barr virus)
ggaauaacaagggaag

SEQ ID NO: 137148 - RNA, 14 nt, Human herpesvirus 4 (Epstein-Barr virus)
ggaaugaacacuca

SEQ ID NO: 137149 - RNA, 14 nt, Human herpesvirus 4 (Epstein-Barr virus)
gcaauugggcauac

SEQ ID NO: 137150 - RNA, 13 nt, Human herpesvirus 4 (Epstein-Barr virus)
gcacagaucugac

SEQ ID NO: 137151 - RNA, 15 nt, Human herpesvirus 4 (Epstein-Barr virus)
gcaccauagcauguc

SEQ ID NO: 137152 - RNA, 16 nt, Human herpesvirus 4 (Epstein-Barr virus)
gcaccauagcauguca

SEQ ID NO: 137153 - RNA, 18 nt, Human herpesvirus 4 (Epstein-Barr virus)
gcaccauagcaugucaca

SEQ ID NO: 137154 - RNA, 15 nt, Human herpesvirus 4 (Epstein-Barr virus)
gcacauuuuguucua

SEQ ID NO: 137155 - RNA, 23 nt, Human herpesvirus 4 (Epstein-Barr virus)
gcaccaacacaaccacggugaca

SEQ ID NO: 137156 - RNA, 23 nt, Human herpesvirus 4 (Epstein-Barr virus)
gcaccgcggcaaaaauaugcaau

SEQ ID NO: 137157 - RNA, 14 nt, Human herpesvirus 4 (Epstein-Barr virus)
gcaccgucagccac

SEQ ID NO: 137158 - RNA, 22 nt, Human herpesvirus 4 (Epstein-Barr virus)
gcaccuggacauagaggggcau

SEQ ID NO: 137159 - RNA, 19 nt, Human herpesvirus 4 (Epstein-Barr virus)
gcaccuguguccugggcaa

SEQ ID NO: 137160 - RNA, 22 nt, Human herpesvirus 4 (Epstein-Barr virus)
gcaccuugacuguaaucacugg

SEQ ID NO: 137161 - RNA, 23 nt, Human herpesvirus 4 (Epstein-Barr virus)
gaucaucucgcuggcucgccuca

SEQ ID NO: 137162 - RNA, 16 nt, Human herpesvirus 4 (Epstein-Barr virus)
gcaaucagacaugcga

SEQ ID NO: 137163 - RNA, 17 nt, Human herpesvirus 4 (Epstein-Barr virus)
gcaaugcccacccacua

SEQ ID NO: 137164 - RNA, 17 nt, Human herpesvirus 4 (Epstein-Barr virus)
gcaagauccuucuggca

SEQ ID NO: 137165 - RNA, 14 nt, Human herpesvirus 4 (Epstein-Barr virus)
gcaagcagcaccug

SEQ ID NO: 137166 - RNA, 16 nt, Human herpesvirus 4 (Epstein-Barr virus)
gcagcagcuacacucu

SEQ ID NO: 137167 - RNA, 14 nt, Human herpesvirus 4 (Epstein-Barr virus)
gcagagagccacau

SEQ ID NO: 137168 - RNA, 21 nt, Human herpesvirus 4 (Epstein-Barr virus)
gcagacaaggacaggugccag

SEQ ID NO: 137169 - RNA, 23 nt, Human herpesvirus 4 (Epstein-Barr virus)
gcagacaaggacaggugccagau

SEQ ID NO: 137170 - RNA, 13 nt, Human herpesvirus 4 (Epstein-Barr virus)
gcagaaggccaug

SEQ ID NO: 137171 - RNA, 22 nt, Human herpesvirus 4 (Epstein-Barr virus)
gcacugaauuuauacccaguga

SEQ ID NO: 137172 - RNA, 11 nt, Human herpesvirus 4 (Epstein-Barr virus)
gcacucauggu

SEQ ID NO: 137173 - RNA, 22 nt, Human herpesvirus 4 (Epstein-Barr virus)
gcacggccgggcuaaucagcuu

SEQ ID NO: 137174 - RNA, 11 nt, Human herpesvirus 4 (Epstein-Barr virus)
gcaccucgggc

SEQ ID NO: 137175 - RNA, 14 nt, Human herpesvirus 4 (Epstein-Barr virus)
gcagguaaaccuuc

SEQ ID NO: 137176 - RNA, 23 nt, Human herpesvirus 4 (Epstein-Barr virus)
gcagguaagaagcuacaccggcc

SEQ ID NO: 137177 - RNA, 14 nt, Human herpesvirus 4 (Epstein-Barr virus)
gcagggguggugga

SEQ ID NO: 137178 - RNA, 14 nt, Human herpesvirus 4 (Epstein-Barr virus)
gcagggugcacaga

SEQ ID NO: 137179 - RNA, 13 nt, Human herpesvirus 4 (Epstein-Barr virus)
gcaguacuagcau

SEQ ID NO: 137180 - RNA, 15 nt, Human herpesvirus 4 (Epstein-Barr virus)
gcagugauaagucau

SEQ ID NO: 137181 - RNA, 21 nt, Human herpesvirus 4 (Epstein-Barr virus)
gcaguggauggggucauuuau

SEQ ID NO: 137182 - RNA, 18 nt, Human herpesvirus 4 (Epstein-Barr virus)
gcagugggugaggcggug

SEQ ID NO: 137183 - RNA, 17 nt, Human herpesvirus 4 (Epstein-Barr virus)
gcaggacacgugacaug

SEQ ID NO: 137184 - RNA, 19 nt, Human herpesvirus 4 (Epstein-Barr virus)
gcaggacacgugacauguc

SEQ ID NO: 137185 - RNA, 20 nt, Human herpesvirus 4 (Epstein-Barr virus)
gcaggacacgugacaugucc

SEQ ID NO: 137186 - RNA, 17 nt, Human herpesvirus 4 (Epstein-Barr virus)
gccgcuuacagccagag

SEQ ID NO: 137187 - RNA, 16 nt, Human herpesvirus 4 (Epstein-Barr virus)
gcccucuuccgugccu

SEQ ID NO: 137188 - RNA, 17 nt, Human herpesvirus 4 (Epstein-Barr virus)
gccuccuggccagcacc

SEQ ID NO: 137189 - RNA, 18 nt, Human herpesvirus 4 (Epstein-Barr virus)
gccuccuggccagcaccc

SEQ ID NO: 137190 - RNA, 16 nt, Human herpesvirus 4 (Epstein-Barr virus)
gccugacucucaugua

SEQ ID NO: 137191 - RNA, 22 nt, Human herpesvirus 4 (Epstein-Barr virus)
gccugagacagaggugcucaag

SEQ ID NO: 137192 - RNA, 20 nt, Human herpesvirus 4 (Epstein-Barr virus)
gccucggcggggaacgugac

SEQ ID NO: 137193 - RNA, 14 nt, Human herpesvirus 4 (Epstein-Barr virus)
gcgaugaggcggug

SEQ ID NO: 137194 - RNA, 17 nt, Human herpesvirus 4 (Epstein-Barr virus)
gcgagcaugaucaggac

SEQ ID NO: 137195 - RNA, 19 nt, Human herpesvirus 4 (Epstein-Barr virus)
gcgagguuaagcugcaccu

SEQ ID NO: 137196 - RNA, 14 nt, Human herpesvirus 4 (Epstein-Barr virus)
gcgcaacgccggcc

SEQ ID NO: 137197 - RNA, 20 nt, Human herpesvirus 4 (Epstein-Barr virus)
gcgcaacgccggccugcugg

SEQ ID NO: 137198 - RNA, 16 nt, Human herpesvirus 4 (Epstein-Barr virus)
gcgaagaacacuccac

SEQ ID NO: 137199 - RNA, 13 nt, Human herpesvirus 4 (Epstein-Barr virus)
gcaucacaaguca

SEQ ID NO: 137200 - RNA, 15 nt, Human herpesvirus 4 (Epstein-Barr virus)
gcaucacaagucaca

SEQ ID NO: 137201 - RNA, 19 nt, Human herpesvirus 4 (Epstein-Barr virus)
gcaucacaagucacaucaa

SEQ ID NO: 137202 - RNA, 15 nt, Human herpesvirus 4 (Epstein-Barr virus)
gcauacgcugaguga

SEQ ID NO: 137203 - RNA, 20 nt, Human herpesvirus 4 (Epstein-Barr virus)
gccaaggacccccgcgucac

SEQ ID NO: 137204 - RNA, 22 nt, Human herpesvirus 4 (Epstein-Barr virus)
gccaacucccccaaacaugucc

SEQ ID NO: 137205 - RNA, 20 nt, Human herpesvirus 4 (Epstein-Barr virus)
gccaaccugcucucucugga

SEQ ID NO: 137206 - RNA, 14 nt, Human herpesvirus 4 (Epstein-Barr virus)
gccagacucucuuc

SEQ ID NO: 137207 - RNA, 20 nt, Human herpesvirus 4 (Epstein-Barr virus)
gccagcaaaaccagcccggg

SEQ ID NO: 137208 - RNA, 21 nt, Human herpesvirus 4 (Epstein-Barr virus)
gccaagguugaagagcagauu

SEQ ID NO: 137209 - RNA, 16 nt, Human herpesvirus 4 (Epstein-Barr virus)
gcccgcuucauucacg

SEQ ID NO: 137210 - RNA, 14 nt, Human herpesvirus 4 (Epstein-Barr virus)
gcccucccacuuuu

SEQ ID NO: 137211 - RNA, 18 nt, Human herpesvirus 4 (Epstein-Barr virus)
gccagcauggcagccggg

SEQ ID NO: 137212 - RNA, 11 nt, Human herpesvirus 4 (Epstein-Barr virus)
gccagccaccc

SEQ ID NO: 137213 - RNA, 16 nt, Human herpesvirus 4 (Epstein-Barr virus)
gccagcuaacugccua

SEQ ID NO: 137214 - RNA, 14 nt, Human herpesvirus 4 (Epstein-Barr virus)
gccaggaccuggau

SEQ ID NO: 137215 - RNA, 20 nt, Human herpesvirus 4 (Epstein-Barr virus)
gccaggaccuggaugcugua

SEQ ID NO: 137216 - RNA, 22 nt, Human herpesvirus 4 (Epstein-Barr virus)
gccaggcccgaccugccaaaga

SEQ ID NO: 137217 - RNA, 19 nt, Human herpesvirus 4 (Epstein-Barr virus)
gccaggccgccaugcucag

SEQ ID NO: 137218 - RNA, 21 nt, Human herpesvirus 4 (Epstein-Barr virus)
gccaugauacucaucugugag

SEQ ID NO: 137219 - RNA, 15 nt, Human herpesvirus 4 (Epstein-Barr virus)
gccaugacuagcgca

SEQ ID NO: 137220 - RNA, 16 nt, Human herpesvirus 4 (Epstein-Barr virus)
gccaugcuaucuugua

SEQ ID NO: 137221 - RNA, 17 nt, Human herpesvirus 4 (Epstein-Barr virus)
gccauucgacaggccau

SEQ ID NO: 137222 - RNA, 18 nt, Human herpesvirus 4 (Epstein-Barr virus)
gccauuguuuaccgccau

SEQ ID NO: 137223 - RNA, 22 nt, Human herpesvirus 4 (Epstein-Barr virus)
gcccaacagcaccgcggcaaaa

SEQ ID NO: 137224 - RNA, 20 nt, Human herpesvirus 4 (Epstein-Barr virus)
cagugccuaaucaccguucc

SEQ ID NO: 137225 - RNA, 21 nt, Human herpesvirus 4 (Epstein-Barr virus)
cagugacgaagacccaucuga

SEQ ID NO: 137226 - RNA, 18 nt, Human herpesvirus 4 (Epstein-Barr virus)
cagucuuugcaauuugcc

SEQ ID NO: 137227 - RNA, 15 nt, Human herpesvirus 4 (Epstein-Barr virus)
cagucuauccaggag

SEQ ID NO: 137228 - RNA, 23 nt, Human herpesvirus 4 (Epstein-Barr virus)
caguccacagccaccggccaagg

SEQ ID NO: 137229 - RNA, 22 nt, Human herpesvirus 4 (Epstein-Barr virus)
caguccaggggccacacagccu

SEQ ID NO: 137230 - RNA, 17 nt, Human herpesvirus 4 (Epstein-Barr virus)
cagucccaacccaaaac

SEQ ID NO: 137231 - RNA, 15 nt, Human herpesvirus 4 (Epstein-Barr virus)
cagucccaccacaaa

SEQ ID NO: 137232 - RNA, 22 nt, Human herpesvirus 4 (Epstein-Barr virus)
cagucaccuuccagacuaugca

SEQ ID NO: 137233 - RNA, 21 nt, Human herpesvirus 4 (Epstein-Barr virus)
cagucaugucgagcaugagcu

SEQ ID NO: 137234 - RNA, 19 nt, Human herpesvirus 4 (Epstein-Barr virus)
caguggauggggucauuua

SEQ ID NO: 137235 - RNA, 20 nt, Human herpesvirus 4 (Epstein-Barr virus)
cagugggguaaaugcaccuu

SEQ ID NO: 137236 - RNA, 21 nt, Human herpesvirus 4 (Epstein-Barr virus)
cauaccaggugccuuuuguac

SEQ ID NO: 137237 - RNA, 19 nt, Human herpesvirus 4 (Epstein-Barr virus)
cauaauggugccugaggga

SEQ ID NO: 137238 - RNA, 17 nt, Human herpesvirus 4 (Epstein-Barr virus)
cauaaauucuccugccu

SEQ ID NO: 137239 - RNA, 17 nt, Human herpesvirus 4 (Epstein-Barr virus)
cauaaaauuuuauucua

SEQ ID NO: 137240 - RNA, 24 nt, Human herpesvirus 4 (Epstein-Barr virus)
cagguuugacuucauauguaugcc

SEQ ID NO: 137241 - RNA, 17 nt, Human herpesvirus 4 (Epstein-Barr virus)
caguaaaccaguagugc

SEQ ID NO: 137242 - RNA, 18 nt, Human herpesvirus 4 (Epstein-Barr virus)
cagguguacgcccuggcg

SEQ ID NO: 137243 - RNA, 19 nt, Human herpesvirus 4 (Epstein-Barr virus)
caggugccagaugugccug

SEQ ID NO: 137244 - RNA, 18 nt, Human herpesvirus 4 (Epstein-Barr virus)
caggugagggugccauug

SEQ ID NO: 137245 - RNA, 18 nt, Human herpesvirus 4 (Epstein-Barr virus)
caguagcuugggaacacc

SEQ ID NO: 137246 - RNA, 19 nt, Human herpesvirus 4 (Epstein-Barr virus)
caggguggcuacuugcuca

SEQ ID NO: 137247 - RNA, 24 nt, Human herpesvirus 4 (Epstein-Barr virus)
cagguaacucacuaaacauugcac

SEQ ID NO: 137248 - RNA, 12 nt, Human herpesvirus 4 (Epstein-Barr virus)
cagggguggugg

SEQ ID NO: 137249 - RNA, 17 nt, Human herpesvirus 4 (Epstein-Barr virus)
cagggguauguggugcc

SEQ ID NO: 137250 - RNA, 19 nt, Human herpesvirus 4 (Epstein-Barr virus)
cagggguauguggugccau

SEQ ID NO: 137251 - RNA, 14 nt, Human herpesvirus 4 (Epstein-Barr virus)
caggggugaugaaa

SEQ ID NO: 137252 - RNA, 20 nt, Human herpesvirus 4 (Epstein-Barr virus)
caggggugaugaaaacagag

SEQ ID NO: 137253 - RNA, 15 nt, Human herpesvirus 4 (Epstein-Barr virus)
cagggccaagacaua

SEQ ID NO: 137254 - RNA, 16 nt, Human herpesvirus 4 (Epstein-Barr virus)
cagggccaagacauag

SEQ ID NO: 137255 - RNA, 13 nt, Human herpesvirus 4 (Epstein-Barr virus)
cagggcccagugc

SEQ ID NO: 137256 - RNA, 18 nt, Human herpesvirus 4 (Epstein-Barr virus)
cagggcuucguccagggg

SEQ ID NO: 137257 - RNA, 12 nt, Human herpesvirus 4 (Epstein-Barr virus)
cagggcaauggg

SEQ ID NO: 137258 - RNA, 13 nt, Human herpesvirus 4 (Epstein-Barr virus)
cagggcaauggga

SEQ ID NO: 137259 - RNA, 17 nt, Human herpesvirus 4 (Epstein-Barr virus)
caggcucggcaccuccu

SEQ ID NO: 137260 - RNA, 20 nt, Human herpesvirus 4 (Epstein-Barr virus)
caggcugacguccaccccac

SEQ ID NO: 137261 - RNA, 23 nt, Human herpesvirus 4 (Epstein-Barr virus)
cagacaccaggcgccgcaggggu

SEQ ID NO: 137262 - RNA, 21 nt, Human herpesvirus 4 (Epstein-Barr virus)
cagacaggagaugauaaugau

SEQ ID NO: 137263 - RNA, 12 nt, Human herpesvirus 4 (Epstein-Barr virus)
cagaaugugcag

SEQ ID NO: 137264 - RNA, 18 nt, Human herpesvirus 4 (Epstein-Barr virus)
cagaauugucacugagaa

SEQ ID NO: 137265 - RNA, 13 nt, Human herpesvirus 4 (Epstein-Barr virus)
cagacgacuccca

SEQ ID NO: 137266 - RNA, 15 nt, Human herpesvirus 4 (Epstein-Barr virus)
cagacgcgauggcac

SEQ ID NO: 137267 - RNA, 16 nt, Human herpesvirus 4 (Epstein-Barr virus)
cagacaugguguagac

SEQ ID NO: 137268 - RNA, 16 nt, Human herpesvirus 4 (Epstein-Barr virus)
cagaccagccccucau

SEQ ID NO: 137269 - RNA, 13 nt, Human herpesvirus 4 (Epstein-Barr virus)
cagacccaacaaa

SEQ ID NO: 137270 - RNA, 15 nt, Human herpesvirus 4 (Epstein-Barr virus)
caggcgaaggcggag

SEQ ID NO: 137271 - RNA, 19 nt, Human herpesvirus 4 (Epstein-Barr virus)
caggccucacgaucuucaa

SEQ ID NO: 137272 - RNA, 13 nt, Human herpesvirus 4 (Epstein-Barr virus)
caggccugucauu

SEQ ID NO: 137273 - RNA, 20 nt, Human herpesvirus 4 (Epstein-Barr virus)
caggcuacaacaggcugcug

SEQ ID NO: 137274 - RNA, 21 nt, Human herpesvirus 4 (Epstein-Barr virus)
caggcuacaacaggcugcuga

SEQ ID NO: 137275 - RNA, 22 nt, Human herpesvirus 4 (Epstein-Barr virus)
caggcuacaacaggcugcugaa

SEQ ID NO: 137276 - RNA, 22 nt, Human herpesvirus 4 (Epstein-Barr virus)
caggccaaauggagacugcaaa

SEQ ID NO: 137277 - RNA, 18 nt, Human herpesvirus 4 (Epstein-Barr virus)
cagacuccacaccaaaua

SEQ ID NO: 137278 - RNA, 23 nt, Human herpesvirus 4 (Epstein-Barr virus)
caggcaccggucucguccaucuu

SEQ ID NO: 137279 - RNA, 17 nt, Human herpesvirus 4 (Epstein-Barr virus)
caggauuccccaaugau

SEQ ID NO: 137280 - RNA, 20 nt, Human herpesvirus 4 (Epstein-Barr virus)
caggauuccccaaugauuga

SEQ ID NO: 137281 - RNA, 17 nt, Human herpesvirus 4 (Epstein-Barr virus)
cauuaggcgacucugca

SEQ ID NO: 137282 - RNA, 16 nt, Human herpesvirus 4 (Epstein-Barr virus)
cauuacaccaucccau

SEQ ID NO: 137283 - RNA, 18 nt, Human herpesvirus 4 (Epstein-Barr virus)
cauuaaccucaaccacaa

SEQ ID NO: 137284 - RNA, 14 nt, Human herpesvirus 4 (Epstein-Barr virus)
ccaaaccaugacau

SEQ ID NO: 137285 - RNA, 18 nt, Human herpesvirus 4 (Epstein-Barr virus)
cauuucucauaauggugc

SEQ ID NO: 137286 - RNA, 20 nt, Human herpesvirus 4 (Epstein-Barr virus)
ccaagaagaagcccaccuau

SEQ ID NO: 137287 - RNA, 15 nt, Human herpesvirus 4 (Epstein-Barr virus)
ccaaagucaagggaa

SEQ ID NO: 137288 - RNA, 15 nt, Human herpesvirus 4 (Epstein-Barr virus)
ccaaagcuaacugua

SEQ ID NO: 137289 - RNA, 16 nt, Human herpesvirus 4 (Epstein-Barr virus)
ccaaagcuaacuguac

SEQ ID NO: 137290 - RNA, 17 nt, Human herpesvirus 4 (Epstein-Barr virus)
ccaaagcuaacuguaca

SEQ ID NO: 137291 - RNA, 14 nt, Human herpesvirus 4 (Epstein-Barr virus)
ccaagauaauggau

SEQ ID NO: 137292 - RNA, 21 nt, Human herpesvirus 4 (Epstein-Barr virus)
ccaaggugugcaugagcacca

SEQ ID NO: 137293 - RNA, 17 nt, Human herpesvirus 4 (Epstein-Barr virus)
ccaagggcagggcaaug

SEQ ID NO: 137294 - RNA, 19 nt, Human herpesvirus 4 (Epstein-Barr virus)
ccaagggcagggcaauggg

SEQ ID NO: 137295 - RNA, 15 nt, Human herpesvirus 4 (Epstein-Barr virus)
ccaauccaugccaau

SEQ ID NO: 137296 - RNA, 11 nt, Human herpesvirus 4 (Epstein-Barr virus)
ccaaugccaaa

SEQ ID NO: 137297 - RNA, 14 nt, Human herpesvirus 4 (Epstein-Barr virus)
ccaauguaucccaa

SEQ ID NO: 137298 - RNA, 21 nt, Human herpesvirus 4 (Epstein-Barr virus)
cauauacuggagaugauucau

SEQ ID NO: 137299 - RNA, 20 nt, Human herpesvirus 4 (Epstein-Barr virus)
caucggguccuagcacaaac

SEQ ID NO: 137300 - RNA, 23 nt, Human herpesvirus 4 (Epstein-Barr virus)
cauaugaugacgccgagaccuau

SEQ ID NO: 137301 - RNA, 21 nt, Human herpesvirus 4 (Epstein-Barr virus)
caucucugauuauagcucugg

SEQ ID NO: 137302 - RNA, 17 nt, Human herpesvirus 4 (Epstein-Barr virus)
caucugagggcagugau

SEQ ID NO: 137303 - RNA, 22 nt, Human herpesvirus 4 (Epstein-Barr virus)
caucuacccaacagucuucagg

SEQ ID NO: 137304 - RNA, 23 nt, Human herpesvirus 4 (Epstein-Barr virus)
caucuacccaacagucuucaggu

SEQ ID NO: 137305 - RNA, 13 nt, Human herpesvirus 4 (Epstein-Barr virus)
caucuaaugaugu

SEQ ID NO: 137306 - RNA, 15 nt, Human herpesvirus 4 (Epstein-Barr virus)
cauguuucccuccaa

SEQ ID NO: 137307 - RNA, 20 nt, Human herpesvirus 4 (Epstein-Barr virus)
cauguuuggggaguuagcau

SEQ ID NO: 137308 - RNA, 14 nt, Human herpesvirus 4 (Epstein-Barr virus)
cauguccuguggug

SEQ ID NO: 137309 - RNA, 13 nt, Human herpesvirus 4 (Epstein-Barr virus)
cauguccacugag

SEQ ID NO: 137310 - RNA, 18 nt, Human herpesvirus 4 (Epstein-Barr virus)
caugucgagcaugagcuc

SEQ ID NO: 137311 - RNA, 20 nt, Human herpesvirus 4 (Epstein-Barr virus)
caugccuaauggccguccuc

SEQ ID NO: 137312 - RNA, 20 nt, Human herpesvirus 4 (Epstein-Barr virus)
caucuggcuggggcauuaac

SEQ ID NO: 137313 - RNA, 13 nt, Human herpesvirus 4 (Epstein-Barr virus)
caugcuuacucaa

SEQ ID NO: 137314 - RNA, 17 nt, Human herpesvirus 4 (Epstein-Barr virus)
caugcugaauauugcca

SEQ ID NO: 137315 - RNA, 19 nt, Human herpesvirus 4 (Epstein-Barr virus)
caugcugaauauugccagc

SEQ ID NO: 137316 - RNA, 17 nt, Human herpesvirus 4 (Epstein-Barr virus)
caugcuguaccugauga

SEQ ID NO: 137317 - RNA, 23 nt, Human herpesvirus 4 (Epstein-Barr virus)
ccauguguguccagugccuaauc

SEQ ID NO: 137318 - RNA, 18 nt, Human herpesvirus 4 (Epstein-Barr virus)
ccaucccggagucauuag

SEQ ID NO: 137319 - RNA, 17 nt, Human herpesvirus 4 (Epstein-Barr virus)
ccaucagggccaggcug

SEQ ID NO: 137320 - RNA, 21 nt, Human herpesvirus 4 (Epstein-Barr virus)
ccauaccugcacggcccucca

SEQ ID NO: 137321 - RNA, 19 nt, Human herpesvirus 4 (Epstein-Barr virus)
ccagggugaccuggcucag

SEQ ID NO: 137322 - RNA, 15 nt, Human herpesvirus 4 (Epstein-Barr virus)
ccauagcaugucaca

SEQ ID NO: 137323 - RNA, 21 nt, Human herpesvirus 4 (Epstein-Barr virus)
ccauagcaugucacacauucc

SEQ ID NO: 137324 - RNA, 16 nt, Human herpesvirus 4 (Epstein-Barr virus)
ccauagaccaguuuuu

SEQ ID NO: 137325 - RNA, 18 nt, Human herpesvirus 4 (Epstein-Barr virus)
ccagcuccgugguccuga

SEQ ID NO: 137326 - RNA, 16 nt, Human herpesvirus 4 (Epstein-Barr virus)
ccagaggccacaaaag

SEQ ID NO: 137327 - RNA, 21 nt, Human herpesvirus 4 (Epstein-Barr virus)
ccagaggacuaauguucucua

SEQ ID NO: 137328 - RNA, 19 nt, Human herpesvirus 4 (Epstein-Barr virus)
ccagaggaggccccggccg

SEQ ID NO: 137329 - RNA, 15 nt, Human herpesvirus 4 (Epstein-Barr virus)
ccaggcccacugcaa

SEQ ID NO: 137330 - RNA, 20 nt, Human herpesvirus 4 (Epstein-Barr virus)
ccaggcccgaccugccaaag

SEQ ID NO: 137331 - RNA, 22 nt, Human herpesvirus 4 (Epstein-Barr virus)
ccagcuucugaggcggcugugg

SEQ ID NO: 137332 - RNA, 22 nt, Human herpesvirus 4 (Epstein-Barr virus)
ccagcuuugagcuaaugccaua

SEQ ID NO: 137333 - RNA, 13 nt, Human herpesvirus 4 (Epstein-Barr virus)
ccaggucuugcca

SEQ ID NO: 137334 - RNA, 21 nt, Human herpesvirus 4 (Epstein-Barr virus)
ccaggucgaccaccucaacau

SEQ ID NO: 137335 - RNA, 13 nt, Human herpesvirus 4 (Epstein-Barr virus)
ccaggggggaccu

SEQ ID NO: 137336 - RNA, 22 nt, Human herpesvirus 4 (Epstein-Barr virus)
ccaggcgccgcagggguggugg

SEQ ID NO: 137337 - RNA, 23 nt, Human herpesvirus 4 (Epstein-Barr virus)
ccaggcgccgcagggguggugga

SEQ ID NO: 137338 - RNA, 22 nt, Human herpesvirus 4 (Epstein-Barr virus)
ccagaaggcuccggcggcagug

SEQ ID NO: 137339 - RNA, 21 nt, Human herpesvirus 4 (Epstein-Barr virus)
ccagaccugugugcuguauuu

SEQ ID NO: 137340 - RNA, 22 nt, Human herpesvirus 4 (Epstein-Barr virus)
ccagacgcgauggcacacgcca

SEQ ID NO: 137341 - RNA, 14 nt, Human herpesvirus 4 (Epstein-Barr virus)
ccagacuaugcaua

SEQ ID NO: 137342 - RNA, 14 nt, Human herpesvirus 4 (Epstein-Barr virus)
ccacacagccugac

SEQ ID NO: 137343 - RNA, 15 nt, Human herpesvirus 4 (Epstein-Barr virus)
ccacacagugggcuu

SEQ ID NO: 137344 - RNA, 18 nt, Human herpesvirus 4 (Epstein-Barr virus)
ccacacacaacacauaga

SEQ ID NO: 137345 - RNA, 21 nt, Human herpesvirus 4 (Epstein-Barr virus)
ccacuuuuaccccagucccaa

SEQ ID NO: 137346 - RNA, 15 nt, Human herpesvirus 4 (Epstein-Barr virus)
ccacaaacaccagug

SEQ ID NO: 137347 - RNA, 18 nt, Human herpesvirus 4 (Epstein-Barr virus)
ccaauucuugcacccacc

SEQ ID NO: 137348 - RNA, 14 nt, Human herpesvirus 4 (Epstein-Barr virus)
cccaggucuugcca

SEQ ID NO: 137349 - RNA, 15 nt, Human herpesvirus 4 (Epstein-Barr virus)
cccagggguggcagu

SEQ ID NO: 137350 - RNA, 14 nt, Human herpesvirus 4 (Epstein-Barr virus)
cccagggucacugg

SEQ ID NO: 137351 - RNA, 16 nt, Human herpesvirus 4 (Epstein-Barr virus)
cccagugaucaucucg

SEQ ID NO: 137352 - RNA, 14 nt, Human herpesvirus 4 (Epstein-Barr virus)
cccagugcacccag

SEQ ID NO: 137353 - RNA, 21 nt, Human herpesvirus 4 (Epstein-Barr virus)
cccauaaaaauaagugcaugg

SEQ ID NO: 137354 - RNA, 22 nt, Human herpesvirus 4 (Epstein-Barr virus)
cccagccacacuggcucucugc

SEQ ID NO: 137355 - RNA, 14 nt, Human herpesvirus 4 (Epstein-Barr virus)
cccagcccuccgca

SEQ ID NO: 137356 - RNA, 14 nt, Human herpesvirus 4 (Epstein-Barr virus)
cccagccuacucuc

SEQ ID NO: 137357 - RNA, 18 nt, Human herpesvirus 4 (Epstein-Barr virus)
cccaaagggacucaaugg

SEQ ID NO: 137358 - RNA, 19 nt, Human herpesvirus 4 (Epstein-Barr virus)
cccacugcaguacuagcau

SEQ ID NO: 137359 - RNA, 22 nt, Human herpesvirus 4 (Epstein-Barr virus)
cccagaggaggacaugugcaug

SEQ ID NO: 137360 - RNA, 23 nt, Human herpesvirus 4 (Epstein-Barr virus)
cccacugugccuaaacgugaugg

SEQ ID NO: 137361 - RNA, 21 nt, Human herpesvirus 4 (Epstein-Barr virus)
cccacuuuuaccccaguccca

SEQ ID NO: 137362 - RNA, 21 nt, Human herpesvirus 4 (Epstein-Barr virus)
ccccaaaacuauaccaaagcu

SEQ ID NO: 137363 - RNA, 13 nt, Human herpesvirus 4 (Epstein-Barr virus)
ccccaaacauguc

SEQ ID NO: 137364 - RNA, 15 nt, Human herpesvirus 4 (Epstein-Barr virus)
cccaugcuuacucaa

SEQ ID NO: 137365 - RNA, 22 nt, Human herpesvirus 4 (Epstein-Barr virus)
ccccaaggaaggcuugccaaaa

SEQ ID NO: 137366 - RNA, 16 nt, Human herpesvirus 4 (Epstein-Barr virus)
ccccacgggaaaaaga

SEQ ID NO: 137367 - RNA, 17 nt, Human herpesvirus 4 (Epstein-Barr virus)
ccccagucccaacccaa

SEQ ID NO: 137368 - RNA, 18 nt, Human herpesvirus 4 (Epstein-Barr virus)
cccgccaccugacccggu

SEQ ID NO: 137369 - RNA, 14 nt, Human herpesvirus 4 (Epstein-Barr virus)
cccggaugaucucg

SEQ ID NO: 137370 - RNA, 15 nt, Human herpesvirus 4 (Epstein-Barr virus)
cccuaggccugccac

SEQ ID NO: 137371 - RNA, 17 nt, Human herpesvirus 4 (Epstein-Barr virus)
ccccgcacuaaagaaua

SEQ ID NO: 137372 - RNA, 15 nt, Human herpesvirus 4 (Epstein-Barr virus)
ccccggucaccccag

SEQ ID NO: 137373 - RNA, 23 nt, Human herpesvirus 4 (Epstein-Barr virus)
ccccuauaaccacaacugcuauu

SEQ ID NO: 137374 - RNA, 18 nt, Human herpesvirus 4 (Epstein-Barr virus)
ccccuuucgacugucauu

SEQ ID NO: 137375 - RNA, 16 nt, Human herpesvirus 4 (Epstein-Barr virus)
cccgacccagccacuu

SEQ ID NO: 137376 - RNA, 15 nt, Human herpesvirus 4 (Epstein-Barr virus)
ccggagccaccacag

SEQ ID NO: 137377 - RNA, 12 nt, Human herpesvirus 4 (Epstein-Barr virus)
ccggaugaucuc

SEQ ID NO: 137378 - RNA, 13 nt, Human herpesvirus 4 (Epstein-Barr virus)
cccugggcucuca

SEQ ID NO: 137379 - RNA, 21 nt, Human herpesvirus 4 (Epstein-Barr virus)
cccugugcuucuaccaagacu

SEQ ID NO: 137380 - RNA, 21 nt, Human herpesvirus 4 (Epstein-Barr virus)
cccuguuagcuauuugaucuu

SEQ ID NO: 137381 - RNA, 17 nt, Human herpesvirus 4 (Epstein-Barr virus)
cccuuccuuuaacucau

SEQ ID NO: 137382 - RNA, 21 nt, Human herpesvirus 4 (Epstein-Barr virus)
ccgcugcgcaaacggacucaa

SEQ ID NO: 137383 - RNA, 21 nt, Human herpesvirus 4 (Epstein-Barr virus)
cccugcacacauuucagguac

SEQ ID NO: 137384 - RNA, 17 nt, Human herpesvirus 4 (Epstein-Barr virus)
cccugccugcaugcuua

SEQ ID NO: 137385 - RNA, 12 nt, Human herpesvirus 4 (Epstein-Barr virus)
cccuggcccacc

SEQ ID NO: 137386 - RNA, 19 nt, Human herpesvirus 4 (Epstein-Barr virus)
cccuggccgugcuggauga

SEQ ID NO: 137387 - RNA, 17 nt, Human herpesvirus 4 (Epstein-Barr virus)
cccugggggccuguguc

SEQ ID NO: 137388 - RNA, 17 nt, Human herpesvirus 4 (Epstein-Barr virus)
cccucgagccauuugag

SEQ ID NO: 137389 - RNA, 20 nt, Human herpesvirus 4 (Epstein-Barr virus)
cccucgguggugggcugcug

SEQ ID NO: 137390 - RNA, 23 nt, Human herpesvirus 4 (Epstein-Barr virus)
cccucgguggugggcugcugagg

SEQ ID NO: 137391 - RNA, 16 nt, Human herpesvirus 4 (Epstein-Barr virus)
cccuccaagcggcaca

SEQ ID NO: 137392 - RNA, 15 nt, Human herpesvirus 4 (Epstein-Barr virus)
cccucacgggccauc

SEQ ID NO: 137393 - RNA, 21 nt, Human herpesvirus 4 (Epstein-Barr virus)
cccucagucacgggacauuaa

SEQ ID NO: 137394 - RNA, 17 nt, Human herpesvirus 4 (Epstein-Barr virus)
ccuaaacgugauggugc

SEQ ID NO: 137395 - RNA, 22 nt, Human herpesvirus 4 (Epstein-Barr virus)
ccggcuacgcgggccacaggug

SEQ ID NO: 137396 - RNA, 21 nt, Human herpesvirus 4 (Epstein-Barr virus)
ccuaaugcauccgcaccacag

SEQ ID NO: 137397 - RNA, 11 nt, Human herpesvirus 4 (Epstein-Barr virus)
ccuaauugugu

SEQ ID NO: 137398 - RNA, 18 nt, Human herpesvirus 4 (Epstein-Barr virus)
ccuacaugaauguuaccc

SEQ ID NO: 137399 - RNA, 22 nt, Human herpesvirus 4 (Epstein-Barr virus)
ccuacaugaauguuacccucau

SEQ ID NO: 137400 - RNA, 16 nt, Human herpesvirus 4 (Epstein-Barr virus)
ccuagaaacugugcca

SEQ ID NO: 137401 - RNA, 23 nt, Human herpesvirus 4 (Epstein-Barr virus)
ccuagaaacugugccauggugcc

SEQ ID NO: 137402 - RNA, 16 nt, Human herpesvirus 4 (Epstein-Barr virus)
ccuagaaagagccaug

SEQ ID NO: 137403 - RNA, 21 nt, Human herpesvirus 4 (Epstein-Barr virus)
ccuaggcacggccucgugcaa

SEQ ID NO: 137404 - RNA, 22 nt, Human herpesvirus 4 (Epstein-Barr virus)
ccuccuaucacagggacaucua

SEQ ID NO: 137405 - RNA, 23 nt, Human herpesvirus 4 (Epstein-Barr virus)
ccuccucuuuuagaaacuaugca

SEQ ID NO: 137406 - RNA, 19 nt, Human herpesvirus 4 (Epstein-Barr virus)
ccugcacagaucugaccac

SEQ ID NO: 137407 - RNA, 15 nt, Human herpesvirus 4 (Epstein-Barr virus)
ccugcgucucauucc

SEQ ID NO: 137408 - RNA, 16 nt, Human herpesvirus 4 (Epstein-Barr virus)
ccugcgucucauuccc

SEQ ID NO: 137409 - RNA, 15 nt, Human herpesvirus 4 (Epstein-Barr virus)
ccugccugcaugcuu

SEQ ID NO: 137410 - RNA, 13 nt, Human herpesvirus 4 (Epstein-Barr virus)
ccugccuggaucu

SEQ ID NO: 137411 - RNA, 13 nt, Human herpesvirus 4 (Epstein-Barr virus)
ccugcugcuagug

SEQ ID NO: 137412 - RNA, 15 nt, Human herpesvirus 4 (Epstein-Barr virus)
ccugcccucccacuu

SEQ ID NO: 137413 - RNA, 18 nt, Human herpesvirus 4 (Epstein-Barr virus)
ccugcccucccacuuuua

SEQ ID NO: 137414 - RNA, 21 nt, Human herpesvirus 4 (Epstein-Barr virus)
ccugccucucuuaugccugug

SEQ ID NO: 137415 - RNA, 18 nt, Human herpesvirus 4 (Epstein-Barr virus)
ccuccagcguggucauaa

SEQ ID NO: 137416 - RNA, 14 nt, Human herpesvirus 4 (Epstein-Barr virus)
ccuccacggggaca

SEQ ID NO: 137417 - RNA, 23 nt, Human herpesvirus 4 (Epstein-Barr virus)
ccuccaccgccgguuaacuuuaa

SEQ ID NO: 137418 - RNA, 17 nt, Human herpesvirus 4 (Epstein-Barr virus)
ccuccgcauccuaggca

SEQ ID NO: 137419 - RNA, 12 nt, Human herpesvirus 4 (Epstein-Barr virus)
ccucccagucua

SEQ ID NO: 137420 - RNA, 11 nt, Human herpesvirus 4 (Epstein-Barr virus)
ccucccggggu

SEQ ID NO: 137421 - RNA, 20 nt, Human herpesvirus 4 (Epstein-Barr virus)
ccucagucacgggacauuaa

SEQ ID NO: 137422 - RNA, 20 nt, Human herpesvirus 4 (Epstein-Barr virus)
ccucauagacacaccuaaau

SEQ ID NO: 137423 - RNA, 20 nt, Human herpesvirus 4 (Epstein-Barr virus)
ccucaucgucgacgcuguuu

SEQ ID NO: 137424 - RNA, 18 nt, Human herpesvirus 4 (Epstein-Barr virus)
ccuguauaaugacuauga

SEQ ID NO: 137425 - RNA, 11 nt, Human herpesvirus 4 (Epstein-Barr virus)
ccugugccucg

SEQ ID NO: 137426 - RNA, 11 nt, Human herpesvirus 4 (Epstein-Barr virus)
aaacaccagug

SEQ ID NO: 137427 - RNA, 13 nt, Human herpesvirus 4 (Epstein-Barr virus)
aaacaaaaccacu

SEQ ID NO: 137428 - RNA, 21 nt, Human herpesvirus 4 (Epstein-Barr virus)
cgccgcuaguugguccagggu

SEQ ID NO: 137429 - RNA, 14 nt, Human herpesvirus 4 (Epstein-Barr virus)
cgcauccaccauca

SEQ ID NO: 137430 - RNA, 13 nt, Human herpesvirus 4 (Epstein-Barr virus)
cgccaucuaccca

SEQ ID NO: 137431 - RNA, 19 nt, Human herpesvirus 4 (Epstein-Barr virus)
cgccaggaccuggaugcug

SEQ ID NO: 137432 - RNA, 16 nt, Human herpesvirus 4 (Epstein-Barr virus)
cgccagccaccccaga

SEQ ID NO: 137433 - RNA, 14 nt, Human herpesvirus 4 (Epstein-Barr virus)
ccuuaaauucaccu

SEQ ID NO: 137434 - RNA, 13 nt, Human herpesvirus 4 (Epstein-Barr virus)
ccuguuugcuuua

SEQ ID NO: 137435 - RNA, 22 nt, Human herpesvirus 4 (Epstein-Barr virus)
ccuguguucuccccacgggaaa

SEQ ID NO: 137436 - RNA, 19 nt, Human herpesvirus 4 (Epstein-Barr virus)
cgcaagggagacguuugag

SEQ ID NO: 137437 - RNA, 18 nt, Human herpesvirus 4 (Epstein-Barr virus)
cgcaauauaaaacccuga

SEQ ID NO: 137438 - RNA, 14 nt, Human herpesvirus 4 (Epstein-Barr virus)
cgcaaguuccucaa

SEQ ID NO: 137439 - RNA, 20 nt, Human herpesvirus 4 (Epstein-Barr virus)
cgcaccacgggaggcggugc

SEQ ID NO: 137440 - RNA, 15 nt, Human herpesvirus 4 (Epstein-Barr virus)
cgcacgugacagauu

SEQ ID NO: 137441 - RNA, 18 nt, Human herpesvirus 4 (Epstein-Barr virus)
cgcacucuuguugcuagc

SEQ ID NO: 137442 - RNA, 14 nt, Human herpesvirus 4 (Epstein-Barr virus)
cgcagggguggugg

SEQ ID NO: 137443 - RNA, 22 nt, Human herpesvirus 4 (Epstein-Barr virus)
cgcaguccgccaugaccagcag

SEQ ID NO: 137444 - RNA, 21 nt, Human herpesvirus 4 (Epstein-Barr virus)
cgcgugggguccggucuugca

SEQ ID NO: 137445 - RNA, 13 nt, Human herpesvirus 4 (Epstein-Barr virus)
cgcgugauuucca

SEQ ID NO: 137446 - RNA, 14 nt, Human herpesvirus 4 (Epstein-Barr virus)
cgcggagaggucca

SEQ ID NO: 137447 - RNA, 13 nt, Human herpesvirus 4 (Epstein-Barr virus)
cgcuucauucacg

SEQ ID NO: 137448 - RNA, 15 nt, Human herpesvirus 4 (Epstein-Barr virus)
cgcugcguggcacca

SEQ ID NO: 137449 - RNA, 21 nt, Human herpesvirus 4 (Epstein-Barr virus)
cgccucuugucggacgaggag

SEQ ID NO: 137450 - RNA, 21 nt, Human herpesvirus 4 (Epstein-Barr virus)
cggaagagcccaaaaccuguu

SEQ ID NO: 137451 - RNA, 20 nt, Human herpesvirus 4 (Epstein-Barr virus)
cgcuuggagucgaagcucuu

SEQ ID NO: 137452 - RNA, 12 nt, Human herpesvirus 4 (Epstein-Barr virus)
cggacaauacac

SEQ ID NO: 137453 - RNA, 15 nt, Human herpesvirus 4 (Epstein-Barr virus)
cggaccaaugccaaa

SEQ ID NO: 137454 - RNA, 14 nt, Human herpesvirus 4 (Epstein-Barr virus)
cggucaccccagau

SEQ ID NO: 137455 - RNA, 17 nt, Human herpesvirus 4 (Epstein-Barr virus)
cggagccaccacagcac

SEQ ID NO: 137456 - RNA, 22 nt, Human herpesvirus 4 (Epstein-Barr virus)
cggucucagacaccaacacaga

SEQ ID NO: 137457 - RNA, 15 nt, Human herpesvirus 4 (Epstein-Barr virus)
cggugauaacugaca

SEQ ID NO: 137458 - RNA, 15 nt, Human herpesvirus 4 (Epstein-Barr virus)
cgguccagaagcaga

SEQ ID NO: 137459 - RNA, 20 nt, Human herpesvirus 4 (Epstein-Barr virus)
cggugaccugacuggcagaa

SEQ ID NO: 137460 - RNA, 16 nt, Human herpesvirus 4 (Epstein-Barr virus)
cggugccugagacaga

SEQ ID NO: 137461 - RNA, 16 nt, Human herpesvirus 4 (Epstein-Barr virus)
cguagccuauuugcac

SEQ ID NO: 137462 - RNA, 21 nt, Human herpesvirus 4 (Epstein-Barr virus)
cgucacuccagccaucaugcu

SEQ ID NO: 137463 - RNA, 20 nt, Human herpesvirus 4 (Epstein-Barr virus)
cgucuaccucuguuccuucu

SEQ ID NO: 137464 - RNA, 14 nt, Human herpesvirus 4 (Epstein-Barr virus)
cgucauuucuucca

SEQ ID NO: 137465 - RNA, 10 nt, Human herpesvirus 4 (Epstein-Barr virus)
cguccaucuc

SEQ ID NO: 137466 - RNA, 21 nt, Human herpesvirus 4 (Epstein-Barr virus)
cguccucccaacauggggcaa

SEQ ID NO: 137467 - RNA, 20 nt, Human herpesvirus 4 (Epstein-Barr virus)
cguccuguccaagugcuaug

SEQ ID NO: 137468 - RNA, 22 nt, Human herpesvirus 4 (Epstein-Barr virus)
cguccuuguccaggagacacac

SEQ ID NO: 137469 - RNA, 18 nt, Human herpesvirus 4 (Epstein-Barr virus)
cuacaaguuaauuuacaa

SEQ ID NO: 137470 - RNA, 16 nt, Human herpesvirus 4 (Epstein-Barr virus)
cuacaauaaacccaau

SEQ ID NO: 137471 - RNA, 14 nt, Human herpesvirus 4 (Epstein-Barr virus)
cuacaauguuccuu

SEQ ID NO: 137472 - RNA, 16 nt, Human herpesvirus 4 (Epstein-Barr virus)
cuaacuuggcaucucu

SEQ ID NO: 137473 - RNA, 19 nt, Human herpesvirus 4 (Epstein-Barr virus)
cuaagccaggauaaucagg

SEQ ID NO: 137474 - RNA, 21 nt, Human herpesvirus 4 (Epstein-Barr virus)
cuacaggacaagacagucaca

SEQ ID NO: 137475 - RNA, 23 nt, Human herpesvirus 4 (Epstein-Barr virus)
cuacaccaccccaccauaugaug

SEQ ID NO: 137476 - RNA, 22 nt, Human herpesvirus 4 (Epstein-Barr virus)
cuacaccgagcagaaggccaug

SEQ ID NO: 137477 - RNA, 16 nt, Human herpesvirus 4 (Epstein-Barr virus)
cuacaccgaucaccag

SEQ ID NO: 137478 - RNA, 16 nt, Human herpesvirus 4 (Epstein-Barr virus)
cuacaucccauaccua

SEQ ID NO: 137479 - RNA, 17 nt, Human herpesvirus 4 (Epstein-Barr virus)
cuacccaacagucuuca

SEQ ID NO: 137480 - RNA, 21 nt, Human herpesvirus 4 (Epstein-Barr virus)
cuaccgaugauucuggccaug

SEQ ID NO: 137481 - RNA, 20 nt, Human herpesvirus 4 (Epstein-Barr virus)
cuacaugaauguuacccuca

SEQ ID NO: 137482 - RNA, 22 nt, Human herpesvirus 4 (Epstein-Barr virus)
cuaacgggaggaaaugaaccca

SEQ ID NO: 137483 - RNA, 19 nt, Human herpesvirus 4 (Epstein-Barr virus)
cuaacggucgaaacccacc

SEQ ID NO: 137484 - RNA, 21 nt, Human herpesvirus 4 (Epstein-Barr virus)
cuaaacgugauggugcugguc

SEQ ID NO: 137485 - RNA, 21 nt, Human herpesvirus 4 (Epstein-Barr virus)
cguuugugauucccagaaaga

SEQ ID NO: 137486 - RNA, 12 nt, Human herpesvirus 4 (Epstein-Barr virus)
cgugguggcauu

SEQ ID NO: 137487 - RNA, 18 nt, Human herpesvirus 4 (Epstein-Barr virus)
cguggcugcgguggugcg

SEQ ID NO: 137488 - RNA, 21 nt, Human herpesvirus 4 (Epstein-Barr virus)
cguggcauccuucagauucag

SEQ ID NO: 137489 - RNA, 17 nt, Human herpesvirus 4 (Epstein-Barr virus)
cgugcuggaugagguua

SEQ ID NO: 137490 - RNA, 18 nt, Human herpesvirus 4 (Epstein-Barr virus)
cucuaacuuggcaucucu

SEQ ID NO: 137491 - RNA, 19 nt, Human herpesvirus 4 (Epstein-Barr virus)
cucuacugccuuguccacu

SEQ ID NO: 137492 - RNA, 18 nt, Human herpesvirus 4 (Epstein-Barr virus)
cucuauugguugaucucc

SEQ ID NO: 137493 - RNA, 18 nt, Human herpesvirus 4 (Epstein-Barr virus)
cucguuaaaccaauagca

SEQ ID NO: 137494 - RNA, 21 nt, Human herpesvirus 4 (Epstein-Barr virus)
cucugcaucagcaucgcuuaa

SEQ ID NO: 137495 - RNA, 14 nt, Human herpesvirus 4 (Epstein-Barr virus)
cucucguugccaaa

SEQ ID NO: 137496 - RNA, 15 nt, Human herpesvirus 4 (Epstein-Barr virus)
cucucguugccaaaa

SEQ ID NO: 137497 - RNA, 17 nt, Human herpesvirus 4 (Epstein-Barr virus)
cucucuggagaucuucu

SEQ ID NO: 137498 - RNA, 19 nt, Human herpesvirus 4 (Epstein-Barr virus)
cucucuggagaucuucuca

SEQ ID NO: 137499 - RNA, 19 nt, Human herpesvirus 4 (Epstein-Barr virus)
cucugaaggauccaugcaa

SEQ ID NO: 137500 - RNA, 22 nt, Human herpesvirus 4 (Epstein-Barr virus)
cucugaagcaacagguccucag

SEQ ID NO: 137501 - RNA, 21 nt, Human herpesvirus 4 (Epstein-Barr virus)
cucucaucuggaacgguggga

SEQ ID NO: 137502 - RNA, 14 nt, Human herpesvirus 4 (Epstein-Barr virus)
cucucagcacuuug

SEQ ID NO: 137503 - RNA, 21 nt, Human herpesvirus 4 (Epstein-Barr virus)
cucucagcacuuugccagcaa

SEQ ID NO: 137504 - RNA, 23 nt, Human herpesvirus 4 (Epstein-Barr virus)
cucucgaugauugagaaugccaa

SEQ ID NO: 137505 - RNA, 14 nt, Human herpesvirus 4 (Epstein-Barr virus)
cucggccacacagu

SEQ ID NO: 137506 - RNA, 15 nt, Human herpesvirus 4 (Epstein-Barr virus)
cucgcucagcccacu

SEQ ID NO: 137507 - RNA, 23 nt, Human herpesvirus 4 (Epstein-Barr virus)
cucgccaucuacccaacagucuu

SEQ ID NO: 137508 - RNA, 15 nt, Human herpesvirus 4 (Epstein-Barr virus)
cucgaagcggucuca

SEQ ID NO: 137509 - RNA, 23 nt, Human herpesvirus 4 (Epstein-Barr virus)
cucccacggaccccccucugaug

SEQ ID NO: 137510 - RNA, 17 nt, Human herpesvirus 4 (Epstein-Barr virus)
cucccacuuuuacccca

SEQ ID NO: 137511 - RNA, 21 nt, Human herpesvirus 4 (Epstein-Barr virus)
cucccacuuuuaccccagucc

SEQ ID NO: 137512 - RNA, 15 nt, Human herpesvirus 4 (Epstein-Barr virus)
cuauuccaccaacac

SEQ ID NO: 137513 - RNA, 20 nt, Human herpesvirus 4 (Epstein-Barr virus)
cuauucugagcaccaacaca

SEQ ID NO: 137514 - RNA, 11 nt, Human herpesvirus 4 (Epstein-Barr virus)
cuauggcgcgu

SEQ ID NO: 137515 - RNA, 19 nt, Human herpesvirus 4 (Epstein-Barr virus)
cuauggggccugugacugg

SEQ ID NO: 137516 - RNA, 14 nt, Human herpesvirus 4 (Epstein-Barr virus)
cuacgcgggccaca

SEQ ID NO: 137517 - RNA, 16 nt, Human herpesvirus 4 (Epstein-Barr virus)
cuacgcagaggccauc

SEQ ID NO: 137518 - RNA, 21 nt, Human herpesvirus 4 (Epstein-Barr virus)
cuacgcagaggccaucauggc

SEQ ID NO: 137519 - RNA, 16 nt, Human herpesvirus 4 (Epstein-Barr virus)
cuacgaccuugaccac

SEQ ID NO: 137520 - RNA, 13 nt, Human herpesvirus 4 (Epstein-Barr virus)
cuaccggcgagca

SEQ ID NO: 137521 - RNA, 15 nt, Human herpesvirus 4 (Epstein-Barr virus)
cuaccggcgagcaug

SEQ ID NO: 137522 - RNA, 15 nt, Human herpesvirus 4 (Epstein-Barr virus)
cuccaucagggccag

SEQ ID NO: 137523 - RNA, 14 nt, Human herpesvirus 4 (Epstein-Barr virus)
cuccagcaaccaau

SEQ ID NO: 137524 - RNA, 15 nt, Human herpesvirus 4 (Epstein-Barr virus)
cuccacucccagucc

SEQ ID NO: 137525 - RNA, 14 nt, Human herpesvirus 4 (Epstein-Barr virus)
cucauaauggugcc

SEQ ID NO: 137526 - RNA, 17 nt, Human herpesvirus 4 (Epstein-Barr virus)
cucauaauggugccuga

SEQ ID NO: 137527 - RNA, 16 nt, Human herpesvirus 4 (Epstein-Barr virus)
cucauacaguuuguua

SEQ ID NO: 137528 - RNA, 23 nt, Human herpesvirus 4 (Epstein-Barr virus)
cucauacaguuuguuaguauugu

SEQ ID NO: 137529 - RNA, 16 nt, Human herpesvirus 4 (Epstein-Barr virus)
cucagucccaccacaa

SEQ ID NO: 137530 - RNA, 15 nt, Human herpesvirus 4 (Epstein-Barr virus)
cucagucuuugcaau

SEQ ID NO: 137531 - RNA, 13 nt, Human herpesvirus 4 (Epstein-Barr virus)
cucaguggccguc

SEQ ID NO: 137532 - RNA, 17 nt, Human herpesvirus 4 (Epstein-Barr virus)
cucagcuccgcgcucaa

SEQ ID NO: 137533 - RNA, 19 nt, Human herpesvirus 4 (Epstein-Barr virus)
cucagcacuuugccagcaa

SEQ ID NO: 137534 - RNA, 18 nt, Human herpesvirus 4 (Epstein-Barr virus)
cucagccccaucuuccag

SEQ ID NO: 137535 - RNA, 16 nt, Human herpesvirus 4 (Epstein-Barr virus)
cucagccccuuggcac

SEQ ID NO: 137536 - RNA, 21 nt, Human herpesvirus 4 (Epstein-Barr virus)
cucagccccuuggcacaagag

SEQ ID NO: 137537 - RNA, 22 nt, Human herpesvirus 4 (Epstein-Barr virus)
cucaggaucagggccaagacau

SEQ ID NO: 137538 - RNA, 18 nt, Human herpesvirus 4 (Epstein-Barr virus)
cucaggccucccagucua

SEQ ID NO: 137539 - RNA, 16 nt, Human herpesvirus 4 (Epstein-Barr virus)
cucaggcuaugaagaa

SEQ ID NO: 137540 - RNA, 15 nt, Human herpesvirus 4 (Epstein-Barr virus)
cucaaggcagucucc

SEQ ID NO: 137541 - RNA, 22 nt, Human herpesvirus 4 (Epstein-Barr virus)
cucaauggcauucagauuucua

SEQ ID NO: 137542 - RNA, 22 nt, Human herpesvirus 4 (Epstein-Barr virus)
cucaccacucgaaacuauggca

SEQ ID NO: 137543 - RNA, 16 nt, Human herpesvirus 4 (Epstein-Barr virus)
cucacaggacauguuu

SEQ ID NO: 137544 - RNA, 18 nt, Human herpesvirus 4 (Epstein-Barr virus)
cuguuccuauaugcucuc

SEQ ID NO: 137545 - RNA, 19 nt, Human herpesvirus 4 (Epstein-Barr virus)
cuguguuucccgacgccaa

SEQ ID NO: 137546 - RNA, 20 nt, Human herpesvirus 4 (Epstein-Barr virus)
cuguguaaccucacuguaau

SEQ ID NO: 137547 - RNA, 15 nt, Human herpesvirus 4 (Epstein-Barr virus)
cugugugcccggggg

SEQ ID NO: 137548 - RNA, 23 nt, Human herpesvirus 4 (Epstein-Barr virus)
cugugugcccggggguggaggcu

SEQ ID NO: 137549 - RNA, 12 nt, Human herpesvirus 4 (Epstein-Barr virus)
cuguggugggcu

SEQ ID NO: 137550 - RNA, 15 nt, Human herpesvirus 4 (Epstein-Barr virus)
cuguggccccggcug

SEQ ID NO: 137551 - RNA, 16 nt, Human herpesvirus 4 (Epstein-Barr virus)
cuguuugcucuauucg

SEQ ID NO: 137552 - RNA, 21 nt, Human herpesvirus 4 (Epstein-Barr virus)
cugucuuuccucuuauuacau

SEQ ID NO: 137553 - RNA, 17 nt, Human herpesvirus 4 (Epstein-Barr virus)
cugucucuuucuggcca

SEQ ID NO: 137554 - RNA, 16 nt, Human herpesvirus 4 (Epstein-Barr virus)
cuguaaucacuggcaa

SEQ ID NO: 137555 - RNA, 18 nt, Human herpesvirus 4 (Epstein-Barr virus)
cuguagcgccgcgguuuc

SEQ ID NO: 137556 - RNA, 21 nt, Human herpesvirus 4 (Epstein-Barr virus)
cuggugagaaguugguggugg

SEQ ID NO: 137557 - RNA, 23 nt, Human herpesvirus 4 (Epstein-Barr virus)
cuggcagcuuuuggccuucuucc

SEQ ID NO: 137558 - RNA, 22 nt, Human herpesvirus 4 (Epstein-Barr virus)
cuggcagggggccgggcgcgcu

SEQ ID NO: 137559 - RNA, 21 nt, Human herpesvirus 4 (Epstein-Barr virus)
cuggcaguccuugugucucua

SEQ ID NO: 137560 - RNA, 18 nt, Human herpesvirus 4 (Epstein-Barr virus)
cuggugguggguguccuc

SEQ ID NO: 137561 - RNA, 21 nt, Human herpesvirus 4 (Epstein-Barr virus)
cuggugcgguuauaacugcca

SEQ ID NO: 137562 - RNA, 13 nt, Human herpesvirus 4 (Epstein-Barr virus)
cucuuacaccaga

SEQ ID NO: 137563 - RNA, 16 nt, Human herpesvirus 4 (Epstein-Barr virus)
cucuuaaccauugaca

SEQ ID NO: 137564 - RNA, 18 nt, Human herpesvirus 4 (Epstein-Barr virus)
cucuucaaccuuggcagu

SEQ ID NO: 137565 - RNA, 14 nt, Human herpesvirus 4 (Epstein-Barr virus)
cugauuuugggcac

SEQ ID NO: 137566 - RNA, 13 nt, Human herpesvirus 4 (Epstein-Barr virus)
cucugggugcuga

SEQ ID NO: 137567 - RNA, 21 nt, Human herpesvirus 4 (Epstein-Barr virus)
cucugcuuuucuccucagucu

SEQ ID NO: 137568 - RNA, 15 nt, Human herpesvirus 4 (Epstein-Barr virus)
cucuggagaucuucu

SEQ ID NO: 137569 - RNA, 15 nt, Human herpesvirus 4 (Epstein-Barr virus)
cucuggcacugcuag

SEQ ID NO: 137570 - RNA, 18 nt, Human herpesvirus 4 (Epstein-Barr virus)
cucuguguuuuuugccug

SEQ ID NO: 137571 - RNA, 19 nt, Human herpesvirus 4 (Epstein-Barr virus)
cugcacggcccuccagcgu

SEQ ID NO: 137572 - RNA, 22 nt, Human herpesvirus 4 (Epstein-Barr virus)
cugccuaacggucgaaacccac

SEQ ID NO: 137573 - RNA, 17 nt, Human herpesvirus 4 (Epstein-Barr virus)
cugcacagaacaucacu

SEQ ID NO: 137574 - RNA, 13 nt, Human herpesvirus 4 (Epstein-Barr virus)
cugcaagccaaga

SEQ ID NO: 137575 - RNA, 14 nt, Human herpesvirus 4 (Epstein-Barr virus)
cuggagcuggugca

SEQ ID NO: 137576 - RNA, 14 nt, Human herpesvirus 4 (Epstein-Barr virus)
cugcugaggguugg

SEQ ID NO: 137577 - RNA, 12 nt, Human herpesvirus 4 (Epstein-Barr virus)
cugcugcugcuu

SEQ ID NO: 137578 - RNA, 18 nt, Human herpesvirus 4 (Epstein-Barr virus)
cugcucuucaaccuuggc

SEQ ID NO: 137579 - RNA, 19 nt, Human herpesvirus 4 (Epstein-Barr virus)
cugcucuucaaccuuggca

SEQ ID NO: 137580 - RNA, 16 nt, Human herpesvirus 4 (Epstein-Barr virus)
cugcuccagugccucc

SEQ ID NO: 137581 - RNA, 21 nt, Human herpesvirus 4 (Epstein-Barr virus)
cugcucccgccucagggaucg

SEQ ID NO: 137582 - RNA, 23 nt, Human herpesvirus 4 (Epstein-Barr virus)
cugcgagggggccuggugccaga

SEQ ID NO: 137583 - RNA, 17 nt, Human herpesvirus 4 (Epstein-Barr virus)
cugccucugcucuggua

SEQ ID NO: 137584 - RNA, 13 nt, Human herpesvirus 4 (Epstein-Barr virus)
cugccuuguccac

SEQ ID NO: 137585 - RNA, 21 nt, Human herpesvirus 4 (Epstein-Barr virus)
cugcgccugagcugccuggug

SEQ ID NO: 137586 - RNA, 22 nt, Human herpesvirus 4 (Epstein-Barr virus)
cugcggagauggaugacaccau

SEQ ID NO: 137587 - RNA, 13 nt, Human herpesvirus 4 (Epstein-Barr virus)
cugcgguggugcg

SEQ ID NO: 137588 - RNA, 23 nt, Human herpesvirus 4 (Epstein-Barr virus)
cugcuauucugagcaccaacaca

SEQ ID NO: 137589 - RNA, 15 nt, Human herpesvirus 4 (Epstein-Barr virus)
ucuuaaccauugaca

SEQ ID NO: 137590 - RNA, 16 nt, Human herpesvirus 4 (Epstein-Barr virus)
ucuuaacccaauuccc

SEQ ID NO: 137591 - RNA, 21 nt, Human herpesvirus 4 (Epstein-Barr virus)
ucugguugauaaucucaaaga

SEQ ID NO: 137592 - RNA, 18 nt, Human herpesvirus 4 (Epstein-Barr virus)
ucuggcacgacuguuccu

SEQ ID NO: 137593 - RNA, 21 nt, Human herpesvirus 4 (Epstein-Barr virus)
ucuggaccgugccauccucuc

SEQ ID NO: 137594 - RNA, 17 nt, Human herpesvirus 4 (Epstein-Barr virus)
ucuggacuuccaugucu

SEQ ID NO: 137595 - RNA, 23 nt, Human herpesvirus 4 (Epstein-Barr virus)
ucuggaggaaauauugcagucaa

SEQ ID NO: 137596 - RNA, 15 nt, Human herpesvirus 4 (Epstein-Barr virus)
ucuuugcaauuugcc

SEQ ID NO: 137597 - RNA, 16 nt, Human herpesvirus 4 (Epstein-Barr virus)
ucuuugcaauuugccu

SEQ ID NO: 137598 - RNA, 17 nt, Human herpesvirus 4 (Epstein-Barr virus)
ucuuugcaauuugccua

SEQ ID NO: 137599 - RNA, 15 nt, Human herpesvirus 4 (Epstein-Barr virus)
ucuuugccaaccugc

SEQ ID NO: 137600 - RNA, 16 nt, Human herpesvirus 4 (Epstein-Barr virus)
ucuuugccaaccugcu

SEQ ID NO: 137601 - RNA, 17 nt, Human herpesvirus 4 (Epstein-Barr virus)
ucuuacugcccagccua

SEQ ID NO: 137602 - RNA, 19 nt, Human herpesvirus 4 (Epstein-Barr virus)
ucuuagggagguggccaca

SEQ ID NO: 137603 - RNA, 19 nt, Human herpesvirus 4 (Epstein-Barr virus)
ucuuagguaucuggaucua

SEQ ID NO: 137604 - RNA, 18 nt, Human herpesvirus 4 (Epstein-Barr virus)
ucuuaccccuggcuucca

SEQ ID NO: 137605 - RNA, 19 nt, Human herpesvirus 4 (Epstein-Barr virus)
ucuuacaccagaggccaca

SEQ ID NO: 137606 - RNA, 20 nt, Human herpesvirus 4 (Epstein-Barr virus)
ucuuacaccagaggccacaa

SEQ ID NO: 137607 - RNA, 21 nt, Human herpesvirus 4 (Epstein-Barr virus)
ucuccucagucuuugcaauuu

SEQ ID NO: 137608 - RNA, 14 nt, Human herpesvirus 4 (Epstein-Barr virus)
ucucccccagauca

SEQ ID NO: 137609 - RNA, 20 nt, Human herpesvirus 4 (Epstein-Barr virus)
ucucaugcuccuauggacac

SEQ ID NO: 137610 - RNA, 11 nt, Human herpesvirus 4 (Epstein-Barr virus)
ucuccauuccc

SEQ ID NO: 137611 - RNA, 19 nt, Human herpesvirus 4 (Epstein-Barr virus)
ucuccagcggcuaccuguc

SEQ ID NO: 137612 - RNA, 13 nt, Human herpesvirus 4 (Epstein-Barr virus)
ucucguugccaaa

SEQ ID NO: 137613 - RNA, 15 nt, Human herpesvirus 4 (Epstein-Barr virus)
ucucuaaagauuuga

SEQ ID NO: 137614 - RNA, 16 nt, Human herpesvirus 4 (Epstein-Barr virus)
ucucuaaagauuugau

SEQ ID NO: 137615 - RNA, 22 nt, Human herpesvirus 4 (Epstein-Barr virus)
ucucgucuguauaccgaugaga

SEQ ID NO: 137616 - RNA, 22 nt, Human herpesvirus 4 (Epstein-Barr virus)
ucugcuucuggaccgugccauc

SEQ ID NO: 137617 - RNA, 21 nt, Human herpesvirus 4 (Epstein-Barr virus)
ucucuguuucuguacaauggg

SEQ ID NO: 137618 - RNA, 15 nt, Human herpesvirus 4 (Epstein-Barr virus)
ucuauacggccacaa

SEQ ID NO: 137619 - RNA, 16 nt, Human herpesvirus 4 (Epstein-Barr virus)
ucuaguuaccacaggu

SEQ ID NO: 137620 - RNA, 20 nt, Human herpesvirus 4 (Epstein-Barr virus)
ucuaaugauguccaguuccc

SEQ ID NO: 137621 - RNA, 11 nt, Human herpesvirus 4 (Epstein-Barr virus)
ucguuguucag

SEQ ID NO: 137622 - RNA, 14 nt, Human herpesvirus 4 (Epstein-Barr virus)
ucggccacacagug

SEQ ID NO: 137623 - RNA, 19 nt, Human herpesvirus 4 (Epstein-Barr virus)
ucggccacacagugggcuu

SEQ ID NO: 137624 - RNA, 22 nt, Human herpesvirus 4 (Epstein-Barr virus)
ucggcaucggguccuagcacaa

SEQ ID NO: 137625 - RNA, 23 nt, Human herpesvirus 4 (Epstein-Barr virus)
ucggcuagccugacuaaggguga

SEQ ID NO: 137626 - RNA, 13 nt, Human herpesvirus 4 (Epstein-Barr virus)
ucgcagcucuaac

SEQ ID NO: 137627 - RNA, 19 nt, Human herpesvirus 4 (Epstein-Barr virus)
ucgccagccuguuugucca

SEQ ID NO: 137628 - RNA, 16 nt, Human herpesvirus 4 (Epstein-Barr virus)
ucgccccuaucuuaac

SEQ ID NO: 137629 - RNA, 17 nt, Human herpesvirus 4 (Epstein-Barr virus)
uccuucucaugcuccua

SEQ ID NO: 137630 - RNA, 14 nt, Human herpesvirus 4 (Epstein-Barr virus)
ucgaaacuauggca

SEQ ID NO: 137631 - RNA, 14 nt, Human herpesvirus 4 (Epstein-Barr virus)
ucgacaggccauua

SEQ ID NO: 137632 - RNA, 17 nt, Human herpesvirus 4 (Epstein-Barr virus)
ucgacacacgagccaua

SEQ ID NO: 137633 - RNA, 21 nt, Human herpesvirus 4 (Epstein-Barr virus)
ucgaugauugagaaugccaag

SEQ ID NO: 137634 - RNA, 22 nt, Human herpesvirus 4 (Epstein-Barr virus)
ucgagauuguuuacaucugccc

SEQ ID NO: 137635 - RNA, 15 nt, Human herpesvirus 4 (Epstein-Barr virus)
ucgacuucugaagau

SEQ ID NO: 137636 - RNA, 14 nt, Human herpesvirus 4 (Epstein-Barr virus)
ucgagcaugagcuc

SEQ ID NO: 137637 - RNA, 22 nt, Human herpesvirus 4 (Epstein-Barr virus)
ucgagcaugagcuccucuccaa

SEQ ID NO: 137638 - RNA, 12 nt, Human herpesvirus 4 (Epstein-Barr virus)
uccgaaagcacu

SEQ ID NO: 137639 - RNA, 12 nt, Human herpesvirus 4 (Epstein-Barr virus)
uccucccggggu

SEQ ID NO: 137640 - RNA, 20 nt, Human herpesvirus 4 (Epstein-Barr virus)
uccucgcaaaagauggacuu

SEQ ID NO: 137641 - RNA, 18 nt, Human herpesvirus 4 (Epstein-Barr virus)
uccugugcuucagcagua

SEQ ID NO: 137642 - RNA, 14 nt, Human herpesvirus 4 (Epstein-Barr virus)
uccuguccaugacc

SEQ ID NO: 137643 - RNA, 15 nt, Human herpesvirus 4 (Epstein-Barr virus)
uccuguccaugacca

SEQ ID NO: 137644 - RNA, 13 nt, Human herpesvirus 4 (Epstein-Barr virus)
uccuguguucucc

SEQ ID NO: 137645 - RNA, 17 nt, Human herpesvirus 4 (Epstein-Barr virus)
uccuuaaauucaccuaa

SEQ ID NO: 137646 - RNA, 18 nt, Human herpesvirus 4 (Epstein-Barr virus)
uccugacgccaaugccaa

SEQ ID NO: 137647 - RNA, 17 nt, Human herpesvirus 4 (Epstein-Barr virus)
uccaggcuccuggaucu

SEQ ID NO: 137648 - RNA, 17 nt, Human herpesvirus 4 (Epstein-Barr virus)
uccaggguccaggagaa

SEQ ID NO: 137649 - RNA, 23 nt, Human herpesvirus 4 (Epstein-Barr virus)
uccaggugacagcagcagugugu

SEQ ID NO: 137650 - RNA, 16 nt, Human herpesvirus 4 (Epstein-Barr virus)
uccaggugugcuucuu

SEQ ID NO: 137651 - RNA, 21 nt, Human herpesvirus 4 (Epstein-Barr virus)
uccagguguggaaaaucucgc

SEQ ID NO: 137652 - RNA, 13 nt, Human herpesvirus 4 (Epstein-Barr virus)
uccaguggcaugg

SEQ ID NO: 137653 - RNA, 22 nt, Human herpesvirus 4 (Epstein-Barr virus)
uccagugggguaaaugcaccuu

SEQ ID NO: 137654 - RNA, 20 nt, Human herpesvirus 4 (Epstein-Barr virus)
ucccaaguguuuccagacac

SEQ ID NO: 137655 - RNA, 17 nt, Human herpesvirus 4 (Epstein-Barr virus)
ucccaauucacaucuca

SEQ ID NO: 137656 - RNA, 18 nt, Human herpesvirus 4 (Epstein-Barr virus)
ucccaauucacaucucag

SEQ ID NO: 137657 - RNA, 15 nt, Human herpesvirus 4 (Epstein-Barr virus)
ucccaacaacuucca

SEQ ID NO: 137658 - RNA, 17 nt, Human herpesvirus 4 (Epstein-Barr virus)
uccauccaguggggcuu

SEQ ID NO: 137659 - RNA, 12 nt, Human herpesvirus 4 (Epstein-Barr virus)
ucccccaugaga

SEQ ID NO: 137660 - RNA, 13 nt, Human herpesvirus 4 (Epstein-Barr virus)
ucccaggccuuag

SEQ ID NO: 137661 - RNA, 14 nt, Human herpesvirus 4 (Epstein-Barr virus)
ucccagccccaauu

SEQ ID NO: 137662 - RNA, 21 nt, Human herpesvirus 4 (Epstein-Barr virus)
ucccacggaccccccucugau

SEQ ID NO: 137663 - RNA, 11 nt, Human herpesvirus 4 (Epstein-Barr virus)
ucccacugugc

SEQ ID NO: 137664 - RNA, 20 nt, Human herpesvirus 4 (Epstein-Barr virus)
uccacagccccacucuugcc

SEQ ID NO: 137665 - RNA, 21 nt, Human herpesvirus 4 (Epstein-Barr virus)
uccacagccccacucuugccu

SEQ ID NO: 137666 - RNA, 15 nt, Human herpesvirus 4 (Epstein-Barr virus)
uccacaccauccaca

SEQ ID NO: 137667 - RNA, 15 nt, Human herpesvirus 4 (Epstein-Barr virus)
uccaccagcuucuca

SEQ ID NO: 137668 - RNA, 19 nt, Human herpesvirus 4 (Epstein-Barr virus)
uccaccagcuucucaaagg

SEQ ID NO: 137669 - RNA, 16 nt, Human herpesvirus 4 (Epstein-Barr virus)
uccaccaucaauguca

SEQ ID NO: 137670 - RNA, 19 nt, Human herpesvirus 4 (Epstein-Barr virus)
uccaccuguguaaccucac

SEQ ID NO: 137671 - RNA, 22 nt, Human herpesvirus 4 (Epstein-Barr virus)
uccagccacgcaggauguucac

SEQ ID NO: 137672 - RNA, 23 nt, Human herpesvirus 4 (Epstein-Barr virus)
uaugauagcagaagacuccugcc

SEQ ID NO: 137673 - RNA, 13 nt, Human herpesvirus 4 (Epstein-Barr virus)
uaugaccaugccc

SEQ ID NO: 137674 - RNA, 15 nt, Human herpesvirus 4 (Epstein-Barr virus)
uaugcauacacugaa

SEQ ID NO: 137675 - RNA, 16 nt, Human herpesvirus 4 (Epstein-Barr virus)
uaugcaugagccacag

SEQ ID NO: 137676 - RNA, 19 nt, Human herpesvirus 4 (Epstein-Barr virus)
uaugccaauccaugccaau

SEQ ID NO: 137677 - RNA, 22 nt, Human herpesvirus 4 (Epstein-Barr virus)
uauaugaaaauguguauucucu

SEQ ID NO: 137678 - RNA, 18 nt, Human herpesvirus 4 (Epstein-Barr virus)
uauagcucugcacaggcu

SEQ ID NO: 137679 - RNA, 17 nt, Human herpesvirus 4 (Epstein-Barr virus)
uauagcucuggcacugc

SEQ ID NO: 137680 - RNA, 20 nt, Human herpesvirus 4 (Epstein-Barr virus)
uagaauccagccaguggucu

SEQ ID NO: 137681 - RNA, 16 nt, Human herpesvirus 4 (Epstein-Barr virus)
uagaaacugugccaug

SEQ ID NO: 137682 - RNA, 18 nt, Human herpesvirus 4 (Epstein-Barr virus)
uacugcacagaacaucac

SEQ ID NO: 137683 - RNA, 16 nt, Human herpesvirus 4 (Epstein-Barr virus)
ucagacccaacaaagc

SEQ ID NO: 137684 - RNA, 14 nt, Human herpesvirus 4 (Epstein-Barr virus)
ucagacaccaacac

SEQ ID NO: 137685 - RNA, 20 nt, Human herpesvirus 4 (Epstein-Barr virus)
ucagaaaacucugcauggag

SEQ ID NO: 137686 - RNA, 19 nt, Human herpesvirus 4 (Epstein-Barr virus)
ucaccuuccagacuaugca

SEQ ID NO: 137687 - RNA, 22 nt, Human herpesvirus 4 (Epstein-Barr virus)
ucaccuugaggugccacagagc

SEQ ID NO: 137688 - RNA, 18 nt, Human herpesvirus 4 (Epstein-Barr virus)
ucacuggcaaagggcaug

SEQ ID NO: 137689 - RNA, 21 nt, Human herpesvirus 4 (Epstein-Barr virus)
ucacugggacaacugucacac

SEQ ID NO: 137690 - RNA, 13 nt, Human herpesvirus 4 (Epstein-Barr virus)
ucaucaucgggaa

SEQ ID NO: 137691 - RNA, 15 nt, Human herpesvirus 4 (Epstein-Barr virus)
ucaggagacacggcu

SEQ ID NO: 137692 - RNA, 15 nt, Human herpesvirus 4 (Epstein-Barr virus)
ucaggaccauggaug

SEQ ID NO: 137693 - RNA, 15 nt, Human herpesvirus 4 (Epstein-Barr virus)
ucagcuuaacgggaa

SEQ ID NO: 137694 - RNA, 17 nt, Human herpesvirus 4 (Epstein-Barr virus)
ucagcuucgaggucucc

SEQ ID NO: 137695 - RNA, 13 nt, Human herpesvirus 4 (Epstein-Barr virus)
ucacccgacaaug

SEQ ID NO: 137696 - RNA, 17 nt, Human herpesvirus 4 (Epstein-Barr virus)
ucaccuggguacccaaa

SEQ ID NO: 137697 - RNA, 20 nt, Human herpesvirus 4 (Epstein-Barr virus)
ucaccaagauuguuccaggu

SEQ ID NO: 137698 - RNA, 22 nt, Human herpesvirus 4 (Epstein-Barr virus)
ucaccaagauuguuccagguca

SEQ ID NO: 137699 - RNA, 21 nt, Human herpesvirus 4 (Epstein-Barr virus)
ucaccacuaagguuacugcac

SEQ ID NO: 137700 - RNA, 22 nt, Human herpesvirus 4 (Epstein-Barr virus)
ucaccacuaagguuacugcaca

SEQ ID NO: 137701 - RNA, 12 nt, Human herpesvirus 4 (Epstein-Barr virus)
ucaccacucgaa

SEQ ID NO: 137702 - RNA, 13 nt, Human herpesvirus 4 (Epstein-Barr virus)
ucaccacucgaaa

SEQ ID NO: 137703 - RNA, 21 nt, Human herpesvirus 4 (Epstein-Barr virus)
ucaccacucgaaacuauggca

SEQ ID NO: 137704 - RNA, 21 nt, Human herpesvirus 4 (Epstein-Barr virus)
ucaccagacgacucccacauu

SEQ ID NO: 137705 - RNA, 15 nt, Human herpesvirus 4 (Epstein-Barr virus)
ucaauggaacccuag

SEQ ID NO: 137706 - RNA, 19 nt, Human herpesvirus 4 (Epstein-Barr virus)
ucaaugagagggacuugga

SEQ ID NO: 137707 - RNA, 16 nt, Human herpesvirus 4 (Epstein-Barr virus)
ucaagcuacucaauga

SEQ ID NO: 137708 - RNA, 15 nt, Human herpesvirus 4 (Epstein-Barr virus)
ucaagagucucgcca

SEQ ID NO: 137709 - RNA, 23 nt, Human herpesvirus 4 (Epstein-Barr virus)
ucaagagucucgccaucuaccca

SEQ ID NO: 137710 - RNA, 21 nt, Human herpesvirus 4 (Epstein-Barr virus)
ucaagaguuuaagcagcacug

SEQ ID NO: 137711 - RNA, 22 nt, Human herpesvirus 4 (Epstein-Barr virus)
ucaagaguuuaagcagcacuga

SEQ ID NO: 137712 - RNA, 19 nt, Human herpesvirus 4 (Epstein-Barr virus)
ucaaauaccgagauguaca

SEQ ID NO: 137713 - RNA, 23 nt, Human herpesvirus 4 (Epstein-Barr virus)
ucaaaggccucggcgcauagcgu

SEQ ID NO: 137714 - RNA, 16 nt, Human herpesvirus 4 (Epstein-Barr virus)
ucaaaguccugcacua

SEQ ID NO: 137715 - RNA, 21 nt, Human herpesvirus 4 (Epstein-Barr virus)
ucaacguccgugagagccuac

SEQ ID NO: 137716 - RNA, 22 nt, Human herpesvirus 4 (Epstein-Barr virus)
uauucaccuugaggugccacag

SEQ ID NO: 137717 - RNA, 23 nt, Human herpesvirus 4 (Epstein-Barr virus)
uauugguaaaacaagggauauga

SEQ ID NO: 137718 - RNA, 19 nt, Human herpesvirus 4 (Epstein-Barr virus)
uauuuaccuuuuugccaau

SEQ ID NO: 137719 - RNA, 19 nt, Human herpesvirus 4 (Epstein-Barr virus)
uauguaugccuuggcauga

SEQ ID NO: 137720 - RNA, 18 nt, Human herpesvirus 4 (Epstein-Barr virus)
uauuaauaaagugcauac

SEQ ID NO: 137721 - RNA, 18 nt, Human herpesvirus 4 (Epstein-Barr virus)
uauuaccugucucucuuu

SEQ ID NO: 137722 - RNA, 22 nt, Human herpesvirus 4 (Epstein-Barr virus)
guguucuccgagaggaugaucc

SEQ ID NO: 137723 - RNA, 17 nt, Human herpesvirus 4 (Epstein-Barr virus)
guguccucuacugccuu

SEQ ID NO: 137724 - RNA, 22 nt, Human herpesvirus 4 (Epstein-Barr virus)
guguauugcucucguugccaaa

SEQ ID NO: 137725 - RNA, 13 nt, Human herpesvirus 4 (Epstein-Barr virus)
gugguggaugugc

SEQ ID NO: 137726 - RNA, 14 nt, Human herpesvirus 4 (Epstein-Barr virus)
guggauugcugaac

SEQ ID NO: 137727 - RNA, 20 nt, Human herpesvirus 4 (Epstein-Barr virus)
guggacacccaccacacagc

SEQ ID NO: 137728 - RNA, 17 nt, Human herpesvirus 4 (Epstein-Barr virus)
guggacaguuugauacu

SEQ ID NO: 137729 - RNA, 20 nt, Human herpesvirus 4 (Epstein-Barr virus)
guggacgggggaauaaucaa

SEQ ID NO: 137730 - RNA, 16 nt, Human herpesvirus 4 (Epstein-Barr virus)
guggcaguauuuugca

SEQ ID NO: 137731 - RNA, 22 nt, Human herpesvirus 4 (Epstein-Barr virus)
guggucuccuucuuuaucucca

SEQ ID NO: 137732 - RNA, 18 nt, Human herpesvirus 4 (Epstein-Barr virus)
guggucguguucccucac

SEQ ID NO: 137733 - RNA, 17 nt, Human herpesvirus 4 (Epstein-Barr virus)
guggucaccgcgaccaa

SEQ ID NO: 137734 - RNA, 22 nt, Human herpesvirus 4 (Epstein-Barr virus)
guuaaggcuguugacaugagca

SEQ ID NO: 137735 - RNA, 12 nt, Human herpesvirus 4 (Epstein-Barr virus)
guuaauuuacaa

SEQ ID NO: 137736 - RNA, 21 nt, Human herpesvirus 4 (Epstein-Barr virus)
guucccuucucccacccugua

SEQ ID NO: 137737 - RNA, 14 nt, Human herpesvirus 4 (Epstein-Barr virus)
guuccuggccaugg

SEQ ID NO: 137738 - RNA, 20 nt, Human herpesvirus 4 (Epstein-Barr virus)
guuccaggugacagcagcag

SEQ ID NO: 137739 - RNA, 13 nt, Human herpesvirus 4 (Epstein-Barr virus)
guuccacaguaau

SEQ ID NO: 137740 - RNA, 21 nt, Human herpesvirus 4 (Epstein-Barr virus)
gugagucugcuggacuccgag

SEQ ID NO: 137741 - RNA, 11 nt, Human herpesvirus 4 (Epstein-Barr virus)
gugagugacac

SEQ ID NO: 137742 - RNA, 23 nt, Human herpesvirus 4 (Epstein-Barr virus)
gugagugacacugaugagucuga

SEQ ID NO: 137743 - RNA, 17 nt, Human herpesvirus 4 (Epstein-Barr virus)
gugaugaaaacagaggc

SEQ ID NO: 137744 - RNA, 15 nt, Human herpesvirus 4 (Epstein-Barr virus)
gugauguagcuauac

SEQ ID NO: 137745 - RNA, 13 nt, Human herpesvirus 4 (Epstein-Barr virus)
gugcacccggcug

SEQ ID NO: 137746 - RNA, 18 nt, Human herpesvirus 4 (Epstein-Barr virus)
gugcgcaacgccggccug

SEQ ID NO: 137747 - RNA, 23 nt, Human herpesvirus 4 (Epstein-Barr virus)
guggacaaggcaguagaggacac

SEQ ID NO: 137748 - RNA, 16 nt, Human herpesvirus 4 (Epstein-Barr virus)
guggaacagaugcugu

SEQ ID NO: 137749 - RNA, 14 nt, Human herpesvirus 4 (Epstein-Barr virus)
gugccauguggcau

SEQ ID NO: 137750 - RNA, 22 nt, Human herpesvirus 4 (Epstein-Barr virus)
gugccagaugugccugggcuau

SEQ ID NO: 137751 - RNA, 22 nt, Human herpesvirus 4 (Epstein-Barr virus)
gugccaaacugcgagggggccu

SEQ ID NO: 137752 - RNA, 14 nt, Human herpesvirus 4 (Epstein-Barr virus)
gucuuguaaaacuu

SEQ ID NO: 137753 - RNA, 12 nt, Human herpesvirus 4 (Epstein-Barr virus)
gugagccacgua

SEQ ID NO: 137754 - RNA, 23 nt, Human herpesvirus 4 (Epstein-Barr virus)
gugagccccacaaacaccagugu

SEQ ID NO: 137755 - RNA, 22 nt, Human herpesvirus 4 (Epstein-Barr virus)
gugagacaccuggcccacugga

SEQ ID NO: 137756 - RNA, 17 nt, Human herpesvirus 4 (Epstein-Barr virus)
gucuuugcaauuugccu

SEQ ID NO: 137757 - RNA, 12 nt, Human herpesvirus 4 (Epstein-Barr virus)
gucuuugccaac

SEQ ID NO: 137758 - RNA, 15 nt, Human herpesvirus 4 (Epstein-Barr virus)
gucuuugccaaccug

SEQ ID NO: 137759 - RNA, 20 nt, Human herpesvirus 4 (Epstein-Barr virus)
gucuuugccaaccugcucuc

SEQ ID NO: 137760 - RNA, 12 nt, Human herpesvirus 4 (Epstein-Barr virus)
gucuucugucuc

SEQ ID NO: 137761 - RNA, 19 nt, Human herpesvirus 4 (Epstein-Barr virus)
gucuuagggcgccagggau

SEQ ID NO: 137762 - RNA, 10 nt, Human herpesvirus 4 (Epstein-Barr virus)
guccaucucg

SEQ ID NO: 137763 - RNA, 16 nt, Human herpesvirus 4 (Epstein-Barr virus)
guccggucuugcaggg

SEQ ID NO: 137764 - RNA, 18 nt, Human herpesvirus 4 (Epstein-Barr virus)
guccggagaccccaaaaa

SEQ ID NO: 137765 - RNA, 13 nt, Human herpesvirus 4 (Epstein-Barr virus)
gucccucuugucc

SEQ ID NO: 137766 - RNA, 12 nt, Human herpesvirus 4 (Epstein-Barr virus)
gucccugagaug

SEQ ID NO: 137767 - RNA, 13 nt, Human herpesvirus 4 (Epstein-Barr virus)
guacuuguccuca

SEQ ID NO: 137768 - RNA, 23 nt, Human herpesvirus 4 (Epstein-Barr virus)
guacuuuuauuuauugcaucaca

SEQ ID NO: 137769 - RNA, 16 nt, Human herpesvirus 4 (Epstein-Barr virus)
guagcacugguggugg

SEQ ID NO: 137770 - RNA, 19 nt, Human herpesvirus 4 (Epstein-Barr virus)
guagauggcgagacucuug

SEQ ID NO: 137771 - RNA, 20 nt, Human herpesvirus 4 (Epstein-Barr virus)
guagauggcgagacucuuga

SEQ ID NO: 137772 - RNA, 14 nt, Human herpesvirus 4 (Epstein-Barr virus)
guagagguggaaca

SEQ ID NO: 137773 - RNA, 13 nt, Human herpesvirus 4 (Epstein-Barr virus)
guacgugccucag

SEQ ID NO: 137774 - RNA, 18 nt, Human herpesvirus 4 (Epstein-Barr virus)
gggugggcggugaucagg

SEQ ID NO: 137775 - RNA, 17 nt, Human herpesvirus 4 (Epstein-Barr virus)
gggugggggugggugca

SEQ ID NO: 137776 - RNA, 11 nt, Human herpesvirus 4 (Epstein-Barr virus)
ggguggugaug

SEQ ID NO: 137777 - RNA, 19 nt, Human herpesvirus 4 (Epstein-Barr virus)
ggguggcauugcgggugga

SEQ ID NO: 137778 - RNA, 19 nt, Human herpesvirus 4 (Epstein-Barr virus)
ggguguggagacuagcuau

SEQ ID NO: 137779 - RNA, 18 nt, Human herpesvirus 4 (Epstein-Barr virus)
ggguguagugggugggca

SEQ ID NO: 137780 - RNA, 11 nt, Human herpesvirus 4 (Epstein-Barr virus)
ggggugccaag

SEQ ID NO: 137781 - RNA, 23 nt, Human herpesvirus 4 (Epstein-Barr virus)
gggguggcgaaucugacauuucu

SEQ ID NO: 137782 - RNA, 19 nt, Human herpesvirus 4 (Epstein-Barr virus)
ggggugaugaaaacagagg

SEQ ID NO: 137783 - RNA, 14 nt, Human herpesvirus 4 (Epstein-Barr virus)
gggucagguguacu

SEQ ID NO: 137784 - RNA, 22 nt, Human herpesvirus 4 (Epstein-Barr virus)
ggguaguagcacugguggugga

SEQ ID NO: 137785 - RNA, 20 nt, Human herpesvirus 4 (Epstein-Barr virus)
gggucucacgagggucugcc

SEQ ID NO: 137786 - RNA, 20 nt, Human herpesvirus 4 (Epstein-Barr virus)
ggguccuagcacaaaccagu

SEQ ID NO: 137787 - RNA, 13 nt, Human herpesvirus 4 (Epstein-Barr virus)
ggggccuuguccg

SEQ ID NO: 137788 - RNA, 14 nt, Human herpesvirus 4 (Epstein-Barr virus)
ggggcgcggcugga

SEQ ID NO: 137789 - RNA, 13 nt, Human herpesvirus 4 (Epstein-Barr virus)
ggggcaacagacu

SEQ ID NO: 137790 - RNA, 14 nt, Human herpesvirus 4 (Epstein-Barr virus)
ggggcggcggugga

SEQ ID NO: 137791 - RNA, 21 nt, Human herpesvirus 4 (Epstein-Barr virus)
gggggcaggauuccccaauga

SEQ ID NO: 137792 - RNA, 15 nt, Human herpesvirus 4 (Epstein-Barr virus)
gggggacuugaguua

SEQ ID NO: 137793 - RNA, 18 nt, Human herpesvirus 4 (Epstein-Barr virus)
gucaguuacacacacagu

SEQ ID NO: 137794 - RNA, 13 nt, Human herpesvirus 4 (Epstein-Barr virus)
gucauuucuucca

SEQ ID NO: 137795 - RNA, 16 nt, Human herpesvirus 4 (Epstein-Barr virus)
gucagagagguugcgc

SEQ ID NO: 137796 - RNA, 13 nt, Human herpesvirus 4 (Epstein-Barr virus)
gucagauuuugca

SEQ ID NO: 137797 - RNA, 21 nt, Human herpesvirus 4 (Epstein-Barr virus)
gucaccauuuucguccuccca

SEQ ID NO: 137798 - RNA, 19 nt, Human herpesvirus 4 (Epstein-Barr virus)
gucacuccagccaucaugc

SEQ ID NO: 137799 - RNA, 21 nt, Human herpesvirus 4 (Epstein-Barr virus)
gucagaaaaucgcagcagggu

SEQ ID NO: 137800 - RNA, 13 nt, Human herpesvirus 4 (Epstein-Barr virus)
gucacaccagucc

SEQ ID NO: 137801 - RNA, 20 nt, Human herpesvirus 4 (Epstein-Barr virus)
gucacaccccacggccaugc

SEQ ID NO: 137802 - RNA, 22 nt, Human herpesvirus 4 (Epstein-Barr virus)
gucacaccccacggccaugcua

SEQ ID NO: 137803 - RNA, 21 nt, Human herpesvirus 4 (Epstein-Barr virus)
gucaaaauucgcgaugcuaua

SEQ ID NO: 137804 - RNA, 22 nt, Human herpesvirus 4 (Epstein-Barr virus)
guauugcgcuggccgagccugu

SEQ ID NO: 137805 - RNA, 12 nt, Human herpesvirus 4 (Epstein-Barr virus)
guauugcucucg

SEQ ID NO: 137806 - RNA, 20 nt, Human herpesvirus 4 (Epstein-Barr virus)
guauugcucucguugccaaa

SEQ ID NO: 137807 - RNA, 14 nt, Human herpesvirus 4 (Epstein-Barr virus)
guauugggacuuga

SEQ ID NO: 137808 - RNA, 14 nt, Human herpesvirus 4 (Epstein-Barr virus)
guauuuacaaacac

SEQ ID NO: 137809 - RNA, 16 nt, Human herpesvirus 4 (Epstein-Barr virus)
guauuuacaaacacua

SEQ ID NO: 137810 - RNA, 15 nt, Human herpesvirus 4 (Epstein-Barr virus)
guaugccuuggcaug

SEQ ID NO: 137811 - RNA, 12 nt, Human herpesvirus 4 (Epstein-Barr virus)
guauguggugcc

SEQ ID NO: 137812 - RNA, 23 nt, Human herpesvirus 4 (Epstein-Barr virus)
guaugccauggccauucgacagg

SEQ ID NO: 137813 - RNA, 13 nt, Human herpesvirus 4 (Epstein-Barr virus)
uaacggguggaag

SEQ ID NO: 137814 - RNA, 16 nt, Human herpesvirus 4 (Epstein-Barr virus)
uaacaguucacuuccu

SEQ ID NO: 137815 - RNA, 17 nt, Human herpesvirus 4 (Epstein-Barr virus)
uaacaggacauguuugg

SEQ ID NO: 137816 - RNA, 14 nt, Human herpesvirus 4 (Epstein-Barr virus)
uaacgcagguccug

SEQ ID NO: 137817 - RNA, 14 nt, Human herpesvirus 4 (Epstein-Barr virus)
uaacuguacauacu

SEQ ID NO: 137818 - RNA, 16 nt, Human herpesvirus 4 (Epstein-Barr virus)
uaacugugguuuccau

SEQ ID NO: 137819 - RNA, 22 nt, Human herpesvirus 4 (Epstein-Barr virus)
uaagaaugggagcaaccagcug

SEQ ID NO: 137820 - RNA, 15 nt, Human herpesvirus 4 (Epstein-Barr virus)
uaagcagcacugaau

SEQ ID NO: 137821 - RNA, 16 nt, Human herpesvirus 4 (Epstein-Barr virus)
uaaggcucugaagcaa

SEQ ID NO: 137822 - RNA, 14 nt, Human herpesvirus 4 (Epstein-Barr virus)
uaaacauugcaccu

SEQ ID NO: 137823 - RNA, 15 nt, Human herpesvirus 4 (Epstein-Barr virus)
uaaacauugcaccuu

SEQ ID NO: 137824 - RNA, 15 nt, Human herpesvirus 4 (Epstein-Barr virus)
guucuacaaugccag

SEQ ID NO: 137825 - RNA, 20 nt, Human herpesvirus 4 (Epstein-Barr virus)
guucuacuccuggcauacuu

SEQ ID NO: 137826 - RNA, 21 nt, Human herpesvirus 4 (Epstein-Barr virus)
guucucgugcaagcagcaccu

SEQ ID NO: 137827 - RNA, 16 nt, Human herpesvirus 4 (Epstein-Barr virus)
guucuccugauuugcu

SEQ ID NO: 137828 - RNA, 20 nt, Human herpesvirus 4 (Epstein-Barr virus)
guucucuucacuaaggcagu

SEQ ID NO: 137829 - RNA, 23 nt, Human herpesvirus 4 (Epstein-Barr virus)
guucuuuuguaaucgcagcucua

SEQ ID NO: 137830 - RNA, 18 nt, Human herpesvirus 4 (Epstein-Barr virus)
guucuuuagggcauccac

SEQ ID NO: 137831 - RNA, 22 nt, Human herpesvirus 4 (Epstein-Barr virus)
guugauaaaaugggucagugau

SEQ ID NO: 137832 - RNA, 18 nt, Human herpesvirus 4 (Epstein-Barr virus)
uacagcuacaccgaucac

SEQ ID NO: 137833 - RNA, 16 nt, Human herpesvirus 4 (Epstein-Barr virus)
uacaggacaagacagu

SEQ ID NO: 137834 - RNA, 14 nt, Human herpesvirus 4 (Epstein-Barr virus)
uacagauagauggc

SEQ ID NO: 137835 - RNA, 17 nt, Human herpesvirus 4 (Epstein-Barr virus)
uacaagcuuuugaccaa

SEQ ID NO: 137836 - RNA, 17 nt, Human herpesvirus 4 (Epstein-Barr virus)
uaauuguguauugcucu

SEQ ID NO: 137837 - RNA, 16 nt, Human herpesvirus 4 (Epstein-Barr virus)
uacuccuggcauacuu

SEQ ID NO: 137838 - RNA, 13 nt, Human herpesvirus 4 (Epstein-Barr virus)
uacucucuagaga

SEQ ID NO: 137839 - RNA, 21 nt, Human herpesvirus 4 (Epstein-Barr virus)
aacaacuuccaacgcauccac

SEQ ID NO: 137840 - RNA, 19 nt, Human herpesvirus 4 (Epstein-Barr virus)
aacaagaacugggaugaac

SEQ ID NO: 137841 - RNA, 18 nt, Human herpesvirus 4 (Epstein-Barr virus)
uacucaucugugagacaa

SEQ ID NO: 137842 - RNA, 13 nt, Human herpesvirus 4 (Epstein-Barr virus)
uacggcuuuccag

SEQ ID NO: 137843 - RNA, 19 nt, Human herpesvirus 4 (Epstein-Barr virus)
uacggugauaacugacaga

SEQ ID NO: 137844 - RNA, 19 nt, Human herpesvirus 4 (Epstein-Barr virus)
uacgugcgugaucaugagg

SEQ ID NO: 137845 - RNA, 16 nt, Human herpesvirus 4 (Epstein-Barr virus)
uacaucugcccggcua

SEQ ID NO: 137846 - RNA, 18 nt, Human herpesvirus 4 (Epstein-Barr virus)
uaccucauagacacaccu

SEQ ID NO: 137847 - RNA, 15 nt, Human herpesvirus 4 (Epstein-Barr virus)
uaccuggugagcaau

SEQ ID NO: 137848 - RNA, 14 nt, Human herpesvirus 4 (Epstein-Barr virus)
uacgcgggccacag

SEQ ID NO: 137849 - RNA, 18 nt, Human herpesvirus 4 (Epstein-Barr virus)
uaccuuccuguguucucc

SEQ ID NO: 137850 - RNA, 21 nt, Human herpesvirus 4 (Epstein-Barr virus)
uacgaugaggaauucuuccag

SEQ ID NO: 137851 - RNA, 13 nt, Human herpesvirus 4 (Epstein-Barr virus)
uuuaccccagucc

SEQ ID NO: 137852 - RNA, 17 nt, Human herpesvirus 4 (Epstein-Barr virus)
uuuacgguuagugugcc

SEQ ID NO: 137853 - RNA, 16 nt, Human herpesvirus 4 (Epstein-Barr virus)
uuuaccgccaucgcac

SEQ ID NO: 137854 - RNA, 20 nt, Human herpesvirus 4 (Epstein-Barr virus)
uuuauuaauaaagugcauac

SEQ ID NO: 137855 - RNA, 12 nt, Human herpesvirus 4 (Epstein-Barr virus)
uuuaaucuggau

SEQ ID NO: 137856 - RNA, 22 nt, Human herpesvirus 4 (Epstein-Barr virus)
uuuaauucucuucuguuugcau

SEQ ID NO: 137857 - RNA, 11 nt, Human herpesvirus 4 (Epstein-Barr virus)
uuuaccaccuc

SEQ ID NO: 137858 - RNA, 22 nt, Human herpesvirus 4 (Epstein-Barr virus)
uuuacaauaaaaugaaaccuuu

SEQ ID NO: 137859 - RNA, 19 nt, Human herpesvirus 4 (Epstein-Barr virus)
uuuacagugguucuccuga

SEQ ID NO: 137860 - RNA, 15 nt, Human herpesvirus 4 (Epstein-Barr virus)
uugugauucccagaa

SEQ ID NO: 137861 - RNA, 18 nt, Human herpesvirus 4 (Epstein-Barr virus)
uuguaaucgcagcucuaa

SEQ ID NO: 137862 - RNA, 21 nt, Human herpesvirus 4 (Epstein-Barr virus)
uugguguauuucuggccaucu

SEQ ID NO: 137863 - RNA, 11 nt, Human herpesvirus 4 (Epstein-Barr virus)
uugguccaggg

SEQ ID NO: 137864 - RNA, 15 nt, Human herpesvirus 4 (Epstein-Barr virus)
uugguaauacgggua

SEQ ID NO: 137865 - RNA, 21 nt, Human herpesvirus 4 (Epstein-Barr virus)
uuggcccgucccucuuguccc

SEQ ID NO: 137866 - RNA, 22 nt, Human herpesvirus 4 (Epstein-Barr virus)
uuggcgucuaugcuuaaccgcu

SEQ ID NO: 137867 - RNA, 16 nt, Human herpesvirus 4 (Epstein-Barr virus)
uuggcgugguggcauu

SEQ ID NO: 137868 - RNA, 15 nt, Human herpesvirus 4 (Epstein-Barr virus)
uuggcuucugcugcu

SEQ ID NO: 137869 - RNA, 14 nt, Human herpesvirus 4 (Epstein-Barr virus)
uuggcuauggucau

SEQ ID NO: 137870 - RNA, 22 nt, Human herpesvirus 4 (Epstein-Barr virus)
uugggcauacccauguugucac

SEQ ID NO: 137871 - RNA, 23 nt, Human herpesvirus 4 (Epstein-Barr virus)
aacagcuucgcaaguuccucaac

SEQ ID NO: 137872 - RNA, 13 nt, Human herpesvirus 4 (Epstein-Barr virus)
aacaggagcagga

SEQ ID NO: 137873 - RNA, 16 nt, Human herpesvirus 4 (Epstein-Barr virus)
aacaggcugcugaaaa

SEQ ID NO: 137874 - RNA, 16 nt, Human herpesvirus 4 (Epstein-Barr virus)
aacaggugggacaaaa

SEQ ID NO: 137875 - RNA, 16 nt, Human herpesvirus 4 (Epstein-Barr virus)
uuuguccagcagggcc

SEQ ID NO: 137876 - RNA, 22 nt, Human herpesvirus 4 (Epstein-Barr virus)
uuucggcgccgcccgggggcca

SEQ ID NO: 137877 - RNA, 16 nt, Human herpesvirus 4 (Epstein-Barr virus)
uuucucccccagauca

SEQ ID NO: 137878 - RNA, 18 nt, Human herpesvirus 4 (Epstein-Barr virus)
uuucugcccccugucucu

SEQ ID NO: 137879 - RNA, 19 nt, Human herpesvirus 4 (Epstein-Barr virus)
uuugggguauucucagaug

SEQ ID NO: 137880 - RNA, 11 nt, Human herpesvirus 4 (Epstein-Barr virus)
uuugggaacac

SEQ ID NO: 137881 - RNA, 16 nt, Human herpesvirus 4 (Epstein-Barr virus)
uuugggaacacggaga

SEQ ID NO: 137882 - RNA, 19 nt, Human herpesvirus 4 (Epstein-Barr virus)
uugccuuuuugccacaugu

SEQ ID NO: 137883 - RNA, 15 nt, Human herpesvirus 4 (Epstein-Barr virus)
uugcucucguugcca

SEQ ID NO: 137884 - RNA, 13 nt, Human herpesvirus 4 (Epstein-Barr virus)
uugcuaauguacc

SEQ ID NO: 137885 - RNA, 20 nt, Human herpesvirus 4 (Epstein-Barr virus)
uuggcauuggcgucaggaga

SEQ ID NO: 137886 - RNA, 17 nt, Human herpesvirus 4 (Epstein-Barr virus)
uuggagucgaagcucuu

SEQ ID NO: 137887 - RNA, 23 nt, Human herpesvirus 4 (Epstein-Barr virus)
uuggcaucaucagcgccguccac

SEQ ID NO: 137888 - RNA, 21 nt, Human herpesvirus 4 (Epstein-Barr virus)
uugcuugccuuuuugccacau

SEQ ID NO: 137889 - RNA, 22 nt, Human herpesvirus 4 (Epstein-Barr virus)
uugccacauguuuucuggacac

SEQ ID NO: 137890 - RNA, 14 nt, Human herpesvirus 4 (Epstein-Barr virus)
uugccaaccugcuc

SEQ ID NO: 137891 - RNA, 19 nt, Human herpesvirus 4 (Epstein-Barr virus)
uugccacccaggguaagag

SEQ ID NO: 137892 - RNA, 11 nt, Human herpesvirus 4 (Epstein-Barr virus)
uugcacuccaa

SEQ ID NO: 137893 - RNA, 14 nt, Human herpesvirus 4 (Epstein-Barr virus)
aacacuacaauaaa

SEQ ID NO: 137894 - RNA, 17 nt, Human herpesvirus 4 (Epstein-Barr virus)
aacacucuuuuuucaac

SEQ ID NO: 137895 - RNA, 10 nt, Human herpesvirus 4 (Epstein-Barr virus)
aacacuccac

SEQ ID NO: 137896 - RNA, 15 nt, Human herpesvirus 4 (Epstein-Barr virus)
aacacagcucuggca

SEQ ID NO: 137897 - RNA, 17 nt, Human herpesvirus 4 (Epstein-Barr virus)
aacacagcucuggcagu

SEQ ID NO: 137898 - RNA, 17 nt, Human herpesvirus 4 (Epstein-Barr virus)
uugacaugagcauggaa

SEQ ID NO: 137899 - RNA, 23 nt, Human herpesvirus 4 (Epstein-Barr virus)
uugacaugagcauggaagacaug

SEQ ID NO: 137900 - RNA, 20 nt, Human herpesvirus 4 (Epstein-Barr virus)
uugacuguaaucacuggcaa

SEQ ID NO: 137901 - RNA, 22 nt, Human herpesvirus 4 (Epstein-Barr virus)
uugaccaguguguacauuccag

SEQ ID NO: 137902 - RNA, 20 nt, Human herpesvirus 4 (Epstein-Barr virus)
uugagaaucugggcugggac

SEQ ID NO: 137903 - RNA, 14 nt, Human herpesvirus 4 (Epstein-Barr virus)
uugaggcaaaagac

SEQ ID NO: 137904 - RNA, 15 nt, Human herpesvirus 4 (Epstein-Barr virus)
uugaugugacuugug

SEQ ID NO: 137905 - RNA, 18 nt, Human herpesvirus 4 (Epstein-Barr virus)
uugauugagaucagaaaa

SEQ ID NO: 137906 - RNA, 12 nt, Human herpesvirus 4 (Epstein-Barr virus)
uugaacgugugc

SEQ ID NO: 137907 - RNA, 13 nt, Human herpesvirus 4 (Epstein-Barr virus)
uucuuuugcucuu

SEQ ID NO: 137908 - RNA, 15 nt, Human herpesvirus 4 (Epstein-Barr virus)
uucuuuugcucuuaa

SEQ ID NO: 137909 - RNA, 19 nt, Human herpesvirus 4 (Epstein-Barr virus)
uucacugggacaacuguca

SEQ ID NO: 137910 - RNA, 20 nt, Human herpesvirus 4 (Epstein-Barr virus)
uucacugggacaacugucac

SEQ ID NO: 137911 - RNA, 22 nt, Human herpesvirus 4 (Epstein-Barr virus)
aacuuccaacgcauccaccauc

SEQ ID NO: 137912 - RNA, 20 nt, Human herpesvirus 4 (Epstein-Barr virus)
aagacagucacauugcaucg

SEQ ID NO: 137913 - RNA, 14 nt, Human herpesvirus 4 (Epstein-Barr virus)
aacuuuaacauuga

SEQ ID NO: 137914 - RNA, 15 nt, Human herpesvirus 4 (Epstein-Barr virus)
aacuuuaacauugau

SEQ ID NO: 137915 - RNA, 14 nt, Human herpesvirus 4 (Epstein-Barr virus)
aacuuuacuuuuau

SEQ ID NO: 137916 - RNA, 17 nt, Human herpesvirus 4 (Epstein-Barr virus)
aagagaggggcagggaa

SEQ ID NO: 137917 - RNA, 14 nt, Human herpesvirus 4 (Epstein-Barr virus)
aagacuauguucuc

SEQ ID NO: 137918 - RNA, 15 nt, Human herpesvirus 4 (Epstein-Barr virus)
aagacgucugguacc

SEQ ID NO: 137919 - RNA, 13 nt, Human herpesvirus 4 (Epstein-Barr virus)
aagacccaucuga

SEQ ID NO: 137920 - RNA, 11 nt, Human herpesvirus 4 (Epstein-Barr virus)
aagaccaggag

SEQ ID NO: 137921 - RNA, 16 nt, Human herpesvirus 4 (Epstein-Barr virus)
aagaugauggacccaa

SEQ ID NO: 137922 - RNA, 14 nt, Human herpesvirus 4 (Epstein-Barr virus)
aagauggauuugaa

SEQ ID NO: 137923 - RNA, 20 nt, Human herpesvirus 4 (Epstein-Barr virus)
aagauggcgugguccacgag

SEQ ID NO: 137924 - RNA, 17 nt, Human herpesvirus 4 (Epstein-Barr virus)
aagaugucaaacauggu

SEQ ID NO: 137925 - RNA, 19 nt, Human herpesvirus 4 (Epstein-Barr virus)
aagcaaacggccuggcauu

SEQ ID NO: 137926 - RNA, 16 nt, Human herpesvirus 4 (Epstein-Barr virus)
aagauugucacagcug

SEQ ID NO: 137927 - RNA, 18 nt, Human herpesvirus 4 (Epstein-Barr virus)
aagauugucacagcugcu

SEQ ID NO: 137928 - RNA, 20 nt, Human herpesvirus 4 (Epstein-Barr virus)
aagcaacccccggcucucag

SEQ ID NO: 137929 - RNA, 22 nt, Human herpesvirus 4 (Epstein-Barr virus)
aagcaacccccggcucucaggc

SEQ ID NO: 137930 - RNA, 19 nt, Human herpesvirus 4 (Epstein-Barr virus)
aagaguuuaagcagcacug

SEQ ID NO: 137931 - RNA, 21 nt, Human herpesvirus 4 (Epstein-Barr virus)
aagaguuuaagcagcacugaa

SEQ ID NO: 137932 - RNA, 23 nt, Human herpesvirus 4 (Epstein-Barr virus)
aagauaaagauggcugccucuca

SEQ ID NO: 137933 - RNA, 23 nt, Human herpesvirus 4 (Epstein-Barr virus)
aagagggaaaagagacugcgaaa

SEQ ID NO: 137934 - RNA, 22 nt, Human herpesvirus 4 (Epstein-Barr virus)
aagagggggugauaaccaugga

SEQ ID NO: 137935 - RNA, 13 nt, Human herpesvirus 4 (Epstein-Barr virus)
aagaguaccccag

SEQ ID NO: 137936 - RNA, 15 nt, Human herpesvirus 4 (Epstein-Barr virus)
aagagucccuccuca

SEQ ID NO: 137937 - RNA, 17 nt, Human herpesvirus 4 (Epstein-Barr virus)
aagagucucgccaucua

SEQ ID NO: 137938 - RNA, 23 nt, Human herpesvirus 4 (Epstein-Barr virus)
aagagucucgccaucuacccaac

SEQ ID NO: 137939 - RNA, 12 nt, Human herpesvirus 4 (Epstein-Barr virus)
aagaggacgagg

SEQ ID NO: 137940 - RNA, 21 nt, Human herpesvirus 4 (Epstein-Barr virus)
aacaugagaaaauacuucucu

SEQ ID NO: 137941 - RNA, 15 nt, Human herpesvirus 4 (Epstein-Barr virus)
aacaugcucuuugau

SEQ ID NO: 137942 - RNA, 16 nt, Human herpesvirus 4 (Epstein-Barr virus)
aacgacacagugauga

SEQ ID NO: 137943 - RNA, 23 nt, Human herpesvirus 4 (Epstein-Barr virus)
aacgcagucuuagguaucuggau

SEQ ID NO: 137944 - RNA, 15 nt, Human herpesvirus 4 (Epstein-Barr virus)
aacaucucuuguaau

SEQ ID NO: 137945 - RNA, 14 nt, Human herpesvirus 4 (Epstein-Barr virus)
aacaucacugccac

SEQ ID NO: 137946 - RNA, 23 nt, Human herpesvirus 4 (Epstein-Barr virus)
uuuuugccaaugacccacuccag

SEQ ID NO: 137947 - RNA, 18 nt, Human herpesvirus 4 (Epstein-Barr virus)
aacggcgagcagggugaa

SEQ ID NO: 137948 - RNA, 21 nt, Human herpesvirus 4 (Epstein-Barr virus)
aacggguggaagcauggggga

SEQ ID NO: 137949 - RNA, 23 nt, Human herpesvirus 4 (Epstein-Barr virus)
aacguggucuccuucuuuaucuc

SEQ ID NO: 137950 - RNA, 16 nt, Human herpesvirus 4 (Epstein-Barr virus)
aacgugauggugcugg

SEQ ID NO: 137951 - RNA, 22 nt, Human herpesvirus 4 (Epstein-Barr virus)
aacuccaacgagggcagacacc

SEQ ID NO: 137952 - RNA, 16 nt, Human herpesvirus 4 (Epstein-Barr virus)
aacugacacacaggcc

SEQ ID NO: 137953 - RNA, 13 nt, Human herpesvirus 4 (Epstein-Barr virus)
aaucaacuacaag

SEQ ID NO: 137954 - RNA, 23 nt, Human herpesvirus 4 (Epstein-Barr virus)
aaucaccgccguaaucuguggug

SEQ ID NO: 137955 - RNA, 21 nt, Human herpesvirus 4 (Epstein-Barr virus)
aauccagcuucucguagagau

SEQ ID NO: 137956 - RNA, 22 nt, Human herpesvirus 4 (Epstein-Barr virus)
aauaaaaagaauguaacacuac

SEQ ID NO: 137957 - RNA, 19 nt, Human herpesvirus 4 (Epstein-Barr virus)
aauaaacccaaugugcaaa

SEQ ID NO: 137958 - RNA, 16 nt, Human herpesvirus 4 (Epstein-Barr virus)
aagugcuaugaccaug

SEQ ID NO: 137959 - RNA, 23 nt, Human herpesvirus 4 (Epstein-Barr virus)
aauaguuccaggugacagcagca

SEQ ID NO: 137960 - RNA, 17 nt, Human herpesvirus 4 (Epstein-Barr virus)
aauagcaugucagcucc

SEQ ID NO: 137961 - RNA, 14 nt, Human herpesvirus 4 (Epstein-Barr virus)
aauagcuucugcag

SEQ ID NO: 137962 - RNA, 17 nt, Human herpesvirus 4 (Epstein-Barr virus)
aagcugccgcgauguac

SEQ ID NO: 137963 - RNA, 22 nt, Human herpesvirus 4 (Epstein-Barr virus)
aagcuuuugaccaagcuaccag

SEQ ID NO: 137964 - RNA, 15 nt, Human herpesvirus 4 (Epstein-Barr virus)
aagcuuaugagcgau

SEQ ID NO: 137965 - RNA, 17 nt, Human herpesvirus 4 (Epstein-Barr virus)
aagcaggggugaugaaa

SEQ ID NO: 137966 - RNA, 23 nt, Human herpesvirus 4 (Epstein-Barr virus)
aagccacucguccgccuacuggu

SEQ ID NO: 137967 - RNA, 12 nt, Human herpesvirus 4 (Epstein-Barr virus)
aaguaaccacau

SEQ ID NO: 137968 - RNA, 22 nt, Human herpesvirus 4 (Epstein-Barr virus)
aagguuacugcacagaacauca

SEQ ID NO: 137969 - RNA, 18 nt, Human herpesvirus 4 (Epstein-Barr virus)
aagguuuagcuauuccac

SEQ ID NO: 137970 - RNA, 20 nt, Human herpesvirus 4 (Epstein-Barr virus)
aagguuuagcuauuccacca

SEQ ID NO: 137971 - RNA, 23 nt, Human herpesvirus 4 (Epstein-Barr virus)
aagguuuagcuauuccaccaaca

SEQ ID NO: 137972 - RNA, 18 nt, Human herpesvirus 4 (Epstein-Barr virus)
aagugagggggccugaga

SEQ ID NO: 137973 - RNA, 20 nt, Human herpesvirus 4 (Epstein-Barr virus)
aaggucagaaaaucgcagca

SEQ ID NO: 137974 - RNA, 17 nt, Human herpesvirus 4 (Epstein-Barr virus)
aaggaaggcuugccaaa

SEQ ID NO: 137975 - RNA, 17 nt, Human herpesvirus 4 (Epstein-Barr virus)
aaggaaugaacacucau

SEQ ID NO: 137976 - RNA, 18 nt, Human herpesvirus 4 (Epstein-Barr virus)
aaggacgggggugggcac

SEQ ID NO: 137977 - RNA, 17 nt, Human herpesvirus 4 (Epstein-Barr virus)
aagguaaacaagcugac

SEQ ID NO: 137978 - RNA, 19 nt, Human herpesvirus 4 (Epstein-Barr virus)
ugauuaggcacuggacaca

SEQ ID NO: 137979 - RNA, 14 nt, Human herpesvirus 4 (Epstein-Barr virus)
ugauguagcuauac

SEQ ID NO: 137980 - RNA, 17 nt, Human herpesvirus 4 (Epstein-Barr virus)
ugaugugacuugugaug

SEQ ID NO: 137981 - RNA, 20 nt, Human herpesvirus 4 (Epstein-Barr virus)
ugaugugacuugugaugcaa

SEQ ID NO: 137982 - RNA, 23 nt, Human herpesvirus 4 (Epstein-Barr virus)
ugauguguguuuuuacccaucac

SEQ ID NO: 137983 - RNA, 14 nt, Human herpesvirus 4 (Epstein-Barr virus)
ugaugguaucagac

SEQ ID NO: 137984 - RNA, 22 nt, Human herpesvirus 4 (Epstein-Barr virus)
ugauagcagaagacuccugccu

SEQ ID NO: 137985 - RNA, 14 nt, Human herpesvirus 4 (Epstein-Barr virus)
ugauccuguacaaa

SEQ ID NO: 137986 - RNA, 20 nt, Human herpesvirus 4 (Epstein-Barr virus)
ugauccuguacaaacccaac

SEQ ID NO: 137987 - RNA, 19 nt, Human herpesvirus 4 (Epstein-Barr virus)
ugaucauggaaaccacuca

SEQ ID NO: 137988 - RNA, 20 nt, Human herpesvirus 4 (Epstein-Barr virus)
ugcaacaaucuggacucucu

SEQ ID NO: 137989 - RNA, 22 nt, Human herpesvirus 4 (Epstein-Barr virus)
ugcaaagggacccacgguggaa

SEQ ID NO: 137990 - RNA, 15 nt, Human herpesvirus 4 (Epstein-Barr virus)
ugcaagcagcaccug

SEQ ID NO: 137991 - RNA, 12 nt, Human herpesvirus 4 (Epstein-Barr virus)
ugagcaccaaca

SEQ ID NO: 137992 - RNA, 20 nt, Human herpesvirus 4 (Epstein-Barr virus)
ugagcaagauccuucuggca

SEQ ID NO: 137993 - RNA, 16 nt, Human herpesvirus 4 (Epstein-Barr virus)
ugagccugagccacac

SEQ ID NO: 137994 - RNA, 23 nt, Human herpesvirus 4 (Epstein-Barr virus)
ugagcccauucucguccaucucg

SEQ ID NO: 137995 - RNA, 21 nt, Human herpesvirus 4 (Epstein-Barr virus)
ugagcccgacgaacuccucca

SEQ ID NO: 137996 - RNA, 17 nt, Human herpesvirus 4 (Epstein-Barr virus)
ugagacagaggugcuca

SEQ ID NO: 137997 - RNA, 17 nt, Human herpesvirus 4 (Epstein-Barr virus)
ugagacuggaacuguac

SEQ ID NO: 137998 - RNA, 16 nt, Human herpesvirus 4 (Epstein-Barr virus)
ucuuuuagacacggaa

SEQ ID NO: 137999 - RNA, 19 nt, Human herpesvirus 4 (Epstein-Barr virus)
ugaaaacagaggcuggaug

SEQ ID NO: 138000 - RNA, 18 nt, Human herpesvirus 4 (Epstein-Barr virus)
ugagaaucugggcuggga

SEQ ID NO: 138001 - RNA, 12 nt, Human herpesvirus 4 (Epstein-Barr virus)
ugagaaugccaa

SEQ ID NO: 138002 - RNA, 21 nt, Human herpesvirus 4 (Epstein-Barr virus)
ugagaagcagcucuucuacua

SEQ ID NO: 138003 - RNA, 22 nt, Human herpesvirus 4 (Epstein-Barr virus)
ugaaaaccggcgagacuuggac

SEQ ID NO: 138004 - RNA, 20 nt, Human herpesvirus 4 (Epstein-Barr virus)
ugagaacuuucuucuacucg

SEQ ID NO: 138005 - RNA, 21 nt, Human herpesvirus 4 (Epstein-Barr virus)
ugagaacuuucuucuacucga

SEQ ID NO: 138006 - RNA, 14 nt, Human herpesvirus 4 (Epstein-Barr virus)
ugauacucaucugu

SEQ ID NO: 138007 - RNA, 21 nt, Human herpesvirus 4 (Epstein-Barr virus)
ugauacucaucugugagacaa

SEQ ID NO: 138008 - RNA, 15 nt, Human herpesvirus 4 (Epstein-Barr virus)
ugauaagucaugaca

SEQ ID NO: 138009 - RNA, 12 nt, Human herpesvirus 4 (Epstein-Barr virus)
ugauaacugaca

SEQ ID NO: 138010 - RNA, 13 nt, Human herpesvirus 4 (Epstein-Barr virus)
ugagucugacuac

SEQ ID NO: 138011 - RNA, 14 nt, Human herpesvirus 4 (Epstein-Barr virus)
ugagugccaugugu

SEQ ID NO: 138012 - RNA, 18 nt, Human herpesvirus 4 (Epstein-Barr virus)
ugaguucuacaaugccag

SEQ ID NO: 138013 - RNA, 14 nt, Human herpesvirus 4 (Epstein-Barr virus)
ugagugucucccca

SEQ ID NO: 138014 - RNA, 13 nt, Human herpesvirus 4 (Epstein-Barr virus)
ugagggcaaagac

SEQ ID NO: 138015 - RNA, 11 nt, Human herpesvirus 4 (Epstein-Barr virus)
ugagggggcca

SEQ ID NO: 138016 - RNA, 23 nt, Human herpesvirus 4 (Epstein-Barr virus)
ugagggggcggucaccgaugaga

SEQ ID NO: 138017 - RNA, 18 nt, Human herpesvirus 4 (Epstein-Barr virus)
ugaggacccaccuuuuaa

SEQ ID NO: 138018 - RNA, 13 nt, Human herpesvirus 4 (Epstein-Barr virus)
ugaggccacgcuu

SEQ ID NO: 138019 - RNA, 12 nt, Human herpesvirus 4 (Epstein-Barr virus)
ugaguccaaaca

SEQ ID NO: 138020 - RNA, 19 nt, Human herpesvirus 4 (Epstein-Barr virus)
ugaggaacauggaugugaa

SEQ ID NO: 138021 - RNA, 14 nt, Human herpesvirus 4 (Epstein-Barr virus)
ugaggaacggugau

SEQ ID NO: 138022 - RNA, 22 nt, Human herpesvirus 4 (Epstein-Barr virus)
ugaggcaaaagacuauguucuc

SEQ ID NO: 138023 - RNA, 15 nt, Human herpesvirus 4 (Epstein-Barr virus)
ugagcuccucuccaa

SEQ ID NO: 138024 - RNA, 17 nt, Human herpesvirus 4 (Epstein-Barr virus)
ugagccgcuuacagcuc

SEQ ID NO: 138025 - RNA, 15 nt, Human herpesvirus 4 (Epstein-Barr virus)
ugcuucgcauuacac

SEQ ID NO: 138026 - RNA, 15 nt, Human herpesvirus 4 (Epstein-Barr virus)
ugcugacauauguac

SEQ ID NO: 138027 - RNA, 14 nt, Human herpesvirus 4 (Epstein-Barr virus)
ugcugaauauugcc

SEQ ID NO: 138028 - RNA, 19 nt, Human herpesvirus 4 (Epstein-Barr virus)
uggaaucauuugaaggaca

SEQ ID NO: 138029 - RNA, 20 nt, Human herpesvirus 4 (Epstein-Barr virus)
uggacaacgacacagugaug

SEQ ID NO: 138030 - RNA, 15 nt, Human herpesvirus 4 (Epstein-Barr virus)
uggacacacauggca

SEQ ID NO: 138031 - RNA, 21 nt, Human herpesvirus 4 (Epstein-Barr virus)
uggacacccaccacacagcau

SEQ ID NO: 138032 - RNA, 14 nt, Human herpesvirus 4 (Epstein-Barr virus)
ugcuugugaucaug

SEQ ID NO: 138033 - RNA, 21 nt, Human herpesvirus 4 (Epstein-Barr virus)
ugcgagggggccuggugccag

SEQ ID NO: 138034 - RNA, 16 nt, Human herpesvirus 4 (Epstein-Barr virus)
ugcgguuauaacugcc

SEQ ID NO: 138035 - RNA, 19 nt, Human herpesvirus 4 (Epstein-Barr virus)
ugcgguuauaacugccaga

SEQ ID NO: 138036 - RNA, 18 nt, Human herpesvirus 4 (Epstein-Barr virus)
ugcguaaucauuaccucu

SEQ ID NO: 138037 - RNA, 14 nt, Human herpesvirus 4 (Epstein-Barr virus)
ugcgucucauuccc

SEQ ID NO: 138038 - RNA, 16 nt, Human herpesvirus 4 (Epstein-Barr virus)
ugcuaagccaggauaa

SEQ ID NO: 138039 - RNA, 22 nt, Human herpesvirus 4 (Epstein-Barr virus)
ugcucgucugcaccccagugga

SEQ ID NO: 138040 - RNA, 20 nt, Human herpesvirus 4 (Epstein-Barr virus)
ugcucucagcacuuugccag

SEQ ID NO: 138041 - RNA, 21 nt, Human herpesvirus 4 (Epstein-Barr virus)
ugcucucagcacuuugccagc

SEQ ID NO: 138042 - RNA, 18 nt, Human herpesvirus 4 (Epstein-Barr virus)
ugcucucguugccaaaac

SEQ ID NO: 138043 - RNA, 21 nt, Human herpesvirus 4 (Epstein-Barr virus)
ugcucucucuggagaucuucu

SEQ ID NO: 138044 - RNA, 18 nt, Human herpesvirus 4 (Epstein-Barr virus)
ugccaagagccccuccau

SEQ ID NO: 138045 - RNA, 20 nt, Human herpesvirus 4 (Epstein-Barr virus)
ugccaagagccccuccauag

SEQ ID NO: 138046 - RNA, 16 nt, Human herpesvirus 4 (Epstein-Barr virus)
ugccaauccaugccaa

SEQ ID NO: 138047 - RNA, 18 nt, Human herpesvirus 4 (Epstein-Barr virus)
ugccaauccaugccaaug

SEQ ID NO: 138048 - RNA, 19 nt, Human herpesvirus 4 (Epstein-Barr virus)
ugcaucacaagucacauca

SEQ ID NO: 138049 - RNA, 13 nt, Human herpesvirus 4 (Epstein-Barr virus)
ugcauacacugaa

SEQ ID NO: 138050 - RNA, 14 nt, Human herpesvirus 4 (Epstein-Barr virus)
ugcacacauuucag

SEQ ID NO: 138051 - RNA, 21 nt, Human herpesvirus 4 (Epstein-Barr virus)
ugcacagaacaucacugccac

SEQ ID NO: 138052 - RNA, 21 nt, Human herpesvirus 4 (Epstein-Barr virus)
ugcacaggcuuggaaacaccc

SEQ ID NO: 138053 - RNA, 22 nt, Human herpesvirus 4 (Epstein-Barr virus)
ugcacaggcuuggaaacaccca

SEQ ID NO: 138054 - RNA, 20 nt, Human herpesvirus 4 (Epstein-Barr virus)
ugcacccuggccgugcugga

SEQ ID NO: 138055 - RNA, 22 nt, Human herpesvirus 4 (Epstein-Barr virus)
ugcaccuugccggccaccuuug

SEQ ID NO: 138056 - RNA, 15 nt, Human herpesvirus 4 (Epstein-Barr virus)
ugcaccuugacugua

SEQ ID NO: 138057 - RNA, 21 nt, Human herpesvirus 4 (Epstein-Barr virus)
ugcacuccaagugcaacaauc

SEQ ID NO: 138058 - RNA, 14 nt, Human herpesvirus 4 (Epstein-Barr virus)
ugccacaaggccag

SEQ ID NO: 138059 - RNA, 20 nt, Human herpesvirus 4 (Epstein-Barr virus)
ugccacgugggucucauggg

SEQ ID NO: 138060 - RNA, 13 nt, Human herpesvirus 4 (Epstein-Barr virus)
ugccagagccucu

SEQ ID NO: 138061 - RNA, 17 nt, Human herpesvirus 4 (Epstein-Barr virus)
ugccagagcuguguuuc

SEQ ID NO: 138062 - RNA, 15 nt, Human herpesvirus 4 (Epstein-Barr virus)
ugccaucgggacaga

SEQ ID NO: 138063 - RNA, 11 nt, Human herpesvirus 4 (Epstein-Barr virus)
ugcccauccau

SEQ ID NO: 138064 - RNA, 14 nt, Human herpesvirus 4 (Epstein-Barr virus)
ugccauggugccaa

SEQ ID NO: 138065 - RNA, 19 nt, Human herpesvirus 4 (Epstein-Barr virus)
ugccauggugccaagcuca

SEQ ID NO: 138066 - RNA, 17 nt, Human herpesvirus 4 (Epstein-Barr virus)
ugccuuuuguacaagcu

SEQ ID NO: 138067 - RNA, 17 nt, Human herpesvirus 4 (Epstein-Barr virus)
ugcgaaaauucagucau

SEQ ID NO: 138068 - RNA, 12 nt, Human herpesvirus 4 (Epstein-Barr virus)
ugcgaaacuugg

SEQ ID NO: 138069 - RNA, 13 nt, Human herpesvirus 4 (Epstein-Barr virus)
ugccuugcucuca

SEQ ID NO: 138070 - RNA, 14 nt, Human herpesvirus 4 (Epstein-Barr virus)
ugccuugcucucag

SEQ ID NO: 138071 - RNA, 12 nt, Human herpesvirus 4 (Epstein-Barr virus)
ugcccccggggg

SEQ ID NO: 138072 - RNA, 20 nt, Human herpesvirus 4 (Epstein-Barr virus)
ugccccaaucgcgugccaaa

SEQ ID NO: 138073 - RNA, 22 nt, Human herpesvirus 4 (Epstein-Barr virus)
ugcccuggaggccucaggcaac

SEQ ID NO: 138074 - RNA, 19 nt, Human herpesvirus 4 (Epstein-Barr virus)
ugguccaggguccaggaga

SEQ ID NO: 138075 - RNA, 19 nt, Human herpesvirus 4 (Epstein-Barr virus)
uggucauggccagcuuuga

SEQ ID NO: 138076 - RNA, 20 nt, Human herpesvirus 4 (Epstein-Barr virus)
uggucaccgcgaccaagacu

SEQ ID NO: 138077 - RNA, 14 nt, Human herpesvirus 4 (Epstein-Barr virus)
uggucaagguguca

SEQ ID NO: 138078 - RNA, 18 nt, Human herpesvirus 4 (Epstein-Barr virus)
uggugccaccaucuggca

SEQ ID NO: 138079 - RNA, 18 nt, Human herpesvirus 4 (Epstein-Barr virus)
ugguguagacagauccca

SEQ ID NO: 138080 - RNA, 14 nt, Human herpesvirus 4 (Epstein-Barr virus)
ugguggguguccuc

SEQ ID NO: 138081 - RNA, 15 nt, Human herpesvirus 4 (Epstein-Barr virus)
ugguggaggaggacc

SEQ ID NO: 138082 - RNA, 17 nt, Human herpesvirus 4 (Epstein-Barr virus)
uggugcgguuauaacug

SEQ ID NO: 138083 - RNA, 20 nt, Human herpesvirus 4 (Epstein-Barr virus)
uggugcgguuauaacugcca

SEQ ID NO: 138084 - RNA, 23 nt, Human herpesvirus 4 (Epstein-Barr virus)
uggacagguacuaacacgcaaua

SEQ ID NO: 138085 - RNA, 12 nt, Human herpesvirus 4 (Epstein-Barr virus)
uggacaucuagu

SEQ ID NO: 138086 - RNA, 22 nt, Human herpesvirus 4 (Epstein-Barr virus)
uggaugguguuggagacgguga

SEQ ID NO: 138087 - RNA, 19 nt, Human herpesvirus 4 (Epstein-Barr virus)
uggcacgacuguuccuaua

SEQ ID NO: 138088 - RNA, 23 nt, Human herpesvirus 4 (Epstein-Barr virus)
uggcaacuccucuuacaccagag

SEQ ID NO: 138089 - RNA, 22 nt, Human herpesvirus 4 (Epstein-Barr virus)
uggauugaguaagcauggggcu

SEQ ID NO: 138090 - RNA, 17 nt, Human herpesvirus 4 (Epstein-Barr virus)
uggcaacgaccagucau

SEQ ID NO: 138091 - RNA, 16 nt, Human herpesvirus 4 (Epstein-Barr virus)
ugggcuucgggggccu

SEQ ID NO: 138092 - RNA, 21 nt, Human herpesvirus 4 (Epstein-Barr virus)
ugggccuuggacucgggguga

SEQ ID NO: 138093 - RNA, 20 nt, Human herpesvirus 4 (Epstein-Barr virus)
ugggccucuaaguacagguc

SEQ ID NO: 138094 - RNA, 18 nt, Human herpesvirus 4 (Epstein-Barr virus)
uggcacucuuaccuuccu

SEQ ID NO: 138095 - RNA, 17 nt, Human herpesvirus 4 (Epstein-Barr virus)
ugggggccugugucuuc

SEQ ID NO: 138096 - RNA, 18 nt, Human herpesvirus 4 (Epstein-Barr virus)
ugggggaaaccugcgaaa

SEQ ID NO: 138097 - RNA, 22 nt, Human herpesvirus 4 (Epstein-Barr virus)
ugggggcuguagaaggagguga

SEQ ID NO: 138098 - RNA, 17 nt, Human herpesvirus 4 (Epstein-Barr virus)
ugggggugggugcaaga

SEQ ID NO: 138099 - RNA, 20 nt, Human herpesvirus 4 (Epstein-Barr virus)
ugggggugucaacaaagaac

SEQ ID NO: 138100 - RNA, 19 nt, Human herpesvirus 4 (Epstein-Barr virus)
ugggguauucucagaugca

SEQ ID NO: 138101 - RNA, 17 nt, Human herpesvirus 4 (Epstein-Barr virus)
ugggguccggucuugca

SEQ ID NO: 138102 - RNA, 18 nt, Human herpesvirus 4 (Epstein-Barr virus)
ugggguccggucuugcag

SEQ ID NO: 138103 - RNA, 13 nt, Human herpesvirus 4 (Epstein-Barr virus)
uggggucucaggc

SEQ ID NO: 138104 - RNA, 23 nt, Human herpesvirus 4 (Epstein-Barr virus)
uggggcauuaggcgacucugcau

SEQ ID NO: 138105 - RNA, 13 nt, Human herpesvirus 4 (Epstein-Barr virus)
ugucuuuccucuu

SEQ ID NO: 138106 - RNA, 17 nt, Human herpesvirus 4 (Epstein-Barr virus)
ugucuuugccaaccugc

SEQ ID NO: 138107 - RNA, 22 nt, Human herpesvirus 4 (Epstein-Barr virus)
ugucuuugccaaccugcucucu

SEQ ID NO: 138108 - RNA, 21 nt, Human herpesvirus 4 (Epstein-Barr virus)
uguacaaacccaacaauguga

SEQ ID NO: 138109 - RNA, 20 nt, Human herpesvirus 4 (Epstein-Barr virus)
uguacauaauguaugccaug

SEQ ID NO: 138110 - RNA, 13 nt, Human herpesvirus 4 (Epstein-Barr virus)
uguacaagcuuuu

SEQ ID NO: 138111 - RNA, 15 nt, Human herpesvirus 4 (Epstein-Barr virus)
uguacaauggggcca

SEQ ID NO: 138112 - RNA, 15 nt, Human herpesvirus 4 (Epstein-Barr virus)
uguacuaaauuugcu

SEQ ID NO: 138113 - RNA, 17 nt, Human herpesvirus 4 (Epstein-Barr virus)
uguaccugaugagucac

SEQ ID NO: 138114 - RNA, 23 nt, Human herpesvirus 4 (Epstein-Barr virus)
uguacugcgaugagggccuucca

SEQ ID NO: 138115 - RNA, 15 nt, Human herpesvirus 4 (Epstein-Barr virus)
ugugaccgucuacau

SEQ ID NO: 138116 - RNA, 18 nt, Human herpesvirus 4 (Epstein-Barr virus)
ugugaauauggcugcgga

SEQ ID NO: 138117 - RNA, 22 nt, Human herpesvirus 4 (Epstein-Barr virus)
ugugaacuuuaacauugaugaa

SEQ ID NO: 138118 - RNA, 15 nt, Human herpesvirus 4 (Epstein-Barr virus)
uguggaagaggaaac

SEQ ID NO: 138119 - RNA, 14 nt, Human herpesvirus 4 (Epstein-Barr virus)
ugugcuguacaugg

SEQ ID NO: 138120 - RNA, 16 nt, Human herpesvirus 4 (Epstein-Barr virus)
uguggccuuccucugc

SEQ ID NO: 138121 - RNA, 15 nt, Human herpesvirus 4 (Epstein-Barr virus)
ugugggggcuguaga

SEQ ID NO: 138122 - RNA, 16 nt, Human herpesvirus 4 (Epstein-Barr virus)
ugugggggcuguagaa

SEQ ID NO: 138123 - RNA, 21 nt, Human herpesvirus 4 (Epstein-Barr virus)
uguguaaccucacuguaauuc

SEQ ID NO: 138124 - RNA, 23 nt, Human herpesvirus 4 (Epstein-Barr virus)
uguguauugcucucguugccaaa

SEQ ID NO: 138125 - RNA, 20 nt, Human herpesvirus 4 (Epstein-Barr virus)
uguugcgagaaaaugagcca

SEQ ID NO: 138126 - RNA, 18 nt, Human herpesvirus 4 (Epstein-Barr virus)
uuaacauccgagaccucc

SEQ ID NO: 138127 - RNA, 22 nt, Human herpesvirus 4 (Epstein-Barr virus)
uguucgugagauugaucugucu

SEQ ID NO: 138128 - RNA, 13 nt, Human herpesvirus 4 (Epstein-Barr virus)
uguugaccucuac

SEQ ID NO: 138129 - RNA, 19 nt, Human herpesvirus 4 (Epstein-Barr virus)
uguucagggccgugcaugg

SEQ ID NO: 138130 - RNA, 20 nt, Human herpesvirus 4 (Epstein-Barr virus)
uguuccuauaugcucucgca

SEQ ID NO: 138131 - RNA, 18 nt, Human herpesvirus 4 (Epstein-Barr virus)
uguucgcacuccuaugca

SEQ ID NO: 138132 - RNA, 20 nt, Human herpesvirus 4 (Epstein-Barr virus)
uguguuuuuacccaucacac

SEQ ID NO: 138133 - RNA, 15 nt, Human herpesvirus 4 (Epstein-Barr virus)
uguuaaggcuguuga

SEQ ID NO: 138134 - RNA, 12 nt, Human herpesvirus 4 (Epstein-Barr virus)
uguguucuugcc

SEQ ID NO: 138135 - RNA, 19 nt, Human herpesvirus 4 (Epstein-Barr virus)
uguuaggagacgcccucaa

SEQ ID NO: 138136 - RNA, 16 nt, Human herpesvirus 4 (Epstein-Barr virus)
uuaauuacaagagaug

SEQ ID NO: 138137 - RNA, 18 nt, Human herpesvirus 4 (Epstein-Barr virus)
uuacugcacagaacauca

SEQ ID NO: 138138 - RNA, 20 nt, Human herpesvirus 4 (Epstein-Barr virus)
uuacagcacauuuuguucua

SEQ ID NO: 138139 - RNA, 16 nt, Human herpesvirus 4 (Epstein-Barr virus)
uuagacacggaagaca

SEQ ID NO: 138140 - RNA, 18 nt, Human herpesvirus 4 (Epstein-Barr virus)
uuauagcucuggcacugc

SEQ ID NO: 138141 - RNA, 18 nt, Human herpesvirus 4 (Epstein-Barr virus)
uuuugugugccuccucaa

SEQ ID NO: 138142 - RNA, 12 nt, Human herpesvirus 4 (Epstein-Barr virus)
uuugugugccuc

SEQ ID NO: 138143 - RNA, 16 nt, Human herpesvirus 4 (Epstein-Barr virus)
uuuuaaucuggaugua

SEQ ID NO: 138144 - RNA, 13 nt, Human herpesvirus 4 (Epstein-Barr virus)
uuuuaccccaguc

SEQ ID NO: 138145 - RNA, 21 nt, Human herpesvirus 4 (Epstein-Barr virus)
uuuuacagugguucuccugau

SEQ ID NO: 138146 - RNA, 21 nt, Human herpesvirus 4 (Epstein-Barr virus)
uuuguggccuuccucugccug

SEQ ID NO: 138147 - RNA, 20 nt, Human herpesvirus 4 (Epstein-Barr virus)
uuugugauucccagaaagaa

SEQ ID NO: 138148 - RNA, 13 nt, Human herpesvirus 4 (Epstein-Barr virus)
uuguccaggagac

SEQ ID NO: 138149 - RNA, 18 nt, Human herpesvirus 4 (Epstein-Barr virus)
uugucaccauuuucgucc

SEQ ID NO: 138150 - RNA, 13 nt, Human herpesvirus 4 (Epstein-Barr virus)
uugucacugagaa

SEQ ID NO: 138151 - RNA, 12 nt, Human herpesvirus 4 (Epstein-Barr virus)
uuuggaggacag

SEQ ID NO: 138152 - RNA, 18 nt, Human herpesvirus 4 (Epstein-Barr virus)
uuuguaaucgcagcucua

SEQ ID NO: 138153 - RNA, 16 nt, Human herpesvirus 4 (Epstein-Barr virus)
uuggcgggacuggcac

SEQ ID NO: 138154 - RNA, 21 nt, Human herpesvirus 4 (Epstein-Barr virus)
ucucgaugauugagaaugcca

SEQ ID NO: 138155 - RNA, 14 nt, Human herpesvirus 4 (Epstein-Barr virus)
ucuauacggccaca

SEQ ID NO: 138156 - RNA, 15 nt, Human herpesvirus 4 (Epstein-Barr virus)
ucuaguuaccacagg

SEQ ID NO: 138157 - RNA, 23 nt, Human herpesvirus 4 (Epstein-Barr virus)
ucuaguaugaaggcuggcaaaga

SEQ ID NO: 138158 - RNA, 18 nt, Human herpesvirus 4 (Epstein-Barr virus)
ucucuguuucuguacaau

SEQ ID NO: 138159 - RNA, 16 nt, Human herpesvirus 4 (Epstein-Barr virus)
ucucuucuguuugcau

SEQ ID NO: 138160 - RNA, 18 nt, Human herpesvirus 4 (Epstein-Barr virus)
ucucuucuguuugcauug

SEQ ID NO: 138161 - RNA, 17 nt, Human herpesvirus 4 (Epstein-Barr virus)
ucucugauggccuggag

SEQ ID NO: 138162 - RNA, 14 nt, Human herpesvirus 4 (Epstein-Barr virus)
ucucguugccaaaa

SEQ ID NO: 138163 - RNA, 14 nt, Human herpesvirus 4 (Epstein-Barr virus)
ucucggauagggga

SEQ ID NO: 138164 - RNA, 16 nt, Human herpesvirus 4 (Epstein-Barr virus)
ucucuaucuacaacaa

SEQ ID NO: 138165 - RNA, 21 nt, Human herpesvirus 4 (Epstein-Barr virus)
ucucucgcgugauuuccauag

SEQ ID NO: 138166 - RNA, 17 nt, Human herpesvirus 4 (Epstein-Barr virus)
ucuacugccuuguccac

SEQ ID NO: 138167 - RNA, 13 nt, Human herpesvirus 4 (Epstein-Barr virus)
ucuacccagagga

SEQ ID NO: 138168 - RNA, 17 nt, Human herpesvirus 4 (Epstein-Barr virus)
ucuacgccccagaugaa

SEQ ID NO: 138169 - RNA, 12 nt, Human herpesvirus 4 (Epstein-Barr virus)
ucuacaaugcca

SEQ ID NO: 138170 - RNA, 13 nt, Human herpesvirus 4 (Epstein-Barr virus)
ucuacaaugccag

SEQ ID NO: 138171 - RNA, 19 nt, Human herpesvirus 4 (Epstein-Barr virus)
ucgcaagcuccuuugccuu

SEQ ID NO: 138172 - RNA, 20 nt, Human herpesvirus 4 (Epstein-Barr virus)
ucgcacucuuguugcuagcc

SEQ ID NO: 138173 - RNA, 23 nt, Human herpesvirus 4 (Epstein-Barr virus)
ucgccccuaucuuaacccaauuc

SEQ ID NO: 138174 - RNA, 17 nt, Human herpesvirus 4 (Epstein-Barr virus)
ucgcccacuaaccuuaa

SEQ ID NO: 138175 - RNA, 23 nt, Human herpesvirus 4 (Epstein-Barr virus)
ucuuccaauccgaaagcacuuug

SEQ ID NO: 138176 - RNA, 18 nt, Human herpesvirus 4 (Epstein-Barr virus)
ucuuccacaccauccaca

SEQ ID NO: 138177 - RNA, 14 nt, Human herpesvirus 4 (Epstein-Barr virus)
ucuucauguccacu

SEQ ID NO: 138178 - RNA, 16 nt, Human herpesvirus 4 (Epstein-Barr virus)
ucuucauguccacuga

SEQ ID NO: 138179 - RNA, 23 nt, Human herpesvirus 4 (Epstein-Barr virus)
ucuucaaccuuggcaguguccuc

SEQ ID NO: 138180 - RNA, 13 nt, Human herpesvirus 4 (Epstein-Barr virus)
ucuucaggucuga

SEQ ID NO: 138181 - RNA, 17 nt, Human herpesvirus 4 (Epstein-Barr virus)
ucuugcacccaccccca

SEQ ID NO: 138182 - RNA, 15 nt, Human herpesvirus 4 (Epstein-Barr virus)
ucuucuucauagccu

SEQ ID NO: 138183 - RNA, 16 nt, Human herpesvirus 4 (Epstein-Barr virus)
ucuugcgcccaggcac

SEQ ID NO: 138184 - RNA, 22 nt, Human herpesvirus 4 (Epstein-Barr virus)
ucuugccguggcgccuggggau

SEQ ID NO: 138185 - RNA, 23 nt, Human herpesvirus 4 (Epstein-Barr virus)
ucugacuacucagaugaagacga

SEQ ID NO: 138186 - RNA, 17 nt, Human herpesvirus 4 (Epstein-Barr virus)
ucucuuguuucggguag

SEQ ID NO: 138187 - RNA, 20 nt, Human herpesvirus 4 (Epstein-Barr virus)
ucucuuucuggccaaccugc

SEQ ID NO: 138188 - RNA, 16 nt, Human herpesvirus 4 (Epstein-Barr virus)
ucugagggcagugaua

SEQ ID NO: 138189 - RNA, 16 nt, Human herpesvirus 4 (Epstein-Barr virus)
ucugagcaccaacaca

SEQ ID NO: 138190 - RNA, 18 nt, Human herpesvirus 4 (Epstein-Barr virus)
ucugagcaccaacacaac

SEQ ID NO: 138191 - RNA, 23 nt, Human herpesvirus 4 (Epstein-Barr virus)
ucuguggugggcucuguacuugu

SEQ ID NO: 138192 - RNA, 19 nt, Human herpesvirus 4 (Epstein-Barr virus)
ucuguuaaggcuguugaca

SEQ ID NO: 138193 - RNA, 20 nt, Human herpesvirus 4 (Epstein-Barr virus)
ucuuagggagguggccacac

SEQ ID NO: 138194 - RNA, 16 nt, Human herpesvirus 4 (Epstein-Barr virus)
ucuuagguaucuggau

SEQ ID NO: 138195 - RNA, 21 nt, Human herpesvirus 4 (Epstein-Barr virus)
ucuuagguaucuggaucuacu

SEQ ID NO: 138196 - RNA, 21 nt, Human herpesvirus 4 (Epstein-Barr virus)
ugauggccuggagagcaugca

SEQ ID NO: 138197 - RNA, 12 nt, Human herpesvirus 4 (Epstein-Barr virus)
ugauguagcuau

SEQ ID NO: 138198 - RNA, 18 nt, Human herpesvirus 4 (Epstein-Barr virus)
ugauguagcuauacuuuc

SEQ ID NO: 138199 - RNA, 13 nt, Human herpesvirus 4 (Epstein-Barr virus)
ugauguacuuucc

SEQ ID NO: 138200 - RNA, 16 nt, Human herpesvirus 4 (Epstein-Barr virus)
ugaugagucugacuac

SEQ ID NO: 138201 - RNA, 19 nt, Human herpesvirus 4 (Epstein-Barr virus)
ugaucuuugacugacacau

SEQ ID NO: 138202 - RNA, 23 nt, Human herpesvirus 4 (Epstein-Barr virus)
ugcaccaguuucuuuccgcggug

SEQ ID NO: 138203 - RNA, 23 nt, Human herpesvirus 4 (Epstein-Barr virus)
ugcacacauuucagguaccccaa

SEQ ID NO: 138204 - RNA, 14 nt, Human herpesvirus 4 (Epstein-Barr virus)
ugcacaccuuggcg

SEQ ID NO: 138205 - RNA, 19 nt, Human herpesvirus 4 (Epstein-Barr virus)
ugagcgaugccucuacgcc

SEQ ID NO: 138206 - RNA, 18 nt, Human herpesvirus 4 (Epstein-Barr virus)
ugagccgcuuacagcucg

SEQ ID NO: 138207 - RNA, 22 nt, Human herpesvirus 4 (Epstein-Barr virus)
ugagaugaacacccccauacau

SEQ ID NO: 138208 - RNA, 14 nt, Human herpesvirus 4 (Epstein-Barr virus)
ugagccauuggcau

SEQ ID NO: 138209 - RNA, 22 nt, Human herpesvirus 4 (Epstein-Barr virus)
ugagcccauucucguccaucuc

SEQ ID NO: 138210 - RNA, 22 nt, Human herpesvirus 4 (Epstein-Barr virus)
ugagcacguguggaagaggaaa

SEQ ID NO: 138211 - RNA, 15 nt, Human herpesvirus 4 (Epstein-Barr virus)
ugagaacagucauca

SEQ ID NO: 138212 - RNA, 16 nt, Human herpesvirus 4 (Epstein-Barr virus)
ugagagccuacccaug

SEQ ID NO: 138213 - RNA, 19 nt, Human herpesvirus 4 (Epstein-Barr virus)
ugacuggugcuuguggugu

SEQ ID NO: 138214 - RNA, 14 nt, Human herpesvirus 4 (Epstein-Barr virus)
ugacuacaccaguc

SEQ ID NO: 138215 - RNA, 14 nt, Human herpesvirus 4 (Epstein-Barr virus)
ugacuacaccauca

SEQ ID NO: 138216 - RNA, 20 nt, Human herpesvirus 4 (Epstein-Barr virus)
ugaauugcuguuuuugccaa

SEQ ID NO: 138217 - RNA, 22 nt, Human herpesvirus 4 (Epstein-Barr virus)
ugaauuccccugccugcaugcu

SEQ ID NO: 138218 - RNA, 22 nt, Human herpesvirus 4 (Epstein-Barr virus)
ugaagguaaacaagcugacaga

SEQ ID NO: 138219 - RNA, 17 nt, Human herpesvirus 4 (Epstein-Barr virus)
ugaacuggucaccagcu

SEQ ID NO: 138220 - RNA, 21 nt, Human herpesvirus 4 (Epstein-Barr virus)
ugaaccagaauaaucucccca

SEQ ID NO: 138221 - RNA, 22 nt, Human herpesvirus 4 (Epstein-Barr virus)
ugaacgccuacgcagaggccau

SEQ ID NO: 138222 - RNA, 19 nt, Human herpesvirus 4 (Epstein-Barr virus)
ugaagaagauugaagacaa

SEQ ID NO: 138223 - RNA, 12 nt, Human herpesvirus 4 (Epstein-Barr virus)
ugaacaccacca

SEQ ID NO: 138224 - RNA, 13 nt, Human herpesvirus 4 (Epstein-Barr virus)
ucuuuaucuccau

SEQ ID NO: 138225 - RNA, 19 nt, Human herpesvirus 4 (Epstein-Barr virus)
ucagcaacugcguccucua

SEQ ID NO: 138226 - RNA, 14 nt, Human herpesvirus 4 (Epstein-Barr virus)
ucagcaucaauguc

SEQ ID NO: 138227 - RNA, 20 nt, Human herpesvirus 4 (Epstein-Barr virus)
ucagauagccggaccuccua

SEQ ID NO: 138228 - RNA, 17 nt, Human herpesvirus 4 (Epstein-Barr virus)
ucagaauugucacugag

SEQ ID NO: 138229 - RNA, 15 nt, Human herpesvirus 4 (Epstein-Barr virus)
ucagaccuacgccau

SEQ ID NO: 138230 - RNA, 17 nt, Human herpesvirus 4 (Epstein-Barr virus)
ucagacgagucugacua

SEQ ID NO: 138231 - RNA, 18 nt, Human herpesvirus 4 (Epstein-Barr virus)
ucagacgagucugacuac

SEQ ID NO: 138232 - RNA, 22 nt, Human herpesvirus 4 (Epstein-Barr virus)
ucagaagaauguccaaaagguc

SEQ ID NO: 138233 - RNA, 15 nt, Human herpesvirus 4 (Epstein-Barr virus)
ucacuuucaguggau

SEQ ID NO: 138234 - RNA, 20 nt, Human herpesvirus 4 (Epstein-Barr virus)
ucacuuucaguggaugcauc

SEQ ID NO: 138235 - RNA, 19 nt, Human herpesvirus 4 (Epstein-Barr virus)
ucacuuccucugcuuuucu

SEQ ID NO: 138236 - RNA, 18 nt, Human herpesvirus 4 (Epstein-Barr virus)
ucacugggacaacuguca

SEQ ID NO: 138237 - RNA, 21 nt, Human herpesvirus 4 (Epstein-Barr virus)
ucagucauaucggaugccuca

SEQ ID NO: 138238 - RNA, 20 nt, Human herpesvirus 4 (Epstein-Barr virus)
ucagguaccccaaaacuaua

SEQ ID NO: 138239 - RNA, 15 nt, Human herpesvirus 4 (Epstein-Barr virus)
ucagggccgugcaug

SEQ ID NO: 138240 - RNA, 16 nt, Human herpesvirus 4 (Epstein-Barr virus)
ucagggccgugcaugg

SEQ ID NO: 138241 - RNA, 17 nt, Human herpesvirus 4 (Epstein-Barr virus)
ucaguucuggugaugcu

SEQ ID NO: 138242 - RNA, 21 nt, Human herpesvirus 4 (Epstein-Barr virus)
ucagcccccccugugcuucua

SEQ ID NO: 138243 - RNA, 14 nt, Human herpesvirus 4 (Epstein-Barr virus)
ucagcgccguccac

SEQ ID NO: 138244 - RNA, 20 nt, Human herpesvirus 4 (Epstein-Barr virus)
ucagcgccguccacggccgu

SEQ ID NO: 138245 - RNA, 20 nt, Human herpesvirus 4 (Epstein-Barr virus)
ucaggaccugggagggccau

SEQ ID NO: 138246 - RNA, 21 nt, Human herpesvirus 4 (Epstein-Barr virus)
ucaggagacacggcucuguca

SEQ ID NO: 138247 - RNA, 16 nt, Human herpesvirus 4 (Epstein-Barr virus)
ucaggcaacaacuaug

SEQ ID NO: 138248 - RNA, 17 nt, Human herpesvirus 4 (Epstein-Barr virus)
ucaggccucccagucua

SEQ ID NO: 138249 - RNA, 21 nt, Human herpesvirus 4 (Epstein-Barr virus)
ucaggccucccagucuaucca

SEQ ID NO: 138250 - RNA, 23 nt, Human herpesvirus 4 (Epstein-Barr virus)
ucaggccucccagucuauccagg

SEQ ID NO: 138251 - RNA, 17 nt, Human herpesvirus 4 (Epstein-Barr virus)
uaugggcaaaacucaca

SEQ ID NO: 138252 - RNA, 23 nt, Human herpesvirus 4 (Epstein-Barr virus)
ucacagaggaggcuggugccuug

SEQ ID NO: 138253 - RNA, 17 nt, Human herpesvirus 4 (Epstein-Barr virus)
ucacaggacauguuugg

SEQ ID NO: 138254 - RNA, 14 nt, Human herpesvirus 4 (Epstein-Barr virus)
ucacaucaagcaga

SEQ ID NO: 138255 - RNA, 21 nt, Human herpesvirus 4 (Epstein-Barr virus)
ucacauuguccucaccaagga

SEQ ID NO: 138256 - RNA, 19 nt, Human herpesvirus 4 (Epstein-Barr virus)
ucacuccagccaucaugcu

SEQ ID NO: 138257 - RNA, 20 nt, Human herpesvirus 4 (Epstein-Barr virus)
ucacugauuuugggcacacu

SEQ ID NO: 138258 - RNA, 15 nt, Human herpesvirus 4 (Epstein-Barr virus)
ucacuaaacauugca

SEQ ID NO: 138259 - RNA, 15 nt, Human herpesvirus 4 (Epstein-Barr virus)
ucacgcgaagggaaa

SEQ ID NO: 138260 - RNA, 22 nt, Human herpesvirus 4 (Epstein-Barr virus)
ucacgggacgcagaaugugcag

SEQ ID NO: 138261 - RNA, 23 nt, Human herpesvirus 4 (Epstein-Barr virus)
ucaccuuccagacuaugcauaca

SEQ ID NO: 138262 - RNA, 20 nt, Human herpesvirus 4 (Epstein-Barr virus)
ucacgaagcgagacaguacu

SEQ ID NO: 138263 - RNA, 16 nt, Human herpesvirus 4 (Epstein-Barr virus)
ucaccguaccaugagu

SEQ ID NO: 138264 - RNA, 21 nt, Human herpesvirus 4 (Epstein-Barr virus)
ucaccuaagaaugggagcaac

SEQ ID NO: 138265 - RNA, 20 nt, Human herpesvirus 4 (Epstein-Barr virus)
ucaccagcuucgagagccac

SEQ ID NO: 138266 - RNA, 15 nt, Human herpesvirus 4 (Epstein-Barr virus)
uccgaaagcacuuug

SEQ ID NO: 138267 - RNA, 20 nt, Human herpesvirus 4 (Epstein-Barr virus)
ucccucauucccccaugaga

SEQ ID NO: 138268 - RNA, 19 nt, Human herpesvirus 4 (Epstein-Barr virus)
ucccuccaagcggcacaga

SEQ ID NO: 138269 - RNA, 21 nt, Human herpesvirus 4 (Epstein-Barr virus)
ucccuccaagcggcacagauu

SEQ ID NO: 138270 - RNA, 14 nt, Human herpesvirus 4 (Epstein-Barr virus)
ucccugagauguga

SEQ ID NO: 138271 - RNA, 16 nt, Human herpesvirus 4 (Epstein-Barr virus)
ucccaacaacuuccaa

SEQ ID NO: 138272 - RNA, 14 nt, Human herpesvirus 4 (Epstein-Barr virus)
uccauuucauugcg

SEQ ID NO: 138273 - RNA, 12 nt, Human herpesvirus 4 (Epstein-Barr virus)
uccuagcacaaa

SEQ ID NO: 138274 - RNA, 23 nt, Human herpesvirus 4 (Epstein-Barr virus)
uccgagaggaugauccuguacaa

SEQ ID NO: 138275 - RNA, 12 nt, Human herpesvirus 4 (Epstein-Barr virus)
uccucagaggag

SEQ ID NO: 138276 - RNA, 18 nt, Human herpesvirus 4 (Epstein-Barr virus)
uccucagaaaacucugca

SEQ ID NO: 138277 - RNA, 15 nt, Human herpesvirus 4 (Epstein-Barr virus)
uccucaccacucgaa

SEQ ID NO: 138278 - RNA, 24 nt, Human herpesvirus 4 (Epstein-Barr virus)
uccucaccacucgaaacuauggca

SEQ ID NO: 138279 - RNA, 15 nt, Human herpesvirus 4 (Epstein-Barr virus)
uccuucucaugcucc

SEQ ID NO: 138280 - RNA, 12 nt, Human herpesvirus 4 (Epstein-Barr virus)
uccuucugcucc

SEQ ID NO: 138281 - RNA, 11 nt, Human herpesvirus 4 (Epstein-Barr virus)
uccuguacaaa

SEQ ID NO: 138282 - RNA, 22 nt, Human herpesvirus 4 (Epstein-Barr virus)
uccuguguucuccccacgggaa

SEQ ID NO: 138283 - RNA, 23 nt, Human herpesvirus 4 (Epstein-Barr virus)
ucauuugaaggacagggggacuc

SEQ ID NO: 138284 - RNA, 14 nt, Human herpesvirus 4 (Epstein-Barr virus)
ucauagacacaccu

SEQ ID NO: 138285 - RNA, 15 nt, Human herpesvirus 4 (Epstein-Barr virus)
ucauaauggugccug

SEQ ID NO: 138286 - RNA, 16 nt, Human herpesvirus 4 (Epstein-Barr virus)
ucauaauggugccuga

SEQ ID NO: 138287 - RNA, 12 nt, Human herpesvirus 4 (Epstein-Barr virus)
ucauugugcuga

SEQ ID NO: 138288 - RNA, 18 nt, Human herpesvirus 4 (Epstein-Barr virus)
uccaacauuaaagccucc

SEQ ID NO: 138289 - RNA, 22 nt, Human herpesvirus 4 (Epstein-Barr virus)
uccaccugccggagggacagua

SEQ ID NO: 138290 - RNA, 15 nt, Human herpesvirus 4 (Epstein-Barr virus)
uccacggggacacgc

SEQ ID NO: 138291 - RNA, 21 nt, Human herpesvirus 4 (Epstein-Barr virus)
uccagugggguaaaugcaccu

SEQ ID NO: 138292 - RNA, 14 nt, Human herpesvirus 4 (Epstein-Barr virus)
uccagguguggaaa

SEQ ID NO: 138293 - RNA, 14 nt, Human herpesvirus 4 (Epstein-Barr virus)
uccaucagggccag

SEQ ID NO: 138294 - RNA, 17 nt, Human herpesvirus 4 (Epstein-Barr virus)
uccaucagggccaggcu

SEQ ID NO: 138295 - RNA, 19 nt, Human herpesvirus 4 (Epstein-Barr virus)
uccaucggauaaacagggg

SEQ ID NO: 138296 - RNA, 22 nt, Human herpesvirus 4 (Epstein-Barr virus)
uccauguccuguggugugcuuu

SEQ ID NO: 138297 - RNA, 23 nt, Human herpesvirus 4 (Epstein-Barr virus)
uccauguacaacuaccugucuga

SEQ ID NO: 138298 - RNA, 18 nt, Human herpesvirus 4 (Epstein-Barr virus)
uccagacuaugcauacac

SEQ ID NO: 138299 - RNA, 16 nt, Human herpesvirus 4 (Epstein-Barr virus)
uccagacgcgauggca

SEQ ID NO: 138300 - RNA, 13 nt, Human herpesvirus 4 (Epstein-Barr virus)
uccaggggccaca

SEQ ID NO: 138301 - RNA, 14 nt, Human herpesvirus 4 (Epstein-Barr virus)
uccaggggccacac

SEQ ID NO: 138302 - RNA, 15 nt, Human herpesvirus 4 (Epstein-Barr virus)
uccagccaucaugcu

SEQ ID NO: 138303 - RNA, 18 nt, Human herpesvirus 4 (Epstein-Barr virus)
uucugcccccugucucuu

SEQ ID NO: 138304 - RNA, 19 nt, Human herpesvirus 4 (Epstein-Barr virus)
uucugcccccugucucuuu

SEQ ID NO: 138305 - RNA, 16 nt, Human herpesvirus 4 (Epstein-Barr virus)
uucuggcacgacuguu

SEQ ID NO: 138306 - RNA, 10 nt, Human herpesvirus 4 (Epstein-Barr virus)
uucuggccaa

SEQ ID NO: 138307 - RNA, 16 nt, Human herpesvirus 4 (Epstein-Barr virus)
uucugcuccagugccu

SEQ ID NO: 138308 - RNA, 17 nt, Human herpesvirus 4 (Epstein-Barr virus)
uucuugaccuugaugua

SEQ ID NO: 138309 - RNA, 19 nt, Human herpesvirus 4 (Epstein-Barr virus)
uugaggaacauggauguga

SEQ ID NO: 138310 - RNA, 14 nt, Human herpesvirus 4 (Epstein-Barr virus)
uugagggcaaagac

SEQ ID NO: 138311 - RNA, 12 nt, Human herpesvirus 4 (Epstein-Barr virus)
uugagggggcca

SEQ ID NO: 138312 - RNA, 15 nt, Human herpesvirus 4 (Epstein-Barr virus)
uugaggugccacaga

SEQ ID NO: 138313 - RNA, 13 nt, Human herpesvirus 4 (Epstein-Barr virus)
uugaguaagcaug

SEQ ID NO: 138314 - RNA, 22 nt, Human herpesvirus 4 (Epstein-Barr virus)
uugaucacuacuacaccgagca

SEQ ID NO: 138315 - RNA, 17 nt, Human herpesvirus 4 (Epstein-Barr virus)
uugaucuuugacugaca

SEQ ID NO: 138316 - RNA, 15 nt, Human herpesvirus 4 (Epstein-Barr virus)
uuggagaaaacgggg

SEQ ID NO: 138317 - RNA, 18 nt, Human herpesvirus 4 (Epstein-Barr virus)
uugcuccaccagcuucuc

SEQ ID NO: 138318 - RNA, 17 nt, Human herpesvirus 4 (Epstein-Barr virus)
uugcuaauguaccucau

SEQ ID NO: 138319 - RNA, 17 nt, Human herpesvirus 4 (Epstein-Barr virus)
uuggacaucuaguggca

SEQ ID NO: 138320 - RNA, 14 nt, Human herpesvirus 4 (Epstein-Barr virus)
uuggaguuuuacaa

SEQ ID NO: 138321 - RNA, 14 nt, Human herpesvirus 4 (Epstein-Barr virus)
uuggccuuuugcac

SEQ ID NO: 138322 - RNA, 16 nt, Human herpesvirus 4 (Epstein-Barr virus)
uugcccucuccagcaa

SEQ ID NO: 138323 - RNA, 14 nt, Human herpesvirus 4 (Epstein-Barr virus)
uugccuuuuugcca

SEQ ID NO: 138324 - RNA, 20 nt, Human herpesvirus 4 (Epstein-Barr virus)
uucaagagucucgccaucua

SEQ ID NO: 138325 - RNA, 19 nt, Human herpesvirus 4 (Epstein-Barr virus)
uuccaacgcauccaccauc

SEQ ID NO: 138326 - RNA, 14 nt, Human herpesvirus 4 (Epstein-Barr virus)
uuccaucggauaaa

SEQ ID NO: 138327 - RNA, 22 nt, Human herpesvirus 4 (Epstein-Barr virus)
uucccaaguguuuccagacacc

SEQ ID NO: 138328 - RNA, 20 nt, Human herpesvirus 4 (Epstein-Barr virus)
uucccacugugccuaaacgu

SEQ ID NO: 138329 - RNA, 23 nt, Human herpesvirus 4 (Epstein-Barr virus)
uuaugggcaaaacucacaggaca

SEQ ID NO: 138330 - RNA, 21 nt, Human herpesvirus 4 (Epstein-Barr virus)
uuaugaaaugcagguuugacu

SEQ ID NO: 138331 - RNA, 19 nt, Human herpesvirus 4 (Epstein-Barr virus)
uuauucuugauugccucuu

SEQ ID NO: 138332 - RNA, 12 nt, Human herpesvirus 4 (Epstein-Barr virus)
uuauugcauuag

SEQ ID NO: 138333 - RNA, 13 nt, Human herpesvirus 4 (Epstein-Barr virus)
uuauucagcaauu

SEQ ID NO: 138334 - RNA, 13 nt, Human herpesvirus 4 (Epstein-Barr virus)
uuauuuaccacac

SEQ ID NO: 138335 - RNA, 14 nt, Human herpesvirus 4 (Epstein-Barr virus)
uuauacccagugag

SEQ ID NO: 138336 - RNA, 17 nt, Human herpesvirus 4 (Epstein-Barr virus)
uuagacagguaacucac

SEQ ID NO: 138337 - RNA, 15 nt, Human herpesvirus 4 (Epstein-Barr virus)
uuaacuaagcuuaug

SEQ ID NO: 138338 - RNA, 15 nt, Human herpesvirus 4 (Epstein-Barr virus)
uuaacuugacuacaa

SEQ ID NO: 138339 - RNA, 16 nt, Human herpesvirus 4 (Epstein-Barr virus)
uuaacuuuaacaagac

SEQ ID NO: 138340 - RNA, 15 nt, Human herpesvirus 4 (Epstein-Barr virus)
uguguccagugccua

SEQ ID NO: 138341 - RNA, 15 nt, Human herpesvirus 4 (Epstein-Barr virus)
uguguacuuguccuc

SEQ ID NO: 138342 - RNA, 19 nt, Human herpesvirus 4 (Epstein-Barr virus)
uguggccccggcuggccau

SEQ ID NO: 138343 - RNA, 13 nt, Human herpesvirus 4 (Epstein-Barr virus)
uguggauaacauc

SEQ ID NO: 138344 - RNA, 15 nt, Human herpesvirus 4 (Epstein-Barr virus)
uuaaggcuguugaca

SEQ ID NO: 138345 - RNA, 18 nt, Human herpesvirus 4 (Epstein-Barr virus)
uuaaggaaugaacacuca

SEQ ID NO: 138346 - RNA, 13 nt, Human herpesvirus 4 (Epstein-Barr virus)
uuaagcagcacug

SEQ ID NO: 138347 - RNA, 15 nt, Human herpesvirus 4 (Epstein-Barr virus)
uuaagcagcacugaa

SEQ ID NO: 138348 - RNA, 17 nt, Human herpesvirus 4 (Epstein-Barr virus)
uuacaucugcccggcua

SEQ ID NO: 138349 - RNA, 23 nt, Human herpesvirus 4 (Epstein-Barr virus)
uuaccacacccccacuuuuccaa

SEQ ID NO: 138350 - RNA, 23 nt, Human herpesvirus 4 (Epstein-Barr virus)
uuaccuuuuugccaaugacccac

SEQ ID NO: 138351 - RNA, 23 nt, Human herpesvirus 4 (Epstein-Barr virus)
uguaaaacuuggaggcugcuaag

SEQ ID NO: 138352 - RNA, 15 nt, Human herpesvirus 4 (Epstein-Barr virus)
uggucauguuucccu

SEQ ID NO: 138353 - RNA, 16 nt, Human herpesvirus 4 (Epstein-Barr virus)
ugguauccaccuagaa

SEQ ID NO: 138354 - RNA, 16 nt, Human herpesvirus 4 (Epstein-Barr virus)
uggucguguucccuca

SEQ ID NO: 138355 - RNA, 21 nt, Human herpesvirus 4 (Epstein-Barr virus)
uggucuccuuguugaccucua

SEQ ID NO: 138356 - RNA, 12 nt, Human herpesvirus 4 (Epstein-Barr virus)
ugggacuugaag

SEQ ID NO: 138357 - RNA, 18 nt, Human herpesvirus 4 (Epstein-Barr virus)
ugggaauaacaagggaag

SEQ ID NO: 138358 - RNA, 21 nt, Human herpesvirus 4 (Epstein-Barr virus)
ugggcaaaacucacaggacau

SEQ ID NO: 138359 - RNA, 20 nt, Human herpesvirus 4 (Epstein-Barr virus)
ugggaugaacccuggggcaa

SEQ ID NO: 138360 - RNA, 21 nt, Human herpesvirus 4 (Epstein-Barr virus)
uggcacugcuagcgucacuga

SEQ ID NO: 138361 - RNA, 13 nt, Human herpesvirus 4 (Epstein-Barr virus)
uggcacucauggu

SEQ ID NO: 138362 - RNA, 21 nt, Human herpesvirus 4 (Epstein-Barr virus)
uggcacucaugguacggugau

SEQ ID NO: 138363 - RNA, 19 nt, Human herpesvirus 4 (Epstein-Barr virus)
uggcagaaucaccagagcc

SEQ ID NO: 138364 - RNA, 13 nt, Human herpesvirus 4 (Epstein-Barr virus)
uggcagggggccg

SEQ ID NO: 138365 - RNA, 15 nt, Human herpesvirus 4 (Epstein-Barr virus)
uggccacacugggga

SEQ ID NO: 138366 - RNA, 13 nt, Human herpesvirus 4 (Epstein-Barr virus)
uggccaaccugcc

SEQ ID NO: 138367 - RNA, 15 nt, Human herpesvirus 4 (Epstein-Barr virus)
uggcccaccuaaaga

SEQ ID NO: 138368 - RNA, 14 nt, Human herpesvirus 4 (Epstein-Barr virus)
uggccagcuuugag

SEQ ID NO: 138369 - RNA, 16 nt, Human herpesvirus 4 (Epstein-Barr virus)
uggccaugaaucugac

SEQ ID NO: 138370 - RNA, 18 nt, Human herpesvirus 4 (Epstein-Barr virus)
uggccauucgacaggcca

SEQ ID NO: 138371 - RNA, 20 nt, Human herpesvirus 4 (Epstein-Barr virus)
uggccaccuucuccaucucc

SEQ ID NO: 138372 - RNA, 22 nt, Human herpesvirus 4 (Epstein-Barr virus)
uggccagcggggagagggugga

SEQ ID NO: 138373 - RNA, 18 nt, Human herpesvirus 4 (Epstein-Barr virus)
uggccuuggggguggugg

SEQ ID NO: 138374 - RNA, 18 nt, Human herpesvirus 4 (Epstein-Barr virus)
uggcgauuuuaaucugga

SEQ ID NO: 138375 - RNA, 13 nt, Human herpesvirus 4 (Epstein-Barr virus)
ugggaaaaugggc

SEQ ID NO: 138376 - RNA, 21 nt, Human herpesvirus 4 (Epstein-Barr virus)
uggccucgucaggagggcaga

SEQ ID NO: 138377 - RNA, 16 nt, Human herpesvirus 4 (Epstein-Barr virus)
uggccgugcuggauga

SEQ ID NO: 138378 - RNA, 12 nt, Human herpesvirus 4 (Epstein-Barr virus)
uggccucaaagu

SEQ ID NO: 138379 - RNA, 14 nt, Human herpesvirus 4 (Epstein-Barr virus)
uggccuucuuccua

SEQ ID NO: 138380 - RNA, 19 nt, Human herpesvirus 4 (Epstein-Barr virus)
uggccuucuuccuagccuu

SEQ ID NO: 138381 - RNA, 17 nt, Human herpesvirus 4 (Epstein-Barr virus)
uggcccugaucugggag

SEQ ID NO: 138382 - RNA, 16 nt, Human herpesvirus 4 (Epstein-Barr virus)
uggccccggcuggcca

SEQ ID NO: 138383 - RNA, 20 nt, Human herpesvirus 4 (Epstein-Barr virus)
uggcccgucccucuuguccc

SEQ ID NO: 138384 - RNA, 20 nt, Human herpesvirus 4 (Epstein-Barr virus)
uggccggcagccuggcucaa

SEQ ID NO: 138385 - RNA, 19 nt, Human herpesvirus 4 (Epstein-Barr virus)
ugucccuuucaguggucac

SEQ ID NO: 138386 - RNA, 14 nt, Human herpesvirus 4 (Epstein-Barr virus)
ugucuguaaucucu

SEQ ID NO: 138387 - RNA, 15 nt, Human herpesvirus 4 (Epstein-Barr virus)
ugucuguaaucucua

SEQ ID NO: 138388 - RNA, 16 nt, Human herpesvirus 4 (Epstein-Barr virus)
ugucuguaaucucuaa

SEQ ID NO: 138389 - RNA, 17 nt, Human herpesvirus 4 (Epstein-Barr virus)
uguccagcagggccuug

SEQ ID NO: 138390 - RNA, 22 nt, Human herpesvirus 4 (Epstein-Barr virus)
ugucucaagcuacucaaugaga

SEQ ID NO: 138391 - RNA, 20 nt, Human herpesvirus 4 (Epstein-Barr virus)
uguccaagugcuaugaccau

SEQ ID NO: 138392 - RNA, 14 nt, Human herpesvirus 4 (Epstein-Barr virus)
ugucauucuaucaa

SEQ ID NO: 138393 - RNA, 17 nt, Human herpesvirus 4 (Epstein-Barr virus)
ugucauuuagaaaccuu

SEQ ID NO: 138394 - RNA, 18 nt, Human herpesvirus 4 (Epstein-Barr virus)
ugugaccgucuacaucaa

SEQ ID NO: 138395 - RNA, 14 nt, Human herpesvirus 4 (Epstein-Barr virus)
ugugaacuuuaaca

SEQ ID NO: 138396 - RNA, 17 nt, Human herpesvirus 4 (Epstein-Barr virus)
ugucacugagaaucucc

SEQ ID NO: 138397 - RNA, 12 nt, Human herpesvirus 4 (Epstein-Barr virus)
uguacauacugc

SEQ ID NO: 138398 - RNA, 15 nt, Human herpesvirus 4 (Epstein-Barr virus)
uguacgggaacauca

SEQ ID NO: 138399 - RNA, 13 nt, Human herpesvirus 4 (Epstein-Barr virus)
uguacgugccuca

SEQ ID NO: 138400 - RNA, 17 nt, Human herpesvirus 4 (Epstein-Barr virus)
uguacgugccucagaua

SEQ ID NO: 138401 - RNA, 19 nt, Human herpesvirus 4 (Epstein-Barr virus)
uguacuaaauuugcugaca

SEQ ID NO: 138402 - RNA, 12 nt, Human herpesvirus 4 (Epstein-Barr virus)
uguaacauuuaa

SEQ ID NO: 138403 - RNA, 18 nt, Human herpesvirus 4 (Epstein-Barr virus)
uguaacugugguuuccau

SEQ ID NO: 138404 - RNA, 22 nt, Human herpesvirus 4 (Epstein-Barr virus)
uguaaucgcagcucuaacuugg

SEQ ID NO: 138405 - RNA, 16 nt, Human herpesvirus 4 (Epstein-Barr virus)
uggaccucaaagaaga

SEQ ID NO: 138406 - RNA, 14 nt, Human herpesvirus 4 (Epstein-Barr virus)
uggacgucccuuug

SEQ ID NO: 138407 - RNA, 15 nt, Human herpesvirus 4 (Epstein-Barr virus)
uggacgugaaccucc

SEQ ID NO: 138408 - RNA, 13 nt, Human herpesvirus 4 (Epstein-Barr virus)
uggacugugguau

SEQ ID NO: 138409 - RNA, 19 nt, Human herpesvirus 4 (Epstein-Barr virus)
uggagaaaguaaccacaua

SEQ ID NO: 138410 - RNA, 19 nt, Human herpesvirus 4 (Epstein-Barr virus)
uggagaagcuggacgugaa

SEQ ID NO: 138411 - RNA, 13 nt, Human herpesvirus 4 (Epstein-Barr virus)
uggagaggcaaac

SEQ ID NO: 138412 - RNA, 15 nt, Human herpesvirus 4 (Epstein-Barr virus)
uggagcuguaacugu

SEQ ID NO: 138413 - RNA, 15 nt, Human herpesvirus 4 (Epstein-Barr virus)
uggaggcccccggcu

SEQ ID NO: 138414 - RNA, 12 nt, Human herpesvirus 4 (Epstein-Barr virus)
uggagggccgau

SEQ ID NO: 138415 - RNA, 18 nt, Human herpesvirus 4 (Epstein-Barr virus)
uggaaacacccauuccag

SEQ ID NO: 138416 - RNA, 15 nt, Human herpesvirus 4 (Epstein-Barr virus)
ugcuuugucuuugcc

SEQ ID NO: 138417 - RNA, 17 nt, Human herpesvirus 4 (Epstein-Barr virus)
ugcuuugucuuugccaa

SEQ ID NO: 138418 - RNA, 17 nt, Human herpesvirus 4 (Epstein-Barr virus)
ugcuugggcaugcugua

SEQ ID NO: 138419 - RNA, 14 nt, Human herpesvirus 4 (Epstein-Barr virus)
uggacacaggacua

SEQ ID NO: 138420 - RNA, 20 nt, Human herpesvirus 4 (Epstein-Barr virus)
uggaacucgaagcggucuca

SEQ ID NO: 138421 - RNA, 12 nt, Human herpesvirus 4 (Epstein-Barr virus)
ugcuguacaugg

SEQ ID NO: 138422 - RNA, 21 nt, Human herpesvirus 4 (Epstein-Barr virus)
ugcuguauuuacaaacacuac

SEQ ID NO: 138423 - RNA, 23 nt, Human herpesvirus 4 (Epstein-Barr virus)
ugcuguauuuacaaacacuacaa

SEQ ID NO: 138424 - RNA, 22 nt, Human herpesvirus 4 (Epstein-Barr virus)
ugcucuguguuuuuugccuggu

SEQ ID NO: 138425 - RNA, 14 nt, Human herpesvirus 4 (Epstein-Barr virus)
ugcucuuaaccauu

SEQ ID NO: 138426 - RNA, 21 nt, Human herpesvirus 4 (Epstein-Barr virus)
ugcugccagagccucugccac

SEQ ID NO: 138427 - RNA, 12 nt, Human herpesvirus 4 (Epstein-Barr virus)
ugcuugugaagg

SEQ ID NO: 138428 - RNA, 24 nt, Human herpesvirus 4 (Epstein-Barr virus)
ugcuguugguguauuucuggccau

SEQ ID NO: 138429 - RNA, 19 nt, Human herpesvirus 4 (Epstein-Barr virus)
ugcaccuugacuguaauca

SEQ ID NO: 138430 - RNA, 14 nt, Human herpesvirus 4 (Epstein-Barr virus)
ugcacuauauucuc

SEQ ID NO: 138431 - RNA, 16 nt, Human herpesvirus 4 (Epstein-Barr virus)
ugcuagcgucacugau

SEQ ID NO: 138432 - RNA, 14 nt, Human herpesvirus 4 (Epstein-Barr virus)
ugcucucguugcca

SEQ ID NO: 138433 - RNA, 15 nt, Human herpesvirus 4 (Epstein-Barr virus)
ugcucucguugccaa

SEQ ID NO: 138434 - RNA, 17 nt, Human herpesvirus 4 (Epstein-Barr virus)
ugcucucguugccaaaa

SEQ ID NO: 138435 - RNA, 13 nt, Human herpesvirus 4 (Epstein-Barr virus)
ugcucucuaucua

SEQ ID NO: 138436 - RNA, 22 nt, Human herpesvirus 4 (Epstein-Barr virus)
ugcuccaccagcuucucaaagg

SEQ ID NO: 138437 - RNA, 16 nt, Human herpesvirus 4 (Epstein-Barr virus)
ugcuaugaccaugccc

SEQ ID NO: 138438 - RNA, 20 nt, Human herpesvirus 4 (Epstein-Barr virus)
agguggugcuugugaaggua

SEQ ID NO: 138439 - RNA, 12 nt, Human herpesvirus 4 (Epstein-Barr virus)
agguguacucuc

SEQ ID NO: 138440 - RNA, 19 nt, Human herpesvirus 4 (Epstein-Barr virus)
aggugucacgugaccuuuu

SEQ ID NO: 138441 - RNA, 15 nt, Human herpesvirus 4 (Epstein-Barr virus)
aggugccacagagca

SEQ ID NO: 138442 - RNA, 16 nt, Human herpesvirus 4 (Epstein-Barr virus)
aggugcccgggugcgu

SEQ ID NO: 138443 - RNA, 20 nt, Human herpesvirus 4 (Epstein-Barr virus)
aggugcucaaggcagucucc

SEQ ID NO: 138444 - RNA, 22 nt, Human herpesvirus 4 (Epstein-Barr virus)
aggcgcuguuauggccaugaua

SEQ ID NO: 138445 - RNA, 19 nt, Human herpesvirus 4 (Epstein-Barr virus)
aggccucccagucuaucca

SEQ ID NO: 138446 - RNA, 20 nt, Human herpesvirus 4 (Epstein-Barr virus)
aggccuugguuucagccuca

SEQ ID NO: 138447 - RNA, 16 nt, Human herpesvirus 4 (Epstein-Barr virus)
aggugggacaaaaugg

SEQ ID NO: 138448 - RNA, 12 nt, Human herpesvirus 4 (Epstein-Barr virus)
aggugugcauga

SEQ ID NO: 138449 - RNA, 17 nt, Human herpesvirus 4 (Epstein-Barr virus)
agguguuguguccugua

SEQ ID NO: 138450 - RNA, 16 nt, Human herpesvirus 4 (Epstein-Barr virus)
agguuacugcacagaa

SEQ ID NO: 138451 - RNA, 22 nt, Human herpesvirus 4 (Epstein-Barr virus)
agguuagcguggacaguuugau

SEQ ID NO: 138452 - RNA, 22 nt, Human herpesvirus 4 (Epstein-Barr virus)
agguucucuucacuaaggcagu

SEQ ID NO: 138453 - RNA, 20 nt, Human herpesvirus 4 (Epstein-Barr virus)
agguucggaaaucuguugac

SEQ ID NO: 138454 - RNA, 22 nt, Human herpesvirus 4 (Epstein-Barr virus)
aguacacuagcuguuugcucua

SEQ ID NO: 138455 - RNA, 14 nt, Human herpesvirus 4 (Epstein-Barr virus)
aguaccccagugac

SEQ ID NO: 138456 - RNA, 15 nt, Human herpesvirus 4 (Epstein-Barr virus)
aguaccccagugacg

SEQ ID NO: 138457 - RNA, 21 nt, Human herpesvirus 4 (Epstein-Barr virus)
aguaccagcccuuuuuccagu

SEQ ID NO: 138458 - RNA, 23 nt, Human herpesvirus 4 (Epstein-Barr virus)
agucacaccccacggccaugcua

SEQ ID NO: 138459 - RNA, 12 nt, Human herpesvirus 4 (Epstein-Barr virus)
agucaguuacac

SEQ ID NO: 138460 - RNA, 22 nt, Human herpesvirus 4 (Epstein-Barr virus)
agucauacucaagagaucagca

SEQ ID NO: 138461 - RNA, 16 nt, Human herpesvirus 4 (Epstein-Barr virus)
agucauccgaggcuga

SEQ ID NO: 138462 - RNA, 20 nt, Human herpesvirus 4 (Epstein-Barr virus)
agucggugggcgguccucca

SEQ ID NO: 138463 - RNA, 21 nt, Human herpesvirus 4 (Epstein-Barr virus)
agucaugucgagcaugagcuc

SEQ ID NO: 138464 - RNA, 17 nt, Human herpesvirus 4 (Epstein-Barr virus)
agucauuagcggccuga

SEQ ID NO: 138465 - RNA, 17 nt, Human herpesvirus 4 (Epstein-Barr virus)
aguuuccuucuugaccu

SEQ ID NO: 138466 - RNA, 19 nt, Human herpesvirus 4 (Epstein-Barr virus)
aguuucuuuccgcgguggu

SEQ ID NO: 138467 - RNA, 20 nt, Human herpesvirus 4 (Epstein-Barr virus)
aguuucuuuccgcgguggug

SEQ ID NO: 138468 - RNA, 21 nt, Human herpesvirus 4 (Epstein-Barr virus)
aguuucuuuccgcgguggugg

SEQ ID NO: 138469 - RNA, 20 nt, Human herpesvirus 4 (Epstein-Barr virus)
aguugguccaggguccagga

SEQ ID NO: 138470 - RNA, 16 nt, Human herpesvirus 4 (Epstein-Barr virus)
aguugguggugggggc

SEQ ID NO: 138471 - RNA, 18 nt, Human herpesvirus 4 (Epstein-Barr virus)
aguuuaagcagcacugaa

SEQ ID NO: 138472 - RNA, 19 nt, Human herpesvirus 4 (Epstein-Barr virus)
aguuuaagcagcacugaau

SEQ ID NO: 138473 - RNA, 20 nt, Human herpesvirus 4 (Epstein-Barr virus)
aguuugauacucaccaagau

SEQ ID NO: 138474 - RNA, 15 nt, Human herpesvirus 4 (Epstein-Barr virus)
agucuucaggucuga

SEQ ID NO: 138475 - RNA, 13 nt, Human herpesvirus 4 (Epstein-Barr virus)
agugacacugaug

SEQ ID NO: 138476 - RNA, 22 nt, Human herpesvirus 4 (Epstein-Barr virus)
agucugacuacucagaugaaga

SEQ ID NO: 138477 - RNA, 18 nt, Human herpesvirus 4 (Epstein-Barr virus)
agucucgccaucuaccca

SEQ ID NO: 138478 - RNA, 15 nt, Human herpesvirus 4 (Epstein-Barr virus)
agucuaucaggaccu

SEQ ID NO: 138479 - RNA, 16 nt, Human herpesvirus 4 (Epstein-Barr virus)
agugugccucuguuau

SEQ ID NO: 138480 - RNA, 17 nt, Human herpesvirus 4 (Epstein-Barr virus)
aguguuuccagacacca

SEQ ID NO: 138481 - RNA, 19 nt, Human herpesvirus 4 (Epstein-Barr virus)
auaaugucuucaauagaca

SEQ ID NO: 138482 - RNA, 11 nt, Human herpesvirus 4 (Epstein-Barr virus)
auaauggugcc

SEQ ID NO: 138483 - RNA, 14 nt, Human herpesvirus 4 (Epstein-Barr virus)
auaaugacuaugag

SEQ ID NO: 138484 - RNA, 16 nt, Human herpesvirus 4 (Epstein-Barr virus)
auacaugucucagagg

SEQ ID NO: 138485 - RNA, 15 nt, Human herpesvirus 4 (Epstein-Barr virus)
auaccaggugccuuu

SEQ ID NO: 138486 - RNA, 16 nt, Human herpesvirus 4 (Epstein-Barr virus)
auaccaggugccuuuu

SEQ ID NO: 138487 - RNA, 20 nt, Human herpesvirus 4 (Epstein-Barr virus)
auaccaaagcuaacuguaca

SEQ ID NO: 138488 - RNA, 15 nt, Human herpesvirus 4 (Epstein-Barr virus)
auacaaaaacuugag

SEQ ID NO: 138489 - RNA, 23 nt, Human herpesvirus 4 (Epstein-Barr virus)
auaaggcucugaagcaacagguc

SEQ ID NO: 138490 - RNA, 17 nt, Human herpesvirus 4 (Epstein-Barr virus)
auaaccacaacugcuau

SEQ ID NO: 138491 - RNA, 23 nt, Human herpesvirus 4 (Epstein-Barr virus)
auaaccgcaccagcuaacaggac

SEQ ID NO: 138492 - RNA, 21 nt, Human herpesvirus 4 (Epstein-Barr virus)
auaaccuggagucugcauguc

SEQ ID NO: 138493 - RNA, 14 nt, Human herpesvirus 4 (Epstein-Barr virus)
auaccgagauguac

SEQ ID NO: 138494 - RNA, 13 nt, Human herpesvirus 4 (Epstein-Barr virus)
auauccccaaagu

SEQ ID NO: 138495 - RNA, 18 nt, Human herpesvirus 4 (Epstein-Barr virus)
auauccuagagggacagc

SEQ ID NO: 138496 - RNA, 15 nt, Human herpesvirus 4 (Epstein-Barr virus)
auauuaauaaauauc

SEQ ID NO: 138497 - RNA, 18 nt, Human herpesvirus 4 (Epstein-Barr virus)
auaugcucucgcacucuu

SEQ ID NO: 138498 - RNA, 18 nt, Human herpesvirus 4 (Epstein-Barr virus)
auaugaaaauguguauuc

SEQ ID NO: 138499 - RNA, 17 nt, Human herpesvirus 4 (Epstein-Barr virus)
aggaugauccuguacaa

SEQ ID NO: 138500 - RNA, 16 nt, Human herpesvirus 4 (Epstein-Barr virus)
aggauggaaagggcau

SEQ ID NO: 138501 - RNA, 22 nt, Human herpesvirus 4 (Epstein-Barr virus)
aggauggaaagggcauguggug

SEQ ID NO: 138502 - RNA, 15 nt, Human herpesvirus 4 (Epstein-Barr virus)
aggauggcacggucc

SEQ ID NO: 138503 - RNA, 15 nt, Human herpesvirus 4 (Epstein-Barr virus)
aggaucagggccaag

SEQ ID NO: 138504 - RNA, 18 nt, Human herpesvirus 4 (Epstein-Barr virus)
aggaugagaccaguggca

SEQ ID NO: 138505 - RNA, 17 nt, Human herpesvirus 4 (Epstein-Barr virus)
aggccagguagcccagc

SEQ ID NO: 138506 - RNA, 19 nt, Human herpesvirus 4 (Epstein-Barr virus)
aggcccgaccugccaaaga

SEQ ID NO: 138507 - RNA, 16 nt, Human herpesvirus 4 (Epstein-Barr virus)
aggcccggaugaucuc

SEQ ID NO: 138508 - RNA, 19 nt, Human herpesvirus 4 (Epstein-Barr virus)
aggcccgggggccuugucc

SEQ ID NO: 138509 - RNA, 18 nt, Human herpesvirus 4 (Epstein-Barr virus)
aggccucacgaucuucaa

SEQ ID NO: 138510 - RNA, 21 nt, Human herpesvirus 4 (Epstein-Barr virus)
aggccugccacgugggucuca

SEQ ID NO: 138511 - RNA, 16 nt, Human herpesvirus 4 (Epstein-Barr virus)
aggaaggcuugccaaa

SEQ ID NO: 138512 - RNA, 15 nt, Human herpesvirus 4 (Epstein-Barr virus)
aggaagagacuucac

SEQ ID NO: 138513 - RNA, 18 nt, Human herpesvirus 4 (Epstein-Barr virus)
aggaggcuggugccuugg

SEQ ID NO: 138514 - RNA, 23 nt, Human herpesvirus 4 (Epstein-Barr virus)
aggacacccaccaccaggcgguu

SEQ ID NO: 138515 - RNA, 15 nt, Human herpesvirus 4 (Epstein-Barr virus)
aggacacugccaagg

SEQ ID NO: 138516 - RNA, 13 nt, Human herpesvirus 4 (Epstein-Barr virus)
aggaggggggcag

SEQ ID NO: 138517 - RNA, 18 nt, Human herpesvirus 4 (Epstein-Barr virus)
aggaggggggcagugaua

SEQ ID NO: 138518 - RNA, 19 nt, Human herpesvirus 4 (Epstein-Barr virus)
aggaggggggcagugauaa

SEQ ID NO: 138519 - RNA, 16 nt, Human herpesvirus 4 (Epstein-Barr virus)
aggagugccucugggu

SEQ ID NO: 138520 - RNA, 12 nt, Human herpesvirus 4 (Epstein-Barr virus)
aggagugcugca

SEQ ID NO: 138521 - RNA, 14 nt, Human herpesvirus 4 (Epstein-Barr virus)
agcgggauagcagg

SEQ ID NO: 138522 - RNA, 13 nt, Human herpesvirus 4 (Epstein-Barr virus)
agcgucacugauu

SEQ ID NO: 138523 - RNA, 14 nt, Human herpesvirus 4 (Epstein-Barr virus)
agcggcuaccuguc

SEQ ID NO: 138524 - RNA, 14 nt, Human herpesvirus 4 (Epstein-Barr virus)
agcuaacaggacau

SEQ ID NO: 138525 - RNA, 21 nt, Human herpesvirus 4 (Epstein-Barr virus)
agcuaaugccauagucacgga

SEQ ID NO: 138526 - RNA, 20 nt, Human herpesvirus 4 (Epstein-Barr virus)
agcuucugaggcggcugugg

SEQ ID NO: 138527 - RNA, 16 nt, Human herpesvirus 4 (Epstein-Barr virus)
agcuugggaacaccgg

SEQ ID NO: 138528 - RNA, 23 nt, Human herpesvirus 4 (Epstein-Barr virus)
aggaacuccgcccaggucuugcc

SEQ ID NO: 138529 - RNA, 15 nt, Human herpesvirus 4 (Epstein-Barr virus)
aggaaaugaacccag

SEQ ID NO: 138530 - RNA, 20 nt, Human herpesvirus 4 (Epstein-Barr virus)
agcuuuuggccuucuuccua

SEQ ID NO: 138531 - RNA, 13 nt, Human herpesvirus 4 (Epstein-Barr virus)
agcagggugaaca

SEQ ID NO: 138532 - RNA, 13 nt, Human herpesvirus 4 (Epstein-Barr virus)
agcaggggugaug

SEQ ID NO: 138533 - RNA, 14 nt, Human herpesvirus 4 (Epstein-Barr virus)
agcaggggugauga

SEQ ID NO: 138534 - RNA, 19 nt, Human herpesvirus 4 (Epstein-Barr virus)
agcagauuuccgucagcca

SEQ ID NO: 138535 - RNA, 11 nt, Human herpesvirus 4 (Epstein-Barr virus)
agcaggagcuu

SEQ ID NO: 138536 - RNA, 16 nt, Human herpesvirus 4 (Epstein-Barr virus)
agcagcagugugugaa

SEQ ID NO: 138537 - RNA, 20 nt, Human herpesvirus 4 (Epstein-Barr virus)
agcacuuugaaagaugucaa

SEQ ID NO: 138538 - RNA, 18 nt, Human herpesvirus 4 (Epstein-Barr virus)
agcagaagacuccugccu

SEQ ID NO: 138539 - RNA, 22 nt, Human herpesvirus 4 (Epstein-Barr virus)
agccacacccaccuaugccaau

SEQ ID NO: 138540 - RNA, 16 nt, Human herpesvirus 4 (Epstein-Barr virus)
agcauuggcgucggga

SEQ ID NO: 138541 - RNA, 14 nt, Human herpesvirus 4 (Epstein-Barr virus)
agccacgacauuga

SEQ ID NO: 138542 - RNA, 18 nt, Human herpesvirus 4 (Epstein-Barr virus)
agccacaggcauugcuaa

SEQ ID NO: 138543 - RNA, 21 nt, Human herpesvirus 4 (Epstein-Barr virus)
agccagggugaccuggcucag

SEQ ID NO: 138544 - RNA, 23 nt, Human herpesvirus 4 (Epstein-Barr virus)
agccucugccacaaggccagcua

SEQ ID NO: 138545 - RNA, 17 nt, Human herpesvirus 4 (Epstein-Barr virus)
agccugagccacaccca

SEQ ID NO: 138546 - RNA, 17 nt, Human herpesvirus 4 (Epstein-Barr virus)
agccugaggaacaucua

SEQ ID NO: 138547 - RNA, 12 nt, Human herpesvirus 4 (Epstein-Barr virus)
agccgugucucc

SEQ ID NO: 138548 - RNA, 22 nt, Human herpesvirus 4 (Epstein-Barr virus)
agccuaauuguguauugcucuc

SEQ ID NO: 138549 - RNA, 22 nt, Human herpesvirus 4 (Epstein-Barr virus)
agccuacaaaaguacacuagcu

SEQ ID NO: 138550 - RNA, 15 nt, Human herpesvirus 4 (Epstein-Barr virus)
agccuacccaugacc

SEQ ID NO: 138551 - RNA, 16 nt, Human herpesvirus 4 (Epstein-Barr virus)
agagauuucauccuca

SEQ ID NO: 138552 - RNA, 16 nt, Human herpesvirus 4 (Epstein-Barr virus)
agagaucuggggccaa

SEQ ID NO: 138553 - RNA, 20 nt, Human herpesvirus 4 (Epstein-Barr virus)
agagaucuggggccaaggac

SEQ ID NO: 138554 - RNA, 22 nt, Human herpesvirus 4 (Epstein-Barr virus)
agagccuacccaugaccaacau

SEQ ID NO: 138555 - RNA, 13 nt, Human herpesvirus 4 (Epstein-Barr virus)
agagccacauucu

SEQ ID NO: 138556 - RNA, 21 nt, Human herpesvirus 4 (Epstein-Barr virus)
agagugccgggcccgggacag

SEQ ID NO: 138557 - RNA, 23 nt, Human herpesvirus 4 (Epstein-Barr virus)
agagucccuccucaccacucgaa

SEQ ID NO: 138558 - RNA, 15 nt, Human herpesvirus 4 (Epstein-Barr virus)
agagucccugcgcca

SEQ ID NO: 138559 - RNA, 17 nt, Human herpesvirus 4 (Epstein-Barr virus)
acuuuguuuagggacag

SEQ ID NO: 138560 - RNA, 23 nt, Human herpesvirus 4 (Epstein-Barr virus)
acuuuccuagaaacugugccaug

SEQ ID NO: 138561 - RNA, 15 nt, Human herpesvirus 4 (Epstein-Barr virus)
acuuugagcugggca

SEQ ID NO: 138562 - RNA, 16 nt, Human herpesvirus 4 (Epstein-Barr virus)
acuuugaaagauguca

SEQ ID NO: 138563 - RNA, 19 nt, Human herpesvirus 4 (Epstein-Barr virus)
acuuugccagcaacuuaua

SEQ ID NO: 138564 - RNA, 16 nt, Human herpesvirus 4 (Epstein-Barr virus)
agauccuucuggcacg

SEQ ID NO: 138565 - RNA, 22 nt, Human herpesvirus 4 (Epstein-Barr virus)
agauccuucuggcacgacuguu

SEQ ID NO: 138566 - RNA, 20 nt, Human herpesvirus 4 (Epstein-Barr virus)
agaguucccggcugcucccg

SEQ ID NO: 138567 - RNA, 18 nt, Human herpesvirus 4 (Epstein-Barr virus)
agaguuuaagcagcacug

SEQ ID NO: 138568 - RNA, 20 nt, Human herpesvirus 4 (Epstein-Barr virus)
agaguuuaagcagcacugaa

SEQ ID NO: 138569 - RNA, 16 nt, Human herpesvirus 4 (Epstein-Barr virus)
agcaaucagacaugcg

SEQ ID NO: 138570 - RNA, 17 nt, Human herpesvirus 4 (Epstein-Barr virus)
agauuuucccacugugc

SEQ ID NO: 138571 - RNA, 19 nt, Human herpesvirus 4 (Epstein-Barr virus)
agcaacccccggcucucag

SEQ ID NO: 138572 - RNA, 20 nt, Human herpesvirus 4 (Epstein-Barr virus)
agcaacccccggcucucagg

SEQ ID NO: 138573 - RNA, 17 nt, Human herpesvirus 4 (Epstein-Barr virus)
agauguaaaauuuacac

SEQ ID NO: 138574 - RNA, 23 nt, Human herpesvirus 4 (Epstein-Barr virus)
agaugugccugggcuaucguccu

SEQ ID NO: 138575 - RNA, 23 nt, Human herpesvirus 4 (Epstein-Barr virus)
agauguuauccacaccaucccaa

SEQ ID NO: 138576 - RNA, 13 nt, Human herpesvirus 4 (Epstein-Barr virus)
agauugucuucca

SEQ ID NO: 138577 - RNA, 24 nt, Human herpesvirus 4 (Epstein-Barr virus)
agaucucagaauugucacugagaa

SEQ ID NO: 138578 - RNA, 17 nt, Human herpesvirus 4 (Epstein-Barr virus)
agaugauggacccaaac

SEQ ID NO: 138579 - RNA, 19 nt, Human herpesvirus 4 (Epstein-Barr virus)
agaugcaacagaggauugg

SEQ ID NO: 138580 - RNA, 19 nt, Human herpesvirus 4 (Epstein-Barr virus)
agaugcaccgggaugagcu

SEQ ID NO: 138581 - RNA, 13 nt, Human herpesvirus 4 (Epstein-Barr virus)
agauggcacucuu

SEQ ID NO: 138582 - RNA, 18 nt, Human herpesvirus 4 (Epstein-Barr virus)
agauggcgccguuugacu

SEQ ID NO: 138583 - RNA, 19 nt, Human herpesvirus 4 (Epstein-Barr virus)
agauggcgugguccacgag

SEQ ID NO: 138584 - RNA, 16 nt, Human herpesvirus 4 (Epstein-Barr virus)
agaugggugcauuuca

SEQ ID NO: 138585 - RNA, 15 nt, Human herpesvirus 4 (Epstein-Barr virus)
acaucauuagcccag

SEQ ID NO: 138586 - RNA, 23 nt, Human herpesvirus 4 (Epstein-Barr virus)
acaucaauggaacccuagccacc

SEQ ID NO: 138587 - RNA, 13 nt, Human herpesvirus 4 (Epstein-Barr virus)
acaucacugccac

SEQ ID NO: 138588 - RNA, 18 nt, Human herpesvirus 4 (Epstein-Barr virus)
acaucagacccaacaaag

SEQ ID NO: 138589 - RNA, 18 nt, Human herpesvirus 4 (Epstein-Barr virus)
acaucuacuuuuaccccc

SEQ ID NO: 138590 - RNA, 21 nt, Human herpesvirus 4 (Epstein-Barr virus)
acagggguauguggugccaug

SEQ ID NO: 138591 - RNA, 20 nt, Human herpesvirus 4 (Epstein-Barr virus)
acaggguggggguggacaug

SEQ ID NO: 138592 - RNA, 18 nt, Human herpesvirus 4 (Epstein-Barr virus)
acagauggagagauuuca

SEQ ID NO: 138593 - RNA, 16 nt, Human herpesvirus 4 (Epstein-Barr virus)
acagauugucuuccac

SEQ ID NO: 138594 - RNA, 21 nt, Human herpesvirus 4 (Epstein-Barr virus)
acagauugucuuccacaccau

SEQ ID NO: 138595 - RNA, 19 nt, Human herpesvirus 4 (Epstein-Barr virus)
acauaauguaugccauggc

SEQ ID NO: 138596 - RNA, 19 nt, Human herpesvirus 4 (Epstein-Barr virus)
acaggucgcguaggucuau

SEQ ID NO: 138597 - RNA, 11 nt, Human herpesvirus 4 (Epstein-Barr virus)
acaggugccag

SEQ ID NO: 138598 - RNA, 22 nt, Human herpesvirus 4 (Epstein-Barr virus)
acaggugggacaaaaugggguc

SEQ ID NO: 138599 - RNA, 16 nt, Human herpesvirus 4 (Epstein-Barr virus)
acaguaacacagggug

SEQ ID NO: 138600 - RNA, 21 nt, Human herpesvirus 4 (Epstein-Barr virus)
acaguagccgaauaucuggag

SEQ ID NO: 138601 - RNA, 16 nt, Human herpesvirus 4 (Epstein-Barr virus)
acaccugacccauacc

SEQ ID NO: 138602 - RNA, 13 nt, Human herpesvirus 4 (Epstein-Barr virus)
acaccuaucugua

SEQ ID NO: 138603 - RNA, 17 nt, Human herpesvirus 4 (Epstein-Barr virus)
acaccggggugccaaga

SEQ ID NO: 138604 - RNA, 20 nt, Human herpesvirus 4 (Epstein-Barr virus)
acaccgagcagaaggccaug

SEQ ID NO: 138605 - RNA, 14 nt, Human herpesvirus 4 (Epstein-Barr virus)
acaccagucccuug

SEQ ID NO: 138606 - RNA, 22 nt, Human herpesvirus 4 (Epstein-Barr virus)
acaccaucccaauucacaucuc

SEQ ID NO: 138607 - RNA, 16 nt, Human herpesvirus 4 (Epstein-Barr virus)
acacccacccugcaca

SEQ ID NO: 138608 - RNA, 18 nt, Human herpesvirus 4 (Epstein-Barr virus)
acacccacggaagcccuc

SEQ ID NO: 138609 - RNA, 15 nt, Human herpesvirus 4 (Epstein-Barr virus)
acaccccacggccau

SEQ ID NO: 138610 - RNA, 18 nt, Human herpesvirus 4 (Epstein-Barr virus)
acacccccacuuuuccaa

SEQ ID NO: 138611 - RNA, 18 nt, Human herpesvirus 4 (Epstein-Barr virus)
acacucuggggucucagg

SEQ ID NO: 138612 - RNA, 19 nt, Human herpesvirus 4 (Epstein-Barr virus)
acacucuggggucucaggc

SEQ ID NO: 138613 - RNA, 15 nt, Human herpesvirus 4 (Epstein-Barr virus)
acacuuaacuugacu

SEQ ID NO: 138614 - RNA, 14 nt, Human herpesvirus 4 (Epstein-Barr virus)
acacacaacacaua

SEQ ID NO: 138615 - RNA, 14 nt, Human herpesvirus 4 (Epstein-Barr virus)
acacacacaguagc

SEQ ID NO: 138616 - RNA, 16 nt, Human herpesvirus 4 (Epstein-Barr virus)
acacacgagccauaga

SEQ ID NO: 138617 - RNA, 17 nt, Human herpesvirus 4 (Epstein-Barr virus)
acacacauggcacucau

SEQ ID NO: 138618 - RNA, 16 nt, Human herpesvirus 4 (Epstein-Barr virus)
acaauguuccuucuca

SEQ ID NO: 138619 - RNA, 23 nt, Human herpesvirus 4 (Epstein-Barr virus)
acaauuccccggggacaccugca

SEQ ID NO: 138620 - RNA, 19 nt, Human herpesvirus 4 (Epstein-Barr virus)
acaauuuuagaugagguag

SEQ ID NO: 138621 - RNA, 18 nt, Human herpesvirus 4 (Epstein-Barr virus)
acacauuacggugcugga

SEQ ID NO: 138622 - RNA, 20 nt, Human herpesvirus 4 (Epstein-Barr virus)
acaccaacacagacugcgau

SEQ ID NO: 138623 - RNA, 15 nt, Human herpesvirus 4 (Epstein-Barr virus)
acaccaccccaccau

SEQ ID NO: 138624 - RNA, 17 nt, Human herpesvirus 4 (Epstein-Barr virus)
acaccaccugcucguga

SEQ ID NO: 138625 - RNA, 13 nt, Human herpesvirus 4 (Epstein-Barr virus)
acacagacugcga

SEQ ID NO: 138626 - RNA, 21 nt, Human herpesvirus 4 (Epstein-Barr virus)
acacaggacaacggcauuccc

SEQ ID NO: 138627 - RNA, 22 nt, Human herpesvirus 4 (Epstein-Barr virus)
acacauagaauuguuaguuuaa

SEQ ID NO: 138628 - RNA, 22 nt, Human herpesvirus 4 (Epstein-Barr virus)
acaacugucacaccagucccaa

SEQ ID NO: 138629 - RNA, 15 nt, Human herpesvirus 4 (Epstein-Barr virus)
acaagacagucacau

SEQ ID NO: 138630 - RNA, 19 nt, Human herpesvirus 4 (Epstein-Barr virus)
acaaggacaggugccagau

SEQ ID NO: 138631 - RNA, 19 nt, Human herpesvirus 4 (Epstein-Barr virus)
acaagcuaccgaugauucu

SEQ ID NO: 138632 - RNA, 20 nt, Human herpesvirus 4 (Epstein-Barr virus)
acaaccacggugacauucac

SEQ ID NO: 138633 - RNA, 19 nt, Human herpesvirus 4 (Epstein-Barr virus)
acaacugcuauucugagca

SEQ ID NO: 138634 - RNA, 14 nt, Human herpesvirus 4 (Epstein-Barr virus)
acaacuauguguau

SEQ ID NO: 138635 - RNA, 14 nt, Human herpesvirus 4 (Epstein-Barr virus)
acaaccccuuccac

SEQ ID NO: 138636 - RNA, 15 nt, Human herpesvirus 4 (Epstein-Barr virus)
acaacggcugugacu

SEQ ID NO: 138637 - RNA, 16 nt, Human herpesvirus 4 (Epstein-Barr virus)
acaagguucggaaauc

SEQ ID NO: 138638 - RNA, 21 nt, Human herpesvirus 4 (Epstein-Barr virus)
acaaggccagcuaacugccua

SEQ ID NO: 138639 - RNA, 21 nt, Human herpesvirus 4 (Epstein-Barr virus)
acaauaaacccaaugugcaaa

SEQ ID NO: 138640 - RNA, 23 nt, Human herpesvirus 4 (Epstein-Barr virus)
acaaguggcgguggaacacggca

SEQ ID NO: 138641 - RNA, 12 nt, Human herpesvirus 4 (Epstein-Barr virus)
acaauacaccca

SEQ ID NO: 138642 - RNA, 14 nt, Human herpesvirus 4 (Epstein-Barr virus)
acaauagaagugga

SEQ ID NO: 138643 - RNA, 16 nt, Human herpesvirus 4 (Epstein-Barr virus)
acaauagaaguggaaa

SEQ ID NO: 138644 - RNA, 16 nt, Human herpesvirus 4 (Epstein-Barr virus)
acaaaaguacacuagc

SEQ ID NO: 138645 - RNA, 17 nt, Human herpesvirus 4 (Epstein-Barr virus)
acaaacacuacaauaaa

SEQ ID NO: 138646 - RNA, 13 nt, Human herpesvirus 4 (Epstein-Barr virus)
acaaacaccagug

SEQ ID NO: 138647 - RNA, 15 nt, Human herpesvirus 4 (Epstein-Barr virus)
aaugagagccaaaaa

SEQ ID NO: 138648 - RNA, 15 nt, Human herpesvirus 4 (Epstein-Barr virus)
aaugacccacuccag

SEQ ID NO: 138649 - RNA, 12 nt, Human herpesvirus 4 (Epstein-Barr virus)
aaugacuaugag

SEQ ID NO: 138650 - RNA, 13 nt, Human herpesvirus 4 (Epstein-Barr virus)
aauuugcugacau

SEQ ID NO: 138651 - RNA, 16 nt, Human herpesvirus 4 (Epstein-Barr virus)
acugugccauggugcc

SEQ ID NO: 138652 - RNA, 17 nt, Human herpesvirus 4 (Epstein-Barr virus)
acugugucccacuccac

SEQ ID NO: 138653 - RNA, 16 nt, Human herpesvirus 4 (Epstein-Barr virus)
acuucuucucugcucg

SEQ ID NO: 138654 - RNA, 15 nt, Human herpesvirus 4 (Epstein-Barr virus)
acuucuuuugcucuu

SEQ ID NO: 138655 - RNA, 17 nt, Human herpesvirus 4 (Epstein-Barr virus)
acuucuuuugcucuuaa

SEQ ID NO: 138656 - RNA, 12 nt, Human herpesvirus 4 (Epstein-Barr virus)
acuuccaacgca

SEQ ID NO: 138657 - RNA, 14 nt, Human herpesvirus 4 (Epstein-Barr virus)
acuucguagcuuug

SEQ ID NO: 138658 - RNA, 20 nt, Human herpesvirus 4 (Epstein-Barr virus)
acugcauccaacgcuuccac

SEQ ID NO: 138659 - RNA, 17 nt, Human herpesvirus 4 (Epstein-Barr virus)
acucgaaacuauggcag

SEQ ID NO: 138660 - RNA, 19 nt, Human herpesvirus 4 (Epstein-Barr virus)
acucgaaacuauggcagac

SEQ ID NO: 138661 - RNA, 14 nt, Human herpesvirus 4 (Epstein-Barr virus)
acuccccucuccau

SEQ ID NO: 138662 - RNA, 17 nt, Human herpesvirus 4 (Epstein-Barr virus)
acuggaacuguacuaaa

SEQ ID NO: 138663 - RNA, 12 nt, Human herpesvirus 4 (Epstein-Barr virus)
acugccuugucc

SEQ ID NO: 138664 - RNA, 23 nt, Human herpesvirus 4 (Epstein-Barr virus)
acugcgagggggccuggugccag

SEQ ID NO: 138665 - RNA, 21 nt, Human herpesvirus 4 (Epstein-Barr virus)
acugcgaugagggccuuccag

SEQ ID NO: 138666 - RNA, 17 nt, Human herpesvirus 4 (Epstein-Barr virus)
acugcuagcgucacuga

SEQ ID NO: 138667 - RNA, 20 nt, Human herpesvirus 4 (Epstein-Barr virus)
acucccacauucguacaucu

SEQ ID NO: 138668 - RNA, 20 nt, Human herpesvirus 4 (Epstein-Barr virus)
acuccagccaucaugcugaa

SEQ ID NO: 138669 - RNA, 18 nt, Human herpesvirus 4 (Epstein-Barr virus)
acuccaagugcaacaauc

SEQ ID NO: 138670 - RNA, 19 nt, Human herpesvirus 4 (Epstein-Barr virus)
acuacgagggccucuggca

SEQ ID NO: 138671 - RNA, 18 nt, Human herpesvirus 4 (Epstein-Barr virus)
acuauccaggucuugccg

SEQ ID NO: 138672 - RNA, 18 nt, Human herpesvirus 4 (Epstein-Barr virus)
acuaaccuuaacaccugc

SEQ ID NO: 138673 - RNA, 16 nt, Human herpesvirus 4 (Epstein-Barr virus)
acuaaacauugcaccu

SEQ ID NO: 138674 - RNA, 18 nt, Human herpesvirus 4 (Epstein-Barr virus)
acgggggugggcggugau

SEQ ID NO: 138675 - RNA, 16 nt, Human herpesvirus 4 (Epstein-Barr virus)
acggggggcuggcgaa

SEQ ID NO: 138676 - RNA, 14 nt, Human herpesvirus 4 (Epstein-Barr virus)
acguuccuggccau

SEQ ID NO: 138677 - RNA, 22 nt, Human herpesvirus 4 (Epstein-Barr virus)
acguguucuccgagaggaugau

SEQ ID NO: 138678 - RNA, 22 nt, Human herpesvirus 4 (Epstein-Barr virus)
acguggacgggggaauaaucaa

SEQ ID NO: 138679 - RNA, 16 nt, Human herpesvirus 4 (Epstein-Barr virus)
accuggugagcaauca

SEQ ID NO: 138680 - RNA, 18 nt, Human herpesvirus 4 (Epstein-Barr virus)
accugguuaacagacuuc

SEQ ID NO: 138681 - RNA, 17 nt, Human herpesvirus 4 (Epstein-Barr virus)
accugucugauugcacc

SEQ ID NO: 138682 - RNA, 20 nt, Human herpesvirus 4 (Epstein-Barr virus)
accugcgucucauucccaag

SEQ ID NO: 138683 - RNA, 16 nt, Human herpesvirus 4 (Epstein-Barr virus)
acgagcgcaucgucuc

SEQ ID NO: 138684 - RNA, 19 nt, Human herpesvirus 4 (Epstein-Barr virus)
acgagcgcaucgucuccag

SEQ ID NO: 138685 - RNA, 22 nt, Human herpesvirus 4 (Epstein-Barr virus)
acgaggaggcggaagaccagga

SEQ ID NO: 138686 - RNA, 23 nt, Human herpesvirus 4 (Epstein-Barr virus)
acgagaccccugggcucucagga

SEQ ID NO: 138687 - RNA, 11 nt, Human herpesvirus 4 (Epstein-Barr virus)
acgagcaugaa

SEQ ID NO: 138688 - RNA, 16 nt, Human herpesvirus 4 (Epstein-Barr virus)
acgagcccaaacucuc

SEQ ID NO: 138689 - RNA, 21 nt, Human herpesvirus 4 (Epstein-Barr virus)
acgccguggcccugagcaugg

SEQ ID NO: 138690 - RNA, 17 nt, Human herpesvirus 4 (Epstein-Barr virus)
acgagucugacuacagc

SEQ ID NO: 138691 - RNA, 18 nt, Human herpesvirus 4 (Epstein-Barr virus)
acgaggcccugcaagcca

SEQ ID NO: 138692 - RNA, 14 nt, Human herpesvirus 4 (Epstein-Barr virus)
acgaggaucccgca

SEQ ID NO: 138693 - RNA, 17 nt, Human herpesvirus 4 (Epstein-Barr virus)
acgaggaucccgcaggu

SEQ ID NO: 138694 - RNA, 23 nt, Human herpesvirus 4 (Epstein-Barr virus)
acgaggggcucgaauaugaugag

SEQ ID NO: 138695 - RNA, 19 nt, Human herpesvirus 4 (Epstein-Barr virus)
acgcguuuauucagcaauu

SEQ ID NO: 138696 - RNA, 14 nt, Human herpesvirus 4 (Epstein-Barr virus)
acgcgcuaccuccu

SEQ ID NO: 138697 - RNA, 19 nt, Human herpesvirus 4 (Epstein-Barr virus)
acgccuuuuuccuagcuua

SEQ ID NO: 138698 - RNA, 12 nt, Human herpesvirus 4 (Epstein-Barr virus)
accaaugccaaa

SEQ ID NO: 138699 - RNA, 19 nt, Human herpesvirus 4 (Epstein-Barr virus)
accaauguaucccaaauaa

SEQ ID NO: 138700 - RNA, 17 nt, Human herpesvirus 4 (Epstein-Barr virus)
accaagaccaauaccca

SEQ ID NO: 138701 - RNA, 13 nt, Human herpesvirus 4 (Epstein-Barr virus)
accaagacucaau

SEQ ID NO: 138702 - RNA, 22 nt, Human herpesvirus 4 (Epstein-Barr virus)
acauuucucauaauggugccug

SEQ ID NO: 138703 - RNA, 14 nt, Human herpesvirus 4 (Epstein-Barr virus)
accccccucugaug

SEQ ID NO: 138704 - RNA, 15 nt, Human herpesvirus 4 (Epstein-Barr virus)
accccccucugaugg

SEQ ID NO: 138705 - RNA, 15 nt, Human herpesvirus 4 (Epstein-Barr virus)
accacauauacugga

SEQ ID NO: 138706 - RNA, 22 nt, Human herpesvirus 4 (Epstein-Barr virus)
accacacccccacuuuuccaac

SEQ ID NO: 138707 - RNA, 15 nt, Human herpesvirus 4 (Epstein-Barr virus)
acccccggcucucag

SEQ ID NO: 138708 - RNA, 17 nt, Human herpesvirus 4 (Epstein-Barr virus)
accccuggcuuccacuc

SEQ ID NO: 138709 - RNA, 21 nt, Human herpesvirus 4 (Epstein-Barr virus)
accccuggggcggcgaugucg

SEQ ID NO: 138710 - RNA, 16 nt, Human herpesvirus 4 (Epstein-Barr virus)
accgagcagaaggcca

SEQ ID NO: 138711 - RNA, 12 nt, Human herpesvirus 4 (Epstein-Barr virus)
accuaugccaau

SEQ ID NO: 138712 - RNA, 20 nt, Human herpesvirus 4 (Epstein-Barr virus)
accuaugccaauccaugcca

SEQ ID NO: 138713 - RNA, 23 nt, Human herpesvirus 4 (Epstein-Barr virus)
accuacaccaccccaccauauga

SEQ ID NO: 138714 - RNA, 13 nt, Human herpesvirus 4 (Epstein-Barr virus)
accuacaggacaa

SEQ ID NO: 138715 - RNA, 21 nt, Human herpesvirus 4 (Epstein-Barr virus)
accuacaggacaagacaguca

SEQ ID NO: 138716 - RNA, 15 nt, Human herpesvirus 4 (Epstein-Barr virus)
augaacccuggggca

SEQ ID NO: 138717 - RNA, 16 nt, Human herpesvirus 4 (Epstein-Barr virus)
augaacccuggggcaa

SEQ ID NO: 138718 - RNA, 21 nt, Human herpesvirus 4 (Epstein-Barr virus)
augaacccuggggcaacagac

SEQ ID NO: 138719 - RNA, 17 nt, Human herpesvirus 4 (Epstein-Barr virus)
augaacacucauggugu

SEQ ID NO: 138720 - RNA, 23 nt, Human herpesvirus 4 (Epstein-Barr virus)
augaacaccaccacgaugacucc

SEQ ID NO: 138721 - RNA, 15 nt, Human herpesvirus 4 (Epstein-Barr virus)
augaaggcuggcaaa

SEQ ID NO: 138722 - RNA, 20 nt, Human herpesvirus 4 (Epstein-Barr virus)
augaaaccuuuuauucuuga

SEQ ID NO: 138723 - RNA, 16 nt, Human herpesvirus 4 (Epstein-Barr virus)
aucacaucaagcagaa

SEQ ID NO: 138724 - RNA, 16 nt, Human herpesvirus 4 (Epstein-Barr virus)
aucuuaggagcccggg

SEQ ID NO: 138725 - RNA, 21 nt, Human herpesvirus 4 (Epstein-Barr virus)
aucuuaccccuggcuuccacu

SEQ ID NO: 138726 - RNA, 12 nt, Human herpesvirus 4 (Epstein-Barr virus)
aucacagggaca

SEQ ID NO: 138727 - RNA, 17 nt, Human herpesvirus 4 (Epstein-Barr virus)
aucacagggacaucuac

SEQ ID NO: 138728 - RNA, 15 nt, Human herpesvirus 4 (Epstein-Barr virus)
augacacaggacaac

SEQ ID NO: 138729 - RNA, 12 nt, Human herpesvirus 4 (Epstein-Barr virus)
augaccaugaug

SEQ ID NO: 138730 - RNA, 18 nt, Human herpesvirus 4 (Epstein-Barr virus)
augagucugacuacucag

SEQ ID NO: 138731 - RNA, 15 nt, Human herpesvirus 4 (Epstein-Barr virus)
augauacucaucugu

SEQ ID NO: 138732 - RNA, 14 nt, Human herpesvirus 4 (Epstein-Barr virus)
augauccuguacaa

SEQ ID NO: 138733 - RNA, 20 nt, Human herpesvirus 4 (Epstein-Barr virus)
augaggaauucuuccagaug

SEQ ID NO: 138734 - RNA, 12 nt, Human herpesvirus 4 (Epstein-Barr virus)
augagcuacucu

SEQ ID NO: 138735 - RNA, 13 nt, Human herpesvirus 4 (Epstein-Barr virus)
augagcuccucuc

SEQ ID NO: 138736 - RNA, 15 nt, Human herpesvirus 4 (Epstein-Barr virus)
augagcauggaagac

SEQ ID NO: 138737 - RNA, 19 nt, Human herpesvirus 4 (Epstein-Barr virus)
augauugaggcaauggcca

SEQ ID NO: 138738 - RNA, 21 nt, Human herpesvirus 4 (Epstein-Barr virus)
augauggccacgacuauccag

SEQ ID NO: 138739 - RNA, 15 nt, Human herpesvirus 4 (Epstein-Barr virus)
augcaucguagucag

SEQ ID NO: 138740 - RNA, 13 nt, Human herpesvirus 4 (Epstein-Barr virus)
augcaguccuccg

SEQ ID NO: 138741 - RNA, 13 nt, Human herpesvirus 4 (Epstein-Barr virus)
augcauacacuga

SEQ ID NO: 138742 - RNA, 21 nt, Human herpesvirus 4 (Epstein-Barr virus)
augcucaguggccgucuggca

SEQ ID NO: 138743 - RNA, 20 nt, Human herpesvirus 4 (Epstein-Barr virus)
augcuauuggguuaacgggu

SEQ ID NO: 138744 - RNA, 21 nt, Human herpesvirus 4 (Epstein-Barr virus)
augcuauuggguuaacgggug

SEQ ID NO: 138745 - RNA, 22 nt, Human herpesvirus 4 (Epstein-Barr virus)
augcuauuggguuaacgggugg

SEQ ID NO: 138746 - RNA, 20 nt, Human herpesvirus 4 (Epstein-Barr virus)
augcucucgcacucuuguug

SEQ ID NO: 138747 - RNA, 17 nt, Human herpesvirus 4 (Epstein-Barr virus)
augcuguaccugaugag

SEQ ID NO: 138748 - RNA, 23 nt, Human herpesvirus 4 (Epstein-Barr virus)
augcugaauauugccagcgccuu

SEQ ID NO: 138749 - RNA, 19 nt, Human herpesvirus 4 (Epstein-Barr virus)
augcucuggcgacuuggug

SEQ ID NO: 138750 - RNA, 20 nt, Human herpesvirus 4 (Epstein-Barr virus)
augcgccagagcggcauccu

SEQ ID NO: 138751 - RNA, 16 nt, Human herpesvirus 4 (Epstein-Barr virus)
augcgccgucauucca

SEQ ID NO: 138752 - RNA, 17 nt, Human herpesvirus 4 (Epstein-Barr virus)
augcgccgucauuccau

SEQ ID NO: 138753 - RNA, 20 nt, Human herpesvirus 4 (Epstein-Barr virus)
augccgcuuacagccagaga

SEQ ID NO: 138754 - RNA, 18 nt, Human herpesvirus 4 (Epstein-Barr virus)
augccucacgcgaaggga

SEQ ID NO: 138755 - RNA, 20 nt, Human herpesvirus 4 (Epstein-Barr virus)
augccucccccuuuacccau

SEQ ID NO: 138756 - RNA, 23 nt, Human herpesvirus 4 (Epstein-Barr virus)
augccucuacgccccagaugaaa

SEQ ID NO: 138757 - RNA, 17 nt, Human herpesvirus 4 (Epstein-Barr virus)
augccaccgugaaguua

SEQ ID NO: 138758 - RNA, 23 nt, Human herpesvirus 4 (Epstein-Barr virus)
augccaacucccccaaacauguc

SEQ ID NO: 138759 - RNA, 17 nt, Human herpesvirus 4 (Epstein-Barr virus)
augcccaccagccagcg

SEQ ID NO: 138760 - RNA, 13 nt, Human herpesvirus 4 (Epstein-Barr virus)
augcccagacuca

SEQ ID NO: 138761 - RNA, 20 nt, Human herpesvirus 4 (Epstein-Barr virus)
auggcagccgggucgugaaa

SEQ ID NO: 138762 - RNA, 24 nt, Human herpesvirus 4 (Epstein-Barr virus)
auggccauucgacaggccauuaga

SEQ ID NO: 138763 - RNA, 23 nt, Human herpesvirus 4 (Epstein-Barr virus)
auggaugugaaugcccccggggg

SEQ ID NO: 138764 - RNA, 23 nt, Human herpesvirus 4 (Epstein-Barr virus)
auggcaaaggucccaggccuuag

SEQ ID NO: 138765 - RNA, 24 nt, Human herpesvirus 4 (Epstein-Barr virus)
augggagcaaccagcuggucauca

SEQ ID NO: 138766 - RNA, 15 nt, Human herpesvirus 4 (Epstein-Barr virus)
auggaaaccacucag

SEQ ID NO: 138767 - RNA, 19 nt, Human herpesvirus 4 (Epstein-Barr virus)
auggaugacaccauggccu

SEQ ID NO: 138768 - RNA, 17 nt, Human herpesvirus 4 (Epstein-Barr virus)
augucaaacaugguguc

SEQ ID NO: 138769 - RNA, 20 nt, Human herpesvirus 4 (Epstein-Barr virus)
augucaaggcucugcacagg

SEQ ID NO: 138770 - RNA, 21 nt, Human herpesvirus 4 (Epstein-Barr virus)
augucaaggcucugcacagga

SEQ ID NO: 138771 - RNA, 22 nt, Human herpesvirus 4 (Epstein-Barr virus)
auguucccggcacaccagacau

SEQ ID NO: 138772 - RNA, 14 nt, Human herpesvirus 4 (Epstein-Barr virus)
auguucugugcagu

SEQ ID NO: 138773 - RNA, 12 nt, Human herpesvirus 4 (Epstein-Barr virus)
auguucucuaac

SEQ ID NO: 138774 - RNA, 19 nt, Human herpesvirus 4 (Epstein-Barr virus)
auguuuggguuauugacau

SEQ ID NO: 138775 - RNA, 17 nt, Human herpesvirus 4 (Epstein-Barr virus)
augggcaaaacucacag

SEQ ID NO: 138776 - RNA, 19 nt, Human herpesvirus 4 (Epstein-Barr virus)
augggcaaaacucacagga

SEQ ID NO: 138777 - RNA, 19 nt, Human herpesvirus 4 (Epstein-Barr virus)
auguacauaauguaugcca

SEQ ID NO: 138778 - RNA, 11 nt, Human herpesvirus 4 (Epstein-Barr virus)
auguacccauc

SEQ ID NO: 138779 - RNA, 20 nt, Human herpesvirus 4 (Epstein-Barr virus)
auuauagcucuggcacugcu

SEQ ID NO: 138780 - RNA, 19 nt, Human herpesvirus 4 (Epstein-Barr virus)
auuaaucagaaauuugcac

SEQ ID NO: 138781 - RNA, 17 nt, Human herpesvirus 4 (Epstein-Barr virus)
auuaagaacaaguacca

SEQ ID NO: 138782 - RNA, 22 nt, Human herpesvirus 4 (Epstein-Barr virus)
auguuuucuggacacaggacua

SEQ ID NO: 138783 - RNA, 19 nt, Human herpesvirus 4 (Epstein-Barr virus)
auuaagagucccuccucac

SEQ ID NO: 138784 - RNA, 17 nt, Human herpesvirus 4 (Epstein-Barr virus)
auuaaccucaaccacaa

SEQ ID NO: 138785 - RNA, 13 nt, Human herpesvirus 4 (Epstein-Barr virus)
auuauuuaccaca

SEQ ID NO: 138786 - RNA, 15 nt, Human herpesvirus 4 (Epstein-Barr virus)
auucacugggacaac

SEQ ID NO: 138787 - RNA, 21 nt, Human herpesvirus 4 (Epstein-Barr virus)
auucacugggacaacugucac

SEQ ID NO: 138788 - RNA, 22 nt, Human herpesvirus 4 (Epstein-Barr virus)
auucacugggacaacugucaca

SEQ ID NO: 138789 - RNA, 16 nt, Human herpesvirus 4 (Epstein-Barr virus)
auucagacgagucuga

SEQ ID NO: 138790 - RNA, 19 nt, Human herpesvirus 4 (Epstein-Barr virus)
caacugcuauucugagcac

SEQ ID NO: 138791 - RNA, 23 nt, Human herpesvirus 4 (Epstein-Barr virus)
caacugcuauucugagcaccaac

SEQ ID NO: 138792 - RNA, 18 nt, Human herpesvirus 4 (Epstein-Barr virus)
caacuacaagcagcuaga

SEQ ID NO: 138793 - RNA, 21 nt, Human herpesvirus 4 (Epstein-Barr virus)
caacuaccugucugauugcac

SEQ ID NO: 138794 - RNA, 22 nt, Human herpesvirus 4 (Epstein-Barr virus)
caacgucccugaguucuacaau

SEQ ID NO: 138795 - RNA, 20 nt, Human herpesvirus 4 (Epstein-Barr virus)
caacuaagagccucgguaga

SEQ ID NO: 138796 - RNA, 19 nt, Human herpesvirus 4 (Epstein-Barr virus)
caacccccggcucucaggc

SEQ ID NO: 138797 - RNA, 20 nt, Human herpesvirus 4 (Epstein-Barr virus)
caacccccggcucucaggcc

SEQ ID NO: 138798 - RNA, 9 nt, Human herpesvirus 4 (Epstein-Barr virus)
caaccugcu

SEQ ID NO: 138799 - RNA, 19 nt, Human herpesvirus 4 (Epstein-Barr virus)
caaccugcucucucuggag

SEQ ID NO: 138800 - RNA, 17 nt, Human herpesvirus 4 (Epstein-Barr virus)
caagaacugggaugaac

SEQ ID NO: 138801 - RNA, 14 nt, Human herpesvirus 4 (Epstein-Barr virus)
caacuucagcucca

SEQ ID NO: 138802 - RNA, 14 nt, Human herpesvirus 4 (Epstein-Barr virus)
caagagcacaaaag

SEQ ID NO: 138803 - RNA, 20 nt, Human herpesvirus 4 (Epstein-Barr virus)
caaguguuuccagacaccag

SEQ ID NO: 138804 - RNA, 18 nt, Human herpesvirus 4 (Epstein-Barr virus)
cacaaccacggugacauu

SEQ ID NO: 138805 - RNA, 24 nt, Human herpesvirus 4 (Epstein-Barr virus)
cacaacugcuauucugagcaccaa

SEQ ID NO: 138806 - RNA, 17 nt, Human herpesvirus 4 (Epstein-Barr virus)
cacaacggcugugacua

SEQ ID NO: 138807 - RNA, 24 nt, Human herpesvirus 4 (Epstein-Barr virus)
cacaucucagggacaacaggucaa

SEQ ID NO: 138808 - RNA, 16 nt, Human herpesvirus 4 (Epstein-Barr virus)
cacagccugacucuca

SEQ ID NO: 138809 - RNA, 20 nt, Human herpesvirus 4 (Epstein-Barr virus)
cacagauggagagauuucau

SEQ ID NO: 138810 - RNA, 20 nt, Human herpesvirus 4 (Epstein-Barr virus)
cacagagcaucagaugagac

SEQ ID NO: 138811 - RNA, 22 nt, Human herpesvirus 4 (Epstein-Barr virus)
cacagaggaggcuggugccuug

SEQ ID NO: 138812 - RNA, 14 nt, Human herpesvirus 4 (Epstein-Barr virus)
cacagacugcgauc

SEQ ID NO: 138813 - RNA, 13 nt, Human herpesvirus 4 (Epstein-Barr virus)
cacagaacaucac

SEQ ID NO: 138814 - RNA, 14 nt, Human herpesvirus 4 (Epstein-Barr virus)
cacagaacaucacu

SEQ ID NO: 138815 - RNA, 14 nt, Human herpesvirus 4 (Epstein-Barr virus)
caauuuccaaaaau

SEQ ID NO: 138816 - RNA, 20 nt, Human herpesvirus 4 (Epstein-Barr virus)
caauauauuuuccauuucau

SEQ ID NO: 138817 - RNA, 17 nt, Human herpesvirus 4 (Epstein-Barr virus)
caaccaauguaucccaa

SEQ ID NO: 138818 - RNA, 15 nt, Human herpesvirus 4 (Epstein-Barr virus)
caacauuaaagccuc

SEQ ID NO: 138819 - RNA, 18 nt, Human herpesvirus 4 (Epstein-Barr virus)
caacauuaaagccuccuc

SEQ ID NO: 138820 - RNA, 20 nt, Human herpesvirus 4 (Epstein-Barr virus)
caaccacggugacauucacu

SEQ ID NO: 138821 - RNA, 14 nt, Human herpesvirus 4 (Epstein-Barr virus)
caacauggggcaau

SEQ ID NO: 138822 - RNA, 19 nt, Human herpesvirus 4 (Epstein-Barr virus)
caacagacaugcagacucc

SEQ ID NO: 138823 - RNA, 18 nt, Human herpesvirus 4 (Epstein-Barr virus)
caaaacugguggacucua

SEQ ID NO: 138824 - RNA, 19 nt, Human herpesvirus 4 (Epstein-Barr virus)
auugcgccgccuaaugcau

SEQ ID NO: 138825 - RNA, 12 nt, Human herpesvirus 4 (Epstein-Barr virus)
auugaugaacug

SEQ ID NO: 138826 - RNA, 15 nt, Human herpesvirus 4 (Epstein-Barr virus)
auugaugaguuaaag

SEQ ID NO: 138827 - RNA, 15 nt, Human herpesvirus 4 (Epstein-Barr virus)
auuuccuacaacuca

SEQ ID NO: 138828 - RNA, 17 nt, Human herpesvirus 4 (Epstein-Barr virus)
auuucuaguuaccacag

SEQ ID NO: 138829 - RNA, 21 nt, Human herpesvirus 4 (Epstein-Barr virus)
auuucucauaauggugccuga

SEQ ID NO: 138830 - RNA, 20 nt, Human herpesvirus 4 (Epstein-Barr virus)
auuuugcaaacaaacuucaa

SEQ ID NO: 138831 - RNA, 13 nt, Human herpesvirus 4 (Epstein-Barr virus)
auuuuaaucugga

SEQ ID NO: 138832 - RNA, 14 nt, Human herpesvirus 4 (Epstein-Barr virus)
auuuugugugccuc

SEQ ID NO: 138833 - RNA, 15 nt, Human herpesvirus 4 (Epstein-Barr virus)
caucauuagcccagc

SEQ ID NO: 138834 - RNA, 18 nt, Human herpesvirus 4 (Epstein-Barr virus)
caucaugcagggugcaca

SEQ ID NO: 138835 - RNA, 22 nt, Human herpesvirus 4 (Epstein-Barr virus)
cauaugaugacgccgagaccua

SEQ ID NO: 138836 - RNA, 16 nt, Human herpesvirus 4 (Epstein-Barr virus)
cauauguacaaugaga

SEQ ID NO: 138837 - RNA, 17 nt, Human herpesvirus 4 (Epstein-Barr virus)
cauauacuggagaugau

SEQ ID NO: 138838 - RNA, 15 nt, Human herpesvirus 4 (Epstein-Barr virus)
cauacggcuuuccag

SEQ ID NO: 138839 - RNA, 21 nt, Human herpesvirus 4 (Epstein-Barr virus)
cauacagcagcuggauguaca

SEQ ID NO: 138840 - RNA, 21 nt, Human herpesvirus 4 (Epstein-Barr virus)
caucccggcccucuuccgugc

SEQ ID NO: 138841 - RNA, 20 nt, Human herpesvirus 4 (Epstein-Barr virus)
cauccaccaucaaugucacc

SEQ ID NO: 138842 - RNA, 22 nt, Human herpesvirus 4 (Epstein-Barr virus)
cauccaccaucaaugucaccac

SEQ ID NO: 138843 - RNA, 22 nt, Human herpesvirus 4 (Epstein-Barr virus)
cauccugcucauuauugcucuc

SEQ ID NO: 138844 - RNA, 16 nt, Human herpesvirus 4 (Epstein-Barr virus)
cauccuucagauucag

SEQ ID NO: 138845 - RNA, 21 nt, Human herpesvirus 4 (Epstein-Barr virus)
cauccuuuauaugaaaaugug

SEQ ID NO: 138846 - RNA, 12 nt, Human herpesvirus 4 (Epstein-Barr virus)
caucgcacgggg

SEQ ID NO: 138847 - RNA, 14 nt, Human herpesvirus 4 (Epstein-Barr virus)
caucuuaucagaga

SEQ ID NO: 138848 - RNA, 24 nt, Human herpesvirus 4 (Epstein-Barr virus)
caucuuggcccgucccucuugucc

SEQ ID NO: 138849 - RNA, 14 nt, Human herpesvirus 4 (Epstein-Barr virus)
caucugcccggcua

SEQ ID NO: 138850 - RNA, 18 nt, Human herpesvirus 4 (Epstein-Barr virus)
caggucgcggaccagggu

SEQ ID NO: 138851 - RNA, 19 nt, Human herpesvirus 4 (Epstein-Barr virus)
caggucgcggaccaggguc

SEQ ID NO: 138852 - RNA, 21 nt, Human herpesvirus 4 (Epstein-Barr virus)
caggugccuuuuguacaagcu

SEQ ID NO: 138853 - RNA, 13 nt, Human herpesvirus 4 (Epstein-Barr virus)
caggugggacaaa

SEQ ID NO: 138854 - RNA, 16 nt, Human herpesvirus 4 (Epstein-Barr virus)
caguaaaucugucucu

SEQ ID NO: 138855 - RNA, 14 nt, Human herpesvirus 4 (Epstein-Barr virus)
caggggugguggau

SEQ ID NO: 138856 - RNA, 14 nt, Human herpesvirus 4 (Epstein-Barr virus)
cagggccgugcaug

SEQ ID NO: 138857 - RNA, 17 nt, Human herpesvirus 4 (Epstein-Barr virus)
cagguaagaagcuacac

SEQ ID NO: 138858 - RNA, 15 nt, Human herpesvirus 4 (Epstein-Barr virus)
cagucacauugcauc

SEQ ID NO: 138859 - RNA, 23 nt, Human herpesvirus 4 (Epstein-Barr virus)
cagucaccuuccagacuaugcau

SEQ ID NO: 138860 - RNA, 16 nt, Human herpesvirus 4 (Epstein-Barr virus)
cagucacgggacauua

SEQ ID NO: 138861 - RNA, 17 nt, Human herpesvirus 4 (Epstein-Barr virus)
cagucacgggacauuaa

SEQ ID NO: 138862 - RNA, 12 nt, Human herpesvirus 4 (Epstein-Barr virus)
caguaugcaguc

SEQ ID NO: 138863 - RNA, 14 nt, Human herpesvirus 4 (Epstein-Barr virus)
cauaauggugccug

SEQ ID NO: 138864 - RNA, 16 nt, Human herpesvirus 4 (Epstein-Barr virus)
cauaauguaugccaug

SEQ ID NO: 138865 - RNA, 23 nt, Human herpesvirus 4 (Epstein-Barr virus)
cauacaggaggaaaggcuauaug

SEQ ID NO: 138866 - RNA, 21 nt, Human herpesvirus 4 (Epstein-Barr virus)
caguuuacaucugcucggggu

SEQ ID NO: 138867 - RNA, 13 nt, Human herpesvirus 4 (Epstein-Barr virus)
caguuuauugaua

SEQ ID NO: 138868 - RNA, 18 nt, Human herpesvirus 4 (Epstein-Barr virus)
cagucccaacccaaaacc

SEQ ID NO: 138869 - RNA, 11 nt, Human herpesvirus 4 (Epstein-Barr virus)
cagucuaucca

SEQ ID NO: 138870 - RNA, 22 nt, Human herpesvirus 4 (Epstein-Barr virus)
cagucuuagguaucuggaucua

SEQ ID NO: 138871 - RNA, 14 nt, Human herpesvirus 4 (Epstein-Barr virus)
cagugauaagucau

SEQ ID NO: 138872 - RNA, 16 nt, Human herpesvirus 4 (Epstein-Barr virus)
caguuaucaccguacc

SEQ ID NO: 138873 - RNA, 16 nt, Human herpesvirus 4 (Epstein-Barr virus)
caccacgaugacuccc

SEQ ID NO: 138874 - RNA, 17 nt, Human herpesvirus 4 (Epstein-Barr virus)
cacauucuggaacucga

SEQ ID NO: 138875 - RNA, 16 nt, Human herpesvirus 4 (Epstein-Barr virus)
caccaacacaaccacg

SEQ ID NO: 138876 - RNA, 15 nt, Human herpesvirus 4 (Epstein-Barr virus)
cagaagacuccugcc

SEQ ID NO: 138877 - RNA, 19 nt, Human herpesvirus 4 (Epstein-Barr virus)
cagaagacuccugccugaa

SEQ ID NO: 138878 - RNA, 21 nt, Human herpesvirus 4 (Epstein-Barr virus)
cagaagggucagcacagccag

SEQ ID NO: 138879 - RNA, 15 nt, Human herpesvirus 4 (Epstein-Barr virus)
cagacaccaccugcu

SEQ ID NO: 138880 - RNA, 15 nt, Human herpesvirus 4 (Epstein-Barr virus)
cagaauugucacuga

SEQ ID NO: 138881 - RNA, 15 nt, Human herpesvirus 4 (Epstein-Barr virus)
cagaauuagcaucag

SEQ ID NO: 138882 - RNA, 22 nt, Human herpesvirus 4 (Epstein-Barr virus)
cagacaugguguagacagaucc

SEQ ID NO: 138883 - RNA, 23 nt, Human herpesvirus 4 (Epstein-Barr virus)
cagacuaugcauacacugaauuu

SEQ ID NO: 138884 - RNA, 16 nt, Human herpesvirus 4 (Epstein-Barr virus)
cagccagagagaucau

SEQ ID NO: 138885 - RNA, 24 nt, Human herpesvirus 4 (Epstein-Barr virus)
cagccagagaggcccacugcagua

SEQ ID NO: 138886 - RNA, 17 nt, Human herpesvirus 4 (Epstein-Barr virus)
cagccccacucuugccu

SEQ ID NO: 138887 - RNA, 22 nt, Human herpesvirus 4 (Epstein-Barr virus)
cagaugccgugaaugcacgcca

SEQ ID NO: 138888 - RNA, 13 nt, Human herpesvirus 4 (Epstein-Barr virus)
cagcccuccucag

SEQ ID NO: 138889 - RNA, 23 nt, Human herpesvirus 4 (Epstein-Barr virus)
cagcuguguacgugccucagaua

SEQ ID NO: 138890 - RNA, 14 nt, Human herpesvirus 4 (Epstein-Barr virus)
cagcuggauguaca

SEQ ID NO: 138891 - RNA, 13 nt, Human herpesvirus 4 (Epstein-Barr virus)
cagcuggcccacc

SEQ ID NO: 138892 - RNA, 16 nt, Human herpesvirus 4 (Epstein-Barr virus)
cagcucuggcaguuau

SEQ ID NO: 138893 - RNA, 18 nt, Human herpesvirus 4 (Epstein-Barr virus)
cagcuccgugguccugag

SEQ ID NO: 138894 - RNA, 20 nt, Human herpesvirus 4 (Epstein-Barr virus)
cagcuuggggccaccgggga

SEQ ID NO: 138895 - RNA, 15 nt, Human herpesvirus 4 (Epstein-Barr virus)
cagcuuaacgggaag

SEQ ID NO: 138896 - RNA, 22 nt, Human herpesvirus 4 (Epstein-Barr virus)
cagcuacacucuggggucucag

SEQ ID NO: 138897 - RNA, 18 nt, Human herpesvirus 4 (Epstein-Barr virus)
cagcuaacaggacauguu

SEQ ID NO: 138898 - RNA, 15 nt, Human herpesvirus 4 (Epstein-Barr virus)
cagccugacucucau

SEQ ID NO: 138899 - RNA, 15 nt, Human herpesvirus 4 (Epstein-Barr virus)
cagccucacugaugg

SEQ ID NO: 138900 - RNA, 13 nt, Human herpesvirus 4 (Epstein-Barr virus)
cagcgaagaacac

SEQ ID NO: 138901 - RNA, 18 nt, Human herpesvirus 4 (Epstein-Barr virus)
cagcgaagaacacuccac

SEQ ID NO: 138902 - RNA, 17 nt, Human herpesvirus 4 (Epstein-Barr virus)
cagcgcuggcuccaggg

SEQ ID NO: 138903 - RNA, 17 nt, Human herpesvirus 4 (Epstein-Barr virus)
cagcgccuugaucuucu

SEQ ID NO: 138904 - RNA, 16 nt, Human herpesvirus 4 (Epstein-Barr virus)
caggcucggcaccucc

SEQ ID NO: 138905 - RNA, 14 nt, Human herpesvirus 4 (Epstein-Barr virus)
cagggcaaugggac

SEQ ID NO: 138906 - RNA, 12 nt, Human herpesvirus 4 (Epstein-Barr virus)
cagggacaucua

SEQ ID NO: 138907 - RNA, 14 nt, Human herpesvirus 4 (Epstein-Barr virus)
caggcgcuguuaug

SEQ ID NO: 138908 - RNA, 20 nt, Human herpesvirus 4 (Epstein-Barr virus)
caggcccgaccugccaaaga

SEQ ID NO: 138909 - RNA, 21 nt, Human herpesvirus 4 (Epstein-Barr virus)
caggccaaauggagacugcaa

SEQ ID NO: 138910 - RNA, 14 nt, Human herpesvirus 4 (Epstein-Barr virus)
caggagcaggagca

SEQ ID NO: 138911 - RNA, 20 nt, Human herpesvirus 4 (Epstein-Barr virus)
caggaggaggagggggacaa

SEQ ID NO: 138912 - RNA, 22 nt, Human herpesvirus 4 (Epstein-Barr virus)
caggaggaggagggggacaaga

SEQ ID NO: 138913 - RNA, 17 nt, Human herpesvirus 4 (Epstein-Barr virus)
caggaggggcaggagca

SEQ ID NO: 138914 - RNA, 19 nt, Human herpesvirus 4 (Epstein-Barr virus)
caggaggaaaggcuauaug

SEQ ID NO: 138915 - RNA, 14 nt, Human herpesvirus 4 (Epstein-Barr virus)
caggacacgugaca

SEQ ID NO: 138916 - RNA, 16 nt, Human herpesvirus 4 (Epstein-Barr virus)
caggacacgugacaug

SEQ ID NO: 138917 - RNA, 14 nt, Human herpesvirus 4 (Epstein-Barr virus)
caggacaagacagu

SEQ ID NO: 138918 - RNA, 21 nt, Human herpesvirus 4 (Epstein-Barr virus)
caggaucagggccaagacaua

SEQ ID NO: 138919 - RNA, 19 nt, Human herpesvirus 4 (Epstein-Barr virus)
caggcaacaacuaugugua

SEQ ID NO: 138920 - RNA, 16 nt, Human herpesvirus 4 (Epstein-Barr virus)
ccgagaggaugauccu

SEQ ID NO: 138921 - RNA, 15 nt, Human herpesvirus 4 (Epstein-Barr virus)
cccuauaaccacaac

SEQ ID NO: 138922 - RNA, 14 nt, Human herpesvirus 4 (Epstein-Barr virus)
cccgggccagcauu

SEQ ID NO: 138923 - RNA, 14 nt, Human herpesvirus 4 (Epstein-Barr virus)
cccggucccagcgg

SEQ ID NO: 138924 - RNA, 15 nt, Human herpesvirus 4 (Epstein-Barr virus)
cccuaauucagccac

SEQ ID NO: 138925 - RNA, 14 nt, Human herpesvirus 4 (Epstein-Barr virus)
cccuaacacucuuu

SEQ ID NO: 138926 - RNA, 16 nt, Human herpesvirus 4 (Epstein-Barr virus)
cccguuaucacaucug

SEQ ID NO: 138927 - RNA, 18 nt, Human herpesvirus 4 (Epstein-Barr virus)
ccgccguaaucuguggug

SEQ ID NO: 138928 - RNA, 15 nt, Human herpesvirus 4 (Epstein-Barr virus)
ccgccaugcucaggg

SEQ ID NO: 138929 - RNA, 22 nt, Human herpesvirus 4 (Epstein-Barr virus)
ccgccuggugguggguguccuc

SEQ ID NO: 138930 - RNA, 21 nt, Human herpesvirus 4 (Epstein-Barr virus)
ccggccaucuuuuagacacgg

SEQ ID NO: 138931 - RNA, 13 nt, Human herpesvirus 4 (Epstein-Barr virus)
ccggcacaccaga

SEQ ID NO: 138932 - RNA, 16 nt, Human herpesvirus 4 (Epstein-Barr virus)
ccggcagaucccgcau

SEQ ID NO: 138933 - RNA, 17 nt, Human herpesvirus 4 (Epstein-Barr virus)
ccgugguccugaggggc

SEQ ID NO: 138934 - RNA, 15 nt, Human herpesvirus 4 (Epstein-Barr virus)
ccgugcuuuuugcca

SEQ ID NO: 138935 - RNA, 16 nt, Human herpesvirus 4 (Epstein-Barr virus)
ccgugagaacuuucuu

SEQ ID NO: 138936 - RNA, 16 nt, Human herpesvirus 4 (Epstein-Barr virus)
ccgggcagguccguga

SEQ ID NO: 138937 - RNA, 21 nt, Human herpesvirus 4 (Epstein-Barr virus)
ccgugaaugcacgccaacagc

SEQ ID NO: 138938 - RNA, 13 nt, Human herpesvirus 4 (Epstein-Barr virus)
cccaccuaugcca

SEQ ID NO: 138939 - RNA, 19 nt, Human herpesvirus 4 (Epstein-Barr virus)
cccaccuaugccaauccau

SEQ ID NO: 138940 - RNA, 16 nt, Human herpesvirus 4 (Epstein-Barr virus)
ccccaccccggcgcca

SEQ ID NO: 138941 - RNA, 23 nt, Human herpesvirus 4 (Epstein-Barr virus)
ccccagcccgccagccaccccag

SEQ ID NO: 138942 - RNA, 18 nt, Human herpesvirus 4 (Epstein-Barr virus)
cccagagugcuccggcug

SEQ ID NO: 138943 - RNA, 15 nt, Human herpesvirus 4 (Epstein-Barr virus)
cccggaccaaugcca

SEQ ID NO: 138944 - RNA, 16 nt, Human herpesvirus 4 (Epstein-Barr virus)
cccggaccaaugccaa

SEQ ID NO: 138945 - RNA, 19 nt, Human herpesvirus 4 (Epstein-Barr virus)
ccccuaucuuaacccaauu

SEQ ID NO: 138946 - RNA, 14 nt, Human herpesvirus 4 (Epstein-Barr virus)
ccccggcaccauag

SEQ ID NO: 138947 - RNA, 16 nt, Human herpesvirus 4 (Epstein-Barr virus)
cccccaucuuugaggg

SEQ ID NO: 138948 - RNA, 12 nt, Human herpesvirus 4 (Epstein-Barr virus)
cccccgaaagaa

SEQ ID NO: 138949 - RNA, 13 nt, Human herpesvirus 4 (Epstein-Barr virus)
cccccucugaugg

SEQ ID NO: 138950 - RNA, 16 nt, Human herpesvirus 4 (Epstein-Barr virus)
ccccgaggcugauguc

SEQ ID NO: 138951 - RNA, 20 nt, Human herpesvirus 4 (Epstein-Barr virus)
ccauugacgcaaguuuugcc

SEQ ID NO: 138952 - RNA, 18 nt, Human herpesvirus 4 (Epstein-Barr virus)
ccauucucguccaucucg

SEQ ID NO: 138953 - RNA, 23 nt, Human herpesvirus 4 (Epstein-Barr virus)
ccauggccauucgacaggccauu

SEQ ID NO: 138954 - RNA, 17 nt, Human herpesvirus 4 (Epstein-Barr virus)
ccauggucgaugaacaa

SEQ ID NO: 138955 - RNA, 15 nt, Human herpesvirus 4 (Epstein-Barr virus)
ccauguccuguggug

SEQ ID NO: 138956 - RNA, 13 nt, Human herpesvirus 4 (Epstein-Barr virus)
ccaugucuacgac

SEQ ID NO: 138957 - RNA, 14 nt, Human herpesvirus 4 (Epstein-Barr virus)
ccaugcucagggcc

SEQ ID NO: 138958 - RNA, 14 nt, Human herpesvirus 4 (Epstein-Barr virus)
ccaugcuuacucaa

SEQ ID NO: 138959 - RNA, 17 nt, Human herpesvirus 4 (Epstein-Barr virus)
ccauggagaacguccac

SEQ ID NO: 138960 - RNA, 18 nt, Human herpesvirus 4 (Epstein-Barr virus)
cccaaguguuuccagaca

SEQ ID NO: 138961 - RNA, 17 nt, Human herpesvirus 4 (Epstein-Barr virus)
cccaacaaugugaaccu

SEQ ID NO: 138962 - RNA, 12 nt, Human herpesvirus 4 (Epstein-Barr virus)
cccaaaccaaau

SEQ ID NO: 138963 - RNA, 19 nt, Human herpesvirus 4 (Epstein-Barr virus)
cccaaaacuauaccaaagc

SEQ ID NO: 138964 - RNA, 14 nt, Human herpesvirus 4 (Epstein-Barr virus)
caugccaucucuga

SEQ ID NO: 138965 - RNA, 15 nt, Human herpesvirus 4 (Epstein-Barr virus)
caugccaucucugau

SEQ ID NO: 138966 - RNA, 14 nt, Human herpesvirus 4 (Epstein-Barr virus)
caugcaggucaggu

SEQ ID NO: 138967 - RNA, 17 nt, Human herpesvirus 4 (Epstein-Barr virus)
caugcgacggcuuuagc

SEQ ID NO: 138968 - RNA, 22 nt, Human herpesvirus 4 (Epstein-Barr virus)
cauggccauucgacaggccauu

SEQ ID NO: 138969 - RNA, 14 nt, Human herpesvirus 4 (Epstein-Barr virus)
cauggccggguuug

SEQ ID NO: 138970 - RNA, 22 nt, Human herpesvirus 4 (Epstein-Barr virus)
cauggaccgaacugauggcaaa

SEQ ID NO: 138971 - RNA, 15 nt, Human herpesvirus 4 (Epstein-Barr virus)
cauggagaagcugga

SEQ ID NO: 138972 - RNA, 21 nt, Human herpesvirus 4 (Epstein-Barr virus)
cauggaaaccacucagacucu

SEQ ID NO: 138973 - RNA, 19 nt, Human herpesvirus 4 (Epstein-Barr virus)
caugggcgggacaaucgca

SEQ ID NO: 138974 - RNA, 14 nt, Human herpesvirus 4 (Epstein-Barr virus)
caugguacggugau

SEQ ID NO: 138975 - RNA, 18 nt, Human herpesvirus 4 (Epstein-Barr virus)
cauuuagaaaccuugccu

SEQ ID NO: 138976 - RNA, 23 nt, Human herpesvirus 4 (Epstein-Barr virus)
ccaaagcuaacuguacauacugc

SEQ ID NO: 138977 - RNA, 17 nt, Human herpesvirus 4 (Epstein-Barr virus)
cauuucagguaccccaa

SEQ ID NO: 138978 - RNA, 23 nt, Human herpesvirus 4 (Epstein-Barr virus)
ccaacagcgaccggcagaucccg

SEQ ID NO: 138979 - RNA, 14 nt, Human herpesvirus 4 (Epstein-Barr virus)
ccaacaacuuccaa

SEQ ID NO: 138980 - RNA, 19 nt, Human herpesvirus 4 (Epstein-Barr virus)
ccaaauugauugaugaguu

SEQ ID NO: 138981 - RNA, 14 nt, Human herpesvirus 4 (Epstein-Barr virus)
ccaauccaugccaa

SEQ ID NO: 138982 - RNA, 15 nt, Human herpesvirus 4 (Epstein-Barr virus)
ccacaccauccacag

SEQ ID NO: 138983 - RNA, 15 nt, Human herpesvirus 4 (Epstein-Barr virus)
ccaaugauugaggca

SEQ ID NO: 138984 - RNA, 20 nt, Human herpesvirus 4 (Epstein-Barr virus)
ccaaugccaaagcugaagaa

SEQ ID NO: 138985 - RNA, 18 nt, Human herpesvirus 4 (Epstein-Barr virus)
ccaauguaucccaaauaa

SEQ ID NO: 138986 - RNA, 19 nt, Human herpesvirus 4 (Epstein-Barr virus)
ccagaguucccggcugcuc

SEQ ID NO: 138987 - RNA, 17 nt, Human herpesvirus 4 (Epstein-Barr virus)
ccacaguaauguugucu

SEQ ID NO: 138988 - RNA, 19 nt, Human herpesvirus 4 (Epstein-Barr virus)
ccacaggggagguggcuga

SEQ ID NO: 138989 - RNA, 16 nt, Human herpesvirus 4 (Epstein-Barr virus)
ccacauauacuggaga

SEQ ID NO: 138990 - RNA, 22 nt, Human herpesvirus 4 (Epstein-Barr virus)
ccaccaucaaugucaccacuaa

SEQ ID NO: 138991 - RNA, 17 nt, Human herpesvirus 4 (Epstein-Barr virus)
ccaccaggcgguuaggg

SEQ ID NO: 138992 - RNA, 22 nt, Human herpesvirus 4 (Epstein-Barr virus)
ccacauuggacacccacccugc

SEQ ID NO: 138993 - RNA, 15 nt, Human herpesvirus 4 (Epstein-Barr virus)
ccaugcccagacuca

SEQ ID NO: 138994 - RNA, 14 nt, Human herpesvirus 4 (Epstein-Barr virus)
ccaugcaaguggau

SEQ ID NO: 138995 - RNA, 12 nt, Human herpesvirus 4 (Epstein-Barr virus)
ccaugacaucac

SEQ ID NO: 138996 - RNA, 13 nt, Human herpesvirus 4 (Epstein-Barr virus)
ccaugacaucaca

SEQ ID NO: 138997 - RNA, 14 nt, Human herpesvirus 4 (Epstein-Barr virus)
ccaugagugccaug

SEQ ID NO: 138998 - RNA, 17 nt, Human herpesvirus 4 (Epstein-Barr virus)
ccaugagugccaugugu

SEQ ID NO: 138999 - RNA, 16 nt, Human herpesvirus 4 (Epstein-Barr virus)
ccaugaaucugacucu

SEQ ID NO: 139000 - RNA, 13 nt, Human herpesvirus 4 (Epstein-Barr virus)
ccaucgcaagcuc

SEQ ID NO: 139001 - RNA, 16 nt, Human herpesvirus 4 (Epstein-Barr virus)
ccaucgcaagcuccuu

SEQ ID NO: 139002 - RNA, 20 nt, Human herpesvirus 4 (Epstein-Barr virus)
ccaucgcaagcuccuuugcc

SEQ ID NO: 139003 - RNA, 19 nt, Human herpesvirus 4 (Epstein-Barr virus)
ccaucugagggcagugaua

SEQ ID NO: 139004 - RNA, 18 nt, Human herpesvirus 4 (Epstein-Barr virus)
ccaucuugagcgccgugg

SEQ ID NO: 139005 - RNA, 21 nt, Human herpesvirus 4 (Epstein-Barr virus)
ccagccacuuacagcacauuu

SEQ ID NO: 139006 - RNA, 22 nt, Human herpesvirus 4 (Epstein-Barr virus)
ccaggugccuuuuguacaagcu

SEQ ID NO: 139007 - RNA, 21 nt, Human herpesvirus 4 (Epstein-Barr virus)
ccaguggcaugggaccgggag

SEQ ID NO: 139008 - RNA, 20 nt, Human herpesvirus 4 (Epstein-Barr virus)
ccagugggguaaaugcaccu

SEQ ID NO: 139009 - RNA, 18 nt, Human herpesvirus 4 (Epstein-Barr virus)
ccagucccaacccaaaac

SEQ ID NO: 139010 - RNA, 13 nt, Human herpesvirus 4 (Epstein-Barr virus)
ccaguaugcaguc

SEQ ID NO: 139011 - RNA, 24 nt, Human herpesvirus 4 (Epstein-Barr virus)
guauuggguguggagacuagcuau

SEQ ID NO: 139012 - RNA, 19 nt, Human herpesvirus 4 (Epstein-Barr virus)
guacuaaauuugcugacau

SEQ ID NO: 139013 - RNA, 23 nt, Human herpesvirus 4 (Epstein-Barr virus)
guacugcgaugagggccuuccag

SEQ ID NO: 139014 - RNA, 12 nt, Human herpesvirus 4 (Epstein-Barr virus)
guacgugccuca

SEQ ID NO: 139015 - RNA, 16 nt, Human herpesvirus 4 (Epstein-Barr virus)
guauaaagucaauaaa

SEQ ID NO: 139016 - RNA, 13 nt, Human herpesvirus 4 (Epstein-Barr virus)
guagugcgcguga

SEQ ID NO: 139017 - RNA, 14 nt, Human herpesvirus 4 (Epstein-Barr virus)
guacuuguccucau

SEQ ID NO: 139018 - RNA, 18 nt, Human herpesvirus 4 (Epstein-Barr virus)
guacuucuucucugcucg

SEQ ID NO: 139019 - RNA, 16 nt, Human herpesvirus 4 (Epstein-Barr virus)
guaaucauuaccucuc

SEQ ID NO: 139020 - RNA, 23 nt, Human herpesvirus 4 (Epstein-Barr virus)
guaaucacuggcaaagggcaugc

SEQ ID NO: 139021 - RNA, 16 nt, Human herpesvirus 4 (Epstein-Barr virus)
guaaggccgcugccag

SEQ ID NO: 139022 - RNA, 19 nt, Human herpesvirus 4 (Epstein-Barr virus)
guaccuuccuguguucucc

SEQ ID NO: 139023 - RNA, 19 nt, Human herpesvirus 4 (Epstein-Barr virus)
gguuucugcccccugucuc

SEQ ID NO: 139024 - RNA, 18 nt, Human herpesvirus 4 (Epstein-Barr virus)
gguugauaaucucaaaga

SEQ ID NO: 139025 - RNA, 20 nt, Human herpesvirus 4 (Epstein-Barr virus)
gggcuccuacgcgcuaccuc

SEQ ID NO: 139026 - RNA, 18 nt, Human herpesvirus 4 (Epstein-Barr virus)
gggcggaagggcaccgug

SEQ ID NO: 139027 - RNA, 14 nt, Human herpesvirus 4 (Epstein-Barr virus)
ggggaacgagggga

SEQ ID NO: 139028 - RNA, 14 nt, Human herpesvirus 4 (Epstein-Barr virus)
ggggagaugaccau

SEQ ID NO: 139029 - RNA, 12 nt, Human herpesvirus 4 (Epstein-Barr virus)
ggggacuugagu

SEQ ID NO: 139030 - RNA, 12 nt, Human herpesvirus 4 (Epstein-Barr virus)
gggccaucuccg

SEQ ID NO: 139031 - RNA, 14 nt, Human herpesvirus 4 (Epstein-Barr virus)
gggccaagguggua

SEQ ID NO: 139032 - RNA, 17 nt, Human herpesvirus 4 (Epstein-Barr virus)
gggccgugcaccugcca

SEQ ID NO: 139033 - RNA, 21 nt, Human herpesvirus 4 (Epstein-Barr virus)
gggccguuuggcgucucaggc

SEQ ID NO: 139034 - RNA, 15 nt, Human herpesvirus 4 (Epstein-Barr virus)
ggguguggagacuag

SEQ ID NO: 139035 - RNA, 13 nt, Human herpesvirus 4 (Epstein-Barr virus)
ggggagguggcug

SEQ ID NO: 139036 - RNA, 20 nt, Human herpesvirus 4 (Epstein-Barr virus)
ggguggugauguagcuauac

SEQ ID NO: 139037 - RNA, 21 nt, Human herpesvirus 4 (Epstein-Barr virus)
ggguggugggcuccuuagacu

SEQ ID NO: 139038 - RNA, 13 nt, Human herpesvirus 4 (Epstein-Barr virus)
gggugggcgguga

SEQ ID NO: 139039 - RNA, 17 nt, Human herpesvirus 4 (Epstein-Barr virus)
gguguagugggugggca

SEQ ID NO: 139040 - RNA, 14 nt, Human herpesvirus 4 (Epstein-Barr virus)
gguggucauguuuc

SEQ ID NO: 139041 - RNA, 20 nt, Human herpesvirus 4 (Epstein-Barr virus)
ggugugagacuggaacugua

SEQ ID NO: 139042 - RNA, 13 nt, Human herpesvirus 4 (Epstein-Barr virus)
gguuauuuugccu

SEQ ID NO: 139043 - RNA, 18 nt, Human herpesvirus 4 (Epstein-Barr virus)
gguuaacuuuaacaagac

SEQ ID NO: 139044 - RNA, 14 nt, Human herpesvirus 4 (Epstein-Barr virus)
gguuauaacugcca

SEQ ID NO: 139045 - RNA, 19 nt, Human herpesvirus 4 (Epstein-Barr virus)
gguccauggcugcaccgau

SEQ ID NO: 139046 - RNA, 13 nt, Human herpesvirus 4 (Epstein-Barr virus)
gguccagggucca

SEQ ID NO: 139047 - RNA, 15 nt, Human herpesvirus 4 (Epstein-Barr virus)
gguccuagcacaaac

SEQ ID NO: 139048 - RNA, 14 nt, Human herpesvirus 4 (Epstein-Barr virus)
gguccggucuugca

SEQ ID NO: 139049 - RNA, 15 nt, Human herpesvirus 4 (Epstein-Barr virus)
gguccggucuugcag

SEQ ID NO: 139050 - RNA, 16 nt, Human herpesvirus 4 (Epstein-Barr virus)
gguacccaaaccaaau

SEQ ID NO: 139051 - RNA, 19 nt, Human herpesvirus 4 (Epstein-Barr virus)
ggucagauuuugcaauaua

SEQ ID NO: 139052 - RNA, 22 nt, Human herpesvirus 4 (Epstein-Barr virus)
ggucgaccaccucaacauauuc

SEQ ID NO: 139053 - RNA, 19 nt, Human herpesvirus 4 (Epstein-Barr virus)
ggugggaagcucagcaguu

SEQ ID NO: 139054 - RNA, 12 nt, Human herpesvirus 4 (Epstein-Barr virus)
ggugggacaaaa

SEQ ID NO: 139055 - RNA, 17 nt, Human herpesvirus 4 (Epstein-Barr virus)
gguggcauuaaugucca

SEQ ID NO: 139056 - RNA, 22 nt, Human herpesvirus 4 (Epstein-Barr virus)
gguggcgaaucugacauuucuc

SEQ ID NO: 139057 - RNA, 11 nt, Human herpesvirus 4 (Epstein-Barr virus)
ggcuugccaaa

SEQ ID NO: 139058 - RNA, 22 nt, Human herpesvirus 4 (Epstein-Barr virus)
gggacauuaaccucaaccacaa

SEQ ID NO: 139059 - RNA, 14 nt, Human herpesvirus 4 (Epstein-Barr virus)
gggacaacagguca

SEQ ID NO: 139060 - RNA, 20 nt, Human herpesvirus 4 (Epstein-Barr virus)
gggacaacugucacaccagu

SEQ ID NO: 139061 - RNA, 16 nt, Human herpesvirus 4 (Epstein-Barr virus)
gggaaccggccccgug

SEQ ID NO: 139062 - RNA, 17 nt, Human herpesvirus 4 (Epstein-Barr virus)
gggaaaauaguuccagg

SEQ ID NO: 139063 - RNA, 20 nt, Human herpesvirus 4 (Epstein-Barr virus)
gggaaaauaguuccagguga

SEQ ID NO: 139064 - RNA, 14 nt, Human herpesvirus 4 (Epstein-Barr virus)
gggaugagcuggag

SEQ ID NO: 139065 - RNA, 11 nt, Human herpesvirus 4 (Epstein-Barr virus)
gggacugggag

SEQ ID NO: 139066 - RNA, 13 nt, Human herpesvirus 4 (Epstein-Barr virus)
gggacugggaggc

SEQ ID NO: 139067 - RNA, 21 nt, Human herpesvirus 4 (Epstein-Barr virus)
gggagguggccacacugggga

SEQ ID NO: 139068 - RNA, 17 nt, Human herpesvirus 4 (Epstein-Barr virus)
gggaggugggggcugcc

SEQ ID NO: 139069 - RNA, 15 nt, Human herpesvirus 4 (Epstein-Barr virus)
gggcaaagauuuucu

SEQ ID NO: 139070 - RNA, 20 nt, Human herpesvirus 4 (Epstein-Barr virus)
gggcacgagauggcccaguu

SEQ ID NO: 139071 - RNA, 19 nt, Human herpesvirus 4 (Epstein-Barr virus)
gggcauacccauguuguca

SEQ ID NO: 139072 - RNA, 17 nt, Human herpesvirus 4 (Epstein-Barr virus)
gggcacucgcccacuaa

SEQ ID NO: 139073 - RNA, 21 nt, Human herpesvirus 4 (Epstein-Barr virus)
gggcaggagcaggaggggcag

SEQ ID NO: 139074 - RNA, 15 nt, Human herpesvirus 4 (Epstein-Barr virus)
gggcaggaggggcag

SEQ ID NO: 139075 - RNA, 15 nt, Human herpesvirus 4 (Epstein-Barr virus)
ggcugggaauggaga

SEQ ID NO: 139076 - RNA, 18 nt, Human herpesvirus 4 (Epstein-Barr virus)
ggcugggauaacaguaag

SEQ ID NO: 139077 - RNA, 23 nt, Human herpesvirus 4 (Epstein-Barr virus)
ggcugggauaacaguaagaugca

SEQ ID NO: 139078 - RNA, 14 nt, Human herpesvirus 4 (Epstein-Barr virus)
ggcuggaugcagcg

SEQ ID NO: 139079 - RNA, 15 nt, Human herpesvirus 4 (Epstein-Barr virus)
ggcuguggacugggg

SEQ ID NO: 139080 - RNA, 13 nt, Human herpesvirus 4 (Epstein-Barr virus)
ggcuggugccuug

SEQ ID NO: 139081 - RNA, 12 nt, Human herpesvirus 4 (Epstein-Barr virus)
ggcugguggccu

SEQ ID NO: 139082 - RNA, 15 nt, Human herpesvirus 4 (Epstein-Barr virus)
ggcugcgguggugcg

SEQ ID NO: 139083 - RNA, 20 nt, Human herpesvirus 4 (Epstein-Barr virus)
ggcucugaagcaacaggucc

SEQ ID NO: 139084 - RNA, 19 nt, Human herpesvirus 4 (Epstein-Barr virus)
ggcggucaccgaugagaca

SEQ ID NO: 139085 - RNA, 14 nt, Human herpesvirus 4 (Epstein-Barr virus)
ggcggcguggagcu

SEQ ID NO: 139086 - RNA, 14 nt, Human herpesvirus 4 (Epstein-Barr virus)
ggcggcuguggccu

SEQ ID NO: 139087 - RNA, 14 nt, Human herpesvirus 4 (Epstein-Barr virus)
ggcgggacuggcac

SEQ ID NO: 139088 - RNA, 23 nt, Human herpesvirus 4 (Epstein-Barr virus)
ggcggcaucauguuuuuggcaug

SEQ ID NO: 139089 - RNA, 20 nt, Human herpesvirus 4 (Epstein-Barr virus)
ggcgcuguuauggccaugau

SEQ ID NO: 139090 - RNA, 22 nt, Human herpesvirus 4 (Epstein-Barr virus)
ggcgcaccuguguccugggcaa

SEQ ID NO: 139091 - RNA, 21 nt, Human herpesvirus 4 (Epstein-Barr virus)
ggccaccuucuccaucuccau

SEQ ID NO: 139092 - RNA, 15 nt, Human herpesvirus 4 (Epstein-Barr virus)
ggccaccaacguccc

SEQ ID NO: 139093 - RNA, 22 nt, Human herpesvirus 4 (Epstein-Barr virus)
ggccaccggggaggccagguag

SEQ ID NO: 139094 - RNA, 21 nt, Human herpesvirus 4 (Epstein-Barr virus)
ggauccaaggugaccccuguu

SEQ ID NO: 139095 - RNA, 17 nt, Human herpesvirus 4 (Epstein-Barr virus)
ggauccggaggggacca

SEQ ID NO: 139096 - RNA, 19 nt, Human herpesvirus 4 (Epstein-Barr virus)
ggaucagaaucaaaaucag

SEQ ID NO: 139097 - RNA, 18 nt, Human herpesvirus 4 (Epstein-Barr virus)
ggaugaagauccaacucc

SEQ ID NO: 139098 - RNA, 17 nt, Human herpesvirus 4 (Epstein-Barr virus)
ggcaaaaauaugcaaug

SEQ ID NO: 139099 - RNA, 20 nt, Human herpesvirus 4 (Epstein-Barr virus)
ggauuccuguccaugaccac

SEQ ID NO: 139100 - RNA, 17 nt, Human herpesvirus 4 (Epstein-Barr virus)
ggaugcaggaccuagaa

SEQ ID NO: 139101 - RNA, 19 nt, Human herpesvirus 4 (Epstein-Barr virus)
ggcacaacggcugugacua

SEQ ID NO: 139102 - RNA, 18 nt, Human herpesvirus 4 (Epstein-Barr virus)
ggcacacauuacggugcu

SEQ ID NO: 139103 - RNA, 17 nt, Human herpesvirus 4 (Epstein-Barr virus)
ggcaacuccucuuacac

SEQ ID NO: 139104 - RNA, 14 nt, Human herpesvirus 4 (Epstein-Barr virus)
ggcauucccgugcu

SEQ ID NO: 139105 - RNA, 19 nt, Human herpesvirus 4 (Epstein-Barr virus)
ggcaugacgucaacuuuac

SEQ ID NO: 139106 - RNA, 17 nt, Human herpesvirus 4 (Epstein-Barr virus)
ggcaucaugcagggugc

SEQ ID NO: 139107 - RNA, 16 nt, Human herpesvirus 4 (Epstein-Barr virus)
ggcacacuuaacuuga

SEQ ID NO: 139108 - RNA, 22 nt, Human herpesvirus 4 (Epstein-Barr virus)
ggauagccucgcgacucguggg

SEQ ID NO: 139109 - RNA, 22 nt, Human herpesvirus 4 (Epstein-Barr virus)
ggauaaacagggguauguggug

SEQ ID NO: 139110 - RNA, 20 nt, Human herpesvirus 4 (Epstein-Barr virus)
ggaagcccucuggacuucca

SEQ ID NO: 139111 - RNA, 19 nt, Human herpesvirus 4 (Epstein-Barr virus)
ggaacggugauuaggcacu

SEQ ID NO: 139112 - RNA, 13 nt, Human herpesvirus 4 (Epstein-Barr virus)
ggaacaggagcag

SEQ ID NO: 139113 - RNA, 20 nt, Human herpesvirus 4 (Epstein-Barr virus)
ggaagagaggggcagggaaa

SEQ ID NO: 139114 - RNA, 21 nt, Human herpesvirus 4 (Epstein-Barr virus)
ggaagagaggggcagggaaac

SEQ ID NO: 139115 - RNA, 16 nt, Human herpesvirus 4 (Epstein-Barr virus)
gcuuugccggcaucca

SEQ ID NO: 139116 - RNA, 20 nt, Human herpesvirus 4 (Epstein-Barr virus)
gcuuuuaacucuuaaaacuu

SEQ ID NO: 139117 - RNA, 23 nt, Human herpesvirus 4 (Epstein-Barr virus)
gcgccccuauaaccacaacugcu

SEQ ID NO: 139118 - RNA, 22 nt, Human herpesvirus 4 (Epstein-Barr virus)
gcgccugagcugccuggugaga

SEQ ID NO: 139119 - RNA, 20 nt, Human herpesvirus 4 (Epstein-Barr virus)
gcgccagagcggcauccuca

SEQ ID NO: 139120 - RNA, 15 nt, Human herpesvirus 4 (Epstein-Barr virus)
gcgaggaacuggcuc

SEQ ID NO: 139121 - RNA, 21 nt, Human herpesvirus 4 (Epstein-Barr virus)
gcgagggggccuggugccaga

SEQ ID NO: 139122 - RNA, 16 nt, Human herpesvirus 4 (Epstein-Barr virus)
gcgacucugcaucagc

SEQ ID NO: 139123 - RNA, 18 nt, Human herpesvirus 4 (Epstein-Barr virus)
gcgaugaacgccuacgca

SEQ ID NO: 139124 - RNA, 19 nt, Human herpesvirus 4 (Epstein-Barr virus)
gcgaugagggccuuccaga

SEQ ID NO: 139125 - RNA, 13 nt, Human herpesvirus 4 (Epstein-Barr virus)
gcgcacgugacag

SEQ ID NO: 139126 - RNA, 13 nt, Human herpesvirus 4 (Epstein-Barr virus)
gcgcacccgggga

SEQ ID NO: 139127 - RNA, 15 nt, Human herpesvirus 4 (Epstein-Barr virus)
gcuaccagagucuau

SEQ ID NO: 139128 - RNA, 16 nt, Human herpesvirus 4 (Epstein-Barr virus)
gcgugauuuccauagg

SEQ ID NO: 139129 - RNA, 17 nt, Human herpesvirus 4 (Epstein-Barr virus)
gcuagucacacccgugg

SEQ ID NO: 139130 - RNA, 19 nt, Human herpesvirus 4 (Epstein-Barr virus)
gcgucgggaaacacagcuc

SEQ ID NO: 139131 - RNA, 17 nt, Human herpesvirus 4 (Epstein-Barr virus)
gcguccuuugggaacac

SEQ ID NO: 139132 - RNA, 15 nt, Human herpesvirus 4 (Epstein-Barr virus)
gcgguccuccacggg

SEQ ID NO: 139133 - RNA, 20 nt, Human herpesvirus 4 (Epstein-Barr virus)
gcuccguccuuguccaggag

SEQ ID NO: 139134 - RNA, 20 nt, Human herpesvirus 4 (Epstein-Barr virus)
gcuccuauggacacuuggua

SEQ ID NO: 139135 - RNA, 13 nt, Human herpesvirus 4 (Epstein-Barr virus)
gcuccagugccuc

SEQ ID NO: 139136 - RNA, 14 nt, Human herpesvirus 4 (Epstein-Barr virus)
gcuccagugccucc

SEQ ID NO: 139137 - RNA, 22 nt, Human herpesvirus 4 (Epstein-Barr virus)
gcucaugcacaccuuggcgggu

SEQ ID NO: 139138 - RNA, 14 nt, Human herpesvirus 4 (Epstein-Barr virus)
gcucuaacuuggca

SEQ ID NO: 139139 - RNA, 16 nt, Human herpesvirus 4 (Epstein-Barr virus)
gcucucagcacuuugc

SEQ ID NO: 139140 - RNA, 19 nt, Human herpesvirus 4 (Epstein-Barr virus)
gcucuucaaccuuggcagu

SEQ ID NO: 139141 - RNA, 13 nt, Human herpesvirus 4 (Epstein-Barr virus)
gcucugcacagga

SEQ ID NO: 139142 - RNA, 15 nt, Human herpesvirus 4 (Epstein-Barr virus)
gcucucguugccaaa

SEQ ID NO: 139143 - RNA, 16 nt, Human herpesvirus 4 (Epstein-Barr virus)
gcucucguugccaaaa

SEQ ID NO: 139144 - RNA, 17 nt, Human herpesvirus 4 (Epstein-Barr virus)
gcucucguugccaaaac

SEQ ID NO: 139145 - RNA, 19 nt, Human herpesvirus 4 (Epstein-Barr virus)
gcucucuaucuacaacaaa

SEQ ID NO: 139146 - RNA, 20 nt, Human herpesvirus 4 (Epstein-Barr virus)
gcucucucuggagaucuucu

SEQ ID NO: 139147 - RNA, 19 nt, Human herpesvirus 4 (Epstein-Barr virus)
gcucggcauuccuaggaga

SEQ ID NO: 139148 - RNA, 18 nt, Human herpesvirus 4 (Epstein-Barr virus)
gcucgcggaagagcccaa

SEQ ID NO: 139149 - RNA, 13 nt, Human herpesvirus 4 (Epstein-Barr virus)
gcuguugaggcaa

SEQ ID NO: 139150 - RNA, 19 nt, Human herpesvirus 4 (Epstein-Barr virus)
gcuguggccgaguggcaga

SEQ ID NO: 139151 - RNA, 23 nt, Human herpesvirus 4 (Epstein-Barr virus)
gcuguggccgaguggcagaauca

SEQ ID NO: 139152 - RNA, 15 nt, Human herpesvirus 4 (Epstein-Barr virus)
gcuguuuugcagcug

SEQ ID NO: 139153 - RNA, 15 nt, Human herpesvirus 4 (Epstein-Barr virus)
gcugcuugugaucau

SEQ ID NO: 139154 - RNA, 19 nt, Human herpesvirus 4 (Epstein-Barr virus)
gcuggacggggguggcgga

SEQ ID NO: 139155 - RNA, 15 nt, Human herpesvirus 4 (Epstein-Barr virus)
gcugcgguggugcgc

SEQ ID NO: 139156 - RNA, 15 nt, Human herpesvirus 4 (Epstein-Barr virus)
gcugcgccugagcug

SEQ ID NO: 139157 - RNA, 17 nt, Human herpesvirus 4 (Epstein-Barr virus)
gcugcagguaaaccuuc

SEQ ID NO: 139158 - RNA, 15 nt, Human herpesvirus 4 (Epstein-Barr virus)
gccgcggccaucacc

SEQ ID NO: 139159 - RNA, 20 nt, Human herpesvirus 4 (Epstein-Barr virus)
gccgcuaguugguccagggu

SEQ ID NO: 139160 - RNA, 17 nt, Human herpesvirus 4 (Epstein-Barr virus)
gccgcagggguggugga

SEQ ID NO: 139161 - RNA, 16 nt, Human herpesvirus 4 (Epstein-Barr virus)
gccgcccccugaccuc

SEQ ID NO: 139162 - RNA, 15 nt, Human herpesvirus 4 (Epstein-Barr virus)
gccgcccgggggcca

SEQ ID NO: 139163 - RNA, 20 nt, Human herpesvirus 4 (Epstein-Barr virus)
gcccuagccguccuguccaa

SEQ ID NO: 139164 - RNA, 19 nt, Human herpesvirus 4 (Epstein-Barr virus)
gcccuccucagaaaacucu

SEQ ID NO: 139165 - RNA, 20 nt, Human herpesvirus 4 (Epstein-Barr virus)
gcccuccucagaaaacucug

SEQ ID NO: 139166 - RNA, 16 nt, Human herpesvirus 4 (Epstein-Barr virus)
gcccucgguggugggc

SEQ ID NO: 139167 - RNA, 16 nt, Human herpesvirus 4 (Epstein-Barr virus)
gcccuaauucagccac

SEQ ID NO: 139168 - RNA, 18 nt, Human herpesvirus 4 (Epstein-Barr virus)
gcccucgagccauuugag

SEQ ID NO: 139169 - RNA, 22 nt, Human herpesvirus 4 (Epstein-Barr virus)
gcccuggaggccucaggcaaca

SEQ ID NO: 139170 - RNA, 21 nt, Human herpesvirus 4 (Epstein-Barr virus)
gcccuggcccaccgguuucca

SEQ ID NO: 139171 - RNA, 17 nt, Human herpesvirus 4 (Epstein-Barr virus)
gccgaagcagauggcga

SEQ ID NO: 139172 - RNA, 17 nt, Human herpesvirus 4 (Epstein-Barr virus)
gccccuaggccugccac

SEQ ID NO: 139173 - RNA, 23 nt, Human herpesvirus 4 (Epstein-Barr virus)
gccccuauaaccacaacugcuau

SEQ ID NO: 139174 - RNA, 22 nt, Human herpesvirus 4 (Epstein-Barr virus)
gcagacuccgaauauccccaaa

SEQ ID NO: 139175 - RNA, 23 nt, Human herpesvirus 4 (Epstein-Barr virus)
gccucuguuaugaaaugcagguu

SEQ ID NO: 139176 - RNA, 14 nt, Human herpesvirus 4 (Epstein-Barr virus)
gccucuuguguucu

SEQ ID NO: 139177 - RNA, 16 nt, Human herpesvirus 4 (Epstein-Barr virus)
gccucugggugcugag

SEQ ID NO: 139178 - RNA, 14 nt, Human herpesvirus 4 (Epstein-Barr virus)
gccucucaucugga

SEQ ID NO: 139179 - RNA, 13 nt, Human herpesvirus 4 (Epstein-Barr virus)
gccuccuggccag

SEQ ID NO: 139180 - RNA, 20 nt, Human herpesvirus 4 (Epstein-Barr virus)
gccucucaaaggccuuggac

SEQ ID NO: 139181 - RNA, 23 nt, Human herpesvirus 4 (Epstein-Barr virus)
gccuaauuguguauugcucucgu

SEQ ID NO: 139182 - RNA, 21 nt, Human herpesvirus 4 (Epstein-Barr virus)
gccuaauggccguccucugga

SEQ ID NO: 139183 - RNA, 17 nt, Human herpesvirus 4 (Epstein-Barr virus)
gccggaggcagacaccc

SEQ ID NO: 139184 - RNA, 20 nt, Human herpesvirus 4 (Epstein-Barr virus)
gccggggccuccauccagug

SEQ ID NO: 139185 - RNA, 18 nt, Human herpesvirus 4 (Epstein-Barr virus)
gccggguucucaggggug

SEQ ID NO: 139186 - RNA, 20 nt, Human herpesvirus 4 (Epstein-Barr virus)
gccugcggggaaaccaacga

SEQ ID NO: 139187 - RNA, 17 nt, Human herpesvirus 4 (Epstein-Barr virus)
gccuggugccagacucu

SEQ ID NO: 139188 - RNA, 17 nt, Human herpesvirus 4 (Epstein-Barr virus)
gccugucauugagguaa

SEQ ID NO: 139189 - RNA, 15 nt, Human herpesvirus 4 (Epstein-Barr virus)
gccugccucugcucu

SEQ ID NO: 139190 - RNA, 18 nt, Human herpesvirus 4 (Epstein-Barr virus)
gccuggagagcaugcagg

SEQ ID NO: 139191 - RNA, 22 nt, Human herpesvirus 4 (Epstein-Barr virus)
gccugugccucgucuaccucug

SEQ ID NO: 139192 - RNA, 22 nt, Human herpesvirus 4 (Epstein-Barr virus)
gccuguuuguccagcagggccu

SEQ ID NO: 139193 - RNA, 14 nt, Human herpesvirus 4 (Epstein-Barr virus)
gccuucucugaugg

SEQ ID NO: 139194 - RNA, 13 nt, Human herpesvirus 4 (Epstein-Barr virus)
gccuugaucuucu

SEQ ID NO: 139195 - RNA, 19 nt, Human herpesvirus 4 (Epstein-Barr virus)
gcgaaaacgaaagugcuug

SEQ ID NO: 139196 - RNA, 17 nt, Human herpesvirus 4 (Epstein-Barr virus)
gcgaaucugacauuucu

SEQ ID NO: 139197 - RNA, 18 nt, Human herpesvirus 4 (Epstein-Barr virus)
guuugggggaguuggcau

SEQ ID NO: 139198 - RNA, 23 nt, Human herpesvirus 4 (Epstein-Barr virus)
guuuugcagucgcugcugcagcu

SEQ ID NO: 139199 - RNA, 17 nt, Human herpesvirus 4 (Epstein-Barr virus)
uaaaaagcgggccugag

SEQ ID NO: 139200 - RNA, 20 nt, Human herpesvirus 4 (Epstein-Barr virus)
guuucccgacgccaaugcua

SEQ ID NO: 139201 - RNA, 22 nt, Human herpesvirus 4 (Epstein-Barr virus)
guuucuggcgauuuuaaucugg

SEQ ID NO: 139202 - RNA, 14 nt, Human herpesvirus 4 (Epstein-Barr virus)
guuugacuucauau

SEQ ID NO: 139203 - RNA, 17 nt, Human herpesvirus 4 (Epstein-Barr virus)
guugucggagguggaga

SEQ ID NO: 139204 - RNA, 13 nt, Human herpesvirus 4 (Epstein-Barr virus)
guuuaaccuggag

SEQ ID NO: 139205 - RNA, 15 nt, Human herpesvirus 4 (Epstein-Barr virus)
guuuaagcagcacug

SEQ ID NO: 139206 - RNA, 13 nt, Human herpesvirus 4 (Epstein-Barr virus)
guuuacaucugcc

SEQ ID NO: 139207 - RNA, 15 nt, Human herpesvirus 4 (Epstein-Barr virus)
guuggccuuuugcac

SEQ ID NO: 139208 - RNA, 17 nt, Human herpesvirus 4 (Epstein-Barr virus)
guuggcuucugcugcug

SEQ ID NO: 139209 - RNA, 14 nt, Human herpesvirus 4 (Epstein-Barr virus)
uaaaccaguagugc

SEQ ID NO: 139210 - RNA, 17 nt, Human herpesvirus 4 (Epstein-Barr virus)
uaaaccaauagcauguc

SEQ ID NO: 139211 - RNA, 23 nt, Human herpesvirus 4 (Epstein-Barr virus)
uaaaauuuacaccugacccauac

SEQ ID NO: 139212 - RNA, 17 nt, Human herpesvirus 4 (Epstein-Barr virus)
uaaacaagcugacagaa

SEQ ID NO: 139213 - RNA, 21 nt, Human herpesvirus 4 (Epstein-Barr virus)
uaaacaagggaaaaagguuua

SEQ ID NO: 139214 - RNA, 13 nt, Human herpesvirus 4 (Epstein-Barr virus)
uaacacagggugg

SEQ ID NO: 139215 - RNA, 18 nt, Human herpesvirus 4 (Epstein-Barr virus)
uaacaagaacugggauga

SEQ ID NO: 139216 - RNA, 15 nt, Human herpesvirus 4 (Epstein-Barr virus)
guuccacaaugccca

SEQ ID NO: 139217 - RNA, 14 nt, Human herpesvirus 4 (Epstein-Barr virus)
guucccggacaaua

SEQ ID NO: 139218 - RNA, 22 nt, Human herpesvirus 4 (Epstein-Barr virus)
guucaguggacacccaccacac

SEQ ID NO: 139219 - RNA, 19 nt, Human herpesvirus 4 (Epstein-Barr virus)
guucucuaacuguguccca

SEQ ID NO: 139220 - RNA, 14 nt, Human herpesvirus 4 (Epstein-Barr virus)
guuccuucugcucc

SEQ ID NO: 139221 - RNA, 16 nt, Human herpesvirus 4 (Epstein-Barr virus)
guguuuccagacacca

SEQ ID NO: 139222 - RNA, 12 nt, Human herpesvirus 4 (Epstein-Barr virus)
guuagaguccaa

SEQ ID NO: 139223 - RNA, 19 nt, Human herpesvirus 4 (Epstein-Barr virus)
guuauugaaaccacgccug

SEQ ID NO: 139224 - RNA, 18 nt, Human herpesvirus 4 (Epstein-Barr virus)
guuauuguucuacuccug

SEQ ID NO: 139225 - RNA, 18 nt, Human herpesvirus 4 (Epstein-Barr virus)
guuaggagacgcccucaa

SEQ ID NO: 139226 - RNA, 17 nt, Human herpesvirus 4 (Epstein-Barr virus)
guuacuucuuuugcucu

SEQ ID NO: 139227 - RNA, 13 nt, Human herpesvirus 4 (Epstein-Barr virus)
guuaccacaggua

SEQ ID NO: 139228 - RNA, 15 nt, Human herpesvirus 4 (Epstein-Barr virus)
guggagccguggccu

SEQ ID NO: 139229 - RNA, 12 nt, Human herpesvirus 4 (Epstein-Barr virus)
guggauccucca

SEQ ID NO: 139230 - RNA, 14 nt, Human herpesvirus 4 (Epstein-Barr virus)
guccggucuugcag

SEQ ID NO: 139231 - RNA, 15 nt, Human herpesvirus 4 (Epstein-Barr virus)
guccggucuugcagg

SEQ ID NO: 139232 - RNA, 13 nt, Human herpesvirus 4 (Epstein-Barr virus)
guccuagcacaaa

SEQ ID NO: 139233 - RNA, 21 nt, Human herpesvirus 4 (Epstein-Barr virus)
gucccugaguucuacaaugcc

SEQ ID NO: 139234 - RNA, 16 nt, Human herpesvirus 4 (Epstein-Barr virus)
guccaggguccaggag

SEQ ID NO: 139235 - RNA, 17 nt, Human herpesvirus 4 (Epstein-Barr virus)
guccaggguccaggaga

SEQ ID NO: 139236 - RNA, 19 nt, Human herpesvirus 4 (Epstein-Barr virus)
gucccaaaccaugacauca

SEQ ID NO: 139237 - RNA, 22 nt, Human herpesvirus 4 (Epstein-Barr virus)
gucaaaauucgcgaugcuauaa

SEQ ID NO: 139238 - RNA, 15 nt, Human herpesvirus 4 (Epstein-Barr virus)
gucaaaguucuuugu

SEQ ID NO: 139239 - RNA, 17 nt, Human herpesvirus 4 (Epstein-Barr virus)
guggcccucgguggugg

SEQ ID NO: 139240 - RNA, 21 nt, Human herpesvirus 4 (Epstein-Barr virus)
guggccaccuucuccaucucc

SEQ ID NO: 139241 - RNA, 19 nt, Human herpesvirus 4 (Epstein-Barr virus)
guggcggaugacccgccaa

SEQ ID NO: 139242 - RNA, 14 nt, Human herpesvirus 4 (Epstein-Barr virus)
guguccagugccua

SEQ ID NO: 139243 - RNA, 16 nt, Human herpesvirus 4 (Epstein-Barr virus)
gugucaauaauuucag

SEQ ID NO: 139244 - RNA, 18 nt, Human herpesvirus 4 (Epstein-Barr virus)
guguaacauuuaaugugg

SEQ ID NO: 139245 - RNA, 20 nt, Human herpesvirus 4 (Epstein-Barr virus)
guguauugcucucguugcca

SEQ ID NO: 139246 - RNA, 11 nt, Human herpesvirus 4 (Epstein-Barr virus)
guguucuugcc

SEQ ID NO: 139247 - RNA, 15 nt, Human herpesvirus 4 (Epstein-Barr virus)
guguggagacuagcu

SEQ ID NO: 139248 - RNA, 13 nt, Human herpesvirus 4 (Epstein-Barr virus)
uauagcucuggca

SEQ ID NO: 139249 - RNA, 16 nt, Human herpesvirus 4 (Epstein-Barr virus)
uauccaggucuugccg

SEQ ID NO: 139250 - RNA, 16 nt, Human herpesvirus 4 (Epstein-Barr virus)
uaggaauuauuuacca

SEQ ID NO: 139251 - RNA, 15 nt, Human herpesvirus 4 (Epstein-Barr virus)
uaggagacgcccuca

SEQ ID NO: 139252 - RNA, 20 nt, Human herpesvirus 4 (Epstein-Barr virus)
uagcucuggcacugcuagcg

SEQ ID NO: 139253 - RNA, 14 nt, Human herpesvirus 4 (Epstein-Barr virus)
uagcuugggaacac

SEQ ID NO: 139254 - RNA, 22 nt, Human herpesvirus 4 (Epstein-Barr virus)
uaguaugaaggcuggcaaagau

SEQ ID NO: 139255 - RNA, 14 nt, Human herpesvirus 4 (Epstein-Barr virus)
uagagaucaggcca

SEQ ID NO: 139256 - RNA, 14 nt, Human herpesvirus 4 (Epstein-Barr virus)
uagcagaagacucc

SEQ ID NO: 139257 - RNA, 23 nt, Human herpesvirus 4 (Epstein-Barr virus)
uagcacgucccaaaccaugacau

SEQ ID NO: 139258 - RNA, 23 nt, Human herpesvirus 4 (Epstein-Barr virus)
uagaauaucgggcguuggcccau

SEQ ID NO: 139259 - RNA, 16 nt, Human herpesvirus 4 (Epstein-Barr virus)
uagaauuguuaguuua

SEQ ID NO: 139260 - RNA, 13 nt, Human herpesvirus 4 (Epstein-Barr virus)
uagaaugugguaa

SEQ ID NO: 139261 - RNA, 13 nt, Human herpesvirus 4 (Epstein-Barr virus)
uagagacacuauc

SEQ ID NO: 139262 - RNA, 14 nt, Human herpesvirus 4 (Epstein-Barr virus)
uagaaaccuugccu

SEQ ID NO: 139263 - RNA, 13 nt, Human herpesvirus 4 (Epstein-Barr virus)
uagaaacuaugca

SEQ ID NO: 139264 - RNA, 21 nt, Human herpesvirus 4 (Epstein-Barr virus)
uagaaacuaugcaugagccac

SEQ ID NO: 139265 - RNA, 13 nt, Human herpesvirus 4 (Epstein-Barr virus)
uacuuuuugccac

SEQ ID NO: 139266 - RNA, 12 nt, Human herpesvirus 4 (Epstein-Barr virus)
uacaugucucag

SEQ ID NO: 139267 - RNA, 13 nt, Human herpesvirus 4 (Epstein-Barr virus)
uacaugucucaga

SEQ ID NO: 139268 - RNA, 14 nt, Human herpesvirus 4 (Epstein-Barr virus)
uaccuuccuguguu

SEQ ID NO: 139269 - RNA, 12 nt, Human herpesvirus 4 (Epstein-Barr virus)
uaccuugggcau

SEQ ID NO: 139270 - RNA, 19 nt, Human herpesvirus 4 (Epstein-Barr virus)
uacuuauuggagaugcucu

SEQ ID NO: 139271 - RNA, 22 nt, Human herpesvirus 4 (Epstein-Barr virus)
uacugcgaugagggccuuccag

SEQ ID NO: 139272 - RNA, 20 nt, Human herpesvirus 4 (Epstein-Barr virus)
uacuaugacaccuaucugua

SEQ ID NO: 139273 - RNA, 20 nt, Human herpesvirus 4 (Epstein-Barr virus)
uacugcccagccuacucucc

SEQ ID NO: 139274 - RNA, 20 nt, Human herpesvirus 4 (Epstein-Barr virus)
uaauucucuucuguuugcau

SEQ ID NO: 139275 - RNA, 12 nt, Human herpesvirus 4 (Epstein-Barr virus)
uaauugcagugg

SEQ ID NO: 139276 - RNA, 18 nt, Human herpesvirus 4 (Epstein-Barr virus)
uaaggaaugaacacucau

SEQ ID NO: 139277 - RNA, 15 nt, Human herpesvirus 4 (Epstein-Barr virus)
uaauucagccaccuc

SEQ ID NO: 139278 - RNA, 14 nt, Human herpesvirus 4 (Epstein-Barr virus)
uaacucacuaaaca

SEQ ID NO: 139279 - RNA, 13 nt, Human herpesvirus 4 (Epstein-Barr virus)
uaagcagcacuga

SEQ ID NO: 139280 - RNA, 17 nt, Human herpesvirus 4 (Epstein-Barr virus)
uaagcagcacugaauuu

SEQ ID NO: 139281 - RNA, 22 nt, Human herpesvirus 4 (Epstein-Barr virus)
uacaaugccaggggggaccuua

SEQ ID NO: 139282 - RNA, 17 nt, Human herpesvirus 4 (Epstein-Barr virus)
uacaauguuccuucuca

SEQ ID NO: 139283 - RNA, 20 nt, Human herpesvirus 4 (Epstein-Barr virus)
uacaggacaagacagucaca

SEQ ID NO: 139284 - RNA, 21 nt, Human herpesvirus 4 (Epstein-Barr virus)
uacaggacaagacagucacau

SEQ ID NO: 139285 - RNA, 19 nt, Human herpesvirus 4 (Epstein-Barr virus)
uacaggaggaaaggcuaua

SEQ ID NO: 139286 - RNA, 23 nt, Human herpesvirus 4 (Epstein-Barr virus)
uacagcagcuggauguacagcua

SEQ ID NO: 139287 - RNA, 17 nt, Human herpesvirus 4 (Epstein-Barr virus)
gaagauggccucaaagu

SEQ ID NO: 139288 - RNA, 10 nt, Human herpesvirus 4 (Epstein-Barr virus)
gaagccacuc

SEQ ID NO: 139289 - RNA, 23 nt, Human herpesvirus 4 (Epstein-Barr virus)
gaagcaacccccggcucucaggc

SEQ ID NO: 139290 - RNA, 16 nt, Human herpesvirus 4 (Epstein-Barr virus)
gaagcggucucagaca

SEQ ID NO: 139291 - RNA, 17 nt, Human herpesvirus 4 (Epstein-Barr virus)
gaagccugccucauccu

SEQ ID NO: 139292 - RNA, 21 nt, Human herpesvirus 4 (Epstein-Barr virus)
gaagcuugugaacuuuaacau

SEQ ID NO: 139293 - RNA, 21 nt, Human herpesvirus 4 (Epstein-Barr virus)
gaaggcuagacgcagcugugu

SEQ ID NO: 139294 - RNA, 18 nt, Human herpesvirus 4 (Epstein-Barr virus)
gaaggaggagacuggcaa

SEQ ID NO: 139295 - RNA, 22 nt, Human herpesvirus 4 (Epstein-Barr virus)
gaaggauccaugcaaguggaug

SEQ ID NO: 139296 - RNA, 13 nt, Human herpesvirus 4 (Epstein-Barr virus)
gaaggcuugccaa

SEQ ID NO: 139297 - RNA, 15 nt, Human herpesvirus 4 (Epstein-Barr virus)
gaaggcuugccaaaa

SEQ ID NO: 139298 - RNA, 15 nt, Human herpesvirus 4 (Epstein-Barr virus)
gaaugaccgugcaug

SEQ ID NO: 139299 - RNA, 22 nt, Human herpesvirus 4 (Epstein-Barr virus)
gaaugacgggaaaguaaccuca

SEQ ID NO: 139300 - RNA, 23 nt, Human herpesvirus 4 (Epstein-Barr virus)
gaaugacgggaaaguaaccucag

SEQ ID NO: 139301 - RNA, 15 nt, Human herpesvirus 4 (Epstein-Barr virus)
gacaagacagucaca

SEQ ID NO: 139302 - RNA, 17 nt, Human herpesvirus 4 (Epstein-Barr virus)
gacaacugucacaccag

SEQ ID NO: 139303 - RNA, 15 nt, Human herpesvirus 4 (Epstein-Barr virus)
gacaaggaguaccug

SEQ ID NO: 139304 - RNA, 22 nt, Human herpesvirus 4 (Epstein-Barr virus)
gacaaggaguaccugcgucuca

SEQ ID NO: 139305 - RNA, 20 nt, Human herpesvirus 4 (Epstein-Barr virus)
gacaaggcaggcgcuguuau

SEQ ID NO: 139306 - RNA, 12 nt, Human herpesvirus 4 (Epstein-Barr virus)
gacaacagguca

SEQ ID NO: 139307 - RNA, 15 nt, Human herpesvirus 4 (Epstein-Barr virus)
gacaacggcauuccc

SEQ ID NO: 139308 - RNA, 16 nt, Human herpesvirus 4 (Epstein-Barr virus)
gacaacggcauucccg

SEQ ID NO: 139309 - RNA, 13 nt, Human herpesvirus 4 (Epstein-Barr virus)
gaaauuugcacuu

SEQ ID NO: 139310 - RNA, 20 nt, Human herpesvirus 4 (Epstein-Barr virus)
gaaacugugccauggugcca

SEQ ID NO: 139311 - RNA, 18 nt, Human herpesvirus 4 (Epstein-Barr virus)
gaaagagccauggugaga

SEQ ID NO: 139312 - RNA, 23 nt, Human herpesvirus 4 (Epstein-Barr virus)
gaacccagggguggcaguggaug

SEQ ID NO: 139313 - RNA, 20 nt, Human herpesvirus 4 (Epstein-Barr virus)
gaaccugagccugagccaca

SEQ ID NO: 139314 - RNA, 16 nt, Human herpesvirus 4 (Epstein-Barr virus)
gaacacggagaucuca

SEQ ID NO: 139315 - RNA, 13 nt, Human herpesvirus 4 (Epstein-Barr virus)
gaaaaugagccau

SEQ ID NO: 139316 - RNA, 13 nt, Human herpesvirus 4 (Epstein-Barr virus)
gaaaauacuucuc

SEQ ID NO: 139317 - RNA, 15 nt, Human herpesvirus 4 (Epstein-Barr virus)
gaaaagggcccaggg

SEQ ID NO: 139318 - RNA, 19 nt, Human herpesvirus 4 (Epstein-Barr virus)
gaaaauaaaaagaauguaa

SEQ ID NO: 139319 - RNA, 18 nt, Human herpesvirus 4 (Epstein-Barr virus)
gaaaccugcgaaacuugg

SEQ ID NO: 139320 - RNA, 17 nt, Human herpesvirus 4 (Epstein-Barr virus)
cugugacuacaccauca

SEQ ID NO: 139321 - RNA, 18 nt, Human herpesvirus 4 (Epstein-Barr virus)
cugugacuacaccaucac

SEQ ID NO: 139322 - RNA, 21 nt, Human herpesvirus 4 (Epstein-Barr virus)
cugugacuggugcuuguggug

SEQ ID NO: 139323 - RNA, 14 nt, Human herpesvirus 4 (Epstein-Barr virus)
cugucuugucacca

SEQ ID NO: 139324 - RNA, 22 nt, Human herpesvirus 4 (Epstein-Barr virus)
cuguggccgaguggcagaauca

SEQ ID NO: 139325 - RNA, 17 nt, Human herpesvirus 4 (Epstein-Barr virus)
cuguggagagaggcaaa

SEQ ID NO: 139326 - RNA, 15 nt, Human herpesvirus 4 (Epstein-Barr virus)
cugugccauggugcc

SEQ ID NO: 139327 - RNA, 19 nt, Human herpesvirus 4 (Epstein-Barr virus)
cugugguaaccggugggcu

SEQ ID NO: 139328 - RNA, 12 nt, Human herpesvirus 4 (Epstein-Barr virus)
cuguggugugcu

SEQ ID NO: 139329 - RNA, 10 nt, Human herpesvirus 4 (Epstein-Barr virus)
cuugcuccac

SEQ ID NO: 139330 - RNA, 15 nt, Human herpesvirus 4 (Epstein-Barr virus)
cuugcuccaccagcu

SEQ ID NO: 139331 - RNA, 21 nt, Human herpesvirus 4 (Epstein-Barr virus)
cuugcucucagcacuuugcca

SEQ ID NO: 139332 - RNA, 22 nt, Human herpesvirus 4 (Epstein-Barr virus)
cuugcucucagcacuuugccag

SEQ ID NO: 139333 - RNA, 15 nt, Human herpesvirus 4 (Epstein-Barr virus)
cuugcugccguuauu

SEQ ID NO: 139334 - RNA, 20 nt, Human herpesvirus 4 (Epstein-Barr virus)
cuugugucucuaucaaggaa

SEQ ID NO: 139335 - RNA, 22 nt, Human herpesvirus 4 (Epstein-Barr virus)
cuuguuucucagagagcauuuc

SEQ ID NO: 139336 - RNA, 14 nt, Human herpesvirus 4 (Epstein-Barr virus)
cuuuaacauugaug

SEQ ID NO: 139337 - RNA, 23 nt, Human herpesvirus 4 (Epstein-Barr virus)
gaaaagagacugcgaaaauucag

SEQ ID NO: 139338 - RNA, 16 nt, Human herpesvirus 4 (Epstein-Barr virus)
gaaaacagaggcugga

SEQ ID NO: 139339 - RNA, 16 nt, Human herpesvirus 4 (Epstein-Barr virus)
cuuuugcucuuaacca

SEQ ID NO: 139340 - RNA, 20 nt, Human herpesvirus 4 (Epstein-Barr virus)
cuuuugcaacgccuuuuucc

SEQ ID NO: 139341 - RNA, 19 nt, Human herpesvirus 4 (Epstein-Barr virus)
cuuugggguauucucagau

SEQ ID NO: 139342 - RNA, 13 nt, Human herpesvirus 4 (Epstein-Barr virus)
cuuugcggcauca

SEQ ID NO: 139343 - RNA, 16 nt, Human herpesvirus 4 (Epstein-Barr virus)
cuuuccgcgguggugg

SEQ ID NO: 139344 - RNA, 19 nt, Human herpesvirus 4 (Epstein-Barr virus)
cuuuccuaagaccuaauaa

SEQ ID NO: 139345 - RNA, 18 nt, Human herpesvirus 4 (Epstein-Barr virus)
cuuugagcugggcaaaga

SEQ ID NO: 139346 - RNA, 20 nt, Human herpesvirus 4 (Epstein-Barr virus)
cuuugaagugguugccaugg

SEQ ID NO: 139347 - RNA, 15 nt, Human herpesvirus 4 (Epstein-Barr virus)
cuuugaaagauguca

SEQ ID NO: 139348 - RNA, 16 nt, Human herpesvirus 4 (Epstein-Barr virus)
gauacucaccaagauu

SEQ ID NO: 139349 - RNA, 20 nt, Human herpesvirus 4 (Epstein-Barr virus)
gauacucaucugugagacaa

SEQ ID NO: 139350 - RNA, 13 nt, Human herpesvirus 4 (Epstein-Barr virus)
gauaaugucuuca

SEQ ID NO: 139351 - RNA, 15 nt, Human herpesvirus 4 (Epstein-Barr virus)
gauccaacuccggcc

SEQ ID NO: 139352 - RNA, 15 nt, Human herpesvirus 4 (Epstein-Barr virus)
gaucauggaaaccac

SEQ ID NO: 139353 - RNA, 19 nt, Human herpesvirus 4 (Epstein-Barr virus)
gaucacuacuacaccgagc

SEQ ID NO: 139354 - RNA, 13 nt, Human herpesvirus 4 (Epstein-Barr virus)
gaucagagcccca

SEQ ID NO: 139355 - RNA, 17 nt, Human herpesvirus 4 (Epstein-Barr virus)
gaucagggccaagacau

SEQ ID NO: 139356 - RNA, 23 nt, Human herpesvirus 4 (Epstein-Barr virus)
gaucaccccgaguccaaggccca

SEQ ID NO: 139357 - RNA, 17 nt, Human herpesvirus 4 (Epstein-Barr virus)
gaugggugcauuucacc

SEQ ID NO: 139358 - RNA, 21 nt, Human herpesvirus 4 (Epstein-Barr virus)
gauggcccugaucugggagau

SEQ ID NO: 139359 - RNA, 22 nt, Human herpesvirus 4 (Epstein-Barr virus)
gauggccucaaaguccugcacu

SEQ ID NO: 139360 - RNA, 24 nt, Human herpesvirus 4 (Epstein-Barr virus)
gauggccuggagagcaugcagguc

SEQ ID NO: 139361 - RNA, 23 nt, Human herpesvirus 4 (Epstein-Barr virus)
gauggcgacuuuguuuagggaca

SEQ ID NO: 139362 - RNA, 18 nt, Human herpesvirus 4 (Epstein-Barr virus)
gauggcgagacucuugaa

SEQ ID NO: 139363 - RNA, 17 nt, Human herpesvirus 4 (Epstein-Barr virus)
gaugaggaauucuucca

SEQ ID NO: 139364 - RNA, 19 nt, Human herpesvirus 4 (Epstein-Barr virus)
gaugaacuggucaccagcu

SEQ ID NO: 139365 - RNA, 14 nt, Human herpesvirus 4 (Epstein-Barr virus)
gaugaacaccacca

SEQ ID NO: 139366 - RNA, 15 nt, Human herpesvirus 4 (Epstein-Barr virus)
gcaaagggcaugcuu

SEQ ID NO: 139367 - RNA, 23 nt, Human herpesvirus 4 (Epstein-Barr virus)
gcaaagacccccccaagccucuc

SEQ ID NO: 139368 - RNA, 18 nt, Human herpesvirus 4 (Epstein-Barr virus)
gauuggaaaagggcccag

SEQ ID NO: 139369 - RNA, 18 nt, Human herpesvirus 4 (Epstein-Barr virus)
gcaaacauacaggaggaa

SEQ ID NO: 139370 - RNA, 17 nt, Human herpesvirus 4 (Epstein-Barr virus)
gauucuacgcuacucuc

SEQ ID NO: 139371 - RNA, 21 nt, Human herpesvirus 4 (Epstein-Barr virus)
gauucuggccaugaaucugac

SEQ ID NO: 139372 - RNA, 18 nt, Human herpesvirus 4 (Epstein-Barr virus)
gcaagcuccuuugccuug

SEQ ID NO: 139373 - RNA, 19 nt, Human herpesvirus 4 (Epstein-Barr virus)
gcaagcuccuuugccuugu

SEQ ID NO: 139374 - RNA, 19 nt, Human herpesvirus 4 (Epstein-Barr virus)
gcaaggacgggggugggca

SEQ ID NO: 139375 - RNA, 14 nt, Human herpesvirus 4 (Epstein-Barr virus)
gcacaaaccagucu

SEQ ID NO: 139376 - RNA, 18 nt, Human herpesvirus 4 (Epstein-Barr virus)
gcacaacggcugugacua

SEQ ID NO: 139377 - RNA, 17 nt, Human herpesvirus 4 (Epstein-Barr virus)
gcaauugggcauaccca

SEQ ID NO: 139378 - RNA, 18 nt, Human herpesvirus 4 (Epstein-Barr virus)
gcaauugggcauacccau

SEQ ID NO: 139379 - RNA, 20 nt, Human herpesvirus 4 (Epstein-Barr virus)
gcaccuguguccugggcaag

SEQ ID NO: 139380 - RNA, 15 nt, Human herpesvirus 4 (Epstein-Barr virus)
gcaccggagccacca

SEQ ID NO: 139381 - RNA, 15 nt, Human herpesvirus 4 (Epstein-Barr virus)
gcaccggucucgucc

SEQ ID NO: 139382 - RNA, 16 nt, Human herpesvirus 4 (Epstein-Barr virus)
gcaccgucagccacac

SEQ ID NO: 139383 - RNA, 14 nt, Human herpesvirus 4 (Epstein-Barr virus)
gagucccugcgcca

SEQ ID NO: 139384 - RNA, 19 nt, Human herpesvirus 4 (Epstein-Barr virus)
gagucucgccaucuaccca

SEQ ID NO: 139385 - RNA, 21 nt, Human herpesvirus 4 (Epstein-Barr virus)
gagucucgccaucuacccaac

SEQ ID NO: 139386 - RNA, 22 nt, Human herpesvirus 4 (Epstein-Barr virus)
gagggccugcggggaaaccaac

SEQ ID NO: 139387 - RNA, 11 nt, Human herpesvirus 4 (Epstein-Barr virus)
gaggcugcuaa

SEQ ID NO: 139388 - RNA, 18 nt, Human herpesvirus 4 (Epstein-Barr virus)
gagggacaguaccacaag

SEQ ID NO: 139389 - RNA, 19 nt, Human herpesvirus 4 (Epstein-Barr virus)
gagugccucugggugcuga

SEQ ID NO: 139390 - RNA, 19 nt, Human herpesvirus 4 (Epstein-Barr virus)
gaguuuaagcagcacugaa

SEQ ID NO: 139391 - RNA, 20 nt, Human herpesvirus 4 (Epstein-Barr virus)
gaguuuaagcagcacugaau

SEQ ID NO: 139392 - RNA, 17 nt, Human herpesvirus 4 (Epstein-Barr virus)
gaguguuccacaguaau

SEQ ID NO: 139393 - RNA, 18 nt, Human herpesvirus 4 (Epstein-Barr virus)
gagccuacccaugaccaa

SEQ ID NO: 139394 - RNA, 22 nt, Human herpesvirus 4 (Epstein-Barr virus)
gaggccccggccgccgugucau

SEQ ID NO: 139395 - RNA, 23 nt, Human herpesvirus 4 (Epstein-Barr virus)
gaggccuuuuuggcgugguggca

SEQ ID NO: 139396 - RNA, 18 nt, Human herpesvirus 4 (Epstein-Barr virus)
gaggcggaagaccaggag

SEQ ID NO: 139397 - RNA, 21 nt, Human herpesvirus 4 (Epstein-Barr virus)
gaggccagagacgagcugcga

SEQ ID NO: 139398 - RNA, 14 nt, Human herpesvirus 4 (Epstein-Barr virus)
gaggcccacugcag

SEQ ID NO: 139399 - RNA, 17 nt, Human herpesvirus 4 (Epstein-Barr virus)
gaggaugaggcugauga

SEQ ID NO: 139400 - RNA, 21 nt, Human herpesvirus 4 (Epstein-Barr virus)
gaggauggaaagggcaugugg

SEQ ID NO: 139401 - RNA, 22 nt, Human herpesvirus 4 (Epstein-Barr virus)
gagcccauucucguccaucucg

SEQ ID NO: 139402 - RNA, 21 nt, Human herpesvirus 4 (Epstein-Barr virus)
gagagguccauggcugcaccg

SEQ ID NO: 139403 - RNA, 22 nt, Human herpesvirus 4 (Epstein-Barr virus)
gagccacacccaccuaugccaa

SEQ ID NO: 139404 - RNA, 23 nt, Human herpesvirus 4 (Epstein-Barr virus)
gagccacacccaccuaugccaau

SEQ ID NO: 139405 - RNA, 17 nt, Human herpesvirus 4 (Epstein-Barr virus)
gagcaugagcuccucuc

SEQ ID NO: 139406 - RNA, 14 nt, Human herpesvirus 4 (Epstein-Barr virus)
gagcaugaucagga

SEQ ID NO: 139407 - RNA, 21 nt, Human herpesvirus 4 (Epstein-Barr virus)
gagaggccucugggguccagg

SEQ ID NO: 139408 - RNA, 18 nt, Human herpesvirus 4 (Epstein-Barr virus)
gagagggaugggcuugau

SEQ ID NO: 139409 - RNA, 15 nt, Human herpesvirus 4 (Epstein-Barr virus)
gagagcauuucaggc

SEQ ID NO: 139410 - RNA, 21 nt, Human herpesvirus 4 (Epstein-Barr virus)
gagagccacgacauugaucac

SEQ ID NO: 139411 - RNA, 15 nt, Human herpesvirus 4 (Epstein-Barr virus)
gagacuuggaccaag

SEQ ID NO: 139412 - RNA, 18 nt, Human herpesvirus 4 (Epstein-Barr virus)
gacucugaaaaugaugaa

SEQ ID NO: 139413 - RNA, 20 nt, Human herpesvirus 4 (Epstein-Barr virus)
gacucugaaaaugaugaauu

SEQ ID NO: 139414 - RNA, 16 nt, Human herpesvirus 4 (Epstein-Barr virus)
gacuggcaacuccucu

SEQ ID NO: 139415 - RNA, 12 nt, Human herpesvirus 4 (Epstein-Barr virus)
gacugugguauc

SEQ ID NO: 139416 - RNA, 22 nt, Human herpesvirus 4 (Epstein-Barr virus)
gagacacggcucugucaguuau

SEQ ID NO: 139417 - RNA, 21 nt, Human herpesvirus 4 (Epstein-Barr virus)
gagacaacggccgagaucucu

SEQ ID NO: 139418 - RNA, 23 nt, Human herpesvirus 4 (Epstein-Barr virus)
gagacacacguggcuuccagaga

SEQ ID NO: 139419 - RNA, 22 nt, Human herpesvirus 4 (Epstein-Barr virus)
gagacggugaccugacuggcag

SEQ ID NO: 139420 - RNA, 17 nt, Human herpesvirus 4 (Epstein-Barr virus)
gagacuuaugcuaacau

SEQ ID NO: 139421 - RNA, 14 nt, Human herpesvirus 4 (Epstein-Barr virus)
gagacuacuaagcu

SEQ ID NO: 139422 - RNA, 14 nt, Human herpesvirus 4 (Epstein-Barr virus)
gacacacgagccau

SEQ ID NO: 139423 - RNA, 20 nt, Human herpesvirus 4 (Epstein-Barr virus)
gacacaccuaaauuuagcac

SEQ ID NO: 139424 - RNA, 12 nt, Human herpesvirus 4 (Epstein-Barr virus)
gacaccaacaca

SEQ ID NO: 139425 - RNA, 21 nt, Human herpesvirus 4 (Epstein-Barr virus)
gacacagugaugaacaccacc

SEQ ID NO: 139426 - RNA, 16 nt, Human herpesvirus 4 (Epstein-Barr virus)
gacgggucucgcguga

SEQ ID NO: 139427 - RNA, 19 nt, Human herpesvirus 4 (Epstein-Barr virus)
gacggugggcaugacacag

SEQ ID NO: 139428 - RNA, 20 nt, Human herpesvirus 4 (Epstein-Barr virus)
gacguggcugcgguggugcg

SEQ ID NO: 139429 - RNA, 19 nt, Human herpesvirus 4 (Epstein-Barr virus)
cguccaccccaccccggcg

SEQ ID NO: 139430 - RNA, 16 nt, Human herpesvirus 4 (Epstein-Barr virus)
cgucagccacacaauc

SEQ ID NO: 139431 - RNA, 19 nt, Human herpesvirus 4 (Epstein-Barr virus)
cgucagccacacaaucagc

SEQ ID NO: 139432 - RNA, 14 nt, Human herpesvirus 4 (Epstein-Barr virus)
cggugaucagggag

SEQ ID NO: 139433 - RNA, 16 nt, Human herpesvirus 4 (Epstein-Barr virus)
cggucucguccaucuu

SEQ ID NO: 139434 - RNA, 18 nt, Human herpesvirus 4 (Epstein-Barr virus)
cguuggcgggacuggcac

SEQ ID NO: 139435 - RNA, 16 nt, Human herpesvirus 4 (Epstein-Barr virus)
cguuuauucagcaauu

SEQ ID NO: 139436 - RNA, 12 nt, Human herpesvirus 4 (Epstein-Barr virus)
cgugccucagau

SEQ ID NO: 139437 - RNA, 18 nt, Human herpesvirus 4 (Epstein-Barr virus)
cgugcgcggaaucaggac

SEQ ID NO: 139438 - RNA, 21 nt, Human herpesvirus 4 (Epstein-Barr virus)
cgcuggccgagccugucgaua

SEQ ID NO: 139439 - RNA, 22 nt, Human herpesvirus 4 (Epstein-Barr virus)
cgcucuguuugaaacacaguuu

SEQ ID NO: 139440 - RNA, 22 nt, Human herpesvirus 4 (Epstein-Barr virus)
cgcuccguccuuguccaggaga

SEQ ID NO: 139441 - RNA, 12 nt, Human herpesvirus 4 (Epstein-Barr virus)
cgcgcuccgucc

SEQ ID NO: 139442 - RNA, 17 nt, Human herpesvirus 4 (Epstein-Barr virus)
cgcggcuggaugcccuc

SEQ ID NO: 139443 - RNA, 11 nt, Human herpesvirus 4 (Epstein-Barr virus)
cgcgugcacau

SEQ ID NO: 139444 - RNA, 19 nt, Human herpesvirus 4 (Epstein-Barr virus)
cgcguccuuugggaacacg

SEQ ID NO: 139445 - RNA, 18 nt, Human herpesvirus 4 (Epstein-Barr virus)
cgcgguuucagcaucaca

SEQ ID NO: 139446 - RNA, 20 nt, Human herpesvirus 4 (Epstein-Barr virus)
cggcuuuccaguucccccca

SEQ ID NO: 139447 - RNA, 22 nt, Human herpesvirus 4 (Epstein-Barr virus)
cgggaacgcccaguaugcaguc

SEQ ID NO: 139448 - RNA, 23 nt, Human herpesvirus 4 (Epstein-Barr virus)
cggcgagacuuggaccaagggca

SEQ ID NO: 139449 - RNA, 15 nt, Human herpesvirus 4 (Epstein-Barr virus)
cggcgccucuugucg

SEQ ID NO: 139450 - RNA, 15 nt, Human herpesvirus 4 (Epstein-Barr virus)
cggccaugcuaucuu

SEQ ID NO: 139451 - RNA, 23 nt, Human herpesvirus 4 (Epstein-Barr virus)
cggcauucccgugcuuuuugcca

SEQ ID NO: 139452 - RNA, 12 nt, Human herpesvirus 4 (Epstein-Barr virus)
cggccaccuuug

SEQ ID NO: 139453 - RNA, 17 nt, Human herpesvirus 4 (Epstein-Barr virus)
cgcuggcucgccucauc

SEQ ID NO: 139454 - RNA, 16 nt, Human herpesvirus 4 (Epstein-Barr virus)
cgcuguuuugcagcug

SEQ ID NO: 139455 - RNA, 21 nt, Human herpesvirus 4 (Epstein-Barr virus)
cgcuguuuugcagcugagucc

SEQ ID NO: 139456 - RNA, 22 nt, Human herpesvirus 4 (Epstein-Barr virus)
ccuagaaugugguaacaggugg

SEQ ID NO: 139457 - RNA, 12 nt, Human herpesvirus 4 (Epstein-Barr virus)
ccuacugguugu

SEQ ID NO: 139458 - RNA, 22 nt, Human herpesvirus 4 (Epstein-Barr virus)
ccuacucuccacucccagucca

SEQ ID NO: 139459 - RNA, 19 nt, Human herpesvirus 4 (Epstein-Barr virus)
cgagaaaaugagccaugac

SEQ ID NO: 139460 - RNA, 22 nt, Human herpesvirus 4 (Epstein-Barr virus)
cgagaaaugcgccgucauucca

SEQ ID NO: 139461 - RNA, 13 nt, Human herpesvirus 4 (Epstein-Barr virus)
cgacugucauuua

SEQ ID NO: 139462 - RNA, 24 nt, Human herpesvirus 4 (Epstein-Barr virus)
ccguugguuucagcgcaucgacac

SEQ ID NO: 139463 - RNA, 16 nt, Human herpesvirus 4 (Epstein-Barr virus)
ccuaaaaccuacauga

SEQ ID NO: 139464 - RNA, 17 nt, Human herpesvirus 4 (Epstein-Barr virus)
ccuaaaaccuacaugaa

SEQ ID NO: 139465 - RNA, 16 nt, Human herpesvirus 4 (Epstein-Barr virus)
ccuaaaaaaugcaaca

SEQ ID NO: 139466 - RNA, 22 nt, Human herpesvirus 4 (Epstein-Barr virus)
ccuacaggacaagacagucaca

SEQ ID NO: 139467 - RNA, 23 nt, Human herpesvirus 4 (Epstein-Barr virus)
ccuacaggacaagacagucacau

SEQ ID NO: 139468 - RNA, 17 nt, Human herpesvirus 4 (Epstein-Barr virus)
ccuacaugaauguuacc

SEQ ID NO: 139469 - RNA, 16 nt, Human herpesvirus 4 (Epstein-Barr virus)
ccuaaugcauccgcac

SEQ ID NO: 139470 - RNA, 14 nt, Human herpesvirus 4 (Epstein-Barr virus)
cgagucugacuaca

SEQ ID NO: 139471 - RNA, 13 nt, Human herpesvirus 4 (Epstein-Barr virus)
cgaggcugauguc

SEQ ID NO: 139472 - RNA, 17 nt, Human herpesvirus 4 (Epstein-Barr virus)
cgagccauagaccaguu

SEQ ID NO: 139473 - RNA, 15 nt, Human herpesvirus 4 (Epstein-Barr virus)
cgagcagaaggccau

SEQ ID NO: 139474 - RNA, 13 nt, Human herpesvirus 4 (Epstein-Barr virus)
cgagcaugagcuc

SEQ ID NO: 139475 - RNA, 19 nt, Human herpesvirus 4 (Epstein-Barr virus)
cgaggaggcggaagaccag

SEQ ID NO: 139476 - RNA, 17 nt, Human herpesvirus 4 (Epstein-Barr virus)
cgauaccuugggcauca

SEQ ID NO: 139477 - RNA, 19 nt, Human herpesvirus 4 (Epstein-Barr virus)
cgcgaugcuauaaaccaga

SEQ ID NO: 139478 - RNA, 18 nt, Human herpesvirus 4 (Epstein-Barr virus)
cgccugucauucuaucaa

SEQ ID NO: 139479 - RNA, 16 nt, Human herpesvirus 4 (Epstein-Barr virus)
cgccgguuaacuuuaa

SEQ ID NO: 139480 - RNA, 13 nt, Human herpesvirus 4 (Epstein-Barr virus)
cgccguuugacug

SEQ ID NO: 139481 - RNA, 16 nt, Human herpesvirus 4 (Epstein-Barr virus)
cgccguuugacuguuu

SEQ ID NO: 139482 - RNA, 15 nt, Human herpesvirus 4 (Epstein-Barr virus)
cgcauccaccaucaa

SEQ ID NO: 139483 - RNA, 16 nt, Human herpesvirus 4 (Epstein-Barr virus)
cgcauagcgugaaguc

SEQ ID NO: 139484 - RNA, 17 nt, Human herpesvirus 4 (Epstein-Barr virus)
cgcaggggugguggaug

SEQ ID NO: 139485 - RNA, 20 nt, Human herpesvirus 4 (Epstein-Barr virus)
cgcagccgucgauaccgggu

SEQ ID NO: 139486 - RNA, 14 nt, Human herpesvirus 4 (Epstein-Barr virus)
cgcacuccuaugca

SEQ ID NO: 139487 - RNA, 18 nt, Human herpesvirus 4 (Epstein-Barr virus)
cgcacuccuaugcauuuc

SEQ ID NO: 139488 - RNA, 15 nt, Human herpesvirus 4 (Epstein-Barr virus)
cugccagagccucug

SEQ ID NO: 139489 - RNA, 13 nt, Human herpesvirus 4 (Epstein-Barr virus)
cugcaaacugaca

SEQ ID NO: 139490 - RNA, 15 nt, Human herpesvirus 4 (Epstein-Barr virus)
cugccgcgauguacc

SEQ ID NO: 139491 - RNA, 11 nt, Human herpesvirus 4 (Epstein-Barr virus)
cugcccggcua

SEQ ID NO: 139492 - RNA, 17 nt, Human herpesvirus 4 (Epstein-Barr virus)
cugcccucccacuuuua

SEQ ID NO: 139493 - RNA, 14 nt, Human herpesvirus 4 (Epstein-Barr virus)
cugccugcaugcuu

SEQ ID NO: 139494 - RNA, 14 nt, Human herpesvirus 4 (Epstein-Barr virus)
cugcgaaaauucag

SEQ ID NO: 139495 - RNA, 16 nt, Human herpesvirus 4 (Epstein-Barr virus)
cugcugcugcuuguga

SEQ ID NO: 139496 - RNA, 16 nt, Human herpesvirus 4 (Epstein-Barr virus)
cugcugcuugugauca

SEQ ID NO: 139497 - RNA, 21 nt, Human herpesvirus 4 (Epstein-Barr virus)
cugcugguuuggagaaaacgg

SEQ ID NO: 139498 - RNA, 20 nt, Human herpesvirus 4 (Epstein-Barr virus)
cuggccaucugucuugucac

SEQ ID NO: 139499 - RNA, 14 nt, Human herpesvirus 4 (Epstein-Barr virus)
cuggcacugcuagc

SEQ ID NO: 139500 - RNA, 22 nt, Human herpesvirus 4 (Epstein-Barr virus)
cuggaacggugggaagcucagc

SEQ ID NO: 139501 - RNA, 12 nt, Human herpesvirus 4 (Epstein-Barr virus)
cuggugccuugg

SEQ ID NO: 139502 - RNA, 21 nt, Human herpesvirus 4 (Epstein-Barr virus)
cugggagggccaucgcaagcu

SEQ ID NO: 139503 - RNA, 15 nt, Human herpesvirus 4 (Epstein-Barr virus)
cugggaggugcugag

SEQ ID NO: 139504 - RNA, 14 nt, Human herpesvirus 4 (Epstein-Barr virus)
cugggacugccugg

SEQ ID NO: 139505 - RNA, 15 nt, Human herpesvirus 4 (Epstein-Barr virus)
cuguacauacugcaa

SEQ ID NO: 139506 - RNA, 14 nt, Human herpesvirus 4 (Epstein-Barr virus)
cuguaaucacuggc

SEQ ID NO: 139507 - RNA, 23 nt, Human herpesvirus 4 (Epstein-Barr virus)
cugacccauaccaggugccuuuu

SEQ ID NO: 139508 - RNA, 11 nt, Human herpesvirus 4 (Epstein-Barr virus)
cugacauuucu

SEQ ID NO: 139509 - RNA, 13 nt, Human herpesvirus 4 (Epstein-Barr virus)
cugacauuucuca

SEQ ID NO: 139510 - RNA, 14 nt, Human herpesvirus 4 (Epstein-Barr virus)
cugacgaggggcca

SEQ ID NO: 139511 - RNA, 14 nt, Human herpesvirus 4 (Epstein-Barr virus)
cugacgcuccagga

SEQ ID NO: 139512 - RNA, 14 nt, Human herpesvirus 4 (Epstein-Barr virus)
cugacgccaaugcc

SEQ ID NO: 139513 - RNA, 13 nt, Human herpesvirus 4 (Epstein-Barr virus)
cugacgguggugg

SEQ ID NO: 139514 - RNA, 12 nt, Human herpesvirus 4 (Epstein-Barr virus)
cugacuaagggu

SEQ ID NO: 139515 - RNA, 22 nt, Human herpesvirus 4 (Epstein-Barr virus)
cugauggccuggagagcaugca

SEQ ID NO: 139516 - RNA, 18 nt, Human herpesvirus 4 (Epstein-Barr virus)
cugaugagucugacuacu

SEQ ID NO: 139517 - RNA, 16 nt, Human herpesvirus 4 (Epstein-Barr virus)
cucuguuucuguacaa

SEQ ID NO: 139518 - RNA, 13 nt, Human herpesvirus 4 (Epstein-Barr virus)
cucuuaugccugu

SEQ ID NO: 139519 - RNA, 19 nt, Human herpesvirus 4 (Epstein-Barr virus)
cucuguguuuuuugccugg

SEQ ID NO: 139520 - RNA, 22 nt, Human herpesvirus 4 (Epstein-Barr virus)
cucuuacaccagaggccacaaa

SEQ ID NO: 139521 - RNA, 17 nt, Human herpesvirus 4 (Epstein-Barr virus)
cucuucauguccacuga

SEQ ID NO: 139522 - RNA, 16 nt, Human herpesvirus 4 (Epstein-Barr virus)
cucuucuguuugcauu

SEQ ID NO: 139523 - RNA, 22 nt, Human herpesvirus 4 (Epstein-Barr virus)
cugaauuuauacccagugagua

SEQ ID NO: 139524 - RNA, 22 nt, Human herpesvirus 4 (Epstein-Barr virus)
cucuugccucggcgcugggacu

SEQ ID NO: 139525 - RNA, 14 nt, Human herpesvirus 4 (Epstein-Barr virus)
cugacacauaaaca

SEQ ID NO: 139526 - RNA, 16 nt, Human herpesvirus 4 (Epstein-Barr virus)
cugacagagccguguc

SEQ ID NO: 139527 - RNA, 15 nt, Human herpesvirus 4 (Epstein-Barr virus)
cucguccaucucgau

SEQ ID NO: 139528 - RNA, 11 nt, Human herpesvirus 4 (Epstein-Barr virus)
cucgguggugg

SEQ ID NO: 139529 - RNA, 13 nt, Human herpesvirus 4 (Epstein-Barr virus)
cucggauagggga

SEQ ID NO: 139530 - RNA, 17 nt, Human herpesvirus 4 (Epstein-Barr virus)
cucuggagaucuucuca

SEQ ID NO: 139531 - RNA, 12 nt, Human herpesvirus 4 (Epstein-Barr virus)
cucucauguacu

SEQ ID NO: 139532 - RNA, 16 nt, Human herpesvirus 4 (Epstein-Barr virus)
cucucagcacuuugcc

SEQ ID NO: 139533 - RNA, 17 nt, Human herpesvirus 4 (Epstein-Barr virus)
cucucagcacuuugcca

SEQ ID NO: 139534 - RNA, 17 nt, Human herpesvirus 4 (Epstein-Barr virus)
cucuauugguugaucuc

SEQ ID NO: 139535 - RNA, 18 nt, Human herpesvirus 4 (Epstein-Barr virus)
cucuaacugugucccacu

SEQ ID NO: 139536 - RNA, 14 nt, Human herpesvirus 4 (Epstein-Barr virus)
cuccuuugccuugu

SEQ ID NO: 139537 - RNA, 14 nt, Human herpesvirus 4 (Epstein-Barr virus)
cucgaaacuauggc

SEQ ID NO: 139538 - RNA, 17 nt, Human herpesvirus 4 (Epstein-Barr virus)
cuccuuaaauucaccua

SEQ ID NO: 139539 - RNA, 21 nt, Human herpesvirus 4 (Epstein-Barr virus)
cucgcguuggaaaacauuagc

SEQ ID NO: 139540 - RNA, 16 nt, Human herpesvirus 4 (Epstein-Barr virus)
cucgcuggcucgccuc

SEQ ID NO: 139541 - RNA, 21 nt, Human herpesvirus 4 (Epstein-Barr virus)
cucgaugauugagaaugccaa

SEQ ID NO: 139542 - RNA, 15 nt, Human herpesvirus 4 (Epstein-Barr virus)
cucgagccauuugag

SEQ ID NO: 139543 - RNA, 15 nt, Human herpesvirus 4 (Epstein-Barr virus)
cuccuaucacaggga

SEQ ID NO: 139544 - RNA, 22 nt, Human herpesvirus 4 (Epstein-Barr virus)
cuccuaucacagggacaucuac

SEQ ID NO: 139545 - RNA, 20 nt, Human herpesvirus 4 (Epstein-Barr virus)
cuccuauggacacuugguaa

SEQ ID NO: 139546 - RNA, 22 nt, Human herpesvirus 4 (Epstein-Barr virus)
cuccuaaaaccuacaugaaugu

SEQ ID NO: 139547 - RNA, 18 nt, Human herpesvirus 4 (Epstein-Barr virus)
cuccauguccuguggugu

SEQ ID NO: 139548 - RNA, 15 nt, Human herpesvirus 4 (Epstein-Barr virus)
cuccugccugaauca

SEQ ID NO: 139549 - RNA, 21 nt, Human herpesvirus 4 (Epstein-Barr virus)
cuccugccugccucugcucug

SEQ ID NO: 139550 - RNA, 15 nt, Human herpesvirus 4 (Epstein-Barr virus)
cuccuccagcagugg

SEQ ID NO: 139551 - RNA, 16 nt, Human herpesvirus 4 (Epstein-Barr virus)
cuauucugagcaccaa

SEQ ID NO: 139552 - RNA, 15 nt, Human herpesvirus 4 (Epstein-Barr virus)
cuauugguugaucuc

SEQ ID NO: 139553 - RNA, 17 nt, Human herpesvirus 4 (Epstein-Barr virus)
cucacauuguccucacc

SEQ ID NO: 139554 - RNA, 13 nt, Human herpesvirus 4 (Epstein-Barr virus)
cucacgaucuuca

SEQ ID NO: 139555 - RNA, 20 nt, Human herpesvirus 4 (Epstein-Barr virus)
cucacgaucuucaagagucu

SEQ ID NO: 139556 - RNA, 16 nt, Human herpesvirus 4 (Epstein-Barr virus)
cucacgcgaagggaaa

SEQ ID NO: 139557 - RNA, 17 nt, Human herpesvirus 4 (Epstein-Barr virus)
cucauuuugugugccuc

SEQ ID NO: 139558 - RNA, 16 nt, Human herpesvirus 4 (Epstein-Barr virus)
cucacuaaacauugca

SEQ ID NO: 139559 - RNA, 13 nt, Human herpesvirus 4 (Epstein-Barr virus)
cucauugugcuga

SEQ ID NO: 139560 - RNA, 14 nt, Human herpesvirus 4 (Epstein-Barr virus)
cucauugugcugaa

SEQ ID NO: 139561 - RNA, 17 nt, Human herpesvirus 4 (Epstein-Barr virus)
cuccaccagcuucucaa

SEQ ID NO: 139562 - RNA, 21 nt, Human herpesvirus 4 (Epstein-Barr virus)
cuccaccgccgguuaacuuua

SEQ ID NO: 139563 - RNA, 19 nt, Human herpesvirus 4 (Epstein-Barr virus)
cuccaagcggcacagauua

SEQ ID NO: 139564 - RNA, 23 nt, Human herpesvirus 4 (Epstein-Barr virus)
cuccaacgagggcagacaccacc

SEQ ID NO: 139565 - RNA, 11 nt, Human herpesvirus 4 (Epstein-Barr virus)
cuauguucucu

SEQ ID NO: 139566 - RNA, 19 nt, Human herpesvirus 4 (Epstein-Barr virus)
cuauggaggcccccggcug

SEQ ID NO: 139567 - RNA, 20 nt, Human herpesvirus 4 (Epstein-Barr virus)
cuauggagggcagcgaagaa

SEQ ID NO: 139568 - RNA, 17 nt, Human herpesvirus 4 (Epstein-Barr virus)
cuagaccucauccugcu

SEQ ID NO: 139569 - RNA, 21 nt, Human herpesvirus 4 (Epstein-Barr virus)
cuagcgccccuauaaccacaa

SEQ ID NO: 139570 - RNA, 14 nt, Human herpesvirus 4 (Epstein-Barr virus)
cuagcucacuuuca

SEQ ID NO: 139571 - RNA, 22 nt, Human herpesvirus 4 (Epstein-Barr virus)
cuaucaggaccugggagggcca

SEQ ID NO: 139572 - RNA, 22 nt, Human herpesvirus 4 (Epstein-Barr virus)
cuagcuuauuuuuugguugugc

SEQ ID NO: 139573 - RNA, 15 nt, Human herpesvirus 4 (Epstein-Barr virus)
cuaagguccaucccg

SEQ ID NO: 139574 - RNA, 14 nt, Human herpesvirus 4 (Epstein-Barr virus)
cuagaaugugguaa

SEQ ID NO: 139575 - RNA, 22 nt, Human herpesvirus 4 (Epstein-Barr virus)
cuagaaacugugccauggugcc

SEQ ID NO: 139576 - RNA, 16 nt, Human herpesvirus 4 (Epstein-Barr virus)
cuaacugugucccacu

SEQ ID NO: 139577 - RNA, 15 nt, Human herpesvirus 4 (Epstein-Barr virus)
cuaacuuggcaucuc

SEQ ID NO: 139578 - RNA, 20 nt, Human herpesvirus 4 (Epstein-Barr virus)
cuaacuuggcaucucuuuua

SEQ ID NO: 139579 - RNA, 17 nt, Human herpesvirus 4 (Epstein-Barr virus)
cguuugaguccaaacag

SEQ ID NO: 139580 - RNA, 16 nt, Human herpesvirus 4 (Epstein-Barr virus)
cuaaaaccuacaugaa

SEQ ID NO: 139581 - RNA, 20 nt, Human herpesvirus 4 (Epstein-Barr virus)
aaaaagguuuagcuauucca

SEQ ID NO: 139582 - RNA, 21 nt, Human herpesvirus 4 (Epstein-Barr virus)
aaaaaggccggcugacaugga

SEQ ID NO: 139583 - RNA, 11 nt, Human herpesvirus 4 (Epstein-Barr virus)
aaacaguuuau

SEQ ID NO: 139584 - RNA, 23 nt, Human herpesvirus 4 (Epstein-Barr virus)
aaaccggcgagacuuggaccaag

SEQ ID NO: 139585 - RNA, 20 nt, Human herpesvirus 4 (Epstein-Barr virus)
aaacccucagucacgggaca

SEQ ID NO: 139586 - RNA, 12 nt, Human herpesvirus 4 (Epstein-Barr virus)
aaacacuacaau

SEQ ID NO: 139587 - RNA, 14 nt, Human herpesvirus 4 (Epstein-Barr virus)
aaacacccauucca

SEQ ID NO: 139588 - RNA, 20 nt, Human herpesvirus 4 (Epstein-Barr virus)
aaaauuggugccuugcucuc

SEQ ID NO: 139589 - RNA, 21 nt, Human herpesvirus 4 (Epstein-Barr virus)
aaaauuggugccuugcucuca

SEQ ID NO: 139590 - RNA, 22 nt, Human herpesvirus 4 (Epstein-Barr virus)
aaaauuuacaccugacccauac

SEQ ID NO: 139591 - RNA, 21 nt, Human herpesvirus 4 (Epstein-Barr virus)
aaaagggcccagggucacugg

SEQ ID NO: 139592 - RNA, 15 nt, Human herpesvirus 4 (Epstein-Barr virus)
aaaacgaaagugcuu

SEQ ID NO: 139593 - RNA, 23 nt, Human herpesvirus 4 (Epstein-Barr virus)
aaaacccugaccaucacaugggg

SEQ ID NO: 139594 - RNA, 16 nt, Human herpesvirus 4 (Epstein-Barr virus)
aaaacuauaccaaagc

SEQ ID NO: 139595 - RNA, 15 nt, Human herpesvirus 4 (Epstein-Barr virus)
aaaaccaaacuaaca

SEQ ID NO: 139596 - RNA, 16 nt, Human herpesvirus 4 (Epstein-Barr virus)
aacaaggagugccucu

SEQ ID NO: 139597 - RNA, 17 nt, Human herpesvirus 4 (Epstein-Barr virus)
aacaaggagugccucug

SEQ ID NO: 139598 - RNA, 12 nt, Human herpesvirus 4 (Epstein-Barr virus)
aacacagggugg

SEQ ID NO: 139599 - RNA, 18 nt, Human herpesvirus 4 (Epstein-Barr virus)
aacaccaguguccagaga

SEQ ID NO: 139600 - RNA, 18 nt, Human herpesvirus 4 (Epstein-Barr virus)
aacacagacugcgaucug

SEQ ID NO: 139601 - RNA, 21 nt, Human herpesvirus 4 (Epstein-Barr virus)
aacacagacugcgaucuggac

SEQ ID NO: 139602 - RNA, 18 nt, Human herpesvirus 4 (Epstein-Barr virus)
aacacaaccacggugaca

SEQ ID NO: 139603 - RNA, 20 nt, Human herpesvirus 4 (Epstein-Barr virus)
aacacagcucuggcaguuau

SEQ ID NO: 139604 - RNA, 22 nt, Human herpesvirus 4 (Epstein-Barr virus)
aacacggcaccgucagccacac

SEQ ID NO: 139605 - RNA, 18 nt, Human herpesvirus 4 (Epstein-Barr virus)
aacacggucuggucacua

SEQ ID NO: 139606 - RNA, 19 nt, Human herpesvirus 4 (Epstein-Barr virus)
aacacggucuggucacuaa

SEQ ID NO: 139607 - RNA, 23 nt, Human herpesvirus 4 (Epstein-Barr virus)
aaauguuacuucuuuugcucuua

SEQ ID NO: 139608 - RNA, 17 nt, Human herpesvirus 4 (Epstein-Barr virus)
aaacgagcccaaacucu

SEQ ID NO: 139609 - RNA, 19 nt, Human herpesvirus 4 (Epstein-Barr virus)
aaaguaaccacauauacug

SEQ ID NO: 139610 - RNA, 14 nt, Human herpesvirus 4 (Epstein-Barr virus)
aaacucacaggaca

SEQ ID NO: 139611 - RNA, 18 nt, Human herpesvirus 4 (Epstein-Barr virus)
aaacucacaggacauguu

SEQ ID NO: 139612 - RNA, 14 nt, Human herpesvirus 4 (Epstein-Barr virus)
aaacucugcaugga

SEQ ID NO: 139613 - RNA, 14 nt, Human herpesvirus 4 (Epstein-Barr virus)
aaagggcauguggu

SEQ ID NO: 139614 - RNA, 13 nt, Human herpesvirus 4 (Epstein-Barr virus)
aaagugcauacac

SEQ ID NO: 139615 - RNA, 16 nt, Human herpesvirus 4 (Epstein-Barr virus)
aagacauagagauggu

SEQ ID NO: 139616 - RNA, 20 nt, Human herpesvirus 4 (Epstein-Barr virus)
aagacauggccgcccgccug

SEQ ID NO: 139617 - RNA, 21 nt, Human herpesvirus 4 (Epstein-Barr virus)
aagagucucgccaucuaccca

SEQ ID NO: 139618 - RNA, 13 nt, Human herpesvirus 4 (Epstein-Barr virus)
aagacagucacau

SEQ ID NO: 139619 - RNA, 16 nt, Human herpesvirus 4 (Epstein-Barr virus)
aagacagucacauugc

SEQ ID NO: 139620 - RNA, 21 nt, Human herpesvirus 4 (Epstein-Barr virus)
aacugcuauucugagcaccaa

SEQ ID NO: 139621 - RNA, 18 nt, Human herpesvirus 4 (Epstein-Barr virus)
aacugagaacagucauca

SEQ ID NO: 139622 - RNA, 15 nt, Human herpesvirus 4 (Epstein-Barr virus)
aacuggucaccagcu

SEQ ID NO: 139623 - RNA, 16 nt, Human herpesvirus 4 (Epstein-Barr virus)
aacuggucaccagcuu

SEQ ID NO: 139624 - RNA, 16 nt, Human herpesvirus 4 (Epstein-Barr virus)
aacugguggacucuau

SEQ ID NO: 139625 - RNA, 16 nt, Human herpesvirus 4 (Epstein-Barr virus)
aacugucacaccaguc

SEQ ID NO: 139626 - RNA, 18 nt, Human herpesvirus 4 (Epstein-Barr virus)
aacugucacaccaguccc

SEQ ID NO: 139627 - RNA, 16 nt, Human herpesvirus 4 (Epstein-Barr virus)
aacgcauccaccauca

SEQ ID NO: 139628 - RNA, 14 nt, Human herpesvirus 4 (Epstein-Barr virus)
aacgagcccaaacu

SEQ ID NO: 139629 - RNA, 13 nt, Human herpesvirus 4 (Epstein-Barr virus)
aacgaaagugcuu

SEQ ID NO: 139630 - RNA, 17 nt, Human herpesvirus 4 (Epstein-Barr virus)
aacucacaggacauguu

SEQ ID NO: 139631 - RNA, 19 nt, Human herpesvirus 4 (Epstein-Barr virus)
aacucacuaaacauugcac

SEQ ID NO: 139632 - RNA, 15 nt, Human herpesvirus 4 (Epstein-Barr virus)
aacucagccccaucu

SEQ ID NO: 139633 - RNA, 19 nt, Human herpesvirus 4 (Epstein-Barr virus)
aacucagccccaucuucca

SEQ ID NO: 139634 - RNA, 18 nt, Human herpesvirus 4 (Epstein-Barr virus)
aacuccggcccacgccau

SEQ ID NO: 139635 - RNA, 16 nt, Human herpesvirus 4 (Epstein-Barr virus)
aacagggguauguggu

SEQ ID NO: 139636 - RNA, 18 nt, Human herpesvirus 4 (Epstein-Barr virus)
aacccccggcucucaggc

SEQ ID NO: 139637 - RNA, 16 nt, Human herpesvirus 4 (Epstein-Barr virus)
aacccccgugcgauga

SEQ ID NO: 139638 - RNA, 13 nt, Human herpesvirus 4 (Epstein-Barr virus)
aacccuagccacc

SEQ ID NO: 139639 - RNA, 14 nt, Human herpesvirus 4 (Epstein-Barr virus)
aacccuguagucac

SEQ ID NO: 139640 - RNA, 21 nt, Human herpesvirus 4 (Epstein-Barr virus)
aagauccuucuggcacgacug

SEQ ID NO: 139641 - RNA, 12 nt, Human herpesvirus 4 (Epstein-Barr virus)
aagaugucaaac

SEQ ID NO: 139642 - RNA, 14 nt, Human herpesvirus 4 (Epstein-Barr virus)
aagggcgccaucua

SEQ ID NO: 139643 - RNA, 17 nt, Human herpesvirus 4 (Epstein-Barr virus)
aagcagcuccgcccuca

SEQ ID NO: 139644 - RNA, 13 nt, Human herpesvirus 4 (Epstein-Barr virus)
aagcagcacugaa

SEQ ID NO: 139645 - RNA, 21 nt, Human herpesvirus 4 (Epstein-Barr virus)
aagggagacguuugaguccaa

SEQ ID NO: 139646 - RNA, 13 nt, Human herpesvirus 4 (Epstein-Barr virus)
aaguaaccacaua

SEQ ID NO: 139647 - RNA, 23 nt, Human herpesvirus 4 (Epstein-Barr virus)
aaguaccagcccuuuuuccagug

SEQ ID NO: 139648 - RNA, 14 nt, Human herpesvirus 4 (Epstein-Barr virus)
aagguuacugcaca

SEQ ID NO: 139649 - RNA, 13 nt, Human herpesvirus 4 (Epstein-Barr virus)
aagguugugcugu

SEQ ID NO: 139650 - RNA, 13 nt, Human herpesvirus 4 (Epstein-Barr virus)
aaggugucaauaa

SEQ ID NO: 139651 - RNA, 22 nt, Human herpesvirus 4 (Epstein-Barr virus)
aaggugucaauaauuucaguga

SEQ ID NO: 139652 - RNA, 17 nt, Human herpesvirus 4 (Epstein-Barr virus)
aauccauuaucuuggca

SEQ ID NO: 139653 - RNA, 18 nt, Human herpesvirus 4 (Epstein-Barr virus)
aauccauuaucuuggcac

SEQ ID NO: 139654 - RNA, 16 nt, Human herpesvirus 4 (Epstein-Barr virus)
aauauugccagcgccu

SEQ ID NO: 139655 - RNA, 15 nt, Human herpesvirus 4 (Epstein-Barr virus)
aaucaccguuccuca

SEQ ID NO: 139656 - RNA, 15 nt, Human herpesvirus 4 (Epstein-Barr virus)
aaucagaaauuugca

SEQ ID NO: 139657 - RNA, 16 nt, Human herpesvirus 4 (Epstein-Barr virus)
aaucagaaauuugcac

SEQ ID NO: 139658 - RNA, 21 nt, Human herpesvirus 4 (Epstein-Barr virus)
aauauuaauaaauaucuuccu

SEQ ID NO: 139659 - RNA, 19 nt, Human herpesvirus 4 (Epstein-Barr virus)
aauuuacaccugacccaua

SEQ ID NO: 139660 - RNA, 14 nt, Human herpesvirus 4 (Epstein-Barr virus)
aauuugcacuuucu

SEQ ID NO: 139661 - RNA, 13 nt, Human herpesvirus 4 (Epstein-Barr virus)
aauucaccuaaga

SEQ ID NO: 139662 - RNA, 13 nt, Human herpesvirus 4 (Epstein-Barr virus)
aauucacaucuca

SEQ ID NO: 139663 - RNA, 14 nt, Human herpesvirus 4 (Epstein-Barr virus)
aauucacaucucag

SEQ ID NO: 139664 - RNA, 19 nt, Human herpesvirus 4 (Epstein-Barr virus)
aauucucuucuguuugcau

SEQ ID NO: 139665 - RNA, 10 nt, Human herpesvirus 4 (Epstein-Barr virus)
aaucuuguug

SEQ ID NO: 139666 - RNA, 19 nt, Human herpesvirus 4 (Epstein-Barr virus)
aauccgaaagcacuuugaa

SEQ ID NO: 139667 - RNA, 13 nt, Human herpesvirus 4 (Epstein-Barr virus)
aaucuccugugcu

SEQ ID NO: 139668 - RNA, 16 nt, Human herpesvirus 4 (Epstein-Barr virus)
aaucugacauuucuca

SEQ ID NO: 139669 - RNA, 12 nt, Human herpesvirus 4 (Epstein-Barr virus)
aaucugacucua

SEQ ID NO: 139670 - RNA, 14 nt, Human herpesvirus 4 (Epstein-Barr virus)
aauguguauucucu

SEQ ID NO: 139671 - RNA, 22 nt, Human herpesvirus 4 (Epstein-Barr virus)
aauguugucuggucgcuagaug

SEQ ID NO: 139672 - RNA, 21 nt, Human herpesvirus 4 (Epstein-Barr virus)
aauguuacuucuuuugcucuu

SEQ ID NO: 139673 - RNA, 14 nt, Human herpesvirus 4 (Epstein-Barr virus)
aauguuacccucau

SEQ ID NO: 139674 - RNA, 13 nt, Human herpesvirus 4 (Epstein-Barr virus)
acaauaaacccaa

SEQ ID NO: 139675 - RNA, 21 nt, Human herpesvirus 4 (Epstein-Barr virus)
acaauacacccaucuggaguu

SEQ ID NO: 139676 - RNA, 14 nt, Human herpesvirus 4 (Epstein-Barr virus)
acaagucacaucaa

SEQ ID NO: 139677 - RNA, 15 nt, Human herpesvirus 4 (Epstein-Barr virus)
acaagggaagaggga

SEQ ID NO: 139678 - RNA, 17 nt, Human herpesvirus 4 (Epstein-Barr virus)
acaagggauaugaaggu

SEQ ID NO: 139679 - RNA, 14 nt, Human herpesvirus 4 (Epstein-Barr virus)
acaacggcauuccc

SEQ ID NO: 139680 - RNA, 12 nt, Human herpesvirus 4 (Epstein-Barr virus)
acucauggugug

SEQ ID NO: 139681 - RNA, 22 nt, Human herpesvirus 4 (Epstein-Barr virus)
acuccagugcgaggaacuggcu

SEQ ID NO: 139682 - RNA, 17 nt, Human herpesvirus 4 (Epstein-Barr virus)
acuccucuuacaccaga

SEQ ID NO: 139683 - RNA, 11 nt, Human herpesvirus 4 (Epstein-Barr virus)
acucuugccuc

SEQ ID NO: 139684 - RNA, 19 nt, Human herpesvirus 4 (Epstein-Barr virus)
acgucaaggcccggaugau

SEQ ID NO: 139685 - RNA, 18 nt, Human herpesvirus 4 (Epstein-Barr virus)
acgucuuuaccaccucaa

SEQ ID NO: 139686 - RNA, 13 nt, Human herpesvirus 4 (Epstein-Barr virus)
acgugagugacac

SEQ ID NO: 139687 - RNA, 14 nt, Human herpesvirus 4 (Epstein-Barr virus)
acgugauggugcug

SEQ ID NO: 139688 - RNA, 17 nt, Human herpesvirus 4 (Epstein-Barr virus)
acuucucauuagucagg

SEQ ID NO: 139689 - RNA, 19 nt, Human herpesvirus 4 (Epstein-Barr virus)
acuucucuagagccaggcu

SEQ ID NO: 139690 - RNA, 12 nt, Human herpesvirus 4 (Epstein-Barr virus)
acuucugaagau

SEQ ID NO: 139691 - RNA, 14 nt, Human herpesvirus 4 (Epstein-Barr virus)
acuuacagcacauu

SEQ ID NO: 139692 - RNA, 13 nt, Human herpesvirus 4 (Epstein-Barr virus)
acuuaacuugacu

SEQ ID NO: 139693 - RNA, 18 nt, Human herpesvirus 4 (Epstein-Barr virus)
acuguuccuauaugcucu

SEQ ID NO: 139694 - RNA, 19 nt, Human herpesvirus 4 (Epstein-Barr virus)
acugugguauccaccuaga

SEQ ID NO: 139695 - RNA, 17 nt, Human herpesvirus 4 (Epstein-Barr virus)
acugagaacagucauca

SEQ ID NO: 139696 - RNA, 22 nt, Human herpesvirus 4 (Epstein-Barr virus)
acugagcaagauccuucuggca

SEQ ID NO: 139697 - RNA, 16 nt, Human herpesvirus 4 (Epstein-Barr virus)
acugacgcuccaggau

SEQ ID NO: 139698 - RNA, 16 nt, Human herpesvirus 4 (Epstein-Barr virus)
agaacaucacugccac

SEQ ID NO: 139699 - RNA, 18 nt, Human herpesvirus 4 (Epstein-Barr virus)
agaacacuccacagaugg

SEQ ID NO: 139700 - RNA, 17 nt, Human herpesvirus 4 (Epstein-Barr virus)
agaaagagccaugguga

SEQ ID NO: 139701 - RNA, 14 nt, Human herpesvirus 4 (Epstein-Barr virus)
agacacaucuggac

SEQ ID NO: 139702 - RNA, 18 nt, Human herpesvirus 4 (Epstein-Barr virus)
agaacugacgcuccagga

SEQ ID NO: 139703 - RNA, 14 nt, Human herpesvirus 4 (Epstein-Barr virus)
acuuggcaucucuu

SEQ ID NO: 139704 - RNA, 22 nt, Human herpesvirus 4 (Epstein-Barr virus)
acuugggcacggagagugcccu

SEQ ID NO: 139705 - RNA, 11 nt, Human herpesvirus 4 (Epstein-Barr virus)
acuugugaugc

SEQ ID NO: 139706 - RNA, 21 nt, Human herpesvirus 4 (Epstein-Barr virus)
acuuguucuuuuguaaucgca

SEQ ID NO: 139707 - RNA, 17 nt, Human herpesvirus 4 (Epstein-Barr virus)
agaaaaugagccaugac

SEQ ID NO: 139708 - RNA, 13 nt, Human herpesvirus 4 (Epstein-Barr virus)
agagggugucaaa

SEQ ID NO: 139709 - RNA, 16 nt, Human herpesvirus 4 (Epstein-Barr virus)
agagguaaaacugcca

SEQ ID NO: 139710 - RNA, 21 nt, Human herpesvirus 4 (Epstein-Barr virus)
agaggccucugggguccagga

SEQ ID NO: 139711 - RNA, 13 nt, Human herpesvirus 4 (Epstein-Barr virus)
agaggccugcacc

SEQ ID NO: 139712 - RNA, 20 nt, Human herpesvirus 4 (Epstein-Barr virus)
agaggaugagaccaguggca

SEQ ID NO: 139713 - RNA, 17 nt, Human herpesvirus 4 (Epstein-Barr virus)
agauagccggccaggca

SEQ ID NO: 139714 - RNA, 23 nt, Human herpesvirus 4 (Epstein-Barr virus)
agaucagcaaccuugggggcaaa

SEQ ID NO: 139715 - RNA, 17 nt, Human herpesvirus 4 (Epstein-Barr virus)
agacuaugcauacacug

SEQ ID NO: 139716 - RNA, 19 nt, Human herpesvirus 4 (Epstein-Barr virus)
agacuaugcauacacugaa

SEQ ID NO: 139717 - RNA, 17 nt, Human herpesvirus 4 (Epstein-Barr virus)
agacuccacaccaaaua

SEQ ID NO: 139718 - RNA, 15 nt, Human herpesvirus 4 (Epstein-Barr virus)
agacucaauuuccaa

SEQ ID NO: 139719 - RNA, 22 nt, Human herpesvirus 4 (Epstein-Barr virus)
agacuaccggcgagcaugauca

SEQ ID NO: 139720 - RNA, 14 nt, Human herpesvirus 4 (Epstein-Barr virus)
agacaccuggccca

SEQ ID NO: 139721 - RNA, 19 nt, Human herpesvirus 4 (Epstein-Barr virus)
agacaccuggcccacugga

SEQ ID NO: 139722 - RNA, 20 nt, Human herpesvirus 4 (Epstein-Barr virus)
agacuuaugcuaacauuuua

SEQ ID NO: 139723 - RNA, 23 nt, Human herpesvirus 4 (Epstein-Barr virus)
agacuuggccuuggggguggugg

SEQ ID NO: 139724 - RNA, 12 nt, Human herpesvirus 4 (Epstein-Barr virus)
agagagccacau

SEQ ID NO: 139725 - RNA, 17 nt, Human herpesvirus 4 (Epstein-Barr virus)
agagacgagcugcgaca

SEQ ID NO: 139726 - RNA, 15 nt, Human herpesvirus 4 (Epstein-Barr virus)
agcaaucagacaugc

SEQ ID NO: 139727 - RNA, 20 nt, Human herpesvirus 4 (Epstein-Barr virus)
agcacaaaccagucuacgac

SEQ ID NO: 139728 - RNA, 21 nt, Human herpesvirus 4 (Epstein-Barr virus)
agcaacccccggcucucaggc

SEQ ID NO: 139729 - RNA, 19 nt, Human herpesvirus 4 (Epstein-Barr virus)
agcaagauccuucuggcac

SEQ ID NO: 139730 - RNA, 15 nt, Human herpesvirus 4 (Epstein-Barr virus)
agcaccggagccacc

SEQ ID NO: 139731 - RNA, 16 nt, Human herpesvirus 4 (Epstein-Barr virus)
agcacauuuuguucua

SEQ ID NO: 139732 - RNA, 12 nt, Human herpesvirus 4 (Epstein-Barr virus)
agcagcacugaa

SEQ ID NO: 139733 - RNA, 13 nt, Human herpesvirus 4 (Epstein-Barr virus)
agcagcacugaau

SEQ ID NO: 139734 - RNA, 21 nt, Human herpesvirus 4 (Epstein-Barr virus)
agcagacuccgaauaucccca

SEQ ID NO: 139735 - RNA, 17 nt, Human herpesvirus 4 (Epstein-Barr virus)
agcagauagccggccag

SEQ ID NO: 139736 - RNA, 17 nt, Human herpesvirus 4 (Epstein-Barr virus)
agcagaagacuccugcc

SEQ ID NO: 139737 - RNA, 13 nt, Human herpesvirus 4 (Epstein-Barr virus)
agcagaaggccau

SEQ ID NO: 139738 - RNA, 19 nt, Human herpesvirus 4 (Epstein-Barr virus)
agcaaccaauguaucccaa

SEQ ID NO: 139739 - RNA, 22 nt, Human herpesvirus 4 (Epstein-Barr virus)
agauugguaccagaagagucau

SEQ ID NO: 139740 - RNA, 18 nt, Human herpesvirus 4 (Epstein-Barr virus)
agauguuauccacaccau

SEQ ID NO: 139741 - RNA, 23 nt, Human herpesvirus 4 (Epstein-Barr virus)
agauucagacgagucugacuaca

SEQ ID NO: 139742 - RNA, 23 nt, Human herpesvirus 4 (Epstein-Barr virus)
acggccuagccaucggggcacgu

SEQ ID NO: 139743 - RNA, 22 nt, Human herpesvirus 4 (Epstein-Barr virus)
acggccucggcggggaacguga

SEQ ID NO: 139744 - RNA, 15 nt, Human herpesvirus 4 (Epstein-Barr virus)
acggccucgugcaac

SEQ ID NO: 139745 - RNA, 16 nt, Human herpesvirus 4 (Epstein-Barr virus)
acggccguagcccagu

SEQ ID NO: 139746 - RNA, 17 nt, Human herpesvirus 4 (Epstein-Barr virus)
acgggaggaaacaggag

SEQ ID NO: 139747 - RNA, 19 nt, Human herpesvirus 4 (Epstein-Barr virus)
acggcucugucaguuauca

SEQ ID NO: 139748 - RNA, 18 nt, Human herpesvirus 4 (Epstein-Barr virus)
acggcaccgucagccaca

SEQ ID NO: 139749 - RNA, 15 nt, Human herpesvirus 4 (Epstein-Barr virus)
acggcaugccuaaug

SEQ ID NO: 139750 - RNA, 23 nt, Human herpesvirus 4 (Epstein-Barr virus)
acgguguuuuuggcuugcuccac

SEQ ID NO: 139751 - RNA, 11 nt, Human herpesvirus 4 (Epstein-Barr virus)
acgggccaucu

SEQ ID NO: 139752 - RNA, 16 nt, Human herpesvirus 4 (Epstein-Barr virus)
acgagggcagacacca

SEQ ID NO: 139753 - RNA, 18 nt, Human herpesvirus 4 (Epstein-Barr virus)
acgaagacccaucugagg

SEQ ID NO: 139754 - RNA, 11 nt, Human herpesvirus 4 (Epstein-Barr virus)
acgaugacucc

SEQ ID NO: 139755 - RNA, 20 nt, Human herpesvirus 4 (Epstein-Barr virus)
acgcaauaaaguuuacuuuc

SEQ ID NO: 139756 - RNA, 16 nt, Human herpesvirus 4 (Epstein-Barr virus)
accuuuuugccaauga

SEQ ID NO: 139757 - RNA, 21 nt, Human herpesvirus 4 (Epstein-Barr virus)
accuugaggugccacagagca

SEQ ID NO: 139758 - RNA, 17 nt, Human herpesvirus 4 (Epstein-Barr virus)
accuuccagacuaugca

SEQ ID NO: 139759 - RNA, 23 nt, Human herpesvirus 4 (Epstein-Barr virus)
accuugccggccaccuuugcuau

SEQ ID NO: 139760 - RNA, 17 nt, Human herpesvirus 4 (Epstein-Barr virus)
accuuggcaguguccuc

SEQ ID NO: 139761 - RNA, 14 nt, Human herpesvirus 4 (Epstein-Barr virus)
accuucuccaucuc

SEQ ID NO: 139762 - RNA, 15 nt, Human herpesvirus 4 (Epstein-Barr virus)
accuucuccaucucc

SEQ ID NO: 139763 - RNA, 20 nt, Human herpesvirus 4 (Epstein-Barr virus)
accuugacuguaaucacugg

SEQ ID NO: 139764 - RNA, 17 nt, Human herpesvirus 4 (Epstein-Barr virus)
accuccucgaaggugca

SEQ ID NO: 139765 - RNA, 19 nt, Human herpesvirus 4 (Epstein-Barr virus)
accuccgggcccacgucaa

SEQ ID NO: 139766 - RNA, 21 nt, Human herpesvirus 4 (Epstein-Barr virus)
accuccuaaaaccuacaugaa

SEQ ID NO: 139767 - RNA, 19 nt, Human herpesvirus 4 (Epstein-Barr virus)
accguaccaugagugccau

SEQ ID NO: 139768 - RNA, 15 nt, Human herpesvirus 4 (Epstein-Barr virus)
accggggaggccagg

SEQ ID NO: 139769 - RNA, 13 nt, Human herpesvirus 4 (Epstein-Barr virus)
accggagccugcc

SEQ ID NO: 139770 - RNA, 15 nt, Human herpesvirus 4 (Epstein-Barr virus)
accgaugagauugcc

SEQ ID NO: 139771 - RNA, 18 nt, Human herpesvirus 4 (Epstein-Barr virus)
accgcgaccaagacucaa

SEQ ID NO: 139772 - RNA, 22 nt, Human herpesvirus 4 (Epstein-Barr virus)
accgccuggugguggguguccu

SEQ ID NO: 139773 - RNA, 18 nt, Human herpesvirus 4 (Epstein-Barr virus)
accgccgguuaacuuuaa

SEQ ID NO: 139774 - RNA, 13 nt, Human herpesvirus 4 (Epstein-Barr virus)
acccaaugugcaa

SEQ ID NO: 139775 - RNA, 14 nt, Human herpesvirus 4 (Epstein-Barr virus)
acccaccacacagc

SEQ ID NO: 139776 - RNA, 21 nt, Human herpesvirus 4 (Epstein-Barr virus)
acccacuacaccccugagaac

SEQ ID NO: 139777 - RNA, 17 nt, Human herpesvirus 4 (Epstein-Barr virus)
acccacuccagugcgag

SEQ ID NO: 139778 - RNA, 18 nt, Human herpesvirus 4 (Epstein-Barr virus)
acacagugaugaacacca

SEQ ID NO: 139779 - RNA, 18 nt, Human herpesvirus 4 (Epstein-Barr virus)
acacacgagccauagacc

SEQ ID NO: 139780 - RNA, 22 nt, Human herpesvirus 4 (Epstein-Barr virus)
acacaaccacggugacauucac

SEQ ID NO: 139781 - RNA, 15 nt, Human herpesvirus 4 (Epstein-Barr virus)
acacagccugacucu

SEQ ID NO: 139782 - RNA, 19 nt, Human herpesvirus 4 (Epstein-Barr virus)
acacauggccggguuugau

SEQ ID NO: 139783 - RNA, 16 nt, Human herpesvirus 4 (Epstein-Barr virus)
acagccccacucuugc

SEQ ID NO: 139784 - RNA, 13 nt, Human herpesvirus 4 (Epstein-Barr virus)
acauauacuggag

SEQ ID NO: 139785 - RNA, 22 nt, Human herpesvirus 4 (Epstein-Barr virus)
acauauacuggagaugauucau

SEQ ID NO: 139786 - RNA, 17 nt, Human herpesvirus 4 (Epstein-Barr virus)
acaucaauggaacccua

SEQ ID NO: 139787 - RNA, 18 nt, Human herpesvirus 4 (Epstein-Barr virus)
acagcugacggugggcau

SEQ ID NO: 139788 - RNA, 21 nt, Human herpesvirus 4 (Epstein-Barr virus)
acagucacauugcaucgcuca

SEQ ID NO: 139789 - RNA, 23 nt, Human herpesvirus 4 (Epstein-Barr virus)
acagucaucaguaaaucugucuc

SEQ ID NO: 139790 - RNA, 14 nt, Human herpesvirus 4 (Epstein-Barr virus)
acaugggccacugc

SEQ ID NO: 139791 - RNA, 18 nt, Human herpesvirus 4 (Epstein-Barr virus)
acaugguagauaaauuaa

SEQ ID NO: 139792 - RNA, 12 nt, Human herpesvirus 4 (Epstein-Barr virus)
acauugaugaac

SEQ ID NO: 139793 - RNA, 21 nt, Human herpesvirus 4 (Epstein-Barr virus)
acauugaugaacuggucacca

SEQ ID NO: 139794 - RNA, 20 nt, Human herpesvirus 4 (Epstein-Barr virus)
acauuuaccuggugagcaau

SEQ ID NO: 139795 - RNA, 22 nt, Human herpesvirus 4 (Epstein-Barr virus)
acauuuaccuggugagcaauca

SEQ ID NO: 139796 - RNA, 21 nt, Human herpesvirus 4 (Epstein-Barr virus)
acauuugaggaggcacacaaa

SEQ ID NO: 139797 - RNA, 15 nt, Human herpesvirus 4 (Epstein-Barr virus)
acauugcaucgcuca

SEQ ID NO: 139798 - RNA, 16 nt, Human herpesvirus 4 (Epstein-Barr virus)
acauuguccucaccaa

SEQ ID NO: 139799 - RNA, 17 nt, Human herpesvirus 4 (Epstein-Barr virus)
accaaagcuaacuguac

SEQ ID NO: 139800 - RNA, 14 nt, Human herpesvirus 4 (Epstein-Barr virus)
accacaacugcuau

SEQ ID NO: 139801 - RNA, 22 nt, Human herpesvirus 4 (Epstein-Barr virus)
accaaugccaaagcugaagaac

SEQ ID NO: 139802 - RNA, 18 nt, Human herpesvirus 4 (Epstein-Barr virus)
accaagggcagggcaaug

SEQ ID NO: 139803 - RNA, 21 nt, Human herpesvirus 4 (Epstein-Barr virus)
accaagggcagggcaauggga

SEQ ID NO: 139804 - RNA, 19 nt, Human herpesvirus 4 (Epstein-Barr virus)
accaggucgaccaccucaa

SEQ ID NO: 139805 - RNA, 13 nt, Human herpesvirus 4 (Epstein-Barr virus)
accaggugccuuu

SEQ ID NO: 139806 - RNA, 19 nt, Human herpesvirus 4 (Epstein-Barr virus)
accagggucaacagguggu

SEQ ID NO: 139807 - RNA, 14 nt, Human herpesvirus 4 (Epstein-Barr virus)
acccaacagucuuc

SEQ ID NO: 139808 - RNA, 20 nt, Human herpesvirus 4 (Epstein-Barr virus)
accagcccuuuuuccagugg

SEQ ID NO: 139809 - RNA, 12 nt, Human herpesvirus 4 (Epstein-Barr virus)
accagcacgugg

SEQ ID NO: 139810 - RNA, 20 nt, Human herpesvirus 4 (Epstein-Barr virus)
accagcuaacaggacauguu

SEQ ID NO: 139811 - RNA, 16 nt, Human herpesvirus 4 (Epstein-Barr virus)
accagcuucucaaagg

SEQ ID NO: 139812 - RNA, 16 nt, Human herpesvirus 4 (Epstein-Barr virus)
caauguuccuucucau

SEQ ID NO: 139813 - RNA, 22 nt, Human herpesvirus 4 (Epstein-Barr virus)
caauguuccuucucaugcuccu

SEQ ID NO: 139814 - RNA, 13 nt, Human herpesvirus 4 (Epstein-Barr virus)
caaugucaaggcu

SEQ ID NO: 139815 - RNA, 20 nt, Human herpesvirus 4 (Epstein-Barr virus)
caaugucaaggcucugcaca

SEQ ID NO: 139816 - RNA, 17 nt, Human herpesvirus 4 (Epstein-Barr virus)
caauucuugcacccacc

SEQ ID NO: 139817 - RNA, 18 nt, Human herpesvirus 4 (Epstein-Barr virus)
caaggcccggaugaucuc

SEQ ID NO: 139818 - RNA, 19 nt, Human herpesvirus 4 (Epstein-Barr virus)
caagggcagggcaauggga

SEQ ID NO: 139819 - RNA, 17 nt, Human herpesvirus 4 (Epstein-Barr virus)
caaggaaggcuugccaa

SEQ ID NO: 139820 - RNA, 18 nt, Human herpesvirus 4 (Epstein-Barr virus)
caaggaaggcuugccaaa

SEQ ID NO: 139821 - RNA, 20 nt, Human herpesvirus 4 (Epstein-Barr virus)
caaggaaggcuugccaaaau

SEQ ID NO: 139822 - RNA, 21 nt, Human herpesvirus 4 (Epstein-Barr virus)
caaggacccccgcgucacugu

SEQ ID NO: 139823 - RNA, 19 nt, Human herpesvirus 4 (Epstein-Barr virus)
caagcuuuugaccaagcua

SEQ ID NO: 139824 - RNA, 20 nt, Human herpesvirus 4 (Epstein-Barr virus)
caaggaaacaaaaccacuga

SEQ ID NO: 139825 - RNA, 13 nt, Human herpesvirus 4 (Epstein-Barr virus)
caagcuccuuugc

SEQ ID NO: 139826 - RNA, 22 nt, Human herpesvirus 4 (Epstein-Barr virus)
caagcuccuuugccuugugugc

SEQ ID NO: 139827 - RNA, 16 nt, Human herpesvirus 4 (Epstein-Barr virus)
cacacaaaaugaggaa

SEQ ID NO: 139828 - RNA, 13 nt, Human herpesvirus 4 (Epstein-Barr virus)
cacaccaguccca

SEQ ID NO: 139829 - RNA, 19 nt, Human herpesvirus 4 (Epstein-Barr virus)
cacacccaccuaugccaau

SEQ ID NO: 139830 - RNA, 19 nt, Human herpesvirus 4 (Epstein-Barr virus)
cacacauuacggugcugga

SEQ ID NO: 139831 - RNA, 22 nt, Human herpesvirus 4 (Epstein-Barr virus)
cacacauuucagguaccccaaa

SEQ ID NO: 139832 - RNA, 15 nt, Human herpesvirus 4 (Epstein-Barr virus)
cacauggggcauuag

SEQ ID NO: 139833 - RNA, 22 nt, Human herpesvirus 4 (Epstein-Barr virus)
cacauguuuucuggacacagga

SEQ ID NO: 139834 - RNA, 22 nt, Human herpesvirus 4 (Epstein-Barr virus)
cacaaacaccaguguccagaga

SEQ ID NO: 139835 - RNA, 18 nt, Human herpesvirus 4 (Epstein-Barr virus)
cacaacggcugugacuac

SEQ ID NO: 139836 - RNA, 20 nt, Human herpesvirus 4 (Epstein-Barr virus)
cacaaccacggugacauuca

SEQ ID NO: 139837 - RNA, 19 nt, Human herpesvirus 4 (Epstein-Barr virus)
cacggggccgugcaccugc

SEQ ID NO: 139838 - RNA, 15 nt, Human herpesvirus 4 (Epstein-Barr virus)
cacggugacauucac

SEQ ID NO: 139839 - RNA, 22 nt, Human herpesvirus 4 (Epstein-Barr virus)
cacgguggcuugggcuguggua

SEQ ID NO: 139840 - RNA, 23 nt, Human herpesvirus 4 (Epstein-Barr virus)
cacgguggcuugggcugugguaa

SEQ ID NO: 139841 - RNA, 16 nt, Human herpesvirus 4 (Epstein-Barr virus)
cacuaucacccauggc

SEQ ID NO: 139842 - RNA, 12 nt, Human herpesvirus 4 (Epstein-Barr virus)
cacucagacucu

SEQ ID NO: 139843 - RNA, 23 nt, Human herpesvirus 4 (Epstein-Barr virus)
cacggaagcccucuggacuucca

SEQ ID NO: 139844 - RNA, 22 nt, Human herpesvirus 4 (Epstein-Barr virus)
cacgcuuggagucgaagcucuu

SEQ ID NO: 139845 - RNA, 20 nt, Human herpesvirus 4 (Epstein-Barr virus)
cacgcggugagggccgucac

SEQ ID NO: 139846 - RNA, 20 nt, Human herpesvirus 4 (Epstein-Barr virus)
cacggcccacgucuuuacca

SEQ ID NO: 139847 - RNA, 12 nt, Human herpesvirus 4 (Epstein-Barr virus)
cacggccucaaa

SEQ ID NO: 139848 - RNA, 12 nt, Human herpesvirus 4 (Epstein-Barr virus)
cacgcaaaguca

SEQ ID NO: 139849 - RNA, 21 nt, Human herpesvirus 4 (Epstein-Barr virus)
cacgcaagggagacguuugag

SEQ ID NO: 139850 - RNA, 14 nt, Human herpesvirus 4 (Epstein-Barr virus)
cacgccagagacaa

SEQ ID NO: 139851 - RNA, 14 nt, Human herpesvirus 4 (Epstein-Barr virus)
caccaacacaacca

SEQ ID NO: 139852 - RNA, 17 nt, Human herpesvirus 4 (Epstein-Barr virus)
caccaacacgaccccaa

SEQ ID NO: 139853 - RNA, 17 nt, Human herpesvirus 4 (Epstein-Barr virus)
cacccggacccggacca

SEQ ID NO: 139854 - RNA, 13 nt, Human herpesvirus 4 (Epstein-Barr virus)
caccgcaaccgcu

SEQ ID NO: 139855 - RNA, 15 nt, Human herpesvirus 4 (Epstein-Barr virus)
caccgggaugagcug

SEQ ID NO: 139856 - RNA, 16 nt, Human herpesvirus 4 (Epstein-Barr virus)
caccggggugccaaga

SEQ ID NO: 139857 - RNA, 13 nt, Human herpesvirus 4 (Epstein-Barr virus)
caccgucagccac

SEQ ID NO: 139858 - RNA, 22 nt, Human herpesvirus 4 (Epstein-Barr virus)
cacgaucuucaagagucucgcc

SEQ ID NO: 139859 - RNA, 22 nt, Human herpesvirus 4 (Epstein-Barr virus)
cacgacuguuccuauaugcucu

SEQ ID NO: 139860 - RNA, 24 nt, Human herpesvirus 4 (Epstein-Barr virus)
cacgagaaaugcgccgucauucca

SEQ ID NO: 139861 - RNA, 22 nt, Human herpesvirus 4 (Epstein-Barr virus)
caccguggcagacacacgugua

SEQ ID NO: 139862 - RNA, 19 nt, Human herpesvirus 4 (Epstein-Barr virus)
cagcuguguacgugccuca

SEQ ID NO: 139863 - RNA, 19 nt, Human herpesvirus 4 (Epstein-Barr virus)
cagcuggcccaccuaaaga

SEQ ID NO: 139864 - RNA, 16 nt, Human herpesvirus 4 (Epstein-Barr virus)
cagcuucgagagccac

SEQ ID NO: 139865 - RNA, 15 nt, Human herpesvirus 4 (Epstein-Barr virus)
cagcuucgaggucuc

SEQ ID NO: 139866 - RNA, 20 nt, Human herpesvirus 4 (Epstein-Barr virus)
cagcuucgcaaguuccucaa

SEQ ID NO: 139867 - RNA, 14 nt, Human herpesvirus 4 (Epstein-Barr virus)
cagcuacacucugg

SEQ ID NO: 139868 - RNA, 21 nt, Human herpesvirus 4 (Epstein-Barr virus)
cagcugacggugggcaugaca

SEQ ID NO: 139869 - RNA, 22 nt, Human herpesvirus 4 (Epstein-Barr virus)
cagcgccuugaucuucuucucc

SEQ ID NO: 139870 - RNA, 16 nt, Human herpesvirus 4 (Epstein-Barr virus)
cagcgaagaacacucc

SEQ ID NO: 139871 - RNA, 14 nt, Human herpesvirus 4 (Epstein-Barr virus)
cagcgcacccgggg

SEQ ID NO: 139872 - RNA, 20 nt, Human herpesvirus 4 (Epstein-Barr virus)
cagccacgcaggauguucac

SEQ ID NO: 139873 - RNA, 15 nt, Human herpesvirus 4 (Epstein-Barr virus)
cagccagagagauca

SEQ ID NO: 139874 - RNA, 13 nt, Human herpesvirus 4 (Epstein-Barr virus)
cagcauucuauca

SEQ ID NO: 139875 - RNA, 15 nt, Human herpesvirus 4 (Epstein-Barr virus)
cagccccuuggcaca

SEQ ID NO: 139876 - RNA, 16 nt, Human herpesvirus 4 (Epstein-Barr virus)
cagccuguuuguccag

SEQ ID NO: 139877 - RNA, 22 nt, Human herpesvirus 4 (Epstein-Barr virus)
cagccgcgguugucaucaucau

SEQ ID NO: 139878 - RNA, 14 nt, Human herpesvirus 4 (Epstein-Barr virus)
cagccuacaaaagu

SEQ ID NO: 139879 - RNA, 21 nt, Human herpesvirus 4 (Epstein-Barr virus)
cagccuacaaaaguacacuag

SEQ ID NO: 139880 - RNA, 20 nt, Human herpesvirus 4 (Epstein-Barr virus)
cagccuacucuccacuccca

SEQ ID NO: 139881 - RNA, 14 nt, Human herpesvirus 4 (Epstein-Barr virus)
cagccucacugaug

SEQ ID NO: 139882 - RNA, 13 nt, Human herpesvirus 4 (Epstein-Barr virus)
cagcaucacaggu

SEQ ID NO: 139883 - RNA, 22 nt, Human herpesvirus 4 (Epstein-Barr virus)
cagcagguaauaaagcuugacc

SEQ ID NO: 139884 - RNA, 14 nt, Human herpesvirus 4 (Epstein-Barr virus)
cagcacuuugccag

SEQ ID NO: 139885 - RNA, 15 nt, Human herpesvirus 4 (Epstein-Barr virus)
cagcacuuugccagc

SEQ ID NO: 139886 - RNA, 15 nt, Human herpesvirus 4 (Epstein-Barr virus)
cagcaaucucggcug

SEQ ID NO: 139887 - RNA, 13 nt, Human herpesvirus 4 (Epstein-Barr virus)
cagauuuugcaau

SEQ ID NO: 139888 - RNA, 14 nt, Human herpesvirus 4 (Epstein-Barr virus)
cagaggccacaaaa

SEQ ID NO: 139889 - RNA, 13 nt, Human herpesvirus 4 (Epstein-Barr virus)
cagagccucugcc

SEQ ID NO: 139890 - RNA, 21 nt, Human herpesvirus 4 (Epstein-Barr virus)
cagaggaggcuggugccuugg

SEQ ID NO: 139891 - RNA, 16 nt, Human herpesvirus 4 (Epstein-Barr virus)
cagagagccacauucu

SEQ ID NO: 139892 - RNA, 20 nt, Human herpesvirus 4 (Epstein-Barr virus)
cagagaggcccacugcagua

SEQ ID NO: 139893 - RNA, 14 nt, Human herpesvirus 4 (Epstein-Barr virus)
cagaaaacucugca

SEQ ID NO: 139894 - RNA, 15 nt, Human herpesvirus 4 (Epstein-Barr virus)
cagaaaacucugcau

SEQ ID NO: 139895 - RNA, 22 nt, Human herpesvirus 4 (Epstein-Barr virus)
cagagcggcauccucaaggggc

SEQ ID NO: 139896 - RNA, 17 nt, Human herpesvirus 4 (Epstein-Barr virus)
cacuccuaugcauuucc

SEQ ID NO: 139897 - RNA, 21 nt, Human herpesvirus 4 (Epstein-Barr virus)
cacuuaacuugacuacaaugu

SEQ ID NO: 139898 - RNA, 12 nt, Human herpesvirus 4 (Epstein-Barr virus)
caaaccaugaca

SEQ ID NO: 139899 - RNA, 17 nt, Human herpesvirus 4 (Epstein-Barr virus)
caaaccaugacaucaca

SEQ ID NO: 139900 - RNA, 13 nt, Human herpesvirus 4 (Epstein-Barr virus)
caaacaugguguc

SEQ ID NO: 139901 - RNA, 18 nt, Human herpesvirus 4 (Epstein-Barr virus)
caaacauggugucuguaa

SEQ ID NO: 139902 - RNA, 14 nt, Human herpesvirus 4 (Epstein-Barr virus)
caaagaacuuugac

SEQ ID NO: 139903 - RNA, 14 nt, Human herpesvirus 4 (Epstein-Barr virus)
auuuuccauuucau

SEQ ID NO: 139904 - RNA, 14 nt, Human herpesvirus 4 (Epstein-Barr virus)
auuuuauucuacau

SEQ ID NO: 139905 - RNA, 15 nt, Human herpesvirus 4 (Epstein-Barr virus)
auuuuagagacacua

SEQ ID NO: 139906 - RNA, 14 nt, Human herpesvirus 4 (Epstein-Barr virus)
auuuuaaucuggau

SEQ ID NO: 139907 - RNA, 18 nt, Human herpesvirus 4 (Epstein-Barr virus)
caacacgaccccaaggaa

SEQ ID NO: 139908 - RNA, 17 nt, Human herpesvirus 4 (Epstein-Barr virus)
caaaguccugcacuaua

SEQ ID NO: 139909 - RNA, 13 nt, Human herpesvirus 4 (Epstein-Barr virus)
caacguccgugag

SEQ ID NO: 139910 - RNA, 19 nt, Human herpesvirus 4 (Epstein-Barr virus)
caacguccgugagagccua

SEQ ID NO: 139911 - RNA, 22 nt, Human herpesvirus 4 (Epstein-Barr virus)
caacguccgugagagccuaccc

SEQ ID NO: 139912 - RNA, 20 nt, Human herpesvirus 4 (Epstein-Barr virus)
caacagcgaccggcagaucc

SEQ ID NO: 139913 - RNA, 22 nt, Human herpesvirus 4 (Epstein-Barr virus)
caaccgccgugucagcugugua

SEQ ID NO: 139914 - RNA, 14 nt, Human herpesvirus 4 (Epstein-Barr virus)
caagaagaagccca

SEQ ID NO: 139915 - RNA, 18 nt, Human herpesvirus 4 (Epstein-Barr virus)
caagacagucacauugca

SEQ ID NO: 139916 - RNA, 19 nt, Human herpesvirus 4 (Epstein-Barr virus)
caagacagucacauugcau

SEQ ID NO: 139917 - RNA, 21 nt, Human herpesvirus 4 (Epstein-Barr virus)
augcuguaccugaugagucac

SEQ ID NO: 139918 - RNA, 16 nt, Human herpesvirus 4 (Epstein-Barr virus)
auuaugguaaggcucu

SEQ ID NO: 139919 - RNA, 17 nt, Human herpesvirus 4 (Epstein-Barr virus)
auggagagguuugagaa

SEQ ID NO: 139920 - RNA, 22 nt, Human herpesvirus 4 (Epstein-Barr virus)
auucaccuugaggugccacaga

SEQ ID NO: 139921 - RNA, 20 nt, Human herpesvirus 4 (Epstein-Barr virus)
auucagacgagucugacuac

SEQ ID NO: 139922 - RNA, 13 nt, Human herpesvirus 4 (Epstein-Barr virus)
auucacaucucag

SEQ ID NO: 139923 - RNA, 13 nt, Human herpesvirus 4 (Epstein-Barr virus)
auugucacugaga

SEQ ID NO: 139924 - RNA, 16 nt, Human herpesvirus 4 (Epstein-Barr virus)
auuguguauugcucuc

SEQ ID NO: 139925 - RNA, 14 nt, Human herpesvirus 4 (Epstein-Barr virus)
auucuggccaugaa

SEQ ID NO: 139926 - RNA, 17 nt, Human herpesvirus 4 (Epstein-Barr virus)
auucuggccaugaaucu

SEQ ID NO: 139927 - RNA, 15 nt, Human herpesvirus 4 (Epstein-Barr virus)
auugacuacaccagu

SEQ ID NO: 139928 - RNA, 16 nt, Human herpesvirus 4 (Epstein-Barr virus)
auuuauacccagugag

SEQ ID NO: 139929 - RNA, 15 nt, Human herpesvirus 4 (Epstein-Barr virus)
auuguguuccaggca

SEQ ID NO: 139930 - RNA, 16 nt, Human herpesvirus 4 (Epstein-Barr virus)
auuuagaaaccuugcc

SEQ ID NO: 139931 - RNA, 17 nt, Human herpesvirus 4 (Epstein-Barr virus)
auuuagaaaccuugccu

SEQ ID NO: 139932 - RNA, 22 nt, Human herpesvirus 4 (Epstein-Barr virus)
auuuggugcuuugucuuugcca

SEQ ID NO: 139933 - RNA, 18 nt, Human herpesvirus 4 (Epstein-Barr virus)
auuucucauaauggugcc

SEQ ID NO: 139934 - RNA, 18 nt, Human herpesvirus 4 (Epstein-Barr virus)
auuucauccucagaggag

SEQ ID NO: 139935 - RNA, 16 nt, Human herpesvirus 4 (Epstein-Barr virus)
auuucagguaccccaa

SEQ ID NO: 139936 - RNA, 14 nt, Human herpesvirus 4 (Epstein-Barr virus)
agggguauguggug

SEQ ID NO: 139937 - RNA, 21 nt, Human herpesvirus 4 (Epstein-Barr virus)
agggucacuggcuuaugcgug

SEQ ID NO: 139938 - RNA, 20 nt, Human herpesvirus 4 (Epstein-Barr virus)
aggguggucaccgcgaccaa

SEQ ID NO: 139939 - RNA, 24 nt, Human herpesvirus 4 (Epstein-Barr virus)
aggugcagcuggcccaccuaaaga

SEQ ID NO: 139940 - RNA, 22 nt, Human herpesvirus 4 (Epstein-Barr virus)
aggugccacagagcaucagaug

SEQ ID NO: 139941 - RNA, 17 nt, Human herpesvirus 4 (Epstein-Barr virus)
aggugacagcagcagug

SEQ ID NO: 139942 - RNA, 14 nt, Human herpesvirus 4 (Epstein-Barr virus)
agguuugacuucau

SEQ ID NO: 139943 - RNA, 24 nt, Human herpesvirus 4 (Epstein-Barr virus)
agguuugacuucauauguaugccu

SEQ ID NO: 139944 - RNA, 13 nt, Human herpesvirus 4 (Epstein-Barr virus)
agguuauuuugcc

SEQ ID NO: 139945 - RNA, 22 nt, Human herpesvirus 4 (Epstein-Barr virus)
agguguacgcccuggcgguuga

SEQ ID NO: 139946 - RNA, 22 nt, Human herpesvirus 4 (Epstein-Barr virus)
agguggucauguuucccuccaa

SEQ ID NO: 139947 - RNA, 15 nt, Human herpesvirus 4 (Epstein-Barr virus)
agguuacuuucccgu

SEQ ID NO: 139948 - RNA, 19 nt, Human herpesvirus 4 (Epstein-Barr virus)
agguuagcguggacaguuu

SEQ ID NO: 139949 - RNA, 17 nt, Human herpesvirus 4 (Epstein-Barr virus)
agguggccacacugggg

SEQ ID NO: 139950 - RNA, 14 nt, Human herpesvirus 4 (Epstein-Barr virus)
aggaucagggccaa

SEQ ID NO: 139951 - RNA, 18 nt, Human herpesvirus 4 (Epstein-Barr virus)
aggaucagggccaagaca

SEQ ID NO: 139952 - RNA, 20 nt, Human herpesvirus 4 (Epstein-Barr virus)
aggaggggcaggaggggcag

SEQ ID NO: 139953 - RNA, 19 nt, Human herpesvirus 4 (Epstein-Barr virus)
aggagguaauuagcacggu

SEQ ID NO: 139954 - RNA, 18 nt, Human herpesvirus 4 (Epstein-Barr virus)
aggaggugagguggugcu

SEQ ID NO: 139955 - RNA, 14 nt, Human herpesvirus 4 (Epstein-Barr virus)
aggaggaggggcag

SEQ ID NO: 139956 - RNA, 16 nt, Human herpesvirus 4 (Epstein-Barr virus)
aggaugauccuguaca

SEQ ID NO: 139957 - RNA, 15 nt, Human herpesvirus 4 (Epstein-Barr virus)
aggaugaagauccaa

SEQ ID NO: 139958 - RNA, 13 nt, Human herpesvirus 4 (Epstein-Barr virus)
aggcggugccugu

SEQ ID NO: 139959 - RNA, 19 nt, Human herpesvirus 4 (Epstein-Barr virus)
aggcgguuagggaggacac

SEQ ID NO: 139960 - RNA, 24 nt, Human herpesvirus 4 (Epstein-Barr virus)
aggcgguuagggaggacacugcca

SEQ ID NO: 139961 - RNA, 19 nt, Human herpesvirus 4 (Epstein-Barr virus)
agggggugccugugccucg

SEQ ID NO: 139962 - RNA, 14 nt, Human herpesvirus 4 (Epstein-Barr virus)
aggggcaaccugaa

SEQ ID NO: 139963 - RNA, 14 nt, Human herpesvirus 4 (Epstein-Barr virus)
aggggcaggagcag

SEQ ID NO: 139964 - RNA, 15 nt, Human herpesvirus 4 (Epstein-Barr virus)
aggcuggaugcagcg

SEQ ID NO: 139965 - RNA, 14 nt, Human herpesvirus 4 (Epstein-Barr virus)
aggcuggugccuug

SEQ ID NO: 139966 - RNA, 19 nt, Human herpesvirus 4 (Epstein-Barr virus)
aggcugcuaagccaggaua

SEQ ID NO: 139967 - RNA, 15 nt, Human herpesvirus 4 (Epstein-Barr virus)
agcuucgagagccac

SEQ ID NO: 139968 - RNA, 17 nt, Human herpesvirus 4 (Epstein-Barr virus)
agcuucgcaaguuccuc

SEQ ID NO: 139969 - RNA, 20 nt, Human herpesvirus 4 (Epstein-Barr virus)
agcuuauuuuuugguugugc

SEQ ID NO: 139970 - RNA, 13 nt, Human herpesvirus 4 (Epstein-Barr virus)
agcuugggaacac

SEQ ID NO: 139971 - RNA, 17 nt, Human herpesvirus 4 (Epstein-Barr virus)
agcuuuugaccaagcua

SEQ ID NO: 139972 - RNA, 13 nt, Human herpesvirus 4 (Epstein-Barr virus)
aggaacggugauu

SEQ ID NO: 139973 - RNA, 18 nt, Human herpesvirus 4 (Epstein-Barr virus)
aggaggaagagacuucac

SEQ ID NO: 139974 - RNA, 16 nt, Human herpesvirus 4 (Epstein-Barr virus)
aggaagaguaccccag

SEQ ID NO: 139975 - RNA, 14 nt, Human herpesvirus 4 (Epstein-Barr virus)
aggaaggcuugcca

SEQ ID NO: 139976 - RNA, 16 nt, Human herpesvirus 4 (Epstein-Barr virus)
agcuguguacgugccu

SEQ ID NO: 139977 - RNA, 17 nt, Human herpesvirus 4 (Epstein-Barr virus)
agcuguguacgugccuc

SEQ ID NO: 139978 - RNA, 22 nt, Human herpesvirus 4 (Epstein-Barr virus)
agcuguguuucccgacgccaau

SEQ ID NO: 139979 - RNA, 18 nt, Human herpesvirus 4 (Epstein-Barr virus)
agcuguuugcucuauucg

SEQ ID NO: 139980 - RNA, 17 nt, Human herpesvirus 4 (Epstein-Barr virus)
agcuggaugguguugga

SEQ ID NO: 139981 - RNA, 15 nt, Human herpesvirus 4 (Epstein-Barr virus)
agcaucacagguuau

SEQ ID NO: 139982 - RNA, 19 nt, Human herpesvirus 4 (Epstein-Barr virus)
agcaucagaugagacuuug

SEQ ID NO: 139983 - RNA, 22 nt, Human herpesvirus 4 (Epstein-Barr virus)
agcaguuguuuuuguggcauug

SEQ ID NO: 139984 - RNA, 19 nt, Human herpesvirus 4 (Epstein-Barr virus)
agcaugaucaggacccugg

SEQ ID NO: 139985 - RNA, 17 nt, Human herpesvirus 4 (Epstein-Barr virus)
agcauggcggccuggca

SEQ ID NO: 139986 - RNA, 17 nt, Human herpesvirus 4 (Epstein-Barr virus)
agcaugucacacauucc

SEQ ID NO: 139987 - RNA, 22 nt, Human herpesvirus 4 (Epstein-Barr virus)
agcaggaggggcaggagcagga

SEQ ID NO: 139988 - RNA, 10 nt, Human herpesvirus 4 (Epstein-Barr virus)
agcaguagcu

SEQ ID NO: 139989 - RNA, 20 nt, Human herpesvirus 4 (Epstein-Barr virus)
agcaggugagggugccauug

SEQ ID NO: 139990 - RNA, 22 nt, Human herpesvirus 4 (Epstein-Barr virus)
agcagcugaggggcaaccugaa

SEQ ID NO: 139991 - RNA, 15 nt, Human herpesvirus 4 (Epstein-Barr virus)
agcagaaaggccaua

SEQ ID NO: 139992 - RNA, 20 nt, Human herpesvirus 4 (Epstein-Barr virus)
aguuggcauuggcgucagga

SEQ ID NO: 139993 - RNA, 20 nt, Human herpesvirus 4 (Epstein-Barr virus)
aguuuaagcagcacugaauu

SEQ ID NO: 139994 - RNA, 22 nt, Human herpesvirus 4 (Epstein-Barr virus)
aguugaaauaucuagcacggca

SEQ ID NO: 139995 - RNA, 16 nt, Human herpesvirus 4 (Epstein-Barr virus)
aguucuacaaugccag

SEQ ID NO: 139996 - RNA, 13 nt, Human herpesvirus 4 (Epstein-Barr virus)
aguuccaggugac

SEQ ID NO: 139997 - RNA, 21 nt, Human herpesvirus 4 (Epstein-Barr virus)
auaacccuuuccuaagaccua

SEQ ID NO: 139998 - RNA, 18 nt, Human herpesvirus 4 (Epstein-Barr virus)
auaaacccaaugugcaaa

SEQ ID NO: 139999 - RNA, 13 nt, Human herpesvirus 4 (Epstein-Barr virus)
auaaacaauuaca

SEQ ID NO: 140000 - RNA, 22 nt, Human herpesvirus 4 (Epstein-Barr virus)
auaaauuaagagucccuccuca

SEQ ID NO: 140001 - RNA, 23 nt, Human herpesvirus 4 (Epstein-Barr virus)
auaaauuaagagucccuccucac

SEQ ID NO: 140002 - RNA, 16 nt, Human herpesvirus 4 (Epstein-Barr virus)
aguuagaguccaauga

SEQ ID NO: 140003 - RNA, 18 nt, Human herpesvirus 4 (Epstein-Barr virus)
aguuaccacagguagaau

SEQ ID NO: 140004 - RNA, 15 nt, Human herpesvirus 4 (Epstein-Barr virus)
aguuacacacacagu

SEQ ID NO: 140005 - RNA, 14 nt, Human herpesvirus 4 (Epstein-Barr virus)
aguguguacauucc

SEQ ID NO: 140006 - RNA, 14 nt, Human herpesvirus 4 (Epstein-Barr virus)
agugcuaugaccau

SEQ ID NO: 140007 - RNA, 18 nt, Human herpesvirus 4 (Epstein-Barr virus)
aguggucaccgguggugg

SEQ ID NO: 140008 - RNA, 17 nt, Human herpesvirus 4 (Epstein-Barr virus)
agugguucaguggacac

SEQ ID NO: 140009 - RNA, 18 nt, Human herpesvirus 4 (Epstein-Barr virus)
agugggguaaaugcaccu

SEQ ID NO: 140010 - RNA, 13 nt, Human herpesvirus 4 (Epstein-Barr virus)
aguggaugcaucg

SEQ ID NO: 140011 - RNA, 14 nt, Human herpesvirus 4 (Epstein-Barr virus)
aguaaaguguaaca

SEQ ID NO: 140012 - RNA, 11 nt, Human herpesvirus 4 (Epstein-Barr virus)
aguaaccacau

SEQ ID NO: 140013 - RNA, 14 nt, Human herpesvirus 4 (Epstein-Barr virus)
aguaaccacauaua

SEQ ID NO: 140014 - RNA, 12 nt, Human herpesvirus 4 (Epstein-Barr virus)
agugaucaucuc

SEQ ID NO: 140015 - RNA, 14 nt, Human herpesvirus 4 (Epstein-Barr virus)
agugauaagucaug

SEQ ID NO: 140016 - RNA, 12 nt, Human herpesvirus 4 (Epstein-Barr virus)
agugcaacaauc

SEQ ID NO: 140017 - RNA, 21 nt, Human herpesvirus 4 (Epstein-Barr virus)
agugacgaagacccaucugag

SEQ ID NO: 140018 - RNA, 23 nt, Human herpesvirus 4 (Epstein-Barr virus)
agugagccccacaaacaccagug

SEQ ID NO: 140019 - RNA, 15 nt, Human herpesvirus 4 (Epstein-Barr virus)
augaaauggaaaaua

SEQ ID NO: 140020 - RNA, 22 nt, Human herpesvirus 4 (Epstein-Barr virus)
augaaaacagaggcuggaugca

SEQ ID NO: 140021 - RNA, 15 nt, Human herpesvirus 4 (Epstein-Barr virus)
aucuaaugaugucca

SEQ ID NO: 140022 - RNA, 15 nt, Human herpesvirus 4 (Epstein-Barr virus)
aucuuugcugaagau

SEQ ID NO: 140023 - RNA, 23 nt, Human herpesvirus 4 (Epstein-Barr virus)
aucuuugcugaagaugauggacc

SEQ ID NO: 140024 - RNA, 22 nt, Human herpesvirus 4 (Epstein-Barr virus)
aucgggacagauugucuuccac

SEQ ID NO: 140025 - RNA, 13 nt, Human herpesvirus 4 (Epstein-Barr virus)
aucggaugccuca

SEQ ID NO: 140026 - RNA, 18 nt, Human herpesvirus 4 (Epstein-Barr virus)
augaaggcuggcaaagau

SEQ ID NO: 140027 - RNA, 14 nt, Human herpesvirus 4 (Epstein-Barr virus)
augaaucugacucu

SEQ ID NO: 140028 - RNA, 16 nt, Human herpesvirus 4 (Epstein-Barr virus)
augaaggugucauuga

SEQ ID NO: 140029 - RNA, 18 nt, Human herpesvirus 4 (Epstein-Barr virus)
augaacuggucaccagcu

SEQ ID NO: 140030 - RNA, 17 nt, Human herpesvirus 4 (Epstein-Barr virus)
augaccaugauggugca

SEQ ID NO: 140031 - RNA, 20 nt, Human herpesvirus 4 (Epstein-Barr virus)
augaccaacaugagggcacc

SEQ ID NO: 140032 - RNA, 16 nt, Human herpesvirus 4 (Epstein-Barr virus)
augaggacucugaaaa

SEQ ID NO: 140033 - RNA, 14 nt, Human herpesvirus 4 (Epstein-Barr virus)
augagcuccucucc

SEQ ID NO: 140034 - RNA, 16 nt, Human herpesvirus 4 (Epstein-Barr virus)
augagucugacuacuc

SEQ ID NO: 140035 - RNA, 17 nt, Human herpesvirus 4 (Epstein-Barr virus)
augagucugacuacuca

SEQ ID NO: 140036 - RNA, 15 nt, Human herpesvirus 4 (Epstein-Barr virus)
augagugccaugugu

SEQ ID NO: 140037 - RNA, 15 nt, Human herpesvirus 4 (Epstein-Barr virus)
augagggccuuccag

SEQ ID NO: 140038 - RNA, 16 nt, Human herpesvirus 4 (Epstein-Barr virus)
augagauugccaagau

SEQ ID NO: 140039 - RNA, 20 nt, Human herpesvirus 4 (Epstein-Barr virus)
augagauugccaagaugcaa

SEQ ID NO: 140040 - RNA, 15 nt, Human herpesvirus 4 (Epstein-Barr virus)
augagaccaguggca

SEQ ID NO: 140041 - RNA, 18 nt, Human herpesvirus 4 (Epstein-Barr virus)
augacgucaacuuuacuu

SEQ ID NO: 140042 - RNA, 19 nt, Human herpesvirus 4 (Epstein-Barr virus)
augccuguggccccggcug

SEQ ID NO: 140043 - RNA, 22 nt, Human herpesvirus 4 (Epstein-Barr virus)
augcggagggucagauuuugca

SEQ ID NO: 140044 - RNA, 13 nt, Human herpesvirus 4 (Epstein-Barr virus)
augcuaucuugua

SEQ ID NO: 140045 - RNA, 16 nt, Human herpesvirus 4 (Epstein-Barr virus)
augcugaauauugcca

SEQ ID NO: 140046 - RNA, 23 nt, Human herpesvirus 4 (Epstein-Barr virus)
augcagugggugaggcggugccu

SEQ ID NO: 140047 - RNA, 14 nt, Human herpesvirus 4 (Epstein-Barr virus)
augcauacacugaa

SEQ ID NO: 140048 - RNA, 18 nt, Human herpesvirus 4 (Epstein-Barr virus)
augccaauccaugccaau

SEQ ID NO: 140049 - RNA, 19 nt, Human herpesvirus 4 (Epstein-Barr virus)
augcccagacucaucucaa

SEQ ID NO: 140050 - RNA, 17 nt, Human herpesvirus 4 (Epstein-Barr virus)
augaugaggacucugaa

SEQ ID NO: 140051 - RNA, 20 nt, Human herpesvirus 4 (Epstein-Barr virus)
augaugaggacucugaaaau

SEQ ID NO: 140052 - RNA, 22 nt, Human herpesvirus 4 (Epstein-Barr virus)
augauacucaucugugagacaa

SEQ ID NO: 140053 - RNA, 12 nt, Human herpesvirus 4 (Epstein-Barr virus)
augcaaguggau

SEQ ID NO: 140054 - RNA, 17 nt, Human herpesvirus 4 (Epstein-Barr virus)
augauugagaaugccaa

SEQ ID NO: 140055 - RNA, 13 nt, Human herpesvirus 4 (Epstein-Barr virus)
augcaaugcccac

SEQ ID NO: 140056 - RNA, 14 nt, Human herpesvirus 4 (Epstein-Barr virus)
augcacgccaacag

SEQ ID NO: 140057 - RNA, 15 nt, Human herpesvirus 4 (Epstein-Barr virus)
augcagguuugacuu

SEQ ID NO: 140058 - RNA, 12 nt, Human herpesvirus 4 (Epstein-Barr virus)
aucauuagccca

SEQ ID NO: 140059 - RNA, 16 nt, Human herpesvirus 4 (Epstein-Barr virus)
aucccauuuuucacua

SEQ ID NO: 140060 - RNA, 14 nt, Human herpesvirus 4 (Epstein-Barr virus)
aucccaauucacau

SEQ ID NO: 140061 - RNA, 19 nt, Human herpesvirus 4 (Epstein-Barr virus)
auccccuuaaucuagcuca

SEQ ID NO: 140062 - RNA, 13 nt, Human herpesvirus 4 (Epstein-Barr virus)
auccuucagauuc

SEQ ID NO: 140063 - RNA, 15 nt, Human herpesvirus 4 (Epstein-Barr virus)
auccuucagauucag

SEQ ID NO: 140064 - RNA, 13 nt, Human herpesvirus 4 (Epstein-Barr virus)
auccuucuggcac

SEQ ID NO: 140065 - RNA, 17 nt, Human herpesvirus 4 (Epstein-Barr virus)
auccgaaagcacuuuga

SEQ ID NO: 140066 - RNA, 20 nt, Human herpesvirus 4 (Epstein-Barr virus)
aucgacacacgagccauaga

SEQ ID NO: 140067 - RNA, 17 nt, Human herpesvirus 4 (Epstein-Barr virus)
aucaccguaccaugagu

SEQ ID NO: 140068 - RNA, 21 nt, Human herpesvirus 4 (Epstein-Barr virus)
aucaccgccguaaucuguggu

SEQ ID NO: 140069 - RNA, 17 nt, Human herpesvirus 4 (Epstein-Barr virus)
aucaccuggguacccaa

SEQ ID NO: 140070 - RNA, 15 nt, Human herpesvirus 4 (Epstein-Barr virus)
aucacccauggccag

SEQ ID NO: 140071 - RNA, 13 nt, Human herpesvirus 4 (Epstein-Barr virus)
aucacaggacaag

SEQ ID NO: 140072 - RNA, 22 nt, Human herpesvirus 4 (Epstein-Barr virus)
aucaugucugacgaggggccag

SEQ ID NO: 140073 - RNA, 15 nt, Human herpesvirus 4 (Epstein-Barr virus)
aucaugcagggugca

SEQ ID NO: 140074 - RNA, 17 nt, Human herpesvirus 4 (Epstein-Barr virus)
aucaugcagggugcaca

SEQ ID NO: 140075 - RNA, 14 nt, Human herpesvirus 4 (Epstein-Barr virus)
aucaugcgugcugu

SEQ ID NO: 140076 - RNA, 19 nt, Human herpesvirus 4 (Epstein-Barr virus)
aucacuacuacaccgagca

SEQ ID NO: 140077 - RNA, 18 nt, Human herpesvirus 4 (Epstein-Barr virus)
aucacuggcaaagggcau

SEQ ID NO: 140078 - RNA, 18 nt, Human herpesvirus 4 (Epstein-Barr virus)
auagucacggaugcugca

SEQ ID NO: 140079 - RNA, 23 nt, Human herpesvirus 4 (Epstein-Barr virus)
auaguuccaggugacagcagcag

SEQ ID NO: 140080 - RNA, 17 nt, Human herpesvirus 4 (Epstein-Barr virus)
auagcucuggcacugcu

SEQ ID NO: 140081 - RNA, 19 nt, Human herpesvirus 4 (Epstein-Barr virus)
auaaugggagggagccugc

SEQ ID NO: 140082 - RNA, 13 nt, Human herpesvirus 4 (Epstein-Barr virus)
auaaucucaaaga

SEQ ID NO: 140083 - RNA, 13 nt, Human herpesvirus 4 (Epstein-Barr virus)
auaaugacuauga

SEQ ID NO: 140084 - RNA, 15 nt, Human herpesvirus 4 (Epstein-Barr virus)
auauagcucugcaca

SEQ ID NO: 140085 - RNA, 17 nt, Human herpesvirus 4 (Epstein-Barr virus)
cgaugauugagaaugcc

SEQ ID NO: 140086 - RNA, 19 nt, Human herpesvirus 4 (Epstein-Barr virus)
cgaugauugagaaugccaa

SEQ ID NO: 140087 - RNA, 16 nt, Human herpesvirus 4 (Epstein-Barr virus)
cgagucugacuacagc

SEQ ID NO: 140088 - RNA, 19 nt, Human herpesvirus 4 (Epstein-Barr virus)
cgagggggccuggugccag

SEQ ID NO: 140089 - RNA, 22 nt, Human herpesvirus 4 (Epstein-Barr virus)
cgacacagugaugaacaccacc

SEQ ID NO: 140090 - RNA, 17 nt, Human herpesvirus 4 (Epstein-Barr virus)
cgacgagcgggauagca

SEQ ID NO: 140091 - RNA, 16 nt, Human herpesvirus 4 (Epstein-Barr virus)
cgacgcggagaggucc

SEQ ID NO: 140092 - RNA, 20 nt, Human herpesvirus 4 (Epstein-Barr virus)
cgagagcaugccaccgugaa

SEQ ID NO: 140093 - RNA, 13 nt, Human herpesvirus 4 (Epstein-Barr virus)
cgagaccuaugua

SEQ ID NO: 140094 - RNA, 16 nt, Human herpesvirus 4 (Epstein-Barr virus)
cgagaccuauguauaa

SEQ ID NO: 140095 - RNA, 19 nt, Human herpesvirus 4 (Epstein-Barr virus)
cgacuuggugccaccaucu

SEQ ID NO: 140096 - RNA, 15 nt, Human herpesvirus 4 (Epstein-Barr virus)
cgacugucauuuaca

SEQ ID NO: 140097 - RNA, 22 nt, Human herpesvirus 4 (Epstein-Barr virus)
cgagauguacauaauguaugcc

SEQ ID NO: 140098 - RNA, 22 nt, Human herpesvirus 4 (Epstein-Barr virus)
cgagcaugagcuccucuccaaa

SEQ ID NO: 140099 - RNA, 21 nt, Human herpesvirus 4 (Epstein-Barr virus)
cgagccauuugaggaacaugg

SEQ ID NO: 140100 - RNA, 15 nt, Human herpesvirus 4 (Epstein-Barr virus)
cgaagaacacuccac

SEQ ID NO: 140101 - RNA, 14 nt, Human herpesvirus 4 (Epstein-Barr virus)
cgaaucugacauuu

SEQ ID NO: 140102 - RNA, 14 nt, Human herpesvirus 4 (Epstein-Barr virus)
cgaagcuagugcag

SEQ ID NO: 140103 - RNA, 20 nt, Human herpesvirus 4 (Epstein-Barr virus)
cgaauauccccaaagucaag

SEQ ID NO: 140104 - RNA, 20 nt, Human herpesvirus 4 (Epstein-Barr virus)
ccuuucgacugucauuuaca

SEQ ID NO: 140105 - RNA, 14 nt, Human herpesvirus 4 (Epstein-Barr virus)
ccuuugcggcauca

SEQ ID NO: 140106 - RNA, 23 nt, Human herpesvirus 4 (Epstein-Barr virus)
ccuuugcuaucuuugcugaagau

SEQ ID NO: 140107 - RNA, 20 nt, Human herpesvirus 4 (Epstein-Barr virus)
ccuggaggccucaggcaaca

SEQ ID NO: 140108 - RNA, 21 nt, Human herpesvirus 4 (Epstein-Barr virus)
ccuggggaaaauguacccauc

SEQ ID NO: 140109 - RNA, 20 nt, Human herpesvirus 4 (Epstein-Barr virus)
ccuggcauacuuuuugccac

SEQ ID NO: 140110 - RNA, 18 nt, Human herpesvirus 4 (Epstein-Barr virus)
ccuucgccccuaucuuaa

SEQ ID NO: 140111 - RNA, 15 nt, Human herpesvirus 4 (Epstein-Barr virus)
ccuucucaugcuccu

SEQ ID NO: 140112 - RNA, 14 nt, Human herpesvirus 4 (Epstein-Barr virus)
ccuucuccaucucc

SEQ ID NO: 140113 - RNA, 12 nt, Human herpesvirus 4 (Epstein-Barr virus)
ccuucucugaug

SEQ ID NO: 140114 - RNA, 13 nt, Human herpesvirus 4 (Epstein-Barr virus)
ccuucucugaugg

SEQ ID NO: 140115 - RNA, 22 nt, Human herpesvirus 4 (Epstein-Barr virus)
ccuucuggcacgacuguuccua

SEQ ID NO: 140116 - RNA, 16 nt, Human herpesvirus 4 (Epstein-Barr virus)
ccuuggcaguguccuc

SEQ ID NO: 140117 - RNA, 21 nt, Human herpesvirus 4 (Epstein-Barr virus)
ccuuggcuauggucauggcca

SEQ ID NO: 140118 - RNA, 19 nt, Human herpesvirus 4 (Epstein-Barr virus)
ccuugguuucagccucacu

SEQ ID NO: 140119 - RNA, 15 nt, Human herpesvirus 4 (Epstein-Barr virus)
ccuugcucucagcac

SEQ ID NO: 140120 - RNA, 22 nt, Human herpesvirus 4 (Epstein-Barr virus)
ccuugcucucagcacuuugcca

SEQ ID NO: 140121 - RNA, 22 nt, Human herpesvirus 4 (Epstein-Barr virus)
ccuugagcccauucucguccau

SEQ ID NO: 140122 - RNA, 16 nt, Human herpesvirus 4 (Epstein-Barr virus)
ccuugagggcaaagac

SEQ ID NO: 140123 - RNA, 19 nt, Human herpesvirus 4 (Epstein-Barr virus)
ccucuguuccuucugcucc

SEQ ID NO: 140124 - RNA, 19 nt, Human herpesvirus 4 (Epstein-Barr virus)
ccucuuacaccagaggcca

SEQ ID NO: 140125 - RNA, 22 nt, Human herpesvirus 4 (Epstein-Barr virus)
ccucuuacaccagaggccacaa

SEQ ID NO: 140126 - RNA, 18 nt, Human herpesvirus 4 (Epstein-Barr virus)
ccugaagcgaagcagcuc

SEQ ID NO: 140127 - RNA, 19 nt, Human herpesvirus 4 (Epstein-Barr virus)
ccucuuguguucuugccgc

SEQ ID NO: 140128 - RNA, 14 nt, Human herpesvirus 4 (Epstein-Barr virus)
ccugcaaacugaca

SEQ ID NO: 140129 - RNA, 22 nt, Human herpesvirus 4 (Epstein-Barr virus)
ccugauuugcucuucgugcucu

SEQ ID NO: 140130 - RNA, 16 nt, Human herpesvirus 4 (Epstein-Barr virus)
ccugacgccaaugcca

SEQ ID NO: 140131 - RNA, 19 nt, Human herpesvirus 4 (Epstein-Barr virus)
ccugagacagaggugcuca

SEQ ID NO: 140132 - RNA, 18 nt, Human herpesvirus 4 (Epstein-Barr virus)
ccugagccugagccacac

SEQ ID NO: 140133 - RNA, 11 nt, Human herpesvirus 4 (Epstein-Barr virus)
ccugagcugcc

SEQ ID NO: 140134 - RNA, 20 nt, Human herpesvirus 4 (Epstein-Barr virus)
ccucuacgccccagaugaaa

SEQ ID NO: 140135 - RNA, 14 nt, Human herpesvirus 4 (Epstein-Barr virus)
ccucuaucgucuca

SEQ ID NO: 140136 - RNA, 19 nt, Human herpesvirus 4 (Epstein-Barr virus)
ccucgcaaaagauggacuu

SEQ ID NO: 140137 - RNA, 12 nt, Human herpesvirus 4 (Epstein-Barr virus)
ccucaaccacaa

SEQ ID NO: 140138 - RNA, 11 nt, Human herpesvirus 4 (Epstein-Barr virus)
ccggucuugca

SEQ ID NO: 140139 - RNA, 19 nt, Human herpesvirus 4 (Epstein-Barr virus)
ccgucagccacacaaucag

SEQ ID NO: 140140 - RNA, 21 nt, Human herpesvirus 4 (Epstein-Barr virus)
ccgucagccagggugaccugg

SEQ ID NO: 140141 - RNA, 14 nt, Human herpesvirus 4 (Epstein-Barr virus)
ccgugaaugcacgc

SEQ ID NO: 140142 - RNA, 17 nt, Human herpesvirus 4 (Epstein-Barr virus)
ccgugaaugcacgccaa

SEQ ID NO: 140143 - RNA, 14 nt, Human herpesvirus 4 (Epstein-Barr virus)
ccgugagaacuuuc

SEQ ID NO: 140144 - RNA, 20 nt, Human herpesvirus 4 (Epstein-Barr virus)
ccuaugccaauccaugccaa

SEQ ID NO: 140145 - RNA, 20 nt, Human herpesvirus 4 (Epstein-Barr virus)
ccuaucacagggacaucuac

SEQ ID NO: 140146 - RNA, 12 nt, Human herpesvirus 4 (Epstein-Barr virus)
ccuauauccuag

SEQ ID NO: 140147 - RNA, 21 nt, Human herpesvirus 4 (Epstein-Barr virus)
ccuauaugcucucgcacucuu

SEQ ID NO: 140148 - RNA, 14 nt, Human herpesvirus 4 (Epstein-Barr virus)
ccguggcagacaca

SEQ ID NO: 140149 - RNA, 17 nt, Human herpesvirus 4 (Epstein-Barr virus)
ccgugcggcuacaucua

SEQ ID NO: 140150 - RNA, 12 nt, Human herpesvirus 4 (Epstein-Barr virus)
ccgggaggugcu

SEQ ID NO: 140151 - RNA, 19 nt, Human herpesvirus 4 (Epstein-Barr virus)
ccggggcccgcuucauuca

SEQ ID NO: 140152 - RNA, 13 nt, Human herpesvirus 4 (Epstein-Barr virus)
ccgggggccaguc

SEQ ID NO: 140153 - RNA, 16 nt, Human herpesvirus 4 (Epstein-Barr virus)
ccgcugaagccaggcu

SEQ ID NO: 140154 - RNA, 12 nt, Human herpesvirus 4 (Epstein-Barr virus)
ccgcugccaggc

SEQ ID NO: 140155 - RNA, 18 nt, Human herpesvirus 4 (Epstein-Barr virus)
ccgcccgggggccagucu

SEQ ID NO: 140156 - RNA, 22 nt, Human herpesvirus 4 (Epstein-Barr virus)
ccgacgaggcccugcaagccaa

SEQ ID NO: 140157 - RNA, 21 nt, Human herpesvirus 4 (Epstein-Barr virus)
ccgagucaguuacacacacag

SEQ ID NO: 140158 - RNA, 16 nt, Human herpesvirus 4 (Epstein-Barr virus)
ccgaggcugagggggc

SEQ ID NO: 140159 - RNA, 11 nt, Human herpesvirus 4 (Epstein-Barr virus)
ccgaggcaccc

SEQ ID NO: 140160 - RNA, 23 nt, Human herpesvirus 4 (Epstein-Barr virus)
ccgauggccccggucaccccaga

SEQ ID NO: 140161 - RNA, 22 nt, Human herpesvirus 4 (Epstein-Barr virus)
cccaauucacaucucagggaca

SEQ ID NO: 140162 - RNA, 20 nt, Human herpesvirus 4 (Epstein-Barr virus)
cccacuaucacccauggcca

SEQ ID NO: 140163 - RNA, 18 nt, Human herpesvirus 4 (Epstein-Barr virus)
cccuugguauugcgcugg

SEQ ID NO: 140164 - RNA, 14 nt, Human herpesvirus 4 (Epstein-Barr virus)
cauuauugcucucu

SEQ ID NO: 140165 - RNA, 19 nt, Human herpesvirus 4 (Epstein-Barr virus)
cauuauugcucucuaucua

SEQ ID NO: 140166 - RNA, 16 nt, Human herpesvirus 4 (Epstein-Barr virus)
cauggucgaugaacaa

SEQ ID NO: 140167 - RNA, 20 nt, Human herpesvirus 4 (Epstein-Barr virus)
caugggggaaaccugcgaaa

SEQ ID NO: 140168 - RNA, 13 nt, Human herpesvirus 4 (Epstein-Barr virus)
caugauacucauc

SEQ ID NO: 140169 - RNA, 17 nt, Human herpesvirus 4 (Epstein-Barr virus)
caugaucaggacccugg

SEQ ID NO: 140170 - RNA, 13 nt, Human herpesvirus 4 (Epstein-Barr virus)
caugagugccaug

SEQ ID NO: 140171 - RNA, 14 nt, Human herpesvirus 4 (Epstein-Barr virus)
caugagggcaccga

SEQ ID NO: 140172 - RNA, 22 nt, Human herpesvirus 4 (Epstein-Barr virus)
caugagggcaccgaucaucucg

SEQ ID NO: 140173 - RNA, 14 nt, Human herpesvirus 4 (Epstein-Barr virus)
caugcccagacuca

SEQ ID NO: 140174 - RNA, 23 nt, Human herpesvirus 4 (Epstein-Barr virus)
cauggaugugaaugcccccgggg

SEQ ID NO: 140175 - RNA, 15 nt, Human herpesvirus 4 (Epstein-Barr virus)
cauggcacucauggu

SEQ ID NO: 140176 - RNA, 23 nt, Human herpesvirus 4 (Epstein-Barr virus)
caugccaaugggggaggagagac

SEQ ID NO: 140177 - RNA, 18 nt, Human herpesvirus 4 (Epstein-Barr virus)
caugccaccgugaaguua

SEQ ID NO: 140178 - RNA, 15 nt, Human herpesvirus 4 (Epstein-Barr virus)
cauugagguaaaaag

SEQ ID NO: 140179 - RNA, 19 nt, Human herpesvirus 4 (Epstein-Barr virus)
cauugacgcaaguuuugcc

SEQ ID NO: 140180 - RNA, 17 nt, Human herpesvirus 4 (Epstein-Barr virus)
cauucucguccaucucg

SEQ ID NO: 140181 - RNA, 23 nt, Human herpesvirus 4 (Epstein-Barr virus)
cauucacggggccgugcaccugc

SEQ ID NO: 140182 - RNA, 23 nt, Human herpesvirus 4 (Epstein-Barr virus)
cauucacugggacaacugucaca

SEQ ID NO: 140183 - RNA, 17 nt, Human herpesvirus 4 (Epstein-Barr virus)
caucaacuucagcucca

SEQ ID NO: 140184 - RNA, 14 nt, Human herpesvirus 4 (Epstein-Barr virus)
caucacaagucaca

SEQ ID NO: 140185 - RNA, 20 nt, Human herpesvirus 4 (Epstein-Barr virus)
cauauucccccacguguucu

SEQ ID NO: 140186 - RNA, 22 nt, Human herpesvirus 4 (Epstein-Barr virus)
cauauuuucagacccaccaugg

SEQ ID NO: 140187 - RNA, 20 nt, Human herpesvirus 4 (Epstein-Barr virus)
caggaguauggggacaaaga

SEQ ID NO: 140188 - RNA, 22 nt, Human herpesvirus 4 (Epstein-Barr virus)
caggagguacaugggccacugc

SEQ ID NO: 140189 - RNA, 15 nt, Human herpesvirus 4 (Epstein-Barr virus)
caggagccccgggcg

SEQ ID NO: 140190 - RNA, 12 nt, Human herpesvirus 4 (Epstein-Barr virus)
caggacauguuu

SEQ ID NO: 140191 - RNA, 23 nt, Human herpesvirus 4 (Epstein-Barr virus)
caggacaagacagucacauugca

SEQ ID NO: 140192 - RNA, 17 nt, Human herpesvirus 4 (Epstein-Barr virus)
caugaauguuacccuca

SEQ ID NO: 140193 - RNA, 13 nt, Human herpesvirus 4 (Epstein-Barr virus)
caugacacaggac

SEQ ID NO: 140194 - RNA, 15 nt, Human herpesvirus 4 (Epstein-Barr virus)
caugacacaggacaa

SEQ ID NO: 140195 - RNA, 16 nt, Human herpesvirus 4 (Epstein-Barr virus)
caucuuaucagagagg

SEQ ID NO: 140196 - RNA, 19 nt, Human herpesvirus 4 (Epstein-Barr virus)
caucgacacacgagccaua

SEQ ID NO: 140197 - RNA, 20 nt, Human herpesvirus 4 (Epstein-Barr virus)
cauccugaagcgaagcagcu

SEQ ID NO: 140198 - RNA, 22 nt, Human herpesvirus 4 (Epstein-Barr virus)
caucaugcagggugcacagacu

SEQ ID NO: 140199 - RNA, 14 nt, Human herpesvirus 4 (Epstein-Barr virus)
caucccaauucaca

SEQ ID NO: 140200 - RNA, 16 nt, Human herpesvirus 4 (Epstein-Barr virus)
caucccaauucacauc

SEQ ID NO: 140201 - RNA, 21 nt, Human herpesvirus 4 (Epstein-Barr virus)
cauccaccaucaaugucacca

SEQ ID NO: 140202 - RNA, 21 nt, Human herpesvirus 4 (Epstein-Barr virus)
ccagaugcaccgggaugagcu

SEQ ID NO: 140203 - RNA, 14 nt, Human herpesvirus 4 (Epstein-Barr virus)
ccagcgugcccaag

SEQ ID NO: 140204 - RNA, 16 nt, Human herpesvirus 4 (Epstein-Barr virus)
ccagcgugcccaagag

SEQ ID NO: 140205 - RNA, 19 nt, Human herpesvirus 4 (Epstein-Barr virus)
ccagcgugcccaagagggc

SEQ ID NO: 140206 - RNA, 18 nt, Human herpesvirus 4 (Epstein-Barr virus)
ccagcgccuugaucuucu

SEQ ID NO: 140207 - RNA, 14 nt, Human herpesvirus 4 (Epstein-Barr virus)
ccagcccuccucag

SEQ ID NO: 140208 - RNA, 16 nt, Human herpesvirus 4 (Epstein-Barr virus)
ccagcagggccuugag

SEQ ID NO: 140209 - RNA, 20 nt, Human herpesvirus 4 (Epstein-Barr virus)
ccagccacuuacagcacauu

SEQ ID NO: 140210 - RNA, 23 nt, Human herpesvirus 4 (Epstein-Barr virus)
ccacgagcggcgugucuuggcca

SEQ ID NO: 140211 - RNA, 21 nt, Human herpesvirus 4 (Epstein-Barr virus)
ccaccuagaaagagccauggu

SEQ ID NO: 140212 - RNA, 14 nt, Human herpesvirus 4 (Epstein-Barr virus)
ccaccucaacauau

SEQ ID NO: 140213 - RNA, 15 nt, Human herpesvirus 4 (Epstein-Barr virus)
ccaccucaacauauu

SEQ ID NO: 140214 - RNA, 23 nt, Human herpesvirus 4 (Epstein-Barr virus)
ccacgacauugaucacuacuaca

SEQ ID NO: 140215 - RNA, 20 nt, Human herpesvirus 4 (Epstein-Barr virus)
ccaccucccugauaaugucu

SEQ ID NO: 140216 - RNA, 16 nt, Human herpesvirus 4 (Epstein-Barr virus)
ccaccuuugcuaucuu

SEQ ID NO: 140217 - RNA, 20 nt, Human herpesvirus 4 (Epstein-Barr virus)
ccaccgacuccgaugcccac

SEQ ID NO: 140218 - RNA, 13 nt, Human herpesvirus 4 (Epstein-Barr virus)
ccacucagacucu

SEQ ID NO: 140219 - RNA, 20 nt, Human herpesvirus 4 (Epstein-Barr virus)
cccaaggaaggcuugccaaa

SEQ ID NO: 140220 - RNA, 21 nt, Human herpesvirus 4 (Epstein-Barr virus)
cccaaggaaggcuugccaaaa

SEQ ID NO: 140221 - RNA, 22 nt, Human herpesvirus 4 (Epstein-Barr virus)
cccaaggaaggcuugccaaaau

SEQ ID NO: 140222 - RNA, 18 nt, Human herpesvirus 4 (Epstein-Barr virus)
ccauguaacaagaacugg

SEQ ID NO: 140223 - RNA, 22 nt, Human herpesvirus 4 (Epstein-Barr virus)
ccaugucggcuaaugccaugca

SEQ ID NO: 140224 - RNA, 14 nt, Human herpesvirus 4 (Epstein-Barr virus)
cccaacagucuuca

SEQ ID NO: 140225 - RNA, 17 nt, Human herpesvirus 4 (Epstein-Barr virus)
ccaugaaucugacucua

SEQ ID NO: 140226 - RNA, 22 nt, Human herpesvirus 4 (Epstein-Barr virus)
ccaugaaucugacucuaacucc

SEQ ID NO: 140227 - RNA, 13 nt, Human herpesvirus 4 (Epstein-Barr virus)
ccagucuauccag

SEQ ID NO: 140228 - RNA, 16 nt, Human herpesvirus 4 (Epstein-Barr virus)
ccagucuauccaggag

SEQ ID NO: 140229 - RNA, 15 nt, Human herpesvirus 4 (Epstein-Barr virus)
ccagucccaacccaa

SEQ ID NO: 140230 - RNA, 15 nt, Human herpesvirus 4 (Epstein-Barr virus)
ccagugaucaucucg

SEQ ID NO: 140231 - RNA, 18 nt, Human herpesvirus 4 (Epstein-Barr virus)
ccagugccuccgccugag

SEQ ID NO: 140232 - RNA, 13 nt, Human herpesvirus 4 (Epstein-Barr virus)
ccagugugccagu

SEQ ID NO: 140233 - RNA, 20 nt, Human herpesvirus 4 (Epstein-Barr virus)
ccaguuccccccagccugag

SEQ ID NO: 140234 - RNA, 21 nt, Human herpesvirus 4 (Epstein-Barr virus)
ccaucuacccaacagucuuca

SEQ ID NO: 140235 - RNA, 23 nt, Human herpesvirus 4 (Epstein-Barr virus)
ccaguuucuuuccgcgguggugg

SEQ ID NO: 140236 - RNA, 16 nt, Human herpesvirus 4 (Epstein-Barr virus)
ccacagagcaucagau

SEQ ID NO: 140237 - RNA, 22 nt, Human herpesvirus 4 (Epstein-Barr virus)
ccacagauggagagauuucauc

SEQ ID NO: 140238 - RNA, 22 nt, Human herpesvirus 4 (Epstein-Barr virus)
ccaacgagggcagacaccaccu

SEQ ID NO: 140239 - RNA, 14 nt, Human herpesvirus 4 (Epstein-Barr virus)
ccaaccugccucuc

SEQ ID NO: 140240 - RNA, 15 nt, Human herpesvirus 4 (Epstein-Barr virus)
ccaaccugcucucuc

SEQ ID NO: 140241 - RNA, 13 nt, Human herpesvirus 4 (Epstein-Barr virus)
ccaacagucuuca

SEQ ID NO: 140242 - RNA, 15 nt, Human herpesvirus 4 (Epstein-Barr virus)
aaaauaguuccaggu

SEQ ID NO: 140243 - RNA, 14 nt, Human herpesvirus 4 (Epstein-Barr virus)
cuucuuuaucucca

SEQ ID NO: 140244 - RNA, 23 nt, Human herpesvirus 4 (Epstein-Barr virus)
cuucuucaggggaaucucugcca

SEQ ID NO: 140245 - RNA, 13 nt, Human herpesvirus 4 (Epstein-Barr virus)
cuucuguuugcau

SEQ ID NO: 140246 - RNA, 15 nt, Human herpesvirus 4 (Epstein-Barr virus)
cuucuguuugcauug

SEQ ID NO: 140247 - RNA, 22 nt, Human herpesvirus 4 (Epstein-Barr virus)
cuugaagaucgugaggccugag

SEQ ID NO: 140248 - RNA, 14 nt, Human herpesvirus 4 (Epstein-Barr virus)
cuucuuuugcucuu

SEQ ID NO: 140249 - RNA, 22 nt, Human herpesvirus 4 (Epstein-Barr virus)
cuucucguagagaucaggccaa

SEQ ID NO: 140250 - RNA, 21 nt, Human herpesvirus 4 (Epstein-Barr virus)
cuucuccaucuccaucagggc

SEQ ID NO: 140251 - RNA, 23 nt, Human herpesvirus 4 (Epstein-Barr virus)
cuucugguugauaaucucaaaga

SEQ ID NO: 140252 - RNA, 21 nt, Human herpesvirus 4 (Epstein-Barr virus)
cuucuggcacgacuguuccua

SEQ ID NO: 140253 - RNA, 15 nt, Human herpesvirus 4 (Epstein-Barr virus)
cuucuggaccgugcc

SEQ ID NO: 140254 - RNA, 15 nt, Human herpesvirus 4 (Epstein-Barr virus)
cuucugaaaaagccu

SEQ ID NO: 140255 - RNA, 11 nt, Human herpesvirus 4 (Epstein-Barr virus)
cuucugaagau

SEQ ID NO: 140256 - RNA, 19 nt, Human herpesvirus 4 (Epstein-Barr virus)
cuucugcagaaggccauug

SEQ ID NO: 140257 - RNA, 15 nt, Human herpesvirus 4 (Epstein-Barr virus)
cuuccuguguucucc

SEQ ID NO: 140258 - RNA, 13 nt, Human herpesvirus 4 (Epstein-Barr virus)
cuucgcauuacac

SEQ ID NO: 140259 - RNA, 22 nt, Human herpesvirus 4 (Epstein-Barr virus)
cuuccuagccuucuuccuagac

SEQ ID NO: 140260 - RNA, 11 nt, Human herpesvirus 4 (Epstein-Barr virus)
cuucucaaagg

SEQ ID NO: 140261 - RNA, 22 nt, Human herpesvirus 4 (Epstein-Barr virus)
cuugaccaguguguacauucca

SEQ ID NO: 140262 - RNA, 18 nt, Human herpesvirus 4 (Epstein-Barr virus)
cuugacuguaaucacugg

SEQ ID NO: 140263 - RNA, 14 nt, Human herpesvirus 4 (Epstein-Barr virus)
cuugagggcaaaga

SEQ ID NO: 140264 - RNA, 15 nt, Human herpesvirus 4 (Epstein-Barr virus)
cuugagggcaaagac

SEQ ID NO: 140265 - RNA, 13 nt, Human herpesvirus 4 (Epstein-Barr virus)
cuugaggugggcu

SEQ ID NO: 140266 - RNA, 20 nt, Human herpesvirus 4 (Epstein-Barr virus)
cuugagucucucgaggucug

SEQ ID NO: 140267 - RNA, 19 nt, Human herpesvirus 4 (Epstein-Barr virus)
cuugauggcccugaucugg

SEQ ID NO: 140268 - RNA, 20 nt, Human herpesvirus 4 (Epstein-Barr virus)
cuugauguacuuuccuagaa

SEQ ID NO: 140269 - RNA, 17 nt, Human herpesvirus 4 (Epstein-Barr virus)
cuugcccucuccagcaa

SEQ ID NO: 140270 - RNA, 15 nt, Human herpesvirus 4 (Epstein-Barr virus)
cuuggcaguguccuc

SEQ ID NO: 140271 - RNA, 16 nt, Human herpesvirus 4 (Epstein-Barr virus)
cuuggucaagguguca

SEQ ID NO: 140272 - RNA, 14 nt, Human herpesvirus 4 (Epstein-Barr virus)
cuugggggcaaagc

SEQ ID NO: 140273 - RNA, 19 nt, Human herpesvirus 4 (Epstein-Barr virus)
cuugguaaucuguacggga

SEQ ID NO: 140274 - RNA, 16 nt, Human herpesvirus 4 (Epstein-Barr virus)
cuuggaggcugcuaag

SEQ ID NO: 140275 - RNA, 15 nt, Human herpesvirus 4 (Epstein-Barr virus)
cuuggaaacacccau

SEQ ID NO: 140276 - RNA, 16 nt, Human herpesvirus 4 (Epstein-Barr virus)
cuugcucucagcacuu

SEQ ID NO: 140277 - RNA, 14 nt, Human herpesvirus 4 (Epstein-Barr virus)
cuuagacugagcca

SEQ ID NO: 140278 - RNA, 13 nt, Human herpesvirus 4 (Epstein-Barr virus)
cugucacaccagu

SEQ ID NO: 140279 - RNA, 21 nt, Human herpesvirus 4 (Epstein-Barr virus)
cuguaugguauucuacuuuaa

SEQ ID NO: 140280 - RNA, 18 nt, Human herpesvirus 4 (Epstein-Barr virus)
cuguauuuacaaacacua

SEQ ID NO: 140281 - RNA, 20 nt, Human herpesvirus 4 (Epstein-Barr virus)
cuguauuuacaaacacuaca

SEQ ID NO: 140282 - RNA, 15 nt, Human herpesvirus 4 (Epstein-Barr virus)
cuguccaagugcuau

SEQ ID NO: 140283 - RNA, 16 nt, Human herpesvirus 4 (Epstein-Barr virus)
cuuacugcccagccua

SEQ ID NO: 140284 - RNA, 18 nt, Human herpesvirus 4 (Epstein-Barr virus)
cuucagaagaauguccaa

SEQ ID NO: 140285 - RNA, 14 nt, Human herpesvirus 4 (Epstein-Barr virus)
cuucagauucagac

SEQ ID NO: 140286 - RNA, 23 nt, Human herpesvirus 4 (Epstein-Barr virus)
cuucagugaccggacgggucuca

SEQ ID NO: 140287 - RNA, 11 nt, Human herpesvirus 4 (Epstein-Barr virus)
cuucauucacg

SEQ ID NO: 140288 - RNA, 14 nt, Human herpesvirus 4 (Epstein-Barr virus)
cuuccagacuaugc

SEQ ID NO: 140289 - RNA, 17 nt, Human herpesvirus 4 (Epstein-Barr virus)
cuuccagacuaugcaua

SEQ ID NO: 140290 - RNA, 14 nt, Human herpesvirus 4 (Epstein-Barr virus)
cuuccagagcucua

SEQ ID NO: 140291 - RNA, 15 nt, Human herpesvirus 4 (Epstein-Barr virus)
cuuccagagcucuac

SEQ ID NO: 140292 - RNA, 15 nt, Human herpesvirus 4 (Epstein-Barr virus)
cuucauguccacuga

SEQ ID NO: 140293 - RNA, 21 nt, Human herpesvirus 4 (Epstein-Barr virus)
cuucauguccacugagcaaga

SEQ ID NO: 140294 - RNA, 21 nt, Human herpesvirus 4 (Epstein-Barr virus)
cuuccaacgcauccaccauca

SEQ ID NO: 140295 - RNA, 13 nt, Human herpesvirus 4 (Epstein-Barr virus)
cuuccacaccauc

SEQ ID NO: 140296 - RNA, 22 nt, Human herpesvirus 4 (Epstein-Barr virus)
cuuccacccccuggagccagcg

SEQ ID NO: 140297 - RNA, 21 nt, Human herpesvirus 4 (Epstein-Barr virus)
cuucaagagucucgccaucua

SEQ ID NO: 140298 - RNA, 16 nt, Human herpesvirus 4 (Epstein-Barr virus)
cugccagagcuguguu

SEQ ID NO: 140299 - RNA, 17 nt, Human herpesvirus 4 (Epstein-Barr virus)
cugccaucgggacagau

SEQ ID NO: 140300 - RNA, 19 nt, Human herpesvirus 4 (Epstein-Barr virus)
cugcccagccuacucucca

SEQ ID NO: 140301 - RNA, 13 nt, Human herpesvirus 4 (Epstein-Barr virus)
cugcuuuuagccu

SEQ ID NO: 140302 - RNA, 21 nt, Human herpesvirus 4 (Epstein-Barr virus)
cuggaacucgaagcggucuca

SEQ ID NO: 140303 - RNA, 16 nt, Human herpesvirus 4 (Epstein-Barr virus)
cugccacauuggacac

SEQ ID NO: 140304 - RNA, 17 nt, Human herpesvirus 4 (Epstein-Barr virus)
cugcagagguucaggga

SEQ ID NO: 140305 - RNA, 22 nt, Human herpesvirus 4 (Epstein-Barr virus)
cugggacaacugucacaccagu

SEQ ID NO: 140306 - RNA, 19 nt, Human herpesvirus 4 (Epstein-Barr virus)
cuggcuuccacucacggga

SEQ ID NO: 140307 - RNA, 21 nt, Human herpesvirus 4 (Epstein-Barr virus)
cuggcgacuuggugccaccau

SEQ ID NO: 140308 - RNA, 23 nt, Human herpesvirus 4 (Epstein-Barr virus)
cuggcgacuuggugccaccaucu

SEQ ID NO: 140309 - RNA, 21 nt, Human herpesvirus 4 (Epstein-Barr virus)
cuggaccagaaggcuccggcg

SEQ ID NO: 140310 - RNA, 14 nt, Human herpesvirus 4 (Epstein-Barr virus)
cuggacccccggag

SEQ ID NO: 140311 - RNA, 14 nt, Human herpesvirus 4 (Epstein-Barr virus)
cuggccaaccugcc

SEQ ID NO: 140312 - RNA, 19 nt, Human herpesvirus 4 (Epstein-Barr virus)
cuggccggccgcccccuga

SEQ ID NO: 140313 - RNA, 23 nt, Human herpesvirus 4 (Epstein-Barr virus)
cuggccggccgcccccugaccuc

SEQ ID NO: 140314 - RNA, 17 nt, Human herpesvirus 4 (Epstein-Barr virus)
cuggccaugaaucugac

SEQ ID NO: 140315 - RNA, 16 nt, Human herpesvirus 4 (Epstein-Barr virus)
cuggccauggccgaga

SEQ ID NO: 140316 - RNA, 19 nt, Human herpesvirus 4 (Epstein-Barr virus)
cuggcccacuggaugcagg

SEQ ID NO: 140317 - RNA, 22 nt, Human herpesvirus 4 (Epstein-Barr virus)
cugggcacuucguagcuuugau

SEQ ID NO: 140318 - RNA, 21 nt, Human herpesvirus 4 (Epstein-Barr virus)
cugggacugccuggggaaaau

SEQ ID NO: 140319 - RNA, 24 nt, Human herpesvirus 4 (Epstein-Barr virus)
cugggagguagauagguggucgca

SEQ ID NO: 140320 - RNA, 11 nt, Human herpesvirus 4 (Epstein-Barr virus)
cugguacagga

SEQ ID NO: 140321 - RNA, 14 nt, Human herpesvirus 4 (Epstein-Barr virus)
cuggggucucaggc

SEQ ID NO: 140322 - RNA, 21 nt, Human herpesvirus 4 (Epstein-Barr virus)
cuguaguggccuucucugaug

SEQ ID NO: 140323 - RNA, 13 nt, Human herpesvirus 4 (Epstein-Barr virus)
cuccucuccaaau

SEQ ID NO: 140324 - RNA, 14 nt, Human herpesvirus 4 (Epstein-Barr virus)
cuccuaucacaggg

SEQ ID NO: 140325 - RNA, 13 nt, Human herpesvirus 4 (Epstein-Barr virus)
cuccgugguccug

SEQ ID NO: 140326 - RNA, 22 nt, Human herpesvirus 4 (Epstein-Barr virus)
cucuuguuucggguaggggagu

SEQ ID NO: 140327 - RNA, 21 nt, Human herpesvirus 4 (Epstein-Barr virus)
cucuuugagggggccaaaagg

SEQ ID NO: 140328 - RNA, 15 nt, Human herpesvirus 4 (Epstein-Barr virus)
cucuuuuacaguggu

SEQ ID NO: 140329 - RNA, 16 nt, Human herpesvirus 4 (Epstein-Barr virus)
cugaagaugauggacc

SEQ ID NO: 140330 - RNA, 15 nt, Human herpesvirus 4 (Epstein-Barr virus)
cugaccaucacaugg

SEQ ID NO: 140331 - RNA, 23 nt, Human herpesvirus 4 (Epstein-Barr virus)
cugacauuucucauaauggugcc

SEQ ID NO: 140332 - RNA, 13 nt, Human herpesvirus 4 (Epstein-Barr virus)
cugacuacucaga

SEQ ID NO: 140333 - RNA, 15 nt, Human herpesvirus 4 (Epstein-Barr virus)
cugacgccaaugcca

SEQ ID NO: 140334 - RNA, 17 nt, Human herpesvirus 4 (Epstein-Barr virus)
cugacggaaaucugcuc

SEQ ID NO: 140335 - RNA, 19 nt, Human herpesvirus 4 (Epstein-Barr virus)
cugaauuuauacccaguga

SEQ ID NO: 140336 - RNA, 16 nt, Human herpesvirus 4 (Epstein-Barr virus)
cugacacagacuuggc

SEQ ID NO: 140337 - RNA, 14 nt, Human herpesvirus 4 (Epstein-Barr virus)
cugacacacaggcc

SEQ ID NO: 140338 - RNA, 22 nt, Human herpesvirus 4 (Epstein-Barr virus)
cugagagccggggguugcuuca

SEQ ID NO: 140339 - RNA, 14 nt, Human herpesvirus 4 (Epstein-Barr virus)
cugacucucaugua

SEQ ID NO: 140340 - RNA, 17 nt, Human herpesvirus 4 (Epstein-Barr virus)
cugaguucuacaaugcc

SEQ ID NO: 140341 - RNA, 16 nt, Human herpesvirus 4 (Epstein-Barr virus)
cugagccugagccaca

SEQ ID NO: 140342 - RNA, 17 nt, Human herpesvirus 4 (Epstein-Barr virus)
cugagccugagccacac

SEQ ID NO: 140343 - RNA, 13 nt, Human herpesvirus 4 (Epstein-Barr virus)
cugagcgaugccu

SEQ ID NO: 140344 - RNA, 22 nt, Human herpesvirus 4 (Epstein-Barr virus)
cugagcuggacgagguccugga

SEQ ID NO: 140345 - RNA, 12 nt, Human herpesvirus 4 (Epstein-Barr virus)
cuaaauuugcug

SEQ ID NO: 140346 - RNA, 23 nt, Human herpesvirus 4 (Epstein-Barr virus)
cuaaauuugcugacauauguaca

SEQ ID NO: 140347 - RNA, 14 nt, Human herpesvirus 4 (Epstein-Barr virus)
cuaaaggcgcaguc

SEQ ID NO: 140348 - RNA, 19 nt, Human herpesvirus 4 (Epstein-Barr virus)
cguuggaugcaguccuccg

SEQ ID NO: 140349 - RNA, 15 nt, Human herpesvirus 4 (Epstein-Barr virus)
cguaacuugucuaca

SEQ ID NO: 140350 - RNA, 15 nt, Human herpesvirus 4 (Epstein-Barr virus)
cgguguccaggugug

SEQ ID NO: 140351 - RNA, 19 nt, Human herpesvirus 4 (Epstein-Barr virus)
cgguuagggaggacacugc

SEQ ID NO: 140352 - RNA, 18 nt, Human herpesvirus 4 (Epstein-Barr virus)
cgugcaagcagcaccugu

SEQ ID NO: 140353 - RNA, 23 nt, Human herpesvirus 4 (Epstein-Barr virus)
cgugagagccuacccaugaccaa

SEQ ID NO: 140354 - RNA, 16 nt, Human herpesvirus 4 (Epstein-Barr virus)
cgugcggcuacaucua

SEQ ID NO: 140355 - RNA, 17 nt, Human herpesvirus 4 (Epstein-Barr virus)
cgugcgugaucaugagg

SEQ ID NO: 140356 - RNA, 14 nt, Human herpesvirus 4 (Epstein-Barr virus)
cggccuccuggcca

SEQ ID NO: 140357 - RNA, 13 nt, Human herpesvirus 4 (Epstein-Barr virus)
cggccucgugcaa

SEQ ID NO: 140358 - RNA, 14 nt, Human herpesvirus 4 (Epstein-Barr virus)
cggcgccaccugca

SEQ ID NO: 140359 - RNA, 11 nt, Human herpesvirus 4 (Epstein-Barr virus)
cggccccgugc

SEQ ID NO: 140360 - RNA, 22 nt, Human herpesvirus 4 (Epstein-Barr virus)
cggcaucggguccuagcacaaa

SEQ ID NO: 140361 - RNA, 21 nt, Human herpesvirus 4 (Epstein-Barr virus)
cggcacaccagacauggugua

SEQ ID NO: 140362 - RNA, 20 nt, Human herpesvirus 4 (Epstein-Barr virus)
cggagggucagauuuugcaa

SEQ ID NO: 140363 - RNA, 23 nt, Human herpesvirus 4 (Epstein-Barr virus)
cggauaaacagggguauguggug

SEQ ID NO: 140364 - RNA, 15 nt, Human herpesvirus 4 (Epstein-Barr virus)
cggaggcagacaccc

SEQ ID NO: 140365 - RNA, 16 nt, Human herpesvirus 4 (Epstein-Barr virus)
cgauuuuaucacagga

SEQ ID NO: 140366 - RNA, 16 nt, Human herpesvirus 4 (Epstein-Barr virus)
cgggcgcgcuccgucc

SEQ ID NO: 140367 - RNA, 16 nt, Human herpesvirus 4 (Epstein-Barr virus)
cgggcgccugcuccac

SEQ ID NO: 140368 - RNA, 17 nt, Human herpesvirus 4 (Epstein-Barr virus)
cgggcgcaccugugucc

SEQ ID NO: 140369 - RNA, 15 nt, Human herpesvirus 4 (Epstein-Barr virus)
cggggcaugcugccc

SEQ ID NO: 140370 - RNA, 13 nt, Human herpesvirus 4 (Epstein-Barr virus)
cggggcggcggug

SEQ ID NO: 140371 - RNA, 12 nt, Human herpesvirus 4 (Epstein-Barr virus)
cgggggaucgcu

SEQ ID NO: 140372 - RNA, 13 nt, Human herpesvirus 4 (Epstein-Barr virus)
cggcucucaggcc

SEQ ID NO: 140373 - RNA, 23 nt, Human herpesvirus 4 (Epstein-Barr virus)
cgggacauuaaccucaaccacaa

SEQ ID NO: 140374 - RNA, 21 nt, Human herpesvirus 4 (Epstein-Barr virus)
cucccugauaaugucuucaau

SEQ ID NO: 140375 - RNA, 13 nt, Human herpesvirus 4 (Epstein-Barr virus)
cuccaacgaggau

SEQ ID NO: 140376 - RNA, 17 nt, Human herpesvirus 4 (Epstein-Barr virus)
cuccaagcggcacagau

SEQ ID NO: 140377 - RNA, 20 nt, Human herpesvirus 4 (Epstein-Barr virus)
cucauuuugugugccuccuc

SEQ ID NO: 140378 - RNA, 15 nt, Human herpesvirus 4 (Epstein-Barr virus)
cucauuauugcucuc

SEQ ID NO: 140379 - RNA, 17 nt, Human herpesvirus 4 (Epstein-Barr virus)
cucauucccccaugaga

SEQ ID NO: 140380 - RNA, 21 nt, Human herpesvirus 4 (Epstein-Barr virus)
cucauucccccaugagaccca

SEQ ID NO: 140381 - RNA, 13 nt, Human herpesvirus 4 (Epstein-Barr virus)
cucagcacuuugc

SEQ ID NO: 140382 - RNA, 15 nt, Human herpesvirus 4 (Epstein-Barr virus)
cucagcacuuugcca

SEQ ID NO: 140383 - RNA, 15 nt, Human herpesvirus 4 (Epstein-Barr virus)
cucagagucuacucg

SEQ ID NO: 140384 - RNA, 13 nt, Human herpesvirus 4 (Epstein-Barr virus)
cucacugauggua

SEQ ID NO: 140385 - RNA, 20 nt, Human herpesvirus 4 (Epstein-Barr virus)
cucaccgggaacgcccagua

SEQ ID NO: 140386 - RNA, 22 nt, Human herpesvirus 4 (Epstein-Barr virus)
cucaacaagcuaccgaugauuc

SEQ ID NO: 140387 - RNA, 16 nt, Human herpesvirus 4 (Epstein-Barr virus)
cuauugguugaucucc

SEQ ID NO: 140388 - RNA, 10 nt, Human herpesvirus 4 (Epstein-Barr virus)
cuaugccaau

SEQ ID NO: 140389 - RNA, 17 nt, Human herpesvirus 4 (Epstein-Barr virus)
cuauccaggucuugccg

SEQ ID NO: 140390 - RNA, 24 nt, Human herpesvirus 4 (Epstein-Barr virus)
cuauauccuagagggacagcugac

SEQ ID NO: 140391 - RNA, 22 nt, Human herpesvirus 4 (Epstein-Barr virus)
cuaucguccuccguccagccac

SEQ ID NO: 140392 - RNA, 21 nt, Human herpesvirus 4 (Epstein-Barr virus)
cuauaccaaagcuaacuguac

SEQ ID NO: 140393 - RNA, 18 nt, Human herpesvirus 4 (Epstein-Barr virus)
cuaguugguccagggucc

SEQ ID NO: 140394 - RNA, 22 nt, Human herpesvirus 4 (Epstein-Barr virus)
cuaguugguccaggguccagga

SEQ ID NO: 140395 - RNA, 13 nt, Human herpesvirus 4 (Epstein-Barr virus)
cuauaaccacaac

SEQ ID NO: 140396 - RNA, 15 nt, Human herpesvirus 4 (Epstein-Barr virus)
cuauaaccacaacug

SEQ ID NO: 140397 - RNA, 19 nt, Human herpesvirus 4 (Epstein-Barr virus)
cuauaaccacaacugcuau

SEQ ID NO: 140398 - RNA, 20 nt, Human herpesvirus 4 (Epstein-Barr virus)
cuaggaauuauuuaccacac

SEQ ID NO: 140399 - RNA, 14 nt, Human herpesvirus 4 (Epstein-Barr virus)
cuagcgucacugau

SEQ ID NO: 140400 - RNA, 16 nt, Human herpesvirus 4 (Epstein-Barr virus)
cuagcgucacugauuu

SEQ ID NO: 140401 - RNA, 13 nt, Human herpesvirus 4 (Epstein-Barr virus)
cuagccuucuucc

SEQ ID NO: 140402 - RNA, 14 nt, Human herpesvirus 4 (Epstein-Barr virus)
cuaggccugccacg

SEQ ID NO: 140403 - RNA, 23 nt, Human herpesvirus 4 (Epstein-Barr virus)
cuaguaugaaggcuggcaaagau

SEQ ID NO: 140404 - RNA, 17 nt, Human herpesvirus 4 (Epstein-Barr virus)
cuacaacucagccccau

SEQ ID NO: 140405 - RNA, 16 nt, Human herpesvirus 4 (Epstein-Barr virus)
cuacucagaugaagac

SEQ ID NO: 140406 - RNA, 22 nt, Human herpesvirus 4 (Epstein-Barr virus)
cuacucagaugaagacgaggag

SEQ ID NO: 140407 - RNA, 23 nt, Human herpesvirus 4 (Epstein-Barr virus)
cuaauuucuaccuaucagagggu

SEQ ID NO: 140408 - RNA, 18 nt, Human herpesvirus 4 (Epstein-Barr virus)
cuaauucagccaccuccc

SEQ ID NO: 140409 - RNA, 20 nt, Human herpesvirus 4 (Epstein-Barr virus)
cuaauggccguccucuggac

SEQ ID NO: 140410 - RNA, 19 nt, Human herpesvirus 4 (Epstein-Barr virus)
cuaauguaccucauagaca

SEQ ID NO: 140411 - RNA, 19 nt, Human herpesvirus 4 (Epstein-Barr virus)
cuaaugcauccgcaccaca

SEQ ID NO: 140412 - RNA, 17 nt, Human herpesvirus 4 (Epstein-Barr virus)
cuagaaacugugccaug

SEQ ID NO: 140413 - RNA, 17 nt, Human herpesvirus 4 (Epstein-Barr virus)
cuagaaagagccauggu

SEQ ID NO: 140414 - RNA, 17 nt, Human herpesvirus 4 (Epstein-Barr virus)
cuacuugcucagguuuc

SEQ ID NO: 140415 - RNA, 20 nt, Human herpesvirus 4 (Epstein-Barr virus)
gccgacuucuggaacauuug

SEQ ID NO: 140416 - RNA, 14 nt, Human herpesvirus 4 (Epstein-Barr virus)
gccgcaccacggga

SEQ ID NO: 140417 - RNA, 23 nt, Human herpesvirus 4 (Epstein-Barr virus)
gccgcaccacgggaggcggugca

SEQ ID NO: 140418 - RNA, 15 nt, Human herpesvirus 4 (Epstein-Barr virus)
gccucagauagccgg

SEQ ID NO: 140419 - RNA, 19 nt, Human herpesvirus 4 (Epstein-Barr virus)
gccuaaacgugauggugcu

SEQ ID NO: 140420 - RNA, 18 nt, Human herpesvirus 4 (Epstein-Barr virus)
gccuacgcagaggccauc

SEQ ID NO: 140421 - RNA, 20 nt, Human herpesvirus 4 (Epstein-Barr virus)
gccaucugucuugucaccau

SEQ ID NO: 140422 - RNA, 16 nt, Human herpesvirus 4 (Epstein-Barr virus)
gcccagcccuccucag

SEQ ID NO: 140423 - RNA, 11 nt, Human herpesvirus 4 (Epstein-Barr virus)
gccaugaaucu

SEQ ID NO: 140424 - RNA, 18 nt, Human herpesvirus 4 (Epstein-Barr virus)
gccaugaaucugacucua

SEQ ID NO: 140425 - RNA, 17 nt, Human herpesvirus 4 (Epstein-Barr virus)
gccaucuacccaacagu

SEQ ID NO: 140426 - RNA, 13 nt, Human herpesvirus 4 (Epstein-Barr virus)
gccauaccugcac

SEQ ID NO: 140427 - RNA, 22 nt, Human herpesvirus 4 (Epstein-Barr virus)
gccaggggggaccuuaacaucc

SEQ ID NO: 140428 - RNA, 10 nt, Human herpesvirus 4 (Epstein-Barr virus)
gccagucucc

SEQ ID NO: 140429 - RNA, 14 nt, Human herpesvirus 4 (Epstein-Barr virus)
gccagucuccgggu

SEQ ID NO: 140430 - RNA, 19 nt, Human herpesvirus 4 (Epstein-Barr virus)
gcccauucucguccaucuc

SEQ ID NO: 140431 - RNA, 17 nt, Human herpesvirus 4 (Epstein-Barr virus)
gccccacgaccucggga

SEQ ID NO: 140432 - RNA, 21 nt, Human herpesvirus 4 (Epstein-Barr virus)
gccaucucugauuauagcucu

SEQ ID NO: 140433 - RNA, 23 nt, Human herpesvirus 4 (Epstein-Barr virus)
gcccagguaccuuccuguguucu

SEQ ID NO: 140434 - RNA, 23 nt, Human herpesvirus 4 (Epstein-Barr virus)
gccccuaucuuaacccaauuccc

SEQ ID NO: 140435 - RNA, 15 nt, Human herpesvirus 4 (Epstein-Barr virus)
gccgaagaagggagg

SEQ ID NO: 140436 - RNA, 17 nt, Human herpesvirus 4 (Epstein-Barr virus)
gccccugauugcugaga

SEQ ID NO: 140437 - RNA, 17 nt, Human herpesvirus 4 (Epstein-Barr virus)
gcauuggggggguggca

SEQ ID NO: 140438 - RNA, 13 nt, Human herpesvirus 4 (Epstein-Barr virus)
gccacacagccug

SEQ ID NO: 140439 - RNA, 17 nt, Human herpesvirus 4 (Epstein-Barr virus)
gccacacuggcucucug

SEQ ID NO: 140440 - RNA, 12 nt, Human herpesvirus 4 (Epstein-Barr virus)
gccacaggggag

SEQ ID NO: 140441 - RNA, 15 nt, Human herpesvirus 4 (Epstein-Barr virus)
gccacaggugccuga

SEQ ID NO: 140442 - RNA, 18 nt, Human herpesvirus 4 (Epstein-Barr virus)
gccaccaacgucccugag

SEQ ID NO: 140443 - RNA, 17 nt, Human herpesvirus 4 (Epstein-Barr virus)
gccaccaucuggcagcu

SEQ ID NO: 140444 - RNA, 17 nt, Human herpesvirus 4 (Epstein-Barr virus)
gccaccuucuccaucuc

SEQ ID NO: 140445 - RNA, 19 nt, Human herpesvirus 4 (Epstein-Barr virus)
gccaccuucuccaucucca

SEQ ID NO: 140446 - RNA, 19 nt, Human herpesvirus 4 (Epstein-Barr virus)
gccacgugggucucauggg

SEQ ID NO: 140447 - RNA, 19 nt, Human herpesvirus 4 (Epstein-Barr virus)
gcauuaauguccagugggg

SEQ ID NO: 140448 - RNA, 15 nt, Human herpesvirus 4 (Epstein-Barr virus)
gcauucuacuaggaa

SEQ ID NO: 140449 - RNA, 17 nt, Human herpesvirus 4 (Epstein-Barr virus)
gcauucuacuaggaaac

SEQ ID NO: 140450 - RNA, 15 nt, Human herpesvirus 4 (Epstein-Barr virus)
gcaugcuugggcaug

SEQ ID NO: 140451 - RNA, 19 nt, Human herpesvirus 4 (Epstein-Barr virus)
gcauggcggccuggcagcg

SEQ ID NO: 140452 - RNA, 17 nt, Human herpesvirus 4 (Epstein-Barr virus)
gcauguguacuuguccu

SEQ ID NO: 140453 - RNA, 20 nt, Human herpesvirus 4 (Epstein-Barr virus)
gcaacccccggcucucaggc

SEQ ID NO: 140454 - RNA, 21 nt, Human herpesvirus 4 (Epstein-Barr virus)
gcaacuccucuuacaccagag

SEQ ID NO: 140455 - RNA, 14 nt, Human herpesvirus 4 (Epstein-Barr virus)
gcauccaccaucaa

SEQ ID NO: 140456 - RNA, 21 nt, Human herpesvirus 4 (Epstein-Barr virus)
gcaucgcucaccccugugcag

SEQ ID NO: 140457 - RNA, 22 nt, Human herpesvirus 4 (Epstein-Barr virus)
gcaaccaggcccacugcaaguu

SEQ ID NO: 140458 - RNA, 23 nt, Human herpesvirus 4 (Epstein-Barr virus)
gcaacaauagaaguggaaacccu

SEQ ID NO: 140459 - RNA, 16 nt, Human herpesvirus 4 (Epstein-Barr virus)
gcaaaugucaccgaag

SEQ ID NO: 140460 - RNA, 20 nt, Human herpesvirus 4 (Epstein-Barr virus)
gcgucaggaaguacagccgg

SEQ ID NO: 140461 - RNA, 19 nt, Human herpesvirus 4 (Epstein-Barr virus)
gcgucaggagacacggcuc

SEQ ID NO: 140462 - RNA, 22 nt, Human herpesvirus 4 (Epstein-Barr virus)
gcguccagacgcgauggcacac

SEQ ID NO: 140463 - RNA, 13 nt, Human herpesvirus 4 (Epstein-Barr virus)
gcgucauuucuuc

SEQ ID NO: 140464 - RNA, 18 nt, Human herpesvirus 4 (Epstein-Barr virus)
gcgucucaggcuaugaag

SEQ ID NO: 140465 - RNA, 20 nt, Human herpesvirus 4 (Epstein-Barr virus)
gcgucucaggcuaugaagaa

SEQ ID NO: 140466 - RNA, 15 nt, Human herpesvirus 4 (Epstein-Barr virus)
gcgguuauaacugcc

SEQ ID NO: 140467 - RNA, 15 nt, Human herpesvirus 4 (Epstein-Barr virus)
gcggcucacauuguc

SEQ ID NO: 140468 - RNA, 16 nt, Human herpesvirus 4 (Epstein-Barr virus)
gcggcuggaugcccuc

SEQ ID NO: 140469 - RNA, 16 nt, Human herpesvirus 4 (Epstein-Barr virus)
gcggcugugagcgcac

SEQ ID NO: 140470 - RNA, 20 nt, Human herpesvirus 4 (Epstein-Barr virus)
gcggcugugagcgcacguga

SEQ ID NO: 140471 - RNA, 22 nt, Human herpesvirus 4 (Epstein-Barr virus)
gcgcuaccuccuaucacaggga

SEQ ID NO: 140472 - RNA, 22 nt, Human herpesvirus 4 (Epstein-Barr virus)
gcgcuccguccuuguccaggag

SEQ ID NO: 140473 - RNA, 16 nt, Human herpesvirus 4 (Epstein-Barr virus)
gcgcuguuauggccau

SEQ ID NO: 140474 - RNA, 22 nt, Human herpesvirus 4 (Epstein-Barr virus)
gcggcaaaaauaugcaaugccc

SEQ ID NO: 140475 - RNA, 17 nt, Human herpesvirus 4 (Epstein-Barr virus)
gcggacuacaaggcauu

SEQ ID NO: 140476 - RNA, 18 nt, Human herpesvirus 4 (Epstein-Barr virus)
gccuuggggguggugggc

SEQ ID NO: 140477 - RNA, 13 nt, Human herpesvirus 4 (Epstein-Barr virus)
gccuugcucucag

SEQ ID NO: 140478 - RNA, 14 nt, Human herpesvirus 4 (Epstein-Barr virus)
gccuuggacucggg

SEQ ID NO: 140479 - RNA, 15 nt, Human herpesvirus 4 (Epstein-Barr virus)
gccuuggcaucauca

SEQ ID NO: 140480 - RNA, 22 nt, Human herpesvirus 4 (Epstein-Barr virus)
gccuuggcuauggucauggcca

SEQ ID NO: 140481 - RNA, 13 nt, Human herpesvirus 4 (Epstein-Barr virus)
gccuucucugaug

SEQ ID NO: 140482 - RNA, 13 nt, Human herpesvirus 4 (Epstein-Barr virus)
gcgcgcuccgucc

SEQ ID NO: 140483 - RNA, 12 nt, Human herpesvirus 4 (Epstein-Barr virus)
gccugugccucg

SEQ ID NO: 140484 - RNA, 16 nt, Human herpesvirus 4 (Epstein-Barr virus)
gccuugagggcaaaga

SEQ ID NO: 140485 - RNA, 17 nt, Human herpesvirus 4 (Epstein-Barr virus)
gccugugugcccggggg

SEQ ID NO: 140486 - RNA, 18 nt, Human herpesvirus 4 (Epstein-Barr virus)
gcuccauguccuguggug

SEQ ID NO: 140487 - RNA, 17 nt, Human herpesvirus 4 (Epstein-Barr virus)
gcuccgugggcccagag

SEQ ID NO: 140488 - RNA, 15 nt, Human herpesvirus 4 (Epstein-Barr virus)
gcuccgugguccuga

SEQ ID NO: 140489 - RNA, 19 nt, Human herpesvirus 4 (Epstein-Barr virus)
gcuccuauggacacuuggu

SEQ ID NO: 140490 - RNA, 12 nt, Human herpesvirus 4 (Epstein-Barr virus)
gcuggauggugu

SEQ ID NO: 140491 - RNA, 11 nt, Human herpesvirus 4 (Epstein-Barr virus)
gcuggcaaaga

SEQ ID NO: 140492 - RNA, 20 nt, Human herpesvirus 4 (Epstein-Barr virus)
gcuggacggcaucaugcgug

SEQ ID NO: 140493 - RNA, 17 nt, Human herpesvirus 4 (Epstein-Barr virus)
gcugcugaggguuggug

SEQ ID NO: 140494 - RNA, 14 nt, Human herpesvirus 4 (Epstein-Barr virus)
gcugcgguggugcg

SEQ ID NO: 140495 - RNA, 17 nt, Human herpesvirus 4 (Epstein-Barr virus)
gcuacgaagaguacgug

SEQ ID NO: 140496 - RNA, 20 nt, Human herpesvirus 4 (Epstein-Barr virus)
gcuacgcgggccacaggugc

SEQ ID NO: 140497 - RNA, 22 nt, Human herpesvirus 4 (Epstein-Barr virus)
gcuacguccucgugagucugcu

SEQ ID NO: 140498 - RNA, 17 nt, Human herpesvirus 4 (Epstein-Barr virus)
gcuauucugagcaccaa

SEQ ID NO: 140499 - RNA, 22 nt, Human herpesvirus 4 (Epstein-Barr virus)
gcuauucugagcaccaacacaa

SEQ ID NO: 140500 - RNA, 21 nt, Human herpesvirus 4 (Epstein-Barr virus)
gcucacgaagcgagacaguac

SEQ ID NO: 140501 - RNA, 13 nt, Human herpesvirus 4 (Epstein-Barr virus)
gcuaacuguacau

SEQ ID NO: 140502 - RNA, 19 nt, Human herpesvirus 4 (Epstein-Barr virus)
gcuaacuguacauacugca

SEQ ID NO: 140503 - RNA, 20 nt, Human herpesvirus 4 (Epstein-Barr virus)
gcuaccuccuaucacaggga

SEQ ID NO: 140504 - RNA, 22 nt, Human herpesvirus 4 (Epstein-Barr virus)
gcuacacucuggggucucaggc

SEQ ID NO: 140505 - RNA, 17 nt, Human herpesvirus 4 (Epstein-Barr virus)
gcuaaugccaugcagcg

SEQ ID NO: 140506 - RNA, 14 nt, Human herpesvirus 4 (Epstein-Barr virus)
ggcuucagcaucaa

SEQ ID NO: 140507 - RNA, 21 nt, Human herpesvirus 4 (Epstein-Barr virus)
ggcuaugguaguggcugggau

SEQ ID NO: 140508 - RNA, 23 nt, Human herpesvirus 4 (Epstein-Barr virus)
ggcucaggaucagggccaagaca

SEQ ID NO: 140509 - RNA, 21 nt, Human herpesvirus 4 (Epstein-Barr virus)
ggcuacgcgggccacaggugc

SEQ ID NO: 140510 - RNA, 22 nt, Human herpesvirus 4 (Epstein-Barr virus)
ggcuacggccguggacggcgcu

SEQ ID NO: 140511 - RNA, 22 nt, Human herpesvirus 4 (Epstein-Barr virus)
ggcggggaacgugacaggcaca

SEQ ID NO: 140512 - RNA, 18 nt, Human herpesvirus 4 (Epstein-Barr virus)
ggccgucuggcagggggc

SEQ ID NO: 140513 - RNA, 22 nt, Human herpesvirus 4 (Epstein-Barr virus)
ggcgcccuuauuauugauguga

SEQ ID NO: 140514 - RNA, 20 nt, Human herpesvirus 4 (Epstein-Barr virus)
ggccgcuuugccggcaucca

SEQ ID NO: 140515 - RNA, 21 nt, Human herpesvirus 4 (Epstein-Barr virus)
ggccggggccuccauccagug

SEQ ID NO: 140516 - RNA, 15 nt, Human herpesvirus 4 (Epstein-Barr virus)
ggccgugcauggcag

SEQ ID NO: 140517 - RNA, 23 nt, Human herpesvirus 4 (Epstein-Barr virus)
ggccgccaugcucagggccacgg

SEQ ID NO: 140518 - RNA, 14 nt, Human herpesvirus 4 (Epstein-Barr virus)
ggccgaguggcaga

SEQ ID NO: 140519 - RNA, 14 nt, Human herpesvirus 4 (Epstein-Barr virus)
ggccgccguggcca

SEQ ID NO: 140520 - RNA, 21 nt, Human herpesvirus 4 (Epstein-Barr virus)
ggcccuagccguccuguccaa

SEQ ID NO: 140521 - RNA, 13 nt, Human herpesvirus 4 (Epstein-Barr virus)
ggcccgucccucu

SEQ ID NO: 140522 - RNA, 12 nt, Human herpesvirus 4 (Epstein-Barr virus)
ggcccgucuuac

SEQ ID NO: 140523 - RNA, 19 nt, Human herpesvirus 4 (Epstein-Barr virus)
ggccccggcaccauagcau

SEQ ID NO: 140524 - RNA, 17 nt, Human herpesvirus 4 (Epstein-Barr virus)
ggcccuaauucagccac

SEQ ID NO: 140525 - RNA, 18 nt, Human herpesvirus 4 (Epstein-Barr virus)
ggcccgaccugccaaaga

SEQ ID NO: 140526 - RNA, 20 nt, Human herpesvirus 4 (Epstein-Barr virus)
ggcacgaaacaugguguaug

SEQ ID NO: 140527 - RNA, 18 nt, Human herpesvirus 4 (Epstein-Barr virus)
ggcaccauagcaugucac

SEQ ID NO: 140528 - RNA, 23 nt, Human herpesvirus 4 (Epstein-Barr virus)
ggcaccgucagccacacaaucag

SEQ ID NO: 140529 - RNA, 20 nt, Human herpesvirus 4 (Epstein-Barr virus)
ggcaaagcaggggugaugaa

SEQ ID NO: 140530 - RNA, 19 nt, Human herpesvirus 4 (Epstein-Barr virus)
ggcaagauggagaggcaaa

SEQ ID NO: 140531 - RNA, 17 nt, Human herpesvirus 4 (Epstein-Barr virus)
ggcacaacggcugugac

SEQ ID NO: 140532 - RNA, 12 nt, Human herpesvirus 4 (Epstein-Barr virus)
ggcacaccagac

SEQ ID NO: 140533 - RNA, 18 nt, Human herpesvirus 4 (Epstein-Barr virus)
ggcacacgccagagacaa

SEQ ID NO: 140534 - RNA, 15 nt, Human herpesvirus 4 (Epstein-Barr virus)
ggacuggcacggugg

SEQ ID NO: 140535 - RNA, 22 nt, Human herpesvirus 4 (Epstein-Barr virus)
ggacugugguauccaccuagaa

SEQ ID NO: 140536 - RNA, 17 nt, Human herpesvirus 4 (Epstein-Barr virus)
ggagaaaguaaccacau

SEQ ID NO: 140537 - RNA, 10 nt, Human herpesvirus 4 (Epstein-Barr virus)
gcuugccaaa

SEQ ID NO: 140538 - RNA, 11 nt, Human herpesvirus 4 (Epstein-Barr virus)
gcuugccaaaa

SEQ ID NO: 140539 - RNA, 17 nt, Human herpesvirus 4 (Epstein-Barr virus)
ggacucggccacacagu

SEQ ID NO: 140540 - RNA, 18 nt, Human herpesvirus 4 (Epstein-Barr virus)
ggacugcgggugucucaa

SEQ ID NO: 140541 - RNA, 15 nt, Human herpesvirus 4 (Epstein-Barr virus)
gcuugaccagugugu

SEQ ID NO: 140542 - RNA, 12 nt, Human herpesvirus 4 (Epstein-Barr virus)
gcuucucaaagg

SEQ ID NO: 140543 - RNA, 15 nt, Human herpesvirus 4 (Epstein-Barr virus)
gcuucuaccaagacu

SEQ ID NO: 140544 - RNA, 19 nt, Human herpesvirus 4 (Epstein-Barr virus)
gcuucagcaucaaugucaa

SEQ ID NO: 140545 - RNA, 19 nt, Human herpesvirus 4 (Epstein-Barr virus)
gcugggacugccuggggaa

SEQ ID NO: 140546 - RNA, 12 nt, Human herpesvirus 4 (Epstein-Barr virus)
gcuggugccuug

SEQ ID NO: 140547 - RNA, 17 nt, Human herpesvirus 4 (Epstein-Barr virus)
gcuggccgccguggcca

SEQ ID NO: 140548 - RNA, 9 nt, Human herpesvirus 4 (Epstein-Barr virus)
gcuggccau

SEQ ID NO: 140549 - RNA, 23 nt, Human herpesvirus 4 (Epstein-Barr virus)
ggaggcguccgccccgaugcgga

SEQ ID NO: 140550 - RNA, 18 nt, Human herpesvirus 4 (Epstein-Barr virus)
ggaguguuccacaguaau

SEQ ID NO: 140551 - RNA, 18 nt, Human herpesvirus 4 (Epstein-Barr virus)
ggagucuggacguggcug

SEQ ID NO: 140552 - RNA, 12 nt, Human herpesvirus 4 (Epstein-Barr virus)
ggaguugaugaa

SEQ ID NO: 140553 - RNA, 14 nt, Human herpesvirus 4 (Epstein-Barr virus)
ggagcaaccagcug

SEQ ID NO: 140554 - RNA, 15 nt, Human herpesvirus 4 (Epstein-Barr virus)
ggaggacacugccaa

SEQ ID NO: 140555 - RNA, 17 nt, Human herpesvirus 4 (Epstein-Barr virus)
ggaggaccuggugguga

SEQ ID NO: 140556 - RNA, 16 nt, Human herpesvirus 4 (Epstein-Barr virus)
ggaggccucaggcaac

SEQ ID NO: 140557 - RNA, 15 nt, Human herpesvirus 4 (Epstein-Barr virus)
ggaggaagauggcgu

SEQ ID NO: 140558 - RNA, 15 nt, Human herpesvirus 4 (Epstein-Barr virus)
ggaggagacuggcaa

SEQ ID NO: 140559 - RNA, 15 nt, Human herpesvirus 4 (Epstein-Barr virus)
ggagcuugaggccag

SEQ ID NO: 140560 - RNA, 20 nt, Human herpesvirus 4 (Epstein-Barr virus)
ggagagggaugggcuugaug

SEQ ID NO: 140561 - RNA, 20 nt, Human herpesvirus 4 (Epstein-Barr virus)
ggagacacaucuggaccaga

SEQ ID NO: 140562 - RNA, 19 nt, Human herpesvirus 4 (Epstein-Barr virus)
ggagacccgagucucugcu

SEQ ID NO: 140563 - RNA, 22 nt, Human herpesvirus 4 (Epstein-Barr virus)
ggagacacggcucugucaguua

SEQ ID NO: 140564 - RNA, 16 nt, Human herpesvirus 4 (Epstein-Barr virus)
ggagacggugaccuga

SEQ ID NO: 140565 - RNA, 18 nt, Human herpesvirus 4 (Epstein-Barr virus)
ggagacguuugaguccaa

SEQ ID NO: 140566 - RNA, 13 nt, Human herpesvirus 4 (Epstein-Barr virus)
ggucugacaccca

SEQ ID NO: 140567 - RNA, 21 nt, Human herpesvirus 4 (Epstein-Barr virus)
ggucgugaaauaaaagcuucu

SEQ ID NO: 140568 - RNA, 21 nt, Human herpesvirus 4 (Epstein-Barr virus)
gguccgugcggcuacaucuac

SEQ ID NO: 140569 - RNA, 17 nt, Human herpesvirus 4 (Epstein-Barr virus)
gguccaggguccaggag

SEQ ID NO: 140570 - RNA, 18 nt, Human herpesvirus 4 (Epstein-Barr virus)
gguccaagguugugcugu

SEQ ID NO: 140571 - RNA, 13 nt, Human herpesvirus 4 (Epstein-Barr virus)
ggucaccccagau

SEQ ID NO: 140572 - RNA, 17 nt, Human herpesvirus 4 (Epstein-Barr virus)
ggucaccccagaugccg

SEQ ID NO: 140573 - RNA, 19 nt, Human herpesvirus 4 (Epstein-Barr virus)
ggucacagaccagccccuc

SEQ ID NO: 140574 - RNA, 22 nt, Human herpesvirus 4 (Epstein-Barr virus)
ggucaggucgcggaccaggguc

SEQ ID NO: 140575 - RNA, 14 nt, Human herpesvirus 4 (Epstein-Barr virus)
ggugccaccaucug

SEQ ID NO: 140576 - RNA, 22 nt, Human herpesvirus 4 (Epstein-Barr virus)
ggugccagacucucuucaguga

SEQ ID NO: 140577 - RNA, 16 nt, Human herpesvirus 4 (Epstein-Barr virus)
ggugccauguggcauc

SEQ ID NO: 140578 - RNA, 14 nt, Human herpesvirus 4 (Epstein-Barr virus)
gguggcaguggaug

SEQ ID NO: 140579 - RNA, 21 nt, Human herpesvirus 4 (Epstein-Barr virus)
gguggcccucgguggugggcu

SEQ ID NO: 140580 - RNA, 14 nt, Human herpesvirus 4 (Epstein-Barr virus)
ggugggguggugua

SEQ ID NO: 140581 - RNA, 17 nt, Human herpesvirus 4 (Epstein-Barr virus)
gguggcgaaucugacau

SEQ ID NO: 140582 - RNA, 13 nt, Human herpesvirus 4 (Epstein-Barr virus)
ggugggugcaaga

SEQ ID NO: 140583 - RNA, 14 nt, Human herpesvirus 4 (Epstein-Barr virus)
ggugccugagggag

SEQ ID NO: 140584 - RNA, 13 nt, Human herpesvirus 4 (Epstein-Barr virus)
ggugccuugcucu

SEQ ID NO: 140585 - RNA, 17 nt, Human herpesvirus 4 (Epstein-Barr virus)
ggugcgguuauaacugc

SEQ ID NO: 140586 - RNA, 18 nt, Human herpesvirus 4 (Epstein-Barr virus)
gguagauagguggucgca

SEQ ID NO: 140587 - RNA, 14 nt, Human herpesvirus 4 (Epstein-Barr virus)
gguaugggggcccg

SEQ ID NO: 140588 - RNA, 22 nt, Human herpesvirus 4 (Epstein-Barr virus)
gguauucucagaugcagugggu

SEQ ID NO: 140589 - RNA, 16 nt, Human herpesvirus 4 (Epstein-Barr virus)
gguaguggcugggaua

SEQ ID NO: 140590 - RNA, 15 nt, Human herpesvirus 4 (Epstein-Barr virus)
gguagugucucucuc

SEQ ID NO: 140591 - RNA, 23 nt, Human herpesvirus 4 (Epstein-Barr virus)
gguaccccaaaacuauaccaaag

SEQ ID NO: 140592 - RNA, 15 nt, Human herpesvirus 4 (Epstein-Barr virus)
gguacaggaccugga

SEQ ID NO: 140593 - RNA, 20 nt, Human herpesvirus 4 (Epstein-Barr virus)
gggaccuacaggacaagaca

SEQ ID NO: 140594 - RNA, 22 nt, Human herpesvirus 4 (Epstein-Barr virus)
gggacgcagaaugugcagggau

SEQ ID NO: 140595 - RNA, 18 nt, Human herpesvirus 4 (Epstein-Barr virus)
ggguuggccuuuugcacc

SEQ ID NO: 140596 - RNA, 13 nt, Human herpesvirus 4 (Epstein-Barr virus)
ggcuugauggccc

SEQ ID NO: 140597 - RNA, 16 nt, Human herpesvirus 4 (Epstein-Barr virus)
ggcuugggcuguggua

SEQ ID NO: 140598 - RNA, 22 nt, Human herpesvirus 4 (Epstein-Barr virus)
gggaaaaagaauagcuucugca

SEQ ID NO: 140599 - RNA, 18 nt, Human herpesvirus 4 (Epstein-Barr virus)
guaaaucugucucucgcg

SEQ ID NO: 140600 - RNA, 15 nt, Human herpesvirus 4 (Epstein-Barr virus)
guaacauuuaaugug

SEQ ID NO: 140601 - RNA, 14 nt, Human herpesvirus 4 (Epstein-Barr virus)
guaaccacauauac

SEQ ID NO: 140602 - RNA, 17 nt, Human herpesvirus 4 (Epstein-Barr virus)
guaacugugguuuccau

SEQ ID NO: 140603 - RNA, 22 nt, Human herpesvirus 4 (Epstein-Barr virus)
guaaguaauuuguugccguugg

SEQ ID NO: 140604 - RNA, 13 nt, Human herpesvirus 4 (Epstein-Barr virus)
guaaucuguggug

SEQ ID NO: 140605 - RNA, 17 nt, Human herpesvirus 4 (Epstein-Barr virus)
guaaaaagcgggccuga

SEQ ID NO: 140606 - RNA, 21 nt, Human herpesvirus 4 (Epstein-Barr virus)
guaaaauuuacaccugaccca

SEQ ID NO: 140607 - RNA, 13 nt, Human herpesvirus 4 (Epstein-Barr virus)
guaaaacugccac

SEQ ID NO: 140608 - RNA, 15 nt, Human herpesvirus 4 (Epstein-Barr virus)
guaaaacugccacau

SEQ ID NO: 140609 - RNA, 16 nt, Human herpesvirus 4 (Epstein-Barr virus)
gguuuaaggaaugaac

SEQ ID NO: 140610 - RNA, 17 nt, Human herpesvirus 4 (Epstein-Barr virus)
gguuggccuuuugcacc

SEQ ID NO: 140611 - RNA, 19 nt, Human herpesvirus 4 (Epstein-Barr virus)
gguuuugcagucgcugcug

SEQ ID NO: 140612 - RNA, 19 nt, Human herpesvirus 4 (Epstein-Barr virus)
gguuauuuugccugaagcu

SEQ ID NO: 140613 - RNA, 22 nt, Human herpesvirus 4 (Epstein-Barr virus)
gguuacugcacagaacaucacu

SEQ ID NO: 140614 - RNA, 20 nt, Human herpesvirus 4 (Epstein-Barr virus)
gguugagcugagcgugugca

SEQ ID NO: 140615 - RNA, 15 nt, Human herpesvirus 4 (Epstein-Barr virus)
gguggucauguuucc

SEQ ID NO: 140616 - RNA, 16 nt, Human herpesvirus 4 (Epstein-Barr virus)
gguguugcaguaugua

SEQ ID NO: 140617 - RNA, 22 nt, Human herpesvirus 4 (Epstein-Barr virus)
ggugucucaagcuacucaauga

SEQ ID NO: 140618 - RNA, 20 nt, Human herpesvirus 4 (Epstein-Barr virus)
gauccggaggggaccacuag

SEQ ID NO: 140619 - RNA, 16 nt, Human herpesvirus 4 (Epstein-Barr virus)
gagguggccacacugg

SEQ ID NO: 140620 - RNA, 18 nt, Human herpesvirus 4 (Epstein-Barr virus)
gauaauguacagacuacc

SEQ ID NO: 140621 - RNA, 13 nt, Human herpesvirus 4 (Epstein-Barr virus)
gaugagauugcca

SEQ ID NO: 140622 - RNA, 16 nt, Human herpesvirus 4 (Epstein-Barr virus)
gaugagucugacuacu

SEQ ID NO: 140623 - RNA, 19 nt, Human herpesvirus 4 (Epstein-Barr virus)
gaugcaccgggaugagcug

SEQ ID NO: 140624 - RNA, 15 nt, Human herpesvirus 4 (Epstein-Barr virus)
gaugcaacagaggau

SEQ ID NO: 140625 - RNA, 17 nt, Human herpesvirus 4 (Epstein-Barr virus)
gaugcaacagaggauug

SEQ ID NO: 140626 - RNA, 18 nt, Human herpesvirus 4 (Epstein-Barr virus)
gaugauugagaaugccaa

SEQ ID NO: 140627 - RNA, 18 nt, Human herpesvirus 4 (Epstein-Barr virus)
gaugaccaugauggugca

SEQ ID NO: 140628 - RNA, 23 nt, Human herpesvirus 4 (Epstein-Barr virus)
gaugacccgccaaggugugcaug

SEQ ID NO: 140629 - RNA, 21 nt, Human herpesvirus 4 (Epstein-Barr virus)
gaugaauugcuguuuuugcca

SEQ ID NO: 140630 - RNA, 17 nt, Human herpesvirus 4 (Epstein-Barr virus)
gaucuuugacugacaca

SEQ ID NO: 140631 - RNA, 17 nt, Human herpesvirus 4 (Epstein-Barr virus)
gaugaacuggucaccag

SEQ ID NO: 140632 - RNA, 20 nt, Human herpesvirus 4 (Epstein-Barr virus)
gauggcacacgccagagaca

SEQ ID NO: 140633 - RNA, 22 nt, Human herpesvirus 4 (Epstein-Barr virus)
gauggccuggagagcaugcagg

SEQ ID NO: 140634 - RNA, 18 nt, Human herpesvirus 4 (Epstein-Barr virus)
gaugcccaccagccagcg

SEQ ID NO: 140635 - RNA, 18 nt, Human herpesvirus 4 (Epstein-Barr virus)
gaugcagcgcaucaggcg

SEQ ID NO: 140636 - RNA, 21 nt, Human herpesvirus 4 (Epstein-Barr virus)
gaugccucacgcgaagggaaa

SEQ ID NO: 140637 - RNA, 15 nt, Human herpesvirus 4 (Epstein-Barr virus)
gauugagaaugccaa

SEQ ID NO: 140638 - RNA, 21 nt, Human herpesvirus 4 (Epstein-Barr virus)
gauguuauccacaccauccca

SEQ ID NO: 140639 - RNA, 23 nt, Human herpesvirus 4 (Epstein-Barr virus)
gaugucaaacauggugucuguaa

SEQ ID NO: 140640 - RNA, 18 nt, Human herpesvirus 4 (Epstein-Barr virus)
gauuaggagcagggccca

SEQ ID NO: 140641 - RNA, 21 nt, Human herpesvirus 4 (Epstein-Barr virus)
gauuaggagcagggcccagug

SEQ ID NO: 140642 - RNA, 11 nt, Human herpesvirus 4 (Epstein-Barr virus)
gauuaggcacu

SEQ ID NO: 140643 - RNA, 20 nt, Human herpesvirus 4 (Epstein-Barr virus)
gauuaggcacuggacacaca

SEQ ID NO: 140644 - RNA, 22 nt, Human herpesvirus 4 (Epstein-Barr virus)
gauuuauuaccugucucucuuu

SEQ ID NO: 140645 - RNA, 22 nt, Human herpesvirus 4 (Epstein-Barr virus)
gauugcugagaaccugcugcua

SEQ ID NO: 140646 - RNA, 17 nt, Human herpesvirus 4 (Epstein-Barr virus)
gauuggaaaagggccca

SEQ ID NO: 140647 - RNA, 13 nt, Human herpesvirus 4 (Epstein-Barr virus)
gauugccaagaug

SEQ ID NO: 140648 - RNA, 18 nt, Human herpesvirus 4 (Epstein-Barr virus)
gauugccucuuguguucu

SEQ ID NO: 140649 - RNA, 13 nt, Human herpesvirus 4 (Epstein-Barr virus)
gauuuugggcaca

SEQ ID NO: 140650 - RNA, 18 nt, Human herpesvirus 4 (Epstein-Barr virus)
gauuuugggcacacuuaa

SEQ ID NO: 140651 - RNA, 16 nt, Human herpesvirus 4 (Epstein-Barr virus)
gcaaaaauaugcaaug

SEQ ID NO: 140652 - RNA, 19 nt, Human herpesvirus 4 (Epstein-Barr virus)
gcaaaacccccgugcgaug

SEQ ID NO: 140653 - RNA, 18 nt, Human herpesvirus 4 (Epstein-Barr virus)
gcaaaacucacaggacau

SEQ ID NO: 140654 - RNA, 23 nt, Human herpesvirus 4 (Epstein-Barr virus)
gacucccacauucguacaucucc

SEQ ID NO: 140655 - RNA, 15 nt, Human herpesvirus 4 (Epstein-Barr virus)
gacuccgaauauccc

SEQ ID NO: 140656 - RNA, 16 nt, Human herpesvirus 4 (Epstein-Barr virus)
gacucuagacagucac

SEQ ID NO: 140657 - RNA, 17 nt, Human herpesvirus 4 (Epstein-Barr virus)
gacucuagacagucacc

SEQ ID NO: 140658 - RNA, 20 nt, Human herpesvirus 4 (Epstein-Barr virus)
gacucuauugguugaucucc

SEQ ID NO: 140659 - RNA, 17 nt, Human herpesvirus 4 (Epstein-Barr virus)
gacucaauuuccaaaaa

SEQ ID NO: 140660 - RNA, 15 nt, Human herpesvirus 4 (Epstein-Barr virus)
gacuccacaccaaau

SEQ ID NO: 140661 - RNA, 17 nt, Human herpesvirus 4 (Epstein-Barr virus)
gacguggcugcgguggu

SEQ ID NO: 140662 - RNA, 20 nt, Human herpesvirus 4 (Epstein-Barr virus)
gacuacaauguuccuucuca

SEQ ID NO: 140663 - RNA, 14 nt, Human herpesvirus 4 (Epstein-Barr virus)
gacuacaccaucac

SEQ ID NO: 140664 - RNA, 20 nt, Human herpesvirus 4 (Epstein-Barr virus)
gacuagcgccccuauaacca

SEQ ID NO: 140665 - RNA, 21 nt, Human herpesvirus 4 (Epstein-Barr virus)
gacuagcgccccuauaaccac

SEQ ID NO: 140666 - RNA, 22 nt, Human herpesvirus 4 (Epstein-Barr virus)
gacugacacauaaacaugguuu

SEQ ID NO: 140667 - RNA, 21 nt, Human herpesvirus 4 (Epstein-Barr virus)
gacuucgggggcgacugccgc

SEQ ID NO: 140668 - RNA, 15 nt, Human herpesvirus 4 (Epstein-Barr virus)
gacuugaggugggcu

SEQ ID NO: 140669 - RNA, 13 nt, Human herpesvirus 4 (Epstein-Barr virus)
gacugucauuuac

SEQ ID NO: 140670 - RNA, 19 nt, Human herpesvirus 4 (Epstein-Barr virus)
aaaugaggaacggugauua

SEQ ID NO: 140671 - RNA, 18 nt, Human herpesvirus 4 (Epstein-Barr virus)
aaauaguuccaggugaca

SEQ ID NO: 140672 - RNA, 18 nt, Human herpesvirus 4 (Epstein-Barr virus)
gacguuugaguccaaaca

SEQ ID NO: 140673 - RNA, 19 nt, Human herpesvirus 4 (Epstein-Barr virus)
gacuaaccaugccaucucu

SEQ ID NO: 140674 - RNA, 18 nt, Human herpesvirus 4 (Epstein-Barr virus)
aaaugcgccgucauucca

SEQ ID NO: 140675 - RNA, 23 nt, Human herpesvirus 4 (Epstein-Barr virus)
aaaugcaccuugacuguaaucac

SEQ ID NO: 140676 - RNA, 13 nt, Human herpesvirus 4 (Epstein-Barr virus)
gagaggaugaucc

SEQ ID NO: 140677 - RNA, 22 nt, Human herpesvirus 4 (Epstein-Barr virus)
gagaggauggcacgguccagaa

SEQ ID NO: 140678 - RNA, 24 nt, Human herpesvirus 4 (Epstein-Barr virus)
gagccgugucuccugacgccaaug

SEQ ID NO: 140679 - RNA, 17 nt, Human herpesvirus 4 (Epstein-Barr virus)
gagccuacccaugacca

SEQ ID NO: 140680 - RNA, 22 nt, Human herpesvirus 4 (Epstein-Barr virus)
gagccugccggaguuuucuccc

SEQ ID NO: 140681 - RNA, 22 nt, Human herpesvirus 4 (Epstein-Barr virus)
gagcggcugugagcgcacguga

SEQ ID NO: 140682 - RNA, 18 nt, Human herpesvirus 4 (Epstein-Barr virus)
gagcggguggaggagcuc

SEQ ID NO: 140683 - RNA, 19 nt, Human herpesvirus 4 (Epstein-Barr virus)
gagcggguggaggagcucc

SEQ ID NO: 140684 - RNA, 13 nt, Human herpesvirus 4 (Epstein-Barr virus)
gagacuaaugugg

SEQ ID NO: 140685 - RNA, 18 nt, Human herpesvirus 4 (Epstein-Barr virus)
gagacuggaacuguacua

SEQ ID NO: 140686 - RNA, 18 nt, Human herpesvirus 4 (Epstein-Barr virus)
gagacuggcaacuccucu

SEQ ID NO: 140687 - RNA, 19 nt, Human herpesvirus 4 (Epstein-Barr virus)
gagaaaaucugcuucuccc

SEQ ID NO: 140688 - RNA, 21 nt, Human herpesvirus 4 (Epstein-Barr virus)
gagggaaaagagacugcgaaa

SEQ ID NO: 140689 - RNA, 17 nt, Human herpesvirus 4 (Epstein-Barr virus)
gagggggcgaaggcgug

SEQ ID NO: 140690 - RNA, 22 nt, Human herpesvirus 4 (Epstein-Barr virus)
gagggcagcgaagaacacucca

SEQ ID NO: 140691 - RNA, 16 nt, Human herpesvirus 4 (Epstein-Barr virus)
gagggccgauaucaca

SEQ ID NO: 140692 - RNA, 18 nt, Human herpesvirus 4 (Epstein-Barr virus)
gagguaauuagcacggua

SEQ ID NO: 140693 - RNA, 14 nt, Human herpesvirus 4 (Epstein-Barr virus)
gaggcggaagacca

SEQ ID NO: 140694 - RNA, 21 nt, Human herpesvirus 4 (Epstein-Barr virus)
gaggccuuuuuggcguggugg

SEQ ID NO: 140695 - RNA, 16 nt, Human herpesvirus 4 (Epstein-Barr virus)
gagggacaguaccaca

SEQ ID NO: 140696 - RNA, 19 nt, Human herpesvirus 4 (Epstein-Barr virus)
gaggcuggugccuuggcuu

SEQ ID NO: 140697 - RNA, 16 nt, Human herpesvirus 4 (Epstein-Barr virus)
gaggcuggaugcagcg

SEQ ID NO: 140698 - RNA, 17 nt, Human herpesvirus 4 (Epstein-Barr virus)
gagcgugugcacccggc

SEQ ID NO: 140699 - RNA, 14 nt, Human herpesvirus 4 (Epstein-Barr virus)
gaggaugagaccag

SEQ ID NO: 140700 - RNA, 18 nt, Human herpesvirus 4 (Epstein-Barr virus)
gaggaggcggaagaccag

SEQ ID NO: 140701 - RNA, 15 nt, Human herpesvirus 4 (Epstein-Barr virus)
gaggacuaauguucu

SEQ ID NO: 140702 - RNA, 16 nt, Human herpesvirus 4 (Epstein-Barr virus)
gaggacuaauguucuc

SEQ ID NO: 140703 - RNA, 17 nt, Human herpesvirus 4 (Epstein-Barr virus)
gaggcccugcaagccaa

SEQ ID NO: 140704 - RNA, 14 nt, Human herpesvirus 4 (Epstein-Barr virus)
gaggccguguuucu

SEQ ID NO: 140705 - RNA, 15 nt, Human herpesvirus 4 (Epstein-Barr virus)
gaggcauaacggugg

SEQ ID NO: 140706 - RNA, 16 nt, Human herpesvirus 4 (Epstein-Barr virus)
gaggcauaacgguggu

SEQ ID NO: 140707 - RNA, 19 nt, Human herpesvirus 4 (Epstein-Barr virus)
gaaccugagccugagccac

SEQ ID NO: 140708 - RNA, 15 nt, Human herpesvirus 4 (Epstein-Barr virus)
gaacaucacugccac

SEQ ID NO: 140709 - RNA, 14 nt, Human herpesvirus 4 (Epstein-Barr virus)
gaacagucaucagu

SEQ ID NO: 140710 - RNA, 22 nt, Human herpesvirus 4 (Epstein-Barr virus)
gaacacggcaccgucagccaca

SEQ ID NO: 140711 - RNA, 15 nt, Human herpesvirus 4 (Epstein-Barr virus)
gaacacuccacagau

SEQ ID NO: 140712 - RNA, 23 nt, Human herpesvirus 4 (Epstein-Barr virus)
gaacagcuucgcaaguuccucaa

SEQ ID NO: 140713 - RNA, 15 nt, Human herpesvirus 4 (Epstein-Barr virus)
gaaauugggugacca

SEQ ID NO: 140714 - RNA, 19 nt, Human herpesvirus 4 (Epstein-Barr virus)
cuuuauugacuacaccagu

SEQ ID NO: 140715 - RNA, 13 nt, Human herpesvirus 4 (Epstein-Barr virus)
cuuuaccaccuca

SEQ ID NO: 140716 - RNA, 14 nt, Human herpesvirus 4 (Epstein-Barr virus)
cuuuaccaccucaa

SEQ ID NO: 140717 - RNA, 22 nt, Human herpesvirus 4 (Epstein-Barr virus)
cuuguucuuggcggacaucauu

SEQ ID NO: 140718 - RNA, 18 nt, Human herpesvirus 4 (Epstein-Barr virus)
cuugugaugcaauaaaua

SEQ ID NO: 140719 - RNA, 22 nt, Human herpesvirus 4 (Epstein-Barr virus)
cuugucuacaucccauaccuac

SEQ ID NO: 140720 - RNA, 13 nt, Human herpesvirus 4 (Epstein-Barr virus)
cuugugucucuau

SEQ ID NO: 140721 - RNA, 10 nt, Human herpesvirus 4 (Epstein-Barr virus)
gaacgugaca

SEQ ID NO: 140722 - RNA, 18 nt, Human herpesvirus 4 (Epstein-Barr virus)
gaacgugacaggcacaac

SEQ ID NO: 140723 - RNA, 20 nt, Human herpesvirus 4 (Epstein-Barr virus)
gaagauugucacagcugcug

SEQ ID NO: 140724 - RNA, 21 nt, Human herpesvirus 4 (Epstein-Barr virus)
gaacuccgcccaggucuugcc

SEQ ID NO: 140725 - RNA, 22 nt, Human herpesvirus 4 (Epstein-Barr virus)
gaacuccgcccaggucuugcca

SEQ ID NO: 140726 - RNA, 21 nt, Human herpesvirus 4 (Epstein-Barr virus)
gaagauuuggcgucuaugcuu

SEQ ID NO: 140727 - RNA, 22 nt, Human herpesvirus 4 (Epstein-Barr virus)
gaagcccucuggacuuccaugu

SEQ ID NO: 140728 - RNA, 14 nt, Human herpesvirus 4 (Epstein-Barr virus)
gaagcgaagcagcu

SEQ ID NO: 140729 - RNA, 15 nt, Human herpesvirus 4 (Epstein-Barr virus)
gaagcgaagcagcuc

SEQ ID NO: 140730 - RNA, 16 nt, Human herpesvirus 4 (Epstein-Barr virus)
gaagcgagacaguacu

SEQ ID NO: 140731 - RNA, 19 nt, Human herpesvirus 4 (Epstein-Barr virus)
gaauaaggcucugaagcaa

SEQ ID NO: 140732 - RNA, 15 nt, Human herpesvirus 4 (Epstein-Barr virus)
gaauaacaagggaag

SEQ ID NO: 140733 - RNA, 19 nt, Human herpesvirus 4 (Epstein-Barr virus)
gaauacccugcauggccag

SEQ ID NO: 140734 - RNA, 21 nt, Human herpesvirus 4 (Epstein-Barr virus)
gaauagcuucugcagaaggcc

SEQ ID NO: 140735 - RNA, 14 nt, Human herpesvirus 4 (Epstein-Barr virus)
gaauaugaugagga

SEQ ID NO: 140736 - RNA, 13 nt, Human herpesvirus 4 (Epstein-Barr virus)
aaaccuugccuac

SEQ ID NO: 140737 - RNA, 13 nt, Human herpesvirus 4 (Epstein-Barr virus)
gaccugccaaaga

SEQ ID NO: 140738 - RNA, 14 nt, Human herpesvirus 4 (Epstein-Barr virus)
gaccucuacacgcu

SEQ ID NO: 140739 - RNA, 16 nt, Human herpesvirus 4 (Epstein-Barr virus)
gacccaaacucgacuu

SEQ ID NO: 140740 - RNA, 15 nt, Human herpesvirus 4 (Epstein-Barr virus)
gacccagccacuuac

SEQ ID NO: 140741 - RNA, 14 nt, Human herpesvirus 4 (Epstein-Barr virus)
gacccauaccaggu

SEQ ID NO: 140742 - RNA, 16 nt, Human herpesvirus 4 (Epstein-Barr virus)
gacccgagucucugcu

SEQ ID NO: 140743 - RNA, 16 nt, Human herpesvirus 4 (Epstein-Barr virus)
gaccccccucugaugg

SEQ ID NO: 140744 - RNA, 20 nt, Human herpesvirus 4 (Epstein-Barr virus)
gacccggaccaaugccaaag

SEQ ID NO: 140745 - RNA, 16 nt, Human herpesvirus 4 (Epstein-Barr virus)
gacccucuugcacucc

SEQ ID NO: 140746 - RNA, 19 nt, Human herpesvirus 4 (Epstein-Barr virus)
gacagaaauugggugacca

SEQ ID NO: 140747 - RNA, 21 nt, Human herpesvirus 4 (Epstein-Barr virus)
gacagauuugggagggaccac

SEQ ID NO: 140748 - RNA, 21 nt, Human herpesvirus 4 (Epstein-Barr virus)
gacagaggugcucaaggcagu

SEQ ID NO: 140749 - RNA, 21 nt, Human herpesvirus 4 (Epstein-Barr virus)
gaccaggucgaccaccucaac

SEQ ID NO: 140750 - RNA, 19 nt, Human herpesvirus 4 (Epstein-Barr virus)
gaccaguguguacauucca

SEQ ID NO: 140751 - RNA, 21 nt, Human herpesvirus 4 (Epstein-Barr virus)
gacaggcacaacggcugugac

SEQ ID NO: 140752 - RNA, 19 nt, Human herpesvirus 4 (Epstein-Barr virus)
gacagcgagagguaaugau

SEQ ID NO: 140753 - RNA, 20 nt, Human herpesvirus 4 (Epstein-Barr virus)
gacaaggcaguagaggacac

SEQ ID NO: 140754 - RNA, 19 nt, Human herpesvirus 4 (Epstein-Barr virus)
gacaaugagcggggagaua

SEQ ID NO: 140755 - RNA, 13 nt, Human herpesvirus 4 (Epstein-Barr virus)
gacacacauggca

SEQ ID NO: 140756 - RNA, 21 nt, Human herpesvirus 4 (Epstein-Barr virus)
gacaauuuuagaugagguaga

SEQ ID NO: 140757 - RNA, 16 nt, Human herpesvirus 4 (Epstein-Barr virus)
aaacuacaggcccggg

SEQ ID NO: 140758 - RNA, 23 nt, Human herpesvirus 4 (Epstein-Barr virus)
aaacucugcauggagaagcugga

SEQ ID NO: 140759 - RNA, 19 nt, Human herpesvirus 4 (Epstein-Barr virus)
aaacugagaacagucauca

SEQ ID NO: 140760 - RNA, 20 nt, Human herpesvirus 4 (Epstein-Barr virus)
aaagccagcgcacccgggga

SEQ ID NO: 140761 - RNA, 16 nt, Human herpesvirus 4 (Epstein-Barr virus)
aaacugguggacucua

SEQ ID NO: 140762 - RNA, 18 nt, Human herpesvirus 4 (Epstein-Barr virus)
aaacugugccauggugcc

SEQ ID NO: 140763 - RNA, 13 nt, Human herpesvirus 4 (Epstein-Barr virus)
aaaguaaccacau

SEQ ID NO: 140764 - RNA, 22 nt, Human herpesvirus 4 (Epstein-Barr virus)
aaaguaaccacauauacuggag

SEQ ID NO: 140765 - RNA, 10 nt, Human herpesvirus 4 (Epstein-Barr virus)
aaagugcaua

SEQ ID NO: 140766 - RNA, 12 nt, Human herpesvirus 4 (Epstein-Barr virus)
aaucuguugacg

SEQ ID NO: 140767 - RNA, 23 nt, Human herpesvirus 4 (Epstein-Barr virus)
aaugcaccuugacuguaaucacu

SEQ ID NO: 140768 - RNA, 15 nt, Human herpesvirus 4 (Epstein-Barr virus)
aaugcagguuugacu

SEQ ID NO: 140769 - RNA, 18 nt, Human herpesvirus 4 (Epstein-Barr virus)
aaugauguccaguucccu

SEQ ID NO: 140770 - RNA, 22 nt, Human herpesvirus 4 (Epstein-Barr virus)
aaugcaacaauagaaguggaaa

SEQ ID NO: 140771 - RNA, 15 nt, Human herpesvirus 4 (Epstein-Barr virus)
aaucugacauuucuc

SEQ ID NO: 140772 - RNA, 13 nt, Human herpesvirus 4 (Epstein-Barr virus)
aaucugacucuaa

SEQ ID NO: 140773 - RNA, 11 nt, Human herpesvirus 4 (Epstein-Barr virus)
aaucuguggug

SEQ ID NO: 140774 - RNA, 14 nt, Human herpesvirus 4 (Epstein-Barr virus)
aaucuguggugggc

SEQ ID NO: 140775 - RNA, 17 nt, Human herpesvirus 4 (Epstein-Barr virus)
aaucuguggugggcucu

SEQ ID NO: 140776 - RNA, 19 nt, Human herpesvirus 4 (Epstein-Barr virus)
aaucuguggugggcucugu

SEQ ID NO: 140777 - RNA, 14 nt, Human herpesvirus 4 (Epstein-Barr virus)
aaugcccccggggg

SEQ ID NO: 140778 - RNA, 16 nt, Human herpesvirus 4 (Epstein-Barr virus)
aaugcgccgucauucc

SEQ ID NO: 140779 - RNA, 23 nt, Human herpesvirus 4 (Epstein-Barr virus)
aaugggacgucuuguaaaacuug

SEQ ID NO: 140780 - RNA, 21 nt, Human herpesvirus 4 (Epstein-Barr virus)
aaugucaaggcucugcacagg

SEQ ID NO: 140781 - RNA, 22 nt, Human herpesvirus 4 (Epstein-Barr virus)
aaugucaaggcucugcacagga

SEQ ID NO: 140782 - RNA, 13 nt, Human herpesvirus 4 (Epstein-Barr virus)
aaugucaccacua

SEQ ID NO: 140783 - RNA, 19 nt, Human herpesvirus 4 (Epstein-Barr virus)
aauguagccccuaggccug

SEQ ID NO: 140784 - RNA, 17 nt, Human herpesvirus 4 (Epstein-Barr virus)
aaugggagcaaccagcu

SEQ ID NO: 140785 - RNA, 13 nt, Human herpesvirus 4 (Epstein-Barr virus)
aauguacagacua

SEQ ID NO: 140786 - RNA, 19 nt, Human herpesvirus 4 (Epstein-Barr virus)
aauugauugaugaguuaaa

SEQ ID NO: 140787 - RNA, 20 nt, Human herpesvirus 4 (Epstein-Barr virus)
aauucacaucucagggacaa

SEQ ID NO: 140788 - RNA, 13 nt, Human herpesvirus 4 (Epstein-Barr virus)
aauucuccugccu

SEQ ID NO: 140789 - RNA, 22 nt, Human herpesvirus 4 (Epstein-Barr virus)
aauguuacccucauugugcuga

SEQ ID NO: 140790 - RNA, 20 nt, Human herpesvirus 4 (Epstein-Barr virus)
aauguuacuucuuuugcucu

SEQ ID NO: 140791 - RNA, 15 nt, Human herpesvirus 4 (Epstein-Barr virus)
aaugugggacuggga

SEQ ID NO: 140792 - RNA, 14 nt, Human herpesvirus 4 (Epstein-Barr virus)
aaugugcagggauu

SEQ ID NO: 140793 - RNA, 12 nt, Human herpesvirus 4 (Epstein-Barr virus)
aaggcagucucc

SEQ ID NO: 140794 - RNA, 19 nt, Human herpesvirus 4 (Epstein-Barr virus)
aaggcggugggaucaugaa

SEQ ID NO: 140795 - RNA, 20 nt, Human herpesvirus 4 (Epstein-Barr virus)
aaggcuggcaaagaucccca

SEQ ID NO: 140796 - RNA, 12 nt, Human herpesvirus 4 (Epstein-Barr virus)
aaggcuguugac

SEQ ID NO: 140797 - RNA, 12 nt, Human herpesvirus 4 (Epstein-Barr virus)
aaggcuugccaa

SEQ ID NO: 140798 - RNA, 18 nt, Human herpesvirus 4 (Epstein-Barr virus)
aagggacucaauggcauu

SEQ ID NO: 140799 - RNA, 16 nt, Human herpesvirus 4 (Epstein-Barr virus)
aagggggcauccuccg

SEQ ID NO: 140800 - RNA, 15 nt, Human herpesvirus 4 (Epstein-Barr virus)
aaguaauuuguugcc

SEQ ID NO: 140801 - RNA, 15 nt, Human herpesvirus 4 (Epstein-Barr virus)
aagugguucagugga

SEQ ID NO: 140802 - RNA, 15 nt, Human herpesvirus 4 (Epstein-Barr virus)
aagaagauugaagac

SEQ ID NO: 140803 - RNA, 19 nt, Human herpesvirus 4 (Epstein-Barr virus)
aagcggucucagacaccaa

SEQ ID NO: 140804 - RNA, 14 nt, Human herpesvirus 4 (Epstein-Barr virus)
aagcggcacagauu

SEQ ID NO: 140805 - RNA, 19 nt, Human herpesvirus 4 (Epstein-Barr virus)
aaucagaaauuugcacuuu

SEQ ID NO: 140806 - RNA, 21 nt, Human herpesvirus 4 (Epstein-Barr virus)
aauaugcaaugcccacccacu

SEQ ID NO: 140807 - RNA, 14 nt, Human herpesvirus 4 (Epstein-Barr virus)
aauauccccaaagu

SEQ ID NO: 140808 - RNA, 22 nt, Human herpesvirus 4 (Epstein-Barr virus)
aauacacccaucuggaguucaa

SEQ ID NO: 140809 - RNA, 17 nt, Human herpesvirus 4 (Epstein-Barr virus)
aauacccugcauggcca

SEQ ID NO: 140810 - RNA, 17 nt, Human herpesvirus 4 (Epstein-Barr virus)
aacuacccgcaaugaaa

SEQ ID NO: 140811 - RNA, 20 nt, Human herpesvirus 4 (Epstein-Barr virus)
aacuaccugucugauugcac

SEQ ID NO: 140812 - RNA, 23 nt, Human herpesvirus 4 (Epstein-Barr virus)
aaccucaaccacaaaaugggggu

SEQ ID NO: 140813 - RNA, 15 nt, Human herpesvirus 4 (Epstein-Barr virus)
aaccugcucucucug

SEQ ID NO: 140814 - RNA, 19 nt, Human herpesvirus 4 (Epstein-Barr virus)
aaccuggagucugcauguc

SEQ ID NO: 140815 - RNA, 14 nt, Human herpesvirus 4 (Epstein-Barr virus)
aaccggugggcucg

SEQ ID NO: 140816 - RNA, 16 nt, Human herpesvirus 4 (Epstein-Barr virus)
aaccuaauuacauggu

SEQ ID NO: 140817 - RNA, 17 nt, Human herpesvirus 4 (Epstein-Barr virus)
aaccuaauuacauggua

SEQ ID NO: 140818 - RNA, 12 nt, Human herpesvirus 4 (Epstein-Barr virus)
aaccuacaugaa

SEQ ID NO: 140819 - RNA, 17 nt, Human herpesvirus 4 (Epstein-Barr virus)
aagaacacuccacagau

SEQ ID NO: 140820 - RNA, 17 nt, Human herpesvirus 4 (Epstein-Barr virus)
aagaacaaggccaagaa

SEQ ID NO: 140821 - RNA, 17 nt, Human herpesvirus 4 (Epstein-Barr virus)
aacugcuauucugagca

SEQ ID NO: 140822 - RNA, 21 nt, Human herpesvirus 4 (Epstein-Barr virus)
aacuguacuaaauuugcugac

SEQ ID NO: 140823 - RNA, 13 nt, Human herpesvirus 4 (Epstein-Barr virus)
aacugugccaugg

SEQ ID NO: 140824 - RNA, 15 nt, Human herpesvirus 4 (Epstein-Barr virus)
aacugugguuuccau

SEQ ID NO: 140825 - RNA, 14 nt, Human herpesvirus 4 (Epstein-Barr virus)
aaccauggacgagg

SEQ ID NO: 140826 - RNA, 16 nt, Human herpesvirus 4 (Epstein-Barr virus)
aaccacauauacugga

SEQ ID NO: 140827 - RNA, 15 nt, Human herpesvirus 4 (Epstein-Barr virus)
aaccacaacugcuau

SEQ ID NO: 140828 - RNA, 13 nt, Human herpesvirus 4 (Epstein-Barr virus)
aaccacggugaca

SEQ ID NO: 140829 - RNA, 17 nt, Human herpesvirus 4 (Epstein-Barr virus)
aaccacggugacauuca

SEQ ID NO: 140830 - RNA, 19 nt, Human herpesvirus 4 (Epstein-Barr virus)
aaccagcuggucaucagcc

SEQ ID NO: 140831 - RNA, 20 nt, Human herpesvirus 4 (Epstein-Barr virus)
aacccuugcccucuccagca

SEQ ID NO: 140832 - RNA, 21 nt, Human herpesvirus 4 (Epstein-Barr virus)
aacccuugcccucuccagcaa

SEQ ID NO: 140833 - RNA, 14 nt, Human herpesvirus 4 (Epstein-Barr virus)
aacccaacaaugug

SEQ ID NO: 140834 - RNA, 17 nt, Human herpesvirus 4 (Epstein-Barr virus)
aacccccggcucucagg

SEQ ID NO: 140835 - RNA, 23 nt, Human herpesvirus 4 (Epstein-Barr virus)
aacauauucccccacguguucuc

SEQ ID NO: 140836 - RNA, 13 nt, Human herpesvirus 4 (Epstein-Barr virus)
uuuugugugccuc

SEQ ID NO: 140837 - RNA, 15 nt, Human herpesvirus 4 (Epstein-Barr virus)
uuuuucggaucccag

SEQ ID NO: 140838 - RNA, 15 nt, Human herpesvirus 4 (Epstein-Barr virus)
aaccaaacuaacauc

SEQ ID NO: 140839 - RNA, 19 nt, Human herpesvirus 4 (Epstein-Barr virus)
uuugcuuaaaaaugugcag

SEQ ID NO: 140840 - RNA, 12 nt, Human herpesvirus 4 (Epstein-Barr virus)
uuugcugaagau

SEQ ID NO: 140841 - RNA, 23 nt, Human herpesvirus 4 (Epstein-Barr virus)
uuugaacaucagacccaacaaag

SEQ ID NO: 140842 - RNA, 20 nt, Human herpesvirus 4 (Epstein-Barr virus)
uuugacugacacauaaacau

SEQ ID NO: 140843 - RNA, 18 nt, Human herpesvirus 4 (Epstein-Barr virus)
uuugaccaagcuaccaga

SEQ ID NO: 140844 - RNA, 13 nt, Human herpesvirus 4 (Epstein-Barr virus)
uuugcaauauauu

SEQ ID NO: 140845 - RNA, 14 nt, Human herpesvirus 4 (Epstein-Barr virus)
uuugauugagauca

SEQ ID NO: 140846 - RNA, 16 nt, Human herpesvirus 4 (Epstein-Barr virus)
uuuccgucagccaggg

SEQ ID NO: 140847 - RNA, 16 nt, Human herpesvirus 4 (Epstein-Barr virus)
uuucuggccaaccugc

SEQ ID NO: 140848 - RNA, 14 nt, Human herpesvirus 4 (Epstein-Barr virus)
uuucuggugagcca

SEQ ID NO: 140849 - RNA, 21 nt, Human herpesvirus 4 (Epstein-Barr virus)
uuugaaagugguagugucucu

SEQ ID NO: 140850 - RNA, 13 nt, Human herpesvirus 4 (Epstein-Barr virus)
uuucuuugcuuca

SEQ ID NO: 140851 - RNA, 19 nt, Human herpesvirus 4 (Epstein-Barr virus)
uuuccuaagaccuaauaaa

SEQ ID NO: 140852 - RNA, 19 nt, Human herpesvirus 4 (Epstein-Barr virus)
uugucacgucacucagcuc

SEQ ID NO: 140853 - RNA, 10 nt, Human herpesvirus 4 (Epstein-Barr virus)
uuguccagga

SEQ ID NO: 140854 - RNA, 20 nt, Human herpesvirus 4 (Epstein-Barr virus)
uugucccugagaugugaauu

SEQ ID NO: 140855 - RNA, 17 nt, Human herpesvirus 4 (Epstein-Barr virus)
uucuuccaauccgaaag

SEQ ID NO: 140856 - RNA, 21 nt, Human herpesvirus 4 (Epstein-Barr virus)
uucuuccuagccuucuuccua

SEQ ID NO: 140857 - RNA, 13 nt, Human herpesvirus 4 (Epstein-Barr virus)
uucuuuagggcau

SEQ ID NO: 140858 - RNA, 18 nt, Human herpesvirus 4 (Epstein-Barr virus)
uucuuuaucuccauccug

SEQ ID NO: 140859 - RNA, 14 nt, Human herpesvirus 4 (Epstein-Barr virus)
uuguuuacaucugc

SEQ ID NO: 140860 - RNA, 19 nt, Human herpesvirus 4 (Epstein-Barr virus)
uuuaaacaugcucuuugau

SEQ ID NO: 140861 - RNA, 22 nt, Human herpesvirus 4 (Epstein-Barr virus)
uugugaacuuuaacauugauga

SEQ ID NO: 140862 - RNA, 21 nt, Human herpesvirus 4 (Epstein-Barr virus)
uugucuccccucugcagagag

SEQ ID NO: 140863 - RNA, 14 nt, Human herpesvirus 4 (Epstein-Barr virus)
uuuauacccaguga

SEQ ID NO: 140864 - RNA, 18 nt, Human herpesvirus 4 (Epstein-Barr virus)
uuuauacccagugaguau

SEQ ID NO: 140865 - RNA, 19 nt, Human herpesvirus 4 (Epstein-Barr virus)
uuuagaaaccuugccuacg

SEQ ID NO: 140866 - RNA, 15 nt, Human herpesvirus 4 (Epstein-Barr virus)
uuuagaaacuaugca

SEQ ID NO: 140867 - RNA, 15 nt, Human herpesvirus 4 (Epstein-Barr virus)
uuuaagcagcacuga

SEQ ID NO: 140868 - RNA, 18 nt, Human herpesvirus 4 (Epstein-Barr virus)
uggagacuacuaagcuaa

SEQ ID NO: 140869 - RNA, 12 nt, Human herpesvirus 4 (Epstein-Barr virus)
uggcccucggug

SEQ ID NO: 140870 - RNA, 21 nt, Human herpesvirus 4 (Epstein-Barr virus)
uggcccugcaaacugacacac

SEQ ID NO: 140871 - RNA, 18 nt, Human herpesvirus 4 (Epstein-Barr virus)
uggccaucugucuuguca

SEQ ID NO: 140872 - RNA, 14 nt, Human herpesvirus 4 (Epstein-Barr virus)
uggccggguuugau

SEQ ID NO: 140873 - RNA, 15 nt, Human herpesvirus 4 (Epstein-Barr virus)
uggccguguucacug

SEQ ID NO: 140874 - RNA, 19 nt, Human herpesvirus 4 (Epstein-Barr virus)
uggccaccuucuccaucuc

SEQ ID NO: 140875 - RNA, 20 nt, Human herpesvirus 4 (Epstein-Barr virus)
uggccaacgcaggcacggcc

SEQ ID NO: 140876 - RNA, 16 nt, Human herpesvirus 4 (Epstein-Barr virus)
uggcauguguacuugu

SEQ ID NO: 140877 - RNA, 19 nt, Human herpesvirus 4 (Epstein-Barr virus)
uggcauuggacgucccuuu

SEQ ID NO: 140878 - RNA, 21 nt, Human herpesvirus 4 (Epstein-Barr virus)
uggcagcagacaaggacaggu

SEQ ID NO: 140879 - RNA, 23 nt, Human herpesvirus 4 (Epstein-Barr virus)
uggcagugauguucugugcagua

SEQ ID NO: 140880 - RNA, 13 nt, Human herpesvirus 4 (Epstein-Barr virus)
uggcaguguccuc

SEQ ID NO: 140881 - RNA, 20 nt, Human herpesvirus 4 (Epstein-Barr virus)
uggcgucaggagacacggcu

SEQ ID NO: 140882 - RNA, 19 nt, Human herpesvirus 4 (Epstein-Barr virus)
uggcgucucaggcuaugaa

SEQ ID NO: 140883 - RNA, 20 nt, Human herpesvirus 4 (Epstein-Barr virus)
uggcgauuuuaaucuggaug

SEQ ID NO: 140884 - RNA, 12 nt, Human herpesvirus 4 (Epstein-Barr virus)
uggcgcggguga

SEQ ID NO: 140885 - RNA, 21 nt, Human herpesvirus 4 (Epstein-Barr virus)
uggccugcguaaucauuaccu

SEQ ID NO: 140886 - RNA, 15 nt, Human herpesvirus 4 (Epstein-Barr virus)
uggcgaaucugacau

SEQ ID NO: 140887 - RNA, 19 nt, Human herpesvirus 4 (Epstein-Barr virus)
ugggaccggggccuuggca

SEQ ID NO: 140888 - RNA, 22 nt, Human herpesvirus 4 (Epstein-Barr virus)
ugggaccggggccuuggcauca

SEQ ID NO: 140889 - RNA, 16 nt, Human herpesvirus 4 (Epstein-Barr virus)
ugggaccuacaggaca

SEQ ID NO: 140890 - RNA, 15 nt, Human herpesvirus 4 (Epstein-Barr virus)
uggcuugggcugugg

SEQ ID NO: 140891 - RNA, 20 nt, Human herpesvirus 4 (Epstein-Barr virus)
uguaguggccuucucugaug

SEQ ID NO: 140892 - RNA, 17 nt, Human herpesvirus 4 (Epstein-Barr virus)
uguaugccuuggcauga

SEQ ID NO: 140893 - RNA, 14 nt, Human herpesvirus 4 (Epstein-Barr virus)
uguauuaccaugga

SEQ ID NO: 140894 - RNA, 19 nt, Human herpesvirus 4 (Epstein-Barr virus)
uguacuucuucucugcucg

SEQ ID NO: 140895 - RNA, 19 nt, Human herpesvirus 4 (Epstein-Barr virus)
uguaacaagaacugggaug

SEQ ID NO: 140896 - RNA, 18 nt, Human herpesvirus 4 (Epstein-Barr virus)
ugggucauuggcaaaaag

SEQ ID NO: 140897 - RNA, 21 nt, Human herpesvirus 4 (Epstein-Barr virus)
ugggcacacuuaacuugacua

SEQ ID NO: 140898 - RNA, 12 nt, Human herpesvirus 4 (Epstein-Barr virus)
uguaaaacuugg

SEQ ID NO: 140899 - RNA, 16 nt, Human herpesvirus 4 (Epstein-Barr virus)
uguaaaauuuacaccu

SEQ ID NO: 140900 - RNA, 18 nt, Human herpesvirus 4 (Epstein-Barr virus)
uguaaaauuuacaccuga

SEQ ID NO: 140901 - RNA, 19 nt, Human herpesvirus 4 (Epstein-Barr virus)
ugguacggugauaacugac

SEQ ID NO: 140902 - RNA, 22 nt, Human herpesvirus 4 (Epstein-Barr virus)
ugguaaguuuucccuuccuuua

SEQ ID NO: 140903 - RNA, 18 nt, Human herpesvirus 4 (Epstein-Barr virus)
ugggugucagaccugaag

SEQ ID NO: 140904 - RNA, 20 nt, Human herpesvirus 4 (Epstein-Barr virus)
uggaaagggcaugugguggc

SEQ ID NO: 140905 - RNA, 15 nt, Human herpesvirus 4 (Epstein-Barr virus)
ugcuuuucuccucag

SEQ ID NO: 140906 - RNA, 21 nt, Human herpesvirus 4 (Epstein-Barr virus)
uggacucuauugguugaucuc

SEQ ID NO: 140907 - RNA, 14 nt, Human herpesvirus 4 (Epstein-Barr virus)
uggaccucaaagaa

SEQ ID NO: 140908 - RNA, 17 nt, Human herpesvirus 4 (Epstein-Barr virus)
uggacgaggacggggaa

SEQ ID NO: 140909 - RNA, 16 nt, Human herpesvirus 4 (Epstein-Barr virus)
uggaacgcuccagcuu

SEQ ID NO: 140910 - RNA, 21 nt, Human herpesvirus 4 (Epstein-Barr virus)
uggaacauuugaggaggcaca

SEQ ID NO: 140911 - RNA, 15 nt, Human herpesvirus 4 (Epstein-Barr virus)
ugcuccagugccucc

SEQ ID NO: 140912 - RNA, 17 nt, Human herpesvirus 4 (Epstein-Barr virus)
ugcucaaggcagucucc

SEQ ID NO: 140913 - RNA, 19 nt, Human herpesvirus 4 (Epstein-Barr virus)
ugcucagguuucugggcau

SEQ ID NO: 140914 - RNA, 23 nt, Human herpesvirus 4 (Epstein-Barr virus)
ugcuauucugagcaccaacacaa

SEQ ID NO: 140915 - RNA, 23 nt, Human herpesvirus 4 (Epstein-Barr virus)
ugcuaugaccaugcccagacuca

SEQ ID NO: 140916 - RNA, 15 nt, Human herpesvirus 4 (Epstein-Barr virus)
ugcuagcgucacuga

SEQ ID NO: 140917 - RNA, 16 nt, Human herpesvirus 4 (Epstein-Barr virus)
ugcuauaaaccagacc

SEQ ID NO: 140918 - RNA, 19 nt, Human herpesvirus 4 (Epstein-Barr virus)
ugcaggacacgugacaugu

SEQ ID NO: 140919 - RNA, 22 nt, Human herpesvirus 4 (Epstein-Barr virus)
ugcaggacacgugacauguccg

SEQ ID NO: 140920 - RNA, 22 nt, Human herpesvirus 4 (Epstein-Barr virus)
ugcaggaccuagaaugugguaa

SEQ ID NO: 140921 - RNA, 14 nt, Human herpesvirus 4 (Epstein-Barr virus)
ugcagcuggcccac

SEQ ID NO: 140922 - RNA, 19 nt, Human herpesvirus 4 (Epstein-Barr virus)
ugacuaagggugaggcuau

SEQ ID NO: 140923 - RNA, 13 nt, Human herpesvirus 4 (Epstein-Barr virus)
ugacggugguggg

SEQ ID NO: 140924 - RNA, 17 nt, Human herpesvirus 4 (Epstein-Barr virus)
ugacuggcagaaaggcu

SEQ ID NO: 140925 - RNA, 21 nt, Human herpesvirus 4 (Epstein-Barr virus)
ugccuggccggcuaucugcuu

SEQ ID NO: 140926 - RNA, 20 nt, Human herpesvirus 4 (Epstein-Barr virus)
ugccuaaacgugauggugcu

SEQ ID NO: 140927 - RNA, 15 nt, Human herpesvirus 4 (Epstein-Barr virus)
ugccgugaaugcacg

SEQ ID NO: 140928 - RNA, 14 nt, Human herpesvirus 4 (Epstein-Barr virus)
ugcaucuuaccccu

SEQ ID NO: 140929 - RNA, 17 nt, Human herpesvirus 4 (Epstein-Barr virus)
ugcauggcagcagacaa

SEQ ID NO: 140930 - RNA, 17 nt, Human herpesvirus 4 (Epstein-Barr virus)
ugccgccgccuccgccg

SEQ ID NO: 140931 - RNA, 11 nt, Human herpesvirus 4 (Epstein-Barr virus)
ugcauuucacc

SEQ ID NO: 140932 - RNA, 14 nt, Human herpesvirus 4 (Epstein-Barr virus)
uucugagcaccaac

SEQ ID NO: 140933 - RNA, 22 nt, Human herpesvirus 4 (Epstein-Barr virus)
uucugagcaccaacacaaccac

SEQ ID NO: 140934 - RNA, 22 nt, Human herpesvirus 4 (Epstein-Barr virus)
uucucagggguguagugggugg

SEQ ID NO: 140935 - RNA, 14 nt, Human herpesvirus 4 (Epstein-Barr virus)
uucuacuaggaaac

SEQ ID NO: 140936 - RNA, 19 nt, Human herpesvirus 4 (Epstein-Barr virus)
uucucccccagaucacggc

SEQ ID NO: 140937 - RNA, 14 nt, Human herpesvirus 4 (Epstein-Barr virus)
uucuccaucuccau

SEQ ID NO: 140938 - RNA, 17 nt, Human herpesvirus 4 (Epstein-Barr virus)
uucuccugauuugcucu

SEQ ID NO: 140939 - RNA, 22 nt, Human herpesvirus 4 (Epstein-Barr virus)
uucucgugcaagcagcaccugu

SEQ ID NO: 140940 - RNA, 21 nt, Human herpesvirus 4 (Epstein-Barr virus)
uucgugagcagggcuucgucc

SEQ ID NO: 140941 - RNA, 16 nt, Human herpesvirus 4 (Epstein-Barr virus)
uucgugcucuucaugu

SEQ ID NO: 140942 - RNA, 15 nt, Human herpesvirus 4 (Epstein-Barr virus)
uucuaccaagacucc

SEQ ID NO: 140943 - RNA, 14 nt, Human herpesvirus 4 (Epstein-Barr virus)
uucgcgaugcuaua

SEQ ID NO: 140944 - RNA, 15 nt, Human herpesvirus 4 (Epstein-Barr virus)
uucgcgaugcuauaa

SEQ ID NO: 140945 - RNA, 15 nt, Human herpesvirus 4 (Epstein-Barr virus)
uuccuauaugcucuc

SEQ ID NO: 140946 - RNA, 14 nt, Human herpesvirus 4 (Epstein-Barr virus)
uuccagacuaugca

SEQ ID NO: 140947 - RNA, 15 nt, Human herpesvirus 4 (Epstein-Barr virus)
uucccacugugccua

SEQ ID NO: 140948 - RNA, 17 nt, Human herpesvirus 4 (Epstein-Barr virus)
uuccccuccccagugau

SEQ ID NO: 140949 - RNA, 18 nt, Human herpesvirus 4 (Epstein-Barr virus)
uuccgucagccaggguga

SEQ ID NO: 140950 - RNA, 18 nt, Human herpesvirus 4 (Epstein-Barr virus)
uucccuguuugcuuuaug

SEQ ID NO: 140951 - RNA, 17 nt, Human herpesvirus 4 (Epstein-Barr virus)
uucccgugcuuuuugcc

SEQ ID NO: 140952 - RNA, 15 nt, Human herpesvirus 4 (Epstein-Barr virus)
uucauguccacugag

SEQ ID NO: 140953 - RNA, 16 nt, Human herpesvirus 4 (Epstein-Barr virus)
uucaguaaaccaguag

SEQ ID NO: 140954 - RNA, 18 nt, Human herpesvirus 4 (Epstein-Barr virus)
uucaggccgguuuugcag

SEQ ID NO: 140955 - RNA, 19 nt, Human herpesvirus 4 (Epstein-Barr virus)
uucaccuugaggugccaca

SEQ ID NO: 140956 - RNA, 20 nt, Human herpesvirus 4 (Epstein-Barr virus)
uucaccuuguuuuagugugg

SEQ ID NO: 140957 - RNA, 17 nt, Human herpesvirus 4 (Epstein-Barr virus)
uuauaugaaaaugugua

SEQ ID NO: 140958 - RNA, 12 nt, Human herpesvirus 4 (Epstein-Barr virus)
uuauccacacca

SEQ ID NO: 140959 - RNA, 19 nt, Human herpesvirus 4 (Epstein-Barr virus)
uuaucaccguaccaugagu

SEQ ID NO: 140960 - RNA, 20 nt, Human herpesvirus 4 (Epstein-Barr virus)
uuauugaugugacuugugau

SEQ ID NO: 140961 - RNA, 16 nt, Human herpesvirus 4 (Epstein-Barr virus)
uuauuggagaugcucu

SEQ ID NO: 140962 - RNA, 22 nt, Human herpesvirus 4 (Epstein-Barr virus)
uuauuaaucagaaauuugcacu

SEQ ID NO: 140963 - RNA, 12 nt, Human herpesvirus 4 (Epstein-Barr virus)
uuaccaccucaa

SEQ ID NO: 140964 - RNA, 12 nt, Human herpesvirus 4 (Epstein-Barr virus)
uuacggugcugg

SEQ ID NO: 140965 - RNA, 13 nt, Human herpesvirus 4 (Epstein-Barr virus)
uuagggaggacac

SEQ ID NO: 140966 - RNA, 13 nt, Human herpesvirus 4 (Epstein-Barr virus)
uuaauaaauaucu

SEQ ID NO: 140967 - RNA, 14 nt, Human herpesvirus 4 (Epstein-Barr virus)
uuaauaaauaucuu

SEQ ID NO: 140968 - RNA, 16 nt, Human herpesvirus 4 (Epstein-Barr virus)
uuaauaaacaauuaca

SEQ ID NO: 140969 - RNA, 21 nt, Human herpesvirus 4 (Epstein-Barr virus)
uuaaaucucagucccaccaca

SEQ ID NO: 140970 - RNA, 16 nt, Human herpesvirus 4 (Epstein-Barr virus)
uuaaauucaccuaaga

SEQ ID NO: 140971 - RNA, 14 nt, Human herpesvirus 4 (Epstein-Barr virus)
uguuuguacuucuu

SEQ ID NO: 140972 - RNA, 18 nt, Human herpesvirus 4 (Epstein-Barr virus)
uguuugcucuauucgcca

SEQ ID NO: 140973 - RNA, 17 nt, Human herpesvirus 4 (Epstein-Barr virus)
uguuucuguacaauggg

SEQ ID NO: 140974 - RNA, 20 nt, Human herpesvirus 4 (Epstein-Barr virus)
uuaaacugaaucuccaccug

SEQ ID NO: 140975 - RNA, 21 nt, Human herpesvirus 4 (Epstein-Barr virus)
ugucagaccugaagacuguug

SEQ ID NO: 140976 - RNA, 23 nt, Human herpesvirus 4 (Epstein-Barr virus)
ugucaccacuaagguuacugcac

SEQ ID NO: 140977 - RNA, 11 nt, Human herpesvirus 4 (Epstein-Barr virus)
ugucacugaga

SEQ ID NO: 140978 - RNA, 20 nt, Human herpesvirus 4 (Epstein-Barr virus)
ugucaacaaagaacuuugac

SEQ ID NO: 140979 - RNA, 20 nt, Human herpesvirus 4 (Epstein-Barr virus)
ugucucaagcuacucaauga

SEQ ID NO: 140980 - RNA, 12 nt, Human herpesvirus 4 (Epstein-Barr virus)
ugucucagaggc

SEQ ID NO: 140981 - RNA, 17 nt, Human herpesvirus 4 (Epstein-Barr virus)
ugucucuaacaguucac

SEQ ID NO: 140982 - RNA, 22 nt, Human herpesvirus 4 (Epstein-Barr virus)
ugucucucuuugagggggccaa

SEQ ID NO: 140983 - RNA, 16 nt, Human herpesvirus 4 (Epstein-Barr virus)
uguuucgugcccucua

SEQ ID NO: 140984 - RNA, 21 nt, Human herpesvirus 4 (Epstein-Barr virus)
uguuucucagagagcauuuca

SEQ ID NO: 140985 - RNA, 12 nt, Human herpesvirus 4 (Epstein-Barr virus)
ucuuguugcuag

SEQ ID NO: 140986 - RNA, 17 nt, Human herpesvirus 4 (Epstein-Barr virus)
ucuugucggacgaggag

SEQ ID NO: 140987 - RNA, 17 nt, Human herpesvirus 4 (Epstein-Barr virus)
ucuuguaaaacuuggag

SEQ ID NO: 140988 - RNA, 11 nt, Human herpesvirus 4 (Epstein-Barr virus)
ucuucuacucg

SEQ ID NO: 140989 - RNA, 16 nt, Human herpesvirus 4 (Epstein-Barr virus)
ucuuggcggacaucau

SEQ ID NO: 140990 - RNA, 13 nt, Human herpesvirus 4 (Epstein-Barr virus)
ugaagacaagguu

SEQ ID NO: 140991 - RNA, 13 nt, Human herpesvirus 4 (Epstein-Barr virus)
ugaacccaggggu

SEQ ID NO: 140992 - RNA, 20 nt, Human herpesvirus 4 (Epstein-Barr virus)
ugaacaucuggcuggggcau

SEQ ID NO: 140993 - RNA, 22 nt, Human herpesvirus 4 (Epstein-Barr virus)
ugaacaucuggcuggggcauua

SEQ ID NO: 140994 - RNA, 21 nt, Human herpesvirus 4 (Epstein-Barr virus)
ugaacgccuacgcagaggcca

SEQ ID NO: 140995 - RNA, 17 nt, Human herpesvirus 4 (Epstein-Barr virus)
ugaacacucauggugug

SEQ ID NO: 140996 - RNA, 18 nt, Human herpesvirus 4 (Epstein-Barr virus)
ugaagauggccucaaagu

SEQ ID NO: 140997 - RNA, 14 nt, Human herpesvirus 4 (Epstein-Barr virus)
ugaagcaacagguc

SEQ ID NO: 140998 - RNA, 10 nt, Human herpesvirus 4 (Epstein-Barr virus)
ugaagccagg

SEQ ID NO: 140999 - RNA, 12 nt, Human herpesvirus 4 (Epstein-Barr virus)
ugacaggcacaa

SEQ ID NO: 141000 - RNA, 16 nt, Human herpesvirus 4 (Epstein-Barr virus)
ugacacugaugagucu

SEQ ID NO: 141001 - RNA, 23 nt, Human herpesvirus 4 (Epstein-Barr virus)
ugacauugcuagucacacccgug

SEQ ID NO: 141002 - RNA, 12 nt, Human herpesvirus 4 (Epstein-Barr virus)
ugacauuucuca

SEQ ID NO: 141003 - RNA, 18 nt, Human herpesvirus 4 (Epstein-Barr virus)
ugacauguccgggugcau

SEQ ID NO: 141004 - RNA, 20 nt, Human herpesvirus 4 (Epstein-Barr virus)
ugacaucggggacgacaucu

SEQ ID NO: 141005 - RNA, 14 nt, Human herpesvirus 4 (Epstein-Barr virus)
ugacaucccaguuc

SEQ ID NO: 141006 - RNA, 23 nt, Human herpesvirus 4 (Epstein-Barr virus)
ugacccucgcgccccaucuuggc

SEQ ID NO: 141007 - RNA, 17 nt, Human herpesvirus 4 (Epstein-Barr virus)
ugacccucuugcacucc

SEQ ID NO: 141008 - RNA, 21 nt, Human herpesvirus 4 (Epstein-Barr virus)
ugaccaguguguacauuccag

SEQ ID NO: 141009 - RNA, 21 nt, Human herpesvirus 4 (Epstein-Barr virus)
ugaccaucacauggggcauua

SEQ ID NO: 141010 - RNA, 20 nt, Human herpesvirus 4 (Epstein-Barr virus)
ugaccuuuuggacauucuuc

SEQ ID NO: 141011 - RNA, 16 nt, Human herpesvirus 4 (Epstein-Barr virus)
ucgcggaccaggguca

SEQ ID NO: 141012 - RNA, 19 nt, Human herpesvirus 4 (Epstein-Barr virus)
ucgcggagagggaugggcu

SEQ ID NO: 141013 - RNA, 19 nt, Human herpesvirus 4 (Epstein-Barr virus)
ucgcguccuuugggaacac

SEQ ID NO: 141014 - RNA, 21 nt, Human herpesvirus 4 (Epstein-Barr virus)
ucgcguccuuugggaacacgg

SEQ ID NO: 141015 - RNA, 22 nt, Human herpesvirus 4 (Epstein-Barr virus)
uccucagaaaacucugcaugga

SEQ ID NO: 141016 - RNA, 23 nt, Human herpesvirus 4 (Epstein-Barr virus)
uccucagucuuugcaauuugccu

SEQ ID NO: 141017 - RNA, 21 nt, Human herpesvirus 4 (Epstein-Barr virus)
ucgcugaaucuaguaugaagg

SEQ ID NO: 141018 - RNA, 17 nt, Human herpesvirus 4 (Epstein-Barr virus)
ucggaaaucuguugacg

SEQ ID NO: 141019 - RNA, 13 nt, Human herpesvirus 4 (Epstein-Barr virus)
uccuagcacaaac

SEQ ID NO: 141020 - RNA, 20 nt, Human herpesvirus 4 (Epstein-Barr virus)
uccuagcacaaaccagucua

SEQ ID NO: 141021 - RNA, 18 nt, Human herpesvirus 4 (Epstein-Barr virus)
uccuaaaaaaugcaacaa

SEQ ID NO: 141022 - RNA, 14 nt, Human herpesvirus 4 (Epstein-Barr virus)
uccuaucacaggga

SEQ ID NO: 141023 - RNA, 20 nt, Human herpesvirus 4 (Epstein-Barr virus)
uccgugagagccuacccaug

SEQ ID NO: 141024 - RNA, 14 nt, Human herpesvirus 4 (Epstein-Barr virus)
uccguccagccacg

SEQ ID NO: 141025 - RNA, 21 nt, Human herpesvirus 4 (Epstein-Barr virus)
uccggcggcaguggaccucaa

SEQ ID NO: 141026 - RNA, 17 nt, Human herpesvirus 4 (Epstein-Barr virus)
ucuacaacaaaacuggu

SEQ ID NO: 141027 - RNA, 16 nt, Human herpesvirus 4 (Epstein-Barr virus)
ucuacaaccccuucca

SEQ ID NO: 141028 - RNA, 22 nt, Human herpesvirus 4 (Epstein-Barr virus)
ucuacaaugccaggggggaccu

SEQ ID NO: 141029 - RNA, 21 nt, Human herpesvirus 4 (Epstein-Barr virus)
ucuacccaacagucuucaggu

SEQ ID NO: 141030 - RNA, 23 nt, Human herpesvirus 4 (Epstein-Barr virus)
ucuaccucuguuccuucugcucc

SEQ ID NO: 141031 - RNA, 14 nt, Human herpesvirus 4 (Epstein-Barr virus)
ucuacguguuccac

SEQ ID NO: 141032 - RNA, 22 nt, Human herpesvirus 4 (Epstein-Barr virus)
ucuacuuuuacccccuggccac

SEQ ID NO: 141033 - RNA, 19 nt, Human herpesvirus 4 (Epstein-Barr virus)
ucgugcaagcagcaccugu

SEQ ID NO: 141034 - RNA, 19 nt, Human herpesvirus 4 (Epstein-Barr virus)
ucguagagaucaggccaaa

SEQ ID NO: 141035 - RNA, 17 nt, Human herpesvirus 4 (Epstein-Barr virus)
ucugagcaccaacacaa

SEQ ID NO: 141036 - RNA, 12 nt, Human herpesvirus 4 (Epstein-Barr virus)
ucugacauuucu

SEQ ID NO: 141037 - RNA, 16 nt, Human herpesvirus 4 (Epstein-Barr virus)
ucugaagcaacagguc

SEQ ID NO: 141038 - RNA, 13 nt, Human herpesvirus 4 (Epstein-Barr virus)
ucucagaugcagu

SEQ ID NO: 141039 - RNA, 22 nt, Human herpesvirus 4 (Epstein-Barr virus)
ucucuuugaagugguugccaug

SEQ ID NO: 141040 - RNA, 16 nt, Human herpesvirus 4 (Epstein-Barr virus)
ucucagcacuuugcca

SEQ ID NO: 141041 - RNA, 18 nt, Human herpesvirus 4 (Epstein-Barr virus)
ucucaaagagggugucaa

SEQ ID NO: 141042 - RNA, 22 nt, Human herpesvirus 4 (Epstein-Barr virus)
ucugucucggccuccuggccag

SEQ ID NO: 141043 - RNA, 20 nt, Human herpesvirus 4 (Epstein-Barr virus)
ucugucucuaacaguucacu

SEQ ID NO: 141044 - RNA, 17 nt, Human herpesvirus 4 (Epstein-Barr virus)
ucuguauaccgaugaga

SEQ ID NO: 141045 - RNA, 23 nt, Human herpesvirus 4 (Epstein-Barr virus)
ucuguauaccgaugagauugcca

SEQ ID NO: 141046 - RNA, 16 nt, Human herpesvirus 4 (Epstein-Barr virus)
ucugcagagagccaca

SEQ ID NO: 141047 - RNA, 24 nt, Human herpesvirus 4 (Epstein-Barr virus)
ucuuccaauccgaaagcacuuuga

SEQ ID NO: 141048 - RNA, 22 nt, Human herpesvirus 4 (Epstein-Barr virus)
ucuucaggggaaucucugccaa

SEQ ID NO: 141049 - RNA, 19 nt, Human herpesvirus 4 (Epstein-Barr virus)
ucuucaggucugacaccca

SEQ ID NO: 141050 - RNA, 13 nt, Human herpesvirus 4 (Epstein-Barr virus)
ucuguggugggcu

SEQ ID NO: 141051 - RNA, 14 nt, Human herpesvirus 4 (Epstein-Barr virus)
ucugugagacaagc

SEQ ID NO: 141052 - RNA, 17 nt, Human herpesvirus 4 (Epstein-Barr virus)
ucauaucggaugccuca

SEQ ID NO: 141053 - RNA, 16 nt, Human herpesvirus 4 (Epstein-Barr virus)
ucauauguaugccuug

SEQ ID NO: 141054 - RNA, 21 nt, Human herpesvirus 4 (Epstein-Barr virus)
ucauauguaugccuuggcaug

SEQ ID NO: 141055 - RNA, 14 nt, Human herpesvirus 4 (Epstein-Barr virus)
ucagucuuugcaau

SEQ ID NO: 141056 - RNA, 20 nt, Human herpesvirus 4 (Epstein-Barr virus)
ucaguggucaccgguggugg

SEQ ID NO: 141057 - RNA, 14 nt, Human herpesvirus 4 (Epstein-Barr virus)
ucaguggaugcauc

SEQ ID NO: 141058 - RNA, 16 nt, Human herpesvirus 4 (Epstein-Barr virus)
ucaguggaugcaucgu

SEQ ID NO: 141059 - RNA, 13 nt, Human herpesvirus 4 (Epstein-Barr virus)
ucauaauggugcc

SEQ ID NO: 141060 - RNA, 19 nt, Human herpesvirus 4 (Epstein-Barr virus)
ucauuuagaaaccuugccu

SEQ ID NO: 141061 - RNA, 15 nt, Human herpesvirus 4 (Epstein-Barr virus)
ucauggccagcuuug

SEQ ID NO: 141062 - RNA, 13 nt, Human herpesvirus 4 (Epstein-Barr virus)
ucauuauugcucu

SEQ ID NO: 141063 - RNA, 17 nt, Human herpesvirus 4 (Epstein-Barr virus)
ucauguuuuuggcaugu

SEQ ID NO: 141064 - RNA, 18 nt, Human herpesvirus 4 (Epstein-Barr virus)
uccaagugcuaugaccau

SEQ ID NO: 141065 - RNA, 19 nt, Human herpesvirus 4 (Epstein-Barr virus)
uccaacgcauccaccauca

SEQ ID NO: 141066 - RNA, 21 nt, Human herpesvirus 4 (Epstein-Barr virus)
uccaacuccggcccacgccau

SEQ ID NO: 141067 - RNA, 23 nt, Human herpesvirus 4 (Epstein-Barr virus)
uccaacgagggcagacaccaccu

SEQ ID NO: 141068 - RNA, 13 nt, Human herpesvirus 4 (Epstein-Barr virus)
uccacggggacac

SEQ ID NO: 141069 - RNA, 20 nt, Human herpesvirus 4 (Epstein-Barr virus)
uccacggccguagcccaguc

SEQ ID NO: 141070 - RNA, 17 nt, Human herpesvirus 4 (Epstein-Barr virus)
uccauguccuguggugu

SEQ ID NO: 141071 - RNA, 17 nt, Human herpesvirus 4 (Epstein-Barr virus)
uccaucuccaucagggc

SEQ ID NO: 141072 - RNA, 13 nt, Human herpesvirus 4 (Epstein-Barr virus)
uccacucccaguc

SEQ ID NO: 141073 - RNA, 15 nt, Human herpesvirus 4 (Epstein-Barr virus)
uccacucccagucca

SEQ ID NO: 141074 - RNA, 16 nt, Human herpesvirus 4 (Epstein-Barr virus)
uccacucccaguccau

SEQ ID NO: 141075 - RNA, 22 nt, Human herpesvirus 4 (Epstein-Barr virus)
uccagaagucggccacagggga

SEQ ID NO: 141076 - RNA, 13 nt, Human herpesvirus 4 (Epstein-Barr virus)
uccagacuaugca

SEQ ID NO: 141077 - RNA, 22 nt, Human herpesvirus 4 (Epstein-Barr virus)
uccagacuaugcauacacugaa

SEQ ID NO: 141078 - RNA, 19 nt, Human herpesvirus 4 (Epstein-Barr virus)
uccagaguucccggcugcu

SEQ ID NO: 141079 - RNA, 23 nt, Human herpesvirus 4 (Epstein-Barr virus)
uccagaugcaccgggaugagcug

SEQ ID NO: 141080 - RNA, 15 nt, Human herpesvirus 4 (Epstein-Barr virus)
ucccaaaccaugaca

SEQ ID NO: 141081 - RNA, 20 nt, Human herpesvirus 4 (Epstein-Barr virus)
uccccugcagaguaauugca

SEQ ID NO: 141082 - RNA, 22 nt, Human herpesvirus 4 (Epstein-Barr virus)
uccccucugcagagagccacau

SEQ ID NO: 141083 - RNA, 11 nt, Human herpesvirus 4 (Epstein-Barr virus)
uccgcccucac

SEQ ID NO: 141084 - RNA, 18 nt, Human herpesvirus 4 (Epstein-Barr virus)
uccgccacccccguccag

SEQ ID NO: 141085 - RNA, 14 nt, Human herpesvirus 4 (Epstein-Barr virus)
uccggaggggacca

SEQ ID NO: 141086 - RNA, 11 nt, Human herpesvirus 4 (Epstein-Barr virus)
uccggucuugc

SEQ ID NO: 141087 - RNA, 15 nt, Human herpesvirus 4 (Epstein-Barr virus)
uccggugccugagac

SEQ ID NO: 141088 - RNA, 19 nt, Human herpesvirus 4 (Epstein-Barr virus)
ucacgaucuucaagagucu

SEQ ID NO: 141089 - RNA, 15 nt, Human herpesvirus 4 (Epstein-Barr virus)
ucacuaaggcagucc

SEQ ID NO: 141090 - RNA, 16 nt, Human herpesvirus 4 (Epstein-Barr virus)
ucacuaaacauugcac

SEQ ID NO: 141091 - RNA, 18 nt, Human herpesvirus 4 (Epstein-Barr virus)
ucacuaaacauugcaccu

SEQ ID NO: 141092 - RNA, 14 nt, Human herpesvirus 4 (Epstein-Barr virus)
ucagagccccaugc

SEQ ID NO: 141093 - RNA, 14 nt, Human herpesvirus 4 (Epstein-Barr virus)
ucaguaaaucuguc

SEQ ID NO: 141094 - RNA, 17 nt, Human herpesvirus 4 (Epstein-Barr virus)
ucagccccaucuuccag

SEQ ID NO: 141095 - RNA, 21 nt, Human herpesvirus 4 (Epstein-Barr virus)
ucagcaacugcguccucuacc

SEQ ID NO: 141096 - RNA, 23 nt, Human herpesvirus 4 (Epstein-Barr virus)
ucagcaacugcguccucuaccug

SEQ ID NO: 141097 - RNA, 20 nt, Human herpesvirus 4 (Epstein-Barr virus)
ucagcaguagcuugggaaca

SEQ ID NO: 141098 - RNA, 16 nt, Human herpesvirus 4 (Epstein-Barr virus)
ucagcacuuugccagc

SEQ ID NO: 141099 - RNA, 13 nt, Human herpesvirus 4 (Epstein-Barr virus)
ucacaagucacau

SEQ ID NO: 141100 - RNA, 16 nt, Human herpesvirus 4 (Epstein-Barr virus)
ucacaagucacaucaa

SEQ ID NO: 141101 - RNA, 23 nt, Human herpesvirus 4 (Epstein-Barr virus)
ucacaccccacggccaugcuauc

SEQ ID NO: 141102 - RNA, 23 nt, Human herpesvirus 4 (Epstein-Barr virus)
ucacaggacauguuuggggaguu

SEQ ID NO: 141103 - RNA, 22 nt, Human herpesvirus 4 (Epstein-Barr virus)
ucacagaggaggcuggugccuu

SEQ ID NO: 141104 - RNA, 18 nt, Human herpesvirus 4 (Epstein-Barr virus)
ucacagguuauuuugccu

SEQ ID NO: 141105 - RNA, 19 nt, Human herpesvirus 4 (Epstein-Barr virus)
ucacagguuauuuugccug

SEQ ID NO: 141106 - RNA, 23 nt, Human herpesvirus 4 (Epstein-Barr virus)
ucacaucaagcagaaaggccaua

SEQ ID NO: 141107 - RNA, 17 nt, Human herpesvirus 4 (Epstein-Barr virus)
ucacaucucagggacaa

SEQ ID NO: 141108 - RNA, 23 nt, Human herpesvirus 4 (Epstein-Barr virus)
ucaaggaaacaaaaccacugacc

SEQ ID NO: 141109 - RNA, 20 nt, Human herpesvirus 4 (Epstein-Barr virus)
ucaaggugucaauaauuuca

SEQ ID NO: 141110 - RNA, 18 nt, Human herpesvirus 4 (Epstein-Barr virus)
uauugcucucguugccaa

SEQ ID NO: 141111 - RNA, 19 nt, Human herpesvirus 4 (Epstein-Barr virus)
uauugcucucguugccaaa

SEQ ID NO: 141112 - RNA, 13 nt, Human herpesvirus 4 (Epstein-Barr virus)
uauugcaucacaa

SEQ ID NO: 141113 - RNA, 20 nt, Human herpesvirus 4 (Epstein-Barr virus)
uauugcaucacaagucacau

SEQ ID NO: 141114 - RNA, 15 nt, Human herpesvirus 4 (Epstein-Barr virus)
uauaaaacccugacc

SEQ ID NO: 141115 - RNA, 12 nt, Human herpesvirus 4 (Epstein-Barr virus)
uauuccagauga

SEQ ID NO: 141116 - RNA, 19 nt, Human herpesvirus 4 (Epstein-Barr virus)
uauucccccgcacuaaaga

SEQ ID NO: 141117 - RNA, 17 nt, Human herpesvirus 4 (Epstein-Barr virus)
gugggugucagaccuga

SEQ ID NO: 141118 - RNA, 20 nt, Human herpesvirus 4 (Epstein-Barr virus)
guggguguccucuacugccu

SEQ ID NO: 141119 - RNA, 21 nt, Human herpesvirus 4 (Epstein-Barr virus)
guggguguccucuacugccuu

SEQ ID NO: 141120 - RNA, 12 nt, Human herpesvirus 4 (Epstein-Barr virus)
gugggguggugu

SEQ ID NO: 141121 - RNA, 13 nt, Human herpesvirus 4 (Epstein-Barr virus)
gugggguggugua

SEQ ID NO: 141122 - RNA, 12 nt, Human herpesvirus 4 (Epstein-Barr virus)
gugggcugacac

SEQ ID NO: 141123 - RNA, 22 nt, Human herpesvirus 4 (Epstein-Barr virus)
gugucuccugacgccaaugcca

SEQ ID NO: 141124 - RNA, 17 nt, Human herpesvirus 4 (Epstein-Barr virus)
gugugcccgggggugga

SEQ ID NO: 141125 - RNA, 18 nt, Human herpesvirus 4 (Epstein-Barr virus)
gugugcuuuccaccggug

SEQ ID NO: 141126 - RNA, 21 nt, Human herpesvirus 4 (Epstein-Barr virus)
gugugcuuuccaccgguggua

SEQ ID NO: 141127 - RNA, 23 nt, Human herpesvirus 4 (Epstein-Barr virus)
guguggaaaaucucgcucagagc

SEQ ID NO: 141128 - RNA, 22 nt, Human herpesvirus 4 (Epstein-Barr virus)
gugucucaagcuacucaaugag

SEQ ID NO: 141129 - RNA, 16 nt, Human herpesvirus 4 (Epstein-Barr virus)
guguguccagugccua

SEQ ID NO: 141130 - RNA, 14 nt, Human herpesvirus 4 (Epstein-Barr virus)
gugugccuccucaa

SEQ ID NO: 141131 - RNA, 16 nt, Human herpesvirus 4 (Epstein-Barr virus)
guguggagacuagcua

SEQ ID NO: 141132 - RNA, 14 nt, Human herpesvirus 4 (Epstein-Barr virus)
guuagugugccucu

SEQ ID NO: 141133 - RNA, 21 nt, Human herpesvirus 4 (Epstein-Barr virus)
guuagugugccucuguuauga

SEQ ID NO: 141134 - RNA, 19 nt, Human herpesvirus 4 (Epstein-Barr virus)
guuacuucuuuugcucuua

SEQ ID NO: 141135 - RNA, 17 nt, Human herpesvirus 4 (Epstein-Barr virus)
gugcuggaugagguuag

SEQ ID NO: 141136 - RNA, 17 nt, Human herpesvirus 4 (Epstein-Barr virus)
gugcuuuccaccggugg

SEQ ID NO: 141137 - RNA, 16 nt, Human herpesvirus 4 (Epstein-Barr virus)
gugcuuugucuuugcc

SEQ ID NO: 141138 - RNA, 14 nt, Human herpesvirus 4 (Epstein-Barr virus)
guggcuuccagaga

SEQ ID NO: 141139 - RNA, 22 nt, Human herpesvirus 4 (Epstein-Barr virus)
gugacacugaugagucugacua

SEQ ID NO: 141140 - RNA, 20 nt, Human herpesvirus 4 (Epstein-Barr virus)
gugaccggacgggucucacg

SEQ ID NO: 141141 - RNA, 15 nt, Human herpesvirus 4 (Epstein-Barr virus)
gugacauguccgggu

SEQ ID NO: 141142 - RNA, 23 nt, Human herpesvirus 4 (Epstein-Barr virus)
gugacauugcuagucacacccgu

SEQ ID NO: 141143 - RNA, 11 nt, Human herpesvirus 4 (Epstein-Barr virus)
gugaccacuga

SEQ ID NO: 141144 - RNA, 18 nt, Human herpesvirus 4 (Epstein-Barr virus)
gugaagucgguguccagg

SEQ ID NO: 141145 - RNA, 13 nt, Human herpesvirus 4 (Epstein-Barr virus)
gugaauauggcug

SEQ ID NO: 141146 - RNA, 17 nt, Human herpesvirus 4 (Epstein-Barr virus)
gucgcugcugcagcuau

SEQ ID NO: 141147 - RNA, 23 nt, Human herpesvirus 4 (Epstein-Barr virus)
gucggcaucggguccuagcacaa

SEQ ID NO: 141148 - RNA, 22 nt, Human herpesvirus 4 (Epstein-Barr virus)
gucuacgaccuugaccacgacu

SEQ ID NO: 141149 - RNA, 18 nt, Human herpesvirus 4 (Epstein-Barr virus)
gucguguucccucaccag

SEQ ID NO: 141150 - RNA, 17 nt, Human herpesvirus 4 (Epstein-Barr virus)
gucucagacaccaacac

SEQ ID NO: 141151 - RNA, 10 nt, Human herpesvirus 4 (Epstein-Barr virus)
gucucagagg

SEQ ID NO: 141152 - RNA, 16 nt, Human herpesvirus 4 (Epstein-Barr virus)
gucucauacaguuugu

SEQ ID NO: 141153 - RNA, 17 nt, Human herpesvirus 4 (Epstein-Barr virus)
gucucgccaucuaccca

SEQ ID NO: 141154 - RNA, 18 nt, Human herpesvirus 4 (Epstein-Barr virus)
gucucuaacaguucacuu

SEQ ID NO: 141155 - RNA, 16 nt, Human herpesvirus 4 (Epstein-Barr virus)
gucucuuucuggccaa

SEQ ID NO: 141156 - RNA, 20 nt, Human herpesvirus 4 (Epstein-Barr virus)
gucucuuucuggccaaccug

SEQ ID NO: 141157 - RNA, 21 nt, Human herpesvirus 4 (Epstein-Barr virus)
gucucuuucuggccaaccugc

SEQ ID NO: 141158 - RNA, 22 nt, Human herpesvirus 4 (Epstein-Barr virus)
guaccagaagagucauacucaa

SEQ ID NO: 141159 - RNA, 16 nt, Human herpesvirus 4 (Epstein-Barr virus)
guacaggaccaugucg

SEQ ID NO: 141160 - RNA, 11 nt, Human herpesvirus 4 (Epstein-Barr virus)
guccuguggug

SEQ ID NO: 141161 - RNA, 15 nt, Human herpesvirus 4 (Epstein-Barr virus)
guccuuguccaggag

SEQ ID NO: 141162 - RNA, 16 nt, Human herpesvirus 4 (Epstein-Barr virus)
guccuuguccaggaga

SEQ ID NO: 141163 - RNA, 20 nt, Human herpesvirus 4 (Epstein-Barr virus)
guccugucucuuuguguucu

SEQ ID NO: 141164 - RNA, 14 nt, Human herpesvirus 4 (Epstein-Barr virus)
guccuagcacaaac

SEQ ID NO: 141165 - RNA, 16 nt, Human herpesvirus 4 (Epstein-Barr virus)
guccuagcacaaacca

SEQ ID NO: 141166 - RNA, 15 nt, Human herpesvirus 4 (Epstein-Barr virus)
guccucuacugccuu

SEQ ID NO: 141167 - RNA, 16 nt, Human herpesvirus 4 (Epstein-Barr virus)
guccucuaucgucuca

SEQ ID NO: 141168 - RNA, 21 nt, Human herpesvirus 4 (Epstein-Barr virus)
gucgaugggcagcuauauuca

SEQ ID NO: 141169 - RNA, 11 nt, Human herpesvirus 4 (Epstein-Barr virus)
uaaauuugcug

SEQ ID NO: 141170 - RNA, 23 nt, Human herpesvirus 4 (Epstein-Barr virus)
uaaaggcgcaguccgccaugacc

SEQ ID NO: 141171 - RNA, 16 nt, Human herpesvirus 4 (Epstein-Barr virus)
uaaagcuugaccagug

SEQ ID NO: 141172 - RNA, 20 nt, Human herpesvirus 4 (Epstein-Barr virus)
uaaagauuugauugagauca

SEQ ID NO: 141173 - RNA, 19 nt, Human herpesvirus 4 (Epstein-Barr virus)
uaaacagggguauguggug

SEQ ID NO: 141174 - RNA, 18 nt, Human herpesvirus 4 (Epstein-Barr virus)
uaaaauuuacaccugacc

SEQ ID NO: 141175 - RNA, 18 nt, Human herpesvirus 4 (Epstein-Barr virus)
uaaaacaagggauaugaa

SEQ ID NO: 141176 - RNA, 20 nt, Human herpesvirus 4 (Epstein-Barr virus)
uaaaacaagggauaugaagg

SEQ ID NO: 141177 - RNA, 13 nt, Human herpesvirus 4 (Epstein-Barr virus)
uaaaaaugugcag

SEQ ID NO: 141178 - RNA, 14 nt, Human herpesvirus 4 (Epstein-Barr virus)
guuuaagcagcacu

SEQ ID NO: 141179 - RNA, 12 nt, Human herpesvirus 4 (Epstein-Barr virus)
guuuaaccugga

SEQ ID NO: 141180 - RNA, 20 nt, Human herpesvirus 4 (Epstein-Barr virus)
guuggagaaaguaaccacau

SEQ ID NO: 141181 - RNA, 15 nt, Human herpesvirus 4 (Epstein-Barr virus)
guuggcauucuacua

SEQ ID NO: 141182 - RNA, 21 nt, Human herpesvirus 4 (Epstein-Barr virus)
guuggcgccgaggcaccccaa

SEQ ID NO: 141183 - RNA, 22 nt, Human herpesvirus 4 (Epstein-Barr virus)
guuguacgugcgugaucaugag

SEQ ID NO: 141184 - RNA, 21 nt, Human herpesvirus 4 (Epstein-Barr virus)
guuaguaccuguccauucaca

SEQ ID NO: 141185 - RNA, 14 nt, Human herpesvirus 4 (Epstein-Barr virus)
guuauaacugccag

SEQ ID NO: 141186 - RNA, 14 nt, Human herpesvirus 4 (Epstein-Barr virus)
guuuucuggacaca

SEQ ID NO: 141187 - RNA, 20 nt, Human herpesvirus 4 (Epstein-Barr virus)
guuuucuggacacaggacua

SEQ ID NO: 141188 - RNA, 12 nt, Human herpesvirus 4 (Epstein-Barr virus)
guuucuguacaa

SEQ ID NO: 141189 - RNA, 19 nt, Human herpesvirus 4 (Epstein-Barr virus)
uaauggccguccucuggac

SEQ ID NO: 141190 - RNA, 18 nt, Human herpesvirus 4 (Epstein-Barr virus)
uaaugauuacgcaggcca

SEQ ID NO: 141191 - RNA, 18 nt, Human herpesvirus 4 (Epstein-Barr virus)
uaaugucuucaauagaca

SEQ ID NO: 141192 - RNA, 15 nt, Human herpesvirus 4 (Epstein-Barr virus)
uaauguaccucauag

SEQ ID NO: 141193 - RNA, 15 nt, Human herpesvirus 4 (Epstein-Barr virus)
uacaccagucccuug

SEQ ID NO: 141194 - RNA, 19 nt, Human herpesvirus 4 (Epstein-Barr virus)
uaaucuggauguauuacca

SEQ ID NO: 141195 - RNA, 18 nt, Human herpesvirus 4 (Epstein-Barr virus)
uaaucucuaaagauuuga

SEQ ID NO: 141196 - RNA, 17 nt, Human herpesvirus 4 (Epstein-Barr virus)
uaaccccuaccucggca

SEQ ID NO: 141197 - RNA, 16 nt, Human herpesvirus 4 (Epstein-Barr virus)
uaaccucaaccacaaa

SEQ ID NO: 141198 - RNA, 15 nt, Human herpesvirus 4 (Epstein-Barr virus)
uaaccuggagucugc

SEQ ID NO: 141199 - RNA, 13 nt, Human herpesvirus 4 (Epstein-Barr virus)
uaaccacauauac

SEQ ID NO: 141200 - RNA, 22 nt, Human herpesvirus 4 (Epstein-Barr virus)
aacaaucuggacucucuguuuc

SEQ ID NO: 141201 - RNA, 16 nt, Human herpesvirus 4 (Epstein-Barr virus)
aacaagcuaccgauga

SEQ ID NO: 141202 - RNA, 21 nt, Human herpesvirus 4 (Epstein-Barr virus)
aacaagcuaccgaugauucug

SEQ ID NO: 141203 - RNA, 23 nt, Human herpesvirus 4 (Epstein-Barr virus)
aacaagcuaccgaugauucuggc

SEQ ID NO: 141204 - RNA, 15 nt, Human herpesvirus 4 (Epstein-Barr virus)
aacaaggccaagaag

SEQ ID NO: 141205 - RNA, 21 nt, Human herpesvirus 4 (Epstein-Barr virus)
uacuaugacaccuaucuguau

SEQ ID NO: 141206 - RNA, 15 nt, Human herpesvirus 4 (Epstein-Barr virus)
uacuaacacgcaaua

SEQ ID NO: 141207 - RNA, 21 nt, Human herpesvirus 4 (Epstein-Barr virus)
uacaccgagcagaaggccaug

SEQ ID NO: 141208 - RNA, 19 nt, Human herpesvirus 4 (Epstein-Barr virus)
uacacucuggggucucagg

SEQ ID NO: 141209 - RNA, 20 nt, Human herpesvirus 4 (Epstein-Barr virus)
uacacucuggggucucaggc

SEQ ID NO: 141210 - RNA, 17 nt, Human herpesvirus 4 (Epstein-Barr virus)
uaccaaagcuaacugua

SEQ ID NO: 141211 - RNA, 15 nt, Human herpesvirus 4 (Epstein-Barr virus)
uaccagagucuauca

SEQ ID NO: 141212 - RNA, 23 nt, Human herpesvirus 4 (Epstein-Barr virus)
uaccagcccuuuuuccaguggca

SEQ ID NO: 141213 - RNA, 20 nt, Human herpesvirus 4 (Epstein-Barr virus)
uacccaaaccaaauguagag

SEQ ID NO: 141214 - RNA, 16 nt, Human herpesvirus 4 (Epstein-Barr virus)
uacccaacagucuuca

SEQ ID NO: 141215 - RNA, 19 nt, Human herpesvirus 4 (Epstein-Barr virus)
uacccaucacacaacaaca

SEQ ID NO: 141216 - RNA, 15 nt, Human herpesvirus 4 (Epstein-Barr virus)
uaccccaaaacuaua

SEQ ID NO: 141217 - RNA, 14 nt, Human herpesvirus 4 (Epstein-Barr virus)
uaccccagugacga

SEQ ID NO: 141218 - RNA, 22 nt, Human herpesvirus 4 (Epstein-Barr virus)
uacuuguccgggcuccaugucc

SEQ ID NO: 141219 - RNA, 13 nt, Human herpesvirus 4 (Epstein-Barr virus)
uacuuguccucau

SEQ ID NO: 141220 - RNA, 21 nt, Human herpesvirus 4 (Epstein-Barr virus)
uagaaaagagagcggcuguga

SEQ ID NO: 141221 - RNA, 21 nt, Human herpesvirus 4 (Epstein-Barr virus)
uagauggcgagacucuugaag

SEQ ID NO: 141222 - RNA, 23 nt, Human herpesvirus 4 (Epstein-Barr virus)
uagccuaauuguguauugcucuc

SEQ ID NO: 141223 - RNA, 18 nt, Human herpesvirus 4 (Epstein-Barr virus)
uagcccagcgucaggaag

SEQ ID NO: 141224 - RNA, 15 nt, Human herpesvirus 4 (Epstein-Barr virus)
uagcagaagacuccu

SEQ ID NO: 141225 - RNA, 22 nt, Human herpesvirus 4 (Epstein-Barr virus)
uagcacgucccaaaccaugaca

SEQ ID NO: 141226 - RNA, 22 nt, Human herpesvirus 4 (Epstein-Barr virus)
uagucaccugcacagaucugac

SEQ ID NO: 141227 - RNA, 18 nt, Human herpesvirus 4 (Epstein-Barr virus)
uaguagcacugguggugg

SEQ ID NO: 141228 - RNA, 18 nt, Human herpesvirus 4 (Epstein-Barr virus)
uaguggccuucucugaug

SEQ ID NO: 141229 - RNA, 14 nt, Human herpesvirus 4 (Epstein-Barr virus)
uaguuaccacaggu

SEQ ID NO: 141230 - RNA, 14 nt, Human herpesvirus 4 (Epstein-Barr virus)
uaguugguccaggg

SEQ ID NO: 141231 - RNA, 15 nt, Human herpesvirus 4 (Epstein-Barr virus)
uagggguaacccugu

SEQ ID NO: 141232 - RNA, 12 nt, Human herpesvirus 4 (Epstein-Barr virus)
uagggaggacac

SEQ ID NO: 141233 - RNA, 16 nt, Human herpesvirus 4 (Epstein-Barr virus)
uaggagacgcccucaa

SEQ ID NO: 141234 - RNA, 19 nt, Human herpesvirus 4 (Epstein-Barr virus)
uagcgacauuuaccuggug

SEQ ID NO: 141235 - RNA, 18 nt, Human herpesvirus 4 (Epstein-Barr virus)
uagcuauuccaccaacac

SEQ ID NO: 141236 - RNA, 16 nt, Human herpesvirus 4 (Epstein-Barr virus)
uagcucuggcacugcu

SEQ ID NO: 141237 - RNA, 18 nt, Human herpesvirus 4 (Epstein-Barr virus)
uagcugucuuuccucuua

SEQ ID NO: 141238 - RNA, 15 nt, Human herpesvirus 4 (Epstein-Barr virus)
uagcuguuugcucua

SEQ ID NO: 141239 - RNA, 17 nt, Human herpesvirus 4 (Epstein-Barr virus)
uagcuugggaacaccgg

SEQ ID NO: 141240 - RNA, 18 nt, Human herpesvirus 4 (Epstein-Barr virus)
uuucuggccaaccugccu

SEQ ID NO: 141241 - RNA, 22 nt, Human herpesvirus 4 (Epstein-Barr virus)
uuucuggcgauuuuaaucugga

SEQ ID NO: 141242 - RNA, 18 nt, Human herpesvirus 4 (Epstein-Barr virus)
uuugccaaccugcucucu

SEQ ID NO: 141243 - RNA, 17 nt, Human herpesvirus 4 (Epstein-Barr virus)
uuugccacauguuuucu

SEQ ID NO: 141244 - RNA, 14 nt, Human herpesvirus 4 (Epstein-Barr virus)
uuugcaauuugccu

SEQ ID NO: 141245 - RNA, 11 nt, Human herpesvirus 4 (Epstein-Barr virus)
uuugaccuguu

SEQ ID NO: 141246 - RNA, 14 nt, Human herpesvirus 4 (Epstein-Barr virus)
uuuccuaagaccua

SEQ ID NO: 141247 - RNA, 20 nt, Human herpesvirus 4 (Epstein-Barr virus)
uuuccuagaaacugugccau

SEQ ID NO: 141248 - RNA, 18 nt, Human herpesvirus 4 (Epstein-Barr virus)
uuuccgucagccagggug

SEQ ID NO: 141249 - RNA, 17 nt, Human herpesvirus 4 (Epstein-Barr virus)
uuucucauaauggugcc

SEQ ID NO: 141250 - RNA, 19 nt, Human herpesvirus 4 (Epstein-Barr virus)
uuucucauaauggugccug

SEQ ID NO: 141251 - RNA, 19 nt, Human herpesvirus 4 (Epstein-Barr virus)
uuuccgaaccuugucuuca

SEQ ID NO: 141252 - RNA, 18 nt, Human herpesvirus 4 (Epstein-Barr virus)
uuucccgacgccaaugcu

SEQ ID NO: 141253 - RNA, 16 nt, Human herpesvirus 4 (Epstein-Barr virus)
uuuccaacccuaacac

SEQ ID NO: 141254 - RNA, 22 nt, Human herpesvirus 4 (Epstein-Barr virus)
uuucaguucuggugaugcuugu

SEQ ID NO: 141255 - RNA, 20 nt, Human herpesvirus 4 (Epstein-Barr virus)
uuucaagagcugaaccagaa

SEQ ID NO: 141256 - RNA, 17 nt, Human herpesvirus 4 (Epstein-Barr virus)
uuuagagacacuaucac

SEQ ID NO: 141257 - RNA, 16 nt, Human herpesvirus 4 (Epstein-Barr virus)
uuuaccagugugccag

SEQ ID NO: 141258 - RNA, 18 nt, Human herpesvirus 4 (Epstein-Barr virus)
uuuaaugugggacuggga

SEQ ID NO: 141259 - RNA, 14 nt, Human herpesvirus 4 (Epstein-Barr virus)
uuguguccuguaug

SEQ ID NO: 141260 - RNA, 19 nt, Human herpesvirus 4 (Epstein-Barr virus)
uuguguccuguaugguauu

SEQ ID NO: 141261 - RNA, 21 nt, Human herpesvirus 4 (Epstein-Barr virus)
uuguugcgagaaaaugagcca

SEQ ID NO: 141262 - RNA, 17 nt, Human herpesvirus 4 (Epstein-Barr virus)
uuguaaagcgacggguc

SEQ ID NO: 141263 - RNA, 17 nt, Human herpesvirus 4 (Epstein-Barr virus)
uugguguauuucuggcc

SEQ ID NO: 141264 - RNA, 20 nt, Human herpesvirus 4 (Epstein-Barr virus)
uugucuacaucccauaccua

SEQ ID NO: 141265 - RNA, 17 nt, Human herpesvirus 4 (Epstein-Barr virus)
uugucuuccacaccauc

SEQ ID NO: 141266 - RNA, 18 nt, Human herpesvirus 4 (Epstein-Barr virus)
uuggacacccacccugca

SEQ ID NO: 141267 - RNA, 21 nt, Human herpesvirus 4 (Epstein-Barr virus)
uuggggagcggggguucucca

SEQ ID NO: 141268 - RNA, 21 nt, Human herpesvirus 4 (Epstein-Barr virus)
uucauaucccuuguuuuacca

SEQ ID NO: 141269 - RNA, 17 nt, Human herpesvirus 4 (Epstein-Barr virus)
uucaggggaaucucugc

SEQ ID NO: 141270 - RNA, 22 nt, Human herpesvirus 4 (Epstein-Barr virus)
uucagguaccccaaaacuauac

SEQ ID NO: 141271 - RNA, 19 nt, Human herpesvirus 4 (Epstein-Barr virus)
uucagccucacugauggua

SEQ ID NO: 141272 - RNA, 22 nt, Human herpesvirus 4 (Epstein-Barr virus)
uucagcaguagcuugggaacac

SEQ ID NO: 141273 - RNA, 16 nt, Human herpesvirus 4 (Epstein-Barr virus)
uucagcaucaauguca

SEQ ID NO: 141274 - RNA, 12 nt, Human herpesvirus 4 (Epstein-Barr virus)
uuauaacugcca

SEQ ID NO: 141275 - RNA, 14 nt, Human herpesvirus 4 (Epstein-Barr virus)
uuauaacugccaga

SEQ ID NO: 141276 - RNA, 21 nt, Human herpesvirus 4 (Epstein-Barr virus)
uucccucauucccccaugaga

SEQ ID NO: 141277 - RNA, 19 nt, Human herpesvirus 4 (Epstein-Barr virus)
uucccuaagcagcugaggg

SEQ ID NO: 141278 - RNA, 19 nt, Human herpesvirus 4 (Epstein-Barr virus)
uuccuagaaacugugccau

SEQ ID NO: 141279 - RNA, 13 nt, Human herpesvirus 4 (Epstein-Barr virus)
uuccuucucaugc

SEQ ID NO: 141280 - RNA, 17 nt, Human herpesvirus 4 (Epstein-Barr virus)
uuccuucucaugcuccu

SEQ ID NO: 141281 - RNA, 15 nt, Human herpesvirus 4 (Epstein-Barr virus)
uugccaaugacccac

SEQ ID NO: 141282 - RNA, 19 nt, Human herpesvirus 4 (Epstein-Barr virus)
uugcugacauauguacaau

SEQ ID NO: 141283 - RNA, 17 nt, Human herpesvirus 4 (Epstein-Barr virus)
uugcucucguugccaaa

SEQ ID NO: 141284 - RNA, 13 nt, Human herpesvirus 4 (Epstein-Barr virus)
uugagaagcagcu

SEQ ID NO: 141285 - RNA, 23 nt, Human herpesvirus 4 (Epstein-Barr virus)
uugcacccaacauagauacuuga

SEQ ID NO: 141286 - RNA, 17 nt, Human herpesvirus 4 (Epstein-Barr virus)
uugaccaguguguacau

SEQ ID NO: 141287 - RNA, 21 nt, Human herpesvirus 4 (Epstein-Barr virus)
uugaccaguguguacauucca

SEQ ID NO: 141288 - RNA, 17 nt, Human herpesvirus 4 (Epstein-Barr virus)
uugacuacaauguuccu

SEQ ID NO: 141289 - RNA, 23 nt, Human herpesvirus 4 (Epstein-Barr virus)
uugaccuugauguacuuuccuag

SEQ ID NO: 141290 - RNA, 18 nt, Human herpesvirus 4 (Epstein-Barr virus)
uugaaagaugucaaacau

SEQ ID NO: 141291 - RNA, 21 nt, Human herpesvirus 4 (Epstein-Barr virus)
uucucguagagaucaggccaa

SEQ ID NO: 141292 - RNA, 17 nt, Human herpesvirus 4 (Epstein-Barr virus)
uucuccucagucuuugc

SEQ ID NO: 141293 - RNA, 15 nt, Human herpesvirus 4 (Epstein-Barr virus)
uucucguccaucucg

SEQ ID NO: 141294 - RNA, 18 nt, Human herpesvirus 4 (Epstein-Barr virus)
uucucuaacuguguccca

SEQ ID NO: 141295 - RNA, 16 nt, Human herpesvirus 4 (Epstein-Barr virus)
uucucagagagcauuu

SEQ ID NO: 141296 - RNA, 16 nt, Human herpesvirus 4 (Epstein-Barr virus)
uucucauaauggugcc

SEQ ID NO: 141297 - RNA, 17 nt, Human herpesvirus 4 (Epstein-Barr virus)
uucucauaauggugccu

SEQ ID NO: 141298 - RNA, 12 nt, Human herpesvirus 4 (Epstein-Barr virus)
uucuccaucucc

SEQ ID NO: 141299 - RNA, 16 nt, Human herpesvirus 4 (Epstein-Barr virus)
uuaaccucaaccacaa

SEQ ID NO: 141300 - RNA, 13 nt, Human herpesvirus 4 (Epstein-Barr virus)
uuacaaacacuac

SEQ ID NO: 141301 - RNA, 12 nt, Human herpesvirus 4 (Epstein-Barr virus)
uuacuggucuuu

SEQ ID NO: 141302 - RNA, 13 nt, Human herpesvirus 4 (Epstein-Barr virus)
uuacugcacagaa

SEQ ID NO: 141303 - RNA, 19 nt, Human herpesvirus 4 (Epstein-Barr virus)
uuacagugguucuccugau

SEQ ID NO: 141304 - RNA, 19 nt, Human herpesvirus 4 (Epstein-Barr virus)
uuaggagacgcccucaauc

SEQ ID NO: 141305 - RNA, 20 nt, Human herpesvirus 4 (Epstein-Barr virus)
uuacuuuuauuucaguucug

SEQ ID NO: 141306 - RNA, 15 nt, Human herpesvirus 4 (Epstein-Barr virus)
uuagggcauccacga

SEQ ID NO: 141307 - RNA, 14 nt, Human herpesvirus 4 (Epstein-Barr virus)
uuagguaucuggau

SEQ ID NO: 141308 - RNA, 16 nt, Human herpesvirus 4 (Epstein-Barr virus)
uuagucaggagguaca

SEQ ID NO: 141309 - RNA, 16 nt, Human herpesvirus 4 (Epstein-Barr virus)
uguucuacuccuggca

SEQ ID NO: 141310 - RNA, 18 nt, Human herpesvirus 4 (Epstein-Barr virus)
uguuccuucucaugcucc

SEQ ID NO: 141311 - RNA, 18 nt, Human herpesvirus 4 (Epstein-Barr virus)
uguucagggccgugcaug

SEQ ID NO: 141312 - RNA, 16 nt, Human herpesvirus 4 (Epstein-Barr virus)
uguucccuaagcagcu

SEQ ID NO: 141313 - RNA, 16 nt, Human herpesvirus 4 (Epstein-Barr virus)
uguuccuauaugcucu

SEQ ID NO: 141314 - RNA, 17 nt, Human herpesvirus 4 (Epstein-Barr virus)
uguuccuauaugcucuc

SEQ ID NO: 141315 - RNA, 23 nt, Human herpesvirus 4 (Epstein-Barr virus)
ugugaugcaauaaauaaaaguac

SEQ ID NO: 141316 - RNA, 18 nt, Human herpesvirus 4 (Epstein-Barr virus)
ugugauucccagaaagaa

SEQ ID NO: 141317 - RNA, 16 nt, Human herpesvirus 4 (Epstein-Barr virus)
ugugccauggugccaa

SEQ ID NO: 141318 - RNA, 19 nt, Human herpesvirus 4 (Epstein-Barr virus)
ugugccucgucuaccucug

SEQ ID NO: 141319 - RNA, 19 nt, Human herpesvirus 4 (Epstein-Barr virus)
uguuuguccagcagggccu

SEQ ID NO: 141320 - RNA, 13 nt, Human herpesvirus 4 (Epstein-Barr virus)
uguuuacaucugc

SEQ ID NO: 141321 - RNA, 13 nt, Human herpesvirus 4 (Epstein-Barr virus)
uguuucuggugag

SEQ ID NO: 141322 - RNA, 21 nt, Human herpesvirus 4 (Epstein-Barr virus)
ugggcgcgugcacauauaccg

SEQ ID NO: 141323 - RNA, 13 nt, Human herpesvirus 4 (Epstein-Barr virus)
ugggccaggucac

SEQ ID NO: 141324 - RNA, 13 nt, Human herpesvirus 4 (Epstein-Barr virus)
ugggcaugcugua

SEQ ID NO: 141325 - RNA, 19 nt, Human herpesvirus 4 (Epstein-Barr virus)
ugggcuaacgggaggaaau

SEQ ID NO: 141326 - RNA, 15 nt, Human herpesvirus 4 (Epstein-Barr virus)
ugggcugacacagac

SEQ ID NO: 141327 - RNA, 13 nt, Human herpesvirus 4 (Epstein-Barr virus)
ugggcugugguaa

SEQ ID NO: 141328 - RNA, 20 nt, Human herpesvirus 4 (Epstein-Barr virus)
ugggcauacccauguuguca

SEQ ID NO: 141329 - RNA, 19 nt, Human herpesvirus 4 (Epstein-Barr virus)
uggcuugcuccaccagcuu

SEQ ID NO: 141330 - RNA, 14 nt, Human herpesvirus 4 (Epstein-Barr virus)
ugggugcauuucac

SEQ ID NO: 141331 - RNA, 13 nt, Human herpesvirus 4 (Epstein-Barr virus)
ugggugaccacug

SEQ ID NO: 141332 - RNA, 18 nt, Human herpesvirus 4 (Epstein-Barr virus)
ugggugaccacugaggga

SEQ ID NO: 141333 - RNA, 20 nt, Human herpesvirus 4 (Epstein-Barr virus)
ugggugcaagaauuggggcu

SEQ ID NO: 141334 - RNA, 14 nt, Human herpesvirus 4 (Epstein-Barr virus)
uggguuauugacau

SEQ ID NO: 141335 - RNA, 15 nt, Human herpesvirus 4 (Epstein-Barr virus)
ugggggacucuucua

SEQ ID NO: 141336 - RNA, 20 nt, Human herpesvirus 4 (Epstein-Barr virus)
uggggggugacgaggaugga

SEQ ID NO: 141337 - RNA, 19 nt, Human herpesvirus 4 (Epstein-Barr virus)
ugggggccuggacuguggu

SEQ ID NO: 141338 - RNA, 13 nt, Human herpesvirus 4 (Epstein-Barr virus)
ugggggugggugc

SEQ ID NO: 141339 - RNA, 13 nt, Human herpesvirus 4 (Epstein-Barr virus)
ugggggugguggg

SEQ ID NO: 141340 - RNA, 13 nt, Human herpesvirus 4 (Epstein-Barr virus)
uggggacaaagag

SEQ ID NO: 141341 - RNA, 15 nt, Human herpesvirus 4 (Epstein-Barr virus)
uggauguacagcuac

SEQ ID NO: 141342 - RNA, 20 nt, Human herpesvirus 4 (Epstein-Barr virus)
uggauuacuggucuuuuaug

SEQ ID NO: 141343 - RNA, 22 nt, Human herpesvirus 4 (Epstein-Barr virus)
uggauucccgacggcaugccua

SEQ ID NO: 141344 - RNA, 18 nt, Human herpesvirus 4 (Epstein-Barr virus)
uggaugcaggaccuagaa

SEQ ID NO: 141345 - RNA, 17 nt, Human herpesvirus 4 (Epstein-Barr virus)
uggaugcaucguaguca

SEQ ID NO: 141346 - RNA, 15 nt, Human herpesvirus 4 (Epstein-Barr virus)
uggcgugguggcauu

SEQ ID NO: 141347 - RNA, 13 nt, Human herpesvirus 4 (Epstein-Barr virus)
uggcgggucaucc

SEQ ID NO: 141348 - RNA, 20 nt, Human herpesvirus 4 (Epstein-Barr virus)
uggcgucgggaaacacagcu

SEQ ID NO: 141349 - RNA, 22 nt, Human herpesvirus 4 (Epstein-Barr virus)
uggcucgccuggagucugagaa

SEQ ID NO: 141350 - RNA, 22 nt, Human herpesvirus 4 (Epstein-Barr virus)
uggcucacgaagcgagacagua

SEQ ID NO: 141351 - RNA, 21 nt, Human herpesvirus 4 (Epstein-Barr virus)
uggcugacggaaaucugcucu

SEQ ID NO: 141352 - RNA, 15 nt, Human herpesvirus 4 (Epstein-Barr virus)
uguccucaccaagga

SEQ ID NO: 141353 - RNA, 19 nt, Human herpesvirus 4 (Epstein-Barr virus)
ugugaucauggaaaccacu

SEQ ID NO: 141354 - RNA, 13 nt, Human herpesvirus 4 (Epstein-Barr virus)
ugugagacaagcc

SEQ ID NO: 141355 - RNA, 13 nt, Human herpesvirus 4 (Epstein-Barr virus)
ugugacuacacca

SEQ ID NO: 141356 - RNA, 18 nt, Human herpesvirus 4 (Epstein-Barr virus)
ugucuacaucccauaccu

SEQ ID NO: 141357 - RNA, 20 nt, Human herpesvirus 4 (Epstein-Barr virus)
uguauuaccauggacaacga

SEQ ID NO: 141358 - RNA, 12 nt, Human herpesvirus 4 (Epstein-Barr virus)
uguauugcucuc

SEQ ID NO: 141359 - RNA, 20 nt, Human herpesvirus 4 (Epstein-Barr virus)
uguauugcucucguugccaa

SEQ ID NO: 141360 - RNA, 22 nt, Human herpesvirus 4 (Epstein-Barr virus)
uguauugcucucguugccaaaa

SEQ ID NO: 141361 - RNA, 14 nt, Human herpesvirus 4 (Epstein-Barr virus)
ugucaauaauuuca

SEQ ID NO: 141362 - RNA, 21 nt, Human herpesvirus 4 (Epstein-Barr virus)
uguccuggccgggcgccugcu

SEQ ID NO: 141363 - RNA, 15 nt, Human herpesvirus 4 (Epstein-Barr virus)
uguccuguaugguau

SEQ ID NO: 141364 - RNA, 13 nt, Human herpesvirus 4 (Epstein-Barr virus)
uguccuguggugu

SEQ ID NO: 141365 - RNA, 21 nt, Human herpesvirus 4 (Epstein-Barr virus)
uguauaccgaugagauugcca

SEQ ID NO: 141366 - RNA, 13 nt, Human herpesvirus 4 (Epstein-Barr virus)
uguaucccaaaua

SEQ ID NO: 141367 - RNA, 17 nt, Human herpesvirus 4 (Epstein-Barr virus)
uguagguguagguaccg

SEQ ID NO: 141368 - RNA, 17 nt, Human herpesvirus 4 (Epstein-Barr virus)
ugguguugcaguaugua

SEQ ID NO: 141369 - RNA, 20 nt, Human herpesvirus 4 (Epstein-Barr virus)
ugguguccucccggggucca

SEQ ID NO: 141370 - RNA, 19 nt, Human herpesvirus 4 (Epstein-Barr virus)
uggugucuguaaucucuaa

SEQ ID NO: 141371 - RNA, 15 nt, Human herpesvirus 4 (Epstein-Barr virus)
uggugccuugcucuc

SEQ ID NO: 141372 - RNA, 17 nt, Human herpesvirus 4 (Epstein-Barr virus)
ugguggguguccucuac

SEQ ID NO: 141373 - RNA, 21 nt, Human herpesvirus 4 (Epstein-Barr virus)
ucacaccccacggccaugcua

SEQ ID NO: 141374 - RNA, 22 nt, Human herpesvirus 4 (Epstein-Barr virus)
ucauauguaugccuuggcauga

SEQ ID NO: 141375 - RNA, 21 nt, Human herpesvirus 4 (Epstein-Barr virus)
ucaugcuccuauggacacuug

SEQ ID NO: 141376 - RNA, 18 nt, Human herpesvirus 4 (Epstein-Barr virus)
ucaugcugaauauugcca

SEQ ID NO: 141377 - RNA, 18 nt, Human herpesvirus 4 (Epstein-Barr virus)
ucaugcagggugcacaga

SEQ ID NO: 141378 - RNA, 21 nt, Human herpesvirus 4 (Epstein-Barr virus)
ucaugcagggugcacagacua

SEQ ID NO: 141379 - RNA, 21 nt, Human herpesvirus 4 (Epstein-Barr virus)
ucauccgccacccccguccag

SEQ ID NO: 141380 - RNA, 23 nt, Human herpesvirus 4 (Epstein-Barr virus)
ucauccugcucauuauugcucuc

SEQ ID NO: 141381 - RNA, 16 nt, Human herpesvirus 4 (Epstein-Barr virus)
ucauguuuuuggcaug

SEQ ID NO: 141382 - RNA, 22 nt, Human herpesvirus 4 (Epstein-Barr virus)
ucauguuuuuggcauguguacu

SEQ ID NO: 141383 - RNA, 16 nt, Human herpesvirus 4 (Epstein-Barr virus)
ucauuagcggccugaa

SEQ ID NO: 141384 - RNA, 14 nt, Human herpesvirus 4 (Epstein-Barr virus)
ucaugguauuccag

SEQ ID NO: 141385 - RNA, 19 nt, Human herpesvirus 4 (Epstein-Barr virus)
ucaugucgagcaugagcuc

SEQ ID NO: 141386 - RNA, 11 nt, Human herpesvirus 4 (Epstein-Barr virus)
uccacaccauc

SEQ ID NO: 141387 - RNA, 22 nt, Human herpesvirus 4 (Epstein-Barr virus)
uccacaccauccacagccccac

SEQ ID NO: 141388 - RNA, 22 nt, Human herpesvirus 4 (Epstein-Barr virus)
uccaauccgaaagcacuuugaa

SEQ ID NO: 141389 - RNA, 13 nt, Human herpesvirus 4 (Epstein-Barr virus)
uccgcaccacaga

SEQ ID NO: 141390 - RNA, 18 nt, Human herpesvirus 4 (Epstein-Barr virus)
uccgcccaggucuugcca

SEQ ID NO: 141391 - RNA, 21 nt, Human herpesvirus 4 (Epstein-Barr virus)
uccgcagccgcugaagccagg

SEQ ID NO: 141392 - RNA, 17 nt, Human herpesvirus 4 (Epstein-Barr virus)
uccgccaggaccuggau

SEQ ID NO: 141393 - RNA, 18 nt, Human herpesvirus 4 (Epstein-Barr virus)
uccggcccacgccauacc

SEQ ID NO: 141394 - RNA, 14 nt, Human herpesvirus 4 (Epstein-Barr virus)
uccggucuugcagg

SEQ ID NO: 141395 - RNA, 15 nt, Human herpesvirus 4 (Epstein-Barr virus)
uccggucuugcaggg

SEQ ID NO: 141396 - RNA, 18 nt, Human herpesvirus 4 (Epstein-Barr virus)
uccggugccugagacaga

SEQ ID NO: 141397 - RNA, 14 nt, Human herpesvirus 4 (Epstein-Barr virus)
uccggagaccccaa

SEQ ID NO: 141398 - RNA, 13 nt, Human herpesvirus 4 (Epstein-Barr virus)
uccguccuugucc

SEQ ID NO: 141399 - RNA, 17 nt, Human herpesvirus 4 (Epstein-Barr virus)
uccguccuuguccagga

SEQ ID NO: 141400 - RNA, 18 nt, Human herpesvirus 4 (Epstein-Barr virus)
uccguccuuguccaggag

SEQ ID NO: 141401 - RNA, 18 nt, Human herpesvirus 4 (Epstein-Barr virus)
uccgugcggcuacaucua

SEQ ID NO: 141402 - RNA, 17 nt, Human herpesvirus 4 (Epstein-Barr virus)
uccuaaaaaaugcaaca

SEQ ID NO: 141403 - RNA, 15 nt, Human herpesvirus 4 (Epstein-Barr virus)
uccucuaccugguca

SEQ ID NO: 141404 - RNA, 16 nt, Human herpesvirus 4 (Epstein-Barr virus)
uccccuccuuggagcu

SEQ ID NO: 141405 - RNA, 21 nt, Human herpesvirus 4 (Epstein-Barr virus)
uccccucugcagagagccaca

SEQ ID NO: 141406 - RNA, 19 nt, Human herpesvirus 4 (Epstein-Barr virus)
uccccaaugauugaggcaa

SEQ ID NO: 141407 - RNA, 13 nt, Human herpesvirus 4 (Epstein-Barr virus)
uccccagcccagc

SEQ ID NO: 141408 - RNA, 18 nt, Human herpesvirus 4 (Epstein-Barr virus)
uccccagugaucaucucg

SEQ ID NO: 141409 - RNA, 14 nt, Human herpesvirus 4 (Epstein-Barr virus)
ucccaccacaaagg

SEQ ID NO: 141410 - RNA, 13 nt, Human herpesvirus 4 (Epstein-Barr virus)
ucccaauucacau

SEQ ID NO: 141411 - RNA, 22 nt, Human herpesvirus 4 (Epstein-Barr virus)
ucccacggaccccccucugaug

SEQ ID NO: 141412 - RNA, 23 nt, Human herpesvirus 4 (Epstein-Barr virus)
ucccacggaccccccucugaugg

SEQ ID NO: 141413 - RNA, 17 nt, Human herpesvirus 4 (Epstein-Barr virus)
ucccacuuuuaccccag

SEQ ID NO: 141414 - RNA, 19 nt, Human herpesvirus 4 (Epstein-Barr virus)
ucccacuuuuaccccaguc

SEQ ID NO: 141415 - RNA, 22 nt, Human herpesvirus 4 (Epstein-Barr virus)
ucccacuuuuaccccaguccca

SEQ ID NO: 141416 - RNA, 14 nt, Human herpesvirus 4 (Epstein-Barr virus)
ucccaacccaaaac

SEQ ID NO: 141417 - RNA, 15 nt, Human herpesvirus 4 (Epstein-Barr virus)
ucccagccccaauuc

SEQ ID NO: 141418 - RNA, 13 nt, Human herpesvirus 4 (Epstein-Barr virus)
ucccaggccucag

SEQ ID NO: 141419 - RNA, 14 nt, Human herpesvirus 4 (Epstein-Barr virus)
ucccagucuaucca

SEQ ID NO: 141420 - RNA, 13 nt, Human herpesvirus 4 (Epstein-Barr virus)
ucgaaacuauggc

SEQ ID NO: 141421 - RNA, 17 nt, Human herpesvirus 4 (Epstein-Barr virus)
ucgacugucauuuacaa

SEQ ID NO: 141422 - RNA, 19 nt, Human herpesvirus 4 (Epstein-Barr virus)
ucgacgcuguuuugcagcu

SEQ ID NO: 141423 - RNA, 14 nt, Human herpesvirus 4 (Epstein-Barr virus)
ucgcggaagagccc

SEQ ID NO: 141424 - RNA, 13 nt, Human herpesvirus 4 (Epstein-Barr virus)
ucgaccagcacgu

SEQ ID NO: 141425 - RNA, 23 nt, Human herpesvirus 4 (Epstein-Barr virus)
ucgguggcagugauguucugugc

SEQ ID NO: 141426 - RNA, 18 nt, Human herpesvirus 4 (Epstein-Barr virus)
ucggugggcgguccucca

SEQ ID NO: 141427 - RNA, 20 nt, Human herpesvirus 4 (Epstein-Barr virus)
ucgucagagagguugcgcug

SEQ ID NO: 141428 - RNA, 14 nt, Human herpesvirus 4 (Epstein-Barr virus)
ucggaucccagauu

SEQ ID NO: 141429 - RNA, 21 nt, Human herpesvirus 4 (Epstein-Barr virus)
ucggcaucggguccuagcaca

SEQ ID NO: 141430 - RNA, 20 nt, Human herpesvirus 4 (Epstein-Barr virus)
ucggcccugcgcuacuauga

SEQ ID NO: 141431 - RNA, 18 nt, Human herpesvirus 4 (Epstein-Barr virus)
ucggcgcugggacugccu

SEQ ID NO: 141432 - RNA, 15 nt, Human herpesvirus 4 (Epstein-Barr virus)
ucgggaaacacagcu

SEQ ID NO: 141433 - RNA, 22 nt, Human herpesvirus 4 (Epstein-Barr virus)
ucgggcaagauggagaggcaaa

SEQ ID NO: 141434 - RNA, 12 nt, Human herpesvirus 4 (Epstein-Barr virus)
ucguugccaaaa

SEQ ID NO: 141435 - RNA, 16 nt, Human herpesvirus 4 (Epstein-Barr virus)
ucuaaugauguccagu

SEQ ID NO: 141436 - RNA, 18 nt, Human herpesvirus 4 (Epstein-Barr virus)
ucuauugguugaucuccu

SEQ ID NO: 141437 - RNA, 19 nt, Human herpesvirus 4 (Epstein-Barr virus)
ucucagacaccaacacaga

SEQ ID NO: 141438 - RNA, 19 nt, Human herpesvirus 4 (Epstein-Barr virus)
ucucaggccucccagucua

SEQ ID NO: 141439 - RNA, 19 nt, Human herpesvirus 4 (Epstein-Barr virus)
ucucagucccaccacaaag

SEQ ID NO: 141440 - RNA, 20 nt, Human herpesvirus 4 (Epstein-Barr virus)
ucucagucccaccacaaagg

SEQ ID NO: 141441 - RNA, 15 nt, Human herpesvirus 4 (Epstein-Barr virus)
ucucauaauggugcc

SEQ ID NO: 141442 - RNA, 15 nt, Human herpesvirus 4 (Epstein-Barr virus)
ucucauacaguuugu

SEQ ID NO: 141443 - RNA, 23 nt, Human herpesvirus 4 (Epstein-Barr virus)
ucugccuggccggcuaucugcuu

SEQ ID NO: 141444 - RNA, 12 nt, Human herpesvirus 4 (Epstein-Barr virus)
ucugccucgggu

SEQ ID NO: 141445 - RNA, 15 nt, Human herpesvirus 4 (Epstein-Barr virus)
ucugauuauagcucu

SEQ ID NO: 141446 - RNA, 17 nt, Human herpesvirus 4 (Epstein-Barr virus)
ucugauuauagcucugg

SEQ ID NO: 141447 - RNA, 14 nt, Human herpesvirus 4 (Epstein-Barr virus)
ucucauucccaagu

SEQ ID NO: 141448 - RNA, 13 nt, Human herpesvirus 4 (Epstein-Barr virus)
ucuccccucugca

SEQ ID NO: 141449 - RNA, 16 nt, Human herpesvirus 4 (Epstein-Barr virus)
ucuccaucagggccag

SEQ ID NO: 141450 - RNA, 15 nt, Human herpesvirus 4 (Epstein-Barr virus)
ucuccacucccaguc

SEQ ID NO: 141451 - RNA, 16 nt, Human herpesvirus 4 (Epstein-Barr virus)
ucuccacucccagucc

SEQ ID NO: 141452 - RNA, 14 nt, Human herpesvirus 4 (Epstein-Barr virus)
ucuccagcaaccaa

SEQ ID NO: 141453 - RNA, 18 nt, Human herpesvirus 4 (Epstein-Barr virus)
ucuccgcuuuaagaccaa

SEQ ID NO: 141454 - RNA, 22 nt, Human herpesvirus 4 (Epstein-Barr virus)
ucuccucagucuuugcaauuug

SEQ ID NO: 141455 - RNA, 19 nt, Human herpesvirus 4 (Epstein-Barr virus)
ucuccugacgccaaugcca

SEQ ID NO: 141456 - RNA, 17 nt, Human herpesvirus 4 (Epstein-Barr virus)
ucuccugauuugcucuu

SEQ ID NO: 141457 - RNA, 13 nt, Human herpesvirus 4 (Epstein-Barr virus)
ucuccugccugcc

SEQ ID NO: 141458 - RNA, 22 nt, Human herpesvirus 4 (Epstein-Barr virus)
ugaccacugagggaguguucca

SEQ ID NO: 141459 - RNA, 16 nt, Human herpesvirus 4 (Epstein-Barr virus)
ugacauuucucauaau

SEQ ID NO: 141460 - RNA, 21 nt, Human herpesvirus 4 (Epstein-Barr virus)
ugacccauaccaggugccuuu

SEQ ID NO: 141461 - RNA, 19 nt, Human herpesvirus 4 (Epstein-Barr virus)
ugaccaguguguacauucc

SEQ ID NO: 141462 - RNA, 20 nt, Human herpesvirus 4 (Epstein-Barr virus)
ugaccaguguguacauucca

SEQ ID NO: 141463 - RNA, 19 nt, Human herpesvirus 4 (Epstein-Barr virus)
ugaccaucacauggggcau

SEQ ID NO: 141464 - RNA, 11 nt, Human herpesvirus 4 (Epstein-Barr virus)
ugaccaugaug

SEQ ID NO: 141465 - RNA, 15 nt, Human herpesvirus 4 (Epstein-Barr virus)
ugaccugacuggcag

SEQ ID NO: 141466 - RNA, 21 nt, Human herpesvirus 4 (Epstein-Barr virus)
ugaccuguugucccugagaug

SEQ ID NO: 141467 - RNA, 12 nt, Human herpesvirus 4 (Epstein-Barr virus)
ugacgaagaccc

SEQ ID NO: 141468 - RNA, 19 nt, Human herpesvirus 4 (Epstein-Barr virus)
ugacgaagacccaucugag

SEQ ID NO: 141469 - RNA, 13 nt, Human herpesvirus 4 (Epstein-Barr virus)
ugaccuugaugua

SEQ ID NO: 141470 - RNA, 20 nt, Human herpesvirus 4 (Epstein-Barr virus)
ugaccuugauguacuuuccu

SEQ ID NO: 141471 - RNA, 22 nt, Human herpesvirus 4 (Epstein-Barr virus)
ugaccuugauguacuuuccuag

SEQ ID NO: 141472 - RNA, 14 nt, Human herpesvirus 4 (Epstein-Barr virus)
ugacgccaaugcca

SEQ ID NO: 141473 - RNA, 14 nt, Human herpesvirus 4 (Epstein-Barr virus)
ugacgaggggccag

SEQ ID NO: 141474 - RNA, 14 nt, Human herpesvirus 4 (Epstein-Barr virus)
ugagggcagugaua

SEQ ID NO: 141475 - RNA, 20 nt, Human herpesvirus 4 (Epstein-Barr virus)
ugagggaguguuccacagua

SEQ ID NO: 141476 - RNA, 22 nt, Human herpesvirus 4 (Epstein-Barr virus)
ugagggaguguuccacaguaau

SEQ ID NO: 141477 - RNA, 23 nt, Human herpesvirus 4 (Epstein-Barr virus)
ugaggcaaaagacuauguucucu

SEQ ID NO: 141478 - RNA, 21 nt, Human herpesvirus 4 (Epstein-Barr virus)
ugacgucaacuuuacuuuuau

SEQ ID NO: 141479 - RNA, 16 nt, Human herpesvirus 4 (Epstein-Barr virus)
ugauaagucaugacaa

SEQ ID NO: 141480 - RNA, 21 nt, Human herpesvirus 4 (Epstein-Barr virus)
ugauaagucaugacaauuuua

SEQ ID NO: 141481 - RNA, 15 nt, Human herpesvirus 4 (Epstein-Barr virus)
ugaguucuacaaugc

SEQ ID NO: 141482 - RNA, 13 nt, Human herpesvirus 4 (Epstein-Barr virus)
ugaggugccacag

SEQ ID NO: 141483 - RNA, 15 nt, Human herpesvirus 4 (Epstein-Barr virus)
ugaggugccacagag

SEQ ID NO: 141484 - RNA, 19 nt, Human herpesvirus 4 (Epstein-Barr virus)
ugaggugggcugacacaga

SEQ ID NO: 141485 - RNA, 18 nt, Human herpesvirus 4 (Epstein-Barr virus)
ugagguggugcuugugaa

SEQ ID NO: 141486 - RNA, 16 nt, Human herpesvirus 4 (Epstein-Barr virus)
ugauucuggccaugaa

SEQ ID NO: 141487 - RNA, 16 nt, Human herpesvirus 4 (Epstein-Barr virus)
ugauacucaccaagau

SEQ ID NO: 141488 - RNA, 18 nt, Human herpesvirus 4 (Epstein-Barr virus)
ugacauucacugggacaa

SEQ ID NO: 141489 - RNA, 22 nt, Human herpesvirus 4 (Epstein-Barr virus)
ugacauucacugggacaacugu

SEQ ID NO: 141490 - RNA, 16 nt, Human herpesvirus 4 (Epstein-Barr virus)
ugaagucgguguccag

SEQ ID NO: 141491 - RNA, 19 nt, Human herpesvirus 4 (Epstein-Barr virus)
ugaaaauguguauucucug

SEQ ID NO: 141492 - RNA, 13 nt, Human herpesvirus 4 (Epstein-Barr virus)
ugaaaaugaugaa

SEQ ID NO: 141493 - RNA, 13 nt, Human herpesvirus 4 (Epstein-Barr virus)
ucuuuugcucuua

SEQ ID NO: 141494 - RNA, 21 nt, Human herpesvirus 4 (Epstein-Barr virus)
ucuuuuguaaucgcagcucua

SEQ ID NO: 141495 - RNA, 16 nt, Human herpesvirus 4 (Epstein-Barr virus)
ucuggaccgugccauc

SEQ ID NO: 141496 - RNA, 18 nt, Human herpesvirus 4 (Epstein-Barr virus)
ucuggaggucuucucuga

SEQ ID NO: 141497 - RNA, 16 nt, Human herpesvirus 4 (Epstein-Barr virus)
ucuggccaugaaucug

SEQ ID NO: 141498 - RNA, 16 nt, Human herpesvirus 4 (Epstein-Barr virus)
ucuggccaaccugccu

SEQ ID NO: 141499 - RNA, 20 nt, Human herpesvirus 4 (Epstein-Barr virus)
ucuggcgauuuuaaucugga

SEQ ID NO: 141500 - RNA, 21 nt, Human herpesvirus 4 (Epstein-Barr virus)
ucuggcgauuuuaaucuggau

SEQ ID NO: 141501 - RNA, 16 nt, Human herpesvirus 4 (Epstein-Barr virus)
ucuggggucucaggcc

SEQ ID NO: 141502 - RNA, 17 nt, Human herpesvirus 4 (Epstein-Barr virus)
ucuuuguggccuuccuc

SEQ ID NO: 141503 - RNA, 18 nt, Human herpesvirus 4 (Epstein-Barr virus)
ugcauggccaggcccgac

SEQ ID NO: 141504 - RNA, 17 nt, Human herpesvirus 4 (Epstein-Barr virus)
ugcauccaacgcuucca

SEQ ID NO: 141505 - RNA, 14 nt, Human herpesvirus 4 (Epstein-Barr virus)
ugcaucacaaguca

SEQ ID NO: 141506 - RNA, 12 nt, Human herpesvirus 4 (Epstein-Barr virus)
ugccauggugcc

SEQ ID NO: 141507 - RNA, 19 nt, Human herpesvirus 4 (Epstein-Barr virus)
ugccauuguuuaccgccau

SEQ ID NO: 141508 - RNA, 15 nt, Human herpesvirus 4 (Epstein-Barr virus)
ugccagacucucuuc

SEQ ID NO: 141509 - RNA, 12 nt, Human herpesvirus 4 (Epstein-Barr virus)
ugccagccucag

SEQ ID NO: 141510 - RNA, 20 nt, Human herpesvirus 4 (Epstein-Barr virus)
ugccagcgccuugaucuucu

SEQ ID NO: 141511 - RNA, 13 nt, Human herpesvirus 4 (Epstein-Barr virus)
ugccaggccuguc

SEQ ID NO: 141512 - RNA, 17 nt, Human herpesvirus 4 (Epstein-Barr virus)
ugccacgugggucucau

SEQ ID NO: 141513 - RNA, 13 nt, Human herpesvirus 4 (Epstein-Barr virus)
ugccacagagcau

SEQ ID NO: 141514 - RNA, 18 nt, Human herpesvirus 4 (Epstein-Barr virus)
ugccacagagcaucagau

SEQ ID NO: 141515 - RNA, 22 nt, Human herpesvirus 4 (Epstein-Barr virus)
ugccaacuuugagcugggcaaa

SEQ ID NO: 141516 - RNA, 15 nt, Human herpesvirus 4 (Epstein-Barr virus)
ugccaauccaugcca

SEQ ID NO: 141517 - RNA, 12 nt, Human herpesvirus 4 (Epstein-Barr virus)
ugccaaccugcu

SEQ ID NO: 141518 - RNA, 19 nt, Human herpesvirus 4 (Epstein-Barr virus)
ugcauuuccugcccuccca

SEQ ID NO: 141519 - RNA, 21 nt, Human herpesvirus 4 (Epstein-Barr virus)
ugcaacagaggauuggcugca

SEQ ID NO: 141520 - RNA, 20 nt, Human herpesvirus 4 (Epstein-Barr virus)
ugcaacaauagaaguggaaa

SEQ ID NO: 141521 - RNA, 20 nt, Human herpesvirus 4 (Epstein-Barr virus)
ugcaggaccuagaauguggu

SEQ ID NO: 141522 - RNA, 13 nt, Human herpesvirus 4 (Epstein-Barr virus)
ugcgagggggccu

SEQ ID NO: 141523 - RNA, 23 nt, Human herpesvirus 4 (Epstein-Barr virus)
ugcgagaaaaugagccaugacua

SEQ ID NO: 141524 - RNA, 15 nt, Human herpesvirus 4 (Epstein-Barr virus)
ugcguaaucauuacc

SEQ ID NO: 141525 - RNA, 21 nt, Human herpesvirus 4 (Epstein-Barr virus)
ugcccucuccagcaaccaaug

SEQ ID NO: 141526 - RNA, 17 nt, Human herpesvirus 4 (Epstein-Barr virus)
ugcccuggaggccucag

SEQ ID NO: 141527 - RNA, 22 nt, Human herpesvirus 4 (Epstein-Barr virus)
ugccggagggacaguaccacaa

SEQ ID NO: 141528 - RNA, 19 nt, Human herpesvirus 4 (Epstein-Barr virus)
ugccgcuccuuugcggcau

SEQ ID NO: 141529 - RNA, 20 nt, Human herpesvirus 4 (Epstein-Barr virus)
ugccuaaucaccguuccuca

SEQ ID NO: 141530 - RNA, 18 nt, Human herpesvirus 4 (Epstein-Barr virus)
ugccuguggccccggcug

SEQ ID NO: 141531 - RNA, 12 nt, Human herpesvirus 4 (Epstein-Barr virus)
ugccuugcucuc

SEQ ID NO: 141532 - RNA, 21 nt, Human herpesvirus 4 (Epstein-Barr virus)
ugccuuuuguacaagcuuuug

SEQ ID NO: 141533 - RNA, 23 nt, Human herpesvirus 4 (Epstein-Barr virus)
ugcgaaacuugggggcaggcuac

SEQ ID NO: 141534 - RNA, 13 nt, Human herpesvirus 4 (Epstein-Barr virus)
ugccuggggaaaa

SEQ ID NO: 141535 - RNA, 23 nt, Human herpesvirus 4 (Epstein-Barr virus)
ugccuggggaaaauguacccauc

SEQ ID NO: 141536 - RNA, 16 nt, Human herpesvirus 4 (Epstein-Barr virus)
ugccucucuuaugccu

SEQ ID NO: 141537 - RNA, 16 nt, Human herpesvirus 4 (Epstein-Barr virus)
ugccucugggugcuga

SEQ ID NO: 141538 - RNA, 17 nt, Human herpesvirus 4 (Epstein-Barr virus)
ugccucugggugcugag

SEQ ID NO: 141539 - RNA, 16 nt, Human herpesvirus 4 (Epstein-Barr virus)
ugccugagacagaggu

SEQ ID NO: 141540 - RNA, 13 nt, Human herpesvirus 4 (Epstein-Barr virus)
acuuuaacauuga

SEQ ID NO: 141541 - RNA, 16 nt, Human herpesvirus 4 (Epstein-Barr virus)
acuuggccuugggggu

SEQ ID NO: 141542 - RNA, 22 nt, Human herpesvirus 4 (Epstein-Barr virus)
acuuguccucuaucgucucaua

SEQ ID NO: 141543 - RNA, 21 nt, Human herpesvirus 4 (Epstein-Barr virus)
acuuuauugacuacaccaguc

SEQ ID NO: 141544 - RNA, 16 nt, Human herpesvirus 4 (Epstein-Barr virus)
acuuauuggagaugcu

SEQ ID NO: 141545 - RNA, 17 nt, Human herpesvirus 4 (Epstein-Barr virus)
acuuauuggagaugcuc

SEQ ID NO: 141546 - RNA, 23 nt, Human herpesvirus 4 (Epstein-Barr virus)
acuuauuggagaugcucuggcga

SEQ ID NO: 141547 - RNA, 21 nt, Human herpesvirus 4 (Epstein-Barr virus)
acugaaucuccaccuguguaa

SEQ ID NO: 141548 - RNA, 18 nt, Human herpesvirus 4 (Epstein-Barr virus)
acugggacaacugucaca

SEQ ID NO: 141549 - RNA, 17 nt, Human herpesvirus 4 (Epstein-Barr virus)
acugggaugaacccugg

SEQ ID NO: 141550 - RNA, 21 nt, Human herpesvirus 4 (Epstein-Barr virus)
acugcacagaacaucacugcc

SEQ ID NO: 141551 - RNA, 23 nt, Human herpesvirus 4 (Epstein-Barr virus)
acugcacagaacaucacugccac

SEQ ID NO: 141552 - RNA, 16 nt, Human herpesvirus 4 (Epstein-Barr virus)
acuguaaucacuggca

SEQ ID NO: 141553 - RNA, 14 nt, Human herpesvirus 4 (Epstein-Barr virus)
acuggucaccagcu

SEQ ID NO: 141554 - RNA, 14 nt, Human herpesvirus 4 (Epstein-Barr virus)
acugucacugugca

SEQ ID NO: 141555 - RNA, 20 nt, Human herpesvirus 4 (Epstein-Barr virus)
acugucacaccagucccaac

SEQ ID NO: 141556 - RNA, 16 nt, Human herpesvirus 4 (Epstein-Barr virus)
acucuggggucucagg

SEQ ID NO: 141557 - RNA, 16 nt, Human herpesvirus 4 (Epstein-Barr virus)
acucuucuauaacccu

SEQ ID NO: 141558 - RNA, 12 nt, Human herpesvirus 4 (Epstein-Barr virus)
acucuugccucg

SEQ ID NO: 141559 - RNA, 20 nt, Human herpesvirus 4 (Epstein-Barr virus)
acucuccacucccaguccau

SEQ ID NO: 141560 - RNA, 20 nt, Human herpesvirus 4 (Epstein-Barr virus)
acucucuguuucuguacaau

SEQ ID NO: 141561 - RNA, 15 nt, Human herpesvirus 4 (Epstein-Barr virus)
acucucuucagugac

SEQ ID NO: 141562 - RNA, 18 nt, Human herpesvirus 4 (Epstein-Barr virus)
acucaucugugagacaag

SEQ ID NO: 141563 - RNA, 19 nt, Human herpesvirus 4 (Epstein-Barr virus)
acucaucugugagacaagc

SEQ ID NO: 141564 - RNA, 17 nt, Human herpesvirus 4 (Epstein-Barr virus)
acucacaggacauguuu

SEQ ID NO: 141565 - RNA, 23 nt, Human herpesvirus 4 (Epstein-Barr virus)
acucaauggcauucagauuucua

SEQ ID NO: 141566 - RNA, 23 nt, Human herpesvirus 4 (Epstein-Barr virus)
acucagcuccgcgcucaacaccu

SEQ ID NO: 141567 - RNA, 16 nt, Human herpesvirus 4 (Epstein-Barr virus)
acguagucguuguuca

SEQ ID NO: 141568 - RNA, 19 nt, Human herpesvirus 4 (Epstein-Barr virus)
acgucaacuuuacuuuuau

SEQ ID NO: 141569 - RNA, 22 nt, Human herpesvirus 4 (Epstein-Barr virus)
acggugccgcuccuuugcggca

SEQ ID NO: 141570 - RNA, 15 nt, Human herpesvirus 4 (Epstein-Barr virus)
acgguuagugugccu

SEQ ID NO: 141571 - RNA, 21 nt, Human herpesvirus 4 (Epstein-Barr virus)
acuauaccaaagcuaacugua

SEQ ID NO: 141572 - RNA, 14 nt, Human herpesvirus 4 (Epstein-Barr virus)
acucaagagaucag

SEQ ID NO: 141573 - RNA, 16 nt, Human herpesvirus 4 (Epstein-Barr virus)
acucaagagaucagca

SEQ ID NO: 141574 - RNA, 18 nt, Human herpesvirus 4 (Epstein-Barr virus)
acuaucacccauggccag

SEQ ID NO: 141575 - RNA, 22 nt, Human herpesvirus 4 (Epstein-Barr virus)
acuagcgccccuauaaccacaa

SEQ ID NO: 141576 - RNA, 17 nt, Human herpesvirus 4 (Epstein-Barr virus)
acuagcuguuugcucua

SEQ ID NO: 141577 - RNA, 17 nt, Human herpesvirus 4 (Epstein-Barr virus)
agaagucggccacaggg

SEQ ID NO: 141578 - RNA, 23 nt, Human herpesvirus 4 (Epstein-Barr virus)
agaagaauguccaaaaggucaaa

SEQ ID NO: 141579 - RNA, 20 nt, Human herpesvirus 4 (Epstein-Barr virus)
agaacugggaugaacccugg

SEQ ID NO: 141580 - RNA, 17 nt, Human herpesvirus 4 (Epstein-Barr virus)
agaaguugguggugggg

SEQ ID NO: 141581 - RNA, 20 nt, Human herpesvirus 4 (Epstein-Barr virus)
agaauacccugcauggccag

SEQ ID NO: 141582 - RNA, 17 nt, Human herpesvirus 4 (Epstein-Barr virus)
agaaguggaaacccuca

SEQ ID NO: 141583 - RNA, 14 nt, Human herpesvirus 4 (Epstein-Barr virus)
agaauguccaaaag

SEQ ID NO: 141584 - RNA, 23 nt, Human herpesvirus 4 (Epstein-Barr virus)
agaauuggggcugggaauggaga

SEQ ID NO: 141585 - RNA, 14 nt, Human herpesvirus 4 (Epstein-Barr virus)
agaaccugcugcua

SEQ ID NO: 141586 - RNA, 20 nt, Human herpesvirus 4 (Epstein-Barr virus)
agaaaugcgccgucauucca

SEQ ID NO: 141587 - RNA, 20 nt, Human herpesvirus 4 (Epstein-Barr virus)
agaaauugggugaccacuga

SEQ ID NO: 141588 - RNA, 20 nt, Human herpesvirus 4 (Epstein-Barr virus)
agaaaggcuggccguguuca

SEQ ID NO: 141589 - RNA, 14 nt, Human herpesvirus 4 (Epstein-Barr virus)
agaaaguaaccaca

SEQ ID NO: 141590 - RNA, 15 nt, Human herpesvirus 4 (Epstein-Barr virus)
agaaaguaaccacau

SEQ ID NO: 141591 - RNA, 22 nt, Human herpesvirus 4 (Epstein-Barr virus)
agacuuggccuuggggguggug

SEQ ID NO: 141592 - RNA, 15 nt, Human herpesvirus 4 (Epstein-Barr virus)
agacuggcaacuccu

SEQ ID NO: 141593 - RNA, 17 nt, Human herpesvirus 4 (Epstein-Barr virus)
agacuggcaacuccucu

SEQ ID NO: 141594 - RNA, 21 nt, Human herpesvirus 4 (Epstein-Barr virus)
agacuucacagagcagcagcu

SEQ ID NO: 141595 - RNA, 22 nt, Human herpesvirus 4 (Epstein-Barr virus)
agaccuauguauaaagucaaua

SEQ ID NO: 141596 - RNA, 14 nt, Human herpesvirus 4 (Epstein-Barr virus)
agacgagcugcgac

SEQ ID NO: 141597 - RNA, 13 nt, Human herpesvirus 4 (Epstein-Barr virus)
agacgagucugac

SEQ ID NO: 141598 - RNA, 17 nt, Human herpesvirus 4 (Epstein-Barr virus)
agacgagucugacuaca

SEQ ID NO: 141599 - RNA, 16 nt, Human herpesvirus 4 (Epstein-Barr virus)
agaccugugugcugua

SEQ ID NO: 141600 - RNA, 21 nt, Human herpesvirus 4 (Epstein-Barr virus)
agacggucccggacuacgugu

SEQ ID NO: 141601 - RNA, 18 nt, Human herpesvirus 4 (Epstein-Barr virus)
agaccucauccugcucau

SEQ ID NO: 141602 - RNA, 13 nt, Human herpesvirus 4 (Epstein-Barr virus)
agacuacuaagcu

SEQ ID NO: 141603 - RNA, 16 nt, Human herpesvirus 4 (Epstein-Barr virus)
agacagucacauugca

SEQ ID NO: 141604 - RNA, 19 nt, Human herpesvirus 4 (Epstein-Barr virus)
agacagucacauugcaucg

SEQ ID NO: 141605 - RNA, 17 nt, Human herpesvirus 4 (Epstein-Barr virus)
agaccacuggcuggauu

SEQ ID NO: 141606 - RNA, 20 nt, Human herpesvirus 4 (Epstein-Barr virus)
agaccccugggcucucagga

SEQ ID NO: 141607 - RNA, 14 nt, Human herpesvirus 4 (Epstein-Barr virus)
agacccggggcccc

SEQ ID NO: 141608 - RNA, 21 nt, Human herpesvirus 4 (Epstein-Barr virus)
agacacggcucugucaguuau

SEQ ID NO: 141609 - RNA, 19 nt, Human herpesvirus 4 (Epstein-Barr virus)
agacacccacggaagcccu

SEQ ID NO: 141610 - RNA, 21 nt, Human herpesvirus 4 (Epstein-Barr virus)
agacacaccuaaauuuagcac

SEQ ID NO: 141611 - RNA, 22 nt, Human herpesvirus 4 (Epstein-Barr virus)
agacaguacucggcuagccuga

SEQ ID NO: 141612 - RNA, 15 nt, Human herpesvirus 4 (Epstein-Barr virus)
acccugcauggccag

SEQ ID NO: 141613 - RNA, 11 nt, Human herpesvirus 4 (Epstein-Barr virus)
acccuguaguc

SEQ ID NO: 141614 - RNA, 18 nt, Human herpesvirus 4 (Epstein-Barr virus)
acccuguagucaccugca

SEQ ID NO: 141615 - RNA, 17 nt, Human herpesvirus 4 (Epstein-Barr virus)
accggagccaccacagc

SEQ ID NO: 141616 - RNA, 19 nt, Human herpesvirus 4 (Epstein-Barr virus)
accgucuacaucaauggaa

SEQ ID NO: 141617 - RNA, 22 nt, Human herpesvirus 4 (Epstein-Barr virus)
accguggagccgggcuucagca

SEQ ID NO: 141618 - RNA, 14 nt, Human herpesvirus 4 (Epstein-Barr virus)
accguaccaugagu

SEQ ID NO: 141619 - RNA, 14 nt, Human herpesvirus 4 (Epstein-Barr virus)
accgucagccacac

SEQ ID NO: 141620 - RNA, 22 nt, Human herpesvirus 4 (Epstein-Barr virus)
accgggggaucgcugaaucuag

SEQ ID NO: 141621 - RNA, 15 nt, Human herpesvirus 4 (Epstein-Barr virus)
acccaugaccaacau

SEQ ID NO: 141622 - RNA, 22 nt, Human herpesvirus 4 (Epstein-Barr virus)
acccauguugucacgucacuca

SEQ ID NO: 141623 - RNA, 13 nt, Human herpesvirus 4 (Epstein-Barr virus)
accccagucccaa

SEQ ID NO: 141624 - RNA, 18 nt, Human herpesvirus 4 (Epstein-Barr virus)
accccagucccaacccaa

SEQ ID NO: 141625 - RNA, 16 nt, Human herpesvirus 4 (Epstein-Barr virus)
acccucauugugcuga

SEQ ID NO: 141626 - RNA, 17 nt, Human herpesvirus 4 (Epstein-Barr virus)
acccucauugugcugaa

SEQ ID NO: 141627 - RNA, 21 nt, Human herpesvirus 4 (Epstein-Barr virus)
acccaaugugcaaaugugguu

SEQ ID NO: 141628 - RNA, 17 nt, Human herpesvirus 4 (Epstein-Barr virus)
acccaacagucuucagg

SEQ ID NO: 141629 - RNA, 16 nt, Human herpesvirus 4 (Epstein-Barr virus)
acccaccuaugccaau

SEQ ID NO: 141630 - RNA, 15 nt, Human herpesvirus 4 (Epstein-Barr virus)
acccacggaagcccu

SEQ ID NO: 141631 - RNA, 20 nt, Human herpesvirus 4 (Epstein-Barr virus)
acccagggguggcaguggau

SEQ ID NO: 141632 - RNA, 14 nt, Human herpesvirus 4 (Epstein-Barr virus)
accaucaaugucac

SEQ ID NO: 141633 - RNA, 22 nt, Human herpesvirus 4 (Epstein-Barr virus)
accauggacaacgacacaguga

SEQ ID NO: 141634 - RNA, 14 nt, Human herpesvirus 4 (Epstein-Barr virus)
accaugagugccau

SEQ ID NO: 141635 - RNA, 14 nt, Human herpesvirus 4 (Epstein-Barr virus)
accaugccaucucu

SEQ ID NO: 141636 - RNA, 15 nt, Human herpesvirus 4 (Epstein-Barr virus)
accaugcucaguggc

SEQ ID NO: 141637 - RNA, 22 nt, Human herpesvirus 4 (Epstein-Barr virus)
accauagcaugucacacauucc

SEQ ID NO: 141638 - RNA, 13 nt, Human herpesvirus 4 (Epstein-Barr virus)
accagugugccag

SEQ ID NO: 141639 - RNA, 14 nt, Human herpesvirus 4 (Epstein-Barr virus)
accagugugccagu

SEQ ID NO: 141640 - RNA, 13 nt, Human herpesvirus 4 (Epstein-Barr virus)
acgcagaggccau

SEQ ID NO: 141641 - RNA, 14 nt, Human herpesvirus 4 (Epstein-Barr virus)
acgcagaggccauc

SEQ ID NO: 141642 - RNA, 15 nt, Human herpesvirus 4 (Epstein-Barr virus)
acgcauccaccauca

SEQ ID NO: 141643 - RNA, 16 nt, Human herpesvirus 4 (Epstein-Barr virus)
acgccaggcucgcuuu

SEQ ID NO: 141644 - RNA, 13 nt, Human herpesvirus 4 (Epstein-Barr virus)
accuugggcauca

SEQ ID NO: 141645 - RNA, 16 nt, Human herpesvirus 4 (Epstein-Barr virus)
accuugggggcaaagc

SEQ ID NO: 141646 - RNA, 19 nt, Human herpesvirus 4 (Epstein-Barr virus)
accugagccugagccacac

SEQ ID NO: 141647 - RNA, 16 nt, Human herpesvirus 4 (Epstein-Barr virus)
accuuggcaguguccu

SEQ ID NO: 141648 - RNA, 22 nt, Human herpesvirus 4 (Epstein-Barr virus)
accuuggccgguggcuguggac

SEQ ID NO: 141649 - RNA, 16 nt, Human herpesvirus 4 (Epstein-Barr virus)
accuugaggugccaca

SEQ ID NO: 141650 - RNA, 12 nt, Human herpesvirus 4 (Epstein-Barr virus)
accuuccacgac

SEQ ID NO: 141651 - RNA, 24 nt, Human herpesvirus 4 (Epstein-Barr virus)
accuaagaaugggagcaaccagcu

SEQ ID NO: 141652 - RNA, 17 nt, Human herpesvirus 4 (Epstein-Barr virus)
accucauagacacaccu

SEQ ID NO: 141653 - RNA, 14 nt, Human herpesvirus 4 (Epstein-Barr virus)
accuccccuguggc

SEQ ID NO: 141654 - RNA, 14 nt, Human herpesvirus 4 (Epstein-Barr virus)
accucccugauaau

SEQ ID NO: 141655 - RNA, 23 nt, Human herpesvirus 4 (Epstein-Barr virus)
accuaaagagagaucuggggcca

SEQ ID NO: 141656 - RNA, 22 nt, Human herpesvirus 4 (Epstein-Barr virus)
accuccuaucacagggacaucu

SEQ ID NO: 141657 - RNA, 20 nt, Human herpesvirus 4 (Epstein-Barr virus)
accucuguuccuucugcucc

SEQ ID NO: 141658 - RNA, 20 nt, Human herpesvirus 4 (Epstein-Barr virus)
accucuuucccauuagcaag

SEQ ID NO: 141659 - RNA, 20 nt, Human herpesvirus 4 (Epstein-Barr virus)
acaugcagacuccagguuau

SEQ ID NO: 141660 - RNA, 21 nt, Human herpesvirus 4 (Epstein-Barr virus)
acaucuggcuggggcauuaac

SEQ ID NO: 141661 - RNA, 16 nt, Human herpesvirus 4 (Epstein-Barr virus)
acauuaaagccuccuc

SEQ ID NO: 141662 - RNA, 21 nt, Human herpesvirus 4 (Epstein-Barr virus)
acauguuuggggaguuagcau

SEQ ID NO: 141663 - RNA, 19 nt, Human herpesvirus 4 (Epstein-Barr virus)
acauguuuucuggacacag

SEQ ID NO: 141664 - RNA, 20 nt, Human herpesvirus 4 (Epstein-Barr virus)
accacucagacucuccgcuu

SEQ ID NO: 141665 - RNA, 20 nt, Human herpesvirus 4 (Epstein-Barr virus)
accacuaagguuacugcaca

SEQ ID NO: 141666 - RNA, 21 nt, Human herpesvirus 4 (Epstein-Barr virus)
accacuaagguuacugcacag

SEQ ID NO: 141667 - RNA, 16 nt, Human herpesvirus 4 (Epstein-Barr virus)
accacgccugcuucac

SEQ ID NO: 141668 - RNA, 16 nt, Human herpesvirus 4 (Epstein-Barr virus)
accaccucccugauaa

SEQ ID NO: 141669 - RNA, 14 nt, Human herpesvirus 4 (Epstein-Barr virus)
accagacauggugu

SEQ ID NO: 141670 - RNA, 15 nt, Human herpesvirus 4 (Epstein-Barr virus)
accagaagagucaua

SEQ ID NO: 141671 - RNA, 17 nt, Human herpesvirus 4 (Epstein-Barr virus)
accagcacgucgucaga

SEQ ID NO: 141672 - RNA, 13 nt, Human herpesvirus 4 (Epstein-Barr virus)
accagcccgggga

SEQ ID NO: 141673 - RNA, 15 nt, Human herpesvirus 4 (Epstein-Barr virus)
accagcuggucauca

SEQ ID NO: 141674 - RNA, 12 nt, Human herpesvirus 4 (Epstein-Barr virus)
accaaacuaaca

SEQ ID NO: 141675 - RNA, 18 nt, Human herpesvirus 4 (Epstein-Barr virus)
accaaagcuaacuguaca

SEQ ID NO: 141676 - RNA, 20 nt, Human herpesvirus 4 (Epstein-Barr virus)
acauuugaggaggcacacaa

SEQ ID NO: 141677 - RNA, 13 nt, Human herpesvirus 4 (Epstein-Barr virus)
acauuuuguucua

SEQ ID NO: 141678 - RNA, 22 nt, Human herpesvirus 4 (Epstein-Barr virus)
aauuuagcacgucccaaaccau

SEQ ID NO: 141679 - RNA, 15 nt, Human herpesvirus 4 (Epstein-Barr virus)
acacgugacaugucc

SEQ ID NO: 141680 - RNA, 21 nt, Human herpesvirus 4 (Epstein-Barr virus)
acacgguuauggcagagcuuu

SEQ ID NO: 141681 - RNA, 18 nt, Human herpesvirus 4 (Epstein-Barr virus)
acagaaauugggugacca

SEQ ID NO: 141682 - RNA, 21 nt, Human herpesvirus 4 (Epstein-Barr virus)
acagaaauugggugaccacug

SEQ ID NO: 141683 - RNA, 22 nt, Human herpesvirus 4 (Epstein-Barr virus)
acagaggaggcuggugccuugg

SEQ ID NO: 141684 - RNA, 17 nt, Human herpesvirus 4 (Epstein-Barr virus)
acagccccacucuugcc

SEQ ID NO: 141685 - RNA, 18 nt, Human herpesvirus 4 (Epstein-Barr virus)
acagccccacucuugccu

SEQ ID NO: 141686 - RNA, 20 nt, Human herpesvirus 4 (Epstein-Barr virus)
acagccgcgguugucaucau

SEQ ID NO: 141687 - RNA, 18 nt, Human herpesvirus 4 (Epstein-Barr virus)
acagcucuggcaguuaua

SEQ ID NO: 141688 - RNA, 20 nt, Human herpesvirus 4 (Epstein-Barr virus)
acagcuucgcaaguuccuca

SEQ ID NO: 141689 - RNA, 15 nt, Human herpesvirus 4 (Epstein-Barr virus)
acaguggguguugcg

SEQ ID NO: 141690 - RNA, 13 nt, Human herpesvirus 4 (Epstein-Barr virus)
acagucuucaggu

SEQ ID NO: 141691 - RNA, 14 nt, Human herpesvirus 4 (Epstein-Barr virus)
acaguuuauugaua

SEQ ID NO: 141692 - RNA, 14 nt, Human herpesvirus 4 (Epstein-Barr virus)
acaggcauugcuaa

SEQ ID NO: 141693 - RNA, 17 nt, Human herpesvirus 4 (Epstein-Barr virus)
auauauuuuccauuuca

SEQ ID NO: 141694 - RNA, 14 nt, Human herpesvirus 4 (Epstein-Barr virus)
auagcucugcacag

SEQ ID NO: 141695 - RNA, 18 nt, Human herpesvirus 4 (Epstein-Barr virus)
auagcucuggcacugcua

SEQ ID NO: 141696 - RNA, 23 nt, Human herpesvirus 4 (Epstein-Barr virus)
auagccucgcgacucgugggaaa

SEQ ID NO: 141697 - RNA, 17 nt, Human herpesvirus 4 (Epstein-Barr virus)
aucaagcagaaaggcca

SEQ ID NO: 141698 - RNA, 17 nt, Human herpesvirus 4 (Epstein-Barr virus)
aucaaccuguauaauga

SEQ ID NO: 141699 - RNA, 17 nt, Human herpesvirus 4 (Epstein-Barr virus)
auagaauuguuaguuua

SEQ ID NO: 141700 - RNA, 14 nt, Human herpesvirus 4 (Epstein-Barr virus)
auacucaucuguga

SEQ ID NO: 141701 - RNA, 16 nt, Human herpesvirus 4 (Epstein-Barr virus)
auacucaucugugaga

SEQ ID NO: 141702 - RNA, 15 nt, Human herpesvirus 4 (Epstein-Barr virus)
auacacccaucugga

SEQ ID NO: 141703 - RNA, 21 nt, Human herpesvirus 4 (Epstein-Barr virus)
auacacccaucuggaguucaa

SEQ ID NO: 141704 - RNA, 12 nt, Human herpesvirus 4 (Epstein-Barr virus)
auaaagcuugac

SEQ ID NO: 141705 - RNA, 13 nt, Human herpesvirus 4 (Epstein-Barr virus)
auaacaagggaag

SEQ ID NO: 141706 - RNA, 23 nt, Human herpesvirus 4 (Epstein-Barr virus)
aucagagccccaugcuuacucaa

SEQ ID NO: 141707 - RNA, 20 nt, Human herpesvirus 4 (Epstein-Barr virus)
aucagcaaccuugggggcaa

SEQ ID NO: 141708 - RNA, 12 nt, Human herpesvirus 4 (Epstein-Barr virus)
aucagggccagg

SEQ ID NO: 141709 - RNA, 13 nt, Human herpesvirus 4 (Epstein-Barr virus)
aucaggacccugg

SEQ ID NO: 141710 - RNA, 14 nt, Human herpesvirus 4 (Epstein-Barr virus)
aucagaaauuugca

SEQ ID NO: 141711 - RNA, 16 nt, Human herpesvirus 4 (Epstein-Barr virus)
aucagaauuagcauca

SEQ ID NO: 141712 - RNA, 18 nt, Human herpesvirus 4 (Epstein-Barr virus)
aucagaaucaaaaucaga

SEQ ID NO: 141713 - RNA, 14 nt, Human herpesvirus 4 (Epstein-Barr virus)
aucauauggugggg

SEQ ID NO: 141714 - RNA, 19 nt, Human herpesvirus 4 (Epstein-Barr virus)
aucaugcagggugcacaga

SEQ ID NO: 141715 - RNA, 20 nt, Human herpesvirus 4 (Epstein-Barr virus)
aucauggccgacgaggcccu

SEQ ID NO: 141716 - RNA, 23 nt, Human herpesvirus 4 (Epstein-Barr virus)
aucauggaaaccacucagacucu

SEQ ID NO: 141717 - RNA, 18 nt, Human herpesvirus 4 (Epstein-Barr virus)
auccggugccugagacag

SEQ ID NO: 141718 - RNA, 17 nt, Human herpesvirus 4 (Epstein-Barr virus)
auccauuaucuuggcac

SEQ ID NO: 141719 - RNA, 18 nt, Human herpesvirus 4 (Epstein-Barr virus)
aucccggcccucuuccgu

SEQ ID NO: 141720 - RNA, 20 nt, Human herpesvirus 4 (Epstein-Barr virus)
auccccaguagacaucaugc

SEQ ID NO: 141721 - RNA, 16 nt, Human herpesvirus 4 (Epstein-Barr virus)
auccaccaucaauguc

SEQ ID NO: 141722 - RNA, 21 nt, Human herpesvirus 4 (Epstein-Barr virus)
aucaugucugacgaggggcca

SEQ ID NO: 141723 - RNA, 21 nt, Human herpesvirus 4 (Epstein-Barr virus)
aucgggcguuggcccauaaaa

SEQ ID NO: 141724 - RNA, 19 nt, Human herpesvirus 4 (Epstein-Barr virus)
aucgucucauacaguuugu

SEQ ID NO: 141725 - RNA, 21 nt, Human herpesvirus 4 (Epstein-Barr virus)
auccuuuauaugaaaaugugu

SEQ ID NO: 141726 - RNA, 17 nt, Human herpesvirus 4 (Epstein-Barr virus)
aucgacacacgagccau

SEQ ID NO: 141727 - RNA, 14 nt, Human herpesvirus 4 (Epstein-Barr virus)
aucuccaccugugu

SEQ ID NO: 141728 - RNA, 21 nt, Human herpesvirus 4 (Epstein-Barr virus)
aucuccaccuguguaaccuca

SEQ ID NO: 141729 - RNA, 22 nt, Human herpesvirus 4 (Epstein-Barr virus)
aucucaagggaggagugcugca

SEQ ID NO: 141730 - RNA, 17 nt, Human herpesvirus 4 (Epstein-Barr virus)
aucucuaaagauuugau

SEQ ID NO: 141731 - RNA, 22 nt, Human herpesvirus 4 (Epstein-Barr virus)
aucucugauuauagcucuggca

SEQ ID NO: 141732 - RNA, 23 nt, Human herpesvirus 4 (Epstein-Barr virus)
aucucugauuauagcucuggcac

SEQ ID NO: 141733 - RNA, 16 nt, Human herpesvirus 4 (Epstein-Barr virus)
aguggagcgaagcuag

SEQ ID NO: 141734 - RNA, 13 nt, Human herpesvirus 4 (Epstein-Barr virus)
aguggaugcaucu

SEQ ID NO: 141735 - RNA, 18 nt, Human herpesvirus 4 (Epstein-Barr virus)
aguggaaacccucaguca

SEQ ID NO: 141736 - RNA, 21 nt, Human herpesvirus 4 (Epstein-Barr virus)
agugcugcagguaaaccuucu

SEQ ID NO: 141737 - RNA, 23 nt, Human herpesvirus 4 (Epstein-Barr virus)
agugcugggagguagauaggugg

SEQ ID NO: 141738 - RNA, 17 nt, Human herpesvirus 4 (Epstein-Barr virus)
agugcuaugaccaugcc

SEQ ID NO: 141739 - RNA, 23 nt, Human herpesvirus 4 (Epstein-Barr virus)
agugacgaagacccaucugaggg

SEQ ID NO: 141740 - RNA, 22 nt, Human herpesvirus 4 (Epstein-Barr virus)
agugagccccacaaacaccagu

SEQ ID NO: 141741 - RNA, 15 nt, Human herpesvirus 4 (Epstein-Barr virus)
agugauuaggagcag

SEQ ID NO: 141742 - RNA, 15 nt, Human herpesvirus 4 (Epstein-Barr virus)
agugcacccaggugg

SEQ ID NO: 141743 - RNA, 21 nt, Human herpesvirus 4 (Epstein-Barr virus)
aguaugaaggcuggcaaagau

SEQ ID NO: 141744 - RNA, 20 nt, Human herpesvirus 4 (Epstein-Barr virus)
aguggucuacccggucgcau

SEQ ID NO: 141745 - RNA, 22 nt, Human herpesvirus 4 (Epstein-Barr virus)
aguucaaccuaauuacauggua

SEQ ID NO: 141746 - RNA, 19 nt, Human herpesvirus 4 (Epstein-Barr virus)
aguugaugaaaggggccga

SEQ ID NO: 141747 - RNA, 13 nt, Human herpesvirus 4 (Epstein-Barr virus)
auaaaaaaccaaa

SEQ ID NO: 141748 - RNA, 19 nt, Human herpesvirus 4 (Epstein-Barr virus)
auaaaaaaccaaacuaaca

SEQ ID NO: 141749 - RNA, 14 nt, Human herpesvirus 4 (Epstein-Barr virus)
aguagaggacaccc

SEQ ID NO: 141750 - RNA, 22 nt, Human herpesvirus 4 (Epstein-Barr virus)
aguaagaugcauacgcugagug

SEQ ID NO: 141751 - RNA, 17 nt, Human herpesvirus 4 (Epstein-Barr virus)
aguaaggccgcugccag

SEQ ID NO: 141752 - RNA, 15 nt, Human herpesvirus 4 (Epstein-Barr virus)
aguaacacagggugg

SEQ ID NO: 141753 - RNA, 15 nt, Human herpesvirus 4 (Epstein-Barr virus)
aggucuucucugaca

SEQ ID NO: 141754 - RNA, 22 nt, Human herpesvirus 4 (Epstein-Barr virus)
aggucgaccaccucaacauauu

SEQ ID NO: 141755 - RNA, 16 nt, Human herpesvirus 4 (Epstein-Barr virus)
agguuugacuucauau

SEQ ID NO: 141756 - RNA, 19 nt, Human herpesvirus 4 (Epstein-Barr virus)
agguaucuggaucuacuua

SEQ ID NO: 141757 - RNA, 15 nt, Human herpesvirus 4 (Epstein-Barr virus)
aggucaaaguucuuu

SEQ ID NO: 141758 - RNA, 14 nt, Human herpesvirus 4 (Epstein-Barr virus)
agguccgugagaac

SEQ ID NO: 141759 - RNA, 19 nt, Human herpesvirus 4 (Epstein-Barr virus)
agggaaaaagguuuagcua

SEQ ID NO: 141760 - RNA, 17 nt, Human herpesvirus 4 (Epstein-Barr virus)
agggaaacgcaaaugcc

SEQ ID NO: 141761 - RNA, 14 nt, Human herpesvirus 4 (Epstein-Barr virus)
agggaggacacugc

SEQ ID NO: 141762 - RNA, 15 nt, Human herpesvirus 4 (Epstein-Barr virus)
agggauugggcuugg

SEQ ID NO: 141763 - RNA, 16 nt, Human herpesvirus 4 (Epstein-Barr virus)
agggcaccgugggaaa

SEQ ID NO: 141764 - RNA, 21 nt, Human herpesvirus 4 (Epstein-Barr virus)
agggcacucgcccacuaaccu

SEQ ID NO: 141765 - RNA, 21 nt, Human herpesvirus 4 (Epstein-Barr virus)
agggccacggcgugccagagg

SEQ ID NO: 141766 - RNA, 15 nt, Human herpesvirus 4 (Epstein-Barr virus)
agggccagagaacug

SEQ ID NO: 141767 - RNA, 13 nt, Human herpesvirus 4 (Epstein-Barr virus)
agggcauguggug

SEQ ID NO: 141768 - RNA, 16 nt, Human herpesvirus 4 (Epstein-Barr virus)
agggcggcgaugaacg

SEQ ID NO: 141769 - RNA, 22 nt, Human herpesvirus 4 (Epstein-Barr virus)
agggccugcggggaaaccaacg

SEQ ID NO: 141770 - RNA, 14 nt, Human herpesvirus 4 (Epstein-Barr virus)
agggcgccagggau

SEQ ID NO: 141771 - RNA, 24 nt, Human herpesvirus 4 (Epstein-Barr virus)
agggcucugaccgacgggcaucuu

SEQ ID NO: 141772 - RNA, 20 nt, Human herpesvirus 4 (Epstein-Barr virus)
agggguauguggugccaugu

SEQ ID NO: 141773 - RNA, 12 nt, Human herpesvirus 4 (Epstein-Barr virus)
agggguggugga

SEQ ID NO: 141774 - RNA, 17 nt, Human herpesvirus 4 (Epstein-Barr virus)
agggucagauuuugcaa

SEQ ID NO: 141775 - RNA, 18 nt, Human herpesvirus 4 (Epstein-Barr virus)
agggucagauuuugcaau

SEQ ID NO: 141776 - RNA, 16 nt, Human herpesvirus 4 (Epstein-Barr virus)
aggggauuccugucca

SEQ ID NO: 141777 - RNA, 18 nt, Human herpesvirus 4 (Epstein-Barr virus)
agggggacaagagcacaa

SEQ ID NO: 141778 - RNA, 23 nt, Human herpesvirus 4 (Epstein-Barr virus)
agggggauccggaggggaccacu

SEQ ID NO: 141779 - RNA, 17 nt, Human herpesvirus 4 (Epstein-Barr virus)
agguacaggaccuggaa

SEQ ID NO: 141780 - RNA, 12 nt, Human herpesvirus 4 (Epstein-Barr virus)
agggugcacaga

SEQ ID NO: 141781 - RNA, 22 nt, Human herpesvirus 4 (Epstein-Barr virus)
aggguugguguccucccggggu

SEQ ID NO: 141782 - RNA, 23 nt, Human herpesvirus 4 (Epstein-Barr virus)
aggcauacagcagcuggauguac

SEQ ID NO: 141783 - RNA, 21 nt, Human herpesvirus 4 (Epstein-Barr virus)
aggcagaggaaggccacaaag

SEQ ID NO: 141784 - RNA, 23 nt, Human herpesvirus 4 (Epstein-Barr virus)
aggcauuuacgguuagugugccu

SEQ ID NO: 141785 - RNA, 16 nt, Human herpesvirus 4 (Epstein-Barr virus)
aggcaguagaggacac

SEQ ID NO: 141786 - RNA, 22 nt, Human herpesvirus 4 (Epstein-Barr virus)
aggcaccggucucguccaucuu

SEQ ID NO: 141787 - RNA, 23 nt, Human herpesvirus 4 (Epstein-Barr virus)
aggaggaccugguggugacauug

SEQ ID NO: 141788 - RNA, 20 nt, Human herpesvirus 4 (Epstein-Barr virus)
aggagcagggcccagugcac

SEQ ID NO: 141789 - RNA, 14 nt, Human herpesvirus 4 (Epstein-Barr virus)
aggcuugccaaaau

SEQ ID NO: 141790 - RNA, 18 nt, Human herpesvirus 4 (Epstein-Barr virus)
aggcuuggaaacacccau

SEQ ID NO: 141791 - RNA, 18 nt, Human herpesvirus 4 (Epstein-Barr virus)
aggcuccuggaucugggg

SEQ ID NO: 141792 - RNA, 14 nt, Human herpesvirus 4 (Epstein-Barr virus)
aggcucugcacagg

SEQ ID NO: 141793 - RNA, 17 nt, Human herpesvirus 4 (Epstein-Barr virus)
aggcucugcacaggagg

SEQ ID NO: 141794 - RNA, 20 nt, Human herpesvirus 4 (Epstein-Barr virus)
aggcuggccguguucacugc

SEQ ID NO: 141795 - RNA, 15 nt, Human herpesvirus 4 (Epstein-Barr virus)
aggcuggugccuugg

SEQ ID NO: 141796 - RNA, 15 nt, Human herpesvirus 4 (Epstein-Barr virus)
aggcuauaugagcua

SEQ ID NO: 141797 - RNA, 16 nt, Human herpesvirus 4 (Epstein-Barr virus)
aggcuacaacaggcug

SEQ ID NO: 141798 - RNA, 15 nt, Human herpesvirus 4 (Epstein-Barr virus)
aggccaacucagacc

SEQ ID NO: 141799 - RNA, 23 nt, Human herpesvirus 4 (Epstein-Barr virus)
agcugccuggugagaaguuggug

SEQ ID NO: 141800 - RNA, 15 nt, Human herpesvirus 4 (Epstein-Barr virus)
agcugagcgugugca

SEQ ID NO: 141801 - RNA, 20 nt, Human herpesvirus 4 (Epstein-Barr virus)
agcugacggugggcaugaca

SEQ ID NO: 141802 - RNA, 14 nt, Human herpesvirus 4 (Epstein-Barr virus)
aggacaugugcaug

SEQ ID NO: 141803 - RNA, 16 nt, Human herpesvirus 4 (Epstein-Barr virus)
aggacgcugcugucca

SEQ ID NO: 141804 - RNA, 21 nt, Human herpesvirus 4 (Epstein-Barr virus)
aggagacacggcucugucagu

SEQ ID NO: 141805 - RNA, 21 nt, Human herpesvirus 4 (Epstein-Barr virus)
aggacucugaaaaugaugaau

SEQ ID NO: 141806 - RNA, 20 nt, Human herpesvirus 4 (Epstein-Barr virus)
aggagauggcgccguuugac

SEQ ID NO: 141807 - RNA, 17 nt, Human herpesvirus 4 (Epstein-Barr virus)
aggagacuggcaacucc

SEQ ID NO: 141808 - RNA, 21 nt, Human herpesvirus 4 (Epstein-Barr virus)
agcuaccgaugauucuggcca

SEQ ID NO: 141809 - RNA, 17 nt, Human herpesvirus 4 (Epstein-Barr virus)
agcuacaccgaucacca

SEQ ID NO: 141810 - RNA, 22 nt, Human herpesvirus 4 (Epstein-Barr virus)
agcuacacucuggggucucagg

SEQ ID NO: 141811 - RNA, 15 nt, Human herpesvirus 4 (Epstein-Barr virus)
agcucuaacuuggca

SEQ ID NO: 141812 - RNA, 14 nt, Human herpesvirus 4 (Epstein-Barr virus)
agcucuggcacugc

SEQ ID NO: 141813 - RNA, 14 nt, Human herpesvirus 4 (Epstein-Barr virus)
agcucuuggucaag

SEQ ID NO: 141814 - RNA, 14 nt, Human herpesvirus 4 (Epstein-Barr virus)
agcuccgcccucac

SEQ ID NO: 141815 - RNA, 22 nt, Human herpesvirus 4 (Epstein-Barr virus)
agcuauuugaucuuugacugac

SEQ ID NO: 141816 - RNA, 17 nt, Human herpesvirus 4 (Epstein-Barr virus)
agcucacuuucagugga

SEQ ID NO: 141817 - RNA, 20 nt, Human herpesvirus 4 (Epstein-Barr virus)
agcucacuuucaguggaugc

SEQ ID NO: 141818 - RNA, 16 nt, Human herpesvirus 4 (Epstein-Barr virus)
agcgaagaacacucca

SEQ ID NO: 141819 - RNA, 16 nt, Human herpesvirus 4 (Epstein-Barr virus)
agcgaggauaaucugg

SEQ ID NO: 141820 - RNA, 15 nt, Human herpesvirus 4 (Epstein-Barr virus)
agccccaucuuccag

SEQ ID NO: 141821 - RNA, 17 nt, Human herpesvirus 4 (Epstein-Barr virus)
agccccaauucuugcac

SEQ ID NO: 141822 - RNA, 17 nt, Human herpesvirus 4 (Epstein-Barr virus)
agcccuuuuuccagugg

SEQ ID NO: 141823 - RNA, 15 nt, Human herpesvirus 4 (Epstein-Barr virus)
agaguaauugcagug

SEQ ID NO: 141824 - RNA, 22 nt, Human herpesvirus 4 (Epstein-Barr virus)
agaggugcucaaggcagucucc

SEQ ID NO: 141825 - RNA, 23 nt, Human herpesvirus 4 (Epstein-Barr virus)
agaggugcucaaggcagucucca

SEQ ID NO: 141826 - RNA, 16 nt, Human herpesvirus 4 (Epstein-Barr virus)
agcccagcccuccgca

SEQ ID NO: 141827 - RNA, 22 nt, Human herpesvirus 4 (Epstein-Barr virus)
agcccagcccuccgcagccgcu

SEQ ID NO: 141828 - RNA, 21 nt, Human herpesvirus 4 (Epstein-Barr virus)
agcccauucucguccaucucg

SEQ ID NO: 141829 - RNA, 22 nt, Human herpesvirus 4 (Epstein-Barr virus)
agaggcccgggggccuuguccg

SEQ ID NO: 141830 - RNA, 15 nt, Human herpesvirus 4 (Epstein-Barr virus)
agaggauggcacggu

SEQ ID NO: 141831 - RNA, 15 nt, Human herpesvirus 4 (Epstein-Barr virus)
agaggccugcaccag

SEQ ID NO: 141832 - RNA, 17 nt, Human herpesvirus 4 (Epstein-Barr virus)
cacggccaugcuaucuu

SEQ ID NO: 141833 - RNA, 14 nt, Human herpesvirus 4 (Epstein-Barr virus)
cacgcgaagggaaa

SEQ ID NO: 141834 - RNA, 17 nt, Human herpesvirus 4 (Epstein-Barr virus)
cacgucuuuaccaccuc

SEQ ID NO: 141835 - RNA, 12 nt, Human herpesvirus 4 (Epstein-Barr virus)
cacuacaccccu

SEQ ID NO: 141836 - RNA, 18 nt, Human herpesvirus 4 (Epstein-Barr virus)
cacuaagguuacugcaca

SEQ ID NO: 141837 - RNA, 21 nt, Human herpesvirus 4 (Epstein-Barr virus)
cacuagaauacccugcauggc

SEQ ID NO: 141838 - RNA, 23 nt, Human herpesvirus 4 (Epstein-Barr virus)
cacggggccgugcaccugccauc

SEQ ID NO: 141839 - RNA, 16 nt, Human herpesvirus 4 (Epstein-Barr virus)
cacgacauugaucacu

SEQ ID NO: 141840 - RNA, 16 nt, Human herpesvirus 4 (Epstein-Barr virus)
caccuuuuaauucucu

SEQ ID NO: 141841 - RNA, 14 nt, Human herpesvirus 4 (Epstein-Barr virus)
caccucgggcucaa

SEQ ID NO: 141842 - RNA, 17 nt, Human herpesvirus 4 (Epstein-Barr virus)
caccugcacagaucuga

SEQ ID NO: 141843 - RNA, 16 nt, Human herpesvirus 4 (Epstein-Barr virus)
caccuggguacccaaa

SEQ ID NO: 141844 - RNA, 16 nt, Human herpesvirus 4 (Epstein-Barr virus)
caccuucuccaucucc

SEQ ID NO: 141845 - RNA, 21 nt, Human herpesvirus 4 (Epstein-Barr virus)
caccuugacuguaaucacugg

SEQ ID NO: 141846 - RNA, 23 nt, Human herpesvirus 4 (Epstein-Barr virus)
caccuugacuguaaucacuggca

SEQ ID NO: 141847 - RNA, 22 nt, Human herpesvirus 4 (Epstein-Barr virus)
caccuugaggugccacagagca

SEQ ID NO: 141848 - RNA, 13 nt, Human herpesvirus 4 (Epstein-Barr virus)
caccgaugagaca

SEQ ID NO: 141849 - RNA, 14 nt, Human herpesvirus 4 (Epstein-Barr virus)
caccgcggcaaaaa

SEQ ID NO: 141850 - RNA, 22 nt, Human herpesvirus 4 (Epstein-Barr virus)
cacccuggccgugcuggaugag

SEQ ID NO: 141851 - RNA, 15 nt, Human herpesvirus 4 (Epstein-Barr virus)
caccgucagccacac

SEQ ID NO: 141852 - RNA, 23 nt, Human herpesvirus 4 (Epstein-Barr virus)
caccgggaacgcccaguaugcag

SEQ ID NO: 141853 - RNA, 14 nt, Human herpesvirus 4 (Epstein-Barr virus)
caccucaacauauu

SEQ ID NO: 141854 - RNA, 22 nt, Human herpesvirus 4 (Epstein-Barr virus)
caccucccugauaaugucuuca

SEQ ID NO: 141855 - RNA, 16 nt, Human herpesvirus 4 (Epstein-Barr virus)
cacucacgggacgcag

SEQ ID NO: 141856 - RNA, 13 nt, Human herpesvirus 4 (Epstein-Barr virus)
cacuauauucucc

SEQ ID NO: 141857 - RNA, 15 nt, Human herpesvirus 4 (Epstein-Barr virus)
cacuaucacguguaa

SEQ ID NO: 141858 - RNA, 14 nt, Human herpesvirus 4 (Epstein-Barr virus)
cacuccaagugcaa

SEQ ID NO: 141859 - RNA, 12 nt, Human herpesvirus 4 (Epstein-Barr virus)
cacuccacagau

SEQ ID NO: 141860 - RNA, 23 nt, Human herpesvirus 4 (Epstein-Barr virus)
cacugauuuugggcacacuuaac

SEQ ID NO: 141861 - RNA, 14 nt, Human herpesvirus 4 (Epstein-Barr virus)
cacucuuguugcua

SEQ ID NO: 141862 - RNA, 13 nt, Human herpesvirus 4 (Epstein-Barr virus)
cacuggagugggu

SEQ ID NO: 141863 - RNA, 21 nt, Human herpesvirus 4 (Epstein-Barr virus)
cacuggagugggucauuggca

SEQ ID NO: 141864 - RNA, 16 nt, Human herpesvirus 4 (Epstein-Barr virus)
cacuggcaaagggcau

SEQ ID NO: 141865 - RNA, 12 nt, Human herpesvirus 4 (Epstein-Barr virus)
cacugguggugg

SEQ ID NO: 141866 - RNA, 13 nt, Human herpesvirus 4 (Epstein-Barr virus)
cagaaauuugcac

SEQ ID NO: 141867 - RNA, 13 nt, Human herpesvirus 4 (Epstein-Barr virus)
cagagagccacau

SEQ ID NO: 141868 - RNA, 23 nt, Human herpesvirus 4 (Epstein-Barr virus)
cagagaggcccacugcaguacua

SEQ ID NO: 141869 - RNA, 13 nt, Human herpesvirus 4 (Epstein-Barr virus)
cagaugugccugg

SEQ ID NO: 141870 - RNA, 20 nt, Human herpesvirus 4 (Epstein-Barr virus)
cagaggacuaauguucucua

SEQ ID NO: 141871 - RNA, 22 nt, Human herpesvirus 4 (Epstein-Barr virus)
cagaggacuaauguucucuaac

SEQ ID NO: 141872 - RNA, 19 nt, Human herpesvirus 4 (Epstein-Barr virus)
cagaaaggccauaaucucu

SEQ ID NO: 141873 - RNA, 21 nt, Human herpesvirus 4 (Epstein-Barr virus)
caaggccggaggcagacaccc

SEQ ID NO: 141874 - RNA, 23 nt, Human herpesvirus 4 (Epstein-Barr virus)
caaggaaacaaaaccacugaccu

SEQ ID NO: 141875 - RNA, 21 nt, Human herpesvirus 4 (Epstein-Barr virus)
caagguaaguaauuuguugcc

SEQ ID NO: 141876 - RNA, 23 nt, Human herpesvirus 4 (Epstein-Barr virus)
caaggagugccucugggugcuga

SEQ ID NO: 141877 - RNA, 15 nt, Human herpesvirus 4 (Epstein-Barr virus)
caaggacaggugcca

SEQ ID NO: 141878 - RNA, 23 nt, Human herpesvirus 4 (Epstein-Barr virus)
caagcucagccccuuggcacaag

SEQ ID NO: 141879 - RNA, 16 nt, Human herpesvirus 4 (Epstein-Barr virus)
caagcuccggcugccc

SEQ ID NO: 141880 - RNA, 20 nt, Human herpesvirus 4 (Epstein-Barr virus)
caagaguuuaagcagcacug

SEQ ID NO: 141881 - RNA, 21 nt, Human herpesvirus 4 (Epstein-Barr virus)
caagaguuuaagcagcacuga

SEQ ID NO: 141882 - RNA, 17 nt, Human herpesvirus 4 (Epstein-Barr virus)
caacaaugugaaccuua

SEQ ID NO: 141883 - RNA, 12 nt, Human herpesvirus 4 (Epstein-Barr virus)
caacacaaccac

SEQ ID NO: 141884 - RNA, 21 nt, Human herpesvirus 4 (Epstein-Barr virus)
caaucuggacucucuguuucu

SEQ ID NO: 141885 - RNA, 13 nt, Human herpesvirus 4 (Epstein-Barr virus)
caauccaugccaa

SEQ ID NO: 141886 - RNA, 14 nt, Human herpesvirus 4 (Epstein-Barr virus)
caauccaugccaau

SEQ ID NO: 141887 - RNA, 17 nt, Human herpesvirus 4 (Epstein-Barr virus)
caauacacccaucugga

SEQ ID NO: 141888 - RNA, 16 nt, Human herpesvirus 4 (Epstein-Barr virus)
caauaauuucagugaa

SEQ ID NO: 141889 - RNA, 14 nt, Human herpesvirus 4 (Epstein-Barr virus)
caaggugugcauga

SEQ ID NO: 141890 - RNA, 13 nt, Human herpesvirus 4 (Epstein-Barr virus)
cacauaaacaugg

SEQ ID NO: 141891 - RNA, 15 nt, Human herpesvirus 4 (Epstein-Barr virus)
cacauagaauuguua

SEQ ID NO: 141892 - RNA, 18 nt, Human herpesvirus 4 (Epstein-Barr virus)
caccagaggccacaaaag

SEQ ID NO: 141893 - RNA, 17 nt, Human herpesvirus 4 (Epstein-Barr virus)
caccaucccaauucaca

SEQ ID NO: 141894 - RNA, 15 nt, Human herpesvirus 4 (Epstein-Barr virus)
caccaucaaugucac

SEQ ID NO: 141895 - RNA, 22 nt, Human herpesvirus 4 (Epstein-Barr virus)
caccagcuaacaggacauguuu

SEQ ID NO: 141896 - RNA, 22 nt, Human herpesvirus 4 (Epstein-Barr virus)
caccauagcaugucacacauuc

SEQ ID NO: 141897 - RNA, 20 nt, Human herpesvirus 4 (Epstein-Barr virus)
caccagucccaacaacuucc

SEQ ID NO: 141898 - RNA, 12 nt, Human herpesvirus 4 (Epstein-Barr virus)
cacccacuacac

SEQ ID NO: 141899 - RNA, 16 nt, Human herpesvirus 4 (Epstein-Barr virus)
cacccacggaagcccu

SEQ ID NO: 141900 - RNA, 17 nt, Human herpesvirus 4 (Epstein-Barr virus)
cacccaccuaugccaau

SEQ ID NO: 141901 - RNA, 22 nt, Human herpesvirus 4 (Epstein-Barr virus)
cacccgacaaugagcggggaga

SEQ ID NO: 141902 - RNA, 13 nt, Human herpesvirus 4 (Epstein-Barr virus)
cacacgagccaua

SEQ ID NO: 141903 - RNA, 17 nt, Human herpesvirus 4 (Epstein-Barr virus)
cacagguuauuuugccu

SEQ ID NO: 141904 - RNA, 15 nt, Human herpesvirus 4 (Epstein-Barr virus)
cacaggcauugcuaa

SEQ ID NO: 141905 - RNA, 13 nt, Human herpesvirus 4 (Epstein-Barr virus)
cacaccagacaug

SEQ ID NO: 141906 - RNA, 17 nt, Human herpesvirus 4 (Epstein-Barr virus)
cacacccaccuaugcca

SEQ ID NO: 141907 - RNA, 17 nt, Human herpesvirus 4 (Epstein-Barr virus)
cacacagccugacucuc

SEQ ID NO: 141908 - RNA, 23 nt, Human herpesvirus 4 (Epstein-Barr virus)
cacacacaguagccgaauaucug

SEQ ID NO: 141909 - RNA, 15 nt, Human herpesvirus 4 (Epstein-Barr virus)
caauuaaacaaggga

SEQ ID NO: 141910 - RNA, 13 nt, Human herpesvirus 4 (Epstein-Barr virus)
aucugggcagcca

SEQ ID NO: 141911 - RNA, 21 nt, Human herpesvirus 4 (Epstein-Barr virus)
aucugcucuucaaccuuggca

SEQ ID NO: 141912 - RNA, 14 nt, Human herpesvirus 4 (Epstein-Barr virus)
aucuguacuuuuau

SEQ ID NO: 141913 - RNA, 18 nt, Human herpesvirus 4 (Epstein-Barr virus)
augguacggugauaacug

SEQ ID NO: 141914 - RNA, 20 nt, Human herpesvirus 4 (Epstein-Barr virus)
augguacggugauaacugac

SEQ ID NO: 141915 - RNA, 22 nt, Human herpesvirus 4 (Epstein-Barr virus)
auggugugagacuggaacugua

SEQ ID NO: 141916 - RNA, 14 nt, Human herpesvirus 4 (Epstein-Barr virus)
augucuacgacaua

SEQ ID NO: 141917 - RNA, 15 nt, Human herpesvirus 4 (Epstein-Barr virus)
auguggcaucgucau

SEQ ID NO: 141918 - RNA, 14 nt, Human herpesvirus 4 (Epstein-Barr virus)
augugguaacaggu

SEQ ID NO: 141919 - RNA, 19 nt, Human herpesvirus 4 (Epstein-Barr virus)
auguggugccauguggcau

SEQ ID NO: 141920 - RNA, 22 nt, Human herpesvirus 4 (Epstein-Barr virus)
auguuacccucauugugcugaa

SEQ ID NO: 141921 - RNA, 15 nt, Human herpesvirus 4 (Epstein-Barr virus)
auucugagcaccaac

SEQ ID NO: 141922 - RNA, 17 nt, Human herpesvirus 4 (Epstein-Barr virus)
auucugagcaccaacac

SEQ ID NO: 141923 - RNA, 23 nt, Human herpesvirus 4 (Epstein-Barr virus)
auucugagcaccaacacaaccac

SEQ ID NO: 141924 - RNA, 22 nt, Human herpesvirus 4 (Epstein-Barr virus)
auugggcauacccauguuguca

SEQ ID NO: 141925 - RNA, 19 nt, Human herpesvirus 4 (Epstein-Barr virus)
auuggcgucgggaaacaca

SEQ ID NO: 141926 - RNA, 13 nt, Human herpesvirus 4 (Epstein-Barr virus)
auugggacuugaa

SEQ ID NO: 141927 - RNA, 19 nt, Human herpesvirus 4 (Epstein-Barr virus)
auucguacaucuccaggcg

SEQ ID NO: 141928 - RNA, 22 nt, Human herpesvirus 4 (Epstein-Barr virus)
auucuaugggaauaacaaggga

SEQ ID NO: 141929 - RNA, 14 nt, Human herpesvirus 4 (Epstein-Barr virus)
auucucagaugcag

SEQ ID NO: 141930 - RNA, 16 nt, Human herpesvirus 4 (Epstein-Barr virus)
auucucguccaucucg

SEQ ID NO: 141931 - RNA, 14 nt, Human herpesvirus 4 (Epstein-Barr virus)
auucgacaggccau

SEQ ID NO: 141932 - RNA, 21 nt, Human herpesvirus 4 (Epstein-Barr virus)
auucgacaggccauuagagau

SEQ ID NO: 141933 - RNA, 14 nt, Human herpesvirus 4 (Epstein-Barr virus)
auuccuguccauga

SEQ ID NO: 141934 - RNA, 15 nt, Human herpesvirus 4 (Epstein-Barr virus)
auuccuguccaugac

SEQ ID NO: 141935 - RNA, 14 nt, Human herpesvirus 4 (Epstein-Barr virus)
auucccccaugaga

SEQ ID NO: 141936 - RNA, 22 nt, Human herpesvirus 4 (Epstein-Barr virus)
auucccagccccaauucuugca

SEQ ID NO: 141937 - RNA, 16 nt, Human herpesvirus 4 (Epstein-Barr virus)
auuccaggugugcuuc

SEQ ID NO: 141938 - RNA, 21 nt, Human herpesvirus 4 (Epstein-Barr virus)
auuccaccaacacgaccccaa

SEQ ID NO: 141939 - RNA, 13 nt, Human herpesvirus 4 (Epstein-Barr virus)
auuacggugcugg

SEQ ID NO: 141940 - RNA, 16 nt, Human herpesvirus 4 (Epstein-Barr virus)
auuagaagaugaugca

SEQ ID NO: 141941 - RNA, 23 nt, Human herpesvirus 4 (Epstein-Barr virus)
auuagagugccgggcccgggaca

SEQ ID NO: 141942 - RNA, 14 nt, Human herpesvirus 4 (Epstein-Barr virus)
auuaggcacuggac

SEQ ID NO: 141943 - RNA, 18 nt, Human herpesvirus 4 (Epstein-Barr virus)
auuaggcacuggacacac

SEQ ID NO: 141944 - RNA, 19 nt, Human herpesvirus 4 (Epstein-Barr virus)
auuaggcacuggacacaca

SEQ ID NO: 141945 - RNA, 18 nt, Human herpesvirus 4 (Epstein-Barr virus)
auuagggguaacccugua

SEQ ID NO: 141946 - RNA, 17 nt, Human herpesvirus 4 (Epstein-Barr virus)
auuaggagcagggccca

SEQ ID NO: 141947 - RNA, 14 nt, Human herpesvirus 4 (Epstein-Barr virus)
auuucauccucaga

SEQ ID NO: 141948 - RNA, 16 nt, Human herpesvirus 4 (Epstein-Barr virus)
auuuauugcaucacaa

SEQ ID NO: 141949 - RNA, 21 nt, Human herpesvirus 4 (Epstein-Barr virus)
auuucaaauaccgagauguac

SEQ ID NO: 141950 - RNA, 16 nt, Human herpesvirus 4 (Epstein-Barr virus)
auuugggagggaccac

SEQ ID NO: 141951 - RNA, 19 nt, Human herpesvirus 4 (Epstein-Barr virus)
auuugcucuucgugcucuu

SEQ ID NO: 141952 - RNA, 11 nt, Human herpesvirus 4 (Epstein-Barr virus)
auuuguugccg

SEQ ID NO: 141953 - RNA, 18 nt, Human herpesvirus 4 (Epstein-Barr virus)
auuuaaaaggggcagcaa

SEQ ID NO: 141954 - RNA, 19 nt, Human herpesvirus 4 (Epstein-Barr virus)
auuuaaaaggggcagcaau

SEQ ID NO: 141955 - RNA, 16 nt, Human herpesvirus 4 (Epstein-Barr virus)
auuuacaaacacuaca

SEQ ID NO: 141956 - RNA, 17 nt, Human herpesvirus 4 (Epstein-Barr virus)
auuuacaaacacuacaa

SEQ ID NO: 141957 - RNA, 17 nt, Human herpesvirus 4 (Epstein-Barr virus)
auuguuuacaucugccc

SEQ ID NO: 141958 - RNA, 11 nt, Human herpesvirus 4 (Epstein-Barr virus)
caaacaugucc

SEQ ID NO: 141959 - RNA, 13 nt, Human herpesvirus 4 (Epstein-Barr virus)
caaaccaugacau

SEQ ID NO: 141960 - RNA, 16 nt, Human herpesvirus 4 (Epstein-Barr virus)
caaaccaugacaucac

SEQ ID NO: 141961 - RNA, 15 nt, Human herpesvirus 4 (Epstein-Barr virus)
caaacacuacaauaa

SEQ ID NO: 141962 - RNA, 19 nt, Human herpesvirus 4 (Epstein-Barr virus)
caaaaugaggaacggugau

SEQ ID NO: 141963 - RNA, 14 nt, Human herpesvirus 4 (Epstein-Barr virus)
caaaaccacugacc

SEQ ID NO: 141964 - RNA, 21 nt, Human herpesvirus 4 (Epstein-Barr virus)
caaaauuggugccuugcucuc

SEQ ID NO: 141965 - RNA, 17 nt, Human herpesvirus 4 (Epstein-Barr virus)
caaacccccuccccugu

SEQ ID NO: 141966 - RNA, 21 nt, Human herpesvirus 4 (Epstein-Barr virus)
caacaagcuaccgaugauucu

SEQ ID NO: 141967 - RNA, 15 nt, Human herpesvirus 4 (Epstein-Barr virus)
caaauugauugauga

SEQ ID NO: 141968 - RNA, 22 nt, Human herpesvirus 4 (Epstein-Barr virus)
cauguucgcacuccuaugcauu

SEQ ID NO: 141969 - RNA, 16 nt, Human herpesvirus 4 (Epstein-Barr virus)
cauguuuuuggcaugu

SEQ ID NO: 141970 - RNA, 18 nt, Human herpesvirus 4 (Epstein-Barr virus)
caugguuuaaggaaugaa

SEQ ID NO: 141971 - RNA, 13 nt, Human herpesvirus 4 (Epstein-Barr virus)
cauguaacaagaa

SEQ ID NO: 141972 - RNA, 20 nt, Human herpesvirus 4 (Epstein-Barr virus)
caugucgagcaugagcuccu

SEQ ID NO: 141973 - RNA, 14 nt, Human herpesvirus 4 (Epstein-Barr virus)
caugucuguuguuu

SEQ ID NO: 141974 - RNA, 15 nt, Human herpesvirus 4 (Epstein-Barr virus)
caugaaucugacucu

SEQ ID NO: 141975 - RNA, 16 nt, Human herpesvirus 4 (Epstein-Barr virus)
caugaaucugacucua

SEQ ID NO: 141976 - RNA, 16 nt, Human herpesvirus 4 (Epstein-Barr virus)
caugaauguuacccuc

SEQ ID NO: 141977 - RNA, 18 nt, Human herpesvirus 4 (Epstein-Barr virus)
caugaauguuacccucau

SEQ ID NO: 141978 - RNA, 20 nt, Human herpesvirus 4 (Epstein-Barr virus)
caugaccaacaugagggcac

SEQ ID NO: 141979 - RNA, 20 nt, Human herpesvirus 4 (Epstein-Barr virus)
caugagaaaauacuucucua

SEQ ID NO: 141980 - RNA, 23 nt, Human herpesvirus 4 (Epstein-Barr virus)
caugagaaaauacuucucuagag

SEQ ID NO: 141981 - RNA, 19 nt, Human herpesvirus 4 (Epstein-Barr virus)
cauggugucuguaaucucu

SEQ ID NO: 141982 - RNA, 18 nt, Human herpesvirus 4 (Epstein-Barr virus)
caugagcuccucuccaaa

SEQ ID NO: 141983 - RNA, 22 nt, Human herpesvirus 4 (Epstein-Barr virus)
cauagucacggaugcugcagag

SEQ ID NO: 141984 - RNA, 23 nt, Human herpesvirus 4 (Epstein-Barr virus)
caucaauaauaagggcgccaucu

SEQ ID NO: 141985 - RNA, 16 nt, Human herpesvirus 4 (Epstein-Barr virus)
caucacaagucacauc

SEQ ID NO: 141986 - RNA, 19 nt, Human herpesvirus 4 (Epstein-Barr virus)
caucaauggaacccuagcc

SEQ ID NO: 141987 - RNA, 15 nt, Human herpesvirus 4 (Epstein-Barr virus)
caucaaugucaccac

SEQ ID NO: 141988 - RNA, 18 nt, Human herpesvirus 4 (Epstein-Barr virus)
caucaccuggguacccaa

SEQ ID NO: 141989 - RNA, 21 nt, Human herpesvirus 4 (Epstein-Barr virus)
caucucuuuuacagugguucu

SEQ ID NO: 141990 - RNA, 19 nt, Human herpesvirus 4 (Epstein-Barr virus)
caucggguccuagcacaaa

SEQ ID NO: 141991 - RNA, 18 nt, Human herpesvirus 4 (Epstein-Barr virus)
cagcauucuaucagcuua

SEQ ID NO: 141992 - RNA, 20 nt, Human herpesvirus 4 (Epstein-Barr virus)
cagcagggccuugagcccau

SEQ ID NO: 141993 - RNA, 16 nt, Human herpesvirus 4 (Epstein-Barr virus)
cagccacgcaggaugu

SEQ ID NO: 141994 - RNA, 14 nt, Human herpesvirus 4 (Epstein-Barr virus)
cagccaccggccaa

SEQ ID NO: 141995 - RNA, 14 nt, Human herpesvirus 4 (Epstein-Barr virus)
caguggacaaggca

SEQ ID NO: 141996 - RNA, 23 nt, Human herpesvirus 4 (Epstein-Barr virus)
caguggagcgaagcuagugcagg

SEQ ID NO: 141997 - RNA, 15 nt, Human herpesvirus 4 (Epstein-Barr virus)
caguggaugcaucgu

SEQ ID NO: 141998 - RNA, 17 nt, Human herpesvirus 4 (Epstein-Barr virus)
caguggccgucuggcag

SEQ ID NO: 141999 - RNA, 19 nt, Human herpesvirus 4 (Epstein-Barr virus)
cagauuuccgaaccuuguc

SEQ ID NO: 142000 - RNA, 20 nt, Human herpesvirus 4 (Epstein-Barr virus)
cagauucagacgagucugac

SEQ ID NO: 142001 - RNA, 13 nt, Human herpesvirus 4 (Epstein-Barr virus)
cagcaaaaccagc

SEQ ID NO: 142002 - RNA, 13 nt, Human herpesvirus 4 (Epstein-Barr virus)
cagcacaagugau

SEQ ID NO: 142003 - RNA, 13 nt, Human herpesvirus 4 (Epstein-Barr virus)
cagcacuuugcca

SEQ ID NO: 142004 - RNA, 17 nt, Human herpesvirus 4 (Epstein-Barr virus)
cauagaggggcaugcuu

SEQ ID NO: 142005 - RNA, 20 nt, Human herpesvirus 4 (Epstein-Barr virus)
cauaaccuggagucugcaug

SEQ ID NO: 142006 - RNA, 21 nt, Human herpesvirus 4 (Epstein-Barr virus)
cagugggugaggcggugccug

SEQ ID NO: 142007 - RNA, 19 nt, Human herpesvirus 4 (Epstein-Barr virus)
caguggucaccgguggugg

SEQ ID NO: 142008 - RNA, 15 nt, Human herpesvirus 4 (Epstein-Barr virus)
ccacucagacucucc

SEQ ID NO: 142009 - RNA, 22 nt, Human herpesvirus 4 (Epstein-Barr virus)
ccacuaagguuacugcacagaa

SEQ ID NO: 142010 - RNA, 22 nt, Human herpesvirus 4 (Epstein-Barr virus)
ccagaagucggccacaggggag

SEQ ID NO: 142011 - RNA, 22 nt, Human herpesvirus 4 (Epstein-Barr virus)
ccagaaagaagugggaccuaca

SEQ ID NO: 142012 - RNA, 17 nt, Human herpesvirus 4 (Epstein-Barr virus)
ccacugucacugugcac

SEQ ID NO: 142013 - RNA, 18 nt, Human herpesvirus 4 (Epstein-Barr virus)
ccaggccgccaugcucag

SEQ ID NO: 142014 - RNA, 20 nt, Human herpesvirus 4 (Epstein-Barr virus)
ccaggaggaggacgugagug

SEQ ID NO: 142015 - RNA, 21 nt, Human herpesvirus 4 (Epstein-Barr virus)
ccagacuaugcauacacugaa

SEQ ID NO: 142016 - RNA, 23 nt, Human herpesvirus 4 (Epstein-Barr virus)
ccagccuguuuguccagcagggc

SEQ ID NO: 142017 - RNA, 21 nt, Human herpesvirus 4 (Epstein-Barr virus)
ccagagaggcccacugcagua

SEQ ID NO: 142018 - RNA, 16 nt, Human herpesvirus 4 (Epstein-Barr virus)
ccagcgcaagcuugcu

SEQ ID NO: 142019 - RNA, 14 nt, Human herpesvirus 4 (Epstein-Barr virus)
ccaccuaugccaau

SEQ ID NO: 142020 - RNA, 23 nt, Human herpesvirus 4 (Epstein-Barr virus)
ccaccugccggagggacaguacc

SEQ ID NO: 142021 - RNA, 19 nt, Human herpesvirus 4 (Epstein-Barr virus)
ccacgucuuuaccaccuca

SEQ ID NO: 142022 - RNA, 20 nt, Human herpesvirus 4 (Epstein-Barr virus)
ccacgucuuuaccaccucaa

SEQ ID NO: 142023 - RNA, 20 nt, Human herpesvirus 4 (Epstein-Barr virus)
ccacgggaggcggugcaagg

SEQ ID NO: 142024 - RNA, 18 nt, Human herpesvirus 4 (Epstein-Barr virus)
ccacgcaggauguucacg

SEQ ID NO: 142025 - RNA, 23 nt, Human herpesvirus 4 (Epstein-Barr virus)
ccaagacucccugacgguggugg

SEQ ID NO: 142026 - RNA, 22 nt, Human herpesvirus 4 (Epstein-Barr virus)
ccaaggugguagcguugguaau

SEQ ID NO: 142027 - RNA, 19 nt, Human herpesvirus 4 (Epstein-Barr virus)
ccaaggugugcaugagcac

SEQ ID NO: 142028 - RNA, 15 nt, Human herpesvirus 4 (Epstein-Barr virus)
ccaagugcaacaauc

SEQ ID NO: 142029 - RNA, 13 nt, Human herpesvirus 4 (Epstein-Barr virus)
ccaaguguuucca

SEQ ID NO: 142030 - RNA, 23 nt, Human herpesvirus 4 (Epstein-Barr virus)
ccaccaucaaugucaccacuaag

SEQ ID NO: 142031 - RNA, 21 nt, Human herpesvirus 4 (Epstein-Barr virus)
ccaccauggaaucauuugaag

SEQ ID NO: 142032 - RNA, 22 nt, Human herpesvirus 4 (Epstein-Barr virus)
ccaccgccgguuaacuuuaaca

SEQ ID NO: 142033 - RNA, 16 nt, Human herpesvirus 4 (Epstein-Barr virus)
cauugcgccgccuaau

SEQ ID NO: 142034 - RNA, 11 nt, Human herpesvirus 4 (Epstein-Barr virus)
cauugaugaac

SEQ ID NO: 142035 - RNA, 13 nt, Human herpesvirus 4 (Epstein-Barr virus)
cauugcaccuugc

SEQ ID NO: 142036 - RNA, 16 nt, Human herpesvirus 4 (Epstein-Barr virus)
cauuuucguccuccca

SEQ ID NO: 142037 - RNA, 12 nt, Human herpesvirus 4 (Epstein-Barr virus)
cauugugcugaa

SEQ ID NO: 142038 - RNA, 17 nt, Human herpesvirus 4 (Epstein-Barr virus)
ccaaaacuauaccaaag

SEQ ID NO: 142039 - RNA, 14 nt, Human herpesvirus 4 (Epstein-Barr virus)
ccaaaaauuugaua

SEQ ID NO: 142040 - RNA, 11 nt, Human herpesvirus 4 (Epstein-Barr virus)
ccaaaccaaau

SEQ ID NO: 142041 - RNA, 14 nt, Human herpesvirus 4 (Epstein-Barr virus)
cauucagauuucua

SEQ ID NO: 142042 - RNA, 15 nt, Human herpesvirus 4 (Epstein-Barr virus)
cauucccccaugaga

SEQ ID NO: 142043 - RNA, 22 nt, Human herpesvirus 4 (Epstein-Barr virus)
cauuccaguuuccuucuugacc

SEQ ID NO: 142044 - RNA, 19 nt, Human herpesvirus 4 (Epstein-Barr virus)
cauucccaaguguuuccag

SEQ ID NO: 142045 - RNA, 17 nt, Human herpesvirus 4 (Epstein-Barr virus)
cauucguacaucuccag

SEQ ID NO: 142046 - RNA, 15 nt, Human herpesvirus 4 (Epstein-Barr virus)
cauucgacaggccau

SEQ ID NO: 142047 - RNA, 16 nt, Human herpesvirus 4 (Epstein-Barr virus)
cauucgacaggccauu

SEQ ID NO: 142048 - RNA, 14 nt, Human herpesvirus 4 (Epstein-Barr virus)
cauuacggugcugg

SEQ ID NO: 142049 - RNA, 18 nt, Human herpesvirus 4 (Epstein-Barr virus)
cauuaacuaagcuuauga

SEQ ID NO: 142050 - RNA, 13 nt, Human herpesvirus 4 (Epstein-Barr virus)
cauuaaccucaac

SEQ ID NO: 142051 - RNA, 18 nt, Human herpesvirus 4 (Epstein-Barr virus)
ccugugcuucagcaguag

SEQ ID NO: 142052 - RNA, 16 nt, Human herpesvirus 4 (Epstein-Barr virus)
ccugucugauugcacc

SEQ ID NO: 142053 - RNA, 17 nt, Human herpesvirus 4 (Epstein-Barr virus)
ccugggcucucaggaac

SEQ ID NO: 142054 - RNA, 14 nt, Human herpesvirus 4 (Epstein-Barr virus)
ccuggagacuacua

SEQ ID NO: 142055 - RNA, 15 nt, Human herpesvirus 4 (Epstein-Barr virus)
ccuggggcaacagac

SEQ ID NO: 142056 - RNA, 22 nt, Human herpesvirus 4 (Epstein-Barr virus)
ccuggugagaaguugguggugg

SEQ ID NO: 142057 - RNA, 16 nt, Human herpesvirus 4 (Epstein-Barr virus)
ccuguagucaccugca

SEQ ID NO: 142058 - RNA, 14 nt, Human herpesvirus 4 (Epstein-Barr virus)
ccugguggugacau

SEQ ID NO: 142059 - RNA, 13 nt, Human herpesvirus 4 (Epstein-Barr virus)
ccugguguugcua

SEQ ID NO: 142060 - RNA, 12 nt, Human herpesvirus 4 (Epstein-Barr virus)
ccuggugccaga

SEQ ID NO: 142061 - RNA, 15 nt, Human herpesvirus 4 (Epstein-Barr virus)
ccuuaaucuagcuca

SEQ ID NO: 142062 - RNA, 20 nt, Human herpesvirus 4 (Epstein-Barr virus)
ccuuaaucuagcucacuuuc

SEQ ID NO: 142063 - RNA, 17 nt, Human herpesvirus 4 (Epstein-Barr virus)
ccuuauuuggacaucua

SEQ ID NO: 142064 - RNA, 19 nt, Human herpesvirus 4 (Epstein-Barr virus)
ccuucagaagaauguccaa

SEQ ID NO: 142065 - RNA, 16 nt, Human herpesvirus 4 (Epstein-Barr virus)
ccuuccagacuaugca

SEQ ID NO: 142066 - RNA, 14 nt, Human herpesvirus 4 (Epstein-Barr virus)
ccuuccuguguucu

SEQ ID NO: 142067 - RNA, 16 nt, Human herpesvirus 4 (Epstein-Barr virus)
ccuucuccaucuccau

SEQ ID NO: 142068 - RNA, 21 nt, Human herpesvirus 4 (Epstein-Barr virus)
ccuucgauuuuacgaugaagg

SEQ ID NO: 142069 - RNA, 16 nt, Human herpesvirus 4 (Epstein-Barr virus)
ccuuuuguacaagcuu

SEQ ID NO: 142070 - RNA, 11 nt, Human herpesvirus 4 (Epstein-Barr virus)
ccuuuugcacc

SEQ ID NO: 142071 - RNA, 13 nt, Human herpesvirus 4 (Epstein-Barr virus)
ccuugggggccug

SEQ ID NO: 142072 - RNA, 21 nt, Human herpesvirus 4 (Epstein-Barr virus)
ccuugugucucuaucaaggaa

SEQ ID NO: 142073 - RNA, 17 nt, Human herpesvirus 4 (Epstein-Barr virus)
ccuugcucucagcacuu

SEQ ID NO: 142074 - RNA, 20 nt, Human herpesvirus 4 (Epstein-Barr virus)
ccuugcucucagcacuuugc

SEQ ID NO: 142075 - RNA, 12 nt, Human herpesvirus 4 (Epstein-Barr virus)
ccuugaucuucu

SEQ ID NO: 142076 - RNA, 17 nt, Human herpesvirus 4 (Epstein-Barr virus)
ccuugaucuucuucucc

SEQ ID NO: 142077 - RNA, 15 nt, Human herpesvirus 4 (Epstein-Barr virus)
ccuugaggugccaca

SEQ ID NO: 142078 - RNA, 16 nt, Human herpesvirus 4 (Epstein-Barr virus)
ccuuugcuaucuuugc

SEQ ID NO: 142079 - RNA, 19 nt, Human herpesvirus 4 (Epstein-Barr virus)
ccuuugcuaucuuugcuga

SEQ ID NO: 142080 - RNA, 19 nt, Human herpesvirus 4 (Epstein-Barr virus)
ccuuuauaugaaaaugugu

SEQ ID NO: 142081 - RNA, 17 nt, Human herpesvirus 4 (Epstein-Barr virus)
ccugcucucgaugauug

SEQ ID NO: 142082 - RNA, 15 nt, Human herpesvirus 4 (Epstein-Barr virus)
ccuggagcuggugca

SEQ ID NO: 142083 - RNA, 14 nt, Human herpesvirus 4 (Epstein-Barr virus)
ccuggccagcaccc

SEQ ID NO: 142084 - RNA, 17 nt, Human herpesvirus 4 (Epstein-Barr virus)
ccugccucucuuaugcc

SEQ ID NO: 142085 - RNA, 17 nt, Human herpesvirus 4 (Epstein-Barr virus)
ccugccugcaugcuuag

SEQ ID NO: 142086 - RNA, 22 nt, Human herpesvirus 4 (Epstein-Barr virus)
ccugccggaguuuucuccccca

SEQ ID NO: 142087 - RNA, 15 nt, Human herpesvirus 4 (Epstein-Barr virus)
ccugccaucgggaca

SEQ ID NO: 142088 - RNA, 16 nt, Human herpesvirus 4 (Epstein-Barr virus)
ccugauaaugucuuca

SEQ ID NO: 142089 - RNA, 23 nt, Human herpesvirus 4 (Epstein-Barr virus)
ccucuuuuagaaacuaugcauga

SEQ ID NO: 142090 - RNA, 17 nt, Human herpesvirus 4 (Epstein-Barr virus)
ccucuuguguucuugcc

SEQ ID NO: 142091 - RNA, 16 nt, Human herpesvirus 4 (Epstein-Barr virus)
ccugcaaacugacaca

SEQ ID NO: 142092 - RNA, 15 nt, Human herpesvirus 4 (Epstein-Barr virus)
ccugcacacauuuca

SEQ ID NO: 142093 - RNA, 16 nt, Human herpesvirus 4 (Epstein-Barr virus)
ccugcacagaucugac

SEQ ID NO: 142094 - RNA, 15 nt, Human herpesvirus 4 (Epstein-Barr virus)
ccugcacuauauucu

SEQ ID NO: 142095 - RNA, 16 nt, Human herpesvirus 4 (Epstein-Barr virus)
ccuccuaaaaccuaca

SEQ ID NO: 142096 - RNA, 15 nt, Human herpesvirus 4 (Epstein-Barr virus)
ccucccuaaccgccu

SEQ ID NO: 142097 - RNA, 16 nt, Human herpesvirus 4 (Epstein-Barr virus)
ccucccagucuaucca

SEQ ID NO: 142098 - RNA, 20 nt, Human herpesvirus 4 (Epstein-Barr virus)
ccuccccagugaucaucucg

SEQ ID NO: 142099 - RNA, 23 nt, Human herpesvirus 4 (Epstein-Barr virus)
ccuccauccaguggggcuucuga

SEQ ID NO: 142100 - RNA, 19 nt, Human herpesvirus 4 (Epstein-Barr virus)
ccuccacggggacacgcuc

SEQ ID NO: 142101 - RNA, 14 nt, Human herpesvirus 4 (Epstein-Barr virus)
ccucacgaucuuca

SEQ ID NO: 142102 - RNA, 17 nt, Human herpesvirus 4 (Epstein-Barr virus)
ccucagaaaacucugca

SEQ ID NO: 142103 - RNA, 23 nt, Human herpesvirus 4 (Epstein-Barr virus)
ccucagaaaacucugcauggaga

SEQ ID NO: 142104 - RNA, 18 nt, Human herpesvirus 4 (Epstein-Barr virus)
ccucaaaguccugcacua

SEQ ID NO: 142105 - RNA, 15 nt, Human herpesvirus 4 (Epstein-Barr virus)
ccucagcgucaggag

SEQ ID NO: 142106 - RNA, 23 nt, Human herpesvirus 4 (Epstein-Barr virus)
ccucagcccccccugugcuucua

SEQ ID NO: 142107 - RNA, 17 nt, Human herpesvirus 4 (Epstein-Barr virus)
ccucagucuuugcaauu

SEQ ID NO: 142108 - RNA, 21 nt, Human herpesvirus 4 (Epstein-Barr virus)
ccucgccuugagggcaaagac

SEQ ID NO: 142109 - RNA, 15 nt, Human herpesvirus 4 (Epstein-Barr virus)
ccucugggguccagg

SEQ ID NO: 142110 - RNA, 16 nt, Human herpesvirus 4 (Epstein-Barr virus)
ccucuccagcaaccaa

SEQ ID NO: 142111 - RNA, 14 nt, Human herpesvirus 4 (Epstein-Barr virus)
ccgggccagcauuc

SEQ ID NO: 142112 - RNA, 20 nt, Human herpesvirus 4 (Epstein-Barr virus)
ccggagggacaguaccacaa

SEQ ID NO: 142113 - RNA, 13 nt, Human herpesvirus 4 (Epstein-Barr virus)
ccggaggggacca

SEQ ID NO: 142114 - RNA, 16 nt, Human herpesvirus 4 (Epstein-Barr virus)
ccggagccugccggag

SEQ ID NO: 142115 - RNA, 22 nt, Human herpesvirus 4 (Epstein-Barr virus)
cccugcagaguaauugcagugg

SEQ ID NO: 142116 - RNA, 17 nt, Human herpesvirus 4 (Epstein-Barr virus)
cccuugguauugcgcug

SEQ ID NO: 142117 - RNA, 18 nt, Human herpesvirus 4 (Epstein-Barr virus)
cccuuauuauugauguga

SEQ ID NO: 142118 - RNA, 18 nt, Human herpesvirus 4 (Epstein-Barr virus)
cccuucgccccuaucuua

SEQ ID NO: 142119 - RNA, 19 nt, Human herpesvirus 4 (Epstein-Barr virus)
cccuucgccccuaucuuaa

SEQ ID NO: 142120 - RNA, 21 nt, Human herpesvirus 4 (Epstein-Barr virus)
ccuagcuuauuuuuugguugu

SEQ ID NO: 142121 - RNA, 23 nt, Human herpesvirus 4 (Epstein-Barr virus)
ccuaggagagaagggagacacau

SEQ ID NO: 142122 - RNA, 16 nt, Human herpesvirus 4 (Epstein-Barr virus)
ccgguggugggugugg

SEQ ID NO: 142123 - RNA, 20 nt, Human herpesvirus 4 (Epstein-Barr virus)
ccgggggccagucuccgggu

SEQ ID NO: 142124 - RNA, 19 nt, Human herpesvirus 4 (Epstein-Barr virus)
ccuagcacaaaccagucua

SEQ ID NO: 142125 - RNA, 18 nt, Human herpesvirus 4 (Epstein-Barr virus)
ccgucacuccagccauca

SEQ ID NO: 142126 - RNA, 13 nt, Human herpesvirus 4 (Epstein-Barr virus)
ccgucagccacac

SEQ ID NO: 142127 - RNA, 12 nt, Human herpesvirus 4 (Epstein-Barr virus)
cccugccugcau

SEQ ID NO: 142128 - RNA, 16 nt, Human herpesvirus 4 (Epstein-Barr virus)
cccuggggcaacagac

SEQ ID NO: 142129 - RNA, 16 nt, Human herpesvirus 4 (Epstein-Barr virus)
cccuggagcuggugca

SEQ ID NO: 142130 - RNA, 14 nt, Human herpesvirus 4 (Epstein-Barr virus)
cccuggaggccuca

SEQ ID NO: 142131 - RNA, 19 nt, Human herpesvirus 4 (Epstein-Barr virus)
cccuggaggccucaggcaa

SEQ ID NO: 142132 - RNA, 21 nt, Human herpesvirus 4 (Epstein-Barr virus)
cccuggaggccucaggcaaca

SEQ ID NO: 142133 - RNA, 13 nt, Human herpesvirus 4 (Epstein-Barr virus)
cccucuccagcaa

SEQ ID NO: 142134 - RNA, 18 nt, Human herpesvirus 4 (Epstein-Barr virus)
cccucuguuucuucaucu

SEQ ID NO: 142135 - RNA, 23 nt, Human herpesvirus 4 (Epstein-Barr virus)
cccugagaugugaauugggaugg

SEQ ID NO: 142136 - RNA, 21 nt, Human herpesvirus 4 (Epstein-Barr virus)
cccugaguucuacaaugccag

SEQ ID NO: 142137 - RNA, 19 nt, Human herpesvirus 4 (Epstein-Barr virus)
cccugauaaugucuucaau

SEQ ID NO: 142138 - RNA, 11 nt, Human herpesvirus 4 (Epstein-Barr virus)
cccuccucacc

SEQ ID NO: 142139 - RNA, 15 nt, Human herpesvirus 4 (Epstein-Barr virus)
cccucauugugcuga

SEQ ID NO: 142140 - RNA, 13 nt, Human herpesvirus 4 (Epstein-Barr virus)
cccgcuagauggc

SEQ ID NO: 142141 - RNA, 13 nt, Human herpesvirus 4 (Epstein-Barr virus)
ccccucugauauu

SEQ ID NO: 142142 - RNA, 20 nt, Human herpesvirus 4 (Epstein-Barr virus)
ccccuguuagcuauuugauc

SEQ ID NO: 142143 - RNA, 16 nt, Human herpesvirus 4 (Epstein-Barr virus)
ccccuggcuuccacuc

SEQ ID NO: 142144 - RNA, 19 nt, Human herpesvirus 4 (Epstein-Barr virus)
ccccaaggaaggcuugcca

SEQ ID NO: 142145 - RNA, 22 nt, Human herpesvirus 4 (Epstein-Barr virus)
cccgaucagagccccaugcuua

SEQ ID NO: 142146 - RNA, 13 nt, Human herpesvirus 4 (Epstein-Barr virus)
cccgccaagcacg

SEQ ID NO: 142147 - RNA, 17 nt, Human herpesvirus 4 (Epstein-Barr virus)
cccgcacuaaagaauaa

SEQ ID NO: 142148 - RNA, 14 nt, Human herpesvirus 4 (Epstein-Barr virus)
ccaucaccugggua

SEQ ID NO: 142149 - RNA, 19 nt, Human herpesvirus 4 (Epstein-Barr virus)
ccaggggggaccuuaacau

SEQ ID NO: 142150 - RNA, 20 nt, Human herpesvirus 4 (Epstein-Barr virus)
cccaguccauguucgcacuc

SEQ ID NO: 142151 - RNA, 19 nt, Human herpesvirus 4 (Epstein-Barr virus)
cccaguggacaaggcagua

SEQ ID NO: 142152 - RNA, 23 nt, Human herpesvirus 4 (Epstein-Barr virus)
cccaggaucagaaucaaaaucag

SEQ ID NO: 142153 - RNA, 20 nt, Human herpesvirus 4 (Epstein-Barr virus)
gccaggcagaggaaggccac

SEQ ID NO: 142154 - RNA, 16 nt, Human herpesvirus 4 (Epstein-Barr virus)
gccaggcucggcaccu

SEQ ID NO: 142155 - RNA, 14 nt, Human herpesvirus 4 (Epstein-Barr virus)
gccaggggggaccu

SEQ ID NO: 142156 - RNA, 17 nt, Human herpesvirus 4 (Epstein-Barr virus)
gccagcauggcagccgg

SEQ ID NO: 142157 - RNA, 15 nt, Human herpesvirus 4 (Epstein-Barr virus)
gccagcgccuugauc

SEQ ID NO: 142158 - RNA, 14 nt, Human herpesvirus 4 (Epstein-Barr virus)
gccaggauaaucag

SEQ ID NO: 142159 - RNA, 21 nt, Human herpesvirus 4 (Epstein-Barr virus)
gccaggaccccuaucacgggg

SEQ ID NO: 142160 - RNA, 20 nt, Human herpesvirus 4 (Epstein-Barr virus)
gccaucuacccaacagucuu

SEQ ID NO: 142161 - RNA, 18 nt, Human herpesvirus 4 (Epstein-Barr virus)
gccaucuaucuguacuuu

SEQ ID NO: 142162 - RNA, 18 nt, Human herpesvirus 4 (Epstein-Barr virus)
gccaucugucuugucacc

SEQ ID NO: 142163 - RNA, 13 nt, Human herpesvirus 4 (Epstein-Barr virus)
gccaugcucaggg

SEQ ID NO: 142164 - RNA, 17 nt, Human herpesvirus 4 (Epstein-Barr virus)
gccaugcucagggccac

SEQ ID NO: 142165 - RNA, 22 nt, Human herpesvirus 4 (Epstein-Barr virus)
gccaucaugcugaauauugcca

SEQ ID NO: 142166 - RNA, 14 nt, Human herpesvirus 4 (Epstein-Barr virus)
gccacuuacagcac

SEQ ID NO: 142167 - RNA, 14 nt, Human herpesvirus 4 (Epstein-Barr virus)
gccacggcgugcca

SEQ ID NO: 142168 - RNA, 15 nt, Human herpesvirus 4 (Epstein-Barr virus)
gccagagacgagcug

SEQ ID NO: 142169 - RNA, 17 nt, Human herpesvirus 4 (Epstein-Barr virus)
gccagagacgagcugcg

SEQ ID NO: 142170 - RNA, 14 nt, Human herpesvirus 4 (Epstein-Barr virus)
gccagagcuguguu

SEQ ID NO: 142171 - RNA, 18 nt, Human herpesvirus 4 (Epstein-Barr virus)
gccacauguuuucuggac

SEQ ID NO: 142172 - RNA, 22 nt, Human herpesvirus 4 (Epstein-Barr virus)
gccacacuggcucucugccucu

SEQ ID NO: 142173 - RNA, 23 nt, Human herpesvirus 4 (Epstein-Barr virus)
gccacgcaagggagacguuugag

SEQ ID NO: 142174 - RNA, 19 nt, Human herpesvirus 4 (Epstein-Barr virus)
gccacgcaggauguucacg

SEQ ID NO: 142175 - RNA, 20 nt, Human herpesvirus 4 (Epstein-Barr virus)
gccaacuuugagcugggcaa

SEQ ID NO: 142176 - RNA, 15 nt, Human herpesvirus 4 (Epstein-Barr virus)
gccaaggugugcaug

SEQ ID NO: 142177 - RNA, 16 nt, Human herpesvirus 4 (Epstein-Barr virus)
gccaauccaugccaau

SEQ ID NO: 142178 - RNA, 16 nt, Human herpesvirus 4 (Epstein-Barr virus)
gccacaggcauugcua

SEQ ID NO: 142179 - RNA, 19 nt, Human herpesvirus 4 (Epstein-Barr virus)
gccacacagccugacucuc

SEQ ID NO: 142180 - RNA, 21 nt, Human herpesvirus 4 (Epstein-Barr virus)
gccacacccaccuaugccaau

SEQ ID NO: 142181 - RNA, 21 nt, Human herpesvirus 4 (Epstein-Barr virus)
gcauucccgugcuuuuugcca

SEQ ID NO: 142182 - RNA, 18 nt, Human herpesvirus 4 (Epstein-Barr virus)
gcaugagcuccucuccaa

SEQ ID NO: 142183 - RNA, 19 nt, Human herpesvirus 4 (Epstein-Barr virus)
gcaucgacacacgagccau

SEQ ID NO: 142184 - RNA, 20 nt, Human herpesvirus 4 (Epstein-Barr virus)
gcaugcuugggcaugcugua

SEQ ID NO: 142185 - RNA, 15 nt, Human herpesvirus 4 (Epstein-Barr virus)
gcaucuaagguccau

SEQ ID NO: 142186 - RNA, 22 nt, Human herpesvirus 4 (Epstein-Barr virus)
gcaucuuaucagagaggccucu

SEQ ID NO: 142187 - RNA, 19 nt, Human herpesvirus 4 (Epstein-Barr virus)
gcauccggugccugagaca

SEQ ID NO: 142188 - RNA, 19 nt, Human herpesvirus 4 (Epstein-Barr virus)
gcauccaccaucaauguca

SEQ ID NO: 142189 - RNA, 20 nt, Human herpesvirus 4 (Epstein-Barr virus)
gcaucacagguuauuuugcc

SEQ ID NO: 142190 - RNA, 17 nt, Human herpesvirus 4 (Epstein-Barr virus)
gcauauuuucagaccca

SEQ ID NO: 142191 - RNA, 11 nt, Human herpesvirus 4 (Epstein-Barr virus)
gcagugauaag

SEQ ID NO: 142192 - RNA, 16 nt, Human herpesvirus 4 (Epstein-Barr virus)
gcagugauaagucaug

SEQ ID NO: 142193 - RNA, 14 nt, Human herpesvirus 4 (Epstein-Barr virus)
gcaggauguucacg

SEQ ID NO: 142194 - RNA, 21 nt, Human herpesvirus 4 (Epstein-Barr virus)
gcaggagaugggugcauuuca

SEQ ID NO: 142195 - RNA, 14 nt, Human herpesvirus 4 (Epstein-Barr virus)
gcaggacacgugac

SEQ ID NO: 142196 - RNA, 22 nt, Human herpesvirus 4 (Epstein-Barr virus)
gcaggcuacaacaggcugcuga

SEQ ID NO: 142197 - RNA, 12 nt, Human herpesvirus 4 (Epstein-Barr virus)
gcagggugaaca

SEQ ID NO: 142198 - RNA, 13 nt, Human herpesvirus 4 (Epstein-Barr virus)
gcagacaccaccu

SEQ ID NO: 142199 - RNA, 20 nt, Human herpesvirus 4 (Epstein-Barr virus)
gcagcuggcccaccuaaaga

SEQ ID NO: 142200 - RNA, 23 nt, Human herpesvirus 4 (Epstein-Barr virus)
gcagcuccgcccucacgggccau

SEQ ID NO: 142201 - RNA, 21 nt, Human herpesvirus 4 (Epstein-Barr virus)
gcagcucuaacuuggcaucuc

SEQ ID NO: 142202 - RNA, 14 nt, Human herpesvirus 4 (Epstein-Barr virus)
gcagcgcaucaggc

SEQ ID NO: 142203 - RNA, 21 nt, Human herpesvirus 4 (Epstein-Barr virus)
gauucagacgagucugacuac

SEQ ID NO: 142204 - RNA, 19 nt, Human herpesvirus 4 (Epstein-Barr virus)
gauuaggagcagggcccag

SEQ ID NO: 142205 - RNA, 19 nt, Human herpesvirus 4 (Epstein-Barr virus)
gauuaggcacuggacacac

SEQ ID NO: 142206 - RNA, 18 nt, Human herpesvirus 4 (Epstein-Barr virus)
gauuccuguccaugacca

SEQ ID NO: 142207 - RNA, 17 nt, Human herpesvirus 4 (Epstein-Barr virus)
gauuucgucagccgcuu

SEQ ID NO: 142208 - RNA, 23 nt, Human herpesvirus 4 (Epstein-Barr virus)
gauuugaaagugguagugucucu

SEQ ID NO: 142209 - RNA, 19 nt, Human herpesvirus 4 (Epstein-Barr virus)
gauuugggagggaccacgc

SEQ ID NO: 142210 - RNA, 16 nt, Human herpesvirus 4 (Epstein-Barr virus)
gauuuugggcacacuu

SEQ ID NO: 142211 - RNA, 19 nt, Human herpesvirus 4 (Epstein-Barr virus)
gauuuugggcacacuuaac

SEQ ID NO: 142212 - RNA, 17 nt, Human herpesvirus 4 (Epstein-Barr virus)
gcaaccagcuggucauc

SEQ ID NO: 142213 - RNA, 13 nt, Human herpesvirus 4 (Epstein-Barr virus)
gcaaaaauaugca

SEQ ID NO: 142214 - RNA, 17 nt, Human herpesvirus 4 (Epstein-Barr virus)
gcaaaacucacaggaca

SEQ ID NO: 142215 - RNA, 14 nt, Human herpesvirus 4 (Epstein-Barr virus)
gcacuuucuuugcu

SEQ ID NO: 142216 - RNA, 13 nt, Human herpesvirus 4 (Epstein-Barr virus)
gcacuuugccagc

SEQ ID NO: 142217 - RNA, 20 nt, Human herpesvirus 4 (Epstein-Barr virus)
gcacugcuagcgucacugau

SEQ ID NO: 142218 - RNA, 19 nt, Human herpesvirus 4 (Epstein-Barr virus)
gcacugaauuuauacccag

SEQ ID NO: 142219 - RNA, 20 nt, Human herpesvirus 4 (Epstein-Barr virus)
gcacucgcccacuaaccuua

SEQ ID NO: 142220 - RNA, 14 nt, Human herpesvirus 4 (Epstein-Barr virus)
gcacccucaacaag

SEQ ID NO: 142221 - RNA, 15 nt, Human herpesvirus 4 (Epstein-Barr virus)
gcaccaacacaacca

SEQ ID NO: 142222 - RNA, 18 nt, Human herpesvirus 4 (Epstein-Barr virus)
gcaccagcuaacaggaca

SEQ ID NO: 142223 - RNA, 21 nt, Human herpesvirus 4 (Epstein-Barr virus)
gcacagaucugaccacggccc

SEQ ID NO: 142224 - RNA, 21 nt, Human herpesvirus 4 (Epstein-Barr virus)
gcaagaacccccugcaggaca

SEQ ID NO: 142225 - RNA, 20 nt, Human herpesvirus 4 (Epstein-Barr virus)
gauggaaagggcauguggug

SEQ ID NO: 142226 - RNA, 16 nt, Human herpesvirus 4 (Epstein-Barr virus)
gaugauggacccaaac

SEQ ID NO: 142227 - RNA, 15 nt, Human herpesvirus 4 (Epstein-Barr virus)
gaucucuugcgccca

SEQ ID NO: 142228 - RNA, 21 nt, Human herpesvirus 4 (Epstein-Barr virus)
gaucucagaauugucacugag

SEQ ID NO: 142229 - RNA, 18 nt, Human herpesvirus 4 (Epstein-Barr virus)
gaugagucugacuacuca

SEQ ID NO: 142230 - RNA, 19 nt, Human herpesvirus 4 (Epstein-Barr virus)
gaugagucugacuacucag

SEQ ID NO: 142231 - RNA, 12 nt, Human herpesvirus 4 (Epstein-Barr virus)
gauagauggcac

SEQ ID NO: 142232 - RNA, 11 nt, Human herpesvirus 4 (Epstein-Barr virus)
gaguaccccag

SEQ ID NO: 142233 - RNA, 11 nt, Human herpesvirus 4 (Epstein-Barr virus)
gaggugccaca

SEQ ID NO: 142234 - RNA, 17 nt, Human herpesvirus 4 (Epstein-Barr virus)
gagguuaagcugcaccu

SEQ ID NO: 142235 - RNA, 20 nt, Human herpesvirus 4 (Epstein-Barr virus)
gagguggugcuugugaaggu

SEQ ID NO: 142236 - RNA, 21 nt, Human herpesvirus 4 (Epstein-Barr virus)
gagguacaugggccacugcag

SEQ ID NO: 142237 - RNA, 21 nt, Human herpesvirus 4 (Epstein-Barr virus)
gaggguggucaccgcgaccaa

SEQ ID NO: 142238 - RNA, 23 nt, Human herpesvirus 4 (Epstein-Barr virus)
gaggucugcgaugaggcgguggg

SEQ ID NO: 142239 - RNA, 13 nt, Human herpesvirus 4 (Epstein-Barr virus)
gaggggaggcggg

SEQ ID NO: 142240 - RNA, 13 nt, Human herpesvirus 4 (Epstein-Barr virus)
gaggggcgguggg

SEQ ID NO: 142241 - RNA, 15 nt, Human herpesvirus 4 (Epstein-Barr virus)
gaggaggcacacaaa

SEQ ID NO: 142242 - RNA, 18 nt, Human herpesvirus 4 (Epstein-Barr virus)
gaggaggcuggugccuug

SEQ ID NO: 142243 - RNA, 18 nt, Human herpesvirus 4 (Epstein-Barr virus)
gaggaggggggcagugau

SEQ ID NO: 142244 - RNA, 20 nt, Human herpesvirus 4 (Epstein-Barr virus)
gagggcgcucugcgccagcc

SEQ ID NO: 142245 - RNA, 13 nt, Human herpesvirus 4 (Epstein-Barr virus)
gaggggaccacua

SEQ ID NO: 142246 - RNA, 16 nt, Human herpesvirus 4 (Epstein-Barr virus)
gauauagcucugcaca

SEQ ID NO: 142247 - RNA, 13 nt, Human herpesvirus 4 (Epstein-Barr virus)
gauaugaaggugu

SEQ ID NO: 142248 - RNA, 22 nt, Human herpesvirus 4 (Epstein-Barr virus)
cuuggaccaagggcagggcaau

SEQ ID NO: 142249 - RNA, 14 nt, Human herpesvirus 4 (Epstein-Barr virus)
cuuggaggcugcua

SEQ ID NO: 142250 - RNA, 21 nt, Human herpesvirus 4 (Epstein-Barr virus)
cuugaccaguguguacauucc

SEQ ID NO: 142251 - RNA, 14 nt, Human herpesvirus 4 (Epstein-Barr virus)
cuugaggugccaca

SEQ ID NO: 142252 - RNA, 17 nt, Human herpesvirus 4 (Epstein-Barr virus)
cuugaucuucuucuccc

SEQ ID NO: 142253 - RNA, 14 nt, Human herpesvirus 4 (Epstein-Barr virus)
cuugauguacuuuc

SEQ ID NO: 142254 - RNA, 15 nt, Human herpesvirus 4 (Epstein-Barr virus)
cuugauguacuuucc

SEQ ID NO: 142255 - RNA, 15 nt, Human herpesvirus 4 (Epstein-Barr virus)
cuuggugugcacgaa

SEQ ID NO: 142256 - RNA, 14 nt, Human herpesvirus 4 (Epstein-Barr virus)
cuugggcuguggua

SEQ ID NO: 142257 - RNA, 14 nt, Human herpesvirus 4 (Epstein-Barr virus)
cuuggggguggugg

SEQ ID NO: 142258 - RNA, 17 nt, Human herpesvirus 4 (Epstein-Barr virus)
cuuggggguggugggcu

SEQ ID NO: 142259 - RNA, 15 nt, Human herpesvirus 4 (Epstein-Barr virus)
gaaaggguacccggg

SEQ ID NO: 142260 - RNA, 21 nt, Human herpesvirus 4 (Epstein-Barr virus)
gaaaggccauaaucucucgaa

SEQ ID NO: 142261 - RNA, 18 nt, Human herpesvirus 4 (Epstein-Barr virus)
gaaaggcuauaugagcua

SEQ ID NO: 142262 - RNA, 14 nt, Human herpesvirus 4 (Epstein-Barr virus)
gaacaucacugcca

SEQ ID NO: 142263 - RNA, 17 nt, Human herpesvirus 4 (Epstein-Barr virus)
gaaaugcagguuugacu

SEQ ID NO: 142264 - RNA, 18 nt, Human herpesvirus 4 (Epstein-Barr virus)
gaacugacgcuccaggau

SEQ ID NO: 142265 - RNA, 15 nt, Human herpesvirus 4 (Epstein-Barr virus)
gaacuuuaacauuga

SEQ ID NO: 142266 - RNA, 17 nt, Human herpesvirus 4 (Epstein-Barr virus)
gaacuuuaacauugaug

SEQ ID NO: 142267 - RNA, 20 nt, Human herpesvirus 4 (Epstein-Barr virus)
gaagacuccugccugaauca

SEQ ID NO: 142268 - RNA, 14 nt, Human herpesvirus 4 (Epstein-Barr virus)
gaauaaggcucuga

SEQ ID NO: 142269 - RNA, 16 nt, Human herpesvirus 4 (Epstein-Barr virus)
gaauaaucaaccugua

SEQ ID NO: 142270 - RNA, 14 nt, Human herpesvirus 4 (Epstein-Barr virus)
gaauaaucucccca

SEQ ID NO: 142271 - RNA, 20 nt, Human herpesvirus 4 (Epstein-Barr virus)
gaagugggaccuacaggaca

SEQ ID NO: 142272 - RNA, 14 nt, Human herpesvirus 4 (Epstein-Barr virus)
gaagugguugccau

SEQ ID NO: 142273 - RNA, 14 nt, Human herpesvirus 4 (Epstein-Barr virus)
gaauuuagccugau

SEQ ID NO: 142274 - RNA, 16 nt, Human herpesvirus 4 (Epstein-Barr virus)
gacagauugucuucca

SEQ ID NO: 142275 - RNA, 17 nt, Human herpesvirus 4 (Epstein-Barr virus)
gacagauugucuuccac

SEQ ID NO: 142276 - RNA, 16 nt, Human herpesvirus 4 (Epstein-Barr virus)
gacaguaacacagggu

SEQ ID NO: 142277 - RNA, 14 nt, Human herpesvirus 4 (Epstein-Barr virus)
gagaaaauacuucu

SEQ ID NO: 142278 - RNA, 21 nt, Human herpesvirus 4 (Epstein-Barr virus)
gacucaacguggucuccuucu

SEQ ID NO: 142279 - RNA, 19 nt, Human herpesvirus 4 (Epstein-Barr virus)
gacuauguucucuacggug

SEQ ID NO: 142280 - RNA, 19 nt, Human herpesvirus 4 (Epstein-Barr virus)
gacuauccaggucuugccg

SEQ ID NO: 142281 - RNA, 18 nt, Human herpesvirus 4 (Epstein-Barr virus)
gacuaugcauacacugaa

SEQ ID NO: 142282 - RNA, 19 nt, Human herpesvirus 4 (Epstein-Barr virus)
gacucccugacgguggugg

SEQ ID NO: 142283 - RNA, 20 nt, Human herpesvirus 4 (Epstein-Barr virus)
gacuccacaccaaauaaaca

SEQ ID NO: 142284 - RNA, 18 nt, Human herpesvirus 4 (Epstein-Barr virus)
gagaacagucaucaguaa

SEQ ID NO: 142285 - RNA, 17 nt, Human herpesvirus 4 (Epstein-Barr virus)
gagauagggaccagagg

SEQ ID NO: 142286 - RNA, 23 nt, Human herpesvirus 4 (Epstein-Barr virus)
gagaucagcaaccuugggggcaa

SEQ ID NO: 142287 - RNA, 20 nt, Human herpesvirus 4 (Epstein-Barr virus)
gagauuguuuacaucugccc

SEQ ID NO: 142288 - RNA, 22 nt, Human herpesvirus 4 (Epstein-Barr virus)
gagaucucagaauugucacuga

SEQ ID NO: 142289 - RNA, 23 nt, Human herpesvirus 4 (Epstein-Barr virus)
gagauugguaccagaagagucau

SEQ ID NO: 142290 - RNA, 18 nt, Human herpesvirus 4 (Epstein-Barr virus)
gagaugggugcauuucac

SEQ ID NO: 142291 - RNA, 13 nt, Human herpesvirus 4 (Epstein-Barr virus)
gagcggcugugag

SEQ ID NO: 142292 - RNA, 23 nt, Human herpesvirus 4 (Epstein-Barr virus)
gagcggguggaggagcuccguga

SEQ ID NO: 142293 - RNA, 18 nt, Human herpesvirus 4 (Epstein-Barr virus)
gagcgugugcacccggcu

SEQ ID NO: 142294 - RNA, 15 nt, Human herpesvirus 4 (Epstein-Barr virus)
gagcuccgugagcag

SEQ ID NO: 142295 - RNA, 16 nt, Human herpesvirus 4 (Epstein-Barr virus)
gagcuccgugggccca

SEQ ID NO: 142296 - RNA, 14 nt, Human herpesvirus 4 (Epstein-Barr virus)
gagcgcaucgucuc

SEQ ID NO: 142297 - RNA, 13 nt, Human herpesvirus 4 (Epstein-Barr virus)
gagcagaaggcca

SEQ ID NO: 142298 - RNA, 16 nt, Human herpesvirus 4 (Epstein-Barr virus)
gagcagaaggccaugg

SEQ ID NO: 142299 - RNA, 24 nt, Human herpesvirus 4 (Epstein-Barr virus)
gagcuguguuucccgacgccaaug

SEQ ID NO: 142300 - RNA, 11 nt, Human herpesvirus 4 (Epstein-Barr virus)
gaggaggacau

SEQ ID NO: 142301 - RNA, 17 nt, Human herpesvirus 4 (Epstein-Barr virus)
gaggagauccgccagga

SEQ ID NO: 142302 - RNA, 21 nt, Human herpesvirus 4 (Epstein-Barr virus)
gaggaaaggcuauaugagcua

SEQ ID NO: 142303 - RNA, 13 nt, Human herpesvirus 4 (Epstein-Barr virus)
gaggaaggccaca

SEQ ID NO: 142304 - RNA, 14 nt, Human herpesvirus 4 (Epstein-Barr virus)
gaggaaggccacaa

SEQ ID NO: 142305 - RNA, 16 nt, Human herpesvirus 4 (Epstein-Barr virus)
gaggaaggccacaaag

SEQ ID NO: 142306 - RNA, 15 nt, Human herpesvirus 4 (Epstein-Barr virus)
gacgcgacauguuuc

SEQ ID NO: 142307 - RNA, 13 nt, Human herpesvirus 4 (Epstein-Barr virus)
gacuacaccauca

SEQ ID NO: 142308 - RNA, 20 nt, Human herpesvirus 4 (Epstein-Barr virus)
gaccuugaccacgacuagcg

SEQ ID NO: 142309 - RNA, 12 nt, Human herpesvirus 4 (Epstein-Barr virus)
gacgccaaugcc

SEQ ID NO: 142310 - RNA, 20 nt, Human herpesvirus 4 (Epstein-Barr virus)
gacccuccugucaccaccuc

SEQ ID NO: 142311 - RNA, 14 nt, Human herpesvirus 4 (Epstein-Barr virus)
gaccuggcucaggu

SEQ ID NO: 142312 - RNA, 22 nt, Human herpesvirus 4 (Epstein-Barr virus)
gaccuuaacauccgagaccucc

SEQ ID NO: 142313 - RNA, 18 nt, Human herpesvirus 4 (Epstein-Barr virus)
gacaugagcauggaagac

SEQ ID NO: 142314 - RNA, 20 nt, Human herpesvirus 4 (Epstein-Barr virus)
gacauuuuauuuacagccau

SEQ ID NO: 142315 - RNA, 17 nt, Human herpesvirus 4 (Epstein-Barr virus)
gacauguccgggugcau

SEQ ID NO: 142316 - RNA, 23 nt, Human herpesvirus 4 (Epstein-Barr virus)
gacauucacugggacaacuguca

SEQ ID NO: 142317 - RNA, 12 nt, Human herpesvirus 4 (Epstein-Barr virus)
gaccaaugccaa

SEQ ID NO: 142318 - RNA, 14 nt, Human herpesvirus 4 (Epstein-Barr virus)
gaccaaugccaaag

SEQ ID NO: 142319 - RNA, 17 nt, Human herpesvirus 4 (Epstein-Barr virus)
gaccaggucgaccaccu

SEQ ID NO: 142320 - RNA, 21 nt, Human herpesvirus 4 (Epstein-Barr virus)
gaccaguuuuucggaucccag

SEQ ID NO: 142321 - RNA, 17 nt, Human herpesvirus 4 (Epstein-Barr virus)
gacccaaagggacucaa

SEQ ID NO: 142322 - RNA, 17 nt, Human herpesvirus 4 (Epstein-Barr virus)
gaccaugcccagacuca

SEQ ID NO: 142323 - RNA, 13 nt, Human herpesvirus 4 (Epstein-Barr virus)
gaccaugcucagu

SEQ ID NO: 142324 - RNA, 20 nt, Human herpesvirus 4 (Epstein-Barr virus)
gacccauaccaggugccuuu

SEQ ID NO: 142325 - RNA, 22 nt, Human herpesvirus 4 (Epstein-Barr virus)
gacccaccauggaaucauuuga

SEQ ID NO: 142326 - RNA, 14 nt, Human herpesvirus 4 (Epstein-Barr virus)
cuacccucuuaggg

SEQ ID NO: 142327 - RNA, 12 nt, Human herpesvirus 4 (Epstein-Barr virus)
cuacaccccuga

SEQ ID NO: 142328 - RNA, 20 nt, Human herpesvirus 4 (Epstein-Barr virus)
cuacacucuggggucucagg

SEQ ID NO: 142329 - RNA, 21 nt, Human herpesvirus 4 (Epstein-Barr virus)
cuacacucuggggucucaggc

SEQ ID NO: 142330 - RNA, 22 nt, Human herpesvirus 4 (Epstein-Barr virus)
cuacacucuggggucucaggcc

SEQ ID NO: 142331 - RNA, 11 nt, Human herpesvirus 4 (Epstein-Barr virus)
cuaauguggug

SEQ ID NO: 142332 - RNA, 20 nt, Human herpesvirus 4 (Epstein-Barr virus)
cuaauguaccucauagacac

SEQ ID NO: 142333 - RNA, 19 nt, Human herpesvirus 4 (Epstein-Barr virus)
cuaauuguguauugcucuc

SEQ ID NO: 142334 - RNA, 20 nt, Human herpesvirus 4 (Epstein-Barr virus)
cuacaaaaguacacuagcug

SEQ ID NO: 142335 - RNA, 15 nt, Human herpesvirus 4 (Epstein-Barr virus)
cuacaauaaacccaa

SEQ ID NO: 142336 - RNA, 14 nt, Human herpesvirus 4 (Epstein-Barr virus)
cuaccuuccacgac

SEQ ID NO: 142337 - RNA, 18 nt, Human herpesvirus 4 (Epstein-Barr virus)
cuaccugucugauugcac

SEQ ID NO: 142338 - RNA, 15 nt, Human herpesvirus 4 (Epstein-Barr virus)
cuacgcagaggccau

SEQ ID NO: 142339 - RNA, 15 nt, Human herpesvirus 4 (Epstein-Barr virus)
cuacuugcucagguu

SEQ ID NO: 142340 - RNA, 20 nt, Human herpesvirus 4 (Epstein-Barr virus)
cuagucacacccguggaggu

SEQ ID NO: 142341 - RNA, 23 nt, Human herpesvirus 4 (Epstein-Barr virus)
cuacugguugucggagguggaga

SEQ ID NO: 142342 - RNA, 18 nt, Human herpesvirus 4 (Epstein-Barr virus)
cucaagcuacucaaugag

SEQ ID NO: 142343 - RNA, 20 nt, Human herpesvirus 4 (Epstein-Barr virus)
cucaaggcagucuccaccuu

SEQ ID NO: 142344 - RNA, 24 nt, Human herpesvirus 4 (Epstein-Barr virus)
cucaagggaggagugcugcaggua

SEQ ID NO: 142345 - RNA, 18 nt, Human herpesvirus 4 (Epstein-Barr virus)
cucaaggggcacgagaug

SEQ ID NO: 142346 - RNA, 17 nt, Human herpesvirus 4 (Epstein-Barr virus)
cucaggaucagggccaa

SEQ ID NO: 142347 - RNA, 19 nt, Human herpesvirus 4 (Epstein-Barr virus)
cucaggcaacaacuaugug

SEQ ID NO: 142348 - RNA, 23 nt, Human herpesvirus 4 (Epstein-Barr virus)
cucagcacuuugccagcaacuua

SEQ ID NO: 142349 - RNA, 19 nt, Human herpesvirus 4 (Epstein-Barr virus)
cucagagcugggaagaaug

SEQ ID NO: 142350 - RNA, 17 nt, Human herpesvirus 4 (Epstein-Barr virus)
cucagacaccaacacag

SEQ ID NO: 142351 - RNA, 13 nt, Human herpesvirus 4 (Epstein-Barr virus)
cucauagacacac

SEQ ID NO: 142352 - RNA, 12 nt, Human herpesvirus 4 (Epstein-Barr virus)
cucauccuggcc

SEQ ID NO: 142353 - RNA, 19 nt, Human herpesvirus 4 (Epstein-Barr virus)
cucaucuggaacgguggga

SEQ ID NO: 142354 - RNA, 16 nt, Human herpesvirus 4 (Epstein-Barr virus)
cucaucugugagacaa

SEQ ID NO: 142355 - RNA, 14 nt, Human herpesvirus 4 (Epstein-Barr virus)
cuauaaccacaacu

SEQ ID NO: 142356 - RNA, 16 nt, Human herpesvirus 4 (Epstein-Barr virus)
cuauaacccuuuccua

SEQ ID NO: 142357 - RNA, 17 nt, Human herpesvirus 4 (Epstein-Barr virus)
cuaguugguccaggguc

SEQ ID NO: 142358 - RNA, 19 nt, Human herpesvirus 4 (Epstein-Barr virus)
cucaacaaggagugccucu

SEQ ID NO: 142359 - RNA, 12 nt, Human herpesvirus 4 (Epstein-Barr virus)
cuaucacaggga

SEQ ID NO: 142360 - RNA, 17 nt, Human herpesvirus 4 (Epstein-Barr virus)
cuaucacagggacaucu

SEQ ID NO: 142361 - RNA, 18 nt, Human herpesvirus 4 (Epstein-Barr virus)
cuaucacagggacaucua

SEQ ID NO: 142362 - RNA, 17 nt, Human herpesvirus 4 (Epstein-Barr virus)
cgacaccggggugccaa

SEQ ID NO: 142363 - RNA, 16 nt, Human herpesvirus 4 (Epstein-Barr virus)
cgaaucugacauuucu

SEQ ID NO: 142364 - RNA, 16 nt, Human herpesvirus 4 (Epstein-Barr virus)
cgaagaacacuccaca

SEQ ID NO: 142365 - RNA, 23 nt, Human herpesvirus 4 (Epstein-Barr virus)
cgaagacccaucugagggcagug

SEQ ID NO: 142366 - RNA, 17 nt, Human herpesvirus 4 (Epstein-Barr virus)
cgcuuugccggcaucca

SEQ ID NO: 142367 - RNA, 14 nt, Human herpesvirus 4 (Epstein-Barr virus)
cgaccugccaaaga

SEQ ID NO: 142368 - RNA, 15 nt, Human herpesvirus 4 (Epstein-Barr virus)
cgaccugccaaagau

SEQ ID NO: 142369 - RNA, 23 nt, Human herpesvirus 4 (Epstein-Barr virus)
cgaccccaaggaaggcuugccaa

SEQ ID NO: 142370 - RNA, 14 nt, Human herpesvirus 4 (Epstein-Barr virus)
cgaccagucauguc

SEQ ID NO: 142371 - RNA, 13 nt, Human herpesvirus 4 (Epstein-Barr virus)
cggaccaggguca

SEQ ID NO: 142372 - RNA, 12 nt, Human herpesvirus 4 (Epstein-Barr virus)
cggaccuccuaa

SEQ ID NO: 142373 - RNA, 16 nt, Human herpesvirus 4 (Epstein-Barr virus)
cggagaaauccagcuu

SEQ ID NO: 142374 - RNA, 15 nt, Human herpesvirus 4 (Epstein-Barr virus)
cggauaaacaggggu

SEQ ID NO: 142375 - RNA, 21 nt, Human herpesvirus 4 (Epstein-Barr virus)
cggauaaacagggguaugugg

SEQ ID NO: 142376 - RNA, 15 nt, Human herpesvirus 4 (Epstein-Barr virus)
cggaggggaccacua

SEQ ID NO: 142377 - RNA, 20 nt, Human herpesvirus 4 (Epstein-Barr virus)
cggagauggaugacaccaug

SEQ ID NO: 142378 - RNA, 20 nt, Human herpesvirus 4 (Epstein-Barr virus)
cgggcguuggcccauaaaaa

SEQ ID NO: 142379 - RNA, 22 nt, Human herpesvirus 4 (Epstein-Barr virus)
cggaugagggacguaucugggc

SEQ ID NO: 142380 - RNA, 14 nt, Human herpesvirus 4 (Epstein-Barr virus)
cguccucuaccugg

SEQ ID NO: 142381 - RNA, 18 nt, Human herpesvirus 4 (Epstein-Barr virus)
cguaccaugagugccaug

SEQ ID NO: 142382 - RNA, 12 nt, Human herpesvirus 4 (Epstein-Barr virus)
cgucuaugcuua

SEQ ID NO: 142383 - RNA, 14 nt, Human herpesvirus 4 (Epstein-Barr virus)
cgucuccagcggcu

SEQ ID NO: 142384 - RNA, 16 nt, Human herpesvirus 4 (Epstein-Barr virus)
cgguuauaacugccag

SEQ ID NO: 142385 - RNA, 22 nt, Human herpesvirus 4 (Epstein-Barr virus)
cgguuauggcagagcuuugccc

SEQ ID NO: 142386 - RNA, 14 nt, Human herpesvirus 4 (Epstein-Barr virus)
cgguuucagcauca

SEQ ID NO: 142387 - RNA, 18 nt, Human herpesvirus 4 (Epstein-Barr virus)
cguaaaucccucucgccu

SEQ ID NO: 142388 - RNA, 13 nt, Human herpesvirus 4 (Epstein-Barr virus)
cggggugccaaga

SEQ ID NO: 142389 - RNA, 14 nt, Human herpesvirus 4 (Epstein-Barr virus)
cggguccuagcaca

SEQ ID NO: 142390 - RNA, 21 nt, Human herpesvirus 4 (Epstein-Barr virus)
cuaaaggcgcaguccgccaug

SEQ ID NO: 142391 - RNA, 13 nt, Human herpesvirus 4 (Epstein-Barr virus)
cgugggaaaaugg

SEQ ID NO: 142392 - RNA, 22 nt, Human herpesvirus 4 (Epstein-Barr virus)
cgugucauuuagaaaccuugcc

SEQ ID NO: 142393 - RNA, 11 nt, Human herpesvirus 4 (Epstein-Barr virus)
cgugugcaccc

SEQ ID NO: 142394 - RNA, 21 nt, Human herpesvirus 4 (Epstein-Barr virus)
cugucacaccagucccaacaa

SEQ ID NO: 142395 - RNA, 23 nt, Human herpesvirus 4 (Epstein-Barr virus)
cugucacaccagucccaacaacu

SEQ ID NO: 142396 - RNA, 19 nt, Human herpesvirus 4 (Epstein-Barr virus)
cugucauucuaucaauuaa

SEQ ID NO: 142397 - RNA, 12 nt, Human herpesvirus 4 (Epstein-Barr virus)
cuguaugguauu

SEQ ID NO: 142398 - RNA, 14 nt, Human herpesvirus 4 (Epstein-Barr virus)
cugguacguuggcu

SEQ ID NO: 142399 - RNA, 12 nt, Human herpesvirus 4 (Epstein-Barr virus)
cuggggcauuaa

SEQ ID NO: 142400 - RNA, 21 nt, Human herpesvirus 4 (Epstein-Barr virus)
cuggggccaaggacccccgcg

SEQ ID NO: 142401 - RNA, 15 nt, Human herpesvirus 4 (Epstein-Barr virus)
cuggagaucuucuca

SEQ ID NO: 142402 - RNA, 20 nt, Human herpesvirus 4 (Epstein-Barr virus)
cuggagucugcaugucuguu

SEQ ID NO: 142403 - RNA, 21 nt, Human herpesvirus 4 (Epstein-Barr virus)
cuggaggucuucucugacaaa

SEQ ID NO: 142404 - RNA, 18 nt, Human herpesvirus 4 (Epstein-Barr virus)
cuggaggccucaggcaac

SEQ ID NO: 142405 - RNA, 19 nt, Human herpesvirus 4 (Epstein-Barr virus)
cuggaggccucaggcaaca

SEQ ID NO: 142406 - RNA, 23 nt, Human herpesvirus 4 (Epstein-Barr virus)
cuggacguggcugcgguggugcg

SEQ ID NO: 142407 - RNA, 23 nt, Human herpesvirus 4 (Epstein-Barr virus)
cuggacucucuguuucuguacaa

SEQ ID NO: 142408 - RNA, 14 nt, Human herpesvirus 4 (Epstein-Barr virus)
cugcuccaccgccu

SEQ ID NO: 142409 - RNA, 14 nt, Human herpesvirus 4 (Epstein-Barr virus)
cuggacugugguau

SEQ ID NO: 142410 - RNA, 21 nt, Human herpesvirus 4 (Epstein-Barr virus)
cugccaagguugaagagcaga

SEQ ID NO: 142411 - RNA, 14 nt, Human herpesvirus 4 (Epstein-Barr virus)
cugccacauuggac

SEQ ID NO: 142412 - RNA, 16 nt, Human herpesvirus 4 (Epstein-Barr virus)
cugcacagaacaucac

SEQ ID NO: 142413 - RNA, 21 nt, Human herpesvirus 4 (Epstein-Barr virus)
cugcacagaacaucacugcca

SEQ ID NO: 142414 - RNA, 16 nt, Human herpesvirus 4 (Epstein-Barr virus)
cugcagagagccacau

SEQ ID NO: 142415 - RNA, 22 nt, Human herpesvirus 4 (Epstein-Barr virus)
cugcaggacacgugacaugucc

SEQ ID NO: 142416 - RNA, 16 nt, Human herpesvirus 4 (Epstein-Barr virus)
cuggacacacauggca

SEQ ID NO: 142417 - RNA, 15 nt, Human herpesvirus 4 (Epstein-Barr virus)
cuggacacaggacua

SEQ ID NO: 142418 - RNA, 16 nt, Human herpesvirus 4 (Epstein-Barr virus)
cugcguagaugagccu

SEQ ID NO: 142419 - RNA, 23 nt, Human herpesvirus 4 (Epstein-Barr virus)
cugcguccagacgcgauggcaca

SEQ ID NO: 142420 - RNA, 17 nt, Human herpesvirus 4 (Epstein-Barr virus)
cugcgugagaugaacac

SEQ ID NO: 142421 - RNA, 14 nt, Human herpesvirus 4 (Epstein-Barr virus)
cucuuuuacagugg

SEQ ID NO: 142422 - RNA, 16 nt, Human herpesvirus 4 (Epstein-Barr virus)
cucuuuuacagugguu

SEQ ID NO: 142423 - RNA, 19 nt, Human herpesvirus 4 (Epstein-Barr virus)
cucuuuuagaaacuaugca

SEQ ID NO: 142424 - RNA, 19 nt, Human herpesvirus 4 (Epstein-Barr virus)
cugaguucuacaaugccag

SEQ ID NO: 142425 - RNA, 20 nt, Human herpesvirus 4 (Epstein-Barr virus)
cugagcuggacgagguccug

SEQ ID NO: 142426 - RNA, 18 nt, Human herpesvirus 4 (Epstein-Barr virus)
cugagcgcacggccucaa

SEQ ID NO: 142427 - RNA, 17 nt, Human herpesvirus 4 (Epstein-Barr virus)
cugagcaccaacacaac

SEQ ID NO: 142428 - RNA, 12 nt, Human herpesvirus 4 (Epstein-Barr virus)
cugagaugugaa

SEQ ID NO: 142429 - RNA, 18 nt, Human herpesvirus 4 (Epstein-Barr virus)
cugagacagaggugcuca

SEQ ID NO: 142430 - RNA, 14 nt, Human herpesvirus 4 (Epstein-Barr virus)
cucccccagaucac

SEQ ID NO: 142431 - RNA, 15 nt, Human herpesvirus 4 (Epstein-Barr virus)
cucccacugucacug

SEQ ID NO: 142432 - RNA, 20 nt, Human herpesvirus 4 (Epstein-Barr virus)
cucaugggggaaugagggaa

SEQ ID NO: 142433 - RNA, 16 nt, Human herpesvirus 4 (Epstein-Barr virus)
cucaugguacggugau

SEQ ID NO: 142434 - RNA, 22 nt, Human herpesvirus 4 (Epstein-Barr virus)
cucauuacuuguucuuuuguaa

SEQ ID NO: 142435 - RNA, 23 nt, Human herpesvirus 4 (Epstein-Barr virus)
cucaugcgccagagcggcauccu

SEQ ID NO: 142436 - RNA, 19 nt, Human herpesvirus 4 (Epstein-Barr virus)
cucaugcuccuauggacac

SEQ ID NO: 142437 - RNA, 17 nt, Human herpesvirus 4 (Epstein-Barr virus)
cucccugacgguggugg

SEQ ID NO: 142438 - RNA, 17 nt, Human herpesvirus 4 (Epstein-Barr virus)
cuccgagaggaugaucc

SEQ ID NO: 142439 - RNA, 21 nt, Human herpesvirus 4 (Epstein-Barr virus)
cucugaaggauccaugcaagu

SEQ ID NO: 142440 - RNA, 16 nt, Human herpesvirus 4 (Epstein-Barr virus)
cucugaaaaugaugaa

SEQ ID NO: 142441 - RNA, 22 nt, Human herpesvirus 4 (Epstein-Barr virus)
cucucucuggagaucuucucac

SEQ ID NO: 142442 - RNA, 19 nt, Human herpesvirus 4 (Epstein-Barr virus)
cucucuguuucuguacaau

SEQ ID NO: 142443 - RNA, 22 nt, Human herpesvirus 4 (Epstein-Barr virus)
cucucucccccgggcgcugccu

SEQ ID NO: 142444 - RNA, 17 nt, Human herpesvirus 4 (Epstein-Barr virus)
cucucgaggucugcgau

SEQ ID NO: 142445 - RNA, 19 nt, Human herpesvirus 4 (Epstein-Barr virus)
cucucgcacucuuguugcu

SEQ ID NO: 142446 - RNA, 15 nt, Human herpesvirus 4 (Epstein-Barr virus)
cucuccagcaaccaa

SEQ ID NO: 142447 - RNA, 20 nt, Human herpesvirus 4 (Epstein-Barr virus)
cuuauuuggacaucuagugg

SEQ ID NO: 142448 - RNA, 24 nt, Human herpesvirus 4 (Epstein-Barr virus)
cuuauuauugaugugacuugugau

SEQ ID NO: 142449 - RNA, 13 nt, Human herpesvirus 4 (Epstein-Barr virus)
cuuccaacgcauc

SEQ ID NO: 142450 - RNA, 15 nt, Human herpesvirus 4 (Epstein-Barr virus)
cuuccagacuaugca

SEQ ID NO: 142451 - RNA, 18 nt, Human herpesvirus 4 (Epstein-Barr virus)
cuucccuguuugcuuuau

SEQ ID NO: 142452 - RNA, 22 nt, Human herpesvirus 4 (Epstein-Barr virus)
cuucucccucagagucuacucg

SEQ ID NO: 142453 - RNA, 15 nt, Human herpesvirus 4 (Epstein-Barr virus)
cuucucaugcuccua

SEQ ID NO: 142454 - RNA, 21 nt, Human herpesvirus 4 (Epstein-Barr virus)
cuucguagcuuugaugaggcu

SEQ ID NO: 142455 - RNA, 17 nt, Human herpesvirus 4 (Epstein-Barr virus)
cuucuguuaaggcuguu

SEQ ID NO: 142456 - RNA, 14 nt, Human herpesvirus 4 (Epstein-Barr virus)
cuucuguuugcauu

SEQ ID NO: 142457 - RNA, 14 nt, Human herpesvirus 4 (Epstein-Barr virus)
cuucucugacaaau

SEQ ID NO: 142458 - RNA, 12 nt, Human herpesvirus 4 (Epstein-Barr virus)
cuucucugcucg

SEQ ID NO: 142459 - RNA, 12 nt, Human herpesvirus 4 (Epstein-Barr virus)
cuucugcugcug

SEQ ID NO: 142460 - RNA, 14 nt, Human herpesvirus 4 (Epstein-Barr virus)
cuuacagcacauuu

SEQ ID NO: 142461 - RNA, 21 nt, Human herpesvirus 4 (Epstein-Barr virus)
cuuacagcacauuuuguucua

SEQ ID NO: 142462 - RNA, 14 nt, Human herpesvirus 4 (Epstein-Barr virus)
cuuacagccagaga

SEQ ID NO: 142463 - RNA, 17 nt, Human herpesvirus 4 (Epstein-Barr virus)
cuuaaccgcuacaaguu

SEQ ID NO: 142464 - RNA, 22 nt, Human herpesvirus 4 (Epstein-Barr virus)
cuuaaggccgagucaguuacac

SEQ ID NO: 142465 - RNA, 18 nt, Human herpesvirus 4 (Epstein-Barr virus)
cuuagggcgccagggauc

SEQ ID NO: 142466 - RNA, 16 nt, Human herpesvirus 4 (Epstein-Barr virus)
cuguuccuucugcucc

SEQ ID NO: 142467 - RNA, 15 nt, Human herpesvirus 4 (Epstein-Barr virus)
cuguuugcuuuaugg

SEQ ID NO: 142468 - RNA, 23 nt, Human herpesvirus 4 (Epstein-Barr virus)
cuguuuguccagcagggccuuga

SEQ ID NO: 142469 - RNA, 23 nt, Human herpesvirus 4 (Epstein-Barr virus)
cugucccuggagcuggugcaccu

SEQ ID NO: 142470 - RNA, 18 nt, Human herpesvirus 4 (Epstein-Barr virus)
cuguuaugaaaugcaggu

SEQ ID NO: 142471 - RNA, 17 nt, Human herpesvirus 4 (Epstein-Barr virus)
cuguuauggccaugaua

SEQ ID NO: 142472 - RNA, 16 nt, Human herpesvirus 4 (Epstein-Barr virus)
cugugucccacuccac

SEQ ID NO: 142473 - RNA, 14 nt, Human herpesvirus 4 (Epstein-Barr virus)
cuguguacgugccu

SEQ ID NO: 142474 - RNA, 22 nt, Human herpesvirus 4 (Epstein-Barr virus)
uaaggcucugaagcaacagguc

SEQ ID NO: 142475 - RNA, 14 nt, Human herpesvirus 4 (Epstein-Barr virus)
uaaggcuguugaca

SEQ ID NO: 142476 - RNA, 21 nt, Human herpesvirus 4 (Epstein-Barr virus)
uaagaugcauacgcugaguga

SEQ ID NO: 142477 - RNA, 17 nt, Human herpesvirus 4 (Epstein-Barr virus)
uaagagucccuccucac

SEQ ID NO: 142478 - RNA, 21 nt, Human herpesvirus 4 (Epstein-Barr virus)
uaacccuguagucaccugcac

SEQ ID NO: 142479 - RNA, 19 nt, Human herpesvirus 4 (Epstein-Barr virus)
uaaccuuaacaccugcagc

SEQ ID NO: 142480 - RNA, 19 nt, Human herpesvirus 4 (Epstein-Barr virus)
uaagaagcuacaccggcca

SEQ ID NO: 142481 - RNA, 17 nt, Human herpesvirus 4 (Epstein-Barr virus)
uaacaggugggacaaaa

SEQ ID NO: 142482 - RNA, 20 nt, Human herpesvirus 4 (Epstein-Barr virus)
uaacaggugggacaaaaugg

SEQ ID NO: 142483 - RNA, 14 nt, Human herpesvirus 4 (Epstein-Barr virus)
uaaccccuaccucg

SEQ ID NO: 142484 - RNA, 15 nt, Human herpesvirus 4 (Epstein-Barr virus)
uaaccacaacugcua

SEQ ID NO: 142485 - RNA, 16 nt, Human herpesvirus 4 (Epstein-Barr virus)
uaaccacaacugcuau

SEQ ID NO: 142486 - RNA, 16 nt, Human herpesvirus 4 (Epstein-Barr virus)
uaaccaugccaucucu

SEQ ID NO: 142487 - RNA, 22 nt, Human herpesvirus 4 (Epstein-Barr virus)
uaaccaugccaucucugauuau

SEQ ID NO: 142488 - RNA, 19 nt, Human herpesvirus 4 (Epstein-Barr virus)
uaaaguuggucaggcugac

SEQ ID NO: 142489 - RNA, 17 nt, Human herpesvirus 4 (Epstein-Barr virus)
guuuuuacccaucacac

SEQ ID NO: 142490 - RNA, 18 nt, Human herpesvirus 4 (Epstein-Barr virus)
uaaaaaaccaaacuaaca

SEQ ID NO: 142491 - RNA, 23 nt, Human herpesvirus 4 (Epstein-Barr virus)
gugggaaaauaguuccaggugac

SEQ ID NO: 142492 - RNA, 17 nt, Human herpesvirus 4 (Epstein-Barr virus)
gugggaggcgaauguag

SEQ ID NO: 142493 - RNA, 19 nt, Human herpesvirus 4 (Epstein-Barr virus)
guggucaccgcgaccaaga

SEQ ID NO: 142494 - RNA, 17 nt, Human herpesvirus 4 (Epstein-Barr virus)
guggucaccgguggugg

SEQ ID NO: 142495 - RNA, 20 nt, Human herpesvirus 4 (Epstein-Barr virus)
gugguggcauuaauguccag

SEQ ID NO: 142496 - RNA, 15 nt, Human herpesvirus 4 (Epstein-Barr virus)
guggugggggcuaug

SEQ ID NO: 142497 - RNA, 14 nt, Human herpesvirus 4 (Epstein-Barr virus)
gugguaacaggugg

SEQ ID NO: 142498 - RNA, 20 nt, Human herpesvirus 4 (Epstein-Barr virus)
gugggucauuggcaaaaagg

SEQ ID NO: 142499 - RNA, 18 nt, Human herpesvirus 4 (Epstein-Barr virus)
uaaacgugauggugcugg

SEQ ID NO: 142500 - RNA, 18 nt, Human herpesvirus 4 (Epstein-Barr virus)
uaaucagaaauuugcacu

SEQ ID NO: 142501 - RNA, 18 nt, Human herpesvirus 4 (Epstein-Barr virus)
uaauacggguaguagcac

SEQ ID NO: 142502 - RNA, 22 nt, Human herpesvirus 4 (Epstein-Barr virus)
uaaucgcagcucuaacuuggca

SEQ ID NO: 142503 - RNA, 21 nt, Human herpesvirus 4 (Epstein-Barr virus)
uaaucuggauguauuaccaug

SEQ ID NO: 142504 - RNA, 19 nt, Human herpesvirus 4 (Epstein-Barr virus)
uaaugauguccaguucccu

SEQ ID NO: 142505 - RNA, 19 nt, Human herpesvirus 4 (Epstein-Barr virus)
uaauguaccucauagacac

SEQ ID NO: 142506 - RNA, 15 nt, Human herpesvirus 4 (Epstein-Barr virus)
uaaugacuaugagga

SEQ ID NO: 142507 - RNA, 12 nt, Human herpesvirus 4 (Epstein-Barr virus)
uaaugugguggg

SEQ ID NO: 142508 - RNA, 17 nt, Human herpesvirus 4 (Epstein-Barr virus)
uacaaacacuacaauaa

SEQ ID NO: 142509 - RNA, 23 nt, Human herpesvirus 4 (Epstein-Barr virus)
uacaacaggcugcugaaaaccgg

SEQ ID NO: 142510 - RNA, 20 nt, Human herpesvirus 4 (Epstein-Barr virus)
uacagauagauggcacucuu

SEQ ID NO: 142511 - RNA, 18 nt, Human herpesvirus 4 (Epstein-Barr virus)
uaccaaagcuaacuguac

SEQ ID NO: 142512 - RNA, 16 nt, Human herpesvirus 4 (Epstein-Barr virus)
uaccaggcauacagca

SEQ ID NO: 142513 - RNA, 14 nt, Human herpesvirus 4 (Epstein-Barr virus)
uaccaggugccuuu

SEQ ID NO: 142514 - RNA, 20 nt, Human herpesvirus 4 (Epstein-Barr virus)
uacaccgagcagaaggccau

SEQ ID NO: 142515 - RNA, 22 nt, Human herpesvirus 4 (Epstein-Barr virus)
uacacucuggggucucaggccu

SEQ ID NO: 142516 - RNA, 14 nt, Human herpesvirus 4 (Epstein-Barr virus)
uacaccccugagaa

SEQ ID NO: 142517 - RNA, 14 nt, Human herpesvirus 4 (Epstein-Barr virus)
uaccgagauguaca

SEQ ID NO: 142518 - RNA, 21 nt, Human herpesvirus 4 (Epstein-Barr virus)
uaccccaaaacuauaccaaag

SEQ ID NO: 142519 - RNA, 17 nt, Human herpesvirus 4 (Epstein-Barr virus)
uacccagaggaggacau

SEQ ID NO: 142520 - RNA, 16 nt, Human herpesvirus 4 (Epstein-Barr virus)
uaccaugagugccaug

SEQ ID NO: 142521 - RNA, 19 nt, Human herpesvirus 4 (Epstein-Barr virus)
uaccaugagugccaugugu

SEQ ID NO: 142522 - RNA, 14 nt, Human herpesvirus 4 (Epstein-Barr virus)
uacccaaaccaaau

SEQ ID NO: 142523 - RNA, 18 nt, Human herpesvirus 4 (Epstein-Barr virus)
uacccaaaccaaauguag

SEQ ID NO: 142524 - RNA, 17 nt, Human herpesvirus 4 (Epstein-Barr virus)
uaguugguccagggucc

SEQ ID NO: 142525 - RNA, 18 nt, Human herpesvirus 4 (Epstein-Barr virus)
uauaaccacaacugcuau

SEQ ID NO: 142526 - RNA, 19 nt, Human herpesvirus 4 (Epstein-Barr virus)
uagggggaggggggaaucu

SEQ ID NO: 142527 - RNA, 21 nt, Human herpesvirus 4 (Epstein-Barr virus)
uagggagguggccacacuggg

SEQ ID NO: 142528 - RNA, 22 nt, Human herpesvirus 4 (Epstein-Barr virus)
uagcgccgcgguuucagcauca

SEQ ID NO: 142529 - RNA, 14 nt, Human herpesvirus 4 (Epstein-Barr virus)
uagccccgggccca

SEQ ID NO: 142530 - RNA, 16 nt, Human herpesvirus 4 (Epstein-Barr virus)
uagccuccgcgcuaau

SEQ ID NO: 142531 - RNA, 18 nt, Human herpesvirus 4 (Epstein-Barr virus)
uagcgaggauaaucuggg

SEQ ID NO: 142532 - RNA, 18 nt, Human herpesvirus 4 (Epstein-Barr virus)
uagccuauuugcacguug

SEQ ID NO: 142533 - RNA, 15 nt, Human herpesvirus 4 (Epstein-Barr virus)
uacucuccacuccca

SEQ ID NO: 142534 - RNA, 21 nt, Human herpesvirus 4 (Epstein-Barr virus)
uacucggcuagccugacuaag

SEQ ID NO: 142535 - RNA, 16 nt, Human herpesvirus 4 (Epstein-Barr virus)
uacucgaccagcacgu

SEQ ID NO: 142536 - RNA, 21 nt, Human herpesvirus 4 (Epstein-Barr virus)
uacucagaugaagacgaggag

SEQ ID NO: 142537 - RNA, 14 nt, Human herpesvirus 4 (Epstein-Barr virus)
uaucacaggacaag

SEQ ID NO: 142538 - RNA, 18 nt, Human herpesvirus 4 (Epstein-Barr virus)
uaucacagggacaucuac

SEQ ID NO: 142539 - RNA, 16 nt, Human herpesvirus 4 (Epstein-Barr virus)
uaucacaucaagcaga

SEQ ID NO: 142540 - RNA, 18 nt, Human herpesvirus 4 (Epstein-Barr virus)
uaucaccguaccaugagu

SEQ ID NO: 142541 - RNA, 14 nt, Human herpesvirus 4 (Epstein-Barr virus)
uauaaugacuauga

SEQ ID NO: 142542 - RNA, 15 nt, Human herpesvirus 4 (Epstein-Barr virus)
uaucagaauuagcau

SEQ ID NO: 142543 - RNA, 17 nt, Human herpesvirus 4 (Epstein-Barr virus)
uaugaugaggacucuga

SEQ ID NO: 142544 - RNA, 18 nt, Human herpesvirus 4 (Epstein-Barr virus)
uaugaugaggacucugaa

SEQ ID NO: 142545 - RNA, 19 nt, Human herpesvirus 4 (Epstein-Barr virus)
uaugcaaugcccacccacu

SEQ ID NO: 142546 - RNA, 15 nt, Human herpesvirus 4 (Epstein-Barr virus)
uaugagcgauuuuau

SEQ ID NO: 142547 - RNA, 13 nt, Human herpesvirus 4 (Epstein-Barr virus)
uaucuuugcugaa

SEQ ID NO: 142548 - RNA, 16 nt, Human herpesvirus 4 (Epstein-Barr virus)
uaugaaaauguguauu

SEQ ID NO: 142549 - RNA, 19 nt, Human herpesvirus 4 (Epstein-Barr virus)
uaugaaggcuggcaaagau

SEQ ID NO: 142550 - RNA, 18 nt, Human herpesvirus 4 (Epstein-Barr virus)
uauguauugggacuugaa

SEQ ID NO: 142551 - RNA, 13 nt, Human herpesvirus 4 (Epstein-Barr virus)
ucaaacauggugu

SEQ ID NO: 142552 - RNA, 21 nt, Human herpesvirus 4 (Epstein-Barr virus)
uauuuggacgagagcaugcca

SEQ ID NO: 142553 - RNA, 18 nt, Human herpesvirus 4 (Epstein-Barr virus)
uauuucugacaucccagu

SEQ ID NO: 142554 - RNA, 19 nt, Human herpesvirus 4 (Epstein-Barr virus)
uauucugagcaccaacaca

SEQ ID NO: 142555 - RNA, 16 nt, Human herpesvirus 4 (Epstein-Barr virus)
ucaacuuuacuuuuau

SEQ ID NO: 142556 - RNA, 18 nt, Human herpesvirus 4 (Epstein-Barr virus)
ucaaccuaauuacauggu

SEQ ID NO: 142557 - RNA, 21 nt, Human herpesvirus 4 (Epstein-Barr virus)
ucaaauaccgagauguacaua

SEQ ID NO: 142558 - RNA, 14 nt, Human herpesvirus 4 (Epstein-Barr virus)
ucaaagaacaaggc

SEQ ID NO: 142559 - RNA, 22 nt, Human herpesvirus 4 (Epstein-Barr virus)
ucaauaauaagggcgccaucua

SEQ ID NO: 142560 - RNA, 16 nt, Human herpesvirus 4 (Epstein-Barr virus)
ucaagcagaaaggcca

SEQ ID NO: 142561 - RNA, 17 nt, Human herpesvirus 4 (Epstein-Barr virus)
ucaaggcucugcacagg

SEQ ID NO: 142562 - RNA, 18 nt, Human herpesvirus 4 (Epstein-Barr virus)
ucaauccauuaucuuggc

SEQ ID NO: 142563 - RNA, 15 nt, Human herpesvirus 4 (Epstein-Barr virus)
ggccagguacaggac

SEQ ID NO: 142564 - RNA, 11 nt, Human herpesvirus 4 (Epstein-Barr virus)
ggccagucucc

SEQ ID NO: 142565 - RNA, 18 nt, Human herpesvirus 4 (Epstein-Barr virus)
ggcaggcuacaacaggcu

SEQ ID NO: 142566 - RNA, 21 nt, Human herpesvirus 4 (Epstein-Barr virus)
ggcaguccuugugucucuauc

SEQ ID NO: 142567 - RNA, 22 nt, Human herpesvirus 4 (Epstein-Barr virus)
ggcaguccuugugucucuauca

SEQ ID NO: 142568 - RNA, 14 nt, Human herpesvirus 4 (Epstein-Barr virus)
ggcagcuauauuca

SEQ ID NO: 142569 - RNA, 15 nt, Human herpesvirus 4 (Epstein-Barr virus)
ggcagcaaucucggc

SEQ ID NO: 142570 - RNA, 16 nt, Human herpesvirus 4 (Epstein-Barr virus)
ggcagacacacgugua

SEQ ID NO: 142571 - RNA, 21 nt, Human herpesvirus 4 (Epstein-Barr virus)
ggcagaaugaccgugcaugca

SEQ ID NO: 142572 - RNA, 17 nt, Human herpesvirus 4 (Epstein-Barr virus)
ggcacggagagugcccu

SEQ ID NO: 142573 - RNA, 22 nt, Human herpesvirus 4 (Epstein-Barr virus)
ggcacucgcccacuaaccuuaa

SEQ ID NO: 142574 - RNA, 16 nt, Human herpesvirus 4 (Epstein-Barr virus)
ggcaccgaucaucucg

SEQ ID NO: 142575 - RNA, 11 nt, Human herpesvirus 4 (Epstein-Barr virus)
ggcaccuuuaa

SEQ ID NO: 142576 - RNA, 23 nt, Human herpesvirus 4 (Epstein-Barr virus)
ggagggcagcgaagaacacucca

SEQ ID NO: 142577 - RNA, 16 nt, Human herpesvirus 4 (Epstein-Barr virus)
ggaggucuucucugac

SEQ ID NO: 142578 - RNA, 22 nt, Human herpesvirus 4 (Epstein-Barr virus)
ggaggccuucugcguccagacg

SEQ ID NO: 142579 - RNA, 12 nt, Human herpesvirus 4 (Epstein-Barr virus)
ggaggcugcuaa

SEQ ID NO: 142580 - RNA, 22 nt, Human herpesvirus 4 (Epstein-Barr virus)
ggaguaccugcgucucauuccc

SEQ ID NO: 142581 - RNA, 13 nt, Human herpesvirus 4 (Epstein-Barr virus)
ggaggccccggcc

SEQ ID NO: 142582 - RNA, 19 nt, Human herpesvirus 4 (Epstein-Barr virus)
ggaggagacuggcaacucc

SEQ ID NO: 142583 - RNA, 13 nt, Human herpesvirus 4 (Epstein-Barr virus)
ggaggacacugcc

SEQ ID NO: 142584 - RNA, 14 nt, Human herpesvirus 4 (Epstein-Barr virus)
ggaggacagcgugg

SEQ ID NO: 142585 - RNA, 21 nt, Human herpesvirus 4 (Epstein-Barr virus)
ggaggaccugguggugacauu

SEQ ID NO: 142586 - RNA, 20 nt, Human herpesvirus 4 (Epstein-Barr virus)
ggccgcugccaggccgccau

SEQ ID NO: 142587 - RNA, 19 nt, Human herpesvirus 4 (Epstein-Barr virus)
ggccgagaagcuugugaac

SEQ ID NO: 142588 - RNA, 15 nt, Human herpesvirus 4 (Epstein-Barr virus)
ggcccgcuucauuca

SEQ ID NO: 142589 - RNA, 15 nt, Human herpesvirus 4 (Epstein-Barr virus)
ggcccggaugaucuc

SEQ ID NO: 142590 - RNA, 19 nt, Human herpesvirus 4 (Epstein-Barr virus)
ggccaugaaucugacucua

SEQ ID NO: 142591 - RNA, 23 nt, Human herpesvirus 4 (Epstein-Barr virus)
ggccaugauacucaucugugaga

SEQ ID NO: 142592 - RNA, 14 nt, Human herpesvirus 4 (Epstein-Barr virus)
ggcccaccuaaaga

SEQ ID NO: 142593 - RNA, 12 nt, Human herpesvirus 4 (Epstein-Barr virus)
ggcccacugcag

SEQ ID NO: 142594 - RNA, 17 nt, Human herpesvirus 4 (Epstein-Barr virus)
ggcccagcccuccucag

SEQ ID NO: 142595 - RNA, 22 nt, Human herpesvirus 4 (Epstein-Barr virus)
ggcccaggaccuuggccggugg

SEQ ID NO: 142596 - RNA, 13 nt, Human herpesvirus 4 (Epstein-Barr virus)
ggcgucuaugcuu

SEQ ID NO: 142597 - RNA, 18 nt, Human herpesvirus 4 (Epstein-Barr virus)
ggcgaaucugacauuucu

SEQ ID NO: 142598 - RNA, 13 nt, Human herpesvirus 4 (Epstein-Barr virus)
ggcgagacuugga

SEQ ID NO: 142599 - RNA, 13 nt, Human herpesvirus 4 (Epstein-Barr virus)
ggccuucucugau

SEQ ID NO: 142600 - RNA, 15 nt, Human herpesvirus 4 (Epstein-Barr virus)
ggccuuguucuuuga

SEQ ID NO: 142601 - RNA, 15 nt, Human herpesvirus 4 (Epstein-Barr virus)
ggccuuuucccucau

SEQ ID NO: 142602 - RNA, 22 nt, Human herpesvirus 4 (Epstein-Barr virus)
ggccucggcggggaacgugaca

SEQ ID NO: 142603 - RNA, 15 nt, Human herpesvirus 4 (Epstein-Barr virus)
ggccuggacuguggu

SEQ ID NO: 142604 - RNA, 15 nt, Human herpesvirus 4 (Epstein-Barr virus)
ggagacacaucugga

SEQ ID NO: 142605 - RNA, 21 nt, Human herpesvirus 4 (Epstein-Barr virus)
ggacguuggcgggacuggcac

SEQ ID NO: 142606 - RNA, 14 nt, Human herpesvirus 4 (Epstein-Barr virus)
ggacuuccaugucu

SEQ ID NO: 142607 - RNA, 16 nt, Human herpesvirus 4 (Epstein-Barr virus)
ggagcagggcccagug

SEQ ID NO: 142608 - RNA, 21 nt, Human herpesvirus 4 (Epstein-Barr virus)
ggagccaccacagcacaagug

SEQ ID NO: 142609 - RNA, 22 nt, Human herpesvirus 4 (Epstein-Barr virus)
ggagaugagauagaggaccgga

SEQ ID NO: 142610 - RNA, 18 nt, Human herpesvirus 4 (Epstein-Barr virus)
ggagaugggugcauuuca

SEQ ID NO: 142611 - RNA, 18 nt, Human herpesvirus 4 (Epstein-Barr virus)
ggagcaaccagcugguca

SEQ ID NO: 142612 - RNA, 19 nt, Human herpesvirus 4 (Epstein-Barr virus)
ggagauaauguacagacua

SEQ ID NO: 142613 - RNA, 13 nt, Human herpesvirus 4 (Epstein-Barr virus)
ggagagcuggaug

SEQ ID NO: 142614 - RNA, 12 nt, Human herpesvirus 4 (Epstein-Barr virus)
ggacauguuugg

SEQ ID NO: 142615 - RNA, 15 nt, Human herpesvirus 4 (Epstein-Barr virus)
ggaccccccucugau

SEQ ID NO: 142616 - RNA, 18 nt, Human herpesvirus 4 (Epstein-Barr virus)
ggacccggaccaaugcca

SEQ ID NO: 142617 - RNA, 19 nt, Human herpesvirus 4 (Epstein-Barr virus)
ggaccgggagccucagugu

SEQ ID NO: 142618 - RNA, 14 nt, Human herpesvirus 4 (Epstein-Barr virus)
ggacgagguccugg

SEQ ID NO: 142619 - RNA, 14 nt, Human herpesvirus 4 (Epstein-Barr virus)
ggacuacgugucca

SEQ ID NO: 142620 - RNA, 12 nt, Human herpesvirus 4 (Epstein-Barr virus)
ggacgucccuuu

SEQ ID NO: 142621 - RNA, 17 nt, Human herpesvirus 4 (Epstein-Barr virus)
ggaaagggcauguggug

SEQ ID NO: 142622 - RNA, 16 nt, Human herpesvirus 4 (Epstein-Barr virus)
ggaaggccacaaagag

SEQ ID NO: 142623 - RNA, 16 nt, Human herpesvirus 4 (Epstein-Barr virus)
ggaagggcaccguggg

SEQ ID NO: 142624 - RNA, 17 nt, Human herpesvirus 4 (Epstein-Barr virus)
ggaaaauauauugcaaa

SEQ ID NO: 142625 - RNA, 15 nt, Human herpesvirus 4 (Epstein-Barr virus)
ggaaaagggcccagg

SEQ ID NO: 142626 - RNA, 13 nt, Human herpesvirus 4 (Epstein-Barr virus)
ggacaacagguca

SEQ ID NO: 142627 - RNA, 12 nt, Human herpesvirus 4 (Epstein-Barr virus)
ggacaacuguca

SEQ ID NO: 142628 - RNA, 19 nt, Human herpesvirus 4 (Epstein-Barr virus)
ggacaacugucacaccagu

SEQ ID NO: 142629 - RNA, 18 nt, Human herpesvirus 4 (Epstein-Barr virus)
ggacagcgccacauacac

SEQ ID NO: 142630 - RNA, 12 nt, Human herpesvirus 4 (Epstein-Barr virus)
gcuaacaggaca

SEQ ID NO: 142631 - RNA, 13 nt, Human herpesvirus 4 (Epstein-Barr virus)
gcuaacaggacau

SEQ ID NO: 142632 - RNA, 17 nt, Human herpesvirus 4 (Epstein-Barr virus)
gcuaacaggacauguuu

SEQ ID NO: 142633 - RNA, 21 nt, Human herpesvirus 4 (Epstein-Barr virus)
gcgggugaugguacggaugau

SEQ ID NO: 142634 - RNA, 14 nt, Human herpesvirus 4 (Epstein-Barr virus)
gcggcuacaucuac

SEQ ID NO: 142635 - RNA, 23 nt, Human herpesvirus 4 (Epstein-Barr virus)
gcggcaucauguuuuuggcaugu

SEQ ID NO: 142636 - RNA, 17 nt, Human herpesvirus 4 (Epstein-Barr virus)
gcggagagggaugggcu

SEQ ID NO: 142637 - RNA, 21 nt, Human herpesvirus 4 (Epstein-Barr virus)
gccccagccacacuggcucuc

SEQ ID NO: 142638 - RNA, 20 nt, Human herpesvirus 4 (Epstein-Barr virus)
gcccauucucguccaucucg

SEQ ID NO: 142639 - RNA, 21 nt, Human herpesvirus 4 (Epstein-Barr virus)
gcccauucucguccaucucga

SEQ ID NO: 142640 - RNA, 11 nt, Human herpesvirus 4 (Epstein-Barr virus)
gccauggugcc

SEQ ID NO: 142641 - RNA, 22 nt, Human herpesvirus 4 (Epstein-Barr virus)
gccauuguuuaccgccaucgca

SEQ ID NO: 142642 - RNA, 14 nt, Human herpesvirus 4 (Epstein-Barr virus)
gcccacgccauacc

SEQ ID NO: 142643 - RNA, 16 nt, Human herpesvirus 4 (Epstein-Barr virus)
gcccacgucaaggccc

SEQ ID NO: 142644 - RNA, 18 nt, Human herpesvirus 4 (Epstein-Barr virus)
gcccacuaaccuuaacac

SEQ ID NO: 142645 - RNA, 15 nt, Human herpesvirus 4 (Epstein-Barr virus)
gcccaguaugcaguc

SEQ ID NO: 142646 - RNA, 19 nt, Human herpesvirus 4 (Epstein-Barr virus)
gcccaguaugcagucucaa

SEQ ID NO: 142647 - RNA, 19 nt, Human herpesvirus 4 (Epstein-Barr virus)
gcccagggucacuggcuua

SEQ ID NO: 142648 - RNA, 16 nt, Human herpesvirus 4 (Epstein-Barr virus)
gcccaccuaugugacc

SEQ ID NO: 142649 - RNA, 12 nt, Human herpesvirus 4 (Epstein-Barr virus)
gcugagaccaug

SEQ ID NO: 142650 - RNA, 17 nt, Human herpesvirus 4 (Epstein-Barr virus)
gcugacauauguacaau

SEQ ID NO: 142651 - RNA, 21 nt, Human herpesvirus 4 (Epstein-Barr virus)
gcucagcuuggggccaccggg

SEQ ID NO: 142652 - RNA, 18 nt, Human herpesvirus 4 (Epstein-Barr virus)
gcucuucauguccacuga

SEQ ID NO: 142653 - RNA, 11 nt, Human herpesvirus 4 (Epstein-Barr virus)
gcucacauugu

SEQ ID NO: 142654 - RNA, 12 nt, Human herpesvirus 4 (Epstein-Barr virus)
gcucacauuguc

SEQ ID NO: 142655 - RNA, 20 nt, Human herpesvirus 4 (Epstein-Barr virus)
gcucacauuguccucaccaa

SEQ ID NO: 142656 - RNA, 16 nt, Human herpesvirus 4 (Epstein-Barr virus)
gcucaccccugugcag

SEQ ID NO: 142657 - RNA, 18 nt, Human herpesvirus 4 (Epstein-Barr virus)
gcucagccccuuggcaca

SEQ ID NO: 142658 - RNA, 14 nt, Human herpesvirus 4 (Epstein-Barr virus)
gcuaauguaccuca

SEQ ID NO: 142659 - RNA, 21 nt, Human herpesvirus 4 (Epstein-Barr virus)
gcuaauguaccucauagacac

SEQ ID NO: 142660 - RNA, 20 nt, Human herpesvirus 4 (Epstein-Barr virus)
gcuauucugagcaccaacac

SEQ ID NO: 142661 - RNA, 14 nt, Human herpesvirus 4 (Epstein-Barr virus)
gcucaaacgcugcu

SEQ ID NO: 142662 - RNA, 18 nt, Human herpesvirus 4 (Epstein-Barr virus)
gcucaaagaaguuaccug

SEQ ID NO: 142663 - RNA, 11 nt, Human herpesvirus 4 (Epstein-Barr virus)
gcuugauggcc

SEQ ID NO: 142664 - RNA, 17 nt, Human herpesvirus 4 (Epstein-Barr virus)
gcuuuucuccucagucu

SEQ ID NO: 142665 - RNA, 18 nt, Human herpesvirus 4 (Epstein-Barr virus)
gcuucgcaaguuccucaa

SEQ ID NO: 142666 - RNA, 23 nt, Human herpesvirus 4 (Epstein-Barr virus)
gcuuccacccccuggagccagcg

SEQ ID NO: 142667 - RNA, 12 nt, Human herpesvirus 4 (Epstein-Barr virus)
gcuggcaaagau

SEQ ID NO: 142668 - RNA, 18 nt, Human herpesvirus 4 (Epstein-Barr virus)
gcuggacuccgaggacca

SEQ ID NO: 142669 - RNA, 21 nt, Human herpesvirus 4 (Epstein-Barr virus)
gcuggagauuuucccacugug

SEQ ID NO: 142670 - RNA, 17 nt, Human herpesvirus 4 (Epstein-Barr virus)
gcuggcccaccuaaaga

SEQ ID NO: 142671 - RNA, 18 nt, Human herpesvirus 4 (Epstein-Barr virus)
gugcgcccugcucucgau

SEQ ID NO: 142672 - RNA, 17 nt, Human herpesvirus 4 (Epstein-Barr virus)
gugcgaggaacuggcuc

SEQ ID NO: 142673 - RNA, 14 nt, Human herpesvirus 4 (Epstein-Barr virus)
gugccuugcucuca

SEQ ID NO: 142674 - RNA, 12 nt, Human herpesvirus 4 (Epstein-Barr virus)
gugccugagaca

SEQ ID NO: 142675 - RNA, 17 nt, Human herpesvirus 4 (Epstein-Barr virus)
gugccucagauagccgg

SEQ ID NO: 142676 - RNA, 17 nt, Human herpesvirus 4 (Epstein-Barr virus)
gugccucgucuaccucu

SEQ ID NO: 142677 - RNA, 16 nt, Human herpesvirus 4 (Epstein-Barr virus)
gugcauggauauagcu

SEQ ID NO: 142678 - RNA, 14 nt, Human herpesvirus 4 (Epstein-Barr virus)
gugcauggcagcag

SEQ ID NO: 142679 - RNA, 17 nt, Human herpesvirus 4 (Epstein-Barr virus)
gugccaagauaauggau

SEQ ID NO: 142680 - RNA, 12 nt, Human herpesvirus 4 (Epstein-Barr virus)
gugccaccaucu

SEQ ID NO: 142681 - RNA, 16 nt, Human herpesvirus 4 (Epstein-Barr virus)
gugccagaugugccug

SEQ ID NO: 142682 - RNA, 19 nt, Human herpesvirus 4 (Epstein-Barr virus)
gugccauguggcaucguca

SEQ ID NO: 142683 - RNA, 16 nt, Human herpesvirus 4 (Epstein-Barr virus)
gugccaugugugucca

SEQ ID NO: 142684 - RNA, 20 nt, Human herpesvirus 4 (Epstein-Barr virus)
gugauuaggcacuggacaca

SEQ ID NO: 142685 - RNA, 12 nt, Human herpesvirus 4 (Epstein-Barr virus)
gugaucauggaa

SEQ ID NO: 142686 - RNA, 23 nt, Human herpesvirus 4 (Epstein-Barr virus)
gugagguguuguguccuguaugg

SEQ ID NO: 142687 - RNA, 13 nt, Human herpesvirus 4 (Epstein-Barr virus)
gugagggugccau

SEQ ID NO: 142688 - RNA, 14 nt, Human herpesvirus 4 (Epstein-Barr virus)
gugauaacugacag

SEQ ID NO: 142689 - RNA, 22 nt, Human herpesvirus 4 (Epstein-Barr virus)
gugacgaggauggaaagggcau

SEQ ID NO: 142690 - RNA, 13 nt, Human herpesvirus 4 (Epstein-Barr virus)
gugacuacaccau

SEQ ID NO: 142691 - RNA, 14 nt, Human herpesvirus 4 (Epstein-Barr virus)
gugacuggugcuug

SEQ ID NO: 142692 - RNA, 19 nt, Human herpesvirus 4 (Epstein-Barr virus)
gucuuuccucuuauuacau

SEQ ID NO: 142693 - RNA, 20 nt, Human herpesvirus 4 (Epstein-Barr virus)
gucuuguccuuggugugcac

SEQ ID NO: 142694 - RNA, 16 nt, Human herpesvirus 4 (Epstein-Barr virus)
gucuuugccaaccugc

SEQ ID NO: 142695 - RNA, 19 nt, Human herpesvirus 4 (Epstein-Barr virus)
gugaacuuuaacauugaug

SEQ ID NO: 142696 - RNA, 17 nt, Human herpesvirus 4 (Epstein-Barr virus)
gucuguaaacuauggag

SEQ ID NO: 142697 - RNA, 13 nt, Human herpesvirus 4 (Epstein-Barr virus)
gucugauugcacc

SEQ ID NO: 142698 - RNA, 20 nt, Human herpesvirus 4 (Epstein-Barr virus)
gucucucuuugagggggcca

SEQ ID NO: 142699 - RNA, 21 nt, Human herpesvirus 4 (Epstein-Barr virus)
gucucucuuugagggggccaa

SEQ ID NO: 142700 - RNA, 15 nt, Human herpesvirus 4 (Epstein-Barr virus)
gucucuuucuggcca

SEQ ID NO: 142701 - RNA, 21 nt, Human herpesvirus 4 (Epstein-Barr virus)
gucggcuaaugccaugcagcg

SEQ ID NO: 142702 - RNA, 12 nt, Human herpesvirus 4 (Epstein-Barr virus)
gucuauggcgcg

SEQ ID NO: 142703 - RNA, 20 nt, Human herpesvirus 4 (Epstein-Barr virus)
gucuacucgaccagcacgug

SEQ ID NO: 142704 - RNA, 23 nt, Human herpesvirus 4 (Epstein-Barr virus)
gucuaccucuguuccuucugcuc

SEQ ID NO: 142705 - RNA, 16 nt, Human herpesvirus 4 (Epstein-Barr virus)
guccucgaaggcuaga

SEQ ID NO: 142706 - RNA, 17 nt, Human herpesvirus 4 (Epstein-Barr virus)
guccucccaacaugggg

SEQ ID NO: 142707 - RNA, 13 nt, Human herpesvirus 4 (Epstein-Barr virus)
guccagaagcaga

SEQ ID NO: 142708 - RNA, 19 nt, Human herpesvirus 4 (Epstein-Barr virus)
guccagacgcgauggcaca

SEQ ID NO: 142709 - RNA, 13 nt, Human herpesvirus 4 (Epstein-Barr virus)
guccucaccaagg

SEQ ID NO: 142710 - RNA, 15 nt, Human herpesvirus 4 (Epstein-Barr virus)
gucgagcaugagcuc

SEQ ID NO: 142711 - RNA, 23 nt, Human herpesvirus 4 (Epstein-Barr virus)
gucgacccuccugucaccaccuc

SEQ ID NO: 142712 - RNA, 18 nt, Human herpesvirus 4 (Epstein-Barr virus)
guccuugugucucuauca

SEQ ID NO: 142713 - RNA, 19 nt, Human herpesvirus 4 (Epstein-Barr virus)
gucaggagguacaugggcc

SEQ ID NO: 142714 - RNA, 15 nt, Human herpesvirus 4 (Epstein-Barr virus)
gucaggcugacgucc

SEQ ID NO: 142715 - RNA, 19 nt, Human herpesvirus 4 (Epstein-Barr virus)
gucauaucggaugccucac

SEQ ID NO: 142716 - RNA, 16 nt, Human herpesvirus 4 (Epstein-Barr virus)
gucauuuagaaaccuu

SEQ ID NO: 142717 - RNA, 17 nt, Human herpesvirus 4 (Epstein-Barr virus)
gucauuuagaaaccuug

SEQ ID NO: 142718 - RNA, 13 nt, Human herpesvirus 4 (Epstein-Barr virus)
guaaaauuuacac

SEQ ID NO: 142719 - RNA, 14 nt, Human herpesvirus 4 (Epstein-Barr virus)
ggugccuugcucuc

SEQ ID NO: 142720 - RNA, 23 nt, Human herpesvirus 4 (Epstein-Barr virus)
ggugccuuuuguacaagcuuuug

SEQ ID NO: 142721 - RNA, 19 nt, Human herpesvirus 4 (Epstein-Barr virus)
ggugcugccagagccucug

SEQ ID NO: 142722 - RNA, 13 nt, Human herpesvirus 4 (Epstein-Barr virus)
gguggcaguggau

SEQ ID NO: 142723 - RNA, 21 nt, Human herpesvirus 4 (Epstein-Barr virus)
gguggcacacauuacggugcu

SEQ ID NO: 142724 - RNA, 19 nt, Human herpesvirus 4 (Epstein-Barr virus)
ggucaccgcgaccaagacu

SEQ ID NO: 142725 - RNA, 19 nt, Human herpesvirus 4 (Epstein-Barr virus)
ggugacauucacugggaca

SEQ ID NO: 142726 - RNA, 20 nt, Human herpesvirus 4 (Epstein-Barr virus)
ggugaagauggccucaaagu

SEQ ID NO: 142727 - RNA, 12 nt, Human herpesvirus 4 (Epstein-Barr virus)
ggugauaacuga

SEQ ID NO: 142728 - RNA, 18 nt, Human herpesvirus 4 (Epstein-Barr virus)
ggugccaagauaauggau

SEQ ID NO: 142729 - RNA, 17 nt, Human herpesvirus 4 (Epstein-Barr virus)
ggcuauggucauggcca

SEQ ID NO: 142730 - RNA, 18 nt, Human herpesvirus 4 (Epstein-Barr virus)
ggcucacauuguccucac

SEQ ID NO: 142731 - RNA, 19 nt, Human herpesvirus 4 (Epstein-Barr virus)
ggcuaugaagaagauugaa

SEQ ID NO: 142732 - RNA, 20 nt, Human herpesvirus 4 (Epstein-Barr virus)
ggcuacaacaggcugcugaa

SEQ ID NO: 142733 - RNA, 18 nt, Human herpesvirus 4 (Epstein-Barr virus)
gggggcaaagcaggggug

SEQ ID NO: 142734 - RNA, 19 nt, Human herpesvirus 4 (Epstein-Barr virus)
gguagauggcgagacucuu

SEQ ID NO: 142735 - RNA, 18 nt, Human herpesvirus 4 (Epstein-Barr virus)
gguaccuuccuguguucu

SEQ ID NO: 142736 - RNA, 20 nt, Human herpesvirus 4 (Epstein-Barr virus)
ggguauguggugccaugugg

SEQ ID NO: 142737 - RNA, 18 nt, Human herpesvirus 4 (Epstein-Barr virus)
ggguccaggagucugcug

SEQ ID NO: 142738 - RNA, 20 nt, Human herpesvirus 4 (Epstein-Barr virus)
gggguuccccuccccaguga

SEQ ID NO: 142739 - RNA, 15 nt, Human herpesvirus 4 (Epstein-Barr virus)
gggggugggugcaag

SEQ ID NO: 142740 - RNA, 20 nt, Human herpesvirus 4 (Epstein-Barr virus)
gggguauucucagaugcagu

SEQ ID NO: 142741 - RNA, 17 nt, Human herpesvirus 4 (Epstein-Barr virus)
guauucucagaugcagu

SEQ ID NO: 142742 - RNA, 22 nt, Human herpesvirus 4 (Epstein-Barr virus)
gucaccacuaagguuacugcac

SEQ ID NO: 142743 - RNA, 19 nt, Human herpesvirus 4 (Epstein-Barr virus)
gucagcuguguacgugccu

SEQ ID NO: 142744 - RNA, 22 nt, Human herpesvirus 4 (Epstein-Barr virus)
gucagccacacaaucagccggg

SEQ ID NO: 142745 - RNA, 19 nt, Human herpesvirus 4 (Epstein-Barr virus)
gucagauugccuucuguua

SEQ ID NO: 142746 - RNA, 19 nt, Human herpesvirus 4 (Epstein-Barr virus)
gucagaccugaagacuguu

SEQ ID NO: 142747 - RNA, 20 nt, Human herpesvirus 4 (Epstein-Barr virus)
gucaccuuccagacuaugca

SEQ ID NO: 142748 - RNA, 18 nt, Human herpesvirus 4 (Epstein-Barr virus)
gucagaaaaucgcagcag

SEQ ID NO: 142749 - RNA, 17 nt, Human herpesvirus 4 (Epstein-Barr virus)
gucacugagaaucuccu

SEQ ID NO: 142750 - RNA, 16 nt, Human herpesvirus 4 (Epstein-Barr virus)
guagagaucaggccaa

SEQ ID NO: 142751 - RNA, 14 nt, Human herpesvirus 4 (Epstein-Barr virus)
guagacagauccca

SEQ ID NO: 142752 - RNA, 13 nt, Human herpesvirus 4 (Epstein-Barr virus)
guacaucuccagg

SEQ ID NO: 142753 - RNA, 14 nt, Human herpesvirus 4 (Epstein-Barr virus)
guaccccagugacg

SEQ ID NO: 142754 - RNA, 20 nt, Human herpesvirus 4 (Epstein-Barr virus)
guaaccacauauacuggaga

SEQ ID NO: 142755 - RNA, 20 nt, Human herpesvirus 4 (Epstein-Barr virus)
guacauaauguaugccaugg

SEQ ID NO: 142756 - RNA, 24 nt, Human herpesvirus 4 (Epstein-Barr virus)
ugcagggugcacagacuagcgagg

SEQ ID NO: 142757 - RNA, 22 nt, Human herpesvirus 4 (Epstein-Barr virus)
ugucuguaaacuauggaggccc

SEQ ID NO: 142758 - RNA, 15 nt, Human herpesvirus 4 (Epstein-Barr virus)
ugugacuggugcuug

SEQ ID NO: 142759 - RNA, 18 nt, Human herpesvirus 4 (Epstein-Barr virus)
uguggagccguggccuuu

SEQ ID NO: 142760 - RNA, 15 nt, Human herpesvirus 4 (Epstein-Barr virus)
ugugggacugggagg

SEQ ID NO: 142761 - RNA, 14 nt, Human herpesvirus 4 (Epstein-Barr virus)
ugcacaggaggccc

SEQ ID NO: 142762 - RNA, 22 nt, Human herpesvirus 4 (Epstein-Barr virus)
ugccgcggugcuguugggccuu

SEQ ID NO: 142763 - RNA, 14 nt, Human herpesvirus 4 (Epstein-Barr virus)
ugcccuggaggccu

SEQ ID NO: 142764 - RNA, 14 nt, Human herpesvirus 4 (Epstein-Barr virus)
ugcaguauguacag

SEQ ID NO: 142765 - RNA, 16 nt, Human herpesvirus 4 (Epstein-Barr virus)
gguccaagguugugcu

SEQ ID NO: 142766 - RNA, 12 nt, Human herpesvirus 4 (Epstein-Barr virus)
gguaacaggugg

SEQ ID NO: 142767 - RNA, 14 nt, Human herpesvirus 4 (Epstein-Barr virus)
uccgcgcucaacac

SEQ ID NO: 142768 - RNA, 18 nt, Human herpesvirus 4 (Epstein-Barr virus)
uccgcggugguggcccuc

SEQ ID NO: 142769 - RNA, 12 nt, Human herpesvirus 4 (Epstein-Barr virus)
uccuccagcagu

SEQ ID NO: 142770 - RNA, 21 nt, Human herpesvirus 4 (Epstein-Barr virus)
uccucgcaaaagauggacuug

SEQ ID NO: 142771 - RNA, 20 nt, Human herpesvirus 4 (Epstein-Barr virus)
ucggccuagacccggggccc

SEQ ID NO: 142772 - RNA, 14 nt, Human herpesvirus 4 (Epstein-Barr virus)
ugacauauguacaa

SEQ ID NO: 142773 - RNA, 21 nt, Human herpesvirus 4 (Epstein-Barr virus)
ugaaccuuauggagaugugcg

SEQ ID NO: 142774 - RNA, 22 nt, Human herpesvirus 4 (Epstein-Barr virus)
ugaagauugucacagcugcugg

SEQ ID NO: 142775 - RNA, 12 nt, Human herpesvirus 4 (Epstein-Barr virus)
ugaagcuugcug

SEQ ID NO: 142776 - RNA, 14 nt, Human herpesvirus 4 (Epstein-Barr virus)
ucuuuguggccuuc

SEQ ID NO: 142777 - RNA, 20 nt, Human herpesvirus 4 (Epstein-Barr virus)
ucuggcacgccguggcccug

SEQ ID NO: 142778 - RNA, 15 nt, Human herpesvirus 4 (Epstein-Barr virus)
ucuggggcuggccug

SEQ ID NO: 142779 - RNA, 16 nt, Human herpesvirus 4 (Epstein-Barr virus)
ucugccgggaggugcu

SEQ ID NO: 142780 - RNA, 22 nt, Human herpesvirus 4 (Epstein-Barr virus)
ccuggugagaaguugguggugg

SEQ ID NO: 142781 - RNA, 11 nt, Human herpesvirus 4 (Epstein-Barr virus)
ccuggccaugg

SEQ ID NO: 142782 - RNA, 20 nt, Human herpesvirus 4 (Epstein-Barr virus)
cggcauccucaaggggcacg

SEQ ID NO: 142783 - RNA, 12 nt, Human herpesvirus 4 (Epstein-Barr virus)
cggguaggggag

SEQ ID NO: 142784 - RNA, 20 nt, Human herpesvirus 4 (Epstein-Barr virus)
cggccaagguccugggccuc

SEQ ID NO: 142785 - RNA, 19 nt, Human herpesvirus 4 (Epstein-Barr virus)
cggccacacagugggcuuc

SEQ ID NO: 142786 - RNA, 17 nt, Human herpesvirus 4 (Epstein-Barr virus)
cggcgaugucggggcug

SEQ ID NO: 142787 - RNA, 18 nt, Human herpesvirus 4 (Epstein-Barr virus)
cuccccugacgcuguggc

SEQ ID NO: 142788 - RNA, 17 nt, Human herpesvirus 4 (Epstein-Barr virus)
cucagaggaggaggaug

SEQ ID NO: 142789 - RNA, 22 nt, Human herpesvirus 4 (Epstein-Barr virus)
cucagcgucaggagagggccag

SEQ ID NO: 142790 - RNA, 17 nt, Human herpesvirus 4 (Epstein-Barr virus)
cuggucaccagcuucga

SEQ ID NO: 142791 - RNA, 16 nt, Human herpesvirus 4 (Epstein-Barr virus)
cuuagcccagaggcgc

SEQ ID NO: 142792 - RNA, 17 nt, Human herpesvirus 4 (Epstein-Barr virus)
cugugucuucugucucg

SEQ ID NO: 142793 - RNA, 17 nt, Human herpesvirus 4 (Epstein-Barr virus)
gacaacugucacaccag

SEQ ID NO: 142794 - RNA, 14 nt, Human herpesvirus 4 (Epstein-Barr virus)
gcggcuggaugccc

SEQ ID NO: 142795 - RNA, 12 nt, Human herpesvirus 4 (Epstein-Barr virus)
gcuccucuccaa

SEQ ID NO: 142796 - RNA, 14 nt, Human herpesvirus 4 (Epstein-Barr virus)
gcugccgucccagg

SEQ ID NO: 142797 - RNA, 15 nt, Human herpesvirus 4 (Epstein-Barr virus)
gcucugcgccagccc

SEQ ID NO: 142798 - RNA, 21 nt, Human herpesvirus 4 (Epstein-Barr virus)
gcugacacagacuuggccuug

SEQ ID NO: 142799 - RNA, 14 nt, Human herpesvirus 4 (Epstein-Barr virus)
gcugauggaggccu

SEQ ID NO: 142800 - RNA, 13 nt, Human herpesvirus 4 (Epstein-Barr virus)
gcucgccccuggu

SEQ ID NO: 142801 - RNA, 19 nt, Human herpesvirus 4 (Epstein-Barr virus)
gcuggacgucuuguccuug

SEQ ID NO: 142802 - RNA, 18 nt, Human herpesvirus 4 (Epstein-Barr virus)
gcuuuccaguucccccca

SEQ ID NO: 142803 - RNA, 16 nt, Human herpesvirus 4 (Epstein-Barr virus)
ggcccagagugcuccg

SEQ ID NO: 142804 - RNA, 17 nt, Human herpesvirus 4 (Epstein-Barr virus)
ggccgacgaggcccugc

SEQ ID NO: 142805 - RNA, 13 nt, Human herpesvirus 4 (Epstein-Barr virus)
gcggcggcggagg

SEQ ID NO: 142806 - RNA, 13 nt, Human herpesvirus 4 (Epstein-Barr virus)
gcggaugcggcgg

SEQ ID NO: 142807 - RNA, 14 nt, Human herpesvirus 4 (Epstein-Barr virus)
gccgccuccgccgc

SEQ ID NO: 142808 - RNA, 13 nt, Human herpesvirus 4 (Epstein-Barr virus)
acccccgcgucac

SEQ ID NO: 142809 - RNA, 18 nt, Human herpesvirus 4 (Epstein-Barr virus)
accagaaggcuccggcgg

SEQ ID NO: 142810 - RNA, 17 nt, Human herpesvirus 4 (Epstein-Barr virus)
acaguaacacagggugg

SEQ ID NO: 142811 - RNA, 15 nt, Human herpesvirus 4 (Epstein-Barr virus)
acacggucuggucac

SEQ ID NO: 142812 - RNA, 19 nt, Human herpesvirus 4 (Epstein-Barr virus)
agccagccggguccgugcg

SEQ ID NO: 142813 - RNA, 16 nt, Human herpesvirus 4 (Epstein-Barr virus)
agccuacucuccacuc

SEQ ID NO: 142814 - RNA, 20 nt, Human herpesvirus 4 (Epstein-Barr virus)
agccgucgauaccgggucag

SEQ ID NO: 142815 - RNA, 15 nt, Human herpesvirus 4 (Epstein-Barr virus)
aggagccccgggcgg

SEQ ID NO: 142816 - RNA, 19 nt, Human herpesvirus 4 (Epstein-Barr virus)
aggagcguguccccgugga

SEQ ID NO: 142817 - RNA, 14 nt, Human herpesvirus 4 (Epstein-Barr virus)
aggcagcucaacuc

SEQ ID NO: 142818 - RNA, 24 nt, Human herpesvirus 4 (Epstein-Barr virus)
acgucccuuuggaggacagcgugg

SEQ ID NO: 142819 - RNA, 20 nt, Human herpesvirus 4 (Epstein-Barr virus)
acggguaguagcacuggugg

SEQ ID NO: 142820 - RNA, 18 nt, Human herpesvirus 4 (Epstein-Barr virus)
acgcuuccacccccugga

SEQ ID NO: 142821 - RNA, 22 nt, Human herpesvirus 4 (Epstein-Barr virus)
cccccggcuggccgccguggcc

SEQ ID NO: 142822 - RNA, 13 nt, Human herpesvirus 4 (Epstein-Barr virus)
ccgagaagcuugu

SEQ ID NO: 142823 - RNA, 17 nt, Human herpesvirus 4 (Epstein-Barr virus)
ccuacaacucagcccca

SEQ ID NO: 142824 - RNA, 20 nt, Human herpesvirus 4 (Epstein-Barr virus)
ccucgcgccccaucuuggcc

SEQ ID NO: 142825 - RNA, 20 nt, Human herpesvirus 4 (Epstein-Barr virus)
ccggucccagcggaugcggc

SEQ ID NO: 142826 - RNA, 16 nt, Human herpesvirus 4 (Epstein-Barr virus)
caagcagaaaggccau

SEQ ID NO: 142827 - RNA, 20 nt, Human herpesvirus 4 (Epstein-Barr virus)
caaggaaacaaaaccacuga

SEQ ID NO: 142828 - RNA, 19 nt, Human herpesvirus 4 (Epstein-Barr virus)
agguggucauguuucccuc

SEQ ID NO: 142829 - RNA, 15 nt, Human herpesvirus 4 (Epstein-Barr virus)
agggucaacaggugg

SEQ ID NO: 142830 - RNA, 13 nt, Human herpesvirus 4 (Epstein-Barr virus)
aggucaaggccaa

SEQ ID NO: 142831 - RNA, 20 nt, Human herpesvirus 4 (Epstein-Barr virus)
cagaaggcuccggcggcagu

SEQ ID NO: 142832 - RNA, 20 nt, Human herpesvirus 4 (Epstein-Barr virus)
cacacaaaaugaggaacggu

SEQ ID NO: 142833 - RNA, 18 nt, Human herpesvirus 4 (Epstein-Barr virus)
caauuccucgcaaaagau

SEQ ID NO: 142834 - RNA, 14 nt, Human herpesvirus 4 (Epstein-Barr virus)
caauuuccaaaaau

SEQ ID NO: 142835 - RNA, 14 nt, Human herpesvirus 4 (Epstein-Barr virus)
cauguuuuuggcau

SEQ ID NO: 142836 - RNA, 12 nt, Human herpesvirus 4 (Epstein-Barr virus)
cauccccagccc

SEQ ID NO: 142837 - RNA, 20 nt, Human herpesvirus 4 (Epstein-Barr virus)
cagacuagcgaggauaaucu

SEQ ID NO: 142838 - RNA, 19 nt, Human herpesvirus 4 (Epstein-Barr virus)
ccaggcagaggaaggccac

SEQ ID NO: 142839 - RNA, 16 nt, Human herpesvirus 4 (Epstein-Barr virus)
ccaguggacaaggcag

SEQ ID NO: 142840 - RNA, 16 nt, Human herpesvirus 4 (Epstein-Barr virus)
ccagcuggucaucagc

SEQ ID NO: 142841 - RNA, 17 nt, Human herpesvirus 4 (Epstein-Barr virus)
ccaccgccuuaaggccg

SEQ ID NO: 142842 - RNA, 16 nt, Human herpesvirus 4 (Epstein-Barr virus)
ccaccggggaggccag

SEQ ID NO: 142843 - RNA, 16 nt, Human herpesvirus 4 (Epstein-Barr virus)
ugguguccggagaccc

SEQ ID NO: 142844 - RNA, 14 nt, Human herpesvirus 4 (Epstein-Barr virus)
uguagacagauccc

SEQ ID NO: 142845 - RNA, 12 nt, Human herpesvirus 4 (Epstein-Barr virus)
ugguggauugcu

SEQ ID NO: 142846 - RNA, 19 nt, Human herpesvirus 4 (Epstein-Barr virus)
ugguggccugggaggugcu

SEQ ID NO: 142847 - RNA, 13 nt, Human herpesvirus 4 (Epstein-Barr virus)
uggugggaggccc

SEQ ID NO: 142848 - RNA, 14 nt, Human herpesvirus 4 (Epstein-Barr virus)
uggugggggcuaug

SEQ ID NO: 142849 - RNA, 21 nt, Human herpesvirus 4 (Epstein-Barr virus)
ucgcggagagggaugggcuug

SEQ ID NO: 142850 - RNA, 16 nt, Human herpesvirus 4 (Epstein-Barr virus)
ucagcuccagggccag

SEQ ID NO: 142851 - RNA, 18 nt, Human herpesvirus 4 (Epstein-Barr virus)
uggucauguuucccucca

SEQ ID NO: 142852 - RNA, 19 nt, Human herpesvirus 4 (Epstein-Barr virus)
uggggccaccggggaggcc

SEQ ID NO: 142853 - RNA, 16 nt, Human herpesvirus 4 (Epstein-Barr virus)
ugggacugggaggccg

SEQ ID NO: 142854 - RNA, 17 nt, Human herpesvirus 4 (Epstein-Barr virus)
ggcgggaguggaggcuc

SEQ ID NO: 142855 - RNA, 19 nt, Human herpesvirus 4 (Epstein-Barr virus)
ggcggaagaccaggagccc

SEQ ID NO: 142856 - RNA, 14 nt, Human herpesvirus 4 (Epstein-Barr virus)
ggcaaagggcaugc

SEQ ID NO: 142857 - RNA, 18 nt, Human herpesvirus 4 (Epstein-Barr virus)
guacccacccccccuccc

SEQ ID NO: 142858 - RNA, 20 nt, Human herpesvirus 4 (Epstein-Barr virus)
gucacaccccacggccaugc

SEQ ID NO: 142859 - RNA, 15 nt, Human herpesvirus 4 (Epstein-Barr virus)
ggugguuuccaucau

SEQ ID NO: 142860 - RNA, 15 nt, Human herpesvirus 4 (Epstein-Barr virus)
ggugccagaugugcc

SEQ ID NO: 142861 - RNA, 17 nt, Human herpesvirus 4 (Epstein-Barr virus)
ggagucugguugcuacg

SEQ ID NO: 142862 - RNA, 23 nt, Human herpesvirus 4 (Epstein-Barr virus)
uagcggccgaagaagggagggcc

SEQ ID NO: 142863 - RNA, 17 nt, Human herpesvirus 4 (Epstein-Barr virus)
uacguguccauguacaa

SEQ ID NO: 142864 - RNA, 20 nt, Human herpesvirus 4 (Epstein-Barr virus)
uacagcagcuggauguacag

SEQ ID NO: 142865 - RNA, 15 nt, Human herpesvirus 4 (Epstein-Barr virus)
uaccgagauguacau

SEQ ID NO: 142866 - RNA, 19 nt, Human herpesvirus 4 (Epstein-Barr virus)
uaacugugucccacuccac

SEQ ID NO: 142867 - RNA, 24 nt, Human herpesvirus 4 (Epstein-Barr virus)
ucacggggccgugcaccugccauc

SEQ ID NO: 142868 - RNA, 20 nt, Human herpesvirus 4 (Epstein-Barr virus)
gugguccacgagcggcgugu

SEQ ID NO: 142869 - RNA, 17 nt, Human herpesvirus 4 (Epstein-Barr virus)
gcaucgucuccagcggc

SEQ ID NO: 142870 - RNA, 20 nt, Human herpesvirus 4 (Epstein-Barr virus)
gcaggagcaggagcgggagg

SEQ ID NO: 142871 - RNA, 20 nt, Human herpesvirus 4 (Epstein-Barr virus)
gcaggagcaggaggggcagg

SEQ ID NO: 142872 - RNA, 17 nt, Human herpesvirus 4 (Epstein-Barr virus)
gcaggaggaggggcagg

SEQ ID NO: 142873 - RNA, 14 nt, Human herpesvirus 4 (Epstein-Barr virus)
gcaggaggggcagg

SEQ ID NO: 142874 - RNA, 18 nt, Human herpesvirus 4 (Epstein-Barr virus)
gcaggcucaggccgccgc

SEQ ID NO: 142875 - RNA, 14 nt, Human herpesvirus 4 (Epstein-Barr virus)
gcagaaggccaugg

SEQ ID NO: 142876 - RNA, 22 nt, Human herpesvirus 4 (Epstein-Barr virus)
gagaccaagaccaauacccagg

SEQ ID NO: 142877 - RNA, 23 nt, Human herpesvirus 4 (Epstein-Barr virus)
gaggcuauaacgcagguccuguu

SEQ ID NO: 142878 - RNA, 16 nt, Human herpesvirus 4 (Epstein-Barr virus)
gcgaccggcagauccc

SEQ ID NO: 142879 - RNA, 23 nt, Human herpesvirus 4 (Epstein-Barr virus)
gccugccggaguuuucuccccca

SEQ ID NO: 142880 - RNA, 14 nt, Human herpesvirus 4 (Epstein-Barr virus)
gccugcuccaccgc

SEQ ID NO: 142881 - RNA, 15 nt, Human herpesvirus 4 (Epstein-Barr virus)
gcccagaggaggccc

SEQ ID NO: 142882 - RNA, 19 nt, Human herpesvirus 4 (Epstein-Barr virus)
cugcggcggcggaggcggc

SEQ ID NO: 142883 - RNA, 21 nt, Human herpesvirus 4 (Epstein-Barr virus)
cugaaucuaguaugaaggcug

SEQ ID NO: 142884 - RNA, 15 nt, Human herpesvirus 4 (Epstein-Barr virus)
cugcccccugucucu

SEQ ID NO: 142885 - RNA, 18 nt, Human herpesvirus 4 (Epstein-Barr virus)
cugaggggcggugggcgc

SEQ ID NO: 142886 - RNA, 20 nt, Human herpesvirus 4 (Epstein-Barr virus)
cggggaaaagagagcugaug

SEQ ID NO: 142887 - RNA, 19 nt, Human herpesvirus 4 (Epstein-Barr virus)
cgggggcgggaguggaggc

SEQ ID NO: 142888 - RNA, 14 nt, Human herpesvirus 4 (Epstein-Barr virus)
cgggccacaggugc

SEQ ID NO: 142889 - RNA, 20 nt, Human herpesvirus 4 (Epstein-Barr virus)
gacgcgauggcacacgccag

SEQ ID NO: 142890 - RNA, 18 nt, Human herpesvirus 4 (Epstein-Barr virus)
cuggacccccggagucug

SEQ ID NO: 142891 - RNA, 16 nt, Human herpesvirus 4 (Epstein-Barr virus)
cugcuggacuccgagg

SEQ ID NO: 142892 - RNA, 19 nt, Human herpesvirus 4 (Epstein-Barr virus)
cugcuggccgagcuggagg

SEQ ID NO: 142893 - RNA, 16 nt, Human herpesvirus 4 (Epstein-Barr virus)
cuggacauagaggggc

SEQ ID NO: 142894 - RNA, 12 nt, Human herpesvirus 4 (Epstein-Barr virus)
gacccuccuguc

SEQ ID NO: 142895 - RNA, 15 nt, Human herpesvirus 4 (Epstein-Barr virus)
cauacagcagcugga

SEQ ID NO: 142896 - RNA, 22 nt, Human herpesvirus 4 (Epstein-Barr virus)
caucccaauucacaucucaggg

SEQ ID NO: 142897 - RNA, 19 nt, Human herpesvirus 4 (Epstein-Barr virus)
cauauguaugccuuggcau

SEQ ID NO: 142898 - RNA, 19 nt, Human herpesvirus 4 (Epstein-Barr virus)
caucaacuucagcuccagg

SEQ ID NO: 142899 - RNA, 17 nt, Human herpesvirus 4 (Epstein-Barr virus)
cgagaaggaggagacug

SEQ ID NO: 142900 - RNA, 19 nt, Human herpesvirus 4 (Epstein-Barr virus)
cgagagcaugccaccguga

SEQ ID NO: 142901 - RNA, 18 nt, Human herpesvirus 4 (Epstein-Barr virus)
cgcagccgcugaagccag

SEQ ID NO: 142902 - RNA, 16 nt, Human herpesvirus 4 (Epstein-Barr virus)
cgcauccgagaggaug

SEQ ID NO: 142903 - RNA, 15 nt, Human herpesvirus 4 (Epstein-Barr virus)
cgcaucgucuccagc

SEQ ID NO: 142904 - RNA, 17 nt, Human herpesvirus 4 (Epstein-Barr virus)
cgcggcccggaggcugc

SEQ ID NO: 142905 - RNA, 23 nt, Human herpesvirus 4 (Epstein-Barr virus)
cgggauagcaggacggggggcug

SEQ ID NO: 142906 - RNA, 21 nt, Human herpesvirus 4 (Epstein-Barr virus)
acuuggccuuggggguggugg

SEQ ID NO: 142907 - RNA, 15 nt, Human herpesvirus 4 (Epstein-Barr virus)
acgcagaaugugcag

SEQ ID NO: 142908 - RNA, 23 nt, Human herpesvirus 4 (Epstein-Barr virus)
aaagccagcgcacccggggaacc

SEQ ID NO: 142909 - RNA, 14 nt, Human herpesvirus 4 (Epstein-Barr virus)
accuccccuguggc

SEQ ID NO: 142910 - RNA, 15 nt, Human herpesvirus 4 (Epstein-Barr virus)
accuuggcgggucau

SEQ ID NO: 142911 - RNA, 18 nt, Human herpesvirus 4 (Epstein-Barr virus)
caaacccuggccgccgga

SEQ ID NO: 142912 - RNA, 20 nt, Human herpesvirus 4 (Epstein-Barr virus)
caaacccuggccgccggaug

SEQ ID NO: 142913 - RNA, 23 nt, Human herpesvirus 4 (Epstein-Barr virus)
augucaaggcucugcacaggagg

SEQ ID NO: 142914 - RNA, 21 nt, Human herpesvirus 4 (Epstein-Barr virus)
augcagcgcccugucccugga

SEQ ID NO: 142915 - RNA, 19 nt, Human herpesvirus 4 (Epstein-Barr virus)
aucugguggcccagcaacu

SEQ ID NO: 142916 - RNA, 22 nt, Human herpesvirus 4 (Epstein-Barr virus)
agcuucugaggcggcuguggcc

SEQ ID NO: 142917 - RNA, 21 nt, Human herpesvirus 4 (Epstein-Barr virus)
aucucgcuggcucgccucauc

SEQ ID NO: 142918 - RNA, 20 nt, Human herpesvirus 4 (Epstein-Barr virus)
cagccgucgauaccggguca

SEQ ID NO: 142919 - RNA, 17 nt, Human herpesvirus 4 (Epstein-Barr virus)
cagcgcuggcuccaggg

SEQ ID NO: 142920 - RNA, 15 nt, Human herpesvirus 4 (Epstein-Barr virus)
caccuuggcggguca

SEQ ID NO: 142921 - RNA, 12 nt, Homo sapiens
augacacagucu

SEQ ID NO: 142922 - RNA, 19 nt, Homo sapiens
gucuuuggugaacauugca

SEQ ID NO: 142923 - RNA, 12 nt, Homo sapiens
acugccaaagaa

SEQ ID NO: 142924 - RNA, 19 nt, Homo sapiens
agccaugggagacacugau

SEQ ID NO: 142925 - RNA, 22 nt, Homo sapiens
guaaaauaaucaguguuuccaa

SEQ ID NO: 142926 - RNA, 13 nt, Homo sapiens
ugauuguagcuau

SEQ ID NO: 142927 - RNA, 20 nt, Homo sapiens
gcagaugguggagcugaaua

SEQ ID NO: 142928 - RNA, 22 nt, Homo sapiens
uguuuccuuuaauuuuuuacua

SEQ ID NO: 142929 - RNA, 16 nt, Homo sapiens
cauaaaaguuggcuca

SEQ ID NO: 142930 - RNA, 19 nt, Homo sapiens
ccucaaaacaaucuuguca

SEQ ID NO: 142931 - RNA, 11 nt, Homo sapiens
uuuaaccaaga

SEQ ID NO: 142932 - RNA, 15 nt, Homo sapiens
uccacagugacucca

SEQ ID NO: 142933 - RNA, 16 nt, Homo sapiens
acacaaucugaaacag

SEQ ID NO: 142934 - RNA, 19 nt, Homo sapiens
gaaugagcaaaaccaaaua

SEQ ID NO: 142935 - RNA, 18 nt, Homo sapiens
auuaagaaauucacuucc

SEQ ID NO: 142936 - RNA, 18 nt, Homo sapiens
cauuuguuuuagucugaa

SEQ ID NO: 142937 - RNA, 13 nt, Homo sapiens
gcugggauuacag

SEQ ID NO: 142938 - RNA, 19 nt, Homo sapiens
gugcugggauuacagggau

SEQ ID NO: 142939 - RNA, 18 nt, Homo sapiens
uugcaauguggcuugaau

SEQ ID NO: 142940 - RNA, 19 nt, Homo sapiens
cauuuaagcugccuguaca

SEQ ID NO: 142941 - RNA, 13 nt, Homo sapiens
ggcaggacagcuc

SEQ ID NO: 142942 - RNA, 14 nt, Homo sapiens
aaaaaugugacuca

SEQ ID NO: 142943 - RNA, 22 nt, Homo sapiens
gucuuggcucacugcaacuucu

SEQ ID NO: 142944 - RNA, 16 nt, Homo sapiens
gcaauagaaauccaau

SEQ ID NO: 142945 - RNA, 11 nt, Homo sapiens
aguaagccaug

SEQ ID NO: 142946 - RNA, 14 nt, Homo sapiens
uacuuaguucaagc

SEQ ID NO: 142947 - RNA, 22 nt, Homo sapiens
ucauucugcauucucuagucag

SEQ ID NO: 142948 - RNA, 21 nt, Homo sapiens
caggguuucaccauguuggcc

SEQ ID NO: 142949 - RNA, 16 nt, Homo sapiens
ugccaggcacacugag

SEQ ID NO: 142950 - RNA, 23 nt, Homo sapiens
auauacuuauagaauucagucaa

SEQ ID NO: 142951 - RNA, 21 nt, Homo sapiens
cucugauguagcuuauacaaa

SEQ ID NO: 142952 - RNA, 16 nt, Homo sapiens
uauagaaaugcugguu

SEQ ID NO: 142953 - RNA, 13 nt, Homo sapiens
caacuguggcuua

SEQ ID NO: 142954 - RNA, 15 nt, Homo sapiens
cagauuauuauugaa

SEQ ID NO: 142955 - RNA, 19 nt, Homo sapiens
caccaacuauagaauguau

SEQ ID NO: 142956 - RNA, 14 nt, Homo sapiens
aggguaaauucucu

SEQ ID NO: 142957 - RNA, 17 nt, Homo sapiens
gucaauguccuacugag

SEQ ID NO: 142958 - RNA, 17 nt, Homo sapiens
ucuccuuagaaguggaa

SEQ ID NO: 142959 - RNA, 17 nt, Homo sapiens
caaauugggccaaagaa

SEQ ID NO: 142960 - RNA, 17 nt, Homo sapiens
gaacuccuuggcuucuu

SEQ ID NO: 142961 - RNA, 17 nt, Homo sapiens
cuaagcacgggccauau

SEQ ID NO: 142962 - RNA, 16 nt, Homo sapiens
cuaaguguaccagaga

SEQ ID NO: 142963 - RNA, 15 nt, Homo sapiens
aauguauuugcuaua

SEQ ID NO: 142964 - RNA, 13 nt, Homo sapiens
ucaaguaauccac

SEQ ID NO: 142965 - RNA, 15 nt, Homo sapiens
ggaccaggucucaua

SEQ ID NO: 142966 - RNA, 23 nt, Homo sapiens
agaagguugagggcaauggacaa

SEQ ID NO: 142967 - RNA, 15 nt, Homo sapiens
aacugaacauuccag

SEQ ID NO: 142968 - RNA, 15 nt, Homo sapiens
uggauuugucuuugg

SEQ ID NO: 142969 - RNA, 17 nt, Homo sapiens
ugaauuuugucuuuaug

SEQ ID NO: 142970 - RNA, 15 nt, Homo sapiens
aauguagaaagugau

SEQ ID NO: 142971 - RNA, 17 nt, Homo sapiens
agucugucaauguccua

SEQ ID NO: 142972 - RNA, 19 nt, Homo sapiens
uguuuuuaauaaagacagg

SEQ ID NO: 142973 - RNA, 14 nt, Homo sapiens
uauacaauauacuu

SEQ ID NO: 142974 - RNA, 20 nt, Homo sapiens
uuguauuuaaaugaaaguga

SEQ ID NO: 142975 - RNA, 18 nt, Homo sapiens
agcuggagucugucaaug

SEQ ID NO: 142976 - RNA, 21 nt, Homo sapiens
ggucagaguuccgacugccau

SEQ ID NO: 142977 - RNA, 17 nt, Homo sapiens
ugaaagugagacuuuga

SEQ ID NO: 142978 - RNA, 22 nt, Homo sapiens
cuuuaguuuuugugaaguuuaa

SEQ ID NO: 142979 - RNA, 16 nt, Homo sapiens
aaguuuaauugacuua

SEQ ID NO: 142980 - RNA, 18 nt, Homo sapiens
uggccaggcuggucucaa

SEQ ID NO: 142981 - RNA, 13 nt, Homo sapiens
uggaaccagccca

SEQ ID NO: 142982 - RNA, 18 nt, Homo sapiens
ugaaguuuaauugacuua

SEQ ID NO: 142983 - RNA, 16 nt, Homo sapiens
uaaaccguacacugug

SEQ ID NO: 142984 - RNA, 21 nt, Homo sapiens
uuggacucaagcaagauuuca

SEQ ID NO: 142985 - RNA, 18 nt, Homo sapiens
uuguuauucuguaguuuc

SEQ ID NO: 142986 - RNA, 20 nt, Homo sapiens
aaucuuucugcagaaacaga

SEQ ID NO: 142987 - RNA, 14 nt, Homo sapiens
accuacaguguaca

SEQ ID NO: 142988 - RNA, 15 nt, Homo sapiens
uuaugaauaguuucc

SEQ ID NO: 142989 - RNA, 21 nt, Homo sapiens
ugagcaaaaccaaauauucca

SEQ ID NO: 142990 - RNA, 22 nt, Homo sapiens
gaaaagaaucggcaauguuuca

SEQ ID NO: 142991 - RNA, 22 nt, Homo sapiens
ccauuagcauuugucaacaaag

SEQ ID NO: 142992 - RNA, 14 nt, Homo sapiens
acugaacauuccag

SEQ ID NO: 142993 - RNA, 17 nt, Homo sapiens
uggcacuuauaaccaaa

SEQ ID NO: 142994 - RNA, 16 nt, Homo sapiens
uuuacuguccaaagac

SEQ ID NO: 142995 - RNA, 16 nt, Homo sapiens
gaguuccgacugccau

SEQ ID NO: 142996 - RNA, 14 nt, Homo sapiens
uaguaaaagccauc

SEQ ID NO: 142997 - RNA, 19 nt, Homo sapiens
auuuuauguuuaguugcac

SEQ ID NO: 142998 - RNA, 20 nt, Homo sapiens
uguuucaaacaaaaagucau

SEQ ID NO: 142999 - RNA, 21 nt, Homo sapiens
acugccaucuuggacuuguca

SEQ ID NO: 143000 - RNA, 12 nt, Homo sapiens
agccucaucucu

SEQ ID NO: 143001 - RNA, 21 nt, Homo sapiens
accgcgcccagccucaucucu

SEQ ID NO: 143002 - RNA, 22 nt, Homo sapiens
aucccucaaaacaaucuuguca

SEQ ID NO: 143003 - RNA, 16 nt, Homo sapiens
cuaacaguaguugcaa

SEQ ID NO: 143004 - RNA, 17 nt, Homo sapiens
auucuuacauuuuacuu

SEQ ID NO: 143005 - RNA, 20 nt, Homo sapiens
agugcaguuuuuuucuuguc

SEQ ID NO: 143006 - RNA, 13 nt, Homo sapiens
uaauaaagacagg

SEQ ID NO: 143007 - RNA, 20 nt, Homo sapiens
ugauauguugguagauucua

SEQ ID NO: 143008 - RNA, 14 nt, Homo sapiens
aaaagacugaccaa

SEQ ID NO: 143009 - RNA, 18 nt, Homo sapiens
cuucuuuacuuaguucaa

SEQ ID NO: 143010 - RNA, 15 nt, Homo sapiens
gugagaggacucuga

SEQ ID NO: 143011 - RNA, 23 nt, Homo sapiens
acugggacuaaguguaccagaga

SEQ ID NO: 143012 - RNA, 18 nt, Homo sapiens
uagaaugagacuuacuuc

SEQ ID NO: 143013 - RNA, 20 nt, Homo sapiens
gucugucaauguccuacuga

SEQ ID NO: 143014 - RNA, 12 nt, Homo sapiens
gaguagcuggau

SEQ ID NO: 143015 - RNA, 15 nt, Homo sapiens
agcgauuaauaacag

SEQ ID NO: 143016 - RNA, 14 nt, Homo sapiens
gacagaagcguaua

SEQ ID NO: 143017 - RNA, 16 nt, Homo sapiens
aaaugcugguuuuuca

SEQ ID NO: 143018 - RNA, 20 nt, Homo sapiens
ucagucuuuuccaugaacuu

SEQ ID NO: 143019 - RNA, 19 nt, Homo sapiens
caugggagacacugaugua

SEQ ID NO: 143020 - RNA, 14 nt, Homo sapiens
uguuaacugaaugc

SEQ ID NO: 143021 - RNA, 19 nt, Homo sapiens
aaaauggcacuugggggac

SEQ ID NO: 143022 - RNA, 17 nt, Homo sapiens
gaugcuggggacacagc

SEQ ID NO: 143023 - RNA, 19 nt, Homo sapiens
uuaaauguagaaagugauc

SEQ ID NO: 143024 - RNA, 19 nt, Homo sapiens
cuuccuggaggugacacuu

SEQ ID NO: 143025 - RNA, 19 nt, Homo sapiens
aacugaaugccacucugua

SEQ ID NO: 143026 - RNA, 11 nt, Homo sapiens
aguugcuguau

SEQ ID NO: 143027 - RNA, 20 nt, Homo sapiens
cgccacccucccacugccaa

SEQ ID NO: 143028 - RNA, 13 nt, Homo sapiens
ucuuccaucaccu

SEQ ID NO: 143029 - RNA, 15 nt, Homo sapiens
aauagugauuuccac

SEQ ID NO: 143030 - RNA, 18 nt, Homo sapiens
cuuagagcuuuaccuaaa

SEQ ID NO: 143031 - RNA, 18 nt, Homo sapiens
aaguaauccaccugccuc

SEQ ID NO: 143032 - RNA, 13 nt, Homo sapiens
agaaagugaucca

SEQ ID NO: 143033 - RNA, 21 nt, Homo sapiens
gaauuuuuauauccacuaaaa

SEQ ID NO: 143034 - RNA, 22 nt, Homo sapiens
cccgccacccucccacugccaa

SEQ ID NO: 143035 - RNA, 23 nt, Homo sapiens
cuagugcaguuuuuuucuugucu

SEQ ID NO: 143036 - RNA, 19 nt, Homo sapiens
ugcuucuuaaaauagccau

SEQ ID NO: 143037 - RNA, 15 nt, Homo sapiens
cagcauggagucaca

SEQ ID NO: 143038 - RNA, 23 nt, Homo sapiens
gucucauaaugcauguggcacuu

SEQ ID NO: 143039 - RNA, 15 nt, Homo sapiens
uccuguuacaaaaga

SEQ ID NO: 143040 - RNA, 22 nt, Homo sapiens
ucaagacgucacccuccauucu

SEQ ID NO: 143041 - RNA, 14 nt, Homo sapiens
acaaaguaagccau

SEQ ID NO: 143042 - RNA, 21 nt, Homo sapiens
aauguggcuugaauguaggua

SEQ ID NO: 143043 - RNA, 17 nt, Homo sapiens
uauugaacuuaugcaaa

SEQ ID NO: 143044 - RNA, 12 nt, Homo sapiens
acugugggcucc

SEQ ID NO: 143045 - RNA, 13 nt, Homo sapiens
guuggcucaggag

SEQ ID NO: 143046 - RNA, 13 nt, Homo sapiens
cagcuguuuaugc

SEQ ID NO: 143047 - RNA, 20 nt, Homo sapiens
gggacuaaguguaccagaga

SEQ ID NO: 143048 - RNA, 14 nt, Homo sapiens
auagaauucaguca

SEQ ID NO: 143049 - RNA, 19 nt, Homo sapiens
cuccacaaagccaaucuca

SEQ ID NO: 143050 - RNA, 19 nt, Homo sapiens
aguuuacauuuuguauauu

SEQ ID NO: 143051 - RNA, 21 nt, Homo sapiens
uguaaauuucucuacugucuc

SEQ ID NO: 143052 - RNA, 20 nt, Homo sapiens
cugaccaauauuguacaguu

SEQ ID NO: 143053 - RNA, 21 nt, Homo sapiens
agacgugauuuugcuguagaa

SEQ ID NO: 143054 - RNA, 17 nt, Homo sapiens
cacccucccacugccaa

SEQ ID NO: 143055 - RNA, 20 nt, Homo sapiens
caggguuucaccauguuggc

SEQ ID NO: 143056 - RNA, 17 nt, Homo sapiens
guacauguuaaacuuac

SEQ ID NO: 143057 - RNA, 18 nt, Homo sapiens
uuaagccauguguuccaa

SEQ ID NO: 143058 - RNA, 17 nt, Homo sapiens
uaugacacucuagucaa

SEQ ID NO: 143059 - RNA, 22 nt, Homo sapiens
ggcuaagaagugacucuugcaa

SEQ ID NO: 143060 - RNA, 14 nt, Homo sapiens
ugcaauguuuuaga

SEQ ID NO: 143061 - RNA, 15 nt, Homo sapiens
aaugacacagucuug

SEQ ID NO: 143062 - RNA, 12 nt, Homo sapiens
uuugucuuuaug

SEQ ID NO: 143063 - RNA, 19 nt, Homo sapiens
auuggaccagucagcacag

SEQ ID NO: 143064 - RNA, 18 nt, Homo sapiens
aucugaaacagcuucaug

SEQ ID NO: 143065 - RNA, 15 nt, Homo sapiens
augagcaaaaccaaa

SEQ ID NO: 143066 - RNA, 21 nt, Homo sapiens
acuguuuugguuuugcucaca

SEQ ID NO: 143067 - RNA, 22 nt, Homo sapiens
caaaaacauucuuacauuuuac

SEQ ID NO: 143068 - RNA, 16 nt, Homo sapiens
aagaauguuuaugaau

SEQ ID NO: 143069 - RNA, 21 nt, Homo sapiens
ccauaaaggggagggacucau

SEQ ID NO: 143070 - RNA, 19 nt, Homo sapiens
aaauuucucuacugucuca

SEQ ID NO: 143071 - RNA, 22 nt, Homo sapiens
acagucuuguauuaaguuguua

SEQ ID NO: 143072 - RNA, 20 nt, Homo sapiens
uguuaauaaaaguacauguu

SEQ ID NO: 143073 - RNA, 16 nt, Homo sapiens
uaugaauaguuuccaa

SEQ ID NO: 143074 - RNA, 14 nt, Homo sapiens
agaauaaauacugu

SEQ ID NO: 143075 - RNA, 19 nt, Homo sapiens
uacaaaguaagccauguau

SEQ ID NO: 143076 - RNA, 13 nt, Homo sapiens
gagcaaacagaaa

SEQ ID NO: 143077 - RNA, 22 nt, Homo sapiens
uaagcugccuguacacaacuca

SEQ ID NO: 143078 - RNA, 20 nt, Homo sapiens
uggacucaagcaagauuuca

SEQ ID NO: 143079 - RNA, 14 nt, Homo sapiens
ccuggcucaucucu

SEQ ID NO: 143080 - RNA, 18 nt, Homo sapiens
ucucgugguaggacugua

SEQ ID NO: 143081 - RNA, 12 nt, Homo sapiens
aaugucuuuauu

SEQ ID NO: 143082 - RNA, 16 nt, Homo sapiens
uaacgagaaauagaaa

SEQ ID NO: 143083 - RNA, 17 nt, Homo sapiens
gucaaagccuugguaaa

SEQ ID NO: 143084 - RNA, 22 nt, Homo sapiens
caaagauacacaaucugaaaca

SEQ ID NO: 143085 - RNA, 21 nt, Homo sapiens
auagagguucuuuauugcuca

SEQ ID NO: 143086 - RNA, 17 nt, Homo sapiens
auccuggggaacauaga

SEQ ID NO: 143087 - RNA, 22 nt, Homo sapiens
uguacaguuuuuauugcuuguu

SEQ ID NO: 143088 - RNA, 23 nt, Homo sapiens
gccuuccuggaggugacacuuga

SEQ ID NO: 143089 - RNA, 17 nt, Homo sapiens
cuagaguucauggauau

SEQ ID NO: 143090 - RNA, 14 nt, Homo sapiens
auugggccaaagaa

SEQ ID NO: 143091 - RNA, 17 nt, Homo sapiens
cuuggguucaagugauu

SEQ ID NO: 143092 - RNA, 16 nt, Homo sapiens
ugagucccagagccaa

SEQ ID NO: 143093 - RNA, 15 nt, Homo sapiens
cuuuauacucaggca

SEQ ID NO: 143094 - RNA, 21 nt, Homo sapiens
aaauuaagaaauucacuuccc

SEQ ID NO: 143095 - RNA, 22 nt, Homo sapiens
accagagaagggcuuggacuca

SEQ ID NO: 143096 - RNA, 12 nt, Homo sapiens
aacuucugccuc

SEQ ID NO: 143097 - RNA, 17 nt, Homo sapiens
cuaaguguaccagagaa

SEQ ID NO: 143098 - RNA, 22 nt, Homo sapiens
ggagaaauaugguacucauuaa

SEQ ID NO: 143099 - RNA, 21 nt, Homo sapiens
guuguuaauaaaaguacaugu

SEQ ID NO: 143100 - RNA, 23 nt, Homo sapiens
cuucucugcuaucuagaucugaa

SEQ ID NO: 143101 - RNA, 15 nt, Homo sapiens
uuacuguccaaagac

SEQ ID NO: 143102 - RNA, 19 nt, Homo sapiens
aggauuugggcucuuggaa

SEQ ID NO: 143103 - RNA, 15 nt, Homo sapiens
guauuaaguuguuaa

SEQ ID NO: 143104 - RNA, 13 nt, Homo sapiens
ugcucacaaaagu

SEQ ID NO: 143105 - RNA, 14 nt, Homo sapiens
cauaugaauaacau

SEQ ID NO: 143106 - RNA, 23 nt, Homo sapiens
aagacgugauuuugcuguagaag

SEQ ID NO: 143107 - RNA, 12 nt, Homo sapiens
gaccaggucuca

SEQ ID NO: 143108 - RNA, 22 nt, Homo sapiens
cuguagaaaagggaacugaaca

SEQ ID NO: 143109 - RNA, 16 nt, Homo sapiens
uguacagucuuguauu

SEQ ID NO: 143110 - RNA, 14 nt, Homo sapiens
caauguuuuagaau

SEQ ID NO: 143111 - RNA, 19 nt, Homo sapiens
uuuucuucuuuuugcuuca

SEQ ID NO: 143112 - RNA, 22 nt, Homo sapiens
uguuucaaacaaaaagucauaa

SEQ ID NO: 143113 - RNA, 15 nt, Homo sapiens
ccuuagaaguggaag

SEQ ID NO: 143114 - RNA, 14 nt, Homo sapiens
agccaguuacauaa

SEQ ID NO: 143115 - RNA, 20 nt, Homo sapiens
cagccuccugaguagcugga

SEQ ID NO: 143116 - RNA, 13 nt, Homo sapiens
gguuauauguaua

SEQ ID NO: 143117 - RNA, 15 nt, Homo sapiens
ugcagccacuguuaa

SEQ ID NO: 143118 - RNA, 21 nt, Homo sapiens
cuaagaagcagauaauggugu

SEQ ID NO: 143119 - RNA, 17 nt, Homo sapiens
aggagugccacuucaug

SEQ ID NO: 143120 - RNA, 15 nt, Homo sapiens
cagcaccuacagugu

SEQ ID NO: 143121 - RNA, 13 nt, Homo sapiens
aaaaugugacuca

SEQ ID NO: 143122 - RNA, 23 nt, Homo sapiens
gagacagcacagccaaccuagcu

SEQ ID NO: 143123 - RNA, 16 nt, Homo sapiens
ugaccugccaggcaca

SEQ ID NO: 143124 - RNA, 18 nt, Homo sapiens
aauaugacacucuaguca

SEQ ID NO: 143125 - RNA, 18 nt, Homo sapiens
ggagccccugcucuggug

SEQ ID NO: 143126 - RNA, 20 nt, Homo sapiens
gucaacaaagucacccacuu

SEQ ID NO: 143127 - RNA, 12 nt, Homo sapiens
aaugaaagugag

SEQ ID NO: 143128 - RNA, 18 nt, Homo sapiens
acgugauuuugcuguaga

SEQ ID NO: 143129 - RNA, 10 nt, Homo sapiens
aaaagugaug

SEQ ID NO: 143130 - RNA, 11 nt, Homo sapiens
uuugcuguaga

SEQ ID NO: 143131 - RNA, 21 nt, Homo sapiens
auaacauggugugcuucuuaa

SEQ ID NO: 143132 - RNA, 16 nt, Homo sapiens
uacaaaguaagccaug

SEQ ID NO: 143133 - RNA, 16 nt, Homo sapiens
ggaaagccaguuacau

SEQ ID NO: 143134 - RNA, 14 nt, Homo sapiens
cuuagaaagucuga

SEQ ID NO: 143135 - RNA, 19 nt, Homo sapiens
uagugcacagcacaaauua

SEQ ID NO: 143136 - RNA, 20 nt, Homo sapiens
uacccguuucacaugcuuuu

SEQ ID NO: 143137 - RNA, 15 nt, Homo sapiens
auucuccugccucag

SEQ ID NO: 143138 - RNA, 23 nt, Homo sapiens
ccacccccaaauuuucuuuuuau

SEQ ID NO: 143139 - RNA, 21 nt, Homo sapiens
caaguucuuaguugcuguaug

SEQ ID NO: 143140 - RNA, 13 nt, Homo sapiens
caggcacacugag

SEQ ID NO: 143141 - RNA, 15 nt, Homo sapiens
cauucugcacucaga

SEQ ID NO: 143142 - RNA, 21 nt, Homo sapiens
aguauauucaaccaaauacuu

SEQ ID NO: 143143 - RNA, 21 nt, Homo sapiens
ugguuuugcucacaaaagucu

SEQ ID NO: 143144 - RNA, 16 nt, Homo sapiens
uuagagcuuuaccuaa

SEQ ID NO: 143145 - RNA, 19 nt, Homo sapiens
gagaucuauauauguauaa

SEQ ID NO: 143146 - RNA, 22 nt, Homo sapiens
uuaaauguagaaagugauccau

SEQ ID NO: 143147 - RNA, 19 nt, Homo sapiens
agggaacugaacauuccag

SEQ ID NO: 143148 - RNA, 21 nt, Homo sapiens
uugcccaggcuggagugcaau

SEQ ID NO: 143149 - RNA, 20 nt, Homo sapiens
cccaggcuggagugcaauga

SEQ ID NO: 143150 - RNA, 15 nt, Homo sapiens
cccagccucaucucu

SEQ ID NO: 143151 - RNA, 22 nt, Homo sapiens
caucugccuccccuucacuccc

SEQ ID NO: 143152 - RNA, 15 nt, Homo sapiens
ugugggcuccauuca

SEQ ID NO: 143153 - RNA, 17 nt, Homo sapiens
agcuggauuacaggcau

SEQ ID NO: 143154 - RNA, 16 nt, Homo sapiens
gaacugaacauuccag

SEQ ID NO: 143155 - RNA, 20 nt, Homo sapiens
gcuuagcuaauauugcaaug

SEQ ID NO: 143156 - RNA, 18 nt, Homo sapiens
uacuuauagaauucaguc

SEQ ID NO: 143157 - RNA, 23 nt, Homo sapiens
uucuaaagauggaaaaaccaccc

SEQ ID NO: 143158 - RNA, 15 nt, Homo sapiens
gccccagccuaggaa

SEQ ID NO: 143159 - RNA, 23 nt, Homo sapiens
gucucgugguaggacuguagaaa

SEQ ID NO: 143160 - RNA, 12 nt, Homo sapiens
gucuuggcucac

SEQ ID NO: 143161 - RNA, 13 nt, Homo sapiens
cagagcaaacaga

SEQ ID NO: 143162 - RNA, 15 nt, Homo sapiens
agggagaagagggaa

SEQ ID NO: 143163 - RNA, 16 nt, Homo sapiens
agcuagcaacauuugu

SEQ ID NO: 143164 - RNA, 19 nt, Homo sapiens
uuugcuucaaaaacauucu

SEQ ID NO: 143165 - RNA, 22 nt, Homo sapiens
aaacauuuguuuguggucuaua

SEQ ID NO: 143166 - RNA, 16 nt, Homo sapiens
gacucaucauuuccau

SEQ ID NO: 143167 - RNA, 21 nt, Homo sapiens
auucucuagucaguuggcuaa

SEQ ID NO: 143168 - RNA, 13 nt, Homo sapiens
ggaaccagcccag

SEQ ID NO: 143169 - RNA, 20 nt, Homo sapiens
uugcccaggcuggagugcaa

SEQ ID NO: 143170 - RNA, 22 nt, Homo sapiens
aaaauaugacacucuagucaaa

SEQ ID NO: 143171 - RNA, 17 nt, Homo sapiens
caaucuguccuguuaca

SEQ ID NO: 143172 - RNA, 15 nt, Homo sapiens
aaaaguuuuguaaau

SEQ ID NO: 143173 - RNA, 12 nt, Homo sapiens
ggagacacugau

SEQ ID NO: 143174 - RNA, 21 nt, Homo sapiens
uggggacacagcaucagcuca

SEQ ID NO: 143175 - RNA, 22 nt, Homo sapiens
uuaaaaaauggacucuugaaau

SEQ ID NO: 143176 - RNA, 13 nt, Homo sapiens
uguaucucaggaa

SEQ ID NO: 143177 - RNA, 14 nt, Homo sapiens
acuaagaagcagau

SEQ ID NO: 143178 - RNA, 13 nt, Homo sapiens
uccacagugacuc

SEQ ID NO: 143179 - RNA, 19 nt, Homo sapiens
uaaagaaaaguuuuguaaa

SEQ ID NO: 143180 - RNA, 22 nt, Homo sapiens
gugaccugccaggcacacugag

SEQ ID NO: 143181 - RNA, 20 nt, Homo sapiens
cuauaaaaugagaagucuca

SEQ ID NO: 143182 - RNA, 12 nt, Homo sapiens
guaaaagccauc

SEQ ID NO: 143183 - RNA, 22 nt, Homo sapiens
ucaaagaaauuuccacucaggu

SEQ ID NO: 143184 - RNA, 15 nt, Homo sapiens
uaucuaaaaucugcu

SEQ ID NO: 143185 - RNA, 14 nt, Homo sapiens
ccacugccaaagaa

SEQ ID NO: 143186 - RNA, 13 nt, Homo sapiens
caaagaaauuucc

SEQ ID NO: 143187 - RNA, 23 nt, Homo sapiens
cauucugcacucagaaaauggca

SEQ ID NO: 143188 - RNA, 20 nt, Homo sapiens
ucuaagccuucugguuuuau

SEQ ID NO: 143189 - RNA, 15 nt, Homo sapiens
gaccauuagcauuug

SEQ ID NO: 143190 - RNA, 13 nt, Homo sapiens
caaucccucaaaa

SEQ ID NO: 143191 - RNA, 22 nt, Homo sapiens
caauauauacuuauagaauuca

SEQ ID NO: 143192 - RNA, 21 nt, Homo sapiens
ucaaguaauccaccugccucg

SEQ ID NO: 143193 - RNA, 16 nt, Homo sapiens
gccacuguuaagccau

SEQ ID NO: 143194 - RNA, 15 nt, Homo sapiens
ugggauuacagggau

SEQ ID NO: 143195 - RNA, 23 nt, Homo sapiens
ccacuguuaagccauguguucca

SEQ ID NO: 143196 - RNA, 12 nt, Homo sapiens
acuuaguucaag

SEQ ID NO: 143197 - RNA, 23 nt, Homo sapiens
ugcuucuuugaaacuuguaugaa

SEQ ID NO: 143198 - RNA, 16 nt, Homo sapiens
gucuaaaaacauuugu

SEQ ID NO: 143199 - RNA, 19 nt, Homo sapiens
guaaauauagcucagguag

SEQ ID NO: 143200 - RNA, 22 nt, Homo sapiens
cacuuagguccaaggucuccag

SEQ ID NO: 143201 - RNA, 19 nt, Homo sapiens
uugcuugcacaaaccaauu

SEQ ID NO: 143202 - RNA, 15 nt, Homo sapiens
aguuccgacugccau

SEQ ID NO: 143203 - RNA, 13 nt, Homo sapiens
uguguuucuuuag

SEQ ID NO: 143204 - RNA, 12 nt, Homo sapiens
uaagacugugua

SEQ ID NO: 143205 - RNA, 22 nt, Homo sapiens
aaagccaaucucaaucccucaa

SEQ ID NO: 143206 - RNA, 19 nt, Homo sapiens
ugaacauugcaauagaaau

SEQ ID NO: 143207 - RNA, 21 nt, Homo sapiens
uacuauuuuuacuaaucuuuc

SEQ ID NO: 143208 - RNA, 22 nt, Homo sapiens
gugccucugggacuggacaauu

SEQ ID NO: 143209 - RNA, 19 nt, Homo sapiens
cucuggccuccaaguccac

SEQ ID NO: 143210 - RNA, 12 nt, Homo sapiens
cacugccaaaga

SEQ ID NO: 143211 - RNA, 21 nt, Homo sapiens
auuugucaacaaagucaccca

SEQ ID NO: 143212 - RNA, 21 nt, Homo sapiens
gaguuauuuuuauuuauuuaa

SEQ ID NO: 143213 - RNA, 21 nt, Homo sapiens
cagaaucucucuucuuuucaa

SEQ ID NO: 143214 - RNA, 22 nt, Homo sapiens
ggagucuuagagcuuuaccuaa

SEQ ID NO: 143215 - RNA, 17 nt, Homo sapiens
ccagagccucaaaugag

SEQ ID NO: 143216 - RNA, 18 nt, Homo sapiens
ccaaguccacaguggaac

SEQ ID NO: 143217 - RNA, 22 nt, Homo sapiens
aagaaaaguuuuguaaauuucu

SEQ ID NO: 143218 - RNA, 12 nt, Homo sapiens
aggacuguagaa

SEQ ID NO: 143219 - RNA, 16 nt, Homo sapiens
gauucuccugccucag

SEQ ID NO: 143220 - RNA, 21 nt, Homo sapiens
uaagaucguucucugccucac

SEQ ID NO: 143221 - RNA, 22 nt, Homo sapiens
agcaaaaccaaauauuccagag

SEQ ID NO: 143222 - RNA, 16 nt, Homo sapiens
uucccauuaaagaagu

SEQ ID NO: 143223 - RNA, 19 nt, Homo sapiens
uuacuuuuuccuggcucau

SEQ ID NO: 143224 - RNA, 22 nt, Homo sapiens
uggauuugucuuuggugaacau

SEQ ID NO: 143225 - RNA, 19 nt, Homo sapiens
acaaaguaagccauguauc

SEQ ID NO: 143226 - RNA, 21 nt, Homo sapiens
gauaggguuucuaaugguuau

SEQ ID NO: 143227 - RNA, 22 nt, Homo sapiens
ucccucaaaacaaucuugucau

SEQ ID NO: 143228 - RNA, 23 nt, Homo sapiens
cuuggaauccuggggaacauaga

SEQ ID NO: 143229 - RNA, 16 nt, Homo sapiens
cagcauggagucacag

SEQ ID NO: 143230 - RNA, 19 nt, Homo sapiens
accaaauacuuuaauguau

SEQ ID NO: 143231 - RNA, 16 nt, Homo sapiens
uagaaauccaauugga

SEQ ID NO: 143232 - RNA, 13 nt, Homo sapiens
gucacagccacuu

SEQ ID NO: 143233 - RNA, 24 nt, Homo sapiens
agugagacuuugaggguguauauu

SEQ ID NO: 143234 - RNA, 21 nt, Homo sapiens
gacagcacagccaaccuagcu

SEQ ID NO: 143235 - RNA, 16 nt, Homo sapiens
uagaaaagggaacuga

SEQ ID NO: 143236 - RNA, 19 nt, Homo sapiens
uguauuuaaaugaaaguga

SEQ ID NO: 143237 - RNA, 10 nt, Homo sapiens
gaaaagcagg

SEQ ID NO: 143238 - RNA, 19 nt, Homo sapiens
aagccauguguuccaaggc

SEQ ID NO: 143239 - RNA, 16 nt, Homo sapiens
augagcaaaaccaaau

SEQ ID NO: 143240 - RNA, 14 nt, Homo sapiens
acagccacuuggga

SEQ ID NO: 143241 - RNA, 12 nt, Homo sapiens
ucugcuagggaa

SEQ ID NO: 143242 - RNA, 20 nt, Homo sapiens
gccacucuguaauugcaaaa

SEQ ID NO: 143243 - RNA, 17 nt, Homo sapiens
cagguucugacucuugg

SEQ ID NO: 143244 - RNA, 22 nt, Homo sapiens
guuucauauugaugugugucua

SEQ ID NO: 143245 - RNA, 17 nt, Homo sapiens
ucaaucccucaaaacaa

SEQ ID NO: 143246 - RNA, 12 nt, Homo sapiens
gagcaaacagaa

SEQ ID NO: 143247 - RNA, 21 nt, Homo sapiens
aacuucaacguaagacugugu

SEQ ID NO: 143248 - RNA, 14 nt, Homo sapiens
uugcucacaaaagu

SEQ ID NO: 143249 - RNA, 19 nt, Homo sapiens
caaagugcugggauuacag

SEQ ID NO: 143250 - RNA, 19 nt, Homo sapiens
gacgugauuuugcuguaga

SEQ ID NO: 143251 - RNA, 23 nt, Homo sapiens
accagagaagggcuuggacucaa

SEQ ID NO: 143252 - RNA, 11 nt, Homo sapiens
caaaaccaaau

SEQ ID NO: 143253 - RNA, 21 nt, Homo sapiens
aagggauggaagaaguaaaua

SEQ ID NO: 143254 - RNA, 21 nt, Homo sapiens
acuuuuuccuggcucaucucu

SEQ ID NO: 143255 - RNA, 22 nt, Homo sapiens
agagagaaaaguaacuguuuug

SEQ ID NO: 143256 - RNA, 20 nt, Homo sapiens
aguuuccaaauuauggcaaa

SEQ ID NO: 143257 - RNA, 22 nt, Homo sapiens
ugucaauguccuacugagacag

SEQ ID NO: 143258 - RNA, 21 nt, Homo sapiens
ccaaguucuuaguugcuguau

SEQ ID NO: 143259 - RNA, 18 nt, Homo sapiens
cuuucccuuaaauaacac

SEQ ID NO: 143260 - RNA, 23 nt, Homo sapiens
acauuuuacuuuuuccuggcuca

SEQ ID NO: 143261 - RNA, 14 nt, Homo sapiens
cuagucaguuggcu

SEQ ID NO: 143262 - RNA, 23 nt, Homo sapiens
uuacuuuuuccuggcucaucucu

SEQ ID NO: 143263 - RNA, 18 nt, Homo sapiens
cucccagccagguucuga

SEQ ID NO: 143264 - RNA, 15 nt, Homo sapiens
auucucuagucaguu

SEQ ID NO: 143265 - RNA, 21 nt, Homo sapiens
uaaauguagaaagugauccau

SEQ ID NO: 143266 - RNA, 21 nt, Homo sapiens
aacaaucuugucauacuugaa

SEQ ID NO: 143267 - RNA, 19 nt, Homo sapiens
ucgugguaggacuguagaa

SEQ ID NO: 143268 - RNA, 18 nt, Homo sapiens
ccuucuuuuuguucuuca

SEQ ID NO: 143269 - RNA, 18 nt, Homo sapiens
augagaaaaugucuuuau

SEQ ID NO: 143270 - RNA, 20 nt, Homo sapiens
guuuaugcauagauaaucuc

SEQ ID NO: 143271 - RNA, 14 nt, Homo sapiens
ugcuguaugucucg

SEQ ID NO: 143272 - RNA, 16 nt, Homo sapiens
auccacuaaaaucaaa

SEQ ID NO: 143273 - RNA, 19 nt, Homo sapiens
ugccaucuuggacuuguca

SEQ ID NO: 143274 - RNA, 13 nt, Homo sapiens
ucaucauuuccau

SEQ ID NO: 143275 - RNA, 19 nt, Homo sapiens
cuggcaguggaacuaagaa

SEQ ID NO: 143276 - RNA, 18 nt, Homo sapiens
caaucugaaacagcuuca

SEQ ID NO: 143277 - RNA, 23 nt, Homo sapiens
aauaagcaggcgugaccugccag

SEQ ID NO: 143278 - RNA, 13 nt, Homo sapiens
cauuuguuuucac

SEQ ID NO: 143279 - RNA, 20 nt, Homo sapiens
auuugcuuagaaagucugau

SEQ ID NO: 143280 - RNA, 16 nt, Homo sapiens
uuguuuguggucuaua

SEQ ID NO: 143281 - RNA, 15 nt, Homo sapiens
ugcacaaaccaauua

SEQ ID NO: 143282 - RNA, 23 nt, Homo sapiens
uaguaaaagccaucuauguauau

SEQ ID NO: 143283 - RNA, 20 nt, Homo sapiens
uuucuugucuauaaagcauu

SEQ ID NO: 143284 - RNA, 15 nt, Homo sapiens
acucaucauuuccau

SEQ ID NO: 143285 - RNA, 22 nt, Homo sapiens
caggcaugugccacccacccaa

SEQ ID NO: 143286 - RNA, 13 nt, Homo sapiens
caaaguaagccau

SEQ ID NO: 143287 - RNA, 23 nt, Homo sapiens
uuccaaucuguccuguuacaaaa

SEQ ID NO: 143288 - RNA, 14 nt, Homo sapiens
uagcuccacaaagc

SEQ ID NO: 143289 - RNA, 16 nt, Homo sapiens
ugcaaugacacagucu

SEQ ID NO: 143290 - RNA, 11 nt, Homo sapiens
gccucaucucu

SEQ ID NO: 143291 - RNA, 14 nt, Homo sapiens
uuaauaaaaguaca

SEQ ID NO: 143292 - RNA, 12 nt, Homo sapiens
uuugcuguagaa

SEQ ID NO: 143293 - RNA, 15 nt, Homo sapiens
aucuguccuguuaca

SEQ ID NO: 143294 - RNA, 17 nt, Homo sapiens
gauuugggcucuuggaa

SEQ ID NO: 143295 - RNA, 13 nt, Homo sapiens
ucuuaagacguga

SEQ ID NO: 143296 - RNA, 22 nt, Homo sapiens
uucagucaaagauacacaaucu

SEQ ID NO: 143297 - RNA, 20 nt, Homo sapiens
uugaaguauauucaaccaaa

SEQ ID NO: 143298 - RNA, 15 nt, Homo sapiens
caggcgugaccugcc

SEQ ID NO: 143299 - RNA, 21 nt, Homo sapiens
ccuccaaguccacaguggaac

SEQ ID NO: 143300 - RNA, 20 nt, Homo sapiens
auugcagcgauuaauaacag

SEQ ID NO: 143301 - RNA, 14 nt, Homo sapiens
ucuaaguaaauaca

SEQ ID NO: 143302 - RNA, 12 nt, Homo sapiens
uauuccagagac

SEQ ID NO: 143303 - RNA, 19 nt, Homo sapiens
cauugcaauagaaauccaa

SEQ ID NO: 143304 - RNA, 16 nt, Homo sapiens
aagcagguucuuguua

SEQ ID NO: 143305 - RNA, 21 nt, Homo sapiens
uuauuaaauguagaaagugau

SEQ ID NO: 143306 - RNA, 17 nt, Homo sapiens
auaugacacucuaguca

SEQ ID NO: 143307 - RNA, 15 nt, Homo sapiens
agaaauccaauugga

SEQ ID NO: 143308 - RNA, 22 nt, Homo sapiens
uuaccuuuuauuuuaauguuuc

SEQ ID NO: 143309 - RNA, 16 nt, Homo sapiens
ccaggcuggagugcaa

SEQ ID NO: 143310 - RNA, 23 nt, Homo sapiens
cgugaccugccaggcacacugag

SEQ ID NO: 143311 - RNA, 22 nt, Homo sapiens
guguuuuuaauaaagacagggu

SEQ ID NO: 143312 - RNA, 23 nt, Homo sapiens
caguuggcuaagaagugacucuu

SEQ ID NO: 143313 - RNA, 13 nt, Homo sapiens
aguugcuguaugu

SEQ ID NO: 143314 - RNA, 20 nt, Homo sapiens
cugaacaauauauacuuaua

SEQ ID NO: 143315 - RNA, 22 nt, Homo sapiens
cauuugucaacaaagucaccca

SEQ ID NO: 143316 - RNA, 17 nt, Homo sapiens
uagcuuauacaaaacau

SEQ ID NO: 143317 - RNA, 18 nt, Homo sapiens
gucugauuguagcuauga

SEQ ID NO: 143318 - RNA, 22 nt, Homo sapiens
uggcuucuuuacuuaguucaag

SEQ ID NO: 143319 - RNA, 21 nt, Homo sapiens
ugagacuuacuucucugcuau

SEQ ID NO: 143320 - RNA, 12 nt, Homo sapiens
uaaaaguuggcu

SEQ ID NO: 143321 - RNA, 16 nt, Homo sapiens
aacaaagucacccacu

SEQ ID NO: 143322 - RNA, 19 nt, Homo sapiens
acaaucuugucauacuuga

SEQ ID NO: 143323 - RNA, 22 nt, Homo sapiens
cuuguuagugcacagcacaaau

SEQ ID NO: 143324 - RNA, 19 nt, Homo sapiens
cauaaugcauguggcacuu

SEQ ID NO: 143325 - RNA, 17 nt, Homo sapiens
caggacagcuccuggac

SEQ ID NO: 143326 - RNA, 16 nt, Homo sapiens
auuuuaauguuuccuu

SEQ ID NO: 143327 - RNA, 17 nt, Homo sapiens
uucaacguaagacugug

SEQ ID NO: 143328 - RNA, 18 nt, Homo sapiens
cagaaagcuagaaagugu

SEQ ID NO: 143329 - RNA, 18 nt, Homo sapiens
acugaauuuugucuuuau

SEQ ID NO: 143330 - RNA, 20 nt, Homo sapiens
auuagcauuugucaacaaag

SEQ ID NO: 143331 - RNA, 14 nt, Homo sapiens
ucucugcuaucuag

SEQ ID NO: 143332 - RNA, 14 nt, Homo sapiens
ggguucaagugauu

SEQ ID NO: 143333 - RNA, 22 nt, Homo sapiens
aagaugaaugagcaaaaccaaa

SEQ ID NO: 143334 - RNA, 18 nt, Homo sapiens
cauauugaugugugucua

SEQ ID NO: 143335 - RNA, 14 nt, Homo sapiens
caguggaacuaaga

SEQ ID NO: 143336 - RNA, 17 nt, Homo sapiens
uaagaagugacucuugc

SEQ ID NO: 143337 - RNA, 18 nt, Homo sapiens
ggauacgacaacuugcac

SEQ ID NO: 143338 - RNA, 13 nt, Homo sapiens
aaacaucauuuca

SEQ ID NO: 143339 - RNA, 16 nt, Homo sapiens
agucuuguauuaaguu

SEQ ID NO: 143340 - RNA, 21 nt, Homo sapiens
ucauggauauguuauacugaa

SEQ ID NO: 143341 - RNA, 15 nt, Homo sapiens
uuggugaacauugca

SEQ ID NO: 143342 - RNA, 16 nt, Homo sapiens
ugcauucucuagucag

SEQ ID NO: 143343 - RNA, 23 nt, Homo sapiens
uccuggggaacauagaacucaug

SEQ ID NO: 143344 - RNA, 21 nt, Homo sapiens
ucaugggguggacucuaacag

SEQ ID NO: 143345 - RNA, 17 nt, Homo sapiens
ugggagacacugaugua

SEQ ID NO: 143346 - RNA, 15 nt, Homo sapiens
aagccauguguucca

SEQ ID NO: 143347 - RNA, 14 nt, Homo sapiens
cuuccaucaccucc

SEQ ID NO: 143348 - RNA, 22 nt, Homo sapiens
ucaaagugagcuccuaagccau

SEQ ID NO: 143349 - RNA, 19 nt, Homo sapiens
accugccaggcacacugag

SEQ ID NO: 143350 - RNA, 22 nt, Homo sapiens
gcaaaaccaaauauuccagaga

SEQ ID NO: 143351 - RNA, 14 nt, Homo sapiens
aauucaucagauaa

SEQ ID NO: 143352 - RNA, 16 nt, Homo sapiens
cccuucuuuucugacu

SEQ ID NO: 143353 - RNA, 21 nt, Homo sapiens
cuuuguaaagaaaguggcuug

SEQ ID NO: 143354 - RNA, 15 nt, Homo sapiens
gagugggcuaagcac

SEQ ID NO: 143355 - RNA, 16 nt, Homo sapiens
ucagcaccuacagugu

SEQ ID NO: 143356 - RNA, 16 nt, Homo sapiens
cccuccauucugcacu

SEQ ID NO: 143357 - RNA, 16 nt, Homo sapiens
gcuccauucaaaguga

SEQ ID NO: 143358 - RNA, 19 nt, Homo sapiens
aggcugugccaucagcucc

SEQ ID NO: 143359 - RNA, 23 nt, Homo sapiens
aaaacuucaacguaagacugugu

SEQ ID NO: 143360 - RNA, 15 nt, Homo sapiens
ccugccaggcacacu

SEQ ID NO: 143361 - RNA, 22 nt, Homo sapiens
cuuaagacgugauuuugcugua

SEQ ID NO: 143362 - RNA, 17 nt, Homo sapiens
cacauuuuucagauaua

SEQ ID NO: 143363 - RNA, 16 nt, Homo sapiens
uuaauaaagacagggu

SEQ ID NO: 143364 - RNA, 20 nt, Homo sapiens
auuccacaaccugguuugcc

SEQ ID NO: 143365 - RNA, 18 nt, Homo sapiens
aaguucuuaguugcugua

SEQ ID NO: 143366 - RNA, 15 nt, Homo sapiens
acaguaguugcaaug

SEQ ID NO: 143367 - RNA, 13 nt, Homo sapiens
aaagaaauuucca

SEQ ID NO: 143368 - RNA, 16 nt, Homo sapiens
cuucuuuuugcuucaa

SEQ ID NO: 143369 - RNA, 18 nt, Homo sapiens
cacucuguaauugcaaaa

SEQ ID NO: 143370 - RNA, 13 nt, Homo sapiens
aucugaacuccuu

SEQ ID NO: 143371 - RNA, 23 nt, Homo sapiens
ucuuaagacgugauuuugcugua

SEQ ID NO: 143372 - RNA, 18 nt, Homo sapiens
gaucguucucugccucac

SEQ ID NO: 143373 - RNA, 10 nt, Homo sapiens
aaacuuguau

SEQ ID NO: 143374 - RNA, 20 nt, Homo sapiens
gccagguucugacucuuggc

SEQ ID NO: 143375 - RNA, 15 nt, Homo sapiens
auaaagacaggguuu

SEQ ID NO: 143376 - RNA, 16 nt, Homo sapiens
gcauuugucaacaaag

SEQ ID NO: 143377 - RNA, 13 nt, Homo sapiens
gaacuuaugcaaa

SEQ ID NO: 143378 - RNA, 19 nt, Homo sapiens
cgugguaggacuguagaaa

SEQ ID NO: 143379 - RNA, 20 nt, Homo sapiens
ugcagccacuguuaagccau

SEQ ID NO: 143380 - RNA, 21 nt, Homo sapiens
uuaaauguagaaagugaucca

SEQ ID NO: 143381 - RNA, 19 nt, Homo sapiens
ucaagugauucuccugccu

SEQ ID NO: 143382 - RNA, 19 nt, Homo sapiens
gacuuugaggguguauauu

SEQ ID NO: 143383 - RNA, 21 nt, Homo sapiens
aaagcccuuaaaaauaugugu

SEQ ID NO: 143384 - RNA, 20 nt, Homo sapiens
ggcuggagugcaaugacaca

SEQ ID NO: 143385 - RNA, 21 nt, Homo sapiens
auguccuacugagacagcaca

SEQ ID NO: 143386 - RNA, 13 nt, Homo sapiens
caguguacagucu

SEQ ID NO: 143387 - RNA, 19 nt, Homo sapiens
uuucuuucaaagaagccag

SEQ ID NO: 143388 - RNA, 22 nt, Homo sapiens
agauucuaauggcuuuauugca

SEQ ID NO: 143389 - RNA, 18 nt, Homo sapiens
acuuuugaaaacaaaaua

SEQ ID NO: 143390 - RNA, 15 nt, Homo sapiens
gccaguuacauaaaa

SEQ ID NO: 143391 - RNA, 15 nt, Homo sapiens
cuggaccaggucuca

SEQ ID NO: 143392 - RNA, 13 nt, Homo sapiens
guaagacugugua

SEQ ID NO: 143393 - RNA, 16 nt, Homo sapiens
cacccuccauucugca

SEQ ID NO: 143394 - RNA, 18 nt, Homo sapiens
auaugacacucuagucaa

SEQ ID NO: 143395 - RNA, 14 nt, Homo sapiens
caauagauauuuac

SEQ ID NO: 143396 - RNA, 21 nt, Homo sapiens
uuauauguauaucacauuccc

SEQ ID NO: 143397 - RNA, 13 nt, Homo sapiens
ggauuacaggcau

SEQ ID NO: 143398 - RNA, 20 nt, Homo sapiens
ucugccuccccuucacuccc

SEQ ID NO: 143399 - RNA, 20 nt, Homo sapiens
gcacaaauugggccaaagaa

SEQ ID NO: 143400 - RNA, 18 nt, Homo sapiens
uaaaccguacacuguguu

SEQ ID NO: 143401 - RNA, 22 nt, Homo sapiens
uaggaagaauuuuuauauccac

SEQ ID NO: 143402 - RNA, 22 nt, Homo sapiens
cuagaguucauggauauguuau

SEQ ID NO: 143403 - RNA, 21 nt, Homo sapiens
cugaugcuggggacacagcau

SEQ ID NO: 143404 - RNA, 13 nt, Homo sapiens
ccaggggagaccc

SEQ ID NO: 143405 - RNA, 12 nt, Homo sapiens
auguaucucagg

SEQ ID NO: 143406 - RNA, 22 nt, Homo sapiens
uagucugaacaauauauacuua

SEQ ID NO: 143407 - RNA, 21 nt, Homo sapiens
uguauuuaaaugaaagugaga

SEQ ID NO: 143408 - RNA, 15 nt, Homo sapiens
gaaugagacuuacuu

SEQ ID NO: 143409 - RNA, 20 nt, Homo sapiens
uagauaaucucuccauuccc

SEQ ID NO: 143410 - RNA, 22 nt, Homo sapiens
gaaauagugauuuccacaguga

SEQ ID NO: 143411 - RNA, 23 nt, Homo sapiens
aagaauuuuuauauccacuaaaa

SEQ ID NO: 143412 - RNA, 15 nt, Homo sapiens
gaaauggggaacuac

SEQ ID NO: 143413 - RNA, 18 nt, Homo sapiens
gacgugauuuugcuguag

SEQ ID NO: 143414 - RNA, 15 nt, Homo sapiens
aaauuucucuacugu

SEQ ID NO: 143415 - RNA, 22 nt, Homo sapiens
uagaaccucgagguuucucaaa

SEQ ID NO: 143416 - RNA, 13 nt, Homo sapiens
uccacaguggaac

SEQ ID NO: 143417 - RNA, 17 nt, Homo sapiens
uuuccaaauuauggcaa

SEQ ID NO: 143418 - RNA, 15 nt, Homo sapiens
gguccaaggucucca

SEQ ID NO: 143419 - RNA, 21 nt, Homo sapiens
cacaaucugaaacagcuucau

SEQ ID NO: 143420 - RNA, 15 nt, Homo sapiens
uaauaaagacagggu

SEQ ID NO: 143421 - RNA, 15 nt, Homo sapiens
aagaauguuuaugaa

SEQ ID NO: 143422 - RNA, 18 nt, Homo sapiens
ucuuggguucaagugauu

SEQ ID NO: 143423 - RNA, 20 nt, Homo sapiens
uacacauuuuucagauauaa

SEQ ID NO: 143424 - RNA, 14 nt, Homo sapiens
caguaguugcaaug

SEQ ID NO: 143425 - RNA, 16 nt, Homo sapiens
gcuaguaaaagccauc

SEQ ID NO: 143426 - RNA, 17 nt, Homo sapiens
aucccgucgacguagaa

SEQ ID NO: 143427 - RNA, 15 nt, Homo sapiens
aauauagcucaggua

SEQ ID NO: 143428 - RNA, 21 nt, Homo sapiens
ugaggaauuucuguucuucca

SEQ ID NO: 143429 - RNA, 19 nt, Homo sapiens
uguuaagccauguguucca

SEQ ID NO: 143430 - RNA, 18 nt, Homo sapiens
gccagagcaaacagaaaa

SEQ ID NO: 143431 - RNA, 13 nt, Homo sapiens
gucuuguguuucu

SEQ ID NO: 143432 - RNA, 21 nt, Homo sapiens
uaguggugacugugggcucca

SEQ ID NO: 143433 - RNA, 16 nt, Homo sapiens
acucaggcagaucuca

SEQ ID NO: 143434 - RNA, 20 nt, Homo sapiens
cuuuuuccuggcucaucucu

SEQ ID NO: 143435 - RNA, 23 nt, Homo sapiens
ccaguaguggugacugugggcuc

SEQ ID NO: 143436 - RNA, 23 nt, Homo sapiens
cuuagagcuuuaccuaaauauga

SEQ ID NO: 143437 - RNA, 23 nt, Homo sapiens
cuuuuuuuuuuuuuaaagacaga

SEQ ID NO: 143438 - RNA, 15 nt, Homo sapiens
ucuaaaaucugcuag

SEQ ID NO: 143439 - RNA, 15 nt, Homo sapiens
gaauguaaugguggc

SEQ ID NO: 143440 - RNA, 18 nt, Homo sapiens
ccaggcuggagugcaaug

SEQ ID NO: 143441 - RNA, 21 nt, Homo sapiens
ugccacucuguaauugcaaaa

SEQ ID NO: 143442 - RNA, 11 nt, Homo sapiens
ccacucagguc

SEQ ID NO: 143443 - RNA, 23 nt, Homo sapiens
uucauggauauguuauacugaac

SEQ ID NO: 143444 - RNA, 20 nt, Homo sapiens
aagaugaaacaucauuucaa

SEQ ID NO: 143445 - RNA, 16 nt, Homo sapiens
cugugccaucagcucc

SEQ ID NO: 143446 - RNA, 13 nt, Homo sapiens
auguguuccaagg

SEQ ID NO: 143447 - RNA, 16 nt, Homo sapiens
ggggacacagcaucag

SEQ ID NO: 143448 - RNA, 18 nt, Homo sapiens
ccucccacugccaaagaa

SEQ ID NO: 143449 - RNA, 14 nt, Homo sapiens
auguaucucaggaa

SEQ ID NO: 143450 - RNA, 16 nt, Homo sapiens
ugagacagcacagcca

SEQ ID NO: 143451 - RNA, 17 nt, Homo sapiens
cuucagucuuuuccaug

SEQ ID NO: 143452 - RNA, 14 nt, Homo sapiens
aucaguagccagca

SEQ ID NO: 143453 - RNA, 19 nt, Homo sapiens
cuuuaccuaaauaugagcc

SEQ ID NO: 143454 - RNA, 20 nt, Homo sapiens
aaaauaaucaguguuuccaa

SEQ ID NO: 143455 - RNA, 12 nt, Homo sapiens
agaaagugaucc

SEQ ID NO: 143456 - RNA, 19 nt, Homo sapiens
cucuugaaaucuguuaaaa

SEQ ID NO: 143457 - RNA, 22 nt, Homo sapiens
uacugcuggcaguggaacuaag

SEQ ID NO: 143458 - RNA, 18 nt, Homo sapiens
uagcauuugucaacaaag

SEQ ID NO: 143459 - RNA, 18 nt, Homo sapiens
acacaaucugaaacagcu

SEQ ID NO: 143460 - RNA, 23 nt, Homo sapiens
uccugaccucaaguaauccaccu

SEQ ID NO: 143461 - RNA, 16 nt, Homo sapiens
acugcaacuucugccu

SEQ ID NO: 143462 - RNA, 18 nt, Homo sapiens
uccugaccucaaguaauc

SEQ ID NO: 143463 - RNA, 18 nt, Homo sapiens
uguagaagauggcacuua

SEQ ID NO: 143464 - RNA, 13 nt, Homo sapiens
aggacuguagaaa

SEQ ID NO: 143465 - RNA, 19 nt, Homo sapiens
guagaaaagggaacugaac

SEQ ID NO: 143466 - RNA, 15 nt, Homo sapiens
ccagagcaaacagaa

SEQ ID NO: 143467 - RNA, 13 nt, Homo sapiens
gaauaugcacaaa

SEQ ID NO: 143468 - RNA, 21 nt, Homo sapiens
cauucccguggaacguuuuuc

SEQ ID NO: 143469 - RNA, 19 nt, Homo sapiens
caaucucaaucccucaaaa

SEQ ID NO: 143470 - RNA, 16 nt, Homo sapiens
gaaguuuucuugacuu

SEQ ID NO: 143471 - RNA, 23 nt, Homo sapiens
ugucucgugguaggacuguagaa

SEQ ID NO: 143472 - RNA, 15 nt, Homo sapiens
uacuuuaauguauaa

SEQ ID NO: 143473 - RNA, 12 nt, Homo sapiens
guucauucugca

SEQ ID NO: 143474 - RNA, 17 nt, Homo sapiens
cuggccuccaaguccac

SEQ ID NO: 143475 - RNA, 21 nt, Homo sapiens
augucuuuauuaaauguagaa

SEQ ID NO: 143476 - RNA, 21 nt, Homo sapiens
ccauuagcauuugucaacaaa

SEQ ID NO: 143477 - RNA, 16 nt, Homo sapiens
acacagcaucagcuca

SEQ ID NO: 143478 - RNA, 19 nt, Homo sapiens
ggaauuucuguucuuccau

SEQ ID NO: 143479 - RNA, 18 nt, Homo sapiens
acaaauugggccaaagaa

SEQ ID NO: 143480 - RNA, 19 nt, Homo sapiens
ugcaguuuuuuucuugucu

SEQ ID NO: 143481 - RNA, 19 nt, Homo sapiens
agugauucuccugccucag

SEQ ID NO: 143482 - RNA, 20 nt, Homo sapiens
uuauuaaauguagaaaguga

SEQ ID NO: 143483 - RNA, 14 nt, Homo sapiens
uucuggggcuucag

SEQ ID NO: 143484 - RNA, 19 nt, Homo sapiens
uccauuuacccuucuuuuc

SEQ ID NO: 143485 - RNA, 22 nt, Homo sapiens
cugagucccuuagccaagcagu

SEQ ID NO: 143486 - RNA, 17 nt, Homo sapiens
uucuuccaugucuauua

SEQ ID NO: 143487 - RNA, 21 nt, Homo sapiens
gucuuuggugaacauugcaau

SEQ ID NO: 143488 - RNA, 14 nt, Homo sapiens
uuauggcaaauuca

SEQ ID NO: 143489 - RNA, 23 nt, Homo sapiens
uaaaaguuggcucaggagucuua

SEQ ID NO: 143490 - RNA, 14 nt, Homo sapiens
guuuaguugcacaa

SEQ ID NO: 143491 - RNA, 16 nt, Homo sapiens
uacagucuuguauuaa

SEQ ID NO: 143492 - RNA, 15 nt, Homo sapiens
acaaaguaagccaug

SEQ ID NO: 143493 - RNA, 16 nt, Homo sapiens
uauugaacuuaugcaa

SEQ ID NO: 143494 - RNA, 13 nt, Homo sapiens
auauacuuauaga

SEQ ID NO: 143495 - RNA, 14 nt, Homo sapiens
gaaacaucauuuca

SEQ ID NO: 143496 - RNA, 14 nt, Homo sapiens
ucaucucuuuauuc

SEQ ID NO: 143497 - RNA, 17 nt, Homo sapiens
agaugcauccuuucaua

SEQ ID NO: 143498 - RNA, 18 nt, Homo sapiens
aauucagggagugggcua

SEQ ID NO: 143499 - RNA, 14 nt, Homo sapiens
ugagcaaaaccaaa

SEQ ID NO: 143500 - RNA, 13 nt, Homo sapiens
acuguccaaagac

SEQ ID NO: 143501 - RNA, 15 nt, Homo sapiens
cacagucuuggcuca

SEQ ID NO: 143502 - RNA, 15 nt, Homo sapiens
cuagucaguuggcua

SEQ ID NO: 143503 - RNA, 11 nt, Homo sapiens
ggaacugugua

SEQ ID NO: 143504 - RNA, 18 nt, Homo sapiens
accuaaauaugagcccag

SEQ ID NO: 143505 - RNA, 14 nt, Homo sapiens
aauagugauuucca

SEQ ID NO: 143506 - RNA, 12 nt, Homo sapiens
aauaaagacagg

SEQ ID NO: 143507 - RNA, 16 nt, Homo sapiens
cauaacaggagugcca

SEQ ID NO: 143508 - RNA, 11 nt, Homo sapiens
agaaguggaag

SEQ ID NO: 143509 - RNA, 18 nt, Homo sapiens
uucugcauucucuaguca

SEQ ID NO: 143510 - RNA, 16 nt, Homo sapiens
acugaaccaggccaga

SEQ ID NO: 143511 - RNA, 11 nt, Homo sapiens
uaaaagccauc

SEQ ID NO: 143512 - RNA, 18 nt, Homo sapiens
uaaugcauguggcacuua

SEQ ID NO: 143513 - RNA, 15 nt, Homo sapiens
auagaauucagucaa

SEQ ID NO: 143514 - RNA, 19 nt, Homo sapiens
accgcaggauuugggcucu

SEQ ID NO: 143515 - RNA, 20 nt, Homo sapiens
gaaguuuguuuaaaugacag

SEQ ID NO: 143516 - RNA, 15 nt, Homo sapiens
uucugaaaaaguauc

SEQ ID NO: 143517 - RNA, 15 nt, Homo sapiens
ugguuauauguauau

SEQ ID NO: 143518 - RNA, 16 nt, Homo sapiens
aaaccaaauauuccag

SEQ ID NO: 143519 - RNA, 15 nt, Homo sapiens
cgacaacuugcacgu

SEQ ID NO: 143520 - RNA, 19 nt, Homo sapiens
uccuaagccaugggagaca

SEQ ID NO: 143521 - RNA, 11 nt, Homo sapiens
ccaaggucucc

SEQ ID NO: 143522 - RNA, 13 nt, Homo sapiens
gaaacagcuucau

SEQ ID NO: 143523 - RNA, 15 nt, Homo sapiens
ccaaagacauguuua

SEQ ID NO: 143524 - RNA, 15 nt, Homo sapiens
ucguucucugccuca

SEQ ID NO: 143525 - RNA, 13 nt, Homo sapiens
gcaguggaacuaa

SEQ ID NO: 143526 - RNA, 20 nt, Homo sapiens
cuccccuguucauucugcau

SEQ ID NO: 143527 - RNA, 22 nt, Homo sapiens
cuguuuugguuuugcucacaaa

SEQ ID NO: 143528 - RNA, 12 nt, Homo sapiens
ugggccaaagaa

SEQ ID NO: 143529 - RNA, 13 nt, Homo sapiens
agucuucuuccau

SEQ ID NO: 143530 - RNA, 13 nt, Homo sapiens
ugcaauguuuuag

SEQ ID NO: 143531 - RNA, 15 nt, Homo sapiens
ccauaugaauaacau

SEQ ID NO: 143532 - RNA, 21 nt, Homo sapiens
uccacucaggucuguuuuccg

SEQ ID NO: 143533 - RNA, 19 nt, Homo sapiens
ugcuucaaaaacauucuua

SEQ ID NO: 143534 - RNA, 16 nt, Homo sapiens
ugaaugccacucugua

SEQ ID NO: 143535 - RNA, 14 nt, Homo sapiens
guuuucccaaagag

SEQ ID NO: 143536 - RNA, 14 nt, Homo sapiens
uacuucucugcuau

SEQ ID NO: 143537 - RNA, 13 nt, Homo sapiens
guccaaggucucc

SEQ ID NO: 143538 - RNA, 16 nt, Homo sapiens
accaauauuguacagu

SEQ ID NO: 143539 - RNA, 23 nt, Homo sapiens
uuacuguucuaaggcugugccau

SEQ ID NO: 143540 - RNA, 16 nt, Homo sapiens
acuauugcuugcacaa

SEQ ID NO: 143541 - RNA, 18 nt, Homo sapiens
ugaaaauaugacacucua

SEQ ID NO: 143542 - RNA, 15 nt, Homo sapiens
ugaaugccacucugu

SEQ ID NO: 143543 - RNA, 10 nt, Homo sapiens
gaaaacagaa

SEQ ID NO: 143544 - RNA, 17 nt, Homo sapiens
uuuaaaugaaagugaga

SEQ ID NO: 143545 - RNA, 13 nt, Homo sapiens
cagagacugggac

SEQ ID NO: 143546 - RNA, 14 nt, Homo sapiens
ugggauuacaggga

SEQ ID NO: 143547 - RNA, 20 nt, Homo sapiens
augcuggggacacagcauca

SEQ ID NO: 143548 - RNA, 13 nt, Homo sapiens
ucaaaaacauucu

SEQ ID NO: 143549 - RNA, 11 nt, Homo sapiens
aagacugacca

SEQ ID NO: 143550 - RNA, 23 nt, Homo sapiens
cacuguuaagccauguguuccaa

SEQ ID NO: 143551 - RNA, 20 nt, Homo sapiens
cucgugguaggacuguagaa

SEQ ID NO: 143552 - RNA, 16 nt, Homo sapiens
uagaucugaacuccuu

SEQ ID NO: 143553 - RNA, 22 nt, Homo sapiens
gcgcaguuggucuuuaaccacu

SEQ ID NO: 143554 - RNA, 21 nt, Homo sapiens
ucuaaggcugugccaucagcu

SEQ ID NO: 143555 - RNA, 17 nt, Homo sapiens
augagggaacuguguag

SEQ ID NO: 143556 - RNA, 22 nt, Homo sapiens
agacagcacagccaaccuagcu

SEQ ID NO: 143557 - RNA, 15 nt, Homo sapiens
cuaacaguaguugca

SEQ ID NO: 143558 - RNA, 19 nt, Homo sapiens
agaaguaaauauagcucag

SEQ ID NO: 143559 - RNA, 14 nt, Homo sapiens
gcuaauauugcaau

SEQ ID NO: 143560 - RNA, 22 nt, Homo sapiens
ggcuaagcacgggccauaugaa

SEQ ID NO: 143561 - RNA, 17 nt, Homo sapiens
acuuacuucucugcuau

SEQ ID NO: 143562 - RNA, 23 nt, Homo sapiens
gaagggcuuggacucaagcaaga

SEQ ID NO: 143563 - RNA, 12 nt, Homo sapiens
gaaucucucuuc

SEQ ID NO: 143564 - RNA, 20 nt, Homo sapiens
aaaaucaaacaauucaggga

SEQ ID NO: 143565 - RNA, 16 nt, Homo sapiens
cuuaaaauagccauaa

SEQ ID NO: 143566 - RNA, 23 nt, Homo sapiens
uuaaaaggaaagcagauggugga

SEQ ID NO: 143567 - RNA, 12 nt, Homo sapiens
gacucaagcaag

SEQ ID NO: 143568 - RNA, 23 nt, Homo sapiens
aacuuggaaauagugauuuccac

SEQ ID NO: 143569 - RNA, 14 nt, Homo sapiens
uuaaacuuacuuag

SEQ ID NO: 143570 - RNA, 21 nt, Homo sapiens
gaauucagucaaagauacaca

SEQ ID NO: 143571 - RNA, 19 nt, Homo sapiens
cugauguagcuuauacaaa

SEQ ID NO: 143572 - RNA, 22 nt, Homo sapiens
aaacccaguaguggugacugug

SEQ ID NO: 143573 - RNA, 20 nt, Homo sapiens
ucauacuugaaaauaugaca

SEQ ID NO: 143574 - RNA, 21 nt, Homo sapiens
aaaauuaagaaauucacuucc

SEQ ID NO: 143575 - RNA, 20 nt, Homo sapiens
agcaacauuuguuuuagucu

SEQ ID NO: 143576 - RNA, 18 nt, Homo sapiens
uuaaaccguacacugugu

SEQ ID NO: 143577 - RNA, 21 nt, Homo sapiens
ccuuggcuaguaaaagccauc

SEQ ID NO: 143578 - RNA, 21 nt, Homo sapiens
guaaauuucucuacugucuca

SEQ ID NO: 143579 - RNA, 23 nt, Homo sapiens
auacuguuuuacuguccaaagac

SEQ ID NO: 143580 - RNA, 14 nt, Homo sapiens
caaugucuaaaaac

SEQ ID NO: 143581 - RNA, 18 nt, Homo sapiens
ccagagcguguagugaau

SEQ ID NO: 143582 - RNA, 18 nt, Homo sapiens
aaaaguauccugcuucug

SEQ ID NO: 143583 - RNA, 11 nt, Homo sapiens
agaagaugaau

SEQ ID NO: 143584 - RNA, 20 nt, Homo sapiens
gcccaggcuggagugcaaug

SEQ ID NO: 143585 - RNA, 22 nt, Homo sapiens
ugauuucagcaccuacagugua

SEQ ID NO: 143586 - RNA, 16 nt, Homo sapiens
cacagccaaccuagcu

SEQ ID NO: 143587 - RNA, 22 nt, Homo sapiens
ugacucaagacuuccagagccu

SEQ ID NO: 143588 - RNA, 16 nt, Homo sapiens
acccuucuccuuagaa

SEQ ID NO: 143589 - RNA, 19 nt, Homo sapiens
auuaucuaaaaucugcuag

SEQ ID NO: 143590 - RNA, 14 nt, Homo sapiens
guccacaguggaac

SEQ ID NO: 143591 - RNA, 18 nt, Homo sapiens
ugcaaugacacagucuug

SEQ ID NO: 143592 - RNA, 18 nt, Homo sapiens
accaacuauagaauguau

SEQ ID NO: 143593 - RNA, 18 nt, Homo sapiens
aaagacaggguuucacca

SEQ ID NO: 143594 - RNA, 14 nt, Homo sapiens
uuuucuugucuaua

SEQ ID NO: 143595 - RNA, 20 nt, Homo sapiens
gacgugauuuugcuguagaa

SEQ ID NO: 143596 - RNA, 18 nt, Homo sapiens
cuauuuuuuguaaugugu

SEQ ID NO: 143597 - RNA, 14 nt, Homo sapiens
acaaucugaaacag

SEQ ID NO: 143598 - RNA, 20 nt, Homo sapiens
uaagaugaaacaucauuuca

SEQ ID NO: 143599 - RNA, 15 nt, Homo sapiens
agccauguaucucag

SEQ ID NO: 143600 - RNA, 12 nt, Homo sapiens
uauuuuuacuaa

SEQ ID NO: 143601 - RNA, 18 nt, Homo sapiens
ucacagccacuugggaua

SEQ ID NO: 143602 - RNA, 20 nt, Homo sapiens
ugcccaggcuggagugcaau

SEQ ID NO: 143603 - RNA, 19 nt, Homo sapiens
uggaaauagugauuuccac

SEQ ID NO: 143604 - RNA, 22 nt, Homo sapiens
uaaccaaagcccaaagugguau

SEQ ID NO: 143605 - RNA, 15 nt, Homo sapiens
uugcaauguggcuug

SEQ ID NO: 143606 - RNA, 13 nt, Homo sapiens
gugccaucagcuc

SEQ ID NO: 143607 - RNA, 17 nt, Homo sapiens
agguugagggcaaugga

SEQ ID NO: 143608 - RNA, 15 nt, Homo sapiens
guagaaagugaucca

SEQ ID NO: 143609 - RNA, 18 nt, Homo sapiens
uugcacaaauugggccaa

SEQ ID NO: 143610 - RNA, 15 nt, Homo sapiens
auucuguaguuucac

SEQ ID NO: 143611 - RNA, 17 nt, Homo sapiens
cugcuagggaauaucaa

SEQ ID NO: 143612 - RNA, 20 nt, Homo sapiens
ucauauugaugugugucuag

SEQ ID NO: 143613 - RNA, 16 nt, Homo sapiens
augcaguuuuccuuaa

SEQ ID NO: 143614 - RNA, 22 nt, Homo sapiens
ccucaaaugagaaaaugucuuu

SEQ ID NO: 143615 - RNA, 14 nt, Homo sapiens
uaaaauagccauaa

SEQ ID NO: 143616 - RNA, 19 nt, Homo sapiens
cuuuaauuuuuuacuauuu

SEQ ID NO: 143617 - RNA, 12 nt, Homo sapiens
ggaaaauucucu

SEQ ID NO: 143618 - RNA, 15 nt, Homo sapiens
gagcuccuaagccau

SEQ ID NO: 143619 - RNA, 22 nt, Homo sapiens
uaccuuuuauuuuaauguuucc

SEQ ID NO: 143620 - RNA, 17 nt, Homo sapiens
uuaugaauaguuuccaa

SEQ ID NO: 143621 - RNA, 22 nt, Homo sapiens
uaugauuguccguaggcccaua

SEQ ID NO: 143622 - RNA, 22 nt, Homo sapiens
uagucucuggcaagaugcuuua

SEQ ID NO: 143623 - RNA, 21 nt, Homo sapiens
gacucaagacuuccagagccu

SEQ ID NO: 143624 - RNA, 11 nt, Homo sapiens
uuuaaagacag

SEQ ID NO: 143625 - RNA, 16 nt, Homo sapiens
uggccuggggcuucug

SEQ ID NO: 143626 - RNA, 21 nt, Homo sapiens
ugcacaaauugggccaaagaa

SEQ ID NO: 143627 - RNA, 17 nt, Homo sapiens
auuucucuacugucuca

SEQ ID NO: 143628 - RNA, 17 nt, Homo sapiens
ggcugugccaucagcuc

SEQ ID NO: 143629 - RNA, 14 nt, Homo sapiens
cacaaucugaaaca

SEQ ID NO: 143630 - RNA, 14 nt, Homo sapiens
aauaaaauuguaca

SEQ ID NO: 143631 - RNA, 18 nt, Homo sapiens
aauguccuacugagacag

SEQ ID NO: 143632 - RNA, 22 nt, Homo sapiens
gugggcuaagcacgggccauau

SEQ ID NO: 143633 - RNA, 13 nt, Homo sapiens
uucuccugccuca

SEQ ID NO: 143634 - RNA, 17 nt, Homo sapiens
aagcuggagucugucaa

SEQ ID NO: 143635 - RNA, 13 nt, Homo sapiens
aaaugaaagugag

SEQ ID NO: 143636 - RNA, 12 nt, Homo sapiens
guacacuguguu

SEQ ID NO: 143637 - RNA, 15 nt, Homo sapiens
aaugugacucaagac

SEQ ID NO: 143638 - RNA, 18 nt, Homo sapiens
uccuccccuguucauucu

SEQ ID NO: 143639 - RNA, 17 nt, Homo sapiens
aaccguacacuguguuu

SEQ ID NO: 143640 - RNA, 20 nt, Homo sapiens
auaaaggggagggacucauc

SEQ ID NO: 143641 - RNA, 22 nt, Homo sapiens
ucaagugauucuccugccucag

SEQ ID NO: 143642 - RNA, 10 nt, Homo sapiens
ucauauugau

SEQ ID NO: 143643 - RNA, 16 nt, Homo sapiens
cuauuagcuccacaaa

SEQ ID NO: 143644 - RNA, 21 nt, Homo sapiens
uggauuacaggcaugugccac

SEQ ID NO: 143645 - RNA, 12 nt, Homo sapiens
gccaagcaguuu

SEQ ID NO: 143646 - RNA, 17 nt, Homo sapiens
gcaauggacaaggaagg

SEQ ID NO: 143647 - RNA, 19 nt, Homo sapiens
uauauguauaucacauucc

SEQ ID NO: 143648 - RNA, 15 nt, Homo sapiens
cuaguaaaagccauc

SEQ ID NO: 143649 - RNA, 22 nt, Homo sapiens
agccuaggaaagccaguuacau

SEQ ID NO: 143650 - RNA, 18 nt, Homo sapiens
ccacccucccacugccaa

SEQ ID NO: 143651 - RNA, 15 nt, Homo sapiens
uaagaaauucacuuc

SEQ ID NO: 143652 - RNA, 21 nt, Homo sapiens
aaagcuagaaaguguaugugu

SEQ ID NO: 143653 - RNA, 14 nt, Homo sapiens
aaaaggcagaguac

SEQ ID NO: 143654 - RNA, 19 nt, Homo sapiens
ucagaguuccgacugccau

SEQ ID NO: 143655 - RNA, 20 nt, Homo sapiens
guauauucaaccaaauacuu

SEQ ID NO: 143656 - RNA, 17 nt, Homo sapiens
ccaaauauuccagagac

SEQ ID NO: 143657 - RNA, 18 nt, Homo sapiens
cgauuaauaacaggcaaa

SEQ ID NO: 143658 - RNA, 18 nt, Homo sapiens
ggaacuaagaaagcccuu

SEQ ID NO: 143659 - RNA, 11 nt, Homo sapiens
uucaagugauu

SEQ ID NO: 143660 - RNA, 19 nt, Homo sapiens
caaucaguagccagcaucu

SEQ ID NO: 143661 - RNA, 13 nt, Homo sapiens
ggauuacagggau

SEQ ID NO: 143662 - RNA, 20 nt, Homo sapiens
acagugacuccacucugagu

SEQ ID NO: 143663 - RNA, 18 nt, Homo sapiens
aaagucuacuuuaccuaa

SEQ ID NO: 143664 - RNA, 19 nt, Homo sapiens
agaucguucucugccucac

SEQ ID NO: 143665 - RNA, 14 nt, Homo sapiens
uagaaugagacuua

SEQ ID NO: 143666 - RNA, 21 nt, Homo sapiens
uaagcacgggccauaugaaua

SEQ ID NO: 143667 - RNA, 12 nt, Homo sapiens
uaguugcuguau

SEQ ID NO: 143668 - RNA, 22 nt, Homo sapiens
cacagcacaaauuaguuguaua

SEQ ID NO: 143669 - RNA, 13 nt, Homo sapiens
uacuaaucuuucu

SEQ ID NO: 143670 - RNA, 12 nt, Homo sapiens
aaguaagccaug

SEQ ID NO: 143671 - RNA, 13 nt, Homo sapiens
cagaaaaagaagg

SEQ ID NO: 143672 - RNA, 14 nt, Homo sapiens
uuugaggguguaua

SEQ ID NO: 143673 - RNA, 15 nt, Homo sapiens
aaccguacacugugu

SEQ ID NO: 143674 - RNA, 16 nt, Homo sapiens
ucaggcagaucucagc

SEQ ID NO: 143675 - RNA, 18 nt, Homo sapiens
aauguagaaagugaucca

SEQ ID NO: 143676 - RNA, 17 nt, Homo sapiens
aauaaccauugucauaa

SEQ ID NO: 143677 - RNA, 11 nt, Homo sapiens
auaguuuccaa

SEQ ID NO: 143678 - RNA, 20 nt, Homo sapiens
accaauauuguacaguuuuu

SEQ ID NO: 143679 - RNA, 18 nt, Homo sapiens
gauaaucucuccauuccc

SEQ ID NO: 143680 - RNA, 14 nt, Homo sapiens
aaacaucauuucaa

SEQ ID NO: 143681 - RNA, 13 nt, Homo sapiens
uucuuuucugacu

SEQ ID NO: 143682 - RNA, 20 nt, Homo sapiens
aaguaaauauagcucaggua

SEQ ID NO: 143683 - RNA, 21 nt, Homo sapiens
caaucugaaacagcuucaugg

SEQ ID NO: 143684 - RNA, 18 nt, Homo sapiens
ggguuucaccauguuggc

SEQ ID NO: 143685 - RNA, 18 nt, Homo sapiens
uggaaauagugauuucca

SEQ ID NO: 143686 - RNA, 15 nt, Homo sapiens
aguguaccagagaag

SEQ ID NO: 143687 - RNA, 17 nt, Homo sapiens
acccuucuuuucugacu

SEQ ID NO: 143688 - RNA, 12 nt, Homo sapiens
ucccacugccaa

SEQ ID NO: 143689 - RNA, 12 nt, Homo sapiens
caaaacauuugu

SEQ ID NO: 143690 - RNA, 22 nt, Homo sapiens
gguacaguauggggguuguaaa

SEQ ID NO: 143691 - RNA, 18 nt, Homo sapiens
uugugcauaaaaacaaga

SEQ ID NO: 143692 - RNA, 18 nt, Homo sapiens
agcucagguagcacuuua

SEQ ID NO: 143693 - RNA, 23 nt, Homo sapiens
cuuccuccccuguucauucugca

SEQ ID NO: 143694 - RNA, 21 nt, Homo sapiens
gauacacaaucugaaacagcu

SEQ ID NO: 143695 - RNA, 15 nt, Homo sapiens
aauaaccauugucau

SEQ ID NO: 143696 - RNA, 15 nt, Homo sapiens
auacuagaguucaug

SEQ ID NO: 143697 - RNA, 22 nt, Homo sapiens
caaaaccaaauauuccagagac

SEQ ID NO: 143698 - RNA, 13 nt, Homo sapiens
ugacacagucuug

SEQ ID NO: 143699 - RNA, 18 nt, Homo sapiens
gcaaacagaaaaagaagg

SEQ ID NO: 143700 - RNA, 21 nt, Homo sapiens
ugaugcuggggacacagcauc

SEQ ID NO: 143701 - RNA, 13 nt, Homo sapiens
agccucaucucuu

SEQ ID NO: 143702 - RNA, 18 nt, Homo sapiens
auauguauaucacauucc

SEQ ID NO: 143703 - RNA, 13 nt, Homo sapiens
ucuuuuugcuuca

SEQ ID NO: 143704 - RNA, 19 nt, Homo sapiens
ccaaagcccaaagugguau

SEQ ID NO: 143705 - RNA, 24 nt, Homo sapiens
cuugguaaaauaaucaguguuucc

SEQ ID NO: 143706 - RNA, 13 nt, Homo sapiens
caaucguaaaauu

SEQ ID NO: 143707 - RNA, 22 nt, Homo sapiens
caccgcgcccagccucaucucu

SEQ ID NO: 143708 - RNA, 14 nt, Homo sapiens
uccccuucacuccc

SEQ ID NO: 143709 - RNA, 23 nt, Homo sapiens
cuuuggugaacauugcaauagaa

SEQ ID NO: 143710 - RNA, 21 nt, Homo sapiens
ugugcuucuuaaaauagccau

SEQ ID NO: 143711 - RNA, 22 nt, Homo sapiens
gugcuucuuaaaauagccauaa

SEQ ID NO: 143712 - RNA, 21 nt, Homo sapiens
auaacuuuuuuuuaaguuaca

SEQ ID NO: 143713 - RNA, 13 nt, Homo sapiens
uuacuaaucuuuc

SEQ ID NO: 143714 - RNA, 19 nt, Homo sapiens
ucaaaacaaucuugucaua

SEQ ID NO: 143715 - RNA, 22 nt, Homo sapiens
ccauacuagaguucauggauau

SEQ ID NO: 143716 - RNA, 18 nt, Homo sapiens
cagaguuccgacugccau

SEQ ID NO: 143717 - RNA, 16 nt, Homo sapiens
acguaagacuguguaa

SEQ ID NO: 143718 - RNA, 20 nt, Homo sapiens
uaaacuuacuuaguguuaug

SEQ ID NO: 143719 - RNA, 16 nt, Homo sapiens
aaauauaguucacaau

SEQ ID NO: 143720 - RNA, 14 nt, Homo sapiens
caaaguaagccaug

SEQ ID NO: 143721 - RNA, 14 nt, Homo sapiens
gucauaacuagaac

SEQ ID NO: 143722 - RNA, 23 nt, Homo sapiens
uguuaagccauguguuccaaggc

SEQ ID NO: 143723 - RNA, 21 nt, Homo sapiens
cacuucccacuauugcuugca

SEQ ID NO: 143724 - RNA, 15 nt, Homo sapiens
gcuaguaaaagccau

SEQ ID NO: 143725 - RNA, 21 nt, Homo sapiens
aaugcugguuuuucaguuuuc

SEQ ID NO: 143726 - RNA, 22 nt, Homo sapiens
ccugaccucaaguaauccaccu

SEQ ID NO: 143727 - RNA, 12 nt, Homo sapiens
uguagaaaguga

SEQ ID NO: 143728 - RNA, 17 nt, Homo sapiens
ucaaaacaaucuuguca

SEQ ID NO: 143729 - RNA, 19 nt, Homo sapiens
ugagucccagagccaauca

SEQ ID NO: 143730 - RNA, 22 nt, Homo sapiens
aauauuccagagacugggacua

SEQ ID NO: 143731 - RNA, 14 nt, Homo sapiens
gccagcaucugccu

SEQ ID NO: 143732 - RNA, 15 nt, Homo sapiens
augaauaguuuccaa

SEQ ID NO: 143733 - RNA, 22 nt, Homo sapiens
ucuuuaaccacuuuucaauguc

SEQ ID NO: 143734 - RNA, 18 nt, Homo sapiens
ggaaauagugauuuccac

SEQ ID NO: 143735 - RNA, 19 nt, Homo sapiens
ugaccaauauuguacaguu

SEQ ID NO: 143736 - RNA, 19 nt, Homo sapiens
cgugauuuugcuguagaag

SEQ ID NO: 143737 - RNA, 16 nt, Homo sapiens
uauaaaagacugacca

SEQ ID NO: 143738 - RNA, 20 nt, Homo sapiens
uguguuuuuaauaaagacag

SEQ ID NO: 143739 - RNA, 15 nt, Homo sapiens
agccagguucugacu

SEQ ID NO: 143740 - RNA, 19 nt, Homo sapiens
auugcuugcacaaaccaau

SEQ ID NO: 143741 - RNA, 20 nt, Homo sapiens
ccacagugacuccacucuga

SEQ ID NO: 143742 - RNA, 18 nt, Homo sapiens
agcccuuaggaagaauuu

SEQ ID NO: 143743 - RNA, 19 nt, Homo sapiens
caauauauacuuauagaau

SEQ ID NO: 143744 - RNA, 19 nt, Homo sapiens
gcauuugucaacaaaguca

SEQ ID NO: 143745 - RNA, 13 nt, Homo sapiens
guguaccagagaa

SEQ ID NO: 143746 - RNA, 18 nt, Homo sapiens
aaccucgagguuucucaa

SEQ ID NO: 143747 - RNA, 13 nt, Homo sapiens
uucagaaucucuc

SEQ ID NO: 143748 - RNA, 23 nt, Homo sapiens
cauggauauguuauacugaacca

SEQ ID NO: 143749 - RNA, 16 nt, Homo sapiens
ccuggaccaggucuca

SEQ ID NO: 143750 - RNA, 20 nt, Homo sapiens
gaacguuuuuccuguucuua

SEQ ID NO: 143751 - RNA, 22 nt, Homo sapiens
augaggaauuucuguucuucca

SEQ ID NO: 143752 - RNA, 22 nt, Homo sapiens
gggaaggaggccguccaucccg

SEQ ID NO: 143753 - RNA, 17 nt, Homo sapiens
gacgugauuuugcugua

SEQ ID NO: 143754 - RNA, 23 nt, Homo sapiens
guggacucuaacaguaguugcaa

SEQ ID NO: 143755 - RNA, 13 nt, Homo sapiens
gugauauguuggu

SEQ ID NO: 143756 - RNA, 20 nt, Homo sapiens
uuuuuacuaaucuuucugca

SEQ ID NO: 143757 - RNA, 14 nt, Homo sapiens
ugaauaugccacuu

SEQ ID NO: 143758 - RNA, 21 nt, Homo sapiens
uguuuaugaauaguuuccaaa

SEQ ID NO: 143759 - RNA, 17 nt, Homo sapiens
uuagugcacagcacaaa

SEQ ID NO: 143760 - RNA, 17 nt, Homo sapiens
augguggccuggggcuu

SEQ ID NO: 143761 - RNA, 17 nt, Homo sapiens
acauaaaaguuggcuca

SEQ ID NO: 143762 - RNA, 13 nt, Homo sapiens
gaauuaagcacag

SEQ ID NO: 143763 - RNA, 15 nt, Homo sapiens
guaggugguuuugaa

SEQ ID NO: 143764 - RNA, 16 nt, Homo sapiens
gaaguuuaauugacuu

SEQ ID NO: 143765 - RNA, 20 nt, Homo sapiens
gaguucauggauauguuaua

SEQ ID NO: 143766 - RNA, 14 nt, Homo sapiens
acacagcaucagcu

SEQ ID NO: 143767 - RNA, 18 nt, Homo sapiens
uguuguuuucccaaagag

SEQ ID NO: 143768 - RNA, 20 nt, Homo sapiens
aaccaaauacuuuaauguau

SEQ ID NO: 143769 - RNA, 13 nt, Homo sapiens
gcuucuuuacuua

SEQ ID NO: 143770 - RNA, 17 nt, Homo sapiens
caaacuccugaccucaa

SEQ ID NO: 143771 - RNA, 23 nt, Homo sapiens
gaaaagaaucggcaauguuucaa

SEQ ID NO: 143772 - RNA, 17 nt, Homo sapiens
uuuaauguuuccuuuaa

SEQ ID NO: 143773 - RNA, 17 nt, Homo sapiens
aagaucguucucugccu

SEQ ID NO: 143774 - RNA, 17 nt, Homo sapiens
agauuucagauuuguga

SEQ ID NO: 143775 - RNA, 18 nt, Homo sapiens
caucccgucgacguagaa

SEQ ID NO: 143776 - RNA, 15 nt, Homo sapiens
agaaagugauccaua

SEQ ID NO: 143777 - RNA, 16 nt, Homo sapiens
ucauuguaaaaagccc

SEQ ID NO: 143778 - RNA, 16 nt, Homo sapiens
ucaauguccuacugag

SEQ ID NO: 143779 - RNA, 18 nt, Homo sapiens
cgugaccugccaggcaca

SEQ ID NO: 143780 - RNA, 11 nt, Homo sapiens
ugaacauucca

SEQ ID NO: 143781 - RNA, 13 nt, Homo sapiens
auuugucaacaaa

SEQ ID NO: 143782 - RNA, 22 nt, Homo sapiens
gcuggauuacaggcaugugcca

SEQ ID NO: 143783 - RNA, 16 nt, Homo sapiens
uaagccauguguucca

SEQ ID NO: 143784 - RNA, 14 nt, Homo sapiens
gcuguagaagaugg

SEQ ID NO: 143785 - RNA, 17 nt, Homo sapiens
ggcacacugagccagca

SEQ ID NO: 143786 - RNA, 16 nt, Homo sapiens
uuccuccccuguucau

SEQ ID NO: 143787 - RNA, 12 nt, Homo sapiens
guagaaagugau

SEQ ID NO: 143788 - RNA, 13 nt, Homo sapiens
aaaguaagccaug

SEQ ID NO: 143789 - RNA, 22 nt, Homo sapiens
cgaauauaucaguaauuucaga

SEQ ID NO: 143790 - RNA, 15 nt, Homo sapiens
cacaaauuaguugua

SEQ ID NO: 143791 - RNA, 15 nt, Homo sapiens
acagcaucagcucaa

SEQ ID NO: 143792 - RNA, 11 nt, Homo sapiens
auaaagacagg

SEQ ID NO: 143793 - RNA, 21 nt, Homo sapiens
caugucuauuagcuccacaaa

SEQ ID NO: 143794 - RNA, 16 nt, Homo sapiens
gauuuugcuguagaag

SEQ ID NO: 143795 - RNA, 13 nt, Homo sapiens
cuuuauugcucau

SEQ ID NO: 143796 - RNA, 16 nt, Homo sapiens
aauaaauucaucagau

SEQ ID NO: 143797 - RNA, 16 nt, Homo sapiens
caggcuggagugcaau

SEQ ID NO: 143798 - RNA, 23 nt, Homo sapiens
gucucaguuuacauuuuguauau

SEQ ID NO: 143799 - RNA, 18 nt, Homo sapiens
accauuagcauuugucaa

SEQ ID NO: 143800 - RNA, 20 nt, Homo sapiens
cagagucucgcucuguugcc

SEQ ID NO: 143801 - RNA, 22 nt, Homo sapiens
ccauuugcuuagaaagucugau

SEQ ID NO: 143802 - RNA, 21 nt, Homo sapiens
auuuuacuuuuuccuggcuca

SEQ ID NO: 143803 - RNA, 17 nt, Homo sapiens
ggcaggaccuguggcca

SEQ ID NO: 143804 - RNA, 13 nt, Homo sapiens
accuacaguguac

SEQ ID NO: 143805 - RNA, 17 nt, Homo sapiens
caguaguggugacugug

SEQ ID NO: 143806 - RNA, 15 nt, Homo sapiens
ccuuugccugguaca

SEQ ID NO: 143807 - RNA, 19 nt, Homo sapiens
uuggauacgacaacuugca

SEQ ID NO: 143808 - RNA, 22 nt, Homo sapiens
cccucccacugccaaagaacuu

SEQ ID NO: 143809 - RNA, 14 nt, Homo sapiens
gucuuuaaccacuu

SEQ ID NO: 143810 - RNA, 21 nt, Homo sapiens
aggacacuagaagauuuugaa

SEQ ID NO: 143811 - RNA, 13 nt, Homo sapiens
gcauucucuaguc

SEQ ID NO: 143812 - RNA, 21 nt, Homo sapiens
caaucuguccuguuacaaaag

SEQ ID NO: 143813 - RNA, 12 nt, Homo sapiens
uucacucccacc

SEQ ID NO: 143814 - RNA, 16 nt, Homo sapiens
gcagagaggcugaaua

SEQ ID NO: 143815 - RNA, 17 nt, Homo sapiens
cucaaagaaauuuccac

SEQ ID NO: 143816 - RNA, 15 nt, Homo sapiens
uggguucaagugauu

SEQ ID NO: 143817 - RNA, 17 nt, Homo sapiens
cugguggggcugccagg

SEQ ID NO: 143818 - RNA, 10 nt, Homo sapiens
uaaagacaga

SEQ ID NO: 143819 - RNA, 21 nt, Homo sapiens
accuucaguugucucugaugu

SEQ ID NO: 143820 - RNA, 14 nt, Homo sapiens
uuggaaaaucaaga

SEQ ID NO: 143821 - RNA, 16 nt, Homo sapiens
uaauaaaaguacaugu

SEQ ID NO: 143822 - RNA, 13 nt, Homo sapiens
gguucaagugauu

SEQ ID NO: 143823 - RNA, 19 nt, Homo sapiens
aguauccugcuucugauau

SEQ ID NO: 143824 - RNA, 22 nt, Homo sapiens
ccauaggaggccaacccaaaau

SEQ ID NO: 143825 - RNA, 21 nt, Homo sapiens
ccacugccaaagaacuuggaa

SEQ ID NO: 143826 - RNA, 23 nt, Homo sapiens
uucagauauaaaagacugaccaa

SEQ ID NO: 143827 - RNA, 23 nt, Homo sapiens
aauuuuauguuuaguugcacaaa

SEQ ID NO: 143828 - RNA, 16 nt, Homo sapiens
aaguccacaguggaac

SEQ ID NO: 143829 - RNA, 20 nt, Homo sapiens
auacuagaguucauggauau

SEQ ID NO: 143830 - RNA, 17 nt, Homo sapiens
gaaugagcaaaaccaaa

SEQ ID NO: 143831 - RNA, 14 nt, Homo sapiens
ccagagacugggac

SEQ ID NO: 143832 - RNA, 22 nt, Homo sapiens
aagccuugguaaaauaaucagu

SEQ ID NO: 143833 - RNA, 18 nt, Homo sapiens
cuauaagaugaaacauca

SEQ ID NO: 143834 - RNA, 21 nt, Homo sapiens
aucugccuccccuucacuccc

SEQ ID NO: 143835 - RNA, 23 nt, Homo sapiens
uagugauuuccacagugacucca

SEQ ID NO: 143836 - RNA, 14 nt, Homo sapiens
caucauuucaaucg

SEQ ID NO: 143837 - RNA, 22 nt, Homo sapiens
uugcacaaauugggccaaagaa

SEQ ID NO: 143838 - RNA, 16 nt, Homo sapiens
agugauucuccugccu

SEQ ID NO: 143839 - RNA, 13 nt, Homo sapiens
ggguaaauucucu

SEQ ID NO: 143840 - RNA, 18 nt, Homo sapiens
cucuaacaguaguugcaa

SEQ ID NO: 143841 - RNA, 13 nt, Homo sapiens
gaaaaguuuugua

SEQ ID NO: 143842 - RNA, 21 nt, Homo sapiens
cacugccaaagaacuuggaaa

SEQ ID NO: 143843 - RNA, 22 nt, Homo sapiens
agauacacaaucugaaacagcu

SEQ ID NO: 143844 - RNA, 16 nt, Homo sapiens
uacaauauacuuguau

SEQ ID NO: 143845 - RNA, 19 nt, Homo sapiens
agcaccuacaguguacagu

SEQ ID NO: 143846 - RNA, 15 nt, Homo sapiens
cacagcaucagcuca

SEQ ID NO: 143847 - RNA, 21 nt, Homo sapiens
aaccguaugagggaacugugu

SEQ ID NO: 143848 - RNA, 20 nt, Homo sapiens
gucagaguuccgacugccau

SEQ ID NO: 143849 - RNA, 18 nt, Homo sapiens
ccaaagaaacauugccuu

SEQ ID NO: 143850 - RNA, 17 nt, Homo sapiens
accuaacgagaaauaga

SEQ ID NO: 143851 - RNA, 19 nt, Homo sapiens
acauuuguuguucuguuaa

SEQ ID NO: 143852 - RNA, 20 nt, Homo sapiens
gacagcuccuggaccaggcc

SEQ ID NO: 143853 - RNA, 23 nt, Homo sapiens
uucagucaaagauacacaaucug

SEQ ID NO: 143854 - RNA, 15 nt, Homo sapiens
aaggcagaguacaaa

SEQ ID NO: 143855 - RNA, 19 nt, Homo sapiens
gucugaacaauauauacuu

SEQ ID NO: 143856 - RNA, 16 nt, Homo sapiens
uagcuuauacaaaaca

SEQ ID NO: 143857 - RNA, 20 nt, Homo sapiens
accguaugagggaacugugu

SEQ ID NO: 143858 - RNA, 17 nt, Homo sapiens
cuaaaaguuaauagggu

SEQ ID NO: 143859 - RNA, 21 nt, Homo sapiens
accuaaauaugagcccagaaa

SEQ ID NO: 143860 - RNA, 12 nt, Homo sapiens
agcaucagcuca

SEQ ID NO: 143861 - RNA, 22 nt, Homo sapiens
uguagagagagaaaaguaacug

SEQ ID NO: 143862 - RNA, 18 nt, Homo sapiens
guugagggcaauggacaa

SEQ ID NO: 143863 - RNA, 16 nt, Homo sapiens
caauauuguacaguuu

SEQ ID NO: 143864 - RNA, 13 nt, Homo sapiens
cacucagaaaaug

SEQ ID NO: 143865 - RNA, 19 nt, Homo sapiens
cacuuagguccaaggucuc

SEQ ID NO: 143866 - RNA, 23 nt, Homo sapiens
ggcagaguacaaaguaagccaug

SEQ ID NO: 143867 - RNA, 14 nt, Homo sapiens
uuugucaacaaagu

SEQ ID NO: 143868 - RNA, 15 nt, Homo sapiens
uggggacacagcauc

SEQ ID NO: 143869 - RNA, 20 nt, Homo sapiens
auacuuauagaauucaguca

SEQ ID NO: 143870 - RNA, 21 nt, Homo sapiens
ucaagugauucuccugccuca

SEQ ID NO: 143871 - RNA, 19 nt, Homo sapiens
aauucugaauuaagcacag

SEQ ID NO: 143872 - RNA, 22 nt, Homo sapiens
agcuggagucugucaauguccu

SEQ ID NO: 143873 - RNA, 18 nt, Homo sapiens
ucauaaaagucacuuuau

SEQ ID NO: 143874 - RNA, 13 nt, Homo sapiens
cuaaauaugagcc

SEQ ID NO: 143875 - RNA, 18 nt, Homo sapiens
gcgcccagccucaucucu

SEQ ID NO: 143876 - RNA, 18 nt, Homo sapiens
gucacagccacuugggau

SEQ ID NO: 143877 - RNA, 21 nt, Homo sapiens
cagagaagggcuuggacucaa

SEQ ID NO: 143878 - RNA, 20 nt, Homo sapiens
aagugagcuccuaagccaug

SEQ ID NO: 143879 - RNA, 22 nt, Homo sapiens
cuuaaaagaaagagaaguuuuc

SEQ ID NO: 143880 - RNA, 15 nt, Homo sapiens
aagccauguaucuca

SEQ ID NO: 143881 - RNA, 20 nt, Homo sapiens
ugaaagcuggagucugucaa

SEQ ID NO: 143882 - RNA, 22 nt, Homo sapiens
uaaauuucucuacugucucagu

SEQ ID NO: 143883 - RNA, 17 nt, Homo sapiens
ucuuaaaauagccauaa

SEQ ID NO: 143884 - RNA, 19 nt, Homo sapiens
cuccugaguagcuggauua

SEQ ID NO: 143885 - RNA, 16 nt, Homo sapiens
uccuuagaaguggaag

SEQ ID NO: 143886 - RNA, 15 nt, Homo sapiens
agcugccuguacaca

SEQ ID NO: 143887 - RNA, 12 nt, Homo sapiens
agugauuuccac

SEQ ID NO: 143888 - RNA, 16 nt, Homo sapiens
aaugccacucuguaau

SEQ ID NO: 143889 - RNA, 13 nt, Homo sapiens
cuugcacaaacca

SEQ ID NO: 143890 - RNA, 19 nt, Homo sapiens
agaaccucgagguuucuca

SEQ ID NO: 143891 - RNA, 23 nt, Homo sapiens
aaaugcugguuuuucaguuuuca

SEQ ID NO: 143892 - RNA, 23 nt, Homo sapiens
ugaaaagaaucggcaauguuuca

SEQ ID NO: 143893 - RNA, 16 nt, Homo sapiens
cuggcaagaugcuuua

SEQ ID NO: 143894 - RNA, 18 nt, Homo sapiens
aagagaaguuuucuugac

SEQ ID NO: 143895 - RNA, 19 nt, Homo sapiens
acugggcgcaguuggucuu

SEQ ID NO: 143896 - RNA, 16 nt, Homo sapiens
aaagugauccauacuu

SEQ ID NO: 143897 - RNA, 13 nt, Homo sapiens
ugaacauugcaau

SEQ ID NO: 143898 - RNA, 17 nt, Homo sapiens
uuaaaccguacacugug

SEQ ID NO: 143899 - RNA, 13 nt, Homo sapiens
ucccucaaaacaa

SEQ ID NO: 143900 - RNA, 22 nt, Homo sapiens
aguuccgacugccaucuuggac

SEQ ID NO: 143901 - RNA, 18 nt, Homo sapiens
auacugaaccaggccaga

SEQ ID NO: 143902 - RNA, 21 nt, Homo sapiens
guagagagagaaaaguaacug

SEQ ID NO: 143903 - RNA, 18 nt, Homo sapiens
ucacugcaacuucugccu

SEQ ID NO: 143904 - RNA, 20 nt, Homo sapiens
gccuccaaguccacagugga

SEQ ID NO: 143905 - RNA, 14 nt, Homo sapiens
caauagaaauccaa

SEQ ID NO: 143906 - RNA, 11 nt, Homo sapiens
auaugcacaaa

SEQ ID NO: 143907 - RNA, 15 nt, Homo sapiens
gacucaucauuucca

SEQ ID NO: 143908 - RNA, 15 nt, Homo sapiens
cucaggcagaucuca

SEQ ID NO: 143909 - RNA, 20 nt, Homo sapiens
agcuuacaagccagcuggag

SEQ ID NO: 143910 - RNA, 21 nt, Homo sapiens
gguaaaauaaucaguguuucc

SEQ ID NO: 143911 - RNA, 13 nt, Homo sapiens
augaaacaucauu

SEQ ID NO: 143912 - RNA, 13 nt, Homo sapiens
uugaaacuuguau

SEQ ID NO: 143913 - RNA, 15 nt, Homo sapiens
ucaaaaacauucuua

SEQ ID NO: 143914 - RNA, 22 nt, Homo sapiens
uccuaagccaugggagacacug

SEQ ID NO: 143915 - RNA, 14 nt, Homo sapiens
ugaaacaucauuuc

SEQ ID NO: 143916 - RNA, 14 nt, Homo sapiens
agccucaucucuuu

SEQ ID NO: 143917 - RNA, 19 nt, Homo sapiens
ccaagcaguuucuuucaaa

SEQ ID NO: 143918 - RNA, 16 nt, Homo sapiens
aaaagggaacugaaca

SEQ ID NO: 143919 - RNA, 23 nt, Homo sapiens
aaugagcaaaaccaaauauucca

SEQ ID NO: 143920 - RNA, 13 nt, Homo sapiens
aguaaaagccauc

SEQ ID NO: 143921 - RNA, 20 nt, Homo sapiens
cuaagcacgggccauaugaa

SEQ ID NO: 143922 - RNA, 18 nt, Homo sapiens
ccugccaggcacacugag

SEQ ID NO: 143923 - RNA, 22 nt, Homo sapiens
gcccagacccuucuccuuagaa

SEQ ID NO: 143924 - RNA, 21 nt, Homo sapiens
ucucccagccagguucugacu

SEQ ID NO: 143925 - RNA, 13 nt, Homo sapiens
aauauaucaguaa

SEQ ID NO: 143926 - RNA, 19 nt, Homo sapiens
cucgagguuucucaaagaa

SEQ ID NO: 143927 - RNA, 21 nt, Homo sapiens
ugaccugccaggcacacugag

SEQ ID NO: 143928 - RNA, 15 nt, Homo sapiens
ggcuggagugcaaug

SEQ ID NO: 143929 - RNA, 17 nt, Homo sapiens
ucaaacuccugaccuca

SEQ ID NO: 143930 - RNA, 23 nt, Homo sapiens
guucauggauauguuauacugaa

SEQ ID NO: 143931 - RNA, 23 nt, Homo sapiens
aauugggccaaagaaacauugcc

SEQ ID NO: 143932 - RNA, 19 nt, Homo sapiens
guuuauacccguuucacau

SEQ ID NO: 143933 - RNA, 14 nt, Homo sapiens
cucaucauuuccau

SEQ ID NO: 143934 - RNA, 15 nt, Homo sapiens
caacaaagucaccca

SEQ ID NO: 143935 - RNA, 13 nt, Homo sapiens
agcaaaaccaaau

SEQ ID NO: 143936 - RNA, 18 nt, Homo sapiens
ggacucaagcaagauuuc

SEQ ID NO: 143937 - RNA, 18 nt, Homo sapiens
ucagaaaauggcacuugg

SEQ ID NO: 143938 - RNA, 19 nt, Homo sapiens
caauguuucaaacaaaaag

SEQ ID NO: 143939 - RNA, 14 nt, Homo sapiens
auaucacauuccca

SEQ ID NO: 143940 - RNA, 20 nt, Homo sapiens
aaaugagaagucucacugau

SEQ ID NO: 143941 - RNA, 19 nt, Homo sapiens
caaaaccaaauauuccaga

SEQ ID NO: 143942 - RNA, 18 nt, Homo sapiens
acugccaaagaacuugga

SEQ ID NO: 143943 - RNA, 13 nt, Homo sapiens
uggcucaucucuu

SEQ ID NO: 143944 - RNA, 15 nt, Homo sapiens
ccacugccaaagaac

SEQ ID NO: 143945 - RNA, 23 nt, Homo sapiens
aaugucuuuauuaaauguagaaa

SEQ ID NO: 143946 - RNA, 14 nt, Homo sapiens
aaugagacuuacuu

SEQ ID NO: 143947 - RNA, 15 nt, Homo sapiens
acaaucuugucauac

SEQ ID NO: 143948 - RNA, 17 nt, Homo sapiens
ucagucuuuuccaugaa

SEQ ID NO: 143949 - RNA, 15 nt, Homo sapiens
aguucauggauaugu

SEQ ID NO: 143950 - RNA, 18 nt, Homo sapiens
uuuuccuggcucaucucu

SEQ ID NO: 143951 - RNA, 15 nt, Homo sapiens
acacagcaucagcuc

SEQ ID NO: 143952 - RNA, 21 nt, Homo sapiens
ccugaugcuggggacacagca

SEQ ID NO: 143953 - RNA, 23 nt, Homo sapiens
aauguaagaucguucucugccuc

SEQ ID NO: 143954 - RNA, 13 nt, Homo sapiens
uaugcacaaacuu

SEQ ID NO: 143955 - RNA, 11 nt, Homo sapiens
acccucccacu

SEQ ID NO: 143956 - RNA, 21 nt, Homo sapiens
ccuaaaaggcagaguacaaag

SEQ ID NO: 143957 - RNA, 15 nt, Homo sapiens
aaaacaaucuuguca

SEQ ID NO: 143958 - RNA, 14 nt, Homo sapiens
uagaauucagucaa

SEQ ID NO: 143959 - RNA, 20 nt, Homo sapiens
gaccugccaggcacacugag

SEQ ID NO: 143960 - RNA, 22 nt, Homo sapiens
agcagaugguggagcugaauau

SEQ ID NO: 143961 - RNA, 15 nt, Homo sapiens
cccgucgacguagaa

SEQ ID NO: 143962 - RNA, 18 nt, Homo sapiens
auguaagaucguucucug

SEQ ID NO: 143963 - RNA, 18 nt, Homo sapiens
gccaaucaguagccagca

SEQ ID NO: 143964 - RNA, 17 nt, Homo sapiens
accuaaauaugagccca

SEQ ID NO: 143965 - RNA, 10 nt, Homo sapiens
cucacaaaag

SEQ ID NO: 143966 - RNA, 17 nt, Homo sapiens
cuucuuuuuguucuuca

SEQ ID NO: 143967 - RNA, 17 nt, Homo sapiens
agaaaguggcuugaaau

SEQ ID NO: 143968 - RNA, 14 nt, Homo sapiens
ugccaaagaacuug

SEQ ID NO: 143969 - RNA, 22 nt, Homo sapiens
cagucuucuuccaugucuauua

SEQ ID NO: 143970 - RNA, 17 nt, Homo sapiens
gacucuuggcacagcau

SEQ ID NO: 143971 - RNA, 21 nt, Homo sapiens
aagaauuuuuauauccacuaa

SEQ ID NO: 143972 - RNA, 15 nt, Homo sapiens
uuaaaugaaagugag

SEQ ID NO: 143973 - RNA, 21 nt, Homo sapiens
gucucaaacuccugaccucaa

SEQ ID NO: 143974 - RNA, 19 nt, Homo sapiens
uagugauuuccacagugac

SEQ ID NO: 143975 - RNA, 13 nt, Homo sapiens
uugucaacaaagu

SEQ ID NO: 143976 - RNA, 15 nt, Homo sapiens
uugagggcaauggac

SEQ ID NO: 143977 - RNA, 20 nt, Homo sapiens
ccaggcuggagugcaaugac

SEQ ID NO: 143978 - RNA, 17 nt, Homo sapiens
cuguaugucucguggua

SEQ ID NO: 143979 - RNA, 23 nt, Homo sapiens
uuuauacucaggcagaucucagc

SEQ ID NO: 143980 - RNA, 15 nt, Homo sapiens
uuuuccuguucuuaa

SEQ ID NO: 143981 - RNA, 15 nt, Homo sapiens
acaauauacuuguau

SEQ ID NO: 143982 - RNA, 16 nt, Homo sapiens
uaaucaguguuuccaa

SEQ ID NO: 143983 - RNA, 14 nt, Homo sapiens
aaccuagcuagcaa

SEQ ID NO: 143984 - RNA, 13 nt, Homo sapiens
cuuaguugcugua

SEQ ID NO: 143985 - RNA, 21 nt, Homo sapiens
cugaccaauauuguacaguuu

SEQ ID NO: 143986 - RNA, 22 nt, Homo sapiens
acacaaucugaaacagcuucau

SEQ ID NO: 143987 - RNA, 19 nt, Homo sapiens
aguuuauacccguuucaca

SEQ ID NO: 143988 - RNA, 21 nt, Homo sapiens
uaaaauaaucaguguuuccaa

SEQ ID NO: 143989 - RNA, 18 nt, Homo sapiens
auugcaauagaaauccaa

SEQ ID NO: 143990 - RNA, 19 nt, Homo sapiens
guuguuaauaaaaguacau

SEQ ID NO: 143991 - RNA, 19 nt, Homo sapiens
uuauacaauauacuuguau

SEQ ID NO: 143992 - RNA, 18 nt, Homo sapiens
ugguuguauuaaagcagg

SEQ ID NO: 143993 - RNA, 11 nt, Homo sapiens
uguccaaagac

SEQ ID NO: 143994 - RNA, 22 nt, Homo sapiens
guaagaucguucucugccucac

SEQ ID NO: 143995 - RNA, 12 nt, Homo sapiens
acaaucuuguca

SEQ ID NO: 143996 - RNA, 23 nt, Homo sapiens
aaauuuucuuuuuauacuauuaa

SEQ ID NO: 143997 - RNA, 18 nt, Homo sapiens
caaggucuccagagggug

SEQ ID NO: 143998 - RNA, 15 nt, Homo sapiens
ucuguucuuccauca

SEQ ID NO: 143999 - RNA, 22 nt, Homo sapiens
gaauaacauggugugcuucuua

SEQ ID NO: 144000 - RNA, 22 nt, Homo sapiens
uagagaccaguuuucucuggaa

SEQ ID NO: 144001 - RNA, 22 nt, Homo sapiens
aauguuuaugaauaguuuccaa

SEQ ID NO: 144002 - RNA, 16 nt, Homo sapiens
ucaacaaagucaccca

SEQ ID NO: 144003 - RNA, 23 nt, Homo sapiens
gugagacuuugaggguguauauu

SEQ ID NO: 144004 - RNA, 15 nt, Homo sapiens
ucauggauauguuau

SEQ ID NO: 144005 - RNA, 12 nt, Homo sapiens
gcuggagugcaa

SEQ ID NO: 144006 - RNA, 19 nt, Homo sapiens
aaccaaauauuccagagac

SEQ ID NO: 144007 - RNA, 17 nt, Homo sapiens
ucaugagugcaacugug

SEQ ID NO: 144008 - RNA, 16 nt, Homo sapiens
augacacucuagucaa

SEQ ID NO: 144009 - RNA, 18 nt, Homo sapiens
aucacauucccauuugcu

SEQ ID NO: 144010 - RNA, 16 nt, Homo sapiens
gagggaaaacagaaaa

SEQ ID NO: 144011 - RNA, 16 nt, Homo sapiens
auggcaggacagcucc

SEQ ID NO: 144012 - RNA, 12 nt, Homo sapiens
acacagcaucag

SEQ ID NO: 144013 - RNA, 14 nt, Homo sapiens
aaagaacuuggaaa

SEQ ID NO: 144014 - RNA, 17 nt, Homo sapiens
uaaauauagcucaggua

SEQ ID NO: 144015 - RNA, 15 nt, Homo sapiens
uccugcuucugauau

SEQ ID NO: 144016 - RNA, 15 nt, Homo sapiens
aaucaguguuuccaa

SEQ ID NO: 144017 - RNA, 16 nt, Homo sapiens
uggcaggacagcuccu

SEQ ID NO: 144018 - RNA, 13 nt, Homo sapiens
uaaauguagaaag

SEQ ID NO: 144019 - RNA, 21 nt, Homo sapiens
uaagaagcagauaaugguguu

SEQ ID NO: 144020 - RNA, 21 nt, Homo sapiens
ccgccacccucccacugccaa

SEQ ID NO: 144021 - RNA, 21 nt, Homo sapiens
ucaagacgucacccuccauuc

SEQ ID NO: 144022 - RNA, 18 nt, Homo sapiens
augcuggggacacagcau

SEQ ID NO: 144023 - RNA, 21 nt, Homo sapiens
aagauuucagauuugugacca

SEQ ID NO: 144024 - RNA, 14 nt, Homo sapiens
aagaaacauugccu

SEQ ID NO: 144025 - RNA, 21 nt, Homo sapiens
aaaaagcccuuaaaaauaugu

SEQ ID NO: 144026 - RNA, 10 nt, Homo sapiens
ugucuuuauu

SEQ ID NO: 144027 - RNA, 23 nt, Homo sapiens
uaaaaaaaaaaaaaaaagugaug

SEQ ID NO: 144028 - RNA, 20 nt, Homo sapiens
guuaaaauaaaauuguacau

SEQ ID NO: 144029 - RNA, 20 nt, Homo sapiens
ucaaaaaaaaaaaaauguga

SEQ ID NO: 144030 - RNA, 13 nt, Homo sapiens
cuaaguaaauaca

SEQ ID NO: 144031 - RNA, 22 nt, Homo sapiens
caaucaauucauaucuauuuau

SEQ ID NO: 144032 - RNA, 17 nt, Homo sapiens
guuguuuucccaaagag

SEQ ID NO: 144033 - RNA, 15 nt, Homo sapiens
ccaaauuauggcaaa

SEQ ID NO: 144034 - RNA, 20 nt, Homo sapiens
uauacccguuucacaugcuu

SEQ ID NO: 144035 - RNA, 15 nt, Homo sapiens
uggcuucuuuacuua

SEQ ID NO: 144036 - RNA, 20 nt, Homo sapiens
acucuaacaguaguugcaau

SEQ ID NO: 144037 - RNA, 20 nt, Homo sapiens
uaaauuucucuacugucuca

SEQ ID NO: 144038 - RNA, 22 nt, Homo sapiens
guuuaugcauagauaaucucuc

SEQ ID NO: 144039 - RNA, 21 nt, Homo sapiens
ucugccuccccuucacuccca

SEQ ID NO: 144040 - RNA, 20 nt, Homo sapiens
ugacacucuagucaaagccu

SEQ ID NO: 144041 - RNA, 22 nt, Homo sapiens
ucaaacaaaaagucauaaaagu

SEQ ID NO: 144042 - RNA, 22 nt, Homo sapiens
uuaucauuaaaaggaaagcaga

SEQ ID NO: 144043 - RNA, 22 nt, Homo sapiens
ugaguagcuggauuacaggcau

SEQ ID NO: 144044 - RNA, 15 nt, Homo sapiens
ucuaaaaacauuugu

SEQ ID NO: 144045 - RNA, 21 nt, Homo sapiens
ggaauccuggggaacauagaa

SEQ ID NO: 144046 - RNA, 15 nt, Homo sapiens
aguuguuaauaaaag

SEQ ID NO: 144047 - RNA, 13 nt, Homo sapiens
aaaagacugacca

SEQ ID NO: 144048 - RNA, 19 nt, Homo sapiens
aagggcuuggacucaagca

SEQ ID NO: 144049 - RNA, 19 nt, Homo sapiens
uagcggggaggggguuauc

SEQ ID NO: 144050 - RNA, 16 nt, Homo sapiens
ucagggagugggcuaa

SEQ ID NO: 144051 - RNA, 14 nt, Homo sapiens
caauauacuuguau

SEQ ID NO: 144052 - RNA, 15 nt, Homo sapiens
uucuuucaaagaagc

SEQ ID NO: 144053 - RNA, 15 nt, Homo sapiens
cuggagucugucaau

SEQ ID NO: 144054 - RNA, 17 nt, Homo sapiens
uccacagugacuccacu

SEQ ID NO: 144055 - RNA, 19 nt, Homo sapiens
gcuucuuaaaauagccaua

SEQ ID NO: 144056 - RNA, 22 nt, Homo sapiens
cuccuuggcuucuuuacuuagu

SEQ ID NO: 144057 - RNA, 19 nt, Homo sapiens
cagucuuggcucacugcaa

SEQ ID NO: 144058 - RNA, 23 nt, Homo sapiens
gaaaugcugguuuuucaguuuuc

SEQ ID NO: 144059 - RNA, 12 nt, Homo sapiens
gguauuuagcca

SEQ ID NO: 144060 - RNA, 18 nt, Homo sapiens
cuuuuuuuuaaguuacac

SEQ ID NO: 144061 - RNA, 18 nt, Homo sapiens
uccuggggaacauagaac

SEQ ID NO: 144062 - RNA, 15 nt, Homo sapiens
gcaggacagcuccug

SEQ ID NO: 144063 - RNA, 23 nt, Homo sapiens
uaaaaguacauguuaaacuuacu

SEQ ID NO: 144064 - RNA, 23 nt, Homo sapiens
uuauucuguaguuucacucucau

SEQ ID NO: 144065 - RNA, 14 nt, Homo sapiens
aaauucacuucccc

SEQ ID NO: 144066 - RNA, 14 nt, Homo sapiens
ucuuuggugaacau

SEQ ID NO: 144067 - RNA, 21 nt, Homo sapiens
augacacucuagucaaagccu

SEQ ID NO: 144068 - RNA, 16 nt, Homo sapiens
ucaaagccuugguaaa

SEQ ID NO: 144069 - RNA, 15 nt, Homo sapiens
caaugacacagucuu

SEQ ID NO: 144070 - RNA, 21 nt, Homo sapiens
guccaucccgucgacguagaa

SEQ ID NO: 144071 - RNA, 10 nt, Homo sapiens
ucccaaagag

SEQ ID NO: 144072 - RNA, 19 nt, Homo sapiens
uuggcuaguaaaagccauc

SEQ ID NO: 144073 - RNA, 20 nt, Homo sapiens
ugucuuuggugaacauugca

SEQ ID NO: 144074 - RNA, 14 nt, Homo sapiens
uagaagauggcacu

SEQ ID NO: 144075 - RNA, 20 nt, Homo sapiens
cuuguuguuuucccaaagag

SEQ ID NO: 144076 - RNA, 16 nt, Homo sapiens
gcccagccucaucucu

SEQ ID NO: 144077 - RNA, 15 nt, Homo sapiens
uuaaaaauaugugua

SEQ ID NO: 144078 - RNA, 13 nt, Homo sapiens
cagcaucagcuca

SEQ ID NO: 144079 - RNA, 23 nt, Homo sapiens
guugauuucagcaccuacagugu

SEQ ID NO: 144080 - RNA, 18 nt, Homo sapiens
gaugaaacaucauuucaa

SEQ ID NO: 144081 - RNA, 15 nt, Homo sapiens
aggcuucuggggcuu

SEQ ID NO: 144082 - RNA, 18 nt, Homo sapiens
uuuaaaugaaagugagac

SEQ ID NO: 144083 - RNA, 13 nt, Homo sapiens
guucucugccuca

SEQ ID NO: 144084 - RNA, 16 nt, Homo sapiens
uuacauuuuguauauu

SEQ ID NO: 144085 - RNA, 9 nt, Homo sapiens
aaagacaga

SEQ ID NO: 144086 - RNA, 13 nt, Homo sapiens
caucauuuccauu

SEQ ID NO: 144087 - RNA, 13 nt, Homo sapiens
ucaaagugagcuc

SEQ ID NO: 144088 - RNA, 17 nt, Homo sapiens
ucaauguccuacugaga

SEQ ID NO: 144089 - RNA, 18 nt, Homo sapiens
auuuuucagauauaaaag

SEQ ID NO: 144090 - RNA, 16 nt, Homo sapiens
cugcuucugauaugca

SEQ ID NO: 144091 - RNA, 22 nt, Homo sapiens
guaacuguuuugguuuugcuca

SEQ ID NO: 144092 - RNA, 22 nt, Homo sapiens
gaaaauugggaauaugcacaaa

SEQ ID NO: 144093 - RNA, 17 nt, Homo sapiens
cuucuaaguaaauacaa

SEQ ID NO: 144094 - RNA, 16 nt, Homo sapiens
aggucagucuucuucc

SEQ ID NO: 144095 - RNA, 17 nt, Homo sapiens
uaacaggagugccacuu

SEQ ID NO: 144096 - RNA, 23 nt, Homo sapiens
aaucccucaaaacaaucuuguca

SEQ ID NO: 144097 - RNA, 15 nt, Homo sapiens
aacauugcaauagaa

SEQ ID NO: 144098 - RNA, 21 nt, Homo sapiens
ggcuucagucuuuuccaugaa

SEQ ID NO: 144099 - RNA, 17 nt, Homo sapiens
cuucuuuuugcuucaaa

SEQ ID NO: 144100 - RNA, 14 nt, Homo sapiens
gcuucugauaugca

SEQ ID NO: 144101 - RNA, 15 nt, Homo sapiens
guugcuguaugucuc

SEQ ID NO: 144102 - RNA, 23 nt, Homo sapiens
ucagauauaaaagacugaccaau

SEQ ID NO: 144103 - RNA, 12 nt, Homo sapiens
uuacauugccuu

SEQ ID NO: 144104 - RNA, 14 nt, Homo sapiens
cacuguuaagccau

SEQ ID NO: 144105 - RNA, 13 nt, Homo sapiens
auuuacauugccu

SEQ ID NO: 144106 - RNA, 17 nt, Homo sapiens
uaaaccguacacugugu

SEQ ID NO: 144107 - RNA, 19 nt, Homo sapiens
ccacuauugcuugcacaaa

SEQ ID NO: 144108 - RNA, 18 nt, Homo sapiens
ucugcauucucuagucag

SEQ ID NO: 144109 - RNA, 23 nt, Homo sapiens
uguauauuuucugugcagccacu

SEQ ID NO: 144110 - RNA, 17 nt, Homo sapiens
cuucugaaaaaguaucc

SEQ ID NO: 144111 - RNA, 18 nt, Homo sapiens
uggcuaguaaaagccauc

SEQ ID NO: 144112 - RNA, 18 nt, Homo sapiens
aauugggaauaugcacaa

SEQ ID NO: 144113 - RNA, 13 nt, Homo sapiens
aauagccauaaag

SEQ ID NO: 144114 - RNA, 15 nt, Homo sapiens
cucuguaauugcaaa

SEQ ID NO: 144115 - RNA, 12 nt, Homo sapiens
uucucugccuca

SEQ ID NO: 144116 - RNA, 14 nt, Homo sapiens
ucuuaguugcugua

SEQ ID NO: 144117 - RNA, 20 nt, Homo sapiens
cugucaauguccuacugaga

SEQ ID NO: 144118 - RNA, 19 nt, Homo sapiens
guguacagucuuguauuaa

SEQ ID NO: 144119 - RNA, 16 nt, Homo sapiens
cuuguauagcaguuuc

SEQ ID NO: 144120 - RNA, 13 nt, Homo sapiens
gaauaguuuccaa

SEQ ID NO: 144121 - RNA, 14 nt, Homo sapiens
uaguggugacugug

SEQ ID NO: 144122 - RNA, 22 nt, Homo sapiens
aaccguaugagggaacugugua

SEQ ID NO: 144123 - RNA, 12 nt, Homo sapiens
auugcuugcaca

SEQ ID NO: 144124 - RNA, 21 nt, Homo sapiens
cagagucucgcucuguugccc

SEQ ID NO: 144125 - RNA, 20 nt, Homo sapiens
aaagcuggagucugucaaug

SEQ ID NO: 144126 - RNA, 16 nt, Homo sapiens
gugccaucagcuccuu

SEQ ID NO: 144127 - RNA, 21 nt, Homo sapiens
gcagaguacaaaguaagccau

SEQ ID NO: 144128 - RNA, 22 nt, Homo sapiens
gccauaaaggggagggacucau

SEQ ID NO: 144129 - RNA, 20 nt, Homo sapiens
cuauaagaugaaacaucauu

SEQ ID NO: 144130 - RNA, 21 nt, Homo sapiens
aaaaguuuuguaaauuucucu

SEQ ID NO: 144131 - RNA, 14 nt, Homo sapiens
uggcucaucucuuu

SEQ ID NO: 144132 - RNA, 21 nt, Homo sapiens
aauaguuguuauucuguaguu

SEQ ID NO: 144133 - RNA, 20 nt, Homo sapiens
ugcuggcaguggaacuaaga

SEQ ID NO: 144134 - RNA, 11 nt, Homo sapiens
uugcuguagaa

SEQ ID NO: 144135 - RNA, 17 nt, Homo sapiens
auuuucuuuuuauacua

SEQ ID NO: 144136 - RNA, 12 nt, Homo sapiens
uuuuauauccac

SEQ ID NO: 144137 - RNA, 15 nt, Homo sapiens
cuguggccaaguucu

SEQ ID NO: 144138 - RNA, 13 nt, Homo sapiens
auucugcacucag

SEQ ID NO: 144139 - RNA, 23 nt, Homo sapiens
agucuuguuguuuucccaaagag

SEQ ID NO: 144140 - RNA, 12 nt, Homo sapiens
uuaacugaaugc

SEQ ID NO: 144141 - RNA, 18 nt, Homo sapiens
agggcaauggacaaggaa

SEQ ID NO: 144142 - RNA, 12 nt, Homo sapiens
aaaaugugacuc

SEQ ID NO: 144143 - RNA, 16 nt, Homo sapiens
aaacagaaaaccugau

SEQ ID NO: 144144 - RNA, 16 nt, Homo sapiens
uugacauucugaaugc

SEQ ID NO: 144145 - RNA, 21 nt, Homo sapiens
cagguucugacucuuggcaca

SEQ ID NO: 144146 - RNA, 18 nt, Homo sapiens
aaguacauguuaaacuua

SEQ ID NO: 144147 - RNA, 17 nt, Homo sapiens
acuuuuuccuggcucau

SEQ ID NO: 144148 - RNA, 23 nt, Homo sapiens
ugggucagaguuccgacugccau

SEQ ID NO: 144149 - RNA, 19 nt, Homo sapiens
uccugaguagcuggauuac

SEQ ID NO: 144150 - RNA, 20 nt, Homo sapiens
caaguucuuaguugcuguau

SEQ ID NO: 144151 - RNA, 15 nt, Homo sapiens
augggagacacugau

SEQ ID NO: 144152 - RNA, 20 nt, Homo sapiens
gauuuugaaauuuuuauuaa

SEQ ID NO: 144153 - RNA, 16 nt, Homo sapiens
aauugcuucaagcauu

SEQ ID NO: 144154 - RNA, 23 nt, Homo sapiens
ccuaagccaugggagacacugau

SEQ ID NO: 144155 - RNA, 21 nt, Homo sapiens
cccacugccaaagaacuugga

SEQ ID NO: 144156 - RNA, 21 nt, Homo sapiens
guauaguuaaccacuaccgaa

SEQ ID NO: 144157 - RNA, 19 nt, Homo sapiens
cccaggcuggagugcaaug

SEQ ID NO: 144158 - RNA, 17 nt, Homo sapiens
gaauuucuguucuucca

SEQ ID NO: 144159 - RNA, 19 nt, Homo sapiens
acacagucuuggcucacug

SEQ ID NO: 144160 - RNA, 17 nt, Homo sapiens
agccccagccuaggaaa

SEQ ID NO: 144161 - RNA, 16 nt, Homo sapiens
acccucccacugccaa

SEQ ID NO: 144162 - RNA, 16 nt, Homo sapiens
caacauuuguuuuagu

SEQ ID NO: 144163 - RNA, 22 nt, Homo sapiens
ucccuucuuuuuguucuucauc

SEQ ID NO: 144164 - RNA, 13 nt, Homo sapiens
uucuucuuuuugc

SEQ ID NO: 144165 - RNA, 16 nt, Homo sapiens
auaaaaguuggcucag

SEQ ID NO: 144166 - RNA, 23 nt, Homo sapiens
agccaccgcgcccagccucaucu

SEQ ID NO: 144167 - RNA, 14 nt, Homo sapiens
acagcaucagcuca

SEQ ID NO: 144168 - RNA, 16 nt, Homo sapiens
gacacagcaucagcuc

SEQ ID NO: 144169 - RNA, 15 nt, Homo sapiens
aucuaaaaucugcua

SEQ ID NO: 144170 - RNA, 15 nt, Homo sapiens
uucaguuuucaggag

SEQ ID NO: 144171 - RNA, 14 nt, Homo sapiens
ccagccucaucucu

SEQ ID NO: 144172 - RNA, 16 nt, Homo sapiens
aagguugagggcaaug

SEQ ID NO: 144173 - RNA, 16 nt, Homo sapiens
uuuaauguuuccuuua

SEQ ID NO: 144174 - RNA, 17 nt, Homo sapiens
ggcucucccagccaggu

SEQ ID NO: 144175 - RNA, 21 nt, Homo sapiens
ucugaacaauauauacuuaua

SEQ ID NO: 144176 - RNA, 17 nt, Homo sapiens
cauggagucacagccac

SEQ ID NO: 144177 - RNA, 15 nt, Homo sapiens
uccuccccuguucau

SEQ ID NO: 144178 - RNA, 22 nt, Homo sapiens
cugucaauguccuacugagaca

SEQ ID NO: 144179 - RNA, 20 nt, Homo sapiens
accaaauacuuuaauguaua

SEQ ID NO: 144180 - RNA, 13 nt, Homo sapiens
aagcauucuucaa

SEQ ID NO: 144181 - RNA, 16 nt, Homo sapiens
aacuuacuuaguguua

SEQ ID NO: 144182 - RNA, 16 nt, Homo sapiens
ugaaguuuaauugacu

SEQ ID NO: 144183 - RNA, 19 nt, Homo sapiens
caguaguggugacuguggg

SEQ ID NO: 144184 - RNA, 16 nt, Homo sapiens
aguagcuggauuacag

SEQ ID NO: 144185 - RNA, 14 nt, Homo sapiens
guuccgacugccau

SEQ ID NO: 144186 - RNA, 12 nt, Homo sapiens
caguguuuccaa

SEQ ID NO: 144187 - RNA, 14 nt, Homo sapiens
uguguuuuuaauaa

SEQ ID NO: 144188 - RNA, 16 nt, Homo sapiens
uccuggggaacauaga

SEQ ID NO: 144189 - RNA, 23 nt, Homo sapiens
cagucaaagauacacaaucugaa

SEQ ID NO: 144190 - RNA, 15 nt, Homo sapiens
uguccuguuacaaaa

SEQ ID NO: 144191 - RNA, 20 nt, Homo sapiens
ucuaaagauggaaaaaccac

SEQ ID NO: 144192 - RNA, 21 nt, Homo sapiens
uggcaguggaacuaagaaagc

SEQ ID NO: 144193 - RNA, 19 nt, Homo sapiens
cuuaugcaaauaaccauug

SEQ ID NO: 144194 - RNA, 17 nt, Homo sapiens
cugauguagcuuauaca

SEQ ID NO: 144195 - RNA, 14 nt, Homo sapiens
ccacaguggaacca

SEQ ID NO: 144196 - RNA, 19 nt, Homo sapiens
gcccaggcuggagugcaau

SEQ ID NO: 144197 - RNA, 17 nt, Homo sapiens
ucggcucuggccuccaa

SEQ ID NO: 144198 - RNA, 21 nt, Homo sapiens
uguguuuuuaauaaagacagg

SEQ ID NO: 144199 - RNA, 16 nt, Homo sapiens
cagccagguucugacu

SEQ ID NO: 144200 - RNA, 18 nt, Homo sapiens
auuagcuccacaaagcca

SEQ ID NO: 144201 - RNA, 22 nt, Homo sapiens
augaaucaaucaauucauaucu

SEQ ID NO: 144202 - RNA, 15 nt, Homo sapiens
uagaaagaagaugaa

SEQ ID NO: 144203 - RNA, 13 nt, Homo sapiens
cucuuggguucaa

SEQ ID NO: 144204 - RNA, 12 nt, Homo sapiens
ugaacauuccag

SEQ ID NO: 144205 - RNA, 18 nt, Homo sapiens
ugugaaguuuaauugacu

SEQ ID NO: 144206 - RNA, 22 nt, Homo sapiens
aacauuuguuuuagucugaaca

SEQ ID NO: 144207 - RNA, 20 nt, Homo sapiens
ggcacagcauggagucacag

SEQ ID NO: 144208 - RNA, 17 nt, Homo sapiens
guacaaaguaagccaug

SEQ ID NO: 144209 - RNA, 22 nt, Homo sapiens
cugggauuacagggaugagcca

SEQ ID NO: 144210 - RNA, 16 nt, Homo sapiens
aggcuggagugcaaug

SEQ ID NO: 144211 - RNA, 22 nt, Homo sapiens
acagcauggagucacagccacu

SEQ ID NO: 144212 - RNA, 22 nt, Homo sapiens
ugagacuuugaggguguauauu

SEQ ID NO: 144213 - RNA, 14 nt, Homo sapiens
accguacacugugu

SEQ ID NO: 144214 - RNA, 15 nt, Homo sapiens
cccacccaacuaauu

SEQ ID NO: 144215 - RNA, 23 nt, Homo sapiens
aaaaccguaugagggaacugugu

SEQ ID NO: 144216 - RNA, 22 nt, Homo sapiens
gcagcgauuaauaacaggcaaa

SEQ ID NO: 144217 - RNA, 18 nt, Homo sapiens
gcaguuuuuuucuugucu

SEQ ID NO: 144218 - RNA, 20 nt, Homo sapiens
cauaaaaguuggcucaggag

SEQ ID NO: 144219 - RNA, 18 nt, Homo sapiens
acauuuguuuguggucua

SEQ ID NO: 144220 - RNA, 13 nt, Homo sapiens
uggagucugucaa

SEQ ID NO: 144221 - RNA, 16 nt, Homo sapiens
aacguaagacugugua

SEQ ID NO: 144222 - RNA, 19 nt, Homo sapiens
gccacccucccacugccaa

SEQ ID NO: 144223 - RNA, 22 nt, Homo sapiens
auauacuuauagaauucaguca

SEQ ID NO: 144224 - RNA, 20 nt, Homo sapiens
cuccugaccucaaguaaucc

SEQ ID NO: 144225 - RNA, 13 nt, Homo sapiens
aaaaacauucuua

SEQ ID NO: 144226 - RNA, 19 nt, Homo sapiens
ggacuaaguguaccagaga

SEQ ID NO: 144227 - RNA, 23 nt, Homo sapiens
ucaaaugagaaaaugucuuuauu

SEQ ID NO: 144228 - RNA, 21 nt, Homo sapiens
accucgagguuucucaaagaa

SEQ ID NO: 144229 - RNA, 19 nt, Homo sapiens
cucgugguaggacuguaga

SEQ ID NO: 144230 - RNA, 19 nt, Homo sapiens
uaaguuacacauuuuucag

SEQ ID NO: 144231 - RNA, 14 nt, Homo sapiens
ucucucuucuuuuc

SEQ ID NO: 144232 - RNA, 22 nt, Homo sapiens
ucuaaagauggaaaaaccaccc

SEQ ID NO: 144233 - RNA, 22 nt, Homo sapiens
guucauggauauguuauacuga

SEQ ID NO: 144234 - RNA, 20 nt, Homo sapiens
ugcaguuuuuuucuugucua

SEQ ID NO: 144235 - RNA, 12 nt, Homo sapiens
gaaccaggccag

SEQ ID NO: 144236 - RNA, 15 nt, Homo sapiens
gcaccuacaguguac

SEQ ID NO: 144237 - RNA, 16 nt, Homo sapiens
aaagggagaagaggga

SEQ ID NO: 144238 - RNA, 24 nt, Homo sapiens
cauguuggccaggcuggucucaaa

SEQ ID NO: 144239 - RNA, 14 nt, Homo sapiens
uguacagucuugua

SEQ ID NO: 144240 - RNA, 14 nt, Homo sapiens
acuuauuuauauaa

SEQ ID NO: 144241 - RNA, 9 nt, Homo sapiens
aaagugaug

SEQ ID NO: 144242 - RNA, 20 nt, Homo sapiens
ugaguagcuggauuacaggc

SEQ ID NO: 144243 - RNA, 19 nt, Homo sapiens
gacuaaguguaccagagaa

SEQ ID NO: 144244 - RNA, 19 nt, Homo sapiens
gaguacaaaguaagccaug

SEQ ID NO: 144245 - RNA, 19 nt, Homo sapiens
uccuggaggugacacuuga

SEQ ID NO: 144246 - RNA, 23 nt, Homo sapiens
aagacgucacccuccauucugca

SEQ ID NO: 144247 - RNA, 22 nt, Homo sapiens
uacuuuuuccuggcucaucucu

SEQ ID NO: 144248 - RNA, 20 nt, Homo sapiens
cuguucuaaggcugugccau

SEQ ID NO: 144249 - RNA, 18 nt, Homo sapiens
gaauuuggguaugaacag

SEQ ID NO: 144250 - RNA, 17 nt, Homo sapiens
gcuccauucaaagugag

SEQ ID NO: 144251 - RNA, 18 nt, Homo sapiens
ccgacugccaucuuggac

SEQ ID NO: 144252 - RNA, 21 nt, Homo sapiens
guuuuacuguccaaagacaug

SEQ ID NO: 144253 - RNA, 20 nt, Homo sapiens
gaaaagaaucggcaauguuu

SEQ ID NO: 144254 - RNA, 12 nt, Homo sapiens
uccccucuagga

SEQ ID NO: 144255 - RNA, 23 nt, Homo sapiens
ccuaggaaagccaguuacauaaa

SEQ ID NO: 144256 - RNA, 16 nt, Homo sapiens
agcuguuuuguugaca

SEQ ID NO: 144257 - RNA, 17 nt, Homo sapiens
auucagggagugggcua

SEQ ID NO: 144258 - RNA, 19 nt, Homo sapiens
cucugagucccagagccaa

SEQ ID NO: 144259 - RNA, 19 nt, Homo sapiens
agauaaucucuccauuccc

SEQ ID NO: 144260 - RNA, 14 nt, Homo sapiens
ccaaauuauggcaa

SEQ ID NO: 144261 - RNA, 13 nt, Homo sapiens
cauuuacauugcc

SEQ ID NO: 144262 - RNA, 20 nt, Homo sapiens
uuaauaggguaaauucucua

SEQ ID NO: 144263 - RNA, 19 nt, Homo sapiens
agggcuuggacucaagcaa

SEQ ID NO: 144264 - RNA, 14 nt, Homo sapiens
ucuuuuccaugaac

SEQ ID NO: 144265 - RNA, 15 nt, Homo sapiens
aauugggccaaagaa

SEQ ID NO: 144266 - RNA, 22 nt, Homo sapiens
aaucaguguuuccaaucugucc

SEQ ID NO: 144267 - RNA, 20 nt, Homo sapiens
aagaaucggcaauguuucaa

SEQ ID NO: 144268 - RNA, 21 nt, Homo sapiens
ucugaggcuucuggggcuuca

SEQ ID NO: 144269 - RNA, 11 nt, Homo sapiens
auucaaaguga

SEQ ID NO: 144270 - RNA, 23 nt, Homo sapiens
caaucaguagccagcaucugccu

SEQ ID NO: 144271 - RNA, 20 nt, Homo sapiens
gucugaacaauauauacuua

SEQ ID NO: 144272 - RNA, 13 nt, Homo sapiens
accaauauuguac

SEQ ID NO: 144273 - RNA, 19 nt, Homo sapiens
agacgugauuuugcuguag

SEQ ID NO: 144274 - RNA, 16 nt, Homo sapiens
gcagaguacaaaguaa

SEQ ID NO: 144275 - RNA, 14 nt, Homo sapiens
cagcuccuggacca

SEQ ID NO: 144276 - RNA, 19 nt, Homo sapiens
aauagugauuuccacagug

SEQ ID NO: 144277 - RNA, 13 nt, Homo sapiens
caaagaagccagc

SEQ ID NO: 144278 - RNA, 14 nt, Homo sapiens
ccuggggcuucuga

SEQ ID NO: 144279 - RNA, 18 nt, Homo sapiens
auaggaggccaacccaaa

SEQ ID NO: 144280 - RNA, 16 nt, Homo sapiens
ucugcauucucuaguc

SEQ ID NO: 144281 - RNA, 15 nt, Homo sapiens
uuuaauagcgucaua

SEQ ID NO: 144282 - RNA, 17 nt, Homo sapiens
guucuaaggcugugcca

SEQ ID NO: 144283 - RNA, 12 nt, Homo sapiens
ugaggguguaua

SEQ ID NO: 144284 - RNA, 16 nt, Homo sapiens
uguuauacugaaccag

SEQ ID NO: 144285 - RNA, 16 nt, Homo sapiens
acaagaacacugaaaa

SEQ ID NO: 144286 - RNA, 11 nt, Homo sapiens
aguugcacaaa

SEQ ID NO: 144287 - RNA, 15 nt, Homo sapiens
uuugaggguguauau

SEQ ID NO: 144288 - RNA, 20 nt, Homo sapiens
gacucuaacaguaguugcaa

SEQ ID NO: 144289 - RNA, 16 nt, Homo sapiens
agucugauuguagcua

SEQ ID NO: 144290 - RNA, 15 nt, Homo sapiens
gauucuccugccuca

SEQ ID NO: 144291 - RNA, 20 nt, Homo sapiens
uguucugguuacuguucuaa

SEQ ID NO: 144292 - RNA, 15 nt, Homo sapiens
caaauauuccagaga

SEQ ID NO: 144293 - RNA, 17 nt, Homo sapiens
cuuagccaagcaguuuc

SEQ ID NO: 144294 - RNA, 14 nt, Homo sapiens
ucaacaaagucacc

SEQ ID NO: 144295 - RNA, 22 nt, Homo sapiens
gcacaaaccaauuaaacccagu

SEQ ID NO: 144296 - RNA, 14 nt, Homo sapiens
ugagaaaaugucuu

SEQ ID NO: 144297 - RNA, 17 nt, Homo sapiens
uagugaaucacguaaag

SEQ ID NO: 144298 - RNA, 13 nt, Homo sapiens
agagcuuuaccua

SEQ ID NO: 144299 - RNA, 23 nt, Homo sapiens
aaucaguguuuccaaucuguccu

SEQ ID NO: 144300 - RNA, 15 nt, Homo sapiens
agagggaaaacagaa

SEQ ID NO: 144301 - RNA, 11 nt, Homo sapiens
cacaugcuuuu

SEQ ID NO: 144302 - RNA, 18 nt, Homo sapiens
guuuacauuuuguauauu

SEQ ID NO: 144303 - RNA, 14 nt, Homo sapiens
acguaagacugugu

SEQ ID NO: 144304 - RNA, 20 nt, Homo sapiens
cucuuggguucaagugauuc

SEQ ID NO: 144305 - RNA, 19 nt, Homo sapiens
accuguggccaaguucuua

SEQ ID NO: 144306 - RNA, 20 nt, Homo sapiens
cuggauuacaggcaugugcc

SEQ ID NO: 144307 - RNA, 18 nt, Homo sapiens
uuaagaaauucacuuccc

SEQ ID NO: 144308 - RNA, 22 nt, Homo sapiens
agaagauggcacuuauaaccaa

SEQ ID NO: 144309 - RNA, 18 nt, Homo sapiens
cuugacuuuugaaaacaa

SEQ ID NO: 144310 - RNA, 13 nt, Homo sapiens
ccuccaaguccac

SEQ ID NO: 144311 - RNA, 20 nt, Homo sapiens
ucuacugucucaguuuacau

SEQ ID NO: 144312 - RNA, 12 nt, Homo sapiens
uggcucaucucu

SEQ ID NO: 144313 - RNA, 18 nt, Homo sapiens
aaggacacuagaagauuu

SEQ ID NO: 144314 - RNA, 17 nt, Homo sapiens
ggcuaguaaaagccauc

SEQ ID NO: 144315 - RNA, 16 nt, Homo sapiens
gucagucuucuuccau

SEQ ID NO: 144316 - RNA, 14 nt, Homo sapiens
ugcacguauuuuaa

SEQ ID NO: 144317 - RNA, 17 nt, Homo sapiens
agugagcuccuaagcca

SEQ ID NO: 144318 - RNA, 13 nt, Homo sapiens
ucugaaacagcuu

SEQ ID NO: 144319 - RNA, 16 nt, Homo sapiens
aauuuugucuuuauga

SEQ ID NO: 144320 - RNA, 15 nt, Homo sapiens
cuuacuuaguguuau

SEQ ID NO: 144321 - RNA, 16 nt, Homo sapiens
uaaugguuauauguau

SEQ ID NO: 144322 - RNA, 19 nt, Homo sapiens
agucuuagagcuuuaccua

SEQ ID NO: 144323 - RNA, 22 nt, Homo sapiens
aacuuggaaauagugauuucca

SEQ ID NO: 144324 - RNA, 18 nt, Homo sapiens
aacaggaauucugaauua

SEQ ID NO: 144325 - RNA, 17 nt, Homo sapiens
cuccuggaccaggucuc

SEQ ID NO: 144326 - RNA, 24 nt, Homo sapiens
ggacagcuccuggaccaggcccau

SEQ ID NO: 144327 - RNA, 16 nt, Homo sapiens
gcaguggaacuaagaa

SEQ ID NO: 144328 - RNA, 13 nt, Homo sapiens
gccauaugaauaa

SEQ ID NO: 144329 - RNA, 13 nt, Homo sapiens
uccacaaagccaa

SEQ ID NO: 144330 - RNA, 16 nt, Homo sapiens
uacuauuuuuacuaau

SEQ ID NO: 144331 - RNA, 17 nt, Homo sapiens
uagcauuugucaacaaa

SEQ ID NO: 144332 - RNA, 20 nt, Homo sapiens
ggacuaaguguaccagagaa

SEQ ID NO: 144333 - RNA, 13 nt, Homo sapiens
agcagauaauggu

SEQ ID NO: 144334 - RNA, 21 nt, Homo sapiens
guauaaauauguauuuuguca

SEQ ID NO: 144335 - RNA, 12 nt, Homo sapiens
acugagccagca

SEQ ID NO: 144336 - RNA, 14 nt, Homo sapiens
ugacucuuggcaca

SEQ ID NO: 144337 - RNA, 13 nt, Homo sapiens
gcaaaaccaaaua

SEQ ID NO: 144338 - RNA, 22 nt, Homo sapiens
ucugauaugcaguuuuccuuaa

SEQ ID NO: 144339 - RNA, 23 nt, Homo sapiens
cacagccaaccuagcuagcaaca

SEQ ID NO: 144340 - RNA, 14 nt, Homo sapiens
uacuguccaaagac

SEQ ID NO: 144341 - RNA, 21 nt, Homo sapiens
aaaucuuuuuuguucaaagau

SEQ ID NO: 144342 - RNA, 21 nt, Homo sapiens
aaaugugacucaagacuucca

SEQ ID NO: 144343 - RNA, 15 nt, Homo sapiens
uguuuauagugcucu

SEQ ID NO: 144344 - RNA, 14 nt, Homo sapiens
gcuccuaagccaug

SEQ ID NO: 144345 - RNA, 14 nt, Homo sapiens
ucaaaaacauucuu

SEQ ID NO: 144346 - RNA, 22 nt, Homo sapiens
gccggggaaggaggccguccau

SEQ ID NO: 144347 - RNA, 12 nt, Homo sapiens
uguaauugcaaa

SEQ ID NO: 144348 - RNA, 13 nt, Homo sapiens
gauacgacaacuu

SEQ ID NO: 144349 - RNA, 14 nt, Homo sapiens
ugugccaucagcuc

SEQ ID NO: 144350 - RNA, 14 nt, Homo sapiens
ucuaauggcuuuau

SEQ ID NO: 144351 - RNA, 21 nt, Homo sapiens
ugcuguagaagauggcacuua

SEQ ID NO: 144352 - RNA, 16 nt, Homo sapiens
cuugguaaaauaauca

SEQ ID NO: 144353 - RNA, 13 nt, Homo sapiens
cuucuccuuagaa

SEQ ID NO: 144354 - RNA, 20 nt, Homo sapiens
ucucaaacuccugaccucaa

SEQ ID NO: 144355 - RNA, 23 nt, Homo sapiens
ugauagagguucuuuauugcuca

SEQ ID NO: 144356 - RNA, 14 nt, Homo sapiens
cauuugucaacaaa

SEQ ID NO: 144357 - RNA, 15 nt, Homo sapiens
auugaacuuaugcaa

SEQ ID NO: 144358 - RNA, 18 nt, Homo sapiens
ugguuuuucaguuuucag

SEQ ID NO: 144359 - RNA, 14 nt, Homo sapiens
aucaguguuuccaa

SEQ ID NO: 144360 - RNA, 17 nt, Homo sapiens
aucguucucugccucac

SEQ ID NO: 144361 - RNA, 21 nt, Homo sapiens
aauguuuuagaaugagacuua

SEQ ID NO: 144362 - RNA, 19 nt, Homo sapiens
cacagcaucagcucaagac

SEQ ID NO: 144363 - RNA, 21 nt, Homo sapiens
cuuguuagugcacagcacaaa

SEQ ID NO: 144364 - RNA, 15 nt, Homo sapiens
agucugaacaauaua

SEQ ID NO: 144365 - RNA, 15 nt, Homo sapiens
uaacauggugugcuu

SEQ ID NO: 144366 - RNA, 11 nt, Homo sapiens
ggcucaucucu

SEQ ID NO: 144367 - RNA, 17 nt, Homo sapiens
agguuucucaaagaaau

SEQ ID NO: 144368 - RNA, 13 nt, Homo sapiens
caguaguugcaau

SEQ ID NO: 144369 - RNA, 16 nt, Homo sapiens
caaauauuccagagac

SEQ ID NO: 144370 - RNA, 15 nt, Homo sapiens
cuuuuuauacuauua

SEQ ID NO: 144371 - RNA, 20 nt, Homo sapiens
caggcuggagugcaaugaca

SEQ ID NO: 144372 - RNA, 15 nt, Homo sapiens
gcuagggaauaucaa

SEQ ID NO: 144373 - RNA, 14 nt, Homo sapiens
ccaaagugguauag

SEQ ID NO: 144374 - RNA, 13 nt, Homo sapiens
aagccuugguaaa

SEQ ID NO: 144375 - RNA, 15 nt, Homo sapiens
gauauaaaagacuga

SEQ ID NO: 144376 - RNA, 15 nt, Homo sapiens
uuuucaaugucuaaa

SEQ ID NO: 144377 - RNA, 13 nt, Homo sapiens
caaaaccaaauau

SEQ ID NO: 144378 - RNA, 18 nt, Homo sapiens
gccacccucccacugcca

SEQ ID NO: 144379 - RNA, 13 nt, Homo sapiens
ugggauuacaggg

SEQ ID NO: 144380 - RNA, 18 nt, Homo sapiens
aauuucucuacugucuca

SEQ ID NO: 144381 - RNA, 22 nt, Homo sapiens
acuuauagaauucagucaaaga

SEQ ID NO: 144382 - RNA, 12 nt, Homo sapiens
ccaguuacauaa

SEQ ID NO: 144383 - RNA, 14 nt, Homo sapiens
cuuaaaauagccau

SEQ ID NO: 144384 - RNA, 13 nt, Homo sapiens
uuuugcuguagaa

SEQ ID NO: 144385 - RNA, 21 nt, Homo sapiens
uuaaagcagggauaugcugua

SEQ ID NO: 144386 - RNA, 19 nt, Homo sapiens
cccucuaggaggugaugau

SEQ ID NO: 144387 - RNA, 19 nt, Homo sapiens
gcuucuuugaaacuuguau

SEQ ID NO: 144388 - RNA, 21 nt, Homo sapiens
ggggacacagcaucagcucaa

SEQ ID NO: 144389 - RNA, 18 nt, Homo sapiens
cagggagugggcuaagca

SEQ ID NO: 144390 - RNA, 14 nt, Homo sapiens
agcuggagucuguc

SEQ ID NO: 144391 - RNA, 17 nt, Homo sapiens
uugguuuugcucacaaa

SEQ ID NO: 144392 - RNA, 13 nt, Homo sapiens
agaagaugaauga

SEQ ID NO: 144393 - RNA, 22 nt, Homo sapiens
uugucaacaaagucacccacuu

SEQ ID NO: 144394 - RNA, 17 nt, Homo sapiens
agucuuagagcuuuacc

SEQ ID NO: 144395 - RNA, 12 nt, Homo sapiens
gcaaaaccaaau

SEQ ID NO: 144396 - RNA, 22 nt, Homo sapiens
gaaaaagaagguugagggcaau

SEQ ID NO: 144397 - RNA, 14 nt, Homo sapiens
ugaauaguuuccaa

SEQ ID NO: 144398 - RNA, 16 nt, Homo sapiens
cucaaagaaauuucca

SEQ ID NO: 144399 - RNA, 17 nt, Homo sapiens
cacaaaagucuacuuua

SEQ ID NO: 144400 - RNA, 21 nt, Homo sapiens
agccaaccuagcuagcaacau

SEQ ID NO: 144401 - RNA, 20 nt, Homo sapiens
cagcuguuuaugcauagaua

SEQ ID NO: 144402 - RNA, 22 nt, Homo sapiens
caaagaacuuggaaauagugau

SEQ ID NO: 144403 - RNA, 23 nt, Homo sapiens
acccuucuccuuagaaguggaag

SEQ ID NO: 144404 - RNA, 15 nt, Homo sapiens
acacaaucugaaaca

SEQ ID NO: 144405 - RNA, 19 nt, Homo sapiens
ccucaucuccuaaaaggca

SEQ ID NO: 144406 - RNA, 23 nt, Homo sapiens
gauauguuauacugaaccaggcc

SEQ ID NO: 144407 - RNA, 17 nt, Homo sapiens
auguagaaagugaucca

SEQ ID NO: 144408 - RNA, 17 nt, Homo sapiens
ccaggcuggagugcaau

SEQ ID NO: 144409 - RNA, 22 nt, Homo sapiens
acauuuguuuuagucugaacaa

SEQ ID NO: 144410 - RNA, 19 nt, Homo sapiens
cauggauauguuauacuga

SEQ ID NO: 144411 - RNA, 17 nt, Homo sapiens
uguuucaaacaaaaagu

SEQ ID NO: 144412 - RNA, 19 nt, Homo sapiens
cacuguguuuuuuuguaua

SEQ ID NO: 144413 - RNA, 16 nt, Homo sapiens
cgugauuuugcuguag

SEQ ID NO: 144414 - RNA, 20 nt, Homo sapiens
aaugacacagucuuggcuca

SEQ ID NO: 144415 - RNA, 15 nt, Homo sapiens
cagagccucaaauga

SEQ ID NO: 144416 - RNA, 17 nt, Homo sapiens
guucugguuacuguucu

SEQ ID NO: 144417 - RNA, 22 nt, Homo sapiens
ucuaaggcugugccaucagcuc

SEQ ID NO: 144418 - RNA, 20 nt, Homo sapiens
uggggacacagcaucagcuc

SEQ ID NO: 144419 - RNA, 16 nt, Homo sapiens
ucaaacaaaaagucau

SEQ ID NO: 144420 - RNA, 16 nt, Homo sapiens
guggauuggauuuguc

SEQ ID NO: 144421 - RNA, 20 nt, Homo sapiens
aagauggcacuuauaaccaa

SEQ ID NO: 144422 - RNA, 21 nt, Homo sapiens
agugcaguuuuuuucuugucu

SEQ ID NO: 144423 - RNA, 13 nt, Homo sapiens
cacacuguuaaaa

SEQ ID NO: 144424 - RNA, 21 nt, Homo sapiens
acugcauaugaaaggacacua

SEQ ID NO: 144425 - RNA, 19 nt, Homo sapiens
gaccugccaggcacacuga

SEQ ID NO: 144426 - RNA, 20 nt, Homo sapiens
ucugacucuuggcacagcau

SEQ ID NO: 144427 - RNA, 11 nt, Homo sapiens
gaaaacagaaa

SEQ ID NO: 144428 - RNA, 14 nt, Homo sapiens
agaugaaacaucau

SEQ ID NO: 144429 - RNA, 14 nt, Homo sapiens
uuuauugcuuguug

SEQ ID NO: 144430 - RNA, 13 nt, Homo sapiens
gacucuaacagua

SEQ ID NO: 144431 - RNA, 20 nt, Homo sapiens
gucaaagauacacaaucuga

SEQ ID NO: 144432 - RNA, 22 nt, Homo sapiens
ggcugucagauauaaguaacuu

SEQ ID NO: 144433 - RNA, 16 nt, Homo sapiens
uuaaaauagccauaaa

SEQ ID NO: 144434 - RNA, 21 nt, Homo sapiens
ugcccaggcuggagugcaaug

SEQ ID NO: 144435 - RNA, 16 nt, Homo sapiens
ucacguaaagcuagaa

SEQ ID NO: 144436 - RNA, 23 nt, Homo sapiens
aacaguaguugcaauguuuuaga

SEQ ID NO: 144437 - RNA, 16 nt, Homo sapiens
acuuacuuaguguuau

SEQ ID NO: 144438 - RNA, 17 nt, Homo sapiens
agggagugggcuaagca

SEQ ID NO: 144439 - RNA, 20 nt, Homo sapiens
ucugaaaaaguauccugcuu

SEQ ID NO: 144440 - RNA, 23 nt, Homo sapiens
gucaauguccuacugagacagca

SEQ ID NO: 144441 - RNA, 14 nt, Homo sapiens
caguguacagucuu

SEQ ID NO: 144442 - RNA, 16 nt, Homo sapiens
aaucucuccauucccg

SEQ ID NO: 144443 - RNA, 21 nt, Homo sapiens
gaguucauggauauguuauac

SEQ ID NO: 144444 - RNA, 18 nt, Homo sapiens
uccagagacugggacuaa

SEQ ID NO: 144445 - RNA, 16 nt, Homo sapiens
acugaauuuugucuuu

SEQ ID NO: 144446 - RNA, 17 nt, Homo sapiens
auuugucaacaaaguca

SEQ ID NO: 144447 - RNA, 13 nt, Homo sapiens
cacugauguauga

SEQ ID NO: 144448 - RNA, 13 nt, Homo sapiens
cacuuuucaaugu

SEQ ID NO: 144449 - RNA, 22 nt, Homo sapiens
aaguaagccauguaucucagga

SEQ ID NO: 144450 - RNA, 19 nt, Homo sapiens
cuagcaacauuuguuuuag

SEQ ID NO: 144451 - RNA, 20 nt, Homo sapiens
guagaaagugauccauacuu

SEQ ID NO: 144452 - RNA, 18 nt, Homo sapiens
uucuuucaaagaagccag

SEQ ID NO: 144453 - RNA, 17 nt, Homo sapiens
ucuggccuccaagucca

SEQ ID NO: 144454 - RNA, 23 nt, Homo sapiens
caguugcagcuguuuuguugaca

SEQ ID NO: 144455 - RNA, 15 nt, Homo sapiens
cuagaguucauggau

SEQ ID NO: 144456 - RNA, 22 nt, Homo sapiens
aaugccacucuguaauugcaaa

SEQ ID NO: 144457 - RNA, 22 nt, Homo sapiens
gacucuauuaaaaucuucaaua

SEQ ID NO: 144458 - RNA, 15 nt, Homo sapiens
gaacugaacauucca

SEQ ID NO: 144459 - RNA, 19 nt, Homo sapiens
agaugaaacaucauuucaa

SEQ ID NO: 144460 - RNA, 15 nt, Homo sapiens
cugaccaauauugua

SEQ ID NO: 144461 - RNA, 23 nt, Homo sapiens
uguaagaucguucucugccucac

SEQ ID NO: 144462 - RNA, 12 nt, Homo sapiens
aggccagagcaa

SEQ ID NO: 144463 - RNA, 14 nt, Homo sapiens
uacgacaacuugca

SEQ ID NO: 144464 - RNA, 13 nt, Homo sapiens
gucuauuagcucc

SEQ ID NO: 144465 - RNA, 20 nt, Homo sapiens
cagagcagagaggcugaaua

SEQ ID NO: 144466 - RNA, 12 nt, Homo sapiens
uaagaugaaaca

SEQ ID NO: 144467 - RNA, 20 nt, Homo sapiens
uccuuggcuucuuuacuuag

SEQ ID NO: 144468 - RNA, 14 nt, Homo sapiens
aacaucauuucaau

SEQ ID NO: 144469 - RNA, 15 nt, Homo sapiens
aguugggugauaugu

SEQ ID NO: 144470 - RNA, 21 nt, Homo sapiens
aguagcuggauuacaggcaug

SEQ ID NO: 144471 - RNA, 14 nt, Homo sapiens
ugggagacacugau

SEQ ID NO: 144472 - RNA, 13 nt, Homo sapiens
ccuacugagacag

SEQ ID NO: 144473 - RNA, 17 nt, Homo sapiens
caacaaagucacccacu

SEQ ID NO: 144474 - RNA, 21 nt, Homo sapiens
agcuagcaacauuuguuuuag

SEQ ID NO: 144475 - RNA, 18 nt, Homo sapiens
gaaccaggccagagcaaa

SEQ ID NO: 144476 - RNA, 13 nt, Homo sapiens
cuggcucaucucu

SEQ ID NO: 144477 - RNA, 14 nt, Homo sapiens
acauuuuguauauu

SEQ ID NO: 144478 - RNA, 23 nt, Homo sapiens
gcaaaaccaaauauuccagagac

SEQ ID NO: 144479 - RNA, 14 nt, Homo sapiens
uaaccauugucaua

SEQ ID NO: 144480 - RNA, 19 nt, Homo sapiens
ccuuggcuaguaaaagcca

SEQ ID NO: 144481 - RNA, 13 nt, Homo sapiens
cagccucaucucu

SEQ ID NO: 144482 - RNA, 18 nt, Homo sapiens
cucaaagaaauuuccacu

SEQ ID NO: 144483 - RNA, 15 nt, Homo sapiens
caaucugaaacagcu

SEQ ID NO: 144484 - RNA, 12 nt, Homo sapiens
ugaaacaucauu

SEQ ID NO: 144485 - RNA, 12 nt, Homo sapiens
uguaccagagaa

SEQ ID NO: 144486 - RNA, 14 nt, Homo sapiens
uguagaaagugauc

SEQ ID NO: 144487 - RNA, 20 nt, Homo sapiens
agcuguuuaugcauagauaa

SEQ ID NO: 144488 - RNA, 24 nt, Homo sapiens
aaucccucaaaacaaucuugucau

SEQ ID NO: 144489 - RNA, 22 nt, Homo sapiens
auuaaauguagaaagugaucca

SEQ ID NO: 144490 - RNA, 22 nt, Homo sapiens
uuaaguuacacauuuuucagau

SEQ ID NO: 144491 - RNA, 21 nt, Homo sapiens
aauuuuauguuuaguugcaca

SEQ ID NO: 144492 - RNA, 16 nt, Homo sapiens
acaauauacuuguaua

SEQ ID NO: 144493 - RNA, 13 nt, Homo sapiens
accaggucucaua

SEQ ID NO: 144494 - RNA, 14 nt, Homo sapiens
gucugaacaauaua

SEQ ID NO: 144495 - RNA, 21 nt, Homo sapiens
cuaugauuguccguaggccca

SEQ ID NO: 144496 - RNA, 15 nt, Homo sapiens
cuccuuagaagugga

SEQ ID NO: 144497 - RNA, 15 nt, Homo sapiens
gagggaacuguguag

SEQ ID NO: 144498 - RNA, 16 nt, Homo sapiens
aguugcaauguuuuag

SEQ ID NO: 144499 - RNA, 15 nt, Homo sapiens
gaaaaguaacuguuu

SEQ ID NO: 144500 - RNA, 22 nt, Homo sapiens
ucuuuguaaagaaaguggcuug

SEQ ID NO: 144501 - RNA, 16 nt, Homo sapiens
gccagagcaaacagaa

SEQ ID NO: 144502 - RNA, 20 nt, Homo sapiens
uacaguuuuuauugcuuguu

SEQ ID NO: 144503 - RNA, 14 nt, Homo sapiens
gauuuccacaguga

SEQ ID NO: 144504 - RNA, 11 nt, Homo sapiens
accucaucucc

SEQ ID NO: 144505 - RNA, 16 nt, Homo sapiens
uuucauaucacacugu

SEQ ID NO: 144506 - RNA, 13 nt, Homo sapiens
agguugagggcaa

SEQ ID NO: 144507 - RNA, 22 nt, Homo sapiens
uggggacacagcaucagcucaa

SEQ ID NO: 144508 - RNA, 21 nt, Homo sapiens
ugugaccauuagcauuuguca

SEQ ID NO: 144509 - RNA, 18 nt, Homo sapiens
gcccaggcuggagugcaa

SEQ ID NO: 144510 - RNA, 19 nt, Homo sapiens
cugggacuaaguguaccag

SEQ ID NO: 144511 - RNA, 21 nt, Homo sapiens
aauguguucggugauuucaga

SEQ ID NO: 144512 - RNA, 22 nt, Homo sapiens
gcaggauuugggcucuuggaau

SEQ ID NO: 144513 - RNA, 22 nt, Homo sapiens
ucagcaccuacaguguacaguc

SEQ ID NO: 144514 - RNA, 15 nt, Homo sapiens
ugcauguggcacuua

SEQ ID NO: 144515 - RNA, 20 nt, Homo sapiens
gcacucagaaaauggcacuu

SEQ ID NO: 144516 - RNA, 23 nt, Homo sapiens
caggcgugaccugccaggcacac

SEQ ID NO: 144517 - RNA, 17 nt, Homo sapiens
ugcuugcacaaaccaau

SEQ ID NO: 144518 - RNA, 20 nt, Homo sapiens
uacacaaucugaaacagcuu

SEQ ID NO: 144519 - RNA, 13 nt, Homo sapiens
gggagacacugau

SEQ ID NO: 144520 - RNA, 19 nt, Homo sapiens
guuucaccauguuggccag

SEQ ID NO: 144521 - RNA, 14 nt, Homo sapiens
cuggccuccaaguc

SEQ ID NO: 144522 - RNA, 22 nt, Homo sapiens
gccuaggaaagccaguuacaua

SEQ ID NO: 144523 - RNA, 20 nt, Homo sapiens
guuaaaaguuguguuuugaa

SEQ ID NO: 144524 - RNA, 14 nt, Homo sapiens
uccaaagacauguu

SEQ ID NO: 144525 - RNA, 16 nt, Homo sapiens
cuaaauaugagcccag

SEQ ID NO: 144526 - RNA, 19 nt, Homo sapiens
accaggucucauaaugcau

SEQ ID NO: 144527 - RNA, 22 nt, Homo sapiens
uagugaaucacguaaagcuaga

SEQ ID NO: 144528 - RNA, 19 nt, Homo sapiens
cuccuggaccaggucucau

SEQ ID NO: 144529 - RNA, 21 nt, Homo sapiens
gaccaauauuguacaguuuuu

SEQ ID NO: 144530 - RNA, 19 nt, Homo sapiens
augugacucaagacuucca

SEQ ID NO: 144531 - RNA, 14 nt, Homo sapiens
aaacaaucuuguca

SEQ ID NO: 144532 - RNA, 19 nt, Homo sapiens
agauaaccucaagucacau

SEQ ID NO: 144533 - RNA, 19 nt, Homo sapiens
cccuguucauucugcauuc

SEQ ID NO: 144534 - RNA, 19 nt, Homo sapiens
cugaguagcuggauuacag

SEQ ID NO: 144535 - RNA, 17 nt, Homo sapiens
aaaaaugugacucaaga

SEQ ID NO: 144536 - RNA, 14 nt, Homo sapiens
auuucuguucuucc

SEQ ID NO: 144537 - RNA, 12 nt, Homo sapiens
cuguccaaagac

SEQ ID NO: 144538 - RNA, 17 nt, Homo sapiens
gaaaagggaacugaaca

SEQ ID NO: 144539 - RNA, 17 nt, Homo sapiens
caggcuggagugcaaug

SEQ ID NO: 144540 - RNA, 18 nt, Homo sapiens
uguugacauucugaaugc

SEQ ID NO: 144541 - RNA, 13 nt, Homo sapiens
gauaugcuguauu

SEQ ID NO: 144542 - RNA, 18 nt, Homo sapiens
guuuuacuguccaaagac

SEQ ID NO: 144543 - RNA, 17 nt, Homo sapiens
aaauaaucaguguuucc

SEQ ID NO: 144544 - RNA, 23 nt, Homo sapiens
agaauauuauuggaaaauucucu

SEQ ID NO: 144545 - RNA, 18 nt, Homo sapiens
agaagguugagggcaaug

SEQ ID NO: 144546 - RNA, 12 nt, Homo sapiens
uuaagaaauuca

SEQ ID NO: 144547 - RNA, 21 nt, Homo sapiens
aggucuccagagggugaaagc

SEQ ID NO: 144548 - RNA, 15 nt, Homo sapiens
guuuccaaucugucc

SEQ ID NO: 144549 - RNA, 20 nt, Homo sapiens
aaggcugugccaucagcucc

SEQ ID NO: 144550 - RNA, 22 nt, Homo sapiens
caauauacuuguauagcaguuu

SEQ ID NO: 144551 - RNA, 15 nt, Homo sapiens
acaaagccaaucuca

SEQ ID NO: 144552 - RNA, 20 nt, Homo sapiens
aucugcuagggaauaucaau

SEQ ID NO: 144553 - RNA, 18 nt, Homo sapiens
cagugacuccacucugag

SEQ ID NO: 144554 - RNA, 21 nt, Homo sapiens
gacgucacccuccauucugca

SEQ ID NO: 144555 - RNA, 18 nt, Homo sapiens
cuuagguccaaggucucc

SEQ ID NO: 144556 - RNA, 18 nt, Homo sapiens
aaaccugaugcuggggac

SEQ ID NO: 144557 - RNA, 17 nt, Homo sapiens
cuccccuucacucccac

SEQ ID NO: 144558 - RNA, 12 nt, Homo sapiens
uuuaaagacaga

SEQ ID NO: 144559 - RNA, 21 nt, Homo sapiens
gaaauucacuuccccucuagg

SEQ ID NO: 144560 - RNA, 12 nt, Homo sapiens
uuucccaaagag

SEQ ID NO: 144561 - RNA, 16 nt, Homo sapiens
augagggaacugugua

SEQ ID NO: 144562 - RNA, 14 nt, Homo sapiens
auuguagcuaugau

SEQ ID NO: 144563 - RNA, 17 nt, Homo sapiens
cauacuagaguucaugg

SEQ ID NO: 144564 - RNA, 22 nt, Homo sapiens
uaugcacaaacuuggcuucuuu

SEQ ID NO: 144565 - RNA, 12 nt, Homo sapiens
ucaaaugagaaa

SEQ ID NO: 144566 - RNA, 16 nt, Homo sapiens
ugaaugagcaaaacca

SEQ ID NO: 144567 - RNA, 22 nt, Homo sapiens
uuauacccguuucacaugcuuu

SEQ ID NO: 144568 - RNA, 16 nt, Homo sapiens
uugcuugcacaaacca

SEQ ID NO: 144569 - RNA, 14 nt, Homo sapiens
uuugaugcuucuuu

SEQ ID NO: 144570 - RNA, 13 nt, Homo sapiens
acacaaucugaaa

SEQ ID NO: 144571 - RNA, 23 nt, Homo sapiens
agcaccuacaguguacagucuug

SEQ ID NO: 144572 - RNA, 21 nt, Homo sapiens
gaccaauauuguacaguuuuu

SEQ ID NO: 144573 - RNA, 14 nt, Homo sapiens
aucuagaucugaac

SEQ ID NO: 144574 - RNA, 13 nt, Homo sapiens
cagaaaaagaagg

SEQ ID NO: 144575 - RNA, 20 nt, Homo sapiens
augcugguuuuucaguuuuc

SEQ ID NO: 144576 - RNA, 13 nt, Homo sapiens
auugcaauagaaa

SEQ ID NO: 144577 - RNA, 23 nt, Homo sapiens
guaaaauuucccauuaaagaagu

SEQ ID NO: 144578 - RNA, 18 nt, Homo sapiens
gucaguuggcuaagaagu

SEQ ID NO: 144579 - RNA, 15 nt, Homo sapiens
uaggaggccaaccca

SEQ ID NO: 144580 - RNA, 21 nt, Homo sapiens
uaugaacagauugccugcuuu

SEQ ID NO: 144581 - RNA, 15 nt, Human herpesvirus 5
aaaaagaaacccuca

SEQ ID NO: 144582 - RNA, 21 nt, Human herpesvirus 5
aaaaagacgacccguugucau

SEQ ID NO: 144583 - RNA, 13 nt, Human herpesvirus 5
aaaaaaaagagag

SEQ ID NO: 144584 - RNA, 14 nt, Human herpesvirus 5
aaaaaguaugugcu

SEQ ID NO: 144585 - RNA, 12 nt, Human herpesvirus 5
aaaaauacugac

SEQ ID NO: 144586 - RNA, 12 nt, Human herpesvirus 5
aaaacacauuau

SEQ ID NO: 144587 - RNA, 22 nt, Human herpesvirus 5
aaaacaccauuggaaguaacau

SEQ ID NO: 144588 - RNA, 19 nt, Human herpesvirus 5
aaaacacgcuuucucacca

SEQ ID NO: 144589 - RNA, 14 nt, Human herpesvirus 5
aaaaauauguagua

SEQ ID NO: 144590 - RNA, 13 nt, Human herpesvirus 5
aaaacaaccacac

SEQ ID NO: 144591 - RNA, 13 nt, Human herpesvirus 5
aaaagaagcugcc

SEQ ID NO: 144592 - RNA, 21 nt, Human herpesvirus 5
aaaagaaacccucaaaacauc

SEQ ID NO: 144593 - RNA, 18 nt, Human herpesvirus 5
aaaaccaccguaccugca

SEQ ID NO: 144594 - RNA, 23 nt, Human herpesvirus 5
aaaaccauugagaaagcuaacau

SEQ ID NO: 144595 - RNA, 10 nt, Human herpesvirus 5
aaaaccaugc

SEQ ID NO: 144596 - RNA, 18 nt, Human herpesvirus 5
aaaacgaccagaaucagc

SEQ ID NO: 144597 - RNA, 14 nt, Human herpesvirus 5
aacgucacauugaa

SEQ ID NO: 144598 - RNA, 21 nt, Human herpesvirus 5
aacgucacuucugcugucacc

SEQ ID NO: 144599 - RNA, 18 nt, Human herpesvirus 5
aacguaauaucaucugca

SEQ ID NO: 144600 - RNA, 20 nt, Human herpesvirus 5
aacggaagaagaagaacaag

SEQ ID NO: 144601 - RNA, 18 nt, Human herpesvirus 5
aacgugacgguugcugag

SEQ ID NO: 144602 - RNA, 20 nt, Human herpesvirus 5
aacgugcgccuuccagucca

SEQ ID NO: 144603 - RNA, 19 nt, Human herpesvirus 5
aacguugagacuaccacau

SEQ ID NO: 144604 - RNA, 21 nt, Human herpesvirus 5
aacguuucuaucaccuaaucu

SEQ ID NO: 144605 - RNA, 20 nt, Human herpesvirus 5
aacuacaauguauagauaca

SEQ ID NO: 144606 - RNA, 21 nt, Human herpesvirus 5
aacuacaauguauagauacac

SEQ ID NO: 144607 - RNA, 22 nt, Human herpesvirus 5
aacuagacaaaaaauauugaca

SEQ ID NO: 144608 - RNA, 21 nt, Human herpesvirus 5
aacuaccgugccaccugcgag

SEQ ID NO: 144609 - RNA, 20 nt, Human herpesvirus 5
aacuaauauugcaauggacu

SEQ ID NO: 144610 - RNA, 11 nt, Human herpesvirus 5
aacuacguggg

SEQ ID NO: 144611 - RNA, 21 nt, Human herpesvirus 5
aacuacguggguaagugacgu

SEQ ID NO: 144612 - RNA, 23 nt, Human herpesvirus 5
aacuuaaccacaagaaacgcugg

SEQ ID NO: 144613 - RNA, 22 nt, Human herpesvirus 5
aacuaucaccaaacaacaccac

SEQ ID NO: 144614 - RNA, 19 nt, Human herpesvirus 5
aaccacguacaagaaccac

SEQ ID NO: 144615 - RNA, 17 nt, Human herpesvirus 5
aacccacgaccauuucc

SEQ ID NO: 144616 - RNA, 13 nt, Human herpesvirus 5
aacccaaaaccau

SEQ ID NO: 144617 - RNA, 23 nt, Human herpesvirus 5
aaccugcugcacuucgcgcucug

SEQ ID NO: 144618 - RNA, 19 nt, Human herpesvirus 5
aaccuacguccgugaguga

SEQ ID NO: 144619 - RNA, 20 nt, Human herpesvirus 5
aaccuacguccgugagugac

SEQ ID NO: 144620 - RNA, 15 nt, Human herpesvirus 5
aaccuaccuacuuca

SEQ ID NO: 144621 - RNA, 21 nt, Human herpesvirus 5
aaccuguauggaggucacugu

SEQ ID NO: 144622 - RNA, 12 nt, Human herpesvirus 5
aaccuuccccac

SEQ ID NO: 144623 - RNA, 17 nt, Human herpesvirus 5
aaccuuccccacccagu

SEQ ID NO: 144624 - RNA, 20 nt, Human herpesvirus 5
aaccacacagauauccacaa

SEQ ID NO: 144625 - RNA, 15 nt, Human herpesvirus 5
aaccaccgugucucc

SEQ ID NO: 144626 - RNA, 21 nt, Human herpesvirus 5
aaccaccgugucuccgugacg

SEQ ID NO: 144627 - RNA, 15 nt, Human herpesvirus 5
aaccaauaacauguc

SEQ ID NO: 144628 - RNA, 20 nt, Human herpesvirus 5
aacauuuuauuuacaucugu

SEQ ID NO: 144629 - RNA, 21 nt, Human herpesvirus 5
aaccaaaaaaccccuaaagcu

SEQ ID NO: 144630 - RNA, 23 nt, Human herpesvirus 5
aacauguagaagcacccauuaca

SEQ ID NO: 144631 - RNA, 20 nt, Human herpesvirus 5
aacauguggaaaucaccugu

SEQ ID NO: 144632 - RNA, 21 nt, Human herpesvirus 5
aacauguggaaaucaccugug

SEQ ID NO: 144633 - RNA, 20 nt, Human herpesvirus 5
aacaggacgcgcuuggacau

SEQ ID NO: 144634 - RNA, 14 nt, Human herpesvirus 5
aacagccuguggca

SEQ ID NO: 144635 - RNA, 13 nt, Human herpesvirus 5
aacagcagccacc

SEQ ID NO: 144636 - RNA, 13 nt, Human herpesvirus 5
aacaaacacagac

SEQ ID NO: 144637 - RNA, 22 nt, Human herpesvirus 5
aacacuuucucuggaugguacg

SEQ ID NO: 144638 - RNA, 17 nt, Human herpesvirus 5
aaauuguuauugccagu

SEQ ID NO: 144639 - RNA, 23 nt, Human herpesvirus 5
aaauuugauuacuccgugcgguu

SEQ ID NO: 144640 - RNA, 14 nt, Human herpesvirus 5
aaagcugcaaucaa

SEQ ID NO: 144641 - RNA, 16 nt, Human herpesvirus 5
aaagccaccguuuuca

SEQ ID NO: 144642 - RNA, 22 nt, Human herpesvirus 5
aaagccacgcggcguacgucac

SEQ ID NO: 144643 - RNA, 20 nt, Human herpesvirus 5
aaaggcuaacucgcguuuau

SEQ ID NO: 144644 - RNA, 21 nt, Human herpesvirus 5
aaauaccgucgacgugguuuu

SEQ ID NO: 144645 - RNA, 19 nt, Human herpesvirus 5
aaauagauagcaagccaga

SEQ ID NO: 144646 - RNA, 11 nt, Human herpesvirus 5
aaaucuuacca

SEQ ID NO: 144647 - RNA, 18 nt, Human herpesvirus 5
aaaucuuaccacaguuga

SEQ ID NO: 144648 - RNA, 21 nt, Human herpesvirus 5
aaaucuguguguucugugaua

SEQ ID NO: 144649 - RNA, 21 nt, Human herpesvirus 5
aaauauauggaguuuguguaa

SEQ ID NO: 144650 - RNA, 22 nt, Human herpesvirus 5
aaauaugggaauuccccugccu

SEQ ID NO: 144651 - RNA, 15 nt, Human herpesvirus 5
aaauauguaguccgu

SEQ ID NO: 144652 - RNA, 15 nt, Human herpesvirus 5
aaauugcaacuuaac

SEQ ID NO: 144653 - RNA, 19 nt, Human herpesvirus 5
aaauucaauaaaaaccacc

SEQ ID NO: 144654 - RNA, 19 nt, Human herpesvirus 5
aaaugcccgccaccaugca

SEQ ID NO: 144655 - RNA, 16 nt, Human herpesvirus 5
aaagacuuaccaccuc

SEQ ID NO: 144656 - RNA, 16 nt, Human herpesvirus 5
aaagaguccaucugcu

SEQ ID NO: 144657 - RNA, 14 nt, Human herpesvirus 5
aaagaccaagagca

SEQ ID NO: 144658 - RNA, 15 nt, Human herpesvirus 5
aaagaccgcugccuc

SEQ ID NO: 144659 - RNA, 18 nt, Human herpesvirus 5
aaagaccuaauacuagug

SEQ ID NO: 144660 - RNA, 12 nt, Human herpesvirus 5
aaagacuauacu

SEQ ID NO: 144661 - RNA, 15 nt, Human herpesvirus 5
aaagaacgugguugu

SEQ ID NO: 144662 - RNA, 17 nt, Human herpesvirus 5
aaagaauggccauguac

SEQ ID NO: 144663 - RNA, 13 nt, Human herpesvirus 5
aaagaaacccuca

SEQ ID NO: 144664 - RNA, 18 nt, Human herpesvirus 5
aaacuuguuuuacaaugu

SEQ ID NO: 144665 - RNA, 14 nt, Human herpesvirus 5
aaaauauguagucc

SEQ ID NO: 144666 - RNA, 19 nt, Human herpesvirus 5
aaaagcaguggcagcagga

SEQ ID NO: 144667 - RNA, 14 nt, Human herpesvirus 5
aaaagccuggguac

SEQ ID NO: 144668 - RNA, 12 nt, Human herpesvirus 5
aaugcgucugca

SEQ ID NO: 144669 - RNA, 16 nt, Human herpesvirus 5
aaugcgcaucuugccg

SEQ ID NO: 144670 - RNA, 14 nt, Human herpesvirus 5
aaugccaccaugaa

SEQ ID NO: 144671 - RNA, 23 nt, Human herpesvirus 5
aaugacggugauucuauuacacu

SEQ ID NO: 144672 - RNA, 20 nt, Human herpesvirus 5
aaugacuaacccugggcuau

SEQ ID NO: 144673 - RNA, 23 nt, Human herpesvirus 5
aaugauugcaugaaaucacugug

SEQ ID NO: 144674 - RNA, 22 nt, Human herpesvirus 5
aaugguggaaaccagauacaac

SEQ ID NO: 144675 - RNA, 20 nt, Human herpesvirus 5
aaugcugcucagguacauua

SEQ ID NO: 144676 - RNA, 17 nt, Human herpesvirus 5
aauccggcugacgcgga

SEQ ID NO: 144677 - RNA, 22 nt, Human herpesvirus 5
aaucuaggaacacugaaaacac

SEQ ID NO: 144678 - RNA, 12 nt, Human herpesvirus 5
aauauauccaau

SEQ ID NO: 144679 - RNA, 22 nt, Human herpesvirus 5
aauauauauagacacacaccaa

SEQ ID NO: 144680 - RNA, 16 nt, Human herpesvirus 5
aauauacuagggaaaa

SEQ ID NO: 144681 - RNA, 21 nt, Human herpesvirus 5
acaaagcacaauacacaugug

SEQ ID NO: 144682 - RNA, 22 nt, Human herpesvirus 5
acaaaaccgucgaaaacaacca

SEQ ID NO: 144683 - RNA, 15 nt, Human herpesvirus 5
acaaauagcagugac

SEQ ID NO: 144684 - RNA, 16 nt, Human herpesvirus 5
acaaauagcagugacu

SEQ ID NO: 144685 - RNA, 19 nt, Human herpesvirus 5
aauugguacucuagugccc

SEQ ID NO: 144686 - RNA, 21 nt, Human herpesvirus 5
aauuggcaggaaagacaacca

SEQ ID NO: 144687 - RNA, 17 nt, Human herpesvirus 5
aauugcuuuaauacucg

SEQ ID NO: 144688 - RNA, 18 nt, Human herpesvirus 5
aauugcgggcccugcuga

SEQ ID NO: 144689 - RNA, 20 nt, Human herpesvirus 5
aauugcgggcccugcugacg

SEQ ID NO: 144690 - RNA, 15 nt, Human herpesvirus 5
aauguauagauacac

SEQ ID NO: 144691 - RNA, 18 nt, Human herpesvirus 5
aaugucccuguaguacua

SEQ ID NO: 144692 - RNA, 17 nt, Human herpesvirus 5
aaugucguaguacaaua

SEQ ID NO: 144693 - RNA, 12 nt, Human herpesvirus 5
aauuauuccagc

SEQ ID NO: 144694 - RNA, 16 nt, Human herpesvirus 5
aauugagcaacaaaca

SEQ ID NO: 144695 - RNA, 12 nt, Human herpesvirus 5
aauugauuucaa

SEQ ID NO: 144696 - RNA, 22 nt, Human herpesvirus 5
aaguuaaagacauucacacaaa

SEQ ID NO: 144697 - RNA, 11 nt, Human herpesvirus 5
aaguguugacc

SEQ ID NO: 144698 - RNA, 20 nt, Human herpesvirus 5
aagugccugcacgaccugcu

SEQ ID NO: 144699 - RNA, 14 nt, Human herpesvirus 5
aagugcgucaaagc

SEQ ID NO: 144700 - RNA, 16 nt, Human herpesvirus 5
aagugcucgacuuuac

SEQ ID NO: 144701 - RNA, 22 nt, Human herpesvirus 5
aaguucaucucggcauaguggu

SEQ ID NO: 144702 - RNA, 23 nt, Human herpesvirus 5
aaguugggucccagcgagcugcg

SEQ ID NO: 144703 - RNA, 16 nt, Human herpesvirus 5
aauaccguaaacauaa

SEQ ID NO: 144704 - RNA, 22 nt, Human herpesvirus 5
aauacuaguguguuccacucca

SEQ ID NO: 144705 - RNA, 18 nt, Human herpesvirus 5
aauacugcauccaucaca

SEQ ID NO: 144706 - RNA, 21 nt, Human herpesvirus 5
aauacugcauccaucacauca

SEQ ID NO: 144707 - RNA, 22 nt, Human herpesvirus 5
aauacugcauccaucacaucac

SEQ ID NO: 144708 - RNA, 12 nt, Human herpesvirus 5
aauaaaaaccac

SEQ ID NO: 144709 - RNA, 16 nt, Human herpesvirus 5
aauacagauacgcaau

SEQ ID NO: 144710 - RNA, 20 nt, Human herpesvirus 5
aauacaugaugaaugucauc

SEQ ID NO: 144711 - RNA, 19 nt, Human herpesvirus 5
aaggccucuaucugcgcca

SEQ ID NO: 144712 - RNA, 13 nt, Human herpesvirus 5
aaggauuuugccg

SEQ ID NO: 144713 - RNA, 20 nt, Human herpesvirus 5
aaggagcgacguaccagcug

SEQ ID NO: 144714 - RNA, 14 nt, Human herpesvirus 5
aaggacgugaugcg

SEQ ID NO: 144715 - RNA, 15 nt, Human herpesvirus 5
aaggaaaacgugacu

SEQ ID NO: 144716 - RNA, 15 nt, Human herpesvirus 5
aaggaacaaaauaau

SEQ ID NO: 144717 - RNA, 17 nt, Human herpesvirus 5
aaggcucagcguucaaa

SEQ ID NO: 144718 - RNA, 22 nt, Human herpesvirus 5
aaguccgucaugcuggcaugca

SEQ ID NO: 144719 - RNA, 22 nt, Human herpesvirus 5
aagucuguauauucaguccauu

SEQ ID NO: 144720 - RNA, 13 nt, Human herpesvirus 5
aagccagauacua

SEQ ID NO: 144721 - RNA, 17 nt, Human herpesvirus 5
aagccagauacuauacg

SEQ ID NO: 144722 - RNA, 17 nt, Human herpesvirus 5
aagcccuuaacauguua

SEQ ID NO: 144723 - RNA, 18 nt, Human herpesvirus 5
aagcccuuaacauguuau

SEQ ID NO: 144724 - RNA, 15 nt, Human herpesvirus 5
aagcccauguagguc

SEQ ID NO: 144725 - RNA, 11 nt, Human herpesvirus 5
aagcucgccaa

SEQ ID NO: 144726 - RNA, 20 nt, Human herpesvirus 5
aagcucuuagcgugugacgu

SEQ ID NO: 144727 - RNA, 13 nt, Human herpesvirus 5
aagcugcaaucaa

SEQ ID NO: 144728 - RNA, 14 nt, Human herpesvirus 5
aagcugcaaucaaa

SEQ ID NO: 144729 - RNA, 17 nt, Human herpesvirus 5
aagcugucagccucuca

SEQ ID NO: 144730 - RNA, 16 nt, Human herpesvirus 5
aagcuugguacacagc

SEQ ID NO: 144731 - RNA, 23 nt, Human herpesvirus 5
aagcuuuagccaggugaccagca

SEQ ID NO: 144732 - RNA, 20 nt, Human herpesvirus 5
aagcguccucgaagucuuca

SEQ ID NO: 144733 - RNA, 19 nt, Human herpesvirus 5
aagcauaguccaccaggcc

SEQ ID NO: 144734 - RNA, 15 nt, Human herpesvirus 5
aagcauaagacggga

SEQ ID NO: 144735 - RNA, 17 nt, Human herpesvirus 5
aagaaucuaggaacacu

SEQ ID NO: 144736 - RNA, 21 nt, Human herpesvirus 5
aagaaucuaggaacacugaaa

SEQ ID NO: 144737 - RNA, 21 nt, Human herpesvirus 5
aagaauccguccccacgucca

SEQ ID NO: 144738 - RNA, 11 nt, Human herpesvirus 5
aagaaggccau

SEQ ID NO: 144739 - RNA, 17 nt, Human herpesvirus 5
aacuucuuggugaucuu

SEQ ID NO: 144740 - RNA, 19 nt, Human herpesvirus 5
aacuugccggguaccuaaa

SEQ ID NO: 144741 - RNA, 22 nt, Human herpesvirus 5
accuaaagcccccacgacuguu

SEQ ID NO: 144742 - RNA, 19 nt, Human herpesvirus 5
accuacgacccuccuaaac

SEQ ID NO: 144743 - RNA, 17 nt, Human herpesvirus 5
accuacguccgugagug

SEQ ID NO: 144744 - RNA, 22 nt, Human herpesvirus 5
accuacgugcaacgccaccaag

SEQ ID NO: 144745 - RNA, 16 nt, Human herpesvirus 5
accgacuuuuacauga

SEQ ID NO: 144746 - RNA, 20 nt, Human herpesvirus 5
accuauaggcuaagcuauac

SEQ ID NO: 144747 - RNA, 20 nt, Human herpesvirus 5
acccugcguccccgcacgac

SEQ ID NO: 144748 - RNA, 23 nt, Human herpesvirus 5
acccugauaaugggaaacggaca

SEQ ID NO: 144749 - RNA, 22 nt, Human herpesvirus 5
acccucgguaguggacaugguu

SEQ ID NO: 144750 - RNA, 14 nt, Human herpesvirus 5
acccugguauccaa

SEQ ID NO: 144751 - RNA, 19 nt, Human herpesvirus 5
acccuucccgaccucccac

SEQ ID NO: 144752 - RNA, 12 nt, Human herpesvirus 5
accgacacagca

SEQ ID NO: 144753 - RNA, 14 nt, Human herpesvirus 5
accgacacagcagc

SEQ ID NO: 144754 - RNA, 18 nt, Human herpesvirus 5
accugucgucgacauguc

SEQ ID NO: 144755 - RNA, 17 nt, Human herpesvirus 5
accugucaccgcugcua

SEQ ID NO: 144756 - RNA, 21 nt, Human herpesvirus 5
accugucagaaggcagugacg

SEQ ID NO: 144757 - RNA, 15 nt, Human herpesvirus 5
accugcugacuauca

SEQ ID NO: 144758 - RNA, 13 nt, Human herpesvirus 5
accugcugcacuu

SEQ ID NO: 144759 - RNA, 18 nt, Human herpesvirus 5
accugcaucacgguggcu

SEQ ID NO: 144760 - RNA, 20 nt, Human herpesvirus 5
accugccucgacaucucgcc

SEQ ID NO: 144761 - RNA, 12 nt, Human herpesvirus 5
accugaaaccua

SEQ ID NO: 144762 - RNA, 15 nt, Human herpesvirus 5
accugaaaccuaccu

SEQ ID NO: 144763 - RNA, 15 nt, Human herpesvirus 5
accugagaacaugug

SEQ ID NO: 144764 - RNA, 20 nt, Human herpesvirus 5
acgcaggaugcgcguacuca

SEQ ID NO: 144765 - RNA, 22 nt, Human herpesvirus 5
acgagcaucgcaacaacagcaa

SEQ ID NO: 144766 - RNA, 17 nt, Human herpesvirus 5
acgagcgccguccugca

SEQ ID NO: 144767 - RNA, 14 nt, Human herpesvirus 5
acgagcgcugcgaa

SEQ ID NO: 144768 - RNA, 17 nt, Human herpesvirus 5
acgacgucaacaucauc

SEQ ID NO: 144769 - RNA, 18 nt, Human herpesvirus 5
acgagagaaccuaccuac

SEQ ID NO: 144770 - RNA, 14 nt, Human herpesvirus 5
acgacuggcucaac

SEQ ID NO: 144771 - RNA, 16 nt, Human herpesvirus 5
acgacuggcucaacuu

SEQ ID NO: 144772 - RNA, 17 nt, Human herpesvirus 5
acgaccuggccuguggu

SEQ ID NO: 144773 - RNA, 13 nt, Human herpesvirus 5
acgacgcugcuug

SEQ ID NO: 144774 - RNA, 17 nt, Human herpesvirus 5
acgacuuuucuuuccuc

SEQ ID NO: 144775 - RNA, 15 nt, Human herpesvirus 5
acgaccgcagguuag

SEQ ID NO: 144776 - RNA, 22 nt, Human herpesvirus 5
acgacgcaugcauucugguacc

SEQ ID NO: 144777 - RNA, 16 nt, Human herpesvirus 5
acgacgccacacacau

SEQ ID NO: 144778 - RNA, 18 nt, Human herpesvirus 5
acgacgccacacacaucu

SEQ ID NO: 144779 - RNA, 15 nt, Human herpesvirus 5
acgacaaauacaaac

SEQ ID NO: 144780 - RNA, 16 nt, Human herpesvirus 5
acgacaaacacuaccg

SEQ ID NO: 144781 - RNA, 17 nt, Human herpesvirus 5
acgacaaacacuaccgu

SEQ ID NO: 144782 - RNA, 22 nt, Human herpesvirus 5
acauuauucuuggaugcuaauu

SEQ ID NO: 144783 - RNA, 22 nt, Human herpesvirus 5
acauugaacgcgguacaugugc

SEQ ID NO: 144784 - RNA, 22 nt, Human herpesvirus 5
accacacucgugacgucaauca

SEQ ID NO: 144785 - RNA, 16 nt, Human herpesvirus 5
accaccgguaccacua

SEQ ID NO: 144786 - RNA, 15 nt, Human herpesvirus 5
accaccguaccugca

SEQ ID NO: 144787 - RNA, 22 nt, Human herpesvirus 5
accaccgucgccgucacugcca

SEQ ID NO: 144788 - RNA, 23 nt, Human herpesvirus 5
accaccgucgccgucacugccac

SEQ ID NO: 144789 - RNA, 16 nt, Human herpesvirus 5
accaccguuaccagua

SEQ ID NO: 144790 - RNA, 20 nt, Human herpesvirus 5
accauccucacacugacgga

SEQ ID NO: 144791 - RNA, 16 nt, Human herpesvirus 5
accaucagcaaagcuc

SEQ ID NO: 144792 - RNA, 13 nt, Human herpesvirus 5
accacuacuaccu

SEQ ID NO: 144793 - RNA, 16 nt, Human herpesvirus 5
accacgucgaccaggu

SEQ ID NO: 144794 - RNA, 19 nt, Human herpesvirus 5
accacgucgauucccaucu

SEQ ID NO: 144795 - RNA, 20 nt, Human herpesvirus 5
accacggcuugcaaaacuac

SEQ ID NO: 144796 - RNA, 20 nt, Human herpesvirus 5
accacgguacaaaccucuac

SEQ ID NO: 144797 - RNA, 21 nt, Human herpesvirus 5
accacgcguccuuucaaggug

SEQ ID NO: 144798 - RNA, 22 nt, Human herpesvirus 5
accacggacacgacaaaugcau

SEQ ID NO: 144799 - RNA, 15 nt, Human herpesvirus 5
acccccguacugccu

SEQ ID NO: 144800 - RNA, 18 nt, Human herpesvirus 5
acccggucagucuauucu

SEQ ID NO: 144801 - RNA, 14 nt, Human herpesvirus 5
acccgcaccagacu

SEQ ID NO: 144802 - RNA, 17 nt, Human herpesvirus 5
acccgcgccgguucuca

SEQ ID NO: 144803 - RNA, 14 nt, Human herpesvirus 5
acccgcugguguug

SEQ ID NO: 144804 - RNA, 13 nt, Human herpesvirus 5
accccaagccaaa

SEQ ID NO: 144805 - RNA, 16 nt, Human herpesvirus 5
accccaagccaaaaac

SEQ ID NO: 144806 - RNA, 15 nt, Human herpesvirus 5
acccauuacaguaac

SEQ ID NO: 144807 - RNA, 20 nt, Human herpesvirus 5
acccaucccgagcacuccac

SEQ ID NO: 144808 - RNA, 21 nt, Human herpesvirus 5
acccaucccgagcacuccaca

SEQ ID NO: 144809 - RNA, 20 nt, Human herpesvirus 5
accauggucggugacaucac

SEQ ID NO: 144810 - RNA, 21 nt, Human herpesvirus 5
accauggucggugacaucacc

SEQ ID NO: 144811 - RNA, 20 nt, Human herpesvirus 5
acccagcuggggaaguacaa

SEQ ID NO: 144812 - RNA, 15 nt, Human herpesvirus 5
acccagggagacuua

SEQ ID NO: 144813 - RNA, 22 nt, Human herpesvirus 5
acagauucaucgugcaguaccu

SEQ ID NO: 144814 - RNA, 18 nt, Human herpesvirus 5
acagauacgcaaugcauc

SEQ ID NO: 144815 - RNA, 20 nt, Human herpesvirus 5
acagaguccgugucagucuc

SEQ ID NO: 144816 - RNA, 17 nt, Human herpesvirus 5
acagagucgccagucca

SEQ ID NO: 144817 - RNA, 20 nt, Human herpesvirus 5
acagguagguggccaugaug

SEQ ID NO: 144818 - RNA, 22 nt, Human herpesvirus 5
acaggcauacggcguauacaau

SEQ ID NO: 144819 - RNA, 23 nt, Human herpesvirus 5
acaggcauacggcguauacaauc

SEQ ID NO: 144820 - RNA, 19 nt, Human herpesvirus 5
acaguagcgguaccagacg

SEQ ID NO: 144821 - RNA, 15 nt, Human herpesvirus 5
acauacgcaggggcu

SEQ ID NO: 144822 - RNA, 16 nt, Human herpesvirus 5
acauacgggacuuaca

SEQ ID NO: 144823 - RNA, 18 nt, Human herpesvirus 5
acaucgucacaccuauca

SEQ ID NO: 144824 - RNA, 19 nt, Human herpesvirus 5
acauuaaaaaaaaaacaac

SEQ ID NO: 144825 - RNA, 23 nt, Human herpesvirus 5
acauguagaagcacccauuacag

SEQ ID NO: 144826 - RNA, 14 nt, Human herpesvirus 5
acauuaccuuucau

SEQ ID NO: 144827 - RNA, 17 nt, Human herpesvirus 5
acauuagacacacgggg

SEQ ID NO: 144828 - RNA, 18 nt, Human herpesvirus 5
acaucuccgucucugguc

SEQ ID NO: 144829 - RNA, 21 nt, Human herpesvirus 5
acaucuguacaaggaucauau

SEQ ID NO: 144830 - RNA, 15 nt, Human herpesvirus 5
acaucugucaccuca

SEQ ID NO: 144831 - RNA, 16 nt, Human herpesvirus 5
acaucugucaccucac

SEQ ID NO: 144832 - RNA, 22 nt, Human herpesvirus 5
acaucgccuauagauagcggca

SEQ ID NO: 144833 - RNA, 23 nt, Human herpesvirus 5
acacuggaaauucaauaaaaacc

SEQ ID NO: 144834 - RNA, 13 nt, Human herpesvirus 5
acacugaaaacac

SEQ ID NO: 144835 - RNA, 16 nt, Human herpesvirus 5
acacucaguacuuugg

SEQ ID NO: 144836 - RNA, 13 nt, Human herpesvirus 5
acacuuggugcuc

SEQ ID NO: 144837 - RNA, 16 nt, Human herpesvirus 5
acacguagugagcuuu

SEQ ID NO: 144838 - RNA, 14 nt, Human herpesvirus 5
acacgccauaacaa

SEQ ID NO: 144839 - RNA, 18 nt, Human herpesvirus 5
acacgccgucucgucaca

SEQ ID NO: 144840 - RNA, 22 nt, Human herpesvirus 5
acacggugaaccgaacuaugug

SEQ ID NO: 144841 - RNA, 15 nt, Human herpesvirus 5
acaacuuaaccacaa

SEQ ID NO: 144842 - RNA, 21 nt, Human herpesvirus 5
acaccaauugcuuuaauacuc

SEQ ID NO: 144843 - RNA, 12 nt, Human herpesvirus 5
acaccaguauug

SEQ ID NO: 144844 - RNA, 13 nt, Human herpesvirus 5
acaagaaacacag

SEQ ID NO: 144845 - RNA, 20 nt, Human herpesvirus 5
acguuguuugugcuguggau

SEQ ID NO: 144846 - RNA, 17 nt, Human herpesvirus 5
acguuucgcgaggacaa

SEQ ID NO: 144847 - RNA, 16 nt, Human herpesvirus 5
acguugagacuaccac

SEQ ID NO: 144848 - RNA, 18 nt, Human herpesvirus 5
acguugagacuaccacau

SEQ ID NO: 144849 - RNA, 15 nt, Human herpesvirus 5
acguucgacauggac

SEQ ID NO: 144850 - RNA, 15 nt, Human herpesvirus 5
acguuacaucauaca

SEQ ID NO: 144851 - RNA, 19 nt, Human herpesvirus 5
acgugucacgccugugaaa

SEQ ID NO: 144852 - RNA, 14 nt, Human herpesvirus 5
acuaacacuccucu

SEQ ID NO: 144853 - RNA, 12 nt, Human herpesvirus 5
acuaacuugacu

SEQ ID NO: 144854 - RNA, 14 nt, Human herpesvirus 5
acgcaugcauucug

SEQ ID NO: 144855 - RNA, 12 nt, Human herpesvirus 5
acgccauaacaa

SEQ ID NO: 144856 - RNA, 16 nt, Human herpesvirus 5
acgccaugcucaagac

SEQ ID NO: 144857 - RNA, 14 nt, Human herpesvirus 5
acgccacacacauc

SEQ ID NO: 144858 - RNA, 12 nt, Human herpesvirus 5
acgccaccaagg

SEQ ID NO: 144859 - RNA, 19 nt, Human herpesvirus 5
acgccgaagacgacguggu

SEQ ID NO: 144860 - RNA, 21 nt, Human herpesvirus 5
acgugguugucguuaccacaa

SEQ ID NO: 144861 - RNA, 15 nt, Human herpesvirus 5
acuacagcaaugaca

SEQ ID NO: 144862 - RNA, 22 nt, Human herpesvirus 5
acuacagcaaugacauggauaa

SEQ ID NO: 144863 - RNA, 20 nt, Human herpesvirus 5
acuacaugcuauaagacagc

SEQ ID NO: 144864 - RNA, 19 nt, Human herpesvirus 5
acuaccguuaacuauucca

SEQ ID NO: 144865 - RNA, 23 nt, Human herpesvirus 5
acuaagucucccgugucuucuua

SEQ ID NO: 144866 - RNA, 17 nt, Human herpesvirus 5
acuaauauugcaaugga

SEQ ID NO: 144867 - RNA, 19 nt, Human herpesvirus 5
acuaauauccgcguuauca

SEQ ID NO: 144868 - RNA, 21 nt, Human herpesvirus 5
acuacuucgauucucuauaca

SEQ ID NO: 144869 - RNA, 22 nt, Human herpesvirus 5
acuacuucgauucucuauacac

SEQ ID NO: 144870 - RNA, 14 nt, Human herpesvirus 5
acuagacagauuca

SEQ ID NO: 144871 - RNA, 22 nt, Human herpesvirus 5
acuacuaauacagauacgcaau

SEQ ID NO: 144872 - RNA, 21 nt, Human herpesvirus 5
acuaguaaaaaaagugcguca

SEQ ID NO: 144873 - RNA, 21 nt, Human herpesvirus 5
acuaguacugagacagccaca

SEQ ID NO: 144874 - RNA, 22 nt, Human herpesvirus 5
acuaguacugagacagccacau

SEQ ID NO: 144875 - RNA, 14 nt, Human herpesvirus 5
acucggcugugccu

SEQ ID NO: 144876 - RNA, 23 nt, Human herpesvirus 5
acucggcgcuguucuggauguau

SEQ ID NO: 144877 - RNA, 15 nt, Human herpesvirus 5
acucggugugcgacg

SEQ ID NO: 144878 - RNA, 23 nt, Human herpesvirus 5
acucagcuacugggagagccgca

SEQ ID NO: 144879 - RNA, 17 nt, Human herpesvirus 5
acucuaucgcgacagac

SEQ ID NO: 144880 - RNA, 16 nt, Human herpesvirus 5
acucuaucuacugucu

SEQ ID NO: 144881 - RNA, 15 nt, Human herpesvirus 5
acucuaacacccagg

SEQ ID NO: 144882 - RNA, 19 nt, Human herpesvirus 5
acucuauguuauacucugu

SEQ ID NO: 144883 - RNA, 20 nt, Human herpesvirus 5
acucuauguuauacucugua

SEQ ID NO: 144884 - RNA, 15 nt, Human herpesvirus 5
acucaccagacuuuu

SEQ ID NO: 144885 - RNA, 12 nt, Human herpesvirus 5
acucaccaaagc

SEQ ID NO: 144886 - RNA, 23 nt, Human herpesvirus 5
acucaguacuuugggguggugcg

SEQ ID NO: 144887 - RNA, 20 nt, Human herpesvirus 5
acucgcgacgcuucauauua

SEQ ID NO: 144888 - RNA, 21 nt, Human herpesvirus 5
acuauuuuuuguaacacuaca

SEQ ID NO: 144889 - RNA, 13 nt, Human herpesvirus 5
acuauguggcucc

SEQ ID NO: 144890 - RNA, 18 nt, Human herpesvirus 5
acuaucgacguguuauca

SEQ ID NO: 144891 - RNA, 19 nt, Human herpesvirus 5
acuggccagaggucucuau

SEQ ID NO: 144892 - RNA, 20 nt, Human herpesvirus 5
acuggcuggaauacguggcg

SEQ ID NO: 144893 - RNA, 13 nt, Human herpesvirus 5
acugcuucuacca

SEQ ID NO: 144894 - RNA, 21 nt, Human herpesvirus 5
acuguaccaucauugcugcua

SEQ ID NO: 144895 - RNA, 11 nt, Human herpesvirus 5
acucuggugcu

SEQ ID NO: 144896 - RNA, 17 nt, Human herpesvirus 5
acucuggugcuauggcu

SEQ ID NO: 144897 - RNA, 13 nt, Human herpesvirus 5
acucucugccacu

SEQ ID NO: 144898 - RNA, 17 nt, Human herpesvirus 5
acugcaccagcaaccac

SEQ ID NO: 144899 - RNA, 18 nt, Human herpesvirus 5
acugcauccaucacauca

SEQ ID NO: 144900 - RNA, 19 nt, Human herpesvirus 5
acugcauccaucacaucac

SEQ ID NO: 144901 - RNA, 18 nt, Human herpesvirus 5
acugccaccgacauggag

SEQ ID NO: 144902 - RNA, 21 nt, Human herpesvirus 5
agaaaugguaugaugaaucau

SEQ ID NO: 144903 - RNA, 19 nt, Human herpesvirus 5
agaaagggauaguggcucg

SEQ ID NO: 144904 - RNA, 15 nt, Human herpesvirus 5
agaaagcuaacauuc

SEQ ID NO: 144905 - RNA, 14 nt, Human herpesvirus 5
agaaggccaugucc

SEQ ID NO: 144906 - RNA, 18 nt, Human herpesvirus 5
agaagguuuugugccaac

SEQ ID NO: 144907 - RNA, 12 nt, Human herpesvirus 5
acuucaaugucc

SEQ ID NO: 144908 - RNA, 14 nt, Human herpesvirus 5
acuucaucaucacc

SEQ ID NO: 144909 - RNA, 13 nt, Human herpesvirus 5
acuucccaugcaa

SEQ ID NO: 144910 - RNA, 13 nt, Human herpesvirus 5
acuuaugugaaua

SEQ ID NO: 144911 - RNA, 19 nt, Human herpesvirus 5
acuuuuaacagcucaugcc

SEQ ID NO: 144912 - RNA, 16 nt, Human herpesvirus 5
acuuuguaucauuaca

SEQ ID NO: 144913 - RNA, 15 nt, Human herpesvirus 5
acuuuuuaauggcca

SEQ ID NO: 144914 - RNA, 18 nt, Human herpesvirus 5
acuuuuuuuaaccaauaa

SEQ ID NO: 144915 - RNA, 18 nt, Human herpesvirus 5
acuuuuuuuacuaguauc

SEQ ID NO: 144916 - RNA, 22 nt, Human herpesvirus 5
acuuuuuuuacuaguauccacg

SEQ ID NO: 144917 - RNA, 24 nt, Human herpesvirus 5
agaaaaaaugguguuacacacucc

SEQ ID NO: 144918 - RNA, 13 nt, Human herpesvirus 5
agacauuccccac

SEQ ID NO: 144919 - RNA, 18 nt, Human herpesvirus 5
agacauuuuaucaguuac

SEQ ID NO: 144920 - RNA, 18 nt, Human herpesvirus 5
agaccaagagcaugcugu

SEQ ID NO: 144921 - RNA, 22 nt, Human herpesvirus 5
agaccaagagcaugcugugggc

SEQ ID NO: 144922 - RNA, 16 nt, Human herpesvirus 5
agacccgcgucccugg

SEQ ID NO: 144923 - RNA, 15 nt, Human herpesvirus 5
agacccacuaccugg

SEQ ID NO: 144924 - RNA, 15 nt, Human herpesvirus 5
agaccccaagccaaa

SEQ ID NO: 144925 - RNA, 23 nt, Human herpesvirus 5
agacaggacaccgcaacucggug

SEQ ID NO: 144926 - RNA, 13 nt, Human herpesvirus 5
agacaucacaguu

SEQ ID NO: 144927 - RNA, 23 nt, Human herpesvirus 5
agacaucgucacaccuaucauaa

SEQ ID NO: 144928 - RNA, 22 nt, Human herpesvirus 5
agacaucuuaugaagcugaaca

SEQ ID NO: 144929 - RNA, 12 nt, Human herpesvirus 5
agacagauucau

SEQ ID NO: 144930 - RNA, 12 nt, Human herpesvirus 5
agacagccacau

SEQ ID NO: 144931 - RNA, 15 nt, Human herpesvirus 5
agacagccacaucaa

SEQ ID NO: 144932 - RNA, 17 nt, Human herpesvirus 5
agaaugcaacgcuuuca

SEQ ID NO: 144933 - RNA, 20 nt, Human herpesvirus 5
agaaugcaacgcuuucagga

SEQ ID NO: 144934 - RNA, 14 nt, Human herpesvirus 5
agaauaggaagaaa

SEQ ID NO: 144935 - RNA, 18 nt, Human herpesvirus 5
agaaucuaggaacacuga

SEQ ID NO: 144936 - RNA, 17 nt, Human herpesvirus 5
agaccgcaacaacagca

SEQ ID NO: 144937 - RNA, 18 nt, Human herpesvirus 5
agaccgcaacaacagcag

SEQ ID NO: 144938 - RNA, 20 nt, Human herpesvirus 5
agagcaaaaccuuacagcuu

SEQ ID NO: 144939 - RNA, 21 nt, Human herpesvirus 5
agagccgcguggcuguagcua

SEQ ID NO: 144940 - RNA, 17 nt, Human herpesvirus 5
agaguuguggcaaagag

SEQ ID NO: 144941 - RNA, 21 nt, Human herpesvirus 5
agauaaaauuugauuacuccg

SEQ ID NO: 144942 - RNA, 14 nt, Human herpesvirus 5
agaguuacaugcaa

SEQ ID NO: 144943 - RNA, 16 nt, Human herpesvirus 5
caacaaauaccaacac

SEQ ID NO: 144944 - RNA, 15 nt, Human herpesvirus 5
caaccacgucaagau

SEQ ID NO: 144945 - RNA, 18 nt, Human herpesvirus 5
caaccauuggcaacauca

SEQ ID NO: 144946 - RNA, 20 nt, Human herpesvirus 5
caaccauuggcaacaucacc

SEQ ID NO: 144947 - RNA, 17 nt, Human herpesvirus 5
caacuacagcaaugaca

SEQ ID NO: 144948 - RNA, 17 nt, Human herpesvirus 5
caacaugcccagcaucu

SEQ ID NO: 144949 - RNA, 20 nt, Human herpesvirus 5
caacaugcccagcaucuccu

SEQ ID NO: 144950 - RNA, 15 nt, Human herpesvirus 5
caacaucuucugcac

SEQ ID NO: 144951 - RNA, 22 nt, Human herpesvirus 5
caacaucaccaacguuaccucc

SEQ ID NO: 144952 - RNA, 16 nt, Human herpesvirus 5
caacuuaaccacaaga

SEQ ID NO: 144953 - RNA, 14 nt, Human herpesvirus 5
caacugcugccucg

SEQ ID NO: 144954 - RNA, 16 nt, Human herpesvirus 5
caacuucuucuacuca

SEQ ID NO: 144955 - RNA, 14 nt, Human herpesvirus 5
caacuucuaccauc

SEQ ID NO: 144956 - RNA, 15 nt, Human herpesvirus 5
caacuucuaccaucu

SEQ ID NO: 144957 - RNA, 20 nt, Human herpesvirus 5
caagagaagaaacccgggug

SEQ ID NO: 144958 - RNA, 15 nt, Human herpesvirus 5
caacuccgugcuguu

SEQ ID NO: 144959 - RNA, 12 nt, Human herpesvirus 5
caacucagggaa

SEQ ID NO: 144960 - RNA, 14 nt, Human herpesvirus 5
caacuaucaccaaa

SEQ ID NO: 144961 - RNA, 15 nt, Human herpesvirus 5
caacugaaauacaug

SEQ ID NO: 144962 - RNA, 18 nt, Human herpesvirus 5
caauagcagccgacacag

SEQ ID NO: 144963 - RNA, 12 nt, Human herpesvirus 5
caauacaucaua

SEQ ID NO: 144964 - RNA, 20 nt, Human herpesvirus 5
caauacugcauccaucacau

SEQ ID NO: 144965 - RNA, 17 nt, Human herpesvirus 5
caauaacccacaccuau

SEQ ID NO: 144966 - RNA, 14 nt, Human herpesvirus 5
caauacaaaaagcu

SEQ ID NO: 144967 - RNA, 13 nt, Human herpesvirus 5
caauacaaugaca

SEQ ID NO: 144968 - RNA, 12 nt, Human herpesvirus 5
caauaacauguc

SEQ ID NO: 144969 - RNA, 13 nt, Human herpesvirus 5
caauaacaugucu

SEQ ID NO: 144970 - RNA, 14 nt, Human herpesvirus 5
caauaacaugucuc

SEQ ID NO: 144971 - RNA, 19 nt, Human herpesvirus 5
caauaaagacgucaaugac

SEQ ID NO: 144972 - RNA, 22 nt, Human herpesvirus 5
caauaaagagauagacaucaca

SEQ ID NO: 144973 - RNA, 21 nt, Human herpesvirus 5
caauaaagauaaucugccaau

SEQ ID NO: 144974 - RNA, 14 nt, Human herpesvirus 5
caauaaacccaucc

SEQ ID NO: 144975 - RNA, 22 nt, Human herpesvirus 5
caauaaagcguugauuucucaa

SEQ ID NO: 144976 - RNA, 18 nt, Human herpesvirus 5
caaucgaaguuuuucaug

SEQ ID NO: 144977 - RNA, 20 nt, Human herpesvirus 5
caaucgacugccuaacugua

SEQ ID NO: 144978 - RNA, 21 nt, Human herpesvirus 5
caaucgacugccuaacuguag

SEQ ID NO: 144979 - RNA, 23 nt, Human herpesvirus 5
caauauauauagacacacaccaa

SEQ ID NO: 144980 - RNA, 21 nt, Human herpesvirus 5
caagucguuucagcccaagac

SEQ ID NO: 144981 - RNA, 12 nt, Human herpesvirus 5
caagucacuaua

SEQ ID NO: 144982 - RNA, 22 nt, Human herpesvirus 5
caaguaccuuaacaugaugaag

SEQ ID NO: 144983 - RNA, 14 nt, Human herpesvirus 5
caaguucgaucuca

SEQ ID NO: 144984 - RNA, 14 nt, Human herpesvirus 5
caaguugguggugg

SEQ ID NO: 144985 - RNA, 22 nt, Human herpesvirus 5
caauaaacuaaaacauucugua

SEQ ID NO: 144986 - RNA, 22 nt, Human herpesvirus 5
caauaaacuuuuuuuaaccaau

SEQ ID NO: 144987 - RNA, 22 nt, Human herpesvirus 5
caauaaagaaaaccacacuguu

SEQ ID NO: 144988 - RNA, 15 nt, Human herpesvirus 5
caauaaaaaccaccg

SEQ ID NO: 144989 - RNA, 16 nt, Human herpesvirus 5
caagccagauacuaua

SEQ ID NO: 144990 - RNA, 16 nt, Human herpesvirus 5
caaggucaacuacagc

SEQ ID NO: 144991 - RNA, 15 nt, Human herpesvirus 5
caaggucguucuccu

SEQ ID NO: 144992 - RNA, 15 nt, Human herpesvirus 5
caagcacuaccagcu

SEQ ID NO: 144993 - RNA, 19 nt, Human herpesvirus 5
cacguucuugcguccuuca

SEQ ID NO: 144994 - RNA, 15 nt, Human herpesvirus 5
cacguugagauucag

SEQ ID NO: 144995 - RNA, 15 nt, Human herpesvirus 5
cacguuacaucauac

SEQ ID NO: 144996 - RNA, 19 nt, Human herpesvirus 5
cacugaacuugagcacaaa

SEQ ID NO: 144997 - RNA, 14 nt, Human herpesvirus 5
cacugaaaacacca

SEQ ID NO: 144998 - RNA, 15 nt, Human herpesvirus 5
cacuacccucaagua

SEQ ID NO: 144999 - RNA, 19 nt, Human herpesvirus 5
cacucgugauggguucugc

SEQ ID NO: 145000 - RNA, 12 nt, Human herpesvirus 5
cacuacagcuug

SEQ ID NO: 145001 - RNA, 19 nt, Human herpesvirus 5
cacuacagcuugcaauucg

SEQ ID NO: 145002 - RNA, 17 nt, Human herpesvirus 5
caccucgaugaagccua

SEQ ID NO: 145003 - RNA, 17 nt, Human herpesvirus 5
caccuguauacugugaa

SEQ ID NO: 145004 - RNA, 21 nt, Human herpesvirus 5
caccugucgucgacaugucgc

SEQ ID NO: 145005 - RNA, 14 nt, Human herpesvirus 5
caccugugguagaa

SEQ ID NO: 145006 - RNA, 19 nt, Human herpesvirus 5
cacgacaaaugcaugcaaa

SEQ ID NO: 145007 - RNA, 15 nt, Human herpesvirus 5
cacgucgaccaggug

SEQ ID NO: 145008 - RNA, 22 nt, Human herpesvirus 5
cacgucgccguccaugucgcug

SEQ ID NO: 145009 - RNA, 12 nt, Human herpesvirus 5
cagaacuggugc

SEQ ID NO: 145010 - RNA, 16 nt, Human herpesvirus 5
cagaacuggugcuauc

SEQ ID NO: 145011 - RNA, 19 nt, Human herpesvirus 5
cagaaggaauaauccgugc

SEQ ID NO: 145012 - RNA, 20 nt, Human herpesvirus 5
cagaaucuauaaauugcucu

SEQ ID NO: 145013 - RNA, 18 nt, Human herpesvirus 5
cagaaugaaccuuguaau

SEQ ID NO: 145014 - RNA, 21 nt, Human herpesvirus 5
cagaagggaauuuguaaaaag

SEQ ID NO: 145015 - RNA, 22 nt, Human herpesvirus 5
cacugcacuuccuguacacauc

SEQ ID NO: 145016 - RNA, 14 nt, Human herpesvirus 5
cacugguauaacca

SEQ ID NO: 145017 - RNA, 15 nt, Human herpesvirus 5
cagaaagcaccagaa

SEQ ID NO: 145018 - RNA, 20 nt, Human herpesvirus 5
cagaaagaggggcaccugua

SEQ ID NO: 145019 - RNA, 16 nt, Human herpesvirus 5
cagaaagcugcaauca

SEQ ID NO: 145020 - RNA, 16 nt, Human herpesvirus 5
cacagagacaccaauu

SEQ ID NO: 145021 - RNA, 13 nt, Human herpesvirus 5
cacagauauccac

SEQ ID NO: 145022 - RNA, 16 nt, Human herpesvirus 5
cacaggaaaguaugug

SEQ ID NO: 145023 - RNA, 22 nt, Human herpesvirus 5
cacagguagguggccaugauga

SEQ ID NO: 145024 - RNA, 20 nt, Human herpesvirus 5
cacagcuccugaaugagcuc

SEQ ID NO: 145025 - RNA, 19 nt, Human herpesvirus 5
cacauacgggacuuacauc

SEQ ID NO: 145026 - RNA, 20 nt, Human herpesvirus 5
cacauauagcucguccacac

SEQ ID NO: 145027 - RNA, 21 nt, Human herpesvirus 5
cacauaucgagguacaugucc

SEQ ID NO: 145028 - RNA, 19 nt, Human herpesvirus 5
caccaguucguagaucaca

SEQ ID NO: 145029 - RNA, 15 nt, Human herpesvirus 5
caccagcaaccaccg

SEQ ID NO: 145030 - RNA, 23 nt, Human herpesvirus 5
caccagcaaggucaacuacagca

SEQ ID NO: 145031 - RNA, 15 nt, Human herpesvirus 5
cacaucugucaccuc

SEQ ID NO: 145032 - RNA, 14 nt, Human herpesvirus 5
caccacgguacaaa

SEQ ID NO: 145033 - RNA, 21 nt, Human herpesvirus 5
caccacgguacaaaccucuac

SEQ ID NO: 145034 - RNA, 15 nt, Human herpesvirus 5
caccaucaggugaca

SEQ ID NO: 145035 - RNA, 23 nt, Human herpesvirus 5
caccauguucgagaaugccucua

SEQ ID NO: 145036 - RNA, 21 nt, Human herpesvirus 5
caccauuggaaguaacaucau

SEQ ID NO: 145037 - RNA, 23 nt, Human herpesvirus 5
caccauuggaaguaacaucauaa

SEQ ID NO: 145038 - RNA, 12 nt, Human herpesvirus 5
cacccacgggug

SEQ ID NO: 145039 - RNA, 15 nt, Human herpesvirus 5
cacccaguagacaga

SEQ ID NO: 145040 - RNA, 21 nt, Human herpesvirus 5
cacccacagagucgccagucc

SEQ ID NO: 145041 - RNA, 10 nt, Human herpesvirus 5
caccuaccug

SEQ ID NO: 145042 - RNA, 19 nt, Human herpesvirus 5
caccuacgacccuccuaaa

SEQ ID NO: 145043 - RNA, 15 nt, Human herpesvirus 5
cacacgccauaacaa

SEQ ID NO: 145044 - RNA, 15 nt, Human herpesvirus 5
cacacguguggaaga

SEQ ID NO: 145045 - RNA, 19 nt, Human herpesvirus 5
cacacguguggaagacaug

SEQ ID NO: 145046 - RNA, 17 nt, Human herpesvirus 5
cacacguucgacaugga

SEQ ID NO: 145047 - RNA, 18 nt, Human herpesvirus 5
cacacguucgacauggac

SEQ ID NO: 145048 - RNA, 21 nt, Human herpesvirus 5
cacacugacggauaaacacga

SEQ ID NO: 145049 - RNA, 20 nt, Human herpesvirus 5
cacagaacacacagauuuuc

SEQ ID NO: 145050 - RNA, 14 nt, Human herpesvirus 5
caaucucacgguua

SEQ ID NO: 145051 - RNA, 19 nt, Human herpesvirus 5
caaugccucauccuuauga

SEQ ID NO: 145052 - RNA, 15 nt, Human herpesvirus 5
caaugcgucugcaac

SEQ ID NO: 145053 - RNA, 24 nt, Human herpesvirus 5
auggaucaucuguuuuugcugcaa

SEQ ID NO: 145054 - RNA, 15 nt, Human herpesvirus 5
aucuucggcuaccuc

SEQ ID NO: 145055 - RNA, 20 nt, Human herpesvirus 5
aucugugauccgugcgcuca

SEQ ID NO: 145056 - RNA, 21 nt, Human herpesvirus 5
aucuuaugaagcugaacaaua

SEQ ID NO: 145057 - RNA, 16 nt, Human herpesvirus 5
aucuguuuuugcugca

SEQ ID NO: 145058 - RNA, 21 nt, Human herpesvirus 5
aucuuaccggggaccucguug

SEQ ID NO: 145059 - RNA, 23 nt, Human herpesvirus 5
auggcguccgggcucggugaccu

SEQ ID NO: 145060 - RNA, 15 nt, Human herpesvirus 5
auggcccucaugacg

SEQ ID NO: 145061 - RNA, 20 nt, Human herpesvirus 5
auggguagccaucgcauucc

SEQ ID NO: 145062 - RNA, 13 nt, Human herpesvirus 5
auggucauauaua

SEQ ID NO: 145063 - RNA, 19 nt, Human herpesvirus 5
augguguuacacacuccuu

SEQ ID NO: 145064 - RNA, 13 nt, Human herpesvirus 5
auguaaacgugug

SEQ ID NO: 145065 - RNA, 16 nt, Human herpesvirus 5
auguauagauacacgu

SEQ ID NO: 145066 - RNA, 16 nt, Human herpesvirus 5
auguaguaucauauua

SEQ ID NO: 145067 - RNA, 20 nt, Human herpesvirus 5
augucuccaagucuggugcg

SEQ ID NO: 145068 - RNA, 19 nt, Human herpesvirus 5
augucgcgauagacaacuc

SEQ ID NO: 145069 - RNA, 17 nt, Human herpesvirus 5
augugcggucauguguc

SEQ ID NO: 145070 - RNA, 16 nt, Human herpesvirus 5
augucguaguacaaua

SEQ ID NO: 145071 - RNA, 16 nt, Human herpesvirus 5
augucgucucaucaca

SEQ ID NO: 145072 - RNA, 19 nt, Human herpesvirus 5
augucccuacucaccaaag

SEQ ID NO: 145073 - RNA, 18 nt, Human herpesvirus 5
auguccgcucguguucca

SEQ ID NO: 145074 - RNA, 16 nt, Human herpesvirus 5
auguuauguuauuaua

SEQ ID NO: 145075 - RNA, 22 nt, Human herpesvirus 5
auguuauaacgacgccagugau

SEQ ID NO: 145076 - RNA, 24 nt, Human herpesvirus 5
auguguauggcccugauggcgaga

SEQ ID NO: 145077 - RNA, 23 nt, Human herpesvirus 5
augugugaauggaaauacaugau

SEQ ID NO: 145078 - RNA, 20 nt, Human herpesvirus 5
auguuacacauuacuacaca

SEQ ID NO: 145079 - RNA, 16 nt, Human herpesvirus 5
auuaauuuaacaaguc

SEQ ID NO: 145080 - RNA, 18 nt, Human herpesvirus 5
auuacacagguguuguua

SEQ ID NO: 145081 - RNA, 11 nt, Human herpesvirus 5
auguuggugcc

SEQ ID NO: 145082 - RNA, 20 nt, Human herpesvirus 5
auguuuuuugaaucauacau

SEQ ID NO: 145083 - RNA, 20 nt, Human herpesvirus 5
caaaacaacguaucacuuuc

SEQ ID NO: 145084 - RNA, 22 nt, Human herpesvirus 5
caaaacaucaccaccaucagca

SEQ ID NO: 145085 - RNA, 12 nt, Human herpesvirus 5
auuuucuacucc

SEQ ID NO: 145086 - RNA, 15 nt, Human herpesvirus 5
auuuucuuugugauu

SEQ ID NO: 145087 - RNA, 23 nt, Human herpesvirus 5
auugggaaagagcguacagucca

SEQ ID NO: 145088 - RNA, 20 nt, Human herpesvirus 5
auuggcauauagccaauaaa

SEQ ID NO: 145089 - RNA, 19 nt, Human herpesvirus 5
auuguugagaacauauaua

SEQ ID NO: 145090 - RNA, 13 nt, Human herpesvirus 5
auuuaacaaguca

SEQ ID NO: 145091 - RNA, 12 nt, Human herpesvirus 5
auugccucuaca

SEQ ID NO: 145092 - RNA, 14 nt, Human herpesvirus 5
auugcucuacugca

SEQ ID NO: 145093 - RNA, 19 nt, Human herpesvirus 5
auugauuucaacaaauacc

SEQ ID NO: 145094 - RNA, 23 nt, Human herpesvirus 5
auugauuucaacaaauaccaaca

SEQ ID NO: 145095 - RNA, 19 nt, Human herpesvirus 5
auucuacauucaauacauc

SEQ ID NO: 145096 - RNA, 16 nt, Human herpesvirus 5
auucuauuacacucua

SEQ ID NO: 145097 - RNA, 22 nt, Human herpesvirus 5
auuaggcaacuaucaccaaaca

SEQ ID NO: 145098 - RNA, 20 nt, Human herpesvirus 5
auucguaacucuaucuacug

SEQ ID NO: 145099 - RNA, 22 nt, Human herpesvirus 5
auuacuaucgacguguuaucac

SEQ ID NO: 145100 - RNA, 13 nt, Human herpesvirus 5
auuacuacguaac

SEQ ID NO: 145101 - RNA, 15 nt, Human herpesvirus 5
auuacggacaccucu

SEQ ID NO: 145102 - RNA, 20 nt, Human herpesvirus 5
auuacgcccgacgugauuua

SEQ ID NO: 145103 - RNA, 15 nt, Human herpesvirus 5
agcuacagccacgac

SEQ ID NO: 145104 - RNA, 16 nt, Human herpesvirus 5
agcuacuuuacguguu

SEQ ID NO: 145105 - RNA, 13 nt, Human herpesvirus 5
agcguuguacaug

SEQ ID NO: 145106 - RNA, 19 nt, Human herpesvirus 5
agcuaauagauuaaugugu

SEQ ID NO: 145107 - RNA, 19 nt, Human herpesvirus 5
agcggucuguucaggugga

SEQ ID NO: 145108 - RNA, 12 nt, Human herpesvirus 5
agcggugcugau

SEQ ID NO: 145109 - RNA, 13 nt, Human herpesvirus 5
agcggugcugaug

SEQ ID NO: 145110 - RNA, 19 nt, Human herpesvirus 5
agcguccacacaccgcuuu

SEQ ID NO: 145111 - RNA, 13 nt, Human herpesvirus 5
agcgucggcgagc

SEQ ID NO: 145112 - RNA, 19 nt, Human herpesvirus 5
agcgucgucguccgugcca

SEQ ID NO: 145113 - RNA, 12 nt, Human herpesvirus 5
agcgucuggcca

SEQ ID NO: 145114 - RNA, 14 nt, Human herpesvirus 5
agcucacuacgugu

SEQ ID NO: 145115 - RNA, 11 nt, Human herpesvirus 5
agcucacuguu

SEQ ID NO: 145116 - RNA, 14 nt, Human herpesvirus 5
agcucaugucgaga

SEQ ID NO: 145117 - RNA, 13 nt, Human herpesvirus 5
agcuccaaaacga

SEQ ID NO: 145118 - RNA, 17 nt, Human herpesvirus 5
agcggcggcggugguga

SEQ ID NO: 145119 - RNA, 23 nt, Human herpesvirus 5
agcggcggcgguggugacugggg

SEQ ID NO: 145120 - RNA, 23 nt, Human herpesvirus 5
agcggcacuuuacauaaaaccac

SEQ ID NO: 145121 - RNA, 16 nt, Human herpesvirus 5
agcggccgcagugggc

SEQ ID NO: 145122 - RNA, 22 nt, Human herpesvirus 5
agcgguauauucaaucauuacu

SEQ ID NO: 145123 - RNA, 15 nt, Human herpesvirus 5
agcggggguuguaca

SEQ ID NO: 145124 - RNA, 14 nt, Human herpesvirus 5
agcgccgucacuuc

SEQ ID NO: 145125 - RNA, 23 nt, Human herpesvirus 5
agcgcgugucccugccagucucc

SEQ ID NO: 145126 - RNA, 21 nt, Human herpesvirus 5
agcgcggcacgccguugccac

SEQ ID NO: 145127 - RNA, 17 nt, Human herpesvirus 5
agcggaggaggugaccu

SEQ ID NO: 145128 - RNA, 18 nt, Human herpesvirus 5
agcgacgaucccucgccg

SEQ ID NO: 145129 - RNA, 13 nt, Human herpesvirus 5
agcgaguggggca

SEQ ID NO: 145130 - RNA, 20 nt, Human herpesvirus 5
agcgaguugcugugcaccuc

SEQ ID NO: 145131 - RNA, 16 nt, Human herpesvirus 5
agcgaauugagcaaca

SEQ ID NO: 145132 - RNA, 12 nt, Human herpesvirus 5
agcgacagcagc

SEQ ID NO: 145133 - RNA, 12 nt, Human herpesvirus 5
agcgacucucaa

SEQ ID NO: 145134 - RNA, 15 nt, Human herpesvirus 5
agcgagaacuaauau

SEQ ID NO: 145135 - RNA, 21 nt, Human herpesvirus 5
agcgagaacuaauauugcaau

SEQ ID NO: 145136 - RNA, 15 nt, Human herpesvirus 5
agccuucccuuguaa

SEQ ID NO: 145137 - RNA, 16 nt, Human herpesvirus 5
agccuggggcaccuau

SEQ ID NO: 145138 - RNA, 17 nt, Human herpesvirus 5
agccacguugagauuca

SEQ ID NO: 145139 - RNA, 16 nt, Human herpesvirus 5
agccagcuacagccac

SEQ ID NO: 145140 - RNA, 22 nt, Human herpesvirus 5
agcccaagaccauuaacaauuc

SEQ ID NO: 145141 - RNA, 15 nt, Human herpesvirus 5
agcccuauccuccau

SEQ ID NO: 145142 - RNA, 17 nt, Human herpesvirus 5
agccccgucaaaacaca

SEQ ID NO: 145143 - RNA, 16 nt, Human herpesvirus 5
agccgacaaccugcug

SEQ ID NO: 145144 - RNA, 17 nt, Human herpesvirus 5
agccgugggaaugguaa

SEQ ID NO: 145145 - RNA, 15 nt, Human herpesvirus 5
agccgucagucauag

SEQ ID NO: 145146 - RNA, 15 nt, Human herpesvirus 5
agccucuacaaacua

SEQ ID NO: 145147 - RNA, 22 nt, Human herpesvirus 5
agccucuacaaacuagcauucu

SEQ ID NO: 145148 - RNA, 14 nt, Human herpesvirus 5
agccuaucaaugaa

SEQ ID NO: 145149 - RNA, 15 nt, Human herpesvirus 5
agaugagcagcaaaa

SEQ ID NO: 145150 - RNA, 21 nt, Human herpesvirus 5
agaugauacauagcaguauuc

SEQ ID NO: 145151 - RNA, 20 nt, Human herpesvirus 5
agccaacgagacuaucuaca

SEQ ID NO: 145152 - RNA, 13 nt, Human herpesvirus 5
agccacaucaaca

SEQ ID NO: 145153 - RNA, 16 nt, Human herpesvirus 5
agccaccgacacagca

SEQ ID NO: 145154 - RNA, 19 nt, Human herpesvirus 5
agccaccgacacagcagca

SEQ ID NO: 145155 - RNA, 19 nt, Human herpesvirus 5
agccaaaggugaccuuauu

SEQ ID NO: 145156 - RNA, 13 nt, Human herpesvirus 5
agaucguacccac

SEQ ID NO: 145157 - RNA, 21 nt, Human herpesvirus 5
agaucgucuacggcuccacac

SEQ ID NO: 145158 - RNA, 13 nt, Human herpesvirus 5
agauccaguauuc

SEQ ID NO: 145159 - RNA, 21 nt, Human herpesvirus 5
agaucccggccuugcugugua

SEQ ID NO: 145160 - RNA, 23 nt, Human herpesvirus 5
agaucccggccuugcuguguauc

SEQ ID NO: 145161 - RNA, 21 nt, Human herpesvirus 5
agauacauguucauaaacucu

SEQ ID NO: 145162 - RNA, 21 nt, Human herpesvirus 5
agauacgcaguguuguuaucc

SEQ ID NO: 145163 - RNA, 16 nt, Human herpesvirus 5
agggcaucaugguggu

SEQ ID NO: 145164 - RNA, 16 nt, Human herpesvirus 5
agggaauuuguaaaaa

SEQ ID NO: 145165 - RNA, 14 nt, Human herpesvirus 5
agggacaaagcagc

SEQ ID NO: 145166 - RNA, 22 nt, Human herpesvirus 5
agggacagugcgccaacggcau

SEQ ID NO: 145167 - RNA, 22 nt, Human herpesvirus 5
agggagccccaucauggcccaa

SEQ ID NO: 145168 - RNA, 13 nt, Human herpesvirus 5
aggcuugucaugg

SEQ ID NO: 145169 - RNA, 16 nt, Human herpesvirus 5
aggcgcuguacauucu

SEQ ID NO: 145170 - RNA, 16 nt, Human herpesvirus 5
aggcgcguaaaacucc

SEQ ID NO: 145171 - RNA, 18 nt, Human herpesvirus 5
aggcacaugaugcaaaua

SEQ ID NO: 145172 - RNA, 20 nt, Human herpesvirus 5
aggcauacggcguauacaau

SEQ ID NO: 145173 - RNA, 13 nt, Human herpesvirus 5
aggccagcugcca

SEQ ID NO: 145174 - RNA, 17 nt, Human herpesvirus 5
aggacuggaagugucac

SEQ ID NO: 145175 - RNA, 15 nt, Human herpesvirus 5
aggagacuaccucag

SEQ ID NO: 145176 - RNA, 23 nt, Human herpesvirus 5
aggacggacggagggucagggau

SEQ ID NO: 145177 - RNA, 19 nt, Human herpesvirus 5
aggacgucaaccacgucaa

SEQ ID NO: 145178 - RNA, 18 nt, Human herpesvirus 5
aggcaaacugaccaagcu

SEQ ID NO: 145179 - RNA, 19 nt, Human herpesvirus 5
aggcaaauauacuagggaa

SEQ ID NO: 145180 - RNA, 21 nt, Human herpesvirus 5
aggagcucacccggcugcugg

SEQ ID NO: 145181 - RNA, 17 nt, Human herpesvirus 5
agcucuugcgaggcuuu

SEQ ID NO: 145182 - RNA, 20 nt, Human herpesvirus 5
agcucuugcgaggcuuugau

SEQ ID NO: 145183 - RNA, 15 nt, Human herpesvirus 5
agcucuuagcgugug

SEQ ID NO: 145184 - RNA, 13 nt, Human herpesvirus 5
agcugaacaauaa

SEQ ID NO: 145185 - RNA, 15 nt, Human herpesvirus 5
agucaacacuaccaa

SEQ ID NO: 145186 - RNA, 16 nt, Human herpesvirus 5
agucaacacuaccaag

SEQ ID NO: 145187 - RNA, 13 nt, Human herpesvirus 5
agucaacauguag

SEQ ID NO: 145188 - RNA, 15 nt, Human herpesvirus 5
agucaacauguagaa

SEQ ID NO: 145189 - RNA, 20 nt, Human herpesvirus 5
agucaauaaagaaaaccaca

SEQ ID NO: 145190 - RNA, 22 nt, Human herpesvirus 5
aguacuaccguuaacuauucca

SEQ ID NO: 145191 - RNA, 16 nt, Human herpesvirus 5
aguauucuauugcgau

SEQ ID NO: 145192 - RNA, 11 nt, Human herpesvirus 5
aguaugugcuc

SEQ ID NO: 145193 - RNA, 23 nt, Human herpesvirus 5
agucaucucauuugcuuuuacaa

SEQ ID NO: 145194 - RNA, 18 nt, Human herpesvirus 5
agucaccguaaucaccaa

SEQ ID NO: 145195 - RNA, 17 nt, Human herpesvirus 5
agucagacccacuaccu

SEQ ID NO: 145196 - RNA, 22 nt, Human herpesvirus 5
agucgucguaguuguugcagaa

SEQ ID NO: 145197 - RNA, 21 nt, Human herpesvirus 5
agucgcucaucgucacgcuca

SEQ ID NO: 145198 - RNA, 16 nt, Human herpesvirus 5
agucggcuaacaaagc

SEQ ID NO: 145199 - RNA, 17 nt, Human herpesvirus 5
agucggcuaacaaagcc

SEQ ID NO: 145200 - RNA, 23 nt, Human herpesvirus 5
agucuagacaggguaacagccuu

SEQ ID NO: 145201 - RNA, 15 nt, Human herpesvirus 5
agucuacgaucgcug

SEQ ID NO: 145202 - RNA, 20 nt, Human herpesvirus 5
agucauagagccaacgagac

SEQ ID NO: 145203 - RNA, 19 nt, Human herpesvirus 5
aguccaacaucgugguauc

SEQ ID NO: 145204 - RNA, 14 nt, Human herpesvirus 5
aguccgucauggac

SEQ ID NO: 145205 - RNA, 20 nt, Human herpesvirus 5
aguccauacagcaacaccau

SEQ ID NO: 145206 - RNA, 10 nt, Human herpesvirus 5
aguccaccuc

SEQ ID NO: 145207 - RNA, 16 nt, Human herpesvirus 5
aguccaccucugcuac

SEQ ID NO: 145208 - RNA, 18 nt, Human herpesvirus 5
aguccauugucaguauuu

SEQ ID NO: 145209 - RNA, 14 nt, Human herpesvirus 5
aguaccagacaucc

SEQ ID NO: 145210 - RNA, 15 nt, Human herpesvirus 5
aguaccagacaucca

SEQ ID NO: 145211 - RNA, 17 nt, Human herpesvirus 5
aguacccaccgauggca

SEQ ID NO: 145212 - RNA, 21 nt, Human herpesvirus 5
aguacccauuacgugugucau

SEQ ID NO: 145213 - RNA, 18 nt, Human herpesvirus 5
aguaccccacgcauaaaa

SEQ ID NO: 145214 - RNA, 23 nt, Human herpesvirus 5
aguaccucuaacaacgucacuuc

SEQ ID NO: 145215 - RNA, 13 nt, Human herpesvirus 5
aguacaauacaaa

SEQ ID NO: 145216 - RNA, 22 nt, Human herpesvirus 5
aguacacugguauaaccaguca

SEQ ID NO: 145217 - RNA, 17 nt, Human herpesvirus 5
aguacaacaguuaucag

SEQ ID NO: 145218 - RNA, 16 nt, Human herpesvirus 5
aguaauggaaaguauc

SEQ ID NO: 145219 - RNA, 21 nt, Human herpesvirus 5
aguaauggaaaguaucgucac

SEQ ID NO: 145220 - RNA, 13 nt, Human herpesvirus 5
aguaauguauacu

SEQ ID NO: 145221 - RNA, 18 nt, Human herpesvirus 5
aggucgcccaggcucacg

SEQ ID NO: 145222 - RNA, 22 nt, Human herpesvirus 5
aggucgcgccgccgcagcaucc

SEQ ID NO: 145223 - RNA, 18 nt, Human herpesvirus 5
aggucggucgaugacgau

SEQ ID NO: 145224 - RNA, 20 nt, Human herpesvirus 5
agguaaagcccguggcccag

SEQ ID NO: 145225 - RNA, 20 nt, Human herpesvirus 5
agggcgacgguguuuuuaua

SEQ ID NO: 145226 - RNA, 14 nt, Human herpesvirus 5
agguaugugugaau

SEQ ID NO: 145227 - RNA, 21 nt, Human herpesvirus 5
agguacaugucccgcauauuu

SEQ ID NO: 145228 - RNA, 13 nt, Human herpesvirus 5
agguacgggucua

SEQ ID NO: 145229 - RNA, 19 nt, Human herpesvirus 5
agguagguggccaugauga

SEQ ID NO: 145230 - RNA, 22 nt, Human herpesvirus 5
auaaaacgugucgcacaaagaa

SEQ ID NO: 145231 - RNA, 14 nt, Human herpesvirus 5
auaaagaaugcaac

SEQ ID NO: 145232 - RNA, 18 nt, Human herpesvirus 5
auaaagacgucaaugaca

SEQ ID NO: 145233 - RNA, 19 nt, Human herpesvirus 5
auaaagacgucaaugacac

SEQ ID NO: 145234 - RNA, 20 nt, Human herpesvirus 5
auaaagacgucaaugacacc

SEQ ID NO: 145235 - RNA, 16 nt, Human herpesvirus 5
auaaagagauagacau

SEQ ID NO: 145236 - RNA, 18 nt, Human herpesvirus 5
agucuaucccuauggcac

SEQ ID NO: 145237 - RNA, 15 nt, Human herpesvirus 5
agucuauucucaaca

SEQ ID NO: 145238 - RNA, 19 nt, Human herpesvirus 5
agucugcaacaugcggcug

SEQ ID NO: 145239 - RNA, 16 nt, Human herpesvirus 5
agucugaaacggggug

SEQ ID NO: 145240 - RNA, 18 nt, Human herpesvirus 5
agucuguauauucagucc

SEQ ID NO: 145241 - RNA, 16 nt, Human herpesvirus 5
auaaagauucacuuaa

SEQ ID NO: 145242 - RNA, 15 nt, Human herpesvirus 5
auaaaucuacacuga

SEQ ID NO: 145243 - RNA, 16 nt, Human herpesvirus 5
auaaaugagaccccau

SEQ ID NO: 145244 - RNA, 14 nt, Human herpesvirus 5
auaaaucaccguga

SEQ ID NO: 145245 - RNA, 19 nt, Human herpesvirus 5
auaauugcacauccucacg

SEQ ID NO: 145246 - RNA, 11 nt, Human herpesvirus 5
auagaccccaa

SEQ ID NO: 145247 - RNA, 21 nt, Human herpesvirus 5
auagacgacuuuggugacuug

SEQ ID NO: 145248 - RNA, 16 nt, Human herpesvirus 5
auagaguuacaugcaa

SEQ ID NO: 145249 - RNA, 21 nt, Human herpesvirus 5
auagauacacguggcugcuuu

SEQ ID NO: 145250 - RNA, 16 nt, Human herpesvirus 5
auacuaaacucuguga

SEQ ID NO: 145251 - RNA, 17 nt, Human herpesvirus 5
auacuaaacucugugau

SEQ ID NO: 145252 - RNA, 21 nt, Human herpesvirus 5
auacuagggaaaacauaagaa

SEQ ID NO: 145253 - RNA, 13 nt, Human herpesvirus 5
auacuuaccaccg

SEQ ID NO: 145254 - RNA, 20 nt, Human herpesvirus 5
auacugcauccaucacauca

SEQ ID NO: 145255 - RNA, 23 nt, Human herpesvirus 5
auacuuuguaaucacgcuaugcg

SEQ ID NO: 145256 - RNA, 19 nt, Human herpesvirus 5
auacucgcuaaccacuacc

SEQ ID NO: 145257 - RNA, 17 nt, Human herpesvirus 5
auacugaaaaacuugaa

SEQ ID NO: 145258 - RNA, 18 nt, Human herpesvirus 5
auacaguugauaacaaac

SEQ ID NO: 145259 - RNA, 16 nt, Human herpesvirus 5
auacagauacgcaaug

SEQ ID NO: 145260 - RNA, 21 nt, Human herpesvirus 5
auacacccacguugcuagguc

SEQ ID NO: 145261 - RNA, 18 nt, Human herpesvirus 5
auacaaauaaaaaaagac

SEQ ID NO: 145262 - RNA, 22 nt, Human herpesvirus 5
auacaaaugaggcacaugaugc

SEQ ID NO: 145263 - RNA, 23 nt, Human herpesvirus 5
auacaaacguugagacuaccaca

SEQ ID NO: 145264 - RNA, 22 nt, Human herpesvirus 5
auacaagcuugguacacagcca

SEQ ID NO: 145265 - RNA, 16 nt, Human herpesvirus 5
auacaaugugcugcau

SEQ ID NO: 145266 - RNA, 18 nt, Human herpesvirus 5
auacgggagucuaccucc

SEQ ID NO: 145267 - RNA, 20 nt, Human herpesvirus 5
auacgcuagcagaagacuuu

SEQ ID NO: 145268 - RNA, 13 nt, Human herpesvirus 5
auacgcaguguug

SEQ ID NO: 145269 - RNA, 14 nt, Human herpesvirus 5
auacgacgauguuu

SEQ ID NO: 145270 - RNA, 19 nt, Human herpesvirus 5
auaccguaaacauaaugac

SEQ ID NO: 145271 - RNA, 19 nt, Human herpesvirus 5
auacauaugcgaugugcaa

SEQ ID NO: 145272 - RNA, 13 nt, Human herpesvirus 5
auaccaucaccua

SEQ ID NO: 145273 - RNA, 15 nt, Human herpesvirus 5
auaccaucaccuaua

SEQ ID NO: 145274 - RNA, 20 nt, Human herpesvirus 5
aucugguacuaucggcucaa

SEQ ID NO: 145275 - RNA, 13 nt, Human herpesvirus 5
aucuguacugcaa

SEQ ID NO: 145276 - RNA, 19 nt, Human herpesvirus 5
aucuguacugcaagacgca

SEQ ID NO: 145277 - RNA, 13 nt, Human herpesvirus 5
aucugucaccuca

SEQ ID NO: 145278 - RNA, 14 nt, Human herpesvirus 5
aucugucaccucac

SEQ ID NO: 145279 - RNA, 22 nt, Human herpesvirus 5
aucugcccuuuacggugcugcg

SEQ ID NO: 145280 - RNA, 13 nt, Human herpesvirus 5
aucugcaccucga

SEQ ID NO: 145281 - RNA, 12 nt, Human herpesvirus 5
aucucaucaagc

SEQ ID NO: 145282 - RNA, 18 nt, Human herpesvirus 5
aucucggcauaguggugu

SEQ ID NO: 145283 - RNA, 19 nt, Human herpesvirus 5
aucuccugagacacuugaa

SEQ ID NO: 145284 - RNA, 14 nt, Human herpesvirus 5
aucuccgguuucaa

SEQ ID NO: 145285 - RNA, 13 nt, Human herpesvirus 5
aucuauacauuga

SEQ ID NO: 145286 - RNA, 17 nt, Human herpesvirus 5
aucuaggugcugcaugu

SEQ ID NO: 145287 - RNA, 13 nt, Human herpesvirus 5
auccaauuacacc

SEQ ID NO: 145288 - RNA, 16 nt, Human herpesvirus 5
auccacaacgacaaau

SEQ ID NO: 145289 - RNA, 19 nt, Human herpesvirus 5
auccacgggccgcgcucca

SEQ ID NO: 145290 - RNA, 22 nt, Human herpesvirus 5
auccagacauuuuaucaguuac

SEQ ID NO: 145291 - RNA, 16 nt, Human herpesvirus 5
auccagguuauggaua

SEQ ID NO: 145292 - RNA, 23 nt, Human herpesvirus 5
auccaggacaaaaaguacacugg

SEQ ID NO: 145293 - RNA, 16 nt, Human herpesvirus 5
auccaguuucaccaag

SEQ ID NO: 145294 - RNA, 18 nt, Human herpesvirus 5
auccggcaacaucucuuc

SEQ ID NO: 145295 - RNA, 16 nt, Human herpesvirus 5
aucuacaacacuaccc

SEQ ID NO: 145296 - RNA, 20 nt, Human herpesvirus 5
aucuacaacacuacccucaa

SEQ ID NO: 145297 - RNA, 14 nt, Human herpesvirus 5
aucuacaacuuaac

SEQ ID NO: 145298 - RNA, 18 nt, Human herpesvirus 5
aucuacaacuuaaccaca

SEQ ID NO: 145299 - RNA, 12 nt, Human herpesvirus 5
aucuacagcaga

SEQ ID NO: 145300 - RNA, 17 nt, Human herpesvirus 5
aucuacaucaguuucca

SEQ ID NO: 145301 - RNA, 19 nt, Human herpesvirus 5
aucuaccagcccagggauc

SEQ ID NO: 145302 - RNA, 14 nt, Human herpesvirus 5
auccuguaaaaaua

SEQ ID NO: 145303 - RNA, 17 nt, Human herpesvirus 5
auccuguugaauaacac

SEQ ID NO: 145304 - RNA, 21 nt, Human herpesvirus 5
auccucgcccaggcugucaau

SEQ ID NO: 145305 - RNA, 21 nt, Human herpesvirus 5
auccucgggcuuuccggccaa

SEQ ID NO: 145306 - RNA, 18 nt, Human herpesvirus 5
auccucguggaaggcacc

SEQ ID NO: 145307 - RNA, 22 nt, Human herpesvirus 5
auaucuccgguuucaaacccac

SEQ ID NO: 145308 - RNA, 13 nt, Human herpesvirus 5
auagcaagccaga

SEQ ID NO: 145309 - RNA, 20 nt, Human herpesvirus 5
auaucuacgcaauguuacac

SEQ ID NO: 145310 - RNA, 23 nt, Human herpesvirus 5
auauuuuacagguauuccgaaac

SEQ ID NO: 145311 - RNA, 19 nt, Human herpesvirus 5
aucaaaccuguuccuguca

SEQ ID NO: 145312 - RNA, 20 nt, Human herpesvirus 5
auauugcuucguauacaaca

SEQ ID NO: 145313 - RNA, 22 nt, Human herpesvirus 5
aucauacauuguuucuuauuaa

SEQ ID NO: 145314 - RNA, 15 nt, Human herpesvirus 5
aucauaaagaaugca

SEQ ID NO: 145315 - RNA, 20 nt, Human herpesvirus 5
aucagaaagcugcaaucaaa

SEQ ID NO: 145316 - RNA, 19 nt, Human herpesvirus 5
aucaaugguggaaaccaga

SEQ ID NO: 145317 - RNA, 15 nt, Human herpesvirus 5
aucaauacaaugaca

SEQ ID NO: 145318 - RNA, 12 nt, Human herpesvirus 5
aucaacauacag

SEQ ID NO: 145319 - RNA, 14 nt, Human herpesvirus 5
aucaacgucucugu

SEQ ID NO: 145320 - RNA, 15 nt, Human herpesvirus 5
aucaacagcagcaac

SEQ ID NO: 145321 - RNA, 14 nt, Human herpesvirus 5
uuagacacacgggg

SEQ ID NO: 145322 - RNA, 14 nt, Human herpesvirus 5
uuagaaucucuugc

SEQ ID NO: 145323 - RNA, 20 nt, Human herpesvirus 5
uuauaacgacgccagugaua

SEQ ID NO: 145324 - RNA, 21 nt, Human herpesvirus 5
uuauaacggaaauuaugaacu

SEQ ID NO: 145325 - RNA, 15 nt, Human herpesvirus 5
uucaaacagcacauu

SEQ ID NO: 145326 - RNA, 22 nt, Human herpesvirus 5
uucaaaguccgucaugcuggca

SEQ ID NO: 145327 - RNA, 17 nt, Human herpesvirus 5
uucaaagggagccccau

SEQ ID NO: 145328 - RNA, 15 nt, Human herpesvirus 5
uuauuugcaucaugu

SEQ ID NO: 145329 - RNA, 20 nt, Human herpesvirus 5
uuacuccgugcgguucucaa

SEQ ID NO: 145330 - RNA, 19 nt, Human herpesvirus 5
uuacuacuucgauucucua

SEQ ID NO: 145331 - RNA, 16 nt, Human herpesvirus 5
uuacuguuauggaucc

SEQ ID NO: 145332 - RNA, 21 nt, Human herpesvirus 5
uuaaugugucgcuauacacca

SEQ ID NO: 145333 - RNA, 16 nt, Human herpesvirus 5
uuacaaaucacagucu

SEQ ID NO: 145334 - RNA, 13 nt, Human herpesvirus 5
uguuagacuagca

SEQ ID NO: 145335 - RNA, 22 nt, Human herpesvirus 5
uguuaccagaacucucugccac

SEQ ID NO: 145336 - RNA, 17 nt, Human herpesvirus 5
uguuagguucguuauaa

SEQ ID NO: 145337 - RNA, 13 nt, Human herpesvirus 5
uguuauacucugu

SEQ ID NO: 145338 - RNA, 18 nt, Human herpesvirus 5
uguuaucaucauggagcu

SEQ ID NO: 145339 - RNA, 16 nt, Human herpesvirus 5
uguuaaaaaaaccacg

SEQ ID NO: 145340 - RNA, 17 nt, Human herpesvirus 5
uguguuccacuccauca

SEQ ID NO: 145341 - RNA, 19 nt, Human herpesvirus 5
uguguuccacuccaucaca

SEQ ID NO: 145342 - RNA, 20 nt, Human herpesvirus 5
uguguuccacuccaucacac

SEQ ID NO: 145343 - RNA, 22 nt, Human herpesvirus 5
uguugacccagggcugcuccaa

SEQ ID NO: 145344 - RNA, 23 nt, Human herpesvirus 5
uguugacccagggcugcuccaac

SEQ ID NO: 145345 - RNA, 13 nt, Human herpesvirus 5
uguucuuacaguu

SEQ ID NO: 145346 - RNA, 12 nt, Human herpesvirus 5
uuaacaaccuau

SEQ ID NO: 145347 - RNA, 15 nt, Human herpesvirus 5
uguugcgaauucaua

SEQ ID NO: 145348 - RNA, 22 nt, Human herpesvirus 5
uguucuaugccgucuucacuac

SEQ ID NO: 145349 - RNA, 22 nt, Human herpesvirus 5
uguuguagcaacuggcaaaaag

SEQ ID NO: 145350 - RNA, 12 nt, Human herpesvirus 5
uguugcucuccu

SEQ ID NO: 145351 - RNA, 14 nt, Human herpesvirus 5
uuaaaaaaaccacg

SEQ ID NO: 145352 - RNA, 19 nt, Human herpesvirus 5
uguuuugcaccaugcagac

SEQ ID NO: 145353 - RNA, 22 nt, Human herpesvirus 5
uguuuucaccgacgugcuuaau

SEQ ID NO: 145354 - RNA, 16 nt, Human herpesvirus 5
uguuuucguguacuac

SEQ ID NO: 145355 - RNA, 16 nt, Human herpesvirus 5
uguguccgcccgagca

SEQ ID NO: 145356 - RNA, 21 nt, Human herpesvirus 5
uguguaaugcguacuucaugc

SEQ ID NO: 145357 - RNA, 18 nt, Human herpesvirus 5
uguguauggcccugaugg

SEQ ID NO: 145358 - RNA, 21 nt, Human herpesvirus 5
uguggugagaaugcuguuuaa

SEQ ID NO: 145359 - RNA, 19 nt, Human herpesvirus 5
ugugggggugcgggugguc

SEQ ID NO: 145360 - RNA, 16 nt, Human herpesvirus 5
uguggggcugcucaac

SEQ ID NO: 145361 - RNA, 15 nt, Human herpesvirus 5
uguggcaaagagcca

SEQ ID NO: 145362 - RNA, 23 nt, Human herpesvirus 5
uguggauagauuucugcguguac

SEQ ID NO: 145363 - RNA, 17 nt, Human herpesvirus 5
uguggaacuguugcgac

SEQ ID NO: 145364 - RNA, 22 nt, Human herpesvirus 5
ugugcgaauuaggcaacuauca

SEQ ID NO: 145365 - RNA, 21 nt, Human herpesvirus 5
ugugcgacgccaugcucaaga

SEQ ID NO: 145366 - RNA, 17 nt, Human herpesvirus 5
ugugcaaaaacuugucc

SEQ ID NO: 145367 - RNA, 19 nt, Human herpesvirus 5
ugugcacgcacgacaugac

SEQ ID NO: 145368 - RNA, 19 nt, Human herpesvirus 5
ugugaauugcgaagccagc

SEQ ID NO: 145369 - RNA, 16 nt, Human herpesvirus 5
ugugacguggauacua

SEQ ID NO: 145370 - RNA, 22 nt, Human herpesvirus 5
ugugaugaacgacacaugcaca

SEQ ID NO: 145371 - RNA, 20 nt, Human herpesvirus 5
uguacuggucuuuuggugga

SEQ ID NO: 145372 - RNA, 15 nt, Human herpesvirus 5
uguacgcauuacaca

SEQ ID NO: 145373 - RNA, 23 nt, Human herpesvirus 5
ugucagucucugaaggacagugu

SEQ ID NO: 145374 - RNA, 12 nt, Human herpesvirus 5
uguaauuauucc

SEQ ID NO: 145375 - RNA, 14 nt, Human herpesvirus 5
uguaaucauccuaa

SEQ ID NO: 145376 - RNA, 15 nt, Human herpesvirus 5
uguaaucauccuaau

SEQ ID NO: 145377 - RNA, 17 nt, Human herpesvirus 5
ugucgcgacacccgggu

SEQ ID NO: 145378 - RNA, 16 nt, Human herpesvirus 5
ugucgcgauagacaac

SEQ ID NO: 145379 - RNA, 22 nt, Human herpesvirus 5
ugucgcgauagacaacuccggu

SEQ ID NO: 145380 - RNA, 20 nt, Human herpesvirus 5
ugucgccgccgucaccaccg

SEQ ID NO: 145381 - RNA, 12 nt, Human herpesvirus 5
ugucccuacuca

SEQ ID NO: 145382 - RNA, 16 nt, Human herpesvirus 5
uguccuccgcacuucg

SEQ ID NO: 145383 - RNA, 16 nt, Human herpesvirus 5
uguccgaggaacuguu

SEQ ID NO: 145384 - RNA, 18 nt, Human herpesvirus 5
uggggcucaaaguucaaa

SEQ ID NO: 145385 - RNA, 23 nt, Human herpesvirus 5
uggggaucuacgcggguuccuca

SEQ ID NO: 145386 - RNA, 21 nt, Human herpesvirus 5
uggggaaguacaauaucaaag

SEQ ID NO: 145387 - RNA, 13 nt, Human herpesvirus 5
ugggcuacuuuga

SEQ ID NO: 145388 - RNA, 16 nt, Human herpesvirus 5
ugggcuaggauaauca

SEQ ID NO: 145389 - RNA, 21 nt, Human herpesvirus 5
ugggcucacgucacuacucug

SEQ ID NO: 145390 - RNA, 15 nt, Human herpesvirus 5
ugggcgaccgucucu

SEQ ID NO: 145391 - RNA, 17 nt, Human herpesvirus 5
uggaugagggcucuuca

SEQ ID NO: 145392 - RNA, 22 nt, Human herpesvirus 5
uggacaugcgcguguacuugcu

SEQ ID NO: 145393 - RNA, 16 nt, Human herpesvirus 5
uggugccccaggauga

SEQ ID NO: 145394 - RNA, 14 nt, Human herpesvirus 5
uggugacugagcac

SEQ ID NO: 145395 - RNA, 13 nt, Human herpesvirus 5
uggugacugggga

SEQ ID NO: 145396 - RNA, 17 nt, Human herpesvirus 5
uggugacuuacaucuca

SEQ ID NO: 145397 - RNA, 14 nt, Human herpesvirus 5
uggugugugucuau

SEQ ID NO: 145398 - RNA, 11 nt, Human herpesvirus 5
uguaagacaga

SEQ ID NO: 145399 - RNA, 22 nt, Human herpesvirus 5
uggucaauaacccacaccuaua

SEQ ID NO: 145400 - RNA, 22 nt, Human herpesvirus 5
uggucaagggucacggugccau

SEQ ID NO: 145401 - RNA, 14 nt, Human herpesvirus 5
uggucaacaccaug

SEQ ID NO: 145402 - RNA, 14 nt, Human herpesvirus 5
ugguaucuacauca

SEQ ID NO: 145403 - RNA, 16 nt, Human herpesvirus 5
ugguauaaccagucau

SEQ ID NO: 145404 - RNA, 18 nt, Human herpesvirus 5
ugguagacgaaagacaau

SEQ ID NO: 145405 - RNA, 23 nt, Human herpesvirus 5
uggucccggauaauuguccuucu

SEQ ID NO: 145406 - RNA, 13 nt, Human herpesvirus 5
uggucgaugcuga

SEQ ID NO: 145407 - RNA, 15 nt, Human herpesvirus 5
uggucgaugcugauc

SEQ ID NO: 145408 - RNA, 14 nt, Human herpesvirus 5
ugguccacuccgua

SEQ ID NO: 145409 - RNA, 24 nt, Human herpesvirus 5
uggucuuuuuaaggagcucugaaa

SEQ ID NO: 145410 - RNA, 23 nt, Human herpesvirus 5
ugccccacucgcucgcuugugua

SEQ ID NO: 145411 - RNA, 16 nt, Human herpesvirus 5
ugccgaagaccucacc

SEQ ID NO: 145412 - RNA, 19 nt, Human herpesvirus 5
ugcccuuuacggugcugcg

SEQ ID NO: 145413 - RNA, 18 nt, Human herpesvirus 5
ugcgaacgucaccggaga

SEQ ID NO: 145414 - RNA, 20 nt, Human herpesvirus 5
ugcgaacgucaccggagacc

SEQ ID NO: 145415 - RNA, 24 nt, Human herpesvirus 5
ugcccaucgucugcauguucauca

SEQ ID NO: 145416 - RNA, 21 nt, Human herpesvirus 5
ugcccauacuuuuacaugaac

SEQ ID NO: 145417 - RNA, 15 nt, Human herpesvirus 5
ugccauggaccugac

SEQ ID NO: 145418 - RNA, 14 nt, Human herpesvirus 5
ugcacgcgcugcuu

SEQ ID NO: 145419 - RNA, 14 nt, Human herpesvirus 5
ugcacgacaucuuc

SEQ ID NO: 145420 - RNA, 17 nt, Human herpesvirus 5
ugcaccgcggcaccuac

SEQ ID NO: 145421 - RNA, 22 nt, Human herpesvirus 5
ugcacaauacgauaauugcuac

SEQ ID NO: 145422 - RNA, 19 nt, Human herpesvirus 5
ugcacaaaagguaugugug

SEQ ID NO: 145423 - RNA, 18 nt, Human herpesvirus 5
ugcauagaguuacaugca

SEQ ID NO: 145424 - RNA, 19 nt, Human herpesvirus 5
ugcauagaguuacaugcaa

SEQ ID NO: 145425 - RNA, 19 nt, Human herpesvirus 5
ugccaauuuuuucgcugcc

SEQ ID NO: 145426 - RNA, 20 nt, Human herpesvirus 5
ugccaauuuuuucgcugcca

SEQ ID NO: 145427 - RNA, 21 nt, Human herpesvirus 5
ugcauauuuguuuucagucag

SEQ ID NO: 145428 - RNA, 23 nt, Human herpesvirus 5
ugcauaucgaucuauacauugaa

SEQ ID NO: 145429 - RNA, 13 nt, Human herpesvirus 5
ugcuaauauaucc

SEQ ID NO: 145430 - RNA, 16 nt, Human herpesvirus 5
ugcuaauuauugccau

SEQ ID NO: 145431 - RNA, 13 nt, Human herpesvirus 5
ugcucgagaccga

SEQ ID NO: 145432 - RNA, 22 nt, Human herpesvirus 5
ugcucgagcgagagcacugaca

SEQ ID NO: 145433 - RNA, 15 nt, Human herpesvirus 5
ugcguguguguuucu

SEQ ID NO: 145434 - RNA, 21 nt, Human herpesvirus 5
ugcguggaaaauugcaacuua

SEQ ID NO: 145435 - RNA, 19 nt, Human herpesvirus 5
ugcggcuucucuuucucac

SEQ ID NO: 145436 - RNA, 20 nt, Human herpesvirus 5
ugcgguuaacccuagcaacg

SEQ ID NO: 145437 - RNA, 17 nt, Human herpesvirus 5
ugcggucgcuucuugcg

SEQ ID NO: 145438 - RNA, 13 nt, Human herpesvirus 5
ugcgcaucuugcc

SEQ ID NO: 145439 - RNA, 20 nt, Human herpesvirus 5
ugcggcguucgcgugcacgc

SEQ ID NO: 145440 - RNA, 19 nt, Human herpesvirus 5
ugcgguaaaaccacgucaa

SEQ ID NO: 145441 - RNA, 23 nt, Human herpesvirus 5
ugcgaagccagcuacagccacga

SEQ ID NO: 145442 - RNA, 15 nt, Human herpesvirus 5
ugcgaaguguugacc

SEQ ID NO: 145443 - RNA, 20 nt, Human herpesvirus 5
ugcgaauuaggcaacuauca

SEQ ID NO: 145444 - RNA, 19 nt, Human herpesvirus 5
ugcgacgccaugcucaaga

SEQ ID NO: 145445 - RNA, 19 nt, Human herpesvirus 5
ugcgacggcggguggagau

SEQ ID NO: 145446 - RNA, 13 nt, Human herpesvirus 5
ugcgaugugcaau

SEQ ID NO: 145447 - RNA, 20 nt, Human herpesvirus 5
ugcuuuaacccaaaaccaug

SEQ ID NO: 145448 - RNA, 22 nt, Human herpesvirus 5
ugcuuuaacccaaaaccaugcu

SEQ ID NO: 145449 - RNA, 24 nt, Human herpesvirus 5
ugcuuucgcacgcaccugugugau

SEQ ID NO: 145450 - RNA, 17 nt, Human herpesvirus 5
uggaagcugcugguggu

SEQ ID NO: 145451 - RNA, 14 nt, Human herpesvirus 5
ugcuuucuuuuugc

SEQ ID NO: 145452 - RNA, 14 nt, Human herpesvirus 5
uggaaucggguggu

SEQ ID NO: 145453 - RNA, 16 nt, Human herpesvirus 5
uggacaauacaucaua

SEQ ID NO: 145454 - RNA, 14 nt, Human herpesvirus 5
uggaauccaucauc

SEQ ID NO: 145455 - RNA, 12 nt, Human herpesvirus 5
uggaaguggaag

SEQ ID NO: 145456 - RNA, 14 nt, Human herpesvirus 5
uggaaguaacauca

SEQ ID NO: 145457 - RNA, 15 nt, Human herpesvirus 5
uggaaguaacaucau

SEQ ID NO: 145458 - RNA, 21 nt, Human herpesvirus 5
ugcugaugccgaucaugugcu

SEQ ID NO: 145459 - RNA, 14 nt, Human herpesvirus 5
ugcugcacgggcuc

SEQ ID NO: 145460 - RNA, 14 nt, Human herpesvirus 5
ugcuucguauacaa

SEQ ID NO: 145461 - RNA, 17 nt, Human herpesvirus 5
ugcuucguauacaacag

SEQ ID NO: 145462 - RNA, 18 nt, Human herpesvirus 5
ugaggcacaugaugcaaa

SEQ ID NO: 145463 - RNA, 21 nt, Human herpesvirus 5
ugaggaggguggugacuuaca

SEQ ID NO: 145464 - RNA, 21 nt, Human herpesvirus 5
ugaguaccccacgcauaaaau

SEQ ID NO: 145465 - RNA, 21 nt, Human herpesvirus 5
ugaggcggcguggacugggac

SEQ ID NO: 145466 - RNA, 19 nt, Human herpesvirus 5
ugaggcucucggaucugcg

SEQ ID NO: 145467 - RNA, 23 nt, Human herpesvirus 5
ugaguacacgcaggcaagccaaa

SEQ ID NO: 145468 - RNA, 17 nt, Human herpesvirus 5
ugauaacaaacaaugac

SEQ ID NO: 145469 - RNA, 18 nt, Human herpesvirus 5
ugauaacaaacaaugaca

SEQ ID NO: 145470 - RNA, 22 nt, Human herpesvirus 5
ugauaacaaacaaugacacucg

SEQ ID NO: 145471 - RNA, 21 nt, Human herpesvirus 5
ugauacagggcgaaaggcacc

SEQ ID NO: 145472 - RNA, 17 nt, Human herpesvirus 5
ugauacaacguggcgau

SEQ ID NO: 145473 - RNA, 22 nt, Human herpesvirus 5
ugagaagcacggagacugcggu

SEQ ID NO: 145474 - RNA, 15 nt, Human herpesvirus 5
ugagaacauguggaa

SEQ ID NO: 145475 - RNA, 18 nt, Human herpesvirus 5
ugaaaaguagcaccacaa

SEQ ID NO: 145476 - RNA, 20 nt, Human herpesvirus 5
ucuuugcuuaucugccucuu

SEQ ID NO: 145477 - RNA, 14 nt, Human herpesvirus 5
ucuuuuaugaugcu

SEQ ID NO: 145478 - RNA, 19 nt, Human herpesvirus 5
ugaaaaacaucuuaagaaa

SEQ ID NO: 145479 - RNA, 21 nt, Human herpesvirus 5
ucuuuuucuucacgccccuga

SEQ ID NO: 145480 - RNA, 16 nt, Human herpesvirus 5
ugagacugguggugag

SEQ ID NO: 145481 - RNA, 13 nt, Human herpesvirus 5
ugagacagccaca

SEQ ID NO: 145482 - RNA, 15 nt, Human herpesvirus 5
ugagacacuugaaua

SEQ ID NO: 145483 - RNA, 15 nt, Human herpesvirus 5
ugagcgacagcagca

SEQ ID NO: 145484 - RNA, 21 nt, Human herpesvirus 5
ugagccugaaguaagcauggc

SEQ ID NO: 145485 - RNA, 20 nt, Human herpesvirus 5
ugagcaggguaaaaaccacg

SEQ ID NO: 145486 - RNA, 19 nt, Human herpesvirus 5
ugagaguggugggaaugca

SEQ ID NO: 145487 - RNA, 20 nt, Human herpesvirus 5
ugcaacuuaacgcgcaagug

SEQ ID NO: 145488 - RNA, 20 nt, Human herpesvirus 5
ugcaacuucuucuacucaca

SEQ ID NO: 145489 - RNA, 23 nt, Human herpesvirus 5
ugcaagacgcaugauuagcaaua

SEQ ID NO: 145490 - RNA, 19 nt, Human herpesvirus 5
ugcaagacuacaugcuaua

SEQ ID NO: 145491 - RNA, 16 nt, Human herpesvirus 5
ugcaaugcaacacuaa

SEQ ID NO: 145492 - RNA, 18 nt, Human herpesvirus 5
ugcaaagucaacauguag

SEQ ID NO: 145493 - RNA, 15 nt, Human herpesvirus 5
ugcaaaguuauccug

SEQ ID NO: 145494 - RNA, 17 nt, Human herpesvirus 5
ugcaacgccuggcguga

SEQ ID NO: 145495 - RNA, 22 nt, Human herpesvirus 5
ugcaacgcgcccgacagcugca

SEQ ID NO: 145496 - RNA, 16 nt, Human herpesvirus 5
ugcaacggcaucaugu

SEQ ID NO: 145497 - RNA, 17 nt, Human herpesvirus 5
ugauuucaacaaauacc

SEQ ID NO: 145498 - RNA, 18 nt, Human herpesvirus 5
ugauuuacgaggucugca

SEQ ID NO: 145499 - RNA, 13 nt, Human herpesvirus 5
ugauuuugauggu

SEQ ID NO: 145500 - RNA, 23 nt, Human herpesvirus 5
ugauucuggaauccaucaucuac

SEQ ID NO: 145501 - RNA, 13 nt, Human herpesvirus 5
ugauugcaugaaa

SEQ ID NO: 145502 - RNA, 21 nt, Human herpesvirus 5
ugaucauggagccgcaagugc

SEQ ID NO: 145503 - RNA, 17 nt, Human herpesvirus 5
ugauccaguugcaccuc

SEQ ID NO: 145504 - RNA, 21 nt, Human herpesvirus 5
ugaucacggacacgacgagua

SEQ ID NO: 145505 - RNA, 22 nt, Human herpesvirus 5
ugaugugcuuuuuaucagggag

SEQ ID NO: 145506 - RNA, 13 nt, Human herpesvirus 5
ugaucugucauca

SEQ ID NO: 145507 - RNA, 18 nt, Human herpesvirus 5
ugaugaacgacacaugca

SEQ ID NO: 145508 - RNA, 17 nt, Human herpesvirus 5
ugaugacaauguggugu

SEQ ID NO: 145509 - RNA, 12 nt, Human herpesvirus 5
ugaugacgguga

SEQ ID NO: 145510 - RNA, 22 nt, Human herpesvirus 5
aaggguguugugcgugaugauu

SEQ ID NO: 145511 - RNA, 15 nt, Human herpesvirus 5
aaggucaaaaccuca

SEQ ID NO: 145512 - RNA, 15 nt, Human herpesvirus 5
aaggucaacuacagc

SEQ ID NO: 145513 - RNA, 18 nt, Human herpesvirus 5
aagguacgggucuaccaa

SEQ ID NO: 145514 - RNA, 17 nt, Human herpesvirus 5
aagguacuuuaccuagc

SEQ ID NO: 145515 - RNA, 18 nt, Human herpesvirus 5
aagguggugaacugugau

SEQ ID NO: 145516 - RNA, 16 nt, Human herpesvirus 5
aagguaugugugaaug

SEQ ID NO: 145517 - RNA, 14 nt, Human herpesvirus 5
aagugacguggaua

SEQ ID NO: 145518 - RNA, 16 nt, Human herpesvirus 5
aagucuugccgugacg

SEQ ID NO: 145519 - RNA, 15 nt, Human herpesvirus 5
aagucucuuucucug

SEQ ID NO: 145520 - RNA, 21 nt, Human herpesvirus 5
aagucuguauauucaguccau

SEQ ID NO: 145521 - RNA, 14 nt, Human herpesvirus 5
aagguucuccauca

SEQ ID NO: 145522 - RNA, 20 nt, Human herpesvirus 5
aagguguggcggcagcggaa

SEQ ID NO: 145523 - RNA, 15 nt, Human herpesvirus 5
aagguuuugugccaa

SEQ ID NO: 145524 - RNA, 14 nt, Human herpesvirus 5
aaguccuccaacuc

SEQ ID NO: 145525 - RNA, 21 nt, Human herpesvirus 5
aaguaagcauggcuuacauuu

SEQ ID NO: 145526 - RNA, 18 nt, Human herpesvirus 5
aagcauggcuuacauuua

SEQ ID NO: 145527 - RNA, 15 nt, Human herpesvirus 5
aagcacuaccagcug

SEQ ID NO: 145528 - RNA, 14 nt, Human herpesvirus 5
aagcacuucagaau

SEQ ID NO: 145529 - RNA, 13 nt, Human herpesvirus 5
aaggaaaaaacac

SEQ ID NO: 145530 - RNA, 21 nt, Human herpesvirus 5
aagcuggacagugagagcuca

SEQ ID NO: 145531 - RNA, 17 nt, Human herpesvirus 5
aagcccccacgacuguu

SEQ ID NO: 145532 - RNA, 18 nt, Human herpesvirus 5
aagccagauacuauacga

SEQ ID NO: 145533 - RNA, 20 nt, Human herpesvirus 5
aagccagcuacagccacgac

SEQ ID NO: 145534 - RNA, 14 nt, Human herpesvirus 5
aagccguacaagac

SEQ ID NO: 145535 - RNA, 15 nt, Human herpesvirus 5
aagccgccaauacag

SEQ ID NO: 145536 - RNA, 20 nt, Human herpesvirus 5
aagccgccagcggaagcuuu

SEQ ID NO: 145537 - RNA, 16 nt, Human herpesvirus 5
aagcccuacuuugugu

SEQ ID NO: 145538 - RNA, 17 nt, Human herpesvirus 5
aagccgacaaccugcug

SEQ ID NO: 145539 - RNA, 17 nt, Human herpesvirus 5
aagccgacgucccugau

SEQ ID NO: 145540 - RNA, 13 nt, Human herpesvirus 5
aauagauagcaag

SEQ ID NO: 145541 - RNA, 13 nt, Human herpesvirus 5
aauaguguccugu

SEQ ID NO: 145542 - RNA, 13 nt, Human herpesvirus 5
aauacugcaucca

SEQ ID NO: 145543 - RNA, 17 nt, Human herpesvirus 5
aauacugcauccaucac

SEQ ID NO: 145544 - RNA, 14 nt, Human herpesvirus 5
aauacuuaggggca

SEQ ID NO: 145545 - RNA, 12 nt, Human herpesvirus 5
aauaaaguacac

SEQ ID NO: 145546 - RNA, 13 nt, Human herpesvirus 5
aauaaaguacacg

SEQ ID NO: 145547 - RNA, 16 nt, Human herpesvirus 5
aauaaauacagggaau

SEQ ID NO: 145548 - RNA, 17 nt, Human herpesvirus 5
aauacugcuauguauca

SEQ ID NO: 145549 - RNA, 19 nt, Human herpesvirus 5
aauagaauacugcuaugua

SEQ ID NO: 145550 - RNA, 13 nt, Human herpesvirus 5
aauagacacaccg

SEQ ID NO: 145551 - RNA, 21 nt, Human herpesvirus 5
aagugccugcacgaccugcuc

SEQ ID NO: 145552 - RNA, 16 nt, Human herpesvirus 5
aauaaaagcacuucag

SEQ ID NO: 145553 - RNA, 14 nt, Human herpesvirus 5
aauaaaaaccaccg

SEQ ID NO: 145554 - RNA, 18 nt, Human herpesvirus 5
aauaaaaaaagacacuca

SEQ ID NO: 145555 - RNA, 15 nt, Human herpesvirus 5
aauaaaaacacagag

SEQ ID NO: 145556 - RNA, 12 nt, Human herpesvirus 5
aauaaacaguac

SEQ ID NO: 145557 - RNA, 19 nt, Human herpesvirus 5
aauaaacauacuuguuuca

SEQ ID NO: 145558 - RNA, 19 nt, Human herpesvirus 5
aauaaacuaaaacauucug

SEQ ID NO: 145559 - RNA, 15 nt, Human herpesvirus 5
aauaaagaaaaccac

SEQ ID NO: 145560 - RNA, 19 nt, Human herpesvirus 5
aauaaagauaaucugccaa

SEQ ID NO: 145561 - RNA, 19 nt, Human herpesvirus 5
aauaaagcuuucuuucuca

SEQ ID NO: 145562 - RNA, 14 nt, Human herpesvirus 5
aaucaagccuguua

SEQ ID NO: 145563 - RNA, 13 nt, Human herpesvirus 5
aauccaucaucua

SEQ ID NO: 145564 - RNA, 12 nt, Human herpesvirus 5
aacucacuguuu

SEQ ID NO: 145565 - RNA, 12 nt, Human herpesvirus 5
aacgugcugcug

SEQ ID NO: 145566 - RNA, 19 nt, Human herpesvirus 5
aacguucuguaaucuucca

SEQ ID NO: 145567 - RNA, 14 nt, Human herpesvirus 5
aacgucaugcauuc

SEQ ID NO: 145568 - RNA, 14 nt, Human herpesvirus 5
aacgucacuucaac

SEQ ID NO: 145569 - RNA, 19 nt, Human herpesvirus 5
aacggccgccgcagccacg

SEQ ID NO: 145570 - RNA, 16 nt, Human herpesvirus 5
aacgcgguacaugugc

SEQ ID NO: 145571 - RNA, 20 nt, Human herpesvirus 5
aacgcuuuaagcugcucaug

SEQ ID NO: 145572 - RNA, 19 nt, Human herpesvirus 5
aacgcucgugagcaacagu

SEQ ID NO: 145573 - RNA, 22 nt, Human herpesvirus 5
aacgcucucgucaggcuuguca

SEQ ID NO: 145574 - RNA, 18 nt, Human herpesvirus 5
uuuuuguuaacaaccuau

SEQ ID NO: 145575 - RNA, 21 nt, Human herpesvirus 5
uuuuucggccgcggaggugcu

SEQ ID NO: 145576 - RNA, 16 nt, Human herpesvirus 5
aacauacaguacaaca

SEQ ID NO: 145577 - RNA, 19 nt, Human herpesvirus 5
aacaucguggcgcacaccu

SEQ ID NO: 145578 - RNA, 17 nt, Human herpesvirus 5
aacaucauaaaaaccau

SEQ ID NO: 145579 - RNA, 22 nt, Human herpesvirus 5
aacaucauaaaaaccauugaga

SEQ ID NO: 145580 - RNA, 14 nt, Human herpesvirus 5
aacgccaccaagga

SEQ ID NO: 145581 - RNA, 16 nt, Human herpesvirus 5
aacgcgcaagugccug

SEQ ID NO: 145582 - RNA, 23 nt, Human herpesvirus 5
aacgacaccucccuaacuaucua

SEQ ID NO: 145583 - RNA, 16 nt, Human herpesvirus 5
aacaugcccagcaucu

SEQ ID NO: 145584 - RNA, 15 nt, Human herpesvirus 5
aacgagugugccucg

SEQ ID NO: 145585 - RNA, 12 nt, Human herpesvirus 5
aagagcuuugac

SEQ ID NO: 145586 - RNA, 14 nt, Human herpesvirus 5
aagaggacaccuca

SEQ ID NO: 145587 - RNA, 16 nt, Human herpesvirus 5
aagagcguacagucca

SEQ ID NO: 145588 - RNA, 17 nt, Human herpesvirus 5
aagcaccguggggucau

SEQ ID NO: 145589 - RNA, 22 nt, Human herpesvirus 5
aagauugggggggaacgugugu

SEQ ID NO: 145590 - RNA, 20 nt, Human herpesvirus 5
aagaugccgaugugugacua

SEQ ID NO: 145591 - RNA, 21 nt, Human herpesvirus 5
aagacaucgucacaccuauca

SEQ ID NO: 145592 - RNA, 21 nt, Human herpesvirus 5
aagacggcuauccagcagcug

SEQ ID NO: 145593 - RNA, 22 nt, Human herpesvirus 5
aagacgggacggcugccucuca

SEQ ID NO: 145594 - RNA, 16 nt, Human herpesvirus 5
aagacgucaaugacac

SEQ ID NO: 145595 - RNA, 14 nt, Human herpesvirus 5
aagacuuaccaccu

SEQ ID NO: 145596 - RNA, 18 nt, Human herpesvirus 5
aacuuucggguugaucua

SEQ ID NO: 145597 - RNA, 16 nt, Human herpesvirus 5
aacuuugacgugcuca

SEQ ID NO: 145598 - RNA, 11 nt, Human herpesvirus 5
aacuucugucu

SEQ ID NO: 145599 - RNA, 21 nt, Human herpesvirus 5
aacuugaagaaauagauagca

SEQ ID NO: 145600 - RNA, 16 nt, Human herpesvirus 5
aacuucuaccaucucc

SEQ ID NO: 145601 - RNA, 14 nt, Human herpesvirus 5
aacuuaugugaaua

SEQ ID NO: 145602 - RNA, 18 nt, Human herpesvirus 5
uucacgcguagccuccuc

SEQ ID NO: 145603 - RNA, 15 nt, Human herpesvirus 5
uucagcuggcuuuca

SEQ ID NO: 145604 - RNA, 19 nt, Human herpesvirus 5
uucagcguaugguuaugac

SEQ ID NO: 145605 - RNA, 17 nt, Human herpesvirus 5
uucacgugcggcugugu

SEQ ID NO: 145606 - RNA, 20 nt, Human herpesvirus 5
uucagaaucuauaaauugcu

SEQ ID NO: 145607 - RNA, 15 nt, Human herpesvirus 5
uucagaccgcaacaa

SEQ ID NO: 145608 - RNA, 22 nt, Human herpesvirus 5
uucagaccgcaacaacagcagc

SEQ ID NO: 145609 - RNA, 15 nt, Human herpesvirus 5
uugaacguaauauca

SEQ ID NO: 145610 - RNA, 21 nt, Human herpesvirus 5
uugauuucaacaaauaccaac

SEQ ID NO: 145611 - RNA, 13 nt, Human herpesvirus 5
uugauuucucaag

SEQ ID NO: 145612 - RNA, 12 nt, Human herpesvirus 5
uugagacuacca

SEQ ID NO: 145613 - RNA, 22 nt, Human herpesvirus 5
uugagcgagaacuaauauugca

SEQ ID NO: 145614 - RNA, 16 nt, Human herpesvirus 5
uugagcacaaacugcg

SEQ ID NO: 145615 - RNA, 17 nt, Human herpesvirus 5
uugagcacaaacugcga

SEQ ID NO: 145616 - RNA, 20 nt, Human herpesvirus 5
uugagcaggguaaaaaccac

SEQ ID NO: 145617 - RNA, 22 nt, Human herpesvirus 5
uugacgcacuuuuuuuacuagu

SEQ ID NO: 145618 - RNA, 16 nt, Human herpesvirus 5
uugacucgcgugccaa

SEQ ID NO: 145619 - RNA, 22 nt, Human herpesvirus 5
aacacaucaacgacgccacaca

SEQ ID NO: 145620 - RNA, 21 nt, Human herpesvirus 5
aacaccggucugugaucugca

SEQ ID NO: 145621 - RNA, 13 nt, Human herpesvirus 5
aacaccgucacgu

SEQ ID NO: 145622 - RNA, 13 nt, Human herpesvirus 5
aacaccauuggaa

SEQ ID NO: 145623 - RNA, 23 nt, Human herpesvirus 5
aacaccauuggaaguaacaucau

SEQ ID NO: 145624 - RNA, 21 nt, Human herpesvirus 5
aacacugaaaacaccauugga

SEQ ID NO: 145625 - RNA, 22 nt, Human herpesvirus 5
aacacgcgggggaaaaacaaag

SEQ ID NO: 145626 - RNA, 17 nt, Human herpesvirus 5
aacacgguggcuuucug

SEQ ID NO: 145627 - RNA, 18 nt, Human herpesvirus 5
uugcagaucgugccgcga

SEQ ID NO: 145628 - RNA, 19 nt, Human herpesvirus 5
uugcaacgcgcccgacagc

SEQ ID NO: 145629 - RNA, 23 nt, Human herpesvirus 5
uugcaaacgguacgcagucacug

SEQ ID NO: 145630 - RNA, 16 nt, Human herpesvirus 5
uugccagucgcacuaa

SEQ ID NO: 145631 - RNA, 22 nt, Human herpesvirus 5
uugcccuucuggagcacacugc

SEQ ID NO: 145632 - RNA, 22 nt, Human herpesvirus 5
uugcuugcccggcgucacacgg

SEQ ID NO: 145633 - RNA, 16 nt, Human herpesvirus 5
uuggaagccgaugcaa

SEQ ID NO: 145634 - RNA, 20 nt, Human herpesvirus 5
uuggaaguaacaucauaaaa

SEQ ID NO: 145635 - RNA, 14 nt, Human herpesvirus 5
uuggcauauagcca

SEQ ID NO: 145636 - RNA, 14 nt, Human herpesvirus 5
uuggacugguacau

SEQ ID NO: 145637 - RNA, 18 nt, Human herpesvirus 5
uuggagacacaacguuau

SEQ ID NO: 145638 - RNA, 14 nt, Human herpesvirus 5
uugcucuacugcaa

SEQ ID NO: 145639 - RNA, 13 nt, Human herpesvirus 5
uugcgaacgucac

SEQ ID NO: 145640 - RNA, 22 nt, Human herpesvirus 5
uugccgcuggacugacacagcu

SEQ ID NO: 145641 - RNA, 18 nt, Human herpesvirus 5
uugccggguaccuaaagc

SEQ ID NO: 145642 - RNA, 13 nt, Human herpesvirus 5
uuugggucuuuuc

SEQ ID NO: 145643 - RNA, 15 nt, Human herpesvirus 5
uuugguugggguucc

SEQ ID NO: 145644 - RNA, 23 nt, Human herpesvirus 5
uuugguggagguggagcuaauag

SEQ ID NO: 145645 - RNA, 13 nt, Human herpesvirus 5
uuuggaccuggag

SEQ ID NO: 145646 - RNA, 14 nt, Human herpesvirus 5
uuucuccgugugua

SEQ ID NO: 145647 - RNA, 12 nt, Human herpesvirus 5
uuucucaccagc

SEQ ID NO: 145648 - RNA, 16 nt, Human herpesvirus 5
uuucuacgugcggcaa

SEQ ID NO: 145649 - RNA, 12 nt, Human herpesvirus 5
uuucuacuccau

SEQ ID NO: 145650 - RNA, 21 nt, Human herpesvirus 5
uuucgcggcgagguggucaac

SEQ ID NO: 145651 - RNA, 21 nt, Human herpesvirus 5
uuucagaccgcaacaacagca

SEQ ID NO: 145652 - RNA, 12 nt, Human herpesvirus 5
uuuuacuaguau

SEQ ID NO: 145653 - RNA, 21 nt, Human herpesvirus 5
uuuuacuaguauccacgucac

SEQ ID NO: 145654 - RNA, 18 nt, Human herpesvirus 5
uuugguuucguuuucaaa

SEQ ID NO: 145655 - RNA, 21 nt, Human herpesvirus 5
uuuuauaaaagagcgucucga

SEQ ID NO: 145656 - RNA, 13 nt, Human herpesvirus 5
aacaguacuacua

SEQ ID NO: 145657 - RNA, 12 nt, Human herpesvirus 5
aacagugugguu

SEQ ID NO: 145658 - RNA, 19 nt, Human herpesvirus 5
aacaguuaucagcaauaaa

SEQ ID NO: 145659 - RNA, 21 nt, Human herpesvirus 5
aacaguuuacgaguacaaaac

SEQ ID NO: 145660 - RNA, 21 nt, Human herpesvirus 5
aacagcggcggcgguggugac

SEQ ID NO: 145661 - RNA, 23 nt, Human herpesvirus 5
aacagcgggucaagacgcugaau

SEQ ID NO: 145662 - RNA, 17 nt, Human herpesvirus 5
uuuucaugguauaaaga

SEQ ID NO: 145663 - RNA, 16 nt, Human herpesvirus 5
uuuucaugaauccaca

SEQ ID NO: 145664 - RNA, 16 nt, Human herpesvirus 5
uuuucaugucuuacaa

SEQ ID NO: 145665 - RNA, 23 nt, Human herpesvirus 5
uugggcauacgcgauaucuggcg

SEQ ID NO: 145666 - RNA, 15 nt, Human herpesvirus 5
uugguacacagccaa

SEQ ID NO: 145667 - RNA, 16 nt, Human herpesvirus 5
uuguacccucacgguc

SEQ ID NO: 145668 - RNA, 22 nt, Human herpesvirus 5
uuguaauaaaguacacgccaca

SEQ ID NO: 145669 - RNA, 22 nt, Human herpesvirus 5
uuguauacucuauauuauacuc

SEQ ID NO: 145670 - RNA, 17 nt, Human herpesvirus 5
uuguggggcugcucaac

SEQ ID NO: 145671 - RNA, 15 nt, Human herpesvirus 5
uugugguggcuggga

SEQ ID NO: 145672 - RNA, 17 nt, Human herpesvirus 5
uuuacaauaaagagaua

SEQ ID NO: 145673 - RNA, 13 nt, Human herpesvirus 5
uuguguguacgac

SEQ ID NO: 145674 - RNA, 15 nt, Human herpesvirus 5
uuguuaacaaccuau

SEQ ID NO: 145675 - RNA, 12 nt, Human herpesvirus 5
uuguuaccagaa

SEQ ID NO: 145676 - RNA, 18 nt, Human herpesvirus 5
uuuauuuuucagcucacu

SEQ ID NO: 145677 - RNA, 16 nt, Human herpesvirus 5
uuuacuaguauccacg

SEQ ID NO: 145678 - RNA, 18 nt, Human herpesvirus 5
uuuacuaguauccacguc

SEQ ID NO: 145679 - RNA, 20 nt, Human herpesvirus 5
uuuacuaguauccacgucac

SEQ ID NO: 145680 - RNA, 18 nt, Human herpesvirus 5
uuuaccgaggagauccag

SEQ ID NO: 145681 - RNA, 19 nt, Human herpesvirus 5
uacgauuucaaaaugugca

SEQ ID NO: 145682 - RNA, 13 nt, Human herpesvirus 5
uaccuucuugccc

SEQ ID NO: 145683 - RNA, 16 nt, Human herpesvirus 5
uacgcgaccagcugcu

SEQ ID NO: 145684 - RNA, 15 nt, Human herpesvirus 5
uacgccggugcugcc

SEQ ID NO: 145685 - RNA, 22 nt, Human herpesvirus 5
uaccuccgacuugaguacuuuc

SEQ ID NO: 145686 - RNA, 23 nt, Human herpesvirus 5
uaccucguccgccuccacuuccg

SEQ ID NO: 145687 - RNA, 20 nt, Human herpesvirus 5
uacgaacccgugccacggaa

SEQ ID NO: 145688 - RNA, 21 nt, Human herpesvirus 5
uacgacccuccuaaaccuggu

SEQ ID NO: 145689 - RNA, 20 nt, Human herpesvirus 5
uaccuagaugcuagcaauaa

SEQ ID NO: 145690 - RNA, 13 nt, Human herpesvirus 5
uacauucaauaca

SEQ ID NO: 145691 - RNA, 21 nt, Human herpesvirus 5
uacauucgccgcaaugggcuu

SEQ ID NO: 145692 - RNA, 20 nt, Human herpesvirus 5
uacaugaugaaugucaucau

SEQ ID NO: 145693 - RNA, 22 nt, Human herpesvirus 5
uacaugaugaaugucaucauca

SEQ ID NO: 145694 - RNA, 14 nt, Human herpesvirus 5
uacaugugcaugac

SEQ ID NO: 145695 - RNA, 22 nt, Human herpesvirus 5
uacaugggggggaacaucgucc

SEQ ID NO: 145696 - RNA, 24 nt, Human herpesvirus 5
uacaugggggggaacaucguccag

SEQ ID NO: 145697 - RNA, 14 nt, Human herpesvirus 5
uacgucgacaugaa

SEQ ID NO: 145698 - RNA, 13 nt, Human herpesvirus 5
uacggugcugcgu

SEQ ID NO: 145699 - RNA, 14 nt, Human herpesvirus 5
uacgggucuaccaa

SEQ ID NO: 145700 - RNA, 18 nt, Human herpesvirus 5
uacgggagucuaccuccu

SEQ ID NO: 145701 - RNA, 23 nt, Human herpesvirus 5
uacucaauaaacgugucacgccu

SEQ ID NO: 145702 - RNA, 24 nt, Human herpesvirus 5
uacucacguugguguuguagcaac

SEQ ID NO: 145703 - RNA, 21 nt, Human herpesvirus 5
uacucacaauggaagccauac

SEQ ID NO: 145704 - RNA, 22 nt, Human herpesvirus 5
uacuccaucaugaaggaucgca

SEQ ID NO: 145705 - RNA, 14 nt, Human herpesvirus 5
aacaacacaucaac

SEQ ID NO: 145706 - RNA, 12 nt, Human herpesvirus 5
aacaacagcagc

SEQ ID NO: 145707 - RNA, 13 nt, Human herpesvirus 5
aacaacgucacuu

SEQ ID NO: 145708 - RNA, 15 nt, Human herpesvirus 5
uacucugacugugua

SEQ ID NO: 145709 - RNA, 18 nt, Human herpesvirus 5
uacuccgugcgguucuca

SEQ ID NO: 145710 - RNA, 18 nt, Human herpesvirus 5
uaauuuaacaagucacua

SEQ ID NO: 145711 - RNA, 19 nt, Human herpesvirus 5
uaauuuaacaagucacuau

SEQ ID NO: 145712 - RNA, 21 nt, Human herpesvirus 5
uacaacaguuaucagcaauaa

SEQ ID NO: 145713 - RNA, 13 nt, Human herpesvirus 5
uaaguaccucuaa

SEQ ID NO: 145714 - RNA, 20 nt, Human herpesvirus 5
uaauacagauacgcaaugca

SEQ ID NO: 145715 - RNA, 17 nt, Human herpesvirus 5
uaauaacggcgcagcac

SEQ ID NO: 145716 - RNA, 17 nt, Human herpesvirus 5
uaauaacuacgcuacga

SEQ ID NO: 145717 - RNA, 16 nt, Human herpesvirus 5
uacaauaaacuguuga

SEQ ID NO: 145718 - RNA, 15 nt, Human herpesvirus 5
uacaacgucaugcau

SEQ ID NO: 145719 - RNA, 14 nt, Human herpesvirus 5
uacaagaaccacgu

SEQ ID NO: 145720 - RNA, 17 nt, Human herpesvirus 5
uacaaugacacuaacuu

SEQ ID NO: 145721 - RNA, 15 nt, Human herpesvirus 5
uacagcgacucucaa

SEQ ID NO: 145722 - RNA, 17 nt, Human herpesvirus 5
uacagcuucuuucucac

SEQ ID NO: 145723 - RNA, 13 nt, Human herpesvirus 5
uacagcaaugaca

SEQ ID NO: 145724 - RNA, 19 nt, Human herpesvirus 5
uacagauccaguuucacca

SEQ ID NO: 145725 - RNA, 20 nt, Human herpesvirus 5
uacauaugcgaugugcaaug

SEQ ID NO: 145726 - RNA, 14 nt, Human herpesvirus 5
uacauauacgugau

SEQ ID NO: 145727 - RNA, 16 nt, Human herpesvirus 5
uacauauacgugauua

SEQ ID NO: 145728 - RNA, 22 nt, Human herpesvirus 5
uacauaaaaccaccguaccugc

SEQ ID NO: 145729 - RNA, 22 nt, Human herpesvirus 5
uacagucccgagaaaacggcug

SEQ ID NO: 145730 - RNA, 23 nt, Human herpesvirus 5
uacagguauuccgaaaccuguau

SEQ ID NO: 145731 - RNA, 19 nt, Human herpesvirus 5
guugauaacaaacaaugac

SEQ ID NO: 145732 - RNA, 17 nt, Human herpesvirus 5
guugauacgcuagcaga

SEQ ID NO: 145733 - RNA, 16 nt, Human herpesvirus 5
uaaaagcugcaugaaa

SEQ ID NO: 145734 - RNA, 16 nt, Human herpesvirus 5
guugagucaugacaug

SEQ ID NO: 145735 - RNA, 16 nt, Human herpesvirus 5
guugagacuaccacau

SEQ ID NO: 145736 - RNA, 16 nt, Human herpesvirus 5
guucuguaaucuucca

SEQ ID NO: 145737 - RNA, 17 nt, Human herpesvirus 5
guucucaaaaacuguaa

SEQ ID NO: 145738 - RNA, 23 nt, Human herpesvirus 5
uaaaccuguuucggauguuuacc

SEQ ID NO: 145739 - RNA, 19 nt, Human herpesvirus 5
uaaacuuuuuuuaaccaau

SEQ ID NO: 145740 - RNA, 12 nt, Human herpesvirus 5
uaaacuggauau

SEQ ID NO: 145741 - RNA, 18 nt, Human herpesvirus 5
uaaacuggauaucuaggu

SEQ ID NO: 145742 - RNA, 11 nt, Human herpesvirus 5
uaaacuuaucc

SEQ ID NO: 145743 - RNA, 15 nt, Human herpesvirus 5
uaaaguacacgccac

SEQ ID NO: 145744 - RNA, 15 nt, Human herpesvirus 5
uaaagacaucgucac

SEQ ID NO: 145745 - RNA, 16 nt, Human herpesvirus 5
uaaagaaucuaggaac

SEQ ID NO: 145746 - RNA, 11 nt, Human herpesvirus 5
uaagguuuaca

SEQ ID NO: 145747 - RNA, 12 nt, Human herpesvirus 5
uaaggagcaaaa

SEQ ID NO: 145748 - RNA, 17 nt, Human herpesvirus 5
uaaggagcaaaaccggg

SEQ ID NO: 145749 - RNA, 19 nt, Human herpesvirus 5
uaagcugucagccucucac

SEQ ID NO: 145750 - RNA, 22 nt, Human herpesvirus 5
uaagcguccucgaagucuucau

SEQ ID NO: 145751 - RNA, 13 nt, Human herpesvirus 5
uaagcauagucca

SEQ ID NO: 145752 - RNA, 14 nt, Human herpesvirus 5
uaagcaccgugaua

SEQ ID NO: 145753 - RNA, 15 nt, Human herpesvirus 5
uaagcaccgugauag

SEQ ID NO: 145754 - RNA, 18 nt, Human herpesvirus 5
uaagaggauacaucauca

SEQ ID NO: 145755 - RNA, 15 nt, Human herpesvirus 5
uaagacagccuuaca

SEQ ID NO: 145756 - RNA, 19 nt, Human herpesvirus 5
uaagacagccuuacagcuu

SEQ ID NO: 145757 - RNA, 19 nt, Human herpesvirus 5
uaagaaaaagguggaaauc

SEQ ID NO: 145758 - RNA, 15 nt, Human herpesvirus 5
uaacgccacggugcu

SEQ ID NO: 145759 - RNA, 15 nt, Human herpesvirus 5
uaacgcgcugcugcu

SEQ ID NO: 145760 - RNA, 14 nt, Human herpesvirus 5
uaacagguauagca

SEQ ID NO: 145761 - RNA, 20 nt, Human herpesvirus 5
uaacgucauucguguugaca

SEQ ID NO: 145762 - RNA, 14 nt, Human herpesvirus 5
uaacguguggugag

SEQ ID NO: 145763 - RNA, 14 nt, Human herpesvirus 5
uaacacuagccauc

SEQ ID NO: 145764 - RNA, 17 nt, Human herpesvirus 5
uaacacuagccaucaca

SEQ ID NO: 145765 - RNA, 13 nt, Human herpesvirus 5
uaacagccuuccc

SEQ ID NO: 145766 - RNA, 22 nt, Human herpesvirus 5
uaacacgucgauaguaauguau

SEQ ID NO: 145767 - RNA, 16 nt, Human herpesvirus 5
uaacaccgucaccacu

SEQ ID NO: 145768 - RNA, 14 nt, Human herpesvirus 5
uaacaagucacuau

SEQ ID NO: 145769 - RNA, 11 nt, Human herpesvirus 5
uaacaaccuau

SEQ ID NO: 145770 - RNA, 18 nt, Human herpesvirus 5
uaacaaccuaugauauaa

SEQ ID NO: 145771 - RNA, 12 nt, Human herpesvirus 5
uaacaacacauc

SEQ ID NO: 145772 - RNA, 21 nt, Human herpesvirus 5
uaaaucaccgugaaagugaua

SEQ ID NO: 145773 - RNA, 18 nt, Human herpesvirus 5
guaugccgauacacgggg

SEQ ID NO: 145774 - RNA, 20 nt, Human herpesvirus 5
guaugaugaaucaugugguc

SEQ ID NO: 145775 - RNA, 16 nt, Human herpesvirus 5
guauggaggucacugu

SEQ ID NO: 145776 - RNA, 21 nt, Human herpesvirus 5
guaugugugaauggaaauaca

SEQ ID NO: 145777 - RNA, 14 nt, Human herpesvirus 5
guauuauauacaaa

SEQ ID NO: 145778 - RNA, 18 nt, Human herpesvirus 5
guaucaguggcgcuuaua

SEQ ID NO: 145779 - RNA, 20 nt, Human herpesvirus 5
guauauucaguccauuguca

SEQ ID NO: 145780 - RNA, 17 nt, Human herpesvirus 5
guaugaaagucccgugu

SEQ ID NO: 145781 - RNA, 18 nt, Human herpesvirus 5
guauccauacuuaccacc

SEQ ID NO: 145782 - RNA, 20 nt, Human herpesvirus 5
guaucgacacuaauuuaucc

SEQ ID NO: 145783 - RNA, 13 nt, Human herpesvirus 5
guaucgagcggug

SEQ ID NO: 145784 - RNA, 18 nt, Human herpesvirus 5
guaucggcauacaaugug

SEQ ID NO: 145785 - RNA, 14 nt, Human herpesvirus 5
guaucuacucagcu

SEQ ID NO: 145786 - RNA, 16 nt, Human herpesvirus 5
guauuccgaaaccugu

SEQ ID NO: 145787 - RNA, 18 nt, Human herpesvirus 5
guauuccgaaaccuguau

SEQ ID NO: 145788 - RNA, 22 nt, Human herpesvirus 5
gucaaccauuggcaacaucacc

SEQ ID NO: 145789 - RNA, 14 nt, Human herpesvirus 5
gucaacacuaccaa

SEQ ID NO: 145790 - RNA, 21 nt, Human herpesvirus 5
gucaauaaagacgucaaugac

SEQ ID NO: 145791 - RNA, 21 nt, Human herpesvirus 5
gucaauaacccacaccuauag

SEQ ID NO: 145792 - RNA, 18 nt, Human herpesvirus 5
gucaauaaguaccucuaa

SEQ ID NO: 145793 - RNA, 22 nt, Human herpesvirus 5
gucaauaauggucaauaaccca

SEQ ID NO: 145794 - RNA, 17 nt, Human herpesvirus 5
gucaacgcuuuggaaaa

SEQ ID NO: 145795 - RNA, 19 nt, Human herpesvirus 5
gucaacuacagcaaugaca

SEQ ID NO: 145796 - RNA, 15 nt, Human herpesvirus 5
gucacaccuaucaua

SEQ ID NO: 145797 - RNA, 21 nt, Human herpesvirus 5
gucacacgcuaagagcuuuga

SEQ ID NO: 145798 - RNA, 23 nt, Human herpesvirus 5
gucacacgcuaagagcuuugacg

SEQ ID NO: 145799 - RNA, 21 nt, Human herpesvirus 5
gucaagggucacggugccaug

SEQ ID NO: 145800 - RNA, 19 nt, Human herpesvirus 5
gucaccacucccaccacgg

SEQ ID NO: 145801 - RNA, 23 nt, Human herpesvirus 5
gucaccucacaagcgucaaccau

SEQ ID NO: 145802 - RNA, 23 nt, Human herpesvirus 5
gucacagagggcguucggacgac

SEQ ID NO: 145803 - RNA, 17 nt, Human herpesvirus 5
gucacugccaccgacau

SEQ ID NO: 145804 - RNA, 23 nt, Human herpesvirus 5
gucacuauagcgggauuuacuac

SEQ ID NO: 145805 - RNA, 20 nt, Human herpesvirus 5
gucacuauuguauacucuau

SEQ ID NO: 145806 - RNA, 23 nt, Human herpesvirus 5
gucacacagguagguggccauga

SEQ ID NO: 145807 - RNA, 16 nt, Human herpesvirus 5
gucacgucuacuacgu

SEQ ID NO: 145808 - RNA, 19 nt, Human herpesvirus 5
gucagcgaacgacgcagug

SEQ ID NO: 145809 - RNA, 13 nt, Human herpesvirus 5
gucagacacagcc

SEQ ID NO: 145810 - RNA, 17 nt, Human herpesvirus 5
gucagacccacuaccug

SEQ ID NO: 145811 - RNA, 15 nt, Human herpesvirus 5
guccaccucugcuac

SEQ ID NO: 145812 - RNA, 18 nt, Human herpesvirus 5
guccaccucugcuacugg

SEQ ID NO: 145813 - RNA, 15 nt, Human herpesvirus 5
guccacaguuuccga

SEQ ID NO: 145814 - RNA, 14 nt, Human herpesvirus 5
gucagggaacacau

SEQ ID NO: 145815 - RNA, 13 nt, Human herpesvirus 5
gucauagagccaa

SEQ ID NO: 145816 - RNA, 22 nt, Human herpesvirus 5
gggggcgcaaacacacacaaaa

SEQ ID NO: 145817 - RNA, 14 nt, Human herpesvirus 5
gggucaugggcgac

SEQ ID NO: 145818 - RNA, 23 nt, Human herpesvirus 5
ggggugaaaaguagcaccacaag

SEQ ID NO: 145819 - RNA, 22 nt, Human herpesvirus 5
gggguuuuuugcguauuccccc

SEQ ID NO: 145820 - RNA, 17 nt, Human herpesvirus 5
ggguaacgcuggcucac

SEQ ID NO: 145821 - RNA, 23 nt, Human herpesvirus 5
ggguguauagaccccaagccaaa

SEQ ID NO: 145822 - RNA, 17 nt, Human herpesvirus 5
ggguguccuacaaagga

SEQ ID NO: 145823 - RNA, 21 nt, Human herpesvirus 5
ggguuacgagaaacugggaua

SEQ ID NO: 145824 - RNA, 21 nt, Human herpesvirus 5
gggucugucuuuuaugaugcu

SEQ ID NO: 145825 - RNA, 23 nt, Human herpesvirus 5
guacgaaaugaccguggcagcuu

SEQ ID NO: 145826 - RNA, 15 nt, Human herpesvirus 5
guacgcgcacgccaa

SEQ ID NO: 145827 - RNA, 17 nt, Human herpesvirus 5
guacggacucuaacacc

SEQ ID NO: 145828 - RNA, 15 nt, Human herpesvirus 5
guacgucuaugagaa

SEQ ID NO: 145829 - RNA, 22 nt, Human herpesvirus 5
guacgucugcguguguguuucu

SEQ ID NO: 145830 - RNA, 14 nt, Human herpesvirus 5
guacuacuaccaau

SEQ ID NO: 145831 - RNA, 18 nt, Human herpesvirus 5
guacugcaagacgcauga

SEQ ID NO: 145832 - RNA, 24 nt, Human herpesvirus 5
guagaucccggccuugcuguguau

SEQ ID NO: 145833 - RNA, 18 nt, Human herpesvirus 5
guagcacucaacauguua

SEQ ID NO: 145834 - RNA, 19 nt, Human herpesvirus 5
guagcacucaacauguuag

SEQ ID NO: 145835 - RNA, 14 nt, Human herpesvirus 5
guagccgaugcuga

SEQ ID NO: 145836 - RNA, 15 nt, Human herpesvirus 5
guacuucccaugcaa

SEQ ID NO: 145837 - RNA, 21 nt, Human herpesvirus 5
guacugagacagccacaucaa

SEQ ID NO: 145838 - RNA, 17 nt, Human herpesvirus 5
guauacaacaguucuau

SEQ ID NO: 145839 - RNA, 19 nt, Human herpesvirus 5
guauacuaaacucugugau

SEQ ID NO: 145840 - RNA, 22 nt, Human herpesvirus 5
guaggucagcgugucugauacc

SEQ ID NO: 145841 - RNA, 13 nt, Human herpesvirus 5
guagcuagugcuc

SEQ ID NO: 145842 - RNA, 23 nt, Human herpesvirus 5
guagcuuuuuuuauacaucuccg

SEQ ID NO: 145843 - RNA, 22 nt, Human herpesvirus 5
guaguaggcuacgguggcgcga

SEQ ID NO: 145844 - RNA, 18 nt, Human herpesvirus 5
guagugcggcgugcugca

SEQ ID NO: 145845 - RNA, 16 nt, Human herpesvirus 5
guaggugaguucaaug

SEQ ID NO: 145846 - RNA, 20 nt, Human herpesvirus 5
gucccgcgcggaucggacac

SEQ ID NO: 145847 - RNA, 19 nt, Human herpesvirus 5
guccgacggcguuuuggcg

SEQ ID NO: 145848 - RNA, 18 nt, Human herpesvirus 5
guccgugucagucucuga

SEQ ID NO: 145849 - RNA, 17 nt, Human herpesvirus 5
guccgccuccacuuccg

SEQ ID NO: 145850 - RNA, 12 nt, Human herpesvirus 5
guccccuucugu

SEQ ID NO: 145851 - RNA, 21 nt, Human herpesvirus 5
guccaucauguucgcuauugu

SEQ ID NO: 145852 - RNA, 10 nt, Human herpesvirus 5
guccaggugg

SEQ ID NO: 145853 - RNA, 22 nt, Human herpesvirus 5
guccagaucgucuacggcucca

SEQ ID NO: 145854 - RNA, 13 nt, Human herpesvirus 5
gugagcuuugacg

SEQ ID NO: 145855 - RNA, 17 nt, Human herpesvirus 5
gugccagcccuauccuc

SEQ ID NO: 145856 - RNA, 15 nt, Human herpesvirus 5
gugccgaugagauaa

SEQ ID NO: 145857 - RNA, 21 nt, Human herpesvirus 5
gugccccccgggauccaagag

SEQ ID NO: 145858 - RNA, 21 nt, Human herpesvirus 5
gugcccauacuuuuacaugaa

SEQ ID NO: 145859 - RNA, 15 nt, Human herpesvirus 5
gugccaggcuguuca

SEQ ID NO: 145860 - RNA, 23 nt, Human herpesvirus 5
guggaagacauggcgacuuuccg

SEQ ID NO: 145861 - RNA, 12 nt, Human herpesvirus 5
gugccucugaaa

SEQ ID NO: 145862 - RNA, 20 nt, Human herpesvirus 5
gugcgacguucuccaaggga

SEQ ID NO: 145863 - RNA, 16 nt, Human herpesvirus 5
gugcacgcgccaaaau

SEQ ID NO: 145864 - RNA, 19 nt, Human herpesvirus 5
gugaucuucauucacuguu

SEQ ID NO: 145865 - RNA, 17 nt, Human herpesvirus 5
gugcaacgccaccaagg

SEQ ID NO: 145866 - RNA, 19 nt, Human herpesvirus 5
gugaugaacgacacaugca

SEQ ID NO: 145867 - RNA, 16 nt, Human herpesvirus 5
gugaugaugcugcuga

SEQ ID NO: 145868 - RNA, 19 nt, Human herpesvirus 5
guuccgacgcgagcgaagu

SEQ ID NO: 145869 - RNA, 18 nt, Human herpesvirus 5
guuccguauucuaucgua

SEQ ID NO: 145870 - RNA, 22 nt, Human herpesvirus 5
guuccguggagucgucucauca

SEQ ID NO: 145871 - RNA, 23 nt, Human herpesvirus 5
guucggcuccguuagccugguca

SEQ ID NO: 145872 - RNA, 17 nt, Human herpesvirus 5
guucgcccugucugcag

SEQ ID NO: 145873 - RNA, 23 nt, Human herpesvirus 5
guucgagaaugccucuacuugga

SEQ ID NO: 145874 - RNA, 22 nt, Human herpesvirus 5
guuccuauugggaaggguguga

SEQ ID NO: 145875 - RNA, 21 nt, Human herpesvirus 5
guuaugggucugguuacauau

SEQ ID NO: 145876 - RNA, 18 nt, Human herpesvirus 5
guuauguuauuauacuga

SEQ ID NO: 145877 - RNA, 13 nt, Human herpesvirus 5
guuauuauacuga

SEQ ID NO: 145878 - RNA, 15 nt, Human herpesvirus 5
guuauucagaaccau

SEQ ID NO: 145879 - RNA, 23 nt, Human herpesvirus 5
guucaaaguccgucaugcuggca

SEQ ID NO: 145880 - RNA, 17 nt, Human herpesvirus 5
gugguggcuguaggcua

SEQ ID NO: 145881 - RNA, 20 nt, Human herpesvirus 5
guggugggaaugcacguguu

SEQ ID NO: 145882 - RNA, 21 nt, Human herpesvirus 5
guggcaggacuugaguaccaa

SEQ ID NO: 145883 - RNA, 14 nt, Human herpesvirus 5
gugguacugcugug

SEQ ID NO: 145884 - RNA, 22 nt, Human herpesvirus 5
gugguacugcugugguguugcc

SEQ ID NO: 145885 - RNA, 21 nt, Human herpesvirus 5
guggcaaguuggccaccaaga

SEQ ID NO: 145886 - RNA, 17 nt, Human herpesvirus 5
gugguaucucacaccgu

SEQ ID NO: 145887 - RNA, 19 nt, Human herpesvirus 5
guggagacggagccguuac

SEQ ID NO: 145888 - RNA, 22 nt, Human herpesvirus 5
guggaggagacuaccucaguca

SEQ ID NO: 145889 - RNA, 16 nt, Human herpesvirus 5
guggauacuaguaaaa

SEQ ID NO: 145890 - RNA, 14 nt, Human herpesvirus 5
guguacuugcucag

SEQ ID NO: 145891 - RNA, 20 nt, Human herpesvirus 5
guguauagaccccaagccaa

SEQ ID NO: 145892 - RNA, 14 nt, Human herpesvirus 5
guguaugcaugucg

SEQ ID NO: 145893 - RNA, 19 nt, Human herpesvirus 5
gugucgacuccgcuggauc

SEQ ID NO: 145894 - RNA, 20 nt, Human herpesvirus 5
guguccgcucaacuuucuaa

SEQ ID NO: 145895 - RNA, 14 nt, Human herpesvirus 5
guguccgugaucac

SEQ ID NO: 145896 - RNA, 16 nt, Human herpesvirus 5
uauguccaugucucca

SEQ ID NO: 145897 - RNA, 17 nt, Human herpesvirus 5
uauguccaugucuccaa

SEQ ID NO: 145898 - RNA, 16 nt, Human herpesvirus 5
uauguccuccgcacuu

SEQ ID NO: 145899 - RNA, 14 nt, Human herpesvirus 5
uauuuaaaacuggu

SEQ ID NO: 145900 - RNA, 19 nt, Human herpesvirus 5
uauuguugagaacauauau

SEQ ID NO: 145901 - RNA, 13 nt, Human herpesvirus 5
uauuguauacucu

SEQ ID NO: 145902 - RNA, 19 nt, Human herpesvirus 5
uauuauacugaaaaacuug

SEQ ID NO: 145903 - RNA, 13 nt, Human herpesvirus 5
uauuauauacaaa

SEQ ID NO: 145904 - RNA, 21 nt, Human herpesvirus 5
uauuagccccacaugcugcuu

SEQ ID NO: 145905 - RNA, 14 nt, Human herpesvirus 5
uauuaguauacuaa

SEQ ID NO: 145906 - RNA, 19 nt, Human herpesvirus 5
ucaaagccgacaaccugcu

SEQ ID NO: 145907 - RNA, 22 nt, Human herpesvirus 5
ucaaagccgacaaccugcugca

SEQ ID NO: 145908 - RNA, 12 nt, Human herpesvirus 5
ucaaaguucaaa

SEQ ID NO: 145909 - RNA, 16 nt, Human herpesvirus 5
ucaaccugcugacuau

SEQ ID NO: 145910 - RNA, 18 nt, Human herpesvirus 5
ucaaacccggucagucua

SEQ ID NO: 145911 - RNA, 22 nt, Human herpesvirus 5
ucaaucaugccgguaucgauuc

SEQ ID NO: 145912 - RNA, 14 nt, Human herpesvirus 5
ucaaucauuacuaa

SEQ ID NO: 145913 - RNA, 16 nt, Human herpesvirus 5
ucaaugccaccaugaa

SEQ ID NO: 145914 - RNA, 20 nt, Human herpesvirus 5
ucaaugguggaaaccagaua

SEQ ID NO: 145915 - RNA, 22 nt, Human herpesvirus 5
ucaaugguggaaaccagauaca

SEQ ID NO: 145916 - RNA, 20 nt, Human herpesvirus 5
ucaaugucccuguaguacua

SEQ ID NO: 145917 - RNA, 20 nt, Human herpesvirus 5
ucaauugcgggcccugcuga

SEQ ID NO: 145918 - RNA, 18 nt, Human herpesvirus 5
ucaccaaggcgagccacu

SEQ ID NO: 145919 - RNA, 19 nt, Human herpesvirus 5
ucaccaaggcgagccacuc

SEQ ID NO: 145920 - RNA, 17 nt, Human herpesvirus 5
ucacaaaaacaccaauc

SEQ ID NO: 145921 - RNA, 22 nt, Human herpesvirus 5
ucaccugugguagaaugcugcu

SEQ ID NO: 145922 - RNA, 18 nt, Human herpesvirus 5
ucaccguaaucaccaaag

SEQ ID NO: 145923 - RNA, 19 nt, Human herpesvirus 5
ucaccguaaucaccaaaga

SEQ ID NO: 145924 - RNA, 13 nt, Human herpesvirus 5
ucagcucacuguu

SEQ ID NO: 145925 - RNA, 14 nt, Human herpesvirus 5
ucagcuugauggug

SEQ ID NO: 145926 - RNA, 17 nt, Human herpesvirus 5
ucaggacgaggagccaa

SEQ ID NO: 145927 - RNA, 23 nt, Human herpesvirus 5
ucaggaguuuauuguguucuccu

SEQ ID NO: 145928 - RNA, 13 nt, Human herpesvirus 5
ucagguacauuac

SEQ ID NO: 145929 - RNA, 14 nt, Human herpesvirus 5
ucagguacauuacc

SEQ ID NO: 145930 - RNA, 20 nt, Human herpesvirus 5
ucaggcuugucauggucugu

SEQ ID NO: 145931 - RNA, 19 nt, Human herpesvirus 5
ucacuucugcugucaccac

SEQ ID NO: 145932 - RNA, 16 nt, Human herpesvirus 5
ucacugccaccgacau

SEQ ID NO: 145933 - RNA, 19 nt, Human herpesvirus 5
ucacugccaccgacaugga

SEQ ID NO: 145934 - RNA, 21 nt, Human herpesvirus 5
ucacuugcgcgguuauggcuc

SEQ ID NO: 145935 - RNA, 13 nt, Human herpesvirus 5
ucagaaucuauaa

SEQ ID NO: 145936 - RNA, 22 nt, Human herpesvirus 5
ucagaagacgagcuagauguga

SEQ ID NO: 145937 - RNA, 15 nt, Human herpesvirus 5
ucagaaggcagugac

SEQ ID NO: 145938 - RNA, 17 nt, Human herpesvirus 5
ucagacccacuaccugg

SEQ ID NO: 145939 - RNA, 19 nt, Human herpesvirus 5
ucagaccgcaacaacagca

SEQ ID NO: 145940 - RNA, 20 nt, Human herpesvirus 5
ucagaccgcaacaacagcag

SEQ ID NO: 145941 - RNA, 21 nt, Human herpesvirus 5
ucagcguccggccucggguug

SEQ ID NO: 145942 - RNA, 12 nt, Human herpesvirus 5
uacugcugcuuc

SEQ ID NO: 145943 - RNA, 15 nt, Human herpesvirus 5
uacuggaagcugcug

SEQ ID NO: 145944 - RNA, 18 nt, Human herpesvirus 5
uagaagcacccauuacag

SEQ ID NO: 145945 - RNA, 20 nt, Human herpesvirus 5
uagaagcacccauuacagua

SEQ ID NO: 145946 - RNA, 13 nt, Human herpesvirus 5
uagaauacuggaa

SEQ ID NO: 145947 - RNA, 12 nt, Human herpesvirus 5
uagaaugcugcu

SEQ ID NO: 145948 - RNA, 14 nt, Human herpesvirus 5
uagaaugcugcuca

SEQ ID NO: 145949 - RNA, 16 nt, Human herpesvirus 5
uauacaacaguucuau

SEQ ID NO: 145950 - RNA, 20 nt, Human herpesvirus 5
uauacucuauguuauacucu

SEQ ID NO: 145951 - RNA, 22 nt, Human herpesvirus 5
uauacagacuuuuauaugaucc

SEQ ID NO: 145952 - RNA, 21 nt, Human herpesvirus 5
uauacaucuccgucucugguc

SEQ ID NO: 145953 - RNA, 15 nt, Human herpesvirus 5
uauaccaucaccuau

SEQ ID NO: 145954 - RNA, 17 nt, Human herpesvirus 5
uauagcaugcauaagaa

SEQ ID NO: 145955 - RNA, 21 nt, Human herpesvirus 5
uauagcaugcauaagaagcca

SEQ ID NO: 145956 - RNA, 22 nt, Human herpesvirus 5
uauagcaugcauaagaagccaa

SEQ ID NO: 145957 - RNA, 23 nt, Human herpesvirus 5
uauagcaugcauaagaagccaag

SEQ ID NO: 145958 - RNA, 13 nt, Human herpesvirus 5
uauacugugaauu

SEQ ID NO: 145959 - RNA, 22 nt, Human herpesvirus 5
uauagaccccaagccaaaaaca

SEQ ID NO: 145960 - RNA, 13 nt, Human herpesvirus 5
uauauacacaugc

SEQ ID NO: 145961 - RNA, 17 nt, Human herpesvirus 5
uauauaaaccguaugca

SEQ ID NO: 145962 - RNA, 18 nt, Human herpesvirus 5
uauauaaaccguaugcac

SEQ ID NO: 145963 - RNA, 17 nt, Human herpesvirus 5
uauaucaguuacuguua

SEQ ID NO: 145964 - RNA, 18 nt, Human herpesvirus 5
uauaucaguuacuguuau

SEQ ID NO: 145965 - RNA, 16 nt, Human herpesvirus 5
uaugcgugaggucugu

SEQ ID NO: 145966 - RNA, 21 nt, Human herpesvirus 5
uaugcauaacgucaaccguau

SEQ ID NO: 145967 - RNA, 23 nt, Human herpesvirus 5
uaugggucacggcggcguguguu

SEQ ID NO: 145968 - RNA, 15 nt, Human herpesvirus 5
uauggcgugaaccac

SEQ ID NO: 145969 - RNA, 20 nt, Human herpesvirus 5
uauggcuccgcggacuuuaa

SEQ ID NO: 145970 - RNA, 17 nt, Human herpesvirus 5
uaucuuuguagccucaa

SEQ ID NO: 145971 - RNA, 17 nt, Human herpesvirus 5
uaucuuaugccaguugc

SEQ ID NO: 145972 - RNA, 15 nt, Human herpesvirus 5
uaucuucaaccucac

SEQ ID NO: 145973 - RNA, 20 nt, Human herpesvirus 5
uaucuucaaccucacguuaa

SEQ ID NO: 145974 - RNA, 22 nt, Human herpesvirus 5
uaugaguaccccacgcauaaaa

SEQ ID NO: 145975 - RNA, 22 nt, Human herpesvirus 5
uaugagaaaagggacagaaaag

SEQ ID NO: 145976 - RNA, 18 nt, Human herpesvirus 5
uaugaguuaaaagggcaa

SEQ ID NO: 145977 - RNA, 20 nt, Human herpesvirus 5
uaugauuuccuccgugucga

SEQ ID NO: 145978 - RNA, 20 nt, Human herpesvirus 5
uaugaggaucaggaguuuau

SEQ ID NO: 145979 - RNA, 18 nt, Human herpesvirus 5
uaucuacaacacuacccu

SEQ ID NO: 145980 - RNA, 22 nt, Human herpesvirus 5
uaucuacaacuuaaccacaaga

SEQ ID NO: 145981 - RNA, 20 nt, Human herpesvirus 5
uaucuguucuuccaccagcu

SEQ ID NO: 145982 - RNA, 13 nt, Human herpesvirus 5
uaucuguacugca

SEQ ID NO: 145983 - RNA, 16 nt, Human herpesvirus 5
uaucuguacugcaaga

SEQ ID NO: 145984 - RNA, 14 nt, Human herpesvirus 5
uaucgaugcugcaa

SEQ ID NO: 145985 - RNA, 15 nt, Human herpesvirus 5
uauccgcguuaucag

SEQ ID NO: 145986 - RNA, 13 nt, Human herpesvirus 5
uauccgcuuucac

SEQ ID NO: 145987 - RNA, 23 nt, Human herpesvirus 5
uaucaucugcucccgcugcugcu

SEQ ID NO: 145988 - RNA, 16 nt, Human herpesvirus 5
uaucauauuaugcgug

SEQ ID NO: 145989 - RNA, 23 nt, Human herpesvirus 5
uaucaucaaucacccacagaguc

SEQ ID NO: 145990 - RNA, 16 nt, Human herpesvirus 5
uaucauaaagaaugca

SEQ ID NO: 145991 - RNA, 13 nt, Human herpesvirus 5
uauccauuggaga

SEQ ID NO: 145992 - RNA, 19 nt, Human herpesvirus 5
uauccauuggagaacagug

SEQ ID NO: 145993 - RNA, 15 nt, Human herpesvirus 5
uauccauacuuacca

SEQ ID NO: 145994 - RNA, 18 nt, Human herpesvirus 5
uauccaacuucacuucaa

SEQ ID NO: 145995 - RNA, 22 nt, Human herpesvirus 5
uauccacaacgacaaauacaaa

SEQ ID NO: 145996 - RNA, 21 nt, Human herpesvirus 5
uaucaccaaacaacaccacgg

SEQ ID NO: 145997 - RNA, 21 nt, Human herpesvirus 5
uaucagaaagcugcaaucaaa

SEQ ID NO: 145998 - RNA, 11 nt, Human herpesvirus 5
uccaccccuuu

SEQ ID NO: 145999 - RNA, 23 nt, Human herpesvirus 5
uccacacgccauaacaaaccacg

SEQ ID NO: 146000 - RNA, 19 nt, Human herpesvirus 5
uccacacgccgucucguca

SEQ ID NO: 146001 - RNA, 21 nt, Human herpesvirus 5
ucaugaacaccuuuuugcugc

SEQ ID NO: 146002 - RNA, 12 nt, Human herpesvirus 5
uccacaacgaca

SEQ ID NO: 146003 - RNA, 19 nt, Human herpesvirus 5
uccacaacgacaaauacaa

SEQ ID NO: 146004 - RNA, 20 nt, Human herpesvirus 5
uccacaacgacaaauacaaa

SEQ ID NO: 146005 - RNA, 13 nt, Human herpesvirus 5
ucaucugcaccuc

SEQ ID NO: 146006 - RNA, 18 nt, Human herpesvirus 5
ucaucuguuuuugcugca

SEQ ID NO: 146007 - RNA, 21 nt, Human herpesvirus 5
ucaucgucacgcucaaggaca

SEQ ID NO: 146008 - RNA, 19 nt, Human herpesvirus 5
ucaucuuuauuugcaucau

SEQ ID NO: 146009 - RNA, 22 nt, Human herpesvirus 5
ucaucuuuauuugcaucaugug

SEQ ID NO: 146010 - RNA, 14 nt, Human herpesvirus 5
ucaucggcauguuc

SEQ ID NO: 146011 - RNA, 17 nt, Human herpesvirus 5
ucaucuauauauacauc

SEQ ID NO: 146012 - RNA, 20 nt, Human herpesvirus 5
ucaucucgccgacgugguga

SEQ ID NO: 146013 - RNA, 22 nt, Human herpesvirus 5
ucccaccccccgggccaccagc

SEQ ID NO: 146014 - RNA, 22 nt, Human herpesvirus 5
ucccucagccucuguguuccca

SEQ ID NO: 146015 - RNA, 11 nt, Human herpesvirus 5
ucccucucuuu

SEQ ID NO: 146016 - RNA, 24 nt, Human herpesvirus 5
uccaguauucaucgggucgucuca

SEQ ID NO: 146017 - RNA, 17 nt, Human herpesvirus 5
uccaucaucuacguguc

SEQ ID NO: 146018 - RNA, 14 nt, Human herpesvirus 5
uccaucacaucacc

SEQ ID NO: 146019 - RNA, 10 nt, Human herpesvirus 5
ucccaccacg

SEQ ID NO: 146020 - RNA, 17 nt, Human herpesvirus 5
uccaguuucaccaaggc

SEQ ID NO: 146021 - RNA, 16 nt, Human herpesvirus 5
uccagcuuaccgccac

SEQ ID NO: 146022 - RNA, 16 nt, Human herpesvirus 5
uccugcagaccgaggc

SEQ ID NO: 146023 - RNA, 18 nt, Human herpesvirus 5
uccuggccaccauguugu

SEQ ID NO: 146024 - RNA, 20 nt, Human herpesvirus 5
uccugcuguuacgacaucac

SEQ ID NO: 146025 - RNA, 16 nt, Human herpesvirus 5
uccuguuggcuuacug

SEQ ID NO: 146026 - RNA, 19 nt, Human herpesvirus 5
uccuggucuuucaugauga

SEQ ID NO: 146027 - RNA, 14 nt, Human herpesvirus 5
uccucccgguauuc

SEQ ID NO: 146028 - RNA, 17 nt, Human herpesvirus 5
uccuccagcagcagcug

SEQ ID NO: 146029 - RNA, 19 nt, Human herpesvirus 5
uccucgugugcuguugacc

SEQ ID NO: 146030 - RNA, 18 nt, Human herpesvirus 5
uccucguguggcaaguug

SEQ ID NO: 146031 - RNA, 14 nt, Human herpesvirus 5
uccgaaaccuguau

SEQ ID NO: 146032 - RNA, 14 nt, Human herpesvirus 5
ucccuuuuacuagu

SEQ ID NO: 146033 - RNA, 19 nt, Human herpesvirus 5
uccgacuugaguacuuuca

SEQ ID NO: 146034 - RNA, 17 nt, Human herpesvirus 5
ucgagggcucgugcgug

SEQ ID NO: 146035 - RNA, 23 nt, Human herpesvirus 5
ucgaugcgccuccgguggugcgu

SEQ ID NO: 146036 - RNA, 15 nt, Human herpesvirus 5
ucgauucccaucuca

SEQ ID NO: 146037 - RNA, 21 nt, Human herpesvirus 5
ucgauucccaucucaacguca

SEQ ID NO: 146038 - RNA, 17 nt, Human herpesvirus 5
ucgaugaagccuaucaa

SEQ ID NO: 146039 - RNA, 23 nt, Human herpesvirus 5
ucgaugacgaugucgaucuccau

SEQ ID NO: 146040 - RNA, 14 nt, Human herpesvirus 5
ucgacauggacaug

SEQ ID NO: 146041 - RNA, 17 nt, Human herpesvirus 5
ucgacgugcgccaguuc

SEQ ID NO: 146042 - RNA, 15 nt, Human herpesvirus 5
ucgaaaacaaccaca

SEQ ID NO: 146043 - RNA, 20 nt, Human herpesvirus 5
uccuuguucucgaccacgua

SEQ ID NO: 146044 - RNA, 11 nt, Human herpesvirus 5
uccuuuuccag

SEQ ID NO: 146045 - RNA, 18 nt, Human herpesvirus 5
uccuuuggguccagccag

SEQ ID NO: 146046 - RNA, 18 nt, Human herpesvirus 5
uccuuccuauuuuguuac

SEQ ID NO: 146047 - RNA, 22 nt, Human herpesvirus 5
uccuucuuccucggacaccggg

SEQ ID NO: 146048 - RNA, 19 nt, Human herpesvirus 5
ucgccacgguuuguggcaa

SEQ ID NO: 146049 - RNA, 17 nt, Human herpesvirus 5
ucgccgacuaaauucau

SEQ ID NO: 146050 - RNA, 22 nt, Human herpesvirus 5
ucgccggcuugcuccucuucca

SEQ ID NO: 146051 - RNA, 11 nt, Human herpesvirus 5
ucgccaggugu

SEQ ID NO: 146052 - RNA, 17 nt, Human herpesvirus 5
ucgccaguccauggucu

SEQ ID NO: 146053 - RNA, 11 nt, Human herpesvirus 5
ucgccaccacc

SEQ ID NO: 146054 - RNA, 19 nt, Human herpesvirus 5
ucgccaccaccgguaccac

SEQ ID NO: 146055 - RNA, 14 nt, Human herpesvirus 5
ucgcaacaacagca

SEQ ID NO: 146056 - RNA, 23 nt, Human herpesvirus 5
ucgauguuggacgaaacguaucc

SEQ ID NO: 146057 - RNA, 18 nt, Human herpesvirus 5
ucgcaucaucaacagcag

SEQ ID NO: 146058 - RNA, 20 nt, Human herpesvirus 5
ucgcaucaucaacagcagca

SEQ ID NO: 146059 - RNA, 13 nt, Human herpesvirus 5
ucggcguggucaa

SEQ ID NO: 146060 - RNA, 20 nt, Human herpesvirus 5
ucgguacgaacgcuacuucc

SEQ ID NO: 146061 - RNA, 21 nt, Human herpesvirus 5
ucgguacgaacgcuacuuccc

SEQ ID NO: 146062 - RNA, 16 nt, Human herpesvirus 5
ucggccggcugcugca

SEQ ID NO: 146063 - RNA, 13 nt, Human herpesvirus 5
ucggccuuuucau

SEQ ID NO: 146064 - RNA, 18 nt, Human herpesvirus 5
ucgccuuccagcuuaccg

SEQ ID NO: 146065 - RNA, 18 nt, Human herpesvirus 5
ucuaaacgccaccugcaa

SEQ ID NO: 146066 - RNA, 22 nt, Human herpesvirus 5
ucguuguguucuuacuccgucu

SEQ ID NO: 146067 - RNA, 17 nt, Human herpesvirus 5
ucggucucgggcucgcu

SEQ ID NO: 146068 - RNA, 15 nt, Human herpesvirus 5
ucguucacccaguua

SEQ ID NO: 146069 - RNA, 10 nt, Human herpesvirus 5
ucuauauucu

SEQ ID NO: 146070 - RNA, 16 nt, Human herpesvirus 5
ucuaucaaugguggaa

SEQ ID NO: 146071 - RNA, 18 nt, Human herpesvirus 5
ucucauaauaaagcuuuc

SEQ ID NO: 146072 - RNA, 13 nt, Human herpesvirus 5
ucuagagacagac

SEQ ID NO: 146073 - RNA, 19 nt, Human herpesvirus 5
ucuagugcccauacuuuua

SEQ ID NO: 146074 - RNA, 19 nt, Human herpesvirus 5
ucuaguacuucccaugcaa

SEQ ID NO: 146075 - RNA, 21 nt, Human herpesvirus 5
ucuaguacuucccaugcaacu

SEQ ID NO: 146076 - RNA, 16 nt, Human herpesvirus 5
ucucugucuucuccgg

SEQ ID NO: 146077 - RNA, 21 nt, Human herpesvirus 5
ucugcuuuuuugucuccugug

SEQ ID NO: 146078 - RNA, 15 nt, Human herpesvirus 5
ucucuauacacauau

SEQ ID NO: 146079 - RNA, 20 nt, Human herpesvirus 5
ucucucgacguuucugauag

SEQ ID NO: 146080 - RNA, 22 nt, Human herpesvirus 5
ucucguacgacgucugcucaaa

SEQ ID NO: 146081 - RNA, 18 nt, Human herpesvirus 5
ucucggugcguggaccag

SEQ ID NO: 146082 - RNA, 14 nt, Human herpesvirus 5
ucucgagugguuca

SEQ ID NO: 146083 - RNA, 20 nt, Human herpesvirus 5
ucucauuuauugugucuacu

SEQ ID NO: 146084 - RNA, 20 nt, Human herpesvirus 5
ucuccaagggagacaucgaa

SEQ ID NO: 146085 - RNA, 11 nt, Human herpesvirus 5
ucuccaccaca

SEQ ID NO: 146086 - RNA, 20 nt, Human herpesvirus 5
ucuccggguuuuuuuuucac

SEQ ID NO: 146087 - RNA, 14 nt, Human herpesvirus 5
ucuuaucaccauca

SEQ ID NO: 146088 - RNA, 18 nt, Human herpesvirus 5
ucuggaacaagaaacaca

SEQ ID NO: 146089 - RNA, 15 nt, Human herpesvirus 5
ucuggucucgugaug

SEQ ID NO: 146090 - RNA, 13 nt, Human herpesvirus 5
ucugguacuuagu

SEQ ID NO: 146091 - RNA, 19 nt, Human herpesvirus 5
ucuuaaaggacgugaugcg

SEQ ID NO: 146092 - RNA, 12 nt, Human herpesvirus 5
ucuguacugcaa

SEQ ID NO: 146093 - RNA, 15 nt, Human herpesvirus 5
ucuguacugcaagac

SEQ ID NO: 146094 - RNA, 20 nt, Human herpesvirus 5
cugcucaaacccggucaguc

SEQ ID NO: 146095 - RNA, 18 nt, Human herpesvirus 5
cugcguucuguggugcgu

SEQ ID NO: 146096 - RNA, 13 nt, Human herpesvirus 5
cugcgccgucucu

SEQ ID NO: 146097 - RNA, 17 nt, Human herpesvirus 5
cugcgcuacgucuacua

SEQ ID NO: 146098 - RNA, 21 nt, Human herpesvirus 5
cugcucauggaggucuaucac

SEQ ID NO: 146099 - RNA, 12 nt, Human herpesvirus 5
cugcucagguac

SEQ ID NO: 146100 - RNA, 16 nt, Human herpesvirus 5
cugcugacgcuguuga

SEQ ID NO: 146101 - RNA, 18 nt, Human herpesvirus 5
cuggauacaguugauaac

SEQ ID NO: 146102 - RNA, 21 nt, Human herpesvirus 5
cuggauacaguugauaacaaa

SEQ ID NO: 146103 - RNA, 23 nt, Human herpesvirus 5
cuggacgacgugauuuguugccc

SEQ ID NO: 146104 - RNA, 14 nt, Human herpesvirus 5
cuggacugacacag

SEQ ID NO: 146105 - RNA, 14 nt, Human herpesvirus 5
cugcaaggccucua

SEQ ID NO: 146106 - RNA, 18 nt, Human herpesvirus 5
cugcaauacagaagggaa

SEQ ID NO: 146107 - RNA, 14 nt, Human herpesvirus 5
cugcaauccgguaa

SEQ ID NO: 146108 - RNA, 18 nt, Human herpesvirus 5
cugcaaagucaacaugua

SEQ ID NO: 146109 - RNA, 14 nt, Human herpesvirus 5
cugccuccuaguaa

SEQ ID NO: 146110 - RNA, 14 nt, Human herpesvirus 5
cugccucgacaucu

SEQ ID NO: 146111 - RNA, 19 nt, Human herpesvirus 5
cugccgaagaccucaccau

SEQ ID NO: 146112 - RNA, 21 nt, Human herpesvirus 5
cugcacuuucgaccacaagcu

SEQ ID NO: 146113 - RNA, 22 nt, Human herpesvirus 5
cugcacuuucgaccacaagcuc

SEQ ID NO: 146114 - RNA, 20 nt, Human herpesvirus 5
cugcaccucgaugaagccua

SEQ ID NO: 146115 - RNA, 13 nt, Human herpesvirus 5
cugcacggcauca

SEQ ID NO: 146116 - RNA, 23 nt, Human herpesvirus 5
cugcaccaaccgacguacgaaau

SEQ ID NO: 146117 - RNA, 15 nt, Human herpesvirus 5
cugcaccacggccuu

SEQ ID NO: 146118 - RNA, 23 nt, Human herpesvirus 5
cucugugaugaacgacacaugca

SEQ ID NO: 146119 - RNA, 15 nt, Human herpesvirus 5
cucugcgccgucucu

SEQ ID NO: 146120 - RNA, 17 nt, Human herpesvirus 5
cucuguaauccuacuca

SEQ ID NO: 146121 - RNA, 17 nt, Human herpesvirus 5
cucuuaaaggacgugau

SEQ ID NO: 146122 - RNA, 22 nt, Human herpesvirus 5
cucuuagcgugugacguggaua

SEQ ID NO: 146123 - RNA, 17 nt, Human herpesvirus 5
cugguucugauuuugau

SEQ ID NO: 146124 - RNA, 12 nt, Human herpesvirus 5
cugguugcugcc

SEQ ID NO: 146125 - RNA, 15 nt, Human herpesvirus 5
cugguggcucaugcc

SEQ ID NO: 146126 - RNA, 16 nt, Human herpesvirus 5
cuggcaagaguucaaa

SEQ ID NO: 146127 - RNA, 22 nt, Human herpesvirus 5
cuggcacguuuuggaaaacgua

SEQ ID NO: 146128 - RNA, 22 nt, Human herpesvirus 5
cuggcacauggccaaugcauau

SEQ ID NO: 146129 - RNA, 19 nt, Human herpesvirus 5
cuggcaacgugccacguga

SEQ ID NO: 146130 - RNA, 15 nt, Human herpesvirus 5
cuggauguauaugau

SEQ ID NO: 146131 - RNA, 18 nt, Human herpesvirus 5
cuguaaaagcugcaugaa

SEQ ID NO: 146132 - RNA, 13 nt, Human herpesvirus 5
cuguacaaucuca

SEQ ID NO: 146133 - RNA, 15 nt, Human herpesvirus 5
cuguaauccuacuca

SEQ ID NO: 146134 - RNA, 19 nt, Human herpesvirus 5
cuguaccaucauugcugcu

SEQ ID NO: 146135 - RNA, 14 nt, Human herpesvirus 5
cuguagcugugguu

SEQ ID NO: 146136 - RNA, 14 nt, Human herpesvirus 5
cugugaaacgccaa

SEQ ID NO: 146137 - RNA, 16 nt, Human herpesvirus 5
cugucuugcuuaauga

SEQ ID NO: 146138 - RNA, 22 nt, Human herpesvirus 5
cugugagcuuuuuuccccauaa

SEQ ID NO: 146139 - RNA, 18 nt, Human herpesvirus 5
cugugaugaacgacacau

SEQ ID NO: 146140 - RNA, 22 nt, Human herpesvirus 5
cuguuucaucgacgccuaccuu

SEQ ID NO: 146141 - RNA, 14 nt, Human herpesvirus 5
cuguugauuuuggc

SEQ ID NO: 146142 - RNA, 16 nt, Human herpesvirus 5
cuguuguuaguuuggu

SEQ ID NO: 146143 - RNA, 13 nt, Human herpesvirus 5
cuguugcucuccu

SEQ ID NO: 146144 - RNA, 13 nt, Human herpesvirus 5
cuguggcugcaca

SEQ ID NO: 146145 - RNA, 20 nt, Human herpesvirus 5
cuguggcugccgcuacugau

SEQ ID NO: 146146 - RNA, 21 nt, Human herpesvirus 5
cugugucggguguggcugucu

SEQ ID NO: 146147 - RNA, 22 nt, Human herpesvirus 5
cuguguucccaacacguccccc

SEQ ID NO: 146148 - RNA, 21 nt, Human herpesvirus 5
cugugugucgcaaauaucgca

SEQ ID NO: 146149 - RNA, 21 nt, Human herpesvirus 5
cuguuaauaaaacgccaugau

SEQ ID NO: 146150 - RNA, 16 nt, Human herpesvirus 5
cuguuaaaaaaaccac

SEQ ID NO: 146151 - RNA, 22 nt, Human herpesvirus 5
cucaccagaaugcuaguuugua

SEQ ID NO: 146152 - RNA, 19 nt, Human herpesvirus 5
cucaaucugcucgaccgcu

SEQ ID NO: 146153 - RNA, 14 nt, Human herpesvirus 5
cucagggcugggau

SEQ ID NO: 146154 - RNA, 13 nt, Human herpesvirus 5
cucaguacuuugg

SEQ ID NO: 146155 - RNA, 14 nt, Human herpesvirus 5
cucagcuacuggga

SEQ ID NO: 146156 - RNA, 20 nt, Human herpesvirus 5
cucagugaauucuggcaaga

SEQ ID NO: 146157 - RNA, 11 nt, Human herpesvirus 5
cuccaucacac

SEQ ID NO: 146158 - RNA, 22 nt, Human herpesvirus 5
cuccaucgugugccuaggucug

SEQ ID NO: 146159 - RNA, 18 nt, Human herpesvirus 5
cuccaucuauuggcagaa

SEQ ID NO: 146160 - RNA, 19 nt, Human herpesvirus 5
cuaccguuaacuauuccac

SEQ ID NO: 146161 - RNA, 21 nt, Human herpesvirus 5
cuaccuagaugcuagcaauaa

SEQ ID NO: 146162 - RNA, 18 nt, Human herpesvirus 5
cuaccuccccuaacguca

SEQ ID NO: 146163 - RNA, 17 nt, Human herpesvirus 5
cuaccucggccuuuuca

SEQ ID NO: 146164 - RNA, 21 nt, Human herpesvirus 5
cuacgaucgcuggaaagacaa

SEQ ID NO: 146165 - RNA, 21 nt, Human herpesvirus 5
cuaccugcgcgauacauugcc

SEQ ID NO: 146166 - RNA, 14 nt, Human herpesvirus 5
cuacgcgaccagcu

SEQ ID NO: 146167 - RNA, 23 nt, Human herpesvirus 5
cuacggaaccugagaacaugugg

SEQ ID NO: 146168 - RNA, 19 nt, Human herpesvirus 5
cuauguuauacucuguaau

SEQ ID NO: 146169 - RNA, 18 nt, Human herpesvirus 5
cuauuaucaucaaucacc

SEQ ID NO: 146170 - RNA, 21 nt, Human herpesvirus 5
cuauuagccccacaugcugcu

SEQ ID NO: 146171 - RNA, 18 nt, Human herpesvirus 5
cucaacgacuuucuggag

SEQ ID NO: 146172 - RNA, 17 nt, Human herpesvirus 5
cucaacguccauauaaa

SEQ ID NO: 146173 - RNA, 16 nt, Human herpesvirus 5
cucgaagcaacaauac

SEQ ID NO: 146174 - RNA, 20 nt, Human herpesvirus 5
cuccuuagucgagacuugca

SEQ ID NO: 146175 - RNA, 23 nt, Human herpesvirus 5
cucgaugcgccuccgguggugcg

SEQ ID NO: 146176 - RNA, 14 nt, Human herpesvirus 5
cucgaugaagccua

SEQ ID NO: 146177 - RNA, 18 nt, Human herpesvirus 5
cucgaugaagccuaucaa

SEQ ID NO: 146178 - RNA, 18 nt, Human herpesvirus 5
cucgcccaggcugucaau

SEQ ID NO: 146179 - RNA, 21 nt, Human herpesvirus 5
cucgccaccacuaccaccacg

SEQ ID NO: 146180 - RNA, 15 nt, Human herpesvirus 5
cucgcacggccugug

SEQ ID NO: 146181 - RNA, 16 nt, Human herpesvirus 5
cucgcuaaccacuacc

SEQ ID NO: 146182 - RNA, 21 nt, Human herpesvirus 5
cucgcccggugagggacccuc

SEQ ID NO: 146183 - RNA, 21 nt, Human herpesvirus 5
cucgccgccgcgccacacgcu

SEQ ID NO: 146184 - RNA, 14 nt, Human herpesvirus 5
cucgcgcccgcaga

SEQ ID NO: 146185 - RNA, 19 nt, Human herpesvirus 5
cucgcgcccgcagacacca

SEQ ID NO: 146186 - RNA, 18 nt, Human herpesvirus 5
cucggccuuuucauacaa

SEQ ID NO: 146187 - RNA, 13 nt, Human herpesvirus 5
cucggcgugguca

SEQ ID NO: 146188 - RNA, 21 nt, Human herpesvirus 5
cucgggaggacucagagccac

SEQ ID NO: 146189 - RNA, 22 nt, Human herpesvirus 5
cucgggugacggcgacaucacg

SEQ ID NO: 146190 - RNA, 20 nt, Human herpesvirus 5
cucuccacccagccccguca

SEQ ID NO: 146191 - RNA, 14 nt, Human herpesvirus 5
cucucauguucuau

SEQ ID NO: 146192 - RNA, 22 nt, Human herpesvirus 5
cucucuuuuuuuucuacaccgu

SEQ ID NO: 146193 - RNA, 16 nt, Human herpesvirus 5
cucugcuucuuuucug

SEQ ID NO: 146194 - RNA, 18 nt, Human herpesvirus 5
cucuaaacgccaccugca

SEQ ID NO: 146195 - RNA, 13 nt, Human herpesvirus 5
cucuaaaaacacc

SEQ ID NO: 146196 - RNA, 19 nt, Human herpesvirus 5
cucguguuuuuuauucaac

SEQ ID NO: 146197 - RNA, 18 nt, Human herpesvirus 5
cucguguaucuuaugcca

SEQ ID NO: 146198 - RNA, 19 nt, Human herpesvirus 5
cucgugcgugucgcugggc

SEQ ID NO: 146199 - RNA, 19 nt, Human herpesvirus 5
cucguacgacgucugcuca

SEQ ID NO: 146200 - RNA, 16 nt, Human herpesvirus 5
cucgucguguccguga

SEQ ID NO: 146201 - RNA, 12 nt, Human herpesvirus 5
cucuauguuaca

SEQ ID NO: 146202 - RNA, 20 nt, Human herpesvirus 5
cucuauguuacaaugucacu

SEQ ID NO: 146203 - RNA, 16 nt, Human herpesvirus 5
cucuauguuauacucu

SEQ ID NO: 146204 - RNA, 16 nt, Human herpesvirus 5
cucuauaaaacuugcc

SEQ ID NO: 146205 - RNA, 18 nt, Human herpesvirus 5
cucuagugcccauacuuu

SEQ ID NO: 146206 - RNA, 23 nt, Human herpesvirus 5
cucuagugcccauacuuuuacau

SEQ ID NO: 146207 - RNA, 15 nt, Human herpesvirus 5
cguggacgggucucu

SEQ ID NO: 146208 - RNA, 13 nt, Human herpesvirus 5
cguggacugggac

SEQ ID NO: 146209 - RNA, 15 nt, Human herpesvirus 5
cgucugcauguucau

SEQ ID NO: 146210 - RNA, 15 nt, Human herpesvirus 5
cgugcugugcuacga

SEQ ID NO: 146211 - RNA, 17 nt, Human herpesvirus 5
cguggauggucauauau

SEQ ID NO: 146212 - RNA, 23 nt, Human herpesvirus 5
cguggcucagcuugaugguguag

SEQ ID NO: 146213 - RNA, 18 nt, Human herpesvirus 5
cgugggucgggagcacau

SEQ ID NO: 146214 - RNA, 19 nt, Human herpesvirus 5
cgugucacgccugugaaac

SEQ ID NO: 146215 - RNA, 16 nt, Human herpesvirus 5
cgugucagucucugaa

SEQ ID NO: 146216 - RNA, 20 nt, Human herpesvirus 5
cguguccagccuucccaugc

SEQ ID NO: 146217 - RNA, 20 nt, Human herpesvirus 5
cguguccccugccaccucag

SEQ ID NO: 146218 - RNA, 15 nt, Human herpesvirus 5
cguguccgugaucac

SEQ ID NO: 146219 - RNA, 12 nt, Human herpesvirus 5
cuaaaaacaccc

SEQ ID NO: 146220 - RNA, 18 nt, Human herpesvirus 5
cguuucuaucaccuaauc

SEQ ID NO: 146221 - RNA, 21 nt, Human herpesvirus 5
cguuucugauagccauguucc

SEQ ID NO: 146222 - RNA, 19 nt, Human herpesvirus 5
cuaaaacguaaaaagaaug

SEQ ID NO: 146223 - RNA, 22 nt, Human herpesvirus 5
cuaacgucucggcggccuaccc

SEQ ID NO: 146224 - RNA, 22 nt, Human herpesvirus 5
cuacaugcuauaagacagccuu

SEQ ID NO: 146225 - RNA, 15 nt, Human herpesvirus 5
cuaccaauacugcau

SEQ ID NO: 146226 - RNA, 21 nt, Human herpesvirus 5
cuacauucgccgcaaugggcu

SEQ ID NO: 146227 - RNA, 20 nt, Human herpesvirus 5
cuacacgccuugcaccuggg

SEQ ID NO: 146228 - RNA, 15 nt, Human herpesvirus 5
cuacagcgacucuca

SEQ ID NO: 146229 - RNA, 16 nt, Human herpesvirus 5
cuacagcaaugacaug

SEQ ID NO: 146230 - RNA, 18 nt, Human herpesvirus 5
cuacagcaaugacaugga

SEQ ID NO: 146231 - RNA, 19 nt, Human herpesvirus 5
cuacagcaaugacauggau

SEQ ID NO: 146232 - RNA, 18 nt, Human herpesvirus 5
cguccgcuggaaauacca

SEQ ID NO: 146233 - RNA, 16 nt, Human herpesvirus 5
cguccaugucgcugcg

SEQ ID NO: 146234 - RNA, 18 nt, Human herpesvirus 5
cgucccuuuuacuaguau

SEQ ID NO: 146235 - RNA, 23 nt, Human herpesvirus 5
cguccgacgccggguuggcacga

SEQ ID NO: 146236 - RNA, 12 nt, Human herpesvirus 5
cgucaugcauuc

SEQ ID NO: 146237 - RNA, 18 nt, Human herpesvirus 5
cgucgugggcuacuuuga

SEQ ID NO: 146238 - RNA, 14 nt, Human herpesvirus 5
cgucgccaccaccg

SEQ ID NO: 146239 - RNA, 11 nt, Human herpesvirus 5
cgucuccauga

SEQ ID NO: 146240 - RNA, 22 nt, Human herpesvirus 5
cgucuucugaagccgucaguca

SEQ ID NO: 146241 - RNA, 22 nt, Human herpesvirus 5
cgucacugccaccgacauggag

SEQ ID NO: 146242 - RNA, 19 nt, Human herpesvirus 5
cgucaccacucccaccacg

SEQ ID NO: 146243 - RNA, 16 nt, Human herpesvirus 5
cgucacgcucaaggac

SEQ ID NO: 146244 - RNA, 22 nt, Human herpesvirus 5
cgucagccucgggugcaccgcg

SEQ ID NO: 146245 - RNA, 16 nt, Human herpesvirus 5
cgucaaaaauaacguc

SEQ ID NO: 146246 - RNA, 19 nt, Human herpesvirus 5
cgucaaaaauaacgucauu

SEQ ID NO: 146247 - RNA, 15 nt, Human herpesvirus 5
cgucaaccauuggca

SEQ ID NO: 146248 - RNA, 19 nt, Human herpesvirus 5
cguaccuagcuacuuugga

SEQ ID NO: 146249 - RNA, 17 nt, Human herpesvirus 5
cguaggugaguucaaug

SEQ ID NO: 146250 - RNA, 20 nt, Human herpesvirus 5
cguacgucaccgcgcuauua

SEQ ID NO: 146251 - RNA, 16 nt, Human herpesvirus 5
cguacuguccuuuguc

SEQ ID NO: 146252 - RNA, 14 nt, Human herpesvirus 5
cguagccaccuguu

SEQ ID NO: 146253 - RNA, 15 nt, Human herpesvirus 5
cguagccgaugcuga

SEQ ID NO: 146254 - RNA, 14 nt, Human herpesvirus 5
cggugcugcugcgc

SEQ ID NO: 146255 - RNA, 21 nt, Human herpesvirus 5
cggugcugcugcgcgacacgg

SEQ ID NO: 146256 - RNA, 18 nt, Human herpesvirus 5
cggugaugcgagugguga

SEQ ID NO: 146257 - RNA, 15 nt, Human herpesvirus 5
cggucccaucgccca

SEQ ID NO: 146258 - RNA, 13 nt, Human herpesvirus 5
cgguaacuggcag

SEQ ID NO: 146259 - RNA, 20 nt, Human herpesvirus 5
cggucugugaucugcacgua

SEQ ID NO: 146260 - RNA, 16 nt, Human herpesvirus 5
cggucuacagacuggg

SEQ ID NO: 146261 - RNA, 22 nt, Human herpesvirus 5
cggagcagagggucguuguccu

SEQ ID NO: 146262 - RNA, 13 nt, Human herpesvirus 5
cggacguagaaaa

SEQ ID NO: 146263 - RNA, 19 nt, Human herpesvirus 5
cgcgaccaccguuaccagu

SEQ ID NO: 146264 - RNA, 13 nt, Human herpesvirus 5
cgcgaguugcaaa

SEQ ID NO: 146265 - RNA, 17 nt, Human herpesvirus 5
cgcgauagugguguuua

SEQ ID NO: 146266 - RNA, 21 nt, Human herpesvirus 5
cgccuuaucgugcuaggcaag

SEQ ID NO: 146267 - RNA, 22 nt, Human herpesvirus 5
aaacaucaccaccaucagcaaa

SEQ ID NO: 146268 - RNA, 19 nt, Human herpesvirus 5
aaacauuuguugagucaug

SEQ ID NO: 146269 - RNA, 20 nt, Human herpesvirus 5
cgcuagcagaagacuuugau

SEQ ID NO: 146270 - RNA, 13 nt, Human herpesvirus 5
cgcuauacaccaa

SEQ ID NO: 146271 - RNA, 15 nt, Human herpesvirus 5
cgcucacccguucac

SEQ ID NO: 146272 - RNA, 19 nt, Human herpesvirus 5
cgcuuagccaccaccugga

SEQ ID NO: 146273 - RNA, 13 nt, Human herpesvirus 5
cgcuuaucuugca

SEQ ID NO: 146274 - RNA, 18 nt, Human herpesvirus 5
cgcuuagacauuccccac

SEQ ID NO: 146275 - RNA, 19 nt, Human herpesvirus 5
cgcugcccgggggugacaa

SEQ ID NO: 146276 - RNA, 16 nt, Human herpesvirus 5
cgcugcuucaccgaua

SEQ ID NO: 146277 - RNA, 16 nt, Human herpesvirus 5
cgcuggacugacacag

SEQ ID NO: 146278 - RNA, 16 nt, Human herpesvirus 5
cgcggcgaggugguca

SEQ ID NO: 146279 - RNA, 16 nt, Human herpesvirus 5
cgcggcaacucgagau

SEQ ID NO: 146280 - RNA, 18 nt, Human herpesvirus 5
cgcggcgugaccacguca

SEQ ID NO: 146281 - RNA, 23 nt, Human herpesvirus 5
cgcgcuucuggucgguuuuuuca

SEQ ID NO: 146282 - RNA, 18 nt, Human herpesvirus 5
cgcggucugcgugaugcc

SEQ ID NO: 146283 - RNA, 18 nt, Human herpesvirus 5
cgcgguggucgaugcuga

SEQ ID NO: 146284 - RNA, 19 nt, Human herpesvirus 5
cgcgguggucgaugcugau

SEQ ID NO: 146285 - RNA, 21 nt, Human herpesvirus 5
cgcguaacgugucuucuucgc

SEQ ID NO: 146286 - RNA, 13 nt, Human herpesvirus 5
cgcgguacaugug

SEQ ID NO: 146287 - RNA, 16 nt, Human herpesvirus 5
cgcgguacaugugcau

SEQ ID NO: 146288 - RNA, 22 nt, Human herpesvirus 5
cgcagguuagcggcgagucacc

SEQ ID NO: 146289 - RNA, 19 nt, Human herpesvirus 5
cgcaggccgccgccgcuca

SEQ ID NO: 146290 - RNA, 15 nt, Human herpesvirus 5
cgcagaaacuuuucc

SEQ ID NO: 146291 - RNA, 22 nt, Human herpesvirus 5
cgcacaucuauuuuugcuaauu

SEQ ID NO: 146292 - RNA, 16 nt, Human herpesvirus 5
cgcaauagaauacugc

SEQ ID NO: 146293 - RNA, 22 nt, Human herpesvirus 5
cgcaauagaauacugcuaugua

SEQ ID NO: 146294 - RNA, 15 nt, Human herpesvirus 5
ccuguuccugcugcu

SEQ ID NO: 146295 - RNA, 18 nt, Human herpesvirus 5
ccuguugggugagguguu

SEQ ID NO: 146296 - RNA, 20 nt, Human herpesvirus 5
cgccacuuuguaucauuaca

SEQ ID NO: 146297 - RNA, 16 nt, Human herpesvirus 5
cgccaccauagccacu

SEQ ID NO: 146298 - RNA, 15 nt, Human herpesvirus 5
cgccaccaugcaucc

SEQ ID NO: 146299 - RNA, 19 nt, Human herpesvirus 5
cgccaccaccgguaccacu

SEQ ID NO: 146300 - RNA, 15 nt, Human herpesvirus 5
cgccaucuucaucuu

SEQ ID NO: 146301 - RNA, 13 nt, Human herpesvirus 5
cgccaugaugaca

SEQ ID NO: 146302 - RNA, 14 nt, Human herpesvirus 5
cgccaguggaugcg

SEQ ID NO: 146303 - RNA, 18 nt, Human herpesvirus 5
cgcaucacccgccucaug

SEQ ID NO: 146304 - RNA, 19 nt, Human herpesvirus 5
cgcaugucgucucaucaca

SEQ ID NO: 146305 - RNA, 19 nt, Human herpesvirus 5
cgcauguguugaauagugu

SEQ ID NO: 146306 - RNA, 16 nt, Human herpesvirus 5
cgccgcuguggcugcc

SEQ ID NO: 146307 - RNA, 20 nt, Human herpesvirus 5
cgccggcaugucccuacuca

SEQ ID NO: 146308 - RNA, 16 nt, Human herpesvirus 5
cgccggcgguuacaga

SEQ ID NO: 146309 - RNA, 17 nt, Human herpesvirus 5
cgccgccaccacccgac

SEQ ID NO: 146310 - RNA, 15 nt, Human herpesvirus 5
cgccgcccucccuca

SEQ ID NO: 146311 - RNA, 16 nt, Human herpesvirus 5
cgccgcggcaccagag

SEQ ID NO: 146312 - RNA, 15 nt, Human herpesvirus 5
cgccuccgguggugc

SEQ ID NO: 146313 - RNA, 16 nt, Human herpesvirus 5
cgccgugacacuuugg

SEQ ID NO: 146314 - RNA, 12 nt, Human herpesvirus 5
cgcccucucggu

SEQ ID NO: 146315 - RNA, 23 nt, Human herpesvirus 5
cgccgacuggauccgcuuccuca

SEQ ID NO: 146316 - RNA, 22 nt, Human herpesvirus 5
cgcccgggaucgcgguuuauuu

SEQ ID NO: 146317 - RNA, 19 nt, Human herpesvirus 5
cgcccuaguggucuuucac

SEQ ID NO: 146318 - RNA, 18 nt, Human herpesvirus 5
aaacaccgacgcuacuuc

SEQ ID NO: 146319 - RNA, 20 nt, Human herpesvirus 5
aaacaccguguggugguugu

SEQ ID NO: 146320 - RNA, 18 nt, Human herpesvirus 5
ccuguggcccgaagaugu

SEQ ID NO: 146321 - RNA, 19 nt, Human herpesvirus 5
ccugugguagaaugcugcu

SEQ ID NO: 146322 - RNA, 18 nt, Human herpesvirus 5
aaacaaagcacaauacac

SEQ ID NO: 146323 - RNA, 17 nt, Human herpesvirus 5
ccugucauccacuugga

SEQ ID NO: 146324 - RNA, 17 nt, Human herpesvirus 5
ccuguaauuauuccagc

SEQ ID NO: 146325 - RNA, 18 nt, Human herpesvirus 5
ccuguaauuauuccagcu

SEQ ID NO: 146326 - RNA, 16 nt, Human herpesvirus 5
ccuguaaaaauacaga

SEQ ID NO: 146327 - RNA, 15 nt, Human herpesvirus 5
ccugugcuuuugcuu

SEQ ID NO: 146328 - RNA, 19 nt, Human herpesvirus 5
ccuaguaauaccaccguca

SEQ ID NO: 146329 - RNA, 23 nt, Human herpesvirus 5
ccuagugaugcgcgaacaggccg

SEQ ID NO: 146330 - RNA, 23 nt, Human herpesvirus 5
ccuccgacuugaguacuuucaca

SEQ ID NO: 146331 - RNA, 12 nt, Human herpesvirus 5
ccuccacuuccg

SEQ ID NO: 146332 - RNA, 19 nt, Human herpesvirus 5
ccuccagcgccuccuggug

SEQ ID NO: 146333 - RNA, 13 nt, Human herpesvirus 5
ccugguugcugcc

SEQ ID NO: 146334 - RNA, 19 nt, Human herpesvirus 5
ccugcgcgauacauugccc

SEQ ID NO: 146335 - RNA, 14 nt, Human herpesvirus 5
ccugcugccgccac

SEQ ID NO: 146336 - RNA, 17 nt, Human herpesvirus 5
ccugcugccgccacugg

SEQ ID NO: 146337 - RNA, 14 nt, Human herpesvirus 5
ccugcaccaaccga

SEQ ID NO: 146338 - RNA, 17 nt, Human herpesvirus 5
ccuccuaguaaugcauu

SEQ ID NO: 146339 - RNA, 13 nt, Human herpesvirus 5
ccugccaccucag

SEQ ID NO: 146340 - RNA, 15 nt, Human herpesvirus 5
ccugccaccucagug

SEQ ID NO: 146341 - RNA, 14 nt, Human herpesvirus 5
ccuagggggugacu

SEQ ID NO: 146342 - RNA, 17 nt, Human herpesvirus 5
ccuagaugcuagcaaua

SEQ ID NO: 146343 - RNA, 16 nt, Human herpesvirus 5
ccuaccugggcugcaa

SEQ ID NO: 146344 - RNA, 14 nt, Human herpesvirus 5
ccuacgacaacauc

SEQ ID NO: 146345 - RNA, 15 nt, Human herpesvirus 5
ccuacgacaacaucc

SEQ ID NO: 146346 - RNA, 16 nt, Human herpesvirus 5
ccuacacgccuugcac

SEQ ID NO: 146347 - RNA, 12 nt, Human herpesvirus 5
ccguuguguaug

SEQ ID NO: 146348 - RNA, 18 nt, Human herpesvirus 5
ccguucgaaggcuacucu

SEQ ID NO: 146349 - RNA, 16 nt, Human herpesvirus 5
ccguuaacuauuccac

SEQ ID NO: 146350 - RNA, 16 nt, Human herpesvirus 5
ccggccuugcugugua

SEQ ID NO: 146351 - RNA, 16 nt, Human herpesvirus 5
ccggcggccguugccg

SEQ ID NO: 146352 - RNA, 14 nt, Human herpesvirus 5
cccucauauacggu

SEQ ID NO: 146353 - RNA, 22 nt, Human herpesvirus 5
cccuggggcugcugcugcacgg

SEQ ID NO: 146354 - RNA, 16 nt, Human herpesvirus 5
cccuguaguacuaccg

SEQ ID NO: 146355 - RNA, 21 nt, Human herpesvirus 5
cccugccuacgucuucaugac

SEQ ID NO: 146356 - RNA, 20 nt, Human herpesvirus 5
cccuucuggagcacacugcu

SEQ ID NO: 146357 - RNA, 22 nt, Human herpesvirus 5
cccuuaccuaucaucacacuaa

SEQ ID NO: 146358 - RNA, 18 nt, Human herpesvirus 5
ccggagcccgcacacugg

SEQ ID NO: 146359 - RNA, 21 nt, Human herpesvirus 5
ccggagcuacgcgaccagcug

SEQ ID NO: 146360 - RNA, 16 nt, Human herpesvirus 5
ccgcuguggcugccgc

SEQ ID NO: 146361 - RNA, 23 nt, Human herpesvirus 5
ccgcuuggggcucaaaguucaaa

SEQ ID NO: 146362 - RNA, 15 nt, Human herpesvirus 5
ccccugggaauucau

SEQ ID NO: 146363 - RNA, 23 nt, Human herpesvirus 5
cccgacgacgguuuccacgccac

SEQ ID NO: 146364 - RNA, 19 nt, Human herpesvirus 5
cccgacacgucacuauccg

SEQ ID NO: 146365 - RNA, 13 nt, Human herpesvirus 5
cccgaccacgaca

SEQ ID NO: 146366 - RNA, 14 nt, Human herpesvirus 5
cccgcacacuggcu

SEQ ID NO: 146367 - RNA, 20 nt, Human herpesvirus 5
cccgagacggcggcauccuc

SEQ ID NO: 146368 - RNA, 14 nt, Human herpesvirus 5
cccgagcacguaca

SEQ ID NO: 146369 - RNA, 14 nt, Human herpesvirus 5
ccccuaguaauacc

SEQ ID NO: 146370 - RNA, 20 nt, Human herpesvirus 5
cccuaacuaucuacaacuua

SEQ ID NO: 146371 - RNA, 23 nt, Human herpesvirus 5
cccgucggcugccuguuccugcu

SEQ ID NO: 146372 - RNA, 20 nt, Human herpesvirus 5
cccggggcauccgcuacucc

SEQ ID NO: 146373 - RNA, 16 nt, Human herpesvirus 5
ccccaucauggcccaa

SEQ ID NO: 146374 - RNA, 21 nt, Human herpesvirus 5
ccccaccuacgagcaggccau

SEQ ID NO: 146375 - RNA, 21 nt, Human herpesvirus 5
cccauccuguaaaaauacaga

SEQ ID NO: 146376 - RNA, 19 nt, Human herpesvirus 5
cccauacuuuuacaugaac

SEQ ID NO: 146377 - RNA, 21 nt, Human herpesvirus 5
cccaggaugaagccaagcgua

SEQ ID NO: 146378 - RNA, 22 nt, Human herpesvirus 5
ccacaacauaugucaacaugaa

SEQ ID NO: 146379 - RNA, 19 nt, Human herpesvirus 5
ccaauuuuuucgcugccaa

SEQ ID NO: 146380 - RNA, 16 nt, Human herpesvirus 5
ccacacagauauccac

SEQ ID NO: 146381 - RNA, 22 nt, Human herpesvirus 5
ccagaagauacucgaugggguc

SEQ ID NO: 146382 - RNA, 13 nt, Human herpesvirus 5
ccaggcuguucac

SEQ ID NO: 146383 - RNA, 18 nt, Human herpesvirus 5
ccaggugccggcgacuga

SEQ ID NO: 146384 - RNA, 22 nt, Human herpesvirus 5
ccaggaggaaaaaaaaacuaga

SEQ ID NO: 146385 - RNA, 18 nt, Human herpesvirus 5
ccagcugccaccagggcg

SEQ ID NO: 146386 - RNA, 18 nt, Human herpesvirus 5
ccagagcgauauguuuca

SEQ ID NO: 146387 - RNA, 19 nt, Human herpesvirus 5
ccagcuggggaaguacaau

SEQ ID NO: 146388 - RNA, 21 nt, Human herpesvirus 5
ccauacuuuuacaugaacaaa

SEQ ID NO: 146389 - RNA, 15 nt, Human herpesvirus 5
ccauacuuaccaccg

SEQ ID NO: 146390 - RNA, 15 nt, Human herpesvirus 5
ccaucaggugacauc

SEQ ID NO: 146391 - RNA, 18 nt, Human herpesvirus 5
ccaucaccuauaacauga

SEQ ID NO: 146392 - RNA, 12 nt, Human herpesvirus 5
ccaugugcagcu

SEQ ID NO: 146393 - RNA, 15 nt, Human herpesvirus 5
ccaucauugcugcua

SEQ ID NO: 146394 - RNA, 22 nt, Human herpesvirus 5
ccauugagaaagcuaacauucc

SEQ ID NO: 146395 - RNA, 19 nt, Human herpesvirus 5
ccauuggaaguaacaucau

SEQ ID NO: 146396 - RNA, 15 nt, Human herpesvirus 5
ccauuggcaacauca

SEQ ID NO: 146397 - RNA, 16 nt, Human herpesvirus 5
ccauuggcaacaucac

SEQ ID NO: 146398 - RNA, 18 nt, Human herpesvirus 5
ccauuuccaugugcagcu

SEQ ID NO: 146399 - RNA, 22 nt, Human herpesvirus 5
cccaaaaaaacacacaccguca

SEQ ID NO: 146400 - RNA, 18 nt, Human herpesvirus 5
caugcugggcgacacuca

SEQ ID NO: 146401 - RNA, 16 nt, Human herpesvirus 5
caugcuauaagacagc

SEQ ID NO: 146402 - RNA, 18 nt, Human herpesvirus 5
caugcuauaagacagccu

SEQ ID NO: 146403 - RNA, 20 nt, Human herpesvirus 5
caugcgucguaugccgccac

SEQ ID NO: 146404 - RNA, 23 nt, Human herpesvirus 5
caugcgugucuacggauugcuga

SEQ ID NO: 146405 - RNA, 24 nt, Human herpesvirus 5
caugcuucuuugguaucuacauca

SEQ ID NO: 146406 - RNA, 19 nt, Human herpesvirus 5
cauggaccugaccugucag

SEQ ID NO: 146407 - RNA, 14 nt, Human herpesvirus 5
cauggagacaguuu

SEQ ID NO: 146408 - RNA, 15 nt, Human herpesvirus 5
caucuguacaaggau

SEQ ID NO: 146409 - RNA, 13 nt, Human herpesvirus 5
caucugucaucua

SEQ ID NO: 146410 - RNA, 15 nt, Human herpesvirus 5
cauguccagccuguu

SEQ ID NO: 146411 - RNA, 18 nt, Human herpesvirus 5
cauguuauguuauuauac

SEQ ID NO: 146412 - RNA, 20 nt, Human herpesvirus 5
cauguuauguuauuauacug

SEQ ID NO: 146413 - RNA, 19 nt, Human herpesvirus 5
caucuagacucacuuuauu

SEQ ID NO: 146414 - RNA, 21 nt, Human herpesvirus 5
caucucauuugcuuuuacaaa

SEQ ID NO: 146415 - RNA, 16 nt, Human herpesvirus 5
caucuccgucucuggu

SEQ ID NO: 146416 - RNA, 16 nt, Human herpesvirus 5
cauaugcgaugugcaa

SEQ ID NO: 146417 - RNA, 22 nt, Human herpesvirus 5
caucgguacgaacgcuacuucc

SEQ ID NO: 146418 - RNA, 19 nt, Human herpesvirus 5
caucgggcccgccacugcc

SEQ ID NO: 146419 - RNA, 17 nt, Human herpesvirus 5
caucgugaaaagguacu

SEQ ID NO: 146420 - RNA, 19 nt, Human herpesvirus 5
caucuaaagacuauacuuu

SEQ ID NO: 146421 - RNA, 22 nt, Human herpesvirus 5
cauauauaaaccguaugcacaa

SEQ ID NO: 146422 - RNA, 14 nt, Human herpesvirus 5
cauauagcucgucc

SEQ ID NO: 146423 - RNA, 19 nt, Human herpesvirus 5
cauagugauuccccgugac

SEQ ID NO: 146424 - RNA, 21 nt, Human herpesvirus 5
cauagugccagcccuauccuc

SEQ ID NO: 146425 - RNA, 17 nt, Human herpesvirus 5
cauagaguuacaugcaa

SEQ ID NO: 146426 - RNA, 20 nt, Human herpesvirus 5
cauacuuaccaccgugacac

SEQ ID NO: 146427 - RNA, 14 nt, Human herpesvirus 5
cauacuucucguac

SEQ ID NO: 146428 - RNA, 20 nt, Human herpesvirus 5
ccaauacugcauccaucaca

SEQ ID NO: 146429 - RNA, 22 nt, Human herpesvirus 5
ccaauacugcauccaucacauc

SEQ ID NO: 146430 - RNA, 13 nt, Human herpesvirus 5
ccaauaacauguc

SEQ ID NO: 146431 - RNA, 21 nt, Human herpesvirus 5
ccaaggcuagacgaaauucac

SEQ ID NO: 146432 - RNA, 20 nt, Human herpesvirus 5
ccaagugucucuaaacgcca

SEQ ID NO: 146433 - RNA, 21 nt, Human herpesvirus 5
ccaaagaugaagacacccugc

SEQ ID NO: 146434 - RNA, 12 nt, Human herpesvirus 5
ccaaagaccgcu

SEQ ID NO: 146435 - RNA, 19 nt, Human herpesvirus 5
ccaacugaaauacaugcua

SEQ ID NO: 146436 - RNA, 20 nt, Human herpesvirus 5
cauuucggggcacgugcuga

SEQ ID NO: 146437 - RNA, 12 nt, Human herpesvirus 5
cauuuccgugcg

SEQ ID NO: 146438 - RNA, 20 nt, Human herpesvirus 5
cauuuaucaauacaaugaca

SEQ ID NO: 146439 - RNA, 21 nt, Human herpesvirus 5
ccaaacgcgugcgggugcaug

SEQ ID NO: 146440 - RNA, 22 nt, Human herpesvirus 5
cauuacugggacgcgugcucuc

SEQ ID NO: 146441 - RNA, 17 nt, Human herpesvirus 5
caggcacgucauugaca

SEQ ID NO: 146442 - RNA, 14 nt, Human herpesvirus 5
caggccgccgcuca

SEQ ID NO: 146443 - RNA, 23 nt, Human herpesvirus 5
caggcccggguucgcgauucuca

SEQ ID NO: 146444 - RNA, 17 nt, Human herpesvirus 5
caggcggcugaucugca

SEQ ID NO: 146445 - RNA, 14 nt, Human herpesvirus 5
cagacccacuaccu

SEQ ID NO: 146446 - RNA, 14 nt, Human herpesvirus 5
cagaccauccucac

SEQ ID NO: 146447 - RNA, 17 nt, Human herpesvirus 5
cagacggcguccaugca

SEQ ID NO: 146448 - RNA, 13 nt, Human herpesvirus 5
cagacgguggugu

SEQ ID NO: 146449 - RNA, 15 nt, Human herpesvirus 5
cagaauugauuucaa

SEQ ID NO: 146450 - RNA, 20 nt, Human herpesvirus 5
cagacaggcggccagcuuca

SEQ ID NO: 146451 - RNA, 21 nt, Human herpesvirus 5
cagggaauaauaauaccacaa

SEQ ID NO: 146452 - RNA, 15 nt, Human herpesvirus 5
caggguaaaaaccac

SEQ ID NO: 146453 - RNA, 15 nt, Human herpesvirus 5
caggguaacagccuu

SEQ ID NO: 146454 - RNA, 21 nt, Human herpesvirus 5
cagggguacgcuaugugucac

SEQ ID NO: 146455 - RNA, 12 nt, Human herpesvirus 5
caggggaucuau

SEQ ID NO: 146456 - RNA, 13 nt, Human herpesvirus 5
cagggugagaaag

SEQ ID NO: 146457 - RNA, 12 nt, Human herpesvirus 5
caguagacagac

SEQ ID NO: 146458 - RNA, 21 nt, Human herpesvirus 5
caguaccgacgacgacagucu

SEQ ID NO: 146459 - RNA, 17 nt, Human herpesvirus 5
caguaugacgugcgaug

SEQ ID NO: 146460 - RNA, 18 nt, Human herpesvirus 5
caguaugacgugcgaugg

SEQ ID NO: 146461 - RNA, 20 nt, Human herpesvirus 5
caggugcugucgcucggcau

SEQ ID NO: 146462 - RNA, 17 nt, Human herpesvirus 5
cauaaaaauaugggaau

SEQ ID NO: 146463 - RNA, 12 nt, Human herpesvirus 5
cauaaaaccacc

SEQ ID NO: 146464 - RNA, 17 nt, Human herpesvirus 5
cauaaacuuaugauucu

SEQ ID NO: 146465 - RNA, 18 nt, Human herpesvirus 5
cauaaacuuaugauucug

SEQ ID NO: 146466 - RNA, 20 nt, Human herpesvirus 5
cauaagacgggacggcugcc

SEQ ID NO: 146467 - RNA, 14 nt, Human herpesvirus 5
cauaagaagccaag

SEQ ID NO: 146468 - RNA, 18 nt, Human herpesvirus 5
cauaaugacguacauaua

SEQ ID NO: 146469 - RNA, 23 nt, Human herpesvirus 5
cauaaugacguacauauacguga

SEQ ID NO: 146470 - RNA, 13 nt, Human herpesvirus 5
cauacaaugugcu

SEQ ID NO: 146471 - RNA, 12 nt, Human herpesvirus 5
cauacaguacaa

SEQ ID NO: 146472 - RNA, 16 nt, Human herpesvirus 5
cauacgggacuuacau

SEQ ID NO: 146473 - RNA, 19 nt, Human herpesvirus 5
cauacgggacuuacaucug

SEQ ID NO: 146474 - RNA, 22 nt, Human herpesvirus 5
caguguauuggcauauagccaa

SEQ ID NO: 146475 - RNA, 17 nt, Human herpesvirus 5
caguucguagaucacac

SEQ ID NO: 146476 - RNA, 12 nt, Human herpesvirus 5
caguucuaucaa

SEQ ID NO: 146477 - RNA, 19 nt, Human herpesvirus 5
caguuuccacgacgcaugc

SEQ ID NO: 146478 - RNA, 20 nt, Human herpesvirus 5
cagucccgagaaaacggcug

SEQ ID NO: 146479 - RNA, 22 nt, Human herpesvirus 5
cagucuccgcaguuacaccaca

SEQ ID NO: 146480 - RNA, 22 nt, Human herpesvirus 5
cagucgacgggugguaccugca

SEQ ID NO: 146481 - RNA, 23 nt, Human herpesvirus 5
cagugacgugaaucgccccucac

SEQ ID NO: 146482 - RNA, 14 nt, Human herpesvirus 5
cagugagagcucau

SEQ ID NO: 146483 - RNA, 17 nt, Human herpesvirus 5
cagugagagcucauaca

SEQ ID NO: 146484 - RNA, 15 nt, Human herpesvirus 5
cagugccagcgggaa

SEQ ID NO: 146485 - RNA, 14 nt, Human herpesvirus 5
gccaugcucaagac

SEQ ID NO: 146486 - RNA, 14 nt, Human herpesvirus 5
gccauggaccugac

SEQ ID NO: 146487 - RNA, 19 nt, Human herpesvirus 5
gccauggagcugcacucac

SEQ ID NO: 146488 - RNA, 16 nt, Human herpesvirus 5
gcccgcacacuggcug

SEQ ID NO: 146489 - RNA, 19 nt, Human herpesvirus 5
gcccacaguagcgguacca

SEQ ID NO: 146490 - RNA, 23 nt, Human herpesvirus 5
gcccacgguccgggcacaaucaa

SEQ ID NO: 146491 - RNA, 16 nt, Human herpesvirus 5
gccaacgagacuaucu

SEQ ID NO: 146492 - RNA, 15 nt, Human herpesvirus 5
gccaagaugcugcgg

SEQ ID NO: 146493 - RNA, 12 nt, Human herpesvirus 5
gcauauagccaa

SEQ ID NO: 146494 - RNA, 15 nt, Human herpesvirus 5
gcauauagccaauaa

SEQ ID NO: 146495 - RNA, 15 nt, Human herpesvirus 5
gcaucaucaacagca

SEQ ID NO: 146496 - RNA, 18 nt, Human herpesvirus 5
gcaucaucaacagcagca

SEQ ID NO: 146497 - RNA, 16 nt, Human herpesvirus 5
gccaaaaacaguauag

SEQ ID NO: 146498 - RNA, 19 nt, Human herpesvirus 5
gccaaaaacaguauagcau

SEQ ID NO: 146499 - RNA, 22 nt, Human herpesvirus 5
gcgaagaugcuauccgcugcga

SEQ ID NO: 146500 - RNA, 22 nt, Human herpesvirus 5
gcgaagcccguucuuccgaguc

SEQ ID NO: 146501 - RNA, 22 nt, Human herpesvirus 5
gcgaacguucuguaaucuucca

SEQ ID NO: 146502 - RNA, 19 nt, Human herpesvirus 5
gcgacuacggcguuuuuca

SEQ ID NO: 146503 - RNA, 17 nt, Human herpesvirus 5
gcgacgucaacggugga

SEQ ID NO: 146504 - RNA, 22 nt, Human herpesvirus 5
gcgacaaucgccgacaagccgg

SEQ ID NO: 146505 - RNA, 13 nt, Human herpesvirus 5
gcgaugugcaaug

SEQ ID NO: 146506 - RNA, 15 nt, Human herpesvirus 5
gcgcagauggacaac

SEQ ID NO: 146507 - RNA, 12 nt, Human herpesvirus 5
gcgcacuuguca

SEQ ID NO: 146508 - RNA, 19 nt, Human herpesvirus 5
gcgauggcccgcuaucgca

SEQ ID NO: 146509 - RNA, 13 nt, Human herpesvirus 5
gcgagcugggcga

SEQ ID NO: 146510 - RNA, 15 nt, Human herpesvirus 5
gcgaggacaaccgca

SEQ ID NO: 146511 - RNA, 16 nt, Human herpesvirus 5
gcgagccccaucgggc

SEQ ID NO: 146512 - RNA, 15 nt, Human herpesvirus 5
gccuccgguggugcg

SEQ ID NO: 146513 - RNA, 16 nt, Human herpesvirus 5
gccggugccgaugaga

SEQ ID NO: 146514 - RNA, 15 nt, Human herpesvirus 5
gccggguuggcacga

SEQ ID NO: 146515 - RNA, 15 nt, Human herpesvirus 5
gcccuggucuggccc

SEQ ID NO: 146516 - RNA, 22 nt, Human herpesvirus 5
gcccuucaacggcaccaccgag

SEQ ID NO: 146517 - RNA, 18 nt, Human herpesvirus 5
gcccuucuggagcacacu

SEQ ID NO: 146518 - RNA, 22 nt, Human herpesvirus 5
gcccuucuggagcacacugcua

SEQ ID NO: 146519 - RNA, 20 nt, Human herpesvirus 5
gccgcgguggucgaugcuga

SEQ ID NO: 146520 - RNA, 13 nt, Human herpesvirus 5
gccgcuggacuga

SEQ ID NO: 146521 - RNA, 17 nt, Human herpesvirus 5
gccgcuggacugacaca

SEQ ID NO: 146522 - RNA, 19 nt, Human herpesvirus 5
gccgcuggacugacacagc

SEQ ID NO: 146523 - RNA, 16 nt, Human herpesvirus 5
gccgggcgucuucgca

SEQ ID NO: 146524 - RNA, 18 nt, Human herpesvirus 5
gccggcuccaagugcaag

SEQ ID NO: 146525 - RNA, 13 nt, Human herpesvirus 5
gccggcugcugca

SEQ ID NO: 146526 - RNA, 21 nt, Human herpesvirus 5
gccggcccucggggugcgggu

SEQ ID NO: 146527 - RNA, 17 nt, Human herpesvirus 5
gcagcugcaccacggcc

SEQ ID NO: 146528 - RNA, 22 nt, Human herpesvirus 5
gcagcggucgcaggacgggaua

SEQ ID NO: 146529 - RNA, 14 nt, Human herpesvirus 5
gcagcucuuuucca

SEQ ID NO: 146530 - RNA, 16 nt, Human herpesvirus 5
gcagccguuuccagag

SEQ ID NO: 146531 - RNA, 19 nt, Human herpesvirus 5
gcagccuccucgcugggau

SEQ ID NO: 146532 - RNA, 15 nt, Human herpesvirus 5
gcagcagcuggugca

SEQ ID NO: 146533 - RNA, 13 nt, Human herpesvirus 5
gcagugggcccac

SEQ ID NO: 146534 - RNA, 13 nt, Human herpesvirus 5
gcaguuacaccac

SEQ ID NO: 146535 - RNA, 21 nt, Human herpesvirus 5
gcaguauuucuagagcacuga

SEQ ID NO: 146536 - RNA, 17 nt, Human herpesvirus 5
gcaggguaaaaaccacg

SEQ ID NO: 146537 - RNA, 21 nt, Human herpesvirus 5
gcagggucgaaaucuuaccac

SEQ ID NO: 146538 - RNA, 18 nt, Human herpesvirus 5
gcagguggaggacaguau

SEQ ID NO: 146539 - RNA, 18 nt, Human herpesvirus 5
gcaggcuuugacggugau

SEQ ID NO: 146540 - RNA, 19 nt, Human herpesvirus 5
gcaggcuuugacggugaug

SEQ ID NO: 146541 - RNA, 14 nt, Human herpesvirus 5
gcacgacaucuucc

SEQ ID NO: 146542 - RNA, 22 nt, Human herpesvirus 5
gcacggaccgcaacgugcugcu

SEQ ID NO: 146543 - RNA, 16 nt, Human herpesvirus 5
gcacgcacgacaugac

SEQ ID NO: 146544 - RNA, 16 nt, Human herpesvirus 5
gcacgucaguggugac

SEQ ID NO: 146545 - RNA, 18 nt, Human herpesvirus 5
gcacgucggggcuguguc

SEQ ID NO: 146546 - RNA, 16 nt, Human herpesvirus 5
gcacuccacacgccau

SEQ ID NO: 146547 - RNA, 12 nt, Human herpesvirus 5
gcacucuugcuc

SEQ ID NO: 146548 - RNA, 13 nt, Human herpesvirus 5
gcacuuccuguac

SEQ ID NO: 146549 - RNA, 17 nt, Human herpesvirus 5
gcacuuccuguacacau

SEQ ID NO: 146550 - RNA, 18 nt, Human herpesvirus 5
gcacuuuacauaaaacca

SEQ ID NO: 146551 - RNA, 21 nt, Human herpesvirus 5
gcacuuuacauaaaaccaccg

SEQ ID NO: 146552 - RNA, 19 nt, Human herpesvirus 5
gcagaaguuguugcaacug

SEQ ID NO: 146553 - RNA, 21 nt, Human herpesvirus 5
gcagaccaccaugugcauggg

SEQ ID NO: 146554 - RNA, 19 nt, Human herpesvirus 5
gcagacaucuuaugaagcu

SEQ ID NO: 146555 - RNA, 19 nt, Human herpesvirus 5
gcacuuucgaccacaagcu

SEQ ID NO: 146556 - RNA, 20 nt, Human herpesvirus 5
gcacuuucgaccacaagcuc

SEQ ID NO: 146557 - RNA, 23 nt, Human herpesvirus 5
gcacuuuuuuuacuaguauccac

SEQ ID NO: 146558 - RNA, 12 nt, Human herpesvirus 5
gcagacgguggu

SEQ ID NO: 146559 - RNA, 13 nt, Human herpesvirus 5
gcaagaguucaaa

SEQ ID NO: 146560 - RNA, 17 nt, Human herpesvirus 5
gcaagugccugcacgac

SEQ ID NO: 146561 - RNA, 19 nt, Human herpesvirus 5
gcaagugccugcacgaccu

SEQ ID NO: 146562 - RNA, 20 nt, Human herpesvirus 5
gcaaugauauuuuacaggua

SEQ ID NO: 146563 - RNA, 22 nt, Human herpesvirus 5
gcaauagcagccgacacagcgg

SEQ ID NO: 146564 - RNA, 22 nt, Human herpesvirus 5
gcaaucaaaccuguuccuguca

SEQ ID NO: 146565 - RNA, 18 nt, Human herpesvirus 5
gcaaucaaugcgucugca

SEQ ID NO: 146566 - RNA, 18 nt, Human herpesvirus 5
gcaacuggcguucaccac

SEQ ID NO: 146567 - RNA, 14 nt, Human herpesvirus 5
gcaacuucuucuac

SEQ ID NO: 146568 - RNA, 18 nt, Human herpesvirus 5
gcaacuucuucuacucac

SEQ ID NO: 146569 - RNA, 22 nt, Human herpesvirus 5
gaucacgcgcucuucacacacu

SEQ ID NO: 146570 - RNA, 19 nt, Human herpesvirus 5
gaucacuaucuucaaccuc

SEQ ID NO: 146571 - RNA, 14 nt, Human herpesvirus 5
gaucaguuguucau

SEQ ID NO: 146572 - RNA, 16 nt, Human herpesvirus 5
gcaccuggguggaacg

SEQ ID NO: 146573 - RNA, 15 nt, Human herpesvirus 5
gcaccuguauacugu

SEQ ID NO: 146574 - RNA, 20 nt, Human herpesvirus 5
gcaccucuauuguguguacg

SEQ ID NO: 146575 - RNA, 18 nt, Human herpesvirus 5
gcaccucgaugaagccua

SEQ ID NO: 146576 - RNA, 21 nt, Human herpesvirus 5
gcaccucgaugaagccuauca

SEQ ID NO: 146577 - RNA, 20 nt, Human herpesvirus 5
gcaccgguuggagcagcucu

SEQ ID NO: 146578 - RNA, 20 nt, Human herpesvirus 5
gcaccuacgacccuccuaaa

SEQ ID NO: 146579 - RNA, 20 nt, Human herpesvirus 5
gcacaucuauuuuugcuaau

SEQ ID NO: 146580 - RNA, 17 nt, Human herpesvirus 5
gcaccacggcuugcaaa

SEQ ID NO: 146581 - RNA, 23 nt, Human herpesvirus 5
gcaccacgucgauucccaucuca

SEQ ID NO: 146582 - RNA, 19 nt, Human herpesvirus 5
gcacauacgggacuuacau

SEQ ID NO: 146583 - RNA, 20 nt, Human herpesvirus 5
gcacauaaacaaacgggacc

SEQ ID NO: 146584 - RNA, 15 nt, Human herpesvirus 5
gcacauauguagcac

SEQ ID NO: 146585 - RNA, 10 nt, Human herpesvirus 5
gcacacagac

SEQ ID NO: 146586 - RNA, 15 nt, Human herpesvirus 5
gcacacagacuuuau

SEQ ID NO: 146587 - RNA, 20 nt, Human herpesvirus 5
gcaauugccucuacacuugg

SEQ ID NO: 146588 - RNA, 19 nt, Human herpesvirus 5
gcaaugucguaguacaaua

SEQ ID NO: 146589 - RNA, 18 nt, Human herpesvirus 5
ggaauauuggcggggaua

SEQ ID NO: 146590 - RNA, 22 nt, Human herpesvirus 5
ggaaugguaaagacaucgucac

SEQ ID NO: 146591 - RNA, 15 nt, Human herpesvirus 5
ggaaugucagaugac

SEQ ID NO: 146592 - RNA, 20 nt, Human herpesvirus 5
ggaaugggcuaggauaauca

SEQ ID NO: 146593 - RNA, 14 nt, Human herpesvirus 5
ggaacgccgugugg

SEQ ID NO: 146594 - RNA, 21 nt, Human herpesvirus 5
ggaacgcuguuacgauuucaa

SEQ ID NO: 146595 - RNA, 17 nt, Human herpesvirus 5
ggaacggguguacaaaa

SEQ ID NO: 146596 - RNA, 14 nt, Human herpesvirus 5
ggaaacggacacua

SEQ ID NO: 146597 - RNA, 17 nt, Human herpesvirus 5
ggaaauacaugaugaau

SEQ ID NO: 146598 - RNA, 17 nt, Human herpesvirus 5
ggaaauuaugaacuuac

SEQ ID NO: 146599 - RNA, 18 nt, Human herpesvirus 5
gcuuuugagucuagacag

SEQ ID NO: 146600 - RNA, 19 nt, Human herpesvirus 5
gcuuuucccggcccugugc

SEQ ID NO: 146601 - RNA, 15 nt, Human herpesvirus 5
gcuuuuuuuauacau

SEQ ID NO: 146602 - RNA, 19 nt, Human herpesvirus 5
gcuuuuuuuauacaucucc

SEQ ID NO: 146603 - RNA, 19 nt, Human herpesvirus 5
ggaaaccgagacggaggaa

SEQ ID NO: 146604 - RNA, 17 nt, Human herpesvirus 5
ggaaaauuauaacggaa

SEQ ID NO: 146605 - RNA, 14 nt, Human herpesvirus 5
ggaaaaacaaagaa

SEQ ID NO: 146606 - RNA, 13 nt, Human herpesvirus 5
gcuuuccuggaca

SEQ ID NO: 146607 - RNA, 23 nt, Human herpesvirus 5
gcuuuaacccaaaaccaugcuac

SEQ ID NO: 146608 - RNA, 15 nt, Human herpesvirus 5
gcuguucuggaugua

SEQ ID NO: 146609 - RNA, 17 nt, Human herpesvirus 5
gcuguugaccuggguag

SEQ ID NO: 146610 - RNA, 18 nt, Human herpesvirus 5
gcucucgcggcccuucaa

SEQ ID NO: 146611 - RNA, 19 nt, Human herpesvirus 5
gcucucccggauccaaggg

SEQ ID NO: 146612 - RNA, 19 nt, Human herpesvirus 5
gcugacagcccaaggggaa

SEQ ID NO: 146613 - RNA, 20 nt, Human herpesvirus 5
gcuguggcugccgcuacuga

SEQ ID NO: 146614 - RNA, 21 nt, Human herpesvirus 5
gcuguggcugccgcuacugau

SEQ ID NO: 146615 - RNA, 18 nt, Human herpesvirus 5
gcugugggcccacugcgg

SEQ ID NO: 146616 - RNA, 17 nt, Human herpesvirus 5
gcugacuucuacggagu

SEQ ID NO: 146617 - RNA, 21 nt, Human herpesvirus 5
gcugcacguggccuggcccga

SEQ ID NO: 146618 - RNA, 19 nt, Human herpesvirus 5
gcuauaccaucaccuauaa

SEQ ID NO: 146619 - RNA, 15 nt, Human herpesvirus 5
gcuauguacacaucc

SEQ ID NO: 146620 - RNA, 22 nt, Human herpesvirus 5
gcgcgacguagaauacuggaag

SEQ ID NO: 146621 - RNA, 14 nt, Human herpesvirus 5
gcgccgacuggauc

SEQ ID NO: 146622 - RNA, 17 nt, Human herpesvirus 5
gcgccguccggacaccg

SEQ ID NO: 146623 - RNA, 14 nt, Human herpesvirus 5
gcgccucucggagc

SEQ ID NO: 146624 - RNA, 13 nt, Human herpesvirus 5
gcgccgugcucag

SEQ ID NO: 146625 - RNA, 13 nt, Human herpesvirus 5
gcgcauguucuau

SEQ ID NO: 146626 - RNA, 14 nt, Human herpesvirus 5
ggcauauagccaau

SEQ ID NO: 146627 - RNA, 18 nt, Human herpesvirus 5
ggcagagccacguugaga

SEQ ID NO: 146628 - RNA, 20 nt, Human herpesvirus 5
ggcagcacaccugccucgac

SEQ ID NO: 146629 - RNA, 16 nt, Human herpesvirus 5
ggcagcaccaugugca

SEQ ID NO: 146630 - RNA, 21 nt, Human herpesvirus 5
ggcagauaaaucacgucaggu

SEQ ID NO: 146631 - RNA, 19 nt, Human herpesvirus 5
ggcacggaccgcaacgugc

SEQ ID NO: 146632 - RNA, 13 nt, Human herpesvirus 5
ggcauauugaaaa

SEQ ID NO: 146633 - RNA, 14 nt, Human herpesvirus 5
ggcaugcaaugcaa

SEQ ID NO: 146634 - RNA, 15 nt, Human herpesvirus 5
ggcaugcugucgggu

SEQ ID NO: 146635 - RNA, 22 nt, Human herpesvirus 5
ggcaugucccuacucaccaaag

SEQ ID NO: 146636 - RNA, 18 nt, Human herpesvirus 5
ggccaacagccuguggca

SEQ ID NO: 146637 - RNA, 21 nt, Human herpesvirus 5
ggccaccaugcugagcaagua

SEQ ID NO: 146638 - RNA, 20 nt, Human herpesvirus 5
ggauguauguaucgcauaaa

SEQ ID NO: 146639 - RNA, 14 nt, Human herpesvirus 5
ggacgaggcagggu

SEQ ID NO: 146640 - RNA, 12 nt, Human herpesvirus 5
ggacgugaugcg

SEQ ID NO: 146641 - RNA, 17 nt, Human herpesvirus 5
ggacgcuguguggcgug

SEQ ID NO: 146642 - RNA, 20 nt, Human herpesvirus 5
ggaccgcaacgugcugcuga

SEQ ID NO: 146643 - RNA, 20 nt, Human herpesvirus 5
ggacaugguuaucauccagg

SEQ ID NO: 146644 - RNA, 20 nt, Human herpesvirus 5
ggacauugggcugugguuca

SEQ ID NO: 146645 - RNA, 19 nt, Human herpesvirus 5
ggacaguguauuggcauau

SEQ ID NO: 146646 - RNA, 18 nt, Human herpesvirus 5
ggaccaaagacuguggug

SEQ ID NO: 146647 - RNA, 18 nt, Human herpesvirus 5
ggacaaaaaguacacugg

SEQ ID NO: 146648 - RNA, 22 nt, Human herpesvirus 5
ggacaaguauuuaugacggaca

SEQ ID NO: 146649 - RNA, 21 nt, Human herpesvirus 5
ggacaaccgcauccugcccac

SEQ ID NO: 146650 - RNA, 20 nt, Human herpesvirus 5
ggacaacuuugacgugcuca

SEQ ID NO: 146651 - RNA, 19 nt, Human herpesvirus 5
ggcucgucgugggcuacuu

SEQ ID NO: 146652 - RNA, 14 nt, Human herpesvirus 5
ggcucguguggcag

SEQ ID NO: 146653 - RNA, 20 nt, Human herpesvirus 5
ggcugcgcccguuggugaau

SEQ ID NO: 146654 - RNA, 12 nt, Human herpesvirus 5
ggcugaucugca

SEQ ID NO: 146655 - RNA, 21 nt, Human herpesvirus 5
ggcugcacacggagcacgggc

SEQ ID NO: 146656 - RNA, 13 nt, Human herpesvirus 5
ggcugcacguggc

SEQ ID NO: 146657 - RNA, 11 nt, Human herpesvirus 5
ggcugcucaac

SEQ ID NO: 146658 - RNA, 18 nt, Human herpesvirus 5
gggagucaacacuaccaa

SEQ ID NO: 146659 - RNA, 18 nt, Human herpesvirus 5
ggcgacugacgccggcau

SEQ ID NO: 146660 - RNA, 12 nt, Human herpesvirus 5
ggcgagccacuc

SEQ ID NO: 146661 - RNA, 23 nt, Human herpesvirus 5
ggcgacuuuuucugcaaagucaa

SEQ ID NO: 146662 - RNA, 20 nt, Human herpesvirus 5
ggcgauagacgacuuuggug

SEQ ID NO: 146663 - RNA, 18 nt, Human herpesvirus 5
ggcucccagagcugcuag

SEQ ID NO: 146664 - RNA, 19 nt, Human herpesvirus 5
ggccuguggauagauuucu

SEQ ID NO: 146665 - RNA, 20 nt, Human herpesvirus 5
ggcgacacucaguacuuugg

SEQ ID NO: 146666 - RNA, 20 nt, Human herpesvirus 5
gggcgcgccggcgccagugg

SEQ ID NO: 146667 - RNA, 18 nt, Human herpesvirus 5
gggcugcuccaacuuugu

SEQ ID NO: 146668 - RNA, 16 nt, Human herpesvirus 5
gggccaccagccgcga

SEQ ID NO: 146669 - RNA, 20 nt, Human herpesvirus 5
gggcaaucaaugcgucugca

SEQ ID NO: 146670 - RNA, 12 nt, Human herpesvirus 5
gggcacaaucaa

SEQ ID NO: 146671 - RNA, 16 nt, Human herpesvirus 5
gggcaccuguauacug

SEQ ID NO: 146672 - RNA, 17 nt, Human herpesvirus 5
gaccaaagacuguggug

SEQ ID NO: 146673 - RNA, 12 nt, Human herpesvirus 5
gaccaagagcau

SEQ ID NO: 146674 - RNA, 12 nt, Human herpesvirus 5
gaccagcacucg

SEQ ID NO: 146675 - RNA, 21 nt, Human herpesvirus 5
gaccaccguuaccaguaccac

SEQ ID NO: 146676 - RNA, 18 nt, Human herpesvirus 5
gaccagcgccaccauagc

SEQ ID NO: 146677 - RNA, 14 nt, Human herpesvirus 5
aaauacaugaugaa

SEQ ID NO: 146678 - RNA, 17 nt, Human herpesvirus 5
aaauacaugaugaaugu

SEQ ID NO: 146679 - RNA, 17 nt, Human herpesvirus 5
aaauacacaacagcugu

SEQ ID NO: 146680 - RNA, 19 nt, Human herpesvirus 5
aaaucacguucgucgugac

SEQ ID NO: 146681 - RNA, 20 nt, Human herpesvirus 5
gacaucuuaugaagcugaac

SEQ ID NO: 146682 - RNA, 12 nt, Human herpesvirus 5
gacaguuuccac

SEQ ID NO: 146683 - RNA, 15 nt, Human herpesvirus 5
gacauccaauuacac

SEQ ID NO: 146684 - RNA, 11 nt, Human herpesvirus 5
gacauggagcc

SEQ ID NO: 146685 - RNA, 23 nt, Human herpesvirus 5
gacaguguauuggcauauagcca

SEQ ID NO: 146686 - RNA, 16 nt, Human herpesvirus 5
gacagugagagcucau

SEQ ID NO: 146687 - RNA, 19 nt, Human herpesvirus 5
gacaggcucgucgugggcu

SEQ ID NO: 146688 - RNA, 16 nt, Human herpesvirus 5
gacaggguaacagccu

SEQ ID NO: 146689 - RNA, 21 nt, Human herpesvirus 5
gacaacggcuggaaauggacu

SEQ ID NO: 146690 - RNA, 19 nt, Human herpesvirus 5
gacaacaaugacacgucuu

SEQ ID NO: 146691 - RNA, 18 nt, Human herpesvirus 5
gaauugguguucuuacag

SEQ ID NO: 146692 - RNA, 19 nt, Human herpesvirus 5
gaauuguuaccagaacucu

SEQ ID NO: 146693 - RNA, 20 nt, Human herpesvirus 5
aaauuauacccaccaacuga

SEQ ID NO: 146694 - RNA, 15 nt, Human herpesvirus 5
aaauuguuauugcca

SEQ ID NO: 146695 - RNA, 18 nt, Human herpesvirus 5
aaauucaauaaaaaccac

SEQ ID NO: 146696 - RNA, 14 nt, Human herpesvirus 5
aacaaacaaugaca

SEQ ID NO: 146697 - RNA, 14 nt, Human herpesvirus 5
gacggauaucuccg

SEQ ID NO: 146698 - RNA, 18 nt, Human herpesvirus 5
gacgccggguuggcacga

SEQ ID NO: 146699 - RNA, 19 nt, Human herpesvirus 5
gacgccgucuaacagguau

SEQ ID NO: 146700 - RNA, 16 nt, Human herpesvirus 5
gacgaugaaccuuccc

SEQ ID NO: 146701 - RNA, 14 nt, Human herpesvirus 5
gacgagcuggacaa

SEQ ID NO: 146702 - RNA, 15 nt, Human herpesvirus 5
gacgacucagggcug

SEQ ID NO: 146703 - RNA, 15 nt, Human herpesvirus 5
gacgacuggcucaac

SEQ ID NO: 146704 - RNA, 16 nt, Human herpesvirus 5
gacgaaacguauccau

SEQ ID NO: 146705 - RNA, 22 nt, Human herpesvirus 5
gacgaaacguauccauuggaga

SEQ ID NO: 146706 - RNA, 16 nt, Human herpesvirus 5
gacgaaagacaaugaa

SEQ ID NO: 146707 - RNA, 19 nt, Human herpesvirus 5
gaccuugcugaugugccag

SEQ ID NO: 146708 - RNA, 22 nt, Human herpesvirus 5
gacgugcgauuuggaccuggag

SEQ ID NO: 146709 - RNA, 23 nt, Human herpesvirus 5
gacguaggcaaacugaccaagcu

SEQ ID NO: 146710 - RNA, 17 nt, Human herpesvirus 5
gacgucaaagcucacua

SEQ ID NO: 146711 - RNA, 14 nt, Human herpesvirus 5
gacgucaacaucau

SEQ ID NO: 146712 - RNA, 21 nt, Human herpesvirus 5
gacguacauauacgugauuau

SEQ ID NO: 146713 - RNA, 19 nt, Human herpesvirus 5
gacgucccuuuuacuagua

SEQ ID NO: 146714 - RNA, 20 nt, Human herpesvirus 5
gacgugcaagacuacaugcu

SEQ ID NO: 146715 - RNA, 14 nt, Human herpesvirus 5
gagaauuagagcau

SEQ ID NO: 146716 - RNA, 16 nt, Human herpesvirus 5
gagaauuagagcauua

SEQ ID NO: 146717 - RNA, 17 nt, Human herpesvirus 5
gacggcgugacacagca

SEQ ID NO: 146718 - RNA, 14 nt, Human herpesvirus 5
gacgguacuuaucg

SEQ ID NO: 146719 - RNA, 15 nt, Human herpesvirus 5
gacggugacuaugug

SEQ ID NO: 146720 - RNA, 22 nt, Human herpesvirus 5
gacggcaacgauagucaucuca

SEQ ID NO: 146721 - RNA, 17 nt, Human herpesvirus 5
gacggcaaggcggagga

SEQ ID NO: 146722 - RNA, 14 nt, Human herpesvirus 5
gacggcgacaucac

SEQ ID NO: 146723 - RNA, 15 nt, Human herpesvirus 5
gacggcgacaucacg

SEQ ID NO: 146724 - RNA, 16 nt, Human herpesvirus 5
aacaaauauauggagu

SEQ ID NO: 146725 - RNA, 18 nt, Human herpesvirus 5
gagaugcgggguggugcu

SEQ ID NO: 146726 - RNA, 15 nt, Human herpesvirus 5
gagauucuaaagcca

SEQ ID NO: 146727 - RNA, 17 nt, Human herpesvirus 5
gagagggaagcccuaaa

SEQ ID NO: 146728 - RNA, 18 nt, Human herpesvirus 5
gagacauggacucuugua

SEQ ID NO: 146729 - RNA, 15 nt, Human herpesvirus 5
gagccacucggccau

SEQ ID NO: 146730 - RNA, 21 nt, Human herpesvirus 5
gagcacacugcuacccugcgc

SEQ ID NO: 146731 - RNA, 13 nt, Human herpesvirus 5
gagcaauugccuc

SEQ ID NO: 146732 - RNA, 18 nt, Human herpesvirus 5
gagcacgggacacggugu

SEQ ID NO: 146733 - RNA, 15 nt, Human herpesvirus 5
gagcaccucaaaaag

SEQ ID NO: 146734 - RNA, 14 nt, Human herpesvirus 5
gauaaccuaccugg

SEQ ID NO: 146735 - RNA, 15 nt, Human herpesvirus 5
gauaacggucaagaa

SEQ ID NO: 146736 - RNA, 24 nt, Human herpesvirus 5
gauaacaauauugcuucguauaca

SEQ ID NO: 146737 - RNA, 14 nt, Human herpesvirus 5
gaguuuucccucag

SEQ ID NO: 146738 - RNA, 18 nt, Human herpesvirus 5
gaguugcucgauuaccua

SEQ ID NO: 146739 - RNA, 14 nt, Human herpesvirus 5
gauauaggugacag

SEQ ID NO: 146740 - RNA, 19 nt, Human herpesvirus 5
gauauaaagaaucuaggaa

SEQ ID NO: 146741 - RNA, 21 nt, Human herpesvirus 5
gauauaaagcgguauauucaa

SEQ ID NO: 146742 - RNA, 14 nt, Human herpesvirus 5
gauaucgauauuac

SEQ ID NO: 146743 - RNA, 23 nt, Human herpesvirus 5
gauaucuacgcaauguuacacau

SEQ ID NO: 146744 - RNA, 22 nt, Human herpesvirus 5
gauauccacaacgacaaauaca

SEQ ID NO: 146745 - RNA, 23 nt, Human herpesvirus 5
gauaugucgcgauagacaacucc

SEQ ID NO: 146746 - RNA, 18 nt, Human herpesvirus 5
gagcucuuuucaucuucu

SEQ ID NO: 146747 - RNA, 19 nt, Human herpesvirus 5
gagcugggcgaccgucucu

SEQ ID NO: 146748 - RNA, 20 nt, Human herpesvirus 5
gaggacaaccgcauccugcc

SEQ ID NO: 146749 - RNA, 17 nt, Human herpesvirus 5
gaguccuggucuuucau

SEQ ID NO: 146750 - RNA, 21 nt, Human herpesvirus 5
gagucaccguaaucaccaaag

SEQ ID NO: 146751 - RNA, 16 nt, Human herpesvirus 5
gaguaggugauccagu

SEQ ID NO: 146752 - RNA, 19 nt, Human herpesvirus 5
gaguagaaaagacagggaa

SEQ ID NO: 146753 - RNA, 18 nt, Human herpesvirus 5
gaaucugguacuuaguca

SEQ ID NO: 146754 - RNA, 19 nt, Human herpesvirus 5
gaaugcaacgcuuucagga

SEQ ID NO: 146755 - RNA, 16 nt, Human herpesvirus 5
gaaugacguuaucaua

SEQ ID NO: 146756 - RNA, 13 nt, Human herpesvirus 5
gaagguaaagccc

SEQ ID NO: 146757 - RNA, 18 nt, Human herpesvirus 5
gaagguaacuucaguggg

SEQ ID NO: 146758 - RNA, 22 nt, Human herpesvirus 5
gaagguuuugugccaacaauga

SEQ ID NO: 146759 - RNA, 16 nt, Human herpesvirus 5
gaaucuaggaacacug

SEQ ID NO: 146760 - RNA, 14 nt, Human herpesvirus 5
gaaucgaugucaag

SEQ ID NO: 146761 - RNA, 14 nt, Human herpesvirus 5
gaaguauacauuac

SEQ ID NO: 146762 - RNA, 13 nt, Human herpesvirus 5
gaauggccaugua

SEQ ID NO: 146763 - RNA, 13 nt, Human herpesvirus 5
gaaugggacaccc

SEQ ID NO: 146764 - RNA, 17 nt, Human herpesvirus 5
gaaugggacacccgugg

SEQ ID NO: 146765 - RNA, 16 nt, Human herpesvirus 5
gaauucaugcuguaug

SEQ ID NO: 146766 - RNA, 14 nt, Human herpesvirus 5
aaagaccgcugccu

SEQ ID NO: 146767 - RNA, 14 nt, Human herpesvirus 5
aaagacaucgucac

SEQ ID NO: 146768 - RNA, 23 nt, Human herpesvirus 5
aaagaaaaaaugguguuacacac

SEQ ID NO: 146769 - RNA, 12 nt, Human herpesvirus 5
aaagaaaccacg

SEQ ID NO: 146770 - RNA, 24 nt, Human herpesvirus 5
aaagaaacccucaaaacaucacca

SEQ ID NO: 146771 - RNA, 22 nt, Human herpesvirus 5
aaaccgucgaaaacaaccacac

SEQ ID NO: 146772 - RNA, 23 nt, Human herpesvirus 5
aaaccgucgaaaacaaccacaca

SEQ ID NO: 146773 - RNA, 16 nt, Human herpesvirus 5
aaaccuaccugggcug

SEQ ID NO: 146774 - RNA, 18 nt, Human herpesvirus 5
aaaccuaccugggcugca

SEQ ID NO: 146775 - RNA, 18 nt, Human herpesvirus 5
aaagagauagacaucaca

SEQ ID NO: 146776 - RNA, 16 nt, Human herpesvirus 5
aaagagcguacagucc

SEQ ID NO: 146777 - RNA, 21 nt, Human herpesvirus 5
aaagagagucacacuuaagaa

SEQ ID NO: 146778 - RNA, 19 nt, Human herpesvirus 5
gaauugcgaagccagcuac

SEQ ID NO: 146779 - RNA, 19 nt, Human herpesvirus 5
gaauucuggcaagaguuca

SEQ ID NO: 146780 - RNA, 21 nt, Human herpesvirus 5
gaauucuggcaagaguucaaa

SEQ ID NO: 146781 - RNA, 20 nt, Human herpesvirus 5
aaagcacaauacacaugugg

SEQ ID NO: 146782 - RNA, 13 nt, Human herpesvirus 5
gaagaagaacaag

SEQ ID NO: 146783 - RNA, 14 nt, Human herpesvirus 5
gaagaagaacaaga

SEQ ID NO: 146784 - RNA, 17 nt, Human herpesvirus 5
gaagaacaagcgguggu

SEQ ID NO: 146785 - RNA, 13 nt, Human herpesvirus 5
gaagacaccugga

SEQ ID NO: 146786 - RNA, 17 nt, Human herpesvirus 5
gaagaccucaccaucuc

SEQ ID NO: 146787 - RNA, 18 nt, Human herpesvirus 5
gaagaccucaccaucuca

SEQ ID NO: 146788 - RNA, 14 nt, Human herpesvirus 5
gaaggcuacucuau

SEQ ID NO: 146789 - RNA, 19 nt, Human herpesvirus 5
gaagcugaacaauaaacua

SEQ ID NO: 146790 - RNA, 19 nt, Human herpesvirus 5
gaagcuguuuuguuuucca

SEQ ID NO: 146791 - RNA, 17 nt, Human herpesvirus 5
gaaggaacgcacgcugg

SEQ ID NO: 146792 - RNA, 13 nt, Human herpesvirus 5
gaaggacagugua

SEQ ID NO: 146793 - RNA, 18 nt, Human herpesvirus 5
gaagauacucgauggggu

SEQ ID NO: 146794 - RNA, 12 nt, Human herpesvirus 5
gaaagcugcaau

SEQ ID NO: 146795 - RNA, 14 nt, Human herpesvirus 5
gaaauaaauacagg

SEQ ID NO: 146796 - RNA, 18 nt, Human herpesvirus 5
gaaauaaauacagggaau

SEQ ID NO: 146797 - RNA, 12 nt, Human herpesvirus 5
gaaauacaugau

SEQ ID NO: 146798 - RNA, 20 nt, Human herpesvirus 5
gaaauacaugaugaauguca

SEQ ID NO: 146799 - RNA, 13 nt, Human herpesvirus 5
gaaauacaugcua

SEQ ID NO: 146800 - RNA, 17 nt, Human herpesvirus 5
gaacugugaugucuauc

SEQ ID NO: 146801 - RNA, 17 nt, Human herpesvirus 5
gaacuguugcgacaaua

SEQ ID NO: 146802 - RNA, 19 nt, Human herpesvirus 5
gaacugaguuuagugcuag

SEQ ID NO: 146803 - RNA, 16 nt, Human herpesvirus 5
gaaaacgggauaugaa

SEQ ID NO: 146804 - RNA, 15 nt, Human herpesvirus 5
gaaaacgucaucucg

SEQ ID NO: 146805 - RNA, 14 nt, Human herpesvirus 5
gaaaaccgccgcuu

SEQ ID NO: 146806 - RNA, 19 nt, Human herpesvirus 5
gaaaagcaguggcagcagg

SEQ ID NO: 146807 - RNA, 23 nt, Human herpesvirus 5
gaaaaguuuauggggaaaaagac

SEQ ID NO: 146808 - RNA, 17 nt, Human herpesvirus 5
gaaaaagaaacccucaa

SEQ ID NO: 146809 - RNA, 12 nt, Human herpesvirus 5
gaaaaacuugaa

SEQ ID NO: 146810 - RNA, 23 nt, Human herpesvirus 5
gaaaacaccauuggaaguaacau

SEQ ID NO: 146811 - RNA, 24 nt, Human herpesvirus 5
gaaaaacaaagaagucucucucua

SEQ ID NO: 146812 - RNA, 20 nt, Human herpesvirus 5
cuuuuucuucacgccccuga

SEQ ID NO: 146813 - RNA, 19 nt, Human herpesvirus 5
cuuuuuuuacuaguaucca

SEQ ID NO: 146814 - RNA, 20 nt, Human herpesvirus 5
cuuuuuuuacuaguauccac

SEQ ID NO: 146815 - RNA, 22 nt, Human herpesvirus 5
gaaacccgcgccgguucucacg

SEQ ID NO: 146816 - RNA, 13 nt, Human herpesvirus 5
gaaaccuaccugg

SEQ ID NO: 146817 - RNA, 19 nt, Human herpesvirus 5
gaaaccuaccugggcugca

SEQ ID NO: 146818 - RNA, 21 nt, Human herpesvirus 5
gaaacgcuuuaagcugcucau

SEQ ID NO: 146819 - RNA, 13 nt, Human herpesvirus 5
gaaagcaccagaa

SEQ ID NO: 146820 - RNA, 15 nt, Human herpesvirus 5
gaaagcguucagugu

SEQ ID NO: 146821 - RNA, 15 nt, Human herpesvirus 5
gaaagcuaacauucc

SEQ ID NO: 146822 - RNA, 16 nt, Human herpesvirus 5
gaaagcuaacauuccc

SEQ ID NO: 146823 - RNA, 16 nt, Human herpesvirus 5
gaaagacaauaaacag

SEQ ID NO: 146824 - RNA, 20 nt, Human herpesvirus 5
gaaagaggggcaccuguaua

SEQ ID NO: 146825 - RNA, 17 nt, Human herpesvirus 5
gaaaaucuguguguucu

SEQ ID NO: 146826 - RNA, 16 nt, Human herpesvirus 5
gaaacaccgucuuuca

SEQ ID NO: 146827 - RNA, 19 nt, Human herpesvirus 5
gaaaccagauacaacguca

SEQ ID NO: 146828 - RNA, 15 nt, Human herpesvirus 5
gaaacauaugcagau

SEQ ID NO: 146829 - RNA, 17 nt, Human herpesvirus 5
cuuuuacuaguauccac

SEQ ID NO: 146830 - RNA, 15 nt, Human herpesvirus 5
cuuuucaugcucaua

SEQ ID NO: 146831 - RNA, 21 nt, Human herpesvirus 5
cuuuucauacaaaccccgugu

SEQ ID NO: 146832 - RNA, 20 nt, Human herpesvirus 5
cuuuucagaccgcaacaaca

SEQ ID NO: 146833 - RNA, 16 nt, Human herpesvirus 5
cuuuugagucuagaca

SEQ ID NO: 146834 - RNA, 23 nt, Human herpesvirus 5
cuuuucuuauaaggaggcaaaua

SEQ ID NO: 146835 - RNA, 18 nt, Human herpesvirus 5
cuuuugcgaauccuaauc

SEQ ID NO: 146836 - RNA, 23 nt, Human herpesvirus 5
cuuugucccccgcacccuaaaac

SEQ ID NO: 146837 - RNA, 18 nt, Human herpesvirus 5
cuuuguggggcugcucaa

SEQ ID NO: 146838 - RNA, 12 nt, Human herpesvirus 5
cuuuuacaugaa

SEQ ID NO: 146839 - RNA, 14 nt, Human herpesvirus 5
cuuuuacaugaaca

SEQ ID NO: 146840 - RNA, 17 nt, Human herpesvirus 5
cuuuuacaugaacaaaa

SEQ ID NO: 146841 - RNA, 20 nt, Human herpesvirus 5
cuuugaacuuugagccccaa

SEQ ID NO: 146842 - RNA, 21 nt, Human herpesvirus 5
cuuuguaaucacgcuaugcga

SEQ ID NO: 146843 - RNA, 22 nt, Human herpesvirus 5
cuuuguaaucacgcuaugcgau

SEQ ID NO: 146844 - RNA, 18 nt, Human herpesvirus 5
cuuuggcuacgguggugu

SEQ ID NO: 146845 - RNA, 15 nt, Human herpesvirus 5
cuuugggguggugcg

SEQ ID NO: 146846 - RNA, 18 nt, Human herpesvirus 5
cuuugguaucugguacua

SEQ ID NO: 146847 - RNA, 16 nt, Human herpesvirus 5
cuuugguggauaacaa

SEQ ID NO: 146848 - RNA, 19 nt, Human herpesvirus 5
cuuucagcguacucauuag

SEQ ID NO: 146849 - RNA, 12 nt, Human herpesvirus 5
cuuuccuuguca

SEQ ID NO: 146850 - RNA, 23 nt, Human herpesvirus 5
cuuugacgucccuuuuacuagua

SEQ ID NO: 146851 - RNA, 14 nt, Human herpesvirus 5
cuuugacgugcuca

SEQ ID NO: 146852 - RNA, 17 nt, Human herpesvirus 5
cuuucuacgugcggcaa

SEQ ID NO: 146853 - RNA, 14 nt, Human herpesvirus 5
cuuucucagucugc

SEQ ID NO: 146854 - RNA, 13 nt, Human herpesvirus 5
cuuaaugaucucc

SEQ ID NO: 146855 - RNA, 11 nt, Human herpesvirus 5
cuuacaucuca

SEQ ID NO: 146856 - RNA, 14 nt, Human herpesvirus 5
cuuaaccacaagaa

SEQ ID NO: 146857 - RNA, 20 nt, Human herpesvirus 5
uuuuuacuaguauccacguc

SEQ ID NO: 146858 - RNA, 22 nt, Human herpesvirus 5
uuuuggauguauguaucgcaua

SEQ ID NO: 146859 - RNA, 14 nt, Human herpesvirus 5
uuuuucgucccgcu

SEQ ID NO: 146860 - RNA, 13 nt, Human herpesvirus 5
uuuuucgcugcca

SEQ ID NO: 146861 - RNA, 18 nt, Human herpesvirus 5
uuuuugucaggacuggaa

SEQ ID NO: 146862 - RNA, 14 nt, Human herpesvirus 5
uuguaaugcuuauu

SEQ ID NO: 146863 - RNA, 23 nt, Human herpesvirus 5
uuguacauggguagccaucgcau

SEQ ID NO: 146864 - RNA, 21 nt, Human herpesvirus 5
uuggcuuacugccugccgcac

SEQ ID NO: 146865 - RNA, 13 nt, Human herpesvirus 5
uuguauacucuau

SEQ ID NO: 146866 - RNA, 22 nt, Human herpesvirus 5
uuguacgagcgcccgucaagcu

SEQ ID NO: 146867 - RNA, 17 nt, Human herpesvirus 5
uuguacgaguacacguu

SEQ ID NO: 146868 - RNA, 15 nt, Human herpesvirus 5
uuguagcaacuggca

SEQ ID NO: 146869 - RNA, 19 nt, Human herpesvirus 5
uuuggucgccugcacugcc

SEQ ID NO: 146870 - RNA, 16 nt, Human herpesvirus 5
uugucauggucuguaa

SEQ ID NO: 146871 - RNA, 16 nt, Human herpesvirus 5
uugucauuaaacaggc

SEQ ID NO: 146872 - RNA, 14 nt, Human herpesvirus 5
uuuuauacaucucc

SEQ ID NO: 146873 - RNA, 23 nt, Human herpesvirus 5
uuuucugcguguuuuauaaaaga

SEQ ID NO: 146874 - RNA, 19 nt, Human herpesvirus 5
uuuuccaaaacgugccagg

SEQ ID NO: 146875 - RNA, 16 nt, Human herpesvirus 5
uuuucagcucacuguu

SEQ ID NO: 146876 - RNA, 14 nt, Human herpesvirus 5
uuuuauuaucaucu

SEQ ID NO: 146877 - RNA, 22 nt, Human herpesvirus 5
uuuuauugauaucgacgucuca

SEQ ID NO: 146878 - RNA, 21 nt, Human herpesvirus 5
ugcucaaacccggucagucua

SEQ ID NO: 146879 - RNA, 19 nt, Human herpesvirus 5
ugcucaaugccaccaugaa

SEQ ID NO: 146880 - RNA, 23 nt, Human herpesvirus 5
ugcucagcggcguguacagcuac

SEQ ID NO: 146881 - RNA, 14 nt, Human herpesvirus 5
ugcucagguacauu

SEQ ID NO: 146882 - RNA, 16 nt, Human herpesvirus 5
ugcucagguacauuac

SEQ ID NO: 146883 - RNA, 14 nt, Human herpesvirus 5
ugcucgauuaccua

SEQ ID NO: 146884 - RNA, 20 nt, Human herpesvirus 5
ugcucgauuaccuacgucaa

SEQ ID NO: 146885 - RNA, 15 nt, Human herpesvirus 5
ugcagauacgcagug

SEQ ID NO: 146886 - RNA, 21 nt, Human herpesvirus 5
ugcagaggacggaggaacuuu

SEQ ID NO: 146887 - RNA, 20 nt, Human herpesvirus 5
ugcagaaguuguugcaacug

SEQ ID NO: 146888 - RNA, 14 nt, Human herpesvirus 5
ugcacgcgccaaaa

SEQ ID NO: 146889 - RNA, 15 nt, Human herpesvirus 5
ugcacguccaugucg

SEQ ID NO: 146890 - RNA, 13 nt, Human herpesvirus 5
ugcugugcaccuc

SEQ ID NO: 146891 - RNA, 21 nt, Human herpesvirus 5
ugcuguguaucguguaucuag

SEQ ID NO: 146892 - RNA, 11 nt, Human herpesvirus 5
ugcugcacuuc

SEQ ID NO: 146893 - RNA, 17 nt, Human herpesvirus 5
ugcugagacugagacug

SEQ ID NO: 146894 - RNA, 22 nt, Human herpesvirus 5
ugcugagacugagacugguggu

SEQ ID NO: 146895 - RNA, 20 nt, Human herpesvirus 5
ugcucugggucgccaggugu

SEQ ID NO: 146896 - RNA, 22 nt, Human herpesvirus 5
ugcuguauuauauacaaaaaca

SEQ ID NO: 146897 - RNA, 22 nt, Human herpesvirus 5
ugcugcggcggcgcgaccuucc

SEQ ID NO: 146898 - RNA, 15 nt, Human herpesvirus 5
ugcugcugcacgggc

SEQ ID NO: 146899 - RNA, 18 nt, Human herpesvirus 5
ugcuggauuacuacugga

SEQ ID NO: 146900 - RNA, 15 nt, Human herpesvirus 5
ugcuggcaugcagac

SEQ ID NO: 146901 - RNA, 15 nt, Human herpesvirus 5
uggaagcggugcuga

SEQ ID NO: 146902 - RNA, 20 nt, Human herpesvirus 5
uggaaguaacaucauaaaaa

SEQ ID NO: 146903 - RNA, 16 nt, Human herpesvirus 5
uggacaaguacagcgg

SEQ ID NO: 146904 - RNA, 19 nt, Human herpesvirus 5
uggacaauacaucauaugu

SEQ ID NO: 146905 - RNA, 16 nt, Human herpesvirus 5
uggaauccaucaucua

SEQ ID NO: 146906 - RNA, 20 nt, Human herpesvirus 5
uggaaucugguacuuaguca

SEQ ID NO: 146907 - RNA, 20 nt, Human herpesvirus 5
ugcuuuuggugcgccacgua

SEQ ID NO: 146908 - RNA, 19 nt, Human herpesvirus 5
ugcuuuuacaaacguggag

SEQ ID NO: 146909 - RNA, 13 nt, Human herpesvirus 5
ugcuuugguggau

SEQ ID NO: 146910 - RNA, 16 nt, Human herpesvirus 5
uggaaaccagauacaa

SEQ ID NO: 146911 - RNA, 21 nt, Human herpesvirus 5
uggaaaucaccugugguagaa

SEQ ID NO: 146912 - RNA, 13 nt, Human herpesvirus 5
uggaaaucccuca

SEQ ID NO: 146913 - RNA, 23 nt, Human herpesvirus 5
uggaacagcucguggaccucacg

SEQ ID NO: 146914 - RNA, 22 nt, Human herpesvirus 5
uggagguggccugcaucuuccc

SEQ ID NO: 146915 - RNA, 20 nt, Human herpesvirus 5
uggauaucuaggugcugcau

SEQ ID NO: 146916 - RNA, 18 nt, Human herpesvirus 5
uggauacaguugauaaca

SEQ ID NO: 146917 - RNA, 22 nt, Human herpesvirus 5
uggagaugaacaagguucucca

SEQ ID NO: 146918 - RNA, 12 nt, Human herpesvirus 5
uggagauucuaa

SEQ ID NO: 146919 - RNA, 15 nt, Human herpesvirus 5
uggagcacacugcua

SEQ ID NO: 146920 - RNA, 13 nt, Human herpesvirus 5
uggagacaguuuc

SEQ ID NO: 146921 - RNA, 13 nt, Human herpesvirus 5
uggagacauggac

SEQ ID NO: 146922 - RNA, 21 nt, Human herpesvirus 5
uggagacacaacguuauccac

SEQ ID NO: 146923 - RNA, 12 nt, Human herpesvirus 5
uggacugguaca

SEQ ID NO: 146924 - RNA, 23 nt, Human herpesvirus 5
uggacucuuguacauagugauuc

SEQ ID NO: 146925 - RNA, 17 nt, Human herpesvirus 5
uggacugacacagcucc

SEQ ID NO: 146926 - RNA, 21 nt, Human herpesvirus 5
uggacugacacagcuccugaa

SEQ ID NO: 146927 - RNA, 23 nt, Human herpesvirus 5
uggacgacgcgcuggacucuuua

SEQ ID NO: 146928 - RNA, 15 nt, Human herpesvirus 5
uggacgccaucaugg

SEQ ID NO: 146929 - RNA, 22 nt, Human herpesvirus 5
uggaccaaagacugugguggga

SEQ ID NO: 146930 - RNA, 11 nt, Human herpesvirus 5
uggacaugguu

SEQ ID NO: 146931 - RNA, 20 nt, Human herpesvirus 5
uggacacucuggcccugcug

SEQ ID NO: 146932 - RNA, 12 nt, Human herpesvirus 5
uguaaucuucca

SEQ ID NO: 146933 - RNA, 22 nt, Human herpesvirus 5
uguacgugcgguaacuggcaga

SEQ ID NO: 146934 - RNA, 23 nt, Human herpesvirus 5
uguacguuuauuuuucagcucac

SEQ ID NO: 146935 - RNA, 23 nt, Human herpesvirus 5
uguaccaucauugcugcuacgga

SEQ ID NO: 146936 - RNA, 19 nt, Human herpesvirus 5
uguacccggcacccgagca

SEQ ID NO: 146937 - RNA, 14 nt, Human herpesvirus 5
ugucagacacagcc

SEQ ID NO: 146938 - RNA, 17 nt, Human herpesvirus 5
ugugacguggauacuag

SEQ ID NO: 146939 - RNA, 21 nt, Human herpesvirus 5
uguggaggagacuaccucagu

SEQ ID NO: 146940 - RNA, 22 nt, Human herpesvirus 5
ugugcuugacuguaccaucauu

SEQ ID NO: 146941 - RNA, 17 nt, Human herpesvirus 5
uguggaaaucaccugug

SEQ ID NO: 146942 - RNA, 12 nt, Human herpesvirus 5
ugugcucaaguu

SEQ ID NO: 146943 - RNA, 16 nt, Human herpesvirus 5
ugucauggggagaaaa

SEQ ID NO: 146944 - RNA, 16 nt, Human herpesvirus 5
ugucaucuaccuaccu

SEQ ID NO: 146945 - RNA, 21 nt, Human herpesvirus 5
ugucaucuaccuaccuuguac

SEQ ID NO: 146946 - RNA, 19 nt, Human herpesvirus 5
uguccaaggguaucaugcu

SEQ ID NO: 146947 - RNA, 22 nt, Human herpesvirus 5
uguccagauacgcguuggccag

SEQ ID NO: 146948 - RNA, 22 nt, Human herpesvirus 5
uguccauagugcgccaagccau

SEQ ID NO: 146949 - RNA, 18 nt, Human herpesvirus 5
uguccccugccaccucag

SEQ ID NO: 146950 - RNA, 20 nt, Human herpesvirus 5
ugucugugcgccguggugcu

SEQ ID NO: 146951 - RNA, 20 nt, Human herpesvirus 5
ugucccuuaucccguuacaa

SEQ ID NO: 146952 - RNA, 15 nt, Human herpesvirus 5
uggccgccacaccug

SEQ ID NO: 146953 - RNA, 21 nt, Human herpesvirus 5
uggccgagacggcgugacaca

SEQ ID NO: 146954 - RNA, 22 nt, Human herpesvirus 5
uggccgagacggcgugacacag

SEQ ID NO: 146955 - RNA, 13 nt, Human herpesvirus 5
uggccucagggau

SEQ ID NO: 146956 - RNA, 20 nt, Human herpesvirus 5
uggccucgauccauccuggg

SEQ ID NO: 146957 - RNA, 23 nt, Human herpesvirus 5
uggcgcaaaagcaccaugagccu

SEQ ID NO: 146958 - RNA, 24 nt, Human herpesvirus 5
uggcgcaaaagcaccaugagccuc

SEQ ID NO: 146959 - RNA, 17 nt, Human herpesvirus 5
uggcgauagcgcuuaua

SEQ ID NO: 146960 - RNA, 19 nt, Human herpesvirus 5
uggcccaaagaccgcugcc

SEQ ID NO: 146961 - RNA, 23 nt, Human herpesvirus 5
uggccaccaugcugagcaaguac

SEQ ID NO: 146962 - RNA, 18 nt, Human herpesvirus 5
uggcaggaaagacaacca

SEQ ID NO: 146963 - RNA, 18 nt, Human herpesvirus 5
uggaugagggcaucaugg

SEQ ID NO: 146964 - RNA, 22 nt, Human herpesvirus 5
uggaugagggcaucaugguggu

SEQ ID NO: 146965 - RNA, 23 nt, Human herpesvirus 5
uggaucaucuguuuuugcugcaa

SEQ ID NO: 146966 - RNA, 15 nt, Human herpesvirus 5
ugguacagauccagu

SEQ ID NO: 146967 - RNA, 16 nt, Human herpesvirus 5
ugggaaugacggugau

SEQ ID NO: 146968 - RNA, 21 nt, Human herpesvirus 5
ugggaauguccaucucgucaa

SEQ ID NO: 146969 - RNA, 17 nt, Human herpesvirus 5
ugggagauccaguauuc

SEQ ID NO: 146970 - RNA, 18 nt, Human herpesvirus 5
ugggagucaacacuacca

SEQ ID NO: 146971 - RNA, 22 nt, Human herpesvirus 5
ugggagucaacacuaccaagua

SEQ ID NO: 146972 - RNA, 14 nt, Human herpesvirus 5
uggucgaugcugau

SEQ ID NO: 146973 - RNA, 16 nt, Human herpesvirus 5
ugguccgucaugaccg

SEQ ID NO: 146974 - RNA, 22 nt, Human herpesvirus 5
ugguauccacgcucguucaaua

SEQ ID NO: 146975 - RNA, 15 nt, Human herpesvirus 5
uggucaacaccaugu

SEQ ID NO: 146976 - RNA, 17 nt, Human herpesvirus 5
uggucaacgcuuuggaa

SEQ ID NO: 146977 - RNA, 15 nt, Human herpesvirus 5
ugguuuaugaugaaa

SEQ ID NO: 146978 - RNA, 16 nt, Human herpesvirus 5
ugguuuauuuuuauaa

SEQ ID NO: 146979 - RNA, 19 nt, Human herpesvirus 5
ugguuuauaagaagacucc

SEQ ID NO: 146980 - RNA, 11 nt, Human herpesvirus 5
uggucuggccc

SEQ ID NO: 146981 - RNA, 20 nt, Human herpesvirus 5
uggugacuggggacggugau

SEQ ID NO: 146982 - RNA, 21 nt, Human herpesvirus 5
uggugacuugggcgauucugu

SEQ ID NO: 146983 - RNA, 18 nt, Human herpesvirus 5
uuaccuaucaucacacua

SEQ ID NO: 146984 - RNA, 12 nt, Human herpesvirus 5
uuaccaguacca

SEQ ID NO: 146985 - RNA, 17 nt, Human herpesvirus 5
uuaccaacguaacagca

SEQ ID NO: 146986 - RNA, 12 nt, Human herpesvirus 5
uuacaugaacaa

SEQ ID NO: 146987 - RNA, 13 nt, Human herpesvirus 5
uuaagcugcucau

SEQ ID NO: 146988 - RNA, 22 nt, Human herpesvirus 5
uuaaggagcucugaaacacaga

SEQ ID NO: 146989 - RNA, 22 nt, Human herpesvirus 5
uuaagguacgggucuaccaaaa

SEQ ID NO: 146990 - RNA, 16 nt, Human herpesvirus 5
uuaaucuuaccgggga

SEQ ID NO: 146991 - RNA, 23 nt, Human herpesvirus 5
uguggcaaguuggccaccaagaa

SEQ ID NO: 146992 - RNA, 15 nt, Human herpesvirus 5
uguguagaacaauga

SEQ ID NO: 146993 - RNA, 19 nt, Human herpesvirus 5
uguguggcguguacagggu

SEQ ID NO: 146994 - RNA, 23 nt, Human herpesvirus 5
uguguuaugcggcgacugauuaa

SEQ ID NO: 146995 - RNA, 19 nt, Human herpesvirus 5
uguguuauucagaaccaug

SEQ ID NO: 146996 - RNA, 15 nt, Human herpesvirus 5
uuaagcagaaacgag

SEQ ID NO: 146997 - RNA, 12 nt, Human herpesvirus 5
uguguugcuaca

SEQ ID NO: 146998 - RNA, 18 nt, Human herpesvirus 5
uguguugcuacagggagu

SEQ ID NO: 146999 - RNA, 21 nt, Human herpesvirus 5
uguguugcuacagggagugaa

SEQ ID NO: 147000 - RNA, 22 nt, Human herpesvirus 5
uuagagcaaaaccuuacagcuu

SEQ ID NO: 147001 - RNA, 12 nt, Human herpesvirus 5
uuagccaccacc

SEQ ID NO: 147002 - RNA, 17 nt, Human herpesvirus 5
uuagcgugugacgugga

SEQ ID NO: 147003 - RNA, 21 nt, Human herpesvirus 5
uuauacucuauguuauacucu

SEQ ID NO: 147004 - RNA, 21 nt, Human herpesvirus 5
uuauacucuguaauccuacuc

SEQ ID NO: 147005 - RNA, 15 nt, Human herpesvirus 5
uuauacaacaggugu

SEQ ID NO: 147006 - RNA, 11 nt, Human herpesvirus 5
uuauacaucuc

SEQ ID NO: 147007 - RNA, 12 nt, Human herpesvirus 5
uuauacaucucc

SEQ ID NO: 147008 - RNA, 17 nt, Human herpesvirus 5
uuaucagaaagcugcaa

SEQ ID NO: 147009 - RNA, 13 nt, Human herpesvirus 5
uuaucagcaauaa

SEQ ID NO: 147010 - RNA, 14 nt, Human herpesvirus 5
uuauuguguucucc

SEQ ID NO: 147011 - RNA, 23 nt, Human herpesvirus 5
uuauuauuuagaaauaaauacag

SEQ ID NO: 147012 - RNA, 22 nt, Human herpesvirus 5
uuauugagcaggguaaaaacca

SEQ ID NO: 147013 - RNA, 18 nt, Human herpesvirus 5
uuaucccguuacaaagaa

SEQ ID NO: 147014 - RNA, 15 nt, Human herpesvirus 5
uuauccuguugaaua

SEQ ID NO: 147015 - RNA, 16 nt, Human herpesvirus 5
uuauguuacaaaacaa

SEQ ID NO: 147016 - RNA, 18 nt, Human herpesvirus 5
uuauguccaugucuccaa

SEQ ID NO: 147017 - RNA, 14 nt, Human herpesvirus 5
uuaugccaguugcu

SEQ ID NO: 147018 - RNA, 19 nt, Human herpesvirus 5
uuaugaguaccccacgcau

SEQ ID NO: 147019 - RNA, 13 nt, Human herpesvirus 5
uucccaaaagaag

SEQ ID NO: 147020 - RNA, 19 nt, Human herpesvirus 5
uucggcucccgcacacaga

SEQ ID NO: 147021 - RNA, 11 nt, Human herpesvirus 5
uucgcugccaa

SEQ ID NO: 147022 - RNA, 13 nt, Human herpesvirus 5
uuccaacucuuuc

SEQ ID NO: 147023 - RNA, 11 nt, Human herpesvirus 5
uucuacauuca

SEQ ID NO: 147024 - RNA, 13 nt, Human herpesvirus 5
uucuaccaucucc

SEQ ID NO: 147025 - RNA, 22 nt, Human herpesvirus 5
uucucuggaugguacgucucua

SEQ ID NO: 147026 - RNA, 14 nt, Human herpesvirus 5
uucacgaggaccau

SEQ ID NO: 147027 - RNA, 21 nt, Human herpesvirus 5
uuccaagccgcagcgcggaaa

SEQ ID NO: 147028 - RNA, 16 nt, Human herpesvirus 5
uucaaucauuacuaaa

SEQ ID NO: 147029 - RNA, 17 nt, Human herpesvirus 5
uucacaaccguauauuc

SEQ ID NO: 147030 - RNA, 15 nt, Human herpesvirus 5
uucacaaaaacacca

SEQ ID NO: 147031 - RNA, 18 nt, Human herpesvirus 5
uucaauaaucuccugaga

SEQ ID NO: 147032 - RNA, 20 nt, Human herpesvirus 5
uucaauaaucuccugagaca

SEQ ID NO: 147033 - RNA, 17 nt, Human herpesvirus 5
uugcgaagccagcuaca

SEQ ID NO: 147034 - RNA, 17 nt, Human herpesvirus 5
uugcgacaauacgcgua

SEQ ID NO: 147035 - RNA, 16 nt, Human herpesvirus 5
uugcgcauccccugac

SEQ ID NO: 147036 - RNA, 20 nt, Human herpesvirus 5
uugcgcauccccugacccuc

SEQ ID NO: 147037 - RNA, 19 nt, Human herpesvirus 5
uugcgcaugguagccgugu

SEQ ID NO: 147038 - RNA, 20 nt, Human herpesvirus 5
uugccgcuggacugacacag

SEQ ID NO: 147039 - RNA, 14 nt, Human herpesvirus 5
uugauguaguacau

SEQ ID NO: 147040 - RNA, 15 nt, Human herpesvirus 5
uugcaaaacuacuaa

SEQ ID NO: 147041 - RNA, 17 nt, Human herpesvirus 5
uugcaaaagaagcugcc

SEQ ID NO: 147042 - RNA, 20 nt, Human herpesvirus 5
uuggccuguggauagauuuc

SEQ ID NO: 147043 - RNA, 17 nt, Human herpesvirus 5
uuggcaacaucaccaac

SEQ ID NO: 147044 - RNA, 15 nt, Human herpesvirus 5
uuggacgaaacguau

SEQ ID NO: 147045 - RNA, 21 nt, Human herpesvirus 5
uuggagacacaacguuaucca

SEQ ID NO: 147046 - RNA, 17 nt, Human herpesvirus 5
uugauacgcuagcagaa

SEQ ID NO: 147047 - RNA, 13 nt, Human herpesvirus 5
uucuugcccacgc

SEQ ID NO: 147048 - RNA, 19 nt, Human herpesvirus 5
uucuuacuccgucuccaga

SEQ ID NO: 147049 - RNA, 12 nt, Human herpesvirus 5
uucuucuacuca

SEQ ID NO: 147050 - RNA, 17 nt, Human herpesvirus 5
uucugcguguaccgcua

SEQ ID NO: 147051 - RNA, 20 nt, Human herpesvirus 5
uucugcaaagucaacaugua

SEQ ID NO: 147052 - RNA, 16 nt, Human herpesvirus 5
uucuuacaguuuucau

SEQ ID NO: 147053 - RNA, 16 nt, Human herpesvirus 5
uccagccuucccaugc

SEQ ID NO: 147054 - RNA, 13 nt, Human herpesvirus 5
uccagcaccacgu

SEQ ID NO: 147055 - RNA, 20 nt, Human herpesvirus 5
uccaggacaaaaaguacacu

SEQ ID NO: 147056 - RNA, 11 nt, Human herpesvirus 5
uccagcugcuu

SEQ ID NO: 147057 - RNA, 21 nt, Human herpesvirus 5
uccagaccagcgccaccauag

SEQ ID NO: 147058 - RNA, 14 nt, Human herpesvirus 5
uccacuccaucaca

SEQ ID NO: 147059 - RNA, 13 nt, Human herpesvirus 5
uccaugugcagcu

SEQ ID NO: 147060 - RNA, 13 nt, Human herpesvirus 5
uccaggugcgcaa

SEQ ID NO: 147061 - RNA, 20 nt, Human herpesvirus 5
uccauagugcgccaagccau

SEQ ID NO: 147062 - RNA, 20 nt, Human herpesvirus 5
uccauacuuaccaccgugac

SEQ ID NO: 147063 - RNA, 17 nt, Human herpesvirus 5
uccaccucugcuacugg

SEQ ID NO: 147064 - RNA, 23 nt, Human herpesvirus 5
uccaaaccguaacgugguaaaua

SEQ ID NO: 147065 - RNA, 16 nt, Human herpesvirus 5
ucauuuuuauuaucau

SEQ ID NO: 147066 - RNA, 22 nt, Human herpesvirus 5
ucauacccgucacgucagugau

SEQ ID NO: 147067 - RNA, 24 nt, Human herpesvirus 5
ucauacccgucacgucagugaucu

SEQ ID NO: 147068 - RNA, 22 nt, Human herpesvirus 5
ucauacgcgccuuuugaucgcc

SEQ ID NO: 147069 - RNA, 13 nt, Human herpesvirus 5
ucauagagccaac

SEQ ID NO: 147070 - RNA, 13 nt, Human herpesvirus 5
ucauauagaccaa

SEQ ID NO: 147071 - RNA, 20 nt, Human herpesvirus 5
ucauaguugcuauaccucag

SEQ ID NO: 147072 - RNA, 11 nt, Human herpesvirus 5
uccuguggucc

SEQ ID NO: 147073 - RNA, 22 nt, Human herpesvirus 5
uccuguacggauugcgccaguu

SEQ ID NO: 147074 - RNA, 16 nt, Human herpesvirus 5
uccuggguaccgaguc

SEQ ID NO: 147075 - RNA, 16 nt, Human herpesvirus 5
uccucgaagucuucau

SEQ ID NO: 147076 - RNA, 21 nt, Human herpesvirus 5
uccuccgcacuucggucucgg

SEQ ID NO: 147077 - RNA, 15 nt, Human herpesvirus 5
uccuucucaucaaug

SEQ ID NO: 147078 - RNA, 13 nt, Human herpesvirus 5
ucgcaacaacagc

SEQ ID NO: 147079 - RNA, 15 nt, Human herpesvirus 5
ucgcaacaacagcaa

SEQ ID NO: 147080 - RNA, 17 nt, Human herpesvirus 5
ucgcaacaacagcaaca

SEQ ID NO: 147081 - RNA, 18 nt, Human herpesvirus 5
ucgcaacaacagcaacaa

SEQ ID NO: 147082 - RNA, 14 nt, Human herpesvirus 5
ucgaugcugaucac

SEQ ID NO: 147083 - RNA, 15 nt, Human herpesvirus 5
ucgaugcugaucacg

SEQ ID NO: 147084 - RNA, 14 nt, Human herpesvirus 5
ucgaugcuguuguc

SEQ ID NO: 147085 - RNA, 21 nt, Human herpesvirus 5
ucgauaguaauguauacuucc

SEQ ID NO: 147086 - RNA, 19 nt, Human herpesvirus 5
ucgagaggguaacuaugua

SEQ ID NO: 147087 - RNA, 23 nt, Human herpesvirus 5
uccuauugggaagggugugacug

SEQ ID NO: 147088 - RNA, 13 nt, Human herpesvirus 5
uccuccaccacgg

SEQ ID NO: 147089 - RNA, 19 nt, Human herpesvirus 5
uccgaauaacaacacauca

SEQ ID NO: 147090 - RNA, 20 nt, Human herpesvirus 5
uccgaauaacaacacaucaa

SEQ ID NO: 147091 - RNA, 18 nt, Human herpesvirus 5
uccauuggagaacagugc

SEQ ID NO: 147092 - RNA, 13 nt, Human herpesvirus 5
ucccgucagugac

SEQ ID NO: 147093 - RNA, 13 nt, Human herpesvirus 5
ucccuaacuaucu

SEQ ID NO: 147094 - RNA, 19 nt, Human herpesvirus 5
ucccuuuuacuaguaucca

SEQ ID NO: 147095 - RNA, 19 nt, Human herpesvirus 5
uccgaaauacgcguuuuga

SEQ ID NO: 147096 - RNA, 22 nt, Human herpesvirus 5
ucccuguaauuauuccagcuuu

SEQ ID NO: 147097 - RNA, 16 nt, Human herpesvirus 5
ucacccgaguccuggu

SEQ ID NO: 147098 - RNA, 20 nt, Human herpesvirus 5
ucaccaccacgguacaaacc

SEQ ID NO: 147099 - RNA, 22 nt, Human herpesvirus 5
ucaccagcaaggucaacuacag

SEQ ID NO: 147100 - RNA, 11 nt, Human herpesvirus 5
ucaccacuuug

SEQ ID NO: 147101 - RNA, 16 nt, Human herpesvirus 5
ucaccagacuuuuugc

SEQ ID NO: 147102 - RNA, 18 nt, Human herpesvirus 5
ucaccgugaaagugauac

SEQ ID NO: 147103 - RNA, 22 nt, Human herpesvirus 5
ucaccucgccuauacuaugugu

SEQ ID NO: 147104 - RNA, 21 nt, Human herpesvirus 5
ucaccugugguagaaugcugc

SEQ ID NO: 147105 - RNA, 17 nt, Human herpesvirus 5
ucaccguaaucaccaaa

SEQ ID NO: 147106 - RNA, 15 nt, Human herpesvirus 5
ucaccgacgugcuua

SEQ ID NO: 147107 - RNA, 20 nt, Human herpesvirus 5
ucaccgaguccaucauguuc

SEQ ID NO: 147108 - RNA, 23 nt, Human herpesvirus 5
ucacgagugcccuuaccuaucau

SEQ ID NO: 147109 - RNA, 21 nt, Human herpesvirus 5
ucacgaucgcuggugucucug

SEQ ID NO: 147110 - RNA, 18 nt, Human herpesvirus 5
ucacgaaaggcaccggca

SEQ ID NO: 147111 - RNA, 14 nt, Human herpesvirus 5
ucacggugccaugg

SEQ ID NO: 147112 - RNA, 20 nt, Human herpesvirus 5
ucacgcugcacgaccugcac

SEQ ID NO: 147113 - RNA, 20 nt, Human herpesvirus 5
ucacgcguagccuccuccac

SEQ ID NO: 147114 - RNA, 14 nt, Human herpesvirus 5
ucacuacucuggga

SEQ ID NO: 147115 - RNA, 16 nt, Human herpesvirus 5
ucacuacucugggaua

SEQ ID NO: 147116 - RNA, 19 nt, Human herpesvirus 5
ucacuauccgaugguuuca

SEQ ID NO: 147117 - RNA, 18 nt, Human herpesvirus 5
ucacuaucuucaaccuca

SEQ ID NO: 147118 - RNA, 19 nt, Human herpesvirus 5
ucacuaucuucaaccucac

SEQ ID NO: 147119 - RNA, 19 nt, Human herpesvirus 5
ucacuauuguauacucuau

SEQ ID NO: 147120 - RNA, 20 nt, Human herpesvirus 5
ucacugccaccgacauggag

SEQ ID NO: 147121 - RNA, 16 nt, Human herpesvirus 5
ucaccaaacaacacca

SEQ ID NO: 147122 - RNA, 13 nt, Human herpesvirus 5
ucacaucacccaa

SEQ ID NO: 147123 - RNA, 20 nt, Human herpesvirus 5
ucacaucacccaacacugcu

SEQ ID NO: 147124 - RNA, 16 nt, Human herpesvirus 5
ucacacguuacaucau

SEQ ID NO: 147125 - RNA, 17 nt, Human herpesvirus 5
ucacacguuacaucaua

SEQ ID NO: 147126 - RNA, 14 nt, Human herpesvirus 5
uauggcauauugaa

SEQ ID NO: 147127 - RNA, 16 nt, Human herpesvirus 5
uauggaggucacuguc

SEQ ID NO: 147128 - RNA, 18 nt, Human herpesvirus 5
uauggaaaauauguaguc

SEQ ID NO: 147129 - RNA, 20 nt, Human herpesvirus 5
uauccauuggagaacagugc

SEQ ID NO: 147130 - RNA, 18 nt, Human herpesvirus 5
uaucgauauuacuggcga

SEQ ID NO: 147131 - RNA, 14 nt, Human herpesvirus 5
ucaggauaggugug

SEQ ID NO: 147132 - RNA, 23 nt, Human herpesvirus 5
ucaggauggagggggaggccaca

SEQ ID NO: 147133 - RNA, 13 nt, Human herpesvirus 5
ucaggaaucuggg

SEQ ID NO: 147134 - RNA, 14 nt, Human herpesvirus 5
ucaggaaucuggga

SEQ ID NO: 147135 - RNA, 15 nt, Human herpesvirus 5
ucaggaaucugggag

SEQ ID NO: 147136 - RNA, 21 nt, Human herpesvirus 5
ucagcuaccgccgcaacagcg

SEQ ID NO: 147137 - RNA, 18 nt, Human herpesvirus 5
ucagcguucaaaggaaua

SEQ ID NO: 147138 - RNA, 19 nt, Human herpesvirus 5
ucagcaccccgcgucacuu

SEQ ID NO: 147139 - RNA, 18 nt, Human herpesvirus 5
ucagcugguggcucaugc

SEQ ID NO: 147140 - RNA, 14 nt, Human herpesvirus 5
ucaguuacuguuau

SEQ ID NO: 147141 - RNA, 19 nt, Human herpesvirus 5
ucaguguuguccccuaucc

SEQ ID NO: 147142 - RNA, 19 nt, Human herpesvirus 5
ucauaauauucuauauucu

SEQ ID NO: 147143 - RNA, 18 nt, Human herpesvirus 5
ucauaaacuguaccgucc

SEQ ID NO: 147144 - RNA, 12 nt, Human herpesvirus 5
ucaguacuuugg

SEQ ID NO: 147145 - RNA, 14 nt, Human herpesvirus 5
ucaguccauuguca

SEQ ID NO: 147146 - RNA, 20 nt, Human herpesvirus 5
ucagguacauuaccuuucau

SEQ ID NO: 147147 - RNA, 19 nt, Human herpesvirus 5
ucaguauuuuugugcucaa

SEQ ID NO: 147148 - RNA, 15 nt, Human herpesvirus 5
ucacuucaaacauca

SEQ ID NO: 147149 - RNA, 17 nt, Human herpesvirus 5
ucacuucaaacaucagc

SEQ ID NO: 147150 - RNA, 16 nt, Human herpesvirus 5
ucacugugaaacgcca

SEQ ID NO: 147151 - RNA, 21 nt, Human herpesvirus 5
ucacuuuuaacagcucaugcc

SEQ ID NO: 147152 - RNA, 22 nt, Human herpesvirus 5
ucacuuuuaacagcucaugccu

SEQ ID NO: 147153 - RNA, 22 nt, Human herpesvirus 5
ucagaaagcaccagaacccguc

SEQ ID NO: 147154 - RNA, 14 nt, Human herpesvirus 5
ucagaaccauguac

SEQ ID NO: 147155 - RNA, 12 nt, Human herpesvirus 5
ucagacacagcc

SEQ ID NO: 147156 - RNA, 17 nt, Human herpesvirus 5
ucagacucacgucacac

SEQ ID NO: 147157 - RNA, 14 nt, Human herpesvirus 5
ucagcagcaccucu

SEQ ID NO: 147158 - RNA, 20 nt, Human herpesvirus 5
ucagcagcaccucuuuccau

SEQ ID NO: 147159 - RNA, 15 nt, Human herpesvirus 5
ucuuuauuugcauca

SEQ ID NO: 147160 - RNA, 21 nt, Human herpesvirus 5
ucuuugccggcucuccuccuc

SEQ ID NO: 147161 - RNA, 16 nt, Human herpesvirus 5
ugaacuucaucaucac

SEQ ID NO: 147162 - RNA, 20 nt, Human herpesvirus 5
ugaacgacacaugcacaaua

SEQ ID NO: 147163 - RNA, 13 nt, Human herpesvirus 5
ugaaccaugaucu

SEQ ID NO: 147164 - RNA, 14 nt, Human herpesvirus 5
ugaaccuuccccac

SEQ ID NO: 147165 - RNA, 18 nt, Human herpesvirus 5
ugaacgcgguacaugugc

SEQ ID NO: 147166 - RNA, 17 nt, Human herpesvirus 5
ugaauuccucuauugcc

SEQ ID NO: 147167 - RNA, 15 nt, Human herpesvirus 5
ugaaggacaguguau

SEQ ID NO: 147168 - RNA, 13 nt, Human herpesvirus 5
ugaagccuaucaa

SEQ ID NO: 147169 - RNA, 14 nt, Human herpesvirus 5
ugaagcugaacaau

SEQ ID NO: 147170 - RNA, 17 nt, Human herpesvirus 5
ugaagcugaacaauaaa

SEQ ID NO: 147171 - RNA, 22 nt, Human herpesvirus 5
ugaauucuggcaagaguucaaa

SEQ ID NO: 147172 - RNA, 17 nt, Human herpesvirus 5
ugaauugcgaagccagc

SEQ ID NO: 147173 - RNA, 18 nt, Human herpesvirus 5
ugacaacggcuggaaaug

SEQ ID NO: 147174 - RNA, 18 nt, Human herpesvirus 5
ugacuagcgaaguacaca

SEQ ID NO: 147175 - RNA, 11 nt, Human herpesvirus 5
ugacaccucaa

SEQ ID NO: 147176 - RNA, 21 nt, Human herpesvirus 5
ugacacagagacuugugauau

SEQ ID NO: 147177 - RNA, 15 nt, Human herpesvirus 5
ugacacucgaagcaa

SEQ ID NO: 147178 - RNA, 19 nt, Human herpesvirus 5
ugagaaagcuaacauuccc

SEQ ID NO: 147179 - RNA, 14 nt, Human herpesvirus 5
ugagacgucgauau

SEQ ID NO: 147180 - RNA, 12 nt, Human herpesvirus 5
ugagaacauaua

SEQ ID NO: 147181 - RNA, 21 nt, Human herpesvirus 5
ugagcaggguaaaaaccacgu

SEQ ID NO: 147182 - RNA, 23 nt, Human herpesvirus 5
ugagcaauugccucuacacuugg

SEQ ID NO: 147183 - RNA, 15 nt, Human herpesvirus 5
ugagcgagaacuaau

SEQ ID NO: 147184 - RNA, 22 nt, Human herpesvirus 5
ugaucauggagccgcaagugcu

SEQ ID NO: 147185 - RNA, 22 nt, Human herpesvirus 5
ugaucacguacguuuuccaaaa

SEQ ID NO: 147186 - RNA, 17 nt, Human herpesvirus 5
ugauauuuuacagguau

SEQ ID NO: 147187 - RNA, 18 nt, Human herpesvirus 5
ugcacaaaagguaugugu

SEQ ID NO: 147188 - RNA, 15 nt, Human herpesvirus 5
ugcacaccuauggcg

SEQ ID NO: 147189 - RNA, 20 nt, Human herpesvirus 5
ugcacaauacgauaauugcu

SEQ ID NO: 147190 - RNA, 22 nt, Human herpesvirus 5
ugcaaggccucuaucugcgcca

SEQ ID NO: 147191 - RNA, 14 nt, Human herpesvirus 5
ugcaauacagaagg

SEQ ID NO: 147192 - RNA, 14 nt, Human herpesvirus 5
ugcaacuucuucua

SEQ ID NO: 147193 - RNA, 21 nt, Human herpesvirus 5
ugaugugggggugcggguggu

SEQ ID NO: 147194 - RNA, 15 nt, Human herpesvirus 5
ugaugaaugucauca

SEQ ID NO: 147195 - RNA, 17 nt, Human herpesvirus 5
ugaugaaugucaucauc

SEQ ID NO: 147196 - RNA, 22 nt, Human herpesvirus 5
ugaugacggugaggaggguggu

SEQ ID NO: 147197 - RNA, 16 nt, Human herpesvirus 5
ugaugggcgucgccag

SEQ ID NO: 147198 - RNA, 20 nt, Human herpesvirus 5
ucuuagcgugugacguggau

SEQ ID NO: 147199 - RNA, 14 nt, Human herpesvirus 5
ucuuaacuauuccu

SEQ ID NO: 147200 - RNA, 15 nt, Human herpesvirus 5
ucugugaugaacgac

SEQ ID NO: 147201 - RNA, 22 nt, Human herpesvirus 5
ucugacgguuggacuccugugu

SEQ ID NO: 147202 - RNA, 15 nt, Human herpesvirus 5
ucuugccaagcuuua

SEQ ID NO: 147203 - RNA, 15 nt, Human herpesvirus 5
ucuuggccguggugu

SEQ ID NO: 147204 - RNA, 21 nt, Human herpesvirus 5
ucuucgacgucgcugccguag

SEQ ID NO: 147205 - RNA, 14 nt, Human herpesvirus 5
ucuuccaccagcua

SEQ ID NO: 147206 - RNA, 14 nt, Human herpesvirus 5
ucgccgcugauacu

SEQ ID NO: 147207 - RNA, 16 nt, Human herpesvirus 5
ucgccugccuauguaa

SEQ ID NO: 147208 - RNA, 19 nt, Human herpesvirus 5
ucgcacggaccuauacuau

SEQ ID NO: 147209 - RNA, 18 nt, Human herpesvirus 5
ucgcacacagacuuuaua

SEQ ID NO: 147210 - RNA, 20 nt, Human herpesvirus 5
ucgcaugucgucucaucaca

SEQ ID NO: 147211 - RNA, 17 nt, Human herpesvirus 5
ucgcaucaucaacagca

SEQ ID NO: 147212 - RNA, 15 nt, Human herpesvirus 5
ucuacagacugggcg

SEQ ID NO: 147213 - RNA, 20 nt, Human herpesvirus 5
ucuaccuagaugcuagcaau

SEQ ID NO: 147214 - RNA, 17 nt, Human herpesvirus 5
ucuacauucaauacauc

SEQ ID NO: 147215 - RNA, 22 nt, Human herpesvirus 5
ucuacugcaacugcaccagcaa

SEQ ID NO: 147216 - RNA, 22 nt, Human herpesvirus 5
ucuacgcuccuacgacaacauc

SEQ ID NO: 147217 - RNA, 21 nt, Human herpesvirus 5
ucuagacaggguaacagccuu

SEQ ID NO: 147218 - RNA, 17 nt, Human herpesvirus 5
ucuagacucacuuuauu

SEQ ID NO: 147219 - RNA, 15 nt, Human herpesvirus 5
ucucgcguucgugau

SEQ ID NO: 147220 - RNA, 19 nt, Human herpesvirus 5
ucucuaaacgccaccugca

SEQ ID NO: 147221 - RNA, 20 nt, Human herpesvirus 5
ucucguacgacgucugcuca

SEQ ID NO: 147222 - RNA, 15 nt, Human herpesvirus 5
ucucuggaugguacg

SEQ ID NO: 147223 - RNA, 21 nt, Human herpesvirus 5
ucucucgguaaugcgugucca

SEQ ID NO: 147224 - RNA, 16 nt, Human herpesvirus 5
ucucuuaguggucgcu

SEQ ID NO: 147225 - RNA, 22 nt, Human herpesvirus 5
ucuaggaacacugaaaacacca

SEQ ID NO: 147226 - RNA, 14 nt, Human herpesvirus 5
ucuauguuacaaug

SEQ ID NO: 147227 - RNA, 14 nt, Human herpesvirus 5
ucuauguuauacuc

SEQ ID NO: 147228 - RNA, 16 nt, Human herpesvirus 5
ucuauguuauacucug

SEQ ID NO: 147229 - RNA, 20 nt, Human herpesvirus 5
ucuauccccaaaaaaacaca

SEQ ID NO: 147230 - RNA, 23 nt, Human herpesvirus 5
ucuauccgaguccaccucugcua

SEQ ID NO: 147231 - RNA, 20 nt, Human herpesvirus 5
cguuuuacuggcgacuuuuu

SEQ ID NO: 147232 - RNA, 23 nt, Human herpesvirus 5
cuaacugauaacgauaugucgcg

SEQ ID NO: 147233 - RNA, 13 nt, Human herpesvirus 5
cuaacuguagcac

SEQ ID NO: 147234 - RNA, 15 nt, Human herpesvirus 5
cuaacuguagcacga

SEQ ID NO: 147235 - RNA, 14 nt, Human herpesvirus 5
cuaagagcuuugac

SEQ ID NO: 147236 - RNA, 18 nt, Human herpesvirus 5
cuaagaggauacaucauc

SEQ ID NO: 147237 - RNA, 13 nt, Human herpesvirus 5
cuagaaagaccaa

SEQ ID NO: 147238 - RNA, 22 nt, Human herpesvirus 5
cuagaaacagcagcgagucuag

SEQ ID NO: 147239 - RNA, 20 nt, Human herpesvirus 5
cuagacaggguaacagccuu

SEQ ID NO: 147240 - RNA, 21 nt, Human herpesvirus 5
cuagacaggguaacagccuuc

SEQ ID NO: 147241 - RNA, 19 nt, Human herpesvirus 5
cuagagacagacgaugaac

SEQ ID NO: 147242 - RNA, 21 nt, Human herpesvirus 5
cuaauacagauacgcaaugca

SEQ ID NO: 147243 - RNA, 18 nt, Human herpesvirus 5
cuaauaaagcacaccgcg

SEQ ID NO: 147244 - RNA, 13 nt, Human herpesvirus 5
cuagcuacuuugg

SEQ ID NO: 147245 - RNA, 15 nt, Human herpesvirus 5
cuagcuacuuuggaa

SEQ ID NO: 147246 - RNA, 19 nt, Human herpesvirus 5
cuaucauaaagaaugcaac

SEQ ID NO: 147247 - RNA, 15 nt, Human herpesvirus 5
cuaucgcgacagaca

SEQ ID NO: 147248 - RNA, 18 nt, Human herpesvirus 5
cuagcgacggcggccaug

SEQ ID NO: 147249 - RNA, 18 nt, Human herpesvirus 5
cuagcacagagacaccaa

SEQ ID NO: 147250 - RNA, 15 nt, Human herpesvirus 5
cuaucuguacugcaa

SEQ ID NO: 147251 - RNA, 21 nt, Human herpesvirus 5
cuaucuucaaccucacguuaa

SEQ ID NO: 147252 - RNA, 13 nt, Human herpesvirus 5
cuaugauccugug

SEQ ID NO: 147253 - RNA, 12 nt, Human herpesvirus 5
cuauguggcucc

SEQ ID NO: 147254 - RNA, 19 nt, Human herpesvirus 5
cuccacacgcaucugcaag

SEQ ID NO: 147255 - RNA, 20 nt, Human herpesvirus 5
cucauuuauugugucuacua

SEQ ID NO: 147256 - RNA, 16 nt, Human herpesvirus 5
cucauuugcuuuuaca

SEQ ID NO: 147257 - RNA, 13 nt, Human herpesvirus 5
cucacccguucac

SEQ ID NO: 147258 - RNA, 20 nt, Human herpesvirus 5
cucacgcacauauguagcac

SEQ ID NO: 147259 - RNA, 23 nt, Human herpesvirus 5
cucacgucaguguuguccccuau

SEQ ID NO: 147260 - RNA, 15 nt, Human herpesvirus 5
cucacgagugcccuu

SEQ ID NO: 147261 - RNA, 21 nt, Human herpesvirus 5
cucacguugguguuguagcaa

SEQ ID NO: 147262 - RNA, 12 nt, Human herpesvirus 5
cucacaauggaa

SEQ ID NO: 147263 - RNA, 17 nt, Human herpesvirus 5
cucacaauggaagccau

SEQ ID NO: 147264 - RNA, 18 nt, Human herpesvirus 5
cucacaauggaagccaua

SEQ ID NO: 147265 - RNA, 17 nt, Human herpesvirus 5
cuauuccuccguguucu

SEQ ID NO: 147266 - RNA, 16 nt, Human herpesvirus 5
cuccuaguaaugcauu

SEQ ID NO: 147267 - RNA, 19 nt, Human herpesvirus 5
cuccugaucgaucgaugcu

SEQ ID NO: 147268 - RNA, 15 nt, Human herpesvirus 5
cuccucugccugggc

SEQ ID NO: 147269 - RNA, 21 nt, Human herpesvirus 5
cuccaucgugugccuaggucu

SEQ ID NO: 147270 - RNA, 18 nt, Human herpesvirus 5
cuccaucaggaucuggug

SEQ ID NO: 147271 - RNA, 16 nt, Human herpesvirus 5
cuccuaaaccugguag

SEQ ID NO: 147272 - RNA, 21 nt, Human herpesvirus 5
cucgcugccgcagcugcugga

SEQ ID NO: 147273 - RNA, 24 nt, Human herpesvirus 5
cucgaccggcggcugcuguugcac

SEQ ID NO: 147274 - RNA, 14 nt, Human herpesvirus 5
cucuacggcacugu

SEQ ID NO: 147275 - RNA, 18 nt, Human herpesvirus 5
cucuggcccugcuguaca

SEQ ID NO: 147276 - RNA, 14 nt, Human herpesvirus 5
cucuggaugguacg

SEQ ID NO: 147277 - RNA, 15 nt, Human herpesvirus 5
cucuguguugcuaca

SEQ ID NO: 147278 - RNA, 13 nt, Human herpesvirus 5
cucuggugcuaug

SEQ ID NO: 147279 - RNA, 15 nt, Human herpesvirus 5
cucggccuugcgcuc

SEQ ID NO: 147280 - RNA, 16 nt, Human herpesvirus 5
cucggcggccacggcg

SEQ ID NO: 147281 - RNA, 17 nt, Human herpesvirus 5
cucgguuucgcuguagc

SEQ ID NO: 147282 - RNA, 11 nt, Human herpesvirus 5
cucggugaccu

SEQ ID NO: 147283 - RNA, 13 nt, Human herpesvirus 5
cucggaccgugac

SEQ ID NO: 147284 - RNA, 14 nt, Human herpesvirus 5
cucggaucuacuca

SEQ ID NO: 147285 - RNA, 20 nt, Human herpesvirus 5
cucggaucuacucaucggca

SEQ ID NO: 147286 - RNA, 13 nt, Human herpesvirus 5
cucggcgugcuca

SEQ ID NO: 147287 - RNA, 14 nt, Human herpesvirus 5
cucggcguggucaa

SEQ ID NO: 147288 - RNA, 21 nt, Human herpesvirus 5
cucguguaucuuaugccaguu

SEQ ID NO: 147289 - RNA, 22 nt, Human herpesvirus 5
cucgugucgacuccgcuggauc

SEQ ID NO: 147290 - RNA, 20 nt, Human herpesvirus 5
cucuaacaacgucacuucug

SEQ ID NO: 147291 - RNA, 20 nt, Human herpesvirus 5
cucguuguacgcauuacaca

SEQ ID NO: 147292 - RNA, 23 nt, Human herpesvirus 5
cucguccacacgccgucucguca

SEQ ID NO: 147293 - RNA, 17 nt, Human herpesvirus 5
cucgucgccuuccagcu

SEQ ID NO: 147294 - RNA, 13 nt, Human herpesvirus 5
cucgucgugggcu

SEQ ID NO: 147295 - RNA, 15 nt, Human herpesvirus 5
cucgucugugucuca

SEQ ID NO: 147296 - RNA, 15 nt, Human herpesvirus 5
cugacaauggacuga

SEQ ID NO: 147297 - RNA, 17 nt, Human herpesvirus 5
cugaauuauccuugacu

SEQ ID NO: 147298 - RNA, 15 nt, Human herpesvirus 5
cucuuggcacaugcc

SEQ ID NO: 147299 - RNA, 15 nt, Human herpesvirus 5
cucuuggcacgggga

SEQ ID NO: 147300 - RNA, 12 nt, Human herpesvirus 5
cucuucuggccc

SEQ ID NO: 147301 - RNA, 22 nt, Human herpesvirus 5
cugaugccgaucaugugcuuaa

SEQ ID NO: 147302 - RNA, 15 nt, Human herpesvirus 5
cugauucgccgugug

SEQ ID NO: 147303 - RNA, 15 nt, Human herpesvirus 5
cugacuguguagauc

SEQ ID NO: 147304 - RNA, 15 nt, Human herpesvirus 5
cugacgcugcuccua

SEQ ID NO: 147305 - RNA, 15 nt, Human herpesvirus 5
cuguaauuauuccag

SEQ ID NO: 147306 - RNA, 17 nt, Human herpesvirus 5
cuguaauuauuccagcu

SEQ ID NO: 147307 - RNA, 16 nt, Human herpesvirus 5
cuguaccguccagggg

SEQ ID NO: 147308 - RNA, 18 nt, Human herpesvirus 5
cuguagcuauuguguuua

SEQ ID NO: 147309 - RNA, 22 nt, Human herpesvirus 5
cuguagcugugguucaaccuga

SEQ ID NO: 147310 - RNA, 13 nt, Human herpesvirus 5
cuggugaugcugg

SEQ ID NO: 147311 - RNA, 18 nt, Human herpesvirus 5
cuggugucacuagacaga

SEQ ID NO: 147312 - RNA, 19 nt, Human herpesvirus 5
cugguuccuagugaugcgc

SEQ ID NO: 147313 - RNA, 18 nt, Human herpesvirus 5
cuggaaauucaauaaaaa

SEQ ID NO: 147314 - RNA, 12 nt, Human herpesvirus 5
cuggaaaauaua

SEQ ID NO: 147315 - RNA, 18 nt, Human herpesvirus 5
cuggcccgaacgcugcuu

SEQ ID NO: 147316 - RNA, 22 nt, Human herpesvirus 5
cuggccgagacggcgugacaca

SEQ ID NO: 147317 - RNA, 24 nt, Human herpesvirus 5
cuggcaugcagaccaccaugugca

SEQ ID NO: 147318 - RNA, 15 nt, Human herpesvirus 5
cuggcguucaccacg

SEQ ID NO: 147319 - RNA, 18 nt, Human herpesvirus 5
cuggcguucaccacgccg

SEQ ID NO: 147320 - RNA, 13 nt, Human herpesvirus 5
cugcugcacgggc

SEQ ID NO: 147321 - RNA, 20 nt, Human herpesvirus 5
cugcugcucggcguggucaa

SEQ ID NO: 147322 - RNA, 12 nt, Human herpesvirus 5
cugcgacuccug

SEQ ID NO: 147323 - RNA, 14 nt, Human herpesvirus 5
cugcaaagucaaca

SEQ ID NO: 147324 - RNA, 14 nt, Human herpesvirus 5
cugcaacggccguu

SEQ ID NO: 147325 - RNA, 22 nt, Human herpesvirus 5
cugcaagacgcaugauuagcaa

SEQ ID NO: 147326 - RNA, 19 nt, Human herpesvirus 5
cgcacuuuuuuuacuagua

SEQ ID NO: 147327 - RNA, 23 nt, Human herpesvirus 5
cgcacuuuuuuuacuaguaucca

SEQ ID NO: 147328 - RNA, 22 nt, Human herpesvirus 5
cgcagaaagaggggcaccugua

SEQ ID NO: 147329 - RNA, 23 nt, Human herpesvirus 5
cgcagaaagaggggcaccuguau

SEQ ID NO: 147330 - RNA, 17 nt, Human herpesvirus 5
cgcagaagaauguugcg

SEQ ID NO: 147331 - RNA, 22 nt, Human herpesvirus 5
cgcagacgucggcgguccucca

SEQ ID NO: 147332 - RNA, 11 nt, Human herpesvirus 5
cgcacacagac

SEQ ID NO: 147333 - RNA, 13 nt, Human herpesvirus 5
cgauucucuauac

SEQ ID NO: 147334 - RNA, 22 nt, Human herpesvirus 5
cgauuucuuuuuguccaccgac

SEQ ID NO: 147335 - RNA, 13 nt, Human herpesvirus 5
cgcaacaacagca

SEQ ID NO: 147336 - RNA, 21 nt, Human herpesvirus 5
cgcaacugauucgccgugugu

SEQ ID NO: 147337 - RNA, 17 nt, Human herpesvirus 5
cgcaacuucuaccaucu

SEQ ID NO: 147338 - RNA, 19 nt, Human herpesvirus 5
cgcaacuucuaccaucucc

SEQ ID NO: 147339 - RNA, 14 nt, Human herpesvirus 5
cgauucccaucuca

SEQ ID NO: 147340 - RNA, 17 nt, Human herpesvirus 5
cgcagcgcaccaugaga

SEQ ID NO: 147341 - RNA, 13 nt, Human herpesvirus 5
cgcaggagcugcu

SEQ ID NO: 147342 - RNA, 15 nt, Human herpesvirus 5
cgcagugggcccacg

SEQ ID NO: 147343 - RNA, 16 nt, Human herpesvirus 5
cgcaggccgccgcuca

SEQ ID NO: 147344 - RNA, 14 nt, Human herpesvirus 5
cgcauaaagggugg

SEQ ID NO: 147345 - RNA, 13 nt, Human herpesvirus 5
cgcaguguuguua

SEQ ID NO: 147346 - RNA, 15 nt, Human herpesvirus 5
cgcaguuacaccaca

SEQ ID NO: 147347 - RNA, 20 nt, Human herpesvirus 5
cgcaugucgucucaucacau

SEQ ID NO: 147348 - RNA, 16 nt, Human herpesvirus 5
cgcaucuugccggugc

SEQ ID NO: 147349 - RNA, 22 nt, Human herpesvirus 5
cgcauguguugaauaguguccu

SEQ ID NO: 147350 - RNA, 12 nt, Human herpesvirus 5
cgcauuacacag

SEQ ID NO: 147351 - RNA, 21 nt, Human herpesvirus 5
cgccguggugcugggucagug

SEQ ID NO: 147352 - RNA, 14 nt, Human herpesvirus 5
cgccgguucucacg

SEQ ID NO: 147353 - RNA, 17 nt, Human herpesvirus 5
cgccgauagaggcgaca

SEQ ID NO: 147354 - RNA, 12 nt, Human herpesvirus 5
cgcgauucucac

SEQ ID NO: 147355 - RNA, 15 nt, Human herpesvirus 5
cgcgcccacuggagu

SEQ ID NO: 147356 - RNA, 13 nt, Human herpesvirus 5
cgccuucugcuac

SEQ ID NO: 147357 - RNA, 14 nt, Human herpesvirus 5
cgcgacgcuucaua

SEQ ID NO: 147358 - RNA, 22 nt, Human herpesvirus 5
cgcccgacaaguucgaucucau

SEQ ID NO: 147359 - RNA, 15 nt, Human herpesvirus 5
cgcccgagcaggugc

SEQ ID NO: 147360 - RNA, 16 nt, Human herpesvirus 5
cgccgacgugauccag

SEQ ID NO: 147361 - RNA, 21 nt, Human herpesvirus 5
cgccaucuagacucacuuuau

SEQ ID NO: 147362 - RNA, 14 nt, Human herpesvirus 5
cgccacacacaucu

SEQ ID NO: 147363 - RNA, 14 nt, Human herpesvirus 5
cgccaccgccgcca

SEQ ID NO: 147364 - RNA, 17 nt, Human herpesvirus 5
cgccacgacaaacacua

SEQ ID NO: 147365 - RNA, 22 nt, Human herpesvirus 5
cgauagagauggcgauauugga

SEQ ID NO: 147366 - RNA, 14 nt, Human herpesvirus 5
cgauagucaucuca

SEQ ID NO: 147367 - RNA, 22 nt, Human herpesvirus 5
cgauagucgacgauaugucgcg

SEQ ID NO: 147368 - RNA, 19 nt, Human herpesvirus 5
cgauaugucgcgauagaca

SEQ ID NO: 147369 - RNA, 20 nt, Human herpesvirus 5
cgauauuugaaaauauggca

SEQ ID NO: 147370 - RNA, 23 nt, Human herpesvirus 5
cgauauuugaaaauauggcauau

SEQ ID NO: 147371 - RNA, 23 nt, Human herpesvirus 5
cgaucccucgccgcuauugcuua

SEQ ID NO: 147372 - RNA, 22 nt, Human herpesvirus 5
cgaucccuuuauccgcuuucac

SEQ ID NO: 147373 - RNA, 15 nt, Human herpesvirus 5
cgaucguaacccagg

SEQ ID NO: 147374 - RNA, 14 nt, Human herpesvirus 5
cgaugaaccuuccc

SEQ ID NO: 147375 - RNA, 17 nt, Human herpesvirus 5
cgaugaaccuuccccac

SEQ ID NO: 147376 - RNA, 18 nt, Human herpesvirus 5
cgaugcuuuccuggacac

SEQ ID NO: 147377 - RNA, 18 nt, Human herpesvirus 5
cgauggcccgcuaucgca

SEQ ID NO: 147378 - RNA, 21 nt, Human herpesvirus 5
cgaugccggccucaucuguaa

SEQ ID NO: 147379 - RNA, 22 nt, Human herpesvirus 5
cgaugacgaugucgaucuccau

SEQ ID NO: 147380 - RNA, 11 nt, Human herpesvirus 5
cgaugaugaua

SEQ ID NO: 147381 - RNA, 17 nt, Human herpesvirus 5
cgaggagccaaacugcg

SEQ ID NO: 147382 - RNA, 23 nt, Human herpesvirus 5
cgagagcacugacagggguggca

SEQ ID NO: 147383 - RNA, 19 nt, Human herpesvirus 5
cgagcugcgguauggguca

SEQ ID NO: 147384 - RNA, 20 nt, Human herpesvirus 5
cgagcugggcgaccgucucu

SEQ ID NO: 147385 - RNA, 23 nt, Human herpesvirus 5
cgagcacguacaccgcuggagcu

SEQ ID NO: 147386 - RNA, 14 nt, Human herpesvirus 5
cgagcacuccacac

SEQ ID NO: 147387 - RNA, 14 nt, Human herpesvirus 5
cgauaauugcuacg

SEQ ID NO: 147388 - RNA, 14 nt, Human herpesvirus 5
cgauacacgggggu

SEQ ID NO: 147389 - RNA, 14 nt, Human herpesvirus 5
ccuaacgucacuuc

SEQ ID NO: 147390 - RNA, 18 nt, Human herpesvirus 5
ccguuaccaguaccaccg

SEQ ID NO: 147391 - RNA, 17 nt, Human herpesvirus 5
ccguuguggggauuuuu

SEQ ID NO: 147392 - RNA, 13 nt, Human herpesvirus 5
cgacgucugcuca

SEQ ID NO: 147393 - RNA, 14 nt, Human herpesvirus 5
cgagacaacaauga

SEQ ID NO: 147394 - RNA, 18 nt, Human herpesvirus 5
cgagacggcgugacacag

SEQ ID NO: 147395 - RNA, 14 nt, Human herpesvirus 5
ccuacucaccaaag

SEQ ID NO: 147396 - RNA, 17 nt, Human herpesvirus 5
ccuacagcgacucucaa

SEQ ID NO: 147397 - RNA, 11 nt, Human herpesvirus 5
ccuaccuggug

SEQ ID NO: 147398 - RNA, 17 nt, Human herpesvirus 5
cgacguaccagcugucc

SEQ ID NO: 147399 - RNA, 22 nt, Human herpesvirus 5
cgacugauuaaccauaucguga

SEQ ID NO: 147400 - RNA, 15 nt, Human herpesvirus 5
cgacugcagcccacc

SEQ ID NO: 147401 - RNA, 23 nt, Human herpesvirus 5
cgacuccuuguguuuucaccgac

SEQ ID NO: 147402 - RNA, 18 nt, Human herpesvirus 5
cgacucgagcgguucgua

SEQ ID NO: 147403 - RNA, 13 nt, Human herpesvirus 5
cgcuguacauucu

SEQ ID NO: 147404 - RNA, 22 nt, Human herpesvirus 5
cggcacgccguugccacgagca

SEQ ID NO: 147405 - RNA, 18 nt, Human herpesvirus 5
cggcacuuuacauaaaac

SEQ ID NO: 147406 - RNA, 21 nt, Human herpesvirus 5
cggcacuuuacauaaaaccac

SEQ ID NO: 147407 - RNA, 17 nt, Human herpesvirus 5
cggcaugucccuacuca

SEQ ID NO: 147408 - RNA, 14 nt, Human herpesvirus 5
cggccguuaucaag

SEQ ID NO: 147409 - RNA, 12 nt, Human herpesvirus 5
cggccguugccg

SEQ ID NO: 147410 - RNA, 18 nt, Human herpesvirus 5
cggccgcaacuucuacca

SEQ ID NO: 147411 - RNA, 13 nt, Human herpesvirus 5
cggcguucugcuc

SEQ ID NO: 147412 - RNA, 21 nt, Human herpesvirus 5
cggcgguggcgucggugcgau

SEQ ID NO: 147413 - RNA, 22 nt, Human herpesvirus 5
cggcgguggcgucggugcgaug

SEQ ID NO: 147414 - RNA, 16 nt, Human herpesvirus 5
cggcgugcaucugccg

SEQ ID NO: 147415 - RNA, 16 nt, Human herpesvirus 5
cggcgcggucccguga

SEQ ID NO: 147416 - RNA, 14 nt, Human herpesvirus 5
cggcggcgaucgca

SEQ ID NO: 147417 - RNA, 21 nt, Human herpesvirus 5
cggcgacaucacggucacuuc

SEQ ID NO: 147418 - RNA, 21 nt, Human herpesvirus 5
cggcugcugcaccacagcgcc

SEQ ID NO: 147419 - RNA, 19 nt, Human herpesvirus 5
cgggacccacgguggccaa

SEQ ID NO: 147420 - RNA, 21 nt, Human herpesvirus 5
cgcgcugguuuggcuggguua

SEQ ID NO: 147421 - RNA, 14 nt, Human herpesvirus 5
cgcguggcuguagc

SEQ ID NO: 147422 - RNA, 20 nt, Human herpesvirus 5
cgcggcacgccguugccacg

SEQ ID NO: 147423 - RNA, 20 nt, Human herpesvirus 5
cgcgccgguucucacggugg

SEQ ID NO: 147424 - RNA, 18 nt, Human herpesvirus 5
cgcgccuuccuccucugc

SEQ ID NO: 147425 - RNA, 18 nt, Human herpesvirus 5
cgcgcuccaggcggagau

SEQ ID NO: 147426 - RNA, 19 nt, Human herpesvirus 5
cgcucaagccgcggugcag

SEQ ID NO: 147427 - RNA, 22 nt, Human herpesvirus 5
cgcuaacugauaacgauauguc

SEQ ID NO: 147428 - RNA, 15 nt, Human herpesvirus 5
cgcuaaaggugcaug

SEQ ID NO: 147429 - RNA, 23 nt, Human herpesvirus 5
cgcuagucaauaaagaaaaccac

SEQ ID NO: 147430 - RNA, 17 nt, Human herpesvirus 5
cgcuauacaccaaggcu

SEQ ID NO: 147431 - RNA, 23 nt, Human herpesvirus 5
cgcucgacguuucgcgaggacaa

SEQ ID NO: 147432 - RNA, 18 nt, Human herpesvirus 5
cgcugacaacccacucuu

SEQ ID NO: 147433 - RNA, 21 nt, Human herpesvirus 5
cgcugacaacccacucuugca

SEQ ID NO: 147434 - RNA, 20 nt, Human herpesvirus 5
cgcugcuuuggagcacggga

SEQ ID NO: 147435 - RNA, 15 nt, Human herpesvirus 5
cgcuggacugacaca

SEQ ID NO: 147436 - RNA, 18 nt, Human herpesvirus 5
cgcuggacugacacagcu

SEQ ID NO: 147437 - RNA, 17 nt, Human herpesvirus 5
cgcugcacggcaucaug

SEQ ID NO: 147438 - RNA, 14 nt, Human herpesvirus 5
cguguuaaacacua

SEQ ID NO: 147439 - RNA, 12 nt, Human herpesvirus 5
cgugugugcucu

SEQ ID NO: 147440 - RNA, 16 nt, Human herpesvirus 5
cgugcuuggacuggua

SEQ ID NO: 147441 - RNA, 14 nt, Human herpesvirus 5
cguggaaaauugca

SEQ ID NO: 147442 - RNA, 18 nt, Human herpesvirus 5
cgugugcuguugaccugg

SEQ ID NO: 147443 - RNA, 14 nt, Human herpesvirus 5
cgugccugagcuug

SEQ ID NO: 147444 - RNA, 18 nt, Human herpesvirus 5
cgugcgauuuggaccugg

SEQ ID NO: 147445 - RNA, 17 nt, Human herpesvirus 5
cgugccaggcuguucac

SEQ ID NO: 147446 - RNA, 15 nt, Human herpesvirus 5
cgugcaguaccucaa

SEQ ID NO: 147447 - RNA, 16 nt, Human herpesvirus 5
cgugcccagccccgua

SEQ ID NO: 147448 - RNA, 15 nt, Human herpesvirus 5
cgugagcucccaucu

SEQ ID NO: 147449 - RNA, 19 nt, Human herpesvirus 5
cgugagcucccaucuucua

SEQ ID NO: 147450 - RNA, 12 nt, Human herpesvirus 5
cgugacgguguu

SEQ ID NO: 147451 - RNA, 23 nt, Human herpesvirus 5
cguuuauuuuucagcucacuguu

SEQ ID NO: 147452 - RNA, 20 nt, Human herpesvirus 5
cguuugacucgcgugccaau

SEQ ID NO: 147453 - RNA, 18 nt, Human herpesvirus 5
cguuguacgcauuacaca

SEQ ID NO: 147454 - RNA, 23 nt, Human herpesvirus 5
cguuaacuauuccacuaguacug

SEQ ID NO: 147455 - RNA, 16 nt, Human herpesvirus 5
cguuaauuccagcgau

SEQ ID NO: 147456 - RNA, 21 nt, Human herpesvirus 5
cguuacgccgacgugauccag

SEQ ID NO: 147457 - RNA, 17 nt, Human herpesvirus 5
cguguuucgcgaacugg

SEQ ID NO: 147458 - RNA, 18 nt, Human herpesvirus 5
cguucaggauuaacguag

SEQ ID NO: 147459 - RNA, 17 nt, Human herpesvirus 5
cguucgaaggcuacucu

SEQ ID NO: 147460 - RNA, 12 nt, Human herpesvirus 5
cguucgacaugg

SEQ ID NO: 147461 - RNA, 15 nt, Human herpesvirus 5
cguuaucgaugcugc

SEQ ID NO: 147462 - RNA, 15 nt, Human herpesvirus 5
cguucaauaaucucc

SEQ ID NO: 147463 - RNA, 12 nt, Human herpesvirus 5
cggucugugauc

SEQ ID NO: 147464 - RNA, 19 nt, Human herpesvirus 5
cggugaaccgaacuaugug

SEQ ID NO: 147465 - RNA, 21 nt, Human herpesvirus 5
cggugagacccgcgucccugg

SEQ ID NO: 147466 - RNA, 18 nt, Human herpesvirus 5
cgguccgcggugucuccu

SEQ ID NO: 147467 - RNA, 17 nt, Human herpesvirus 5
cgguccgggcacaauca

SEQ ID NO: 147468 - RNA, 19 nt, Human herpesvirus 5
cggucccgugauggagaaa

SEQ ID NO: 147469 - RNA, 17 nt, Human herpesvirus 5
cggucgcaggacgggau

SEQ ID NO: 147470 - RNA, 15 nt, Human herpesvirus 5
cggugcagguucuga

SEQ ID NO: 147471 - RNA, 15 nt, Human herpesvirus 5
cggucagucuauucu

SEQ ID NO: 147472 - RNA, 14 nt, Human herpesvirus 5
cgguaauuugauac

SEQ ID NO: 147473 - RNA, 23 nt, Human herpesvirus 5
cgguagaugagcagcaaaacgac

SEQ ID NO: 147474 - RNA, 19 nt, Human herpesvirus 5
cgguaguggacaugguuau

SEQ ID NO: 147475 - RNA, 14 nt, Human herpesvirus 5
cgggugcaugacuc

SEQ ID NO: 147476 - RNA, 15 nt, Human herpesvirus 5
cgggugguaccugca

SEQ ID NO: 147477 - RNA, 15 nt, Human herpesvirus 5
cgggugguguugcgc

SEQ ID NO: 147478 - RNA, 14 nt, Human herpesvirus 5
cgucaccacuuuga

SEQ ID NO: 147479 - RNA, 13 nt, Human herpesvirus 5
cgucacuaaggac

SEQ ID NO: 147480 - RNA, 15 nt, Human herpesvirus 5
cgucacuacucuggg

SEQ ID NO: 147481 - RNA, 19 nt, Human herpesvirus 5
cgucacuauuguauacucu

SEQ ID NO: 147482 - RNA, 17 nt, Human herpesvirus 5
cgucacugccaccgaca

SEQ ID NO: 147483 - RNA, 10 nt, Human herpesvirus 5
cgucacuucc

SEQ ID NO: 147484 - RNA, 21 nt, Human herpesvirus 5
cgucaaccauuggcaacauca

SEQ ID NO: 147485 - RNA, 23 nt, Human herpesvirus 5
cgucaauaaagacgucaaugaca

SEQ ID NO: 147486 - RNA, 14 nt, Human herpesvirus 5
cguccagcaccacg

SEQ ID NO: 147487 - RNA, 11 nt, Human herpesvirus 5
cguccaggugg

SEQ ID NO: 147488 - RNA, 15 nt, Human herpesvirus 5
cguccacaguuuccg

SEQ ID NO: 147489 - RNA, 10 nt, Human herpesvirus 5
cguauauucu

SEQ ID NO: 147490 - RNA, 19 nt, Human herpesvirus 5
cguagugcggcgugcugca

SEQ ID NO: 147491 - RNA, 18 nt, Human herpesvirus 5
cguaggcagcgucucuug

SEQ ID NO: 147492 - RNA, 19 nt, Human herpesvirus 5
cgguggcgucggugcgaug

SEQ ID NO: 147493 - RNA, 16 nt, Human herpesvirus 5
cggugguacugcugug

SEQ ID NO: 147494 - RNA, 20 nt, Human herpesvirus 5
cguacucgucguguccguga

SEQ ID NO: 147495 - RNA, 16 nt, Human herpesvirus 5
gacgugcgaccuggac

SEQ ID NO: 147496 - RNA, 13 nt, Human herpesvirus 5
gacgucaaugaca

SEQ ID NO: 147497 - RNA, 21 nt, Human herpesvirus 5
gacgugagcucccaucuucua

SEQ ID NO: 147498 - RNA, 13 nt, Human herpesvirus 5
gacgugauccagg

SEQ ID NO: 147499 - RNA, 15 nt, Human herpesvirus 5
gacggugaugaugcu

SEQ ID NO: 147500 - RNA, 12 nt, Human herpesvirus 5
gacggugaugcg

SEQ ID NO: 147501 - RNA, 17 nt, Human herpesvirus 5
gacgguuuccacgccac

SEQ ID NO: 147502 - RNA, 21 nt, Human herpesvirus 5
gacggcguguuggacgcugug

SEQ ID NO: 147503 - RNA, 19 nt, Human herpesvirus 5
gacggcccccuaccugcgc

SEQ ID NO: 147504 - RNA, 20 nt, Human herpesvirus 5
gacggagccguuaccgccuc

SEQ ID NO: 147505 - RNA, 21 nt, Human herpesvirus 5
gacgcuguugagcucggacac

SEQ ID NO: 147506 - RNA, 23 nt, Human herpesvirus 5
gacaccucuauguuacaauguca

SEQ ID NO: 147507 - RNA, 22 nt, Human herpesvirus 5
gacgcucguccucucugucuuc

SEQ ID NO: 147508 - RNA, 13 nt, Human herpesvirus 5
gacacaugcacaa

SEQ ID NO: 147509 - RNA, 15 nt, Human herpesvirus 5
gacacaugcacaaua

SEQ ID NO: 147510 - RNA, 16 nt, Human herpesvirus 5
gacacagagacuugug

SEQ ID NO: 147511 - RNA, 15 nt, Human herpesvirus 5
gacacagcuccugaa

SEQ ID NO: 147512 - RNA, 19 nt, Human herpesvirus 5
gacacauuucggaagccau

SEQ ID NO: 147513 - RNA, 21 nt, Human herpesvirus 5
gacaauacaucauauguacaa

SEQ ID NO: 147514 - RNA, 17 nt, Human herpesvirus 5
gacaaguucgaucucau

SEQ ID NO: 147515 - RNA, 18 nt, Human herpesvirus 5
gacaagcuguggcugcac

SEQ ID NO: 147516 - RNA, 16 nt, Human herpesvirus 5
gagacuaccucaguca

SEQ ID NO: 147517 - RNA, 20 nt, Human herpesvirus 5
gagacuuagaaucucuugcg

SEQ ID NO: 147518 - RNA, 16 nt, Human herpesvirus 5
gagacuugcacgcugu

SEQ ID NO: 147519 - RNA, 16 nt, Human herpesvirus 5
gagacgucgauaucaa

SEQ ID NO: 147520 - RNA, 17 nt, Human herpesvirus 5
gagacacagucuaccua

SEQ ID NO: 147521 - RNA, 14 nt, Human herpesvirus 5
gagacaacaaugac

SEQ ID NO: 147522 - RNA, 23 nt, Human herpesvirus 5
gagacaagguggugaacugugau

SEQ ID NO: 147523 - RNA, 18 nt, Human herpesvirus 5
gagaauuagagcauuaag

SEQ ID NO: 147524 - RNA, 22 nt, Human herpesvirus 5
gagacagccacaucaacauaca

SEQ ID NO: 147525 - RNA, 18 nt, Human herpesvirus 5
gagaccacgguuugggaa

SEQ ID NO: 147526 - RNA, 20 nt, Human herpesvirus 5
gacuggcgucguguaaucca

SEQ ID NO: 147527 - RNA, 13 nt, Human herpesvirus 5
gacuuacaucuca

SEQ ID NO: 147528 - RNA, 18 nt, Human herpesvirus 5
gagaagguuuugugccaa

SEQ ID NO: 147529 - RNA, 18 nt, Human herpesvirus 5
gacugaauauacagacuu

SEQ ID NO: 147530 - RNA, 13 nt, Human herpesvirus 5
gacugacacagcu

SEQ ID NO: 147531 - RNA, 21 nt, Human herpesvirus 5
gacucgcugucgagacggcuc

SEQ ID NO: 147532 - RNA, 11 nt, Human herpesvirus 5
gagagaaccua

SEQ ID NO: 147533 - RNA, 21 nt, Human herpesvirus 5
gagagacauggacucuuguac

SEQ ID NO: 147534 - RNA, 17 nt, Human herpesvirus 5
gagagauuaaacauuug

SEQ ID NO: 147535 - RNA, 16 nt, Human herpesvirus 5
gagagccgcacagacc

SEQ ID NO: 147536 - RNA, 18 nt, Human herpesvirus 5
gagcaugacuguuuccaa

SEQ ID NO: 147537 - RNA, 22 nt, Human herpesvirus 5
gagcaugugcuugacuguacca

SEQ ID NO: 147538 - RNA, 14 nt, Human herpesvirus 5
gagccaaacugcga

SEQ ID NO: 147539 - RNA, 16 nt, Human herpesvirus 5
gagauaauggggauga

SEQ ID NO: 147540 - RNA, 17 nt, Human herpesvirus 5
gagcaggguaaaaacca

SEQ ID NO: 147541 - RNA, 18 nt, Human herpesvirus 5
gagcaggguaaaaaccac

SEQ ID NO: 147542 - RNA, 15 nt, Human herpesvirus 5
gagcaggucucgcgc

SEQ ID NO: 147543 - RNA, 18 nt, Human herpesvirus 5
gagcaucgcaacaacagc

SEQ ID NO: 147544 - RNA, 19 nt, Human herpesvirus 5
gagcaucgcaacaacagca

SEQ ID NO: 147545 - RNA, 12 nt, Human herpesvirus 5
gagccauguuau

SEQ ID NO: 147546 - RNA, 14 nt, Human herpesvirus 5
gaggagggugguga

SEQ ID NO: 147547 - RNA, 18 nt, Human herpesvirus 5
gauaacaaacaaugacac

SEQ ID NO: 147548 - RNA, 18 nt, Human herpesvirus 5
gauaaccgcaaaggccac

SEQ ID NO: 147549 - RNA, 22 nt, Human herpesvirus 5
gagggccgccaauuggcggcga

SEQ ID NO: 147550 - RNA, 19 nt, Human herpesvirus 5
gagggaagcacgaucuccu

SEQ ID NO: 147551 - RNA, 20 nt, Human herpesvirus 5
gaggcuaacgcgcugcugcu

SEQ ID NO: 147552 - RNA, 13 nt, Human herpesvirus 5
gaggcggcgugga

SEQ ID NO: 147553 - RNA, 13 nt, Human herpesvirus 5
gagucacacuuaa

SEQ ID NO: 147554 - RNA, 20 nt, Human herpesvirus 5
gagucucuggcgcaaaagca

SEQ ID NO: 147555 - RNA, 18 nt, Human herpesvirus 5
gaguccgucauggacgac

SEQ ID NO: 147556 - RNA, 21 nt, Human herpesvirus 5
gagugaagagggugaaggcaa

SEQ ID NO: 147557 - RNA, 16 nt, Human herpesvirus 5
gcaccugugugaucug

SEQ ID NO: 147558 - RNA, 16 nt, Human herpesvirus 5
gcacgcgcuagccuuu

SEQ ID NO: 147559 - RNA, 14 nt, Human herpesvirus 5
gcacgacuggccag

SEQ ID NO: 147560 - RNA, 15 nt, Human herpesvirus 5
gcacaauacacaugu

SEQ ID NO: 147561 - RNA, 21 nt, Human herpesvirus 5
gcacaauacgauaauugcuac

SEQ ID NO: 147562 - RNA, 19 nt, Human herpesvirus 5
gcacaccuguuggagcaac

SEQ ID NO: 147563 - RNA, 16 nt, Human herpesvirus 5
gcaaguccuccaacuc

SEQ ID NO: 147564 - RNA, 20 nt, Human herpesvirus 5
gcaauaucggcguucugcuc

SEQ ID NO: 147565 - RNA, 16 nt, Human herpesvirus 5
gcaaugcaacacuaaa

SEQ ID NO: 147566 - RNA, 12 nt, Human herpesvirus 5
gauucugcacag

SEQ ID NO: 147567 - RNA, 16 nt, Human herpesvirus 5
gauucgccguguguua

SEQ ID NO: 147568 - RNA, 22 nt, Human herpesvirus 5
gauuuaccguaaagagagucac

SEQ ID NO: 147569 - RNA, 16 nt, Human herpesvirus 5
gcaaacugaccaagcu

SEQ ID NO: 147570 - RNA, 12 nt, Human herpesvirus 5
gcaaagagccau

SEQ ID NO: 147571 - RNA, 16 nt, Human herpesvirus 5
gcaaagagccauguua

SEQ ID NO: 147572 - RNA, 17 nt, Human herpesvirus 5
gcaaagaguccaucugc

SEQ ID NO: 147573 - RNA, 16 nt, Human herpesvirus 5
gcaaagucaacaugua

SEQ ID NO: 147574 - RNA, 20 nt, Human herpesvirus 5
gcaaauaaagaugauacaua

SEQ ID NO: 147575 - RNA, 21 nt, Human herpesvirus 5
gcaacacguagugagcuuuga

SEQ ID NO: 147576 - RNA, 16 nt, Human herpesvirus 5
gcaacaacagcagcaa

SEQ ID NO: 147577 - RNA, 11 nt, Human herpesvirus 5
gcaagccaaac

SEQ ID NO: 147578 - RNA, 22 nt, Human herpesvirus 5
gcaagccaaaccacaaggcaga

SEQ ID NO: 147579 - RNA, 13 nt, Human herpesvirus 5
gcaagcagucaaa

SEQ ID NO: 147580 - RNA, 17 nt, Human herpesvirus 5
gcaagaugcucgggaua

SEQ ID NO: 147581 - RNA, 15 nt, Human herpesvirus 5
gaugaagccuaucaa

SEQ ID NO: 147582 - RNA, 15 nt, Human herpesvirus 5
gaugaaacauaugca

SEQ ID NO: 147583 - RNA, 17 nt, Human herpesvirus 5
gaucuugacgcugcugg

SEQ ID NO: 147584 - RNA, 16 nt, Human herpesvirus 5
gaucuucggcuaccuc

SEQ ID NO: 147585 - RNA, 21 nt, Human herpesvirus 5
gaucugugauccgugcgcuca

SEQ ID NO: 147586 - RNA, 22 nt, Human herpesvirus 5
gaugaggcggcguggacuggga

SEQ ID NO: 147587 - RNA, 23 nt, Human herpesvirus 5
gaugaggcggcguggacugggac

SEQ ID NO: 147588 - RNA, 15 nt, Human herpesvirus 5
gaugagcgugcugcu

SEQ ID NO: 147589 - RNA, 17 nt, Human herpesvirus 5
gaugaaugucaucauca

SEQ ID NO: 147590 - RNA, 20 nt, Human herpesvirus 5
gaugaauuccucuauugcca

SEQ ID NO: 147591 - RNA, 14 nt, Human herpesvirus 5
gaugaauuguuacc

SEQ ID NO: 147592 - RNA, 15 nt, Human herpesvirus 5
gaugaauuguuacca

SEQ ID NO: 147593 - RNA, 19 nt, Human herpesvirus 5
gauggccuacggcugcauc

SEQ ID NO: 147594 - RNA, 18 nt, Human herpesvirus 5
gaugguacuauaugcgug

SEQ ID NO: 147595 - RNA, 18 nt, Human herpesvirus 5
gauguacccgcugguguu

SEQ ID NO: 147596 - RNA, 18 nt, Human herpesvirus 5
gauguacguaccacggua

SEQ ID NO: 147597 - RNA, 12 nt, Human herpesvirus 5
gaugugcaaugc

SEQ ID NO: 147598 - RNA, 20 nt, Human herpesvirus 5
gaugugcagggacagugcgc

SEQ ID NO: 147599 - RNA, 13 nt, Human herpesvirus 5
gaugugguucugg

SEQ ID NO: 147600 - RNA, 17 nt, Human herpesvirus 5
gauagagauggcgauau

SEQ ID NO: 147601 - RNA, 22 nt, Human herpesvirus 5
gaucacguacguuuuccaaaac

SEQ ID NO: 147602 - RNA, 12 nt, Human herpesvirus 5
gauccaguuuca

SEQ ID NO: 147603 - RNA, 21 nt, Human herpesvirus 5
gauaauaacggcgcagcacca

SEQ ID NO: 147604 - RNA, 12 nt, Human herpesvirus 5
gauaaucugcca

SEQ ID NO: 147605 - RNA, 20 nt, Human herpesvirus 5
gauaauugcacauccucacg

SEQ ID NO: 147606 - RNA, 18 nt, Human herpesvirus 5
gauacaacgucaugcauu

SEQ ID NO: 147607 - RNA, 22 nt, Human herpesvirus 5
gauagacaacuccggucgcuaa

SEQ ID NO: 147608 - RNA, 13 nt, Human herpesvirus 5
gauagacaucaca

SEQ ID NO: 147609 - RNA, 23 nt, Human herpesvirus 5
gauaccgggcgccgggacucugg

SEQ ID NO: 147610 - RNA, 23 nt, Human herpesvirus 5
gauacaguugauaacaaacaaug

SEQ ID NO: 147611 - RNA, 12 nt, Human herpesvirus 5
cuuucugcuuaa

SEQ ID NO: 147612 - RNA, 13 nt, Human herpesvirus 5
cuuugacggugau

SEQ ID NO: 147613 - RNA, 21 nt, Human herpesvirus 5
cuuugacguauuugaagccag

SEQ ID NO: 147614 - RNA, 12 nt, Human herpesvirus 5
cuuugagcacaa

SEQ ID NO: 147615 - RNA, 13 nt, Human herpesvirus 5
cuuugagcacaaa

SEQ ID NO: 147616 - RNA, 16 nt, Human herpesvirus 5
cuuugccggcucuccu

SEQ ID NO: 147617 - RNA, 16 nt, Human herpesvirus 5
cuuuccucgccaccac

SEQ ID NO: 147618 - RNA, 18 nt, Human herpesvirus 5
cuuucgcacgcaccugug

SEQ ID NO: 147619 - RNA, 15 nt, Human herpesvirus 5
cuuucucagucugca

SEQ ID NO: 147620 - RNA, 15 nt, Human herpesvirus 5
cuuuguaucauuaca

SEQ ID NO: 147621 - RNA, 13 nt, Human herpesvirus 5
cuuuuaacagcuc

SEQ ID NO: 147622 - RNA, 19 nt, Human herpesvirus 5
cuuuuaacagcucaugccu

SEQ ID NO: 147623 - RNA, 14 nt, Human herpesvirus 5
cuuuuacuaguauc

SEQ ID NO: 147624 - RNA, 16 nt, Human herpesvirus 5
cuuuuacuaguaucca

SEQ ID NO: 147625 - RNA, 13 nt, Human herpesvirus 5
cuuuuaccaacgu

SEQ ID NO: 147626 - RNA, 23 nt, Human herpesvirus 5
cuuuucagaccgcaacaacagca

SEQ ID NO: 147627 - RNA, 19 nt, Human herpesvirus 5
cuuuugcgaauccuaaucg

SEQ ID NO: 147628 - RNA, 23 nt, Human herpesvirus 5
cuuuugcucucuuaguggucgcu

SEQ ID NO: 147629 - RNA, 17 nt, Human herpesvirus 5
cuuuuggugugugucua

SEQ ID NO: 147630 - RNA, 20 nt, Human herpesvirus 5
cuuuucauacaaaccccgug

SEQ ID NO: 147631 - RNA, 11 nt, Human herpesvirus 5
cuuuucaucua

SEQ ID NO: 147632 - RNA, 15 nt, Human herpesvirus 5
cuuuuuauucuuggu

SEQ ID NO: 147633 - RNA, 19 nt, Human herpesvirus 5
cuuuuuaaggagcucugaa

SEQ ID NO: 147634 - RNA, 22 nt, Human herpesvirus 5
cuuuuuuauguccaugucucca

SEQ ID NO: 147635 - RNA, 19 nt, Human herpesvirus 5
cuuuuuuuaaccaauaaca

SEQ ID NO: 147636 - RNA, 15 nt, Human herpesvirus 5
gaaaacauaagaaua

SEQ ID NO: 147637 - RNA, 22 nt, Human herpesvirus 5
gaaaagccggcuccaagugcaa

SEQ ID NO: 147638 - RNA, 15 nt, Human herpesvirus 5
gaaaaaggguuucaa

SEQ ID NO: 147639 - RNA, 21 nt, Human herpesvirus 5
gaaaaagguggaaaucccuca

SEQ ID NO: 147640 - RNA, 14 nt, Human herpesvirus 5
gaaaacaaccacac

SEQ ID NO: 147641 - RNA, 14 nt, Human herpesvirus 5
gaaaaaaugguguu

SEQ ID NO: 147642 - RNA, 17 nt, Human herpesvirus 5
gaaaaaaugguguuaca

SEQ ID NO: 147643 - RNA, 12 nt, Human herpesvirus 5
cuuucaagguga

SEQ ID NO: 147644 - RNA, 21 nt, Human herpesvirus 5
cuuuauucagaaagcaccaga

SEQ ID NO: 147645 - RNA, 22 nt, Human herpesvirus 5
cuuuauucagaaagcaccagaa

SEQ ID NO: 147646 - RNA, 12 nt, Human herpesvirus 5
cuuguuuuacaa

SEQ ID NO: 147647 - RNA, 21 nt, Human herpesvirus 5
cuugucgccaugcuucauguc

SEQ ID NO: 147648 - RNA, 21 nt, Human herpesvirus 5
cuugucggcgugaaugggcac

SEQ ID NO: 147649 - RNA, 16 nt, Human herpesvirus 5
cuugcuuaaugaucuc

SEQ ID NO: 147650 - RNA, 13 nt, Human herpesvirus 5
cuugcuguguauc

SEQ ID NO: 147651 - RNA, 14 nt, Human herpesvirus 5
cuugcugaugugcc

SEQ ID NO: 147652 - RNA, 21 nt, Human herpesvirus 5
cuugcuccucuuccaaaucuc

SEQ ID NO: 147653 - RNA, 13 nt, Human herpesvirus 5
cuugcguccuuca

SEQ ID NO: 147654 - RNA, 20 nt, Human herpesvirus 5
cugugguagaaugcugcuca

SEQ ID NO: 147655 - RNA, 21 nt, Human herpesvirus 5
cuugccaagcuuuagccaggu

SEQ ID NO: 147656 - RNA, 21 nt, Human herpesvirus 5
cugugaugaacgacacaugca

SEQ ID NO: 147657 - RNA, 14 nt, Human herpesvirus 5
cuguggauguugag

SEQ ID NO: 147658 - RNA, 13 nt, Human herpesvirus 5
cugugggcccacu

SEQ ID NO: 147659 - RNA, 20 nt, Human herpesvirus 5
cugugaauugcgaagccagc

SEQ ID NO: 147660 - RNA, 11 nt, Human herpesvirus 5
cugugagcuuu

SEQ ID NO: 147661 - RNA, 11 nt, Human herpesvirus 5
cugugauaaca

SEQ ID NO: 147662 - RNA, 15 nt, Human herpesvirus 5
cugugauaacacguc

SEQ ID NO: 147663 - RNA, 19 nt, Human herpesvirus 5
cuguauggaggucacuguc

SEQ ID NO: 147664 - RNA, 15 nt, Human herpesvirus 5
gaaacccguguaaug

SEQ ID NO: 147665 - RNA, 20 nt, Human herpesvirus 5
gaaacgcuggaaaauauacc

SEQ ID NO: 147666 - RNA, 16 nt, Human herpesvirus 5
gaaacgugagucuccg

SEQ ID NO: 147667 - RNA, 18 nt, Human herpesvirus 5
gaaaccacgcgucagggc

SEQ ID NO: 147668 - RNA, 15 nt, Human herpesvirus 5
gaaacauguccccau

SEQ ID NO: 147669 - RNA, 20 nt, Human herpesvirus 5
gaaacagcguccacaguuuc

SEQ ID NO: 147670 - RNA, 23 nt, Human herpesvirus 5
gaaacagcguccacaguuuccga

SEQ ID NO: 147671 - RNA, 23 nt, Human herpesvirus 5
gaaaaguaacacacggccagcuc

SEQ ID NO: 147672 - RNA, 15 nt, Human herpesvirus 5
gaaaauauggcauau

SEQ ID NO: 147673 - RNA, 15 nt, Human herpesvirus 5
gaaaauuacuacgua

SEQ ID NO: 147674 - RNA, 22 nt, Human herpesvirus 5
gaacacggcgugacaauaaaca

SEQ ID NO: 147675 - RNA, 13 nt, Human herpesvirus 5
gaacaauaaacua

SEQ ID NO: 147676 - RNA, 22 nt, Human herpesvirus 5
gaacaauaaacuaaaacauucu

SEQ ID NO: 147677 - RNA, 22 nt, Human herpesvirus 5
gaaccuacgugcaacgccacca

SEQ ID NO: 147678 - RNA, 21 nt, Human herpesvirus 5
gaacccuucccgaccucccac

SEQ ID NO: 147679 - RNA, 16 nt, Human herpesvirus 5
gaaagagaaaccccca

SEQ ID NO: 147680 - RNA, 17 nt, Human herpesvirus 5
gaaauguugacccaggg

SEQ ID NO: 147681 - RNA, 12 nt, Human herpesvirus 5
gaaagcuaacau

SEQ ID NO: 147682 - RNA, 22 nt, Human herpesvirus 5
gacaacggccgccgcagccacg

SEQ ID NO: 147683 - RNA, 20 nt, Human herpesvirus 5
gacaacggcuggaaauggac

SEQ ID NO: 147684 - RNA, 14 nt, Human herpesvirus 5
gacaaccggagcag

SEQ ID NO: 147685 - RNA, 15 nt, Human herpesvirus 5
gacaaccugcugcac

SEQ ID NO: 147686 - RNA, 19 nt, Human herpesvirus 5
gacaacuuugacgugcuca

SEQ ID NO: 147687 - RNA, 18 nt, Human herpesvirus 5
gacaaaaaguacacuggu

SEQ ID NO: 147688 - RNA, 17 nt, Human herpesvirus 5
gaauccgacgacgaguc

SEQ ID NO: 147689 - RNA, 23 nt, Human herpesvirus 5
gaagggcuguucgaugugguucu

SEQ ID NO: 147690 - RNA, 16 nt, Human herpesvirus 5
gaaggucaaaaccuca

SEQ ID NO: 147691 - RNA, 17 nt, Human herpesvirus 5
gaaggucaaaaccucag

SEQ ID NO: 147692 - RNA, 15 nt, Human herpesvirus 5
gaaggacaguguauu

SEQ ID NO: 147693 - RNA, 22 nt, Human herpesvirus 5
gaagccaagcguauccugguca

SEQ ID NO: 147694 - RNA, 13 nt, Human herpesvirus 5
gaagcggugcuga

SEQ ID NO: 147695 - RNA, 20 nt, Human herpesvirus 5
gaagcggugcugauggguga

SEQ ID NO: 147696 - RNA, 20 nt, Human herpesvirus 5
gaagaugccgaugugugacu

SEQ ID NO: 147697 - RNA, 13 nt, Human herpesvirus 5
gaacgcuacuucc

SEQ ID NO: 147698 - RNA, 14 nt, Human herpesvirus 5
gaacgcuacuuccc

SEQ ID NO: 147699 - RNA, 13 nt, Human herpesvirus 5
gaacgcuguuacg

SEQ ID NO: 147700 - RNA, 15 nt, Human herpesvirus 5
gaacgagucgcucau

SEQ ID NO: 147701 - RNA, 16 nt, Human herpesvirus 5
gaacgagugugccucg

SEQ ID NO: 147702 - RNA, 15 nt, Human herpesvirus 5
gaacggaguggugag

SEQ ID NO: 147703 - RNA, 19 nt, Human herpesvirus 5
gaacggauaucuacgcaau

SEQ ID NO: 147704 - RNA, 21 nt, Human herpesvirus 5
gaacggaagaagaagaacaag

SEQ ID NO: 147705 - RNA, 20 nt, Human herpesvirus 5
uacagauccaguuucaccaa

SEQ ID NO: 147706 - RNA, 15 nt, Human herpesvirus 5
uacagcacguacaaa

SEQ ID NO: 147707 - RNA, 13 nt, Human herpesvirus 5
uacacaacagcug

SEQ ID NO: 147708 - RNA, 14 nt, Human herpesvirus 5
uacacaacagcugu

SEQ ID NO: 147709 - RNA, 14 nt, Human herpesvirus 5
uacagcuaccucau

SEQ ID NO: 147710 - RNA, 22 nt, Human herpesvirus 5
uacagguauuccgaaaccugua

SEQ ID NO: 147711 - RNA, 23 nt, Human herpesvirus 5
uacaguugauaacaaacaaugac

SEQ ID NO: 147712 - RNA, 14 nt, Human herpesvirus 5
uacaguacaacagu

SEQ ID NO: 147713 - RNA, 14 nt, Human herpesvirus 5
uacauaaaaccacc

SEQ ID NO: 147714 - RNA, 14 nt, Human herpesvirus 5
uacaaugugcugca

SEQ ID NO: 147715 - RNA, 15 nt, Human herpesvirus 5
uacaaugugcugcau

SEQ ID NO: 147716 - RNA, 18 nt, Human herpesvirus 5
uacaaugugcugcaugag

SEQ ID NO: 147717 - RNA, 22 nt, Human herpesvirus 5
uacaaggagcgacguaccagcu

SEQ ID NO: 147718 - RNA, 13 nt, Human herpesvirus 5
uacaaguaugugg

SEQ ID NO: 147719 - RNA, 17 nt, Human herpesvirus 5
uaagcuauaccaucacc

SEQ ID NO: 147720 - RNA, 18 nt, Human herpesvirus 5
uaacucuaucuacugucu

SEQ ID NO: 147721 - RNA, 18 nt, Human herpesvirus 5
uaaggaaaacgugacuuu

SEQ ID NO: 147722 - RNA, 22 nt, Human herpesvirus 5
uaauuauugccauaauucucau

SEQ ID NO: 147723 - RNA, 22 nt, Human herpesvirus 5
uaagcugucagccucucacggu

SEQ ID NO: 147724 - RNA, 15 nt, Human herpesvirus 5
uacuaucgacguguu

SEQ ID NO: 147725 - RNA, 13 nt, Human herpesvirus 5
uacuaguauccac

SEQ ID NO: 147726 - RNA, 20 nt, Human herpesvirus 5
uacuaccgcgcccacuggag

SEQ ID NO: 147727 - RNA, 20 nt, Human herpesvirus 5
uacuagggaaaacauaagaa

SEQ ID NO: 147728 - RNA, 22 nt, Human herpesvirus 5
uacguggguaagugacguggau

SEQ ID NO: 147729 - RNA, 15 nt, Human herpesvirus 5
uacuucaguaugaaa

SEQ ID NO: 147730 - RNA, 18 nt, Human herpesvirus 5
uacuucccaugcaacuuc

SEQ ID NO: 147731 - RNA, 13 nt, Human herpesvirus 5
uaccuuguaccaa

SEQ ID NO: 147732 - RNA, 18 nt, Human herpesvirus 5
uaccucuaacaacgucac

SEQ ID NO: 147733 - RNA, 18 nt, Human herpesvirus 5
uaccuccccuaacgucac

SEQ ID NO: 147734 - RNA, 22 nt, Human herpesvirus 5
uaccgucgcccucgguaauuug

SEQ ID NO: 147735 - RNA, 15 nt, Human herpesvirus 5
uaccuaucaucacac

SEQ ID NO: 147736 - RNA, 16 nt, Human herpesvirus 5
uaccuacggaccgcag

SEQ ID NO: 147737 - RNA, 23 nt, Human herpesvirus 5
uaccuagagaggcuggcgguaug

SEQ ID NO: 147738 - RNA, 18 nt, Human herpesvirus 5
uacaugcuauaagacagc

SEQ ID NO: 147739 - RNA, 23 nt, Human herpesvirus 5
uacaugaugaaugucaucaucac

SEQ ID NO: 147740 - RNA, 14 nt, Human herpesvirus 5
uacaugaacaaaaa

SEQ ID NO: 147741 - RNA, 16 nt, Human herpesvirus 5
uacuuuuacaugaaca

SEQ ID NO: 147742 - RNA, 13 nt, Human herpesvirus 5
uagacuagcacag

SEQ ID NO: 147743 - RNA, 19 nt, Human herpesvirus 5
uagacgaaagacaaugaaa

SEQ ID NO: 147744 - RNA, 13 nt, Human herpesvirus 5
uagacagauucau

SEQ ID NO: 147745 - RNA, 14 nt, Human herpesvirus 5
uagaauacugcuau

SEQ ID NO: 147746 - RNA, 17 nt, Human herpesvirus 5
uagcacgucagugguga

SEQ ID NO: 147747 - RNA, 18 nt, Human herpesvirus 5
uagcaagccagauacuau

SEQ ID NO: 147748 - RNA, 21 nt, Human herpesvirus 5
uagagcaaaaccuuacagcuu

SEQ ID NO: 147749 - RNA, 16 nt, Human herpesvirus 5
uagaugagcagcaaaa

SEQ ID NO: 147750 - RNA, 15 nt, Human herpesvirus 5
uagaugcuagcaaua

SEQ ID NO: 147751 - RNA, 15 nt, Human herpesvirus 5
uaguauccacgucac

SEQ ID NO: 147752 - RNA, 18 nt, Human herpesvirus 5
uaggcaccuggacuucaa

SEQ ID NO: 147753 - RNA, 21 nt, Human herpesvirus 5
uagucaauaaagaaaaccaca

SEQ ID NO: 147754 - RNA, 16 nt, Human herpesvirus 5
uagucacgucgcuguu

SEQ ID NO: 147755 - RNA, 18 nt, Human herpesvirus 5
uagcugcacaccaguauu

SEQ ID NO: 147756 - RNA, 21 nt, Human herpesvirus 5
uaggaaccgguccagucacau

SEQ ID NO: 147757 - RNA, 11 nt, Human herpesvirus 5
uauacaucucc

SEQ ID NO: 147758 - RNA, 17 nt, Human herpesvirus 5
uauaccaucaccuauaa

SEQ ID NO: 147759 - RNA, 12 nt, Human herpesvirus 5
uauacucuguaa

SEQ ID NO: 147760 - RNA, 22 nt, Human herpesvirus 5
uagugcccauacuuuuacauga

SEQ ID NO: 147761 - RNA, 21 nt, Human herpesvirus 5
uagugaauugguguucuuaca

SEQ ID NO: 147762 - RNA, 17 nt, Human herpesvirus 5
uagugacgugucgggaa

SEQ ID NO: 147763 - RNA, 20 nt, Human herpesvirus 5
uauccaauacggcugccacu

SEQ ID NO: 147764 - RNA, 17 nt, Human herpesvirus 5
uaucaucuaaagacuau

SEQ ID NO: 147765 - RNA, 21 nt, Human herpesvirus 5
uaucaucuuuauuugcaucau

SEQ ID NO: 147766 - RNA, 21 nt, Human herpesvirus 5
uaucaugaggcaacucaugau

SEQ ID NO: 147767 - RNA, 13 nt, Human herpesvirus 5
uauagccaauaaa

SEQ ID NO: 147768 - RNA, 16 nt, Human herpesvirus 5
uauaggcuaagcuaua

SEQ ID NO: 147769 - RNA, 17 nt, Human herpesvirus 5
uauagaccccaagccaa

SEQ ID NO: 147770 - RNA, 18 nt, Human herpesvirus 5
uauagaccccaagccaaa

SEQ ID NO: 147771 - RNA, 18 nt, Human herpesvirus 5
uauagauagcggcacuuu

SEQ ID NO: 147772 - RNA, 22 nt, Human herpesvirus 5
uauauacaaaaacaugcacaua

SEQ ID NO: 147773 - RNA, 21 nt, Human herpesvirus 5
gugugaagcgguggaaaccaa

SEQ ID NO: 147774 - RNA, 13 nt, Human herpesvirus 5
gugucugucucaa

SEQ ID NO: 147775 - RNA, 19 nt, Human herpesvirus 5
guguuauucagaaccaugu

SEQ ID NO: 147776 - RNA, 14 nt, Human herpesvirus 5
guguuaucacagaa

SEQ ID NO: 147777 - RNA, 16 nt, Human herpesvirus 5
gugucaaaaaucacuu

SEQ ID NO: 147778 - RNA, 16 nt, Human herpesvirus 5
gugucccugccagucu

SEQ ID NO: 147779 - RNA, 18 nt, Human herpesvirus 5
gugucccugccagucucc

SEQ ID NO: 147780 - RNA, 23 nt, Human herpesvirus 5
guguccgcggcgugaccacguca

SEQ ID NO: 147781 - RNA, 19 nt, Human herpesvirus 5
guguccgcucaacuuucua

SEQ ID NO: 147782 - RNA, 13 nt, Human herpesvirus 5
guguccuacaaag

SEQ ID NO: 147783 - RNA, 14 nt, Human herpesvirus 5
guggcagcuggcuu

SEQ ID NO: 147784 - RNA, 17 nt, Human herpesvirus 5
guguacgccaucuucau

SEQ ID NO: 147785 - RNA, 17 nt, Human herpesvirus 5
gucaaagccgacaaccu

SEQ ID NO: 147786 - RNA, 15 nt, Human herpesvirus 5
gucaacacuaccaag

SEQ ID NO: 147787 - RNA, 12 nt, Human herpesvirus 5
gucaacauguag

SEQ ID NO: 147788 - RNA, 20 nt, Human herpesvirus 5
gucaauaaagaaaaccacac

SEQ ID NO: 147789 - RNA, 20 nt, Human herpesvirus 5
gucaaccugcugacuaucau

SEQ ID NO: 147790 - RNA, 22 nt, Human herpesvirus 5
gucaacgguggaauucgcuggg

SEQ ID NO: 147791 - RNA, 12 nt, Human herpesvirus 5
gucaacuacagc

SEQ ID NO: 147792 - RNA, 22 nt, Human herpesvirus 5
gucaaggcucgcaaagacgugc

SEQ ID NO: 147793 - RNA, 21 nt, Human herpesvirus 5
guccauagugcgccaagccau

SEQ ID NO: 147794 - RNA, 23 nt, Human herpesvirus 5
guccauauguugucaggacgugc

SEQ ID NO: 147795 - RNA, 13 nt, Human herpesvirus 5
gucccgcuuuucu

SEQ ID NO: 147796 - RNA, 16 nt, Human herpesvirus 5
gucccuuuuacuagua

SEQ ID NO: 147797 - RNA, 18 nt, Human herpesvirus 5
gucccuacucaccaaagc

SEQ ID NO: 147798 - RNA, 19 nt, Human herpesvirus 5
gucccccccguccaggugg

SEQ ID NO: 147799 - RNA, 22 nt, Human herpesvirus 5
guggaacgagcgccguccugca

SEQ ID NO: 147800 - RNA, 13 nt, Human herpesvirus 5
guccuacaaagga

SEQ ID NO: 147801 - RNA, 16 nt, Human herpesvirus 5
gucccgacauggagac

SEQ ID NO: 147802 - RNA, 15 nt, Human herpesvirus 5
guccgcggugucucc

SEQ ID NO: 147803 - RNA, 17 nt, Human herpesvirus 5
guggauggucauauaua

SEQ ID NO: 147804 - RNA, 21 nt, Human herpesvirus 5
guggcaaggcguauguuauca

SEQ ID NO: 147805 - RNA, 23 nt, Human herpesvirus 5
guggacgggucucuuugacacga

SEQ ID NO: 147806 - RNA, 22 nt, Human herpesvirus 5
guggacgacuggcucaacuuuc

SEQ ID NO: 147807 - RNA, 15 nt, Human herpesvirus 5
guuaccaguaccacc

SEQ ID NO: 147808 - RNA, 17 nt, Human herpesvirus 5
guuacccugguauccaa

SEQ ID NO: 147809 - RNA, 15 nt, Human herpesvirus 5
guuaccuucuugccc

SEQ ID NO: 147810 - RNA, 16 nt, Human herpesvirus 5
guuacuaacacuccuc

SEQ ID NO: 147811 - RNA, 15 nt, Human herpesvirus 5
guuagacauggggca

SEQ ID NO: 147812 - RNA, 15 nt, Human herpesvirus 5
guuagacuagcacag

SEQ ID NO: 147813 - RNA, 22 nt, Human herpesvirus 5
guuauugccagucgcacuaaua

SEQ ID NO: 147814 - RNA, 20 nt, Human herpesvirus 5
guuauaacgacgccagugau

SEQ ID NO: 147815 - RNA, 21 nt, Human herpesvirus 5
guuauaacgacgccagugaua

SEQ ID NO: 147816 - RNA, 21 nt, Human herpesvirus 5
guuauaagcguggauggucau

SEQ ID NO: 147817 - RNA, 20 nt, Human herpesvirus 5
guuaucagaaagcugcaauc

SEQ ID NO: 147818 - RNA, 16 nt, Human herpesvirus 5
guuaaaaaaaccacgu

SEQ ID NO: 147819 - RNA, 13 nt, Human herpesvirus 5
guuaaacuggaua

SEQ ID NO: 147820 - RNA, 16 nt, Human herpesvirus 5
guguugcuacagggag

SEQ ID NO: 147821 - RNA, 18 nt, Human herpesvirus 5
guguugcuaggcgggcug

SEQ ID NO: 147822 - RNA, 16 nt, Human herpesvirus 5
guguuguauaugugaa

SEQ ID NO: 147823 - RNA, 23 nt, Human herpesvirus 5
guuaauaaaacgccaugaugaca

SEQ ID NO: 147824 - RNA, 16 nt, Human herpesvirus 5
guuaaucgcacuucca

SEQ ID NO: 147825 - RNA, 16 nt, Human herpesvirus 5
guuaauuggagacaca

SEQ ID NO: 147826 - RNA, 19 nt, Human herpesvirus 5
guucgaguccugcuguuac

SEQ ID NO: 147827 - RNA, 22 nt, Human herpesvirus 5
guucgcaugucgucucaucaca

SEQ ID NO: 147828 - RNA, 19 nt, Human herpesvirus 5
guucgcugacgaugagcaa

SEQ ID NO: 147829 - RNA, 16 nt, Human herpesvirus 5
guucgcuucucacucu

SEQ ID NO: 147830 - RNA, 19 nt, Human herpesvirus 5
guucuaugcauaacgucaa

SEQ ID NO: 147831 - RNA, 13 nt, Human herpesvirus 5
guucuccaaggga

SEQ ID NO: 147832 - RNA, 15 nt, Human herpesvirus 5
guucugaaucugcuc

SEQ ID NO: 147833 - RNA, 20 nt, Human herpesvirus 5
guucugcguaagcaccguga

SEQ ID NO: 147834 - RNA, 14 nt, Human herpesvirus 5
guucuuacaguuuu

SEQ ID NO: 147835 - RNA, 15 nt, Human herpesvirus 5
guucuuacaguuuuc

SEQ ID NO: 147836 - RNA, 17 nt, Human herpesvirus 5
guucaauaaucuccuga

SEQ ID NO: 147837 - RNA, 16 nt, Human herpesvirus 5
guucacaacucaggga

SEQ ID NO: 147838 - RNA, 16 nt, Human herpesvirus 5
guuccacuccaucaca

SEQ ID NO: 147839 - RNA, 23 nt, Human herpesvirus 5
guuccagaccagcgccaccauag

SEQ ID NO: 147840 - RNA, 14 nt, Human herpesvirus 5
uaacaauauugcuu

SEQ ID NO: 147841 - RNA, 18 nt, Human herpesvirus 5
uaacaauuuuucuuuuuc

SEQ ID NO: 147842 - RNA, 13 nt, Human herpesvirus 5
uaacacgcaccac

SEQ ID NO: 147843 - RNA, 15 nt, Human herpesvirus 5
uaacaccgucaccac

SEQ ID NO: 147844 - RNA, 12 nt, Human herpesvirus 5
uaacacuacagc

SEQ ID NO: 147845 - RNA, 14 nt, Human herpesvirus 5
uaacacuacagcuu

SEQ ID NO: 147846 - RNA, 15 nt, Human herpesvirus 5
uaacuauuccacuag

SEQ ID NO: 147847 - RNA, 18 nt, Human herpesvirus 5
uaacguuaggaaccagug

SEQ ID NO: 147848 - RNA, 22 nt, Human herpesvirus 5
uaacguagguuuucgaaauaac

SEQ ID NO: 147849 - RNA, 16 nt, Human herpesvirus 5
uaaauuguuauugcca

SEQ ID NO: 147850 - RNA, 23 nt, Human herpesvirus 5
uaacaaauauauggaguuugugu

SEQ ID NO: 147851 - RNA, 14 nt, Human herpesvirus 5
uaacaaacaaugac

SEQ ID NO: 147852 - RNA, 16 nt, Human herpesvirus 5
uaacaaacaaugacac

SEQ ID NO: 147853 - RNA, 16 nt, Human herpesvirus 5
uaaaauuugauuacuc

SEQ ID NO: 147854 - RNA, 14 nt, Human herpesvirus 5
uaaaucuacacuga

SEQ ID NO: 147855 - RNA, 18 nt, Human herpesvirus 5
guugggaccgcagcgugg

SEQ ID NO: 147856 - RNA, 22 nt, Human herpesvirus 5
guuguacgcauuacacaggugu

SEQ ID NO: 147857 - RNA, 19 nt, Human herpesvirus 5
guuggcuuacugccugccg

SEQ ID NO: 147858 - RNA, 15 nt, Human herpesvirus 5
guuggaacccaucga

SEQ ID NO: 147859 - RNA, 20 nt, Human herpesvirus 5
guugccgcuggacugacaca

SEQ ID NO: 147860 - RNA, 18 nt, Human herpesvirus 5
guugagcgccuucugcua

SEQ ID NO: 147861 - RNA, 16 nt, Human herpesvirus 5
guugagaacauauaua

SEQ ID NO: 147862 - RNA, 22 nt, Human herpesvirus 5
guugaccguuguggggauuuuu

SEQ ID NO: 147863 - RNA, 14 nt, Human herpesvirus 5
guugcacacggccg

SEQ ID NO: 147864 - RNA, 18 nt, Human herpesvirus 5
guuuaugaacauguaucu

SEQ ID NO: 147865 - RNA, 20 nt, Human herpesvirus 5
guuucgcuguagcugugguu

SEQ ID NO: 147866 - RNA, 20 nt, Human herpesvirus 5
guuucaucgacgccuaccuu

SEQ ID NO: 147867 - RNA, 23 nt, Human herpesvirus 5
guuucaaacagcacauuagacac

SEQ ID NO: 147868 - RNA, 22 nt, Human herpesvirus 5
guuuauuuuucagcucacuguu

SEQ ID NO: 147869 - RNA, 19 nt, Human herpesvirus 5
guuuugauaaccuaccugg

SEQ ID NO: 147870 - RNA, 14 nt, Human herpesvirus 5
guuuuacaauguua

SEQ ID NO: 147871 - RNA, 19 nt, Human herpesvirus 5
gcgaauuaggcaacuauca

SEQ ID NO: 147872 - RNA, 20 nt, Human herpesvirus 5
gcgacaucaagcuggcacau

SEQ ID NO: 147873 - RNA, 20 nt, Human herpesvirus 5
gccuuuugaucgccaccgcc

SEQ ID NO: 147874 - RNA, 21 nt, Human herpesvirus 5
gccuuucuaggcuacuccgcc

SEQ ID NO: 147875 - RNA, 13 nt, Human herpesvirus 5
gccuugcugugua

SEQ ID NO: 147876 - RNA, 14 nt, Human herpesvirus 5
gccuugcuguguau

SEQ ID NO: 147877 - RNA, 15 nt, Human herpesvirus 5
gccuucagcgucuca

SEQ ID NO: 147878 - RNA, 20 nt, Human herpesvirus 5
gccuucagcgucucauuugu

SEQ ID NO: 147879 - RNA, 17 nt, Human herpesvirus 5
gccuucggccagcguga

SEQ ID NO: 147880 - RNA, 18 nt, Human herpesvirus 5
gccuguggauagauuucu

SEQ ID NO: 147881 - RNA, 16 nt, Human herpesvirus 5
gccuuauguggcugcg

SEQ ID NO: 147882 - RNA, 19 nt, Human herpesvirus 5
gccugguacuugacacugc

SEQ ID NO: 147883 - RNA, 12 nt, Human herpesvirus 5
gccugcaucuuc

SEQ ID NO: 147884 - RNA, 18 nt, Human herpesvirus 5
gccugcacugccaggugc

SEQ ID NO: 147885 - RNA, 13 nt, Human herpesvirus 5
gccugcaccaacc

SEQ ID NO: 147886 - RNA, 17 nt, Human herpesvirus 5
gccugcacgaccugcuc

SEQ ID NO: 147887 - RNA, 24 nt, Human herpesvirus 5
gccugcacgccgccgugacugcga

SEQ ID NO: 147888 - RNA, 15 nt, Human herpesvirus 5
gccggaccgugcacg

SEQ ID NO: 147889 - RNA, 21 nt, Human herpesvirus 5
gccggcgaacguucuguaauc

SEQ ID NO: 147890 - RNA, 17 nt, Human herpesvirus 5
gccguguuuuugcucga

SEQ ID NO: 147891 - RNA, 18 nt, Human herpesvirus 5
gccgucgcgccuuccucc

SEQ ID NO: 147892 - RNA, 13 nt, Human herpesvirus 5
gccgucacuuccc

SEQ ID NO: 147893 - RNA, 22 nt, Human herpesvirus 5
gccguccaugucgcugcgcaga

SEQ ID NO: 147894 - RNA, 21 nt, Human herpesvirus 5
gccgugcugggcugggugcau

SEQ ID NO: 147895 - RNA, 17 nt, Human herpesvirus 5
gccucggaucuacucau

SEQ ID NO: 147896 - RNA, 14 nt, Human herpesvirus 5
gccuccgcggcccg

SEQ ID NO: 147897 - RNA, 16 nt, Human herpesvirus 5
gccugagcuugguguu

SEQ ID NO: 147898 - RNA, 19 nt, Human herpesvirus 5
gccuccuaguaaugcauua

SEQ ID NO: 147899 - RNA, 23 nt, Human herpesvirus 5
gccuccuccaccacggcugcuga

SEQ ID NO: 147900 - RNA, 18 nt, Human herpesvirus 5
gccucauuuguauuuacu

SEQ ID NO: 147901 - RNA, 19 nt, Human herpesvirus 5
gccucauuuguauuuacuu

SEQ ID NO: 147902 - RNA, 23 nt, Human herpesvirus 5
gccucauuuguauuuacuuuaaa

SEQ ID NO: 147903 - RNA, 13 nt, Human herpesvirus 5
gccuccacuuccg

SEQ ID NO: 147904 - RNA, 13 nt, Human herpesvirus 5
gccuaucaaugaa

SEQ ID NO: 147905 - RNA, 18 nt, Human herpesvirus 5
gccuacgucuucaugacg

SEQ ID NO: 147906 - RNA, 23 nt, Human herpesvirus 5
gccuauagauagcggcacuuuac

SEQ ID NO: 147907 - RNA, 16 nt, Human herpesvirus 5
gcagagccaccaggug

SEQ ID NO: 147908 - RNA, 21 nt, Human herpesvirus 5
gcagagccacguugagauuca

SEQ ID NO: 147909 - RNA, 18 nt, Human herpesvirus 5
gcacgggcucgggugacg

SEQ ID NO: 147910 - RNA, 22 nt, Human herpesvirus 5
gcacggaaaagcaguggcagca

SEQ ID NO: 147911 - RNA, 21 nt, Human herpesvirus 5
gcacggcaucaugcugggcga

SEQ ID NO: 147912 - RNA, 18 nt, Human herpesvirus 5
gcacggccuguggugcga

SEQ ID NO: 147913 - RNA, 23 nt, Human herpesvirus 5
gcacggcgcggucccgugaugga

SEQ ID NO: 147914 - RNA, 18 nt, Human herpesvirus 5
gcaccuggguggaacgag

SEQ ID NO: 147915 - RNA, 19 nt, Human herpesvirus 5
gcacgucgcugauccgcag

SEQ ID NO: 147916 - RNA, 14 nt, Human herpesvirus 5
gcacgugcucuuuu

SEQ ID NO: 147917 - RNA, 19 nt, Human herpesvirus 5
gcagaccaccaugugcaug

SEQ ID NO: 147918 - RNA, 22 nt, Human herpesvirus 5
gcagaccgugggucgggagcac

SEQ ID NO: 147919 - RNA, 14 nt, Human herpesvirus 5
gcagaccuacagca

SEQ ID NO: 147920 - RNA, 18 nt, Human herpesvirus 5
gcccgaccacgacacggu

SEQ ID NO: 147921 - RNA, 21 nt, Human herpesvirus 5
gcccgaccacgacacggugcu

SEQ ID NO: 147922 - RNA, 13 nt, Human herpesvirus 5
gcccgccggccac

SEQ ID NO: 147923 - RNA, 15 nt, Human herpesvirus 5
gccccggcuucauua

SEQ ID NO: 147924 - RNA, 12 nt, Human herpesvirus 5
gcagcaccucuu

SEQ ID NO: 147925 - RNA, 12 nt, Human herpesvirus 5
gcagcacauugu

SEQ ID NO: 147926 - RNA, 18 nt, Human herpesvirus 5
gcagcaccaugugcaaaa

SEQ ID NO: 147927 - RNA, 23 nt, Human herpesvirus 5
gcccuucuggagcacacugcuac

SEQ ID NO: 147928 - RNA, 19 nt, Human herpesvirus 5
gccgacgaagaagaacaag

SEQ ID NO: 147929 - RNA, 20 nt, Human herpesvirus 5
gccgacggucaccaucgugc

SEQ ID NO: 147930 - RNA, 17 nt, Human herpesvirus 5
gccgagacgcugcgcua

SEQ ID NO: 147931 - RNA, 23 nt, Human herpesvirus 5
gccgagacgcugcgcuacgucua

SEQ ID NO: 147932 - RNA, 22 nt, Human herpesvirus 5
gccgagacggcgugacacagca

SEQ ID NO: 147933 - RNA, 15 nt, Human herpesvirus 5
gccgcacaccuguug

SEQ ID NO: 147934 - RNA, 14 nt, Human herpesvirus 5
gccgccaacuccgu

SEQ ID NO: 147935 - RNA, 16 nt, Human herpesvirus 5
gccgccacaccuguca

SEQ ID NO: 147936 - RNA, 13 nt, Human herpesvirus 5
gccgccaccggug

SEQ ID NO: 147937 - RNA, 13 nt, Human herpesvirus 5
gccgcaagugcuc

SEQ ID NO: 147938 - RNA, 17 nt, Human herpesvirus 5
gccgcagaccauccuca

SEQ ID NO: 147939 - RNA, 18 nt, Human herpesvirus 5
gccgcagaccauccucac

SEQ ID NO: 147940 - RNA, 23 nt, Human herpesvirus 5
gccgcagaccauccucacacuga

SEQ ID NO: 147941 - RNA, 17 nt, Human herpesvirus 5
gccgauagagauggcga

SEQ ID NO: 147942 - RNA, 18 nt, Human herpesvirus 5
gccgaucaugugcuuaag

SEQ ID NO: 147943 - RNA, 14 nt, Human herpesvirus 5
gccgccgugacugc

SEQ ID NO: 147944 - RNA, 21 nt, Human herpesvirus 5
gccgccuucgaaacggugcga

SEQ ID NO: 147945 - RNA, 20 nt, Human herpesvirus 5
gccgcuggacugacacagcu

SEQ ID NO: 147946 - RNA, 18 nt, Human herpesvirus 5
gcugcgcgacacgguggc

SEQ ID NO: 147947 - RNA, 20 nt, Human herpesvirus 5
gcugcgguuuccucuucuag

SEQ ID NO: 147948 - RNA, 20 nt, Human herpesvirus 5
gcugcgcccguuggugaaug

SEQ ID NO: 147949 - RNA, 22 nt, Human herpesvirus 5
gcugcuuucgcacgcaccugug

SEQ ID NO: 147950 - RNA, 13 nt, Human herpesvirus 5
gcuggaaagacaa

SEQ ID NO: 147951 - RNA, 19 nt, Human herpesvirus 5
gcugcucggcguggucaac

SEQ ID NO: 147952 - RNA, 16 nt, Human herpesvirus 5
gcugcugcugcacggg

SEQ ID NO: 147953 - RNA, 15 nt, Human herpesvirus 5
gcuguggcugcacac

SEQ ID NO: 147954 - RNA, 16 nt, Human herpesvirus 5
gcuguuacgauuucaa

SEQ ID NO: 147955 - RNA, 13 nt, Human herpesvirus 5
gcuuaagcagaaa

SEQ ID NO: 147956 - RNA, 23 nt, Human herpesvirus 5
gcuuagacauuccccaccuuccc

SEQ ID NO: 147957 - RNA, 22 nt, Human herpesvirus 5
gcuuggcuacacgacggggaaa

SEQ ID NO: 147958 - RNA, 21 nt, Human herpesvirus 5
gcuuggggcucaaaguucaaa

SEQ ID NO: 147959 - RNA, 21 nt, Human herpesvirus 5
gcuucaacgccugcaccaacc

SEQ ID NO: 147960 - RNA, 22 nt, Human herpesvirus 5
gcucgucgugggcuacuuugac

SEQ ID NO: 147961 - RNA, 14 nt, Human herpesvirus 5
gcucuaaaaacacc

SEQ ID NO: 147962 - RNA, 15 nt, Human herpesvirus 5
gcucguguaucuuau

SEQ ID NO: 147963 - RNA, 19 nt, Human herpesvirus 5
gcucugggucgccaggugu

SEQ ID NO: 147964 - RNA, 23 nt, Human herpesvirus 5
gcucauggaggucuaucacgggc

SEQ ID NO: 147965 - RNA, 13 nt, Human herpesvirus 5
gcuccaagugcaa

SEQ ID NO: 147966 - RNA, 15 nt, Human herpesvirus 5
gcuccaagugcaagc

SEQ ID NO: 147967 - RNA, 21 nt, Human herpesvirus 5
gcuccaggcggagaugaggac

SEQ ID NO: 147968 - RNA, 15 nt, Human herpesvirus 5
gcuccacgcuauaca

SEQ ID NO: 147969 - RNA, 19 nt, Human herpesvirus 5
gcucccagagcugcuagga

SEQ ID NO: 147970 - RNA, 13 nt, Human herpesvirus 5
gcuccucuuccaa

SEQ ID NO: 147971 - RNA, 21 nt, Human herpesvirus 5
gcuccucuuccaaaucuccgc

SEQ ID NO: 147972 - RNA, 16 nt, Human herpesvirus 5
gcuccuuagucgagac

SEQ ID NO: 147973 - RNA, 16 nt, Human herpesvirus 5
gcgguggugacugggg

SEQ ID NO: 147974 - RNA, 17 nt, Human herpesvirus 5
gcggugaacgugcgcga

SEQ ID NO: 147975 - RNA, 21 nt, Human herpesvirus 5
gcgguccuagcacgucagugg

SEQ ID NO: 147976 - RNA, 14 nt, Human herpesvirus 5
gcgcguacggugga

SEQ ID NO: 147977 - RNA, 19 nt, Human herpesvirus 5
gcguccuuucaaggugauu

SEQ ID NO: 147978 - RNA, 21 nt, Human herpesvirus 5
gcgucguguaauccacgacuc

SEQ ID NO: 147979 - RNA, 11 nt, Human herpesvirus 5
gcguauucccc

SEQ ID NO: 147980 - RNA, 15 nt, Human herpesvirus 5
gcgucaaagcucuua

SEQ ID NO: 147981 - RNA, 15 nt, Human herpesvirus 5
gcgguuuaucaugag

SEQ ID NO: 147982 - RNA, 13 nt, Human herpesvirus 5
gcuagcaauaauc

SEQ ID NO: 147983 - RNA, 17 nt, Human herpesvirus 5
gcuauccgcugcgacua

SEQ ID NO: 147984 - RNA, 13 nt, Human herpesvirus 5
gcuauaugcaucg

SEQ ID NO: 147985 - RNA, 16 nt, Human herpesvirus 5
gcuauaagaaggccau

SEQ ID NO: 147986 - RNA, 16 nt, Human herpesvirus 5
gcgugcucagcuggug

SEQ ID NO: 147987 - RNA, 16 nt, Human herpesvirus 5
gcgugcuccaccaacg

SEQ ID NO: 147988 - RNA, 21 nt, Human herpesvirus 5
gcuacgaccuggccuguggug

SEQ ID NO: 147989 - RNA, 22 nt, Human herpesvirus 5
gcgugcuguuuuccguguugcc

SEQ ID NO: 147990 - RNA, 23 nt, Human herpesvirus 5
gcgcacuugucauuaaacaggcu

SEQ ID NO: 147991 - RNA, 12 nt, Human herpesvirus 5
gcgauguagcag

SEQ ID NO: 147992 - RNA, 15 nt, Human herpesvirus 5
gcgauguagcagaaa

SEQ ID NO: 147993 - RNA, 20 nt, Human herpesvirus 5
gcgauagucgacgauauguc

SEQ ID NO: 147994 - RNA, 22 nt, Human herpesvirus 5
gcgagaacuaauauugcaaugg

SEQ ID NO: 147995 - RNA, 20 nt, Human herpesvirus 5
gcgacguucuccaagggaga

SEQ ID NO: 147996 - RNA, 19 nt, Human herpesvirus 5
gcgacuccuuguguuuuca

SEQ ID NO: 147997 - RNA, 17 nt, Human herpesvirus 5
gcgagccccaucgggcc

SEQ ID NO: 147998 - RNA, 18 nt, Human herpesvirus 5
gcgaggcgaaacuggugc

SEQ ID NO: 147999 - RNA, 14 nt, Human herpesvirus 5
gcgaggcuuugaug

SEQ ID NO: 148000 - RNA, 13 nt, Human herpesvirus 5
gcgaggugucaug

SEQ ID NO: 148001 - RNA, 18 nt, Human herpesvirus 5
gcgccaccauagccacua

SEQ ID NO: 148002 - RNA, 21 nt, Human herpesvirus 5
gcgccaacggcauagugccag

SEQ ID NO: 148003 - RNA, 15 nt, Human herpesvirus 5
gcgccaagccaugca

SEQ ID NO: 148004 - RNA, 18 nt, Human herpesvirus 5
gcgccaaguugguggugg

SEQ ID NO: 148005 - RNA, 14 nt, Human herpesvirus 5
gcgcaucacccgcc

SEQ ID NO: 148006 - RNA, 13 nt, Human herpesvirus 5
gcgcaucuugccg

SEQ ID NO: 148007 - RNA, 15 nt, Human herpesvirus 5
gcgcaucuugccggu

SEQ ID NO: 148008 - RNA, 16 nt, Human herpesvirus 5
gcgccggugacccgcc

SEQ ID NO: 148009 - RNA, 13 nt, Human herpesvirus 5
gcgccgguucuca

SEQ ID NO: 148010 - RNA, 15 nt, Human herpesvirus 5
gcgccgucacuuccc

SEQ ID NO: 148011 - RNA, 14 nt, Human herpesvirus 5
gcgccgcggcacca

SEQ ID NO: 148012 - RNA, 13 nt, Human herpesvirus 5
gcgccuucugcua

SEQ ID NO: 148013 - RNA, 14 nt, Human herpesvirus 5
gcgccgccgcucac

SEQ ID NO: 148014 - RNA, 19 nt, Human herpesvirus 5
gcgccgccucgcaucauca

SEQ ID NO: 148015 - RNA, 21 nt, Human herpesvirus 5
gcuuuggucgccugcacugcc

SEQ ID NO: 148016 - RNA, 23 nt, Human herpesvirus 5
gcuuuucagaccgcaacaacagc

SEQ ID NO: 148017 - RNA, 16 nt, Human herpesvirus 5
gcuuuucuacuccauc

SEQ ID NO: 148018 - RNA, 21 nt, Human herpesvirus 5
gcuuuucuacuccaucaugaa

SEQ ID NO: 148019 - RNA, 19 nt, Human herpesvirus 5
ggaacacugaaaacaccau

SEQ ID NO: 148020 - RNA, 12 nt, Human herpesvirus 5
gcuuuccuggac

SEQ ID NO: 148021 - RNA, 14 nt, Human herpesvirus 5
gcuuucucaucuca

SEQ ID NO: 148022 - RNA, 15 nt, Human herpesvirus 5
gcuuuaagcugcuca

SEQ ID NO: 148023 - RNA, 22 nt, Human herpesvirus 5
ggaacguuacccugguauccaa

SEQ ID NO: 148024 - RNA, 14 nt, Human herpesvirus 5
ggaagcggugcuga

SEQ ID NO: 148025 - RNA, 22 nt, Human herpesvirus 5
ggauacgggcuaugcuggugau

SEQ ID NO: 148026 - RNA, 13 nt, Human herpesvirus 5
ggauacaguugau

SEQ ID NO: 148027 - RNA, 19 nt, Human herpesvirus 5
ggauaugaggaaacugaau

SEQ ID NO: 148028 - RNA, 15 nt, Human herpesvirus 5
ggcauauagccaaua

SEQ ID NO: 148029 - RNA, 11 nt, Human herpesvirus 5
ggcaugcaaug

SEQ ID NO: 148030 - RNA, 17 nt, Human herpesvirus 5
ggcauuccgcacaacug

SEQ ID NO: 148031 - RNA, 23 nt, Human herpesvirus 5
ggcaaagaaaaaaaaaaggaaca

SEQ ID NO: 148032 - RNA, 22 nt, Human herpesvirus 5
ggcaauugcaugucgcccagaa

SEQ ID NO: 148033 - RNA, 20 nt, Human herpesvirus 5
ggcaaguuggccaccaagaa

SEQ ID NO: 148034 - RNA, 18 nt, Human herpesvirus 5
ggcaagccaaaccacaag

SEQ ID NO: 148035 - RNA, 17 nt, Human herpesvirus 5
ggaugauucgcagucac

SEQ ID NO: 148036 - RNA, 13 nt, Human herpesvirus 5
ggauguauaugau

SEQ ID NO: 148037 - RNA, 22 nt, Human herpesvirus 5
ggauccaaggccuccagcgccu

SEQ ID NO: 148038 - RNA, 18 nt, Human herpesvirus 5
ggaucugcgaguggaauu

SEQ ID NO: 148039 - RNA, 19 nt, Human herpesvirus 5
ggcgccgucagagcaucaa

SEQ ID NO: 148040 - RNA, 15 nt, Human herpesvirus 5
ggcgcgggugguguu

SEQ ID NO: 148041 - RNA, 20 nt, Human herpesvirus 5
ggcgcguagaaggcaaccag

SEQ ID NO: 148042 - RNA, 19 nt, Human herpesvirus 5
ggcgcgaccuucccucucc

SEQ ID NO: 148043 - RNA, 16 nt, Human herpesvirus 5
ggcggacggaggaguc

SEQ ID NO: 148044 - RNA, 17 nt, Human herpesvirus 5
ggcggccauggagcugc

SEQ ID NO: 148045 - RNA, 20 nt, Human herpesvirus 5
ggcggccgacggcagcgugc

SEQ ID NO: 148046 - RNA, 21 nt, Human herpesvirus 5
ggcucgccuuccccgaugugc

SEQ ID NO: 148047 - RNA, 13 nt, Human herpesvirus 5
ggcucuccuccuc

SEQ ID NO: 148048 - RNA, 19 nt, Human herpesvirus 5
ggcuggaauacguggcggu

SEQ ID NO: 148049 - RNA, 16 nt, Human herpesvirus 5
ggcuggaggacuuuuu

SEQ ID NO: 148050 - RNA, 18 nt, Human herpesvirus 5
ggcuggcccucgcagugc

SEQ ID NO: 148051 - RNA, 18 nt, Human herpesvirus 5
gggauuuucgaugauaca

SEQ ID NO: 148052 - RNA, 17 nt, Human herpesvirus 5
gggauggggagacguga

SEQ ID NO: 148053 - RNA, 18 nt, Human herpesvirus 5
gggauccgccgccauugc

SEQ ID NO: 148054 - RNA, 21 nt, Human herpesvirus 5
gggaucuaccagcccagggau

SEQ ID NO: 148055 - RNA, 13 nt, Human herpesvirus 5
gggaaaacauaag

SEQ ID NO: 148056 - RNA, 11 nt, Human herpesvirus 5
gggaagggugu

SEQ ID NO: 148057 - RNA, 21 nt, Human herpesvirus 5
gggaaguacaauaucaaagaa

SEQ ID NO: 148058 - RNA, 19 nt, Human herpesvirus 5
gggaaguauacauuacuau

SEQ ID NO: 148059 - RNA, 23 nt, Human herpesvirus 5
gggacucuggugcuauggcugcu

SEQ ID NO: 148060 - RNA, 24 nt, Human herpesvirus 5
gggaaugccagaguagauuuucau

SEQ ID NO: 148061 - RNA, 21 nt, Human herpesvirus 5
gggaauuccccugccuacguc

SEQ ID NO: 148062 - RNA, 20 nt, Human herpesvirus 5
gggaaaaggaauagcaagaa

SEQ ID NO: 148063 - RNA, 19 nt, Human herpesvirus 5
gguggcucgauacacugga

SEQ ID NO: 148064 - RNA, 19 nt, Human herpesvirus 5
ggugaaaaguagcaccaca

SEQ ID NO: 148065 - RNA, 12 nt, Human herpesvirus 5
ggucugcgcugc

SEQ ID NO: 148066 - RNA, 14 nt, Human herpesvirus 5
ggucggcgugucca

SEQ ID NO: 148067 - RNA, 22 nt, Human herpesvirus 5
ggucggugucucgucggugaga

SEQ ID NO: 148068 - RNA, 16 nt, Human herpesvirus 5
ggucauguuucucacg

SEQ ID NO: 148069 - RNA, 19 nt, Human herpesvirus 5
gguuaccggucacuggacu

SEQ ID NO: 148070 - RNA, 13 nt, Human herpesvirus 5
gguucccacagga

SEQ ID NO: 148071 - RNA, 17 nt, Human herpesvirus 5
ggugugaugguacuaua

SEQ ID NO: 148072 - RNA, 19 nt, Human herpesvirus 5
gguguugugcgugaugauu

SEQ ID NO: 148073 - RNA, 11 nt, Human herpesvirus 5
ggugugucuau

SEQ ID NO: 148074 - RNA, 13 nt, Human herpesvirus 5
ggugugugucuau

SEQ ID NO: 148075 - RNA, 15 nt, Human herpesvirus 5
gguggugacugggga

SEQ ID NO: 148076 - RNA, 21 nt, Human herpesvirus 5
gguguacgugcgguaacuggc

SEQ ID NO: 148077 - RNA, 16 nt, Human herpesvirus 5
gggugguagaacugag

SEQ ID NO: 148078 - RNA, 18 nt, Human herpesvirus 5
gggugacggcgacaucac

SEQ ID NO: 148079 - RNA, 15 nt, Human herpesvirus 5
ggguuaagaggucac

SEQ ID NO: 148080 - RNA, 15 nt, Human herpesvirus 5
gguaaagacaucguc

SEQ ID NO: 148081 - RNA, 12 nt, Human herpesvirus 5
gguaacuggcag

SEQ ID NO: 148082 - RNA, 12 nt, Human herpesvirus 5
gguacaugugca

SEQ ID NO: 148083 - RNA, 14 nt, Human herpesvirus 5
gggccuacaccagu

SEQ ID NO: 148084 - RNA, 13 nt, Human herpesvirus 5
gggcccugcugac

SEQ ID NO: 148085 - RNA, 20 nt, Human herpesvirus 5
gggccgccaauuggcggcga

SEQ ID NO: 148086 - RNA, 16 nt, Human herpesvirus 5
gggcgacagcacguua

SEQ ID NO: 148087 - RNA, 17 nt, Human herpesvirus 5
gguuggacuccugugua

SEQ ID NO: 148088 - RNA, 13 nt, Human herpesvirus 5
gguuucgcuguag

SEQ ID NO: 148089 - RNA, 19 nt, Human herpesvirus 5
guaaaaaaaaaaacaaagc

SEQ ID NO: 148090 - RNA, 16 nt, Human herpesvirus 5
guaacugauaucgcca

SEQ ID NO: 148091 - RNA, 23 nt, Human herpesvirus 5
guacgaaccagcugguaccugaa

SEQ ID NO: 148092 - RNA, 18 nt, Human herpesvirus 5
guacgaacgcuacuuccc

SEQ ID NO: 148093 - RNA, 17 nt, Human herpesvirus 5
guacgcagucacugcgu

SEQ ID NO: 148094 - RNA, 23 nt, Human herpesvirus 5
guaccuggacgcggugaacgugc

SEQ ID NO: 148095 - RNA, 21 nt, Human herpesvirus 5
guaccucuaacaacgucacuu

SEQ ID NO: 148096 - RNA, 13 nt, Human herpesvirus 5
guaccgcucuucu

SEQ ID NO: 148097 - RNA, 15 nt, Human herpesvirus 5
guaccuaaagccccc

SEQ ID NO: 148098 - RNA, 16 nt, Human herpesvirus 5
guaccuaaagccccca

SEQ ID NO: 148099 - RNA, 18 nt, Human herpesvirus 5
guaaugcgcaucuugccg

SEQ ID NO: 148100 - RNA, 15 nt, Human herpesvirus 5
guaaugcguacuuca

SEQ ID NO: 148101 - RNA, 19 nt, Human herpesvirus 5
guaaugcuuauucuagccc

SEQ ID NO: 148102 - RNA, 14 nt, Human herpesvirus 5
guaauggaaaguau

SEQ ID NO: 148103 - RNA, 14 nt, Human herpesvirus 5
guaaucaccaaaga

SEQ ID NO: 148104 - RNA, 14 nt, Human herpesvirus 5
guaguuguugcaga

SEQ ID NO: 148105 - RNA, 19 nt, Human herpesvirus 5
guaccugaaaccuaccugg

SEQ ID NO: 148106 - RNA, 18 nt, Human herpesvirus 5
guacuaaaaaaguguuua

SEQ ID NO: 148107 - RNA, 21 nt, Human herpesvirus 5
guacuaccguuaacuauucca

SEQ ID NO: 148108 - RNA, 15 nt, Human herpesvirus 5
guacgggucuaccaa

SEQ ID NO: 148109 - RNA, 19 nt, Human herpesvirus 5
guauuguugagaacauaua

SEQ ID NO: 148110 - RNA, 14 nt, Human herpesvirus 5
guauuggcauauag

SEQ ID NO: 148111 - RNA, 19 nt, Human herpesvirus 5
guauuggcauauagccaau

SEQ ID NO: 148112 - RNA, 21 nt, Human herpesvirus 5
guauuuuugugcucaaguuca

SEQ ID NO: 148113 - RNA, 11 nt, Human herpesvirus 5
gucaaaacaca

SEQ ID NO: 148114 - RNA, 18 nt, Human herpesvirus 5
guauuucuagagcacuga

SEQ ID NO: 148115 - RNA, 19 nt, Human herpesvirus 5
guauagaccccaagccaaa

SEQ ID NO: 148116 - RNA, 22 nt, Human herpesvirus 5
guauagaccccaagccaaaaac

SEQ ID NO: 148117 - RNA, 20 nt, Human herpesvirus 5
guauacuaaacucugugaug

SEQ ID NO: 148118 - RNA, 15 nt, Human herpesvirus 5
ccaguagacagacag

SEQ ID NO: 148119 - RNA, 19 nt, Human herpesvirus 5
ccagcagcagcuggugcau

SEQ ID NO: 148120 - RNA, 22 nt, Human herpesvirus 5
ccaucgguacgaacgcuacuuc

SEQ ID NO: 148121 - RNA, 18 nt, Human herpesvirus 5
ccaguucguagaucacac

SEQ ID NO: 148122 - RNA, 17 nt, Human herpesvirus 5
ccauaaaucuacacuga

SEQ ID NO: 148123 - RNA, 21 nt, Human herpesvirus 5
ccaugcaacuucuucuacuca

SEQ ID NO: 148124 - RNA, 23 nt, Human herpesvirus 5
ccaugcaacuucuucuacucaca

SEQ ID NO: 148125 - RNA, 18 nt, Human herpesvirus 5
ccaccaagaaacaccggu

SEQ ID NO: 148126 - RNA, 14 nt, Human herpesvirus 5
ccacaucaacauac

SEQ ID NO: 148127 - RNA, 20 nt, Human herpesvirus 5
ccacagggagggaacguuac

SEQ ID NO: 148128 - RNA, 16 nt, Human herpesvirus 5
ccagaucacuaucuuc

SEQ ID NO: 148129 - RNA, 22 nt, Human herpesvirus 5
ccagcaaggucaacuacagcaa

SEQ ID NO: 148130 - RNA, 18 nt, Human herpesvirus 5
ccacacucgugacgucaa

SEQ ID NO: 148131 - RNA, 18 nt, Human herpesvirus 5
ccacagcgugacuuugag

SEQ ID NO: 148132 - RNA, 21 nt, Human herpesvirus 5
ccacaagcgccgucacuuccc

SEQ ID NO: 148133 - RNA, 16 nt, Human herpesvirus 5
ccacacacaucuguca

SEQ ID NO: 148134 - RNA, 13 nt, Human herpesvirus 5
ccacaccugucac

SEQ ID NO: 148135 - RNA, 15 nt, Human herpesvirus 5
ccaauacugcaucca

SEQ ID NO: 148136 - RNA, 20 nt, Human herpesvirus 5
ccaauacagcacguacaaau

SEQ ID NO: 148137 - RNA, 13 nt, Human herpesvirus 5
ccaacaagcggga

SEQ ID NO: 148138 - RNA, 19 nt, Human herpesvirus 5
ccaacaugcccagcaucuc

SEQ ID NO: 148139 - RNA, 15 nt, Human herpesvirus 5
cauuuccgugcgauu

SEQ ID NO: 148140 - RNA, 22 nt, Human herpesvirus 5
ccaaagaugaagacacccugcg

SEQ ID NO: 148141 - RNA, 15 nt, Human herpesvirus 5
cauggcuauguacac

SEQ ID NO: 148142 - RNA, 17 nt, Human herpesvirus 5
cauggagacaguuucca

SEQ ID NO: 148143 - RNA, 17 nt, Human herpesvirus 5
cauggaggccaacaucu

SEQ ID NO: 148144 - RNA, 20 nt, Human herpesvirus 5
caugcgcaacagguccagcu

SEQ ID NO: 148145 - RNA, 16 nt, Human herpesvirus 5
caugccgccaccggug

SEQ ID NO: 148146 - RNA, 12 nt, Human herpesvirus 5
caugccucuaca

SEQ ID NO: 148147 - RNA, 20 nt, Human herpesvirus 5
caugccuuccgcgugcucca

SEQ ID NO: 148148 - RNA, 13 nt, Human herpesvirus 5
caugcucaagaca

SEQ ID NO: 148149 - RNA, 17 nt, Human herpesvirus 5
caugcauaagaagccaa

SEQ ID NO: 148150 - RNA, 18 nt, Human herpesvirus 5
caugcauaagaagccaag

SEQ ID NO: 148151 - RNA, 20 nt, Human herpesvirus 5
caugcaacuucuucuacuca

SEQ ID NO: 148152 - RNA, 23 nt, Human herpesvirus 5
caugcaacuucuucuacucacaa

SEQ ID NO: 148153 - RNA, 21 nt, Human herpesvirus 5
cccaaggaucgcgagccccau

SEQ ID NO: 148154 - RNA, 11 nt, Human herpesvirus 5
cccaagccaaa

SEQ ID NO: 148155 - RNA, 15 nt, Human herpesvirus 5
ccaugcuucaugucg

SEQ ID NO: 148156 - RNA, 23 nt, Human herpesvirus 5
ccaugggcuacguaggccuccuc

SEQ ID NO: 148157 - RNA, 20 nt, Human herpesvirus 5
ccauucuuuuuauauauaca

SEQ ID NO: 148158 - RNA, 17 nt, Human herpesvirus 5
ccccgcuacagcaaaga

SEQ ID NO: 148159 - RNA, 17 nt, Human herpesvirus 5
cccccgucaacacgguc

SEQ ID NO: 148160 - RNA, 21 nt, Human herpesvirus 5
ccccuaucgcguguguucuau

SEQ ID NO: 148161 - RNA, 20 nt, Human herpesvirus 5
ccccguugaaaacacgcuuu

SEQ ID NO: 148162 - RNA, 21 nt, Human herpesvirus 5
ccccguggacgacuggcucaa

SEQ ID NO: 148163 - RNA, 14 nt, Human herpesvirus 5
ccccgugugaugug

SEQ ID NO: 148164 - RNA, 15 nt, Human herpesvirus 5
cccggauaauugucc

SEQ ID NO: 148165 - RNA, 11 nt, Human herpesvirus 5
ccccaccuacg

SEQ ID NO: 148166 - RNA, 21 nt, Human herpesvirus 5
cccagcuggggaaguacaaua

SEQ ID NO: 148167 - RNA, 15 nt, Human herpesvirus 5
cccacgaccauuucc

SEQ ID NO: 148168 - RNA, 23 nt, Human herpesvirus 5
cccaccgccgcuuucucaucuca

SEQ ID NO: 148169 - RNA, 16 nt, Human herpesvirus 5
cccacguccacccauc

SEQ ID NO: 148170 - RNA, 16 nt, Human herpesvirus 5
cccacuggaguugcuc

SEQ ID NO: 148171 - RNA, 20 nt, Human herpesvirus 5
cccagagcgauauguuucaa

SEQ ID NO: 148172 - RNA, 19 nt, Human herpesvirus 5
ccgugacacuuuggcucuu

SEQ ID NO: 148173 - RNA, 16 nt, Human herpesvirus 5
ccgugauagccacgac

SEQ ID NO: 148174 - RNA, 22 nt, Human herpesvirus 5
ccgugcgguucucaaaaacugu

SEQ ID NO: 148175 - RNA, 20 nt, Human herpesvirus 5
ccgggacucuggugcuaugg

SEQ ID NO: 148176 - RNA, 17 nt, Human herpesvirus 5
ccgucgcuuaucuugca

SEQ ID NO: 148177 - RNA, 14 nt, Human herpesvirus 5
ccggcugcugcacc

SEQ ID NO: 148178 - RNA, 13 nt, Human herpesvirus 5
ccggcggcugcug

SEQ ID NO: 148179 - RNA, 15 nt, Human herpesvirus 5
ccggcguugccgcca

SEQ ID NO: 148180 - RNA, 21 nt, Human herpesvirus 5
ccggcgcgccacguaggugag

SEQ ID NO: 148181 - RNA, 16 nt, Human herpesvirus 5
ccggcgcugagaaccu

SEQ ID NO: 148182 - RNA, 13 nt, Human herpesvirus 5
ccggcggagacga

SEQ ID NO: 148183 - RNA, 12 nt, Human herpesvirus 5
ccgccgcuuucu

SEQ ID NO: 148184 - RNA, 12 nt, Human herpesvirus 5
ccgcgaggccac

SEQ ID NO: 148185 - RNA, 22 nt, Human herpesvirus 5
ccgcccgacaaguucgaucuca

SEQ ID NO: 148186 - RNA, 11 nt, Human herpesvirus 5
cccgugggugu

SEQ ID NO: 148187 - RNA, 20 nt, Human herpesvirus 5
cccgugugucuaaugugcug

SEQ ID NO: 148188 - RNA, 16 nt, Human herpesvirus 5
cccuaaagcucgccaa

SEQ ID NO: 148189 - RNA, 16 nt, Human herpesvirus 5
cccuaauaaagcacac

SEQ ID NO: 148190 - RNA, 19 nt, Human herpesvirus 5
cccgguauucggaaacagc

SEQ ID NO: 148191 - RNA, 14 nt, Human herpesvirus 5
cccgucaugguaca

SEQ ID NO: 148192 - RNA, 15 nt, Human herpesvirus 5
cccuaguaauaccac

SEQ ID NO: 148193 - RNA, 23 nt, Human herpesvirus 5
cccuaccugcgcgauacauugcc

SEQ ID NO: 148194 - RNA, 21 nt, Human herpesvirus 5
ccgacgugagcucccaucuuc

SEQ ID NO: 148195 - RNA, 20 nt, Human herpesvirus 5
ccgagcacuccacacgccau

SEQ ID NO: 148196 - RNA, 14 nt, Human herpesvirus 5
ccgaugguccguca

SEQ ID NO: 148197 - RNA, 15 nt, Human herpesvirus 5
ccgcaacgugcugcu

SEQ ID NO: 148198 - RNA, 13 nt, Human herpesvirus 5
ccgaucaccagaa

SEQ ID NO: 148199 - RNA, 22 nt, Human herpesvirus 5
ccgaguccaccucugcuacugg

SEQ ID NO: 148200 - RNA, 15 nt, Human herpesvirus 5
ccgcaguuacaccac

SEQ ID NO: 148201 - RNA, 16 nt, Human herpesvirus 5
ccgcaguuacaccaca

SEQ ID NO: 148202 - RNA, 22 nt, Human herpesvirus 5
ccgccaacagcaccgccggcua

SEQ ID NO: 148203 - RNA, 13 nt, Human herpesvirus 5
ccgcaaugggcuu

SEQ ID NO: 148204 - RNA, 20 nt, Human herpesvirus 5
ccgcacgcgcuagccuuucu

SEQ ID NO: 148205 - RNA, 17 nt, Human herpesvirus 5
caggcaagccaaaccac

SEQ ID NO: 148206 - RNA, 20 nt, Human herpesvirus 5
caggacuggaagugucacgc

SEQ ID NO: 148207 - RNA, 20 nt, Human herpesvirus 5
caggcauacggcguauacaa

SEQ ID NO: 148208 - RNA, 23 nt, Human herpesvirus 5
caggcauacggcguauacaauca

SEQ ID NO: 148209 - RNA, 20 nt, Human herpesvirus 5
caggcaucaccgugauaacg

SEQ ID NO: 148210 - RNA, 17 nt, Human herpesvirus 5
caggccgccgccgcuca

SEQ ID NO: 148211 - RNA, 21 nt, Human herpesvirus 5
caggcucgcguguuuugucug

SEQ ID NO: 148212 - RNA, 23 nt, Human herpesvirus 5
caggcucgcguguuuugucugag

SEQ ID NO: 148213 - RNA, 18 nt, Human herpesvirus 5
caggcucugcgccgucuc

SEQ ID NO: 148214 - RNA, 19 nt, Human herpesvirus 5
caggcucugcgccgucucu

SEQ ID NO: 148215 - RNA, 22 nt, Human herpesvirus 5
caggcuuugacggugaugcgug

SEQ ID NO: 148216 - RNA, 13 nt, Human herpesvirus 5
cagggacagugcg

SEQ ID NO: 148217 - RNA, 22 nt, Human herpesvirus 5
cagggagacacagucuaccuag

SEQ ID NO: 148218 - RNA, 14 nt, Human herpesvirus 5
cagcgccgugcuca

SEQ ID NO: 148219 - RNA, 21 nt, Human herpesvirus 5
cagcggcugcgcgcucgucuc

SEQ ID NO: 148220 - RNA, 15 nt, Human herpesvirus 5
cagcggggguggugg

SEQ ID NO: 148221 - RNA, 22 nt, Human herpesvirus 5
cagccuucccuuguaagacaga

SEQ ID NO: 148222 - RNA, 21 nt, Human herpesvirus 5
cagcguagucuggcagcguua

SEQ ID NO: 148223 - RNA, 15 nt, Human herpesvirus 5
cagcguccacaguuu

SEQ ID NO: 148224 - RNA, 17 nt, Human herpesvirus 5
cagcguccacaguuucc

SEQ ID NO: 148225 - RNA, 18 nt, Human herpesvirus 5
cagcguccacaguuuccg

SEQ ID NO: 148226 - RNA, 19 nt, Human herpesvirus 5
cagcucaugccucuacauc

SEQ ID NO: 148227 - RNA, 18 nt, Human herpesvirus 5
cagcuccugaaugagcuc

SEQ ID NO: 148228 - RNA, 23 nt, Human herpesvirus 5
cagcuguuggauucugauuucag

SEQ ID NO: 148229 - RNA, 23 nt, Human herpesvirus 5
cagcuuaaaggcgcacuugucau

SEQ ID NO: 148230 - RNA, 20 nt, Human herpesvirus 5
cagcuucuuucucaccgugc

SEQ ID NO: 148231 - RNA, 22 nt, Human herpesvirus 5
cagcuggggaaguacaauauca

SEQ ID NO: 148232 - RNA, 23 nt, Human herpesvirus 5
cagcuggggaaguacaauaucaa

SEQ ID NO: 148233 - RNA, 23 nt, Human herpesvirus 5
cagauauccacaacgacaaauac

SEQ ID NO: 148234 - RNA, 23 nt, Human herpesvirus 5
cagauagguaaagcggugggugg

SEQ ID NO: 148235 - RNA, 14 nt, Human herpesvirus 5
cagauacgcagugu

SEQ ID NO: 148236 - RNA, 18 nt, Human herpesvirus 5
cagauacaacgucaugca

SEQ ID NO: 148237 - RNA, 22 nt, Human herpesvirus 5
cagaucgugccgcgagguguca

SEQ ID NO: 148238 - RNA, 15 nt, Human herpesvirus 5
cagacucacgucaca

SEQ ID NO: 148239 - RNA, 13 nt, Human herpesvirus 5
cagaguaggugau

SEQ ID NO: 148240 - RNA, 16 nt, Human herpesvirus 5
cagagucgccagucca

SEQ ID NO: 148241 - RNA, 19 nt, Human herpesvirus 5
cagaccgcaacaacagcag

SEQ ID NO: 148242 - RNA, 21 nt, Human herpesvirus 5
cagacaucuuaugaagcugaa

SEQ ID NO: 148243 - RNA, 17 nt, Human herpesvirus 5
cagacccacuaccugga

SEQ ID NO: 148244 - RNA, 22 nt, Human herpesvirus 5
cagaaucagcagugaguacacg

SEQ ID NO: 148245 - RNA, 17 nt, Human herpesvirus 5
cagaaguuguugcaacu

SEQ ID NO: 148246 - RNA, 17 nt, Human herpesvirus 5
cagaacucucugccacu

SEQ ID NO: 148247 - RNA, 13 nt, Human herpesvirus 5
cagaagacuuuga

SEQ ID NO: 148248 - RNA, 22 nt, Human herpesvirus 5
cagaacuggugcuaucaugaca

SEQ ID NO: 148249 - RNA, 15 nt, Human herpesvirus 5
caccaaaaauccaga

SEQ ID NO: 148250 - RNA, 14 nt, Human herpesvirus 5
cacaugcacaauac

SEQ ID NO: 148251 - RNA, 21 nt, Human herpesvirus 5
caccaccuugucuccccggug

SEQ ID NO: 148252 - RNA, 15 nt, Human herpesvirus 5
caguuaucagcaaua

SEQ ID NO: 148253 - RNA, 16 nt, Human herpesvirus 5
caguuaucagcaauaa

SEQ ID NO: 148254 - RNA, 16 nt, Human herpesvirus 5
cagugaucuucauuca

SEQ ID NO: 148255 - RNA, 20 nt, Human herpesvirus 5
caguucacggggagaagaaa

SEQ ID NO: 148256 - RNA, 21 nt, Human herpesvirus 5
caguccauacagcaacaccau

SEQ ID NO: 148257 - RNA, 22 nt, Human herpesvirus 5
caguccauacagcaacaccaua

SEQ ID NO: 148258 - RNA, 21 nt, Human herpesvirus 5
caguccauauguugucaggac

SEQ ID NO: 148259 - RNA, 13 nt, Human herpesvirus 5
cagucgccgucag

SEQ ID NO: 148260 - RNA, 23 nt, Human herpesvirus 5
cagucgacgggugguaccugcaa

SEQ ID NO: 148261 - RNA, 15 nt, Human herpesvirus 5
cauaaaaaagagaca

SEQ ID NO: 148262 - RNA, 22 nt, Human herpesvirus 5
caguugauaacaaacaaugaca

SEQ ID NO: 148263 - RNA, 15 nt, Human herpesvirus 5
caguugcaccucgac

SEQ ID NO: 148264 - RNA, 16 nt, Human herpesvirus 5
cauacagcaacaccau

SEQ ID NO: 148265 - RNA, 21 nt, Human herpesvirus 5
cauaaaaccaccguaccugca

SEQ ID NO: 148266 - RNA, 17 nt, Human herpesvirus 5
caguauagcaugcauaa

SEQ ID NO: 148267 - RNA, 19 nt, Human herpesvirus 5
caguaugaaagucccgugu

SEQ ID NO: 148268 - RNA, 20 nt, Human herpesvirus 5
cagucagacccacuaccugg

SEQ ID NO: 148269 - RNA, 22 nt, Human herpesvirus 5
cagucagacccacuaccuggag

SEQ ID NO: 148270 - RNA, 22 nt, Human herpesvirus 5
caguauaaaauggucguugccc

SEQ ID NO: 148271 - RNA, 18 nt, Human herpesvirus 5
caguacaacaguuaucag

SEQ ID NO: 148272 - RNA, 22 nt, Human herpesvirus 5
caguacaacaguuaucagcaau

SEQ ID NO: 148273 - RNA, 16 nt, Human herpesvirus 5
caguacggacaaguau

SEQ ID NO: 148274 - RNA, 22 nt, Human herpesvirus 5
caguaccucaacacauugcuga

SEQ ID NO: 148275 - RNA, 12 nt, Human herpesvirus 5
cagguccagcuu

SEQ ID NO: 148276 - RNA, 18 nt, Human herpesvirus 5
cagggguacgcuaugugu

SEQ ID NO: 148277 - RNA, 20 nt, Human herpesvirus 5
cagggguacgcuauguguca

SEQ ID NO: 148278 - RNA, 22 nt, Human herpesvirus 5
cagguguuguuagacuagcaca

SEQ ID NO: 148279 - RNA, 16 nt, Human herpesvirus 5
cagguggagauucuaa

SEQ ID NO: 148280 - RNA, 22 nt, Human herpesvirus 5
cagguggagauucuaaagccac

SEQ ID NO: 148281 - RNA, 14 nt, Human herpesvirus 5
caggugaccagcag

SEQ ID NO: 148282 - RNA, 17 nt, Human herpesvirus 5
caucugccgaaacaccg

SEQ ID NO: 148283 - RNA, 13 nt, Human herpesvirus 5
caucgcauaugac

SEQ ID NO: 148284 - RNA, 20 nt, Human herpesvirus 5
caucuggcgcagauggacaa

SEQ ID NO: 148285 - RNA, 14 nt, Human herpesvirus 5
caucugucaccuca

SEQ ID NO: 148286 - RNA, 16 nt, Human herpesvirus 5
caucugucaccucaca

SEQ ID NO: 148287 - RNA, 20 nt, Human herpesvirus 5
caucuguuuuugcugcaacg

SEQ ID NO: 148288 - RNA, 21 nt, Human herpesvirus 5
caucuucuaacgguuacacaa

SEQ ID NO: 148289 - RNA, 14 nt, Human herpesvirus 5
caugaacgucugca

SEQ ID NO: 148290 - RNA, 13 nt, Human herpesvirus 5
caucgcacacaga

SEQ ID NO: 148291 - RNA, 17 nt, Human herpesvirus 5
caucgcaccaucguggu

SEQ ID NO: 148292 - RNA, 16 nt, Human herpesvirus 5
cauccuaauugguacu

SEQ ID NO: 148293 - RNA, 13 nt, Human herpesvirus 5
cauccgcuacucc

SEQ ID NO: 148294 - RNA, 13 nt, Human herpesvirus 5
cauccaucacauc

SEQ ID NO: 148295 - RNA, 15 nt, Human herpesvirus 5
cauccaucacaucac

SEQ ID NO: 148296 - RNA, 16 nt, Human herpesvirus 5
cauccaucacaucacc

SEQ ID NO: 148297 - RNA, 22 nt, Human herpesvirus 5
cauccaucacaucacccaacac

SEQ ID NO: 148298 - RNA, 17 nt, Human herpesvirus 5
cauacauaugcgaugug

SEQ ID NO: 148299 - RNA, 20 nt, Human herpesvirus 5
cauacggggaggagacacag

SEQ ID NO: 148300 - RNA, 21 nt, Human herpesvirus 5
cauacggggaggagacacaga

SEQ ID NO: 148301 - RNA, 19 nt, Human herpesvirus 5
cauacggcguauacaauca

SEQ ID NO: 148302 - RNA, 13 nt, Human herpesvirus 5
cauauagccaaua

SEQ ID NO: 148303 - RNA, 14 nt, Human herpesvirus 5
caucauaaaaacca

SEQ ID NO: 148304 - RNA, 13 nt, Human herpesvirus 5
caucagcaaagcu

SEQ ID NO: 148305 - RNA, 22 nt, Human herpesvirus 5
cauaucgggcccuggauacaag

SEQ ID NO: 148306 - RNA, 14 nt, Human herpesvirus 5
cauccaauuacacc

SEQ ID NO: 148307 - RNA, 18 nt, Human herpesvirus 5
cauccaauuacaccgaug

SEQ ID NO: 148308 - RNA, 16 nt, Human herpesvirus 5
caucaucagcgucaca

SEQ ID NO: 148309 - RNA, 15 nt, Human herpesvirus 5
caucaucaacagcag

SEQ ID NO: 148310 - RNA, 19 nt, Human herpesvirus 5
auuuuuccaaaagugauuu

SEQ ID NO: 148311 - RNA, 17 nt, Human herpesvirus 5
caaaacgucaggaaucu

SEQ ID NO: 148312 - RNA, 15 nt, Human herpesvirus 5
caaaacuacuaauac

SEQ ID NO: 148313 - RNA, 14 nt, Human herpesvirus 5
caaaaaaaaggagg

SEQ ID NO: 148314 - RNA, 12 nt, Human herpesvirus 5
auuuuugcuaau

SEQ ID NO: 148315 - RNA, 18 nt, Human herpesvirus 5
auuuuuuguaacacuaca

SEQ ID NO: 148316 - RNA, 19 nt, Human herpesvirus 5
auuucugcguguaccgcua

SEQ ID NO: 148317 - RNA, 22 nt, Human herpesvirus 5
auuucuguucguaaacuuaucc

SEQ ID NO: 148318 - RNA, 18 nt, Human herpesvirus 5
auuucggaagccaugccu

SEQ ID NO: 148319 - RNA, 15 nt, Human herpesvirus 5
auuuccuguguagaa

SEQ ID NO: 148320 - RNA, 23 nt, Human herpesvirus 5
auugcccuucuggagcacacugc

SEQ ID NO: 148321 - RNA, 19 nt, Human herpesvirus 5
auugccagucgcacuaaua

SEQ ID NO: 148322 - RNA, 12 nt, Human herpesvirus 5
caaaauagucac

SEQ ID NO: 148323 - RNA, 18 nt, Human herpesvirus 5
caaagcggucucacugug

SEQ ID NO: 148324 - RNA, 17 nt, Human herpesvirus 5
caaagaacgaaaacaca

SEQ ID NO: 148325 - RNA, 15 nt, Human herpesvirus 5
caaagaugaagacac

SEQ ID NO: 148326 - RNA, 21 nt, Human herpesvirus 5
caaagggagccccaucauggc

SEQ ID NO: 148327 - RNA, 16 nt, Human herpesvirus 5
caaaggacucgcucac

SEQ ID NO: 148328 - RNA, 17 nt, Human herpesvirus 5
caaagcuccauuaugca

SEQ ID NO: 148329 - RNA, 18 nt, Human herpesvirus 5
caaagcuggacagugaga

SEQ ID NO: 148330 - RNA, 19 nt, Human herpesvirus 5
caacacuuuuuuaccuauc

SEQ ID NO: 148331 - RNA, 21 nt, Human herpesvirus 5
caacacuuuuuuaccuaucac

SEQ ID NO: 148332 - RNA, 14 nt, Human herpesvirus 5
caacagcagcaaca

SEQ ID NO: 148333 - RNA, 23 nt, Human herpesvirus 5
caaaguccgucaugcuggcaugc

SEQ ID NO: 148334 - RNA, 14 nt, Human herpesvirus 5
caaagucaacaugu

SEQ ID NO: 148335 - RNA, 15 nt, Human herpesvirus 5
caaagucaacaugua

SEQ ID NO: 148336 - RNA, 16 nt, Human herpesvirus 5
caaagucaacauguag

SEQ ID NO: 148337 - RNA, 11 nt, Human herpesvirus 5
caaaguucaaa

SEQ ID NO: 148338 - RNA, 21 nt, Human herpesvirus 5
caacauguagaagcacccauu

SEQ ID NO: 148339 - RNA, 18 nt, Human herpesvirus 5
caacauagcguaaauccc

SEQ ID NO: 148340 - RNA, 21 nt, Human herpesvirus 5
caacauacaguacaacaguua

SEQ ID NO: 148341 - RNA, 23 nt, Human herpesvirus 5
caacaucaucagcgccgugcuca

SEQ ID NO: 148342 - RNA, 18 nt, Human herpesvirus 5
caauaaaagcacuucaga

SEQ ID NO: 148343 - RNA, 22 nt, Human herpesvirus 5
caauaaaagcacuucagaaucu

SEQ ID NO: 148344 - RNA, 15 nt, Human herpesvirus 5
caauagaauacugcu

SEQ ID NO: 148345 - RNA, 18 nt, Human herpesvirus 5
caauagaauacugcuaug

SEQ ID NO: 148346 - RNA, 15 nt, Human herpesvirus 5
caaguucgaucucau

SEQ ID NO: 148347 - RNA, 14 nt, Human herpesvirus 5
caauaaaaaccacc

SEQ ID NO: 148348 - RNA, 18 nt, Human herpesvirus 5
caauugccucuacacuug

SEQ ID NO: 148349 - RNA, 20 nt, Human herpesvirus 5
caauugcgggcccugcugac

SEQ ID NO: 148350 - RNA, 13 nt, Human herpesvirus 5
caaucauuacuaa

SEQ ID NO: 148351 - RNA, 18 nt, Human herpesvirus 5
cacacguuacaucauaca

SEQ ID NO: 148352 - RNA, 20 nt, Human herpesvirus 5
cacacguucgacauggacau

SEQ ID NO: 148353 - RNA, 20 nt, Human herpesvirus 5
cacacgggggcgcaaacaca

SEQ ID NO: 148354 - RNA, 17 nt, Human herpesvirus 5
cacacuuaagaaaaagg

SEQ ID NO: 148355 - RNA, 13 nt, Human herpesvirus 5
cacagacuuuaua

SEQ ID NO: 148356 - RNA, 19 nt, Human herpesvirus 5
cacagaagaaaaaaacaca

SEQ ID NO: 148357 - RNA, 19 nt, Human herpesvirus 5
cacaagcgccgucacuucc

SEQ ID NO: 148358 - RNA, 23 nt, Human herpesvirus 5
cacaaccguauauucuacauuca

SEQ ID NO: 148359 - RNA, 22 nt, Human herpesvirus 5
cacaaacugcgacacgugcuuu

SEQ ID NO: 148360 - RNA, 14 nt, Human herpesvirus 5
cacaaaaucuucua

SEQ ID NO: 148361 - RNA, 14 nt, Human herpesvirus 5
cacaaaaacaccaa

SEQ ID NO: 148362 - RNA, 19 nt, Human herpesvirus 5
caaguacggagauguggug

SEQ ID NO: 148363 - RNA, 18 nt, Human herpesvirus 5
caagguucuccaucagga

SEQ ID NO: 148364 - RNA, 17 nt, Human herpesvirus 5
caacuuugacgugcuca

SEQ ID NO: 148365 - RNA, 22 nt, Human herpesvirus 5
caacuuuguggggcugcucaac

SEQ ID NO: 148366 - RNA, 12 nt, Human herpesvirus 5
caagaaacaccg

SEQ ID NO: 148367 - RNA, 17 nt, Human herpesvirus 5
caacuucuaccaucucc

SEQ ID NO: 148368 - RNA, 15 nt, Human herpesvirus 5
caacuucacuucaaa

SEQ ID NO: 148369 - RNA, 20 nt, Human herpesvirus 5
caagaauaaaucaccgugaa

SEQ ID NO: 148370 - RNA, 23 nt, Human herpesvirus 5
caagaauccguccccacguccac

SEQ ID NO: 148371 - RNA, 14 nt, Human herpesvirus 5
caaccguauauucu

SEQ ID NO: 148372 - RNA, 20 nt, Human herpesvirus 5
caaccguauauucuacauuc

SEQ ID NO: 148373 - RNA, 22 nt, Human herpesvirus 5
caaccguauauucuacauucaa

SEQ ID NO: 148374 - RNA, 14 nt, Human herpesvirus 5
caaccccgcggcug

SEQ ID NO: 148375 - RNA, 15 nt, Human herpesvirus 5
caacccguaucugag

SEQ ID NO: 148376 - RNA, 20 nt, Human herpesvirus 5
caacgacgccacacacaucu

SEQ ID NO: 148377 - RNA, 17 nt, Human herpesvirus 5
caacgacaccucccuaa

SEQ ID NO: 148378 - RNA, 22 nt, Human herpesvirus 5
caacgagacuaucuacaacacu

SEQ ID NO: 148379 - RNA, 13 nt, Human herpesvirus 5
caacgcuuuggaa

SEQ ID NO: 148380 - RNA, 17 nt, Human herpesvirus 5
caacggcauagugccag

SEQ ID NO: 148381 - RNA, 18 nt, Human herpesvirus 5
caacggcuggaaauggac

SEQ ID NO: 148382 - RNA, 18 nt, Human herpesvirus 5
caacggcuggaggacuuu

SEQ ID NO: 148383 - RNA, 12 nt, Human herpesvirus 5
caacgucacuuc

SEQ ID NO: 148384 - RNA, 21 nt, Human herpesvirus 5
caacgucuacaucucaucaag

SEQ ID NO: 148385 - RNA, 11 nt, Human herpesvirus 5
caacuaucacc

SEQ ID NO: 148386 - RNA, 16 nt, Human herpesvirus 5
caacuaucaccaaaca

SEQ ID NO: 148387 - RNA, 17 nt, Human herpesvirus 5
caacuuaaccacaagaa

SEQ ID NO: 148388 - RNA, 20 nt, Human herpesvirus 5
caacuuaacgcgcaagugcc

SEQ ID NO: 148389 - RNA, 13 nt, Human herpesvirus 5
caacuggcaaaaa

SEQ ID NO: 148390 - RNA, 16 nt, Human herpesvirus 5
caacuccgugccagcu

SEQ ID NO: 148391 - RNA, 17 nt, Human herpesvirus 5
caacuccgugccagcug

SEQ ID NO: 148392 - RNA, 18 nt, Human herpesvirus 5
auucaggggaaguauaca

SEQ ID NO: 148393 - RNA, 16 nt, Human herpesvirus 5
auucaucgugcaguac

SEQ ID NO: 148394 - RNA, 18 nt, Human herpesvirus 5
auucacaaaaacaccaau

SEQ ID NO: 148395 - RNA, 16 nt, Human herpesvirus 5
auucaauaaaaaccac

SEQ ID NO: 148396 - RNA, 17 nt, Human herpesvirus 5
auucaauaaaaaccacc

SEQ ID NO: 148397 - RNA, 18 nt, Human herpesvirus 5
auucaauaaaaaccaccg

SEQ ID NO: 148398 - RNA, 21 nt, Human herpesvirus 5
auugagcaggguaaaaaccac

SEQ ID NO: 148399 - RNA, 22 nt, Human herpesvirus 5
auugagcaggguaaaaaccacg

SEQ ID NO: 148400 - RNA, 18 nt, Human herpesvirus 5
auugagcgagaacuaaua

SEQ ID NO: 148401 - RNA, 23 nt, Human herpesvirus 5
auugacacagagacuugugauau

SEQ ID NO: 148402 - RNA, 19 nt, Human herpesvirus 5
auucuuuuuauauauacac

SEQ ID NO: 148403 - RNA, 15 nt, Human herpesvirus 5
auucuggaauccauc

SEQ ID NO: 148404 - RNA, 19 nt, Human herpesvirus 5
auguuuuuugaaucauaca

SEQ ID NO: 148405 - RNA, 15 nt, Human herpesvirus 5
auuaucaucuaaaga

SEQ ID NO: 148406 - RNA, 19 nt, Human herpesvirus 5
auguacccgcugguguugc

SEQ ID NO: 148407 - RNA, 20 nt, Human herpesvirus 5
auguagcacucaacauguua

SEQ ID NO: 148408 - RNA, 20 nt, Human herpesvirus 5
auguaucgcauaaagggugg

SEQ ID NO: 148409 - RNA, 19 nt, Human herpesvirus 5
auguucucugaaaccccau

SEQ ID NO: 148410 - RNA, 23 nt, Human herpesvirus 5
auguucuucgggaaucauggggu

SEQ ID NO: 148411 - RNA, 18 nt, Human herpesvirus 5
auggaucacgcgcucuuc

SEQ ID NO: 148412 - RNA, 14 nt, Human herpesvirus 5
auggauaacgacag

SEQ ID NO: 148413 - RNA, 16 nt, Human herpesvirus 5
auggaguuuguguaau

SEQ ID NO: 148414 - RNA, 17 nt, Human herpesvirus 5
auggaguuuguguaaug

SEQ ID NO: 148415 - RNA, 20 nt, Human herpesvirus 5
auggacugaauauacagacu

SEQ ID NO: 148416 - RNA, 22 nt, Human herpesvirus 5
auggagcccacgccgaugcucc

SEQ ID NO: 148417 - RNA, 21 nt, Human herpesvirus 5
auggaacggauaucuacgcaa

SEQ ID NO: 148418 - RNA, 18 nt, Human herpesvirus 5
augggaagaaaccguguu

SEQ ID NO: 148419 - RNA, 16 nt, Human herpesvirus 5
auggccuacggcugca

SEQ ID NO: 148420 - RNA, 20 nt, Human herpesvirus 5
auggcacggucaucuacgug

SEQ ID NO: 148421 - RNA, 14 nt, Human herpesvirus 5
augccaccaugaac

SEQ ID NO: 148422 - RNA, 18 nt, Human herpesvirus 5
augccaccaugaacugac

SEQ ID NO: 148423 - RNA, 17 nt, Human herpesvirus 5
augccucauccuuauga

SEQ ID NO: 148424 - RNA, 18 nt, Human herpesvirus 5
augccgaucaugugcuua

SEQ ID NO: 148425 - RNA, 19 nt, Human herpesvirus 5
augccgguaucgauuccag

SEQ ID NO: 148426 - RNA, 20 nt, Human herpesvirus 5
augcugcucagguacauuac

SEQ ID NO: 148427 - RNA, 15 nt, Human herpesvirus 5
augcuagcaauaauc

SEQ ID NO: 148428 - RNA, 19 nt, Human herpesvirus 5
augcgucguaugccgccac

SEQ ID NO: 148429 - RNA, 15 nt, Human herpesvirus 5
augcgaugugcaaug

SEQ ID NO: 148430 - RNA, 12 nt, Human herpesvirus 5
augcguguucag

SEQ ID NO: 148431 - RNA, 16 nt, Human herpesvirus 5
augcauaucgaucuau

SEQ ID NO: 148432 - RNA, 16 nt, Human herpesvirus 5
augcauuaucaucuaa

SEQ ID NO: 148433 - RNA, 14 nt, Human herpesvirus 5
augcaaugcaacac

SEQ ID NO: 148434 - RNA, 17 nt, Human herpesvirus 5
augcaacgcuuucagga

SEQ ID NO: 148435 - RNA, 14 nt, Human herpesvirus 5
augacuguuuccaa

SEQ ID NO: 148436 - RNA, 17 nt, Human herpesvirus 5
augaggaaacugaauac

SEQ ID NO: 148437 - RNA, 14 nt, Human herpesvirus 5
augaggcaacucau

SEQ ID NO: 148438 - RNA, 17 nt, Human herpesvirus 5
augauauuuuacaggua

SEQ ID NO: 148439 - RNA, 15 nt, Human herpesvirus 5
augaccgcaaugaua

SEQ ID NO: 148440 - RNA, 17 nt, Human herpesvirus 5
augaccgcaaugauauu

SEQ ID NO: 148441 - RNA, 17 nt, Human herpesvirus 5
augacggcccccuccuu

SEQ ID NO: 148442 - RNA, 16 nt, Human herpesvirus 5
augacucguugggauu

SEQ ID NO: 148443 - RNA, 18 nt, Human herpesvirus 5
augaauuguuaccagaac

SEQ ID NO: 148444 - RNA, 22 nt, Human herpesvirus 5
augaaucuuccccucugcugcu

SEQ ID NO: 148445 - RNA, 19 nt, Human herpesvirus 5
aucuuaugaagcugaacaa

SEQ ID NO: 148446 - RNA, 20 nt, Human herpesvirus 5
aucuuaugaagcugaacaau

SEQ ID NO: 148447 - RNA, 15 nt, Human herpesvirus 5
augaacaaauucagc

SEQ ID NO: 148448 - RNA, 12 nt, Human herpesvirus 5
augaacaagguu

SEQ ID NO: 148449 - RNA, 14 nt, Human herpesvirus 5
augaagccuaucaa

SEQ ID NO: 148450 - RNA, 16 nt, Human herpesvirus 5
augaaccaagucuugc

SEQ ID NO: 148451 - RNA, 21 nt, Human herpesvirus 5
augaacgacacaugcacaaua

SEQ ID NO: 148452 - RNA, 23 nt, Human herpesvirus 5
accuaauacuaguguguuccacu

SEQ ID NO: 148453 - RNA, 22 nt, Human herpesvirus 5
accuagacgaagaggacaccuc

SEQ ID NO: 148454 - RNA, 12 nt, Human herpesvirus 5
accucaccaucu

SEQ ID NO: 148455 - RNA, 14 nt, Human herpesvirus 5
accucaccaucuca

SEQ ID NO: 148456 - RNA, 14 nt, Human herpesvirus 5
accgaccagcacuc

SEQ ID NO: 148457 - RNA, 12 nt, Human herpesvirus 5
accgacauggag

SEQ ID NO: 148458 - RNA, 16 nt, Human herpesvirus 5
acccgguugcggcccc

SEQ ID NO: 148459 - RNA, 19 nt, Human herpesvirus 5
acccgcgccgguucucacg

SEQ ID NO: 148460 - RNA, 15 nt, Human herpesvirus 5
accgcaacaacagca

SEQ ID NO: 148461 - RNA, 15 nt, Human herpesvirus 5
accgagacgugcgac

SEQ ID NO: 148462 - RNA, 21 nt, Human herpesvirus 5
accgauauccaauaaacccau

SEQ ID NO: 148463 - RNA, 15 nt, Human herpesvirus 5
accgaucaccagaag

SEQ ID NO: 148464 - RNA, 15 nt, Human herpesvirus 5
accgccgcaacagcg

SEQ ID NO: 148465 - RNA, 17 nt, Human herpesvirus 5
accgcaguugcugccuu

SEQ ID NO: 148466 - RNA, 19 nt, Human herpesvirus 5
accccgaacuggagcucaa

SEQ ID NO: 148467 - RNA, 19 nt, Human herpesvirus 5
accccuggacgguacaguu

SEQ ID NO: 148468 - RNA, 16 nt, Human herpesvirus 5
acccgauacagucagc

SEQ ID NO: 148469 - RNA, 18 nt, Human herpesvirus 5
accacauuuuuugacaga

SEQ ID NO: 148470 - RNA, 20 nt, Human herpesvirus 5
accccauccuguaaaaauac

SEQ ID NO: 148471 - RNA, 20 nt, Human herpesvirus 5
acauuuaucaauacaaugac

SEQ ID NO: 148472 - RNA, 21 nt, Human herpesvirus 5
accaauacugcauccaucaca

SEQ ID NO: 148473 - RNA, 15 nt, Human herpesvirus 5
accaaggcgagccac

SEQ ID NO: 148474 - RNA, 17 nt, Human herpesvirus 5
accaagugccgccgucg

SEQ ID NO: 148475 - RNA, 20 nt, Human herpesvirus 5
accaauaaagauaaucugcc

SEQ ID NO: 148476 - RNA, 13 nt, Human herpesvirus 5
accaauaacaugu

SEQ ID NO: 148477 - RNA, 14 nt, Human herpesvirus 5
accaauaacauguc

SEQ ID NO: 148478 - RNA, 15 nt, Human herpesvirus 5
accaauaacaugucu

SEQ ID NO: 148479 - RNA, 21 nt, Human herpesvirus 5
acgccuuaucgugcuaggcaa

SEQ ID NO: 148480 - RNA, 13 nt, Human herpesvirus 5
acgcgaccagcug

SEQ ID NO: 148481 - RNA, 23 nt, Human herpesvirus 5
acgcggagcggaggaggugaccu

SEQ ID NO: 148482 - RNA, 14 nt, Human herpesvirus 5
acgcguguucucau

SEQ ID NO: 148483 - RNA, 19 nt, Human herpesvirus 5
acggcgaaaauacgcaucc

SEQ ID NO: 148484 - RNA, 14 nt, Human herpesvirus 5
acgauccucgggaa

SEQ ID NO: 148485 - RNA, 19 nt, Human herpesvirus 5
acgauaugucgcgacaauc

SEQ ID NO: 148486 - RNA, 16 nt, Human herpesvirus 5
acgccggcaaccccua

SEQ ID NO: 148487 - RNA, 20 nt, Human herpesvirus 5
acgccgucgcuuaucuugca

SEQ ID NO: 148488 - RNA, 15 nt, Human herpesvirus 5
acgccgucucgucac

SEQ ID NO: 148489 - RNA, 14 nt, Human herpesvirus 5
acgccgagugggac

SEQ ID NO: 148490 - RNA, 16 nt, Human herpesvirus 5
acgcaacacguaguga

SEQ ID NO: 148491 - RNA, 20 nt, Human herpesvirus 5
acgagcaucgcaacaacagc

SEQ ID NO: 148492 - RNA, 20 nt, Human herpesvirus 5
acgagcgcccgucaagcucg

SEQ ID NO: 148493 - RNA, 15 nt, Human herpesvirus 5
acgacgucugcucaa

SEQ ID NO: 148494 - RNA, 14 nt, Human herpesvirus 5
acgacaacaucccu

SEQ ID NO: 148495 - RNA, 21 nt, Human herpesvirus 5
acgaagaugccgaugugugac

SEQ ID NO: 148496 - RNA, 18 nt, Human herpesvirus 5
acgacauccgucagccuc

SEQ ID NO: 148497 - RNA, 14 nt, Human herpesvirus 5
acgacgacagucuc

SEQ ID NO: 148498 - RNA, 13 nt, Human herpesvirus 5
acgacgcaugcau

SEQ ID NO: 148499 - RNA, 21 nt, Human herpesvirus 5
acgacgcgccccccaccuacg

SEQ ID NO: 148500 - RNA, 15 nt, Human herpesvirus 5
acgacaaaugcaugc

SEQ ID NO: 148501 - RNA, 18 nt, Human herpesvirus 5
acgacacaugcacaauac

SEQ ID NO: 148502 - RNA, 22 nt, Human herpesvirus 5
acgacaccucccuaacuaucua

SEQ ID NO: 148503 - RNA, 15 nt, Human herpesvirus 5
accugcaucacggug

SEQ ID NO: 148504 - RNA, 23 nt, Human herpesvirus 5
accuggaccggugguacugcugu

SEQ ID NO: 148505 - RNA, 22 nt, Human herpesvirus 5
accuggacgggggggaccgggg

SEQ ID NO: 148506 - RNA, 17 nt, Human herpesvirus 5
accugccucgacaucuc

SEQ ID NO: 148507 - RNA, 19 nt, Human herpesvirus 5
accugccucgacaucucgc

SEQ ID NO: 148508 - RNA, 17 nt, Human herpesvirus 5
accuguauacugugaau

SEQ ID NO: 148509 - RNA, 10 nt, Human herpesvirus 5
accuggguag

SEQ ID NO: 148510 - RNA, 21 nt, Human herpesvirus 5
accugguagacgaaagacaau

SEQ ID NO: 148511 - RNA, 22 nt, Human herpesvirus 5
acgugguuuuuuuaacagugug

SEQ ID NO: 148512 - RNA, 15 nt, Human herpesvirus 5
acguggauacuagua

SEQ ID NO: 148513 - RNA, 10 nt, Human herpesvirus 5
acgugcugcu

SEQ ID NO: 148514 - RNA, 14 nt, Human herpesvirus 5
acgugcugcugaug

SEQ ID NO: 148515 - RNA, 19 nt, Human herpesvirus 5
acgugcgccuuccagucca

SEQ ID NO: 148516 - RNA, 14 nt, Human herpesvirus 5
acgugcaacgccac

SEQ ID NO: 148517 - RNA, 19 nt, Human herpesvirus 5
acgugcaagacuacaugcu

SEQ ID NO: 148518 - RNA, 19 nt, Human herpesvirus 5
acgugaaucgccccucacg

SEQ ID NO: 148519 - RNA, 19 nt, Human herpesvirus 5
acguucgcucgggcacguu

SEQ ID NO: 148520 - RNA, 19 nt, Human herpesvirus 5
acguuacccugguauccaa

SEQ ID NO: 148521 - RNA, 22 nt, Human herpesvirus 5
acguuucgcgaggacaaggcuc

SEQ ID NO: 148522 - RNA, 18 nt, Human herpesvirus 5
acguucuguaaucuucca

SEQ ID NO: 148523 - RNA, 18 nt, Human herpesvirus 5
acgggggggaccgggggc

SEQ ID NO: 148524 - RNA, 16 nt, Human herpesvirus 5
acgggugguaccugca

SEQ ID NO: 148525 - RNA, 16 nt, Human herpesvirus 5
acgucguuuuguucac

SEQ ID NO: 148526 - RNA, 23 nt, Human herpesvirus 5
acgucggcgguccuccagcagca

SEQ ID NO: 148527 - RNA, 19 nt, Human herpesvirus 5
acgucucuacggcacuguc

SEQ ID NO: 148528 - RNA, 20 nt, Human herpesvirus 5
acgucugcguguguguuucu

SEQ ID NO: 148529 - RNA, 15 nt, Human herpesvirus 5
acggcgcucuuucag

SEQ ID NO: 148530 - RNA, 16 nt, Human herpesvirus 5
acggcgaagucugcua

SEQ ID NO: 148531 - RNA, 13 nt, Human herpesvirus 5
acggcgacaucac

SEQ ID NO: 148532 - RNA, 23 nt, Human herpesvirus 5
acgggcaaagaguccaucugcuu

SEQ ID NO: 148533 - RNA, 19 nt, Human herpesvirus 5
acgggcugcgcggguuuca

SEQ ID NO: 148534 - RNA, 20 nt, Human herpesvirus 5
acgggacuuacaucugcucc

SEQ ID NO: 148535 - RNA, 16 nt, Human herpesvirus 5
acgggacacgcugaug

SEQ ID NO: 148536 - RNA, 18 nt, Human herpesvirus 5
acgggacacgguguuucg

SEQ ID NO: 148537 - RNA, 11 nt, Human herpesvirus 5
acggcugcauc

SEQ ID NO: 148538 - RNA, 13 nt, Human herpesvirus 5
acuaaaacauucu

SEQ ID NO: 148539 - RNA, 17 nt, Human herpesvirus 5
acuaacgucacauugaa

SEQ ID NO: 148540 - RNA, 20 nt, Human herpesvirus 5
acuaauaccgguuguaauca

SEQ ID NO: 148541 - RNA, 16 nt, Human herpesvirus 5
acuaauauugcaaugg

SEQ ID NO: 148542 - RNA, 18 nt, Human herpesvirus 5
acuaagucucccgugucu

SEQ ID NO: 148543 - RNA, 20 nt, Human herpesvirus 5
acuacaauguauagauacac

SEQ ID NO: 148544 - RNA, 14 nt, Human herpesvirus 5
acuacagcaaugac

SEQ ID NO: 148545 - RNA, 22 nt, Human herpesvirus 5
acuaucgacguguuaucacaga

SEQ ID NO: 148546 - RNA, 16 nt, Human herpesvirus 5
acuaucuucaaccuca

SEQ ID NO: 148547 - RNA, 15 nt, Human herpesvirus 5
acuaucuacaacacu

SEQ ID NO: 148548 - RNA, 15 nt, Human herpesvirus 5
acuaucuacaacuua

SEQ ID NO: 148549 - RNA, 24 nt, Human herpesvirus 5
acuaucuacaacuuaaccacaaga

SEQ ID NO: 148550 - RNA, 23 nt, Human herpesvirus 5
acuacguugggucugcgcugccc

SEQ ID NO: 148551 - RNA, 17 nt, Human herpesvirus 5
acuaccguuaacuauuc

SEQ ID NO: 148552 - RNA, 13 nt, Human herpesvirus 5
acuaccgauaaaa

SEQ ID NO: 148553 - RNA, 16 nt, Human herpesvirus 5
acuaccacuacgaugc

SEQ ID NO: 148554 - RNA, 18 nt, Human herpesvirus 5
acuacagcuucuuucuca

SEQ ID NO: 148555 - RNA, 19 nt, Human herpesvirus 5
acuacaugcuauaagacag

SEQ ID NO: 148556 - RNA, 23 nt, Human herpesvirus 5
acuacaugcuauaagacagccuu

SEQ ID NO: 148557 - RNA, 18 nt, Human herpesvirus 5
acuccgugcgguucucaa

SEQ ID NO: 148558 - RNA, 20 nt, Human herpesvirus 5
acuccgaauaacaacacauc

SEQ ID NO: 148559 - RNA, 21 nt, Human herpesvirus 5
acuccgaauaacaacacauca

SEQ ID NO: 148560 - RNA, 22 nt, Human herpesvirus 5
acuccgaauaacaacacaucaa

SEQ ID NO: 148561 - RNA, 20 nt, Human herpesvirus 5
acuauguguaugaugucuca

SEQ ID NO: 148562 - RNA, 21 nt, Human herpesvirus 5
acuauguguaugaugucucau

SEQ ID NO: 148563 - RNA, 21 nt, Human herpesvirus 5
acugcuauguaucaucuuuau

SEQ ID NO: 148564 - RNA, 19 nt, Human herpesvirus 5
acugcgugucaaaaaucac

SEQ ID NO: 148565 - RNA, 15 nt, Human herpesvirus 5
acugcgacacgugcu

SEQ ID NO: 148566 - RNA, 19 nt, Human herpesvirus 5
acugcugccucgaugcgcc

SEQ ID NO: 148567 - RNA, 11 nt, Human herpesvirus 5
acugcugcuuc

SEQ ID NO: 148568 - RNA, 21 nt, Human herpesvirus 5
acuucgauucucuauacacau

SEQ ID NO: 148569 - RNA, 18 nt, Human herpesvirus 5
acuucuaccaucuccguc

SEQ ID NO: 148570 - RNA, 23 nt, Human herpesvirus 5
acuucuacggaguuuucccucag

SEQ ID NO: 148571 - RNA, 17 nt, Human herpesvirus 5
acuucagcagcaccucu

SEQ ID NO: 148572 - RNA, 21 nt, Human herpesvirus 5
acuucacgugcggcuguguua

SEQ ID NO: 148573 - RNA, 23 nt, Human herpesvirus 5
acuucuuggugaucuucaccauc

SEQ ID NO: 148574 - RNA, 22 nt, Human herpesvirus 5
acuucucguacgacgucugcuc

SEQ ID NO: 148575 - RNA, 14 nt, Human herpesvirus 5
acuucugcugucac

SEQ ID NO: 148576 - RNA, 23 nt, Human herpesvirus 5
acuggaaauucaauaaaaaccac

SEQ ID NO: 148577 - RNA, 15 nt, Human herpesvirus 5
acugucgccacuaug

SEQ ID NO: 148578 - RNA, 23 nt, Human herpesvirus 5
acugucggggcgcagaaacuuuu

SEQ ID NO: 148579 - RNA, 23 nt, Human herpesvirus 5
acuguuaauaaaacgccaugaug

SEQ ID NO: 148580 - RNA, 17 nt, Human herpesvirus 5
acuguuauggaucccac

SEQ ID NO: 148581 - RNA, 18 nt, Human herpesvirus 5
acuguuaaaaaaaccacg

SEQ ID NO: 148582 - RNA, 17 nt, Human herpesvirus 5
acuuaacgcgcaagugc

SEQ ID NO: 148583 - RNA, 12 nt, Human herpesvirus 5
aaugacaccuca

SEQ ID NO: 148584 - RNA, 12 nt, Human herpesvirus 5
aaugacauggau

SEQ ID NO: 148585 - RNA, 16 nt, Human herpesvirus 5
aaugacaagugcgccu

SEQ ID NO: 148586 - RNA, 12 nt, Human herpesvirus 5
aauuuguaaaua

SEQ ID NO: 148587 - RNA, 16 nt, Human herpesvirus 5
aauuuuuucgcugcca

SEQ ID NO: 148588 - RNA, 13 nt, Human herpesvirus 5
acaaaaauacuga

SEQ ID NO: 148589 - RNA, 19 nt, Human herpesvirus 5
acaaaaagcucccaugaga

SEQ ID NO: 148590 - RNA, 11 nt, Human herpesvirus 5
acaaacacuac

SEQ ID NO: 148591 - RNA, 19 nt, Human herpesvirus 5
acaaacguugagacuacca

SEQ ID NO: 148592 - RNA, 22 nt, Human herpesvirus 5
acaaacguugagacuaccacau

SEQ ID NO: 148593 - RNA, 18 nt, Human herpesvirus 5
acaaagcacaauacacau

SEQ ID NO: 148594 - RNA, 21 nt, Human herpesvirus 5
acaaagaagucucucucuaga

SEQ ID NO: 148595 - RNA, 12 nt, Human herpesvirus 5
acaacacuaccc

SEQ ID NO: 148596 - RNA, 13 nt, Human herpesvirus 5
acaacacuacccu

SEQ ID NO: 148597 - RNA, 12 nt, Human herpesvirus 5
acaacacaucaa

SEQ ID NO: 148598 - RNA, 15 nt, Human herpesvirus 5
acaaaugcaugcaaa

SEQ ID NO: 148599 - RNA, 22 nt, Human herpesvirus 5
acaaaugcaugcaaacuucuca

SEQ ID NO: 148600 - RNA, 17 nt, Human herpesvirus 5
acaaaugaggcacauga

SEQ ID NO: 148601 - RNA, 23 nt, Human herpesvirus 5
acaaaucacagucuccuucucau

SEQ ID NO: 148602 - RNA, 12 nt, Human herpesvirus 5
acaauacaucau

SEQ ID NO: 148603 - RNA, 13 nt, Human herpesvirus 5
acaauacaucaua

SEQ ID NO: 148604 - RNA, 19 nt, Human herpesvirus 5
acaauacgcguaagauaca

SEQ ID NO: 148605 - RNA, 15 nt, Human herpesvirus 5
acaauacacaugugg

SEQ ID NO: 148606 - RNA, 15 nt, Human herpesvirus 5
acaaguucgaucuca

SEQ ID NO: 148607 - RNA, 22 nt, Human herpesvirus 5
acaagugcgccuuuaagcugga

SEQ ID NO: 148608 - RNA, 23 nt, Human herpesvirus 5
acaaugacacgucuuacuucagc

SEQ ID NO: 148609 - RNA, 13 nt, Human herpesvirus 5
acaauauugcuuc

SEQ ID NO: 148610 - RNA, 14 nt, Human herpesvirus 5
acaauggaagccau

SEQ ID NO: 148611 - RNA, 16 nt, Human herpesvirus 5
acaauggaagccauac

SEQ ID NO: 148612 - RNA, 19 nt, Human herpesvirus 5
acaauguauagauacacgu

SEQ ID NO: 148613 - RNA, 16 nt, Human herpesvirus 5
acaaugugcugcauga

SEQ ID NO: 148614 - RNA, 11 nt, Human herpesvirus 5
acaaccugcug

SEQ ID NO: 148615 - RNA, 17 nt, Human herpesvirus 5
acaaccugcugcacuuc

SEQ ID NO: 148616 - RNA, 13 nt, Human herpesvirus 5
acaaccuguggaa

SEQ ID NO: 148617 - RNA, 19 nt, Human herpesvirus 5
acaacgguacuucaguaug

SEQ ID NO: 148618 - RNA, 22 nt, Human herpesvirus 5
acaaccacacagauauccacaa

SEQ ID NO: 148619 - RNA, 19 nt, Human herpesvirus 5
acaaccacggcgaaccgcc

SEQ ID NO: 148620 - RNA, 18 nt, Human herpesvirus 5
acaacaguuaucagcaau

SEQ ID NO: 148621 - RNA, 14 nt, Human herpesvirus 5
acaacagcagcaac

SEQ ID NO: 148622 - RNA, 17 nt, Human herpesvirus 5
acaagcuguggcugcac

SEQ ID NO: 148623 - RNA, 21 nt, Human herpesvirus 5
acaagcuugguacacagccaa

SEQ ID NO: 148624 - RNA, 23 nt, Human herpesvirus 5
acaaggagcgacguaccagcugu

SEQ ID NO: 148625 - RNA, 14 nt, Human herpesvirus 5
acaacugguuccug

SEQ ID NO: 148626 - RNA, 17 nt, Human herpesvirus 5
acaacuuaaccacaaga

SEQ ID NO: 148627 - RNA, 22 nt, Human herpesvirus 5
acacaucgcacacagacuuuau

SEQ ID NO: 148628 - RNA, 18 nt, Human herpesvirus 5
acacaucugucaccucac

SEQ ID NO: 148629 - RNA, 16 nt, Human herpesvirus 5
acacaggccagcugcc

SEQ ID NO: 148630 - RNA, 17 nt, Human herpesvirus 5
acacaggccagcugcca

SEQ ID NO: 148631 - RNA, 18 nt, Human herpesvirus 5
acacagagacuugugaua

SEQ ID NO: 148632 - RNA, 17 nt, Human herpesvirus 5
acacagcuccugaauga

SEQ ID NO: 148633 - RNA, 20 nt, Human herpesvirus 5
acacacguucgacauggaca

SEQ ID NO: 148634 - RNA, 22 nt, Human herpesvirus 5
acaccacgguuaccuucuugcc

SEQ ID NO: 148635 - RNA, 17 nt, Human herpesvirus 5
acacauuauucuuggau

SEQ ID NO: 148636 - RNA, 16 nt, Human herpesvirus 5
acagagucgccagucc

SEQ ID NO: 148637 - RNA, 14 nt, Human herpesvirus 5
acagauauccacaa

SEQ ID NO: 148638 - RNA, 19 nt, Human herpesvirus 5
acacucuggcccugcugua

SEQ ID NO: 148639 - RNA, 20 nt, Human herpesvirus 5
acacucgugacgucaaucaa

SEQ ID NO: 148640 - RNA, 22 nt, Human herpesvirus 5
acacugguauaaccagucaugc

SEQ ID NO: 148641 - RNA, 21 nt, Human herpesvirus 5
acaccaucucgcggaagauac

SEQ ID NO: 148642 - RNA, 14 nt, Human herpesvirus 5
acaccgucaccacu

SEQ ID NO: 148643 - RNA, 15 nt, Human herpesvirus 5
acaccgugugguggu

SEQ ID NO: 148644 - RNA, 12 nt, Human herpesvirus 5
acaccuauggcg

SEQ ID NO: 148645 - RNA, 17 nt, Human herpesvirus 5
acaccucccuaacuauc

SEQ ID NO: 148646 - RNA, 21 nt, Human herpesvirus 5
acaccuauaggcuaagcuaua

SEQ ID NO: 148647 - RNA, 22 nt, Human herpesvirus 5
acaccucuauguuacaauguca

SEQ ID NO: 148648 - RNA, 17 nt, Human herpesvirus 5
acaguacuacuaccaau

SEQ ID NO: 148649 - RNA, 23 nt, Human herpesvirus 5
acaguacuacuaccaauacugca

SEQ ID NO: 148650 - RNA, 17 nt, Human herpesvirus 5
acaguacaacaguuauc

SEQ ID NO: 148651 - RNA, 17 nt, Human herpesvirus 5
acaguauagcaugcaua

SEQ ID NO: 148652 - RNA, 17 nt, Human herpesvirus 5
acauacgggacuuacau

SEQ ID NO: 148653 - RNA, 21 nt, Human herpesvirus 5
acauagcccgcuucaacgccu

SEQ ID NO: 148654 - RNA, 18 nt, Human herpesvirus 5
acagcaaagacgaugaua

SEQ ID NO: 148655 - RNA, 19 nt, Human herpesvirus 5
acagcaaagacgaugauac

SEQ ID NO: 148656 - RNA, 15 nt, Human herpesvirus 5
acagcagauacaugc

SEQ ID NO: 148657 - RNA, 17 nt, Human herpesvirus 5
acagcaugaacaccaga

SEQ ID NO: 148658 - RNA, 15 nt, Human herpesvirus 5
acaggguaacagccu

SEQ ID NO: 148659 - RNA, 14 nt, Human herpesvirus 5
acagggaaugggaa

SEQ ID NO: 148660 - RNA, 19 nt, Human herpesvirus 5
acagccacaucaacauaca

SEQ ID NO: 148661 - RNA, 12 nt, Human herpesvirus 5
acaucgucacac

SEQ ID NO: 148662 - RNA, 14 nt, Human herpesvirus 5
acauucaauacauc

SEQ ID NO: 148663 - RNA, 16 nt, Human herpesvirus 5
acauucaauacaucau

SEQ ID NO: 148664 - RNA, 20 nt, Human herpesvirus 5
acauuccccugggaauucau

SEQ ID NO: 148665 - RNA, 17 nt, Human herpesvirus 5
acauuccccaccuuccc

SEQ ID NO: 148666 - RNA, 21 nt, Human herpesvirus 5
acauugaacgcgguacaugug

SEQ ID NO: 148667 - RNA, 13 nt, Human herpesvirus 5
acaucacaguuca

SEQ ID NO: 148668 - RNA, 14 nt, Human herpesvirus 5
acaucacaguucac

SEQ ID NO: 148669 - RNA, 13 nt, Human herpesvirus 5
acaucaguuucca

SEQ ID NO: 148670 - RNA, 13 nt, Human herpesvirus 5
acaucaacauaca

SEQ ID NO: 148671 - RNA, 14 nt, Human herpesvirus 5
acaucaacauacag

SEQ ID NO: 148672 - RNA, 20 nt, Human herpesvirus 5
acauaugcagauacgcagug

SEQ ID NO: 148673 - RNA, 16 nt, Human herpesvirus 5
acauaugcgaugugca

SEQ ID NO: 148674 - RNA, 19 nt, Human herpesvirus 5
acauauagcucguccacac

SEQ ID NO: 148675 - RNA, 18 nt, Human herpesvirus 5
agaugcagacgguggugu

SEQ ID NO: 148676 - RNA, 15 nt, Human herpesvirus 5
agaugcuagcaauaa

SEQ ID NO: 148677 - RNA, 11 nt, Human herpesvirus 5
agaugauggug

SEQ ID NO: 148678 - RNA, 17 nt, Human herpesvirus 5
agaugaagacacccugc

SEQ ID NO: 148679 - RNA, 16 nt, Human herpesvirus 5
agaugaacaagguucu

SEQ ID NO: 148680 - RNA, 18 nt, Human herpesvirus 5
agauucgcgggaucguca

SEQ ID NO: 148681 - RNA, 20 nt, Human herpesvirus 5
agcaaccaccguuucuacaa

SEQ ID NO: 148682 - RNA, 22 nt, Human herpesvirus 5
agcaaccaccguuucuacaaaa

SEQ ID NO: 148683 - RNA, 15 nt, Human herpesvirus 5
agcaacaacagucgc

SEQ ID NO: 148684 - RNA, 19 nt, Human herpesvirus 5
agcaacaauaccgauacca

SEQ ID NO: 148685 - RNA, 14 nt, Human herpesvirus 5
agauuuccugugua

SEQ ID NO: 148686 - RNA, 18 nt, Human herpesvirus 5
agcaauaaaagcacuuca

SEQ ID NO: 148687 - RNA, 17 nt, Human herpesvirus 5
agcaaggucaacuacag

SEQ ID NO: 148688 - RNA, 22 nt, Human herpesvirus 5
agcaagaauaaaucaccgugaa

SEQ ID NO: 148689 - RNA, 14 nt, Human herpesvirus 5
agcaagcagucaaa

SEQ ID NO: 148690 - RNA, 17 nt, Human herpesvirus 5
agcaagccagauacuau

SEQ ID NO: 148691 - RNA, 19 nt, Human herpesvirus 5
agcaaugucguaguacaau

SEQ ID NO: 148692 - RNA, 21 nt, Human herpesvirus 5
agcaaucugacguccagcacc

SEQ ID NO: 148693 - RNA, 22 nt, Human herpesvirus 5
agcaccacgucgauucccaucu

SEQ ID NO: 148694 - RNA, 15 nt, Human herpesvirus 5
agcacagagacacca

SEQ ID NO: 148695 - RNA, 16 nt, Human herpesvirus 5
agcacagagacaccaa

SEQ ID NO: 148696 - RNA, 22 nt, Human herpesvirus 5
agauagagaaaccgcauguguu

SEQ ID NO: 148697 - RNA, 21 nt, Human herpesvirus 5
agauagguaaagcggugggug

SEQ ID NO: 148698 - RNA, 22 nt, Human herpesvirus 5
agauagucccacaggggaucua

SEQ ID NO: 148699 - RNA, 13 nt, Human herpesvirus 5
agauaaucugcca

SEQ ID NO: 148700 - RNA, 23 nt, Human herpesvirus 5
agaucgugccgcgaggugucaug

SEQ ID NO: 148701 - RNA, 17 nt, Human herpesvirus 5
agauccaguuucaccaa

SEQ ID NO: 148702 - RNA, 17 nt, Human herpesvirus 5
agauauccgaugaugau

SEQ ID NO: 148703 - RNA, 20 nt, Human herpesvirus 5
acuuugauguaguugcagag

SEQ ID NO: 148704 - RNA, 22 nt, Human herpesvirus 5
acuuuggcucuuuccugugcac

SEQ ID NO: 148705 - RNA, 14 nt, Human herpesvirus 5
acuuuggugacuug

SEQ ID NO: 148706 - RNA, 16 nt, Human herpesvirus 5
acuuuuuuaccuauca

SEQ ID NO: 148707 - RNA, 16 nt, Human herpesvirus 5
acuuuuuuuaaccaau

SEQ ID NO: 148708 - RNA, 19 nt, Human herpesvirus 5
agaaaaaaaaaaaacacgc

SEQ ID NO: 148709 - RNA, 15 nt, Human herpesvirus 5
agagucgccagucca

SEQ ID NO: 148710 - RNA, 20 nt, Human herpesvirus 5
agagccacguugagauucag

SEQ ID NO: 148711 - RNA, 13 nt, Human herpesvirus 5
agagcaaaaccuu

SEQ ID NO: 148712 - RNA, 15 nt, Human herpesvirus 5
agccuaucaaugaag

SEQ ID NO: 148713 - RNA, 17 nt, Human herpesvirus 5
agccuaucaaugaagac

SEQ ID NO: 148714 - RNA, 23 nt, Human herpesvirus 5
agccucaagaauccguccccacg

SEQ ID NO: 148715 - RNA, 23 nt, Human herpesvirus 5
agccgugggaaugguaaagacau

SEQ ID NO: 148716 - RNA, 15 nt, Human herpesvirus 5
agccggaaaaaccgc

SEQ ID NO: 148717 - RNA, 19 nt, Human herpesvirus 5
agccggcccguuguguaug

SEQ ID NO: 148718 - RNA, 13 nt, Human herpesvirus 5
agccucuguguuc

SEQ ID NO: 148719 - RNA, 16 nt, Human herpesvirus 5
agccucuguguuccca

SEQ ID NO: 148720 - RNA, 14 nt, Human herpesvirus 5
agccauacuucucg

SEQ ID NO: 148721 - RNA, 24 nt, Human herpesvirus 5
agccacgagcaucgcaacaacagc

SEQ ID NO: 148722 - RNA, 19 nt, Human herpesvirus 5
agccacgaguacccauuac

SEQ ID NO: 148723 - RNA, 18 nt, Human herpesvirus 5
agccacucggccauaaga

SEQ ID NO: 148724 - RNA, 16 nt, Human herpesvirus 5
agcauucaccuccagc

SEQ ID NO: 148725 - RNA, 16 nt, Human herpesvirus 5
agcacuucagaaucua

SEQ ID NO: 148726 - RNA, 18 nt, Human herpesvirus 5
agcacccgucaugguaca

SEQ ID NO: 148727 - RNA, 20 nt, Human herpesvirus 5
agcaccggcgccugcugcuc

SEQ ID NO: 148728 - RNA, 15 nt, Human herpesvirus 5
agcagcaacagcagc

SEQ ID NO: 148729 - RNA, 22 nt, Human herpesvirus 5
agcagcaaugucguaguacaau

SEQ ID NO: 148730 - RNA, 21 nt, Human herpesvirus 5
agcagccgcgcuugucgccau

SEQ ID NO: 148731 - RNA, 23 nt, Human herpesvirus 5
agcagccgcgcuugucgccaugc

SEQ ID NO: 148732 - RNA, 17 nt, Human herpesvirus 5
agcaggguaaaaaccac

SEQ ID NO: 148733 - RNA, 19 nt, Human herpesvirus 5
agcaggguaaaaaccacgu

SEQ ID NO: 148734 - RNA, 19 nt, Human herpesvirus 5
agcagguggaggacaguau

SEQ ID NO: 148735 - RNA, 14 nt, Human herpesvirus 5
agcaugacuguuuc

SEQ ID NO: 148736 - RNA, 20 nt, Human herpesvirus 5
agcaugcauaagaagccaag

SEQ ID NO: 148737 - RNA, 18 nt, Human herpesvirus 5
agcaucgcaacaacagca

SEQ ID NO: 148738 - RNA, 20 nt, Human herpesvirus 5
agcuuuuuuuauacaucucc

SEQ ID NO: 148739 - RNA, 23 nt, Human herpesvirus 5
agcuuuggucgccugcacugcca

SEQ ID NO: 148740 - RNA, 18 nt, Human herpesvirus 5
aggaaaacggaaugucag

SEQ ID NO: 148741 - RNA, 16 nt, Human herpesvirus 5
agcuuucgcgcagcgc

SEQ ID NO: 148742 - RNA, 14 nt, Human herpesvirus 5
aggaacacugaaaa

SEQ ID NO: 148743 - RNA, 18 nt, Human herpesvirus 5
agcuugguguuuuuucuc

SEQ ID NO: 148744 - RNA, 17 nt, Human herpesvirus 5
agcuuggcguuuauuuc

SEQ ID NO: 148745 - RNA, 21 nt, Human herpesvirus 5
agcguuggcggcgauggucau

SEQ ID NO: 148746 - RNA, 18 nt, Human herpesvirus 5
agcguggauggucauaua

SEQ ID NO: 148747 - RNA, 18 nt, Human herpesvirus 5
agcggaggaggugaccug

SEQ ID NO: 148748 - RNA, 21 nt, Human herpesvirus 5
agcggcacuuuacauaaaacc

SEQ ID NO: 148749 - RNA, 21 nt, Human herpesvirus 5
agcguauuuucuacuccgaau

SEQ ID NO: 148750 - RNA, 19 nt, Human herpesvirus 5
agcgggguaugcguguuca

SEQ ID NO: 148751 - RNA, 18 nt, Human herpesvirus 5
aggagugucagacacagc

SEQ ID NO: 148752 - RNA, 17 nt, Human herpesvirus 5
aggacaguguauuggca

SEQ ID NO: 148753 - RNA, 18 nt, Human herpesvirus 5
aggagguauggugaccau

SEQ ID NO: 148754 - RNA, 13 nt, Human herpesvirus 5
aggaaucugggag

SEQ ID NO: 148755 - RNA, 14 nt, Human herpesvirus 5
aggccagcugccac

SEQ ID NO: 148756 - RNA, 23 nt, Human herpesvirus 5
aggcccggguucgcgauucucac

SEQ ID NO: 148757 - RNA, 23 nt, Human herpesvirus 5
aggaucgugggugguagaacuga

SEQ ID NO: 148758 - RNA, 18 nt, Human herpesvirus 5
auaugaggaaacugaaua

SEQ ID NO: 148759 - RNA, 19 nt, Human herpesvirus 5
auaugauccuuguacagau

SEQ ID NO: 148760 - RNA, 23 nt, Human herpesvirus 5
auaugauccuuguacagauguaa

SEQ ID NO: 148761 - RNA, 17 nt, Human herpesvirus 5
auaugcuaauauaucca

SEQ ID NO: 148762 - RNA, 20 nt, Human herpesvirus 5
auaugugcggucaugugucg

SEQ ID NO: 148763 - RNA, 21 nt, Human herpesvirus 5
aucaauacaaugacacuaacu

SEQ ID NO: 148764 - RNA, 21 nt, Human herpesvirus 5
aucaagcuggcacauggccaa

SEQ ID NO: 148765 - RNA, 20 nt, Human herpesvirus 5
aucaaggacuguuuucucaa

SEQ ID NO: 148766 - RNA, 14 nt, Human herpesvirus 5
auauccaauacggc

SEQ ID NO: 148767 - RNA, 22 nt, Human herpesvirus 5
auauccacaacgacaaauacaa

SEQ ID NO: 148768 - RNA, 17 nt, Human herpesvirus 5
auaucggcguucugcuc

SEQ ID NO: 148769 - RNA, 18 nt, Human herpesvirus 5
auaucuacagcagauaca

SEQ ID NO: 148770 - RNA, 21 nt, Human herpesvirus 5
auaucuccgguuucaaaccca

SEQ ID NO: 148771 - RNA, 23 nt, Human herpesvirus 5
auauaaacguggguuucggugac

SEQ ID NO: 148772 - RNA, 16 nt, Human herpesvirus 5
auacccgucacugcac

SEQ ID NO: 148773 - RNA, 14 nt, Human herpesvirus 5
auacccuaauaaag

SEQ ID NO: 148774 - RNA, 15 nt, Human herpesvirus 5
auacccuaauaaagc

SEQ ID NO: 148775 - RNA, 23 nt, Human herpesvirus 5
auaccgggcgccgggacucuggu

SEQ ID NO: 148776 - RNA, 14 nt, Human herpesvirus 5
auagucaucucauu

SEQ ID NO: 148777 - RNA, 17 nt, Human herpesvirus 5
auaacgacgccagugau

SEQ ID NO: 148778 - RNA, 17 nt, Human herpesvirus 5
auaaccgcaaaggccac

SEQ ID NO: 148779 - RNA, 16 nt, Human herpesvirus 5
auaaggagcucauguc

SEQ ID NO: 148780 - RNA, 13 nt, Human herpesvirus 5
auaaggaggcaaa

SEQ ID NO: 148781 - RNA, 16 nt, Human herpesvirus 5
auaagaagccaagggg

SEQ ID NO: 148782 - RNA, 13 nt, Human herpesvirus 5
auaagaaggccau

SEQ ID NO: 148783 - RNA, 14 nt, Human herpesvirus 5
auaaguaccucuaa

SEQ ID NO: 148784 - RNA, 15 nt, Human herpesvirus 5
auaauaaugauguac

SEQ ID NO: 148785 - RNA, 13 nt, Human herpesvirus 5
auaauacacgugg

SEQ ID NO: 148786 - RNA, 12 nt, Human herpesvirus 5
auaauaccacaa

SEQ ID NO: 148787 - RNA, 15 nt, Human herpesvirus 5
auaauaauaccacaa

SEQ ID NO: 148788 - RNA, 18 nt, Human herpesvirus 5
auacaaaaacaugcacau

SEQ ID NO: 148789 - RNA, 20 nt, Human herpesvirus 5
auacaagcuugguacacagc

SEQ ID NO: 148790 - RNA, 23 nt, Human herpesvirus 5
auacaagcuugguacacagccaa

SEQ ID NO: 148791 - RNA, 23 nt, Human herpesvirus 5
auacaaggagcgacguaccagcu

SEQ ID NO: 148792 - RNA, 18 nt, Human herpesvirus 5
auacaacgucaugcauuc

SEQ ID NO: 148793 - RNA, 17 nt, Human herpesvirus 5
auacaucuccgucucug

SEQ ID NO: 148794 - RNA, 10 nt, Human herpesvirus 5
auacaugaug

SEQ ID NO: 148795 - RNA, 18 nt, Human herpesvirus 5
auacaugaugaaugucau

SEQ ID NO: 148796 - RNA, 21 nt, Human herpesvirus 5
auaaucugccaaucgcaccuu

SEQ ID NO: 148797 - RNA, 16 nt, Human herpesvirus 5
auaauggucaauaacc

SEQ ID NO: 148798 - RNA, 18 nt, Human herpesvirus 5
auaauugcacauccucac

SEQ ID NO: 148799 - RNA, 20 nt, Human herpesvirus 5
auaauugcuacgucacaaua

SEQ ID NO: 148800 - RNA, 23 nt, Human herpesvirus 5
auaauugcuacgucacaauaaca

SEQ ID NO: 148801 - RNA, 24 nt, Human herpesvirus 5
agugucucuaaacgccaccugcaa

SEQ ID NO: 148802 - RNA, 16 nt, Human herpesvirus 5
aguuacacucgcucua

SEQ ID NO: 148803 - RNA, 18 nt, Human herpesvirus 5
aguuaucagcaauaaaag

SEQ ID NO: 148804 - RNA, 15 nt, Human herpesvirus 5
aguuauccuguugaa

SEQ ID NO: 148805 - RNA, 22 nt, Human herpesvirus 5
agucuaucccuauggcacgucg

SEQ ID NO: 148806 - RNA, 15 nt, Human herpesvirus 5
agucugcgacggggu

SEQ ID NO: 148807 - RNA, 20 nt, Human herpesvirus 5
agucuguauauucaguccau

SEQ ID NO: 148808 - RNA, 14 nt, Human herpesvirus 5
auaaaagcacuuca

SEQ ID NO: 148809 - RNA, 16 nt, Human herpesvirus 5
auaaaauuugauuacu

SEQ ID NO: 148810 - RNA, 14 nt, Human herpesvirus 5
auaaaccguaugca

SEQ ID NO: 148811 - RNA, 14 nt, Human herpesvirus 5
auaaacgucaacca

SEQ ID NO: 148812 - RNA, 16 nt, Human herpesvirus 5
auaaacuaaaacauuc

SEQ ID NO: 148813 - RNA, 14 nt, Human herpesvirus 5
auaaagaaaaccac

SEQ ID NO: 148814 - RNA, 17 nt, Human herpesvirus 5
auaaagauaaucugcca

SEQ ID NO: 148815 - RNA, 18 nt, Human herpesvirus 5
auaaagaugauacauagc

SEQ ID NO: 148816 - RNA, 19 nt, Human herpesvirus 5
auaaagaugauacauagca

SEQ ID NO: 148817 - RNA, 12 nt, Human herpesvirus 5
auaaagauucac

SEQ ID NO: 148818 - RNA, 21 nt, Human herpesvirus 5
aguuggguggcucaccgucag

SEQ ID NO: 148819 - RNA, 19 nt, Human herpesvirus 5
auaaaacgccaugaugaca

SEQ ID NO: 148820 - RNA, 14 nt, Human herpesvirus 5
aguuuaugagaaaa

SEQ ID NO: 148821 - RNA, 23 nt, Human herpesvirus 5
aguccguaccgcuuggggcucaa

SEQ ID NO: 148822 - RNA, 20 nt, Human herpesvirus 5
aguccccccacggaucucgc

SEQ ID NO: 148823 - RNA, 23 nt, Human herpesvirus 5
agucgccgacgaagaagaacaag

SEQ ID NO: 148824 - RNA, 22 nt, Human herpesvirus 5
agucgcucaucgucacgcucaa

SEQ ID NO: 148825 - RNA, 14 nt, Human herpesvirus 5
aguccugcuguuac

SEQ ID NO: 148826 - RNA, 21 nt, Human herpesvirus 5
agucgacgggugguaccugca

SEQ ID NO: 148827 - RNA, 15 nt, Human herpesvirus 5
agucgagacuugcac

SEQ ID NO: 148828 - RNA, 16 nt, Human herpesvirus 5
agucgagacuugcacg

SEQ ID NO: 148829 - RNA, 20 nt, Human herpesvirus 5
agucuaccuagaugcuagca

SEQ ID NO: 148830 - RNA, 16 nt, Human herpesvirus 5
agucuaccuccugcag

SEQ ID NO: 148831 - RNA, 23 nt, Human herpesvirus 5
agucacacuuaagaaaaaggugg

SEQ ID NO: 148832 - RNA, 21 nt, Human herpesvirus 5
agucaccguaaucaccaaaga

SEQ ID NO: 148833 - RNA, 19 nt, Human herpesvirus 5
agucagacccacuaccugg

SEQ ID NO: 148834 - RNA, 21 nt, Human herpesvirus 5
agucacugcgugucaaaaauc

SEQ ID NO: 148835 - RNA, 12 nt, Human herpesvirus 5
agucaacacuac

SEQ ID NO: 148836 - RNA, 14 nt, Human herpesvirus 5
agucaacacuacca

SEQ ID NO: 148837 - RNA, 22 nt, Human herpesvirus 5
agucaacacuaccaaguacccc

SEQ ID NO: 148838 - RNA, 12 nt, Human herpesvirus 5
agucaacaugua

SEQ ID NO: 148839 - RNA, 18 nt, Human herpesvirus 5
agucaacauguagaagca

SEQ ID NO: 148840 - RNA, 19 nt, Human herpesvirus 5
aguacugagacagccacau

SEQ ID NO: 148841 - RNA, 17 nt, Human herpesvirus 5
aguacuacuaccaauac

SEQ ID NO: 148842 - RNA, 16 nt, Human herpesvirus 5
aguaccagacauccaa

SEQ ID NO: 148843 - RNA, 20 nt, Human herpesvirus 5
aguacacgcaggcaagccaa

SEQ ID NO: 148844 - RNA, 21 nt, Human herpesvirus 5
aguacacgcaggcaagccaaa

SEQ ID NO: 148845 - RNA, 16 nt, Human herpesvirus 5
aguacaacaguuauca

SEQ ID NO: 148846 - RNA, 21 nt, Human herpesvirus 5
aguacaacaguuaucagcaau

SEQ ID NO: 148847 - RNA, 21 nt, Human herpesvirus 5
aggcggacauugggcuguggu

SEQ ID NO: 148848 - RNA, 22 nt, Human herpesvirus 5
aggcgccgcaaacaucuaccuc

SEQ ID NO: 148849 - RNA, 17 nt, Human herpesvirus 5
aggcggcggcgaucgca

SEQ ID NO: 148850 - RNA, 18 nt, Human herpesvirus 5
aggcggcguggacuggga

SEQ ID NO: 148851 - RNA, 14 nt, Human herpesvirus 5
aggugaguucaaug

SEQ ID NO: 148852 - RNA, 17 nt, Human herpesvirus 5
agguggaaaucccucac

SEQ ID NO: 148853 - RNA, 13 nt, Human herpesvirus 5
agguggccaugau

SEQ ID NO: 148854 - RNA, 19 nt, Human herpesvirus 5
agguggccugcaucuuccc

SEQ ID NO: 148855 - RNA, 17 nt, Human herpesvirus 5
agguguggcgaaagccu

SEQ ID NO: 148856 - RNA, 12 nt, Human herpesvirus 5
aaaaaaacaugg

SEQ ID NO: 148857 - RNA, 11 nt, Human herpesvirus 5
aaaaaaaccac

SEQ ID NO: 148858 - RNA, 14 nt, Human herpesvirus 5
aaaaaauauugaca

SEQ ID NO: 148859 - RNA, 19 nt, Human herpesvirus 5
aaaaacaacacauacuuuc

SEQ ID NO: 148860 - RNA, 20 nt, Human herpesvirus 5
aaaaacugcgggcacugggg

SEQ ID NO: 148861 - RNA, 22 nt, Human herpesvirus 5
aaaaacugcgggcacuggggac

SEQ ID NO: 148862 - RNA, 14 nt, Human herpesvirus 5
aaaaaccacguaca

SEQ ID NO: 148863 - RNA, 20 nt, Human herpesvirus 5
aaaaacaguauagcaugcau

SEQ ID NO: 148864 - RNA, 17 nt, Human herpesvirus 5
aaaaccaccguaccugc

SEQ ID NO: 148865 - RNA, 23 nt, Human herpesvirus 5
aaaacaaagaagucucucucuag

SEQ ID NO: 148866 - RNA, 18 nt, Human herpesvirus 5
aaaacaaccacacagaua

SEQ ID NO: 148867 - RNA, 14 nt, Human herpesvirus 5
aaaacuacuaauac

SEQ ID NO: 148868 - RNA, 18 nt, Human herpesvirus 5
aaaagcgccgugcucuug

SEQ ID NO: 148869 - RNA, 16 nt, Human herpesvirus 5
aaaacuaaaagaccua

SEQ ID NO: 148870 - RNA, 13 nt, Human herpesvirus 5
aaaacgucaucuc

SEQ ID NO: 148871 - RNA, 13 nt, Human herpesvirus 5
aaaagguaugugu

SEQ ID NO: 148872 - RNA, 21 nt, Human herpesvirus 5
aaaagucuguauauucagucc

SEQ ID NO: 148873 - RNA, 19 nt, Human herpesvirus 5
aaaagucccgugucgucuc

SEQ ID NO: 148874 - RNA, 15 nt, Human herpesvirus 5
aaaaguagcaccaca

SEQ ID NO: 148875 - RNA, 18 nt, Human herpesvirus 5
aaaagguaugugugaaug

SEQ ID NO: 148876 - RNA, 19 nt, Human herpesvirus 5
aaaaugugcgaauuaggca

SEQ ID NO: 148877 - RNA, 11 nt, Human herpesvirus 5
aaaaugucgcc

SEQ ID NO: 148878 - RNA, 22 nt, Human herpesvirus 5
aaaauacagaguccgugucagu

SEQ ID NO: 148879 - RNA, 14 nt, Human herpesvirus 5
aaaaguaugugcuc

SEQ ID NO: 148880 - RNA, 21 nt, Human herpesvirus 5
aaaagucccgugucgucucca

SEQ ID NO: 148881 - RNA, 14 nt, Human herpesvirus 5
aaaauugcaacuua

SEQ ID NO: 148882 - RNA, 12 nt, Human herpesvirus 5
aaacaacaccac

SEQ ID NO: 148883 - RNA, 15 nt, Human herpesvirus 5
aaaauuugauuacuc

SEQ ID NO: 148884 - RNA, 18 nt, Human herpesvirus 5
aaacaaaaaaacaugggc

SEQ ID NO: 148885 - RNA, 17 nt, Human herpesvirus 5
aaacaccguguucuccc

SEQ ID NO: 148886 - RNA, 12 nt, Human herpesvirus 5
aaacccguguaa

SEQ ID NO: 148887 - RNA, 21 nt, Human herpesvirus 5
aaaccgucgaaaacaaccaca

SEQ ID NO: 148888 - RNA, 19 nt, Human herpesvirus 5
aaaccauugagaaagcuaa

SEQ ID NO: 148889 - RNA, 18 nt, Human herpesvirus 5
aaaccacgcgucagggcg

SEQ ID NO: 148890 - RNA, 16 nt, Human herpesvirus 5
aaacaguuuuugcaga

SEQ ID NO: 148891 - RNA, 13 nt, Human herpesvirus 5
aaacauaugcaga

SEQ ID NO: 148892 - RNA, 18 nt, Human herpesvirus 5
aaacagcguccacaguuu

SEQ ID NO: 148893 - RNA, 22 nt, Human herpesvirus 5
aaacauuuguugagucaugaca

SEQ ID NO: 148894 - RNA, 21 nt, Human herpesvirus 5
auauacuuauauccgccagga

SEQ ID NO: 148895 - RNA, 23 nt, Human herpesvirus 5
auauacgugauuauacaacaggu

SEQ ID NO: 148896 - RNA, 19 nt, Human herpesvirus 5
auauaaccuuucccugucu

SEQ ID NO: 148897 - RNA, 18 nt, Human herpesvirus 5
auauaaaccguaugcaca

SEQ ID NO: 148898 - RNA, 20 nt, Human herpesvirus 5
auauaauacacgugguuuau

SEQ ID NO: 148899 - RNA, 15 nt, Human herpesvirus 5
auaugugcggucaug

SEQ ID NO: 148900 - RNA, 14 nt, Human herpesvirus 5
auauccgcguuauc

SEQ ID NO: 148901 - RNA, 16 nt, Human herpesvirus 5
auauccgcguuaucag

SEQ ID NO: 148902 - RNA, 12 nt, Human herpesvirus 5
auaucuacagca

SEQ ID NO: 148903 - RNA, 19 nt, Human herpesvirus 5
auaucuacgcaauguuaca

SEQ ID NO: 148904 - RNA, 16 nt, Human herpesvirus 5
auaucaguuacuguua

SEQ ID NO: 148905 - RNA, 13 nt, Human herpesvirus 5
auaucaucugcac

SEQ ID NO: 148906 - RNA, 15 nt, Human herpesvirus 5
auagcggcacuuuac

SEQ ID NO: 148907 - RNA, 19 nt, Human herpesvirus 5
auagugcgccaagccaugc

SEQ ID NO: 148908 - RNA, 18 nt, Human herpesvirus 5
auagugacgugucgggaa

SEQ ID NO: 148909 - RNA, 15 nt, Human herpesvirus 5
aucauauuaugcgug

SEQ ID NO: 148910 - RNA, 13 nt, Human herpesvirus 5
aucaucaacagca

SEQ ID NO: 148911 - RNA, 14 nt, Human herpesvirus 5
aucaucaacagcag

SEQ ID NO: 148912 - RNA, 16 nt, Human herpesvirus 5
aucacguuguccuugu

SEQ ID NO: 148913 - RNA, 13 nt, Human herpesvirus 5
aucaucugcaccu

SEQ ID NO: 148914 - RNA, 13 nt, Human herpesvirus 5
aucacacuaagaa

SEQ ID NO: 148915 - RNA, 14 nt, Human herpesvirus 5
aucaccaucaggug

SEQ ID NO: 148916 - RNA, 14 nt, Human herpesvirus 5
aucaccaaacaaca

SEQ ID NO: 148917 - RNA, 15 nt, Human herpesvirus 5
aucacgaaaggcacc

SEQ ID NO: 148918 - RNA, 17 nt, Human herpesvirus 5
auauuaugcguguccug

SEQ ID NO: 148919 - RNA, 16 nt, Human herpesvirus 5
auauucaaucauuacu

SEQ ID NO: 148920 - RNA, 17 nt, Human herpesvirus 5
auauucaaucauuacua

SEQ ID NO: 148921 - RNA, 17 nt, Human herpesvirus 5
aucgacacuaauuuauc

SEQ ID NO: 148922 - RNA, 23 nt, Human herpesvirus 5
aucgaaguuuuucaugucuuaca

SEQ ID NO: 148923 - RNA, 22 nt, Human herpesvirus 5
aucgacgucucaucuugagaca

SEQ ID NO: 148924 - RNA, 21 nt, Human herpesvirus 5
aucgacugccuaacuguagca

SEQ ID NO: 148925 - RNA, 19 nt, Human herpesvirus 5
aucgcacacagacuuuaua

SEQ ID NO: 148926 - RNA, 13 nt, Human herpesvirus 5
aucgaugcuguug

SEQ ID NO: 148927 - RNA, 15 nt, Human herpesvirus 5
aucccguuacaaaga

SEQ ID NO: 148928 - RNA, 19 nt, Human herpesvirus 5
auccgagggggcuuuccaa

SEQ ID NO: 148929 - RNA, 17 nt, Human herpesvirus 5
auccuuguacagaugua

SEQ ID NO: 148930 - RNA, 16 nt, Human herpesvirus 5
auccccucgccacgac

SEQ ID NO: 148931 - RNA, 18 nt, Human herpesvirus 5
aucauuacuaaacaaaaa

SEQ ID NO: 148932 - RNA, 13 nt, Human herpesvirus 5
auccauacuuacc

SEQ ID NO: 148933 - RNA, 18 nt, Human herpesvirus 5
augcacagcgucuggcca

SEQ ID NO: 148934 - RNA, 19 nt, Human herpesvirus 5
augcaacuucuucuacuca

SEQ ID NO: 148935 - RNA, 14 nt, Human herpesvirus 5
augcaacgcuuuca

SEQ ID NO: 148936 - RNA, 16 nt, Human herpesvirus 5
augauaacgucauuca

SEQ ID NO: 148937 - RNA, 18 nt, Human herpesvirus 5
augauauuuuacagguau

SEQ ID NO: 148938 - RNA, 17 nt, Human herpesvirus 5
augauaucuacagcaga

SEQ ID NO: 148939 - RNA, 21 nt, Human herpesvirus 5
augaucauggagccgcaagug

SEQ ID NO: 148940 - RNA, 15 nt, Human herpesvirus 5
augaugaaucaugug

SEQ ID NO: 148941 - RNA, 13 nt, Human herpesvirus 5
augaugacgguga

SEQ ID NO: 148942 - RNA, 12 nt, Human herpesvirus 5
augaugagcacg

SEQ ID NO: 148943 - RNA, 12 nt, Human herpesvirus 5
augauugucugc

SEQ ID NO: 148944 - RNA, 13 nt, Human herpesvirus 5
augauuagcaaua

SEQ ID NO: 148945 - RNA, 23 nt, Human herpesvirus 5
augccagaguagauuuucaugaa

SEQ ID NO: 148946 - RNA, 19 nt, Human herpesvirus 5
augccacgcgucgacccca

SEQ ID NO: 148947 - RNA, 19 nt, Human herpesvirus 5
augccaguugcuguugcuc

SEQ ID NO: 148948 - RNA, 21 nt, Human herpesvirus 5
augccaguugcuguugcucua

SEQ ID NO: 148949 - RNA, 17 nt, Human herpesvirus 5
augcauaagaagccaag

SEQ ID NO: 148950 - RNA, 12 nt, Human herpesvirus 5
augcaugucgcg

SEQ ID NO: 148951 - RNA, 19 nt, Human herpesvirus 5
augcauucugguaccugcu

SEQ ID NO: 148952 - RNA, 21 nt, Human herpesvirus 5
augcauucugguaccugcuaa

SEQ ID NO: 148953 - RNA, 18 nt, Human herpesvirus 5
augcggcacccggcugca

SEQ ID NO: 148954 - RNA, 13 nt, Human herpesvirus 5
augcguacuucau

SEQ ID NO: 148955 - RNA, 18 nt, Human herpesvirus 5
augcguguuaaacacuac

SEQ ID NO: 148956 - RNA, 18 nt, Human herpesvirus 5
augcuaauuauugccaua

SEQ ID NO: 148957 - RNA, 19 nt, Human herpesvirus 5
augcuaagaugaacgggug

SEQ ID NO: 148958 - RNA, 14 nt, Human herpesvirus 5
augcgaugugcaau

SEQ ID NO: 148959 - RNA, 15 nt, Human herpesvirus 5
augcgcaucuugccg

SEQ ID NO: 148960 - RNA, 15 nt, Human herpesvirus 5
augacguacauauac

SEQ ID NO: 148961 - RNA, 21 nt, Human herpesvirus 5
augagaacacgcgugacacau

SEQ ID NO: 148962 - RNA, 15 nt, Human herpesvirus 5
augacacuaacuuga

SEQ ID NO: 148963 - RNA, 23 nt, Human herpesvirus 5
augaaggaucgcaauagaauacu

SEQ ID NO: 148964 - RNA, 16 nt, Human herpesvirus 5
augaagcugaacaaua

SEQ ID NO: 148965 - RNA, 22 nt, Human herpesvirus 5
aucgggauaucgccguguaaug

SEQ ID NO: 148966 - RNA, 23 nt, Human herpesvirus 5
aucgcgucuuucgccgccacgcu

SEQ ID NO: 148967 - RNA, 15 nt, Human herpesvirus 5
aucgcaacaacagca

SEQ ID NO: 148968 - RNA, 21 nt, Human herpesvirus 5
aucguagucccaggacacauu

SEQ ID NO: 148969 - RNA, 17 nt, Human herpesvirus 5
aucgucacaccuaucau

SEQ ID NO: 148970 - RNA, 17 nt, Human herpesvirus 5
aucgucgccacacgugu

SEQ ID NO: 148971 - RNA, 18 nt, Human herpesvirus 5
aucgugaaccaugaucuu

SEQ ID NO: 148972 - RNA, 11 nt, Human herpesvirus 5
aucuuuuggag

SEQ ID NO: 148973 - RNA, 17 nt, Human herpesvirus 5
augaaacauaugcagau

SEQ ID NO: 148974 - RNA, 12 nt, Human herpesvirus 5
augaaccuuccc

SEQ ID NO: 148975 - RNA, 16 nt, Human herpesvirus 5
augaacgacacaugca

SEQ ID NO: 148976 - RNA, 22 nt, Human herpesvirus 5
augaacgacacaugcacaauac

SEQ ID NO: 148977 - RNA, 13 nt, Human herpesvirus 5
agugagcuuugac

SEQ ID NO: 148978 - RNA, 17 nt, Human herpesvirus 5
agugagagcucauacau

SEQ ID NO: 148979 - RNA, 16 nt, Human herpesvirus 5
agugacguggauacua

SEQ ID NO: 148980 - RNA, 17 nt, Human herpesvirus 5
agugacguggauacuag

SEQ ID NO: 148981 - RNA, 19 nt, Human herpesvirus 5
agugacguggauacuagua

SEQ ID NO: 148982 - RNA, 23 nt, Human herpesvirus 5
aguauacuaaacucugugaugaa

SEQ ID NO: 148983 - RNA, 23 nt, Human herpesvirus 5
aguaucauauuaugcguguccug

SEQ ID NO: 148984 - RNA, 14 nt, Human herpesvirus 5
aguauccacgucac

SEQ ID NO: 148985 - RNA, 16 nt, Human herpesvirus 5
agugcaucuacguggu

SEQ ID NO: 148986 - RNA, 19 nt, Human herpesvirus 5
agugccugcacgaccugcu

SEQ ID NO: 148987 - RNA, 18 nt, Human herpesvirus 5
aguaacaccgucaccacu

SEQ ID NO: 148988 - RNA, 19 nt, Human herpesvirus 5
aguaacaccgucaccacuc

SEQ ID NO: 148989 - RNA, 23 nt, Human herpesvirus 5
aguacuaccguuaacuauuccac

SEQ ID NO: 148990 - RNA, 21 nt, Human herpesvirus 5
aguaaaagggacgucaaagcu

SEQ ID NO: 148991 - RNA, 22 nt, Human herpesvirus 5
aguacugagacagccacaucaa

SEQ ID NO: 148992 - RNA, 18 nt, Human herpesvirus 5
aguagaaaagacagggaa

SEQ ID NO: 148993 - RNA, 16 nt, Human herpesvirus 5
aguagcggguaauaaa

SEQ ID NO: 148994 - RNA, 23 nt, Human herpesvirus 5
aguagcuuuuuuuauacaucucc

SEQ ID NO: 148995 - RNA, 19 nt, Human herpesvirus 5
agugguggcggcagccacg

SEQ ID NO: 148996 - RNA, 16 nt, Human herpesvirus 5
agugcggcgugcugca

SEQ ID NO: 148997 - RNA, 18 nt, Human herpesvirus 5
aguggacaugguuaucau

SEQ ID NO: 148998 - RNA, 14 nt, Human herpesvirus 5
aguuacgaaucuca

SEQ ID NO: 148999 - RNA, 15 nt, Human herpesvirus 5
aguuaucagcaauaa

SEQ ID NO: 149000 - RNA, 15 nt, Human herpesvirus 5
auaaacacgacaucc

SEQ ID NO: 149001 - RNA, 13 nt, Human herpesvirus 5
auaaccuaccugg

SEQ ID NO: 149002 - RNA, 17 nt, Human herpesvirus 5
auaauacacgugguuua

SEQ ID NO: 149003 - RNA, 13 nt, Human herpesvirus 5
auaacaacacauc

SEQ ID NO: 149004 - RNA, 18 nt, Human herpesvirus 5
auaacaaacaaugacacu

SEQ ID NO: 149005 - RNA, 19 nt, Human herpesvirus 5
aguucaccguauggcugcg

SEQ ID NO: 149006 - RNA, 14 nt, Human herpesvirus 5
aguucaaaguccgu

SEQ ID NO: 149007 - RNA, 23 nt, Human herpesvirus 5
aguucaaaguccgucaugcuggc

SEQ ID NO: 149008 - RNA, 18 nt, Human herpesvirus 5
aguugauacgcuagcaga

SEQ ID NO: 149009 - RNA, 19 nt, Human herpesvirus 5
aguugauacgcuagcagaa

SEQ ID NO: 149010 - RNA, 19 nt, Human herpesvirus 5
aguugcaccucgaccuccg

SEQ ID NO: 149011 - RNA, 12 nt, Human herpesvirus 5
aguuuagugcua

SEQ ID NO: 149012 - RNA, 12 nt, Human herpesvirus 5
aguuguugcaga

SEQ ID NO: 149013 - RNA, 13 nt, Human herpesvirus 5
auaaaagcacuuc

SEQ ID NO: 149014 - RNA, 23 nt, Human herpesvirus 5
aguuggacuacgaagauaucgau

SEQ ID NO: 149015 - RNA, 15 nt, Human herpesvirus 5
aguuggccaccaaga

SEQ ID NO: 149016 - RNA, 14 nt, Human herpesvirus 5
agcagcucuuccaa

SEQ ID NO: 149017 - RNA, 15 nt, Human herpesvirus 5
agcagcuggugcauc

SEQ ID NO: 149018 - RNA, 13 nt, Human herpesvirus 5
agcaguauucuau

SEQ ID NO: 149019 - RNA, 22 nt, Human herpesvirus 5
agcaggcuuugacggugaugcg

SEQ ID NO: 149020 - RNA, 15 nt, Human herpesvirus 5
agcaggguaaaaacc

SEQ ID NO: 149021 - RNA, 14 nt, Human herpesvirus 5
agcaucgcaacaac

SEQ ID NO: 149022 - RNA, 23 nt, Human herpesvirus 5
agcauacggggaggagacacaga

SEQ ID NO: 149023 - RNA, 17 nt, Human herpesvirus 5
agcuggggaaguacaau

SEQ ID NO: 149024 - RNA, 12 nt, Human herpesvirus 5
agcuggcuuuca

SEQ ID NO: 149025 - RNA, 22 nt, Human herpesvirus 5
agcugcucauggaggucuauca

SEQ ID NO: 149026 - RNA, 15 nt, Human herpesvirus 5
agcugguaccugaaa

SEQ ID NO: 149027 - RNA, 22 nt, Human herpesvirus 5
aggaagcggcgguagaaacguc

SEQ ID NO: 149028 - RNA, 15 nt, Human herpesvirus 5
aggaaagacaaccaa

SEQ ID NO: 149029 - RNA, 13 nt, Human herpesvirus 5
agcuugauggugu

SEQ ID NO: 149030 - RNA, 12 nt, Human herpesvirus 5
agcuuuagccag

SEQ ID NO: 149031 - RNA, 20 nt, Human herpesvirus 5
agcuucucucuggucuuccc

SEQ ID NO: 149032 - RNA, 16 nt, Human herpesvirus 5
aggcucgucgugggcu

SEQ ID NO: 149033 - RNA, 18 nt, Human herpesvirus 5
aggcucugcgccgucucu

SEQ ID NO: 149034 - RNA, 17 nt, Human herpesvirus 5
aggcuacgguggcgcga

SEQ ID NO: 149035 - RNA, 21 nt, Human herpesvirus 5
aggggcguguguuugacauuu

SEQ ID NO: 149036 - RNA, 20 nt, Human herpesvirus 5
agggggcuuuccaaagccga

SEQ ID NO: 149037 - RNA, 16 nt, Human herpesvirus 5
aggcggcugaucugca

SEQ ID NO: 149038 - RNA, 22 nt, Human herpesvirus 5
aggcggaaaaagaagcgugcua

SEQ ID NO: 149039 - RNA, 16 nt, Human herpesvirus 5
aggaugcgcguacuca

SEQ ID NO: 149040 - RNA, 23 nt, Human herpesvirus 5
aggaucgcaauagaauacugcua

SEQ ID NO: 149041 - RNA, 18 nt, Human herpesvirus 5
aggugcugcauguguauu

SEQ ID NO: 149042 - RNA, 21 nt, Human herpesvirus 5
aggugcuggcggccguggccu

SEQ ID NO: 149043 - RNA, 23 nt, Human herpesvirus 5
aggugucauguucgacggucaga

SEQ ID NO: 149044 - RNA, 21 nt, Human herpesvirus 5
agguuuugcucuaaaaacacc

SEQ ID NO: 149045 - RNA, 18 nt, Human herpesvirus 5
aggugaguucaaugugcu

SEQ ID NO: 149046 - RNA, 14 nt, Human herpesvirus 5
aggugauccaguua

SEQ ID NO: 149047 - RNA, 17 nt, Human herpesvirus 5
aggguggugacuuacau

SEQ ID NO: 149048 - RNA, 20 nt, Human herpesvirus 5
aggguggugacuuacaucuc

SEQ ID NO: 149049 - RNA, 21 nt, Human herpesvirus 5
aggguggugacuuacaucuca

SEQ ID NO: 149050 - RNA, 19 nt, Human herpesvirus 5
auuuguaaaaaggcaauua

SEQ ID NO: 149051 - RNA, 16 nt, Human herpesvirus 5
auuuguuaugauguca

SEQ ID NO: 149052 - RNA, 13 nt, Human herpesvirus 5
auuguuaccagaa

SEQ ID NO: 149053 - RNA, 17 nt, Human herpesvirus 5
auuuacgagguacuguu

SEQ ID NO: 149054 - RNA, 18 nt, Human herpesvirus 5
auuuaucaauacaaugac

SEQ ID NO: 149055 - RNA, 16 nt, Human herpesvirus 5
auugagaaagcuaaca

SEQ ID NO: 149056 - RNA, 15 nt, Human herpesvirus 5
auugagcaacaaaca

SEQ ID NO: 149057 - RNA, 21 nt, Human herpesvirus 5
auucugcguaacgguggaaua

SEQ ID NO: 149058 - RNA, 20 nt, Human herpesvirus 5
auucuggaauccaucaucua

SEQ ID NO: 149059 - RNA, 14 nt, Human herpesvirus 5
auucuggcaagagu

SEQ ID NO: 149060 - RNA, 20 nt, Human herpesvirus 5
auucuggcaagaguucaaag

SEQ ID NO: 149061 - RNA, 21 nt, Human herpesvirus 5
auucgauacgcugcuuuuggc

SEQ ID NO: 149062 - RNA, 21 nt, Human herpesvirus 5
auugugucgaguaucuacuca

SEQ ID NO: 149063 - RNA, 16 nt, Human herpesvirus 5
auucaaucauuacuaa

SEQ ID NO: 149064 - RNA, 20 nt, Human herpesvirus 5
auucaucgugcaguaccuca

SEQ ID NO: 149065 - RNA, 21 nt, Human herpesvirus 5
auucagaaaacgggauaugaa

SEQ ID NO: 149066 - RNA, 19 nt, Human herpesvirus 5
auuccccgugacaguauua

SEQ ID NO: 149067 - RNA, 17 nt, Human herpesvirus 5
auucccaucucaacguc

SEQ ID NO: 149068 - RNA, 16 nt, Human herpesvirus 5
auuccgaaaccuguau

SEQ ID NO: 149069 - RNA, 13 nt, Human herpesvirus 5
auggacucuugua

SEQ ID NO: 149070 - RNA, 14 nt, Human herpesvirus 5
auggacugucugca

SEQ ID NO: 149071 - RNA, 20 nt, Human herpesvirus 5
augcuguaugggcaggcgua

SEQ ID NO: 149072 - RNA, 21 nt, Human herpesvirus 5
augcuucuuugguaucuacau

SEQ ID NO: 149073 - RNA, 21 nt, Human herpesvirus 5
auggacauaaaaaagagacac

SEQ ID NO: 149074 - RNA, 19 nt, Human herpesvirus 5
caacuuuguggggcugcuc

SEQ ID NO: 149075 - RNA, 13 nt, Human herpesvirus 5
caacgucacuucu

SEQ ID NO: 149076 - RNA, 15 nt, Human herpesvirus 5
caacgucaugcauuc

SEQ ID NO: 149077 - RNA, 15 nt, Human herpesvirus 5
caacgucuacaucuc

SEQ ID NO: 149078 - RNA, 14 nt, Human herpesvirus 5
caacgugcugcuga

SEQ ID NO: 149079 - RNA, 17 nt, Human herpesvirus 5
caaccgcauccugccca

SEQ ID NO: 149080 - RNA, 19 nt, Human herpesvirus 5
caaccguauauucuacauu

SEQ ID NO: 149081 - RNA, 13 nt, Human herpesvirus 5
caaccugcugcac

SEQ ID NO: 149082 - RNA, 10 nt, Human herpesvirus 5
caacagcagc

SEQ ID NO: 149083 - RNA, 14 nt, Human herpesvirus 5
caacagccuguggc

SEQ ID NO: 149084 - RNA, 21 nt, Human herpesvirus 5
caacaguacuacuaccaauac

SEQ ID NO: 149085 - RNA, 15 nt, Human herpesvirus 5
caacaguucuaucaa

SEQ ID NO: 149086 - RNA, 20 nt, Human herpesvirus 5
caacggcuggaaauggacuu

SEQ ID NO: 149087 - RNA, 19 nt, Human herpesvirus 5
caacggcuggaggacuuuu

SEQ ID NO: 149088 - RNA, 22 nt, Human herpesvirus 5
caaccuguggaauacccagcug

SEQ ID NO: 149089 - RNA, 18 nt, Human herpesvirus 5
caaaguuauccuguugaa

SEQ ID NO: 149090 - RNA, 14 nt, Human herpesvirus 5
caaaguacuugucg

SEQ ID NO: 149091 - RNA, 17 nt, Human herpesvirus 5
caaauaaagaugauaca

SEQ ID NO: 149092 - RNA, 18 nt, Human herpesvirus 5
caaauaccaacacuauau

SEQ ID NO: 149093 - RNA, 14 nt, Human herpesvirus 5
caaauauauggagu

SEQ ID NO: 149094 - RNA, 14 nt, Human herpesvirus 5
caacagcaacaaca

SEQ ID NO: 149095 - RNA, 14 nt, Human herpesvirus 5
caacagaagcugcg

SEQ ID NO: 149096 - RNA, 20 nt, Human herpesvirus 5
caacacguaacgucuucuga

SEQ ID NO: 149097 - RNA, 21 nt, Human herpesvirus 5
caacacguagugagcuuugac

SEQ ID NO: 149098 - RNA, 13 nt, Human herpesvirus 5
caaaugcaugcaa

SEQ ID NO: 149099 - RNA, 16 nt, Human herpesvirus 5
caaaugaggcacauga

SEQ ID NO: 149100 - RNA, 15 nt, Human herpesvirus 5
auuuucaugaaucca

SEQ ID NO: 149101 - RNA, 18 nt, Human herpesvirus 5
auuuucaugaauccacag

SEQ ID NO: 149102 - RNA, 19 nt, Human herpesvirus 5
auuuuccauaaaucuacac

SEQ ID NO: 149103 - RNA, 20 nt, Human herpesvirus 5
auuuuuuguaacacuacagc

SEQ ID NO: 149104 - RNA, 22 nt, Human herpesvirus 5
caaacacuaccgucgccaccac

SEQ ID NO: 149105 - RNA, 12 nt, Human herpesvirus 5
caaaaauacuga

SEQ ID NO: 149106 - RNA, 13 nt, Human herpesvirus 5
caaaaacuguaag

SEQ ID NO: 149107 - RNA, 19 nt, Human herpesvirus 5
caaaaagcgccgugcucuu

SEQ ID NO: 149108 - RNA, 15 nt, Human herpesvirus 5
caaaaaagaaaaaga

SEQ ID NO: 149109 - RNA, 13 nt, Human herpesvirus 5
caaagagccaugu

SEQ ID NO: 149110 - RNA, 16 nt, Human herpesvirus 5
caaagcuggacaguga

SEQ ID NO: 149111 - RNA, 23 nt, Human herpesvirus 5
caaagcuggacagugagagcuca

SEQ ID NO: 149112 - RNA, 20 nt, Human herpesvirus 5
caaagcggucucacugugac

SEQ ID NO: 149113 - RNA, 17 nt, Human herpesvirus 5
caaagcacaauacacau

SEQ ID NO: 149114 - RNA, 10 nt, Human herpesvirus 5
caaacaucua

SEQ ID NO: 149115 - RNA, 19 nt, Human herpesvirus 5
caaaccggacgcugccuca

SEQ ID NO: 149116 - RNA, 23 nt, Human herpesvirus 5
caaacccggucagucuauucuca

SEQ ID NO: 149117 - RNA, 21 nt, Human herpesvirus 5
caaacccaccggcggggaaaa

SEQ ID NO: 149118 - RNA, 13 nt, Human herpesvirus 5
caaacugaccaag

SEQ ID NO: 149119 - RNA, 15 nt, Human herpesvirus 5
caaacugaccaagcu

SEQ ID NO: 149120 - RNA, 20 nt, Human herpesvirus 5
caaacugcgacacgugcuuu

SEQ ID NO: 149121 - RNA, 21 nt, Human herpesvirus 5
caaacuucucauuuauugugu

SEQ ID NO: 149122 - RNA, 18 nt, Human herpesvirus 5
cacuguuaaaaaaaccac

SEQ ID NO: 149123 - RNA, 19 nt, Human herpesvirus 5
cacuguuugagcaugacug

SEQ ID NO: 149124 - RNA, 15 nt, Human herpesvirus 5
cacucaguacuuugg

SEQ ID NO: 149125 - RNA, 14 nt, Human herpesvirus 5
cacuucaaacauca

SEQ ID NO: 149126 - RNA, 21 nt, Human herpesvirus 5
cacuugcgcgguuauggcucc

SEQ ID NO: 149127 - RNA, 21 nt, Human herpesvirus 5
cacuucaaccacgaguaacac

SEQ ID NO: 149128 - RNA, 17 nt, Human herpesvirus 5
cacuuuuuuaccuauca

SEQ ID NO: 149129 - RNA, 21 nt, Human herpesvirus 5
cagaaaaaauuauacccacca

SEQ ID NO: 149130 - RNA, 17 nt, Human herpesvirus 5
cacuuuacauaaaacca

SEQ ID NO: 149131 - RNA, 22 nt, Human herpesvirus 5
cagagccaccaggugccggcga

SEQ ID NO: 149132 - RNA, 21 nt, Human herpesvirus 5
cagagccacguugagauucag

SEQ ID NO: 149133 - RNA, 20 nt, Human herpesvirus 5
cagagaggacgagcguccac

SEQ ID NO: 149134 - RNA, 23 nt, Human herpesvirus 5
cagagacaccaauugcuuuaaua

SEQ ID NO: 149135 - RNA, 18 nt, Human herpesvirus 5
cagagucggcuguccuug

SEQ ID NO: 149136 - RNA, 16 nt, Human herpesvirus 5
cagaucacuaucuuca

SEQ ID NO: 149137 - RNA, 17 nt, Human herpesvirus 5
cagaucacuaucuucaa

SEQ ID NO: 149138 - RNA, 13 nt, Human herpesvirus 5
cagauauccacaa

SEQ ID NO: 149139 - RNA, 20 nt, Human herpesvirus 5
cagauacaacgucaugcauu

SEQ ID NO: 149140 - RNA, 21 nt, Human herpesvirus 5
cagauacgcguuggccaguau

SEQ ID NO: 149141 - RNA, 19 nt, Human herpesvirus 5
cagcaaugucguaguacaa

SEQ ID NO: 149142 - RNA, 16 nt, Human herpesvirus 5
cagcaauagcagccga

SEQ ID NO: 149143 - RNA, 22 nt, Human herpesvirus 5
cagcaauaucggcguucugcuc

SEQ ID NO: 149144 - RNA, 15 nt, Human herpesvirus 5
cagaugcucccggcg

SEQ ID NO: 149145 - RNA, 20 nt, Human herpesvirus 5
cagauguaaauaaaauguuu

SEQ ID NO: 149146 - RNA, 14 nt, Human herpesvirus 5
cagcacaccugccu

SEQ ID NO: 149147 - RNA, 23 nt, Human herpesvirus 5
cagcacaccugccucgacaucuc

SEQ ID NO: 149148 - RNA, 15 nt, Human herpesvirus 5
cagcaccaugugcaa

SEQ ID NO: 149149 - RNA, 16 nt, Human herpesvirus 5
cagcaccaugugcaaa

SEQ ID NO: 149150 - RNA, 18 nt, Human herpesvirus 5
cagcacguuaguuacagc

SEQ ID NO: 149151 - RNA, 22 nt, Human herpesvirus 5
cagcaggcuuugacggugaugc

SEQ ID NO: 149152 - RNA, 18 nt, Human herpesvirus 5
cagccgcgcuugucgcca

SEQ ID NO: 149153 - RNA, 14 nt, Human herpesvirus 5
cagccucuguguuc

SEQ ID NO: 149154 - RNA, 17 nt, Human herpesvirus 5
cagcauucaccuccagc

SEQ ID NO: 149155 - RNA, 19 nt, Human herpesvirus 5
cagcgccaccauagccacu

SEQ ID NO: 149156 - RNA, 15 nt, Human herpesvirus 5
cagcgcaccaugaga

SEQ ID NO: 149157 - RNA, 17 nt, Human herpesvirus 5
cagcgacgacccacgac

SEQ ID NO: 149158 - RNA, 22 nt, Human herpesvirus 5
cagcgacuucgguuccaucuca

SEQ ID NO: 149159 - RNA, 23 nt, Human herpesvirus 5
cagcgacuucgguuccaucucag

SEQ ID NO: 149160 - RNA, 19 nt, Human herpesvirus 5
cagcgccgccgcucauaau

SEQ ID NO: 149161 - RNA, 18 nt, Human herpesvirus 5
cagcggcggcggugguga

SEQ ID NO: 149162 - RNA, 23 nt, Human herpesvirus 5
cagcggcguguacagcuaccuca

SEQ ID NO: 149163 - RNA, 22 nt, Human herpesvirus 5
cagcucuuaaaggacgugaugc

SEQ ID NO: 149164 - RNA, 22 nt, Human herpesvirus 5
cagcucguguaucuuaugccag

SEQ ID NO: 149165 - RNA, 17 nt, Human herpesvirus 5
cagcguauuuucuacuc

SEQ ID NO: 149166 - RNA, 18 nt, Human herpesvirus 5
cagcuccacgcuauacau

SEQ ID NO: 149167 - RNA, 21 nt, Human herpesvirus 5
cagcuucuuucucaccgugcu

SEQ ID NO: 149168 - RNA, 14 nt, Human herpesvirus 5
cagcuggugcauca

SEQ ID NO: 149169 - RNA, 16 nt, Human herpesvirus 5
cagcugcgaucuguga

SEQ ID NO: 149170 - RNA, 14 nt, Human herpesvirus 5
caccgugaaaguga

SEQ ID NO: 149171 - RNA, 13 nt, Human herpesvirus 5
cacgacaucuucc

SEQ ID NO: 149172 - RNA, 14 nt, Human herpesvirus 5
cacgacgcaugcau

SEQ ID NO: 149173 - RNA, 14 nt, Human herpesvirus 5
cacgagccagacga

SEQ ID NO: 149174 - RNA, 18 nt, Human herpesvirus 5
caccgguaccacuacuac

SEQ ID NO: 149175 - RNA, 19 nt, Human herpesvirus 5
caccgguaccacuacuacc

SEQ ID NO: 149176 - RNA, 13 nt, Human herpesvirus 5
caccguaccugca

SEQ ID NO: 149177 - RNA, 16 nt, Human herpesvirus 5
caccggagaccgucca

SEQ ID NO: 149178 - RNA, 20 nt, Human herpesvirus 5
caccgcuggagcuaucugug

SEQ ID NO: 149179 - RNA, 22 nt, Human herpesvirus 5
cacccugaguuccgucagcaca

SEQ ID NO: 149180 - RNA, 16 nt, Human herpesvirus 5
caccgacgugcuuaau

SEQ ID NO: 149181 - RNA, 22 nt, Human herpesvirus 5
caccgacgugcuuaaucaguca

SEQ ID NO: 149182 - RNA, 13 nt, Human herpesvirus 5
caccgaagccgua

SEQ ID NO: 149183 - RNA, 18 nt, Human herpesvirus 5
caccaccgguaccacuac

SEQ ID NO: 149184 - RNA, 14 nt, Human herpesvirus 5
caccaacugaaaua

SEQ ID NO: 149185 - RNA, 22 nt, Human herpesvirus 5
cacauugaacgcgguacaugug

SEQ ID NO: 149186 - RNA, 23 nt, Human herpesvirus 5
cacauugaacgcgguacaugugc

SEQ ID NO: 149187 - RNA, 16 nt, Human herpesvirus 5
caccaaaaauccagac

SEQ ID NO: 149188 - RNA, 15 nt, Human herpesvirus 5
caccaaacaacacca

SEQ ID NO: 149189 - RNA, 19 nt, Human herpesvirus 5
cacgcaggugaggcucucg

SEQ ID NO: 149190 - RNA, 17 nt, Human herpesvirus 5
cacgccggcgguuacag

SEQ ID NO: 149191 - RNA, 20 nt, Human herpesvirus 5
cacgcagaacgaucccuuua

SEQ ID NO: 149192 - RNA, 14 nt, Human herpesvirus 5
cacgcacauaugua

SEQ ID NO: 149193 - RNA, 15 nt, Human herpesvirus 5
cacgcguguucucau

SEQ ID NO: 149194 - RNA, 20 nt, Human herpesvirus 5
cacgcguuauacgccgagug

SEQ ID NO: 149195 - RNA, 15 nt, Human herpesvirus 5
cacggagaaacaccc

SEQ ID NO: 149196 - RNA, 15 nt, Human herpesvirus 5
cacggcaacaugugu

SEQ ID NO: 149197 - RNA, 19 nt, Human herpesvirus 5
cacggcggcguguguuuua

SEQ ID NO: 149198 - RNA, 19 nt, Human herpesvirus 5
cacggcuaagaggauacau

SEQ ID NO: 149199 - RNA, 15 nt, Human herpesvirus 5
cacgcaccuguguga

SEQ ID NO: 149200 - RNA, 13 nt, Human herpesvirus 5
cacgccauaacaa

SEQ ID NO: 149201 - RNA, 19 nt, Human herpesvirus 5
cacggaccgcaacgugcug

SEQ ID NO: 149202 - RNA, 23 nt, Human herpesvirus 5
cacuauagcgggauuuacuacuu

SEQ ID NO: 149203 - RNA, 13 nt, Human herpesvirus 5
cacuaucuucaac

SEQ ID NO: 149204 - RNA, 17 nt, Human herpesvirus 5
cacuaucuucaaccuca

SEQ ID NO: 149205 - RNA, 15 nt, Human herpesvirus 5
cacggugugauggua

SEQ ID NO: 149206 - RNA, 19 nt, Human herpesvirus 5
cacggucgggcacucggcu

SEQ ID NO: 149207 - RNA, 13 nt, Human herpesvirus 5
cacggggauuuuc

SEQ ID NO: 149208 - RNA, 22 nt, Human herpesvirus 5
cacgguacaaaccucuaccucg

SEQ ID NO: 149209 - RNA, 18 nt, Human herpesvirus 5
cacguacguuuuccaaaa

SEQ ID NO: 149210 - RNA, 20 nt, Human herpesvirus 5
cacguacguuuuccaaaacg

SEQ ID NO: 149211 - RNA, 17 nt, Human herpesvirus 5
cacgucacuacucuggg

SEQ ID NO: 149212 - RNA, 18 nt, Human herpesvirus 5
cacgucacuauuguauac

SEQ ID NO: 149213 - RNA, 13 nt, Human herpesvirus 5
cacuacuaccucc

SEQ ID NO: 149214 - RNA, 23 nt, Human herpesvirus 5
cacgucacacguuacaucauaca

SEQ ID NO: 149215 - RNA, 24 nt, Human herpesvirus 5
cacgucacacguuacaucauacaa

SEQ ID NO: 149216 - RNA, 13 nt, Human herpesvirus 5
cacaacgacguuu

SEQ ID NO: 149217 - RNA, 19 nt, Human herpesvirus 5
cacaauacgauaauugcua

SEQ ID NO: 149218 - RNA, 12 nt, Human herpesvirus 5
cacauuacuaca

SEQ ID NO: 149219 - RNA, 17 nt, Human herpesvirus 5
cacauggccaaugcaua

SEQ ID NO: 149220 - RNA, 16 nt, Human herpesvirus 5
cacaugcacaauacga

SEQ ID NO: 149221 - RNA, 21 nt, Human herpesvirus 5
cacaugcccuguaagauauaa

SEQ ID NO: 149222 - RNA, 18 nt, Human herpesvirus 5
cacacaccgucagggaac

SEQ ID NO: 149223 - RNA, 14 nt, Human herpesvirus 5
cacacagacuuuau

SEQ ID NO: 149224 - RNA, 16 nt, Human herpesvirus 5
cacacagauauccaca

SEQ ID NO: 149225 - RNA, 16 nt, Human herpesvirus 5
cacaauggaagccaua

SEQ ID NO: 149226 - RNA, 16 nt, Human herpesvirus 5
caagcuguggcugcac

SEQ ID NO: 149227 - RNA, 20 nt, Human herpesvirus 5
caagcgguacggacuacaua

SEQ ID NO: 149228 - RNA, 16 nt, Human herpesvirus 5
caagcgccgucacuuc

SEQ ID NO: 149229 - RNA, 15 nt, Human herpesvirus 5
caaggacaucgagga

SEQ ID NO: 149230 - RNA, 19 nt, Human herpesvirus 5
caagggggugggccuauag

SEQ ID NO: 149231 - RNA, 20 nt, Human herpesvirus 5
caagggucacggugccaugg

SEQ ID NO: 149232 - RNA, 23 nt, Human herpesvirus 5
caauugcaugucgcccagaaaga

SEQ ID NO: 149233 - RNA, 17 nt, Human herpesvirus 5
caagguacggacucuaa

SEQ ID NO: 149234 - RNA, 17 nt, Human herpesvirus 5
caagguagucaacauaa

SEQ ID NO: 149235 - RNA, 21 nt, Human herpesvirus 5
accagcgccaccauagccacu

SEQ ID NO: 149236 - RNA, 21 nt, Human herpesvirus 5
accaggcucugcgccgucucu

SEQ ID NO: 149237 - RNA, 15 nt, Human herpesvirus 5
accagcccagggauc

SEQ ID NO: 149238 - RNA, 17 nt, Human herpesvirus 5
accagauacaacgucau

SEQ ID NO: 149239 - RNA, 23 nt, Human herpesvirus 5
accagauacaacgucaugcauuc

SEQ ID NO: 149240 - RNA, 19 nt, Human herpesvirus 5
accagcaaggucaacuaca

SEQ ID NO: 149241 - RNA, 20 nt, Human herpesvirus 5
acccaacacugcuucuacca

SEQ ID NO: 149242 - RNA, 20 nt, Human herpesvirus 5
accauuuccaugugcagcug

SEQ ID NO: 149243 - RNA, 22 nt, Human herpesvirus 5
accauugagaaagcuaacauuc

SEQ ID NO: 149244 - RNA, 12 nt, Human herpesvirus 5
accaguaccacc

SEQ ID NO: 149245 - RNA, 16 nt, Human herpesvirus 5
accaaggcgagccacu

SEQ ID NO: 149246 - RNA, 17 nt, Human herpesvirus 5
accaaggcgagccacuc

SEQ ID NO: 149247 - RNA, 14 nt, Human herpesvirus 5
accaagcaugccac

SEQ ID NO: 149248 - RNA, 23 nt, Human herpesvirus 5
accaauacugcauccaucacauc

SEQ ID NO: 149249 - RNA, 20 nt, Human herpesvirus 5
accagacuuggagacaugga

SEQ ID NO: 149250 - RNA, 18 nt, Human herpesvirus 5
accagacuuuuugcuuua

SEQ ID NO: 149251 - RNA, 13 nt, Human herpesvirus 5
accaaagacugug

SEQ ID NO: 149252 - RNA, 14 nt, Human herpesvirus 5
accaaacaacacca

SEQ ID NO: 149253 - RNA, 20 nt, Human herpesvirus 5
acaugggggggaacaucguc

SEQ ID NO: 149254 - RNA, 19 nt, Human herpesvirus 5
acaugcuauaagacagccu

SEQ ID NO: 149255 - RNA, 15 nt, Human herpesvirus 5
acauggagacaguuu

SEQ ID NO: 149256 - RNA, 22 nt, Human herpesvirus 5
acaugaugaaugucaucaucac

SEQ ID NO: 149257 - RNA, 19 nt, Human herpesvirus 5
acaugcccuguaagauaua

SEQ ID NO: 149258 - RNA, 20 nt, Human herpesvirus 5
acaugcccuguaagauauaa

SEQ ID NO: 149259 - RNA, 22 nt, Human herpesvirus 5
acagucgacgggugguaccugc

SEQ ID NO: 149260 - RNA, 15 nt, Human herpesvirus 5
acagucuaucccuau

SEQ ID NO: 149261 - RNA, 23 nt, Human herpesvirus 5
acaguugauaacaaacaaugaca

SEQ ID NO: 149262 - RNA, 14 nt, Human herpesvirus 5
acagcuaccucaug

SEQ ID NO: 149263 - RNA, 22 nt, Human herpesvirus 5
acagcucaugccucuacaucac

SEQ ID NO: 149264 - RNA, 21 nt, Human herpesvirus 5
acagcuccugaaugagcucuu

SEQ ID NO: 149265 - RNA, 19 nt, Human herpesvirus 5
acagcggcggcggugguga

SEQ ID NO: 149266 - RNA, 17 nt, Human herpesvirus 5
acagcguccacaguuuc

SEQ ID NO: 149267 - RNA, 21 nt, Human herpesvirus 5
acaucacaguucaccaccuug

SEQ ID NO: 149268 - RNA, 20 nt, Human herpesvirus 5
acaucaccaacguuaccucc

SEQ ID NO: 149269 - RNA, 18 nt, Human herpesvirus 5
acaucacccaacacugcu

SEQ ID NO: 149270 - RNA, 23 nt, Human herpesvirus 5
acaucaagcuggcacauggccaa

SEQ ID NO: 149271 - RNA, 16 nt, Human herpesvirus 5
acaucauaaaaaccau

SEQ ID NO: 149272 - RNA, 18 nt, Human herpesvirus 5
acaguuaucagcaauaaa

SEQ ID NO: 149273 - RNA, 24 nt, Human herpesvirus 5
acaucaacgacgccacacacaucu

SEQ ID NO: 149274 - RNA, 19 nt, Human herpesvirus 5
acauauguuuugacugcaa

SEQ ID NO: 149275 - RNA, 17 nt, Human herpesvirus 5
acauaugcgaugugcaa

SEQ ID NO: 149276 - RNA, 23 nt, Human herpesvirus 5
acauauggacuggagagacuuuc

SEQ ID NO: 149277 - RNA, 12 nt, Human herpesvirus 5
acauauguagca

SEQ ID NO: 149278 - RNA, 17 nt, Human herpesvirus 5
acauauguagcacucaa

SEQ ID NO: 149279 - RNA, 23 nt, Human herpesvirus 5
acagcccaaggggaaaaggaaua

SEQ ID NO: 149280 - RNA, 13 nt, Human herpesvirus 5
acagccacaucaa

SEQ ID NO: 149281 - RNA, 14 nt, Human herpesvirus 5
acagccacaucaac

SEQ ID NO: 149282 - RNA, 18 nt, Human herpesvirus 5
acagcaugaacaccagau

SEQ ID NO: 149283 - RNA, 22 nt, Human herpesvirus 5
acagcacauuagacacacgggg

SEQ ID NO: 149284 - RNA, 14 nt, Human herpesvirus 5
acagccuuacagcu

SEQ ID NO: 149285 - RNA, 22 nt, Human herpesvirus 5
acagccuucccuuguaagacag

SEQ ID NO: 149286 - RNA, 14 nt, Human herpesvirus 5
acagcgacucucaa

SEQ ID NO: 149287 - RNA, 17 nt, Human herpesvirus 5
acacaucugucaccuca

SEQ ID NO: 149288 - RNA, 21 nt, Human herpesvirus 5
acacauaucgagguacauguc

SEQ ID NO: 149289 - RNA, 21 nt, Human herpesvirus 5
acacaaucccguuggacaaua

SEQ ID NO: 149290 - RNA, 17 nt, Human herpesvirus 5
acacagcacgcugauaa

SEQ ID NO: 149291 - RNA, 14 nt, Human herpesvirus 5
acacagauauccac

SEQ ID NO: 149292 - RNA, 23 nt, Human herpesvirus 5
acccacguaguuccccuacguga

SEQ ID NO: 149293 - RNA, 15 nt, Human herpesvirus 5
accgaggagauccag

SEQ ID NO: 149294 - RNA, 15 nt, Human herpesvirus 5
accgcaguugcugcc

SEQ ID NO: 149295 - RNA, 14 nt, Human herpesvirus 5
accgcaaaggccac

SEQ ID NO: 149296 - RNA, 14 nt, Human herpesvirus 5
accgcaacaacagc

SEQ ID NO: 149297 - RNA, 17 nt, Human herpesvirus 5
accgcaacaacagcagc

SEQ ID NO: 149298 - RNA, 16 nt, Human herpesvirus 5
accgcaacgugcugcu

SEQ ID NO: 149299 - RNA, 17 nt, Human herpesvirus 5
accgcaacgugcugcug

SEQ ID NO: 149300 - RNA, 20 nt, Human herpesvirus 5
accgcaacgugcugcugaug

SEQ ID NO: 149301 - RNA, 20 nt, Human herpesvirus 5
accggacgcugccucagucu

SEQ ID NO: 149302 - RNA, 20 nt, Human herpesvirus 5
accgucgaaaacaaccacac

SEQ ID NO: 149303 - RNA, 20 nt, Human herpesvirus 5
accgucgccgucacugccac

SEQ ID NO: 149304 - RNA, 12 nt, Human herpesvirus 5
accguaccugca

SEQ ID NO: 149305 - RNA, 17 nt, Human herpesvirus 5
accgguuggagcagcuc

SEQ ID NO: 149306 - RNA, 17 nt, Human herpesvirus 5
accuccuccucccucgc

SEQ ID NO: 149307 - RNA, 17 nt, Human herpesvirus 5
accucgaugaagccuau

SEQ ID NO: 149308 - RNA, 17 nt, Human herpesvirus 5
accuccccuaacgucac

SEQ ID NO: 149309 - RNA, 21 nt, Human herpesvirus 5
accuccccuaacgucacuuca

SEQ ID NO: 149310 - RNA, 22 nt, Human herpesvirus 5
accucguccgccuccacuuccg

SEQ ID NO: 149311 - RNA, 11 nt, Human herpesvirus 5
accgugucucc

SEQ ID NO: 149312 - RNA, 22 nt, Human herpesvirus 5
accgugucuccgugacgguacu

SEQ ID NO: 149313 - RNA, 18 nt, Human herpesvirus 5
accuugagcgacagcagc

SEQ ID NO: 149314 - RNA, 19 nt, Human herpesvirus 5
accuucccucuagagacag

SEQ ID NO: 149315 - RNA, 15 nt, Human herpesvirus 5
acgaaaacacauuau

SEQ ID NO: 149316 - RNA, 13 nt, Human herpesvirus 5
acgaaacccgugu

SEQ ID NO: 149317 - RNA, 22 nt, Human herpesvirus 5
acgaaacccguguaaugcguac

SEQ ID NO: 149318 - RNA, 15 nt, Human herpesvirus 5
acgaaagacaaugaa

SEQ ID NO: 149319 - RNA, 15 nt, Human herpesvirus 5
acgcacgacaugaca

SEQ ID NO: 149320 - RNA, 15 nt, Human herpesvirus 5
acgcaaccacggugg

SEQ ID NO: 149321 - RNA, 18 nt, Human herpesvirus 5
acgaugucgaucuccauc

SEQ ID NO: 149322 - RNA, 13 nt, Human herpesvirus 5
acgaagaggacac

SEQ ID NO: 149323 - RNA, 13 nt, Human herpesvirus 5
acgagguacuguu

SEQ ID NO: 149324 - RNA, 22 nt, Human herpesvirus 5
acgaguaacaccgucaccacuc

SEQ ID NO: 149325 - RNA, 15 nt, Human herpesvirus 5
acgauagucaucuca

SEQ ID NO: 149326 - RNA, 22 nt, Human herpesvirus 5
acgauauaaagaggcacggugu

SEQ ID NO: 149327 - RNA, 10 nt, Human herpesvirus 5
acgcugcuuu

SEQ ID NO: 149328 - RNA, 16 nt, Human herpesvirus 5
acgcugccucagucuc

SEQ ID NO: 149329 - RNA, 18 nt, Human herpesvirus 5
acgcugcgucgcagucag

SEQ ID NO: 149330 - RNA, 19 nt, Human herpesvirus 5
acgcugucuugcuuaauga

SEQ ID NO: 149331 - RNA, 17 nt, Human herpesvirus 5
acgcucguucaauaauc

SEQ ID NO: 149332 - RNA, 14 nt, Human herpesvirus 5
acgcuaagagcuuu

SEQ ID NO: 149333 - RNA, 19 nt, Human herpesvirus 5
acgcgugcgggugcaugac

SEQ ID NO: 149334 - RNA, 18 nt, Human herpesvirus 5
acgguacaaaccucuacc

SEQ ID NO: 149335 - RNA, 13 nt, Human herpesvirus 5
acgguacuuaucg

SEQ ID NO: 149336 - RNA, 19 nt, Human herpesvirus 5
acgguauuuuuucugucgc

SEQ ID NO: 149337 - RNA, 19 nt, Human herpesvirus 5
acggggauuuucgaugaua

SEQ ID NO: 149338 - RNA, 17 nt, Human herpesvirus 5
acggugcuuuucaucua

SEQ ID NO: 149339 - RNA, 12 nt, Human herpesvirus 5
acgguggaauaa

SEQ ID NO: 149340 - RNA, 21 nt, Human herpesvirus 5
acgguggcucgauacacugga

SEQ ID NO: 149341 - RNA, 19 nt, Human herpesvirus 5
acggugugaugguacuaua

SEQ ID NO: 149342 - RNA, 18 nt, Human herpesvirus 5
acggugauucuauuacac

SEQ ID NO: 149343 - RNA, 18 nt, Human herpesvirus 5
acggucauguuucucacg

SEQ ID NO: 149344 - RNA, 16 nt, Human herpesvirus 5
acguaauaucaucugc

SEQ ID NO: 149345 - RNA, 19 nt, Human herpesvirus 5
acguagaaaaguaacacac

SEQ ID NO: 149346 - RNA, 12 nt, Human herpesvirus 5
acggagugguga

SEQ ID NO: 149347 - RNA, 21 nt, Human herpesvirus 5
acggcaacgauagucaucuca

SEQ ID NO: 149348 - RNA, 12 nt, Human herpesvirus 5
acggacaccucu

SEQ ID NO: 149349 - RNA, 12 nt, Human herpesvirus 5
acggaccgugug

SEQ ID NO: 149350 - RNA, 20 nt, Human herpesvirus 5
acggaaccugagaacaugug

SEQ ID NO: 149351 - RNA, 22 nt, Human herpesvirus 5
acggcgugacaauaaacaacau

SEQ ID NO: 149352 - RNA, 16 nt, Human herpesvirus 5
acggcgugacacagca

SEQ ID NO: 149353 - RNA, 16 nt, Human herpesvirus 5
acgggacuuacaucug

SEQ ID NO: 149354 - RNA, 17 nt, Human herpesvirus 5
acggcgaagucugcuac

SEQ ID NO: 149355 - RNA, 19 nt, Human herpesvirus 5
acggcgcucuuucagcgua

SEQ ID NO: 149356 - RNA, 21 nt, Human herpesvirus 5
acggccucugggcugagacag

SEQ ID NO: 149357 - RNA, 20 nt, Human herpesvirus 5
agauucaucgugcaguaccu

SEQ ID NO: 149358 - RNA, 12 nt, Human herpesvirus 5
agaugugguggg

SEQ ID NO: 149359 - RNA, 22 nt, Human herpesvirus 5
agauguggugggagucaacacu

SEQ ID NO: 149360 - RNA, 19 nt, Human herpesvirus 5
agaugggggagaugacacg

SEQ ID NO: 149361 - RNA, 21 nt, Human herpesvirus 5
agcaaaacgaccagaaucagc

SEQ ID NO: 149362 - RNA, 14 nt, Human herpesvirus 5
agcagaaaaccgcc

SEQ ID NO: 149363 - RNA, 19 nt, Human herpesvirus 5
agcacuucagaaucuauaa

SEQ ID NO: 149364 - RNA, 12 nt, Human herpesvirus 5
agcagagccacc

SEQ ID NO: 149365 - RNA, 19 nt, Human herpesvirus 5
agcagagggucguuguccu

SEQ ID NO: 149366 - RNA, 12 nt, Human herpesvirus 5
agcagcaauguc

SEQ ID NO: 149367 - RNA, 14 nt, Human herpesvirus 5
agcaccaugugcaa

SEQ ID NO: 149368 - RNA, 15 nt, Human herpesvirus 5
agcaccaugugcaaa

SEQ ID NO: 149369 - RNA, 12 nt, Human herpesvirus 5
agcaccgugaua

SEQ ID NO: 149370 - RNA, 14 nt, Human herpesvirus 5
agcacgaucuccuc

SEQ ID NO: 149371 - RNA, 14 nt, Human herpesvirus 5
agcacgggcugcug

SEQ ID NO: 149372 - RNA, 16 nt, Human herpesvirus 5
agcacgucagugguga

SEQ ID NO: 149373 - RNA, 12 nt, Human herpesvirus 5
agcacugcgcaa

SEQ ID NO: 149374 - RNA, 18 nt, Human herpesvirus 5
agcaagccagauacuaua

SEQ ID NO: 149375 - RNA, 14 nt, Human herpesvirus 5
agcaacuggcaaaa

SEQ ID NO: 149376 - RNA, 20 nt, Human herpesvirus 5
agcacaaaaauacugacaau

SEQ ID NO: 149377 - RNA, 23 nt, Human herpesvirus 5
agcacaaaaauacugacaaugga

SEQ ID NO: 149378 - RNA, 12 nt, Human herpesvirus 5
agcacaccugcc

SEQ ID NO: 149379 - RNA, 15 nt, Human herpesvirus 5
agagacuugugauau

SEQ ID NO: 149380 - RNA, 19 nt, Human herpesvirus 5
agagacaccaauugcuuua

SEQ ID NO: 149381 - RNA, 17 nt, Human herpesvirus 5
agacuuucaaugaugaa

SEQ ID NO: 149382 - RNA, 22 nt, Human herpesvirus 5
agacugguggugagaguagugg

SEQ ID NO: 149383 - RNA, 14 nt, Human herpesvirus 5
agacuaucuacaac

SEQ ID NO: 149384 - RNA, 21 nt, Human herpesvirus 5
agacuaucuacaacacuaccc

SEQ ID NO: 149385 - RNA, 15 nt, Human herpesvirus 5
agacucacgucacac

SEQ ID NO: 149386 - RNA, 13 nt, Human herpesvirus 5
agacucacuuuau

SEQ ID NO: 149387 - RNA, 13 nt, Human herpesvirus 5
agacugugguggg

SEQ ID NO: 149388 - RNA, 14 nt, Human herpesvirus 5
agaugcuagcaaua

SEQ ID NO: 149389 - RNA, 16 nt, Human herpesvirus 5
agaugccgauguguga

SEQ ID NO: 149390 - RNA, 19 nt, Human herpesvirus 5
agaugccgaugugugacua

SEQ ID NO: 149391 - RNA, 17 nt, Human herpesvirus 5
agaugcagacgguggug

SEQ ID NO: 149392 - RNA, 19 nt, Human herpesvirus 5
agauauaaagaaucuagga

SEQ ID NO: 149393 - RNA, 21 nt, Human herpesvirus 5
agauacucgauggggucgugg

SEQ ID NO: 149394 - RNA, 19 nt, Human herpesvirus 5
agauagacaucacaguuca

SEQ ID NO: 149395 - RNA, 22 nt, Human herpesvirus 5
agagguguagcgggcugucaca

SEQ ID NO: 149396 - RNA, 21 nt, Human herpesvirus 5
agaaacagcagcgagucuaga

SEQ ID NO: 149397 - RNA, 12 nt, Human herpesvirus 5
agaaacccucaa

SEQ ID NO: 149398 - RNA, 23 nt, Human herpesvirus 5
acuuucuaauugacauacgguaa

SEQ ID NO: 149399 - RNA, 19 nt, Human herpesvirus 5
acuuugauguaguugcaga

SEQ ID NO: 149400 - RNA, 17 nt, Human herpesvirus 5
acuuucgaccacaagcu

SEQ ID NO: 149401 - RNA, 17 nt, Human herpesvirus 5
acuuuacauaaaaccac

SEQ ID NO: 149402 - RNA, 18 nt, Human herpesvirus 5
acuuuacauaaaaccacc

SEQ ID NO: 149403 - RNA, 13 nt, Human herpesvirus 5
acuuuaauucuga

SEQ ID NO: 149404 - RNA, 23 nt, Human herpesvirus 5
acuuggaaucugguacuuaguca

SEQ ID NO: 149405 - RNA, 15 nt, Human herpesvirus 5
agaacuuugcugcua

SEQ ID NO: 149406 - RNA, 15 nt, Human herpesvirus 5
agacaauaaacagua

SEQ ID NO: 149407 - RNA, 13 nt, Human herpesvirus 5
agacaacaaugac

SEQ ID NO: 149408 - RNA, 15 nt, Human herpesvirus 5
agaaacgugagucuc

SEQ ID NO: 149409 - RNA, 15 nt, Human herpesvirus 5
agaaacgcuggaaaa

SEQ ID NO: 149410 - RNA, 16 nt, Human herpesvirus 5
agaaacgcuggaaaau

SEQ ID NO: 149411 - RNA, 11 nt, Human herpesvirus 5
agaacaugugg

SEQ ID NO: 149412 - RNA, 15 nt, Human herpesvirus 5
agaacggagugguga

SEQ ID NO: 149413 - RNA, 22 nt, Human herpesvirus 5
acugacaagucguuucagccca

SEQ ID NO: 149414 - RNA, 12 nt, Human herpesvirus 5
acugacacagcu

SEQ ID NO: 149415 - RNA, 12 nt, Human herpesvirus 5
acugaccaagcu

SEQ ID NO: 149416 - RNA, 12 nt, Human herpesvirus 5
acugaagggugc

SEQ ID NO: 149417 - RNA, 21 nt, Human herpesvirus 5
acugaauaccucgcagggucg

SEQ ID NO: 149418 - RNA, 12 nt, Human herpesvirus 5
acugagcacagc

SEQ ID NO: 149419 - RNA, 17 nt, Human herpesvirus 5
acugagacuggugguga

SEQ ID NO: 149420 - RNA, 20 nt, Human herpesvirus 5
acugacgugcaggauguuac

SEQ ID NO: 149421 - RNA, 14 nt, Human herpesvirus 5
acuguggugggaga

SEQ ID NO: 149422 - RNA, 22 nt, Human herpesvirus 5
acuguuccacggccagcgccuu

SEQ ID NO: 149423 - RNA, 18 nt, Human herpesvirus 5
acuguuaauaaaacgcca

SEQ ID NO: 149424 - RNA, 13 nt, Human herpesvirus 5
acuuacaucucac

SEQ ID NO: 149425 - RNA, 14 nt, Human herpesvirus 5
acuuacaucugcuc

SEQ ID NO: 149426 - RNA, 23 nt, Human herpesvirus 5
acuuaaagcccuuaacauguuau

SEQ ID NO: 149427 - RNA, 23 nt, Human herpesvirus 5
acuguuucaucgacgccuaccuu

SEQ ID NO: 149428 - RNA, 23 nt, Human herpesvirus 5
acuucucguacgacgucugcuca

SEQ ID NO: 149429 - RNA, 16 nt, Human herpesvirus 5
acuuaggggcacucuu

SEQ ID NO: 149430 - RNA, 15 nt, Human herpesvirus 5
acuugaguacuuuca

SEQ ID NO: 149431 - RNA, 17 nt, Human herpesvirus 5
acuugaguacuuucaca

SEQ ID NO: 149432 - RNA, 14 nt, Human herpesvirus 5
acuucuucuacuca

SEQ ID NO: 149433 - RNA, 15 nt, Human herpesvirus 5
acuucuucuacucac

SEQ ID NO: 149434 - RNA, 23 nt, Human herpesvirus 5
acuucuucuacucacaauggaag

SEQ ID NO: 149435 - RNA, 19 nt, Human herpesvirus 5
acgugaaguuccacagagc

SEQ ID NO: 149436 - RNA, 20 nt, Human herpesvirus 5
acgugagcucccaucuucua

SEQ ID NO: 149437 - RNA, 15 nt, Human herpesvirus 5
acgugcaggauguua

SEQ ID NO: 149438 - RNA, 20 nt, Human herpesvirus 5
acgugcaacgccaccaagga

SEQ ID NO: 149439 - RNA, 22 nt, Human herpesvirus 5
acgucaauaaagacgucaauga

SEQ ID NO: 149440 - RNA, 20 nt, Human herpesvirus 5
acgucacacguuacaucaua

SEQ ID NO: 149441 - RNA, 13 nt, Human herpesvirus 5
acgucgacaugaa

SEQ ID NO: 149442 - RNA, 18 nt, Human herpesvirus 5
acgucgauucccaucuca

SEQ ID NO: 149443 - RNA, 17 nt, Human herpesvirus 5
acgucggcgguccucca

SEQ ID NO: 149444 - RNA, 21 nt, Human herpesvirus 5
acgucuacaucucaucaagca

SEQ ID NO: 149445 - RNA, 15 nt, Human herpesvirus 5
acgucacuacucugg

SEQ ID NO: 149446 - RNA, 21 nt, Human herpesvirus 5
acgucacuauuguauacucua

SEQ ID NO: 149447 - RNA, 18 nt, Human herpesvirus 5
acgucaguggugacgcug

SEQ ID NO: 149448 - RNA, 22 nt, Human herpesvirus 5
acgucaaagcucacuacguguu

SEQ ID NO: 149449 - RNA, 21 nt, Human herpesvirus 5
acguaggggaacuacgugggu

SEQ ID NO: 149450 - RNA, 18 nt, Human herpesvirus 5
acguaggugaguucaaug

SEQ ID NO: 149451 - RNA, 20 nt, Human herpesvirus 5
acucugugaugaacgacaca

SEQ ID NO: 149452 - RNA, 21 nt, Human herpesvirus 5
acuccuuguguuuucaccgac

SEQ ID NO: 149453 - RNA, 15 nt, Human herpesvirus 5
acuccuuuuccagcg

SEQ ID NO: 149454 - RNA, 22 nt, Human herpesvirus 5
acuccuggaccugcguaccaac

SEQ ID NO: 149455 - RNA, 14 nt, Human herpesvirus 5
acuccgugccagcu

SEQ ID NO: 149456 - RNA, 13 nt, Human herpesvirus 5
acuccgugcuguu

SEQ ID NO: 149457 - RNA, 12 nt, Human herpesvirus 5
acuccaucacac

SEQ ID NO: 149458 - RNA, 20 nt, Human herpesvirus 5
acuccacaaccuguggaaua

SEQ ID NO: 149459 - RNA, 14 nt, Human herpesvirus 5
acuccacacgccau

SEQ ID NO: 149460 - RNA, 14 nt, Human herpesvirus 5
acaacgacaaauac

SEQ ID NO: 149461 - RNA, 14 nt, Human herpesvirus 5
acaaccugcugcac

SEQ ID NO: 149462 - RNA, 13 nt, Human herpesvirus 5
acaacgucacuuc

SEQ ID NO: 149463 - RNA, 21 nt, Human herpesvirus 5
acaagccgacccccaccagcg

SEQ ID NO: 149464 - RNA, 17 nt, Human herpesvirus 5
acaagcgccgucacuuc

SEQ ID NO: 149465 - RNA, 19 nt, Human herpesvirus 5
acaagcgccgucacuuccc

SEQ ID NO: 149466 - RNA, 15 nt, Human herpesvirus 5
acaaccgcauccugc

SEQ ID NO: 149467 - RNA, 16 nt, Human herpesvirus 5
acaaccgcauccugcc

SEQ ID NO: 149468 - RNA, 22 nt, Human herpesvirus 5
acaaccguauauucuacauuca

SEQ ID NO: 149469 - RNA, 19 nt, Human herpesvirus 5
acaaccacacagauaucca

SEQ ID NO: 149470 - RNA, 13 nt, Human herpesvirus 5
acaacaucccucc

SEQ ID NO: 149471 - RNA, 21 nt, Human herpesvirus 5
acaacaguuaucagcaauaaa

SEQ ID NO: 149472 - RNA, 18 nt, Human herpesvirus 5
aauuuguaaaaaggcaau

SEQ ID NO: 149473 - RNA, 13 nt, Human herpesvirus 5
acaaacaaugaca

SEQ ID NO: 149474 - RNA, 14 nt, Human herpesvirus 5
acaaacaaugacac

SEQ ID NO: 149475 - RNA, 20 nt, Human herpesvirus 5
acaaacugcgacacgugcuu

SEQ ID NO: 149476 - RNA, 16 nt, Human herpesvirus 5
acaaacguugagacua

SEQ ID NO: 149477 - RNA, 22 nt, Human herpesvirus 5
acaaacgccguuauguucagug

SEQ ID NO: 149478 - RNA, 12 nt, Human herpesvirus 5
acaaaccucuac

SEQ ID NO: 149479 - RNA, 14 nt, Human herpesvirus 5
acaagucacuauag

SEQ ID NO: 149480 - RNA, 15 nt, Human herpesvirus 5
acaauggaagccaua

SEQ ID NO: 149481 - RNA, 17 nt, Human herpesvirus 5
acaauguauagauacac

SEQ ID NO: 149482 - RNA, 17 nt, Human herpesvirus 5
acacaaaaucuucuaaa

SEQ ID NO: 149483 - RNA, 16 nt, Human herpesvirus 5
aauguuacacauuacu

SEQ ID NO: 149484 - RNA, 16 nt, Human herpesvirus 5
aauucaauaaaaacca

SEQ ID NO: 149485 - RNA, 18 nt, Human herpesvirus 5
aauucaauaaaaaccacc

SEQ ID NO: 149486 - RNA, 22 nt, Human herpesvirus 5
aaucuguguguucugugauaac

SEQ ID NO: 149487 - RNA, 20 nt, Human herpesvirus 5
aaucccuguaauuauuccag

SEQ ID NO: 149488 - RNA, 23 nt, Human herpesvirus 5
aaucuucuaaaacgguacgggcc

SEQ ID NO: 149489 - RNA, 14 nt, Human herpesvirus 5
aaugaaccuuguaa

SEQ ID NO: 149490 - RNA, 20 nt, Human herpesvirus 5
aauucuggcaagaguucaaa

SEQ ID NO: 149491 - RNA, 15 nt, Human herpesvirus 5
aauucacaaaaacac

SEQ ID NO: 149492 - RNA, 14 nt, Human herpesvirus 5
aauucagcaacacu

SEQ ID NO: 149493 - RNA, 23 nt, Human herpesvirus 5
aauuccccucgccuaagacuuug

SEQ ID NO: 149494 - RNA, 14 nt, Human herpesvirus 5
aauuguuauugcca

SEQ ID NO: 149495 - RNA, 15 nt, Human herpesvirus 5
aauauguaguccgua

SEQ ID NO: 149496 - RNA, 21 nt, Human herpesvirus 5
aauacaaacguugagacuacc

SEQ ID NO: 149497 - RNA, 16 nt, Human herpesvirus 5
aauaauaauaccacaa

SEQ ID NO: 149498 - RNA, 13 nt, Human herpesvirus 5
aauaaucuccuga

SEQ ID NO: 149499 - RNA, 12 nt, Human herpesvirus 5
aauaacaugucu

SEQ ID NO: 149500 - RNA, 23 nt, Human herpesvirus 5
aauaaccgcggugugcuuuauua

SEQ ID NO: 149501 - RNA, 18 nt, Human herpesvirus 5
aauaacggcgcagcacca

SEQ ID NO: 149502 - RNA, 19 nt, Human herpesvirus 5
aauaacuacgcuacgaccu

SEQ ID NO: 149503 - RNA, 20 nt, Human herpesvirus 5
aauaacuacgcuacgaccug

SEQ ID NO: 149504 - RNA, 22 nt, Human herpesvirus 5
aauaaagcguugauuucucaag

SEQ ID NO: 149505 - RNA, 13 nt, Human herpesvirus 5
aauaaaucauggc

SEQ ID NO: 149506 - RNA, 16 nt, Human herpesvirus 5
aauaaaguacacgcca

SEQ ID NO: 149507 - RNA, 17 nt, Human herpesvirus 5
aauaacaacacaucaac

SEQ ID NO: 149508 - RNA, 23 nt, Human herpesvirus 5
aauaaaugagaccccauccugua

SEQ ID NO: 149509 - RNA, 11 nt, Human herpesvirus 5
aauaacauguc

SEQ ID NO: 149510 - RNA, 18 nt, Human herpesvirus 5
aaucacuuuuaacagcuc

SEQ ID NO: 149511 - RNA, 19 nt, Human herpesvirus 5
aaucacuuuuaacagcuca

SEQ ID NO: 149512 - RNA, 22 nt, Human herpesvirus 5
aaucacagucuccuucucauca

SEQ ID NO: 149513 - RNA, 16 nt, Human herpesvirus 5
aauccaucaucuacgu

SEQ ID NO: 149514 - RNA, 22 nt, Human herpesvirus 5
aaucauccuaauugguacucua

SEQ ID NO: 149515 - RNA, 15 nt, Human herpesvirus 5
aaucauaauauucua

SEQ ID NO: 149516 - RNA, 15 nt, Human herpesvirus 5
aaucauacauuguuu

SEQ ID NO: 149517 - RNA, 15 nt, Human herpesvirus 5
aaguaagcauggcuu

SEQ ID NO: 149518 - RNA, 21 nt, Human herpesvirus 5
aaguaccucuaacaacgucac

SEQ ID NO: 149519 - RNA, 22 nt, Human herpesvirus 5
aaguagcugguggaagaacaga

SEQ ID NO: 149520 - RNA, 23 nt, Human herpesvirus 5
aaguagcuuuuuuuauacaucuc

SEQ ID NO: 149521 - RNA, 20 nt, Human herpesvirus 5
aauaaacuguugauuuuggc

SEQ ID NO: 149522 - RNA, 16 nt, Human herpesvirus 5
aauaaagaugauacau

SEQ ID NO: 149523 - RNA, 22 nt, Human herpesvirus 5
aauaaacaguacggacaaguau

SEQ ID NO: 149524 - RNA, 18 nt, Human herpesvirus 5
aauaaagacgucaaugac

SEQ ID NO: 149525 - RNA, 19 nt, Human herpesvirus 5
aauaaagacgucaaugaca

SEQ ID NO: 149526 - RNA, 12 nt, Human herpesvirus 5
aaguauacauua

SEQ ID NO: 149527 - RNA, 17 nt, Human herpesvirus 5
aaguauacauuacuauc

SEQ ID NO: 149528 - RNA, 19 nt, Human herpesvirus 5
aauaaaacgccaugaugac

SEQ ID NO: 149529 - RNA, 20 nt, Human herpesvirus 5
aauaaaacgccaugaugaca

SEQ ID NO: 149530 - RNA, 13 nt, Human herpesvirus 5
aagucaacaugua

SEQ ID NO: 149531 - RNA, 14 nt, Human herpesvirus 5
aagucaacauguag

SEQ ID NO: 149532 - RNA, 11 nt, Human herpesvirus 5
aagcacuucag

SEQ ID NO: 149533 - RNA, 17 nt, Human herpesvirus 5
aagcacuucagaaucua

SEQ ID NO: 149534 - RNA, 22 nt, Human herpesvirus 5
aaggggaaaaggaauagcaaga

SEQ ID NO: 149535 - RNA, 22 nt, Human herpesvirus 5
aagguacggacucuaacaccca

SEQ ID NO: 149536 - RNA, 21 nt, Human herpesvirus 5
aaggucaacuacagcaaugac

SEQ ID NO: 149537 - RNA, 21 nt, Human herpesvirus 5
aagauugggggggaacgugug

SEQ ID NO: 149538 - RNA, 13 nt, Human herpesvirus 5
aagauucacuuaa

SEQ ID NO: 149539 - RNA, 23 nt, Human herpesvirus 5
aaccgguuuauucguaacucuau

SEQ ID NO: 149540 - RNA, 20 nt, Human herpesvirus 5
aaccguaugcacaaaaggua

SEQ ID NO: 149541 - RNA, 16 nt, Human herpesvirus 5
aacccggucagucuau

SEQ ID NO: 149542 - RNA, 14 nt, Human herpesvirus 5
aacaguucuaucaa

SEQ ID NO: 149543 - RNA, 15 nt, Human herpesvirus 5
aacaguuaucagcaa

SEQ ID NO: 149544 - RNA, 18 nt, Human herpesvirus 5
aacaguuuacgaguacaa

SEQ ID NO: 149545 - RNA, 14 nt, Human herpesvirus 5
aacauacaguacaa

SEQ ID NO: 149546 - RNA, 17 nt, Human herpesvirus 5
aacaguacuacuaccaa

SEQ ID NO: 149547 - RNA, 18 nt, Human herpesvirus 5
aacaguacuacuaccaau

SEQ ID NO: 149548 - RNA, 13 nt, Human herpesvirus 5
aacacugcuucua

SEQ ID NO: 149549 - RNA, 16 nt, Human herpesvirus 5
aacacuaccgucgcca

SEQ ID NO: 149550 - RNA, 22 nt, Human herpesvirus 5
aacacuaaauuguuauugccag

SEQ ID NO: 149551 - RNA, 16 nt, Human herpesvirus 5
aacacugaaaacacca

SEQ ID NO: 149552 - RNA, 16 nt, Human herpesvirus 5
aacuccgugccagcug

SEQ ID NO: 149553 - RNA, 16 nt, Human herpesvirus 5
aacugaaauacaugcu

SEQ ID NO: 149554 - RNA, 20 nt, Human herpesvirus 5
aacgauaaccguguccgcuc

SEQ ID NO: 149555 - RNA, 16 nt, Human herpesvirus 5
aacgauagucaucuca

SEQ ID NO: 149556 - RNA, 19 nt, Human herpesvirus 5
aacgcgaccaccguuacca

SEQ ID NO: 149557 - RNA, 17 nt, Human herpesvirus 5
aacgcgguacaugugca

SEQ ID NO: 149558 - RNA, 23 nt, Human herpesvirus 5
aacgcguggcccuggucuggccc

SEQ ID NO: 149559 - RNA, 11 nt, Human herpesvirus 5
aacuguagcac

SEQ ID NO: 149560 - RNA, 17 nt, Human herpesvirus 5
aacuguugcgacaauac

SEQ ID NO: 149561 - RNA, 17 nt, Human herpesvirus 5
aacugcguggacggcga

SEQ ID NO: 149562 - RNA, 20 nt, Human herpesvirus 5
aagacagggaaagguuauau

SEQ ID NO: 149563 - RNA, 20 nt, Human herpesvirus 5
aagacaaccaaaacgucagg

SEQ ID NO: 149564 - RNA, 17 nt, Human herpesvirus 5
aagaaaauuacuacgua

SEQ ID NO: 149565 - RNA, 23 nt, Human herpesvirus 5
aagaaacccucaaaacaucacca

SEQ ID NO: 149566 - RNA, 23 nt, Human herpesvirus 5
aacuuuguggggcugcucaacuu

SEQ ID NO: 149567 - RNA, 11 nt, Human herpesvirus 5
aagagcuuuga

SEQ ID NO: 149568 - RNA, 18 nt, Human herpesvirus 5
aagaggggcaccuguaua

SEQ ID NO: 149569 - RNA, 21 nt, Human herpesvirus 5
aagaccugacgccguucuuga

SEQ ID NO: 149570 - RNA, 15 nt, Human herpesvirus 5
aagacgucaaugaca

SEQ ID NO: 149571 - RNA, 21 nt, Human herpesvirus 5
aagacgcaugauuagcaauau

SEQ ID NO: 149572 - RNA, 20 nt, Human herpesvirus 5
aagacuuugauguaguugca

SEQ ID NO: 149573 - RNA, 22 nt, Human herpesvirus 5
aagacuuugauguaguugcaga

SEQ ID NO: 149574 - RNA, 23 nt, Human herpesvirus 5
aagacuauacuuuuucaugguau

SEQ ID NO: 149575 - RNA, 23 nt, Human herpesvirus 5
aagacgggacggcugccucucau

SEQ ID NO: 149576 - RNA, 22 nt, Human herpesvirus 5
aagagauagacaucacaguuca

SEQ ID NO: 149577 - RNA, 20 nt, Human herpesvirus 5
aagagagucacacuuaagaa

SEQ ID NO: 149578 - RNA, 14 nt, Human herpesvirus 5
aaagucccgugugu

SEQ ID NO: 149579 - RNA, 14 nt, Human herpesvirus 5
aaagucaacaugua

SEQ ID NO: 149580 - RNA, 15 nt, Human herpesvirus 5
aaaguagcaccacaa

SEQ ID NO: 149581 - RNA, 18 nt, Human herpesvirus 5
aaagugcgucaaagcucu

SEQ ID NO: 149582 - RNA, 20 nt, Human herpesvirus 5
aaacgguacgcagucacugc

SEQ ID NO: 149583 - RNA, 15 nt, Human herpesvirus 5
aaaguacacgccaca

SEQ ID NO: 149584 - RNA, 21 nt, Human herpesvirus 5
aaaguacacugguauaaccag

SEQ ID NO: 149585 - RNA, 17 nt, Human herpesvirus 5
aaaguacgucuaugaga

SEQ ID NO: 149586 - RNA, 12 nt, Human herpesvirus 5
aaacgcugcuug

SEQ ID NO: 149587 - RNA, 20 nt, Human herpesvirus 5
aaacgucaggaaucugggag

SEQ ID NO: 149588 - RNA, 15 nt, Human herpesvirus 5
aaacgugacuuuauu

SEQ ID NO: 149589 - RNA, 18 nt, Human herpesvirus 5
aaacuaaaacauucugua

SEQ ID NO: 149590 - RNA, 19 nt, Human herpesvirus 5
aaacuaaaacauucuguaa

SEQ ID NO: 149591 - RNA, 14 nt, Human herpesvirus 5
aaacgccaccugca

SEQ ID NO: 149592 - RNA, 15 nt, Human herpesvirus 5
aaaccuaccugggcu

SEQ ID NO: 149593 - RNA, 23 nt, Human herpesvirus 5
aaaccuguauggaggucacuguc

SEQ ID NO: 149594 - RNA, 15 nt, Human herpesvirus 5
aaaucuacacugaac

SEQ ID NO: 149595 - RNA, 23 nt, Human herpesvirus 5
aaauguuuuuauuuaaaacuggu

SEQ ID NO: 149596 - RNA, 20 nt, Human herpesvirus 5
aacaacggcuggaggacuuu

SEQ ID NO: 149597 - RNA, 13 nt, Human herpesvirus 5
aacaacacaucaa

SEQ ID NO: 149598 - RNA, 19 nt, Human herpesvirus 5
aacacguagugagcuuuga

SEQ ID NO: 149599 - RNA, 12 nt, Human herpesvirus 5
aacacuacagcu

SEQ ID NO: 149600 - RNA, 18 nt, Human herpesvirus 5
aacacuacagcuugcaau

SEQ ID NO: 149601 - RNA, 17 nt, Human herpesvirus 5
aacaccuuuuugcugca

SEQ ID NO: 149602 - RNA, 23 nt, Human herpesvirus 5
aacacgcgggggaaaaacaaaga

SEQ ID NO: 149603 - RNA, 19 nt, Human herpesvirus 5
aacacgcgugacacauagc

SEQ ID NO: 149604 - RNA, 17 nt, Human herpesvirus 5
aacacaucgcacacaga

SEQ ID NO: 149605 - RNA, 20 nt, Human herpesvirus 5
aacacauugcugauuacaau

SEQ ID NO: 149606 - RNA, 22 nt, Human herpesvirus 5
aacacauugcugauuacaauga

SEQ ID NO: 149607 - RNA, 20 nt, Human herpesvirus 5
aacaccacggcacgacauau

SEQ ID NO: 149608 - RNA, 20 nt, Human herpesvirus 5
aacaauaccgauaccaucuu

SEQ ID NO: 149609 - RNA, 21 nt, Human herpesvirus 5
aacaauauugcuucguauaca

SEQ ID NO: 149610 - RNA, 22 nt, Human herpesvirus 5
aacaauauugcuucguauacaa

SEQ ID NO: 149611 - RNA, 22 nt, Human herpesvirus 5
aacaaugacuaacccugggcua

SEQ ID NO: 149612 - RNA, 22 nt, Human herpesvirus 5
aacacaacauaacgacaguguc

SEQ ID NO: 149613 - RNA, 21 nt, Human herpesvirus 5
uaggaacacugaaaacaccau

SEQ ID NO: 149614 - RNA, 21 nt, Human herpesvirus 5
uagcuuuuuuuauacaucucc

SEQ ID NO: 149615 - RNA, 16 nt, Human herpesvirus 5
uagcuagugcagccuu

SEQ ID NO: 149616 - RNA, 12 nt, Human herpesvirus 5
uagcuacuuugg

SEQ ID NO: 149617 - RNA, 14 nt, Human herpesvirus 5
uaggucuguugcgu

SEQ ID NO: 149618 - RNA, 12 nt, Human herpesvirus 5
uaguuguugcag

SEQ ID NO: 149619 - RNA, 13 nt, Human herpesvirus 5
uaguuguugcaga

SEQ ID NO: 149620 - RNA, 16 nt, Human herpesvirus 5
uaguuagacaggcuau

SEQ ID NO: 149621 - RNA, 11 nt, Human herpesvirus 5
uaguugcagag

SEQ ID NO: 149622 - RNA, 14 nt, Human herpesvirus 5
uagugaugcgcgaa

SEQ ID NO: 149623 - RNA, 17 nt, Human herpesvirus 5
uagugcggcgugcugca

SEQ ID NO: 149624 - RNA, 13 nt, Human herpesvirus 5
uagugagcuuuga

SEQ ID NO: 149625 - RNA, 14 nt, Human herpesvirus 5
uaguacccacauuu

SEQ ID NO: 149626 - RNA, 16 nt, Human herpesvirus 5
uaguacuucccaugca

SEQ ID NO: 149627 - RNA, 11 nt, Human herpesvirus 5
uagucaucuca

SEQ ID NO: 149628 - RNA, 17 nt, Human herpesvirus 5
uagucaucucauuugcu

SEQ ID NO: 149629 - RNA, 14 nt, Human herpesvirus 5
uagcagaaggaaua

SEQ ID NO: 149630 - RNA, 23 nt, Human herpesvirus 5
uagcacgucaguggugacgcuga

SEQ ID NO: 149631 - RNA, 17 nt, Human herpesvirus 5
uagcacagagacaccaa

SEQ ID NO: 149632 - RNA, 22 nt, Human herpesvirus 5
uagcacagagacaccaauugcu

SEQ ID NO: 149633 - RNA, 14 nt, Human herpesvirus 5
uagcaagccagaua

SEQ ID NO: 149634 - RNA, 19 nt, Human herpesvirus 5
uagccccacaugcugcuua

SEQ ID NO: 149635 - RNA, 14 nt, Human herpesvirus 5
uagccgaugcugau

SEQ ID NO: 149636 - RNA, 22 nt, Human herpesvirus 5
uagccugucuaacuagccuucc

SEQ ID NO: 149637 - RNA, 15 nt, Human herpesvirus 5
uagccaauaaagaga

SEQ ID NO: 149638 - RNA, 20 nt, Human herpesvirus 5
uagcaugcauaagaagccaa

SEQ ID NO: 149639 - RNA, 21 nt, Human herpesvirus 5
uagcaugcauaagaagccaag

SEQ ID NO: 149640 - RNA, 20 nt, Human herpesvirus 5
uagauuaaugugucgcuaua

SEQ ID NO: 149641 - RNA, 20 nt, Human herpesvirus 5
uagauuuucaugaauccaca

SEQ ID NO: 149642 - RNA, 22 nt, Human herpesvirus 5
uagaggcgacaucaagcuggca

SEQ ID NO: 149643 - RNA, 12 nt, Human herpesvirus 5
uacuuucacaac

SEQ ID NO: 149644 - RNA, 18 nt, Human herpesvirus 5
uacuuuauuaggucaggg

SEQ ID NO: 149645 - RNA, 11 nt, Human herpesvirus 5
uacuugcucag

SEQ ID NO: 149646 - RNA, 19 nt, Human herpesvirus 5
uacuucgauucucuauaca

SEQ ID NO: 149647 - RNA, 20 nt, Human herpesvirus 5
uacuucccaugcaacuucuu

SEQ ID NO: 149648 - RNA, 18 nt, Human herpesvirus 5
uacuucagcagcaccucu

SEQ ID NO: 149649 - RNA, 19 nt, Human herpesvirus 5
uacuucaugccccgaugaa

SEQ ID NO: 149650 - RNA, 15 nt, Human herpesvirus 5
uagacucacuuuauu

SEQ ID NO: 149651 - RNA, 16 nt, Human herpesvirus 5
uagacacacaccaaaa

SEQ ID NO: 149652 - RNA, 15 nt, Human herpesvirus 5
uagaccccaagccaa

SEQ ID NO: 149653 - RNA, 15 nt, Human herpesvirus 5
uagacaucacaguuc

SEQ ID NO: 149654 - RNA, 16 nt, Human herpesvirus 5
uagacaucacaguuca

SEQ ID NO: 149655 - RNA, 14 nt, Human herpesvirus 5
uagacauuccccac

SEQ ID NO: 149656 - RNA, 13 nt, Human herpesvirus 5
uacccccguguau

SEQ ID NO: 149657 - RNA, 22 nt, Human herpesvirus 5
uacccagcuggggaaguacaau

SEQ ID NO: 149658 - RNA, 23 nt, Human herpesvirus 5
uaccccuaucgcguguguucuau

SEQ ID NO: 149659 - RNA, 20 nt, Human herpesvirus 5
uacccugguauccaacuuca

SEQ ID NO: 149660 - RNA, 15 nt, Human herpesvirus 5
uacccaccgauggca

SEQ ID NO: 149661 - RNA, 23 nt, Human herpesvirus 5
uaccaucauugcugcuacggaau

SEQ ID NO: 149662 - RNA, 14 nt, Human herpesvirus 5
uaccaucuccgucg

SEQ ID NO: 149663 - RNA, 16 nt, Human herpesvirus 5
uaccaucugauccagu

SEQ ID NO: 149664 - RNA, 16 nt, Human herpesvirus 5
uaccaacgcuuccugc

SEQ ID NO: 149665 - RNA, 21 nt, Human herpesvirus 5
uaccacaaccaucgguacgaa

SEQ ID NO: 149666 - RNA, 15 nt, Human herpesvirus 5
uaccaccacgaccau

SEQ ID NO: 149667 - RNA, 22 nt, Human herpesvirus 5
uacauuuaucaauacaaugaca

SEQ ID NO: 149668 - RNA, 18 nt, Human herpesvirus 5
uacacugguauaaccagu

SEQ ID NO: 149669 - RNA, 16 nt, Human herpesvirus 5
uacuaaacucugugau

SEQ ID NO: 149670 - RNA, 17 nt, Human herpesvirus 5
uaccgccccaccgccgu

SEQ ID NO: 149671 - RNA, 14 nt, Human herpesvirus 5
uaccguaaacauaa

SEQ ID NO: 149672 - RNA, 18 nt, Human herpesvirus 5
uacuaccguuaacuauuc

SEQ ID NO: 149673 - RNA, 20 nt, Human herpesvirus 5
uacuaccguuaacuauucca

SEQ ID NO: 149674 - RNA, 19 nt, Human herpesvirus 5
uacuaccgcgcccacugga

SEQ ID NO: 149675 - RNA, 13 nt, Human herpesvirus 5
uacuacuaccaau

SEQ ID NO: 149676 - RNA, 23 nt, Human herpesvirus 5
uacuacuaccaauacugcaucca

SEQ ID NO: 149677 - RNA, 17 nt, Human herpesvirus 5
uacuacuucgauucucu

SEQ ID NO: 149678 - RNA, 18 nt, Human herpesvirus 5
uacuaguauccacgucac

SEQ ID NO: 149679 - RNA, 16 nt, Human herpesvirus 5
uacuaguguguuccac

SEQ ID NO: 149680 - RNA, 16 nt, Human herpesvirus 5
uacuaucgacguguua

SEQ ID NO: 149681 - RNA, 16 nt, Human herpesvirus 5
aacaaggcuauaucaa

SEQ ID NO: 149682 - RNA, 20 nt, Human herpesvirus 5
aacaauaaagcguugauuuc

SEQ ID NO: 149683 - RNA, 16 nt, Human herpesvirus 5
uaaccaauaacauguc

SEQ ID NO: 149684 - RNA, 16 nt, Human herpesvirus 5
uaaccgcaaaggccac

SEQ ID NO: 149685 - RNA, 16 nt, Human herpesvirus 5
uaaccgggugcugaua

SEQ ID NO: 149686 - RNA, 20 nt, Human herpesvirus 5
uaaucccuguaauuauucca

SEQ ID NO: 149687 - RNA, 12 nt, Human herpesvirus 5
uaauccuacuca

SEQ ID NO: 149688 - RNA, 13 nt, Human herpesvirus 5
uaauccuacucaa

SEQ ID NO: 149689 - RNA, 21 nt, Human herpesvirus 5
uaauauguggucgcguguggu

SEQ ID NO: 149690 - RNA, 21 nt, Human herpesvirus 5
uacacgcacgcugguuaccag

SEQ ID NO: 149691 - RNA, 16 nt, Human herpesvirus 5
uacaacacuacccuca

SEQ ID NO: 149692 - RNA, 14 nt, Human herpesvirus 5
uacacauuacuaca

SEQ ID NO: 149693 - RNA, 13 nt, Human herpesvirus 5
uacaaaccucuac

SEQ ID NO: 149694 - RNA, 14 nt, Human herpesvirus 5
uaauguauccuggg

SEQ ID NO: 149695 - RNA, 13 nt, Human herpesvirus 5
uaauguaccaaga

SEQ ID NO: 149696 - RNA, 10 nt, Human herpesvirus 5
uaaugugcug

SEQ ID NO: 149697 - RNA, 12 nt, Human herpesvirus 5
uaaugauguacg

SEQ ID NO: 149698 - RNA, 18 nt, Human herpesvirus 5
guuuccucuucuaguacu

SEQ ID NO: 149699 - RNA, 20 nt, Human herpesvirus 5
guuugagcaugacuguuucc

SEQ ID NO: 149700 - RNA, 15 nt, Human herpesvirus 5
guuuuacgaguggug

SEQ ID NO: 149701 - RNA, 13 nt, Human herpesvirus 5
guuuuguuuucca

SEQ ID NO: 149702 - RNA, 14 nt, Human herpesvirus 5
guuuugcuuuugca

SEQ ID NO: 149703 - RNA, 23 nt, Human herpesvirus 5
guuuuauugacgaagaugccgau

SEQ ID NO: 149704 - RNA, 21 nt, Human herpesvirus 5
guuuuuauuacccgcuacugu

SEQ ID NO: 149705 - RNA, 23 nt, Human herpesvirus 5
guuuuugcuuccgagcuguguuu

SEQ ID NO: 149706 - RNA, 15 nt, Human herpesvirus 5
guuuuuugaaucaua

SEQ ID NO: 149707 - RNA, 17 nt, Human herpesvirus 5
guuuuuuuauguuacaa

SEQ ID NO: 149708 - RNA, 20 nt, Human herpesvirus 5
guuuuuuuccauccuggcca

SEQ ID NO: 149709 - RNA, 18 nt, Human herpesvirus 5
guuuuuuuuuguuaacaa

SEQ ID NO: 149710 - RNA, 21 nt, Human herpesvirus 5
guuaucagaaagcugcaauca

SEQ ID NO: 149711 - RNA, 22 nt, Human herpesvirus 5
guuauccgaacgaaacccgugu

SEQ ID NO: 149712 - RNA, 15 nt, Human herpesvirus 5
guugcuauaccucag

SEQ ID NO: 149713 - RNA, 18 nt, Human herpesvirus 5
guuaugauaucuacagca

SEQ ID NO: 149714 - RNA, 22 nt, Human herpesvirus 5
guuauaacgacgccagugauaa

SEQ ID NO: 149715 - RNA, 14 nt, Human herpesvirus 5
guuaugaccaagcc

SEQ ID NO: 149716 - RNA, 22 nt, Human herpesvirus 5
guuggguauuacggacaccucu

SEQ ID NO: 149717 - RNA, 15 nt, Human herpesvirus 5
guuggccaguauaaa

SEQ ID NO: 149718 - RNA, 13 nt, Human herpesvirus 5
guugcucuccucu

SEQ ID NO: 149719 - RNA, 20 nt, Human herpesvirus 5
guuguggcaaagagccaugu

SEQ ID NO: 149720 - RNA, 17 nt, Human herpesvirus 5
guuucaaacagcacauu

SEQ ID NO: 149721 - RNA, 23 nt, Human herpesvirus 5
guuuacugaaaaggaaugugcuu

SEQ ID NO: 149722 - RNA, 15 nt, Human herpesvirus 5
uaaaaauacagaguc

SEQ ID NO: 149723 - RNA, 16 nt, Human herpesvirus 5
uaaacacgacauccgu

SEQ ID NO: 149724 - RNA, 22 nt, Human herpesvirus 5
uaaaaugugcgaauuaggcaac

SEQ ID NO: 149725 - RNA, 12 nt, Human herpesvirus 5
uaaagauucacu

SEQ ID NO: 149726 - RNA, 13 nt, Human herpesvirus 5
uaaagauucacuu

SEQ ID NO: 149727 - RNA, 23 nt, Human herpesvirus 5
uaaagccacgcggcguacgucac

SEQ ID NO: 149728 - RNA, 22 nt, Human herpesvirus 5
uaaagagaguuguggcaaagag

SEQ ID NO: 149729 - RNA, 15 nt, Human herpesvirus 5
uaaagauaaucugcc

SEQ ID NO: 149730 - RNA, 16 nt, Human herpesvirus 5
uaaagaugauacauag

SEQ ID NO: 149731 - RNA, 14 nt, Human herpesvirus 5
uaaaggacgugaug

SEQ ID NO: 149732 - RNA, 16 nt, Human herpesvirus 5
uaaaggacgugaugcg

SEQ ID NO: 149733 - RNA, 22 nt, Human herpesvirus 5
uaaaggcgcacuugucauuaaa

SEQ ID NO: 149734 - RNA, 21 nt, Human herpesvirus 5
uaacaucauaaaaaccauuga

SEQ ID NO: 149735 - RNA, 16 nt, Human herpesvirus 5
uaaauuagugucgaua

SEQ ID NO: 149736 - RNA, 18 nt, Human herpesvirus 5
uaaaugagaccccauccu

SEQ ID NO: 149737 - RNA, 11 nt, Human herpesvirus 5
gucgaugcuga

SEQ ID NO: 149738 - RNA, 13 nt, Human herpesvirus 5
gucgaugcugauc

SEQ ID NO: 149739 - RNA, 14 nt, Human herpesvirus 5
gucgaucagguacu

SEQ ID NO: 149740 - RNA, 19 nt, Human herpesvirus 5
gucgcaggacgggauaucc

SEQ ID NO: 149741 - RNA, 18 nt, Human herpesvirus 5
gucgccaguccauggucu

SEQ ID NO: 149742 - RNA, 19 nt, Human herpesvirus 5
gucgccauggcuauguaca

SEQ ID NO: 149743 - RNA, 22 nt, Human herpesvirus 5
gucgacaugucgcgacacccgg

SEQ ID NO: 149744 - RNA, 15 nt, Human herpesvirus 5
guccucgcccgguga

SEQ ID NO: 149745 - RNA, 24 nt, Human herpesvirus 5
guaccccuggacgguacaguuuau

SEQ ID NO: 149746 - RNA, 14 nt, Human herpesvirus 5
guaccgacuggggu

SEQ ID NO: 149747 - RNA, 22 nt, Human herpesvirus 5
guaccguccagggguacgcuau

SEQ ID NO: 149748 - RNA, 22 nt, Human herpesvirus 5
guacauuaccuuucaucgugaa

SEQ ID NO: 149749 - RNA, 15 nt, Human herpesvirus 5
guacaugugcaugac

SEQ ID NO: 149750 - RNA, 17 nt, Human herpesvirus 5
guaccuagcuacuuugg

SEQ ID NO: 149751 - RNA, 19 nt, Human herpesvirus 5
guaccuagcuacuuuggaa

SEQ ID NO: 149752 - RNA, 18 nt, Human herpesvirus 5
guaccucaacacauugcu

SEQ ID NO: 149753 - RNA, 19 nt, Human herpesvirus 5
guacacgcaggcaagccaa

SEQ ID NO: 149754 - RNA, 21 nt, Human herpesvirus 5
guacacgcaggcaagccaaac

SEQ ID NO: 149755 - RNA, 17 nt, Human herpesvirus 5
guacacggggauuuucg

SEQ ID NO: 149756 - RNA, 16 nt, Human herpesvirus 5
gucucgucgacgucau

SEQ ID NO: 149757 - RNA, 12 nt, Human herpesvirus 5
gucucacuguga

SEQ ID NO: 149758 - RNA, 12 nt, Human herpesvirus 5
gucucuggucuc

SEQ ID NO: 149759 - RNA, 23 nt, Human herpesvirus 5
gucucuguuuuuuuuuguuaaca

SEQ ID NO: 149760 - RNA, 18 nt, Human herpesvirus 5
gucugacaguucacgggg

SEQ ID NO: 149761 - RNA, 15 nt, Human herpesvirus 5
gucucuaccaacgcu

SEQ ID NO: 149762 - RNA, 17 nt, Human herpesvirus 5
gucucuacggcacuguc

SEQ ID NO: 149763 - RNA, 22 nt, Human herpesvirus 5
gucuuuuuucucguuguacgca

SEQ ID NO: 149764 - RNA, 21 nt, Human herpesvirus 5
gucuuuuuaaggagcucugaa

SEQ ID NO: 149765 - RNA, 13 nt, Human herpesvirus 5
gugaaccaugauc

SEQ ID NO: 149766 - RNA, 14 nt, Human herpesvirus 5
gucugcgacuccug

SEQ ID NO: 149767 - RNA, 20 nt, Human herpesvirus 5
gucugcguguguguuucuua

SEQ ID NO: 149768 - RNA, 12 nt, Human herpesvirus 5
gucugcuugcug

SEQ ID NO: 149769 - RNA, 19 nt, Human herpesvirus 5
gucuauuaucaucaaucac

SEQ ID NO: 149770 - RNA, 20 nt, Human herpesvirus 5
gucuauuaucaucaaucacc

SEQ ID NO: 149771 - RNA, 15 nt, Human herpesvirus 5
gucuaucacgggcuc

SEQ ID NO: 149772 - RNA, 19 nt, Human herpesvirus 5
gucuaucgucgccacacgu

SEQ ID NO: 149773 - RNA, 13 nt, Human herpesvirus 5
gucgcuuagccac

SEQ ID NO: 149774 - RNA, 19 nt, Human herpesvirus 5
gucgcaugagauccaaaau

SEQ ID NO: 149775 - RNA, 16 nt, Human herpesvirus 5
gucgugagcagcgugc

SEQ ID NO: 149776 - RNA, 19 nt, Human herpesvirus 5
gucguggcucagcuugaug

SEQ ID NO: 149777 - RNA, 14 nt, Human herpesvirus 5
gucguggugacuga

SEQ ID NO: 149778 - RNA, 16 nt, Human herpesvirus 5
gucgugugugcucucu

SEQ ID NO: 149779 - RNA, 19 nt, Human herpesvirus 5
gucgucaugaacuucauca

SEQ ID NO: 149780 - RNA, 15 nt, Human herpesvirus 5
gucgucgacaugucg

SEQ ID NO: 149781 - RNA, 20 nt, Human herpesvirus 5
gucgucgacgcaucugucau

SEQ ID NO: 149782 - RNA, 12 nt, Human herpesvirus 5
gucggugcgaug

SEQ ID NO: 149783 - RNA, 15 nt, Human herpesvirus 5
gucggggcugugucg

SEQ ID NO: 149784 - RNA, 14 nt, Human herpesvirus 5
gugaauugcgaagc

SEQ ID NO: 149785 - RNA, 17 nt, Human herpesvirus 5
gugaauugguguucuua

SEQ ID NO: 149786 - RNA, 21 nt, Human herpesvirus 5
gugacacagcacgcugauaac

SEQ ID NO: 149787 - RNA, 21 nt, Human herpesvirus 5
gugcguggaaaauugcaacuu

SEQ ID NO: 149788 - RNA, 22 nt, Human herpesvirus 5
gugcgcuugguaacucacuguu

SEQ ID NO: 149789 - RNA, 14 nt, Human herpesvirus 5
gugacguggauacu

SEQ ID NO: 149790 - RNA, 15 nt, Human herpesvirus 5
gugcgccuuccaguc

SEQ ID NO: 149791 - RNA, 15 nt, Human herpesvirus 5
guggcucuacagugg

SEQ ID NO: 149792 - RNA, 14 nt, Human herpesvirus 5
guggcgagguguga

SEQ ID NO: 149793 - RNA, 15 nt, Human herpesvirus 5
guggccgaacagcag

SEQ ID NO: 149794 - RNA, 22 nt, Human herpesvirus 5
gugcuggccgccgcugcacggc

SEQ ID NO: 149795 - RNA, 16 nt, Human herpesvirus 5
gugcugccgcacgaga

SEQ ID NO: 149796 - RNA, 14 nt, Human herpesvirus 5
gugcugcucugcac

SEQ ID NO: 149797 - RNA, 16 nt, Human herpesvirus 5
gugcuuaagcagaaac

SEQ ID NO: 149798 - RNA, 19 nt, Human herpesvirus 5
gugcugauaagacggacug

SEQ ID NO: 149799 - RNA, 16 nt, Human herpesvirus 5
gugcugcauguguauu

SEQ ID NO: 149800 - RNA, 15 nt, Human herpesvirus 5
guuacccugguaucc

SEQ ID NO: 149801 - RNA, 14 nt, Human herpesvirus 5
guuagcuuuugccc

SEQ ID NO: 149802 - RNA, 14 nt, Human herpesvirus 5
guuaggaaccagug

SEQ ID NO: 149803 - RNA, 20 nt, Human herpesvirus 5
guguguuugcgcccccgugu

SEQ ID NO: 149804 - RNA, 17 nt, Human herpesvirus 5
gugugucuaaugugcug

SEQ ID NO: 149805 - RNA, 13 nt, Human herpesvirus 5
gugugugucuaua

SEQ ID NO: 149806 - RNA, 20 nt, Human herpesvirus 5
guguuauucagaaccaugua

SEQ ID NO: 149807 - RNA, 23 nt, Human herpesvirus 5
gugucuacuacucuguguugcua

SEQ ID NO: 149808 - RNA, 22 nt, Human herpesvirus 5
gugugacguggauacuaguaaa

SEQ ID NO: 149809 - RNA, 13 nt, Human herpesvirus 5
gugugcucucuau

SEQ ID NO: 149810 - RNA, 20 nt, Human herpesvirus 5
gugugaauggaaauacauga

SEQ ID NO: 149811 - RNA, 11 nt, Human herpesvirus 5
guggggcugcu

SEQ ID NO: 149812 - RNA, 20 nt, Human herpesvirus 5
gugggagucaacacuaccaa

SEQ ID NO: 149813 - RNA, 18 nt, Human herpesvirus 5
gugggccuauagacucua

SEQ ID NO: 149814 - RNA, 21 nt, Human herpesvirus 5
uauucguaaccagcauuugag

SEQ ID NO: 149815 - RNA, 23 nt, Human herpesvirus 5
uauugagcaggguaaaaaccacg

SEQ ID NO: 149816 - RNA, 14 nt, Human herpesvirus 5
uauaaauugcucua

SEQ ID NO: 149817 - RNA, 20 nt, Human herpesvirus 5
uauaaauugcucuacugcaa

SEQ ID NO: 149818 - RNA, 19 nt, Human herpesvirus 5
uauaagcguggauggucau

SEQ ID NO: 149819 - RNA, 13 nt, Human herpesvirus 5
uauaaggaggcaa

SEQ ID NO: 149820 - RNA, 14 nt, Human herpesvirus 5
uauaagaaggccau

SEQ ID NO: 149821 - RNA, 14 nt, Human herpesvirus 5
uauaagacagccuu

SEQ ID NO: 149822 - RNA, 15 nt, Human herpesvirus 5
uauaacgccgaucau

SEQ ID NO: 149823 - RNA, 19 nt, Human herpesvirus 5
uauaagaaaagacaaugaa

SEQ ID NO: 149824 - RNA, 14 nt, Human herpesvirus 5
uauugcaauggacu

SEQ ID NO: 149825 - RNA, 16 nt, Human herpesvirus 5
uauuugcaucaugugc

SEQ ID NO: 149826 - RNA, 18 nt, Human herpesvirus 5
uauuuuuucauaguugcu

SEQ ID NO: 149827 - RNA, 21 nt, Human herpesvirus 5
ucaacaguuuacgaguacaaa

SEQ ID NO: 149828 - RNA, 16 nt, Human herpesvirus 5
ucaacauacaguacaa

SEQ ID NO: 149829 - RNA, 12 nt, Human herpesvirus 5
ucaacacuacca

SEQ ID NO: 149830 - RNA, 21 nt, Human herpesvirus 5
ucaaggagaacaccacgguua

SEQ ID NO: 149831 - RNA, 21 nt, Human herpesvirus 5
ucaaggccacuauggcgugaa

SEQ ID NO: 149832 - RNA, 22 nt, Human herpesvirus 5
ucaaggccgccucuucuggccc

SEQ ID NO: 149833 - RNA, 23 nt, Human herpesvirus 5
ucaagggacaaagcagcauucac

SEQ ID NO: 149834 - RNA, 22 nt, Human herpesvirus 5
ucaaccacccgccggaacgcug

SEQ ID NO: 149835 - RNA, 19 nt, Human herpesvirus 5
ucaaccauuggcaacauca

SEQ ID NO: 149836 - RNA, 14 nt, Human herpesvirus 5
ucaauacaaugaca

SEQ ID NO: 149837 - RNA, 23 nt, Human herpesvirus 5
ucaauaaacuuuuuuuaaccaau

SEQ ID NO: 149838 - RNA, 23 nt, Human herpesvirus 5
ucaauaaagaaaaccacacuguu

SEQ ID NO: 149839 - RNA, 15 nt, Human herpesvirus 5
ucaauaaucuccuga

SEQ ID NO: 149840 - RNA, 19 nt, Human herpesvirus 5
ucaauaaucuccugagaca

SEQ ID NO: 149841 - RNA, 16 nt, Human herpesvirus 5
ucaauaaaaaccaccg

SEQ ID NO: 149842 - RNA, 18 nt, Human herpesvirus 5
ucacagucuccuucucau

SEQ ID NO: 149843 - RNA, 14 nt, Human herpesvirus 5
ucacacuuaagaaa

SEQ ID NO: 149844 - RNA, 18 nt, Human herpesvirus 5
ucacacaggccagcugcc

SEQ ID NO: 149845 - RNA, 19 nt, Human herpesvirus 5
ucacacaggccagcugcca

SEQ ID NO: 149846 - RNA, 19 nt, Human herpesvirus 5
ucacaauugacguggguug

SEQ ID NO: 149847 - RNA, 16 nt, Human herpesvirus 5
ucagcagugaguacac

SEQ ID NO: 149848 - RNA, 18 nt, Human herpesvirus 5
ucagccucgggugcaccg

SEQ ID NO: 149849 - RNA, 14 nt, Human herpesvirus 5
ucacugccaccgac

SEQ ID NO: 149850 - RNA, 21 nt, Human herpesvirus 5
ucagaguaggugauccaguua

SEQ ID NO: 149851 - RNA, 20 nt, Human herpesvirus 5
ucacgucgggacgauauaaa

SEQ ID NO: 149852 - RNA, 17 nt, Human herpesvirus 5
ucacgucuacuacguca

SEQ ID NO: 149853 - RNA, 20 nt, Human herpesvirus 5
ucacuauagcgggauuuacu

SEQ ID NO: 149854 - RNA, 17 nt, Human herpesvirus 5
ucacuauuguauacucu

SEQ ID NO: 149855 - RNA, 21 nt, Human herpesvirus 5
ucacgucacuacucugggaua

SEQ ID NO: 149856 - RNA, 21 nt, Human herpesvirus 5
ucacgaggaccauuuccaugu

SEQ ID NO: 149857 - RNA, 18 nt, Human herpesvirus 5
ucaccaaacaacaccacg

SEQ ID NO: 149858 - RNA, 24 nt, Human herpesvirus 5
uccggcgcugagaaccuacgugca

SEQ ID NO: 149859 - RNA, 15 nt, Human herpesvirus 5
uccgcuugcugcgaa

SEQ ID NO: 149860 - RNA, 18 nt, Human herpesvirus 5
uccgauguacguaccacg

SEQ ID NO: 149861 - RNA, 21 nt, Human herpesvirus 5
ucccgcuuuucuacuccauca

SEQ ID NO: 149862 - RNA, 16 nt, Human herpesvirus 5
uccccuaacgucacuu

SEQ ID NO: 149863 - RNA, 19 nt, Human herpesvirus 5
uccccuaacgucacuucaa

SEQ ID NO: 149864 - RNA, 17 nt, Human herpesvirus 5
uccccgugacaguauua

SEQ ID NO: 149865 - RNA, 16 nt, Human herpesvirus 5
uccccgugacgugcaa

SEQ ID NO: 149866 - RNA, 16 nt, Human herpesvirus 5
uccccugccaccucag

SEQ ID NO: 149867 - RNA, 21 nt, Human herpesvirus 5
uccccuucuguauccauacuu

SEQ ID NO: 149868 - RNA, 22 nt, Human herpesvirus 5
ucccccugcacguccaugucgc

SEQ ID NO: 149869 - RNA, 17 nt, Human herpesvirus 5
uccaucgacgauccucg

SEQ ID NO: 149870 - RNA, 14 nt, Human herpesvirus 5
uccacuaguacuga

SEQ ID NO: 149871 - RNA, 23 nt, Human herpesvirus 5
uccacgccaccgccgccaccacc

SEQ ID NO: 149872 - RNA, 20 nt, Human herpesvirus 5
uccaacaccacgagcaugaa

SEQ ID NO: 149873 - RNA, 20 nt, Human herpesvirus 5
ucauuacagacgccuauaaa

SEQ ID NO: 149874 - RNA, 15 nt, Human herpesvirus 5
ucauguuucucacgc

SEQ ID NO: 149875 - RNA, 19 nt, Human herpesvirus 5
ucauggcuuccgacgugag

SEQ ID NO: 149876 - RNA, 14 nt, Human herpesvirus 5
ucaugguggucuac

SEQ ID NO: 149877 - RNA, 18 nt, Human herpesvirus 5
ucauggagccgcaagugc

SEQ ID NO: 149878 - RNA, 19 nt, Human herpesvirus 5
ucauggagccgcaagugcu

SEQ ID NO: 149879 - RNA, 16 nt, Human herpesvirus 5
ucaugcgucggcauua

SEQ ID NO: 149880 - RNA, 12 nt, Human herpesvirus 5
ucaugccgccac

SEQ ID NO: 149881 - RNA, 19 nt, Human herpesvirus 5
ucauuuguauuuacuuuaa

SEQ ID NO: 149882 - RNA, 18 nt, Human herpesvirus 5
ucauucguguugacaggg

SEQ ID NO: 149883 - RNA, 22 nt, Human herpesvirus 5
uccaaaagugauuuuugggcau

SEQ ID NO: 149884 - RNA, 16 nt, Human herpesvirus 5
ucauaaguuuacggga

SEQ ID NO: 149885 - RNA, 19 nt, Human herpesvirus 5
ucauaaacuuucaggucuc

SEQ ID NO: 149886 - RNA, 15 nt, Human herpesvirus 5
ucagccucuguguuc

SEQ ID NO: 149887 - RNA, 15 nt, Human herpesvirus 5
ucaguccauugucag

SEQ ID NO: 149888 - RNA, 12 nt, Human herpesvirus 5
ucauagagccaa

SEQ ID NO: 149889 - RNA, 23 nt, Human herpesvirus 5
ucugugaugaacgacacaugcac

SEQ ID NO: 149890 - RNA, 20 nt, Human herpesvirus 5
ucuguggaggagacuaccuc

SEQ ID NO: 149891 - RNA, 14 nt, Human herpesvirus 5
ucuuccucagugaa

SEQ ID NO: 149892 - RNA, 15 nt, Human herpesvirus 5
ucuguuuuugcugca

SEQ ID NO: 149893 - RNA, 21 nt, Human herpesvirus 5
ucugcauagaguuacaugcaa

SEQ ID NO: 149894 - RNA, 22 nt, Human herpesvirus 5
ucugccuccuaguaaugcauua

SEQ ID NO: 149895 - RNA, 13 nt, Human herpesvirus 5
ucugccacuaccg

SEQ ID NO: 149896 - RNA, 22 nt, Human herpesvirus 5
ucugccacuaccgauaaaacua

SEQ ID NO: 149897 - RNA, 10 nt, Human herpesvirus 5
ucugcuuaaa

SEQ ID NO: 149898 - RNA, 12 nt, Human herpesvirus 5
ucugucaucacg

SEQ ID NO: 149899 - RNA, 17 nt, Human herpesvirus 5
ucugcguguguguuucu

SEQ ID NO: 149900 - RNA, 15 nt, Human herpesvirus 5
ucucacguacaggca

SEQ ID NO: 149901 - RNA, 11 nt, Human herpesvirus 5
ucucacuguga

SEQ ID NO: 149902 - RNA, 11 nt, Human herpesvirus 5
ucucaccgugc

SEQ ID NO: 149903 - RNA, 19 nt, Human herpesvirus 5
ucugaagccgucagucaua

SEQ ID NO: 149904 - RNA, 15 nt, Human herpesvirus 5
ucugacgcuguacaa

SEQ ID NO: 149905 - RNA, 18 nt, Human herpesvirus 5
ucugacguccagcaccac

SEQ ID NO: 149906 - RNA, 18 nt, Human herpesvirus 5
ucugauccaguugcaccu

SEQ ID NO: 149907 - RNA, 18 nt, Human herpesvirus 5
ucugauagccauguucca

SEQ ID NO: 149908 - RNA, 19 nt, Human herpesvirus 5
ucugauagccauguuccau

SEQ ID NO: 149909 - RNA, 13 nt, Human herpesvirus 5
ucgucaaucuugc

SEQ ID NO: 149910 - RNA, 15 nt, Human herpesvirus 5
ucguaagcggcagca

SEQ ID NO: 149911 - RNA, 13 nt, Human herpesvirus 5
ucggagaguauaa

SEQ ID NO: 149912 - RNA, 19 nt, Human herpesvirus 5
ucgugauggguucugcggu

SEQ ID NO: 149913 - RNA, 16 nt, Human herpesvirus 5
ucgugggcuacuuuga

SEQ ID NO: 149914 - RNA, 16 nt, Human herpesvirus 5
ucguguaauccacgac

SEQ ID NO: 149915 - RNA, 15 nt, Human herpesvirus 5
ucguguaucuuaugc

SEQ ID NO: 149916 - RNA, 19 nt, Human herpesvirus 5
ucgucgugggcuacuuuga

SEQ ID NO: 149917 - RNA, 16 nt, Human herpesvirus 5
ucgucguguccgugau

SEQ ID NO: 149918 - RNA, 23 nt, Human herpesvirus 5
ucgucaaagccgacaaccugcug

SEQ ID NO: 149919 - RNA, 22 nt, Human herpesvirus 5
ucgucgacgcaucugucaucua

SEQ ID NO: 149920 - RNA, 15 nt, Human herpesvirus 5
ucgucuuugucauac

SEQ ID NO: 149921 - RNA, 13 nt, Human herpesvirus 5
ucgugaaccauga

SEQ ID NO: 149922 - RNA, 15 nt, Human herpesvirus 5
ucgucugugucucac

SEQ ID NO: 149923 - RNA, 17 nt, Human herpesvirus 5
ucuauggcccaggguac

SEQ ID NO: 149924 - RNA, 13 nt, Human herpesvirus 5
ucuacuacucugu

SEQ ID NO: 149925 - RNA, 13 nt, Human herpesvirus 5
ucuacuccaucau

SEQ ID NO: 149926 - RNA, 21 nt, Human herpesvirus 5
ucuacuccgaauaacaacaca

SEQ ID NO: 149927 - RNA, 15 nt, Human herpesvirus 5
ucuacugcaacugca

SEQ ID NO: 149928 - RNA, 14 nt, Human herpesvirus 5
ucuaccugauuucu

SEQ ID NO: 149929 - RNA, 18 nt, Human herpesvirus 5
ucuaccagcccagggauc

SEQ ID NO: 149930 - RNA, 16 nt, Human herpesvirus 5
ucuacaacuuaaccac

SEQ ID NO: 149931 - RNA, 17 nt, Human herpesvirus 5
ucguguugacagggcuu

SEQ ID NO: 149932 - RNA, 12 nt, Human herpesvirus 5
uccgguggugcg

SEQ ID NO: 149933 - RNA, 15 nt, Human herpesvirus 5
uccgucaugcuggca

SEQ ID NO: 149934 - RNA, 12 nt, Human herpesvirus 5
uccuaaaccugg

SEQ ID NO: 149935 - RNA, 16 nt, Human herpesvirus 5
uccuaguaaugcauua

SEQ ID NO: 149936 - RNA, 22 nt, Human herpesvirus 5
uccuacacgccuugcaccuggg

SEQ ID NO: 149937 - RNA, 19 nt, Human herpesvirus 5
ucgcuuuuuacuuuguaug

SEQ ID NO: 149938 - RNA, 18 nt, Human herpesvirus 5
ucgcuuagccaccaccug

SEQ ID NO: 149939 - RNA, 13 nt, Human herpesvirus 5
ucgcguguggucu

SEQ ID NO: 149940 - RNA, 15 nt, Human herpesvirus 5
ucgcuauacaccaag

SEQ ID NO: 149941 - RNA, 22 nt, Human herpesvirus 5
ucgcucggaacgacgacucagg

SEQ ID NO: 149942 - RNA, 18 nt, Human herpesvirus 5
uccucagugaauucuggc

SEQ ID NO: 149943 - RNA, 19 nt, Human herpesvirus 5
uccucagugaauucuggca

SEQ ID NO: 149944 - RNA, 18 nt, Human herpesvirus 5
ucgcggcgagguggucaa

SEQ ID NO: 149945 - RNA, 21 nt, Human herpesvirus 5
ugacgaagaugccgaugugug

SEQ ID NO: 149946 - RNA, 14 nt, Human herpesvirus 5
ugaccuugcugaug

SEQ ID NO: 149947 - RNA, 15 nt, Human herpesvirus 5
ugacgacgacgcugc

SEQ ID NO: 149948 - RNA, 21 nt, Human herpesvirus 5
ugaccuggcugcuuaaugaca

SEQ ID NO: 149949 - RNA, 14 nt, Human herpesvirus 5
ugacccguggugag

SEQ ID NO: 149950 - RNA, 14 nt, Human herpesvirus 5
ugaccggaggcuaa

SEQ ID NO: 149951 - RNA, 16 nt, Human herpesvirus 5
ugaccggcccuagaaa

SEQ ID NO: 149952 - RNA, 18 nt, Human herpesvirus 5
ugacauggauaacgacag

SEQ ID NO: 149953 - RNA, 15 nt, Human herpesvirus 5
ugaccagcaguauga

SEQ ID NO: 149954 - RNA, 20 nt, Human herpesvirus 5
ugacaguauuaacguguggu

SEQ ID NO: 149955 - RNA, 17 nt, Human herpesvirus 5
ugacagcauacggggag

SEQ ID NO: 149956 - RNA, 18 nt, Human herpesvirus 5
ugacacuaacuugacuau

SEQ ID NO: 149957 - RNA, 14 nt, Human herpesvirus 5
ugacaauguggugu

SEQ ID NO: 149958 - RNA, 20 nt, Human herpesvirus 5
ugacacagagacuugugaua

SEQ ID NO: 149959 - RNA, 10 nt, Human herpesvirus 5
ugacacagca

SEQ ID NO: 149960 - RNA, 11 nt, Human herpesvirus 5
ugaaggcaaag

SEQ ID NO: 149961 - RNA, 20 nt, Human herpesvirus 5
ugaaggguguugugcgugau

SEQ ID NO: 149962 - RNA, 15 nt, Human herpesvirus 5
ugaauaacaccaaaa

SEQ ID NO: 149963 - RNA, 19 nt, Human herpesvirus 5
ugaaucgccccucacguca

SEQ ID NO: 149964 - RNA, 13 nt, Human herpesvirus 5
ugaauugcacggu

SEQ ID NO: 149965 - RNA, 13 nt, Human herpesvirus 5
ugaaugucaucau

SEQ ID NO: 149966 - RNA, 19 nt, Human herpesvirus 5
ugaacaccuuuuugcugca

SEQ ID NO: 149967 - RNA, 16 nt, Human herpesvirus 5
ugaacgcgguacaugu

SEQ ID NO: 149968 - RNA, 17 nt, Human herpesvirus 5
ugaacgcgguacaugug

SEQ ID NO: 149969 - RNA, 20 nt, Human herpesvirus 5
ugaacgcgguacaugugcau

SEQ ID NO: 149970 - RNA, 11 nt, Human herpesvirus 5
ugaaccuuccc

SEQ ID NO: 149971 - RNA, 17 nt, Human herpesvirus 5
ugaaccuuguaaugcuu

SEQ ID NO: 149972 - RNA, 15 nt, Human herpesvirus 5
ugaagacacccugcg

SEQ ID NO: 149973 - RNA, 17 nt, Human herpesvirus 5
ugaagaaauagauagca

SEQ ID NO: 149974 - RNA, 15 nt, Human herpesvirus 5
ugaacuugagcacaa

SEQ ID NO: 149975 - RNA, 12 nt, Human herpesvirus 5
ugaacgucugca

SEQ ID NO: 149976 - RNA, 22 nt, Human herpesvirus 5
ugaacguggugaggggcgugug

SEQ ID NO: 149977 - RNA, 22 nt, Human herpesvirus 5
ugaaagcuuucuacgugcggca

SEQ ID NO: 149978 - RNA, 14 nt, Human herpesvirus 5
ugaaaccuaccugg

SEQ ID NO: 149979 - RNA, 21 nt, Human herpesvirus 5
ugaaacccgcgccgguucuca

SEQ ID NO: 149980 - RNA, 19 nt, Human herpesvirus 5
ucuugccaagcuuuagcca

SEQ ID NO: 149981 - RNA, 22 nt, Human herpesvirus 5
ucuugacgacguuguggcugcu

SEQ ID NO: 149982 - RNA, 15 nt, Human herpesvirus 5
ucuucuaguacuucc

SEQ ID NO: 149983 - RNA, 11 nt, Human herpesvirus 5
ucuucuacuca

SEQ ID NO: 149984 - RNA, 12 nt, Human herpesvirus 5
ucuucgucguca

SEQ ID NO: 149985 - RNA, 18 nt, Human herpesvirus 5
ucuucuaacgguuacaca

SEQ ID NO: 149986 - RNA, 22 nt, Human herpesvirus 5
ucuucugaagccgucagucaua

SEQ ID NO: 149987 - RNA, 23 nt, Human herpesvirus 5
ucuucugaagccgucagucauag

SEQ ID NO: 149988 - RNA, 14 nt, Human herpesvirus 5
ucuuccugcugcgc

SEQ ID NO: 149989 - RNA, 20 nt, Human herpesvirus 5
ucuucgccaagaugcugcgg

SEQ ID NO: 149990 - RNA, 12 nt, Human herpesvirus 5
ucuuucaugaug

SEQ ID NO: 149991 - RNA, 16 nt, Human herpesvirus 5
ugaaaauauggcauau

SEQ ID NO: 149992 - RNA, 15 nt, Human herpesvirus 5
uguuuaaugacaagu

SEQ ID NO: 149993 - RNA, 14 nt, Human herpesvirus 5
uguuucaaacagca

SEQ ID NO: 149994 - RNA, 17 nt, Human herpesvirus 5
uguuguuagacuagcac

SEQ ID NO: 149995 - RNA, 22 nt, Human herpesvirus 5
uguugucaggacgugcugucgu

SEQ ID NO: 149996 - RNA, 21 nt, Human herpesvirus 5
ugucucuaaacgccaccugca

SEQ ID NO: 149997 - RNA, 13 nt, Human herpesvirus 5
ugucucuguguag

SEQ ID NO: 149998 - RNA, 17 nt, Human herpesvirus 5
ugucacgcguguucuca

SEQ ID NO: 149999 - RNA, 19 nt, Human herpesvirus 5
ugucggcgugaaugggcac

SEQ ID NO: 150000 - RNA, 14 nt, Human herpesvirus 5
ugucuaaugugcug

SEQ ID NO: 150001 - RNA, 14 nt, Human herpesvirus 5
ugucaaucaugccg

SEQ ID NO: 150002 - RNA, 12 nt, Human herpesvirus 5
ugucaccucaca

SEQ ID NO: 150003 - RNA, 12 nt, Human herpesvirus 5
uuaaacuggaua

SEQ ID NO: 150004 - RNA, 24 nt, Human herpesvirus 5
uuaaacgucguuguguucuuacuc

SEQ ID NO: 150005 - RNA, 17 nt, Human herpesvirus 5
uuaaaguaaauacaaau

SEQ ID NO: 150006 - RNA, 19 nt, Human herpesvirus 5
uuaaaggcgcacuugucau

SEQ ID NO: 150007 - RNA, 16 nt, Human herpesvirus 5
uguuucuuaacuauuc

SEQ ID NO: 150008 - RNA, 19 nt, Human herpesvirus 5
uguuucuuauuaauuuaac

SEQ ID NO: 150009 - RNA, 22 nt, Human herpesvirus 5
uguuugaauaccguaaacauaa

SEQ ID NO: 150010 - RNA, 20 nt, Human herpesvirus 5
uuaaacccacgaccauuucc

SEQ ID NO: 150011 - RNA, 21 nt, Human herpesvirus 5
uuaaggagcucugaaacacag

SEQ ID NO: 150012 - RNA, 22 nt, Human herpesvirus 5
uuaauaaaacgccaugaugaca

SEQ ID NO: 150013 - RNA, 15 nt, Human herpesvirus 5
uuacccccguguauc

SEQ ID NO: 150014 - RNA, 13 nt, Human herpesvirus 5
uuaccccucgcug

SEQ ID NO: 150015 - RNA, 17 nt, Human herpesvirus 5
uuacgaaauucgugggu

SEQ ID NO: 150016 - RNA, 24 nt, Human herpesvirus 5
uuaccguaaagagagucacacuua

SEQ ID NO: 150017 - RNA, 22 nt, Human herpesvirus 5
uuaccuagcgaucgcaugcuuc

SEQ ID NO: 150018 - RNA, 17 nt, Human herpesvirus 5
uuauuaccgaguaccgc

SEQ ID NO: 150019 - RNA, 17 nt, Human herpesvirus 5
uuauguuacaaaacaac

SEQ ID NO: 150020 - RNA, 22 nt, Human herpesvirus 5
uuauugacuagcgaaguacaca

SEQ ID NO: 150021 - RNA, 15 nt, Human herpesvirus 5
uuauucagaaccaug

SEQ ID NO: 150022 - RNA, 16 nt, Human herpesvirus 5
uuaucugccucuuccu

SEQ ID NO: 150023 - RNA, 20 nt, Human herpesvirus 5
uuaucuguucuuccaccagc

SEQ ID NO: 150024 - RNA, 14 nt, Human herpesvirus 5
uuaucgaugcugca

SEQ ID NO: 150025 - RNA, 20 nt, Human herpesvirus 5
uuaucagaaagcugcaauca

SEQ ID NO: 150026 - RNA, 22 nt, Human herpesvirus 5
uuaucagaaagcugcaaucaaa

SEQ ID NO: 150027 - RNA, 22 nt, Human herpesvirus 5
uucaccauucucgucugugucu

SEQ ID NO: 150028 - RNA, 16 nt, Human herpesvirus 5
uucacacaaaaucuuc

SEQ ID NO: 150029 - RNA, 13 nt, Human herpesvirus 5
uucaaucauuacu

SEQ ID NO: 150030 - RNA, 23 nt, Human herpesvirus 5
uucaauaaaaaaaauauguagua

SEQ ID NO: 150031 - RNA, 14 nt, Human herpesvirus 5
uucaauaaaaacca

SEQ ID NO: 150032 - RNA, 15 nt, Human herpesvirus 5
uucaauaaaaaccac

SEQ ID NO: 150033 - RNA, 17 nt, Human herpesvirus 5
uucaauaaaaaccaccg

SEQ ID NO: 150034 - RNA, 22 nt, Human herpesvirus 5
uucaauaaaaaccaccgugucu

SEQ ID NO: 150035 - RNA, 15 nt, Human herpesvirus 5
uucaguccauuguca

SEQ ID NO: 150036 - RNA, 16 nt, Human herpesvirus 5
uucaucucuucgugac

SEQ ID NO: 150037 - RNA, 18 nt, Human herpesvirus 5
uucccucuagagacagac

SEQ ID NO: 150038 - RNA, 21 nt, Human herpesvirus 5
uuccccacccaguagacagac

SEQ ID NO: 150039 - RNA, 18 nt, Human herpesvirus 5
uucccaucucaacgucaa

SEQ ID NO: 150040 - RNA, 18 nt, Human herpesvirus 5
uuccaugugcagcuggug

SEQ ID NO: 150041 - RNA, 23 nt, Human herpesvirus 5
uuccagaccagcgccaccauagc

SEQ ID NO: 150042 - RNA, 12 nt, Human herpesvirus 5
uuccaacaccac

SEQ ID NO: 150043 - RNA, 20 nt, Human herpesvirus 5
uuccgugauagccacgacgc

SEQ ID NO: 150044 - RNA, 13 nt, Human herpesvirus 5
uuccugcagguac

SEQ ID NO: 150045 - RNA, 18 nt, Human herpesvirus 5
uuccucuucuaguacuuc

SEQ ID NO: 150046 - RNA, 12 nt, Human herpesvirus 5
uuccuguguaga

SEQ ID NO: 150047 - RNA, 21 nt, Human herpesvirus 5
uucgagugccaguacagcgcc

SEQ ID NO: 150048 - RNA, 22 nt, Human herpesvirus 5
uucgagaaugccucuacuugga

SEQ ID NO: 150049 - RNA, 23 nt, Human herpesvirus 5
uucgucgagcacccgucauggua

SEQ ID NO: 150050 - RNA, 20 nt, Human herpesvirus 5
uucgucugacgcugcuccua

SEQ ID NO: 150051 - RNA, 18 nt, Human herpesvirus 5
uucggccggcugcugcac

SEQ ID NO: 150052 - RNA, 15 nt, Human herpesvirus 5
uucggggucuuuauu

SEQ ID NO: 150053 - RNA, 14 nt, Human herpesvirus 5
uucggugaccacaa

SEQ ID NO: 150054 - RNA, 16 nt, Human herpesvirus 5
uucgccaagaugcugc

SEQ ID NO: 150055 - RNA, 14 nt, Human herpesvirus 5
uucucuggauggua

SEQ ID NO: 150056 - RNA, 16 nt, Human herpesvirus 5
uucuacuccaucauga

SEQ ID NO: 150057 - RNA, 17 nt, Human herpesvirus 5
uucuaucguaacaaaua

SEQ ID NO: 150058 - RNA, 14 nt, Human herpesvirus 5
uucuccaagggaga

SEQ ID NO: 150059 - RNA, 11 nt, Human herpesvirus 5
uucuauauucu

SEQ ID NO: 150060 - RNA, 16 nt, Human herpesvirus 5
uucugcugucaccacc

SEQ ID NO: 150061 - RNA, 20 nt, Human herpesvirus 5
uucuggucgggcguguggua

SEQ ID NO: 150062 - RNA, 18 nt, Human herpesvirus 5
uucuggaacaagaaacac

SEQ ID NO: 150063 - RNA, 13 nt, Human herpesvirus 5
uucuggcuauaau

SEQ ID NO: 150064 - RNA, 15 nt, Human herpesvirus 5
uucuguaaucuucca

SEQ ID NO: 150065 - RNA, 20 nt, Human herpesvirus 5
uucuguguaacugauaucgc

SEQ ID NO: 150066 - RNA, 22 nt, Human herpesvirus 5
uucugugugucgcaaauaucgc

SEQ ID NO: 150067 - RNA, 12 nt, Human herpesvirus 5
uucuuacuccgu

SEQ ID NO: 150068 - RNA, 19 nt, Human herpesvirus 5
uucuuauaaggaggcaaau

SEQ ID NO: 150069 - RNA, 22 nt, Human herpesvirus 5
ugccgcacgagacgcgacuccu

SEQ ID NO: 150070 - RNA, 19 nt, Human herpesvirus 5
ugcaucugccgaaacaccg

SEQ ID NO: 150071 - RNA, 14 nt, Human herpesvirus 5
ugccgcagcugcug

SEQ ID NO: 150072 - RNA, 17 nt, Human herpesvirus 5
ugcaugucgcccagaaa

SEQ ID NO: 150073 - RNA, 22 nt, Human herpesvirus 5
ugcauguuggugccccaggaug

SEQ ID NO: 150074 - RNA, 19 nt, Human herpesvirus 5
ugcaugacucguugggauu

SEQ ID NO: 150075 - RNA, 21 nt, Human herpesvirus 5
ugcaugagaacacgcgugaca

SEQ ID NO: 150076 - RNA, 20 nt, Human herpesvirus 5
ugccggucuacagacugggc

SEQ ID NO: 150077 - RNA, 16 nt, Human herpesvirus 5
ugccuacgucuucaug

SEQ ID NO: 150078 - RNA, 16 nt, Human herpesvirus 5
ugccucgacaucucgc

SEQ ID NO: 150079 - RNA, 15 nt, Human herpesvirus 5
ugccugggcacgcgc

SEQ ID NO: 150080 - RNA, 15 nt, Human herpesvirus 5
ugcgccaacggcaua

SEQ ID NO: 150081 - RNA, 20 nt, Human herpesvirus 5
ugcgccgcagcggcuuugug

SEQ ID NO: 150082 - RNA, 13 nt, Human herpesvirus 5
ugcgccgccagcg

SEQ ID NO: 150083 - RNA, 17 nt, Human herpesvirus 5
ugcgcgauacauugccc

SEQ ID NO: 150084 - RNA, 17 nt, Human herpesvirus 5
ugcgccuuccaguccau

SEQ ID NO: 150085 - RNA, 18 nt, Human herpesvirus 5
ugcgcgccacaacgccgu

SEQ ID NO: 150086 - RNA, 13 nt, Human herpesvirus 5
ugacuuacaucuc

SEQ ID NO: 150087 - RNA, 14 nt, Human herpesvirus 5
ugacuuacaucuca

SEQ ID NO: 150088 - RNA, 15 nt, Human herpesvirus 5
ugacgguacuuaucg

SEQ ID NO: 150089 - RNA, 18 nt, Human herpesvirus 5
ugacgucccuuuuacuag

SEQ ID NO: 150090 - RNA, 21 nt, Human herpesvirus 5
ugacgucccuuuuacuaguau

SEQ ID NO: 150091 - RNA, 15 nt, Human herpesvirus 5
ugacgcugucuugcu

SEQ ID NO: 150092 - RNA, 13 nt, Human herpesvirus 5
ugacggugaugcg

SEQ ID NO: 150093 - RNA, 22 nt, Human herpesvirus 5
ugacgugacucuugacguuuau

SEQ ID NO: 150094 - RNA, 13 nt, Human herpesvirus 5
ugacgugcgaugg

SEQ ID NO: 150095 - RNA, 18 nt, Human herpesvirus 5
ugacguggauacuaguaa

SEQ ID NO: 150096 - RNA, 14 nt, Human herpesvirus 5
ugacguuaucauaa

SEQ ID NO: 150097 - RNA, 16 nt, Human herpesvirus 5
ugcagcccaccgcccu

SEQ ID NO: 150098 - RNA, 15 nt, Human herpesvirus 5
ugcauccaucacauc

SEQ ID NO: 150099 - RNA, 18 nt, Human herpesvirus 5
ugcagaaguuguugcaac

SEQ ID NO: 150100 - RNA, 17 nt, Human herpesvirus 5
ugcuauaagaaggccau

SEQ ID NO: 150101 - RNA, 14 nt, Human herpesvirus 5
ugcuauaagacagc

SEQ ID NO: 150102 - RNA, 17 nt, Human herpesvirus 5
ugcuauaagacagccuu

SEQ ID NO: 150103 - RNA, 14 nt, Human herpesvirus 5
ugcggcgugcugca

SEQ ID NO: 150104 - RNA, 16 nt, Human herpesvirus 5
ugcggauccagcugcu

SEQ ID NO: 150105 - RNA, 20 nt, Human herpesvirus 5
ugcggccgccgcucacaguc

SEQ ID NO: 150106 - RNA, 20 nt, Human herpesvirus 5
ugcggcgcguagaaggcaac

SEQ ID NO: 150107 - RNA, 21 nt, Human herpesvirus 5
ugcgcucuugggcgacaugca

SEQ ID NO: 150108 - RNA, 13 nt, Human herpesvirus 5
ugcgcuacgucua

SEQ ID NO: 150109 - RNA, 16 nt, Human herpesvirus 5
ugcgcuacgucuacua

SEQ ID NO: 150110 - RNA, 21 nt, Human herpesvirus 5
ugcgcgucaucggcaccaucg

SEQ ID NO: 150111 - RNA, 18 nt, Human herpesvirus 5
ugcucaaaguacuugucg

SEQ ID NO: 150112 - RNA, 16 nt, Human herpesvirus 5
ugcucaggccacccgc

SEQ ID NO: 150113 - RNA, 24 nt, Human herpesvirus 5
ugcucccgcugcugcuguguagac

SEQ ID NO: 150114 - RNA, 21 nt, Human herpesvirus 5
ugcugcccauuguuuccucag

SEQ ID NO: 150115 - RNA, 19 nt, Human herpesvirus 5
ugcugcucggcguggucaa

SEQ ID NO: 150116 - RNA, 21 nt, Human herpesvirus 5
ugcugcuguguagacugccau

SEQ ID NO: 150117 - RNA, 22 nt, Human herpesvirus 5
uggaacggucuuuauauauaca

SEQ ID NO: 150118 - RNA, 21 nt, Human herpesvirus 5
uggaacgagcgccguccugca

SEQ ID NO: 150119 - RNA, 16 nt, Human herpesvirus 5
uggacgacuggcucaa

SEQ ID NO: 150120 - RNA, 11 nt, Human herpesvirus 5
uggacggggaa

SEQ ID NO: 150121 - RNA, 14 nt, Human herpesvirus 5
uggacgugguuacc

SEQ ID NO: 150122 - RNA, 15 nt, Human herpesvirus 5
uggacuucaaugucc

SEQ ID NO: 150123 - RNA, 15 nt, Human herpesvirus 5
ugcuuagcugcacac

SEQ ID NO: 150124 - RNA, 18 nt, Human herpesvirus 5
ugcuuaauaaacauacuu

SEQ ID NO: 150125 - RNA, 15 nt, Human herpesvirus 5
ugcuguugcacgggc

SEQ ID NO: 150126 - RNA, 17 nt, Human herpesvirus 5
ugcuguugcacgggcuc

SEQ ID NO: 150127 - RNA, 14 nt, Human herpesvirus 5
ugcugugggcccac

SEQ ID NO: 150128 - RNA, 17 nt, Human herpesvirus 5
uggaaaacguacgugau

SEQ ID NO: 150129 - RNA, 19 nt, Human herpesvirus 5
uggaaaauauaccaggcau

SEQ ID NO: 150130 - RNA, 22 nt, Human herpesvirus 5
uggguuacgagaaacugggaua

SEQ ID NO: 150131 - RNA, 19 nt, Human herpesvirus 5
uggguguuucuccgugugu

SEQ ID NO: 150132 - RNA, 20 nt, Human herpesvirus 5
ugguaccugaaaccuaccug

SEQ ID NO: 150133 - RNA, 12 nt, Human herpesvirus 5
ugguaccugcaa

SEQ ID NO: 150134 - RNA, 15 nt, Human herpesvirus 5
ugggucgccaggugu

SEQ ID NO: 150135 - RNA, 16 nt, Human herpesvirus 5
ugggucgggagcacau

SEQ ID NO: 150136 - RNA, 17 nt, Human herpesvirus 5
ugggucgggagcacaua

SEQ ID NO: 150137 - RNA, 18 nt, Human herpesvirus 5
ugggucgggagcacauac

SEQ ID NO: 150138 - RNA, 14 nt, Human herpesvirus 5
ugggucugguuaca

SEQ ID NO: 150139 - RNA, 18 nt, Human herpesvirus 5
ugggcaugcaaugcaaca

SEQ ID NO: 150140 - RNA, 21 nt, Human herpesvirus 5
uguaacacuacagcuugcaau

SEQ ID NO: 150141 - RNA, 12 nt, Human herpesvirus 5
uguacuugcuca

SEQ ID NO: 150142 - RNA, 20 nt, Human herpesvirus 5
uguagacugccauucuuacu

SEQ ID NO: 150143 - RNA, 19 nt, Human herpesvirus 5
uguagcgccgacggugaga

SEQ ID NO: 150144 - RNA, 22 nt, Human herpesvirus 5
uguagcgggcugucacaucaac

SEQ ID NO: 150145 - RNA, 15 nt, Human herpesvirus 5
uguaucguguaucua

SEQ ID NO: 150146 - RNA, 16 nt, Human herpesvirus 5
uguaguaucauauuau

SEQ ID NO: 150147 - RNA, 20 nt, Human herpesvirus 5
uguauagaccccaagccaaa

SEQ ID NO: 150148 - RNA, 22 nt, Human herpesvirus 5
uguauagaccccaagccaaaaa

SEQ ID NO: 150149 - RNA, 17 nt, Human herpesvirus 5
uggcuguagcuauugug

SEQ ID NO: 150150 - RNA, 21 nt, Human herpesvirus 5
ugggaaugacggugauucuau

SEQ ID NO: 150151 - RNA, 16 nt, Human herpesvirus 5
ugggaaugcacguguu

SEQ ID NO: 150152 - RNA, 22 nt, Human herpesvirus 5
ugggaaugguaaagacaucguc

SEQ ID NO: 150153 - RNA, 16 nt, Human herpesvirus 5
ugggaagggugugacu

SEQ ID NO: 150154 - RNA, 23 nt, Human herpesvirus 5
uggccuuacagguggagauucua

SEQ ID NO: 150155 - RNA, 22 nt, Human herpesvirus 5
uggcgauauuggaaaaaucgau

SEQ ID NO: 150156 - RNA, 18 nt, Human herpesvirus 5
uggcggccguggccugug

SEQ ID NO: 150157 - RNA, 18 nt, Human herpesvirus 5
uggcuccgcggacuuuaa

SEQ ID NO: 150158 - RNA, 14 nt, Human herpesvirus 5
uggcucgccuuccc

SEQ ID NO: 150159 - RNA, 16 nt, Human herpesvirus 5
uggcugccgcuacuga

SEQ ID NO: 150160 - RNA, 21 nt, Human herpesvirus 5
uggcugcgcgccuccguccuc

SEQ ID NO: 150161 - RNA, 16 nt, Human herpesvirus 5
uggcugcuuaaugaca

SEQ ID NO: 150162 - RNA, 16 nt, Human herpesvirus 5
uggcauauagccaaua

SEQ ID NO: 150163 - RNA, 18 nt, Human herpesvirus 5
uggcauauagccaauaaa

SEQ ID NO: 150164 - RNA, 16 nt, Human herpesvirus 5
uggccuacggcugcau

SEQ ID NO: 150165 - RNA, 19 nt, Human herpesvirus 5
uggccgucuuggguagcuu

SEQ ID NO: 150166 - RNA, 23 nt, Human herpesvirus 5
uggccgugcugggcugggugcau

SEQ ID NO: 150167 - RNA, 16 nt, Human herpesvirus 5
uggccucgauccaucc

SEQ ID NO: 150168 - RNA, 14 nt, Human herpesvirus 5
uggccugcaucuuc

SEQ ID NO: 150169 - RNA, 17 nt, Human herpesvirus 5
uggccgccacaccuguc

SEQ ID NO: 150170 - RNA, 23 nt, Human herpesvirus 5
uggcccaggguacggaucuuauu

SEQ ID NO: 150171 - RNA, 17 nt, Human herpesvirus 5
uggccagcgccugguac

SEQ ID NO: 150172 - RNA, 21 nt, Human herpesvirus 5
uggccaguauaaaauggucgu

SEQ ID NO: 150173 - RNA, 15 nt, Human herpesvirus 5
uggagacacaacguu

SEQ ID NO: 150174 - RNA, 22 nt, Human herpesvirus 5
uggagcacacugcuacccugcg

SEQ ID NO: 150175 - RNA, 21 nt, Human herpesvirus 5
uggaggagacuaccucaguca

SEQ ID NO: 150176 - RNA, 19 nt, Human herpesvirus 5
uggauacaagcuugguaca

SEQ ID NO: 150177 - RNA, 13 nt, Human herpesvirus 5
uggauacuaguaa

SEQ ID NO: 150178 - RNA, 22 nt, Human herpesvirus 5
uggaggacaguauuuacuucac

SEQ ID NO: 150179 - RNA, 15 nt, Human herpesvirus 5
uuuaaggagcucuga

SEQ ID NO: 150180 - RNA, 17 nt, Human herpesvirus 5
uuuagccaggugaccag

SEQ ID NO: 150181 - RNA, 11 nt, Human herpesvirus 5
uuuauaugauc

SEQ ID NO: 150182 - RNA, 16 nt, Human herpesvirus 5
uuucauaaauucugac

SEQ ID NO: 150183 - RNA, 12 nt, Human herpesvirus 5
uuuaugagaaaa

SEQ ID NO: 150184 - RNA, 15 nt, Human herpesvirus 5
uuuccaaaagugauu

SEQ ID NO: 150185 - RNA, 15 nt, Human herpesvirus 5
uuucaugucuuacaa

SEQ ID NO: 150186 - RNA, 19 nt, Human herpesvirus 5
uuucauaguugcuauaccu

SEQ ID NO: 150187 - RNA, 13 nt, Human herpesvirus 5
uuucaugcucaua

SEQ ID NO: 150188 - RNA, 20 nt, Human herpesvirus 5
uugucuccccggugugucua

SEQ ID NO: 150189 - RNA, 23 nt, Human herpesvirus 5
uugucuccccggugugucuauua

SEQ ID NO: 150190 - RNA, 20 nt, Human herpesvirus 5
uugucgcggcccaugaggua

SEQ ID NO: 150191 - RNA, 24 nt, Human herpesvirus 5
uugucgccaugcuucaugucgucc

SEQ ID NO: 150192 - RNA, 18 nt, Human herpesvirus 5
uuguuuguggguguugcu

SEQ ID NO: 150193 - RNA, 15 nt, Human herpesvirus 5
uuuaacaagucacua

SEQ ID NO: 150194 - RNA, 20 nt, Human herpesvirus 5
uucuuccaccagcuacuuua

SEQ ID NO: 150195 - RNA, 18 nt, Human herpesvirus 5
uucuugccaagcuuuagc

SEQ ID NO: 150196 - RNA, 21 nt, Human herpesvirus 5
uucuugccaagcuuuagccag

SEQ ID NO: 150197 - RNA, 22 nt, Human herpesvirus 5
uuguccucuccuccuucuuccu

SEQ ID NO: 150198 - RNA, 13 nt, Human herpesvirus 5
uuguccuucuccc

SEQ ID NO: 150199 - RNA, 21 nt, Human herpesvirus 5
uugucaguauuuuugugcuca

SEQ ID NO: 150200 - RNA, 17 nt, Human herpesvirus 5
uuucuguguaacugaua

SEQ ID NO: 150201 - RNA, 23 nt, Human herpesvirus 5
uuuccccgccccaucaccucgcc

SEQ ID NO: 150202 - RNA, 15 nt, Human herpesvirus 5
uuugcgacaguugcc

SEQ ID NO: 150203 - RNA, 14 nt, Human herpesvirus 5
uuugacgugcucaa

SEQ ID NO: 150204 - RNA, 13 nt, Human herpesvirus 5
uuugagcacaaac

SEQ ID NO: 150205 - RNA, 18 nt, Human herpesvirus 5
uuugaauaccguaaacau

SEQ ID NO: 150206 - RNA, 21 nt, Human herpesvirus 5
uuugugcacgcacgacaugac

SEQ ID NO: 150207 - RNA, 17 nt, Human herpesvirus 5
uuuguggggcugcucaa

SEQ ID NO: 150208 - RNA, 13 nt, Human herpesvirus 5
uuuuccauuucgc

SEQ ID NO: 150209 - RNA, 14 nt, Human herpesvirus 5
uuuucgaugauaca

SEQ ID NO: 150210 - RNA, 18 nt, Human herpesvirus 5
aaccaaaacgucaggaau

SEQ ID NO: 150211 - RNA, 16 nt, Human herpesvirus 5
aaccaauaacaugucu

SEQ ID NO: 150212 - RNA, 15 nt, Human herpesvirus 5
aaccaaaaaaccccu

SEQ ID NO: 150213 - RNA, 21 nt, Human herpesvirus 5
aacauuuguugagucaugaca

SEQ ID NO: 150214 - RNA, 17 nt, Human herpesvirus 5
aacaugggcaugcaaug

SEQ ID NO: 150215 - RNA, 20 nt, Human herpesvirus 5
uuuuucaugucuuacaaauc

SEQ ID NO: 150216 - RNA, 19 nt, Human herpesvirus 5
uuuuguuaacaaccuauga

SEQ ID NO: 150217 - RNA, 15 nt, Human herpesvirus 5
uuuuguuaguauucu

SEQ ID NO: 150218 - RNA, 18 nt, Human herpesvirus 5
uuuugcucuaaaaacacc

SEQ ID NO: 150219 - RNA, 21 nt, Human herpesvirus 5
aacagcagggagccagauggc

SEQ ID NO: 150220 - RNA, 11 nt, Human herpesvirus 5
aacagcacauu

SEQ ID NO: 150221 - RNA, 21 nt, Human herpesvirus 5
aacccauccccucgccacgac

SEQ ID NO: 150222 - RNA, 17 nt, Human herpesvirus 5
aaccauuggcaacauca

SEQ ID NO: 150223 - RNA, 19 nt, Human herpesvirus 5
aaccauuggcaacaucacc

SEQ ID NO: 150224 - RNA, 20 nt, Human herpesvirus 5
aacccacguccacucagaca

SEQ ID NO: 150225 - RNA, 15 nt, Human herpesvirus 5
aaccgcaaaggccac

SEQ ID NO: 150226 - RNA, 15 nt, Human herpesvirus 5
aaccgagacggagga

SEQ ID NO: 150227 - RNA, 18 nt, Human herpesvirus 5
aaccacgucgaccaggug

SEQ ID NO: 150228 - RNA, 15 nt, Human herpesvirus 5
aaccacgaguaacac

SEQ ID NO: 150229 - RNA, 19 nt, Human herpesvirus 5
aaccacacagauauccaca

SEQ ID NO: 150230 - RNA, 18 nt, Human herpesvirus 5
aaccaccguuucuacaaa

SEQ ID NO: 150231 - RNA, 19 nt, Human herpesvirus 5
aaccaugcuacgccgggga

SEQ ID NO: 150232 - RNA, 20 nt, Human herpesvirus 5
aaccagugcgucgcuguuga

SEQ ID NO: 150233 - RNA, 19 nt, Human herpesvirus 5
aaccagaucacuaucuuca

SEQ ID NO: 150234 - RNA, 18 nt, Human herpesvirus 5
aacugugaugucuaucuc

SEQ ID NO: 150235 - RNA, 12 nt, Human herpesvirus 5
aacugcugccuc

SEQ ID NO: 150236 - RNA, 14 nt, Human herpesvirus 5
aacugcaccagcaa

SEQ ID NO: 150237 - RNA, 19 nt, Human herpesvirus 5
aacugcaccagcaaccacc

SEQ ID NO: 150238 - RNA, 22 nt, Human herpesvirus 5
aacuggcaaaaagcgccgugcu

SEQ ID NO: 150239 - RNA, 22 nt, Human herpesvirus 5
aacuggaaagagagacauggac

SEQ ID NO: 150240 - RNA, 14 nt, Human herpesvirus 5
aaccguauauucua

SEQ ID NO: 150241 - RNA, 20 nt, Human herpesvirus 5
aaccguauauucuacauuca

SEQ ID NO: 150242 - RNA, 17 nt, Human herpesvirus 5
aaccugagaacaugugg

SEQ ID NO: 150243 - RNA, 14 nt, Human herpesvirus 5
aaccuuguaaugcu

SEQ ID NO: 150244 - RNA, 21 nt, Human herpesvirus 5
aacuacgcuacgaccuggccu

SEQ ID NO: 150245 - RNA, 15 nt, Human herpesvirus 5
aacuaauauugcaau

SEQ ID NO: 150246 - RNA, 12 nt, Human herpesvirus 5
aacuauuccacu

SEQ ID NO: 150247 - RNA, 15 nt, Human herpesvirus 5
aacugaccaagcuag

SEQ ID NO: 150248 - RNA, 18 nt, Human herpesvirus 5
aacuagcauucuggugag

SEQ ID NO: 150249 - RNA, 13 nt, Human herpesvirus 5
aauaccacaacca

SEQ ID NO: 150250 - RNA, 15 nt, Human herpesvirus 5
aauaccacaaccauc

SEQ ID NO: 150251 - RNA, 16 nt, Human herpesvirus 5
aauaccaccgucacgu

SEQ ID NO: 150252 - RNA, 14 nt, Human herpesvirus 5
aauacaugaugaau

SEQ ID NO: 150253 - RNA, 20 nt, Human herpesvirus 5
aauacagauacgcaaugcau

SEQ ID NO: 150254 - RNA, 22 nt, Human herpesvirus 5
aauacaccgagccauuccuuua

SEQ ID NO: 150255 - RNA, 14 nt, Human herpesvirus 5
aauacacaacagcu

SEQ ID NO: 150256 - RNA, 20 nt, Human herpesvirus 5
aauacaaaugaggcacauga

SEQ ID NO: 150257 - RNA, 20 nt, Human herpesvirus 5
aauaaucccuguaauuauuc

SEQ ID NO: 150258 - RNA, 12 nt, Human herpesvirus 5
aauaauggucaa

SEQ ID NO: 150259 - RNA, 14 nt, Human herpesvirus 5
aauaauggucaaua

SEQ ID NO: 150260 - RNA, 15 nt, Human herpesvirus 5
aaguuauccuguuga

SEQ ID NO: 150261 - RNA, 23 nt, Human herpesvirus 5
aaguugcgguaaaaccacgucaa

SEQ ID NO: 150262 - RNA, 14 nt, Human herpesvirus 5
aaguugguggugga

SEQ ID NO: 150263 - RNA, 15 nt, Human herpesvirus 5
aaguuuauggggaaa

SEQ ID NO: 150264 - RNA, 13 nt, Human herpesvirus 5
aauaacaccaaaa

SEQ ID NO: 150265 - RNA, 22 nt, Human herpesvirus 5
aauaacaccaaaaauccagaca

SEQ ID NO: 150266 - RNA, 15 nt, Human herpesvirus 5
aauaacccacaccua

SEQ ID NO: 150267 - RNA, 15 nt, Human herpesvirus 5
aauaacaacacauca

SEQ ID NO: 150268 - RNA, 16 nt, Human herpesvirus 5
aauaacaacacaucaa

SEQ ID NO: 150269 - RNA, 19 nt, Human herpesvirus 5
aauaauaagccggcagcug

SEQ ID NO: 150270 - RNA, 15 nt, Human herpesvirus 5
aauaaguaccucuaa

SEQ ID NO: 150271 - RNA, 16 nt, Human herpesvirus 5
aauaucaucugcaccu

SEQ ID NO: 150272 - RNA, 22 nt, Human herpesvirus 5
aauauauggaguuuguguaaug

SEQ ID NO: 150273 - RNA, 18 nt, Human herpesvirus 5
aauauagcgucucucuua

SEQ ID NO: 150274 - RNA, 16 nt, Human herpesvirus 5
aauauagggacagucc

SEQ ID NO: 150275 - RNA, 23 nt, Human herpesvirus 5
aauaccgguuguaaucauccuaa

SEQ ID NO: 150276 - RNA, 14 nt, Human herpesvirus 5
aauauguaguccgu

SEQ ID NO: 150277 - RNA, 18 nt, Human herpesvirus 5
aaucagcagugaguacac

SEQ ID NO: 150278 - RNA, 13 nt, Human herpesvirus 5
aagcguucagugu

SEQ ID NO: 150279 - RNA, 22 nt, Human herpesvirus 5
aagcgcuaccucggccuuuuca

SEQ ID NO: 150280 - RNA, 13 nt, Human herpesvirus 5
aagcgcuuucuga

SEQ ID NO: 150281 - RNA, 14 nt, Human herpesvirus 5
aagcgccgucacuu

SEQ ID NO: 150282 - RNA, 17 nt, Human herpesvirus 5
aagcgccgucacuuccc

SEQ ID NO: 150283 - RNA, 16 nt, Human herpesvirus 5
aaggaucauguagaaa

SEQ ID NO: 150284 - RNA, 21 nt, Human herpesvirus 5
aaggaggacauggacucgcca

SEQ ID NO: 150285 - RNA, 15 nt, Human herpesvirus 5
aaggagcaaaaccgg

SEQ ID NO: 150286 - RNA, 22 nt, Human herpesvirus 5
aagaauccguccccacguccac

SEQ ID NO: 150287 - RNA, 12 nt, Human herpesvirus 5
aagccuggguac

SEQ ID NO: 150288 - RNA, 20 nt, Human herpesvirus 5
aagaauguugcgaauucaua

SEQ ID NO: 150289 - RNA, 12 nt, Human herpesvirus 5
aaguaugugcuc

SEQ ID NO: 150290 - RNA, 21 nt, Human herpesvirus 5
aaguaucgacacuaauuuauc

SEQ ID NO: 150291 - RNA, 13 nt, Human herpesvirus 5
aagggugugacug

SEQ ID NO: 150292 - RNA, 13 nt, Human herpesvirus 5
aaguacacuggua

SEQ ID NO: 150293 - RNA, 17 nt, Human herpesvirus 5
aaguacggagauguggu

SEQ ID NO: 150294 - RNA, 16 nt, Human herpesvirus 5
aaguacgucuaugaga

SEQ ID NO: 150295 - RNA, 13 nt, Human herpesvirus 5
aaguaccucuaac

SEQ ID NO: 150296 - RNA, 14 nt, Human herpesvirus 5
aaguagcaccacaa

SEQ ID NO: 150297 - RNA, 15 nt, Human herpesvirus 5
aagggacgucaaagc

SEQ ID NO: 150298 - RNA, 16 nt, Human herpesvirus 5
aaggcggccguccuuc

SEQ ID NO: 150299 - RNA, 15 nt, Human herpesvirus 5
aaugucaucaucacg

SEQ ID NO: 150300 - RNA, 20 nt, Human herpesvirus 5
aauguuuuuauuuaaaacug

SEQ ID NO: 150301 - RNA, 17 nt, Human herpesvirus 5
aauuagugucgauacuu

SEQ ID NO: 150302 - RNA, 19 nt, Human herpesvirus 5
aauucacaaaaacaccaau

SEQ ID NO: 150303 - RNA, 17 nt, Human herpesvirus 5
aauucaauaaaaaccac

SEQ ID NO: 150304 - RNA, 16 nt, Human herpesvirus 5
aauuccacucgcagau

SEQ ID NO: 150305 - RNA, 22 nt, Human herpesvirus 5
aauuccccugccuacgucuuca

SEQ ID NO: 150306 - RNA, 24 nt, Human herpesvirus 5
aauugcucuacugcaacugcacca

SEQ ID NO: 150307 - RNA, 20 nt, Human herpesvirus 5
aauugcuacgucacaauaac

SEQ ID NO: 150308 - RNA, 22 nt, Human herpesvirus 5
aauugacauacgguaaugccau

SEQ ID NO: 150309 - RNA, 23 nt, Human herpesvirus 5
aauugcacgguccggcaccguua

SEQ ID NO: 150310 - RNA, 14 nt, Human herpesvirus 5
aauuggagacacaa

SEQ ID NO: 150311 - RNA, 12 nt, Human herpesvirus 5
aaugguguuaca

SEQ ID NO: 150312 - RNA, 17 nt, Human herpesvirus 5
aaugguaugaugaauca

SEQ ID NO: 150313 - RNA, 14 nt, Human herpesvirus 5
aauguauagauaca

SEQ ID NO: 150314 - RNA, 18 nt, Human herpesvirus 5
aaugucguaguacaauac

SEQ ID NO: 150315 - RNA, 18 nt, Human herpesvirus 5
aaugggaaacggacacua

SEQ ID NO: 150316 - RNA, 14 nt, Human herpesvirus 5
aauggccaacagcc

SEQ ID NO: 150317 - RNA, 19 nt, Human herpesvirus 5
aaugccucauccuuaugag

SEQ ID NO: 150318 - RNA, 21 nt, Human herpesvirus 5
aaugccaugcggauccagcug

SEQ ID NO: 150319 - RNA, 17 nt, Human herpesvirus 5
aaugcugcucagguaca

SEQ ID NO: 150320 - RNA, 20 nt, Human herpesvirus 5
aaucugccaaucgcaccuua

SEQ ID NO: 150321 - RNA, 22 nt, Human herpesvirus 5
aaucugggagguggcugggcuc

SEQ ID NO: 150322 - RNA, 23 nt, Human herpesvirus 5
aaucugggagguggcugggcuca

SEQ ID NO: 150323 - RNA, 19 nt, Human herpesvirus 5
aaucugucguacuguccuu

SEQ ID NO: 150324 - RNA, 19 nt, Human herpesvirus 5
aaucugacguccagcacca

SEQ ID NO: 150325 - RNA, 14 nt, Human herpesvirus 5
aaucaugccgguau

SEQ ID NO: 150326 - RNA, 13 nt, Human herpesvirus 5
aaucauggcuucc

SEQ ID NO: 150327 - RNA, 18 nt, Human herpesvirus 5
aaucuaggaacacugaaa

SEQ ID NO: 150328 - RNA, 13 nt, Human herpesvirus 5
aaugcaacacuaa

SEQ ID NO: 150329 - RNA, 19 nt, Human herpesvirus 5
aaugcagcgaauugagcaa

SEQ ID NO: 150330 - RNA, 20 nt, Human herpesvirus 5
aaagucuggguuuccagaua

SEQ ID NO: 150331 - RNA, 19 nt, Human herpesvirus 5
aaagucuacgaucgcugga

SEQ ID NO: 150332 - RNA, 22 nt, Human herpesvirus 5
aaaguaucgacacuaauuuauc

SEQ ID NO: 150333 - RNA, 16 nt, Human herpesvirus 5
aaaguucaaaguccgu

SEQ ID NO: 150334 - RNA, 19 nt, Human herpesvirus 5
aaaguucaaaguccgucau

SEQ ID NO: 150335 - RNA, 22 nt, Human herpesvirus 5
aaaguacuugucggcgugaaug

SEQ ID NO: 150336 - RNA, 16 nt, Human herpesvirus 5
aaaguagcaccacaag

SEQ ID NO: 150337 - RNA, 13 nt, Human herpesvirus 5
aaaguaugugcuc

SEQ ID NO: 150338 - RNA, 15 nt, Human herpesvirus 5
aaaguagguacuaac

SEQ ID NO: 150339 - RNA, 19 nt, Human herpesvirus 5
aaagguggaaaucccucac

SEQ ID NO: 150340 - RNA, 16 nt, Human herpesvirus 5
aaagguaugugugaau

SEQ ID NO: 150341 - RNA, 18 nt, Human herpesvirus 5
aaaggcgcacuugucauu

SEQ ID NO: 150342 - RNA, 18 nt, Human herpesvirus 5
aaaggcaccggcagccca

SEQ ID NO: 150343 - RNA, 13 nt, Human herpesvirus 5
aaagcuaacauuc

SEQ ID NO: 150344 - RNA, 20 nt, Human herpesvirus 5
aaagcgggaccuuacaguuu

SEQ ID NO: 150345 - RNA, 18 nt, Human herpesvirus 5
aaagcucuuagcguguga

SEQ ID NO: 150346 - RNA, 15 nt, Human herpesvirus 5
aaagcugcaaucaaa

SEQ ID NO: 150347 - RNA, 22 nt, Human herpesvirus 5
aaagcuucggccggcugcugca

SEQ ID NO: 150348 - RNA, 11 nt, Human herpesvirus 5
aaacuuaugau

SEQ ID NO: 150349 - RNA, 21 nt, Human herpesvirus 5
aaagcaccaugagccucaggu

SEQ ID NO: 150350 - RNA, 17 nt, Human herpesvirus 5
aaagccgacaaccugcu

SEQ ID NO: 150351 - RNA, 20 nt, Human herpesvirus 5
aaagccgacaaccugcugca

SEQ ID NO: 150352 - RNA, 21 nt, Human herpesvirus 5
aaagccggcuccaagugcaag

SEQ ID NO: 150353 - RNA, 22 nt, Human herpesvirus 5
aaagccggcuccaagugcaagc

SEQ ID NO: 150354 - RNA, 15 nt, Human herpesvirus 5
aaacugaccaagcua

SEQ ID NO: 150355 - RNA, 12 nt, Human herpesvirus 5
aaacugggauac

SEQ ID NO: 150356 - RNA, 21 nt, Human herpesvirus 5
aaacuacuaauacagauacgc

SEQ ID NO: 150357 - RNA, 21 nt, Human herpesvirus 5
aaacguugagacuaccacaug

SEQ ID NO: 150358 - RNA, 22 nt, Human herpesvirus 5
aaacgggaccaucgugcucauc

SEQ ID NO: 150359 - RNA, 17 nt, Human herpesvirus 5
aaacgucaggaaucugg

SEQ ID NO: 150360 - RNA, 15 nt, Human herpesvirus 5
gacacagcacgcuga

SEQ ID NO: 150361 - RNA, 12 nt, Human herpesvirus 5
gacacagcagca

SEQ ID NO: 150362 - RNA, 15 nt, Human herpesvirus 5
gacacagcagcacca

SEQ ID NO: 150363 - RNA, 21 nt, Human herpesvirus 5
gacacagcuccugaaugagcu

SEQ ID NO: 150364 - RNA, 18 nt, Human herpesvirus 5
gacacaugcacaauacga

SEQ ID NO: 150365 - RNA, 21 nt, Human herpesvirus 5
gacacauuucggaagccaugc

SEQ ID NO: 150366 - RNA, 12 nt, Human herpesvirus 5
gacaauggacug

SEQ ID NO: 150367 - RNA, 22 nt, Human herpesvirus 5
gacaagguggugaacugugaug

SEQ ID NO: 150368 - RNA, 16 nt, Human herpesvirus 5
gacaaguucgaucuca

SEQ ID NO: 150369 - RNA, 23 nt, Human herpesvirus 5
gacagcgcgacgagcgcugcgaa

SEQ ID NO: 150370 - RNA, 19 nt, Human herpesvirus 5
gacagcgcuggccgaucca

SEQ ID NO: 150371 - RNA, 14 nt, Human herpesvirus 5
gacagacgauauga

SEQ ID NO: 150372 - RNA, 20 nt, Human herpesvirus 5
gacagacgauaugaggcuau

SEQ ID NO: 150373 - RNA, 23 nt, Human herpesvirus 5
gacagacgauaugaggcuauauc

SEQ ID NO: 150374 - RNA, 18 nt, Human herpesvirus 5
gacacuuuaggcggcgca

SEQ ID NO: 150375 - RNA, 17 nt, Human herpesvirus 5
gacacuuuggcucuuuc

SEQ ID NO: 150376 - RNA, 17 nt, Human herpesvirus 5
gacacucaguacuuugg

SEQ ID NO: 150377 - RNA, 19 nt, Human herpesvirus 5
gacacucgaagcaacaaua

SEQ ID NO: 150378 - RNA, 22 nt, Human herpesvirus 5
gacacucuggcccugcuguaca

SEQ ID NO: 150379 - RNA, 14 nt, Human herpesvirus 5
gacacgguguuucg

SEQ ID NO: 150380 - RNA, 19 nt, Human herpesvirus 5
gacccuccccccaucccgc

SEQ ID NO: 150381 - RNA, 19 nt, Human herpesvirus 5
gacccuccuaaaccuggua

SEQ ID NO: 150382 - RNA, 21 nt, Human herpesvirus 5
gaccgcaacgugcugcugaug

SEQ ID NO: 150383 - RNA, 14 nt, Human herpesvirus 5
gacccaucgcacca

SEQ ID NO: 150384 - RNA, 19 nt, Human herpesvirus 5
gacccagggcugcuccaac

SEQ ID NO: 150385 - RNA, 13 nt, Human herpesvirus 5
gacccagggucag

SEQ ID NO: 150386 - RNA, 17 nt, Human herpesvirus 5
gaccauggucggugaca

SEQ ID NO: 150387 - RNA, 22 nt, Human herpesvirus 5
gaccucacguugaacuaccacu

SEQ ID NO: 150388 - RNA, 18 nt, Human herpesvirus 5
gaccggugguacugcugu

SEQ ID NO: 150389 - RNA, 16 nt, Human herpesvirus 5
gaccucuuugagcaca

SEQ ID NO: 150390 - RNA, 19 nt, Human herpesvirus 5
aaauagcagugacugggua

SEQ ID NO: 150391 - RNA, 12 nt, Human herpesvirus 5
aaacgcuggaaa

SEQ ID NO: 150392 - RNA, 24 nt, Human herpesvirus 5
aaaccugguagacgaaagacaaug

SEQ ID NO: 150393 - RNA, 16 nt, Human herpesvirus 5
aaaccuguuccuguca

SEQ ID NO: 150394 - RNA, 23 nt, Human herpesvirus 5
aaaccucagucugccuccuagua

SEQ ID NO: 150395 - RNA, 14 nt, Human herpesvirus 5
gaauccaucaucua

SEQ ID NO: 150396 - RNA, 13 nt, Human herpesvirus 5
gaaucaugugguc

SEQ ID NO: 150397 - RNA, 16 nt, Human herpesvirus 5
gaauaaaucaccguga

SEQ ID NO: 150398 - RNA, 17 nt, Human herpesvirus 5
gaauaacaacacaucaa

SEQ ID NO: 150399 - RNA, 14 nt, Human herpesvirus 5
gaauaauccgugcg

SEQ ID NO: 150400 - RNA, 15 nt, Human herpesvirus 5
gaagcggugcugaug

SEQ ID NO: 150401 - RNA, 20 nt, Human herpesvirus 5
gaagccuggggcaccuaucu

SEQ ID NO: 150402 - RNA, 21 nt, Human herpesvirus 5
gaagccaggcgcgcucucgau

SEQ ID NO: 150403 - RNA, 21 nt, Human herpesvirus 5
gaagccauaaaaauaugggaa

SEQ ID NO: 150404 - RNA, 21 nt, Human herpesvirus 5
gaaguggaagcggugcugaug

SEQ ID NO: 150405 - RNA, 13 nt, Human herpesvirus 5
gaaguuguugcaa

SEQ ID NO: 150406 - RNA, 17 nt, Human herpesvirus 5
gaaguuguugcaacugu

SEQ ID NO: 150407 - RNA, 13 nt, Human herpesvirus 5
gaagucugcuaca

SEQ ID NO: 150408 - RNA, 23 nt, Human herpesvirus 5
gaagcagcaaugucguaguacaa

SEQ ID NO: 150409 - RNA, 20 nt, Human herpesvirus 5
gaagcacccauuacaguaac

SEQ ID NO: 150410 - RNA, 20 nt, Human herpesvirus 5
gaagaugcuauccgcugcga

SEQ ID NO: 150411 - RNA, 22 nt, Human herpesvirus 5
gaacuacagcuucuuucucacc

SEQ ID NO: 150412 - RNA, 15 nt, Human herpesvirus 5
gaacguucuguaauc

SEQ ID NO: 150413 - RNA, 20 nt, Human herpesvirus 5
gaacguucuguaaucuucca

SEQ ID NO: 150414 - RNA, 13 nt, Human herpesvirus 5
gaacggaagaaga

SEQ ID NO: 150415 - RNA, 15 nt, Human herpesvirus 5
cuugucuccccggug

SEQ ID NO: 150416 - RNA, 17 nt, Human herpesvirus 5
cuuuaacccaaaaccau

SEQ ID NO: 150417 - RNA, 16 nt, Human herpesvirus 5
cuuguuuuaucuuuaa

SEQ ID NO: 150418 - RNA, 16 nt, Human herpesvirus 5
cuuuacauaaaaccac

SEQ ID NO: 150419 - RNA, 21 nt, Human herpesvirus 5
cuuuaagguacgggucuacca

SEQ ID NO: 150420 - RNA, 23 nt, Human herpesvirus 5
cuuuauucucaucuuuugcucca

SEQ ID NO: 150421 - RNA, 12 nt, Human herpesvirus 5
cuuuauugacua

SEQ ID NO: 150422 - RNA, 15 nt, Human herpesvirus 5
cuuuauauauacaaa

SEQ ID NO: 150423 - RNA, 21 nt, Human herpesvirus 5
cuuuauuuacgagguacuguu

SEQ ID NO: 150424 - RNA, 18 nt, Human herpesvirus 5
gaaauucaauaaaaacca

SEQ ID NO: 150425 - RNA, 14 nt, Human herpesvirus 5
gaaauuaugaacuu

SEQ ID NO: 150426 - RNA, 22 nt, Human herpesvirus 5
gaaauguugacccagggcugcu

SEQ ID NO: 150427 - RNA, 21 nt, Human herpesvirus 5
cuuuaccuagcgaucgcaugc

SEQ ID NO: 150428 - RNA, 16 nt, Human herpesvirus 5
cuuuacggugcugcgu

SEQ ID NO: 150429 - RNA, 17 nt, Human herpesvirus 5
gaacacacagauuuucu

SEQ ID NO: 150430 - RNA, 20 nt, Human herpesvirus 5
gaaccagcugguaccugaaa

SEQ ID NO: 150431 - RNA, 18 nt, Human herpesvirus 5
gaaccacguugucuaucc

SEQ ID NO: 150432 - RNA, 13 nt, Human herpesvirus 5
gaaccugcucaaa

SEQ ID NO: 150433 - RNA, 17 nt, Human herpesvirus 5
gaacgacacaugcacaa

SEQ ID NO: 150434 - RNA, 18 nt, Human herpesvirus 5
gaacgacacaugcacaau

SEQ ID NO: 150435 - RNA, 12 nt, Human herpesvirus 5
gaaccgcacgga

SEQ ID NO: 150436 - RNA, 15 nt, Human herpesvirus 5
gaaccuacgugcaac

SEQ ID NO: 150437 - RNA, 17 nt, Human herpesvirus 5
gaggccacccacccggu

SEQ ID NO: 150438 - RNA, 20 nt, Human herpesvirus 5
gaggaguccgucauggacga

SEQ ID NO: 150439 - RNA, 13 nt, Human herpesvirus 5
gaggcgguggcug

SEQ ID NO: 150440 - RNA, 21 nt, Human herpesvirus 5
gagguggagcuaauagauuaa

SEQ ID NO: 150441 - RNA, 16 nt, Human herpesvirus 5
gagguauggugaccau

SEQ ID NO: 150442 - RNA, 14 nt, Human herpesvirus 5
gagaaagcuaacau

SEQ ID NO: 150443 - RNA, 16 nt, Human herpesvirus 5
gagaaaagggacagaa

SEQ ID NO: 150444 - RNA, 23 nt, Human herpesvirus 5
gagacuaucuacaacacuacccu

SEQ ID NO: 150445 - RNA, 15 nt, Human herpesvirus 5
gagacggcuccgccg

SEQ ID NO: 150446 - RNA, 20 nt, Human herpesvirus 5
gagaccgucgccaccaugca

SEQ ID NO: 150447 - RNA, 20 nt, Human herpesvirus 5
gagcgaguggggcaacugcu

SEQ ID NO: 150448 - RNA, 15 nt, Human herpesvirus 5
gagcgccuucugcua

SEQ ID NO: 150449 - RNA, 20 nt, Human herpesvirus 5
gagccugaaguaagcauggc

SEQ ID NO: 150450 - RNA, 14 nt, Human herpesvirus 5
gagacuggugguga

SEQ ID NO: 150451 - RNA, 20 nt, Human herpesvirus 5
gacuaacccugggcuauaug

SEQ ID NO: 150452 - RNA, 13 nt, Human herpesvirus 5
gacguuacacggg

SEQ ID NO: 150453 - RNA, 20 nt, Human herpesvirus 5
gacguuaucgaugcugcaag

SEQ ID NO: 150454 - RNA, 16 nt, Human herpesvirus 5
gacguggauacuagua

SEQ ID NO: 150455 - RNA, 13 nt, Human herpesvirus 5
aaauauaccaggc

SEQ ID NO: 150456 - RNA, 22 nt, Human herpesvirus 5
aaauauauggaguuuguguaau

SEQ ID NO: 150457 - RNA, 19 nt, Human herpesvirus 5
aaaugaccguggcagcuuu

SEQ ID NO: 150458 - RNA, 19 nt, Human herpesvirus 5
gacuguucgucgagcaccc

SEQ ID NO: 150459 - RNA, 18 nt, Human herpesvirus 5
gacuuccaggugcgcaac

SEQ ID NO: 150460 - RNA, 13 nt, Human herpesvirus 5
gacucuggugcua

SEQ ID NO: 150461 - RNA, 13 nt, Human herpesvirus 5
gacugauuaacca

SEQ ID NO: 150462 - RNA, 15 nt, Human herpesvirus 5
gacugagacuggugg

SEQ ID NO: 150463 - RNA, 14 nt, Human herpesvirus 5
gacuggcuacauca

SEQ ID NO: 150464 - RNA, 20 nt, Human herpesvirus 5
gacuacaugcuauaagacag

SEQ ID NO: 150465 - RNA, 15 nt, Human herpesvirus 5
gacucaccagacuuu

SEQ ID NO: 150466 - RNA, 14 nt, Human herpesvirus 5
gcaaacgcugcuug

SEQ ID NO: 150467 - RNA, 22 nt, Human herpesvirus 5
gauugcaugaaaucacugugaa

SEQ ID NO: 150468 - RNA, 17 nt, Human herpesvirus 5
gauugcugacgcuggaa

SEQ ID NO: 150469 - RNA, 13 nt, Human herpesvirus 5
gauuggcccucca

SEQ ID NO: 150470 - RNA, 20 nt, Human herpesvirus 5
gaugucugccgcgguacgca

SEQ ID NO: 150471 - RNA, 23 nt, Human herpesvirus 5
gauguuggacgaaacguauccau

SEQ ID NO: 150472 - RNA, 13 nt, Human herpesvirus 5
gauucucuauaca

SEQ ID NO: 150473 - RNA, 20 nt, Human herpesvirus 5
gauuccccgugacaguauua

SEQ ID NO: 150474 - RNA, 21 nt, Human herpesvirus 5
gauuauuaccgaguaccgcau

SEQ ID NO: 150475 - RNA, 20 nt, Human herpesvirus 5
gaugcgccuccgguggugcg

SEQ ID NO: 150476 - RNA, 22 nt, Human herpesvirus 5
gaugcucugggucgccaggugu

SEQ ID NO: 150477 - RNA, 13 nt, Human herpesvirus 5
gaugcugaucacg

SEQ ID NO: 150478 - RNA, 14 nt, Human herpesvirus 5
gaugcugcugagac

SEQ ID NO: 150479 - RNA, 15 nt, Human herpesvirus 5
gaugcugcugagacu

SEQ ID NO: 150480 - RNA, 17 nt, Human herpesvirus 5
gaugcuauccgcugcga

SEQ ID NO: 150481 - RNA, 15 nt, Human herpesvirus 5
gaugguacgucucua

SEQ ID NO: 150482 - RNA, 17 nt, Human herpesvirus 5
gaugaacgacacaugca

SEQ ID NO: 150483 - RNA, 18 nt, Human herpesvirus 5
gaugaauuguuaccagaa

SEQ ID NO: 150484 - RNA, 22 nt, Human herpesvirus 5
gaugaauuguuaccagaacucu

SEQ ID NO: 150485 - RNA, 14 nt, Human herpesvirus 5
gaugaagccuauca

SEQ ID NO: 150486 - RNA, 18 nt, Human herpesvirus 5
gaugaagauggccaucac

SEQ ID NO: 150487 - RNA, 18 nt, Human herpesvirus 5
gaugagcaauugccucua

SEQ ID NO: 150488 - RNA, 13 nt, Human herpesvirus 5
gaugagcagcaaa

SEQ ID NO: 150489 - RNA, 18 nt, Human herpesvirus 5
gauaauugcacauccuca

SEQ ID NO: 150490 - RNA, 21 nt, Human herpesvirus 5
gagguuucgggccgacgucaa

SEQ ID NO: 150491 - RNA, 19 nt, Human herpesvirus 5
gauacaacgucaugcauuc

SEQ ID NO: 150492 - RNA, 19 nt, Human herpesvirus 5
gauacaagcuugguacaca

SEQ ID NO: 150493 - RNA, 17 nt, Human herpesvirus 5
gauaagacggacuguuu

SEQ ID NO: 150494 - RNA, 20 nt, Human herpesvirus 5
gauaagacggacuguuucau

SEQ ID NO: 150495 - RNA, 23 nt, Human herpesvirus 5
gauacagggugccgccacgguuu

SEQ ID NO: 150496 - RNA, 20 nt, Human herpesvirus 5
gauacaguugauaacaaaca

SEQ ID NO: 150497 - RNA, 14 nt, Human herpesvirus 5
gauacgcugcuuuu

SEQ ID NO: 150498 - RNA, 18 nt, Human herpesvirus 5
gauacgcugcuuuuggcc

SEQ ID NO: 150499 - RNA, 16 nt, Human herpesvirus 5
gauccggcaacaucuc

SEQ ID NO: 150500 - RNA, 12 nt, Human herpesvirus 5
gauccugugguc

SEQ ID NO: 150501 - RNA, 22 nt, Human herpesvirus 5
gauagacgacuuuggugacuug

SEQ ID NO: 150502 - RNA, 12 nt, Human herpesvirus 5
gauccaguauuc

SEQ ID NO: 150503 - RNA, 17 nt, Human herpesvirus 5
gauccaguuucaccaag

SEQ ID NO: 150504 - RNA, 13 nt, Human herpesvirus 5
gaucggacaucau

SEQ ID NO: 150505 - RNA, 18 nt, Human herpesvirus 5
gaucguucccgucccucu

SEQ ID NO: 150506 - RNA, 18 nt, Human herpesvirus 5
gaucuccgagaggaggag

SEQ ID NO: 150507 - RNA, 17 nt, Human herpesvirus 5
gaucuucggcuaccucg

SEQ ID NO: 150508 - RNA, 22 nt, Human herpesvirus 5
gaucugcgaguggaauuucccu

SEQ ID NO: 150509 - RNA, 15 nt, Human herpesvirus 5
gguguuagacauggg

SEQ ID NO: 150510 - RNA, 13 nt, Human herpesvirus 5
ggugguccacucc

SEQ ID NO: 150511 - RNA, 12 nt, Human herpesvirus 5
ggugguaccugc

SEQ ID NO: 150512 - RNA, 20 nt, Human herpesvirus 5
ggugguacugcugugguguu

SEQ ID NO: 150513 - RNA, 16 nt, Human herpesvirus 5
gguguccuacaaagga

SEQ ID NO: 150514 - RNA, 14 nt, Human herpesvirus 5
gguuugcgucucca

SEQ ID NO: 150515 - RNA, 22 nt, Human herpesvirus 5
guaaaagggacgucaaagcuca

SEQ ID NO: 150516 - RNA, 22 nt, Human herpesvirus 5
guaaaaaaagugcgucaaagcu

SEQ ID NO: 150517 - RNA, 14 nt, Human herpesvirus 5
guaauaucaucugc

SEQ ID NO: 150518 - RNA, 12 nt, Human herpesvirus 5
guaauuauucca

SEQ ID NO: 150519 - RNA, 13 nt, Human herpesvirus 5
guaaucacgcuau

SEQ ID NO: 150520 - RNA, 18 nt, Human herpesvirus 5
guaaggagcaaaaccggg

SEQ ID NO: 150521 - RNA, 20 nt, Human herpesvirus 5
guaagcauggcuuacauuua

SEQ ID NO: 150522 - RNA, 14 nt, Human herpesvirus 5
guaacucacuguuu

SEQ ID NO: 150523 - RNA, 17 nt, Human herpesvirus 5
guaacucuaucuacugu

SEQ ID NO: 150524 - RNA, 21 nt, Human herpesvirus 5
guaaccagcauuugaguauac

SEQ ID NO: 150525 - RNA, 12 nt, Human herpesvirus 5
guaaacuuaucc

SEQ ID NO: 150526 - RNA, 17 nt, Human herpesvirus 5
gggaaaacauaagaaua

SEQ ID NO: 150527 - RNA, 19 nt, Human herpesvirus 5
ggcuuuuuugucccggggg

SEQ ID NO: 150528 - RNA, 20 nt, Human herpesvirus 5
ggcuuuccggccaacaugcc

SEQ ID NO: 150529 - RNA, 18 nt, Human herpesvirus 5
ggcuuugacggugaugcg

SEQ ID NO: 150530 - RNA, 24 nt, Human herpesvirus 5
gggaacagacccgauacagucagc

SEQ ID NO: 150531 - RNA, 23 nt, Human herpesvirus 5
gguaaaaccacgucaauaaagac

SEQ ID NO: 150532 - RNA, 16 nt, Human herpesvirus 5
gguaaaggaacaaccc

SEQ ID NO: 150533 - RNA, 15 nt, Human herpesvirus 5
gguacaaaccucuac

SEQ ID NO: 150534 - RNA, 20 nt, Human herpesvirus 5
gguaaugcguguccagauac

SEQ ID NO: 150535 - RNA, 20 nt, Human herpesvirus 5
gguaccugaaaccuaccugg

SEQ ID NO: 150536 - RNA, 21 nt, Human herpesvirus 5
gguaguugauacgcuagcaga

SEQ ID NO: 150537 - RNA, 14 nt, Human herpesvirus 5
gguagaaugcugcu

SEQ ID NO: 150538 - RNA, 20 nt, Human herpesvirus 5
ggucaacaaacagcucuuaa

SEQ ID NO: 150539 - RNA, 18 nt, Human herpesvirus 5
ggugcgcggcgacaagcu

SEQ ID NO: 150540 - RNA, 21 nt, Human herpesvirus 5
ggugcgacguucuccaaggga

SEQ ID NO: 150541 - RNA, 18 nt, Human herpesvirus 5
gguggcgucggugcgaug

SEQ ID NO: 150542 - RNA, 16 nt, Human herpesvirus 5
gguggccaacaccggg

SEQ ID NO: 150543 - RNA, 21 nt, Human herpesvirus 5
ggugcaugacucguugggauu

SEQ ID NO: 150544 - RNA, 22 nt, Human herpesvirus 5
ggugauuaccguucgcuuccau

SEQ ID NO: 150545 - RNA, 13 nt, Human herpesvirus 5
ggugacuaugugu

SEQ ID NO: 150546 - RNA, 16 nt, Human herpesvirus 5
ggugacugagcacagc

SEQ ID NO: 150547 - RNA, 18 nt, Human herpesvirus 5
ggucuuccugcugcgcau

SEQ ID NO: 150548 - RNA, 22 nt, Human herpesvirus 5
ggucauauauaaaccguaugca

SEQ ID NO: 150549 - RNA, 16 nt, Human herpesvirus 5
gguccgcggugucucc

SEQ ID NO: 150550 - RNA, 14 nt, Human herpesvirus 5
gguccggcaccguu

SEQ ID NO: 150551 - RNA, 15 nt, Human herpesvirus 5
ggucggugacaucac

SEQ ID NO: 150552 - RNA, 13 nt, Human herpesvirus 5
ggucggugucucg

SEQ ID NO: 150553 - RNA, 18 nt, Human herpesvirus 5
ggucguggcucagcuuga

SEQ ID NO: 150554 - RNA, 16 nt, Human herpesvirus 5
ggucgcaggacgggau

SEQ ID NO: 150555 - RNA, 22 nt, Human herpesvirus 5
ggucuccauggccgaguaccgc

SEQ ID NO: 150556 - RNA, 15 nt, Human herpesvirus 5
ggagacaguuuccac

SEQ ID NO: 150557 - RNA, 11 nt, Human herpesvirus 5
ggagauccagu

SEQ ID NO: 150558 - RNA, 18 nt, Human herpesvirus 5
ggagaugcagacgguggu

SEQ ID NO: 150559 - RNA, 17 nt, Human herpesvirus 5
ggagcucugaaacacag

SEQ ID NO: 150560 - RNA, 14 nt, Human herpesvirus 5
ggaggacucagagc

SEQ ID NO: 150561 - RNA, 17 nt, Human herpesvirus 5
ggagcagccgccagcga

SEQ ID NO: 150562 - RNA, 21 nt, Human herpesvirus 5
ggagcuaauagauuaaugugu

SEQ ID NO: 150563 - RNA, 19 nt, Human herpesvirus 5
ggagcuacgcgaccagcug

SEQ ID NO: 150564 - RNA, 21 nt, Human herpesvirus 5
ggagucugucgaccgcagcgg

SEQ ID NO: 150565 - RNA, 16 nt, Human herpesvirus 5
ggagucaacacuacca

SEQ ID NO: 150566 - RNA, 15 nt, Human herpesvirus 5
ggauaugaaggucaa

SEQ ID NO: 150567 - RNA, 21 nt, Human herpesvirus 5
ggaguuggccucgauccaucc

SEQ ID NO: 150568 - RNA, 22 nt, Human herpesvirus 5
gcuggcccucgcagugcaucua

SEQ ID NO: 150569 - RNA, 22 nt, Human herpesvirus 5
gcugguaccugaaaccuaccug

SEQ ID NO: 150570 - RNA, 15 nt, Human herpesvirus 5
gcugggcgacacuca

SEQ ID NO: 150571 - RNA, 22 nt, Human herpesvirus 5
gcugggcuacaagugcagcgac

SEQ ID NO: 150572 - RNA, 12 nt, Human herpesvirus 5
gcuggugucucu

SEQ ID NO: 150573 - RNA, 18 nt, Human herpesvirus 5
gcuucggccggcugcugc

SEQ ID NO: 150574 - RNA, 18 nt, Human herpesvirus 5
gcuucguaagcugucagc

SEQ ID NO: 150575 - RNA, 17 nt, Human herpesvirus 5
gcuuccauaaacgcuuu

SEQ ID NO: 150576 - RNA, 13 nt, Human herpesvirus 5
gcuucugguagcu

SEQ ID NO: 150577 - RNA, 12 nt, Human herpesvirus 5
ggacuguguucg

SEQ ID NO: 150578 - RNA, 21 nt, Human herpesvirus 5
ggcacacgguccgugggagac

SEQ ID NO: 150579 - RNA, 17 nt, Human herpesvirus 5
ggcacauggccaaugca

SEQ ID NO: 150580 - RNA, 20 nt, Human herpesvirus 5
ggcacauggccaaugcauau

SEQ ID NO: 150581 - RNA, 19 nt, Human herpesvirus 5
ggcaacgauagucaucuca

SEQ ID NO: 150582 - RNA, 16 nt, Human herpesvirus 5
ggcaacuaucaccaaa

SEQ ID NO: 150583 - RNA, 18 nt, Human herpesvirus 5
ggcaacucgagauggugu

SEQ ID NO: 150584 - RNA, 16 nt, Human herpesvirus 5
ggcaaaagacuuacca

SEQ ID NO: 150585 - RNA, 18 nt, Human herpesvirus 5
ggcaaacugaccaagcua

SEQ ID NO: 150586 - RNA, 16 nt, Human herpesvirus 5
ggcaccuaccaucuga

SEQ ID NO: 150587 - RNA, 13 nt, Human herpesvirus 5
ggcaccuaucucc

SEQ ID NO: 150588 - RNA, 15 nt, Human herpesvirus 5
ggcccuggauacaag

SEQ ID NO: 150589 - RNA, 20 nt, Human herpesvirus 5
ggccgaccccgucacugucg

SEQ ID NO: 150590 - RNA, 12 nt, Human herpesvirus 5
ggccgacggcag

SEQ ID NO: 150591 - RNA, 22 nt, Human herpesvirus 5
ggccgcaacuucuaccaucucc

SEQ ID NO: 150592 - RNA, 13 nt, Human herpesvirus 5
ggccgcccaaaca

SEQ ID NO: 150593 - RNA, 18 nt, Human herpesvirus 5
ggccgucuccaccaauca

SEQ ID NO: 150594 - RNA, 14 nt, Human herpesvirus 5
ggccggcugcugca

SEQ ID NO: 150595 - RNA, 20 nt, Human herpesvirus 5
ggccggacggcagcgucaca

SEQ ID NO: 150596 - RNA, 14 nt, Human herpesvirus 5
ggcgcacuugucau

SEQ ID NO: 150597 - RNA, 23 nt, Human herpesvirus 5
ggcgccgcgguggucgaugcuga

SEQ ID NO: 150598 - RNA, 14 nt, Human herpesvirus 5
ggcgauucugugug

SEQ ID NO: 150599 - RNA, 16 nt, Human herpesvirus 5
ggcggcuuauguuucu

SEQ ID NO: 150600 - RNA, 22 nt, Human herpesvirus 5
ggcguagucggcuaacaaagcc

SEQ ID NO: 150601 - RNA, 18 nt, Human herpesvirus 5
ggcgguauuguugagaac

SEQ ID NO: 150602 - RNA, 21 nt, Human herpesvirus 5
ggcgguggcgucggugcgaug

SEQ ID NO: 150603 - RNA, 15 nt, Human herpesvirus 5
ggcgucaccacuuug

SEQ ID NO: 150604 - RNA, 14 nt, Human herpesvirus 5
ggcuaccaugcgca

SEQ ID NO: 150605 - RNA, 12 nt, Human herpesvirus 5
ggcuauaugcau

SEQ ID NO: 150606 - RNA, 14 nt, Human herpesvirus 5
ggcguugucuuucu

SEQ ID NO: 150607 - RNA, 20 nt, Human herpesvirus 5
ggcgucgucgacgcaucugu

SEQ ID NO: 150608 - RNA, 14 nt, Human herpesvirus 5
ggcgugaaugggca

SEQ ID NO: 150609 - RNA, 20 nt, Human herpesvirus 5
ggcucaccacgcagcaggcu

SEQ ID NO: 150610 - RNA, 16 nt, Human herpesvirus 5
ggcucaaaguucaaag

SEQ ID NO: 150611 - RNA, 15 nt, Human herpesvirus 5
ggcuucccucucuuu

SEQ ID NO: 150612 - RNA, 19 nt, Human herpesvirus 5
gcguguacgccaucuucau

SEQ ID NO: 150613 - RNA, 12 nt, Human herpesvirus 5
gcuaagcuauac

SEQ ID NO: 150614 - RNA, 18 nt, Human herpesvirus 5
gcuaagcuauaccaucac

SEQ ID NO: 150615 - RNA, 17 nt, Human herpesvirus 5
gcuacgaaacuuuucug

SEQ ID NO: 150616 - RNA, 19 nt, Human herpesvirus 5
gcuaccucguaguugcaca

SEQ ID NO: 150617 - RNA, 17 nt, Human herpesvirus 5
gcucacgucacuacucu

SEQ ID NO: 150618 - RNA, 17 nt, Human herpesvirus 5
gcucaaugccaccauga

SEQ ID NO: 150619 - RNA, 20 nt, Human herpesvirus 5
gcucaaugccaccaugaacu

SEQ ID NO: 150620 - RNA, 22 nt, Human herpesvirus 5
gcucaucgucacgcucaaggac

SEQ ID NO: 150621 - RNA, 13 nt, Human herpesvirus 5
gcuacgucuacua

SEQ ID NO: 150622 - RNA, 13 nt, Human herpesvirus 5
gcucggugaccuc

SEQ ID NO: 150623 - RNA, 15 nt, Human herpesvirus 5
gcugcgcgacacggu

SEQ ID NO: 150624 - RNA, 19 nt, Human herpesvirus 5
gcugcgcuacgucuacuau

SEQ ID NO: 150625 - RNA, 18 nt, Human herpesvirus 5
gcugcugagacugagacu

SEQ ID NO: 150626 - RNA, 13 nt, Human herpesvirus 5
gcugcgugcuccg

SEQ ID NO: 150627 - RNA, 19 nt, Human herpesvirus 5
gcugcuauaagaaggccau

SEQ ID NO: 150628 - RNA, 19 nt, Human herpesvirus 5
gcuggacagugagagcuca

SEQ ID NO: 150629 - RNA, 20 nt, Human herpesvirus 5
gcuggaaauaccaacguauc

SEQ ID NO: 150630 - RNA, 15 nt, Human herpesvirus 5
gcuggaaauggacuu

SEQ ID NO: 150631 - RNA, 14 nt, Human herpesvirus 5
gcuggaaguggaag

SEQ ID NO: 150632 - RNA, 16 nt, Human herpesvirus 5
gcugcuguugcacggg

SEQ ID NO: 150633 - RNA, 18 nt, Human herpesvirus 5
gcugcggcggcacucgcu

SEQ ID NO: 150634 - RNA, 20 nt, Human herpesvirus 5
gcuggcaacgugccacguga

SEQ ID NO: 150635 - RNA, 19 nt, Human herpesvirus 5
gcuggauuacuacuggaua

SEQ ID NO: 150636 - RNA, 18 nt, Human herpesvirus 5
gcuggaggcccuggugga

SEQ ID NO: 150637 - RNA, 15 nt, Human herpesvirus 5
gcuggagcuaucugu

SEQ ID NO: 150638 - RNA, 12 nt, Human herpesvirus 5
gcuccaccaacg

SEQ ID NO: 150639 - RNA, 14 nt, Human herpesvirus 5
gcuccagaagauac

SEQ ID NO: 150640 - RNA, 17 nt, Human herpesvirus 5
gcucccagagcugcuag

SEQ ID NO: 150641 - RNA, 14 nt, Human herpesvirus 5
gcuccgcaagcgcc

SEQ ID NO: 150642 - RNA, 15 nt, Human herpesvirus 5
gcugccgcuacugau

SEQ ID NO: 150643 - RNA, 20 nt, Human herpesvirus 5
gcugccgcuacugaucgccu

SEQ ID NO: 150644 - RNA, 23 nt, Human herpesvirus 5
gcucgggugacggcgacaucacg

SEQ ID NO: 150645 - RNA, 22 nt, Human herpesvirus 5
gcucgacguuucgcgaggacaa

SEQ ID NO: 150646 - RNA, 18 nt, Human herpesvirus 5
gccuuccccgaugugcag

SEQ ID NO: 150647 - RNA, 18 nt, Human herpesvirus 5
gccuguuuucguguacua

SEQ ID NO: 150648 - RNA, 22 nt, Human herpesvirus 5
gccuugcgcucccugcuccgca

SEQ ID NO: 150649 - RNA, 17 nt, Human herpesvirus 5
gccucaagaauccgucc

SEQ ID NO: 150650 - RNA, 19 nt, Human herpesvirus 5
gccugucauccacuuggag

SEQ ID NO: 150651 - RNA, 17 nt, Human herpesvirus 5
gcgcgcuccacgucuuc

SEQ ID NO: 150652 - RNA, 13 nt, Human herpesvirus 5
gcggagcguucaa

SEQ ID NO: 150653 - RNA, 18 nt, Human herpesvirus 5
gcggcaccuaccaucuga

SEQ ID NO: 150654 - RNA, 17 nt, Human herpesvirus 5
gcggcacgaucaucugu

SEQ ID NO: 150655 - RNA, 22 nt, Human herpesvirus 5
gcggcacuuuacauaaaaccac

SEQ ID NO: 150656 - RNA, 13 nt, Human herpesvirus 5
gcgggcacugggg

SEQ ID NO: 150657 - RNA, 16 nt, Human herpesvirus 5
gcggcgacuggcgaga

SEQ ID NO: 150658 - RNA, 15 nt, Human herpesvirus 5
gcggcggcgaucgca

SEQ ID NO: 150659 - RNA, 14 nt, Human herpesvirus 5
gcggcggcgguggu

SEQ ID NO: 150660 - RNA, 13 nt, Human herpesvirus 5
gcggcggugguga

SEQ ID NO: 150661 - RNA, 17 nt, Human herpesvirus 5
gcggcgguggugacugg

SEQ ID NO: 150662 - RNA, 15 nt, Human herpesvirus 5
gcggcuagagcgcga

SEQ ID NO: 150663 - RNA, 20 nt, Human herpesvirus 5
gcgguggcgucggugcgaug

SEQ ID NO: 150664 - RNA, 16 nt, Human herpesvirus 5
gcggugcagguucuga

SEQ ID NO: 150665 - RNA, 19 nt, Human herpesvirus 5
gcgucuggauuugucucuc

SEQ ID NO: 150666 - RNA, 19 nt, Human herpesvirus 5
gcgugacacagcacgcuga

SEQ ID NO: 150667 - RNA, 16 nt, Human herpesvirus 5
gcguagccaccuguug

SEQ ID NO: 150668 - RNA, 17 nt, Human herpesvirus 5
gcguccuuucaagguga

SEQ ID NO: 150669 - RNA, 19 nt, Human herpesvirus 5
gcguacacguugggaagac

SEQ ID NO: 150670 - RNA, 13 nt, Human herpesvirus 5
gcguaagcaccgu

SEQ ID NO: 150671 - RNA, 11 nt, Human herpesvirus 5
gcaacaacagc

SEQ ID NO: 150672 - RNA, 12 nt, Human herpesvirus 5
gcaacaacagca

SEQ ID NO: 150673 - RNA, 14 nt, Human herpesvirus 5
gcaacaacagcagc

SEQ ID NO: 150674 - RNA, 15 nt, Human herpesvirus 5
gcaacaacagcagca

SEQ ID NO: 150675 - RNA, 11 nt, Human herpesvirus 5
gcaaaggccac

SEQ ID NO: 150676 - RNA, 12 nt, Human herpesvirus 5
gcaacacuuuuu

SEQ ID NO: 150677 - RNA, 15 nt, Human herpesvirus 5
gcaacagcagccacc

SEQ ID NO: 150678 - RNA, 15 nt, Human herpesvirus 5
gcaacgacaccuccc

SEQ ID NO: 150679 - RNA, 13 nt, Human herpesvirus 5
gcaucggcagaaa

SEQ ID NO: 150680 - RNA, 18 nt, Human herpesvirus 5
gcaucgauuucuugccaa

SEQ ID NO: 150681 - RNA, 17 nt, Human herpesvirus 5
gcaucuucgagugccag

SEQ ID NO: 150682 - RNA, 17 nt, Human herpesvirus 5
gcaugaaaucacuguga

SEQ ID NO: 150683 - RNA, 16 nt, Human herpesvirus 5
gcauccaucacaucac

SEQ ID NO: 150684 - RNA, 19 nt, Human herpesvirus 5
gcaacugcaccagcaacca

SEQ ID NO: 150685 - RNA, 19 nt, Human herpesvirus 5
gcaucaucaacagcagcaa

SEQ ID NO: 150686 - RNA, 21 nt, Human herpesvirus 5
gcaucauguuccuacacgccu

SEQ ID NO: 150687 - RNA, 17 nt, Human herpesvirus 5
gcaacuaucaccaaaca

SEQ ID NO: 150688 - RNA, 18 nt, Human herpesvirus 5
gcaacuaucaccaaacaa

SEQ ID NO: 150689 - RNA, 14 nt, Human herpesvirus 5
gcaacgccaccaag

SEQ ID NO: 150690 - RNA, 16 nt, Human herpesvirus 5
gcaugacuguuuccaa

SEQ ID NO: 150691 - RNA, 18 nt, Human herpesvirus 5
gcaugauuagcaauauua

SEQ ID NO: 150692 - RNA, 18 nt, Human herpesvirus 5
gcaugcauaagaagccaa

SEQ ID NO: 150693 - RNA, 23 nt, Human herpesvirus 5
gcauuacugggacgcgugcucuc

SEQ ID NO: 150694 - RNA, 16 nt, Human herpesvirus 5
gccacggugcuuuuca

SEQ ID NO: 150695 - RNA, 22 nt, Human herpesvirus 5
gccacgguuugaccacacucgu

SEQ ID NO: 150696 - RNA, 19 nt, Human herpesvirus 5
gccacguagccgaugcuga

SEQ ID NO: 150697 - RNA, 20 nt, Human herpesvirus 5
gccacguagccgaugcugau

SEQ ID NO: 150698 - RNA, 14 nt, Human herpesvirus 5
gccacccacccggu

SEQ ID NO: 150699 - RNA, 15 nt, Human herpesvirus 5
gccaccgacacagca

SEQ ID NO: 150700 - RNA, 14 nt, Human herpesvirus 5
gccaccugcaaagu

SEQ ID NO: 150701 - RNA, 15 nt, Human herpesvirus 5
gccaccaugaacuga

SEQ ID NO: 150702 - RNA, 17 nt, Human herpesvirus 5
gccaccaccgguaccac

SEQ ID NO: 150703 - RNA, 16 nt, Human herpesvirus 5
gccaccauagccacua

SEQ ID NO: 150704 - RNA, 17 nt, Human herpesvirus 5
gccaccaagaaacaccg

SEQ ID NO: 150705 - RNA, 15 nt, Human herpesvirus 5
gccacaggcggcgca

SEQ ID NO: 150706 - RNA, 22 nt, Human herpesvirus 5
gccacacggugugaugguacua

SEQ ID NO: 150707 - RNA, 19 nt, Human herpesvirus 5
gccaauuuuuucgcugcca

SEQ ID NO: 150708 - RNA, 23 nt, Human herpesvirus 5
gccacacacaucugucaccucac

SEQ ID NO: 150709 - RNA, 20 nt, Human herpesvirus 5
gcccgacaaguucgaucuca

SEQ ID NO: 150710 - RNA, 14 nt, Human herpesvirus 5
gccgaagaccucac

SEQ ID NO: 150711 - RNA, 18 nt, Human herpesvirus 5
gcccuuuacggugcugcg

SEQ ID NO: 150712 - RNA, 18 nt, Human herpesvirus 5
gcccaucgucugcauguu

SEQ ID NO: 150713 - RNA, 23 nt, Human herpesvirus 5
gcccaucgucugcauguucauca

SEQ ID NO: 150714 - RNA, 21 nt, Human herpesvirus 5
gccccacucgcucgcuugugu

SEQ ID NO: 150715 - RNA, 18 nt, Human herpesvirus 5
gccaggugaccagcagua

SEQ ID NO: 150716 - RNA, 19 nt, Human herpesvirus 5
gccaguugcuguugcucua

SEQ ID NO: 150717 - RNA, 20 nt, Human herpesvirus 5
gccaucuagacucacuuuau

SEQ ID NO: 150718 - RNA, 12 nt, Human herpesvirus 5
gccuaagacuuu

SEQ ID NO: 150719 - RNA, 13 nt, Human herpesvirus 5
gccuaagacuuug

SEQ ID NO: 150720 - RNA, 22 nt, Human herpesvirus 5
gccucauccuuaugagcgucug

SEQ ID NO: 150721 - RNA, 20 nt, Human herpesvirus 5
gccuccagcgccuccuggug

SEQ ID NO: 150722 - RNA, 19 nt, Human herpesvirus 5
gccuggagcgaguggggca

SEQ ID NO: 150723 - RNA, 21 nt, Human herpesvirus 5
gccgcaacuucuaccaucucc

SEQ ID NO: 150724 - RNA, 14 nt, Human herpesvirus 5
gccgaucaugugcu

SEQ ID NO: 150725 - RNA, 17 nt, Human herpesvirus 5
gccgagaccgucgccac

SEQ ID NO: 150726 - RNA, 21 nt, Human herpesvirus 5
gccgagacggcgugacacagc

SEQ ID NO: 150727 - RNA, 14 nt, Human herpesvirus 5
gccgucagucauag

SEQ ID NO: 150728 - RNA, 17 nt, Human herpesvirus 5
gccgccucgcaucauca

SEQ ID NO: 150729 - RNA, 22 nt, Human herpesvirus 5
gccgucgaccgacgucgcacac

SEQ ID NO: 150730 - RNA, 13 nt, Human herpesvirus 5
gccgucucccucu

SEQ ID NO: 150731 - RNA, 15 nt, Human herpesvirus 5
gccgugacacuuugg

SEQ ID NO: 150732 - RNA, 18 nt, Human herpesvirus 5
gccgcagccguuggugga

SEQ ID NO: 150733 - RNA, 14 nt, Human herpesvirus 5
gccgccgcucauaa

SEQ ID NO: 150734 - RNA, 16 nt, Human herpesvirus 5
gccgcaagugcucgac

SEQ ID NO: 150735 - RNA, 20 nt, Human herpesvirus 5
cuacuucgauucucuauaca

SEQ ID NO: 150736 - RNA, 19 nt, Human herpesvirus 5
cuagcacagagacaccaau

SEQ ID NO: 150737 - RNA, 21 nt, Human herpesvirus 5
cuagaugcuagcaauaauccc

SEQ ID NO: 150738 - RNA, 16 nt, Human herpesvirus 5
cuaauugguacucuag

SEQ ID NO: 150739 - RNA, 16 nt, Human herpesvirus 5
cuacaacacuacccuc

SEQ ID NO: 150740 - RNA, 20 nt, Human herpesvirus 5
cuacuccgaauaacaacaca

SEQ ID NO: 150741 - RNA, 23 nt, Human herpesvirus 5
cuacuccgaauaacaacacauca

SEQ ID NO: 150742 - RNA, 21 nt, Human herpesvirus 5
cuacucacaauggaagccaua

SEQ ID NO: 150743 - RNA, 12 nt, Human herpesvirus 5
cuacucugggau

SEQ ID NO: 150744 - RNA, 11 nt, Human herpesvirus 5
cuaguauccac

SEQ ID NO: 150745 - RNA, 12 nt, Human herpesvirus 5
cuaggugcugca

SEQ ID NO: 150746 - RNA, 14 nt, Human herpesvirus 5
cuaguaaugcauua

SEQ ID NO: 150747 - RNA, 20 nt, Human herpesvirus 5
cuaguacugagacagccaca

SEQ ID NO: 150748 - RNA, 21 nt, Human herpesvirus 5
cuaggcuacucugacugugua

SEQ ID NO: 150749 - RNA, 22 nt, Human herpesvirus 5
cuaggcuacucugacuguguag

SEQ ID NO: 150750 - RNA, 18 nt, Human herpesvirus 5
cuaggaacacugaaaaca

SEQ ID NO: 150751 - RNA, 15 nt, Human herpesvirus 5
cuauaagaaggccau

SEQ ID NO: 150752 - RNA, 15 nt, Human herpesvirus 5
cuauaagacagccuu

SEQ ID NO: 150753 - RNA, 20 nt, Human herpesvirus 5
cuaguuagauuuccugugua

SEQ ID NO: 150754 - RNA, 13 nt, Human herpesvirus 5
cuauagacucuau

SEQ ID NO: 150755 - RNA, 15 nt, Human herpesvirus 5
cuauacaccaaggcu

SEQ ID NO: 150756 - RNA, 21 nt, Human herpesvirus 5
cuaucgacccccguacugccu

SEQ ID NO: 150757 - RNA, 18 nt, Human herpesvirus 5
cuauccccaaaaaaacac

SEQ ID NO: 150758 - RNA, 21 nt, Human herpesvirus 5
cuauccccaaaaaaacacaca

SEQ ID NO: 150759 - RNA, 19 nt, Human herpesvirus 5
cuauaugcgugaggucugu

SEQ ID NO: 150760 - RNA, 20 nt, Human herpesvirus 5
cuaucaccaaacaacaccac

SEQ ID NO: 150761 - RNA, 14 nt, Human herpesvirus 5
cuauccagcagcug

SEQ ID NO: 150762 - RNA, 16 nt, Human herpesvirus 5
cuaucaugacaccgac

SEQ ID NO: 150763 - RNA, 11 nt, Human herpesvirus 5
cuaugcuggug

SEQ ID NO: 150764 - RNA, 16 nt, Human herpesvirus 5
cuauuguauacucuau

SEQ ID NO: 150765 - RNA, 20 nt, Human herpesvirus 5
cuauuguguguacgacagcc

SEQ ID NO: 150766 - RNA, 19 nt, Human herpesvirus 5
cuauugggaagggugugac

SEQ ID NO: 150767 - RNA, 14 nt, Human herpesvirus 5
cucaaaacaucacc

SEQ ID NO: 150768 - RNA, 18 nt, Human herpesvirus 5
cucaaaggacucgcucac

SEQ ID NO: 150769 - RNA, 22 nt, Human herpesvirus 5
cucacgucaguguuguccccua

SEQ ID NO: 150770 - RNA, 16 nt, Human herpesvirus 5
cucacgagugcccuua

SEQ ID NO: 150771 - RNA, 17 nt, Human herpesvirus 5
cucacgcacauauguag

SEQ ID NO: 150772 - RNA, 23 nt, Human herpesvirus 5
cucacgcacauauguagcacuca

SEQ ID NO: 150773 - RNA, 21 nt, Human herpesvirus 5
cucacuguuugaauaccguaa

SEQ ID NO: 150774 - RNA, 22 nt, Human herpesvirus 5
cucacuguuugaauaccguaaa

SEQ ID NO: 150775 - RNA, 22 nt, Human herpesvirus 5
cucacuuuccucgccaccacua

SEQ ID NO: 150776 - RNA, 12 nt, Human herpesvirus 5
cucaucuagaaa

SEQ ID NO: 150777 - RNA, 16 nt, Human herpesvirus 5
cucaucuuuugcucca

SEQ ID NO: 150778 - RNA, 19 nt, Human herpesvirus 5
cucauuugcuuuuacaaac

SEQ ID NO: 150779 - RNA, 20 nt, Human herpesvirus 5
cucccggcgcucugacagcc

SEQ ID NO: 150780 - RNA, 19 nt, Human herpesvirus 5
cgggacagcgugccggcga

SEQ ID NO: 150781 - RNA, 23 nt, Human herpesvirus 5
cgggaaacauguccccaucauca

SEQ ID NO: 150782 - RNA, 20 nt, Human herpesvirus 5
cgggauaucgccguguaaug

SEQ ID NO: 150783 - RNA, 12 nt, Human herpesvirus 5
cggcugcugcac

SEQ ID NO: 150784 - RNA, 17 nt, Human herpesvirus 5
cggcucaucaccaacgu

SEQ ID NO: 150785 - RNA, 23 nt, Human herpesvirus 5
cggcuccgccgucggugcgccca

SEQ ID NO: 150786 - RNA, 24 nt, Human herpesvirus 5
cggcuuugugccgagaccgucgcc

SEQ ID NO: 150787 - RNA, 22 nt, Human herpesvirus 5
cggcgugaccacgucaccgugc

SEQ ID NO: 150788 - RNA, 23 nt, Human herpesvirus 5
cggcgugaccacgucaccgugcc

SEQ ID NO: 150789 - RNA, 14 nt, Human herpesvirus 5
cggcguguguuuua

SEQ ID NO: 150790 - RNA, 14 nt, Human herpesvirus 5
cggcguucugcucu

SEQ ID NO: 150791 - RNA, 19 nt, Human herpesvirus 5
cggcggcgguccccgucga

SEQ ID NO: 150792 - RNA, 22 nt, Human herpesvirus 5
cggcggcugcuguugcacgggc

SEQ ID NO: 150793 - RNA, 15 nt, Human herpesvirus 5
cgggguuaaacugga

SEQ ID NO: 150794 - RNA, 15 nt, Human herpesvirus 5
cgggguucaccugca

SEQ ID NO: 150795 - RNA, 21 nt, Human herpesvirus 5
cgggugcaccgcggcaccuac

SEQ ID NO: 150796 - RNA, 14 nt, Human herpesvirus 5
cgggcagacaucuu

SEQ ID NO: 150797 - RNA, 23 nt, Human herpesvirus 5
cgggcagcccaaguucagcagca

SEQ ID NO: 150798 - RNA, 14 nt, Human herpesvirus 5
cgggcugcgcgggu

SEQ ID NO: 150799 - RNA, 15 nt, Human herpesvirus 5
cggggaggagacaca

SEQ ID NO: 150800 - RNA, 15 nt, Human herpesvirus 5
cgauuucuugccaag

SEQ ID NO: 150801 - RNA, 15 nt, Human herpesvirus 5
cgcaacgucuacauc

SEQ ID NO: 150802 - RNA, 19 nt, Human herpesvirus 5
cgcaacgucuacaucucau

SEQ ID NO: 150803 - RNA, 23 nt, Human herpesvirus 5
cgcaacacguagugagcuuugac

SEQ ID NO: 150804 - RNA, 15 nt, Human herpesvirus 5
cgcaaccacggugga

SEQ ID NO: 150805 - RNA, 14 nt, Human herpesvirus 5
cggcaacagaagcu

SEQ ID NO: 150806 - RNA, 22 nt, Human herpesvirus 5
cggaugagcgugcugcucugca

SEQ ID NO: 150807 - RNA, 23 nt, Human herpesvirus 5
cggauugcggcuucucuuucuca

SEQ ID NO: 150808 - RNA, 16 nt, Human herpesvirus 5
cggauuggguaggggu

SEQ ID NO: 150809 - RNA, 23 nt, Human herpesvirus 5
cggauaggcaccuggacuucaau

SEQ ID NO: 150810 - RNA, 20 nt, Human herpesvirus 5
cggcacccggcugcacgugg

SEQ ID NO: 150811 - RNA, 21 nt, Human herpesvirus 5
cggcauacaaugugcugcaug

SEQ ID NO: 150812 - RNA, 16 nt, Human herpesvirus 5
cggcagcugcuuucuu

SEQ ID NO: 150813 - RNA, 23 nt, Human herpesvirus 5
cggcacuuuacauaaaaccaccg

SEQ ID NO: 150814 - RNA, 15 nt, Human herpesvirus 5
cggcgcgccccggcg

SEQ ID NO: 150815 - RNA, 20 nt, Human herpesvirus 5
cggccauggaggccaacauc

SEQ ID NO: 150816 - RNA, 17 nt, Human herpesvirus 5
cggccucggguugccug

SEQ ID NO: 150817 - RNA, 13 nt, Human herpesvirus 5
cggccggcugcug

SEQ ID NO: 150818 - RNA, 14 nt, Human herpesvirus 5
cgugcgggugcaug

SEQ ID NO: 150819 - RNA, 21 nt, Human herpesvirus 5
cgugccuuguuuuaucuuuaa

SEQ ID NO: 150820 - RNA, 16 nt, Human herpesvirus 5
cgugcuccaccaacgu

SEQ ID NO: 150821 - RNA, 21 nt, Human herpesvirus 5
cgugcucgggcguguggguga

SEQ ID NO: 150822 - RNA, 15 nt, Human herpesvirus 5
cgugugugcucucua

SEQ ID NO: 150823 - RNA, 17 nt, Human herpesvirus 5
cguguguguuucuuaac

SEQ ID NO: 150824 - RNA, 12 nt, Human herpesvirus 5
cgugacuuuauu

SEQ ID NO: 150825 - RNA, 17 nt, Human herpesvirus 5
cgugacgguacuuaucg

SEQ ID NO: 150826 - RNA, 12 nt, Human herpesvirus 5
cgugacacagca

SEQ ID NO: 150827 - RNA, 13 nt, Human herpesvirus 5
cgugacacuuugg

SEQ ID NO: 150828 - RNA, 12 nt, Human herpesvirus 5
cgugacauccaa

SEQ ID NO: 150829 - RNA, 19 nt, Human herpesvirus 5
cgugacaauaaacaacaua

SEQ ID NO: 150830 - RNA, 14 nt, Human herpesvirus 5
cgucuuugucauac

SEQ ID NO: 150831 - RNA, 15 nt, Human herpesvirus 5
cgguguuagacaugg

SEQ ID NO: 150832 - RNA, 14 nt, Human herpesvirus 5
cgguuaauguaucc

SEQ ID NO: 150833 - RNA, 16 nt, Human herpesvirus 5
cgguuaccuucuugcc

SEQ ID NO: 150834 - RNA, 17 nt, Human herpesvirus 5
cgguuaccuucuugccc

SEQ ID NO: 150835 - RNA, 11 nt, Human herpesvirus 5
cgguucucacg

SEQ ID NO: 150836 - RNA, 16 nt, Human herpesvirus 5
cgguugcggccccgua

SEQ ID NO: 150837 - RNA, 21 nt, Human herpesvirus 5
cgguggguuucgucgcgccca

SEQ ID NO: 150838 - RNA, 13 nt, Human herpesvirus 5
cggguguacaaaa

SEQ ID NO: 150839 - RNA, 16 nt, Human herpesvirus 5
cggugcuuuucaucua

SEQ ID NO: 150840 - RNA, 23 nt, Human herpesvirus 5
cgguggaaacgaguguaccaucu

SEQ ID NO: 150841 - RNA, 13 nt, Human herpesvirus 5
cguaaacuuaucc

SEQ ID NO: 150842 - RNA, 23 nt, Human herpesvirus 5
cguaaagagagucacacuuaaga

SEQ ID NO: 150843 - RNA, 15 nt, Human herpesvirus 5
cguaauaucaucugc

SEQ ID NO: 150844 - RNA, 17 nt, Human herpesvirus 5
cguuggugaauguuacc

SEQ ID NO: 150845 - RNA, 22 nt, Human herpesvirus 5
cguuguaauauaaggagcucau

SEQ ID NO: 150846 - RNA, 19 nt, Human herpesvirus 5
cuaaaguuacgaaucucau

SEQ ID NO: 150847 - RNA, 19 nt, Human herpesvirus 5
cguguuucaaacagcacau

SEQ ID NO: 150848 - RNA, 16 nt, Human herpesvirus 5
cguuaccgccucuguc

SEQ ID NO: 150849 - RNA, 16 nt, Human herpesvirus 5
cuaaauucaugucgcg

SEQ ID NO: 150850 - RNA, 19 nt, Human herpesvirus 5
cuaaauuguuauugccagu

SEQ ID NO: 150851 - RNA, 12 nt, Human herpesvirus 5
cuaacacuccuc

SEQ ID NO: 150852 - RNA, 17 nt, Human herpesvirus 5
cuaacaacgucacuucu

SEQ ID NO: 150853 - RNA, 22 nt, Human herpesvirus 5
cuaauaccgguuguaaucaucc

SEQ ID NO: 150854 - RNA, 15 nt, Human herpesvirus 5
cugagacacuugaau

SEQ ID NO: 150855 - RNA, 16 nt, Human herpesvirus 5
cugagaacauguggaa

SEQ ID NO: 150856 - RNA, 13 nt, Human herpesvirus 5
cugagacugagac

SEQ ID NO: 150857 - RNA, 13 nt, Human herpesvirus 5
cugaauauacaga

SEQ ID NO: 150858 - RNA, 20 nt, Human herpesvirus 5
cugaccuugcugaugugcca

SEQ ID NO: 150859 - RNA, 13 nt, Human herpesvirus 5
cugaaguaagcau

SEQ ID NO: 150860 - RNA, 15 nt, Human herpesvirus 5
cugaagccguacaag

SEQ ID NO: 150861 - RNA, 16 nt, Human herpesvirus 5
cugaagccgucaguca

SEQ ID NO: 150862 - RNA, 15 nt, Human herpesvirus 5
cucuuuuccccgugc

SEQ ID NO: 150863 - RNA, 15 nt, Human herpesvirus 5
cucuuuucuauguaa

SEQ ID NO: 150864 - RNA, 14 nt, Human herpesvirus 5
cuccguguucuuaa

SEQ ID NO: 150865 - RNA, 15 nt, Human herpesvirus 5
cuccguguucuuaau

SEQ ID NO: 150866 - RNA, 21 nt, Human herpesvirus 5
cuccgaauaacaacacaucaa

SEQ ID NO: 150867 - RNA, 17 nt, Human herpesvirus 5
cuccuaguaaugcauua

SEQ ID NO: 150868 - RNA, 19 nt, Human herpesvirus 5
cuccuacgacaacaucccu

SEQ ID NO: 150869 - RNA, 15 nt, Human herpesvirus 5
cucuuccucagugaa

SEQ ID NO: 150870 - RNA, 23 nt, Human herpesvirus 5
cuggucaagggucacggugccau

SEQ ID NO: 150871 - RNA, 22 nt, Human herpesvirus 5
cuguauauucaguccauuguca

SEQ ID NO: 150872 - RNA, 18 nt, Human herpesvirus 5
cuguauccauacuuacca

SEQ ID NO: 150873 - RNA, 18 nt, Human herpesvirus 5
cuggucucgugauguggg

SEQ ID NO: 150874 - RNA, 13 nt, Human herpesvirus 5
cugguaccugaaa

SEQ ID NO: 150875 - RNA, 14 nt, Human herpesvirus 5
cugguaccugcuaa

SEQ ID NO: 150876 - RNA, 14 nt, Human herpesvirus 5
cugguacuuaguca

SEQ ID NO: 150877 - RNA, 13 nt, Human herpesvirus 5
cugggcugcaagg

SEQ ID NO: 150878 - RNA, 23 nt, Human herpesvirus 5
cugggcuggcccucgcagugcau

SEQ ID NO: 150879 - RNA, 21 nt, Human herpesvirus 5
cuggggucaaaagccugggua

SEQ ID NO: 150880 - RNA, 15 nt, Human herpesvirus 5
cuggcccugcuguac

SEQ ID NO: 150881 - RNA, 21 nt, Human herpesvirus 5
cuggcccaaagaccgcugccu

SEQ ID NO: 150882 - RNA, 16 nt, Human herpesvirus 5
cuggaauccaucaucu

SEQ ID NO: 150883 - RNA, 20 nt, Human herpesvirus 5
cuggacacucuggcccugcu

SEQ ID NO: 150884 - RNA, 16 nt, Human herpesvirus 5
cuggcggcggguagcc

SEQ ID NO: 150885 - RNA, 23 nt, Human herpesvirus 5
cugggacaccacgguuuaccaca

SEQ ID NO: 150886 - RNA, 18 nt, Human herpesvirus 5
cuggcugguguugccgca

SEQ ID NO: 150887 - RNA, 15 nt, Human herpesvirus 5
cugaucugucaucac

SEQ ID NO: 150888 - RNA, 17 nt, Human herpesvirus 5
cugccaccgacauggag

SEQ ID NO: 150889 - RNA, 23 nt, Human herpesvirus 5
cugccaccucaguggaccgucaa

SEQ ID NO: 150890 - RNA, 16 nt, Human herpesvirus 5
cugcauguuggugccc

SEQ ID NO: 150891 - RNA, 16 nt, Human herpesvirus 5
cugcauccaucacauc

SEQ ID NO: 150892 - RNA, 22 nt, Human herpesvirus 5
cugcauccaucacaucacccaa

SEQ ID NO: 150893 - RNA, 22 nt, Human herpesvirus 5
cuggaaauucaauaaaaaccac

SEQ ID NO: 150894 - RNA, 17 nt, Human herpesvirus 5
cuggaacaagaaacaca

SEQ ID NO: 150895 - RNA, 18 nt, Human herpesvirus 5
cuggaacaagaaacacag

SEQ ID NO: 150896 - RNA, 19 nt, Human herpesvirus 5
cugcccguucuccccgugg

SEQ ID NO: 150897 - RNA, 15 nt, Human herpesvirus 5
cugcugcuguguaga

SEQ ID NO: 150898 - RNA, 17 nt, Human herpesvirus 5
cugcuguuacgacauca

SEQ ID NO: 150899 - RNA, 16 nt, Human herpesvirus 5
cugcuguugcacgggc

SEQ ID NO: 150900 - RNA, 17 nt, Human herpesvirus 5
cuucaaccucacguuaa

SEQ ID NO: 150901 - RNA, 19 nt, Human herpesvirus 5
cuuaugaagcugaacaaua

SEQ ID NO: 150902 - RNA, 15 nt, Human herpesvirus 5
cuuaugauucugcac

SEQ ID NO: 150903 - RNA, 16 nt, Human herpesvirus 5
cuuaugauucugcaca

SEQ ID NO: 150904 - RNA, 13 nt, Human herpesvirus 5
cuuccaguccaua

SEQ ID NO: 150905 - RNA, 20 nt, Human herpesvirus 5
cuuccccacccaguagacag

SEQ ID NO: 150906 - RNA, 21 nt, Human herpesvirus 5
cuucaucaucaccacccgaga

SEQ ID NO: 150907 - RNA, 15 nt, Human herpesvirus 5
cuucauaaagcuguu

SEQ ID NO: 150908 - RNA, 14 nt, Human herpesvirus 5
cuucagaaucuaua

SEQ ID NO: 150909 - RNA, 20 nt, Human herpesvirus 5
cuuacuucagcagcaccucu

SEQ ID NO: 150910 - RNA, 12 nt, Human herpesvirus 5
cugucgugguga

SEQ ID NO: 150911 - RNA, 16 nt, Human herpesvirus 5
cugucauccacuugga

SEQ ID NO: 150912 - RNA, 11 nt, Human herpesvirus 5
cuuauaucguu

SEQ ID NO: 150913 - RNA, 13 nt, Human herpesvirus 5
cuuaucaccauca

SEQ ID NO: 150914 - RNA, 21 nt, Human herpesvirus 5
cuugcgcgguuauggcuccgc

SEQ ID NO: 150915 - RNA, 21 nt, Human herpesvirus 5
cuuggaaucugguacuuaguc

SEQ ID NO: 150916 - RNA, 12 nt, Human herpesvirus 5
cuugcuguguau

SEQ ID NO: 150917 - RNA, 14 nt, Human herpesvirus 5
cuuggccguggugu

SEQ ID NO: 150918 - RNA, 20 nt, Human herpesvirus 5
cuuggcggucgggucugucu

SEQ ID NO: 150919 - RNA, 21 nt, Human herpesvirus 5
cuuggggcauaaaacaccgac

SEQ ID NO: 150920 - RNA, 18 nt, Human herpesvirus 5
cuugcccgcaaaagcaga

SEQ ID NO: 150921 - RNA, 19 nt, Human herpesvirus 5
cuugccaagcuuuagccag

SEQ ID NO: 150922 - RNA, 12 nt, Human herpesvirus 5
cuugauggugua

SEQ ID NO: 150923 - RNA, 16 nt, Human herpesvirus 5
cuugacuguaccauca

SEQ ID NO: 150924 - RNA, 19 nt, Human herpesvirus 5
cuugagacagacacguaga

SEQ ID NO: 150925 - RNA, 22 nt, Human herpesvirus 5
cuucuaguacuucccaugcaac

SEQ ID NO: 150926 - RNA, 14 nt, Human herpesvirus 5
cuucuaccaucucc

SEQ ID NO: 150927 - RNA, 22 nt, Human herpesvirus 5
cuucgguuagcggucuguucag

SEQ ID NO: 150928 - RNA, 17 nt, Human herpesvirus 5
cuucccuuguaagacag

SEQ ID NO: 150929 - RNA, 18 nt, Human herpesvirus 5
cuucccuuguaagacaga

SEQ ID NO: 150930 - RNA, 14 nt, Human herpesvirus 5
cuuccgcgagcacc

SEQ ID NO: 150931 - RNA, 16 nt, Human herpesvirus 5
cuucgagggcucgugc

SEQ ID NO: 150932 - RNA, 15 nt, Human herpesvirus 5
cuucgauucucuaua

SEQ ID NO: 150933 - RNA, 21 nt, Human herpesvirus 5
cuucgauucucuauacacaua

SEQ ID NO: 150934 - RNA, 17 nt, Human herpesvirus 5
cuucuccccgacuccgc

SEQ ID NO: 150935 - RNA, 22 nt, Human herpesvirus 5
cuucucguacgacgucugcuca

SEQ ID NO: 150936 - RNA, 22 nt, Human herpesvirus 5
cuucuuccucggacaccgggcu

SEQ ID NO: 150937 - RNA, 14 nt, Human herpesvirus 5
aaaauauugacaca

SEQ ID NO: 150938 - RNA, 15 nt, Human herpesvirus 5
ccacauuuugcucuc

SEQ ID NO: 150939 - RNA, 21 nt, Human herpesvirus 5
ccaccaacugaaauacaugcu

SEQ ID NO: 150940 - RNA, 17 nt, Human herpesvirus 5
ccaccacccgacugcag

SEQ ID NO: 150941 - RNA, 21 nt, Human herpesvirus 5
aaaaucuguguguucugugau

SEQ ID NO: 150942 - RNA, 22 nt, Human herpesvirus 5
aaaaugcuguauuauauacaaa

SEQ ID NO: 150943 - RNA, 15 nt, Human herpesvirus 5
ccaacacugcuucua

SEQ ID NO: 150944 - RNA, 13 nt, Human herpesvirus 5
ccaaaaaaacaca

SEQ ID NO: 150945 - RNA, 21 nt, Human herpesvirus 5
ccaaaaucugacgcuguacaa

SEQ ID NO: 150946 - RNA, 22 nt, Human herpesvirus 5
ccaacccagggagacuuagaau

SEQ ID NO: 150947 - RNA, 18 nt, Human herpesvirus 5
ccaacgagacuaucuaca

SEQ ID NO: 150948 - RNA, 17 nt, Human herpesvirus 5
ccaacuccgugccagcu

SEQ ID NO: 150949 - RNA, 14 nt, Human herpesvirus 5
ccacaccuauaggc

SEQ ID NO: 150950 - RNA, 20 nt, Human herpesvirus 5
ccacaguagcgguaccagac

SEQ ID NO: 150951 - RNA, 18 nt, Human herpesvirus 5
ccaucgucugcauguuca

SEQ ID NO: 150952 - RNA, 15 nt, Human herpesvirus 5
ccauaagcuguguac

SEQ ID NO: 150953 - RNA, 17 nt, Human herpesvirus 5
ccaguucguagaucaca

SEQ ID NO: 150954 - RNA, 22 nt, Human herpesvirus 5
ccagccuguuuaaugacaagug

SEQ ID NO: 150955 - RNA, 13 nt, Human herpesvirus 5
ccaucuucaucuu

SEQ ID NO: 150956 - RNA, 16 nt, Human herpesvirus 5
ccaucuucaucuuuca

SEQ ID NO: 150957 - RNA, 19 nt, Human herpesvirus 5
ccaucuucuaacgguuaca

SEQ ID NO: 150958 - RNA, 19 nt, Human herpesvirus 5
ccaucuagacucacuuuau

SEQ ID NO: 150959 - RNA, 15 nt, Human herpesvirus 5
ccaugcaacuucuuc

SEQ ID NO: 150960 - RNA, 21 nt, Human herpesvirus 5
ccaugagucgccgacggucac

SEQ ID NO: 150961 - RNA, 20 nt, Human herpesvirus 5
ccauggaggccaacaucuuc

SEQ ID NO: 150962 - RNA, 21 nt, Human herpesvirus 5
ccauggaggccaacaucuucu

SEQ ID NO: 150963 - RNA, 22 nt, Human herpesvirus 5
ccaugccuuccgcgugcuccac

SEQ ID NO: 150964 - RNA, 14 nt, Human herpesvirus 5
ccacuccaucacac

SEQ ID NO: 150965 - RNA, 13 nt, Human herpesvirus 5
ccacuacuaccuc

SEQ ID NO: 150966 - RNA, 21 nt, Human herpesvirus 5
ccacgucgauucccaucucaa

SEQ ID NO: 150967 - RNA, 24 nt, Human herpesvirus 5
ccacuacagaauugauuucaacaa

SEQ ID NO: 150968 - RNA, 18 nt, Human herpesvirus 5
ccacguagccgaugcuga

SEQ ID NO: 150969 - RNA, 19 nt, Human herpesvirus 5
ccacgaccaagugucucua

SEQ ID NO: 150970 - RNA, 23 nt, Human herpesvirus 5
ccacgagugacgacgacgcugcu

SEQ ID NO: 150971 - RNA, 19 nt, Human herpesvirus 5
ccagccccgucaaaacaca

SEQ ID NO: 150972 - RNA, 21 nt, Human herpesvirus 5
ccagauacaacgucaugcauu

SEQ ID NO: 150973 - RNA, 14 nt, Human herpesvirus 5
ccagauacuauacg

SEQ ID NO: 150974 - RNA, 13 nt, Human herpesvirus 5
caucauguucgcu

SEQ ID NO: 150975 - RNA, 22 nt, Human herpesvirus 5
caucccccugcacguccauguc

SEQ ID NO: 150976 - RNA, 20 nt, Human herpesvirus 5
caucccgagcacuccacacg

SEQ ID NO: 150977 - RNA, 23 nt, Human herpesvirus 5
caucuuaugaagcugaacaauaa

SEQ ID NO: 150978 - RNA, 13 nt, Human herpesvirus 5
caugacaacggga

SEQ ID NO: 150979 - RNA, 18 nt, Human herpesvirus 5
caggacgggauaucccag

SEQ ID NO: 150980 - RNA, 22 nt, Human herpesvirus 5
cauauuuguuuucagucagaga

SEQ ID NO: 150981 - RNA, 21 nt, Human herpesvirus 5
caggauguuacgcgagucaga

SEQ ID NO: 150982 - RNA, 14 nt, Human herpesvirus 5
caucacauuaggau

SEQ ID NO: 150983 - RNA, 19 nt, Human herpesvirus 5
caucaccaccaucagcaaa

SEQ ID NO: 150984 - RNA, 19 nt, Human herpesvirus 5
caucacccaacacugcuuc

SEQ ID NO: 150985 - RNA, 12 nt, Human herpesvirus 5
caucaccaacgu

SEQ ID NO: 150986 - RNA, 21 nt, Human herpesvirus 5
caucaacgacgccacacacau

SEQ ID NO: 150987 - RNA, 15 nt, Human herpesvirus 5
caucauaaaaaccau

SEQ ID NO: 150988 - RNA, 16 nt, Human herpesvirus 5
caucagcaaagcucca

SEQ ID NO: 150989 - RNA, 17 nt, Human herpesvirus 5
caucagcgccgugcuca

SEQ ID NO: 150990 - RNA, 14 nt, Human herpesvirus 5
cauucaauacauca

SEQ ID NO: 150991 - RNA, 17 nt, Human herpesvirus 5
cauucaauacaucauau

SEQ ID NO: 150992 - RNA, 20 nt, Human herpesvirus 5
cauucucgucugugucucac

SEQ ID NO: 150993 - RNA, 23 nt, Human herpesvirus 5
cauuccgcaacgucuacaucuca

SEQ ID NO: 150994 - RNA, 22 nt, Human herpesvirus 5
cauucuuuuuauauauacacau

SEQ ID NO: 150995 - RNA, 18 nt, Human herpesvirus 5
cauucugguaccugcuaa

SEQ ID NO: 150996 - RNA, 19 nt, Human herpesvirus 5
cauugcccuucuggagcac

SEQ ID NO: 150997 - RNA, 15 nt, Human herpesvirus 5
cauuugcuuuuacaa

SEQ ID NO: 150998 - RNA, 21 nt, Human herpesvirus 5
caugaugaaugucaucaucac

SEQ ID NO: 150999 - RNA, 17 nt, Human herpesvirus 5
caugcagaccuacagca

SEQ ID NO: 151000 - RNA, 13 nt, Human herpesvirus 5
caugcacauaaac

SEQ ID NO: 151001 - RNA, 15 nt, Human herpesvirus 5
caugacuguuuccaa

SEQ ID NO: 151002 - RNA, 16 nt, Human herpesvirus 5
caugagauccaaaauc

SEQ ID NO: 151003 - RNA, 15 nt, Human herpesvirus 5
caugggcaugcaaug

SEQ ID NO: 151004 - RNA, 20 nt, Human herpesvirus 5
cauggcucccagagcugcua

SEQ ID NO: 151005 - RNA, 13 nt, Human herpesvirus 5
cauguacguuuau

SEQ ID NO: 151006 - RNA, 22 nt, Human herpesvirus 5
cauguagaagcacccauuacag

SEQ ID NO: 151007 - RNA, 15 nt, Human herpesvirus 5
caugguggucuacaa

SEQ ID NO: 151008 - RNA, 14 nt, Human herpesvirus 5
cccuuguaagacag

SEQ ID NO: 151009 - RNA, 22 nt, Human herpesvirus 5
cccacgguccgggcacaaucaa

SEQ ID NO: 151010 - RNA, 18 nt, Human herpesvirus 5
ccgaagccuggggcaccu

SEQ ID NO: 151011 - RNA, 18 nt, Human herpesvirus 5
ccgaagacgacgugguuu

SEQ ID NO: 151012 - RNA, 12 nt, Human herpesvirus 5
cccacuaccugg

SEQ ID NO: 151013 - RNA, 13 nt, Human herpesvirus 5
ccgaaaccuguau

SEQ ID NO: 151014 - RNA, 15 nt, Human herpesvirus 5
ccgaauaacaacaca

SEQ ID NO: 151015 - RNA, 14 nt, Human herpesvirus 5
ccgacaaccugcug

SEQ ID NO: 151016 - RNA, 22 nt, Human herpesvirus 5
cccaauuacucggugugcgacg

SEQ ID NO: 151017 - RNA, 18 nt, Human herpesvirus 5
cccaaguucagcagcauc

SEQ ID NO: 151018 - RNA, 23 nt, Human herpesvirus 5
cccacgccgucgcuuaucuugca

SEQ ID NO: 151019 - RNA, 22 nt, Human herpesvirus 5
ccgauguggaacuguugcgaca

SEQ ID NO: 151020 - RNA, 14 nt, Human herpesvirus 5
ccgaucaugugcuu

SEQ ID NO: 151021 - RNA, 13 nt, Human herpesvirus 5
ccgauacacgggg

SEQ ID NO: 151022 - RNA, 17 nt, Human herpesvirus 5
ccgcaacgugcugcuga

SEQ ID NO: 151023 - RNA, 15 nt, Human herpesvirus 5
ccgcaacaacagcag

SEQ ID NO: 151024 - RNA, 17 nt, Human herpesvirus 5
ccgaggcacgucggggc

SEQ ID NO: 151025 - RNA, 16 nt, Human herpesvirus 5
ccgaggcuacugcugc

SEQ ID NO: 151026 - RNA, 18 nt, Human herpesvirus 5
ccgaguccuggucuuuca

SEQ ID NO: 151027 - RNA, 22 nt, Human herpesvirus 5
ccgagaaagggauaguggcucg

SEQ ID NO: 151028 - RNA, 19 nt, Human herpesvirus 5
ccgagacggcgugacacag

SEQ ID NO: 151029 - RNA, 20 nt, Human herpesvirus 5
ccgagacgugcgaccuggac

SEQ ID NO: 151030 - RNA, 15 nt, Human herpesvirus 5
ccgacgagacaacaa

SEQ ID NO: 151031 - RNA, 20 nt, Human herpesvirus 5
ccgacgagacaacaaugaca

SEQ ID NO: 151032 - RNA, 18 nt, Human herpesvirus 5
ccgagcugaaggacacgg

SEQ ID NO: 151033 - RNA, 13 nt, Human herpesvirus 5
ccgagcuguguuu

SEQ ID NO: 151034 - RNA, 14 nt, Human herpesvirus 5
ccgagcuugugcuu

SEQ ID NO: 151035 - RNA, 16 nt, Human herpesvirus 5
ccgcagcaccggcuca

SEQ ID NO: 151036 - RNA, 23 nt, Human herpesvirus 5
ccgcagcgaguugcugugcaccu

SEQ ID NO: 151037 - RNA, 21 nt, Human herpesvirus 5
ccgcugcacggcaucaugcug

SEQ ID NO: 151038 - RNA, 19 nt, Human herpesvirus 5
ccgcuaccgucgcuacauu

SEQ ID NO: 151039 - RNA, 13 nt, Human herpesvirus 5
ccgcggaaacgac

SEQ ID NO: 151040 - RNA, 21 nt, Human herpesvirus 5
ccgcgguggucgaugcugauc

SEQ ID NO: 151041 - RNA, 12 nt, Human herpesvirus 5
ccgcguuaucag

SEQ ID NO: 151042 - RNA, 18 nt, Human herpesvirus 5
ccgccucggaucuacuca

SEQ ID NO: 151043 - RNA, 18 nt, Human herpesvirus 5
ccgggggugacaaggaag

SEQ ID NO: 151044 - RNA, 18 nt, Human herpesvirus 5
ccgggucgccuaagggga

SEQ ID NO: 151045 - RNA, 13 nt, Human herpesvirus 5
ccggcugcugcac

SEQ ID NO: 151046 - RNA, 19 nt, Human herpesvirus 5
ccgugccccacucgcucgc

SEQ ID NO: 151047 - RNA, 15 nt, Human herpesvirus 5
ccgugcucgugccca

SEQ ID NO: 151048 - RNA, 22 nt, Human herpesvirus 5
ccgugggucccggcgcgguguu

SEQ ID NO: 151049 - RNA, 14 nt, Human herpesvirus 5
ccgugucgcgcacc

SEQ ID NO: 151050 - RNA, 11 nt, Human herpesvirus 5
ccgugucuccg

SEQ ID NO: 151051 - RNA, 14 nt, Human herpesvirus 5
ccuaucaaugaaga

SEQ ID NO: 151052 - RNA, 20 nt, Human herpesvirus 5
ccuaucgacccccguacugc

SEQ ID NO: 151053 - RNA, 15 nt, Human herpesvirus 5
ccuauagacucuaua

SEQ ID NO: 151054 - RNA, 23 nt, Human herpesvirus 5
ccuauagauagcggcacuuuaca

SEQ ID NO: 151055 - RNA, 24 nt, Human herpesvirus 5
ccuauggcacgucgcugauccgca

SEQ ID NO: 151056 - RNA, 13 nt, Human herpesvirus 5
ccgugauagccac

SEQ ID NO: 151057 - RNA, 14 nt, Human herpesvirus 5
ccgugacaguauua

SEQ ID NO: 151058 - RNA, 18 nt, Human herpesvirus 5
ccgucagggaacacaucg

SEQ ID NO: 151059 - RNA, 15 nt, Human herpesvirus 5
ccgucaggugcuccg

SEQ ID NO: 151060 - RNA, 21 nt, Human herpesvirus 5
ccgucaucggcacgugcucuu

SEQ ID NO: 151061 - RNA, 21 nt, Human herpesvirus 5
ccguccggcgcaacuucuguc

SEQ ID NO: 151062 - RNA, 14 nt, Human herpesvirus 5
ccgucuccaccaca

SEQ ID NO: 151063 - RNA, 15 nt, Human herpesvirus 5
ccgucuccaccacag

SEQ ID NO: 151064 - RNA, 14 nt, Human herpesvirus 5
ccggugugucuauu

SEQ ID NO: 151065 - RNA, 22 nt, Human herpesvirus 5
ccgucacuaaggaccgacacgg

SEQ ID NO: 151066 - RNA, 18 nt, Human herpesvirus 5
ccguaaagagagucacac

SEQ ID NO: 151067 - RNA, 17 nt, Human herpesvirus 5
ccucaaaacaucaccac

SEQ ID NO: 151068 - RNA, 22 nt, Human herpesvirus 5
ccucaaaacaucaccaccauca

SEQ ID NO: 151069 - RNA, 13 nt, Human herpesvirus 5
ccucaccaucuca

SEQ ID NO: 151070 - RNA, 19 nt, Human herpesvirus 5
ccucgccgcuauugcuuag

SEQ ID NO: 151071 - RNA, 14 nt, Human herpesvirus 5
ccucuacaaacuag

SEQ ID NO: 151072 - RNA, 14 nt, Human herpesvirus 5
ccucuaccucgucc

SEQ ID NO: 151073 - RNA, 20 nt, Human herpesvirus 5
ccucuaacaacgucacuucu

SEQ ID NO: 151074 - RNA, 15 nt, Human herpesvirus 5
ccucgggaggacuca

SEQ ID NO: 151075 - RNA, 13 nt, Human herpesvirus 5
ccucgcugggcua

SEQ ID NO: 151076 - RNA, 16 nt, Human herpesvirus 5
ccucguaguugcacac

SEQ ID NO: 151077 - RNA, 24 nt, Human herpesvirus 5
ccucgucgccuuccagcuuaccgc

SEQ ID NO: 151078 - RNA, 19 nt, Human herpesvirus 5
ccugacccgcggcuacgua

SEQ ID NO: 151079 - RNA, 17 nt, Human herpesvirus 5
ccucuuuuccccgugcc

SEQ ID NO: 151080 - RNA, 16 nt, Human herpesvirus 5
ccucuuccucagugaa

SEQ ID NO: 151081 - RNA, 12 nt, Human herpesvirus 5
ccucuucuagua

SEQ ID NO: 151082 - RNA, 14 nt, Human herpesvirus 5
ccucuguguuccca

SEQ ID NO: 151083 - RNA, 17 nt, Human herpesvirus 5
ccucuccuguugcucuc

SEQ ID NO: 151084 - RNA, 17 nt, Human herpesvirus 5
ccucucgcgcccgcaga

SEQ ID NO: 151085 - RNA, 18 nt, Human herpesvirus 5
ccuucuggagcacacugc

SEQ ID NO: 151086 - RNA, 14 nt, Human herpesvirus 5
ccuuguaccaacug

SEQ ID NO: 151087 - RNA, 21 nt, Human herpesvirus 5
ccuucuguauccauacuuacc

SEQ ID NO: 151088 - RNA, 20 nt, Human herpesvirus 5
ccuucuuccucggacaccgg

SEQ ID NO: 151089 - RNA, 18 nt, Human herpesvirus 5
ccuggguaccgagucgga

SEQ ID NO: 151090 - RNA, 23 nt, Human herpesvirus 5
ccugguauccaacuucacuucaa

SEQ ID NO: 151091 - RNA, 18 nt, Human herpesvirus 5
ccuggagcgaguggggca

SEQ ID NO: 151092 - RNA, 18 nt, Human herpesvirus 5
ccuggcccgaacgcugcu

SEQ ID NO: 151093 - RNA, 13 nt, Human herpesvirus 5
ccugcugcucgaa

SEQ ID NO: 151094 - RNA, 19 nt, Human herpesvirus 5
ccuuucugaccuugcugau

SEQ ID NO: 151095 - RNA, 15 nt, Human herpesvirus 5
ccuuuaagcuggacc

SEQ ID NO: 151096 - RNA, 21 nt, Human herpesvirus 5
cgaaaagaggaaguugcggua

SEQ ID NO: 151097 - RNA, 19 nt, Human herpesvirus 5
cgaaaacuuguuuuacaau

SEQ ID NO: 151098 - RNA, 19 nt, Human herpesvirus 5
ccuuuuacuaguauccacg

SEQ ID NO: 151099 - RNA, 14 nt, Human herpesvirus 5
cgaaacguauccau

SEQ ID NO: 151100 - RNA, 16 nt, Human herpesvirus 5
cgaauaacaacacauc

SEQ ID NO: 151101 - RNA, 13 nt, Human herpesvirus 5
cgaaguguugacc

SEQ ID NO: 151102 - RNA, 16 nt, Human herpesvirus 5
cgaaguuuuucauguc

SEQ ID NO: 151103 - RNA, 18 nt, Human herpesvirus 5
cgaaguuuuucaugucuu

SEQ ID NO: 151104 - RNA, 17 nt, Human herpesvirus 5
cgaauucccacuacacu

SEQ ID NO: 151105 - RNA, 22 nt, Human herpesvirus 5
cgaauugagcaacaaacacaga

SEQ ID NO: 151106 - RNA, 13 nt, Human herpesvirus 5
cgaacaggugucu

SEQ ID NO: 151107 - RNA, 14 nt, Human herpesvirus 5
cgaagaugaaaaac

SEQ ID NO: 151108 - RNA, 13 nt, Human herpesvirus 5
cgaagaccucacc

SEQ ID NO: 151109 - RNA, 17 nt, Human herpesvirus 5
cgagcggcggacuuggc

SEQ ID NO: 151110 - RNA, 17 nt, Human herpesvirus 5
cgagcgcgaccgccuca

SEQ ID NO: 151111 - RNA, 12 nt, Human herpesvirus 5
cgagcacuccac

SEQ ID NO: 151112 - RNA, 23 nt, Human herpesvirus 5
cgagaggaguggcugcuguguug

SEQ ID NO: 151113 - RNA, 20 nt, Human herpesvirus 5
cgacugccuaacuguagcac

SEQ ID NO: 151114 - RNA, 17 nt, Human herpesvirus 5
cgacugcgcggccugcu

SEQ ID NO: 151115 - RNA, 19 nt, Human herpesvirus 5
cgacugcguggggugcugg

SEQ ID NO: 151116 - RNA, 13 nt, Human herpesvirus 5
cgagaacuaauau

SEQ ID NO: 151117 - RNA, 19 nt, Human herpesvirus 5
cgagaacuaauauugcaau

SEQ ID NO: 151118 - RNA, 12 nt, Human herpesvirus 5
cgagacuaucua

SEQ ID NO: 151119 - RNA, 13 nt, Human herpesvirus 5
cgacguaccagcu

SEQ ID NO: 151120 - RNA, 14 nt, Human herpesvirus 5
cgacguaccagcug

SEQ ID NO: 151121 - RNA, 12 nt, Human herpesvirus 5
cgacgucgucca

SEQ ID NO: 151122 - RNA, 18 nt, Human herpesvirus 5
cgacgggugguaccugca

SEQ ID NO: 151123 - RNA, 15 nt, Human herpesvirus 5
cgacgcaucugucau

SEQ ID NO: 151124 - RNA, 18 nt, Human herpesvirus 5
cgacgcaucugucaucua

SEQ ID NO: 151125 - RNA, 14 nt, Human herpesvirus 5
cgacgcaugcauuc

SEQ ID NO: 151126 - RNA, 15 nt, Human herpesvirus 5
cgacccccaccagcg

SEQ ID NO: 151127 - RNA, 13 nt, Human herpesvirus 5
cgacaaccugcug

SEQ ID NO: 151128 - RNA, 19 nt, Human herpesvirus 5
cgacagcucguguaucuua

SEQ ID NO: 151129 - RNA, 20 nt, Human herpesvirus 5
cgacagcacguuaguuacag

SEQ ID NO: 151130 - RNA, 19 nt, Human herpesvirus 5
cgaccaccguuaccaguac

SEQ ID NO: 151131 - RNA, 20 nt, Human herpesvirus 5
cgacauggagacaguuucca

SEQ ID NO: 151132 - RNA, 18 nt, Human herpesvirus 5
cgacauggcccucaugac

SEQ ID NO: 151133 - RNA, 19 nt, Human herpesvirus 5
cgacauggcccucaugacg

SEQ ID NO: 151134 - RNA, 22 nt, Human herpesvirus 5
cgacauggcccucaugacgcuc

SEQ ID NO: 151135 - RNA, 12 nt, Human herpesvirus 5
cgacaugucgcg

SEQ ID NO: 151136 - RNA, 17 nt, Human herpesvirus 5
cgaccacaagcucagca

SEQ ID NO: 151137 - RNA, 20 nt, Human herpesvirus 5
cgagggggcuuuccaaagcc

SEQ ID NO: 151138 - RNA, 16 nt, Human herpesvirus 5
cgaggcuuugauguag

SEQ ID NO: 151139 - RNA, 20 nt, Human herpesvirus 5
cgaguagaaaagacagggaa

SEQ ID NO: 151140 - RNA, 19 nt, Human herpesvirus 5
cgagcugggcgaccgucuc

SEQ ID NO: 151141 - RNA, 17 nt, Human herpesvirus 5
cgagugcggucgguguc

SEQ ID NO: 151142 - RNA, 15 nt, Human herpesvirus 5
cgaguccugcuguua

SEQ ID NO: 151143 - RNA, 14 nt, Human herpesvirus 5
cgauauaggugaca

SEQ ID NO: 151144 - RNA, 17 nt, Human herpesvirus 5
cgauacgccggugcugc

SEQ ID NO: 151145 - RNA, 12 nt, Human herpesvirus 5
cgauacuaauau

SEQ ID NO: 151146 - RNA, 20 nt, Human herpesvirus 5
cgaugccggccucaucugua

SEQ ID NO: 151147 - RNA, 21 nt, Human herpesvirus 5
cgaugcgccuccgguggugcg

SEQ ID NO: 151148 - RNA, 23 nt, Human herpesvirus 5
cgaucaucuguccuaggggguga

SEQ ID NO: 151149 - RNA, 14 nt, Human herpesvirus 5
cgaucgcaugcuuc

SEQ ID NO: 151150 - RNA, 18 nt, Human herpesvirus 5
cgaucgcuggaaagacaa

SEQ ID NO: 151151 - RNA, 20 nt, Human herpesvirus 5
cgauauuggaaaaaucgaua

SEQ ID NO: 151152 - RNA, 17 nt, Human herpesvirus 5
cgauucccacaacauau

SEQ ID NO: 151153 - RNA, 23 nt, Human herpesvirus 5
cgauucucacgaucgcugguguc

SEQ ID NO: 151154 - RNA, 14 nt, Human herpesvirus 5
cgauucucuauaca

SEQ ID NO: 151155 - RNA, 21 nt, Human herpesvirus 5
cgauggggucguggcucagcu

SEQ ID NO: 151156 - RNA, 18 nt, Human herpesvirus 5
cgauggcacggucaucua

SEQ ID NO: 151157 - RNA, 20 nt, Human herpesvirus 5
cgauguuuuuugaaucauac

SEQ ID NO: 151158 - RNA, 21 nt, Human herpesvirus 5
cgauguuuuuugaaucauaca

SEQ ID NO: 151159 - RNA, 15 nt, Human herpesvirus 5
uuugacguauuugaa

SEQ ID NO: 151160 - RNA, 15 nt, Human herpesvirus 5
uuugccggcucuccu

SEQ ID NO: 151161 - RNA, 13 nt, Human herpesvirus 5
uuucugcuuaaag

SEQ ID NO: 151162 - RNA, 18 nt, Human herpesvirus 5
ugccugcacgaccugcuc

SEQ ID NO: 151163 - RNA, 21 nt, Human herpesvirus 5
ugcgaagccagcuacagccac

SEQ ID NO: 151164 - RNA, 17 nt, Human herpesvirus 5
ugccuuccgcgugcucc

SEQ ID NO: 151165 - RNA, 14 nt, Human herpesvirus 5
ugccucuacuugga

SEQ ID NO: 151166 - RNA, 22 nt, Human herpesvirus 5
ugcccgaagaggacgaagugac

SEQ ID NO: 151167 - RNA, 23 nt, Human herpesvirus 5
ugccgagacgacgguaacaaccg

SEQ ID NO: 151168 - RNA, 14 nt, Human herpesvirus 5
ugccgagcugccuu

SEQ ID NO: 151169 - RNA, 22 nt, Human herpesvirus 5
ugccgaaacaccgugugguggu

SEQ ID NO: 151170 - RNA, 22 nt, Human herpesvirus 5
ugccgaagaccucaccaucuca

SEQ ID NO: 151171 - RNA, 21 nt, Human herpesvirus 5
ugccccccgggauccaagaga

SEQ ID NO: 151172 - RNA, 23 nt, Human herpesvirus 5
ugcccauugagcgagaacuaaua

SEQ ID NO: 151173 - RNA, 21 nt, Human herpesvirus 5
ugcccaucgucugcauguuca

SEQ ID NO: 151174 - RNA, 19 nt, Human herpesvirus 5
ugcccgucggcugccuguu

SEQ ID NO: 151175 - RNA, 22 nt, Human herpesvirus 5
ugcgucaagacgggccugguau

SEQ ID NO: 151176 - RNA, 12 nt, Human herpesvirus 5
ugcgugaugauu

SEQ ID NO: 151177 - RNA, 14 nt, Human herpesvirus 5
ugcguguaccgcua

SEQ ID NO: 151178 - RNA, 17 nt, Human herpesvirus 5
ugcguguuaaacacuac

SEQ ID NO: 151179 - RNA, 22 nt, Human herpesvirus 5
ugcguuacggguacacggggau

SEQ ID NO: 151180 - RNA, 21 nt, Human herpesvirus 5
ugcgguaacuggcagagccac

SEQ ID NO: 151181 - RNA, 14 nt, Human herpesvirus 5
ugcgguuuccucuu

SEQ ID NO: 151182 - RNA, 16 nt, Human herpesvirus 5
ugcggucggugucucg

SEQ ID NO: 151183 - RNA, 21 nt, Human herpesvirus 5
ugcggcgacugauuaaccaua

SEQ ID NO: 151184 - RNA, 16 nt, Human herpesvirus 5
ugcgacacgugcuuuu

SEQ ID NO: 151185 - RNA, 22 nt, Human herpesvirus 5
ugcgaggacaaccgcauccugc

SEQ ID NO: 151186 - RNA, 17 nt, Human herpesvirus 5
ugcgaggcuuugaugua

SEQ ID NO: 151187 - RNA, 14 nt, Human herpesvirus 5
ugcgaugugcaaug

SEQ ID NO: 151188 - RNA, 19 nt, Human herpesvirus 5
ugcgcccccgugugucuaa

SEQ ID NO: 151189 - RNA, 23 nt, Human herpesvirus 5
ugcgccuuuaagcuggaccuguu

SEQ ID NO: 151190 - RNA, 18 nt, Human herpesvirus 5
ugcgcgaauggcuggugu

SEQ ID NO: 151191 - RNA, 18 nt, Human herpesvirus 5
ugcgcguguacuugcuca

SEQ ID NO: 151192 - RNA, 19 nt, Human herpesvirus 5
ugcgcauguucuaugccgu

SEQ ID NO: 151193 - RNA, 21 nt, Human herpesvirus 5
ugcgcgucgaccuugagcgac

SEQ ID NO: 151194 - RNA, 22 nt, Human herpesvirus 5
ugcgcucuugggcgacaugcac

SEQ ID NO: 151195 - RNA, 16 nt, Human herpesvirus 5
ugcauaagaagccaag

SEQ ID NO: 151196 - RNA, 15 nt, Human herpesvirus 5
ugcagcgcuacgugc

SEQ ID NO: 151197 - RNA, 13 nt, Human herpesvirus 5
ugcagcuggugau

SEQ ID NO: 151198 - RNA, 14 nt, Human herpesvirus 5
ugcagcuggugauc

SEQ ID NO: 151199 - RNA, 16 nt, Human herpesvirus 5
ugcagcgacgaucccu

SEQ ID NO: 151200 - RNA, 17 nt, Human herpesvirus 5
ugcagcgacgaucccuc

SEQ ID NO: 151201 - RNA, 17 nt, Human herpesvirus 5
ugcaacugcaccagcaa

SEQ ID NO: 151202 - RNA, 23 nt, Human herpesvirus 5
ugcaacugcaccagcaaccaccg

SEQ ID NO: 151203 - RNA, 17 nt, Human herpesvirus 5
ugcaaagucaacaugua

SEQ ID NO: 151204 - RNA, 20 nt, Human herpesvirus 5
ugauuucaacaaauaccaac

SEQ ID NO: 151205 - RNA, 17 nt, Human herpesvirus 5
ugcaaaagaagcugccc

SEQ ID NO: 151206 - RNA, 14 nt, Human herpesvirus 5
ugccaacaaugacu

SEQ ID NO: 151207 - RNA, 15 nt, Human herpesvirus 5
ugccagucgcacuaa

SEQ ID NO: 151208 - RNA, 12 nt, Human herpesvirus 5
ugcccacgccgu

SEQ ID NO: 151209 - RNA, 17 nt, Human herpesvirus 5
ugccauggaccugaccu

SEQ ID NO: 151210 - RNA, 18 nt, Human herpesvirus 5
ugcaucgccauccgagcc

SEQ ID NO: 151211 - RNA, 22 nt, Human herpesvirus 5
ugcauuaucaucuaaagacuau

SEQ ID NO: 151212 - RNA, 14 nt, Human herpesvirus 5
ugcauguucaucac

SEQ ID NO: 151213 - RNA, 22 nt, Human herpesvirus 5
ucuguauccauacuuaccaccg

SEQ ID NO: 151214 - RNA, 18 nt, Human herpesvirus 5
ucugggauauaaauuggg

SEQ ID NO: 151215 - RNA, 17 nt, Human herpesvirus 5
ucugguaccugcuaaag

SEQ ID NO: 151216 - RNA, 12 nt, Human herpesvirus 5
ucugguacuuag

SEQ ID NO: 151217 - RNA, 17 nt, Human herpesvirus 5
ucuggcaagaguucaaa

SEQ ID NO: 151218 - RNA, 15 nt, Human herpesvirus 5
ucuggcccugcugua

SEQ ID NO: 151219 - RNA, 17 nt, Human herpesvirus 5
ucuggauguauaugauu

SEQ ID NO: 151220 - RNA, 15 nt, Human herpesvirus 5
ugaaaaacaucuuaa

SEQ ID NO: 151221 - RNA, 14 nt, Human herpesvirus 5
ugaaaacaccauug

SEQ ID NO: 151222 - RNA, 15 nt, Human herpesvirus 5
ugaaaacgucaucuc

SEQ ID NO: 151223 - RNA, 17 nt, Human herpesvirus 5
ugaaaaguagcaccaca

SEQ ID NO: 151224 - RNA, 15 nt, Human herpesvirus 5
ugaaacauaugcaga

SEQ ID NO: 151225 - RNA, 17 nt, Human herpesvirus 5
ugaaaucacugugaaac

SEQ ID NO: 151226 - RNA, 14 nt, Human herpesvirus 5
ugaauaacaccaaa

SEQ ID NO: 151227 - RNA, 19 nt, Human herpesvirus 5
ugaauaacaccaaaaaucc

SEQ ID NO: 151228 - RNA, 23 nt, Human herpesvirus 5
ugaauaacaccaaaaauccagac

SEQ ID NO: 151229 - RNA, 17 nt, Human herpesvirus 5
ugaaacgccaacuccgu

SEQ ID NO: 151230 - RNA, 17 nt, Human herpesvirus 5
ugacaucaccgccuccc

SEQ ID NO: 151231 - RNA, 21 nt, Human herpesvirus 5
ugacaguauuaacguguggug

SEQ ID NO: 151232 - RNA, 19 nt, Human herpesvirus 5
ugacaguucacggggagaa

SEQ ID NO: 151233 - RNA, 16 nt, Human herpesvirus 5
ugaauggaaauacaug

SEQ ID NO: 151234 - RNA, 21 nt, Human herpesvirus 5
ugaauggaaauacaugaugaa

SEQ ID NO: 151235 - RNA, 19 nt, Human herpesvirus 5
ugaauauagggacaguccc

SEQ ID NO: 151236 - RNA, 15 nt, Human herpesvirus 5
ugaaucaugugguca

SEQ ID NO: 151237 - RNA, 14 nt, Human herpesvirus 5
ugauuauacaacag

SEQ ID NO: 151238 - RNA, 22 nt, Human herpesvirus 5
ugauucuggaauccaucaucua

SEQ ID NO: 151239 - RNA, 21 nt, Human herpesvirus 5
ugauuuacgaggucugcaugu

SEQ ID NO: 151240 - RNA, 15 nt, Human herpesvirus 5
ugauaaccuaccugg

SEQ ID NO: 151241 - RNA, 16 nt, Human herpesvirus 5
ugauaacaaacaauga

SEQ ID NO: 151242 - RNA, 16 nt, Human herpesvirus 5
ugauaaaauccagguu

SEQ ID NO: 151243 - RNA, 17 nt, Human herpesvirus 5
ugauacccuaauaaagc

SEQ ID NO: 151244 - RNA, 16 nt, Human herpesvirus 5
ugauacgcuagcagaa

SEQ ID NO: 151245 - RNA, 16 nt, Human herpesvirus 5
ugauacauagcaguau

SEQ ID NO: 151246 - RNA, 23 nt, Human herpesvirus 5
ugacgugcaagacuacaugcuau

SEQ ID NO: 151247 - RNA, 20 nt, Human herpesvirus 5
ugacguggguuggucacuga

SEQ ID NO: 151248 - RNA, 19 nt, Human herpesvirus 5
ugacggauaaacacgacau

SEQ ID NO: 151249 - RNA, 19 nt, Human herpesvirus 5
ugacguauuugaagccagg

SEQ ID NO: 151250 - RNA, 22 nt, Human herpesvirus 5
ugaccggcccuagaaagaccaa

SEQ ID NO: 151251 - RNA, 16 nt, Human herpesvirus 5
ugacgguuggacuccu

SEQ ID NO: 151252 - RNA, 22 nt, Human herpesvirus 5
ugacguacauauacgugauuau

SEQ ID NO: 151253 - RNA, 12 nt, Human herpesvirus 5
ugacgcugcuuu

SEQ ID NO: 151254 - RNA, 13 nt, Human herpesvirus 5
ugacgcuguacaa

SEQ ID NO: 151255 - RNA, 19 nt, Human herpesvirus 5
ugacgcuguuagugguggc

SEQ ID NO: 151256 - RNA, 14 nt, Human herpesvirus 5
ugaggaggguggug

SEQ ID NO: 151257 - RNA, 16 nt, Human herpesvirus 5
ugaggaggguggugac

SEQ ID NO: 151258 - RNA, 22 nt, Human herpesvirus 5
ugaggaggguggugacuuacau

SEQ ID NO: 151259 - RNA, 20 nt, Human herpesvirus 5
ugacgcacuuuuuuuacuag

SEQ ID NO: 151260 - RNA, 23 nt, Human herpesvirus 5
ugacgcacuuuuuuuacuaguau

SEQ ID NO: 151261 - RNA, 16 nt, Human herpesvirus 5
ugacgacgacgcugcu

SEQ ID NO: 151262 - RNA, 16 nt, Human herpesvirus 5
ugaccguuguggggau

SEQ ID NO: 151263 - RNA, 13 nt, Human herpesvirus 5
ugaccaugggcua

SEQ ID NO: 151264 - RNA, 17 nt, Human herpesvirus 5
ucuccugagacacuuga

SEQ ID NO: 151265 - RNA, 18 nt, Human herpesvirus 5
ucucauuugcuuuuacaa

SEQ ID NO: 151266 - RNA, 20 nt, Human herpesvirus 5
ucucaugaacaccuuuuugc

SEQ ID NO: 151267 - RNA, 15 nt, Human herpesvirus 5
ucugcacgcucuguc

SEQ ID NO: 151268 - RNA, 12 nt, Human herpesvirus 5
ucugcauguugg

SEQ ID NO: 151269 - RNA, 13 nt, Human herpesvirus 5
ucugcauguuggu

SEQ ID NO: 151270 - RNA, 14 nt, Human herpesvirus 5
ucugcgccgucucu

SEQ ID NO: 151271 - RNA, 14 nt, Human herpesvirus 5
ucugcguguuuuau

SEQ ID NO: 151272 - RNA, 22 nt, Human herpesvirus 5
ucugcgucggagcucuuuucau

SEQ ID NO: 151273 - RNA, 18 nt, Human herpesvirus 5
ucugcguucuguggugcg

SEQ ID NO: 151274 - RNA, 11 nt, Human herpesvirus 5
ucugcuacugg

SEQ ID NO: 151275 - RNA, 23 nt, Human herpesvirus 5
ucucaacacguaacgucuucuga

SEQ ID NO: 151276 - RNA, 14 nt, Human herpesvirus 5
ucucacgguuaaag

SEQ ID NO: 151277 - RNA, 22 nt, Human herpesvirus 5
ucgugugcuguugaccugggua

SEQ ID NO: 151278 - RNA, 23 nt, Human herpesvirus 5
ucguuauaagcguggauggucau

SEQ ID NO: 151279 - RNA, 14 nt, Human herpesvirus 5
ucgugucgcugcgu

SEQ ID NO: 151280 - RNA, 17 nt, Human herpesvirus 5
ucgugucgcugcgucca

SEQ ID NO: 151281 - RNA, 17 nt, Human herpesvirus 5
ucuaaacgccaccugca

SEQ ID NO: 151282 - RNA, 12 nt, Human herpesvirus 5
ucuaaagccacg

SEQ ID NO: 151283 - RNA, 19 nt, Human herpesvirus 5
ucuaaauaauaaaaacaca

SEQ ID NO: 151284 - RNA, 17 nt, Human herpesvirus 5
ucuaacaacgucacuuc

SEQ ID NO: 151285 - RNA, 18 nt, Human herpesvirus 5
ucuaacaacgucacuucu

SEQ ID NO: 151286 - RNA, 17 nt, Human herpesvirus 5
ucgggcccuggauacaa

SEQ ID NO: 151287 - RNA, 20 nt, Human herpesvirus 5
ucggcuguccuugauguauc

SEQ ID NO: 151288 - RNA, 16 nt, Human herpesvirus 5
ucggccgcgucgcaaa

SEQ ID NO: 151289 - RNA, 22 nt, Human herpesvirus 5
ucggcagaggucgccgcugaua

SEQ ID NO: 151290 - RNA, 19 nt, Human herpesvirus 5
ucggaaacgacucaccaga

SEQ ID NO: 151291 - RNA, 21 nt, Human herpesvirus 5
ucgucaggcuugucauggucu

SEQ ID NO: 151292 - RNA, 22 nt, Human herpesvirus 5
ucgucaaagccgacaaccugcu

SEQ ID NO: 151293 - RNA, 20 nt, Human herpesvirus 5
ucgucaaggcucgcaaagac

SEQ ID NO: 151294 - RNA, 16 nt, Human herpesvirus 5
ucgucacgcucaagga

SEQ ID NO: 151295 - RNA, 13 nt, Human herpesvirus 5
ucguaguacaaua

SEQ ID NO: 151296 - RNA, 15 nt, Human herpesvirus 5
ucguaagcugucagc

SEQ ID NO: 151297 - RNA, 14 nt, Human herpesvirus 5
ucgguguuguacuc

SEQ ID NO: 151298 - RNA, 19 nt, Human herpesvirus 5
ucgguuugcgucuccauga

SEQ ID NO: 151299 - RNA, 20 nt, Human herpesvirus 5
ucgugcgaggacaaccgcau

SEQ ID NO: 151300 - RNA, 20 nt, Human herpesvirus 5
ucgucguaguuguugcagaa

SEQ ID NO: 151301 - RNA, 14 nt, Human herpesvirus 5
ucgucucaucacau

SEQ ID NO: 151302 - RNA, 14 nt, Human herpesvirus 5
ucgucucaucauca

SEQ ID NO: 151303 - RNA, 14 nt, Human herpesvirus 5
ucgucgacgucauc

SEQ ID NO: 151304 - RNA, 18 nt, Human herpesvirus 5
ucgaccucuuugagcaca

SEQ ID NO: 151305 - RNA, 20 nt, Human herpesvirus 5
ucgaccuugagcgacagcag

SEQ ID NO: 151306 - RNA, 14 nt, Human herpesvirus 5
ucgacguguuauca

SEQ ID NO: 151307 - RNA, 20 nt, Human herpesvirus 5
ucgacugcguggggugcugg

SEQ ID NO: 151308 - RNA, 16 nt, Human herpesvirus 5
ucgaagguaacuucag

SEQ ID NO: 151309 - RNA, 15 nt, Human herpesvirus 5
ucgcucuagguuuga

SEQ ID NO: 151310 - RNA, 18 nt, Human herpesvirus 5
ucgcucucgucgcucuau

SEQ ID NO: 151311 - RNA, 17 nt, Human herpesvirus 5
ucgcucaucgucacgcu

SEQ ID NO: 151312 - RNA, 13 nt, Human herpesvirus 5
ucgcucgcugcau

SEQ ID NO: 151313 - RNA, 19 nt, Human herpesvirus 5
uccugcagcugcaccacgg

SEQ ID NO: 151314 - RNA, 15 nt, Human herpesvirus 5
uccugagacacuuga

SEQ ID NO: 151315 - RNA, 14 nt, Human herpesvirus 5
ucgaaaacaaccac

SEQ ID NO: 151316 - RNA, 16 nt, Human herpesvirus 5
ucgaaaacaaccacac

SEQ ID NO: 151317 - RNA, 12 nt, Human herpesvirus 5
ucgaaagccacc

SEQ ID NO: 151318 - RNA, 19 nt, Human herpesvirus 5
ucgaaagccaccguuuuca

SEQ ID NO: 151319 - RNA, 15 nt, Human herpesvirus 5
ucgaaccaaccaaaa

SEQ ID NO: 151320 - RNA, 23 nt, Human herpesvirus 5
ucccagaggaagcccauguaggu

SEQ ID NO: 151321 - RNA, 11 nt, Human herpesvirus 5
ucccaccacgg

SEQ ID NO: 151322 - RNA, 23 nt, Human herpesvirus 5
ucccaccacgguuuccucgguca

SEQ ID NO: 151323 - RNA, 17 nt, Human herpesvirus 5
uccaccacggcugcuga

SEQ ID NO: 151324 - RNA, 18 nt, Human herpesvirus 5
ucccccccguccaggugg

SEQ ID NO: 151325 - RNA, 13 nt, Human herpesvirus 5
uccccuacgugac

SEQ ID NO: 151326 - RNA, 22 nt, Human herpesvirus 5
uccccuaguaauaccaccguca

SEQ ID NO: 151327 - RNA, 20 nt, Human herpesvirus 5
ucccgacauggagacaguuu

SEQ ID NO: 151328 - RNA, 15 nt, Human herpesvirus 5
uccuacgacaacauc

SEQ ID NO: 151329 - RNA, 23 nt, Human herpesvirus 5
uccucgugugcuguugaccuggg

SEQ ID NO: 151330 - RNA, 15 nt, Human herpesvirus 5
uccucuccguuacca

SEQ ID NO: 151331 - RNA, 17 nt, Human herpesvirus 5
uccucgggaaugccaga

SEQ ID NO: 151332 - RNA, 23 nt, Human herpesvirus 5
uccucgggaggacucagagccac

SEQ ID NO: 151333 - RNA, 16 nt, Human herpesvirus 5
uccucguaaacuuaug

SEQ ID NO: 151334 - RNA, 15 nt, Human herpesvirus 5
uccucguggaaggca

SEQ ID NO: 151335 - RNA, 15 nt, Human herpesvirus 5
uccgucguuaucuuc

SEQ ID NO: 151336 - RNA, 16 nt, Human herpesvirus 5
uccgucuccagacaaa

SEQ ID NO: 151337 - RNA, 15 nt, Human herpesvirus 5
uccgguaacguggac

SEQ ID NO: 151338 - RNA, 17 nt, Human herpesvirus 5
uccgugauagccacgac

SEQ ID NO: 151339 - RNA, 23 nt, Human herpesvirus 5
uccggcugacgcggacgaggaac

SEQ ID NO: 151340 - RNA, 21 nt, Human herpesvirus 5
uccgcguuuggucgccugccu

SEQ ID NO: 151341 - RNA, 22 nt, Human herpesvirus 5
uccggacggcgaagucugcuac

SEQ ID NO: 151342 - RNA, 18 nt, Human herpesvirus 5
uccgcccuugguggagac

SEQ ID NO: 151343 - RNA, 23 nt, Human herpesvirus 5
uccgccguguuuuugcucgagac

SEQ ID NO: 151344 - RNA, 17 nt, Human herpesvirus 5
uccgauguacguaccac

SEQ ID NO: 151345 - RNA, 13 nt, Human herpesvirus 5
uccgaugaugaua

SEQ ID NO: 151346 - RNA, 23 nt, Human herpesvirus 5
uccacaacgacaaauacaaacgu

SEQ ID NO: 151347 - RNA, 14 nt, Human herpesvirus 5
uccaagggagacau

SEQ ID NO: 151348 - RNA, 13 nt, Human herpesvirus 5
uccaauaaaccca

SEQ ID NO: 151349 - RNA, 22 nt, Human herpesvirus 5
uccaacuucacuucaaacauca

SEQ ID NO: 151350 - RNA, 23 nt, Human herpesvirus 5
uccaacuucacuucaaacaucag

SEQ ID NO: 151351 - RNA, 15 nt, Human herpesvirus 5
ucauucguguugaca

SEQ ID NO: 151352 - RNA, 12 nt, Human herpesvirus 5
uccaagugcaag

SEQ ID NO: 151353 - RNA, 23 nt, Human herpesvirus 5
uccaacuuuguggggcugcucaa

SEQ ID NO: 151354 - RNA, 19 nt, Human herpesvirus 5
ucaugugucgauguuccua

SEQ ID NO: 151355 - RNA, 18 nt, Human herpesvirus 5
ucauguucgacggucaga

SEQ ID NO: 151356 - RNA, 11 nt, Human herpesvirus 5
ucauguucucc

SEQ ID NO: 151357 - RNA, 23 nt, Human herpesvirus 5
ucaugguggucuacaagcgcaac

SEQ ID NO: 151358 - RNA, 18 nt, Human herpesvirus 5
ucaugguauaaagauuca

SEQ ID NO: 151359 - RNA, 20 nt, Human herpesvirus 5
ucaugguauaaagauucacu

SEQ ID NO: 151360 - RNA, 21 nt, Human herpesvirus 5
ucaugguauaaagauucacuu

SEQ ID NO: 151361 - RNA, 14 nt, Human herpesvirus 5
ucauuaugauuucc

SEQ ID NO: 151362 - RNA, 15 nt, Human herpesvirus 5
ucaucgacgccuacc

SEQ ID NO: 151363 - RNA, 21 nt, Human herpesvirus 5
ucaucugcucccgcugcugcu

SEQ ID NO: 151364 - RNA, 19 nt, Human herpesvirus 5
ucaucgucacgcucaagga

SEQ ID NO: 151365 - RNA, 19 nt, Human herpesvirus 5
ucaucgugcaguaccucaa

SEQ ID NO: 151366 - RNA, 19 nt, Human herpesvirus 5
ucaugcauucagaaaacgg

SEQ ID NO: 151367 - RNA, 15 nt, Human herpesvirus 5
ucaugaacuucauca

SEQ ID NO: 151368 - RNA, 20 nt, Human herpesvirus 5
ucaugaacuucaucaucacc

SEQ ID NO: 151369 - RNA, 16 nt, Human herpesvirus 5
ucauggagcuacucac

SEQ ID NO: 151370 - RNA, 17 nt, Human herpesvirus 5
ucacaccgucagcugcg

SEQ ID NO: 151371 - RNA, 18 nt, Human herpesvirus 5
ucacaauggaagccauac

SEQ ID NO: 151372 - RNA, 21 nt, Human herpesvirus 5
ucacaauggaagccauacuuc

SEQ ID NO: 151373 - RNA, 19 nt, Human herpesvirus 5
ucaucaagcacuaccagcu

SEQ ID NO: 151374 - RNA, 15 nt, Human herpesvirus 5
ucaucaaucacccac

SEQ ID NO: 151375 - RNA, 19 nt, Human herpesvirus 5
ucauauuaugcguguccug

SEQ ID NO: 151376 - RNA, 12 nt, Human herpesvirus 5
ucaucaacagca

SEQ ID NO: 151377 - RNA, 14 nt, Human herpesvirus 5
ucaucaacagcagc

SEQ ID NO: 151378 - RNA, 11 nt, Human herpesvirus 5
ucaucaucacc

SEQ ID NO: 151379 - RNA, 18 nt, Human herpesvirus 5
ucaucaucacgcaaagca

SEQ ID NO: 151380 - RNA, 19 nt, Human herpesvirus 5
ugguggccgaacagcagcu

SEQ ID NO: 151381 - RNA, 21 nt, Human herpesvirus 5
ugguggccgaacagcagcucu

SEQ ID NO: 151382 - RNA, 17 nt, Human herpesvirus 5
uggugccccaggaugaa

SEQ ID NO: 151383 - RNA, 21 nt, Human herpesvirus 5
ugguggaaaccagauacaacg

SEQ ID NO: 151384 - RNA, 11 nt, Human herpesvirus 5
ugguguuacac

SEQ ID NO: 151385 - RNA, 20 nt, Human herpesvirus 5
ugguuaucauccaggacaaa

SEQ ID NO: 151386 - RNA, 20 nt, Human herpesvirus 5
uguaggagacgagcucuugc

SEQ ID NO: 151387 - RNA, 24 nt, Human herpesvirus 5
uguaguacuaccguuaacuauucc

SEQ ID NO: 151388 - RNA, 20 nt, Human herpesvirus 5
uguaucggcauacaaugugc

SEQ ID NO: 151389 - RNA, 14 nt, Human herpesvirus 5
uguauaugugaauu

SEQ ID NO: 151390 - RNA, 15 nt, Human herpesvirus 5
uguauauauauauca

SEQ ID NO: 151391 - RNA, 12 nt, Human herpesvirus 5
uguauagauaca

SEQ ID NO: 151392 - RNA, 17 nt, Human herpesvirus 5
uguccgcucguguucca

SEQ ID NO: 151393 - RNA, 16 nt, Human herpesvirus 5
uguccgcgggcaauug

SEQ ID NO: 151394 - RNA, 18 nt, Human herpesvirus 5
uguauuggcauauagcca

SEQ ID NO: 151395 - RNA, 23 nt, Human herpesvirus 5
uguauuauauacaaaaacaugca

SEQ ID NO: 151396 - RNA, 19 nt, Human herpesvirus 5
ugucuauaaaggccgugcc

SEQ ID NO: 151397 - RNA, 13 nt, Human herpesvirus 5
ugugaggaugaaa

SEQ ID NO: 151398 - RNA, 15 nt, Human herpesvirus 5
uguccuaggggguga

SEQ ID NO: 151399 - RNA, 14 nt, Human herpesvirus 5
ugucgcaaauaucg

SEQ ID NO: 151400 - RNA, 12 nt, Human herpesvirus 5
ugucgcacaaag

SEQ ID NO: 151401 - RNA, 14 nt, Human herpesvirus 5
ugucggcgugaaug

SEQ ID NO: 151402 - RNA, 13 nt, Human herpesvirus 5
ugucgcuauacac

SEQ ID NO: 151403 - RNA, 14 nt, Human herpesvirus 5
uggcugcuguguug

SEQ ID NO: 151404 - RNA, 17 nt, Human herpesvirus 5
uggcuauaauaugugcg

SEQ ID NO: 151405 - RNA, 14 nt, Human herpesvirus 5
uggcuauguacaca

SEQ ID NO: 151406 - RNA, 23 nt, Human herpesvirus 5
uggcgcguacgguggacggguuu

SEQ ID NO: 151407 - RNA, 16 nt, Human herpesvirus 5
uggcaagaguucaaag

SEQ ID NO: 151408 - RNA, 15 nt, Human herpesvirus 5
uggcaaggugcugca

SEQ ID NO: 151409 - RNA, 21 nt, Human herpesvirus 5
uggcaaguuggccaccaagaa

SEQ ID NO: 151410 - RNA, 15 nt, Human herpesvirus 5
uggauuaguaaugga

SEQ ID NO: 151411 - RNA, 14 nt, Human herpesvirus 5
uggauguauguauc

SEQ ID NO: 151412 - RNA, 20 nt, Human herpesvirus 5
uggauguugagagugguggg

SEQ ID NO: 151413 - RNA, 14 nt, Human herpesvirus 5
uggauuugucucuc

SEQ ID NO: 151414 - RNA, 14 nt, Human herpesvirus 5
uggcaaagagccau

SEQ ID NO: 151415 - RNA, 12 nt, Human herpesvirus 5
ugcuacagggag

SEQ ID NO: 151416 - RNA, 19 nt, Human herpesvirus 5
uggguuacgagaaacuggg

SEQ ID NO: 151417 - RNA, 20 nt, Human herpesvirus 5
uggguauuacggacaccucu

SEQ ID NO: 151418 - RNA, 17 nt, Human herpesvirus 5
uggguggcucaccguca

SEQ ID NO: 151419 - RNA, 15 nt, Human herpesvirus 5
ugguaagucugggaa

SEQ ID NO: 151420 - RNA, 19 nt, Human herpesvirus 5
uggguccagccagcaucga

SEQ ID NO: 151421 - RNA, 23 nt, Human herpesvirus 5
ugggucccggcgcgguguuagac

SEQ ID NO: 151422 - RNA, 22 nt, Human herpesvirus 5
ugggcauacgcgauaucuggcg

SEQ ID NO: 151423 - RNA, 12 nt, Human herpesvirus 5
ugggcaugcaau

SEQ ID NO: 151424 - RNA, 19 nt, Human herpesvirus 5
uguuugcgcccccgugugu

SEQ ID NO: 151425 - RNA, 20 nt, Human herpesvirus 5
uguuugcgcccccguguguc

SEQ ID NO: 151426 - RNA, 22 nt, Human herpesvirus 5
uguuugcgcccccgugugucua

SEQ ID NO: 151427 - RNA, 18 nt, Human herpesvirus 5
uguuucaaacagcacauu

SEQ ID NO: 151428 - RNA, 20 nt, Human herpesvirus 5
uguuguuagacuagcacaga

SEQ ID NO: 151429 - RNA, 20 nt, Human herpesvirus 5
uguuggaccaaagacugugg

SEQ ID NO: 151430 - RNA, 22 nt, Human herpesvirus 5
uguugccgcuggacugacacag

SEQ ID NO: 151431 - RNA, 18 nt, Human herpesvirus 5
uguucucaugcagcacau

SEQ ID NO: 151432 - RNA, 11 nt, Human herpesvirus 5
uuaaaacuggu

SEQ ID NO: 151433 - RNA, 13 nt, Human herpesvirus 5
uguuuuuugugca

SEQ ID NO: 151434 - RNA, 18 nt, Human herpesvirus 5
uuaaacccacgaccauuu

SEQ ID NO: 151435 - RNA, 21 nt, Human herpesvirus 5
uuaaacgucguuguguucuua

SEQ ID NO: 151436 - RNA, 22 nt, Human herpesvirus 5
uuaaacgucguuguguucuuac

SEQ ID NO: 151437 - RNA, 16 nt, Human herpesvirus 5
uguuacaaugucacug

SEQ ID NO: 151438 - RNA, 22 nt, Human herpesvirus 5
ugugccucauuuguauuuacuu

SEQ ID NO: 151439 - RNA, 14 nt, Human herpesvirus 5
uguuagacuagcac

SEQ ID NO: 151440 - RNA, 15 nt, Human herpesvirus 5
ugugaucugcacgua

SEQ ID NO: 151441 - RNA, 21 nt, Human herpesvirus 5
ugugcacgcacgacaugacac

SEQ ID NO: 151442 - RNA, 17 nt, Human herpesvirus 5
uguucucccgacgucac

SEQ ID NO: 151443 - RNA, 16 nt, Human herpesvirus 5
uguugaauaacaccaa

SEQ ID NO: 151444 - RNA, 23 nt, Human herpesvirus 5
uuagugucgauacuuuguaauca

SEQ ID NO: 151445 - RNA, 23 nt, Human herpesvirus 5
uuaguauacuaaacucugugaug

SEQ ID NO: 151446 - RNA, 15 nt, Human herpesvirus 5
uuacauaaaaccacc

SEQ ID NO: 151447 - RNA, 16 nt, Human herpesvirus 5
uuacauaaaaccaccg

SEQ ID NO: 151448 - RNA, 22 nt, Human herpesvirus 5
uuacagccuugagaaccugcuc

SEQ ID NO: 151449 - RNA, 17 nt, Human herpesvirus 5
uuacuaguauccacguc

SEQ ID NO: 151450 - RNA, 19 nt, Human herpesvirus 5
uuacguguuucaaacagca

SEQ ID NO: 151451 - RNA, 19 nt, Human herpesvirus 5
uuacugggacgcgugcucu

SEQ ID NO: 151452 - RNA, 19 nt, Human herpesvirus 5
uuacuccgugcgguucuca

SEQ ID NO: 151453 - RNA, 12 nt, Human herpesvirus 5
uuacacauuacu

SEQ ID NO: 151454 - RNA, 16 nt, Human herpesvirus 5
uuaacccaaaaccaug

SEQ ID NO: 151455 - RNA, 19 nt, Human herpesvirus 5
uuaacccaaaaccaugcua

SEQ ID NO: 151456 - RNA, 15 nt, Human herpesvirus 5
uuaacgcgcaagugc

SEQ ID NO: 151457 - RNA, 14 nt, Human herpesvirus 5
uuaacaagucacua

SEQ ID NO: 151458 - RNA, 17 nt, Human herpesvirus 5
uuaacaagucacuauag

SEQ ID NO: 151459 - RNA, 19 nt, Human herpesvirus 5
uuaacaacguguccagcua

SEQ ID NO: 151460 - RNA, 18 nt, Human herpesvirus 5
uucuacucguaaacugug

SEQ ID NO: 151461 - RNA, 15 nt, Human herpesvirus 5
uucuaguacuuccca

SEQ ID NO: 151462 - RNA, 23 nt, Human herpesvirus 5
uucuccugccgagacgacgguaa

SEQ ID NO: 151463 - RNA, 16 nt, Human herpesvirus 5
uucuuugguaucuaca

SEQ ID NO: 151464 - RNA, 13 nt, Human herpesvirus 5
uucuuuuugcaaa

SEQ ID NO: 151465 - RNA, 18 nt, Human herpesvirus 5
uugaaagcuuucuacgug

SEQ ID NO: 151466 - RNA, 14 nt, Human herpesvirus 5
uugaaaauauggca

SEQ ID NO: 151467 - RNA, 15 nt, Human herpesvirus 5
uugaaaauauggcau

SEQ ID NO: 151468 - RNA, 13 nt, Human herpesvirus 5
uugaaucauacau

SEQ ID NO: 151469 - RNA, 20 nt, Human herpesvirus 5
uugacuagcgaaguacacag

SEQ ID NO: 151470 - RNA, 22 nt, Human herpesvirus 5
uugaccggcccuagaaagacca

SEQ ID NO: 151471 - RNA, 13 nt, Human herpesvirus 5
uugagaacauaua

SEQ ID NO: 151472 - RNA, 13 nt, Human herpesvirus 5
uugagacuaccac

SEQ ID NO: 151473 - RNA, 15 nt, Human herpesvirus 5
uugagacuaccacau

SEQ ID NO: 151474 - RNA, 15 nt, Human herpesvirus 5
uugagcgacagcagc

SEQ ID NO: 151475 - RNA, 21 nt, Human herpesvirus 5
uugcugcgaagcccguucuuc

SEQ ID NO: 151476 - RNA, 18 nt, Human herpesvirus 5
uucgaccacaagcucagc

SEQ ID NO: 151477 - RNA, 17 nt, Human herpesvirus 5
uucgccgcaaugggcuu

SEQ ID NO: 151478 - RNA, 21 nt, Human herpesvirus 5
uucgcaugucgucucaucaca

SEQ ID NO: 151479 - RNA, 19 nt, Human herpesvirus 5
uucgcggcgagguggucaa

SEQ ID NO: 151480 - RNA, 19 nt, Human herpesvirus 5
uucgauucucuauacacau

SEQ ID NO: 151481 - RNA, 23 nt, Human herpesvirus 5
uuccgcaacgucuacaucucauc

SEQ ID NO: 151482 - RNA, 17 nt, Human herpesvirus 5
uuccucgccaccacuac

SEQ ID NO: 151483 - RNA, 20 nt, Human herpesvirus 5
uuccucagugaauucuggca

SEQ ID NO: 151484 - RNA, 20 nt, Human herpesvirus 5
uuccccgagaggguggguua

SEQ ID NO: 151485 - RNA, 14 nt, Human herpesvirus 5
uucccuuguaagac

SEQ ID NO: 151486 - RNA, 18 nt, Human herpesvirus 5
uucccuuguaagacagaa

SEQ ID NO: 151487 - RNA, 20 nt, Human herpesvirus 5
uucacgcugcuauaagaagg

SEQ ID NO: 151488 - RNA, 22 nt, Human herpesvirus 5
uucacucgggcgcaucacccgc

SEQ ID NO: 151489 - RNA, 16 nt, Human herpesvirus 5
uucacuucaaacauca

SEQ ID NO: 151490 - RNA, 19 nt, Human herpesvirus 5
uucagaccgcaacaacagc

SEQ ID NO: 151491 - RNA, 14 nt, Human herpesvirus 5
uucagaaccaugua

SEQ ID NO: 151492 - RNA, 14 nt, Human herpesvirus 5
uucagaaucuauaa

SEQ ID NO: 151493 - RNA, 22 nt, Human herpesvirus 5
uucagcguaugguuaugaccaa

SEQ ID NO: 151494 - RNA, 18 nt, Human herpesvirus 5
uucaguugcgaacgucac

SEQ ID NO: 151495 - RNA, 18 nt, Human herpesvirus 5
uucaucgugcaguaccuc

SEQ ID NO: 151496 - RNA, 19 nt, Human herpesvirus 5
uucaucgugcaguaccuca

SEQ ID NO: 151497 - RNA, 12 nt, Human herpesvirus 5
uucauucacugu

SEQ ID NO: 151498 - RNA, 21 nt, Human herpesvirus 5
uucauuaugaguaccccacgc

SEQ ID NO: 151499 - RNA, 16 nt, Human herpesvirus 5
uuggguccagccagca

SEQ ID NO: 151500 - RNA, 21 nt, Human herpesvirus 5
uugggaauauuggcggggaua

SEQ ID NO: 151501 - RNA, 15 nt, Human herpesvirus 5
uuggacaauacauca

SEQ ID NO: 151502 - RNA, 14 nt, Human herpesvirus 5
uuggaaaagccucc

SEQ ID NO: 151503 - RNA, 18 nt, Human herpesvirus 5
uugcuucguauacaacag

SEQ ID NO: 151504 - RNA, 17 nt, Human herpesvirus 5
uugucugcgacguggag

SEQ ID NO: 151505 - RNA, 21 nt, Human herpesvirus 5
uugucugugcgccguggugcu

SEQ ID NO: 151506 - RNA, 21 nt, Human herpesvirus 5
uugucuccccggugugucuau

SEQ ID NO: 151507 - RNA, 14 nt, Human herpesvirus 5
uuggugugugucua

SEQ ID NO: 151508 - RNA, 17 nt, Human herpesvirus 5
uuggugugugucuauau

SEQ ID NO: 151509 - RNA, 16 nt, Human herpesvirus 5
uugguaucugguacua

SEQ ID NO: 151510 - RNA, 15 nt, Human herpesvirus 5
uuguaacacuacagc

SEQ ID NO: 151511 - RNA, 21 nt, Human herpesvirus 5
uuguugagcgccuucugcuac

SEQ ID NO: 151512 - RNA, 14 nt, Human herpesvirus 5
uuguguguacgaca

SEQ ID NO: 151513 - RNA, 18 nt, Human herpesvirus 5
uuguguucuuacuccguc

SEQ ID NO: 151514 - RNA, 16 nt, Human herpesvirus 5
uuuaaggagcucugaa

SEQ ID NO: 151515 - RNA, 21 nt, Human herpesvirus 5
uuuaagguacgggucuaccaa

SEQ ID NO: 151516 - RNA, 21 nt, Human herpesvirus 5
uuuaacccaaaaccaugcuac

SEQ ID NO: 151517 - RNA, 16 nt, Human herpesvirus 5
uuuacauaaaaccacc

SEQ ID NO: 151518 - RNA, 13 nt, Human herpesvirus 5
uuuacuuuguaug

SEQ ID NO: 151519 - RNA, 18 nt, Human herpesvirus 5
uuuauauauacacaugcc

SEQ ID NO: 151520 - RNA, 13 nt, Human herpesvirus 5
uuuauuaucaucu

SEQ ID NO: 151521 - RNA, 18 nt, Human herpesvirus 5
uuucaacaaauaccaaca

SEQ ID NO: 151522 - RNA, 16 nt, Human herpesvirus 5
uuucaccauucucguc

SEQ ID NO: 151523 - RNA, 22 nt, Human herpesvirus 5
uuucagaccgcaacaacagcag

SEQ ID NO: 151524 - RNA, 17 nt, Human herpesvirus 5
uuucagagaugccguag

SEQ ID NO: 151525 - RNA, 21 nt, Human herpesvirus 5
uuuccccauaagcuguguacu

SEQ ID NO: 151526 - RNA, 23 nt, Human herpesvirus 5
uuucaugguauaaagauucacuu

SEQ ID NO: 151527 - RNA, 13 nt, Human herpesvirus 5
uuucuacuccauc

SEQ ID NO: 151528 - RNA, 15 nt, Human herpesvirus 5
uuucucagucugcaa

SEQ ID NO: 151529 - RNA, 18 nt, Human herpesvirus 5
uuucggauguuuacccuu

SEQ ID NO: 151530 - RNA, 13 nt, Human herpesvirus 5
uuucgcugggacg

SEQ ID NO: 151531 - RNA, 18 nt, Human herpesvirus 5
uuucggaagccaugccuu

SEQ ID NO: 151532 - RNA, 16 nt, Human herpesvirus 5
uuucgaaauaaccuac

SEQ ID NO: 151533 - RNA, 15 nt, Human herpesvirus 5
uuucgaccacaagcu

SEQ ID NO: 151534 - RNA, 18 nt, Human herpesvirus 5
uuuccgaugguccgucau

SEQ ID NO: 151535 - RNA, 23 nt, Human herpesvirus 5
guacagauccaguuucaccaagg

SEQ ID NO: 151536 - RNA, 22 nt, Human herpesvirus 5
guacaacaguuaucagcaauaa

SEQ ID NO: 151537 - RNA, 19 nt, Human herpesvirus 5
guacaaaacggacgggaaa

SEQ ID NO: 151538 - RNA, 13 nt, Human herpesvirus 5
guacacagccaag

SEQ ID NO: 151539 - RNA, 16 nt, Human herpesvirus 5
guaacacacggccagc

SEQ ID NO: 151540 - RNA, 20 nt, Human herpesvirus 5
guaacaccgucaccacuccc

SEQ ID NO: 151541 - RNA, 13 nt, Human herpesvirus 5
guaacacuacagc

SEQ ID NO: 151542 - RNA, 15 nt, Human herpesvirus 5
guagaacugaguuua

SEQ ID NO: 151543 - RNA, 12 nt, Human herpesvirus 5
guagcacugcgc

SEQ ID NO: 151544 - RNA, 16 nt, Human herpesvirus 5
guagaugagcagcaaa

SEQ ID NO: 151545 - RNA, 22 nt, Human herpesvirus 5
gucacuauccgaugguuucauu

SEQ ID NO: 151546 - RNA, 21 nt, Human herpesvirus 5
gucacugccaccgacauggag

SEQ ID NO: 151547 - RNA, 15 nt, Human herpesvirus 5
gucacggugccaugg

SEQ ID NO: 151548 - RNA, 16 nt, Human herpesvirus 5
gucacuacucugggau

SEQ ID NO: 151549 - RNA, 21 nt, Human herpesvirus 5
gucagcgucgcuccuaccgcc

SEQ ID NO: 151550 - RNA, 14 nt, Human herpesvirus 5
gucagcgugucuga

SEQ ID NO: 151551 - RNA, 18 nt, Human herpesvirus 5
gucacacguuacaucaua

SEQ ID NO: 151552 - RNA, 22 nt, Human herpesvirus 5
guauucugcguaacgguggaau

SEQ ID NO: 151553 - RNA, 16 nt, Human herpesvirus 5
guagccgaugcugaug

SEQ ID NO: 151554 - RNA, 14 nt, Human herpesvirus 5
guauuaacgugugg

SEQ ID NO: 151555 - RNA, 16 nt, Human herpesvirus 5
guaucgcuuagugaau

SEQ ID NO: 151556 - RNA, 19 nt, Human herpesvirus 5
ggggucaaaagccugggua

SEQ ID NO: 151557 - RNA, 11 nt, Human herpesvirus 5
gggguggugcg

SEQ ID NO: 151558 - RNA, 23 nt, Human herpesvirus 5
gggucccauuucggggcacgugc

SEQ ID NO: 151559 - RNA, 13 nt, Human herpesvirus 5
gggucuaccaaaa

SEQ ID NO: 151560 - RNA, 16 nt, Human herpesvirus 5
gguacgcuauguguca

SEQ ID NO: 151561 - RNA, 17 nt, Human herpesvirus 5
gguacgggucuaccaaa

SEQ ID NO: 151562 - RNA, 20 nt, Human herpesvirus 5
gguacgguaccgcugggaug

SEQ ID NO: 151563 - RNA, 14 nt, Human herpesvirus 5
gguacuuacgucac

SEQ ID NO: 151564 - RNA, 23 nt, Human herpesvirus 5
gguacuuagucaguuuuuuucca

SEQ ID NO: 151565 - RNA, 15 nt, Human herpesvirus 5
gguacuucaguauga

SEQ ID NO: 151566 - RNA, 13 nt, Human herpesvirus 5
gguagaagagcac

SEQ ID NO: 151567 - RNA, 17 nt, Human herpesvirus 5
gguagaugagcagcaaa

SEQ ID NO: 151568 - RNA, 18 nt, Human herpesvirus 5
gguagaugagcagcaaaa

SEQ ID NO: 151569 - RNA, 19 nt, Human herpesvirus 5
gguagaugagcagcaaaac

SEQ ID NO: 151570 - RNA, 13 nt, Human herpesvirus 5
ggggcucaaaguu

SEQ ID NO: 151571 - RNA, 13 nt, Human herpesvirus 5
ggcucagcuugau

SEQ ID NO: 151572 - RNA, 20 nt, Human herpesvirus 5
ggcuaccaugcgcaacaggu

SEQ ID NO: 151573 - RNA, 14 nt, Human herpesvirus 5
ggcuacgguggugu

SEQ ID NO: 151574 - RNA, 23 nt, Human herpesvirus 5
ggcuagagcgcgaguugcaaaag

SEQ ID NO: 151575 - RNA, 17 nt, Human herpesvirus 5
ggcucaaacaccgcugc

SEQ ID NO: 151576 - RNA, 17 nt, Human herpesvirus 5
ggcucacgucacuacuc

SEQ ID NO: 151577 - RNA, 19 nt, Human herpesvirus 5
ggcucacgucacuacucug

SEQ ID NO: 151578 - RNA, 12 nt, Human herpesvirus 5
ggcuaucuguac

SEQ ID NO: 151579 - RNA, 17 nt, Human herpesvirus 5
ggugauuuauucuugcu

SEQ ID NO: 151580 - RNA, 15 nt, Human herpesvirus 5
ggucacggugccaug

SEQ ID NO: 151581 - RNA, 14 nt, Human herpesvirus 5
gguauaaagauuca

SEQ ID NO: 151582 - RNA, 20 nt, Human herpesvirus 5
gguauauucaaucauuacua

SEQ ID NO: 151583 - RNA, 13 nt, Human herpesvirus 5
gguggaaaccaga

SEQ ID NO: 151584 - RNA, 15 nt, Human herpesvirus 5
gguggaaccgugccg

SEQ ID NO: 151585 - RNA, 14 nt, Human herpesvirus 5
gguggaagaacaga

SEQ ID NO: 151586 - RNA, 17 nt, Human herpesvirus 5
ggugcggcguucgcgug

SEQ ID NO: 151587 - RNA, 13 nt, Human herpesvirus 5
guaaagcccgugg

SEQ ID NO: 151588 - RNA, 15 nt, Human herpesvirus 5
guaaaguagcuggug

SEQ ID NO: 151589 - RNA, 17 nt, Human herpesvirus 5
gucaugcuggcaugcag

SEQ ID NO: 151590 - RNA, 14 nt, Human herpesvirus 5
gucauucguguuga

SEQ ID NO: 151591 - RNA, 13 nt, Human herpesvirus 5
gucagucuauucu

SEQ ID NO: 151592 - RNA, 13 nt, Human herpesvirus 5
guccuuguucucg

SEQ ID NO: 151593 - RNA, 17 nt, Human herpesvirus 5
gucgaaaacaaccacac

SEQ ID NO: 151594 - RNA, 20 nt, Human herpesvirus 5
gucgacgggugguaccugca

SEQ ID NO: 151595 - RNA, 18 nt, Human herpesvirus 5
gucgaaccaaccaaaaaa

SEQ ID NO: 151596 - RNA, 16 nt, Human herpesvirus 5
gucgauucccaucuca

SEQ ID NO: 151597 - RNA, 21 nt, Human herpesvirus 5
guccuccagcagcagcuggug

SEQ ID NO: 151598 - RNA, 14 nt, Human herpesvirus 5
guccuucaucucuu

SEQ ID NO: 151599 - RNA, 15 nt, Human herpesvirus 5
gucuacgaccaaagc

SEQ ID NO: 151600 - RNA, 13 nt, Human herpesvirus 5
gucuaaugugcug

SEQ ID NO: 151601 - RNA, 22 nt, Human herpesvirus 5
gucguuguguucuuacuccguc

SEQ ID NO: 151602 - RNA, 22 nt, Human herpesvirus 5
gucuagacaggguaacagccuu

SEQ ID NO: 151603 - RNA, 22 nt, Human herpesvirus 5
gucucacccgaguccuggucuu

SEQ ID NO: 151604 - RNA, 22 nt, Human herpesvirus 5
gucggcgugaaugggcacgccg

SEQ ID NO: 151605 - RNA, 18 nt, Human herpesvirus 5
gucgcucuuggagcgcga

SEQ ID NO: 151606 - RNA, 20 nt, Human herpesvirus 5
gucgcuguuuuuguucacaa

SEQ ID NO: 151607 - RNA, 15 nt, Human herpesvirus 5
gucgcuuaucuugca

SEQ ID NO: 151608 - RNA, 14 nt, Human herpesvirus 5
gucgccaccaccgg

SEQ ID NO: 151609 - RNA, 14 nt, Human herpesvirus 5
gucgcccagaaaga

SEQ ID NO: 151610 - RNA, 13 nt, Human herpesvirus 5
gucgccgauguga

SEQ ID NO: 151611 - RNA, 12 nt, Human herpesvirus 5
gucgcgaucucc

SEQ ID NO: 151612 - RNA, 14 nt, Human herpesvirus 5
gucgcgcacccggc

SEQ ID NO: 151613 - RNA, 15 nt, Human herpesvirus 5
gucguaguuguugca

SEQ ID NO: 151614 - RNA, 23 nt, Human herpesvirus 5
gucguccgguaaaggaacaaccc

SEQ ID NO: 151615 - RNA, 15 nt, Human herpesvirus 5
gucguguccgugauc

SEQ ID NO: 151616 - RNA, 12 nt, Human herpesvirus 5
gucgcaugagau

SEQ ID NO: 151617 - RNA, 13 nt, Human herpesvirus 5
gucucccucugcu

SEQ ID NO: 151618 - RNA, 13 nt, Human herpesvirus 5
gucuccaccacag

SEQ ID NO: 151619 - RNA, 16 nt, Human herpesvirus 5
gucuccaagucuggug

SEQ ID NO: 151620 - RNA, 17 nt, Human herpesvirus 5
gucugacgcugcuccua

SEQ ID NO: 151621 - RNA, 12 nt, Human herpesvirus 5
gucugggugcug

SEQ ID NO: 151622 - RNA, 21 nt, Human herpesvirus 5
gucuggcuugggucgacuguu

SEQ ID NO: 151623 - RNA, 21 nt, Human herpesvirus 5
gucugccgcgguacgcacguc

SEQ ID NO: 151624 - RNA, 22 nt, Human herpesvirus 5
gucugccuccuaguaaugcauu

SEQ ID NO: 151625 - RNA, 22 nt, Human herpesvirus 5
gugaaccgaacuauguggcucc

SEQ ID NO: 151626 - RNA, 15 nt, Human herpesvirus 5
gugaaccgcucauau

SEQ ID NO: 151627 - RNA, 20 nt, Human herpesvirus 5
gucuuuuuaaggagcucuga

SEQ ID NO: 151628 - RNA, 12 nt, Human herpesvirus 5
gucuuucacauc

SEQ ID NO: 151629 - RNA, 19 nt, Human herpesvirus 5
gucugucuuuuaugaugcu

SEQ ID NO: 151630 - RNA, 18 nt, Human herpesvirus 5
gucugugaucugcacgua

SEQ ID NO: 151631 - RNA, 12 nt, Human herpesvirus 5
gucuucaugacg

SEQ ID NO: 151632 - RNA, 15 nt, Human herpesvirus 5
gugacuuacaucuca

SEQ ID NO: 151633 - RNA, 16 nt, Human herpesvirus 5
gugacuuacaucucac

SEQ ID NO: 151634 - RNA, 11 nt, Human herpesvirus 5
gugacuaugug

SEQ ID NO: 151635 - RNA, 13 nt, Human herpesvirus 5
gugaauucuggca

SEQ ID NO: 151636 - RNA, 23 nt, Human herpesvirus 5
gugaauucuggcaagaguucaaa

SEQ ID NO: 151637 - RNA, 21 nt, Human herpesvirus 5
gugauaaguaccagacaucca

SEQ ID NO: 151638 - RNA, 23 nt, Human herpesvirus 5
gugagguguuucagggugacaag

SEQ ID NO: 151639 - RNA, 18 nt, Human herpesvirus 5
gugaguacacgcaggcaa

SEQ ID NO: 151640 - RNA, 23 nt, Human herpesvirus 5
gugagauacauguucauaaacuc

SEQ ID NO: 151641 - RNA, 15 nt, Human herpesvirus 5
gugacguggauacua

SEQ ID NO: 151642 - RNA, 16 nt, Human herpesvirus 5
gugaugcgagugguga

SEQ ID NO: 151643 - RNA, 19 nt, Human herpesvirus 5
gugauuauacaacaggugu

SEQ ID NO: 151644 - RNA, 18 nt, Human herpesvirus 5
gugaugaacgacacaugc

SEQ ID NO: 151645 - RNA, 21 nt, Human herpesvirus 5
gugauuuaucugccacuuuuc

SEQ ID NO: 151646 - RNA, 15 nt, Human herpesvirus 5
gugaugguacuauau

SEQ ID NO: 151647 - RNA, 20 nt, Human herpesvirus 5
gugcccuuaccuaucaucac

SEQ ID NO: 151648 - RNA, 12 nt, Human herpesvirus 5
gugcaguaccuc

SEQ ID NO: 151649 - RNA, 13 nt, Human herpesvirus 5
gugcaguaccuca

SEQ ID NO: 151650 - RNA, 15 nt, Human herpesvirus 5
gugccuucggccagc

SEQ ID NO: 151651 - RNA, 17 nt, Human herpesvirus 5
gugcgacgccaugcuca

SEQ ID NO: 151652 - RNA, 11 nt, Human herpesvirus 5
gugcggugaaa

SEQ ID NO: 151653 - RNA, 23 nt, Human herpesvirus 5
gugcugcaccucaacaagggcug

SEQ ID NO: 151654 - RNA, 15 nt, Human herpesvirus 5
gugcugcauguguau

SEQ ID NO: 151655 - RNA, 14 nt, Human herpesvirus 5
gugcuuaaggugaa

SEQ ID NO: 151656 - RNA, 21 nt, Human herpesvirus 5
gugcucggaccgugacggugg

SEQ ID NO: 151657 - RNA, 17 nt, Human herpesvirus 5
gugcucaaguucagugu

SEQ ID NO: 151658 - RNA, 19 nt, Human herpesvirus 5
gugcucaaguucaguguag

SEQ ID NO: 151659 - RNA, 15 nt, Human herpesvirus 5
gugcucgcgcacgua

SEQ ID NO: 151660 - RNA, 23 nt, Human herpesvirus 5
gcuggccgagacggcgugacaca

SEQ ID NO: 151661 - RNA, 14 nt, Human herpesvirus 5
gcugggaguggugg

SEQ ID NO: 151662 - RNA, 14 nt, Human herpesvirus 5
gcuggacugacaca

SEQ ID NO: 151663 - RNA, 22 nt, Human herpesvirus 5
gcuggacugacacagcuccuga

SEQ ID NO: 151664 - RNA, 15 nt, Human herpesvirus 5
gcuggcacauggcca

SEQ ID NO: 151665 - RNA, 15 nt, Human herpesvirus 5
gcuggggaaguacaa

SEQ ID NO: 151666 - RNA, 21 nt, Human herpesvirus 5
gcuggggaaguacaauaucaa

SEQ ID NO: 151667 - RNA, 23 nt, Human herpesvirus 5
gcugggcucacgucacuacucug

SEQ ID NO: 151668 - RNA, 12 nt, Human herpesvirus 5
gcuucuaccacc

SEQ ID NO: 151669 - RNA, 22 nt, Human herpesvirus 5
gcuucucuuucucaccuggacc

SEQ ID NO: 151670 - RNA, 20 nt, Human herpesvirus 5
gcuuggcuacacgacgggga

SEQ ID NO: 151671 - RNA, 17 nt, Human herpesvirus 5
gcuugcaaaacuacuaa

SEQ ID NO: 151672 - RNA, 14 nt, Human herpesvirus 5
gcucaaaguucaaa

SEQ ID NO: 151673 - RNA, 14 nt, Human herpesvirus 5
gcucaaacaccgcu

SEQ ID NO: 151674 - RNA, 17 nt, Human herpesvirus 5
gcuaauauauccaauac

SEQ ID NO: 151675 - RNA, 14 nt, Human herpesvirus 5
gcuaagagcuuuga

SEQ ID NO: 151676 - RNA, 18 nt, Human herpesvirus 5
gcucagcuugauggugua

SEQ ID NO: 151677 - RNA, 15 nt, Human herpesvirus 5
gcucacgucacuacu

SEQ ID NO: 151678 - RNA, 23 nt, Human herpesvirus 5
gcucacuguuugaauaccguaaa

SEQ ID NO: 151679 - RNA, 18 nt, Human herpesvirus 5
gcucacuuuccucgccac

SEQ ID NO: 151680 - RNA, 19 nt, Human herpesvirus 5
gcucaccgcaguugcugcc

SEQ ID NO: 151681 - RNA, 19 nt, Human herpesvirus 5
gcucacagucuaucccuau

SEQ ID NO: 151682 - RNA, 18 nt, Human herpesvirus 5
gcugacagucgacgggug

SEQ ID NO: 151683 - RNA, 23 nt, Human herpesvirus 5
gcugagcguguggaggacggggu

SEQ ID NO: 151684 - RNA, 16 nt, Human herpesvirus 5
gcugauacuaucgggg

SEQ ID NO: 151685 - RNA, 22 nt, Human herpesvirus 5
gcugauaauaaaggcucucugu

SEQ ID NO: 151686 - RNA, 17 nt, Human herpesvirus 5
gcugcacucacgcggcc

SEQ ID NO: 151687 - RNA, 13 nt, Human herpesvirus 5
gcugcaaggccuc

SEQ ID NO: 151688 - RNA, 15 nt, Human herpesvirus 5
gccauuuuuccaaaa

SEQ ID NO: 151689 - RNA, 14 nt, Human herpesvirus 5
gcccaaacaucuaa

SEQ ID NO: 151690 - RNA, 13 nt, Human herpesvirus 5
gccauuccuuuau

SEQ ID NO: 151691 - RNA, 19 nt, Human herpesvirus 5
gcccauugagcgagaacua

SEQ ID NO: 151692 - RNA, 19 nt, Human herpesvirus 5
gccccaagcgguacggacu

SEQ ID NO: 151693 - RNA, 16 nt, Human herpesvirus 5
gcgcuguacauucugc

SEQ ID NO: 151694 - RNA, 19 nt, Human herpesvirus 5
gcgcuugcccgcaaaagca

SEQ ID NO: 151695 - RNA, 19 nt, Human herpesvirus 5
gcgcugacagcauacgggg

SEQ ID NO: 151696 - RNA, 22 nt, Human herpesvirus 5
gcggaacgugacgguugcugag

SEQ ID NO: 151697 - RNA, 15 nt, Human herpesvirus 5
gcggacggugcgggu

SEQ ID NO: 151698 - RNA, 18 nt, Human herpesvirus 5
gcggaugagcgugcugcu

SEQ ID NO: 151699 - RNA, 22 nt, Human herpesvirus 5
gcggcaaaagacuuaccaccuc

SEQ ID NO: 151700 - RNA, 15 nt, Human herpesvirus 5
gcggcagcggcgcca

SEQ ID NO: 151701 - RNA, 21 nt, Human herpesvirus 5
gcggcacuuuacauaaaacca

SEQ ID NO: 151702 - RNA, 14 nt, Human herpesvirus 5
gcggcuaucuguac

SEQ ID NO: 151703 - RNA, 22 nt, Human herpesvirus 5
gcggcuaacacgacacuagccg

SEQ ID NO: 151704 - RNA, 21 nt, Human herpesvirus 5
gcggccauggagcugcacuca

SEQ ID NO: 151705 - RNA, 13 nt, Human herpesvirus 5
gcggcccaugagg

SEQ ID NO: 151706 - RNA, 14 nt, Human herpesvirus 5
gcggcccaugaggu

SEQ ID NO: 151707 - RNA, 21 nt, Human herpesvirus 5
gcgguaaccgggugcugauaa

SEQ ID NO: 151708 - RNA, 14 nt, Human herpesvirus 5
gcgguaacuggcag

SEQ ID NO: 151709 - RNA, 15 nt, Human herpesvirus 5
gcguggcuguagcua

SEQ ID NO: 151710 - RNA, 21 nt, Human herpesvirus 5
gcguguacagcuaccucauga

SEQ ID NO: 151711 - RNA, 18 nt, Human herpesvirus 5
gcggguaauaaaaacaau

SEQ ID NO: 151712 - RNA, 16 nt, Human herpesvirus 5
gcgggguucaccugca

SEQ ID NO: 151713 - RNA, 22 nt, Human herpesvirus 5
gcguuuugauaaccuaccuggu

SEQ ID NO: 151714 - RNA, 23 nt, Human herpesvirus 5
gcguuuugauaaccuaccuggug

SEQ ID NO: 151715 - RNA, 15 nt, Human herpesvirus 5
gcguguccugguuuu

SEQ ID NO: 151716 - RNA, 15 nt, Human herpesvirus 5
gcguguuaaacacua

SEQ ID NO: 151717 - RNA, 12 nt, Human herpesvirus 5
ggacaguguauu

SEQ ID NO: 151718 - RNA, 21 nt, Human herpesvirus 5
ggacagagcagccguuuccag

SEQ ID NO: 151719 - RNA, 16 nt, Human herpesvirus 5
ggaaugggcuaggaua

SEQ ID NO: 151720 - RNA, 21 nt, Human herpesvirus 5
ggaaugguaaagacaucguca

SEQ ID NO: 151721 - RNA, 20 nt, Human herpesvirus 5
ggaaguuccgacgcgagcga

SEQ ID NO: 151722 - RNA, 17 nt, Human herpesvirus 5
ggaauccgcguuccaau

SEQ ID NO: 151723 - RNA, 22 nt, Human herpesvirus 5
ggaaacagcguccacaguuucc

SEQ ID NO: 151724 - RNA, 20 nt, Human herpesvirus 5
ggaaagacaauaaacaguac

SEQ ID NO: 151725 - RNA, 19 nt, Human herpesvirus 5
ggaaguacaauaucaaaga

SEQ ID NO: 151726 - RNA, 21 nt, Human herpesvirus 5
ggaaauucaauaaaaaccacc

SEQ ID NO: 151727 - RNA, 14 nt, Human herpesvirus 5
ggaaauacaugaug

SEQ ID NO: 151728 - RNA, 15 nt, Human herpesvirus 5
ggaaaggaauacaaa

SEQ ID NO: 151729 - RNA, 18 nt, Human herpesvirus 5
ggacgucaaagcucacua

SEQ ID NO: 151730 - RNA, 14 nt, Human herpesvirus 5
ggacgcgugcucuc

SEQ ID NO: 151731 - RNA, 19 nt, Human herpesvirus 5
ggacgcugccucagucucu

SEQ ID NO: 151732 - RNA, 22 nt, Human herpesvirus 5
ggacgaacaggugucuaagaga

SEQ ID NO: 151733 - RNA, 13 nt, Human herpesvirus 5
ggacccacggugg

SEQ ID NO: 151734 - RNA, 18 nt, Human herpesvirus 5
ggagauccaguuacacuc

SEQ ID NO: 151735 - RNA, 13 nt, Human herpesvirus 5
ggacuucaauguc

SEQ ID NO: 151736 - RNA, 16 nt, Human herpesvirus 5
ggacuuacaucugcuc

SEQ ID NO: 151737 - RNA, 14 nt, Human herpesvirus 5
ggagacacagucua

SEQ ID NO: 151738 - RNA, 21 nt, Human herpesvirus 5
ggagacacagucuaccuagau

SEQ ID NO: 151739 - RNA, 13 nt, Human herpesvirus 5
ggagacaguuucc

SEQ ID NO: 151740 - RNA, 15 nt, Human herpesvirus 5
ggagaagcgcagcgu

SEQ ID NO: 151741 - RNA, 16 nt, Human herpesvirus 5
ggccucugggcugaga

SEQ ID NO: 151742 - RNA, 22 nt, Human herpesvirus 5
ggcgagcgaagguagaggaguc

SEQ ID NO: 151743 - RNA, 13 nt, Human herpesvirus 5
ggcgaccgucucu

SEQ ID NO: 151744 - RNA, 15 nt, Human herpesvirus 5
ggcgucggagaguau

SEQ ID NO: 151745 - RNA, 13 nt, Human herpesvirus 5
ggcgucuuccucc

SEQ ID NO: 151746 - RNA, 14 nt, Human herpesvirus 5
ggcguggacuggga

SEQ ID NO: 151747 - RNA, 10 nt, Human herpesvirus 5
ggcguaacaa

SEQ ID NO: 151748 - RNA, 24 nt, Human herpesvirus 5
ggcgguggccgucuuggguagcuu

SEQ ID NO: 151749 - RNA, 18 nt, Human herpesvirus 5
ggcgguggugacugggga

SEQ ID NO: 151750 - RNA, 15 nt, Human herpesvirus 5
ggcgauagcgcuuau

SEQ ID NO: 151751 - RNA, 13 nt, Human herpesvirus 5
ggcgauaugggcu

SEQ ID NO: 151752 - RNA, 15 nt, Human herpesvirus 5
ggcgauauuggaaaa

SEQ ID NO: 151753 - RNA, 19 nt, Human herpesvirus 5
ggccauggagcugcacuca

SEQ ID NO: 151754 - RNA, 20 nt, Human herpesvirus 5
ggccgagacggcgugacaca

SEQ ID NO: 151755 - RNA, 17 nt, Human herpesvirus 5
ggcccugcuguacaaca

SEQ ID NO: 151756 - RNA, 18 nt, Human herpesvirus 5
ggccggacggcagcguca

SEQ ID NO: 151757 - RNA, 15 nt, Human herpesvirus 5
ggccgcaacuucuac

SEQ ID NO: 151758 - RNA, 15 nt, Human herpesvirus 5
ggaggacggcgacga

SEQ ID NO: 151759 - RNA, 14 nt, Human herpesvirus 5
ggaggagauggccu

SEQ ID NO: 151760 - RNA, 21 nt, Human herpesvirus 5
ggaggccgagacgcugcgcua

SEQ ID NO: 151761 - RNA, 23 nt, Human herpesvirus 5
ggaggaacuuucggccgaaacau

SEQ ID NO: 151762 - RNA, 17 nt, Human herpesvirus 5
ggagccccaucauggcc

SEQ ID NO: 151763 - RNA, 17 nt, Human herpesvirus 5
ggagcccgcacacuggc

SEQ ID NO: 151764 - RNA, 19 nt, Human herpesvirus 5
ggagcccgcacacuggcug

SEQ ID NO: 151765 - RNA, 13 nt, Human herpesvirus 5
ggcacgccgugcu

SEQ ID NO: 151766 - RNA, 18 nt, Human herpesvirus 5
ggaguggcugcuguguug

SEQ ID NO: 151767 - RNA, 16 nt, Human herpesvirus 5
ggaguggucaauaaug

SEQ ID NO: 151768 - RNA, 22 nt, Human herpesvirus 5
ggcacuuuacauaaaaccaccg

SEQ ID NO: 151769 - RNA, 20 nt, Human herpesvirus 5
ggcacgucggggcugugucg

SEQ ID NO: 151770 - RNA, 19 nt, Human herpesvirus 5
ggcacugucguguuccaga

SEQ ID NO: 151771 - RNA, 15 nt, Human herpesvirus 5
ggcagcaccaugugc

SEQ ID NO: 151772 - RNA, 21 nt, Human herpesvirus 5
ggccaguauaaaauggucguu

SEQ ID NO: 151773 - RNA, 14 nt, Human herpesvirus 5
ucaaugaagacuug

SEQ ID NO: 151774 - RNA, 16 nt, Human herpesvirus 5
ucaaugaagacuugga

SEQ ID NO: 151775 - RNA, 17 nt, Human herpesvirus 5
ucaagacagacacgguc

SEQ ID NO: 151776 - RNA, 12 nt, Human herpesvirus 5
ucaauacaauga

SEQ ID NO: 151777 - RNA, 17 nt, Human herpesvirus 5
ucaauacaaugacacua

SEQ ID NO: 151778 - RNA, 18 nt, Human herpesvirus 5
ucaauaaagaaaaccaca

SEQ ID NO: 151779 - RNA, 16 nt, Human herpesvirus 5
ucaauaaagacgucaa

SEQ ID NO: 151780 - RNA, 21 nt, Human herpesvirus 5
ucaauaaagacgucaaugaca

SEQ ID NO: 151781 - RNA, 16 nt, Human herpesvirus 5
ucaaggcucgcaaaga

SEQ ID NO: 151782 - RNA, 14 nt, Human herpesvirus 5
ucaaguucagugua

SEQ ID NO: 151783 - RNA, 15 nt, Human herpesvirus 5
ucaauaaaaaccacc

SEQ ID NO: 151784 - RNA, 21 nt, Human herpesvirus 5
ucaaagcggucucacugugac

SEQ ID NO: 151785 - RNA, 16 nt, Human herpesvirus 5
ucaaagggagccccau

SEQ ID NO: 151786 - RNA, 13 nt, Human herpesvirus 5
ucaaaguucaaag

SEQ ID NO: 151787 - RNA, 21 nt, Human herpesvirus 5
ucaacacggucauguuucuca

SEQ ID NO: 151788 - RNA, 17 nt, Human herpesvirus 5
ucaacauacaguacaac

SEQ ID NO: 151789 - RNA, 21 nt, Human herpesvirus 5
ucaacgacgccacacacaucu

SEQ ID NO: 151790 - RNA, 17 nt, Human herpesvirus 5
ucaaccacgucaagauc

SEQ ID NO: 151791 - RNA, 16 nt, Human herpesvirus 5
ucaacgccugcaccaa

SEQ ID NO: 151792 - RNA, 16 nt, Human herpesvirus 5
ucaacuacagcaauga

SEQ ID NO: 151793 - RNA, 17 nt, Human herpesvirus 5
ucaacuacagcaaugac

SEQ ID NO: 151794 - RNA, 18 nt, Human herpesvirus 5
ucaacuacagcaaugaca

SEQ ID NO: 151795 - RNA, 19 nt, Human herpesvirus 5
ucaacuacagcaaugacau

SEQ ID NO: 151796 - RNA, 21 nt, Human herpesvirus 5
uauucaucgggucgucucacc

SEQ ID NO: 151797 - RNA, 17 nt, Human herpesvirus 5
uauugaaaucuaccuga

SEQ ID NO: 151798 - RNA, 23 nt, Human herpesvirus 5
uauugacacagagacuugugaua

SEQ ID NO: 151799 - RNA, 18 nt, Human herpesvirus 5
uauuguugagaacauaua

SEQ ID NO: 151800 - RNA, 17 nt, Human herpesvirus 5
uauuccgaaaccuguau

SEQ ID NO: 151801 - RNA, 17 nt, Human herpesvirus 5
uauuccacuaguacuga

SEQ ID NO: 151802 - RNA, 17 nt, Human herpesvirus 5
uauuaaugcccauugag

SEQ ID NO: 151803 - RNA, 14 nt, Human herpesvirus 5
uauuacuauaggga

SEQ ID NO: 151804 - RNA, 21 nt, Human herpesvirus 5
uauuugaaaauauggcauauu

SEQ ID NO: 151805 - RNA, 14 nt, Human herpesvirus 5
ucaaaaugugcaau

SEQ ID NO: 151806 - RNA, 19 nt, Human herpesvirus 5
ucaaaccuguuccugucaa

SEQ ID NO: 151807 - RNA, 22 nt, Human herpesvirus 5
uauuuuuaucgggaaugggcua

SEQ ID NO: 151808 - RNA, 23 nt, Human herpesvirus 5
uauuuucuacuccgaauaacaac

SEQ ID NO: 151809 - RNA, 16 nt, Human herpesvirus 5
ucaaaaaucacuuuua

SEQ ID NO: 151810 - RNA, 14 nt, Human herpesvirus 5
uauguaguaucaua

SEQ ID NO: 151811 - RNA, 13 nt, Human herpesvirus 5
uauguuauacucu

SEQ ID NO: 151812 - RNA, 19 nt, Human herpesvirus 5
uaugaaggucaaaaccuca

SEQ ID NO: 151813 - RNA, 20 nt, Human herpesvirus 5
uaugagaaaagggacagaaa

SEQ ID NO: 151814 - RNA, 19 nt, Human herpesvirus 5
uaugaaagucccgugugug

SEQ ID NO: 151815 - RNA, 19 nt, Human herpesvirus 5
uaugaagcugaacaauaaa

SEQ ID NO: 151816 - RNA, 14 nt, Human herpesvirus 5
uaugaggaaacuga

SEQ ID NO: 151817 - RNA, 13 nt, Human herpesvirus 5
uaugaggcuauau

SEQ ID NO: 151818 - RNA, 14 nt, Human herpesvirus 5
uaugauaucuacag

SEQ ID NO: 151819 - RNA, 18 nt, Human herpesvirus 5
uaugcacaaaagguaugu

SEQ ID NO: 151820 - RNA, 13 nt, Human herpesvirus 5
uaucagcaauaaa

SEQ ID NO: 151821 - RNA, 19 nt, Human herpesvirus 5
uaucagcaauaaaagcacu

SEQ ID NO: 151822 - RNA, 23 nt, Human herpesvirus 5
uaucagcuaccgccgcaacagcg

SEQ ID NO: 151823 - RNA, 16 nt, Human herpesvirus 5
uaucaaugaagacuug

SEQ ID NO: 151824 - RNA, 20 nt, Human herpesvirus 5
uaucagaaagcugcaaucaa

SEQ ID NO: 151825 - RNA, 13 nt, Human herpesvirus 5
uaucgucaccaau

SEQ ID NO: 151826 - RNA, 14 nt, Human herpesvirus 5
uaucuucaaccuca

SEQ ID NO: 151827 - RNA, 11 nt, Human herpesvirus 5
uaucuacauca

SEQ ID NO: 151828 - RNA, 14 nt, Human herpesvirus 5
uaucggcauacaau

SEQ ID NO: 151829 - RNA, 15 nt, Human herpesvirus 5
uaucuccgguuucaa

SEQ ID NO: 151830 - RNA, 23 nt, Human herpesvirus 5
uaucucacaccgucagcugcgua

SEQ ID NO: 151831 - RNA, 17 nt, Human herpesvirus 5
uaucaauacaaugacac

SEQ ID NO: 151832 - RNA, 21 nt, Human herpesvirus 5
uacgucaauaaguaccucuaa

SEQ ID NO: 151833 - RNA, 23 nt, Human herpesvirus 5
uacucacguugguguuguagcaa

SEQ ID NO: 151834 - RNA, 21 nt, Human herpesvirus 5
uacuccgucuccagacaaagc

SEQ ID NO: 151835 - RNA, 18 nt, Human herpesvirus 5
uacucuauguuauacucu

SEQ ID NO: 151836 - RNA, 16 nt, Human herpesvirus 5
uacucugacuguguag

SEQ ID NO: 151837 - RNA, 12 nt, Human herpesvirus 5
uacucugggaua

SEQ ID NO: 151838 - RNA, 15 nt, Human herpesvirus 5
uagcagugacugggu

SEQ ID NO: 151839 - RNA, 16 nt, Human herpesvirus 5
uacugcauccaucaca

SEQ ID NO: 151840 - RNA, 18 nt, Human herpesvirus 5
uacugcauccaucacauc

SEQ ID NO: 151841 - RNA, 19 nt, Human herpesvirus 5
uacugcauccaucacauca

SEQ ID NO: 151842 - RNA, 20 nt, Human herpesvirus 5
uacugcauccaucacaucac

SEQ ID NO: 151843 - RNA, 12 nt, Human herpesvirus 5
uagccaggugac

SEQ ID NO: 151844 - RNA, 14 nt, Human herpesvirus 5
uagccuucccguga

SEQ ID NO: 151845 - RNA, 18 nt, Human herpesvirus 5
uagcgaucgcaugcuucu

SEQ ID NO: 151846 - RNA, 16 nt, Human herpesvirus 5
uagccuccggcuguca

SEQ ID NO: 151847 - RNA, 22 nt, Human herpesvirus 5
uagcccggucggucuuccugcu

SEQ ID NO: 151848 - RNA, 18 nt, Human herpesvirus 5
uagccgaggacuuuauga

SEQ ID NO: 151849 - RNA, 21 nt, Human herpesvirus 5
uagccgaggacuuuaugacgc

SEQ ID NO: 151850 - RNA, 14 nt, Human herpesvirus 5
uagccaccuguugg

SEQ ID NO: 151851 - RNA, 20 nt, Human herpesvirus 5
uagccagcgucggcauauga

SEQ ID NO: 151852 - RNA, 18 nt, Human herpesvirus 5
uaggcuacucugacugug

SEQ ID NO: 151853 - RNA, 17 nt, Human herpesvirus 5
uauaagcaccguggggu

SEQ ID NO: 151854 - RNA, 23 nt, Human herpesvirus 5
uauaagcguggauggucauauau

SEQ ID NO: 151855 - RNA, 17 nt, Human herpesvirus 5
uauaaaccguaugcaca

SEQ ID NO: 151856 - RNA, 18 nt, Human herpesvirus 5
uauaaaccguaugcacaa

SEQ ID NO: 151857 - RNA, 17 nt, Human herpesvirus 5
uauaaagcgguauauuc

SEQ ID NO: 151858 - RNA, 21 nt, Human herpesvirus 5
uauaaaauggucguugcccac

SEQ ID NO: 151859 - RNA, 18 nt, Human herpesvirus 5
uaguguguuccacuccau

SEQ ID NO: 151860 - RNA, 13 nt, Human herpesvirus 5
uaggucagggaug

SEQ ID NO: 151861 - RNA, 20 nt, Human herpesvirus 5
uaggucagggaugacgggga

SEQ ID NO: 151862 - RNA, 17 nt, Human herpesvirus 5
uaguaaugcauuaucau

SEQ ID NO: 151863 - RNA, 17 nt, Human herpesvirus 5
uaguaauaccaccguca

SEQ ID NO: 151864 - RNA, 20 nt, Human herpesvirus 5
uaguacccacauuuugcucu

SEQ ID NO: 151865 - RNA, 14 nt, Human herpesvirus 5
uacccacauuuugc

SEQ ID NO: 151866 - RNA, 19 nt, Human herpesvirus 5
uacccugguauccaacuuc

SEQ ID NO: 151867 - RNA, 13 nt, Human herpesvirus 5
uacgagguacugu

SEQ ID NO: 151868 - RNA, 22 nt, Human herpesvirus 5
uacgauaauugcuacgucacaa

SEQ ID NO: 151869 - RNA, 18 nt, Human herpesvirus 5
uacggcguauacaaucau

SEQ ID NO: 151870 - RNA, 19 nt, Human herpesvirus 5
uacggcuccacacgcaucu

SEQ ID NO: 151871 - RNA, 18 nt, Human herpesvirus 5
uacgggacuuacaucugc

SEQ ID NO: 151872 - RNA, 15 nt, Human herpesvirus 5
uacgucgacaugaac

SEQ ID NO: 151873 - RNA, 20 nt, Human herpesvirus 5
uacucaacgugcgccuucca

SEQ ID NO: 151874 - RNA, 15 nt, Human herpesvirus 5
uacuauguguaugau

SEQ ID NO: 151875 - RNA, 23 nt, Human herpesvirus 5
uacgcaauguuacacauuacuac

SEQ ID NO: 151876 - RNA, 16 nt, Human herpesvirus 5
uacgcagucacugcgu

SEQ ID NO: 151877 - RNA, 14 nt, Human herpesvirus 5
uacgcauuacacag

SEQ ID NO: 151878 - RNA, 11 nt, Human herpesvirus 5
uacgcuaugug

SEQ ID NO: 151879 - RNA, 21 nt, Human herpesvirus 5
uacgcgcuaaaggugcaugac

SEQ ID NO: 151880 - RNA, 23 nt, Human herpesvirus 5
uacggaguuuucccucagccucu

SEQ ID NO: 151881 - RNA, 22 nt, Human herpesvirus 5
uacaccaguucguagaucacac

SEQ ID NO: 151882 - RNA, 13 nt, Human herpesvirus 5
uaccaucaccuau

SEQ ID NO: 151883 - RNA, 17 nt, Human herpesvirus 5
uaccaucauugcugcua

SEQ ID NO: 151884 - RNA, 20 nt, Human herpesvirus 5
uaccauccuuuucaugcuca

SEQ ID NO: 151885 - RNA, 16 nt, Human herpesvirus 5
uaccaucuccgucgac

SEQ ID NO: 151886 - RNA, 22 nt, Human herpesvirus 5
uaccacauuuuuugacagauga

SEQ ID NO: 151887 - RNA, 20 nt, Human herpesvirus 5
uacacugguauaaccaguca

SEQ ID NO: 151888 - RNA, 13 nt, Human herpesvirus 5
uaccaauacugca

SEQ ID NO: 151889 - RNA, 22 nt, Human herpesvirus 5
uaccaauacugcauccaucaca

SEQ ID NO: 151890 - RNA, 15 nt, Human herpesvirus 5
uacaacaguuaucag

SEQ ID NO: 151891 - RNA, 21 nt, Human herpesvirus 5
uacaacguagggcgguauugu

SEQ ID NO: 151892 - RNA, 17 nt, Human herpesvirus 5
uacaacgucaugcauuc

SEQ ID NO: 151893 - RNA, 19 nt, Human herpesvirus 5
uacaaaugaggcacaugau

SEQ ID NO: 151894 - RNA, 22 nt, Human herpesvirus 5
uacaaaugaggcacaugaugca

SEQ ID NO: 151895 - RNA, 16 nt, Human herpesvirus 5
uaauggccaacagccu

SEQ ID NO: 151896 - RNA, 20 nt, Human herpesvirus 5
uaauggggaugaugaaccaa

SEQ ID NO: 151897 - RNA, 18 nt, Human herpesvirus 5
uaauggaaaguaucguca

SEQ ID NO: 151898 - RNA, 15 nt, Human herpesvirus 5
uaaucuccugagaca

SEQ ID NO: 151899 - RNA, 21 nt, Human herpesvirus 5
uaaucuccugagacacuugaa

SEQ ID NO: 151900 - RNA, 20 nt, Human herpesvirus 5
uaauaaaacgccaugaugac

SEQ ID NO: 151901 - RNA, 14 nt, Human herpesvirus 5
uaaucaccaaagau

SEQ ID NO: 151902 - RNA, 18 nt, Human herpesvirus 5
uaauauauccaauacggc

SEQ ID NO: 151903 - RNA, 16 nt, Human herpesvirus 5
uaauauacacacggag

SEQ ID NO: 151904 - RNA, 14 nt, Human herpesvirus 5
uaauauugcaaugg

SEQ ID NO: 151905 - RNA, 15 nt, Human herpesvirus 5
uaaagauucacuuaa

SEQ ID NO: 151906 - RNA, 20 nt, Human herpesvirus 5
uaaagaaugcaacgcuuuca

SEQ ID NO: 151907 - RNA, 14 nt, Human herpesvirus 5
uaaagacaucguca

SEQ ID NO: 151908 - RNA, 23 nt, Human herpesvirus 5
uaaagacaucgucacaccuauca

SEQ ID NO: 151909 - RNA, 20 nt, Human herpesvirus 5
uaaagacauucacacaaaau

SEQ ID NO: 151910 - RNA, 15 nt, Human herpesvirus 5
uaaagacgucaauga

SEQ ID NO: 151911 - RNA, 17 nt, Human herpesvirus 5
uaaagacgucaaugaca

SEQ ID NO: 151912 - RNA, 22 nt, Human herpesvirus 5
uaaagacgucaaugacaccuca

SEQ ID NO: 151913 - RNA, 15 nt, Human herpesvirus 5
uaaagacuauacuuu

SEQ ID NO: 151914 - RNA, 18 nt, Human herpesvirus 5
uaaagggcgaacguccuc

SEQ ID NO: 151915 - RNA, 16 nt, Human herpesvirus 5
uaaagcgguggguggu

SEQ ID NO: 151916 - RNA, 18 nt, Human herpesvirus 5
uaaagcccuuaacauguu

SEQ ID NO: 151917 - RNA, 19 nt, Human herpesvirus 5
uaaaauggucguugcccac

SEQ ID NO: 151918 - RNA, 19 nt, Human herpesvirus 5
guggugugcgaaguguuga

SEQ ID NO: 151919 - RNA, 14 nt, Human herpesvirus 5
gugggcuacuuuga

SEQ ID NO: 151920 - RNA, 13 nt, Human herpesvirus 5
guggcucaugccg

SEQ ID NO: 151921 - RNA, 16 nt, Human herpesvirus 5
guggcguuggcagcaa

SEQ ID NO: 151922 - RNA, 21 nt, Human herpesvirus 5
uaaaaaaaaaaguaugugcuc

SEQ ID NO: 151923 - RNA, 16 nt, Human herpesvirus 5
uaaaaaaagacacuca

SEQ ID NO: 151924 - RNA, 12 nt, Human herpesvirus 5
guuuuuaccuac

SEQ ID NO: 151925 - RNA, 16 nt, Human herpesvirus 5
uaaaaaccauugagaa

SEQ ID NO: 151926 - RNA, 11 nt, Human herpesvirus 5
uaaaaaccacg

SEQ ID NO: 151927 - RNA, 18 nt, Human herpesvirus 5
uaacagccuucccuugua

SEQ ID NO: 151928 - RNA, 14 nt, Human herpesvirus 5
uaacacuccucucc

SEQ ID NO: 151929 - RNA, 14 nt, Human herpesvirus 5
uaacccacaccuau

SEQ ID NO: 151930 - RNA, 20 nt, Human herpesvirus 5
uaaccacgucgaccaggugc

SEQ ID NO: 151931 - RNA, 15 nt, Human herpesvirus 5
uaacagcucaugccu

SEQ ID NO: 151932 - RNA, 15 nt, Human herpesvirus 5
uaacagugugguuuu

SEQ ID NO: 151933 - RNA, 18 nt, Human herpesvirus 5
uaacauuccccugggaau

SEQ ID NO: 151934 - RNA, 14 nt, Human herpesvirus 5
uaagacagccuuac

SEQ ID NO: 151935 - RNA, 12 nt, Human herpesvirus 5
uaaccuaccugg

SEQ ID NO: 151936 - RNA, 22 nt, Human herpesvirus 5
uaaccguguccgcucaacuuuc

SEQ ID NO: 151937 - RNA, 16 nt, Human herpesvirus 5
uaacgacgccagugau

SEQ ID NO: 151938 - RNA, 23 nt, Human herpesvirus 5
uaagauauaaagaaucuaggaac

SEQ ID NO: 151939 - RNA, 21 nt, Human herpesvirus 5
uaaggucccgcuuuucuacuc

SEQ ID NO: 151940 - RNA, 23 nt, Human herpesvirus 5
uaaguaccagacauccaauuaca

SEQ ID NO: 151941 - RNA, 13 nt, Human herpesvirus 5
uaaguccaacauc

SEQ ID NO: 151942 - RNA, 14 nt, Human herpesvirus 5
uaagugacguggau

SEQ ID NO: 151943 - RNA, 15 nt, Human herpesvirus 5
cuguguagacugcca

SEQ ID NO: 151944 - RNA, 17 nt, Human herpesvirus 5
cuguguggcguguacag

SEQ ID NO: 151945 - RNA, 17 nt, Human herpesvirus 5
cuguguguucugugaua

SEQ ID NO: 151946 - RNA, 21 nt, Human herpesvirus 5
cuguuaaaaaaaccacgucga

SEQ ID NO: 151947 - RNA, 16 nt, Human herpesvirus 5
cuguccuaggggguga

SEQ ID NO: 151948 - RNA, 16 nt, Human herpesvirus 5
cugucgucgacauguc

SEQ ID NO: 151949 - RNA, 21 nt, Human herpesvirus 5
cugucguguuccagaccagcg

SEQ ID NO: 151950 - RNA, 23 nt, Human herpesvirus 5
cugucuaacuagccuucccguga

SEQ ID NO: 151951 - RNA, 19 nt, Human herpesvirus 5
cugucgccgacuaaauuca

SEQ ID NO: 151952 - RNA, 15 nt, Human herpesvirus 5
cuguguauaguuugu

SEQ ID NO: 151953 - RNA, 13 nt, Human herpesvirus 5
cuguguaucgugu

SEQ ID NO: 151954 - RNA, 23 nt, Human herpesvirus 5
cuguucguguccggaccccauac

SEQ ID NO: 151955 - RNA, 13 nt, Human herpesvirus 5
cuguuuucucaau

SEQ ID NO: 151956 - RNA, 18 nt, Human herpesvirus 5
cuuaaaggcgcacuuguc

SEQ ID NO: 151957 - RNA, 17 nt, Human herpesvirus 5
cuguugagcucggacac

SEQ ID NO: 151958 - RNA, 17 nt, Human herpesvirus 5
cuuaggggcacucuugc

SEQ ID NO: 151959 - RNA, 16 nt, Human herpesvirus 5
cuuauaaggaggcaaa

SEQ ID NO: 151960 - RNA, 16 nt, Human herpesvirus 5
cuuagcuuucuugacu

SEQ ID NO: 151961 - RNA, 17 nt, Human herpesvirus 5
cuuaacaacguguccag

SEQ ID NO: 151962 - RNA, 19 nt, Human herpesvirus 5
cuuaacacuagccaucaca

SEQ ID NO: 151963 - RNA, 23 nt, Human herpesvirus 5
cuuacagcuuuugagucuagaca

SEQ ID NO: 151964 - RNA, 10 nt, Human herpesvirus 5
cuuacaucuc

SEQ ID NO: 151965 - RNA, 22 nt, Human herpesvirus 5
cuuaccuaucaucacacuaaga

SEQ ID NO: 151966 - RNA, 16 nt, Human herpesvirus 5
cuuacauuuaucaaua

SEQ ID NO: 151967 - RNA, 12 nt, Human herpesvirus 5
cuucugcuguca

SEQ ID NO: 151968 - RNA, 14 nt, Human herpesvirus 5
cuucugcugucacc

SEQ ID NO: 151969 - RNA, 17 nt, Human herpesvirus 5
cuucuggagcacacugc

SEQ ID NO: 151970 - RNA, 15 nt, Human herpesvirus 5
cuucuccccgacucc

SEQ ID NO: 151971 - RNA, 18 nt, Human herpesvirus 5
cuucugaagccgucaguc

SEQ ID NO: 151972 - RNA, 21 nt, Human herpesvirus 5
cuucugcacuuucgaccacaa

SEQ ID NO: 151973 - RNA, 23 nt, Human herpesvirus 5
cuucuguggaggagacuaccuca

SEQ ID NO: 151974 - RNA, 19 nt, Human herpesvirus 5
cuucgccaagaugcugcgg

SEQ ID NO: 151975 - RNA, 18 nt, Human herpesvirus 5
cuucuccaucuauuggca

SEQ ID NO: 151976 - RNA, 16 nt, Human herpesvirus 5
cuucuaguacuuccca

SEQ ID NO: 151977 - RNA, 19 nt, Human herpesvirus 5
cuucggccggcugcugcac

SEQ ID NO: 151978 - RNA, 18 nt, Human herpesvirus 5
cuucggcucaucaccaac

SEQ ID NO: 151979 - RNA, 15 nt, Human herpesvirus 5
cuucggucucgggcu

SEQ ID NO: 151980 - RNA, 14 nt, Human herpesvirus 5
cuucgcgcucugua

SEQ ID NO: 151981 - RNA, 15 nt, Human herpesvirus 5
cuuccgagcuguguu

SEQ ID NO: 151982 - RNA, 22 nt, Human herpesvirus 5
cuuccccgaugugcagggacag

SEQ ID NO: 151983 - RNA, 17 nt, Human herpesvirus 5
cuucccucuagagacag

SEQ ID NO: 151984 - RNA, 18 nt, Human herpesvirus 5
cuucccucuagagacaga

SEQ ID NO: 151985 - RNA, 21 nt, Human herpesvirus 5
cuuccccacccaguagacaga

SEQ ID NO: 151986 - RNA, 17 nt, Human herpesvirus 5
cuucauaaagcuguuga

SEQ ID NO: 151987 - RNA, 12 nt, Human herpesvirus 5
cuucagaaucua

SEQ ID NO: 151988 - RNA, 23 nt, Human herpesvirus 5
cuucaucgucuugcgauguagca

SEQ ID NO: 151989 - RNA, 18 nt, Human herpesvirus 5
cuuaucaccaucagguga

SEQ ID NO: 151990 - RNA, 13 nt, Human herpesvirus 5
cuuauucuagccc

SEQ ID NO: 151991 - RNA, 14 nt, Human herpesvirus 5
cuucaaaguagcug

SEQ ID NO: 151992 - RNA, 16 nt, Human herpesvirus 5
cuucaccaucaccugg

SEQ ID NO: 151993 - RNA, 14 nt, Human herpesvirus 5
cucuccaguccaua

SEQ ID NO: 151994 - RNA, 19 nt, Human herpesvirus 5
cuccgccggcaugucccua

SEQ ID NO: 151995 - RNA, 18 nt, Human herpesvirus 5
cuccgcggucagguccag

SEQ ID NO: 151996 - RNA, 15 nt, Human herpesvirus 5
cucugacuguguaga

SEQ ID NO: 151997 - RNA, 18 nt, Human herpesvirus 5
cuccgaacgcucgugagc

SEQ ID NO: 151998 - RNA, 22 nt, Human herpesvirus 5
cuccgaauaacaacacaucaac

SEQ ID NO: 151999 - RNA, 16 nt, Human herpesvirus 5
cuccccggugugucua

SEQ ID NO: 152000 - RNA, 17 nt, Human herpesvirus 5
cucccuaacuaucuaca

SEQ ID NO: 152001 - RNA, 18 nt, Human herpesvirus 5
cucccgguauucggaaac

SEQ ID NO: 152002 - RNA, 23 nt, Human herpesvirus 5
cucaugaacaccuuuuugcugca

SEQ ID NO: 152003 - RNA, 21 nt, Human herpesvirus 5
cucccacgaagacccguucac

SEQ ID NO: 152004 - RNA, 21 nt, Human herpesvirus 5
cucccaggaccacguccagau

SEQ ID NO: 152005 - RNA, 14 nt, Human herpesvirus 5
cucccaucuucuaa

SEQ ID NO: 152006 - RNA, 21 nt, Human herpesvirus 5
cucccaugagaauuagagcau

SEQ ID NO: 152007 - RNA, 17 nt, Human herpesvirus 5
cugagacagccacauca

SEQ ID NO: 152008 - RNA, 16 nt, Human herpesvirus 5
cugagacuggugguga

SEQ ID NO: 152009 - RNA, 18 nt, Human herpesvirus 5
cugagacugguggugaga

SEQ ID NO: 152010 - RNA, 19 nt, Human herpesvirus 5
cugagcgccgacuggaucc

SEQ ID NO: 152011 - RNA, 12 nt, Human herpesvirus 5
cugaggggaaag

SEQ ID NO: 152012 - RNA, 15 nt, Human herpesvirus 5
cucuuuccugugcac

SEQ ID NO: 152013 - RNA, 13 nt, Human herpesvirus 5
cucugcguugcca

SEQ ID NO: 152014 - RNA, 13 nt, Human herpesvirus 5
cugaaaacaccau

SEQ ID NO: 152015 - RNA, 11 nt, Human herpesvirus 5
cugaaacacag

SEQ ID NO: 152016 - RNA, 15 nt, Human herpesvirus 5
cugaaaccuaccugg

SEQ ID NO: 152017 - RNA, 16 nt, Human herpesvirus 5
cugaaaccuaccuggg

SEQ ID NO: 152018 - RNA, 19 nt, Human herpesvirus 5
cugcguguguguuucuuaa

SEQ ID NO: 152019 - RNA, 17 nt, Human herpesvirus 5
cugcuaaaguagguacu

SEQ ID NO: 152020 - RNA, 17 nt, Human herpesvirus 5
cugcguucuguggugcg

SEQ ID NO: 152021 - RNA, 13 nt, Human herpesvirus 5
cugcguugccacg

SEQ ID NO: 152022 - RNA, 18 nt, Human herpesvirus 5
cugcguaagcaccgugau

SEQ ID NO: 152023 - RNA, 23 nt, Human herpesvirus 5
cugcggcggcuugggcagcagcg

SEQ ID NO: 152024 - RNA, 22 nt, Human herpesvirus 5
cugcggcugaagccguacaaga

SEQ ID NO: 152025 - RNA, 21 nt, Human herpesvirus 5
cugcucaaugccaccaugaac

SEQ ID NO: 152026 - RNA, 18 nt, Human herpesvirus 5
cugcuacagucccgagaa

SEQ ID NO: 152027 - RNA, 21 nt, Human herpesvirus 5
cugcucaaacccggucagucu

SEQ ID NO: 152028 - RNA, 21 nt, Human herpesvirus 5
cugcagccggugcgcgaccgc

SEQ ID NO: 152029 - RNA, 23 nt, Human herpesvirus 5
cugcaccacggccuuauguggcu

SEQ ID NO: 152030 - RNA, 13 nt, Human herpesvirus 5
cugcacgacaucu

SEQ ID NO: 152031 - RNA, 14 nt, Human herpesvirus 5
cugcacgacaucuu

SEQ ID NO: 152032 - RNA, 14 nt, Human herpesvirus 5
cugcacgaccugcu

SEQ ID NO: 152033 - RNA, 15 nt, Human herpesvirus 5
cugcacgaccugcuc

SEQ ID NO: 152034 - RNA, 20 nt, Human herpesvirus 5
cugcacgaccugcuccagua

SEQ ID NO: 152035 - RNA, 15 nt, Human herpesvirus 5
cugcauguuggugcc

SEQ ID NO: 152036 - RNA, 17 nt, Human herpesvirus 5
cugccaaucgcaccuua

SEQ ID NO: 152037 - RNA, 21 nt, Human herpesvirus 5
cugcauagaguuacaugcaac

SEQ ID NO: 152038 - RNA, 17 nt, Human herpesvirus 5
cugcauccaucacauca

SEQ ID NO: 152039 - RNA, 13 nt, Human herpesvirus 5
cuggacugacaca

SEQ ID NO: 152040 - RNA, 22 nt, Human herpesvirus 5
cuggacgguacaguuuaugaua

SEQ ID NO: 152041 - RNA, 20 nt, Human herpesvirus 5
cuggauaucuaggugcugca

SEQ ID NO: 152042 - RNA, 15 nt, Human herpesvirus 5
cuggagcacacugcu

SEQ ID NO: 152043 - RNA, 18 nt, Human herpesvirus 5
cuggagcuaucugugucc

SEQ ID NO: 152044 - RNA, 22 nt, Human herpesvirus 5
cuggagagacuuucaaugauga

SEQ ID NO: 152045 - RNA, 23 nt, Human herpesvirus 5
cuggauuacgaacccgugccacg

SEQ ID NO: 152046 - RNA, 15 nt, Human herpesvirus 5
cugggcgaccgucuc

SEQ ID NO: 152047 - RNA, 16 nt, Human herpesvirus 5
cugggcgaccgucucu

SEQ ID NO: 152048 - RNA, 15 nt, Human herpesvirus 5
cugggcuauaugcau

SEQ ID NO: 152049 - RNA, 10 nt, Human herpesvirus 5
cugggcucac

SEQ ID NO: 152050 - RNA, 14 nt, Human herpesvirus 5
cugggcugagacag

SEQ ID NO: 152051 - RNA, 14 nt, Human herpesvirus 5
cugggcugcaaggu

SEQ ID NO: 152052 - RNA, 21 nt, Human herpesvirus 5
cugggcuggcccucgcagugc

SEQ ID NO: 152053 - RNA, 22 nt, Human herpesvirus 5
cuggggcugcugcugcacgggc

SEQ ID NO: 152054 - RNA, 21 nt, Human herpesvirus 5
cuggggacggugaugaugcug

SEQ ID NO: 152055 - RNA, 17 nt, Human herpesvirus 5
cuggggcaccuaucucc

SEQ ID NO: 152056 - RNA, 15 nt, Human herpesvirus 5
cuggucccaauguuc

SEQ ID NO: 152057 - RNA, 22 nt, Human herpesvirus 5
cuggucaaccugcugacuauca

SEQ ID NO: 152058 - RNA, 20 nt, Human herpesvirus 5
cugucaucacgguacacaga

SEQ ID NO: 152059 - RNA, 19 nt, Human herpesvirus 5
cgugucccugccagucucc

SEQ ID NO: 152060 - RNA, 12 nt, Human herpesvirus 5
cguguccgcccc

SEQ ID NO: 152061 - RNA, 15 nt, Human herpesvirus 5
cguguacuugcucag

SEQ ID NO: 152062 - RNA, 15 nt, Human herpesvirus 5
cguguaauccacgac

SEQ ID NO: 152063 - RNA, 22 nt, Human herpesvirus 5
cguguacgccaucuucaucuuu

SEQ ID NO: 152064 - RNA, 13 nt, Human herpesvirus 5
cguggauggucau

SEQ ID NO: 152065 - RNA, 16 nt, Human herpesvirus 5
cguggucacgucggcu

SEQ ID NO: 152066 - RNA, 16 nt, Human herpesvirus 5
cguggguuggucacug

SEQ ID NO: 152067 - RNA, 20 nt, Human herpesvirus 5
cgugguaaauaaaucauggc

SEQ ID NO: 152068 - RNA, 14 nt, Human herpesvirus 5
cguggauacuagua

SEQ ID NO: 152069 - RNA, 15 nt, Human herpesvirus 5
cguggauacuaguaa

SEQ ID NO: 152070 - RNA, 14 nt, Human herpesvirus 5
cguggaaggcaccg

SEQ ID NO: 152071 - RNA, 16 nt, Human herpesvirus 5
cgucugcgccuuuugc

SEQ ID NO: 152072 - RNA, 13 nt, Human herpesvirus 5
cgucuucaugacg

SEQ ID NO: 152073 - RNA, 15 nt, Human herpesvirus 5
cuaacgguuacacaa

SEQ ID NO: 152074 - RNA, 14 nt, Human herpesvirus 5
cuaacgucacuuca

SEQ ID NO: 152075 - RNA, 21 nt, Human herpesvirus 5
cgggucucuuugacacgagcg

SEQ ID NO: 152076 - RNA, 11 nt, Human herpesvirus 5
cggugugcgac

SEQ ID NO: 152077 - RNA, 21 nt, Human herpesvirus 5
cggugugcgacgccaugcuca

SEQ ID NO: 152078 - RNA, 12 nt, Human herpesvirus 5
cggugugucuau

SEQ ID NO: 152079 - RNA, 18 nt, Human herpesvirus 5
cgguuaccuucuugccca

SEQ ID NO: 152080 - RNA, 13 nt, Human herpesvirus 5
cgguguuggccac

SEQ ID NO: 152081 - RNA, 20 nt, Human herpesvirus 5
cgguguuuuucgucccgcuu

SEQ ID NO: 152082 - RNA, 15 nt, Human herpesvirus 5
cggggcugguugcuu

SEQ ID NO: 152083 - RNA, 17 nt, Human herpesvirus 5
cguaaagagagucacac

SEQ ID NO: 152084 - RNA, 21 nt, Human herpesvirus 5
cguaaagagagucacacuuaa

SEQ ID NO: 152085 - RNA, 20 nt, Human herpesvirus 5
cguaaccacgucgaccaggu

SEQ ID NO: 152086 - RNA, 15 nt, Human herpesvirus 5
cguaacgucuucuga

SEQ ID NO: 152087 - RNA, 22 nt, Human herpesvirus 5
cguaacucuaucuacugucucc

SEQ ID NO: 152088 - RNA, 15 nt, Human herpesvirus 5
cgguuucguuuauug

SEQ ID NO: 152089 - RNA, 17 nt, Human herpesvirus 5
cgguuuaucaugaggca

SEQ ID NO: 152090 - RNA, 14 nt, Human herpesvirus 5
cgguuccaucggca

SEQ ID NO: 152091 - RNA, 12 nt, Human herpesvirus 5
cgguucucacgg

SEQ ID NO: 152092 - RNA, 13 nt, Human herpesvirus 5
cgucucgucacac

SEQ ID NO: 152093 - RNA, 23 nt, Human herpesvirus 5
cgucuggagguggccugcaucuu

SEQ ID NO: 152094 - RNA, 19 nt, Human herpesvirus 5
cgucgugggcuacuuugac

SEQ ID NO: 152095 - RNA, 15 nt, Human herpesvirus 5
cgucgccaccaugca

SEQ ID NO: 152096 - RNA, 13 nt, Human herpesvirus 5
cgucgcgaucucc

SEQ ID NO: 152097 - RNA, 15 nt, Human herpesvirus 5
cguaagcaccgugau

SEQ ID NO: 152098 - RNA, 11 nt, Human herpesvirus 5
cguaccugcau

SEQ ID NO: 152099 - RNA, 18 nt, Human herpesvirus 5
cguacgguucaucgucua

SEQ ID NO: 152100 - RNA, 19 nt, Human herpesvirus 5
cguccgggcucggugaccu

SEQ ID NO: 152101 - RNA, 17 nt, Human herpesvirus 5
cgucccuggggcugcug

SEQ ID NO: 152102 - RNA, 13 nt, Human herpesvirus 5
cgucgaucuugac

SEQ ID NO: 152103 - RNA, 17 nt, Human herpesvirus 5
cgucgcacaccuugaaa

SEQ ID NO: 152104 - RNA, 12 nt, Human herpesvirus 5
cggauaucuacg

SEQ ID NO: 152105 - RNA, 22 nt, Human herpesvirus 5
cggaucaauugcgggcccugcu

SEQ ID NO: 152106 - RNA, 16 nt, Human herpesvirus 5
cggcaacgauagucau

SEQ ID NO: 152107 - RNA, 20 nt, Human herpesvirus 5
cggcaacgauagucaucuca

SEQ ID NO: 152108 - RNA, 16 nt, Human herpesvirus 5
cgggcaauugcauguc

SEQ ID NO: 152109 - RNA, 21 nt, Human herpesvirus 5
cgggcuaugcuggugaugcug

SEQ ID NO: 152110 - RNA, 19 nt, Human herpesvirus 5
cgggcuccaugcugacgua

SEQ ID NO: 152111 - RNA, 15 nt, Human herpesvirus 5
cgggcucggugaccu

SEQ ID NO: 152112 - RNA, 13 nt, Human herpesvirus 5
cgggcccugcuga

SEQ ID NO: 152113 - RNA, 13 nt, Human herpesvirus 5
cggggaaaaucac

SEQ ID NO: 152114 - RNA, 18 nt, Human herpesvirus 5
cggggaggagacacagaa

SEQ ID NO: 152115 - RNA, 21 nt, Human herpesvirus 5
cggggauuuucgaugauacau

SEQ ID NO: 152116 - RNA, 15 nt, Human herpesvirus 5
cggaggaggugaccu

SEQ ID NO: 152117 - RNA, 20 nt, Human herpesvirus 5
cggagcggaggaggugaccu

SEQ ID NO: 152118 - RNA, 13 nt, Human herpesvirus 5
cggagaccgucca

SEQ ID NO: 152119 - RNA, 17 nt, Human herpesvirus 5
cggaguaagaacacaac

SEQ ID NO: 152120 - RNA, 20 nt, Human herpesvirus 5
cggaccgcagcaccggcuca

SEQ ID NO: 152121 - RNA, 16 nt, Human herpesvirus 5
cgacauggagcccacg

SEQ ID NO: 152122 - RNA, 22 nt, Human herpesvirus 5
cgaccggcggcugcuguugcac

SEQ ID NO: 152123 - RNA, 16 nt, Human herpesvirus 5
cgcuuuucuacuccau

SEQ ID NO: 152124 - RNA, 20 nt, Human herpesvirus 5
cgacgcaugcauucugguac

SEQ ID NO: 152125 - RNA, 12 nt, Human herpesvirus 5
cgacgccgucua

SEQ ID NO: 152126 - RNA, 17 nt, Human herpesvirus 5
cgaagaccucaccaucu

SEQ ID NO: 152127 - RNA, 19 nt, Human herpesvirus 5
cgaagaccucaccaucuca

SEQ ID NO: 152128 - RNA, 15 nt, Human herpesvirus 5
cgaaggcuacucuau

SEQ ID NO: 152129 - RNA, 17 nt, Human herpesvirus 5
cgaauaacaacacauca

SEQ ID NO: 152130 - RNA, 17 nt, Human herpesvirus 5
cgacaaacacuaccguc

SEQ ID NO: 152131 - RNA, 12 nt, Human herpesvirus 5
cgacacaugcac

SEQ ID NO: 152132 - RNA, 21 nt, Human herpesvirus 5
cgacacacguucgacauggac

SEQ ID NO: 152133 - RNA, 14 nt, Human herpesvirus 5
cgacaacaucccuc

SEQ ID NO: 152134 - RNA, 17 nt, Human herpesvirus 5
cgaauuaggcaacuauc

SEQ ID NO: 152135 - RNA, 19 nt, Human herpesvirus 5
cgaaucgccggcuugcucc

SEQ ID NO: 152136 - RNA, 16 nt, Human herpesvirus 5
cgaauggaucaucugu

SEQ ID NO: 152137 - RNA, 14 nt, Human herpesvirus 5
cuaucaaugaagac

SEQ ID NO: 152138 - RNA, 14 nt, Human herpesvirus 5
cuauuguauacucu

SEQ ID NO: 152139 - RNA, 20 nt, Human herpesvirus 5
cuauauuaucuuuuaccaac

SEQ ID NO: 152140 - RNA, 14 nt, Human herpesvirus 5
cuauuuuggcacga

SEQ ID NO: 152141 - RNA, 19 nt, Human herpesvirus 5
cuauaaauguucucugaaa

SEQ ID NO: 152142 - RNA, 18 nt, Human herpesvirus 5
cuauaaauugcucuacug

SEQ ID NO: 152143 - RNA, 12 nt, Human herpesvirus 5
cuauaagacagc

SEQ ID NO: 152144 - RNA, 13 nt, Human herpesvirus 5
cuauacacauaug

SEQ ID NO: 152145 - RNA, 16 nt, Human herpesvirus 5
cuauaccaucaccuau

SEQ ID NO: 152146 - RNA, 17 nt, Human herpesvirus 5
cuauagcgggauuuacu

SEQ ID NO: 152147 - RNA, 22 nt, Human herpesvirus 5
cucaucauccccuccuugauca

SEQ ID NO: 152148 - RNA, 12 nt, Human herpesvirus 5
cucagucugcaa

SEQ ID NO: 152149 - RNA, 19 nt, Human herpesvirus 5
cucagucugccuccuagua

SEQ ID NO: 152150 - RNA, 22 nt, Human herpesvirus 5
cucaguacuuugggguggugcg

SEQ ID NO: 152151 - RNA, 18 nt, Human herpesvirus 5
cucaaguacggagaugug

SEQ ID NO: 152152 - RNA, 13 nt, Human herpesvirus 5
cucaaguucagug

SEQ ID NO: 152153 - RNA, 19 nt, Human herpesvirus 5
cucaaggagaacaccacgg

SEQ ID NO: 152154 - RNA, 23 nt, Human herpesvirus 5
cucaauaaacgugucacgccugu

SEQ ID NO: 152155 - RNA, 21 nt, Human herpesvirus 5
cuagucaauaaagaaaaccac

SEQ ID NO: 152156 - RNA, 21 nt, Human herpesvirus 5
cuaguacugagacagccacau

SEQ ID NO: 152157 - RNA, 21 nt, Human herpesvirus 5
cuaggucgucuuggaagccga

SEQ ID NO: 152158 - RNA, 18 nt, Human herpesvirus 5
cuaggugcugcaugugua

SEQ ID NO: 152159 - RNA, 20 nt, Human herpesvirus 5
cuacuuggacuuucuccuuu

SEQ ID NO: 152160 - RNA, 20 nt, Human herpesvirus 5
cuacucugacuguguagauc

SEQ ID NO: 152161 - RNA, 22 nt, Human herpesvirus 5
cuacgcccuaguggucuuucac

SEQ ID NO: 152162 - RNA, 20 nt, Human herpesvirus 5
cuacgcaauguuacacauua

SEQ ID NO: 152163 - RNA, 12 nt, Human herpesvirus 5
cuacgguggugu

SEQ ID NO: 152164 - RNA, 15 nt, Human herpesvirus 5
cuacgucgacaugaa

SEQ ID NO: 152165 - RNA, 15 nt, Human herpesvirus 5
cuacgucuucaugac

SEQ ID NO: 152166 - RNA, 18 nt, Human herpesvirus 5
cuaccggcgagggugucc

SEQ ID NO: 152167 - RNA, 18 nt, Human herpesvirus 5
cuacuaccaauacugcau

SEQ ID NO: 152168 - RNA, 14 nt, Human herpesvirus 5
cuacuacucugugu

SEQ ID NO: 152169 - RNA, 16 nt, Human herpesvirus 5
cuaauuauugccauaa

SEQ ID NO: 152170 - RNA, 13 nt, Human herpesvirus 5
cuacaaaggaaaa

SEQ ID NO: 152171 - RNA, 11 nt, Human herpesvirus 5
cuaacuaucua

SEQ ID NO: 152172 - RNA, 11 nt, Human herpesvirus 5
cuaaugugcug

SEQ ID NO: 152173 - RNA, 15 nt, Human herpesvirus 5
cuacacugaacuuga

SEQ ID NO: 152174 - RNA, 22 nt, Human herpesvirus 5
cuacaccaguucguagaucaca

SEQ ID NO: 152175 - RNA, 13 nt, Human herpesvirus 5
cuacagcaaugac

SEQ ID NO: 152176 - RNA, 21 nt, Human herpesvirus 5
cuacagaauugauuucaacaa

SEQ ID NO: 152177 - RNA, 16 nt, Human herpesvirus 5
cuacaucacugacaag

SEQ ID NO: 152178 - RNA, 17 nt, Human herpesvirus 5
cuacaucacugacaagu

SEQ ID NO: 152179 - RNA, 19 nt, Human herpesvirus 5
cuacaucaguuuccacgac

SEQ ID NO: 152180 - RNA, 16 nt, Human herpesvirus 5
cuacagcagauacaug

SEQ ID NO: 152181 - RNA, 17 nt, Human herpesvirus 5
cuaccgccgcaacagcg

SEQ ID NO: 152182 - RNA, 23 nt, Human herpesvirus 5
cuacaugcuauaagacagccuua

SEQ ID NO: 152183 - RNA, 18 nt, Human herpesvirus 5
cuacaucucaucaagcac

SEQ ID NO: 152184 - RNA, 16 nt, Human herpesvirus 5
cuaccaauacugcauc

SEQ ID NO: 152185 - RNA, 13 nt, Human herpesvirus 5
cuacauucaauac

SEQ ID NO: 152186 - RNA, 16 nt, Human herpesvirus 5
cuacauucaauacauc

SEQ ID NO: 152187 - RNA, 14 nt, Human herpesvirus 5
gacccacuaccugg

SEQ ID NO: 152188 - RNA, 15 nt, Human herpesvirus 5
gaccccaagccaaaa

SEQ ID NO: 152189 - RNA, 21 nt, Human herpesvirus 5
gaccccaagccaaaaacagua

SEQ ID NO: 152190 - RNA, 22 nt, Human herpesvirus 5
gaccauggucggugacaucacc

SEQ ID NO: 152191 - RNA, 24 nt, Human herpesvirus 5
gaccauuaacaauuccacgccgcu

SEQ ID NO: 152192 - RNA, 16 nt, Human herpesvirus 5
gaccacgucaccgugc

SEQ ID NO: 152193 - RNA, 23 nt, Human herpesvirus 5
gaccagcaguaugacgugcgaug

SEQ ID NO: 152194 - RNA, 14 nt, Human herpesvirus 5
gaccagcgccacca

SEQ ID NO: 152195 - RNA, 20 nt, Human herpesvirus 5
gaccagcgccaccauagcca

SEQ ID NO: 152196 - RNA, 17 nt, Human herpesvirus 5
gacaugucgcgacaccc

SEQ ID NO: 152197 - RNA, 16 nt, Human herpesvirus 5
gaccaaagacuguggu

SEQ ID NO: 152198 - RNA, 14 nt, Human herpesvirus 5
gacauggacauaaa

SEQ ID NO: 152199 - RNA, 20 nt, Human herpesvirus 5
gacauggagcccacgccgau

SEQ ID NO: 152200 - RNA, 18 nt, Human herpesvirus 5
gacauggcccucaugacg

SEQ ID NO: 152201 - RNA, 12 nt, Human herpesvirus 5
gacaucucgccg

SEQ ID NO: 152202 - RNA, 23 nt, Human herpesvirus 5
gacaucgcucgcuuuggagcgcg

SEQ ID NO: 152203 - RNA, 14 nt, Human herpesvirus 5
gacgaagaggacac

SEQ ID NO: 152204 - RNA, 17 nt, Human herpesvirus 5
gaccucuuugagcacaa

SEQ ID NO: 152205 - RNA, 16 nt, Human herpesvirus 5
gaccuaguuagauuuc

SEQ ID NO: 152206 - RNA, 20 nt, Human herpesvirus 5
gacccuuugauguaguacau

SEQ ID NO: 152207 - RNA, 19 nt, Human herpesvirus 5
gaccccgcuacagcaaaga

SEQ ID NO: 152208 - RNA, 17 nt, Human herpesvirus 5
gacccuccuaaaccugg

SEQ ID NO: 152209 - RNA, 17 nt, Human herpesvirus 5
gaccgcaacgugcugcu

SEQ ID NO: 152210 - RNA, 18 nt, Human herpesvirus 5
gaccggcggcugcuguug

SEQ ID NO: 152211 - RNA, 14 nt, Human herpesvirus 5
gaccguacacgcac

SEQ ID NO: 152212 - RNA, 21 nt, Human herpesvirus 5
gacgccaaguacgguauucgu

SEQ ID NO: 152213 - RNA, 21 nt, Human herpesvirus 5
gacgcacuuuuuuuacuagua

SEQ ID NO: 152214 - RNA, 17 nt, Human herpesvirus 5
gacgccgaggacgccgu

SEQ ID NO: 152215 - RNA, 17 nt, Human herpesvirus 5
gacgccgucuaacaggu

SEQ ID NO: 152216 - RNA, 18 nt, Human herpesvirus 5
gacguuucgcgaggacaa

SEQ ID NO: 152217 - RNA, 12 nt, Human herpesvirus 5
gacuaacccugg

SEQ ID NO: 152218 - RNA, 21 nt, Human herpesvirus 5
gaggaaguugcgguaaaacca

SEQ ID NO: 152219 - RNA, 21 nt, Human herpesvirus 5
gaggagcucacccggcugcug

SEQ ID NO: 152220 - RNA, 14 nt, Human herpesvirus 5
gaggagacacagaa

SEQ ID NO: 152221 - RNA, 18 nt, Human herpesvirus 5
gaggagacuaccucaguc

SEQ ID NO: 152222 - RNA, 18 nt, Human herpesvirus 5
gagcucugaaacacagac

SEQ ID NO: 152223 - RNA, 19 nt, Human herpesvirus 5
gagcacaaaaauacugaca

SEQ ID NO: 152224 - RNA, 14 nt, Human herpesvirus 5
gagcuaucuguguc

SEQ ID NO: 152225 - RNA, 16 nt, Human herpesvirus 5
gagcggguucccacag

SEQ ID NO: 152226 - RNA, 14 nt, Human herpesvirus 5
gagauggcgauauu

SEQ ID NO: 152227 - RNA, 19 nt, Human herpesvirus 5
gagauacgauucuggcgcu

SEQ ID NO: 152228 - RNA, 16 nt, Human herpesvirus 5
gagaacaauaaagcgu

SEQ ID NO: 152229 - RNA, 16 nt, Human herpesvirus 5
gacucaccagacuuuu

SEQ ID NO: 152230 - RNA, 20 nt, Human herpesvirus 5
gacaguauuaacguguggug

SEQ ID NO: 152231 - RNA, 21 nt, Human herpesvirus 5
gacaguauuaacgugugguga

SEQ ID NO: 152232 - RNA, 17 nt, Human herpesvirus 5
gacagcgcgacgagcgc

SEQ ID NO: 152233 - RNA, 18 nt, Human herpesvirus 5
gacagcacguuaguuaca

SEQ ID NO: 152234 - RNA, 16 nt, Human herpesvirus 5
gacagccacaucaaca

SEQ ID NO: 152235 - RNA, 16 nt, Human herpesvirus 5
gacaggcggccagcuu

SEQ ID NO: 152236 - RNA, 22 nt, Human herpesvirus 5
gacagggaaagguuauauaaaa

SEQ ID NO: 152237 - RNA, 13 nt, Human herpesvirus 5
gacagcuaccgag

SEQ ID NO: 152238 - RNA, 18 nt, Human herpesvirus 5
gacagacgauaugaggcu

SEQ ID NO: 152239 - RNA, 13 nt, Human herpesvirus 5
gacacuaauuuau

SEQ ID NO: 152240 - RNA, 16 nt, Human herpesvirus 5
gaauugcgaagccagc

SEQ ID NO: 152241 - RNA, 16 nt, Human herpesvirus 5
gaaugguaaagacauc

SEQ ID NO: 152242 - RNA, 21 nt, Human herpesvirus 5
gaagugccgcgccgccuggag

SEQ ID NO: 152243 - RNA, 16 nt, Human herpesvirus 5
gaagagguugguguga

SEQ ID NO: 152244 - RNA, 16 nt, Human herpesvirus 5
gaauaauaauaccaca

SEQ ID NO: 152245 - RNA, 16 nt, Human herpesvirus 5
gaagaggacaccucaa

SEQ ID NO: 152246 - RNA, 16 nt, Human herpesvirus 5
gaagaagaagaacaag

SEQ ID NO: 152247 - RNA, 23 nt, Human herpesvirus 5
gaagaaauagauagcaagccaga

SEQ ID NO: 152248 - RNA, 21 nt, Human herpesvirus 5
gaacucgaccucuuugagcac

SEQ ID NO: 152249 - RNA, 17 nt, Human herpesvirus 5
gaacgugacgguugcug

SEQ ID NO: 152250 - RNA, 17 nt, Human herpesvirus 5
gaacgugcgcgaaagcu

SEQ ID NO: 152251 - RNA, 14 nt, Human herpesvirus 5
gaacuaauauugca

SEQ ID NO: 152252 - RNA, 11 nt, Human herpesvirus 5
gaaccaugauc

SEQ ID NO: 152253 - RNA, 18 nt, Human herpesvirus 5
gaacacugaaaacaccau

SEQ ID NO: 152254 - RNA, 20 nt, Human herpesvirus 5
gaacagacccgauacaguca

SEQ ID NO: 152255 - RNA, 22 nt, Human herpesvirus 5
gaacagacccgauacagucagc

SEQ ID NO: 152256 - RNA, 13 nt, Human herpesvirus 5
gaaaucccucacc

SEQ ID NO: 152257 - RNA, 16 nt, Human herpesvirus 5
gaaauccgagagguag

SEQ ID NO: 152258 - RNA, 18 nt, Human herpesvirus 5
gaacagcagcucuuccaa

SEQ ID NO: 152259 - RNA, 17 nt, Human herpesvirus 5
gaacagggaagacuguc

SEQ ID NO: 152260 - RNA, 19 nt, Human herpesvirus 5
gaaaguacggugucgccac

SEQ ID NO: 152261 - RNA, 17 nt, Human herpesvirus 5
cuugaguacuuucacaa

SEQ ID NO: 152262 - RNA, 21 nt, Human herpesvirus 5
cuugacgacguuguggcugcu

SEQ ID NO: 152263 - RNA, 23 nt, Human herpesvirus 5
cuugacgacguuguggcugcuau

SEQ ID NO: 152264 - RNA, 22 nt, Human herpesvirus 5
cuugacuauuuuuuguaacacu

SEQ ID NO: 152265 - RNA, 23 nt, Human herpesvirus 5
cuugacuauuuuuuguaacacua

SEQ ID NO: 152266 - RNA, 23 nt, Human herpesvirus 5
cuugagcacaaaaauacugacaa

SEQ ID NO: 152267 - RNA, 18 nt, Human herpesvirus 5
cuuggcagcgggccuguu

SEQ ID NO: 152268 - RNA, 19 nt, Human herpesvirus 5
cuuggccgaccugugcgug

SEQ ID NO: 152269 - RNA, 19 nt, Human herpesvirus 5
cuuggaaucugguacuuag

SEQ ID NO: 152270 - RNA, 15 nt, Human herpesvirus 5
gauaugaggcuauau

SEQ ID NO: 152271 - RNA, 23 nt, Human herpesvirus 5
gauauaggugacagacgauauga

SEQ ID NO: 152272 - RNA, 22 nt, Human herpesvirus 5
gauauaaagcgguauauucaau

SEQ ID NO: 152273 - RNA, 17 nt, Human herpesvirus 5
gagguagaagggcuguu

SEQ ID NO: 152274 - RNA, 22 nt, Human herpesvirus 5
gaggguggugacuuacaucuca

SEQ ID NO: 152275 - RNA, 22 nt, Human herpesvirus 5
gagguacgguaccgcugggaug

SEQ ID NO: 152276 - RNA, 14 nt, Human herpesvirus 5
gagguuugggagaa

SEQ ID NO: 152277 - RNA, 17 nt, Human herpesvirus 5
gaggugaccuggcugcu

SEQ ID NO: 152278 - RNA, 22 nt, Human herpesvirus 5
gaguacacgcaggcaagccaaa

SEQ ID NO: 152279 - RNA, 14 nt, Human herpesvirus 5
gauagcaagccaga

SEQ ID NO: 152280 - RNA, 20 nt, Human herpesvirus 5
gauagcaagccagauacuau

SEQ ID NO: 152281 - RNA, 11 nt, Human herpesvirus 5
gaugaugcugc

SEQ ID NO: 152282 - RNA, 15 nt, Human herpesvirus 5
gaugaugcugcugag

SEQ ID NO: 152283 - RNA, 22 nt, Human herpesvirus 5
gaugaugcugcugagacugaga

SEQ ID NO: 152284 - RNA, 23 nt, Human herpesvirus 5
gaugaugcugcugagacugagac

SEQ ID NO: 152285 - RNA, 14 nt, Human herpesvirus 5
gaucuauacauuga

SEQ ID NO: 152286 - RNA, 19 nt, Human herpesvirus 5
gauccuccggcgcugagaa

SEQ ID NO: 152287 - RNA, 17 nt, Human herpesvirus 5
gauccugggacaccacg

SEQ ID NO: 152288 - RNA, 16 nt, Human herpesvirus 5
gaucgccuggagcgag

SEQ ID NO: 152289 - RNA, 22 nt, Human herpesvirus 5
gaucgcggccuucagcgucuca

SEQ ID NO: 152290 - RNA, 16 nt, Human herpesvirus 5
gaucgcuggugucucu

SEQ ID NO: 152291 - RNA, 17 nt, Human herpesvirus 5
gaugcuuuccuggacac

SEQ ID NO: 152292 - RNA, 15 nt, Human herpesvirus 5
gaugccaucacggga

SEQ ID NO: 152293 - RNA, 18 nt, Human herpesvirus 5
gaugccgaugugugacua

SEQ ID NO: 152294 - RNA, 13 nt, Human herpesvirus 5
gaugcuagcaaua

SEQ ID NO: 152295 - RNA, 17 nt, Human herpesvirus 5
gcaacuucuucuacuca

SEQ ID NO: 152296 - RNA, 16 nt, Human herpesvirus 5
gcaacuucuaccaucu

SEQ ID NO: 152297 - RNA, 19 nt, Human herpesvirus 5
gcaacuucuaccaucuccg

SEQ ID NO: 152298 - RNA, 12 nt, Human herpesvirus 5
gcaacugcugcc

SEQ ID NO: 152299 - RNA, 21 nt, Human herpesvirus 5
gcaccacaagcgccgucacuu

SEQ ID NO: 152300 - RNA, 18 nt, Human herpesvirus 5
gcaccacggcuugcaaaa

SEQ ID NO: 152301 - RNA, 13 nt, Human herpesvirus 5
gcaccaugugcaa

SEQ ID NO: 152302 - RNA, 14 nt, Human herpesvirus 5
gcaccaugugcaaa

SEQ ID NO: 152303 - RNA, 15 nt, Human herpesvirus 5
gcaccaugugcaaaa

SEQ ID NO: 152304 - RNA, 14 nt, Human herpesvirus 5
gcacccggcugcac

SEQ ID NO: 152305 - RNA, 15 nt, Human herpesvirus 5
gcacccgucauggua

SEQ ID NO: 152306 - RNA, 21 nt, Human herpesvirus 5
gcacucuugcucguuguaaua

SEQ ID NO: 152307 - RNA, 21 nt, Human herpesvirus 5
gcacuuucgaccacaagcuca

SEQ ID NO: 152308 - RNA, 20 nt, Human herpesvirus 5
gcacuuuacauaaaaccacc

SEQ ID NO: 152309 - RNA, 23 nt, Human herpesvirus 5
gcagaaaagccggcuccaagugc

SEQ ID NO: 152310 - RNA, 20 nt, Human herpesvirus 5
gcagaaaaucuguguguucu

SEQ ID NO: 152311 - RNA, 20 nt, Human herpesvirus 5
gcagaaacgagauaaugggg

SEQ ID NO: 152312 - RNA, 22 nt, Human herpesvirus 5
gcaacgacaccucccuaacuau

SEQ ID NO: 152313 - RNA, 13 nt, Human herpesvirus 5
gcaacgugcugcu

SEQ ID NO: 152314 - RNA, 18 nt, Human herpesvirus 5
gcaacgauagucaucuca

SEQ ID NO: 152315 - RNA, 16 nt, Human herpesvirus 5
gcaacgccaccaagga

SEQ ID NO: 152316 - RNA, 21 nt, Human herpesvirus 5
gcaacacuuuuuuaccuauca

SEQ ID NO: 152317 - RNA, 19 nt, Human herpesvirus 5
gauuucugcguguaccgcu

SEQ ID NO: 152318 - RNA, 16 nt, Human herpesvirus 5
gauucagaucuaccau

SEQ ID NO: 152319 - RNA, 17 nt, Human herpesvirus 5
gauuagcagaaggaaua

SEQ ID NO: 152320 - RNA, 21 nt, Human herpesvirus 5
gauuccccgugacaguauuaa

SEQ ID NO: 152321 - RNA, 19 nt, Human herpesvirus 5
gcagcgacuucgguuccau

SEQ ID NO: 152322 - RNA, 20 nt, Human herpesvirus 5
gcagcugcuuucuuuuugca

SEQ ID NO: 152323 - RNA, 17 nt, Human herpesvirus 5
gcagaccaccaugugca

SEQ ID NO: 152324 - RNA, 17 nt, Human herpesvirus 5
gcagaagaauguugcga

SEQ ID NO: 152325 - RNA, 18 nt, Human herpesvirus 5
gcagcgccccucuuaaca

SEQ ID NO: 152326 - RNA, 16 nt, Human herpesvirus 5
gcagcaucuggcgcgg

SEQ ID NO: 152327 - RNA, 24 nt, Human herpesvirus 5
gcaggcccggguucgcgauucuca

SEQ ID NO: 152328 - RNA, 23 nt, Human herpesvirus 5
gcagucagacccacuaccuggag

SEQ ID NO: 152329 - RNA, 18 nt, Human herpesvirus 5
gcaguaugacgugcgaug

SEQ ID NO: 152330 - RNA, 20 nt, Human herpesvirus 5
gcaguaugacgugcgauggu

SEQ ID NO: 152331 - RNA, 15 nt, Human herpesvirus 5
gcaggguaaaaacca

SEQ ID NO: 152332 - RNA, 19 nt, Human herpesvirus 5
gcaucaacgacgagaugaa

SEQ ID NO: 152333 - RNA, 13 nt, Human herpesvirus 5
gcauagugguguu

SEQ ID NO: 152334 - RNA, 20 nt, Human herpesvirus 5
gcauacggcguauacaauca

SEQ ID NO: 152335 - RNA, 22 nt, Human herpesvirus 5
gcauaagacgggacggcugccu

SEQ ID NO: 152336 - RNA, 17 nt, Human herpesvirus 5
gcauagaguuacaugca

SEQ ID NO: 152337 - RNA, 18 nt, Human herpesvirus 5
gcauagcgaucuggugua

SEQ ID NO: 152338 - RNA, 14 nt, Human herpesvirus 5
gcauaagaagccaa

SEQ ID NO: 152339 - RNA, 15 nt, Human herpesvirus 5
gcauaagaagccaag

SEQ ID NO: 152340 - RNA, 12 nt, Human herpesvirus 5
gcauccaucaca

SEQ ID NO: 152341 - RNA, 15 nt, Human herpesvirus 5
gcauccaucacauca

SEQ ID NO: 152342 - RNA, 17 nt, Human herpesvirus 5
gcauccaucacaucacc

SEQ ID NO: 152343 - RNA, 16 nt, Human herpesvirus 5
gcaucaucaacagcag

SEQ ID NO: 152344 - RNA, 22 nt, Human herpesvirus 5
gcauccucgggcuuuccggcca

SEQ ID NO: 152345 - RNA, 20 nt, Human herpesvirus 5
gcaucgccgacguaggcaaa

SEQ ID NO: 152346 - RNA, 20 nt, Human herpesvirus 5
gcaucuucgccaagaugcug

SEQ ID NO: 152347 - RNA, 18 nt, Human herpesvirus 5
gcaucugccgaaacaccg

SEQ ID NO: 152348 - RNA, 19 nt, Human herpesvirus 5
gcaucugucaucuaccuac

SEQ ID NO: 152349 - RNA, 22 nt, Human herpesvirus 5
gcaugggcgacaccgccucggu

SEQ ID NO: 152350 - RNA, 14 nt, Human herpesvirus 5
gcaugacuguuucc

SEQ ID NO: 152351 - RNA, 20 nt, Human herpesvirus 5
gcauucucuacgaacgguau

SEQ ID NO: 152352 - RNA, 22 nt, Human herpesvirus 5
gcaugucccuacucaccaaagc

SEQ ID NO: 152353 - RNA, 18 nt, Human herpesvirus 5
gcaugucgucucaucaca

SEQ ID NO: 152354 - RNA, 18 nt, Human herpesvirus 5
gcaugugcuugacuguac

SEQ ID NO: 152355 - RNA, 16 nt, Human herpesvirus 5
gccaaucgcaccuuau

SEQ ID NO: 152356 - RNA, 21 nt, Human herpesvirus 5
gccaacuccgugcuguuggac

SEQ ID NO: 152357 - RNA, 11 nt, Human herpesvirus 5
gccaagccaug

SEQ ID NO: 152358 - RNA, 17 nt, Human herpesvirus 5
gccaacgagacuaucua

SEQ ID NO: 152359 - RNA, 19 nt, Human herpesvirus 5
gccaacggaguuacucgca

SEQ ID NO: 152360 - RNA, 14 nt, Human herpesvirus 5
gccaacaaugacua

SEQ ID NO: 152361 - RNA, 17 nt, Human herpesvirus 5
gccacggugcuuuucau

SEQ ID NO: 152362 - RNA, 21 nt, Human herpesvirus 5
gccacggugcuuuucaucuau

SEQ ID NO: 152363 - RNA, 14 nt, Human herpesvirus 5
gccacgacgucucc

SEQ ID NO: 152364 - RNA, 16 nt, Human herpesvirus 5
gccacaucaacauaca

SEQ ID NO: 152365 - RNA, 17 nt, Human herpesvirus 5
gccaccgacacagcagc

SEQ ID NO: 152366 - RNA, 16 nt, Human herpesvirus 5
gccagauacuauacga

SEQ ID NO: 152367 - RNA, 21 nt, Human herpesvirus 5
gccacguaggugaguucaaug

SEQ ID NO: 152368 - RNA, 19 nt, Human herpesvirus 5
gccauaaaaauaugggaau

SEQ ID NO: 152369 - RNA, 13 nt, Human herpesvirus 5
gccaucuucaucu

SEQ ID NO: 152370 - RNA, 18 nt, Human herpesvirus 5
gccaucuucaucuuucag

SEQ ID NO: 152371 - RNA, 19 nt, Human herpesvirus 5
gccaggacccguacugcga

SEQ ID NO: 152372 - RNA, 16 nt, Human herpesvirus 5
gccagcugccaccagg

SEQ ID NO: 152373 - RNA, 16 nt, Human herpesvirus 5
gccagucgcacuaaua

SEQ ID NO: 152374 - RNA, 16 nt, Human herpesvirus 5
ccaucaguacggcuuu

SEQ ID NO: 152375 - RNA, 17 nt, Human herpesvirus 5
cccauaagcuguguacu

SEQ ID NO: 152376 - RNA, 17 nt, Human herpesvirus 5
cccaucgucugcauguu

SEQ ID NO: 152377 - RNA, 23 nt, Human herpesvirus 5
ccccaacccagggagacuuagaa

SEQ ID NO: 152378 - RNA, 23 nt, Human herpesvirus 5
ccagggaggagggguuaagaggu

SEQ ID NO: 152379 - RNA, 15 nt, Human herpesvirus 5
ccaggcucacguuga

SEQ ID NO: 152380 - RNA, 19 nt, Human herpesvirus 5
ccauaucgugaaccaugau

SEQ ID NO: 152381 - RNA, 13 nt, Human herpesvirus 5
ccauacuuaccac

SEQ ID NO: 152382 - RNA, 16 nt, Human herpesvirus 5
ccauacuuuuacauga

SEQ ID NO: 152383 - RNA, 17 nt, Human herpesvirus 5
ccauacuuuuacaugaa

SEQ ID NO: 152384 - RNA, 16 nt, Human herpesvirus 5
ccauauaaacgugggu

SEQ ID NO: 152385 - RNA, 20 nt, Human herpesvirus 5
cccgacaaguucgaucucau

SEQ ID NO: 152386 - RNA, 22 nt, Human herpesvirus 5
ccccacagcaugaacaccagau

SEQ ID NO: 152387 - RNA, 15 nt, Human herpesvirus 5
ccccaauuacucggu

SEQ ID NO: 152388 - RNA, 16 nt, Human herpesvirus 5
ccccaauuacucggug

SEQ ID NO: 152389 - RNA, 22 nt, Human herpesvirus 5
ccccaagcgguacggacuacau

SEQ ID NO: 152390 - RNA, 12 nt, Human herpesvirus 5
ccccuccuugau

SEQ ID NO: 152391 - RNA, 17 nt, Human herpesvirus 5
cccgcgacgugguuuca

SEQ ID NO: 152392 - RNA, 21 nt, Human herpesvirus 5
ccgucacugccaccgacaugg

SEQ ID NO: 152393 - RNA, 16 nt, Human herpesvirus 5
ccguccccacguccac

SEQ ID NO: 152394 - RNA, 19 nt, Human herpesvirus 5
ccgucccguuacgccggag

SEQ ID NO: 152395 - RNA, 13 nt, Human herpesvirus 5
ccgucaaaacaca

SEQ ID NO: 152396 - RNA, 19 nt, Human herpesvirus 5
ccguauauucuacauucaa

SEQ ID NO: 152397 - RNA, 15 nt, Human herpesvirus 5
ccuagcacgucagug

SEQ ID NO: 152398 - RNA, 20 nt, Human herpesvirus 5
ccguccucgucgccuuccag

SEQ ID NO: 152399 - RNA, 20 nt, Human herpesvirus 5
ccgucgcgcgcgcagggaau

SEQ ID NO: 152400 - RNA, 19 nt, Human herpesvirus 5
ccgucaugaccgcaaugau

SEQ ID NO: 152401 - RNA, 21 nt, Human herpesvirus 5
ccuagacgaagaggacaccuc

SEQ ID NO: 152402 - RNA, 17 nt, Human herpesvirus 5
ccgggugcgcgacacgg

SEQ ID NO: 152403 - RNA, 19 nt, Human herpesvirus 5
ccggggacuuuaacggucu

SEQ ID NO: 152404 - RNA, 20 nt, Human herpesvirus 5
ccggucagucuauucucaac

SEQ ID NO: 152405 - RNA, 18 nt, Human herpesvirus 5
ccuagcgaucgcaugcuu

SEQ ID NO: 152406 - RNA, 20 nt, Human herpesvirus 5
ccuagcgaucgcaugcuucu

SEQ ID NO: 152407 - RNA, 12 nt, Human herpesvirus 5
ccuagcuacuuu

SEQ ID NO: 152408 - RNA, 15 nt, Human herpesvirus 5
ccuaguaauaccacc

SEQ ID NO: 152409 - RNA, 15 nt, Human herpesvirus 5
ccuaguaaugcauua

SEQ ID NO: 152410 - RNA, 18 nt, Human herpesvirus 5
ccuauagacucuauaggc

SEQ ID NO: 152411 - RNA, 17 nt, Human herpesvirus 5
ccucaaaaagcaggugg

SEQ ID NO: 152412 - RNA, 13 nt, Human herpesvirus 5
ccuaucaucacac

SEQ ID NO: 152413 - RNA, 17 nt, Human herpesvirus 5
ccuauugggaagggugu

SEQ ID NO: 152414 - RNA, 18 nt, Human herpesvirus 5
ccuaucuccgacagcgcg

SEQ ID NO: 152415 - RNA, 19 nt, Human herpesvirus 5
ccgaaaguagcguguuuga

SEQ ID NO: 152416 - RNA, 14 nt, Human herpesvirus 5
cccuuuuacuagua

SEQ ID NO: 152417 - RNA, 13 nt, Human herpesvirus 5
ccgacaaccugcu

SEQ ID NO: 152418 - RNA, 19 nt, Human herpesvirus 5
ccgacaaccugcugcacuu

SEQ ID NO: 152419 - RNA, 20 nt, Human herpesvirus 5
ccgacauggagacaguuucc

SEQ ID NO: 152420 - RNA, 15 nt, Human herpesvirus 5
ccggauggagucgga

SEQ ID NO: 152421 - RNA, 20 nt, Human herpesvirus 5
ccgggcgccgggacucuggu

SEQ ID NO: 152422 - RNA, 20 nt, Human herpesvirus 5
ccggacgcgccacgcucgcu

SEQ ID NO: 152423 - RNA, 19 nt, Human herpesvirus 5
ccgcuuuggcuacgguggu

SEQ ID NO: 152424 - RNA, 15 nt, Human herpesvirus 5
ccgcuacugucagug

SEQ ID NO: 152425 - RNA, 14 nt, Human herpesvirus 5
ccucuagagacaga

SEQ ID NO: 152426 - RNA, 15 nt, Human herpesvirus 5
ccucggaucuacuca

SEQ ID NO: 152427 - RNA, 16 nt, Human herpesvirus 5
ccucggaucuacucau

SEQ ID NO: 152428 - RNA, 13 nt, Human herpesvirus 5
ccucuauguuaca

SEQ ID NO: 152429 - RNA, 17 nt, Human herpesvirus 5
ccucgccuaagacuuug

SEQ ID NO: 152430 - RNA, 20 nt, Human herpesvirus 5
ccucagucugccuccuagua

SEQ ID NO: 152431 - RNA, 16 nt, Human herpesvirus 5
ccucagucaccgaguc

SEQ ID NO: 152432 - RNA, 21 nt, Human herpesvirus 5
ccucagucaccgaguccauca

SEQ ID NO: 152433 - RNA, 18 nt, Human herpesvirus 5
ccucagggaugaugauaa

SEQ ID NO: 152434 - RNA, 21 nt, Human herpesvirus 5
ccucagcgugcucagcuggug

SEQ ID NO: 152435 - RNA, 21 nt, Human herpesvirus 5
ccucacgagugcccuuaccua

SEQ ID NO: 152436 - RNA, 23 nt, Human herpesvirus 5
ccucccuaacuaucuacaacuua

SEQ ID NO: 152437 - RNA, 16 nt, Human herpesvirus 5
ccuccuaguaaugcau

SEQ ID NO: 152438 - RNA, 15 nt, Human herpesvirus 5
ccuccgacccgaaga

SEQ ID NO: 152439 - RNA, 19 nt, Human herpesvirus 5
ccugcacguccaugucgcg

SEQ ID NO: 152440 - RNA, 15 nt, Human herpesvirus 5
ccugcacgaccugcu

SEQ ID NO: 152441 - RNA, 22 nt, Human herpesvirus 5
ccucuuuccauucuuccguguc

SEQ ID NO: 152442 - RNA, 17 nt, Human herpesvirus 5
ccucuuugagcacaaac

SEQ ID NO: 152443 - RNA, 15 nt, Human herpesvirus 5
ccugagaacaugugg

SEQ ID NO: 152444 - RNA, 14 nt, Human herpesvirus 5
ccugcguaccaaca

SEQ ID NO: 152445 - RNA, 18 nt, Human herpesvirus 5
ccugcgaggaccguacac

SEQ ID NO: 152446 - RNA, 15 nt, Human herpesvirus 5
ccugcugacgcuguu

SEQ ID NO: 152447 - RNA, 14 nt, Human herpesvirus 5
ccugcugacuauca

SEQ ID NO: 152448 - RNA, 19 nt, Human herpesvirus 5
ccugcugacuaucaucggu

SEQ ID NO: 152449 - RNA, 11 nt, Human herpesvirus 5
ccugcugcacu

SEQ ID NO: 152450 - RNA, 13 nt, Human herpesvirus 5
ccugcugcuacgc

SEQ ID NO: 152451 - RNA, 24 nt, Human herpesvirus 5
ccuuuauccgcuuucacaccgauu

SEQ ID NO: 152452 - RNA, 17 nt, Human herpesvirus 5
ccuuuacggugcugcgu

SEQ ID NO: 152453 - RNA, 20 nt, Human herpesvirus 5
ccuuugcgcauccccugacc

SEQ ID NO: 152454 - RNA, 17 nt, Human herpesvirus 5
ccuuucuaggcuacucc

SEQ ID NO: 152455 - RNA, 14 nt, Human herpesvirus 5
ccuuguaagacaga

SEQ ID NO: 152456 - RNA, 14 nt, Human herpesvirus 5
cgaaaacaaccaca

SEQ ID NO: 152457 - RNA, 14 nt, Human herpesvirus 5
cgaaagacaaugaa

SEQ ID NO: 152458 - RNA, 14 nt, Human herpesvirus 5
cgaacgcuacuucc

SEQ ID NO: 152459 - RNA, 15 nt, Human herpesvirus 5
cgaacgcuacuuccc

SEQ ID NO: 152460 - RNA, 22 nt, Human herpesvirus 5
ccuucuguauccauacuuacca

SEQ ID NO: 152461 - RNA, 22 nt, Human herpesvirus 5
ccuucuguggaggagacuaccu

SEQ ID NO: 152462 - RNA, 18 nt, Human herpesvirus 5
ccuuaugagcgucugcgc

SEQ ID NO: 152463 - RNA, 18 nt, Human herpesvirus 5
ccuguaaauaaaaagcug

SEQ ID NO: 152464 - RNA, 19 nt, Human herpesvirus 5
ccugucagaaggcagugac

SEQ ID NO: 152465 - RNA, 19 nt, Human herpesvirus 5
ccuggugcaaaugcagcga

SEQ ID NO: 152466 - RNA, 13 nt, Human herpesvirus 5
ccuguggcaccgc

SEQ ID NO: 152467 - RNA, 14 nt, Human herpesvirus 5
ccuguuccugucaa

SEQ ID NO: 152468 - RNA, 17 nt, Human herpesvirus 5
ccuguugaauaacacca

SEQ ID NO: 152469 - RNA, 20 nt, Human herpesvirus 5
ccugugcaccgucaucggca

SEQ ID NO: 152470 - RNA, 15 nt, Human herpesvirus 5
cauuacuaaacaaaa

SEQ ID NO: 152471 - RNA, 14 nt, Human herpesvirus 5
cauuaccuuucauc

SEQ ID NO: 152472 - RNA, 15 nt, Human herpesvirus 5
cauuccgcaacgucu

SEQ ID NO: 152473 - RNA, 21 nt, Human herpesvirus 5
cauugagaaagcuaacauucc

SEQ ID NO: 152474 - RNA, 19 nt, Human herpesvirus 5
cauucugguaccugcuaaa

SEQ ID NO: 152475 - RNA, 16 nt, Human herpesvirus 5
cauuccccaccuuccc

SEQ ID NO: 152476 - RNA, 15 nt, Human herpesvirus 5
cauucaauacaucau

SEQ ID NO: 152477 - RNA, 18 nt, Human herpesvirus 5
ccaaacccguuacaagua

SEQ ID NO: 152478 - RNA, 23 nt, Human herpesvirus 5
ccaaaacgucaggaaucugggag

SEQ ID NO: 152479 - RNA, 16 nt, Human herpesvirus 5
ccaaaaauccagacau

SEQ ID NO: 152480 - RNA, 22 nt, Human herpesvirus 5
ccaaaagugauuuuugggcaua

SEQ ID NO: 152481 - RNA, 23 nt, Human herpesvirus 5
ccaacuucacuucaaacaucagc

SEQ ID NO: 152482 - RNA, 23 nt, Human herpesvirus 5
ccaccgccgcuuucucaucucag

SEQ ID NO: 152483 - RNA, 22 nt, Human herpesvirus 5
ccacccacgacggcuccaagaa

SEQ ID NO: 152484 - RNA, 16 nt, Human herpesvirus 5
ccacccgagacuucuc

SEQ ID NO: 152485 - RNA, 18 nt, Human herpesvirus 5
ccacccgccggaacgcug

SEQ ID NO: 152486 - RNA, 21 nt, Human herpesvirus 5
ccacccugaguuccgucagca

SEQ ID NO: 152487 - RNA, 14 nt, Human herpesvirus 5
ccaccaugaacuga

SEQ ID NO: 152488 - RNA, 14 nt, Human herpesvirus 5
ccaauaacaugucu

SEQ ID NO: 152489 - RNA, 13 nt, Human herpesvirus 5
ccaaguucagcag

SEQ ID NO: 152490 - RNA, 20 nt, Human herpesvirus 5
ccaaggaucgcgagccccau

SEQ ID NO: 152491 - RNA, 22 nt, Human herpesvirus 5
ccaagcuuuagccaggugacca

SEQ ID NO: 152492 - RNA, 21 nt, Human herpesvirus 5
ccacgcugacaacccacucuu

SEQ ID NO: 152493 - RNA, 20 nt, Human herpesvirus 5
ccacgguuugaccacacucg

SEQ ID NO: 152494 - RNA, 18 nt, Human herpesvirus 5
ccacgucaccgugcccca

SEQ ID NO: 152495 - RNA, 21 nt, Human herpesvirus 5
ccacgucacuauuguauacuc

SEQ ID NO: 152496 - RNA, 14 nt, Human herpesvirus 5
ccaccguaccugca

SEQ ID NO: 152497 - RNA, 22 nt, Human herpesvirus 5
ccaccgucgccgucacugccac

SEQ ID NO: 152498 - RNA, 14 nt, Human herpesvirus 5
ccacgacacggugc

SEQ ID NO: 152499 - RNA, 17 nt, Human herpesvirus 5
ccagcuacagccacgac

SEQ ID NO: 152500 - RNA, 23 nt, Human herpesvirus 5
ccaggacaaaaaguacacuggua

SEQ ID NO: 152501 - RNA, 21 nt, Human herpesvirus 5
ccagacauccaauuacaccga

SEQ ID NO: 152502 - RNA, 22 nt, Human herpesvirus 5
ccagacauccaauuacaccgau

SEQ ID NO: 152503 - RNA, 13 nt, Human herpesvirus 5
ccacuaguacuga

SEQ ID NO: 152504 - RNA, 15 nt, Human herpesvirus 5
ccacuauggcgugaa

SEQ ID NO: 152505 - RNA, 21 nt, Human herpesvirus 5
ccacuacagaauugauuucaa

SEQ ID NO: 152506 - RNA, 22 nt, Human herpesvirus 5
ccacuuccgugauagccacgac

SEQ ID NO: 152507 - RNA, 20 nt, Human herpesvirus 5
caguguccggcaagaugcuc

SEQ ID NO: 152508 - RNA, 16 nt, Human herpesvirus 5
caguguauuggcauau

SEQ ID NO: 152509 - RNA, 23 nt, Human herpesvirus 5
cauaaacuguaccguccaggggu

SEQ ID NO: 152510 - RNA, 15 nt, Human herpesvirus 5
cauaaagaaugcaac

SEQ ID NO: 152511 - RNA, 23 nt, Human herpesvirus 5
cauaaaggguggcgaggugugag

SEQ ID NO: 152512 - RNA, 13 nt, Human herpesvirus 5
cauagaguuacau

SEQ ID NO: 152513 - RNA, 16 nt, Human herpesvirus 5
cauagaguuacaugca

SEQ ID NO: 152514 - RNA, 18 nt, Human herpesvirus 5
cauacuuaccaccgugac

SEQ ID NO: 152515 - RNA, 15 nt, Human herpesvirus 5
cauagccucuacaaa

SEQ ID NO: 152516 - RNA, 23 nt, Human herpesvirus 5
cauagccucuacaaacuagcauu

SEQ ID NO: 152517 - RNA, 16 nt, Human herpesvirus 5
cauagcaguauucuau

SEQ ID NO: 152518 - RNA, 13 nt, Human herpesvirus 5
cauaagaagccaa

SEQ ID NO: 152519 - RNA, 16 nt, Human herpesvirus 5
cauaauaaagcuuucu

SEQ ID NO: 152520 - RNA, 15 nt, Human herpesvirus 5
cagcacauuguaugc

SEQ ID NO: 152521 - RNA, 13 nt, Human herpesvirus 5
cagcaacaccaua

SEQ ID NO: 152522 - RNA, 20 nt, Human herpesvirus 5
cagcaaccaccguuucuaca

SEQ ID NO: 152523 - RNA, 18 nt, Human herpesvirus 5
cagauuuguucgggguga

SEQ ID NO: 152524 - RNA, 16 nt, Human herpesvirus 5
caguggaccgucaauu

SEQ ID NO: 152525 - RNA, 20 nt, Human herpesvirus 5
cagcaucgauuucuugccaa

SEQ ID NO: 152526 - RNA, 21 nt, Human herpesvirus 5
cagcaucgauuucuugccaag

SEQ ID NO: 152527 - RNA, 16 nt, Human herpesvirus 5
cagcaugaacaccaga

SEQ ID NO: 152528 - RNA, 17 nt, Human herpesvirus 5
cagcaugaacaccagau

SEQ ID NO: 152529 - RNA, 19 nt, Human herpesvirus 5
cagcaguaugacgugcgau

SEQ ID NO: 152530 - RNA, 20 nt, Human herpesvirus 5
cagcaguaugacgugcgaug

SEQ ID NO: 152531 - RNA, 17 nt, Human herpesvirus 5
cagcagcuggugcauca

SEQ ID NO: 152532 - RNA, 23 nt, Human herpesvirus 5
cagcaggcuuugacggugaugcg

SEQ ID NO: 152533 - RNA, 15 nt, Human herpesvirus 5
caucgggucgucuca

SEQ ID NO: 152534 - RNA, 17 nt, Human herpesvirus 5
caucgggucgucucacc

SEQ ID NO: 152535 - RNA, 14 nt, Human herpesvirus 5
caucacccaacacu

SEQ ID NO: 152536 - RNA, 17 nt, Human herpesvirus 5
caucacgguacacagau

SEQ ID NO: 152537 - RNA, 20 nt, Human herpesvirus 5
caucgucacaccuaucauaa

SEQ ID NO: 152538 - RNA, 19 nt, Human herpesvirus 5
caucuacgugucugggcca

SEQ ID NO: 152539 - RNA, 13 nt, Human herpesvirus 5
caucuagacucac

SEQ ID NO: 152540 - RNA, 18 nt, Human herpesvirus 5
caucuagacucacuuuau

SEQ ID NO: 152541 - RNA, 18 nt, Human herpesvirus 5
caucaagcacuaccagcu

SEQ ID NO: 152542 - RNA, 15 nt, Human herpesvirus 5
caucaacauacagua

SEQ ID NO: 152543 - RNA, 20 nt, Human herpesvirus 5
caucaacauacaguacaaca

SEQ ID NO: 152544 - RNA, 14 nt, Human herpesvirus 5
cauauuaguauacu

SEQ ID NO: 152545 - RNA, 17 nt, Human herpesvirus 5
caugaugaaugucauca

SEQ ID NO: 152546 - RNA, 17 nt, Human herpesvirus 5
caugauuagcaauauua

SEQ ID NO: 152547 - RNA, 20 nt, Human herpesvirus 5
caugagaauuagagcauuaa

SEQ ID NO: 152548 - RNA, 15 nt, Human herpesvirus 5
caugagauccaaaau

SEQ ID NO: 152549 - RNA, 19 nt, Human herpesvirus 5
caugucuuacaaaucacag

SEQ ID NO: 152550 - RNA, 13 nt, Human herpesvirus 5
caugucgucucau

SEQ ID NO: 152551 - RNA, 18 nt, Human herpesvirus 5
caugucgucucaucacau

SEQ ID NO: 152552 - RNA, 23 nt, Human herpesvirus 5
cauguaggucucgggguccucgu

SEQ ID NO: 152553 - RNA, 13 nt, Human herpesvirus 5
cauguuucucacg

SEQ ID NO: 152554 - RNA, 22 nt, Human herpesvirus 5
cauguuucucacgcgacgcacu

SEQ ID NO: 152555 - RNA, 18 nt, Human herpesvirus 5
cauguucuaugccgucuu

SEQ ID NO: 152556 - RNA, 17 nt, Human herpesvirus 5
caugugcagcuggugau

SEQ ID NO: 152557 - RNA, 15 nt, Human herpesvirus 5
cauguggaaaucacc

SEQ ID NO: 152558 - RNA, 17 nt, Human herpesvirus 5
caugugcuuaagcagaa

SEQ ID NO: 152559 - RNA, 18 nt, Human herpesvirus 5
caugugcuuaagcagaaa

SEQ ID NO: 152560 - RNA, 17 nt, Human herpesvirus 5
caaauuuuaucuuggau

SEQ ID NO: 152561 - RNA, 19 nt, Human herpesvirus 5
caaauuuuaucuuggauaa

SEQ ID NO: 152562 - RNA, 11 nt, Human herpesvirus 5
caaaugcagcg

SEQ ID NO: 152563 - RNA, 11 nt, Human herpesvirus 5
caacaaugacu

SEQ ID NO: 152564 - RNA, 17 nt, Human herpesvirus 5
caacaaauaccaacacu

SEQ ID NO: 152565 - RNA, 17 nt, Human herpesvirus 5
caaaccuguuccuguca

SEQ ID NO: 152566 - RNA, 22 nt, Human herpesvirus 5
caaacgggaccaucgugcucau

SEQ ID NO: 152567 - RNA, 13 nt, Human herpesvirus 5
caaaucacagucu

SEQ ID NO: 152568 - RNA, 15 nt, Human herpesvirus 5
caaaacgaccagaau

SEQ ID NO: 152569 - RNA, 13 nt, Human herpesvirus 5
caaaaacuugucc

SEQ ID NO: 152570 - RNA, 13 nt, Human herpesvirus 5
caaacaaugacac

SEQ ID NO: 152571 - RNA, 16 nt, Human herpesvirus 5
caaacaacaccacggc

SEQ ID NO: 152572 - RNA, 20 nt, Human herpesvirus 5
caaacagcacauuagacaca

SEQ ID NO: 152573 - RNA, 12 nt, Human herpesvirus 5
auuguauacucu

SEQ ID NO: 152574 - RNA, 23 nt, Human herpesvirus 5
auuuaccguaaagagagucacac

SEQ ID NO: 152575 - RNA, 17 nt, Human herpesvirus 5
auuuacgaggucugcau

SEQ ID NO: 152576 - RNA, 18 nt, Human herpesvirus 5
auuuacgaggucugcaug

SEQ ID NO: 152577 - RNA, 19 nt, Human herpesvirus 5
auuuagaaauaaauacagg

SEQ ID NO: 152578 - RNA, 14 nt, Human herpesvirus 5
auuuguauuuacuu

SEQ ID NO: 152579 - RNA, 12 nt, Human herpesvirus 5
caaaaacaguau

SEQ ID NO: 152580 - RNA, 15 nt, Human herpesvirus 5
auuuauggaaaauau

SEQ ID NO: 152581 - RNA, 14 nt, Human herpesvirus 5
auuuauucuugcua

SEQ ID NO: 152582 - RNA, 19 nt, Human herpesvirus 5
auuuaucaauacaaugaca

SEQ ID NO: 152583 - RNA, 15 nt, Human herpesvirus 5
auuaggcaacuauca

SEQ ID NO: 152584 - RNA, 21 nt, Human herpesvirus 5
auuagccccacaugcugcuua

SEQ ID NO: 152585 - RNA, 19 nt, Human herpesvirus 5
auuacugggacgcgugcuc

SEQ ID NO: 152586 - RNA, 16 nt, Human herpesvirus 5
auuauacccaccaacu

SEQ ID NO: 152587 - RNA, 17 nt, Human herpesvirus 5
auuccccugccuacguc

SEQ ID NO: 152588 - RNA, 12 nt, Human herpesvirus 5
auuccgcacaac

SEQ ID NO: 152589 - RNA, 15 nt, Human herpesvirus 5
auuccucuauugcca

SEQ ID NO: 152590 - RNA, 14 nt, Human herpesvirus 5
auucguaaccagca

SEQ ID NO: 152591 - RNA, 19 nt, Human herpesvirus 5
auucguaaccagcauuuga

SEQ ID NO: 152592 - RNA, 14 nt, Human herpesvirus 5
auucucuauacaca

SEQ ID NO: 152593 - RNA, 15 nt, Human herpesvirus 5
auucucuauacacau

SEQ ID NO: 152594 - RNA, 16 nt, Human herpesvirus 5
auucucuauacacaua

SEQ ID NO: 152595 - RNA, 22 nt, Human herpesvirus 5
auucgucugacgcugcuccuau

SEQ ID NO: 152596 - RNA, 12 nt, Human herpesvirus 5
auucugauuuca

SEQ ID NO: 152597 - RNA, 16 nt, Human herpesvirus 5
auugcgggcccugcug

SEQ ID NO: 152598 - RNA, 16 nt, Human herpesvirus 5
auguuauuauacugaa

SEQ ID NO: 152599 - RNA, 16 nt, Human herpesvirus 5
auguuacaaaacaacg

SEQ ID NO: 152600 - RNA, 16 nt, Human herpesvirus 5
auguuacacauuacua

SEQ ID NO: 152601 - RNA, 13 nt, Human herpesvirus 5
augugugacuaaa

SEQ ID NO: 152602 - RNA, 14 nt, Human herpesvirus 5
auuacaguaacgca

SEQ ID NO: 152603 - RNA, 22 nt, Human herpesvirus 5
auuaauuuaacaagucacuaua

SEQ ID NO: 152604 - RNA, 12 nt, Human herpesvirus 5
augugguucugg

SEQ ID NO: 152605 - RNA, 15 nt, Human herpesvirus 5
auguggacgauacua

SEQ ID NO: 152606 - RNA, 18 nt, Human herpesvirus 5
auguggacgauacuaaua

SEQ ID NO: 152607 - RNA, 17 nt, Human herpesvirus 5
augucuuacaaaucaca

SEQ ID NO: 152608 - RNA, 18 nt, Human herpesvirus 5
augucguaguacaauaca

SEQ ID NO: 152609 - RNA, 17 nt, Human herpesvirus 5
augucgcccagaaagaa

SEQ ID NO: 152610 - RNA, 14 nt, Human herpesvirus 5
augucgaucuccau

SEQ ID NO: 152611 - RNA, 14 nt, Human herpesvirus 5
augucaucaucacg

SEQ ID NO: 152612 - RNA, 18 nt, Human herpesvirus 5
auguccggccgucgcaag

SEQ ID NO: 152613 - RNA, 15 nt, Human herpesvirus 5
auguccaugucucca

SEQ ID NO: 152614 - RNA, 15 nt, Human herpesvirus 5
augguccgucaugac

SEQ ID NO: 152615 - RNA, 19 nt, Human herpesvirus 5
augguauaaagauucacuu

SEQ ID NO: 152616 - RNA, 14 nt, Human herpesvirus 5
aucuguacugcaag

SEQ ID NO: 152617 - RNA, 10 nt, Human herpesvirus 5
aucugucacc

SEQ ID NO: 152618 - RNA, 13 nt, Human herpesvirus 5
aucugucaucacg

SEQ ID NO: 152619 - RNA, 18 nt, Human herpesvirus 5
aucugccucuuccucgug

SEQ ID NO: 152620 - RNA, 19 nt, Human herpesvirus 5
caauguuacacauuacuac

SEQ ID NO: 152621 - RNA, 12 nt, Human herpesvirus 5
caaugcaacacu

SEQ ID NO: 152622 - RNA, 21 nt, Human herpesvirus 5
caaugguggaaaccagauaca

SEQ ID NO: 152623 - RNA, 19 nt, Human herpesvirus 5
caaugucccuguaguacua

SEQ ID NO: 152624 - RNA, 16 nt, Human herpesvirus 5
caaugucguaguacaa

SEQ ID NO: 152625 - RNA, 22 nt, Human herpesvirus 5
cacaauggaagccauacuucuc

SEQ ID NO: 152626 - RNA, 18 nt, Human herpesvirus 5
cacacaucugucaccuca

SEQ ID NO: 152627 - RNA, 19 nt, Human herpesvirus 5
cacacaucugucaccucac

SEQ ID NO: 152628 - RNA, 19 nt, Human herpesvirus 5
cacacagauuuucugcgug

SEQ ID NO: 152629 - RNA, 18 nt, Human herpesvirus 5
cacagggaauaauaauac

SEQ ID NO: 152630 - RNA, 17 nt, Human herpesvirus 5
cacacggagaaacaccc

SEQ ID NO: 152631 - RNA, 20 nt, Human herpesvirus 5
cacacgcuaagagcuuugac

SEQ ID NO: 152632 - RNA, 16 nt, Human herpesvirus 5
cacccgggggugaaaa

SEQ ID NO: 152633 - RNA, 16 nt, Human herpesvirus 5
cacccgucaugguaca

SEQ ID NO: 152634 - RNA, 16 nt, Human herpesvirus 5
cacccaguagacagac

SEQ ID NO: 152635 - RNA, 21 nt, Human herpesvirus 5
caccaggaacacgguggcuuu

SEQ ID NO: 152636 - RNA, 17 nt, Human herpesvirus 5
caccauccgaagcuaca

SEQ ID NO: 152637 - RNA, 15 nt, Human herpesvirus 5
caccaucaccuggcg

SEQ ID NO: 152638 - RNA, 21 nt, Human herpesvirus 5
caccaucaggugacauccucg

SEQ ID NO: 152639 - RNA, 18 nt, Human herpesvirus 5
caccaugcagaccuacag

SEQ ID NO: 152640 - RNA, 15 nt, Human herpesvirus 5
caccaugcaucccac

SEQ ID NO: 152641 - RNA, 19 nt, Human herpesvirus 5
caccaugcaucccaccacg

SEQ ID NO: 152642 - RNA, 18 nt, Human herpesvirus 5
caccagaugcucccggcg

SEQ ID NO: 152643 - RNA, 15 nt, Human herpesvirus 5
caccacgguuuacca

SEQ ID NO: 152644 - RNA, 20 nt, Human herpesvirus 5
caccacgucgauucccaucu

SEQ ID NO: 152645 - RNA, 20 nt, Human herpesvirus 5
cacaucaacauacaguacaa

SEQ ID NO: 152646 - RNA, 15 nt, Human herpesvirus 5
cacaucaacucuauc

SEQ ID NO: 152647 - RNA, 21 nt, Human herpesvirus 5
cacaucgcacacagacuuuau

SEQ ID NO: 152648 - RNA, 23 nt, Human herpesvirus 5
caccacggcuugcaaaacuacua

SEQ ID NO: 152649 - RNA, 16 nt, Human herpesvirus 5
caccacgguacaaacc

SEQ ID NO: 152650 - RNA, 18 nt, Human herpesvirus 5
cacauaaacaaacgggac

SEQ ID NO: 152651 - RNA, 21 nt, Human herpesvirus 5
cacauacgggacuuacaucug

SEQ ID NO: 152652 - RNA, 23 nt, Human herpesvirus 5
cacagguagguggccaugaugac

SEQ ID NO: 152653 - RNA, 19 nt, Human herpesvirus 5
cacagucuccuucucauca

SEQ ID NO: 152654 - RNA, 22 nt, Human herpesvirus 5
caaggucaacuacagcaaugac

SEQ ID NO: 152655 - RNA, 12 nt, Human herpesvirus 5
caaggugcugca

SEQ ID NO: 152656 - RNA, 19 nt, Human herpesvirus 5
caagggucacggugccaug

SEQ ID NO: 152657 - RNA, 21 nt, Human herpesvirus 5
caauaaagacgucaaugacac

SEQ ID NO: 152658 - RNA, 20 nt, Human herpesvirus 5
caauaaagauaaucugccaa

SEQ ID NO: 152659 - RNA, 12 nt, Human herpesvirus 5
caauacaaugac

SEQ ID NO: 152660 - RNA, 15 nt, Human herpesvirus 5
caauaaguaccucua

SEQ ID NO: 152661 - RNA, 14 nt, Human herpesvirus 5
caauaaucuccuga

SEQ ID NO: 152662 - RNA, 15 nt, Human herpesvirus 5
caauaaucuccugag

SEQ ID NO: 152663 - RNA, 13 nt, Human herpesvirus 5
caauacaucauau

SEQ ID NO: 152664 - RNA, 17 nt, Human herpesvirus 5
caauacugcauccauca

SEQ ID NO: 152665 - RNA, 19 nt, Human herpesvirus 5
caauacugcauccaucaca

SEQ ID NO: 152666 - RNA, 22 nt, Human herpesvirus 5
caauacugcauccaucacauca

SEQ ID NO: 152667 - RNA, 21 nt, Human herpesvirus 5
caaucugacguccagcaccac

SEQ ID NO: 152668 - RNA, 18 nt, Human herpesvirus 5
caacacguagugagcuuu

SEQ ID NO: 152669 - RNA, 15 nt, Human herpesvirus 5
caacacuaccaagua

SEQ ID NO: 152670 - RNA, 13 nt, Human herpesvirus 5
caagcacuaccag

SEQ ID NO: 152671 - RNA, 12 nt, Human herpesvirus 5
caagcaugccac

SEQ ID NO: 152672 - RNA, 14 nt, Human herpesvirus 5
caagcgcaacaucg

SEQ ID NO: 152673 - RNA, 17 nt, Human herpesvirus 5
caagcgccgucacuucc

SEQ ID NO: 152674 - RNA, 22 nt, Human herpesvirus 5
caaggcuagacgaaauucacaa

SEQ ID NO: 152675 - RNA, 19 nt, Human herpesvirus 5
cagaaagaggggcaccugu

SEQ ID NO: 152676 - RNA, 21 nt, Human herpesvirus 5
cagaaagaggggcaccuguau

SEQ ID NO: 152677 - RNA, 13 nt, Human herpesvirus 5
cagaaagcugcaa

SEQ ID NO: 152678 - RNA, 14 nt, Human herpesvirus 5
cagaaagcugcaau

SEQ ID NO: 152679 - RNA, 17 nt, Human herpesvirus 5
cagaaagcugcaaucaa

SEQ ID NO: 152680 - RNA, 15 nt, Human herpesvirus 5
cagacuuggagacau

SEQ ID NO: 152681 - RNA, 15 nt, Human herpesvirus 5
cacuuucgaccacaa

SEQ ID NO: 152682 - RNA, 20 nt, Human herpesvirus 5
cacuuuacauaaaaccaccg

SEQ ID NO: 152683 - RNA, 17 nt, Human herpesvirus 5
cacuuuuuuuacuagua

SEQ ID NO: 152684 - RNA, 18 nt, Human herpesvirus 5
cacuuuuuuuacuaguau

SEQ ID NO: 152685 - RNA, 18 nt, Human herpesvirus 5
cagaaaaucuguguguuc

SEQ ID NO: 152686 - RNA, 23 nt, Human herpesvirus 5
cagaggacccugauaaugggaaa

SEQ ID NO: 152687 - RNA, 19 nt, Human herpesvirus 5
cagaggacggaggaacuuu

SEQ ID NO: 152688 - RNA, 20 nt, Human herpesvirus 5
cagaggacggaggaacuuuc

SEQ ID NO: 152689 - RNA, 20 nt, Human herpesvirus 5
cagagccacguugagauuca

SEQ ID NO: 152690 - RNA, 18 nt, Human herpesvirus 5
cacugguauaaccaguca

SEQ ID NO: 152691 - RNA, 19 nt, Human herpesvirus 5
cacugguauaaccagucau

SEQ ID NO: 152692 - RNA, 19 nt, Human herpesvirus 5
cacugccaccgacauggag

SEQ ID NO: 152693 - RNA, 17 nt, Human herpesvirus 5
cacucuuggcacaugcc

SEQ ID NO: 152694 - RNA, 18 nt, Human herpesvirus 5
cacucuggcccugcugua

SEQ ID NO: 152695 - RNA, 16 nt, Human herpesvirus 5
cacuacccucaaguac

SEQ ID NO: 152696 - RNA, 13 nt, Human herpesvirus 5
caccuaccaucug

SEQ ID NO: 152697 - RNA, 19 nt, Human herpesvirus 5
caccuaccaucugauccag

SEQ ID NO: 152698 - RNA, 18 nt, Human herpesvirus 5
caccgucgccgucacugc

SEQ ID NO: 152699 - RNA, 21 nt, Human herpesvirus 5
caccgucgccgucacugccac

SEQ ID NO: 152700 - RNA, 16 nt, Human herpesvirus 5
caccgucgcugugcaa

SEQ ID NO: 152701 - RNA, 22 nt, Human herpesvirus 5
caccggcagcacaccugccucg

SEQ ID NO: 152702 - RNA, 15 nt, Human herpesvirus 5
caccgauauccaaua

SEQ ID NO: 152703 - RNA, 13 nt, Human herpesvirus 5
caccgacacagca

SEQ ID NO: 152704 - RNA, 20 nt, Human herpesvirus 5
caccgagggcagaacuggug

SEQ ID NO: 152705 - RNA, 18 nt, Human herpesvirus 5
caccgcggcaccuaccau

SEQ ID NO: 152706 - RNA, 19 nt, Human herpesvirus 5
caccgcaguugcugccuua

SEQ ID NO: 152707 - RNA, 22 nt, Human herpesvirus 5
caccuucccucuagagacagac

SEQ ID NO: 152708 - RNA, 14 nt, Human herpesvirus 5
caccuuuaagguac

SEQ ID NO: 152709 - RNA, 14 nt, Human herpesvirus 5
cacgaaaggcaccg

SEQ ID NO: 152710 - RNA, 14 nt, Human herpesvirus 5
cacgaccacuaauc

SEQ ID NO: 152711 - RNA, 13 nt, Human herpesvirus 5
cacgacaaacacu

SEQ ID NO: 152712 - RNA, 23 nt, Human herpesvirus 5
cacgagcaucgcaacaacagcaa

SEQ ID NO: 152713 - RNA, 16 nt, Human herpesvirus 5
cacgaguacccauuac

SEQ ID NO: 152714 - RNA, 12 nt, Human herpesvirus 5
cacgagugcccu

SEQ ID NO: 152715 - RNA, 21 nt, Human herpesvirus 5
cacgacggcuccaagaaaaac

SEQ ID NO: 152716 - RNA, 21 nt, Human herpesvirus 5
cacggggauuuucgaugauac

SEQ ID NO: 152717 - RNA, 19 nt, Human herpesvirus 5
cacggucauguuucucacg

SEQ ID NO: 152718 - RNA, 15 nt, Human herpesvirus 5
cacguacaaauagca

SEQ ID NO: 152719 - RNA, 18 nt, Human herpesvirus 5
cacguagccgaugcugau

SEQ ID NO: 152720 - RNA, 22 nt, Human herpesvirus 5
cacgucacacgcuaagagcuuu

SEQ ID NO: 152721 - RNA, 12 nt, Human herpesvirus 5
cacuaccagcug

SEQ ID NO: 152722 - RNA, 22 nt, Human herpesvirus 5
cacuaauaccgguuguaaucau

SEQ ID NO: 152723 - RNA, 17 nt, Human herpesvirus 5
cacguuacaucauacaa

SEQ ID NO: 152724 - RNA, 15 nt, Human herpesvirus 5
cacguccacccaucc

SEQ ID NO: 152725 - RNA, 16 nt, Human herpesvirus 5
cacguccagaucgucu

SEQ ID NO: 152726 - RNA, 14 nt, Human herpesvirus 5
cacgccugugaaac

SEQ ID NO: 152727 - RNA, 13 nt, Human herpesvirus 5
cacgccgccguga

SEQ ID NO: 152728 - RNA, 17 nt, Human herpesvirus 5
cacgcgcucuucacaca

SEQ ID NO: 152729 - RNA, 13 nt, Human herpesvirus 5
cacgcaucugcaa

SEQ ID NO: 152730 - RNA, 16 nt, Human herpesvirus 5
cacgcaggcaagccaa

SEQ ID NO: 152731 - RNA, 22 nt, Human herpesvirus 5
cacgcagcagagccaccaggug

SEQ ID NO: 152732 - RNA, 22 nt, Human herpesvirus 5
cacggcugcugaucgccgucac

SEQ ID NO: 152733 - RNA, 22 nt, Human herpesvirus 5
cacgcuuaaagcucguguuguc

SEQ ID NO: 152734 - RNA, 21 nt, Human herpesvirus 5
cacggaccgcaacgugcugcu

SEQ ID NO: 152735 - RNA, 15 nt, Human herpesvirus 5
cacggccagcuccac

SEQ ID NO: 152736 - RNA, 20 nt, Human herpesvirus 5
cacggaaaagcaguggcagc

SEQ ID NO: 152737 - RNA, 20 nt, Human herpesvirus 5
cacgcugguuaccaggcuua

SEQ ID NO: 152738 - RNA, 21 nt, Human herpesvirus 5
agaggaguggcugcuguguug

SEQ ID NO: 152739 - RNA, 16 nt, Human herpesvirus 5
agagggugaaggcaaa

SEQ ID NO: 152740 - RNA, 21 nt, Human herpesvirus 5
agccccaagcgguacggacua

SEQ ID NO: 152741 - RNA, 21 nt, Human herpesvirus 5
agagguguagcgggcugucac

SEQ ID NO: 152742 - RNA, 22 nt, Human herpesvirus 5
agccgacaaccugcugcacuuc

SEQ ID NO: 152743 - RNA, 12 nt, Human herpesvirus 5
agccgaugcuga

SEQ ID NO: 152744 - RNA, 14 nt, Human herpesvirus 5
agccgaugcugaug

SEQ ID NO: 152745 - RNA, 22 nt, Human herpesvirus 5
agccccagagcgauauguuuca

SEQ ID NO: 152746 - RNA, 12 nt, Human herpesvirus 5
agcgagaacuaa

SEQ ID NO: 152747 - RNA, 19 nt, Human herpesvirus 5
agccuuaggaacagggaag

SEQ ID NO: 152748 - RNA, 21 nt, Human herpesvirus 5
agccuucccuuguaagacaga

SEQ ID NO: 152749 - RNA, 12 nt, Human herpesvirus 5
agcucacuguuu

SEQ ID NO: 152750 - RNA, 19 nt, Human herpesvirus 5
agcuccguucgcgcagcgc

SEQ ID NO: 152751 - RNA, 14 nt, Human herpesvirus 5
agcucccaucuucu

SEQ ID NO: 152752 - RNA, 15 nt, Human herpesvirus 5
agcucaugccucuac

SEQ ID NO: 152753 - RNA, 20 nt, Human herpesvirus 5
agcucaugccucuacaucac

SEQ ID NO: 152754 - RNA, 19 nt, Human herpesvirus 5
agcucuuuuccagcgugcg

SEQ ID NO: 152755 - RNA, 23 nt, Human herpesvirus 5
agcucuugcgaggcuuugaugua

SEQ ID NO: 152756 - RNA, 13 nt, Human herpesvirus 5
agcuacagccacg

SEQ ID NO: 152757 - RNA, 19 nt, Human herpesvirus 5
agcuaccgccgcaacagcg

SEQ ID NO: 152758 - RNA, 16 nt, Human herpesvirus 5
agcuacgcgaccagcu

SEQ ID NO: 152759 - RNA, 13 nt, Human herpesvirus 5
agcuagugcagcc

SEQ ID NO: 152760 - RNA, 16 nt, Human herpesvirus 5
agcgccgcgacggggu

SEQ ID NO: 152761 - RNA, 15 nt, Human herpesvirus 5
agcgcgaccgccuca

SEQ ID NO: 152762 - RNA, 13 nt, Human herpesvirus 5
aggacgugaugcg

SEQ ID NO: 152763 - RNA, 19 nt, Human herpesvirus 5
aggacgacgacuacuauua

SEQ ID NO: 152764 - RNA, 18 nt, Human herpesvirus 5
agcugcacaccaguauug

SEQ ID NO: 152765 - RNA, 14 nt, Human herpesvirus 5
agcuggacagugag

SEQ ID NO: 152766 - RNA, 18 nt, Human herpesvirus 5
agcugggcgaccgucucu

SEQ ID NO: 152767 - RNA, 22 nt, Human herpesvirus 5
aggccacgcggcguauccucaa

SEQ ID NO: 152768 - RNA, 14 nt, Human herpesvirus 5
aggccacgugcaac

SEQ ID NO: 152769 - RNA, 17 nt, Human herpesvirus 5
aggcugaacgagugugc

SEQ ID NO: 152770 - RNA, 23 nt, Human herpesvirus 5
aggcucgucgugggcuacuuuga

SEQ ID NO: 152771 - RNA, 20 nt, Human herpesvirus 5
aggcacauacgggacuuaca

SEQ ID NO: 152772 - RNA, 17 nt, Human herpesvirus 5
aggcacuguuugagcau

SEQ ID NO: 152773 - RNA, 14 nt, Human herpesvirus 5
aggcacgucauuga

SEQ ID NO: 152774 - RNA, 20 nt, Human herpesvirus 5
aggguguugugcgugaugau

SEQ ID NO: 152775 - RNA, 16 nt, Human herpesvirus 5
aggguggugacuuaca

SEQ ID NO: 152776 - RNA, 20 nt, Human herpesvirus 5
agguacgaaccagcugguac

SEQ ID NO: 152777 - RNA, 13 nt, Human herpesvirus 5
agggcuccgucug

SEQ ID NO: 152778 - RNA, 22 nt, Human herpesvirus 5
aggggcaccuguauacugugaa

SEQ ID NO: 152779 - RNA, 17 nt, Human herpesvirus 5
agggucacggugccaug

SEQ ID NO: 152780 - RNA, 14 nt, Human herpesvirus 5
aggguaaaaaccac

SEQ ID NO: 152781 - RNA, 15 nt, Human herpesvirus 5
aggguaaaaaccacg

SEQ ID NO: 152782 - RNA, 22 nt, Human herpesvirus 5
aggguaacagccuucccuugua

SEQ ID NO: 152783 - RNA, 23 nt, Human herpesvirus 5
agggcuguucgaugugguucugg

SEQ ID NO: 152784 - RNA, 21 nt, Human herpesvirus 5
aggggaaaaggaauagcaaga

SEQ ID NO: 152785 - RNA, 19 nt, Human herpesvirus 5
agggcagaacuggugcuau

SEQ ID NO: 152786 - RNA, 18 nt, Human herpesvirus 5
agggagacuuagaaucuc

SEQ ID NO: 152787 - RNA, 22 nt, Human herpesvirus 5
aggcuuaacacuagccaucaca

SEQ ID NO: 152788 - RNA, 23 nt, Human herpesvirus 5
agguccuuuggguccagccagca

SEQ ID NO: 152789 - RNA, 19 nt, Human herpesvirus 5
aggucagcgugucugauac

SEQ ID NO: 152790 - RNA, 13 nt, Human herpesvirus 5
aggucacaggugc

SEQ ID NO: 152791 - RNA, 20 nt, Human herpesvirus 5
agguauuccgaaaccuguau

SEQ ID NO: 152792 - RNA, 23 nt, Human herpesvirus 5
aggucguagugcggcgugcugca

SEQ ID NO: 152793 - RNA, 14 nt, Human herpesvirus 5
aggucguggaggca

SEQ ID NO: 152794 - RNA, 18 nt, Human herpesvirus 5
aggugaacgagucgcuca

SEQ ID NO: 152795 - RNA, 22 nt, Human herpesvirus 5
aguaacgcagggagacacaguc

SEQ ID NO: 152796 - RNA, 22 nt, Human herpesvirus 5
aguaacaucauaaaaaccauug

SEQ ID NO: 152797 - RNA, 17 nt, Human herpesvirus 5
aguaauaccaccgucac

SEQ ID NO: 152798 - RNA, 12 nt, Human herpesvirus 5
aguaaucaaauu

SEQ ID NO: 152799 - RNA, 12 nt, Human herpesvirus 5
aguaaugcauua

SEQ ID NO: 152800 - RNA, 15 nt, Human herpesvirus 5
aguaaugcauuauca

SEQ ID NO: 152801 - RNA, 20 nt, Human herpesvirus 5
aguaaugcauuaucaucuaa

SEQ ID NO: 152802 - RNA, 15 nt, Human herpesvirus 5
aguauacuaaacucu

SEQ ID NO: 152803 - RNA, 15 nt, Human herpesvirus 5
aguuugguaguugau

SEQ ID NO: 152804 - RNA, 11 nt, Human herpesvirus 5
aguugcguuug

SEQ ID NO: 152805 - RNA, 20 nt, Human herpesvirus 5
aguugcaaaagaagcugccc

SEQ ID NO: 152806 - RNA, 13 nt, Human herpesvirus 5
agugacgugaauc

SEQ ID NO: 152807 - RNA, 21 nt, Human herpesvirus 5
agugacguggauacuaguaaa

SEQ ID NO: 152808 - RNA, 16 nt, Human herpesvirus 5
aguaucuacucagcua

SEQ ID NO: 152809 - RNA, 19 nt, Human herpesvirus 5
aguaucauauuaugcgugu

SEQ ID NO: 152810 - RNA, 23 nt, Human herpesvirus 5
agugauuccccgugacaguauua

SEQ ID NO: 152811 - RNA, 14 nt, Human herpesvirus 5
agugcaucuacgug

SEQ ID NO: 152812 - RNA, 12 nt, Human herpesvirus 5
agugagcuuuga

SEQ ID NO: 152813 - RNA, 19 nt, Human herpesvirus 5
agugaguacacgcaggcaa

SEQ ID NO: 152814 - RNA, 18 nt, Human herpesvirus 5
agugcggucggugucucg

SEQ ID NO: 152815 - RNA, 16 nt, Human herpesvirus 5
agugcgccgagcggcc

SEQ ID NO: 152816 - RNA, 20 nt, Human herpesvirus 5
agugccugcacgaccugcuc

SEQ ID NO: 152817 - RNA, 22 nt, Human herpesvirus 5
agugcccauacuuuuacaugaa

SEQ ID NO: 152818 - RNA, 20 nt, Human herpesvirus 5
aguggacaugguuaucaucc

SEQ ID NO: 152819 - RNA, 19 nt, Human herpesvirus 5
aguggucaauaauggucaa

SEQ ID NO: 152820 - RNA, 15 nt, Human herpesvirus 5
aucucaucaagcacu

SEQ ID NO: 152821 - RNA, 22 nt, Human herpesvirus 5
aucucaucaagcacuaccagcu

SEQ ID NO: 152822 - RNA, 17 nt, Human herpesvirus 5
aucuaggaacacugaaa

SEQ ID NO: 152823 - RNA, 16 nt, Human herpesvirus 5
aucuaccuaccuugua

SEQ ID NO: 152824 - RNA, 22 nt, Human herpesvirus 5
aucguguuucggcggcuguucg

SEQ ID NO: 152825 - RNA, 14 nt, Human herpesvirus 5
aucuacaacacuac

SEQ ID NO: 152826 - RNA, 17 nt, Human herpesvirus 5
aucuacaacacuacccu

SEQ ID NO: 152827 - RNA, 23 nt, Human herpesvirus 5
aucuacaacacuacccucaagua

SEQ ID NO: 152828 - RNA, 23 nt, Human herpesvirus 5
aucuacaacuuaaccacaagaaa

SEQ ID NO: 152829 - RNA, 15 nt, Human herpesvirus 5
aucgacguguuauca

SEQ ID NO: 152830 - RNA, 14 nt, Human herpesvirus 5
aucgcaacaacagc

SEQ ID NO: 152831 - RNA, 17 nt, Human herpesvirus 5
aucgcaacaacagcaac

SEQ ID NO: 152832 - RNA, 12 nt, Human herpesvirus 5
aucgauauuuga

SEQ ID NO: 152833 - RNA, 14 nt, Human herpesvirus 5
auccugggacacca

SEQ ID NO: 152834 - RNA, 12 nt, Human herpesvirus 5
auccucgggaau

SEQ ID NO: 152835 - RNA, 14 nt, Human herpesvirus 5
auccucacacugac

SEQ ID NO: 152836 - RNA, 18 nt, Human herpesvirus 5
aucguguaucuagaucac

SEQ ID NO: 152837 - RNA, 18 nt, Human herpesvirus 5
aucgggcccgccacugcc

SEQ ID NO: 152838 - RNA, 20 nt, Human herpesvirus 5
aucggccgcggugcgcugca

SEQ ID NO: 152839 - RNA, 17 nt, Human herpesvirus 5
aucgccccucacgucag

SEQ ID NO: 152840 - RNA, 15 nt, Human herpesvirus 5
aucgcagccacgcgc

SEQ ID NO: 152841 - RNA, 17 nt, Human herpesvirus 5
aucgcauaagaacggag

SEQ ID NO: 152842 - RNA, 16 nt, Human herpesvirus 5
aucgcgacagacaucc

SEQ ID NO: 152843 - RNA, 22 nt, Human herpesvirus 5
aucgcguccgaccgggaaacca

SEQ ID NO: 152844 - RNA, 16 nt, Human herpesvirus 5
aucgcuggaaagacaa

SEQ ID NO: 152845 - RNA, 17 nt, Human herpesvirus 5
aucgcuggaaagacaau

SEQ ID NO: 152846 - RNA, 17 nt, Human herpesvirus 5
auccaaucgacugccua

SEQ ID NO: 152847 - RNA, 18 nt, Human herpesvirus 5
auccaucacaucacccaa

SEQ ID NO: 152848 - RNA, 12 nt, Human herpesvirus 5
auccauacuuac

SEQ ID NO: 152849 - RNA, 18 nt, Human herpesvirus 5
auccacucuuggcacaug

SEQ ID NO: 152850 - RNA, 21 nt, Human herpesvirus 5
auccaggacaaaaaguacacu

SEQ ID NO: 152851 - RNA, 11 nt, Human herpesvirus 5
auccaguauuc

SEQ ID NO: 152852 - RNA, 19 nt, Human herpesvirus 5
aucccacgucacuauugua

SEQ ID NO: 152853 - RNA, 22 nt, Human herpesvirus 5
auccguccccacguccacccau

SEQ ID NO: 152854 - RNA, 19 nt, Human herpesvirus 5
aucccuguaauuauuccag

SEQ ID NO: 152855 - RNA, 19 nt, Human herpesvirus 5
aucauggagccgcaagugc

SEQ ID NO: 152856 - RNA, 14 nt, Human herpesvirus 5
aucaugugccucau

SEQ ID NO: 152857 - RNA, 20 nt, Human herpesvirus 5
aucauuuuuauuaucaucug

SEQ ID NO: 152858 - RNA, 22 nt, Human herpesvirus 5
aucauccuaauugguacucuag

SEQ ID NO: 152859 - RNA, 19 nt, Human herpesvirus 5
aucaucuguuuuugcugca

SEQ ID NO: 152860 - RNA, 15 nt, Human herpesvirus 5
aucaucaacagcagc

SEQ ID NO: 152861 - RNA, 16 nt, Human herpesvirus 5
aucaucacacuaagaa

SEQ ID NO: 152862 - RNA, 15 nt, Human herpesvirus 5
aucauacauuguuuc

SEQ ID NO: 152863 - RNA, 21 nt, Human herpesvirus 5
aucagacuuucgacgugcgcc

SEQ ID NO: 152864 - RNA, 16 nt, Human herpesvirus 5
aucagaaagcugcaau

SEQ ID NO: 152865 - RNA, 16 nt, Human herpesvirus 5
aucacgguacacagau

SEQ ID NO: 152866 - RNA, 16 nt, Human herpesvirus 5
aucagcgccgugcuca

SEQ ID NO: 152867 - RNA, 18 nt, Human herpesvirus 5
auaaauugcucuacugca

SEQ ID NO: 152868 - RNA, 21 nt, Human herpesvirus 5
auaaauuuugaaucgauguca

SEQ ID NO: 152869 - RNA, 16 nt, Human herpesvirus 5
auaacaaacaaugaca

SEQ ID NO: 152870 - RNA, 14 nt, Human herpesvirus 5
auaaaggcucucug

SEQ ID NO: 152871 - RNA, 14 nt, Human herpesvirus 5
auaaaguacacgcc

SEQ ID NO: 152872 - RNA, 15 nt, Human herpesvirus 5
auaaaucaccgugaa

SEQ ID NO: 152873 - RNA, 10 nt, Human herpesvirus 5
auacacccac

SEQ ID NO: 152874 - RNA, 9 nt, Human herpesvirus 5
auacacguu

SEQ ID NO: 152875 - RNA, 15 nt, Human herpesvirus 5
auacaaugacacuaa

SEQ ID NO: 152876 - RNA, 13 nt, Human herpesvirus 5
auacagggugccg

SEQ ID NO: 152877 - RNA, 13 nt, Human herpesvirus 5
auacaguacaaca

SEQ ID NO: 152878 - RNA, 14 nt, Human herpesvirus 5
auacagauacgcaa

SEQ ID NO: 152879 - RNA, 17 nt, Human herpesvirus 5
auacaucgcauaugacg

SEQ ID NO: 152880 - RNA, 23 nt, Human herpesvirus 5
auacuaguaaaaaaagugcguca

SEQ ID NO: 152881 - RNA, 19 nt, Human herpesvirus 5
auacuaguguguuccacuc

SEQ ID NO: 152882 - RNA, 22 nt, Human herpesvirus 5
auacuauguguaugaugucuca

SEQ ID NO: 152883 - RNA, 20 nt, Human herpesvirus 5
auacucuauauuauacucua

SEQ ID NO: 152884 - RNA, 22 nt, Human herpesvirus 5
auacucuguaauccuacucaau

SEQ ID NO: 152885 - RNA, 17 nt, Human herpesvirus 5
auacugcauccaucaca

SEQ ID NO: 152886 - RNA, 21 nt, Human herpesvirus 5
auacugcauccaucacaucac

SEQ ID NO: 152887 - RNA, 21 nt, Human herpesvirus 5
auacgugauuauacaacaggu

SEQ ID NO: 152888 - RNA, 15 nt, Human herpesvirus 5
auacgcaguguuguu

SEQ ID NO: 152889 - RNA, 16 nt, Human herpesvirus 5
auagaccccaagccaa

SEQ ID NO: 152890 - RNA, 20 nt, Human herpesvirus 5
auagaccccaagccaaaaac

SEQ ID NO: 152891 - RNA, 17 nt, Human herpesvirus 5
auagauagcaagccaga

SEQ ID NO: 152892 - RNA, 12 nt, Human herpesvirus 5
auagcaagaaua

SEQ ID NO: 152893 - RNA, 18 nt, Human herpesvirus 5
auagcaagaauaaaucac

SEQ ID NO: 152894 - RNA, 15 nt, Human herpesvirus 5
auagaauacugcuau

SEQ ID NO: 152895 - RNA, 19 nt, Human herpesvirus 5
aucaacgacgccacacaca

SEQ ID NO: 152896 - RNA, 14 nt, Human herpesvirus 5
aucacccgccucau

SEQ ID NO: 152897 - RNA, 23 nt, Human herpesvirus 5
aucaaaccuguuccugucaaugu

SEQ ID NO: 152898 - RNA, 17 nt, Human herpesvirus 5
auauugcuucguauaca

SEQ ID NO: 152899 - RNA, 19 nt, Human herpesvirus 5
auauuugaaaauauggcau

SEQ ID NO: 152900 - RNA, 13 nt, Human herpesvirus 5
auauuuuacaggu

SEQ ID NO: 152901 - RNA, 13 nt, Human herpesvirus 5
auagcgcuuauau

SEQ ID NO: 152902 - RNA, 18 nt, Human herpesvirus 5
auagcagugacuggguaa

SEQ ID NO: 152903 - RNA, 21 nt, Human herpesvirus 5
auagcaugcauaagaagccaa

SEQ ID NO: 152904 - RNA, 23 nt, Human herpesvirus 5
auagcaugcauaagaagccaagg

SEQ ID NO: 152905 - RNA, 20 nt, Human herpesvirus 5
auauaccaggcaucaccgug

SEQ ID NO: 152906 - RNA, 23 nt, Human herpesvirus 5
auauacgggguuaaacuggauau

SEQ ID NO: 152907 - RNA, 14 nt, Human herpesvirus 5
auauacacacggag

SEQ ID NO: 152908 - RNA, 19 nt, Human herpesvirus 5
auauagccuccggcuguca

SEQ ID NO: 152909 - RNA, 13 nt, Human herpesvirus 5
auauaggugacag

SEQ ID NO: 152910 - RNA, 18 nt, Human herpesvirus 5
auauauaaaccguaugca

SEQ ID NO: 152911 - RNA, 12 nt, Human herpesvirus 5
auauauacaaac

SEQ ID NO: 152912 - RNA, 17 nt, Human herpesvirus 5
auauucuauauucugca

SEQ ID NO: 152913 - RNA, 21 nt, Human herpesvirus 5
auauucugcauagaguuacau

SEQ ID NO: 152914 - RNA, 22 nt, Human herpesvirus 5
auauucuacauucaauacauca

SEQ ID NO: 152915 - RNA, 21 nt, Human herpesvirus 5
acaguuuccacgcagcgggaa

SEQ ID NO: 152916 - RNA, 12 nt, Human herpesvirus 5
acaguugauaac

SEQ ID NO: 152917 - RNA, 15 nt, Human herpesvirus 5
acaguuaucagcaau

SEQ ID NO: 152918 - RNA, 21 nt, Human herpesvirus 5
acagugagagcucauacauau

SEQ ID NO: 152919 - RNA, 15 nt, Human herpesvirus 5
acaguguauuggcau

SEQ ID NO: 152920 - RNA, 23 nt, Human herpesvirus 5
acagucgacgggugguaccugca

SEQ ID NO: 152921 - RNA, 23 nt, Human herpesvirus 5
acagcucguguaucuuaugccag

SEQ ID NO: 152922 - RNA, 18 nt, Human herpesvirus 5
acagcggcucgccgcaga

SEQ ID NO: 152923 - RNA, 16 nt, Human herpesvirus 5
acagcguccacaguuu

SEQ ID NO: 152924 - RNA, 20 nt, Human herpesvirus 5
acagcguccacaguuuccga

SEQ ID NO: 152925 - RNA, 22 nt, Human herpesvirus 5
acagacgaugaaccuuccccac

SEQ ID NO: 152926 - RNA, 17 nt, Human herpesvirus 5
acagacuuuuauaugau

SEQ ID NO: 152927 - RNA, 17 nt, Human herpesvirus 5
acagaaugaaccuugua

SEQ ID NO: 152928 - RNA, 16 nt, Human herpesvirus 5
acacgguuucuuccca

SEQ ID NO: 152929 - RNA, 21 nt, Human herpesvirus 5
acacgucccccugaucuguca

SEQ ID NO: 152930 - RNA, 17 nt, Human herpesvirus 5
acacguucgacauggac

SEQ ID NO: 152931 - RNA, 17 nt, Human herpesvirus 5
acacuacagcuugcaau

SEQ ID NO: 152932 - RNA, 19 nt, Human herpesvirus 5
aauuuaacaagucacuaua

SEQ ID NO: 152933 - RNA, 18 nt, Human herpesvirus 5
acacggaacggagcagcc

SEQ ID NO: 152934 - RNA, 13 nt, Human herpesvirus 5
acacgcaacuuuu

SEQ ID NO: 152935 - RNA, 22 nt, Human herpesvirus 5
acacgcacgcugguuaccaggc

SEQ ID NO: 152936 - RNA, 21 nt, Human herpesvirus 5
acacgcgggggaaaaacaaag

SEQ ID NO: 152937 - RNA, 16 nt, Human herpesvirus 5
acacgcuaagagcuuu

SEQ ID NO: 152938 - RNA, 19 nt, Human herpesvirus 5
acacgacggggaaaaucac

SEQ ID NO: 152939 - RNA, 22 nt, Human herpesvirus 5
acauuacuaucgacguguuauc

SEQ ID NO: 152940 - RNA, 14 nt, Human herpesvirus 5
accaaaaauccaga

SEQ ID NO: 152941 - RNA, 21 nt, Human herpesvirus 5
accaaaccguccuuuuaucau

SEQ ID NO: 152942 - RNA, 15 nt, Human herpesvirus 5
accaacguuaccucc

SEQ ID NO: 152943 - RNA, 11 nt, Human herpesvirus 5
accagcugucc

SEQ ID NO: 152944 - RNA, 18 nt, Human herpesvirus 5
accaggaacacgguggcu

SEQ ID NO: 152945 - RNA, 20 nt, Human herpesvirus 5
accaggaacacgguggcuuu

SEQ ID NO: 152946 - RNA, 23 nt, Human herpesvirus 5
accagcgccaccauagccacuac

SEQ ID NO: 152947 - RNA, 22 nt, Human herpesvirus 5
accagcaguaugacgugcgaug

SEQ ID NO: 152948 - RNA, 13 nt, Human herpesvirus 5
accacggccuuau

SEQ ID NO: 152949 - RNA, 14 nt, Human herpesvirus 5
accacgucaauaaa

SEQ ID NO: 152950 - RNA, 21 nt, Human herpesvirus 5
accacgucgauucccaucuca

SEQ ID NO: 152951 - RNA, 14 nt, Human herpesvirus 5
accacuacuaccuc

SEQ ID NO: 152952 - RNA, 16 nt, Human herpesvirus 5
acaugcgcguguacuu

SEQ ID NO: 152953 - RNA, 20 nt, Human herpesvirus 5
acaugcuauaagacagccuu

SEQ ID NO: 152954 - RNA, 16 nt, Human herpesvirus 5
acauggagacaguuuc

SEQ ID NO: 152955 - RNA, 18 nt, Human herpesvirus 5
acauggagacaguuucca

SEQ ID NO: 152956 - RNA, 16 nt, Human herpesvirus 5
acaugggcaugcaaug

SEQ ID NO: 152957 - RNA, 17 nt, Human herpesvirus 5
acaugguuaucauccag

SEQ ID NO: 152958 - RNA, 22 nt, Human herpesvirus 5
acauguagaagcacccauuaca

SEQ ID NO: 152959 - RNA, 16 nt, Human herpesvirus 5
acaugaugaaugucau

SEQ ID NO: 152960 - RNA, 24 nt, Human herpesvirus 5
acaugcaacaguacuacuaccaau

SEQ ID NO: 152961 - RNA, 22 nt, Human herpesvirus 5
acaucuuaugaagcugaacaau

SEQ ID NO: 152962 - RNA, 18 nt, Human herpesvirus 5
acaguuuacgaguagaaa

SEQ ID NO: 152963 - RNA, 15 nt, Human herpesvirus 5
acaguuuuugagaac

SEQ ID NO: 152964 - RNA, 12 nt, Human herpesvirus 5
acauaaaaccac

SEQ ID NO: 152965 - RNA, 13 nt, Human herpesvirus 5
acauaaaaccacc

SEQ ID NO: 152966 - RNA, 14 nt, Human herpesvirus 5
acauaaaaccaccg

SEQ ID NO: 152967 - RNA, 13 nt, Human herpesvirus 5
acauaaacaaacg

SEQ ID NO: 152968 - RNA, 16 nt, Human herpesvirus 5
accugagaacaugugg

SEQ ID NO: 152969 - RNA, 21 nt, Human herpesvirus 5
accucuauguuacaaugucac

SEQ ID NO: 152970 - RNA, 17 nt, Human herpesvirus 5
accucgugcgaggacaa

SEQ ID NO: 152971 - RNA, 16 nt, Human herpesvirus 5
accucgaugaagccua

SEQ ID NO: 152972 - RNA, 19 nt, Human herpesvirus 5
accguuaccaguaccaccg

SEQ ID NO: 152973 - RNA, 18 nt, Human herpesvirus 5
accucaguggaccgucaa

SEQ ID NO: 152974 - RNA, 24 nt, Human herpesvirus 5
accugcaaaguuauccuguugaau

SEQ ID NO: 152975 - RNA, 16 nt, Human herpesvirus 5
accugcacgacaucuu

SEQ ID NO: 152976 - RNA, 13 nt, Human herpesvirus 5
accuuuuugcugc

SEQ ID NO: 152977 - RNA, 13 nt, Human herpesvirus 5
acgaaagcguuca

SEQ ID NO: 152978 - RNA, 16 nt, Human herpesvirus 5
accuuugcgcaucccc

SEQ ID NO: 152979 - RNA, 16 nt, Human herpesvirus 5
acgccaucuucaucuu

SEQ ID NO: 152980 - RNA, 13 nt, Human herpesvirus 5
acgccaugaugac

SEQ ID NO: 152981 - RNA, 17 nt, Human herpesvirus 5
acgccaacuccgugcca

SEQ ID NO: 152982 - RNA, 22 nt, Human herpesvirus 5
acgccaacuccgugccagcugg

SEQ ID NO: 152983 - RNA, 13 nt, Human herpesvirus 5
acgcaucugucau

SEQ ID NO: 152984 - RNA, 20 nt, Human herpesvirus 5
acgcaugauuagcaauauua

SEQ ID NO: 152985 - RNA, 21 nt, Human herpesvirus 5
acgcaggaugcgcguacucaa

SEQ ID NO: 152986 - RNA, 14 nt, Human herpesvirus 5
acgcacgacaugac

SEQ ID NO: 152987 - RNA, 17 nt, Human herpesvirus 5
acgcacauauguagcac

SEQ ID NO: 152988 - RNA, 21 nt, Human herpesvirus 5
acgaaccagcugguaccugaa

SEQ ID NO: 152989 - RNA, 14 nt, Human herpesvirus 5
acgcucucgucagg

SEQ ID NO: 152990 - RNA, 18 nt, Human herpesvirus 5
acggaagccgccaauaca

SEQ ID NO: 152991 - RNA, 21 nt, Human herpesvirus 5
acggaaccugagaacaugugg

SEQ ID NO: 152992 - RNA, 22 nt, Human herpesvirus 5
acggagaaacacccacgggugu

SEQ ID NO: 152993 - RNA, 16 nt, Human herpesvirus 5
acggacacgacaaaug

SEQ ID NO: 152994 - RNA, 17 nt, Human herpesvirus 5
acggacgcuacuuuccg

SEQ ID NO: 152995 - RNA, 22 nt, Human herpesvirus 5
accaggcucugcgccgucucuu

SEQ ID NO: 152996 - RNA, 20 nt, Human herpesvirus 5
accagcguauuuucuacucc

SEQ ID NO: 152997 - RNA, 22 nt, Human herpesvirus 5
accagcugggccuacaccaguu

SEQ ID NO: 152998 - RNA, 20 nt, Human herpesvirus 5
accaugcagaccuacagcac

SEQ ID NO: 152999 - RNA, 14 nt, Human herpesvirus 5
accaucucgcggaa

SEQ ID NO: 153000 - RNA, 20 nt, Human herpesvirus 5
accauaucgugaaccaugau

SEQ ID NO: 153001 - RNA, 21 nt, Human herpesvirus 5
acccagcuggggaaguacaau

SEQ ID NO: 153002 - RNA, 21 nt, Human herpesvirus 5
acccacgguggccaacaagcg

SEQ ID NO: 153003 - RNA, 13 nt, Human herpesvirus 5
acccacuaccugg

SEQ ID NO: 153004 - RNA, 14 nt, Human herpesvirus 5
acccacgacggcuc

SEQ ID NO: 153005 - RNA, 22 nt, Human herpesvirus 5
acccacagagucgccaguccau

SEQ ID NO: 153006 - RNA, 15 nt, Human herpesvirus 5
acccaccaacugaaa

SEQ ID NO: 153007 - RNA, 14 nt, Human herpesvirus 5
accauuucuuggau

SEQ ID NO: 153008 - RNA, 19 nt, Human herpesvirus 5
accauuggaaguaacauca

SEQ ID NO: 153009 - RNA, 16 nt, Human herpesvirus 5
accauuggcaacauca

SEQ ID NO: 153010 - RNA, 17 nt, Human herpesvirus 5
accauuggcaacaucac

SEQ ID NO: 153011 - RNA, 18 nt, Human herpesvirus 5
acccuccuaaaccuggua

SEQ ID NO: 153012 - RNA, 15 nt, Human herpesvirus 5
acccgucaugguaca

SEQ ID NO: 153013 - RNA, 22 nt, Human herpesvirus 5
acccgucgccauuuccccucau

SEQ ID NO: 153014 - RNA, 23 nt, Human herpesvirus 5
acccgugucgccgccgucaccac

SEQ ID NO: 153015 - RNA, 13 nt, Human herpesvirus 5
accccaccuaccu

SEQ ID NO: 153016 - RNA, 19 nt, Human herpesvirus 5
accgggaacuuaugugaau

SEQ ID NO: 153017 - RNA, 23 nt, Human herpesvirus 5
accguaaaaaaaaaaacaaagca

SEQ ID NO: 153018 - RNA, 15 nt, Human herpesvirus 5
accguaaucaccaaa

SEQ ID NO: 153019 - RNA, 21 nt, Human herpesvirus 5
accgugggucgggagcacaua

SEQ ID NO: 153020 - RNA, 15 nt, Human herpesvirus 5
accgucuccaccaca

SEQ ID NO: 153021 - RNA, 18 nt, Human herpesvirus 5
acccuucccgaccuccca

SEQ ID NO: 153022 - RNA, 20 nt, Human herpesvirus 5
accggcagcacaccugccuc

SEQ ID NO: 153023 - RNA, 22 nt, Human herpesvirus 5
acccugcgcucugcguugccac

SEQ ID NO: 153024 - RNA, 17 nt, Human herpesvirus 5
acccugcggagcguuca

SEQ ID NO: 153025 - RNA, 15 nt, Human herpesvirus 5
agacaggacaccgca

SEQ ID NO: 153026 - RNA, 17 nt, Human herpesvirus 5
agacaggcuaugggaag

SEQ ID NO: 153027 - RNA, 16 nt, Human herpesvirus 5
agacagccacaucaac

SEQ ID NO: 153028 - RNA, 22 nt, Human herpesvirus 5
agacaagguggugaacugugau

SEQ ID NO: 153029 - RNA, 18 nt, Human herpesvirus 5
agaccacgguuugggaaa

SEQ ID NO: 153030 - RNA, 16 nt, Human herpesvirus 5
agaccgcaacaacagc

SEQ ID NO: 153031 - RNA, 12 nt, Human herpesvirus 5
agaccgcugccu

SEQ ID NO: 153032 - RNA, 13 nt, Human herpesvirus 5
agaccuacagcac

SEQ ID NO: 153033 - RNA, 15 nt, Human herpesvirus 5
agacauccaauuaca

SEQ ID NO: 153034 - RNA, 19 nt, Human herpesvirus 5
agacauccaauuacaccga

SEQ ID NO: 153035 - RNA, 13 nt, Human herpesvirus 5
agacaucgucaca

SEQ ID NO: 153036 - RNA, 17 nt, Human herpesvirus 5
agacaucuuaugaagcu

SEQ ID NO: 153037 - RNA, 15 nt, Human herpesvirus 5
agacauggacucuug

SEQ ID NO: 153038 - RNA, 23 nt, Human herpesvirus 5
agacauuccccaccuucccucua

SEQ ID NO: 153039 - RNA, 12 nt, Human herpesvirus 5
agacuaccacau

SEQ ID NO: 153040 - RNA, 14 nt, Human herpesvirus 5
agacucacuuuauu

SEQ ID NO: 153041 - RNA, 20 nt, Human herpesvirus 5
agacgcucacccguucacuc

SEQ ID NO: 153042 - RNA, 20 nt, Human herpesvirus 5
agacgucggcgguccuccag

SEQ ID NO: 153043 - RNA, 14 nt, Human herpesvirus 5
agacgucaaugaca

SEQ ID NO: 153044 - RNA, 19 nt, Human herpesvirus 5
agacggcuauccagcagcu

SEQ ID NO: 153045 - RNA, 16 nt, Human herpesvirus 5
agaccucaccaucuca

SEQ ID NO: 153046 - RNA, 16 nt, Human herpesvirus 5
agacuuaccaccuccu

SEQ ID NO: 153047 - RNA, 21 nt, Human herpesvirus 5
agacuuaccaccuccugggua

SEQ ID NO: 153048 - RNA, 19 nt, Human herpesvirus 5
agacugcgguuaacccuag

SEQ ID NO: 153049 - RNA, 19 nt, Human herpesvirus 5
agagaaccuaccuacuuca

SEQ ID NO: 153050 - RNA, 20 nt, Human herpesvirus 5
agacuuugauguaguugcag

SEQ ID NO: 153051 - RNA, 15 nt, Human herpesvirus 5
agacuuuuauaugau

SEQ ID NO: 153052 - RNA, 14 nt, Human herpesvirus 5
agaggaaaaaccgc

SEQ ID NO: 153053 - RNA, 13 nt, Human herpesvirus 5
agaggacaccuca

SEQ ID NO: 153054 - RNA, 17 nt, Human herpesvirus 5
agaaagaacgugguugu

SEQ ID NO: 153055 - RNA, 13 nt, Human herpesvirus 5
agaaacaccgucu

SEQ ID NO: 153056 - RNA, 13 nt, Human herpesvirus 5
agaaccugcucaa

SEQ ID NO: 153057 - RNA, 13 nt, Human herpesvirus 5
agaacauauauaa

SEQ ID NO: 153058 - RNA, 18 nt, Human herpesvirus 5
agaauguugcgaauucau

SEQ ID NO: 153059 - RNA, 15 nt, Human herpesvirus 5
agaaugaaccuugua

SEQ ID NO: 153060 - RNA, 21 nt, Human herpesvirus 5
agaauggccauguacguuuau

SEQ ID NO: 153061 - RNA, 23 nt, Human herpesvirus 5
agaaucaccgucgagaaaacuaa

SEQ ID NO: 153062 - RNA, 13 nt, Human herpesvirus 5
agaaucagcagug

SEQ ID NO: 153063 - RNA, 21 nt, Human herpesvirus 5
agaaucagcagugaguacacg

SEQ ID NO: 153064 - RNA, 11 nt, Human herpesvirus 5
agaacugaguu

SEQ ID NO: 153065 - RNA, 17 nt, Human herpesvirus 5
agaacucucugccacua

SEQ ID NO: 153066 - RNA, 15 nt, Human herpesvirus 5
agaacuaauauugca

SEQ ID NO: 153067 - RNA, 16 nt, Human herpesvirus 5
agaacuaauauugcaa

SEQ ID NO: 153068 - RNA, 15 nt, Human herpesvirus 5
agaagauacucgaug

SEQ ID NO: 153069 - RNA, 17 nt, Human herpesvirus 5
agaagcacccauuacag

SEQ ID NO: 153070 - RNA, 19 nt, Human herpesvirus 5
agaagcacccauuacagua

SEQ ID NO: 153071 - RNA, 19 nt, Human herpesvirus 5
acuagcacagagacaccaa

SEQ ID NO: 153072 - RNA, 14 nt, Human herpesvirus 5
acuaucaccaaaca

SEQ ID NO: 153073 - RNA, 20 nt, Human herpesvirus 5
acuaucaccaaacaacacca

SEQ ID NO: 153074 - RNA, 17 nt, Human herpesvirus 5
acuauacgacgauguuu

SEQ ID NO: 153075 - RNA, 16 nt, Human herpesvirus 5
acuaguacugagacag

SEQ ID NO: 153076 - RNA, 16 nt, Human herpesvirus 5
acuaguauccacguca

SEQ ID NO: 153077 - RNA, 19 nt, Human herpesvirus 5
acggugguuuaugaugaaa

SEQ ID NO: 153078 - RNA, 13 nt, Human herpesvirus 5
acgguggacgggu

SEQ ID NO: 153079 - RNA, 23 nt, Human herpesvirus 5
acggugcugcugcgcgacacggu

SEQ ID NO: 153080 - RNA, 15 nt, Human herpesvirus 5
acggucagacggggu

SEQ ID NO: 153081 - RNA, 16 nt, Human herpesvirus 5
acggagggucagggau

SEQ ID NO: 153082 - RNA, 17 nt, Human herpesvirus 5
acguauuugaagccagg

SEQ ID NO: 153083 - RNA, 16 nt, Human herpesvirus 5
acgucacucuuggcac

SEQ ID NO: 153084 - RNA, 18 nt, Human herpesvirus 5
acguagccgaugcugaug

SEQ ID NO: 153085 - RNA, 22 nt, Human herpesvirus 5
acguaggcaaacugaccaagcu

SEQ ID NO: 153086 - RNA, 17 nt, Human herpesvirus 5
acguagagugguauaca

SEQ ID NO: 153087 - RNA, 19 nt, Human herpesvirus 5
acguaaaguagcuggugga

SEQ ID NO: 153088 - RNA, 12 nt, Human herpesvirus 5
acucagagccac

SEQ ID NO: 153089 - RNA, 13 nt, Human herpesvirus 5
acucacaauggaa

SEQ ID NO: 153090 - RNA, 19 nt, Human herpesvirus 5
acucacaauggaagccaua

SEQ ID NO: 153091 - RNA, 13 nt, Human herpesvirus 5
acucgcgucacgu

SEQ ID NO: 153092 - RNA, 20 nt, Human herpesvirus 5
acucaucggcauguucggcu

SEQ ID NO: 153093 - RNA, 14 nt, Human herpesvirus 5
acucaguacuuugg

SEQ ID NO: 153094 - RNA, 23 nt, Human herpesvirus 5
acucuauauuauacucuauguua

SEQ ID NO: 153095 - RNA, 15 nt, Human herpesvirus 5
acucuaucuacuguc

SEQ ID NO: 153096 - RNA, 14 nt, Human herpesvirus 5
acucuaacacccag

SEQ ID NO: 153097 - RNA, 17 nt, Human herpesvirus 5
acucgugacgucaauca

SEQ ID NO: 153098 - RNA, 13 nt, Human herpesvirus 5
acugaaaacacca

SEQ ID NO: 153099 - RNA, 15 nt, Human herpesvirus 5
acucuggugcuaugg

SEQ ID NO: 153100 - RNA, 21 nt, Human herpesvirus 5
acucuguguugcuacagggag

SEQ ID NO: 153101 - RNA, 14 nt, Human herpesvirus 5
acucugacugugua

SEQ ID NO: 153102 - RNA, 18 nt, Human herpesvirus 5
acugucagaguaggugau

SEQ ID NO: 153103 - RNA, 12 nt, Human herpesvirus 5
acuuacaucuca

SEQ ID NO: 153104 - RNA, 14 nt, Human herpesvirus 5
acuuacaucucacg

SEQ ID NO: 153105 - RNA, 12 nt, Human herpesvirus 5
acuuacaucugc

SEQ ID NO: 153106 - RNA, 18 nt, Human herpesvirus 5
acuuaccaccuccugggu

SEQ ID NO: 153107 - RNA, 19 nt, Human herpesvirus 5
acuuacgucacucuuggca

SEQ ID NO: 153108 - RNA, 12 nt, Human herpesvirus 5
acuggugcuauc

SEQ ID NO: 153109 - RNA, 15 nt, Human herpesvirus 5
acugauuaaccauau

SEQ ID NO: 153110 - RNA, 20 nt, Human herpesvirus 5
acugggccucggcgugcuca

SEQ ID NO: 153111 - RNA, 20 nt, Human herpesvirus 5
acuggcagagccacguugag

SEQ ID NO: 153112 - RNA, 23 nt, Human herpesvirus 5
acugaguuuagugcuaguugucg

SEQ ID NO: 153113 - RNA, 15 nt, Human herpesvirus 5
agaaaaccacacugu

SEQ ID NO: 153114 - RNA, 23 nt, Human herpesvirus 5
agaaaagccggcuccaagugcaa

SEQ ID NO: 153115 - RNA, 17 nt, Human herpesvirus 5
agaaaauuacuacguaa

SEQ ID NO: 153116 - RNA, 19 nt, Human herpesvirus 5
acuuggccgaccugugcgu

SEQ ID NO: 153117 - RNA, 16 nt, Human herpesvirus 5
uuccggucucggcucg

SEQ ID NO: 153118 - RNA, 16 nt, Human herpesvirus 5
uucgaguccguccucg

SEQ ID NO: 153119 - RNA, 15 nt, Human herpesvirus 5
uucggccggcugcug

SEQ ID NO: 153120 - RNA, 17 nt, Human herpesvirus 5
uucagcguccggccucg

SEQ ID NO: 153121 - RNA, 13 nt, Human herpesvirus 5
uguggggcugcuc

SEQ ID NO: 153122 - RNA, 13 nt, Human herpesvirus 5
ugcgccuuccagu

SEQ ID NO: 153123 - RNA, 19 nt, Human herpesvirus 5
uguugacccagggcugcuc

SEQ ID NO: 153124 - RNA, 18 nt, Human herpesvirus 5
ugcccauuccgcaacguc

SEQ ID NO: 153125 - RNA, 23 nt, Human herpesvirus 5
ugacuacgaugaagacgcgacuc

SEQ ID NO: 153126 - RNA, 14 nt, Human herpesvirus 5
ugcagacgguggug

SEQ ID NO: 153127 - RNA, 24 nt, Human herpesvirus 5
ugccggucuacagacugggcgacg

SEQ ID NO: 153128 - RNA, 15 nt, Human herpesvirus 5
ugccggagcuacgcg

SEQ ID NO: 153129 - RNA, 20 nt, Human herpesvirus 5
ugccuggacgccugggcgcg

SEQ ID NO: 153130 - RNA, 18 nt, Human herpesvirus 5
ugcgcaccuucggcggua

SEQ ID NO: 153131 - RNA, 19 nt, Human herpesvirus 5
ucuccuccgucgcggccag

SEQ ID NO: 153132 - RNA, 19 nt, Human herpesvirus 5
ucugacgcugucuugcuua

SEQ ID NO: 153133 - RNA, 23 nt, Human herpesvirus 5
ucugccggcugcggcggcacucg

SEQ ID NO: 153134 - RNA, 16 nt, Human herpesvirus 5
ucuugcccacgccguc

SEQ ID NO: 153135 - RNA, 13 nt, Human herpesvirus 5
ugacacggcgguu

SEQ ID NO: 153136 - RNA, 20 nt, Human herpesvirus 5
ugacggcgcucuuucagcgu

SEQ ID NO: 153137 - RNA, 16 nt, Human herpesvirus 5
ugagcuguuucgacgu

SEQ ID NO: 153138 - RNA, 15 nt, Human herpesvirus 5
ucggccgaccccguc

SEQ ID NO: 153139 - RNA, 17 nt, Human herpesvirus 5
ucccuacuaccgucgug

SEQ ID NO: 153140 - RNA, 16 nt, Human herpesvirus 5
ucgaaauaaccuacgu

SEQ ID NO: 153141 - RNA, 12 nt, Human herpesvirus 5
uccccuaacguc

SEQ ID NO: 153142 - RNA, 17 nt, Human herpesvirus 5
ucuagcuggcggccucu

SEQ ID NO: 153143 - RNA, 23 nt, Human herpesvirus 5
ucuauaggcgguacuuacgucac

SEQ ID NO: 153144 - RNA, 20 nt, Human herpesvirus 5
ucgagaccgaagacgccguc

SEQ ID NO: 153145 - RNA, 23 nt, Human herpesvirus 5
ucggcgugaaugggcacgccgug

SEQ ID NO: 153146 - RNA, 19 nt, Human herpesvirus 5
ucggugaccacaaccacgu

SEQ ID NO: 153147 - RNA, 17 nt, Human herpesvirus 5
ggucguagugcggcgug

SEQ ID NO: 153148 - RNA, 13 nt, Human herpesvirus 5
ggucgacugcgug

SEQ ID NO: 153149 - RNA, 15 nt, Human herpesvirus 5
uccaaccucgccguc

SEQ ID NO: 153150 - RNA, 17 nt, Human herpesvirus 5
uccccgaauuugggcgg

SEQ ID NO: 153151 - RNA, 14 nt, Human herpesvirus 5
uccaucgcagccac

SEQ ID NO: 153152 - RNA, 21 nt, Human herpesvirus 5
ucccacuacacuauguucgug

SEQ ID NO: 153153 - RNA, 15 nt, Human herpesvirus 5
ucccaucucaacguc

SEQ ID NO: 153154 - RNA, 23 nt, Human herpesvirus 5
uccgaccgggaaaccacgccggc

SEQ ID NO: 153155 - RNA, 14 nt, Human herpesvirus 5
uccgagcugcggua

SEQ ID NO: 153156 - RNA, 20 nt, Human herpesvirus 5
gccgcgucgcaaacgcugcu

SEQ ID NO: 153157 - RNA, 21 nt, Human herpesvirus 5
gccgcucgggaacagacccga

SEQ ID NO: 153158 - RNA, 15 nt, Human herpesvirus 5
gccgcccgacgccga

SEQ ID NO: 153159 - RNA, 19 nt, Human herpesvirus 5
gccgacgcgcgcccgcgcc

SEQ ID NO: 153160 - RNA, 18 nt, Human herpesvirus 5
gccgaggcuacugcugcu

SEQ ID NO: 153161 - RNA, 14 nt, Human herpesvirus 5
gccgccaacgccga

SEQ ID NO: 153162 - RNA, 15 nt, Human herpesvirus 5
gccgccgcgccacac

SEQ ID NO: 153163 - RNA, 13 nt, Human herpesvirus 5
gccgagacggcgu

SEQ ID NO: 153164 - RNA, 14 nt, Human herpesvirus 5
gccgagacggcgug

SEQ ID NO: 153165 - RNA, 15 nt, Human herpesvirus 5
gccgagacggcguga

SEQ ID NO: 153166 - RNA, 16 nt, Human herpesvirus 5
gcacgacgcggcguug

SEQ ID NO: 153167 - RNA, 13 nt, Human herpesvirus 5
gcacgggcugcug

SEQ ID NO: 153168 - RNA, 16 nt, Human herpesvirus 5
gcacguuuuggaaaac

SEQ ID NO: 153169 - RNA, 11 nt, Human herpesvirus 5
gcccucgccgg

SEQ ID NO: 153170 - RNA, 16 nt, Human herpesvirus 5
gcccguucuuccgagu

SEQ ID NO: 153171 - RNA, 11 nt, Human herpesvirus 5
gccgacgaggc

SEQ ID NO: 153172 - RNA, 14 nt, Human herpesvirus 5
gccgacaaccugcu

SEQ ID NO: 153173 - RNA, 15 nt, Human herpesvirus 5
gauucaggacgagga

SEQ ID NO: 153174 - RNA, 23 nt, Human herpesvirus 5
gcaaaaacuuguccuugcgcgcg

SEQ ID NO: 153175 - RNA, 19 nt, Human herpesvirus 5
gcaaucgcuucaccgucgc

SEQ ID NO: 153176 - RNA, 13 nt, Human herpesvirus 5
gcaccuaucuccg

SEQ ID NO: 153177 - RNA, 19 nt, Human herpesvirus 5
gcggcagcggaacucgacc

SEQ ID NO: 153178 - RNA, 12 nt, Human herpesvirus 5
gcggcgguggag

SEQ ID NO: 153179 - RNA, 15 nt, Human herpesvirus 5
gcggcgguggccguc

SEQ ID NO: 153180 - RNA, 16 nt, Human herpesvirus 5
gcggcgugcgcacgcc

SEQ ID NO: 153181 - RNA, 13 nt, Human herpesvirus 5
gcggcggcacucg

SEQ ID NO: 153182 - RNA, 18 nt, Human herpesvirus 5
gcggccgugguggccgug

SEQ ID NO: 153183 - RNA, 13 nt, Human herpesvirus 5
gcgcguacggugg

SEQ ID NO: 153184 - RNA, 16 nt, Human herpesvirus 5
gcgcguccacagcgug

SEQ ID NO: 153185 - RNA, 12 nt, Human herpesvirus 5
gcgcacggcguc

SEQ ID NO: 153186 - RNA, 16 nt, Human herpesvirus 5
ggacauggacucgcca

SEQ ID NO: 153187 - RNA, 24 nt, Human herpesvirus 5
ggcccgagcgguugccgugacgca

SEQ ID NO: 153188 - RNA, 14 nt, Human herpesvirus 5
gcugccaccagggc

SEQ ID NO: 153189 - RNA, 15 nt, Human herpesvirus 5
ggacaaguacagcgg

SEQ ID NO: 153190 - RNA, 20 nt, Human herpesvirus 5
ggacccguacugcgacggca

SEQ ID NO: 153191 - RNA, 19 nt, Human herpesvirus 5
gcuuuauccgacucgcugu

SEQ ID NO: 153192 - RNA, 18 nt, Human herpesvirus 5
gcuguuguugacgcugcu

SEQ ID NO: 153193 - RNA, 22 nt, Human herpesvirus 5
ggaaccaccguagcacugcgca

SEQ ID NO: 153194 - RNA, 21 nt, Human herpesvirus 5
ggaagccggucgucugcgacu

SEQ ID NO: 153195 - RNA, 22 nt, Human herpesvirus 5
ggaagcuuuggucgccugcacu

SEQ ID NO: 153196 - RNA, 20 nt, Human herpesvirus 5
gcugcgcaauaugacgcuga

SEQ ID NO: 153197 - RNA, 18 nt, Human herpesvirus 5
gcugcucggcguggucaa

SEQ ID NO: 153198 - RNA, 16 nt, Human herpesvirus 5
gcugggauccgccgcc

SEQ ID NO: 153199 - RNA, 15 nt, Human herpesvirus 5
gcugugcaacgcgug

SEQ ID NO: 153200 - RNA, 14 nt, Human herpesvirus 5
gcuguucacgcgga

SEQ ID NO: 153201 - RNA, 14 nt, Human herpesvirus 5
gcugcuucauccag

SEQ ID NO: 153202 - RNA, 16 nt, Human herpesvirus 5
gcugcuuucgcacgca

SEQ ID NO: 153203 - RNA, 13 nt, Human herpesvirus 5
gcucgcucgcgcc

SEQ ID NO: 153204 - RNA, 17 nt, Human herpesvirus 5
gcucgcucugacgccgc

SEQ ID NO: 153205 - RNA, 12 nt, Human herpesvirus 5
gcucuacgcgug

SEQ ID NO: 153206 - RNA, 19 nt, Human herpesvirus 5
gcucggaccgugacggugg

SEQ ID NO: 153207 - RNA, 19 nt, Human herpesvirus 5
gcucggcggccacggcguc

SEQ ID NO: 153208 - RNA, 16 nt, Human herpesvirus 5
gcugaucgccgucacu

SEQ ID NO: 153209 - RNA, 23 nt, Human herpesvirus 5
gcggcuguauuauuagacgccgg

SEQ ID NO: 153210 - RNA, 19 nt, Human herpesvirus 5
gcgggcacuggggacggug

SEQ ID NO: 153211 - RNA, 19 nt, Human herpesvirus 5
gcgguaugggucacggcgg

SEQ ID NO: 153212 - RNA, 21 nt, Human herpesvirus 5
gcgggggaaaaacaaagaagu

SEQ ID NO: 153213 - RNA, 16 nt, Human herpesvirus 5
gcggugggugguaaaa

SEQ ID NO: 153214 - RNA, 19 nt, Human herpesvirus 5
gcgguguuuccgauggugg

SEQ ID NO: 153215 - RNA, 15 nt, Human herpesvirus 5
gcguaggacgacgug

SEQ ID NO: 153216 - RNA, 13 nt, Human herpesvirus 5
gcguacgguggac

SEQ ID NO: 153217 - RNA, 23 nt, Human herpesvirus 5
gcuacgguggcgcgacggugaug

SEQ ID NO: 153218 - RNA, 20 nt, Human herpesvirus 5
gcuaccucaugacgcacgcc

SEQ ID NO: 153219 - RNA, 14 nt, Human herpesvirus 5
gcguggccggcgug

SEQ ID NO: 153220 - RNA, 17 nt, Human herpesvirus 5
gcguggcggccgacggc

SEQ ID NO: 153221 - RNA, 19 nt, Human herpesvirus 5
gcguguggaggacggggug

SEQ ID NO: 153222 - RNA, 23 nt, Human herpesvirus 5
gcucacguugaugaaaacgaggu

SEQ ID NO: 153223 - RNA, 20 nt, Human herpesvirus 5
gcuacuuuccgauccuugga

SEQ ID NO: 153224 - RNA, 17 nt, Human herpesvirus 5
gcgucagaagacgagcu

SEQ ID NO: 153225 - RNA, 14 nt, Human herpesvirus 5
gcguccgacgccgg

SEQ ID NO: 153226 - RNA, 22 nt, Human herpesvirus 5
gcgucgccaguaccgacgacga

SEQ ID NO: 153227 - RNA, 19 nt, Human herpesvirus 5
gcgucgccugcgacggcgg

SEQ ID NO: 153228 - RNA, 20 nt, Human herpesvirus 5
gcgucgucaaggacggcgug

SEQ ID NO: 153229 - RNA, 19 nt, Human herpesvirus 5
gcguggaccagacggcguc

SEQ ID NO: 153230 - RNA, 22 nt, Human herpesvirus 5
gcgugcaccugcugccgccacu

SEQ ID NO: 153231 - RNA, 21 nt, Human herpesvirus 5
gaaccgcucauauagaccaaa

SEQ ID NO: 153232 - RNA, 13 nt, Human herpesvirus 5
gaagacggagcuc

SEQ ID NO: 153233 - RNA, 18 nt, Human herpesvirus 5
cuuguucucgaccacgua

SEQ ID NO: 153234 - RNA, 17 nt, Human herpesvirus 5
cuuuggcuacgguggug

SEQ ID NO: 153235 - RNA, 14 nt, Human herpesvirus 5
cuugcccacgccgu

SEQ ID NO: 153236 - RNA, 21 nt, Human herpesvirus 5
gaaaccguacuaagucucccg

SEQ ID NO: 153237 - RNA, 21 nt, Human herpesvirus 5
gaaacagcguccacaguuucc

SEQ ID NO: 153238 - RNA, 16 nt, Human herpesvirus 5
gagcaggucucgcgca

SEQ ID NO: 153239 - RNA, 20 nt, Human herpesvirus 5
gagccgccgacgcuggcgcu

SEQ ID NO: 153240 - RNA, 19 nt, Human herpesvirus 5
gagcagcaaaacgaccaga

SEQ ID NO: 153241 - RNA, 20 nt, Human herpesvirus 5
gagcgccggggagacgacga

SEQ ID NO: 153242 - RNA, 18 nt, Human herpesvirus 5
gagcgggcggcgguggug

SEQ ID NO: 153243 - RNA, 14 nt, Human herpesvirus 5
gaaggaacgcacgc

SEQ ID NO: 153244 - RNA, 18 nt, Human herpesvirus 5
gaggaacccugcggcgcc

SEQ ID NO: 153245 - RNA, 15 nt, Human herpesvirus 5
gaggaagcgggggug

SEQ ID NO: 153246 - RNA, 18 nt, Human herpesvirus 5
gaggacauggacucgcca

SEQ ID NO: 153247 - RNA, 16 nt, Human herpesvirus 5
cugugcuggccgccgc

SEQ ID NO: 153248 - RNA, 23 nt, Human herpesvirus 5
cuguggcaccgccuccgaacgcu

SEQ ID NO: 153249 - RNA, 15 nt, Human herpesvirus 5
cuucaaccacgagua

SEQ ID NO: 153250 - RNA, 14 nt, Human herpesvirus 5
cuggucaacugcgu

SEQ ID NO: 153251 - RNA, 19 nt, Human herpesvirus 5
cuucuaccuggcuggcgca

SEQ ID NO: 153252 - RNA, 22 nt, Human herpesvirus 5
cuggucuggcccaaagaccgcu

SEQ ID NO: 153253 - RNA, 21 nt, Human herpesvirus 5
cuguaccguuauuucgugcgu

SEQ ID NO: 153254 - RNA, 15 nt, Human herpesvirus 5
cuccgucacgccucu

SEQ ID NO: 153255 - RNA, 15 nt, Human herpesvirus 5
cucgccgacguggug

SEQ ID NO: 153256 - RNA, 13 nt, Human herpesvirus 5
cuccacggccucc

SEQ ID NO: 153257 - RNA, 19 nt, Human herpesvirus 5
cucaccuggaccgguggua

SEQ ID NO: 153258 - RNA, 22 nt, Human herpesvirus 5
cuauuggcagaagcauagcgau

SEQ ID NO: 153259 - RNA, 17 nt, Human herpesvirus 5
cgugucgucuccacgua

SEQ ID NO: 153260 - RNA, 17 nt, Human herpesvirus 5
cguguucucccgacguc

SEQ ID NO: 153261 - RNA, 20 nt, Human herpesvirus 5
cguuaacuauuccacuagua

SEQ ID NO: 153262 - RNA, 19 nt, Human herpesvirus 5
cguuccguggagucgucuc

SEQ ID NO: 153263 - RNA, 20 nt, Human herpesvirus 5
cguuguuucuguacggcguu

SEQ ID NO: 153264 - RNA, 23 nt, Human herpesvirus 5
cguucacuuuuccguuuuacgug

SEQ ID NO: 153265 - RNA, 15 nt, Human herpesvirus 5
cuacucacguuggug

SEQ ID NO: 153266 - RNA, 21 nt, Human herpesvirus 5
cuacucgcacaaccuguggug

SEQ ID NO: 153267 - RNA, 21 nt, Human herpesvirus 5
cggcgcaacuucugucucggc

SEQ ID NO: 153268 - RNA, 12 nt, Human herpesvirus 5
cggcgccguccg

SEQ ID NO: 153269 - RNA, 20 nt, Human herpesvirus 5
cggcggcuguucgacagcgg

SEQ ID NO: 153270 - RNA, 14 nt, Human herpesvirus 5
cgguaaaaccacgu

SEQ ID NO: 153271 - RNA, 13 nt, Human herpesvirus 5
cgguacacguccc

SEQ ID NO: 153272 - RNA, 14 nt, Human herpesvirus 5
cgguaccacuacua

SEQ ID NO: 153273 - RNA, 22 nt, Human herpesvirus 5
cgguacgcagucacugcguguc

SEQ ID NO: 153274 - RNA, 14 nt, Human herpesvirus 5
cggugagacgaggc

SEQ ID NO: 153275 - RNA, 15 nt, Human herpesvirus 5
cggugcaggccgcgc

SEQ ID NO: 153276 - RNA, 22 nt, Human herpesvirus 5
cggugcguggaccagacggcgu

SEQ ID NO: 153277 - RNA, 21 nt, Human herpesvirus 5
cgguggucggcugccgccgcu

SEQ ID NO: 153278 - RNA, 15 nt, Human herpesvirus 5
cgguugcggcuuggu

SEQ ID NO: 153279 - RNA, 22 nt, Human herpesvirus 5
cgucacucuuggcacggggaau

SEQ ID NO: 153280 - RNA, 18 nt, Human herpesvirus 5
cgucaucucgccgacgug

SEQ ID NO: 153281 - RNA, 20 nt, Human herpesvirus 5
cgucaucucgccgacguggu

SEQ ID NO: 153282 - RNA, 16 nt, Human herpesvirus 5
cgucacaauugacgug

SEQ ID NO: 153283 - RNA, 20 nt, Human herpesvirus 5
cguccgggcuuuccuuguca

SEQ ID NO: 153284 - RNA, 22 nt, Human herpesvirus 5
cgucgaccuugagcgacagcag

SEQ ID NO: 153285 - RNA, 15 nt, Human herpesvirus 5
cgucuggacgcgcgg

SEQ ID NO: 153286 - RNA, 17 nt, Human herpesvirus 5
cgucuggacgcgcggcu

SEQ ID NO: 153287 - RNA, 18 nt, Human herpesvirus 5
cgugaaugggcacgccgu

SEQ ID NO: 153288 - RNA, 14 nt, Human herpesvirus 5
cgucgagcggcgug

SEQ ID NO: 153289 - RNA, 20 nt, Human herpesvirus 5
cgucgcaucaucaacagcag

SEQ ID NO: 153290 - RNA, 17 nt, Human herpesvirus 5
cgugccaggcuguucac

SEQ ID NO: 153291 - RNA, 20 nt, Human herpesvirus 5
cgugccaucaaucgcguccg

SEQ ID NO: 153292 - RNA, 20 nt, Human herpesvirus 5
cgugcccguuuucacagcag

SEQ ID NO: 153293 - RNA, 19 nt, Human herpesvirus 5
cgugcaacggcgacgcggu

SEQ ID NO: 153294 - RNA, 14 nt, Human herpesvirus 5
cgugcgcacgccgc

SEQ ID NO: 153295 - RNA, 16 nt, Human herpesvirus 5
cgugcgcacgccgcgc

SEQ ID NO: 153296 - RNA, 18 nt, Human herpesvirus 5
cguggacugggacgagga

SEQ ID NO: 153297 - RNA, 19 nt, Human herpesvirus 5
cguggcuuucuccgacgug

SEQ ID NO: 153298 - RNA, 21 nt, Human herpesvirus 5
cgucguuuuguucaccgucgc

SEQ ID NO: 153299 - RNA, 22 nt, Human herpesvirus 5
cgugcuuuuggugcgccacgua

SEQ ID NO: 153300 - RNA, 16 nt, Human herpesvirus 5
cgugcucgugcccauc

SEQ ID NO: 153301 - RNA, 13 nt, Human herpesvirus 5
cggcauccucggg

SEQ ID NO: 153302 - RNA, 22 nt, Human herpesvirus 5
cggcauccucgggcuuuccggc

SEQ ID NO: 153303 - RNA, 19 nt, Human herpesvirus 5
cgcucgcuuuggagcgcga

SEQ ID NO: 153304 - RNA, 19 nt, Human herpesvirus 5
cggcagucuuuuccgugac

SEQ ID NO: 153305 - RNA, 20 nt, Human herpesvirus 5
cgcucucgucaggcuuguca

SEQ ID NO: 153306 - RNA, 16 nt, Human herpesvirus 5
cgcucugacgccgcgc

SEQ ID NO: 153307 - RNA, 15 nt, Human herpesvirus 5
cgcucugccggcugc

SEQ ID NO: 153308 - RNA, 16 nt, Human herpesvirus 5
cgcucccugcuccgca

SEQ ID NO: 153309 - RNA, 19 nt, Human herpesvirus 5
cggcagcggaacucgaccu

SEQ ID NO: 153310 - RNA, 16 nt, Human herpesvirus 5
cgcguaagaaaccgcg

SEQ ID NO: 153311 - RNA, 15 nt, Human herpesvirus 5
cgcguaggacgacgu

SEQ ID NO: 153312 - RNA, 15 nt, Human herpesvirus 5
cgcgugccugggaac

SEQ ID NO: 153313 - RNA, 17 nt, Human herpesvirus 5
cgcgugcacgcgcugcu

SEQ ID NO: 153314 - RNA, 15 nt, Human herpesvirus 5
cgcuauggcggccau

SEQ ID NO: 153315 - RNA, 21 nt, Human herpesvirus 5
ccugcacgacaucuuccgcga

SEQ ID NO: 153316 - RNA, 17 nt, Human herpesvirus 5
ccugcagaccgaggcgc

SEQ ID NO: 153317 - RNA, 16 nt, Human herpesvirus 5
ccgugagugacgcggu

SEQ ID NO: 153318 - RNA, 21 nt, Human herpesvirus 5
ccuucugcuacgcggcgcccg

SEQ ID NO: 153319 - RNA, 21 nt, Human herpesvirus 5
ccucugccugggcacgcgcgu

SEQ ID NO: 153320 - RNA, 15 nt, Human herpesvirus 5
ccugacccgcggcua

SEQ ID NO: 153321 - RNA, 20 nt, Human herpesvirus 5
ccucuccuccgucgcggcca

SEQ ID NO: 153322 - RNA, 13 nt, Human herpesvirus 5
ccucggacaccgg

SEQ ID NO: 153323 - RNA, 13 nt, Human herpesvirus 5
ccuugcgcgcggu

SEQ ID NO: 153324 - RNA, 22 nt, Human herpesvirus 5
ccuugcgcucccugcuccgcaa

SEQ ID NO: 153325 - RNA, 14 nt, Human herpesvirus 5
cgaacguccucgga

SEQ ID NO: 153326 - RNA, 14 nt, Human herpesvirus 5
ccaccgacgcgcga

SEQ ID NO: 153327 - RNA, 16 nt, Human herpesvirus 5
ccaccgagacgugcga

SEQ ID NO: 153328 - RNA, 14 nt, Human herpesvirus 5
ccacaggcgccgca

SEQ ID NO: 153329 - RNA, 17 nt, Human herpesvirus 5
ccagaggcccgccgaga

SEQ ID NO: 153330 - RNA, 23 nt, Human herpesvirus 5
ccacgcucgcucugacgccgcgc

SEQ ID NO: 153331 - RNA, 20 nt, Human herpesvirus 5
ccacggaaguuccgacgcga

SEQ ID NO: 153332 - RNA, 19 nt, Human herpesvirus 5
ccacgacgcagaaagaggg

SEQ ID NO: 153333 - RNA, 16 nt, Human herpesvirus 5
ccacgagugacgacga

SEQ ID NO: 153334 - RNA, 20 nt, Human herpesvirus 5
ccaggauuucaccgccgcua

SEQ ID NO: 153335 - RNA, 18 nt, Human herpesvirus 5
cagacuuucgacgugcgc

SEQ ID NO: 153336 - RNA, 18 nt, Human herpesvirus 5
cagagaccgccgccgcgc

SEQ ID NO: 153337 - RNA, 15 nt, Human herpesvirus 5
cagacgucggcgguc

SEQ ID NO: 153338 - RNA, 20 nt, Human herpesvirus 5
cagaugacgagcgccggcga

SEQ ID NO: 153339 - RNA, 16 nt, Human herpesvirus 5
cagaugcucccggcgc

SEQ ID NO: 153340 - RNA, 20 nt, Human herpesvirus 5
cagauuuacagcccggcggu

SEQ ID NO: 153341 - RNA, 18 nt, Human herpesvirus 5
cagcaguaugacgugcga

SEQ ID NO: 153342 - RNA, 22 nt, Human herpesvirus 5
caucgguugccucuggguguug

SEQ ID NO: 153343 - RNA, 13 nt, Human herpesvirus 5
ccaaccucgccgu

SEQ ID NO: 153344 - RNA, 16 nt, Human herpesvirus 5
ccaaagccgccgccga

SEQ ID NO: 153345 - RNA, 12 nt, Human herpesvirus 5
ccaacacguccc

SEQ ID NO: 153346 - RNA, 21 nt, Human herpesvirus 5
caugcugagcaaguacacgcg

SEQ ID NO: 153347 - RNA, 21 nt, Human herpesvirus 5
cagcagggagccagauggcga

SEQ ID NO: 153348 - RNA, 21 nt, Human herpesvirus 5
cacaacggccgccgacgucgc

SEQ ID NO: 153349 - RNA, 14 nt, Human herpesvirus 5
cacaagcgcccgaa

SEQ ID NO: 153350 - RNA, 23 nt, Human herpesvirus 5
cacacuggcuggaauacguggcg

SEQ ID NO: 153351 - RNA, 13 nt, Human herpesvirus 5
caagcuugguaca

SEQ ID NO: 153352 - RNA, 14 nt, Human herpesvirus 5
caauuccacgccgc

SEQ ID NO: 153353 - RNA, 16 nt, Human herpesvirus 5
cacaccugccucgaca

SEQ ID NO: 153354 - RNA, 23 nt, Human herpesvirus 5
cacacgguccgugggagacgcgg

SEQ ID NO: 153355 - RNA, 20 nt, Human herpesvirus 5
caccaccgagacgugcgacc

SEQ ID NO: 153356 - RNA, 13 nt, Human herpesvirus 5
caccaaccgacgu

SEQ ID NO: 153357 - RNA, 15 nt, Human herpesvirus 5
caccaauaggggagu

SEQ ID NO: 153358 - RNA, 14 nt, Human herpesvirus 5
cacgucgaccaggu

SEQ ID NO: 153359 - RNA, 19 nt, Human herpesvirus 5
cacgucggcucgaagaggu

SEQ ID NO: 153360 - RNA, 21 nt, Human herpesvirus 5
cacgucuagcaggcccaggcc

SEQ ID NO: 153361 - RNA, 16 nt, Human herpesvirus 5
caccaggugccggcga

SEQ ID NO: 153362 - RNA, 23 nt, Human herpesvirus 5
cacuccacacgccauaacaaacc

SEQ ID NO: 153363 - RNA, 19 nt, Human herpesvirus 5
cacggccuccgacgagcgu

SEQ ID NO: 153364 - RNA, 16 nt, Human herpesvirus 5
cacggcgaaccgccgu

SEQ ID NO: 153365 - RNA, 19 nt, Human herpesvirus 5
cacggcgaaccgccgucgc

SEQ ID NO: 153366 - RNA, 22 nt, Human herpesvirus 5
cacgguacgauaaaaacaacgu

SEQ ID NO: 153367 - RNA, 23 nt, Human herpesvirus 5
cacggugacguagcagcacgcgg

SEQ ID NO: 153368 - RNA, 19 nt, Human herpesvirus 5
cacgguggccaacaagcgg

SEQ ID NO: 153369 - RNA, 16 nt, Human herpesvirus 5
cacggcuaccaugcgc

SEQ ID NO: 153370 - RNA, 19 nt, Human herpesvirus 5
aguacaaaacaggaaagga

SEQ ID NO: 153371 - RNA, 20 nt, Human herpesvirus 5
aggucgucuuggaagccgau

SEQ ID NO: 153372 - RNA, 17 nt, Human herpesvirus 5
caagugcaagcgccgcg

SEQ ID NO: 153373 - RNA, 22 nt, Human herpesvirus 5
caaguuggugguggaaugcggu

SEQ ID NO: 153374 - RNA, 22 nt, Human herpesvirus 5
caaggugauuauuaaaccgccc

SEQ ID NO: 153375 - RNA, 21 nt, Human herpesvirus 5
aguaggcgcgcacccgacggc

SEQ ID NO: 153376 - RNA, 16 nt, Human herpesvirus 5
ccggugcgcgaccgca

SEQ ID NO: 153377 - RNA, 18 nt, Human herpesvirus 5
ccguacacgcacgcuggu

SEQ ID NO: 153378 - RNA, 12 nt, Human herpesvirus 5
ccgucgccgcga

SEQ ID NO: 153379 - RNA, 20 nt, Human herpesvirus 5
ccgguaaaggaacaacccgu

SEQ ID NO: 153380 - RNA, 20 nt, Human herpesvirus 5
ccgguauucggaaacagcgu

SEQ ID NO: 153381 - RNA, 20 nt, Human herpesvirus 5
ccgcgacaacggccgccgca

SEQ ID NO: 153382 - RNA, 22 nt, Human herpesvirus 5
ccggccgcggugccggcggcua

SEQ ID NO: 153383 - RNA, 18 nt, Human herpesvirus 5
ccgggccaccagccgcga

SEQ ID NO: 153384 - RNA, 14 nt, Human herpesvirus 5
ccggcgcgguguua

SEQ ID NO: 153385 - RNA, 14 nt, Human herpesvirus 5
ccucccuccgcggc

SEQ ID NO: 153386 - RNA, 16 nt, Human herpesvirus 5
ccuccgacgacgccga

SEQ ID NO: 153387 - RNA, 13 nt, Human herpesvirus 5
ccuccggcuguca

SEQ ID NO: 153388 - RNA, 19 nt, Human herpesvirus 5
ccucauguguauggcccug

SEQ ID NO: 153389 - RNA, 16 nt, Human herpesvirus 5
ccuauccgcgcggcua

SEQ ID NO: 153390 - RNA, 14 nt, Human herpesvirus 5
ccuauggcgccgug

SEQ ID NO: 153391 - RNA, 15 nt, Human herpesvirus 5
ccuaagacgucgcga

SEQ ID NO: 153392 - RNA, 16 nt, Human herpesvirus 5
ccgugggucccggcgc

SEQ ID NO: 153393 - RNA, 22 nt, Human herpesvirus 5
ccgucggaaacccgacgagaca

SEQ ID NO: 153394 - RNA, 23 nt, Human herpesvirus 5
ccgccucggaucuacucaucggc

SEQ ID NO: 153395 - RNA, 12 nt, Human herpesvirus 5
ccgccgcggcgu

SEQ ID NO: 153396 - RNA, 20 nt, Human herpesvirus 5
ccgcuuaacaacguguccag

SEQ ID NO: 153397 - RNA, 14 nt, Human herpesvirus 5
ccggaccgugcacg

SEQ ID NO: 153398 - RNA, 12 nt, Human herpesvirus 5
ccgcggaggugc

SEQ ID NO: 153399 - RNA, 19 nt, Human herpesvirus 5
ccgagcccccgucgcccga

SEQ ID NO: 153400 - RNA, 20 nt, Human herpesvirus 5
ccgacgcuggcgcugcggcu

SEQ ID NO: 153401 - RNA, 17 nt, Human herpesvirus 5
ccgacgcgcgaccgcga

SEQ ID NO: 153402 - RNA, 19 nt, Human herpesvirus 5
ccgaagguuagcgccgcgg

SEQ ID NO: 153403 - RNA, 21 nt, Human herpesvirus 5
ccgcagcgaguugcugugcac

SEQ ID NO: 153404 - RNA, 14 nt, Human herpesvirus 5
ccgaugcuccgcga

SEQ ID NO: 153405 - RNA, 15 nt, Human herpesvirus 5
ccgcaagcgccgcca

SEQ ID NO: 153406 - RNA, 17 nt, Human herpesvirus 5
ccgacaaccugcugcac

SEQ ID NO: 153407 - RNA, 23 nt, Human herpesvirus 5
cccgaggucuuuugcacgcgcga

SEQ ID NO: 153408 - RNA, 19 nt, Human herpesvirus 5
cccgcacgacgaccccgcu

SEQ ID NO: 153409 - RNA, 20 nt, Human herpesvirus 5
cccgcuucaacgccugcacc

SEQ ID NO: 153410 - RNA, 19 nt, Human herpesvirus 5
cccgucaaaacacacgcga

SEQ ID NO: 153411 - RNA, 12 nt, Human herpesvirus 5
ccgaacgcugcu

SEQ ID NO: 153412 - RNA, 20 nt, Human herpesvirus 5
cccucucgcgcccgcagaca

SEQ ID NO: 153413 - RNA, 18 nt, Human herpesvirus 5
cccucuucuuugccggcu

SEQ ID NO: 153414 - RNA, 19 nt, Human herpesvirus 5
cccugaguucacgcgcgga

SEQ ID NO: 153415 - RNA, 17 nt, Human herpesvirus 5
cccuauggcacgucgcu

SEQ ID NO: 153416 - RNA, 18 nt, Human herpesvirus 5
ccccgaauuugggcggug

SEQ ID NO: 153417 - RNA, 21 nt, Human herpesvirus 5
cccccgcugagcguuggcggc

SEQ ID NO: 153418 - RNA, 23 nt, Human herpesvirus 5
cccacgacuguucgucgagcacc

SEQ ID NO: 153419 - RNA, 14 nt, Human herpesvirus 5
cccgagacggcggc

SEQ ID NO: 153420 - RNA, 14 nt, Human herpesvirus 5
cccgccguugcggc

SEQ ID NO: 153421 - RNA, 17 nt, Human herpesvirus 5
accgacaaggcgcggcg

SEQ ID NO: 153422 - RNA, 18 nt, Human herpesvirus 5
accgacaaggcgcggcga

SEQ ID NO: 153423 - RNA, 14 nt, Human herpesvirus 5
accgagacggagga

SEQ ID NO: 153424 - RNA, 15 nt, Human herpesvirus 5
acggacggcaaggcg

SEQ ID NO: 153425 - RNA, 17 nt, Human herpesvirus 5
acggacggcaaggcgga

SEQ ID NO: 153426 - RNA, 13 nt, Human herpesvirus 5
acggagccguuac

SEQ ID NO: 153427 - RNA, 22 nt, Human herpesvirus 5
acggagcucccacguuuacgcg

SEQ ID NO: 153428 - RNA, 19 nt, Human herpesvirus 5
acggauugcgccaguuguc

SEQ ID NO: 153429 - RNA, 22 nt, Human herpesvirus 5
acgguacgcagucacugcgugu

SEQ ID NO: 153430 - RNA, 14 nt, Human herpesvirus 5
acgguccgggcaca

SEQ ID NO: 153431 - RNA, 13 nt, Human herpesvirus 5
acggugcgcggcg

SEQ ID NO: 153432 - RNA, 14 nt, Human herpesvirus 5
acggugcgcggcga

SEQ ID NO: 153433 - RNA, 16 nt, Human herpesvirus 5
acgucguugaagacac

SEQ ID NO: 153434 - RNA, 20 nt, Human herpesvirus 5
acgcuucauauuaguauacu

SEQ ID NO: 153435 - RNA, 15 nt, Human herpesvirus 5
agaauggaccgucga

SEQ ID NO: 153436 - RNA, 20 nt, Human herpesvirus 5
acggugucgccaccguugac

SEQ ID NO: 153437 - RNA, 21 nt, Human herpesvirus 5
acguacaagaaccacguuguc

SEQ ID NO: 153438 - RNA, 22 nt, Human herpesvirus 5
acguacuguuuaaccacguugc

SEQ ID NO: 153439 - RNA, 20 nt, Human herpesvirus 5
acguaguuccccuacgugac

SEQ ID NO: 153440 - RNA, 21 nt, Human herpesvirus 5
agacgaugauaccgaaggcga

SEQ ID NO: 153441 - RNA, 21 nt, Human herpesvirus 5
aggacgggaugcacagcgucu

SEQ ID NO: 153442 - RNA, 18 nt, Human herpesvirus 5
aggacucgcucacgucgu

SEQ ID NO: 153443 - RNA, 15 nt, Human herpesvirus 5
aggagacaccgucgc

SEQ ID NO: 153444 - RNA, 21 nt, Human herpesvirus 5
agccguguuuagucgcggcga

SEQ ID NO: 153445 - RNA, 18 nt, Human herpesvirus 5
agccgccgacgcuggcgc

SEQ ID NO: 153446 - RNA, 18 nt, Human herpesvirus 5
agccucaagaauccgucc

SEQ ID NO: 153447 - RNA, 12 nt, Human herpesvirus 5
agacgcugcgcu

SEQ ID NO: 153448 - RNA, 21 nt, Human herpesvirus 5
agcagaaggaauaauccgugc

SEQ ID NO: 153449 - RNA, 18 nt, Human herpesvirus 5
agcaagaguugcaacgcg

SEQ ID NO: 153450 - RNA, 14 nt, Human herpesvirus 5
agacugugguggga

SEQ ID NO: 153451 - RNA, 19 nt, Human herpesvirus 5
acaccuguuggagcaacgg

SEQ ID NO: 153452 - RNA, 20 nt, Human herpesvirus 5
accacaacggccgccgacgu

SEQ ID NO: 153453 - RNA, 13 nt, Human herpesvirus 5
accccaagccaaa

SEQ ID NO: 153454 - RNA, 22 nt, Human herpesvirus 5
accacccuguuccccgugacgu

SEQ ID NO: 153455 - RNA, 16 nt, Human herpesvirus 5
accacgucaccgugcc

SEQ ID NO: 153456 - RNA, 20 nt, Human herpesvirus 5
accauccucaccccgcgcga

SEQ ID NO: 153457 - RNA, 17 nt, Human herpesvirus 5
acccuguuccccgugac

SEQ ID NO: 153458 - RNA, 17 nt, Human herpesvirus 5
aaggccgugccgccgcg

SEQ ID NO: 153459 - RNA, 19 nt, Human herpesvirus 5
aacgucaucucgccgacgu

SEQ ID NO: 153460 - RNA, 17 nt, Human herpesvirus 5
aaucagcagugaguaca

SEQ ID NO: 153461 - RNA, 14 nt, Human herpesvirus 5
aauaccaacguauc

SEQ ID NO: 153462 - RNA, 19 nt, Human herpesvirus 5
aauugcaacuuaacgcgca

SEQ ID NO: 153463 - RNA, 18 nt, Human herpesvirus 5
acaaccacggcgaaccgc

SEQ ID NO: 153464 - RNA, 20 nt, Human herpesvirus 5
aaccucuaccucguccgccu

SEQ ID NO: 153465 - RNA, 14 nt, Human herpesvirus 5
aaccgugguccgcu

SEQ ID NO: 153466 - RNA, 14 nt, Human herpesvirus 5
aacguguggugaga

SEQ ID NO: 153467 - RNA, 20 nt, Human herpesvirus 5
aagacaucgucacaccuauc

SEQ ID NO: 153468 - RNA, 23 nt, Human herpesvirus 5
aacaaccuaugauauaaagcggu

SEQ ID NO: 153469 - RNA, 21 nt, Human herpesvirus 5
aacaccguguucucccgacgu

SEQ ID NO: 153470 - RNA, 13 nt, Human herpesvirus 5
aacacgcaacacg

SEQ ID NO: 153471 - RNA, 21 nt, Human herpesvirus 5
aacacguaacgucuucugaag

SEQ ID NO: 153472 - RNA, 16 nt, Human herpesvirus 5
aacacuccucuccccg

SEQ ID NO: 153473 - RNA, 21 nt, Human herpesvirus 5
aacccaaguagcggcgcgccc

SEQ ID NO: 153474 - RNA, 16 nt, Human herpesvirus 5
aaccccguguccgccc

SEQ ID NO: 153475 - RNA, 11 nt, Human herpesvirus 5
uggggcugcug

SEQ ID NO: 153476 - RNA, 19 nt, Human herpesvirus 5
uggagaaaacgccggcgga

SEQ ID NO: 153477 - RNA, 16 nt, Human herpesvirus 5
uggaccagacggcguc

SEQ ID NO: 153478 - RNA, 17 nt, Human herpesvirus 5
uggcccuggucuggccc

SEQ ID NO: 153479 - RNA, 14 nt, Human herpesvirus 5
ugcggcgcagacgu

SEQ ID NO: 153480 - RNA, 15 nt, Human herpesvirus 5
ugcgggguggugcuc

SEQ ID NO: 153481 - RNA, 21 nt, Human herpesvirus 5
ucggauacagggugccgccac

SEQ ID NO: 153482 - RNA, 24 nt, Human herpesvirus 5
uggaaauucaauaaaaaccaccgu

SEQ ID NO: 153483 - RNA, 16 nt, Human herpesvirus 5
uggaacgagcgccguc

SEQ ID NO: 153484 - RNA, 13 nt, Human herpesvirus 5
guggugacggugg

SEQ ID NO: 153485 - RNA, 13 nt, Human herpesvirus 5
guggugaucgugg

SEQ ID NO: 153486 - RNA, 17 nt, Human herpesvirus 5
guguaccaucuggcgca

SEQ ID NO: 153487 - RNA, 14 nt, Human herpesvirus 5
gugcgcguccacag

SEQ ID NO: 153488 - RNA, 21 nt, Human herpesvirus 5
guggcggcgguggagggcgcg

SEQ ID NO: 153489 - RNA, 16 nt, Human herpesvirus 5
gugggaaugguaaaga

SEQ ID NO: 153490 - RNA, 15 nt, Human herpesvirus 5
gugcguggaccagac

SEQ ID NO: 153491 - RNA, 20 nt, Human herpesvirus 5
guugaagacaccuggaaaga

SEQ ID NO: 153492 - RNA, 15 nt, Human herpesvirus 5
guucugcacggcguc

SEQ ID NO: 153493 - RNA, 21 nt, Human herpesvirus 5
guuuccagagaacgcagcgca

SEQ ID NO: 153494 - RNA, 20 nt, Human herpesvirus 5
guuucggaguaccgaguaga

SEQ ID NO: 153495 - RNA, 18 nt, Human herpesvirus 5
guuucuggggugggcgcg

SEQ ID NO: 153496 - RNA, 11 nt, Human herpesvirus 5
guuugcgucuc

SEQ ID NO: 153497 - RNA, 18 nt, Human herpesvirus 5
guguagauuuauggaaaa

SEQ ID NO: 153498 - RNA, 18 nt, Human herpesvirus 5
guguuucgguccgaugua

SEQ ID NO: 153499 - RNA, 17 nt, Human herpesvirus 5
guguuuucaccgacgug

SEQ ID NO: 153500 - RNA, 18 nt, Human herpesvirus 5
guuaacccccgacgagca

SEQ ID NO: 153501 - RNA, 17 nt, Human herpesvirus 5
guucaucgucuacgucg

SEQ ID NO: 153502 - RNA, 18 nt, Human herpesvirus 5
gucggagccccugcgcgc

SEQ ID NO: 153503 - RNA, 17 nt, Human herpesvirus 5
gucggccugggcugcug

SEQ ID NO: 153504 - RNA, 13 nt, Human herpesvirus 5
gucuccaccacag

SEQ ID NO: 153505 - RNA, 14 nt, Human herpesvirus 5
gucgacgacgccgu

SEQ ID NO: 153506 - RNA, 13 nt, Human herpesvirus 5
gugaauggaaaua

SEQ ID NO: 153507 - RNA, 16 nt, Human herpesvirus 5
gugaauucuggcaaga

SEQ ID NO: 153508 - RNA, 19 nt, Human herpesvirus 5
ucaguguacacgcgcccag

SEQ ID NO: 153509 - RNA, 19 nt, Human herpesvirus 5
ucgagacuugcacgcuguc

SEQ ID NO: 153510 - RNA, 18 nt, Human herpesvirus 5
ucgccgccgucgcgccuu

SEQ ID NO: 153511 - RNA, 20 nt, Human herpesvirus 5
ucgauccucucucacgcguc

SEQ ID NO: 153512 - RNA, 20 nt, Human herpesvirus 5
ucacgggaaggcuaguuaga

SEQ ID NO: 153513 - RNA, 18 nt, Human herpesvirus 5
ucaccuagacgcaaacgc

SEQ ID NO: 153514 - RNA, 21 nt, Human herpesvirus 5
ucagaaagcaccagaacccgu

SEQ ID NO: 153515 - RNA, 22 nt, Human herpesvirus 5
ucagaaagcaccagaacccguc

SEQ ID NO: 153516 - RNA, 14 nt, Human herpesvirus 5
uaugggcggugguc

SEQ ID NO: 153517 - RNA, 20 nt, Human herpesvirus 5
uacaccaguucguagaucac

SEQ ID NO: 153518 - RNA, 21 nt, Human herpesvirus 5
uaauaagccggcagcugcuuu

SEQ ID NO: 153519 - RNA, 18 nt, Human herpesvirus 5
uaaccacguugcgucgug

SEQ ID NO: 153520 - RNA, 15 nt, Human herpesvirus 5
uaaccuacguccgug

SEQ ID NO: 153521 - RNA, 15 nt, Human herpesvirus 5
uacagcccggcggug

SEQ ID NO: 153522 - RNA, 20 nt, Human herpesvirus 5
uacgauaauugcuacgucac

SEQ ID NO: 153523 - RNA, 23 nt, Human herpesvirus 5
uagaccaaaccggacgcugccuc

SEQ ID NO: 153524 - RNA, 19 nt, Human herpesvirus 5
uagguguggcgaaagccuc

SEQ ID NO: 153525 - RNA, 22 nt, Human herpesvirus 5
uaguaauggaaaguaucgucac

SEQ ID NO: 153526 - RNA, 15 nt, Human herpesvirus 5
uaguauccacgucac

SEQ ID NO: 153527 - RNA, 16 nt, Human herpesvirus 5
uauacaucuccgucuc

SEQ ID NO: 153528 - RNA, 19 nt, Human herpesvirus 5
ggaggugaccuggcugcuu

SEQ ID NO: 153529 - RNA, 13 nt, Human herpesvirus 5
gcgaccagcugcu

SEQ ID NO: 153530 - RNA, 20 nt, Human herpesvirus 5
gcgccgugcucagcggcgug

SEQ ID NO: 153531 - RNA, 16 nt, Human herpesvirus 5
gcgccguaguucuccg

SEQ ID NO: 153532 - RNA, 14 nt, Human herpesvirus 5
gcgcgacacggugg

SEQ ID NO: 153533 - RNA, 17 nt, Human herpesvirus 5
gcgcgcgucuggacgcg

SEQ ID NO: 153534 - RNA, 18 nt, Human herpesvirus 5
gcgcgcacccgacggcgg

SEQ ID NO: 153535 - RNA, 18 nt, Human herpesvirus 5
gguuguuccggcggcgug

SEQ ID NO: 153536 - RNA, 16 nt, Human herpesvirus 5
gguuaccccucgcugg

SEQ ID NO: 153537 - RNA, 17 nt, Human herpesvirus 5
gguuuucggacagagca

SEQ ID NO: 153538 - RNA, 20 nt, Human herpesvirus 5
gucaaggcucgcaaagacgu

SEQ ID NO: 153539 - RNA, 19 nt, Human herpesvirus 5
guauucaucgggucgucuc

SEQ ID NO: 153540 - RNA, 13 nt, Human herpesvirus 5
gucagucagaagu

SEQ ID NO: 153541 - RNA, 14 nt, Human herpesvirus 5
guaggaguggcgcc

SEQ ID NO: 153542 - RNA, 13 nt, Human herpesvirus 5
guacgcgcacgcc

SEQ ID NO: 153543 - RNA, 20 nt, Human herpesvirus 5
ggcucucggaucugcggcuc

SEQ ID NO: 153544 - RNA, 14 nt, Human herpesvirus 5
ggcgguggcugcgc

SEQ ID NO: 153545 - RNA, 15 nt, Human herpesvirus 5
cgggaaaccacgccg

SEQ ID NO: 153546 - RNA, 16 nt, Human herpesvirus 5
cgggaaaccacgccgg

SEQ ID NO: 153547 - RNA, 17 nt, Human herpesvirus 5
cggcguucgcgugcacg

SEQ ID NO: 153548 - RNA, 15 nt, Human herpesvirus 5
cggcugcuguugcac

SEQ ID NO: 153549 - RNA, 15 nt, Human herpesvirus 5
cggcucaccacgcag

SEQ ID NO: 153550 - RNA, 20 nt, Human herpesvirus 5
cggcgugaaugggcacgccg

SEQ ID NO: 153551 - RNA, 20 nt, Human herpesvirus 5
cggcaccaucggacucgcca

SEQ ID NO: 153552 - RNA, 19 nt, Human herpesvirus 5
cggcacgccguugccacga

SEQ ID NO: 153553 - RNA, 14 nt, Human herpesvirus 5
cggaaaaaccgcgc

SEQ ID NO: 153554 - RNA, 18 nt, Human herpesvirus 5
cggagcagccgccagcga

SEQ ID NO: 153555 - RNA, 14 nt, Human herpesvirus 5
cgcuggcucggcgc

SEQ ID NO: 153556 - RNA, 17 nt, Human herpesvirus 5
cggaaguuccgacgcga

SEQ ID NO: 153557 - RNA, 13 nt, Human herpesvirus 5
cgcugcugcucuc

SEQ ID NO: 153558 - RNA, 17 nt, Human herpesvirus 5
cgcggcgagguggucaa

SEQ ID NO: 153559 - RNA, 18 nt, Human herpesvirus 5
cgcggcccccacggcggc

SEQ ID NO: 153560 - RNA, 14 nt, Human herpesvirus 5
cgcgcgagcgugcg

SEQ ID NO: 153561 - RNA, 14 nt, Human herpesvirus 5
cgcggcagcggcgc

SEQ ID NO: 153562 - RNA, 19 nt, Human herpesvirus 5
cgcugacagcauacgggga

SEQ ID NO: 153563 - RNA, 20 nt, Human herpesvirus 5
cgcugacguugaugcggcgc

SEQ ID NO: 153564 - RNA, 18 nt, Human herpesvirus 5
cgcugauaacgacguggu

SEQ ID NO: 153565 - RNA, 23 nt, Human herpesvirus 5
cgcggagguuugucuggcggcuu

SEQ ID NO: 153566 - RNA, 15 nt, Human herpesvirus 5
cgcggaaacgacgga

SEQ ID NO: 153567 - RNA, 19 nt, Human herpesvirus 5
cgcgcucuguaccguuauu

SEQ ID NO: 153568 - RNA, 12 nt, Human herpesvirus 5
cgcgcgaccgcg

SEQ ID NO: 153569 - RNA, 18 nt, Human herpesvirus 5
cgcgcuuugcgccgccgc

SEQ ID NO: 153570 - RNA, 21 nt, Human herpesvirus 5
cgcgccucucggagccgccga

SEQ ID NO: 153571 - RNA, 13 nt, Human herpesvirus 5
cgcgcgcccgcgc

SEQ ID NO: 153572 - RNA, 16 nt, Human herpesvirus 5
cgccgugacguccgcu

SEQ ID NO: 153573 - RNA, 15 nt, Human herpesvirus 5
cgccgugggcggcga

SEQ ID NO: 153574 - RNA, 15 nt, Human herpesvirus 5
cgccggcgggcggcu

SEQ ID NO: 153575 - RNA, 17 nt, Human herpesvirus 5
cgccggggagacgacga

SEQ ID NO: 153576 - RNA, 15 nt, Human herpesvirus 5
cgccugcgacggcgg

SEQ ID NO: 153577 - RNA, 16 nt, Human herpesvirus 5
cgccugcgacggcggg

SEQ ID NO: 153578 - RNA, 15 nt, Human herpesvirus 5
cgccucuucuggccc

SEQ ID NO: 153579 - RNA, 18 nt, Human herpesvirus 5
cgccguguguuaccgccg

SEQ ID NO: 153580 - RNA, 19 nt, Human herpesvirus 5
cgccguugcggccgccgcu

SEQ ID NO: 153581 - RNA, 14 nt, Human herpesvirus 5
cgccuccgguggug

SEQ ID NO: 153582 - RNA, 22 nt, Human herpesvirus 5
cgccgcucauaaugccgucacc

SEQ ID NO: 153583 - RNA, 16 nt, Human herpesvirus 5
cgccgcccgacgccga

SEQ ID NO: 153584 - RNA, 15 nt, Human herpesvirus 5
cgccgccgacucgcu

SEQ ID NO: 153585 - RNA, 13 nt, Human herpesvirus 5
cgccgccgucacc

SEQ ID NO: 153586 - RNA, 11 nt, Human herpesvirus 5
cgccgcagacc

SEQ ID NO: 153587 - RNA, 15 nt, Human herpesvirus 5
cgccgccagcgcggu

SEQ ID NO: 153588 - RNA, 18 nt, Human herpesvirus 5
cgccgauagagauggcga

SEQ ID NO: 153589 - RNA, 15 nt, Human herpesvirus 5
cgccgauagaggcga

SEQ ID NO: 153590 - RNA, 19 nt, Human herpesvirus 5
cgcgccacaacgccguccg

SEQ ID NO: 153591 - RNA, 19 nt, Human herpesvirus 5
cgcgagccccaucgggccc

SEQ ID NO: 153592 - RNA, 15 nt, Human herpesvirus 5
cgcgccgggcggcuu

SEQ ID NO: 153593 - RNA, 23 nt, Human herpesvirus 5
cgcgcccucuucuuugccggcuc

SEQ ID NO: 153594 - RNA, 23 nt, Human herpesvirus 5
cgcgaccagcugcuggacgacgu

SEQ ID NO: 153595 - RNA, 20 nt, Human herpesvirus 5
cgcgacguguugcgggaccu

SEQ ID NO: 153596 - RNA, 13 nt, Human herpesvirus 5
cgcgaacgccgcg

SEQ ID NO: 153597 - RNA, 19 nt, Human herpesvirus 5
cgccaacuaccgugccacc

SEQ ID NO: 153598 - RNA, 15 nt, Human herpesvirus 5
cgccacaacgccguc

SEQ ID NO: 153599 - RNA, 13 nt, Human herpesvirus 5
cgccagcggccug

SEQ ID NO: 153600 - RNA, 21 nt, Human herpesvirus 5
cgcagcagagccaccaggugc

SEQ ID NO: 153601 - RNA, 15 nt, Human herpesvirus 5
cgcccgagacggcgg

SEQ ID NO: 153602 - RNA, 21 nt, Human herpesvirus 5
cgaucugugauccgugcgcuc

SEQ ID NO: 153603 - RNA, 21 nt, Human herpesvirus 5
cgaucgcgcuuuugaccgcga

SEQ ID NO: 153604 - RNA, 18 nt, Human herpesvirus 5
cgaucguaacccaggcgc

SEQ ID NO: 153605 - RNA, 22 nt, Human herpesvirus 5
cgauguuucggaguaccgagua

SEQ ID NO: 153606 - RNA, 19 nt, Human herpesvirus 5
cgaggcgcuggacgccauc

SEQ ID NO: 153607 - RNA, 17 nt, Human herpesvirus 5
cgagcguugcgcucgcg

SEQ ID NO: 153608 - RNA, 15 nt, Human herpesvirus 5
cgcaaaggccacgug

SEQ ID NO: 153609 - RNA, 20 nt, Human herpesvirus 5
cgcacaacugguuccugcag

SEQ ID NO: 153610 - RNA, 14 nt, Human herpesvirus 5
cgcacgagacgcga

SEQ ID NO: 153611 - RNA, 23 nt, Human herpesvirus 5
cgcacgagacgcgacuccugcag

SEQ ID NO: 153612 - RNA, 22 nt, Human herpesvirus 5
cgagacggcgugacacagcacg

SEQ ID NO: 153613 - RNA, 16 nt, Human herpesvirus 5
cgagcgcgaacgccgc

SEQ ID NO: 153614 - RNA, 18 nt, Human herpesvirus 5
cgagcgcgaacgccgcgc

SEQ ID NO: 153615 - RNA, 18 nt, Human herpesvirus 5
cgagcgcggcacgccguu

SEQ ID NO: 153616 - RNA, 15 nt, Human herpesvirus 5
cgaauuugggcggug

SEQ ID NO: 153617 - RNA, 15 nt, Human herpesvirus 5
cgacgaaggacggga

SEQ ID NO: 153618 - RNA, 15 nt, Human herpesvirus 5
cgacgagcgcugcga

SEQ ID NO: 153619 - RNA, 16 nt, Human herpesvirus 5
cgacgcgcgaccgcga

SEQ ID NO: 153620 - RNA, 12 nt, Human herpesvirus 5
cgacggacgcga

SEQ ID NO: 153621 - RNA, 19 nt, Human herpesvirus 5
cgacguagguuaccgcgug

SEQ ID NO: 153622 - RNA, 23 nt, Human herpesvirus 5
caucaccaacguuaccuccgacu

SEQ ID NO: 153623 - RNA, 18 nt, Human herpesvirus 5
cauccagcuccguucgcg

SEQ ID NO: 153624 - RNA, 20 nt, Human herpesvirus 5
cauaagaauaggaagaaacc

SEQ ID NO: 153625 - RNA, 20 nt, Human herpesvirus 5
cauaaugccgucaccgucgc

SEQ ID NO: 153626 - RNA, 23 nt, Human herpesvirus 5
caguguauuggcauauagccaau

SEQ ID NO: 153627 - RNA, 12 nt, Human herpesvirus 5
caguccgcuccg

SEQ ID NO: 153628 - RNA, 17 nt, Human herpesvirus 5
caggguaaaaaccacgu

SEQ ID NO: 153629 - RNA, 17 nt, Human herpesvirus 5
caggggcuggacguggu

SEQ ID NO: 153630 - RNA, 19 nt, Human herpesvirus 5
caggugugcgcgucggcgc

SEQ ID NO: 153631 - RNA, 20 nt, Human herpesvirus 5
caguacaacaguuaucagca

SEQ ID NO: 153632 - RNA, 16 nt, Human herpesvirus 5
cagggcgcgccggcgc

SEQ ID NO: 153633 - RNA, 22 nt, Human herpesvirus 5
cagggaauuuugaaaaccgcgc

SEQ ID NO: 153634 - RNA, 16 nt, Human herpesvirus 5
caggcuguucacgcgg

SEQ ID NO: 153635 - RNA, 15 nt, Human herpesvirus 5
caggccgacucgcgg

SEQ ID NO: 153636 - RNA, 15 nt, Human herpesvirus 5
gaccggcggcugcug

SEQ ID NO: 153637 - RNA, 18 nt, Human herpesvirus 5
gacauggagacaguuucc

SEQ ID NO: 153638 - RNA, 17 nt, Human herpesvirus 5
gacauggagcccacgcc

SEQ ID NO: 153639 - RNA, 13 nt, Human herpesvirus 5
cugcucgaccgcu

SEQ ID NO: 153640 - RNA, 21 nt, Human herpesvirus 5
cuggacgcggugaacgugcgc

SEQ ID NO: 153641 - RNA, 19 nt, Human herpesvirus 5
gacacuaggcguccgcgcc

SEQ ID NO: 153642 - RNA, 18 nt, Human herpesvirus 5
cuggcaacgugccacgug

SEQ ID NO: 153643 - RNA, 16 nt, Human herpesvirus 5
cuggccgagacggcgu

SEQ ID NO: 153644 - RNA, 19 nt, Human herpesvirus 5
gacgauuuuaugcgccgcc

SEQ ID NO: 153645 - RNA, 19 nt, Human herpesvirus 5
gacgaagugccgcgccgcc

SEQ ID NO: 153646 - RNA, 23 nt, Human herpesvirus 5
gacgaccuacgggacacgcugau

SEQ ID NO: 153647 - RNA, 22 nt, Human herpesvirus 5
gacgacgguuuccacgccaccg

SEQ ID NO: 153648 - RNA, 16 nt, Human herpesvirus 5
gacgaucccucgccgc

SEQ ID NO: 153649 - RNA, 14 nt, Human herpesvirus 5
gacgagcaggcucg

SEQ ID NO: 153650 - RNA, 17 nt, Human herpesvirus 5
gacgagcguugcgcucg

SEQ ID NO: 153651 - RNA, 18 nt, Human herpesvirus 5
gacgagggucugcgcgac

SEQ ID NO: 153652 - RNA, 18 nt, Human herpesvirus 5
gacgcucggccuugcgcu

SEQ ID NO: 153653 - RNA, 18 nt, Human herpesvirus 5
gacggugguuuccgcgcc

SEQ ID NO: 153654 - RNA, 15 nt, Human herpesvirus 5
gacgguuuccacgcc

SEQ ID NO: 153655 - RNA, 17 nt, Human herpesvirus 5
gacggcguuuuggcgcc

SEQ ID NO: 153656 - RNA, 15 nt, Human herpesvirus 5
gacgugacgguguuu

SEQ ID NO: 153657 - RNA, 16 nt, Human herpesvirus 5
cucgcucgcgcccgcu

SEQ ID NO: 153658 - RNA, 20 nt, Human herpesvirus 5
cucgcgucuuagacgcgcgg

SEQ ID NO: 153659 - RNA, 17 nt, Human herpesvirus 5
cucgggccgaaccccgu

SEQ ID NO: 153660 - RNA, 16 nt, Human herpesvirus 5
cucgggugcaccgcgg

SEQ ID NO: 153661 - RNA, 20 nt, Human herpesvirus 5
cucgucggugagacgaggcc

SEQ ID NO: 153662 - RNA, 18 nt, Human herpesvirus 5
cucggagccgccgacgcu

SEQ ID NO: 153663 - RNA, 17 nt, Human herpesvirus 5
cugcaccaaccgacgua

SEQ ID NO: 153664 - RNA, 22 nt, Human herpesvirus 5
cugcacgccgccgugacugcga

SEQ ID NO: 153665 - RNA, 16 nt, Human herpesvirus 5
cugcagguacggcccg

SEQ ID NO: 153666 - RNA, 18 nt, Human herpesvirus 5
cugccuuacggcgaccgu

SEQ ID NO: 153667 - RNA, 13 nt, Human herpesvirus 5
cucuugcgcccuc

SEQ ID NO: 153668 - RNA, 20 nt, Human herpesvirus 5
cucuuggcgccgcggugguc

SEQ ID NO: 153669 - RNA, 19 nt, Human herpesvirus 5
cucucgagugcggucggug

SEQ ID NO: 153670 - RNA, 23 nt, Human herpesvirus 5
cugauggccgacgaggccggcgg

SEQ ID NO: 153671 - RNA, 22 nt, Human herpesvirus 5
cugcgcgucaccgaugccggcc

SEQ ID NO: 153672 - RNA, 23 nt, Human herpesvirus 5
cugccucagucucucggugcgug

SEQ ID NO: 153673 - RNA, 14 nt, Human herpesvirus 5
cucguucccagcgc

SEQ ID NO: 153674 - RNA, 17 nt, Human herpesvirus 5
cugcgcaggccgccgcu

SEQ ID NO: 153675 - RNA, 15 nt, Human herpesvirus 5
cugcgcccguuggug

SEQ ID NO: 153676 - RNA, 17 nt, Human herpesvirus 5
gcccagcaucuccucgc

SEQ ID NO: 153677 - RNA, 22 nt, Human herpesvirus 5
gccaguacagcgccgacgugcu

SEQ ID NO: 153678 - RNA, 22 nt, Human herpesvirus 5
gccagcgaacaccaucucgcgg

SEQ ID NO: 153679 - RNA, 12 nt, Human herpesvirus 5
gccacacgcgcu

SEQ ID NO: 153680 - RNA, 16 nt, Human herpesvirus 5
gccaccaggugccggc

SEQ ID NO: 153681 - RNA, 15 nt, Human herpesvirus 5
gccccacaugcugcu

SEQ ID NO: 153682 - RNA, 16 nt, Human herpesvirus 5
gccugcacgaccugcu

SEQ ID NO: 153683 - RNA, 13 nt, Human herpesvirus 5
gccuccucgcugg

SEQ ID NO: 153684 - RNA, 19 nt, Human herpesvirus 5
gccuugcgcucccugcucc

SEQ ID NO: 153685 - RNA, 21 nt, Human herpesvirus 5
gccugggaacgcgcgcacggc

SEQ ID NO: 153686 - RNA, 19 nt, Human herpesvirus 5
gccuaggucuguugcguug

SEQ ID NO: 153687 - RNA, 22 nt, Human herpesvirus 5
gccguguguuggcuacggcgga

SEQ ID NO: 153688 - RNA, 19 nt, Human herpesvirus 5
gcgccaguacgauccuccg

SEQ ID NO: 153689 - RNA, 18 nt, Human herpesvirus 5
gcgcccgcgccucacgcu

SEQ ID NO: 153690 - RNA, 19 nt, Human herpesvirus 5
gagggcgcgcggcaacucg

SEQ ID NO: 153691 - RNA, 18 nt, Human herpesvirus 5
gagucgcggggacgcgug

SEQ ID NO: 153692 - RNA, 14 nt, Human herpesvirus 5
gaucgggcggucga

SEQ ID NO: 153693 - RNA, 19 nt, Human herpesvirus 5
gaggccgagacgcugcgcu

SEQ ID NO: 153694 - RNA, 22 nt, Human herpesvirus 5
gacuugaguaccaagugccgcc

SEQ ID NO: 153695 - RNA, 21 nt, Human herpesvirus 5
gagaacuuuguagugcgcgcc

SEQ ID NO: 153696 - RNA, 15 nt, Human herpesvirus 5
gaugcuauccgcugc

SEQ ID NO: 153697 - RNA, 19 nt, Human herpesvirus 5
gcagaacccgguugcggcc

SEQ ID NO: 153698 - RNA, 14 nt, Human herpesvirus 5
gcagagggcgcgcc

SEQ ID NO: 153699 - RNA, 20 nt, Human herpesvirus 5
gcagcaccaugccggagcua

SEQ ID NO: 153700 - RNA, 22 nt, Human herpesvirus 5
gcagcacgcggcucacguagca

SEQ ID NO: 153701 - RNA, 17 nt, Human herpesvirus 5
gaugcgcaccuucggcg

SEQ ID NO: 153702 - RNA, 17 nt, Human herpesvirus 5
gauccacgggccgcgcu

SEQ ID NO: 153703 - RNA, 22 nt, Human herpesvirus 5
gaugaacguggugaggggcgug

SEQ ID NO: 153704 - RNA, 16 nt, Human herpesvirus 5
gcagccgacacagcgg

SEQ ID NO: 153705 - RNA, 16 nt, Human herpesvirus 5
gcaggccgcgcaggcc

SEQ ID NO: 153706 - RNA, 18 nt, Human herpesvirus 5
gccaaaaucugacgcugu

SEQ ID NO: 153707 - RNA, 18 nt, Human herpesvirus 5
gccaagaugcugcgggcc

SEQ ID NO: 153708 - RNA, 21 nt, Human herpesvirus 5
gcauaagaagccaagggggug

SEQ ID NO: 153709 - RNA, 19 nt, Human herpesvirus 5
gcaggucucgcgcaucgcc

SEQ ID NO: 153710 - RNA, 15 nt, Human herpesvirus 5
gcaggugugcgcguc

SEQ ID NO: 153711 - RNA, 23 nt, Human herpesvirus 5
caccugccucgacaucucgccgu

SEQ ID NO: 153712 - RNA, 14 nt, Human herpesvirus 5
cacgcgcgacuugg

SEQ ID NO: 153713 - RNA, 22 nt, Human herpesvirus 5
caccggccuccgacgacgccga

SEQ ID NO: 153714 - RNA, 23 nt, Human herpesvirus 5
cacgccccugaguucacgcgcgg

SEQ ID NO: 153715 - RNA, 15 nt, Human herpesvirus 5
caccgaaagcgcgcu

SEQ ID NO: 153716 - RNA, 15 nt, Human herpesvirus 5
caccgacgacgacga

SEQ ID NO: 153717 - RNA, 23 nt, Human herpesvirus 5
caccgucgcguccgacgcgacgg

SEQ ID NO: 153718 - RNA, 17 nt, Human herpesvirus 5
caaccacgucggggcug

SEQ ID NO: 153719 - RNA, 19 nt, Human herpesvirus 5
cagcggaaaaugccgccgc

SEQ ID NO: 153720 - RNA, 21 nt, Human herpesvirus 5
cagcggucguuuuaaccgcag

SEQ ID NO: 153721 - RNA, 21 nt, Human herpesvirus 5
cagcguauuuucuacuccgaa

SEQ ID NO: 153722 - RNA, 15 nt, Human herpesvirus 5
cacgccgugcucgcg

SEQ ID NO: 153723 - RNA, 15 nt, Human herpesvirus 5
cagcgccaggcggcu

SEQ ID NO: 153724 - RNA, 12 nt, Human herpesvirus 5
cagcggaggugg

SEQ ID NO: 153725 - RNA, 13 nt, Human herpesvirus 5
cagcgucuggcca

SEQ ID NO: 153726 - RNA, 20 nt, Human herpesvirus 5
cagcuuaccgccaccgucgc

SEQ ID NO: 153727 - RNA, 19 nt, Human herpesvirus 5
cagcugcuggagcgcggcc

SEQ ID NO: 153728 - RNA, 14 nt, Human herpesvirus 5
caggaccacgucca

SEQ ID NO: 153729 - RNA, 23 nt, Human herpesvirus 5
cagcgagcgcacccacucgucgc

SEQ ID NO: 153730 - RNA, 15 nt, Human herpesvirus 5
cagccgacacagcgg

SEQ ID NO: 153731 - RNA, 11 nt, Human herpesvirus 5
cacgccggcgg

SEQ ID NO: 153732 - RNA, 18 nt, Human herpesvirus 5
cagccaccgacacagcag

SEQ ID NO: 153733 - RNA, 21 nt, Human herpesvirus 5
aucugcccuauccgcgcggcu

SEQ ID NO: 153734 - RNA, 22 nt, Human herpesvirus 5
aucguuuacgggggauggcgau

SEQ ID NO: 153735 - RNA, 15 nt, Human herpesvirus 5
aucuccgacagcgcg

SEQ ID NO: 153736 - RNA, 15 nt, Human herpesvirus 5
aucgucuacgucguu

SEQ ID NO: 153737 - RNA, 21 nt, Human herpesvirus 5
aucgccgauagagauggcgau

SEQ ID NO: 153738 - RNA, 16 nt, Human herpesvirus 5
auaugcaucggaaaau

SEQ ID NO: 153739 - RNA, 15 nt, Human herpesvirus 5
aucaccuggcgacgu

SEQ ID NO: 153740 - RNA, 18 nt, Human herpesvirus 5
agcugcgcaggccgccgc

SEQ ID NO: 153741 - RNA, 14 nt, Human herpesvirus 5
aggaagcggcggua

SEQ ID NO: 153742 - RNA, 14 nt, Human herpesvirus 5
agugauacguuguu

SEQ ID NO: 153743 - RNA, 18 nt, Human herpesvirus 5
agcucguuucgccggcgc

SEQ ID NO: 153744 - RNA, 14 nt, Human herpesvirus 5
agcucugucggcgc

SEQ ID NO: 153745 - RNA, 15 nt, Human herpesvirus 5
augaccggacgugcu

SEQ ID NO: 153746 - RNA, 14 nt, Human herpesvirus 5
caaacgcugcuugg

SEQ ID NO: 153747 - RNA, 14 nt, Human herpesvirus 5
caaagaacgaaaac

SEQ ID NO: 153748 - RNA, 20 nt, Human herpesvirus 5
auucuaaagccacgcggcgu

SEQ ID NO: 153749 - RNA, 20 nt, Human herpesvirus 5
auuuuccucguaaacuuaug

SEQ ID NO: 153750 - RNA, 17 nt, Human herpesvirus 5
caaaaaaaaaucggugg

SEQ ID NO: 153751 - RNA, 21 nt, Human herpesvirus 5
acgacaucuuccgcgagcacc

SEQ ID NO: 153752 - RNA, 12 nt, Human herpesvirus 5
acgacgcggcgu

SEQ ID NO: 153753 - RNA, 12 nt, Human herpesvirus 5
acgacggcgguu

SEQ ID NO: 153754 - RNA, 16 nt, Human herpesvirus 5
accucgugcgaggaca

SEQ ID NO: 153755 - RNA, 22 nt, Human herpesvirus 5
accucuuuccauucuuccgugu

SEQ ID NO: 153756 - RNA, 15 nt, Human herpesvirus 5
accuggacgcgguga

SEQ ID NO: 153757 - RNA, 23 nt, Human herpesvirus 5
acgaagaagaacaagacggagga

SEQ ID NO: 153758 - RNA, 21 nt, Human herpesvirus 5
acgaagaugccgaugugugac

SEQ ID NO: 153759 - RNA, 13 nt, Human herpesvirus 5
accgcgacggcga

SEQ ID NO: 153760 - RNA, 19 nt, Human herpesvirus 5
accgcuacaacgcgcgccu

SEQ ID NO: 153761 - RNA, 14 nt, Human herpesvirus 5
accgugcucgugcc

SEQ ID NO: 153762 - RNA, 18 nt, Human herpesvirus 5
accgcagguuagcggcga

SEQ ID NO: 153763 - RNA, 21 nt, Human herpesvirus 5
aaacccacgaccauuuccgug

SEQ ID NO: 153764 - RNA, 20 nt, Human herpesvirus 5
aaacuagcauucuggugaga

SEQ ID NO: 153765 - RNA, 23 nt, Human herpesvirus 5
aaaauuucguaaacgacgucguc

SEQ ID NO: 153766 - RNA, 23 nt, Human herpesvirus 5
aaaacaugcgguguuuccgaugg

SEQ ID NO: 153767 - RNA, 13 nt, Human herpesvirus 5
aaaaaaaggcguu

SEQ ID NO: 153768 - RNA, 19 nt, Human herpesvirus 5
aaaaacacgacgaaagcgu

SEQ ID NO: 153769 - RNA, 13 nt, Human herpesvirus 5
acgccacgucgga

SEQ ID NO: 153770 - RNA, 16 nt, Human herpesvirus 5
acgccaugcucaagac

SEQ ID NO: 153771 - RNA, 24 nt, Human herpesvirus 5
accugugugaucugggcagcggcu

SEQ ID NO: 153772 - RNA, 15 nt, Human herpesvirus 5
acgcgcggcggcgga

SEQ ID NO: 153773 - RNA, 23 nt, Human herpesvirus 5
acgcggaccgaucaccagaaggc

SEQ ID NO: 153774 - RNA, 13 nt, Human herpesvirus 5
acgcggcagcggc

SEQ ID NO: 153775 - RNA, 14 nt, Human herpesvirus 5
acguucgucgugac

SEQ ID NO: 153776 - RNA, 17 nt, Human herpesvirus 5
acgcguggcccuggucu

SEQ ID NO: 153777 - RNA, 18 nt, Human herpesvirus 5
acguggacguuacacggg

SEQ ID NO: 153778 - RNA, 17 nt, Human herpesvirus 5
acguggguuucggugac

SEQ ID NO: 153779 - RNA, 19 nt, Human herpesvirus 5
acgcggcguauccucaagu

SEQ ID NO: 153780 - RNA, 11 nt, Human herpesvirus 5
agcgacggcgg

SEQ ID NO: 153781 - RNA, 17 nt, Human herpesvirus 5
agcgcccgaagccgcgc

SEQ ID NO: 153782 - RNA, 15 nt, Human herpesvirus 5
agcgguaccagacgc

SEQ ID NO: 153783 - RNA, 13 nt, Human herpesvirus 5
agcgcuacgugcg

SEQ ID NO: 153784 - RNA, 20 nt, Human herpesvirus 5
acugcgauaauaacggcgca

SEQ ID NO: 153785 - RNA, 14 nt, Human herpesvirus 5
acugacacagcucc

SEQ ID NO: 153786 - RNA, 19 nt, Human herpesvirus 5
acuacguugggucugcgcu

SEQ ID NO: 153787 - RNA, 18 nt, Human herpesvirus 5
acucgcaccggcagcaca

SEQ ID NO: 153788 - RNA, 13 nt, Homo sapiens
ugcaauguuuuag

SEQ ID NO: 153789 - RNA, 17 nt, Homo sapiens
uguuucaaacaaaaagu

SEQ ID NO: 153790 - RNA, 19 nt, Homo sapiens
cacuguguuuuuuuguaua

SEQ ID NO: 153791 - RNA, 15 nt, Homo sapiens
ccauaugaauaacau

SEQ ID NO: 153792 - RNA, 16 nt, Homo sapiens
uaacgagaaauagaaa

SEQ ID NO: 153793 - RNA, 16 nt, Homo sapiens
ugaaugccacucugua

SEQ ID NO: 153794 - RNA, 15 nt, Homo sapiens
uguuuauagugcucu

SEQ ID NO: 153795 - RNA, 14 nt, Homo sapiens
ugggauuacaggga

SEQ ID NO: 153796 - RNA, 19 nt, Homo sapiens
guuguuaauaaaaguacau

SEQ ID NO: 153797 - RNA, 19 nt, Homo sapiens
aaauuucucuacugucuca

SEQ ID NO: 153798 - RNA, 20 nt, Homo sapiens
uguuaauaaaaguacauguu

SEQ ID NO: 153799 - RNA, 20 nt, Homo sapiens
gaaguuuguuuaaaugacag

SEQ ID NO: 153800 - RNA, 18 nt, Homo sapiens
ugguuguauuaaagcagg

SEQ ID NO: 153801 - RNA, 15 nt, Homo sapiens
uugagggcaauggac

SEQ ID NO: 153802 - RNA, 14 nt, Homo sapiens
uacuucucugcuau

SEQ ID NO: 153803 - RNA, 21 nt, Homo sapiens
uaaaauaaucaguguuuccaa

SEQ ID NO: 153804 - RNA, 12 nt, Homo sapiens
aaugucuuuauu

SEQ ID NO: 153805 - RNA, 14 nt, Homo sapiens
auugggccaaagaa

SEQ ID NO: 153806 - RNA, 18 nt, Homo sapiens
ucucgugguaggacugua

SEQ ID NO: 153807 - RNA, 23 nt, Homo sapiens
gccuuccuggaggugacacuuga

SEQ ID NO: 153808 - RNA, 22 nt, Homo sapiens
ugaguagcuggauuacaggcau

SEQ ID NO: 153809 - RNA, 22 nt, Homo sapiens
ugauuucagcaccuacagugua

SEQ ID NO: 153810 - RNA, 15 nt, Homo sapiens
ucguucucugccuca

SEQ ID NO: 153811 - RNA, 11 nt, Homo sapiens
ccaaggucucc

SEQ ID NO: 153812 - RNA, 15 nt, Homo sapiens
uucugaaaaaguauc

SEQ ID NO: 153813 - RNA, 15 nt, Homo sapiens
acacaaucugaaaca

SEQ ID NO: 153814 - RNA, 22 nt, Homo sapiens
caaaaacauucuuacauuuuac

SEQ ID NO: 153815 - RNA, 23 nt, Homo sapiens
gauauguuauacugaaccaggcc

SEQ ID NO: 153816 - RNA, 14 nt, Homo sapiens
guuuucccaaagag

SEQ ID NO: 153817 - RNA, 14 nt, Homo sapiens
ccuggcucaucucu

SEQ ID NO: 153818 - RNA, 19 nt, Homo sapiens
ugcuucaaaaacauucuua

SEQ ID NO: 153819 - RNA, 22 nt, Homo sapiens
aaacccaguaguggugacugug

SEQ ID NO: 153820 - RNA, 17 nt, Homo sapiens
guacauguuaaacuuac

SEQ ID NO: 153821 - RNA, 17 nt, Homo sapiens
uaugacacucuagucaa

SEQ ID NO: 153822 - RNA, 14 nt, Homo sapiens
uagaauucagucaa

SEQ ID NO: 153823 - RNA, 15 nt, Homo sapiens
aaaacaaucuuguca

SEQ ID NO: 153824 - RNA, 14 nt, Homo sapiens
ugugccaucagcuc

SEQ ID NO: 153825 - RNA, 14 nt, Homo sapiens
ucaaaaacauucuu

SEQ ID NO: 153826 - RNA, 13 nt, Homo sapiens
ucaaaaacauucu

SEQ ID NO: 153827 - RNA, 16 nt, Homo sapiens
uaugaauaguuuccaa

SEQ ID NO: 153828 - RNA, 15 nt, Homo sapiens
aaugacacagucuug

SEQ ID NO: 153829 - RNA, 21 nt, Homo sapiens
gucucaaacuccugaccucaa

SEQ ID NO: 153830 - RNA, 17 nt, Homo sapiens
uagcauuugucaacaaa

SEQ ID NO: 153831 - RNA, 13 nt, Homo sapiens
uccacaaagccaa

SEQ ID NO: 153832 - RNA, 16 nt, Homo sapiens
acuauugcuugcacaa

SEQ ID NO: 153833 - RNA, 13 nt, Homo sapiens
uaugcacaaacuu

SEQ ID NO: 153834 - RNA, 18 nt, Homo sapiens
uuaaaccguacacugugu

SEQ ID NO: 153835 - RNA, 17 nt, Homo sapiens
agggagugggcuaagca

SEQ ID NO: 153836 - RNA, 13 nt, Homo sapiens
gugccaucagcuc

SEQ ID NO: 153837 - RNA, 22 nt, Homo sapiens
acuuauagaauucagucaaaga

SEQ ID NO: 153838 - RNA, 16 nt, Homo sapiens
acuuacuuaguguuau

SEQ ID NO: 153839 - RNA, 17 nt, Homo sapiens
aucguucucugccucac

SEQ ID NO: 153840 - RNA, 20 nt, Homo sapiens
gggacuaaguguaccagaga

SEQ ID NO: 153841 - RNA, 21 nt, Homo sapiens
ugaccugccaggcacacugag

SEQ ID NO: 153842 - RNA, 20 nt, Homo sapiens
caggguuucaccauguuggc

SEQ ID NO: 153843 - RNA, 21 nt, Homo sapiens
agacgugauuuugcuguagaa

SEQ ID NO: 153844 - RNA, 21 nt, Homo sapiens
aauguggcuugaauguaggua

SEQ ID NO: 153845 - RNA, 13 nt, Homo sapiens
guuggcucaggag

SEQ ID NO: 153846 - RNA, 19 nt, Homo sapiens
accuguggccaaguucuua

SEQ ID NO: 153847 - RNA, 15 nt, Homo sapiens
ggcuggagugcaaug

SEQ ID NO: 153848 - RNA, 22 nt, Homo sapiens
ggcuaagaagugacucuugcaa

SEQ ID NO: 153849 - RNA, 14 nt, Homo sapiens
cauuugucaacaaa

SEQ ID NO: 153850 - RNA, 17 nt, Homo sapiens
cacccucccacugccaa

SEQ ID NO: 153851 - RNA, 22 nt, Homo sapiens
gguacaguauggggguuguaaa

SEQ ID NO: 153852 - RNA, 13 nt, Homo sapiens
ggguaaauucucu

SEQ ID NO: 153853 - RNA, 12 nt, Homo sapiens
caaaacauuugu

SEQ ID NO: 153854 - RNA, 22 nt, Homo sapiens
ucaagacgucacccuccauucu

SEQ ID NO: 153855 - RNA, 20 nt, Homo sapiens
aaggcugugccaucagcucc

SEQ ID NO: 153856 - RNA, 15 nt, Homo sapiens
guuuccaaucugucc

SEQ ID NO: 153857 - RNA, 12 nt, Homo sapiens
uuuaaagacaga

SEQ ID NO: 153858 - RNA, 23 nt, Homo sapiens
accagagaagggcuuggacucaa

SEQ ID NO: 153859 - RNA, 24 nt, Homo sapiens
aaucccucaaaacaaucuugucau

SEQ ID NO: 153860 - RNA, 17 nt, Homo sapiens
ucaugagugcaacugug

SEQ ID NO: 153861 - RNA, 13 nt, Homo sapiens
caaagaagccagc

SEQ ID NO: 153862 - RNA, 13 nt, Homo sapiens
cuaaguaaauaca

SEQ ID NO: 153863 - RNA, 22 nt, Homo sapiens
caaucaauucauaucuauuuau

SEQ ID NO: 153864 - RNA, 15 nt, Homo sapiens
aauauagcucaggua

SEQ ID NO: 153865 - RNA, 15 nt, Homo sapiens
uaauaaagacagggu

SEQ ID NO: 153866 - RNA, 13 nt, Homo sapiens
uugaaacuuguau

SEQ ID NO: 153867 - RNA, 23 nt, Homo sapiens
cuuccuccccuguucauucugca

SEQ ID NO: 153868 - RNA, 11 nt, Homo sapiens
caaaaccaaau

SEQ ID NO: 153869 - RNA, 17 nt, Homo sapiens
aggagugccacuucaug

SEQ ID NO: 153870 - RNA, 15 nt, Homo sapiens
aagaauguuuaugaa

SEQ ID NO: 153871 - RNA, 18 nt, Homo sapiens
uagaaugagacuuacuuc

SEQ ID NO: 153872 - RNA, 17 nt, Homo sapiens
cacaaaagucuacuuua

SEQ ID NO: 153873 - RNA, 19 nt, Homo sapiens
cucuugaaaucuguuaaaa

SEQ ID NO: 153874 - RNA, 20 nt, Homo sapiens
cuccccuguucauucugcau

SEQ ID NO: 153875 - RNA, 21 nt, Homo sapiens
aaagcuagaaaguguaugugu

SEQ ID NO: 153876 - RNA, 15 nt, Homo sapiens
gacucaucauuucca

SEQ ID NO: 153877 - RNA, 14 nt, Homo sapiens
acauuuuguauauu

SEQ ID NO: 153878 - RNA, 13 nt, Homo sapiens
gacucuaacagua

SEQ ID NO: 153879 - RNA, 19 nt, Homo sapiens
gaccugccaggcacacuga

SEQ ID NO: 153880 - RNA, 18 nt, Homo sapiens
aauugggaauaugcacaa

SEQ ID NO: 153881 - RNA, 22 nt, Homo sapiens
uccuaagccaugggagacacug

SEQ ID NO: 153882 - RNA, 21 nt, Homo sapiens
uaagcacgggccauaugaaua

SEQ ID NO: 153883 - RNA, 22 nt, Homo sapiens
agccuaggaaagccaguuacau

SEQ ID NO: 153884 - RNA, 21 nt, Homo sapiens
aacaaucuugucauacuugaa

SEQ ID NO: 153885 - RNA, 21 nt, Homo sapiens
uaaauguagaaagugauccau

SEQ ID NO: 153886 - RNA, 23 nt, Homo sapiens
aaugagcaaaaccaaauauucca

SEQ ID NO: 153887 - RNA, 16 nt, Homo sapiens
acacagcaucagcuca

SEQ ID NO: 153888 - RNA, 17 nt, Homo sapiens
cuccccuucacucccac

SEQ ID NO: 153889 - RNA, 23 nt, Homo sapiens
cuuagagcuuuaccuaaauauga

SEQ ID NO: 153890 - RNA, 18 nt, Homo sapiens
ggguuucaccauguuggc

SEQ ID NO: 153891 - RNA, 21 nt, Homo sapiens
aucugccuccccuucacuccc

SEQ ID NO: 153892 - RNA, 17 nt, Homo sapiens
cuucugaaaaaguaucc

SEQ ID NO: 153893 - RNA, 13 nt, Homo sapiens
aaaugaaagugag

SEQ ID NO: 153894 - RNA, 16 nt, Homo sapiens
acugcaacuucugccu

SEQ ID NO: 153895 - RNA, 18 nt, Homo sapiens
uccugaccucaaguaauc

SEQ ID NO: 153896 - RNA, 12 nt, Homo sapiens
guaaaagccauc

SEQ ID NO: 153897 - RNA, 23 nt, Homo sapiens
ugaaaagaaucggcaauguuuca

SEQ ID NO: 153898 - RNA, 19 nt, Homo sapiens
guaaauauagcucagguag

SEQ ID NO: 153899 - RNA, 16 nt, Homo sapiens
cuauuagcuccacaaa

SEQ ID NO: 153900 - RNA, 16 nt, Homo sapiens
gcuaguaaaagccauc

SEQ ID NO: 153901 - RNA, 15 nt, Homo sapiens
ugugggcuccauuca

SEQ ID NO: 153902 - RNA, 17 nt, Homo sapiens
aagcuggagucugucaa

SEQ ID NO: 153903 - RNA, 19 nt, Homo sapiens
aauucugaauuaagcacag

SEQ ID NO: 153904 - RNA, 21 nt, Homo sapiens
cagagucucgcucuguugccc

SEQ ID NO: 153905 - RNA, 22 nt, Homo sapiens
accagagaagggcuuggacuca

SEQ ID NO: 153906 - RNA, 19 nt, Homo sapiens
caaucaguagccagcaucu

SEQ ID NO: 153907 - RNA, 21 nt, Homo sapiens
ucaagugauucuccugccuca

SEQ ID NO: 153908 - RNA, 12 nt, Homo sapiens
agugauuuccac

SEQ ID NO: 153909 - RNA, 12 nt, Homo sapiens
uaagacugugua

SEQ ID NO: 153910 - RNA, 13 nt, Homo sapiens
cuugcacaaacca

SEQ ID NO: 153911 - RNA, 16 nt, Homo sapiens
gacucaucauuuccau

SEQ ID NO: 153912 - RNA, 12 nt, Homo sapiens
uaagaugaaaca

SEQ ID NO: 153913 - RNA, 17 nt, Homo sapiens
cuggccuccaaguccac

SEQ ID NO: 153914 - RNA, 20 nt, Homo sapiens
guagaaagugauccauacuu

SEQ ID NO: 153915 - RNA, 17 nt, Homo sapiens
uugguuuugcucacaaa

SEQ ID NO: 153916 - RNA, 16 nt, Homo sapiens
ggaaagccaguuacau

SEQ ID NO: 153917 - RNA, 20 nt, Homo sapiens
cagagcagagaggcugaaua

SEQ ID NO: 153918 - RNA, 20 nt, Homo sapiens
auacuuauagaauucaguca

SEQ ID NO: 153919 - RNA, 23 nt, Homo sapiens
cauucugcacucagaaaauggca

SEQ ID NO: 153920 - RNA, 23 nt, Homo sapiens
aaucccucaaaacaaucuuguca

SEQ ID NO: 153921 - RNA, 22 nt, Homo sapiens
uugucaacaaagucacccacuu

SEQ ID NO: 153922 - RNA, 21 nt, Homo sapiens
uggggacacagcaucagcuca

SEQ ID NO: 153923 - RNA, 16 nt, Homo sapiens
uccuuagaaguggaag

SEQ ID NO: 153924 - RNA, 23 nt, Homo sapiens
ugcuucuuugaaacuuguaugaa

SEQ ID NO: 153925 - RNA, 22 nt, Homo sapiens
aaccguaugagggaacugugua

SEQ ID NO: 153926 - RNA, 22 nt, Homo sapiens
gaaaauugggaauaugcacaaa

SEQ ID NO: 153927 - RNA, 13 nt, Homo sapiens
uguguuucuuuag

SEQ ID NO: 153928 - RNA, 13 nt, Homo sapiens
gaauaguuuccaa

SEQ ID NO: 153929 - RNA, 20 nt, Homo sapiens
cuauaaaaugagaagucuca

SEQ ID NO: 153930 - RNA, 16 nt, Homo sapiens
gugccaucagcuccuu

SEQ ID NO: 153931 - RNA, 22 nt, Homo sapiens
cacuuagguccaaggucuccag

SEQ ID NO: 153932 - RNA, 21 nt, Homo sapiens
ggggacacagcaucagcucaa

SEQ ID NO: 153933 - RNA, 13 nt, Homo sapiens
uguaucucaggaa

SEQ ID NO: 153934 - RNA, 19 nt, Homo sapiens
uaaagaaaaguuuuguaaa

SEQ ID NO: 153935 - RNA, 20 nt, Homo sapiens
uugcccaggcuggagugcaa

SEQ ID NO: 153936 - RNA, 14 nt, Homo sapiens
uaguggugacugug

SEQ ID NO: 153937 - RNA, 19 nt, Homo sapiens
ccaagcaguuucuuucaaa

SEQ ID NO: 153938 - RNA, 20 nt, Homo sapiens
cugucaauguccuacugaga

SEQ ID NO: 153939 - RNA, 20 nt, Homo sapiens
aagauggcacuuauaaccaa

SEQ ID NO: 153940 - RNA, 23 nt, Homo sapiens
gucucgugguaggacuguagaaa

SEQ ID NO: 153941 - RNA, 13 nt, Homo sapiens
aauagccauaaag

SEQ ID NO: 153942 - RNA, 15 nt, Homo sapiens
aggcuucuggggcuu

SEQ ID NO: 153943 - RNA, 13 nt, Homo sapiens
caaagaaauuucc

SEQ ID NO: 153944 - RNA, 22 nt, Homo sapiens
uuaaauguagaaagugauccau

SEQ ID NO: 153945 - RNA, 12 nt, Homo sapiens
acuuaguucaag

SEQ ID NO: 153946 - RNA, 18 nt, Homo sapiens
acaaauugggccaaagaa

SEQ ID NO: 153947 - RNA, 14 nt, Homo sapiens
agccucaucucuuu

SEQ ID NO: 153948 - RNA, 23 nt, Homo sapiens
ccacuguuaagccauguguucca

SEQ ID NO: 153949 - RNA, 16 nt, Homo sapiens
aaugccacucuguaau

SEQ ID NO: 153950 - RNA, 13 nt, Homo sapiens
caguaguugcaau

SEQ ID NO: 153951 - RNA, 19 nt, Homo sapiens
uuacuuuuuccuggcucau

SEQ ID NO: 153952 - RNA, 12 nt, Homo sapiens
gucuuggcucac

SEQ ID NO: 153953 - RNA, 22 nt, Homo sapiens
caauauauacuuauagaauuca

SEQ ID NO: 153954 - RNA, 13 nt, Homo sapiens
gaacuuaugcaaa

SEQ ID NO: 153955 - RNA, 16 nt, Homo sapiens
cugcuucugauaugca

SEQ ID NO: 153956 - RNA, 21 nt, Homo sapiens
aaauuaagaaauucacuuccc

SEQ ID NO: 153957 - RNA, 21 nt, Homo sapiens
auagagguucuuuauugcuca

SEQ ID NO: 153958 - RNA, 22 nt, Homo sapiens
caaagaacuuggaaauagugau

SEQ ID NO: 153959 - RNA, 12 nt, Homo sapiens
agaaagugaucc

SEQ ID NO: 153960 - RNA, 13 nt, Homo sapiens
augaaacaucauu

SEQ ID NO: 153961 - RNA, 22 nt, Homo sapiens
aguuccgacugccaucuuggac

SEQ ID NO: 153962 - RNA, 17 nt, Homo sapiens
auguagaaagugaucca

SEQ ID NO: 153963 - RNA, 15 nt, Homo sapiens
ucaaaaacauucuua

SEQ ID NO: 153964 - RNA, 18 nt, Homo sapiens
agggcaauggacaaggaa

SEQ ID NO: 153965 - RNA, 17 nt, Homo sapiens
auccuggggaacauaga

SEQ ID NO: 153966 - RNA, 20 nt, Homo sapiens
gccuccaaguccacagugga

SEQ ID NO: 153967 - RNA, 20 nt, Homo sapiens
gucugucaauguccuacuga

SEQ ID NO: 153968 - RNA, 13 nt, Homo sapiens
aaaagacugacca

SEQ ID NO: 153969 - RNA, 18 nt, Homo sapiens
ccgacugccaucuuggac

SEQ ID NO: 153970 - RNA, 17 nt, Homo sapiens
ucaaucccucaaaacaa

SEQ ID NO: 153971 - RNA, 12 nt, Homo sapiens
aaaaugugacuc

SEQ ID NO: 153972 - RNA, 21 nt, Homo sapiens
aaaaguuuuguaaauuucucu

SEQ ID NO: 153973 - RNA, 16 nt, Homo sapiens
acucaggcagaucuca

SEQ ID NO: 153974 - RNA, 20 nt, Homo sapiens
ugcuggcaguggaacuaaga

SEQ ID NO: 153975 - RNA, 17 nt, Homo sapiens
uaaauauagcucaggua

SEQ ID NO: 153976 - RNA, 17 nt, Homo sapiens
aucccgucgacguagaa

SEQ ID NO: 153977 - RNA, 18 nt, Homo sapiens
gacgugauuuugcuguag

SEQ ID NO: 153978 - RNA, 21 nt, Homo sapiens
auucucuagucaguuggcuaa

SEQ ID NO: 153979 - RNA, 19 nt, Homo sapiens
aagggcuuggacucaagca

SEQ ID NO: 153980 - RNA, 16 nt, Homo sapiens
agugauucuccugccu

SEQ ID NO: 153981 - RNA, 15 nt, Homo sapiens
cagcauggagucaca

SEQ ID NO: 153982 - RNA, 19 nt, Homo sapiens
gacgugauuuugcuguaga

SEQ ID NO: 153983 - RNA, 22 nt, Homo sapiens
ugucaauguccuacugagacag

SEQ ID NO: 153984 - RNA, 11 nt, Homo sapiens
aguugcacaaa

SEQ ID NO: 153985 - RNA, 23 nt, Homo sapiens
gugagacuuugaggguguauauu

SEQ ID NO: 153986 - RNA, 19 nt, Homo sapiens
caaagugcugggauuacag

SEQ ID NO: 153987 - RNA, 20 nt, Homo sapiens
gucugaacaauauauacuua

SEQ ID NO: 153988 - RNA, 22 nt, Homo sapiens
uagagaccaguuuucucuggaa

SEQ ID NO: 153989 - RNA, 15 nt, Homo sapiens
ccaaauuauggcaaa

SEQ ID NO: 153990 - RNA, 17 nt, Homo sapiens
guuguuuucccaaagag

SEQ ID NO: 153991 - RNA, 12 nt, Homo sapiens
aaugaaagugag

SEQ ID NO: 153992 - RNA, 20 nt, Homo sapiens
cuuguuguuuucccaaagag

SEQ ID NO: 153993 - RNA, 13 nt, Homo sapiens
caaaaccaaauau

SEQ ID NO: 153994 - RNA, 19 nt, Homo sapiens
cacuuagguccaaggucuc

SEQ ID NO: 153995 - RNA, 13 nt, Homo sapiens
gucacagccacuu

SEQ ID NO: 153996 - RNA, 17 nt, Homo sapiens
cagguucugacucuugg

SEQ ID NO: 153997 - RNA, 23 nt, Homo sapiens
gagacagcacagccaaccuagcu

SEQ ID NO: 153998 - RNA, 19 nt, Homo sapiens
agauaaucucuccauuccc

SEQ ID NO: 153999 - RNA, 15 nt, Homo sapiens
agaaauccaauugga

SEQ ID NO: 154000 - RNA, 14 nt, Homo sapiens
gcuguagaagaugg

SEQ ID NO: 154001 - RNA, 18 nt, Homo sapiens
ccuucuuuuuguucuuca

SEQ ID NO: 154002 - RNA, 22 nt, Homo sapiens
acagcauggagucacagccacu

SEQ ID NO: 154003 - RNA, 21 nt, Homo sapiens
gacagcacagccaaccuagcu

SEQ ID NO: 154004 - RNA, 16 nt, Homo sapiens
augagcaaaaccaaau

SEQ ID NO: 154005 - RNA, 20 nt, Homo sapiens
ugucuuuggugaacauugca

SEQ ID NO: 154006 - RNA, 19 nt, Homo sapiens
agugauucuccugccucag

SEQ ID NO: 154007 - RNA, 14 nt, Homo sapiens
uuauggcaaauuca

SEQ ID NO: 154008 - RNA, 12 nt, Homo sapiens
ucugcuagggaa

SEQ ID NO: 154009 - RNA, 20 nt, Homo sapiens
gccacucuguaauugcaaaa

SEQ ID NO: 154010 - RNA, 18 nt, Homo sapiens
gcgcccagccucaucucu

SEQ ID NO: 154011 - RNA, 16 nt, Homo sapiens
gcccagccucaucucu

SEQ ID NO: 154012 - RNA, 21 nt, Homo sapiens
cagaaucucucuucuuuucaa

SEQ ID NO: 154013 - RNA, 16 nt, Homo sapiens
uauugaacuuaugcaa

SEQ ID NO: 154014 - RNA, 16 nt, Homo sapiens
uagaaaagggaacuga

SEQ ID NO: 154015 - RNA, 20 nt, Homo sapiens
uguucugguuacuguucuaa

SEQ ID NO: 154016 - RNA, 14 nt, Homo sapiens
ccacugccaaagaa

SEQ ID NO: 154017 - RNA, 23 nt, Homo sapiens
aagacgugauuuugcuguagaag

SEQ ID NO: 154018 - RNA, 16 nt, Homo sapiens
ucaacaaagucaccca

SEQ ID NO: 154019 - RNA, 14 nt, Homo sapiens
aagaaacauugccu

SEQ ID NO: 154020 - RNA, 19 nt, Homo sapiens
gucugaacaauauauacuu

SEQ ID NO: 154021 - RNA, 20 nt, Homo sapiens
accguaugagggaacugugu

SEQ ID NO: 154022 - RNA, 12 nt, Homo sapiens
cacugccaaaga

SEQ ID NO: 154023 - RNA, 16 nt, Homo sapiens
gucuaaaaacauuugu

SEQ ID NO: 154024 - RNA, 22 nt, Homo sapiens
aagaaaaguuuuguaaauuucu

SEQ ID NO: 154025 - RNA, 16 nt, Homo sapiens
gauucuccugccucag

SEQ ID NO: 154026 - RNA, 21 nt, Homo sapiens
ucaaguaauccaccugccucg

SEQ ID NO: 154027 - RNA, 11 nt, Homo sapiens
auucaaaguga

SEQ ID NO: 154028 - RNA, 23 nt, Homo sapiens
cuuggaauccuggggaacauaga

SEQ ID NO: 154029 - RNA, 19 nt, Homo sapiens
aggauuugggcucuuggaa

SEQ ID NO: 154030 - RNA, 18 nt, Homo sapiens
ccaaguccacaguggaac

SEQ ID NO: 154031 - RNA, 22 nt, Homo sapiens
uggauuugucuuuggugaacau

SEQ ID NO: 154032 - RNA, 18 nt, Homo sapiens
caaggucuccagagggug

SEQ ID NO: 154033 - RNA, 14 nt, Homo sapiens
ucuuuuccaugaac

SEQ ID NO: 154034 - RNA, 16 nt, Homo sapiens
caauauuguacaguuu

SEQ ID NO: 154035 - RNA, 11 nt, Homo sapiens
ggaacugugua

SEQ ID NO: 154036 - RNA, 14 nt, Homo sapiens
uagaagauggcacu

SEQ ID NO: 154037 - RNA, 14 nt, Homo sapiens
uagcuccacaaagc

SEQ ID NO: 154038 - RNA, 21 nt, Homo sapiens
ugagcaaaaccaaauauucca

SEQ ID NO: 154039 - RNA, 11 nt, Homo sapiens
gccucaucucu

SEQ ID NO: 154040 - RNA, 15 nt, Homo sapiens
agaaagugauccaua

SEQ ID NO: 154041 - RNA, 18 nt, Homo sapiens
gucugauuguagcuauga

SEQ ID NO: 154042 - RNA, 14 nt, Homo sapiens
uguguuuuuaauaa

SEQ ID NO: 154043 - RNA, 14 nt, Homo sapiens
guuccgacugccau

SEQ ID NO: 154044 - RNA, 23 nt, Homo sapiens
aaugucuuuauuaaauguagaaa

SEQ ID NO: 154045 - RNA, 16 nt, Homo sapiens
ucaauguccuacugag

SEQ ID NO: 154046 - RNA, 18 nt, Homo sapiens
uuuuccuggcucaucucu

SEQ ID NO: 154047 - RNA, 16 nt, Homo sapiens
ucagggagugggcuaa

SEQ ID NO: 154048 - RNA, 20 nt, Homo sapiens
uagauaaucucuccauuccc

SEQ ID NO: 154049 - RNA, 16 nt, Homo sapiens
ugcaaugacacagucu

SEQ ID NO: 154050 - RNA, 20 nt, Homo sapiens
aaucuuucugcagaaacaga

SEQ ID NO: 154051 - RNA, 16 nt, Homo sapiens
ccaggcuggagugcaa

SEQ ID NO: 154052 - RNA, 20 nt, Homo sapiens
guuaaaauaaaauuguacau

SEQ ID NO: 154053 - RNA, 18 nt, Homo sapiens
uuguuauucuguaguuuc

SEQ ID NO: 154054 - RNA, 14 nt, Homo sapiens
uuaauaaaaguaca

SEQ ID NO: 154055 - RNA, 22 nt, Homo sapiens
gaaauagugauuuccacaguga

SEQ ID NO: 154056 - RNA, 21 nt, Homo sapiens
uuaaauguagaaagugaucca

SEQ ID NO: 154057 - RNA, 16 nt, Homo sapiens
gcagagaggcugaaua

SEQ ID NO: 154058 - RNA, 19 nt, Homo sapiens
uagcggggaggggguuauc

SEQ ID NO: 154059 - RNA, 18 nt, Homo sapiens
cuuuuuuuuaaguuacac

SEQ ID NO: 154060 - RNA, 19 nt, Homo sapiens
cagucuuggcucacugcaa

SEQ ID NO: 154061 - RNA, 17 nt, Homo sapiens
uagcuuauacaaaacau

SEQ ID NO: 154062 - RNA, 14 nt, Homo sapiens
caauagauauuuac

SEQ ID NO: 154063 - RNA, 16 nt, Homo sapiens
cacccuccauucugca

SEQ ID NO: 154064 - RNA, 21 nt, Homo sapiens
auaacuuuuuuuuaaguuaca

SEQ ID NO: 154065 - RNA, 15 nt, Homo sapiens
uuaugaauaguuucc

SEQ ID NO: 154066 - RNA, 22 nt, Homo sapiens
ccauuagcauuugucaacaaag

SEQ ID NO: 154067 - RNA, 17 nt, Homo sapiens
auucuuacauuuuacuu

SEQ ID NO: 154068 - RNA, 20 nt, Homo sapiens
uguuucaaacaaaaagucau

SEQ ID NO: 154069 - RNA, 18 nt, Homo sapiens
uccuggggaacauagaac

SEQ ID NO: 154070 - RNA, 23 nt, Homo sapiens
uaaaaguacauguuaaacuuacu

SEQ ID NO: 154071 - RNA, 15 nt, Homo sapiens
cuggagucugucaau

SEQ ID NO: 154072 - RNA, 15 nt, Homo sapiens
uucuuucaaagaagc

SEQ ID NO: 154073 - RNA, 19 nt, Homo sapiens
agauaaccucaagucacau

SEQ ID NO: 154074 - RNA, 13 nt, Homo sapiens
aaaaacauucuua

SEQ ID NO: 154075 - RNA, 21 nt, Homo sapiens
accgcgcccagccucaucucu

SEQ ID NO: 154076 - RNA, 20 nt, Homo sapiens
auugcagcgauuaauaacag

SEQ ID NO: 154077 - RNA, 22 nt, Homo sapiens
uuaccuuuuauuuuaauguuuc

SEQ ID NO: 154078 - RNA, 19 nt, Homo sapiens
ccaaagcccaaagugguau

SEQ ID NO: 154079 - RNA, 22 nt, Homo sapiens
guguuuuuaauaaagacagggu

SEQ ID NO: 154080 - RNA, 21 nt, Homo sapiens
uguauuuaaaugaaagugaga

SEQ ID NO: 154081 - RNA, 13 nt, Homo sapiens
caguguacagucu

SEQ ID NO: 154082 - RNA, 19 nt, Homo sapiens
cuuaugcaaauaaccauug

SEQ ID NO: 154083 - RNA, 22 nt, Homo sapiens
ggagaaauaugguacucauuaa

SEQ ID NO: 154084 - RNA, 15 nt, Homo sapiens
acaaucuugucauac

SEQ ID NO: 154085 - RNA, 17 nt, Homo sapiens
guacaaaguaagccaug

SEQ ID NO: 154086 - RNA, 22 nt, Homo sapiens
cugggauuacagggaugagcca

SEQ ID NO: 154087 - RNA, 14 nt, Homo sapiens
auaucacauuccca

SEQ ID NO: 154088 - RNA, 21 nt, Homo sapiens
aggacacuagaagauuuugaa

SEQ ID NO: 154089 - RNA, 17 nt, Homo sapiens
auaugacacucuaguca

SEQ ID NO: 154090 - RNA, 18 nt, Homo sapiens
aacaggaauucugaauua

SEQ ID NO: 154091 - RNA, 17 nt, Homo sapiens
gcuccauucaaagugag

SEQ ID NO: 154092 - RNA, 17 nt, Homo sapiens
ggcuaguaaaagccauc

SEQ ID NO: 154093 - RNA, 21 nt, Homo sapiens
gauacacaaucugaaacagcu

SEQ ID NO: 154094 - RNA, 20 nt, Homo sapiens
gucaacaaagucacccacuu

SEQ ID NO: 154095 - RNA, 13 nt, Homo sapiens
gggagacacugau

SEQ ID NO: 154096 - RNA, 13 nt, Homo sapiens
uggcucaucucuu

SEQ ID NO: 154097 - RNA, 21 nt, Homo sapiens
aaaaagcccuuaaaaauaugu

SEQ ID NO: 154098 - RNA, 16 nt, Homo sapiens
acugaaccaggccaga

SEQ ID NO: 154099 - RNA, 15 nt, Homo sapiens
uuacuguccaaagac

SEQ ID NO: 154100 - RNA, 23 nt, Homo sapiens
cuucucugcuaucuagaucugaa

SEQ ID NO: 154101 - RNA, 15 nt, Homo sapiens
cacagucuuggcuca

SEQ ID NO: 154102 - RNA, 10 nt, Homo sapiens
ucccaaagag

SEQ ID NO: 154103 - RNA, 12 nt, Homo sapiens
agcaucagcuca

SEQ ID NO: 154104 - RNA, 22 nt, Homo sapiens
uggggacacagcaucagcucaa

SEQ ID NO: 154105 - RNA, 15 nt, Homo sapiens
gagggaacuguguag

SEQ ID NO: 154106 - RNA, 14 nt, Homo sapiens
aaacaucauuucaa

SEQ ID NO: 154107 - RNA, 15 nt, Homo sapiens
ccuuagaaguggaag

SEQ ID NO: 154108 - RNA, 13 nt, Homo sapiens
aauauaucaguaa

SEQ ID NO: 154109 - RNA, 17 nt, Homo sapiens
ggcugugccaucagcuc

SEQ ID NO: 154110 - RNA, 21 nt, Homo sapiens
guuguuaauaaaaguacaugu

SEQ ID NO: 154111 - RNA, 22 nt, Homo sapiens
aaucaguguuuccaaucugucc

SEQ ID NO: 154112 - RNA, 19 nt, Homo sapiens
acaaaguaagccauguauc

SEQ ID NO: 154113 - RNA, 22 nt, Homo sapiens
auuaaauguagaaagugaucca

SEQ ID NO: 154114 - RNA, 14 nt, Homo sapiens
cagcuccuggacca

SEQ ID NO: 154115 - RNA, 16 nt, Homo sapiens
uagcuuauacaaaaca

SEQ ID NO: 154116 - RNA, 12 nt, Homo sapiens
aauaaagacagg

SEQ ID NO: 154117 - RNA, 14 nt, Homo sapiens
caauguuuuagaau

SEQ ID NO: 154118 - RNA, 15 nt, Homo sapiens
aauugggccaaagaa

SEQ ID NO: 154119 - RNA, 14 nt, Homo sapiens
gauuuccacaguga

SEQ ID NO: 154120 - RNA, 13 nt, Homo sapiens
ggauuacaggcau

SEQ ID NO: 154121 - RNA, 14 nt, Homo sapiens
ccagagacugggac

SEQ ID NO: 154122 - RNA, 19 nt, Homo sapiens
caaaaccaaauauuccaga

SEQ ID NO: 154123 - RNA, 23 nt, Homo sapiens
uucauggauauguuauacugaac

SEQ ID NO: 154124 - RNA, 16 nt, Homo sapiens
agucuuguauuaaguu

SEQ ID NO: 154125 - RNA, 15 nt, Homo sapiens
uguccuguuacaaaa

SEQ ID NO: 154126 - RNA, 19 nt, Homo sapiens
accaggucucauaaugcau

SEQ ID NO: 154127 - RNA, 16 nt, Homo sapiens
aaaugcugguuuuuca

SEQ ID NO: 154128 - RNA, 21 nt, Homo sapiens
ggaauccuggggaacauagaa

SEQ ID NO: 154129 - RNA, 12 nt, Homo sapiens
augacacagucu

SEQ ID NO: 154130 - RNA, 16 nt, Homo sapiens
uauagaaaugcugguu

SEQ ID NO: 154131 - RNA, 20 nt, Homo sapiens
gauuuugaaauuuuuauuaa

SEQ ID NO: 154132 - RNA, 18 nt, Homo sapiens
aaguacauguuaaacuua

SEQ ID NO: 154133 - RNA, 22 nt, Homo sapiens
guaaaauaaucaguguuuccaa

SEQ ID NO: 154134 - RNA, 16 nt, Homo sapiens
aaagggagaagaggga

SEQ ID NO: 154135 - RNA, 22 nt, Homo sapiens
auauacuuauagaauucaguca

SEQ ID NO: 154136 - RNA, 23 nt, Homo sapiens
uaguaaaagccaucuauguauau

SEQ ID NO: 154137 - RNA, 17 nt, Homo sapiens
ggcucucccagccaggu

SEQ ID NO: 154138 - RNA, 20 nt, Homo sapiens
ccacagugacuccacucuga

SEQ ID NO: 154139 - RNA, 22 nt, Homo sapiens
gggaaggaggccguccaucccg

SEQ ID NO: 154140 - RNA, 20 nt, Homo sapiens
gaacguuuuuccuguucuua

SEQ ID NO: 154141 - RNA, 17 nt, Homo sapiens
caggacagcuccuggac

SEQ ID NO: 154142 - RNA, 19 nt, Homo sapiens
gaaugagcaaaaccaaaua

SEQ ID NO: 154143 - RNA, 18 nt, Homo sapiens
agcccuuaggaagaauuu

SEQ ID NO: 154144 - RNA, 21 nt, Homo sapiens
ugagacuuacuucucugcuau

SEQ ID NO: 154145 - RNA, 23 nt, Homo sapiens
uccuggggaacauagaacucaug

SEQ ID NO: 154146 - RNA, 19 nt, Homo sapiens
cauuuaagcugccuguaca

SEQ ID NO: 154147 - RNA, 21 nt, Homo sapiens
caggguuucaccauguuggcc

SEQ ID NO: 154148 - RNA, 13 nt, Homo sapiens
aaacaucauuuca

SEQ ID NO: 154149 - RNA, 19 nt, Homo sapiens
gucuuuggugaacauugca

SEQ ID NO: 154150 - RNA, 21 nt, Homo sapiens
uguuuaugaauaguuuccaaa

SEQ ID NO: 154151 - RNA, 16 nt, Homo sapiens
auaaaaguuggcucag

SEQ ID NO: 154152 - RNA, 19 nt, Homo sapiens
guguacagucuuguauuaa

SEQ ID NO: 154153 - RNA, 19 nt, Homo sapiens
cccaggcuggagugcaaug

SEQ ID NO: 154154 - RNA, 18 nt, Homo sapiens
acugaauuuugucuuuau

SEQ ID NO: 154155 - RNA, 22 nt, Homo sapiens
gucuuggcucacugcaacuucu

SEQ ID NO: 154156 - RNA, 23 nt, Homo sapiens
cauggauauguuauacugaacca

SEQ ID NO: 154157 - RNA, 17 nt, Homo sapiens
agccccagccuaggaaa

SEQ ID NO: 154158 - RNA, 14 nt, Homo sapiens
ucucugcuaucuag

SEQ ID NO: 154159 - RNA, 18 nt, Homo sapiens
agcuggagucugucaaug

SEQ ID NO: 154160 - RNA, 19 nt, Homo sapiens
gugcugggauuacagggau

SEQ ID NO: 154161 - RNA, 16 nt, Homo sapiens
gaaguuuaauugacuu

SEQ ID NO: 154162 - RNA, 17 nt, Homo sapiens
acauaaaaguuggcuca

SEQ ID NO: 154163 - RNA, 13 nt, Homo sapiens
cucuuggguucaa

SEQ ID NO: 154164 - RNA, 16 nt, Homo sapiens
cccuccauucugcacu

SEQ ID NO: 154165 - RNA, 13 nt, Homo sapiens
aaagaaauuucca

SEQ ID NO: 154166 - RNA, 16 nt, Homo sapiens
caacauuuguuuuagu

SEQ ID NO: 154167 - RNA, 22 nt, Homo sapiens
cuuuaguuuuugugaaguuuaa

SEQ ID NO: 154168 - RNA, 17 nt, Homo sapiens
gaacuccuuggcuucuu

SEQ ID NO: 154169 - RNA, 20 nt, Homo sapiens
uuguauuuaaaugaaaguga

SEQ ID NO: 154170 - RNA, 17 nt, Homo sapiens
ugaaagugagacuuuga

SEQ ID NO: 154171 - RNA, 13 nt, Homo sapiens
cuuuauugcucau

SEQ ID NO: 154172 - RNA, 14 nt, Homo sapiens
acacagcaucagcu

SEQ ID NO: 154173 - RNA, 16 nt, Homo sapiens
aauaaauucaucagau

SEQ ID NO: 154174 - RNA, 20 nt, Homo sapiens
auuccacaaccugguuugcc

SEQ ID NO: 154175 - RNA, 23 nt, Homo sapiens
agaagguugagggcaauggacaa

SEQ ID NO: 154176 - RNA, 13 nt, Homo sapiens
uucuucuuuuugc

SEQ ID NO: 154177 - RNA, 15 nt, Homo sapiens
ggaccaggucucaua

SEQ ID NO: 154178 - RNA, 16 nt, Homo sapiens
uuuaauguuuccuuua

SEQ ID NO: 154179 - RNA, 21 nt, Homo sapiens
ucugaacaauauauacuuaua

SEQ ID NO: 154180 - RNA, 17 nt, Homo sapiens
caaauugggccaaagaa

SEQ ID NO: 154181 - RNA, 19 nt, Homo sapiens
caguaguggugacuguggg

SEQ ID NO: 154182 - RNA, 16 nt, Homo sapiens
gauuuugcuguagaag

SEQ ID NO: 154183 - RNA, 16 nt, Homo sapiens
acccucccacugccaa

SEQ ID NO: 154184 - RNA, 14 nt, Homo sapiens
aauucaucagauaa

SEQ ID NO: 154185 - RNA, 15 nt, Homo sapiens
uagaaagaagaugaa

SEQ ID NO: 154186 - RNA, 16 nt, Homo sapiens
gcaauagaaauccaau

SEQ ID NO: 154187 - RNA, 15 nt, Homo sapiens
auaaagacaggguuu

SEQ ID NO: 154188 - RNA, 16 nt, Homo sapiens
cagccagguucugacu

SEQ ID NO: 154189 - RNA, 11 nt, Homo sapiens
aguaagccaug

SEQ ID NO: 154190 - RNA, 16 nt, Homo sapiens
caggcuggagugcaau

SEQ ID NO: 154191 - RNA, 13 nt, Homo sapiens
cagcaucagcuca

SEQ ID NO: 154192 - RNA, 15 nt, Homo sapiens
auucuccugccucag

SEQ ID NO: 154193 - RNA, 18 nt, Homo sapiens
gaugaaacaucauuucaa

SEQ ID NO: 154194 - RNA, 22 nt, Homo sapiens
ccauuugcuuagaaagucugau

SEQ ID NO: 154195 - RNA, 14 nt, Homo sapiens
cuuccaucaccucc

SEQ ID NO: 154196 - RNA, 18 nt, Homo sapiens
cauauugaugugugucua

SEQ ID NO: 154197 - RNA, 13 nt, Homo sapiens
gugauauguuggu

SEQ ID NO: 154198 - RNA, 16 nt, Homo sapiens
uauaaaagacugacca

SEQ ID NO: 154199 - RNA, 19 nt, Homo sapiens
cuuuaccuaaauaugagcc

SEQ ID NO: 154200 - RNA, 23 nt, Homo sapiens
uucuaaagauggaaaaaccaccc

SEQ ID NO: 154201 - RNA, 13 nt, Homo sapiens
cuggcucaucucu

SEQ ID NO: 154202 - RNA, 11 nt, Homo sapiens
auaguuuccaa

SEQ ID NO: 154203 - RNA, 19 nt, Homo sapiens
ggaauuucuguucuuccau

SEQ ID NO: 154204 - RNA, 21 nt, Homo sapiens
guagagagagaaaaguaacug

SEQ ID NO: 154205 - RNA, 13 nt, Homo sapiens
ccuacugagacag

SEQ ID NO: 154206 - RNA, 16 nt, Homo sapiens
auuuuaauguuuccuu

SEQ ID NO: 154207 - RNA, 19 nt, Homo sapiens
ccuuggcuaguaaaagcca

SEQ ID NO: 154208 - RNA, 14 nt, Homo sapiens
caauagaaauccaa

SEQ ID NO: 154209 - RNA, 13 nt, Homo sapiens
gcaguggaacuaa

SEQ ID NO: 154210 - RNA, 19 nt, Homo sapiens
ucagaguuccgacugccau

SEQ ID NO: 154211 - RNA, 13 nt, Homo sapiens
ggauuacagggau

SEQ ID NO: 154212 - RNA, 21 nt, Homo sapiens
augucuuuauuaaauguagaa

SEQ ID NO: 154213 - RNA, 15 nt, Homo sapiens
cuagaguucauggau

SEQ ID NO: 154214 - RNA, 19 nt, Homo sapiens
caaucucaaucccucaaaa

SEQ ID NO: 154215 - RNA, 15 nt, Homo sapiens
cugaccaauauugua

SEQ ID NO: 154216 - RNA, 17 nt, Homo sapiens
agcuggauuacaggcau

SEQ ID NO: 154217 - RNA, 21 nt, Homo sapiens
ccauuagcauuugucaacaaa

SEQ ID NO: 154218 - RNA, 18 nt, Homo sapiens
aaagucuacuuuaccuaa

SEQ ID NO: 154219 - RNA, 10 nt, Homo sapiens
ucauauugau

SEQ ID NO: 154220 - RNA, 14 nt, Homo sapiens
cuuagaaagucuga

SEQ ID NO: 154221 - RNA, 23 nt, Homo sapiens
caguugcagcuguuuuguugaca

SEQ ID NO: 154222 - RNA, 22 nt, Homo sapiens
aaugccacucuguaauugcaaa

SEQ ID NO: 154223 - RNA, 18 nt, Homo sapiens
ucacugcaacuucugccu

SEQ ID NO: 154224 - RNA, 21 nt, Homo sapiens
cauucccguggaacguuuuuc

SEQ ID NO: 154225 - RNA, 14 nt, Homo sapiens
aacaucauuucaau

SEQ ID NO: 154226 - RNA, 15 nt, Homo sapiens
cccagccucaucucu

SEQ ID NO: 154227 - RNA, 13 nt, Homo sapiens
aguaaaagccauc

SEQ ID NO: 154228 - RNA, 20 nt, Homo sapiens
ucugaaaaaguauccugcuu

SEQ ID NO: 154229 - RNA, 22 nt, Homo sapiens
ucaagugauucuccugccucag

SEQ ID NO: 154230 - RNA, 14 nt, Homo sapiens
uaaccauugucaua

SEQ ID NO: 154231 - RNA, 16 nt, Homo sapiens
aacaaagucacccacu

SEQ ID NO: 154232 - RNA, 18 nt, Homo sapiens
ccacccucccacugccaa

SEQ ID NO: 154233 - RNA, 21 nt, Homo sapiens
agcuagcaacauuuguuuuag

SEQ ID NO: 154234 - RNA, 18 nt, Homo sapiens
gccacccucccacugcca

SEQ ID NO: 154235 - RNA, 14 nt, Homo sapiens
ugggagacacugau

SEQ ID NO: 154236 - RNA, 15 nt, Homo sapiens
cacagcaucagcuca

SEQ ID NO: 154237 - RNA, 13 nt, Homo sapiens
uccacaguggaac

SEQ ID NO: 154238 - RNA, 18 nt, Homo sapiens
cuuagguccaaggucucc

SEQ ID NO: 154239 - RNA, 12 nt, Homo sapiens
uccccucuagga

SEQ ID NO: 154240 - RNA, 18 nt, Homo sapiens
agaagguugagggcaaug

SEQ ID NO: 154241 - RNA, 18 nt, Homo sapiens
ggagccccugcucuggug

SEQ ID NO: 154242 - RNA, 18 nt, Homo sapiens
cucuaacaguaguugcaa

SEQ ID NO: 154243 - RNA, 21 nt, Homo sapiens
gaaauucacuuccccucuagg

SEQ ID NO: 154244 - RNA, 20 nt, Homo sapiens
cuuuuuccuggcucaucucu

SEQ ID NO: 154245 - RNA, 12 nt, Homo sapiens
ucccacugccaa

SEQ ID NO: 154246 - RNA, 13 nt, Homo sapiens
ugacacagucuug

SEQ ID NO: 154247 - RNA, 16 nt, Homo sapiens
aguugcaauguuuuag

SEQ ID NO: 154248 - RNA, 20 nt, Homo sapiens
accaauauuguacaguuuuu

SEQ ID NO: 154249 - RNA, 19 nt, Homo sapiens
agcaccuacaguguacagu

SEQ ID NO: 154250 - RNA, 16 nt, Homo sapiens
agucugauuguagcua

SEQ ID NO: 154251 - RNA, 22 nt, Homo sapiens
uaugauuguccguaggcccaua

SEQ ID NO: 154252 - RNA, 22 nt, Homo sapiens
cuguagaaaagggaacugaaca

SEQ ID NO: 154253 - RNA, 14 nt, Homo sapiens
ugagaaaaugucuu

SEQ ID NO: 154254 - RNA, 21 nt, Homo sapiens
ucugaggcuucuggggcuuca

SEQ ID NO: 154255 - RNA, 15 nt, Homo sapiens
gguccaaggucucca

SEQ ID NO: 154256 - RNA, 18 nt, Homo sapiens
cgauuaauaacaggcaaa

SEQ ID NO: 154257 - RNA, 17 nt, Homo sapiens
aauaaccauugucauaa

SEQ ID NO: 154258 - RNA, 18 nt, Homo sapiens
gauaaucucuccauuccc

SEQ ID NO: 154259 - RNA, 19 nt, Homo sapiens
cuuccuggaggugacacuu

SEQ ID NO: 154260 - RNA, 12 nt, Homo sapiens
aaguaagccaug

SEQ ID NO: 154261 - RNA, 13 nt, Homo sapiens
agaaagugaucca

SEQ ID NO: 154262 - RNA, 19 nt, Homo sapiens
uauauguauaucacauucc

SEQ ID NO: 154263 - RNA, 18 nt, Homo sapiens
gaauuuggguaugaacag

SEQ ID NO: 154264 - RNA, 13 nt, Homo sapiens
gaaaaguuuugua

SEQ ID NO: 154265 - RNA, 23 nt, Homo sapiens
gucucauaaugcauguggcacuu

SEQ ID NO: 154266 - RNA, 21 nt, Homo sapiens
aggucuccagagggugaaagc

SEQ ID NO: 154267 - RNA, 21 nt, Homo sapiens
uaguggugacugugggcucca

SEQ ID NO: 154268 - RNA, 22 nt, Homo sapiens
cacagcacaaauuaguuguaua

SEQ ID NO: 154269 - RNA, 18 nt, Homo sapiens
aauguagaaagugaucca

SEQ ID NO: 154270 - RNA, 17 nt, Homo sapiens
cuaaaaguuaauagggu

SEQ ID NO: 154271 - RNA, 13 nt, Homo sapiens
gcauucucuaguc

SEQ ID NO: 154272 - RNA, 22 nt, Homo sapiens
ucuuuaaccacuuuucaauguc

SEQ ID NO: 154273 - RNA, 19 nt, Homo sapiens
ugaccaauauuguacaguu

SEQ ID NO: 154274 - RNA, 20 nt, Homo sapiens
ucugccuccccuucacuccc

SEQ ID NO: 154275 - RNA, 15 nt, Homo sapiens
uggguucaagugauu

SEQ ID NO: 154276 - RNA, 21 nt, Homo sapiens
ccacugccaaagaacuuggaa

SEQ ID NO: 154277 - RNA, 23 nt, Homo sapiens
aaaaccguaugagggaacugugu

SEQ ID NO: 154278 - RNA, 16 nt, Homo sapiens
aaguccacaguggaac

SEQ ID NO: 154279 - RNA, 15 nt, Homo sapiens
cccacccaacuaauu

SEQ ID NO: 154280 - RNA, 18 nt, Homo sapiens
ggaaauagugauuuccac

SEQ ID NO: 154281 - RNA, 14 nt, Homo sapiens
uccccuucacuccc

SEQ ID NO: 154282 - RNA, 18 nt, Homo sapiens
cuucuuuacuuaguucaa

SEQ ID NO: 154283 - RNA, 20 nt, Homo sapiens
uaaacuuacuuaguguuaug

SEQ ID NO: 154284 - RNA, 19 nt, Homo sapiens
uaaguuacacauuuuucag

SEQ ID NO: 154285 - RNA, 19 nt, Homo sapiens
cugaguagcuggauuacag

SEQ ID NO: 154286 - RNA, 19 nt, Homo sapiens
aguauccugcuucugauau

SEQ ID NO: 154287 - RNA, 16 nt, Homo sapiens
aacguaagacugugua

SEQ ID NO: 154288 - RNA, 21 nt, Homo sapiens
gaccaauauuguacaguuuuu

SEQ ID NO: 154289 - RNA, 14 nt, Homo sapiens
caaaguaagccaug

SEQ ID NO: 154290 - RNA, 20 nt, Homo sapiens
cuccugaccucaaguaaucc

SEQ ID NO: 154291 - RNA, 14 nt, Homo sapiens
auuucuguucuucc

SEQ ID NO: 154292 - RNA, 13 nt, Homo sapiens
gauaugcuguauu

SEQ ID NO: 154293 - RNA, 17 nt, Homo sapiens
aaauaaucaguguuucc

SEQ ID NO: 154294 - RNA, 14 nt, Homo sapiens
auguaucucaggaa

SEQ ID NO: 154295 - RNA, 23 nt, Homo sapiens
ccaguaguggugacugugggcuc

SEQ ID NO: 154296 - RNA, 21 nt, Homo sapiens
aaagcccuuaaaaauaugugu

SEQ ID NO: 154297 - RNA, 13 nt, Homo sapiens
agccucaucucuu

SEQ ID NO: 154298 - RNA, 17 nt, Homo sapiens
ucuccuuagaaguggaa

SEQ ID NO: 154299 - RNA, 17 nt, Homo sapiens
uggcacuuauaaccaaa

SEQ ID NO: 154300 - RNA, 14 nt, Homo sapiens
gucuuuaaccacuu

SEQ ID NO: 154301 - RNA, 14 nt, Homo sapiens
accuacaguguaca

SEQ ID NO: 154302 - RNA, 13 nt, Homo sapiens
ucugaaacagcuu

SEQ ID NO: 154303 - RNA, 13 nt, Homo sapiens
gccauaugaauaa

SEQ ID NO: 154304 - RNA, 17 nt, Homo sapiens
cugauguagcuuauaca

SEQ ID NO: 154305 - RNA, 15 nt, Homo sapiens
cuuacuuaguguuau

SEQ ID NO: 154306 - RNA, 23 nt, Homo sapiens
cagucaaagauacacaaucugaa

SEQ ID NO: 154307 - RNA, 17 nt, Homo sapiens
augagggaacuguguag

SEQ ID NO: 154308 - RNA, 21 nt, Homo sapiens
cuaagaagcagauaauggugu

SEQ ID NO: 154309 - RNA, 11 nt, Homo sapiens
agaaguggaag

SEQ ID NO: 154310 - RNA, 16 nt, Homo sapiens
uguacagucuuguauu

SEQ ID NO: 154311 - RNA, 17 nt, Homo sapiens
accuaacgagaaauaga

SEQ ID NO: 154312 - RNA, 19 nt, Homo sapiens
cuuuaauuuuuuacuauuu

SEQ ID NO: 154313 - RNA, 15 nt, Homo sapiens
auagaauucagucaa

SEQ ID NO: 154314 - RNA, 22 nt, Homo sapiens
ucagcaccuacaguguacaguc

SEQ ID NO: 154315 - RNA, 16 nt, Homo sapiens
augcaguuuuccuuaa

SEQ ID NO: 154316 - RNA, 15 nt, Homo sapiens
cuagucaguuggcua

SEQ ID NO: 154317 - RNA, 20 nt, Homo sapiens
ucauauugaugugugucuag

SEQ ID NO: 154318 - RNA, 18 nt, Homo sapiens
ucuuggguucaagugauu

SEQ ID NO: 154319 - RNA, 19 nt, Homo sapiens
cugggacuaaguguaccag

SEQ ID NO: 154320 - RNA, 15 nt, Homo sapiens
gagcuccuaagccau

SEQ ID NO: 154321 - RNA, 14 nt, Homo sapiens
cacaaucugaaaca

SEQ ID NO: 154322 - RNA, 15 nt, Homo sapiens
auucuguaguuucac

SEQ ID NO: 154323 - RNA, 14 nt, Homo sapiens
ugagcaaaaccaaa

SEQ ID NO: 154324 - RNA, 15 nt, Homo sapiens
cagcaccuacagugu

SEQ ID NO: 154325 - RNA, 20 nt, Homo sapiens
gacgugauuuugcuguagaa

SEQ ID NO: 154326 - RNA, 18 nt, Homo sapiens
uaaugcauguggcacuua

SEQ ID NO: 154327 - RNA, 19 nt, Homo sapiens
uccauuuacccuucuuuuc

SEQ ID NO: 154328 - RNA, 13 nt, Homo sapiens
aaaaugugacuca

SEQ ID NO: 154329 - RNA, 13 nt, Homo sapiens
cacucagaaaaug

SEQ ID NO: 154330 - RNA, 20 nt, Homo sapiens
uacacaaucugaaacagcuu

SEQ ID NO: 154331 - RNA, 20 nt, Homo sapiens
ugcagccacuguuaagccau

SEQ ID NO: 154332 - RNA, 13 nt, Homo sapiens
ccuccaaguccac

SEQ ID NO: 154333 - RNA, 21 nt, Homo sapiens
uuggacucaagcaagauuuca

SEQ ID NO: 154334 - RNA, 16 nt, Homo sapiens
aggcuggagugcaaug

SEQ ID NO: 154335 - RNA, 13 nt, Homo sapiens
agagcuuuaccua

SEQ ID NO: 154336 - RNA, 18 nt, Homo sapiens
uuaagaaauucacuuccc

SEQ ID NO: 154337 - RNA, 21 nt, Homo sapiens
auguccuacugagacagcaca

SEQ ID NO: 154338 - RNA, 22 nt, Homo sapiens
gcuggauuacaggcaugugcca

SEQ ID NO: 154339 - RNA, 16 nt, Homo sapiens
uccuggggaacauaga

SEQ ID NO: 154340 - RNA, 18 nt, Homo sapiens
cgugaccugccaggcaca

SEQ ID NO: 154341 - RNA, 14 nt, Homo sapiens
cuuaaaauagccau

SEQ ID NO: 154342 - RNA, 21 nt, Homo sapiens
auaacauggugugcuucuuaa

SEQ ID NO: 154343 - RNA, 21 nt, Homo sapiens
uuaaagcagggauaugcugua

SEQ ID NO: 154344 - RNA, 18 nt, Homo sapiens
aauaugacacucuaguca

SEQ ID NO: 154345 - RNA, 14 nt, Homo sapiens
acaaucugaaacag

SEQ ID NO: 154346 - RNA, 15 nt, Homo sapiens
guagaaagugaucca

SEQ ID NO: 154347 - RNA, 18 nt, Homo sapiens
aauucagggagugggcua

SEQ ID NO: 154348 - RNA, 15 nt, Homo sapiens
agagggaaaacagaa

SEQ ID NO: 154349 - RNA, 22 nt, Homo sapiens
caccgcgcccagccucaucucu

SEQ ID NO: 154350 - RNA, 18 nt, Homo sapiens
accauuagcauuugucaa

SEQ ID NO: 154351 - RNA, 19 nt, Homo sapiens
gcccaggcuggagugcaau

SEQ ID NO: 154352 - RNA, 23 nt, Homo sapiens
agccaccgcgcccagccucaucu

SEQ ID NO: 154353 - RNA, 17 nt, Homo sapiens
cuaagcacgggccauau

SEQ ID NO: 154354 - RNA, 22 nt, Homo sapiens
cccucccacugccaaagaacuu

SEQ ID NO: 154355 - RNA, 23 nt, Homo sapiens
aaaacuucaacguaagacugugu

SEQ ID NO: 154356 - RNA, 18 nt, Homo sapiens
ugugaaguuuaauugacu

SEQ ID NO: 154357 - RNA, 17 nt, Homo sapiens
caguaguggugacugug

SEQ ID NO: 154358 - RNA, 10 nt, Homo sapiens
aaacuuguau

SEQ ID NO: 154359 - RNA, 22 nt, Homo sapiens
ucccuucuuuuuguucuucauc

SEQ ID NO: 154360 - RNA, 17 nt, Homo sapiens
cauggagucacagccac

SEQ ID NO: 154361 - RNA, 18 nt, Homo sapiens
uguuguuuucccaaagag

SEQ ID NO: 154362 - RNA, 15 nt, Homo sapiens
ccuuugccugguaca

SEQ ID NO: 154363 - RNA, 13 nt, Homo sapiens
gcuucuuuacuua

SEQ ID NO: 154364 - RNA, 22 nt, Homo sapiens
ucaaagugagcuccuaagccau

SEQ ID NO: 154365 - RNA, 18 nt, Homo sapiens
uggccaggcuggucucaa

SEQ ID NO: 154366 - RNA, 15 nt, Homo sapiens
aacugaacauuccag

SEQ ID NO: 154367 - RNA, 20 nt, Homo sapiens
cagagucucgcucuguugcc

SEQ ID NO: 154368 - RNA, 19 nt, Homo sapiens
ccucaaaacaaucuuguca

SEQ ID NO: 154369 - RNA, 15 nt, Homo sapiens
cagauuauuauugaa

SEQ ID NO: 154370 - RNA, 17 nt, Homo sapiens
ggcaggaccuguggcca

SEQ ID NO: 154371 - RNA, 22 nt, Homo sapiens
augaaucaaucaauucauaucu

SEQ ID NO: 154372 - RNA, 18 nt, Homo sapiens
auuagcuccacaaagcca

SEQ ID NO: 154373 - RNA, 19 nt, Homo sapiens
accugccaggcacacugag

SEQ ID NO: 154374 - RNA, 19 nt, Homo sapiens
auugcuugcacaaaccaau

SEQ ID NO: 154375 - RNA, 16 nt, Homo sapiens
ugccaggcacacugag

SEQ ID NO: 154376 - RNA, 12 nt, Homo sapiens
ugaacauuccag

SEQ ID NO: 154377 - RNA, 21 nt, Homo sapiens
cucugauguagcuuauacaaa

SEQ ID NO: 154378 - RNA, 19 nt, Homo sapiens
aggcugugccaucagcucc

SEQ ID NO: 154379 - RNA, 14 nt, Homo sapiens
guccacaguggaac

SEQ ID NO: 154380 - RNA, 16 nt, Homo sapiens
gaaguuuucuugacuu

SEQ ID NO: 154381 - RNA, 15 nt, Homo sapiens
agccauguaucucag

SEQ ID NO: 154382 - RNA, 17 nt, Homo sapiens
ucuggccuccaagucca

SEQ ID NO: 154383 - RNA, 20 nt, Homo sapiens
caggcuggagugcaaugaca

SEQ ID NO: 154384 - RNA, 20 nt, Homo sapiens
ugcccaggcuggagugcaau

SEQ ID NO: 154385 - RNA, 16 nt, Homo sapiens
acugaauuuugucuuu

SEQ ID NO: 154386 - RNA, 16 nt, Homo sapiens
uuaaaauagccauaaa

SEQ ID NO: 154387 - RNA, 15 nt, Homo sapiens
guaggugguuuugaa

SEQ ID NO: 154388 - RNA, 15 nt, Homo sapiens
caaucugaaacagcu

SEQ ID NO: 154389 - RNA, 21 nt, Homo sapiens
cagguucugacucuuggcaca

SEQ ID NO: 154390 - RNA, 19 nt, Homo sapiens
uguuuuuaauaaagacagg

SEQ ID NO: 154391 - RNA, 13 nt, Homo sapiens
uucagaaucucuc

SEQ ID NO: 154392 - RNA, 23 nt, Homo sapiens
uguaagaucguucucugccucac

SEQ ID NO: 154393 - RNA, 16 nt, Homo sapiens
ccuggaccaggucuca

SEQ ID NO: 154394 - RNA, 13 nt, Homo sapiens
ggcaggacagcuc

SEQ ID NO: 154395 - RNA, 17 nt, Homo sapiens
gaauuucuguucuucca

SEQ ID NO: 154396 - RNA, 15 nt, Homo sapiens
augggagacacugau

SEQ ID NO: 154397 - RNA, 17 nt, Homo sapiens
ugggagacacugaugua

SEQ ID NO: 154398 - RNA, 16 nt, Homo sapiens
acacaaucugaaacag

SEQ ID NO: 154399 - RNA, 17 nt, Homo sapiens
uucaacguaagacugug

SEQ ID NO: 154400 - RNA, 19 nt, Homo sapiens
gcauuugucaacaaaguca

SEQ ID NO: 154401 - RNA, 17 nt, Homo sapiens
ucggcucuggccuccaa

SEQ ID NO: 154402 - RNA, 17 nt, Homo sapiens
uaagaagugacucuugc

SEQ ID NO: 154403 - RNA, 16 nt, Homo sapiens
gcuccauucaaaguga

SEQ ID NO: 154404 - RNA, 20 nt, Homo sapiens
uguguuuuuaauaaagacag

SEQ ID NO: 154405 - RNA, 20 nt, Homo sapiens
gcagaugguggagcugaaua

SEQ ID NO: 154406 - RNA, 21 nt, Homo sapiens
ucauggauauguuauacugaa

SEQ ID NO: 154407 - RNA, 16 nt, Homo sapiens
aagguugagggcaaug

SEQ ID NO: 154408 - RNA, 16 nt, Homo sapiens
cauaaaaguuggcuca

SEQ ID NO: 154409 - RNA, 16 nt, Homo sapiens
ugcauucucuagucag

SEQ ID NO: 154410 - RNA, 16 nt, Homo sapiens
uuguuuguggucuaua

SEQ ID NO: 154411 - RNA, 19 nt, Homo sapiens
uccuggaggugacacuuga

SEQ ID NO: 154412 - RNA, 17 nt, Homo sapiens
cuaaguguaccagagaa

SEQ ID NO: 154413 - RNA, 22 nt, Homo sapiens
uguuuccuuuaauuuuuuacua

SEQ ID NO: 154414 - RNA, 19 nt, Homo sapiens
agccaugggagacacugau

SEQ ID NO: 154415 - RNA, 15 nt, Homo sapiens
uccacagugacucca

SEQ ID NO: 154416 - RNA, 18 nt, Homo sapiens
auuaagaaauucacuucc

SEQ ID NO: 154417 - RNA, 20 nt, Homo sapiens
caaguucuuaguugcuguau

SEQ ID NO: 154418 - RNA, 19 nt, Homo sapiens
cauaaugcauguggcacuu

SEQ ID NO: 154419 - RNA, 15 nt, Homo sapiens
agccagguucugacu

SEQ ID NO: 154420 - RNA, 23 nt, Homo sapiens
ugggucagaguuccgacugccau

SEQ ID NO: 154421 - RNA, 19 nt, Homo sapiens
uccugaguagcuggauuac

SEQ ID NO: 154422 - RNA, 12 nt, Homo sapiens
uaaaaguuggcu

SEQ ID NO: 154423 - RNA, 21 nt, Homo sapiens
accuaaauaugagcccagaaa

SEQ ID NO: 154424 - RNA, 13 nt, Homo sapiens
cauuuacauugcc

SEQ ID NO: 154425 - RNA, 11 nt, Homo sapiens
accucaucucc

SEQ ID NO: 154426 - RNA, 15 nt, Homo sapiens
aaccguacacugugu

SEQ ID NO: 154427 - RNA, 15 nt, Homo sapiens
guauuaaguuguuaa

SEQ ID NO: 154428 - RNA, 14 nt, Homo sapiens
agccaguuacauaa

SEQ ID NO: 154429 - RNA, 20 nt, Homo sapiens
cgccacccucccacugccaa

SEQ ID NO: 154430 - RNA, 21 nt, Homo sapiens
uaagaucguucucugccucac

SEQ ID NO: 154431 - RNA, 12 nt, Homo sapiens
aggacuguagaa

SEQ ID NO: 154432 - RNA, 16 nt, Homo sapiens
uacaauauacuuguau

SEQ ID NO: 154433 - RNA, 15 nt, Homo sapiens
gugagaggacucuga

SEQ ID NO: 154434 - RNA, 20 nt, Homo sapiens
uacacauuuuucagauauaa

SEQ ID NO: 154435 - RNA, 23 nt, Homo sapiens
aacaguaguugcaauguuuuaga

SEQ ID NO: 154436 - RNA, 14 nt, Homo sapiens
ucaucucuuuauuc

SEQ ID NO: 154437 - RNA, 18 nt, Homo sapiens
caucccgucgacguagaa

SEQ ID NO: 154438 - RNA, 19 nt, Homo sapiens
cucuggccuccaaguccac

SEQ ID NO: 154439 - RNA, 14 nt, Homo sapiens
gaaacaucauuuca

SEQ ID NO: 154440 - RNA, 16 nt, Homo sapiens
cauaacaggagugcca

SEQ ID NO: 154441 - RNA, 17 nt, Homo sapiens
cugcuagggaauaucaa

SEQ ID NO: 154442 - RNA, 19 nt, Homo sapiens
uuggcuaguaaaagccauc

SEQ ID NO: 154443 - RNA, 21 nt, Homo sapiens
auuugucaacaaagucaccca

SEQ ID NO: 154444 - RNA, 15 nt, Homo sapiens
ugcauguggcacuua

SEQ ID NO: 154445 - RNA, 20 nt, Homo sapiens
cagccuccugaguagcugga

SEQ ID NO: 154446 - RNA, 10 nt, Homo sapiens
aaaagugaug

SEQ ID NO: 154447 - RNA, 21 nt, Homo sapiens
gucuuuggugaacauugcaau

SEQ ID NO: 154448 - RNA, 22 nt, Homo sapiens
cugagucccuuagccaagcagu

SEQ ID NO: 154449 - RNA, 14 nt, Homo sapiens
uuuucuugucuaua

SEQ ID NO: 154450 - RNA, 12 nt, Homo sapiens
guagaaagugau

SEQ ID NO: 154451 - RNA, 16 nt, Homo sapiens
aacuuacuuaguguua

SEQ ID NO: 154452 - RNA, 19 nt, Homo sapiens
ucaaaacaaucuugucaua

SEQ ID NO: 154453 - RNA, 22 nt, Homo sapiens
ggcuaagcacgggccauaugaa

SEQ ID NO: 154454 - RNA, 20 nt, Homo sapiens
cucuuggguucaagugauuc

SEQ ID NO: 154455 - RNA, 15 nt, Homo sapiens
gcaggacagcuccug

SEQ ID NO: 154456 - RNA, 20 nt, Homo sapiens
aaccaaauacuuuaauguau

SEQ ID NO: 154457 - RNA, 22 nt, Homo sapiens
ugagacuuugaggguguauauu

SEQ ID NO: 154458 - RNA, 16 nt, Homo sapiens
uaagccauguguucca

SEQ ID NO: 154459 - RNA, 19 nt, Homo sapiens
augugacucaagacuucca

SEQ ID NO: 154460 - RNA, 21 nt, Homo sapiens
uuauuaaauguagaaagugau

SEQ ID NO: 154461 - RNA, 16 nt, Homo sapiens
aguagcuggauuacag

SEQ ID NO: 154462 - RNA, 14 nt, Homo sapiens
ccacaguggaacca

SEQ ID NO: 154463 - RNA, 15 nt, Homo sapiens
acacagcaucagcuc

SEQ ID NO: 154464 - RNA, 20 nt, Homo sapiens
accaaauacuuuaauguaua

SEQ ID NO: 154465 - RNA, 11 nt, Homo sapiens
auaaagacagg

SEQ ID NO: 154466 - RNA, 13 nt, Homo sapiens
ucuuaagacguga

SEQ ID NO: 154467 - RNA, 19 nt, Homo sapiens
auuggaccagucagcacag

SEQ ID NO: 154468 - RNA, 15 nt, Homo sapiens
uccuccccuguucau

SEQ ID NO: 154469 - RNA, 14 nt, Homo sapiens
caauauacuuguau

SEQ ID NO: 154470 - RNA, 18 nt, Homo sapiens
augagaaaaugucuuuau

SEQ ID NO: 154471 - RNA, 18 nt, Homo sapiens
cagaguuccgacugccau

SEQ ID NO: 154472 - RNA, 13 nt, Homo sapiens
aguugcuguaugu

SEQ ID NO: 154473 - RNA, 21 nt, Homo sapiens
acugccaucuuggacuuguca

SEQ ID NO: 154474 - RNA, 21 nt, Homo sapiens
augacacucuagucaaagccu

SEQ ID NO: 154475 - RNA, 14 nt, Homo sapiens
uuggaaaaucaaga

SEQ ID NO: 154476 - RNA, 18 nt, Homo sapiens
acuuuugaaaacaaaaua

SEQ ID NO: 154477 - RNA, 14 nt, Homo sapiens
gucauaacuagaac

SEQ ID NO: 154478 - RNA, 22 nt, Homo sapiens
aucccucaaaacaaucuuguca

SEQ ID NO: 154479 - RNA, 22 nt, Homo sapiens
cauuugucaacaaagucaccca

SEQ ID NO: 154480 - RNA, 14 nt, Homo sapiens
ucuuuggugaacau

SEQ ID NO: 154481 - RNA, 17 nt, Homo sapiens
caggcuggagugcaaug

SEQ ID NO: 154482 - RNA, 19 nt, Homo sapiens
gacuaaguguaccagagaa

SEQ ID NO: 154483 - RNA, 20 nt, Homo sapiens
ucagucuuuuccaugaacuu

SEQ ID NO: 154484 - RNA, 19 nt, Homo sapiens
cucgugguaggacuguaga

SEQ ID NO: 154485 - RNA, 21 nt, Homo sapiens
ccuccaaguccacaguggaac

SEQ ID NO: 154486 - RNA, 23 nt, Homo sapiens
cuuuggugaacauugcaauagaa

SEQ ID NO: 154487 - RNA, 20 nt, Homo sapiens
ugacacucuagucaaagccu

SEQ ID NO: 154488 - RNA, 14 nt, Homo sapiens
gacagaagcguaua

SEQ ID NO: 154489 - RNA, 20 nt, Homo sapiens
gcacaaauugggccaaagaa

SEQ ID NO: 154490 - RNA, 11 nt, Homo sapiens
auaugcacaaa

SEQ ID NO: 154491 - RNA, 23 nt, Homo sapiens
gcaaaaccaaauauuccagagac

SEQ ID NO: 154492 - RNA, 20 nt, Homo sapiens
cuauaagaugaaacaucauu

SEQ ID NO: 154493 - RNA, 23 nt, Homo sapiens
uccugaccucaaguaauccaccu

SEQ ID NO: 154494 - RNA, 21 nt, Homo sapiens
gguaaaauaaucaguguuucc

SEQ ID NO: 154495 - RNA, 12 nt, Homo sapiens
uucucugccuca

SEQ ID NO: 154496 - RNA, 16 nt, Homo sapiens
cuuguauagcaguuuc

SEQ ID NO: 154497 - RNA, 15 nt, Homo sapiens
aagccauguguucca

SEQ ID NO: 154498 - RNA, 23 nt, Homo sapiens
agucuuguuguuuucccaaagag

SEQ ID NO: 154499 - RNA, 12 nt, Homo sapiens
uuaacugaaugc

SEQ ID NO: 154500 - RNA, 20 nt, Homo sapiens
cagcuguuuaugcauagaua

SEQ ID NO: 154501 - RNA, 18 nt, Homo sapiens
cuuucccuuaaauaacac

SEQ ID NO: 154502 - RNA, 23 nt, Homo sapiens
uuacuuuuuccuggcucaucucu

SEQ ID NO: 154503 - RNA, 18 nt, Homo sapiens
uggaaauagugauuucca

SEQ ID NO: 154504 - RNA, 21 nt, Homo sapiens
ugaggaauuucuguucuucca

SEQ ID NO: 154505 - RNA, 15 nt, Homo sapiens
gauucuccugccuca

SEQ ID NO: 154506 - RNA, 17 nt, Homo sapiens
uuuccaaauuauggcaa

SEQ ID NO: 154507 - RNA, 14 nt, Homo sapiens
ugcuguaugucucg

SEQ ID NO: 154508 - RNA, 15 nt, Homo sapiens
gaaaaguaacuguuu

SEQ ID NO: 154509 - RNA, 12 nt, Homo sapiens
uguaccagagaa

SEQ ID NO: 154510 - RNA, 13 nt, Homo sapiens
uacuaaucuuucu

SEQ ID NO: 154511 - RNA, 21 nt, Homo sapiens
aacuucaacguaagacugugu

SEQ ID NO: 154512 - RNA, 13 nt, Homo sapiens
ugcucacaaaagu

SEQ ID NO: 154513 - RNA, 22 nt, Homo sapiens
caauauacuuguauagcaguuu

SEQ ID NO: 154514 - RNA, 15 nt, Homo sapiens
uccugcuucugauau

SEQ ID NO: 154515 - RNA, 20 nt, Homo sapiens
aguuuccaaauuauggcaaa

SEQ ID NO: 154516 - RNA, 21 nt, Homo sapiens
ccaaguucuuaguugcuguau

SEQ ID NO: 154517 - RNA, 12 nt, Homo sapiens
gaguagcuggau

SEQ ID NO: 154518 - RNA, 13 nt, Homo sapiens
cagaaaaagaagg

SEQ ID NO: 154519 - RNA, 16 nt, Homo sapiens
gagggaaaacagaaaa

SEQ ID NO: 154520 - RNA, 20 nt, Homo sapiens
gucagaguuccgacugccau

SEQ ID NO: 154521 - RNA, 21 nt, Homo sapiens
cacaaucugaaacagcuucau

SEQ ID NO: 154522 - RNA, 20 nt, Homo sapiens
uggggacacagcaucagcuc

SEQ ID NO: 154523 - RNA, 15 nt, Homo sapiens
gaacugaacauucca

SEQ ID NO: 154524 - RNA, 19 nt, Homo sapiens
cacagcaucagcucaagac

SEQ ID NO: 154525 - RNA, 16 nt, Homo sapiens
aggucagucuucuucc

SEQ ID NO: 154526 - RNA, 12 nt, Homo sapiens
guacacuguguu

SEQ ID NO: 154527 - RNA, 16 nt, Homo sapiens
agcuagcaacauuugu

SEQ ID NO: 154528 - RNA, 19 nt, Homo sapiens
agaugaaacaucauuucaa

SEQ ID NO: 154529 - RNA, 17 nt, Homo sapiens
caacaaagucacccacu

SEQ ID NO: 154530 - RNA, 17 nt, Homo sapiens
cuucuaaguaaauacaa

SEQ ID NO: 154531 - RNA, 11 nt, Homo sapiens
uucaagugauu

SEQ ID NO: 154532 - RNA, 21 nt, Homo sapiens
aaccguaugagggaacugugu

SEQ ID NO: 154533 - RNA, 22 nt, Homo sapiens
ucuaaggcugugccaucagcuc

SEQ ID NO: 154534 - RNA, 20 nt, Homo sapiens
augcuggggacacagcauca

SEQ ID NO: 154535 - RNA, 16 nt, Homo sapiens
uuagagcuuuaccuaa

SEQ ID NO: 154536 - RNA, 22 nt, Homo sapiens
aaaauaugacacucuagucaaa

SEQ ID NO: 154537 - RNA, 12 nt, Homo sapiens
aggccagagcaa

SEQ ID NO: 154538 - RNA, 15 nt, Homo sapiens
ugggauuacagggau

SEQ ID NO: 154539 - RNA, 18 nt, Homo sapiens
uuuaaaugaaagugagac

SEQ ID NO: 154540 - RNA, 14 nt, Homo sapiens
acuaagaagcagau

SEQ ID NO: 154541 - RNA, 17 nt, Homo sapiens
ucuuaaaauagccauaa

SEQ ID NO: 154542 - RNA, 18 nt, Homo sapiens
aauuucucuacugucuca

SEQ ID NO: 154543 - RNA, 19 nt, Homo sapiens
gcuucuuugaaacuuguau

SEQ ID NO: 154544 - RNA, 15 nt, Homo sapiens
aguuccgacugccau

SEQ ID NO: 154545 - RNA, 22 nt, Homo sapiens
aaagccaaucucaaucccucaa

SEQ ID NO: 154546 - RNA, 18 nt, Homo sapiens
aauguccuacugagacag

SEQ ID NO: 154547 - RNA, 14 nt, Homo sapiens
uacgacaacuugca

SEQ ID NO: 154548 - RNA, 19 nt, Homo sapiens
ugaacauugcaauagaaau

SEQ ID NO: 154549 - RNA, 12 nt, Homo sapiens
uuacauugccuu

SEQ ID NO: 154550 - RNA, 19 nt, Homo sapiens
guagaaaagggaacugaac

SEQ ID NO: 154551 - RNA, 12 nt, Homo sapiens
gcaaaaccaaau

SEQ ID NO: 154552 - RNA, 15 nt, Homo sapiens
cauucugcacucaga

SEQ ID NO: 154553 - RNA, 13 nt, Homo sapiens
cagagcaaacaga

SEQ ID NO: 154554 - RNA, 23 nt, Homo sapiens
ucagauauaaaagacugaccaau

SEQ ID NO: 154555 - RNA, 17 nt, Homo sapiens
cuucuuuuuguucuuca

SEQ ID NO: 154556 - RNA, 21 nt, Homo sapiens
guaaauuucucuacugucuca

SEQ ID NO: 154557 - RNA, 13 nt, Homo sapiens
uucuccugccuca

SEQ ID NO: 154558 - RNA, 12 nt, Homo sapiens
uuugucuuuaug

SEQ ID NO: 154559 - RNA, 22 nt, Homo sapiens
agcagaugguggagcugaauau

SEQ ID NO: 154560 - RNA, 21 nt, Homo sapiens
aaaauuaagaaauucacuucc

SEQ ID NO: 154561 - RNA, 18 nt, Homo sapiens
gccaaucaguagccagca

SEQ ID NO: 154562 - RNA, 23 nt, Homo sapiens
aauguaagaucguucucugccuc

SEQ ID NO: 154563 - RNA, 10 nt, Homo sapiens
cucacaaaag

SEQ ID NO: 154564 - RNA, 19 nt, Homo sapiens
cugauguagcuuauacaaa

SEQ ID NO: 154565 - RNA, 18 nt, Homo sapiens
ccagagcguguagugaau

SEQ ID NO: 154566 - RNA, 16 nt, Homo sapiens
cacagccaaccuagcu

SEQ ID NO: 154567 - RNA, 15 nt, Homo sapiens
uugcaauguggcuug

SEQ ID NO: 154568 - RNA, 15 nt, Homo sapiens
agggagaagagggaa

SEQ ID NO: 154569 - RNA, 17 nt, Homo sapiens
auuugucaacaaaguca

SEQ ID NO: 154570 - RNA, 23 nt, Homo sapiens
guugauuucagcaccuacagugu

SEQ ID NO: 154571 - RNA, 12 nt, Homo sapiens
acugugggcucc

SEQ ID NO: 154572 - RNA, 18 nt, Homo sapiens
uuaagccauguguuccaa

SEQ ID NO: 154573 - RNA, 21 nt, Homo sapiens
uguaaauuucucuacugucuc

SEQ ID NO: 154574 - RNA, 18 nt, Homo sapiens
ggacucaagcaagauuuc

SEQ ID NO: 154575 - RNA, 16 nt, Homo sapiens
acccuucuccuuagaa

SEQ ID NO: 154576 - RNA, 19 nt, Homo sapiens
uagugcacagcacaaauua

SEQ ID NO: 154577 - RNA, 13 nt, Homo sapiens
uccacagugacuc

SEQ ID NO: 154578 - RNA, 15 nt, Homo sapiens
aagccauguaucuca

SEQ ID NO: 154579 - RNA, 11 nt, Homo sapiens
agaagaugaau

SEQ ID NO: 154580 - RNA, 15 nt, Homo sapiens
aguucauggauaugu

SEQ ID NO: 154581 - RNA, 20 nt, Homo sapiens
agcaacauuuguuuuagucu

SEQ ID NO: 154582 - RNA, 18 nt, Homo sapiens
aaaaguauccugcuucug

SEQ ID NO: 154583 - RNA, 18 nt, Homo sapiens
ugguuuuucaguuuucag

SEQ ID NO: 154584 - RNA, 14 nt, Homo sapiens
uuaaacuuacuuag

SEQ ID NO: 154585 - RNA, 20 nt, Homo sapiens
auacuagaguucauggauau

SEQ ID NO: 154586 - RNA, 12 nt, Homo sapiens
acugccaaagaa

SEQ ID NO: 154587 - RNA, 22 nt, Homo sapiens
guucauggauauguuauacuga

SEQ ID NO: 154588 - RNA, 22 nt, Homo sapiens
uuaucauuaaaaggaaagcaga

SEQ ID NO: 154589 - RNA, 19 nt, Homo sapiens
ucgugguaggacuguagaa

SEQ ID NO: 154590 - RNA, 16 nt, Homo sapiens
ggggacacagcaucag

SEQ ID NO: 154591 - RNA, 12 nt, Homo sapiens
ugggccaaagaa

SEQ ID NO: 154592 - RNA, 23 nt, Homo sapiens
uuuauacucaggcagaucucagc

SEQ ID NO: 154593 - RNA, 22 nt, Homo sapiens
guaagaucguucucugccucac

SEQ ID NO: 154594 - RNA, 15 nt, Homo sapiens
cgacaacuugcacgu

SEQ ID NO: 154595 - RNA, 13 nt, Homo sapiens
uugucaacaaagu

SEQ ID NO: 154596 - RNA, 21 nt, Homo sapiens
aaaucuuuuuuguucaaagau

SEQ ID NO: 154597 - RNA, 21 nt, Homo sapiens
cugaccaauauuguacaguuu

SEQ ID NO: 154598 - RNA, 17 nt, Homo sapiens
ccaggcuggagugcaau

SEQ ID NO: 154599 - RNA, 13 nt, Homo sapiens
cuuaguugcugua

SEQ ID NO: 154600 - RNA, 14 nt, Homo sapiens
ugacucuuggcaca

SEQ ID NO: 154601 - RNA, 19 nt, Homo sapiens
agaaguaaauauagcucag

SEQ ID NO: 154602 - RNA, 16 nt, Homo sapiens
uaaucaguguuuccaa

SEQ ID NO: 154603 - RNA, 22 nt, Homo sapiens
cuguuuugguuuugcucacaaa

SEQ ID NO: 154604 - RNA, 20 nt, Homo sapiens
ccaggcuggagugcaaugac

SEQ ID NO: 154605 - RNA, 21 nt, Homo sapiens
uccacucaggucuguuuuccg

SEQ ID NO: 154606 - RNA, 23 nt, Homo sapiens
cacagccaaccuagcuagcaaca

SEQ ID NO: 154607 - RNA, 21 nt, Homo sapiens
acuguuuugguuuugcucaca

SEQ ID NO: 154608 - RNA, 22 nt, Homo sapiens
ucugauaugcaguuuuccuuaa

SEQ ID NO: 154609 - RNA, 22 nt, Homo sapiens
acacaaucugaaacagcuucau

SEQ ID NO: 154610 - RNA, 13 nt, Homo sapiens
cagagacugggac

SEQ ID NO: 154611 - RNA, 18 nt, Homo sapiens
ugaaaauaugacacucua

SEQ ID NO: 154612 - RNA, 15 nt, Homo sapiens
augaauaguuuccaa

SEQ ID NO: 154613 - RNA, 20 nt, Homo sapiens
cucgugguaggacuguagaa

SEQ ID NO: 154614 - RNA, 22 nt, Homo sapiens
uaagcugccuguacacaacuca

SEQ ID NO: 154615 - RNA, 14 nt, Homo sapiens
aaccuagcuagcaa

SEQ ID NO: 154616 - RNA, 16 nt, Homo sapiens
uagaucugaacuccuu

SEQ ID NO: 154617 - RNA, 15 nt, Homo sapiens
ugaaugccacucugu

SEQ ID NO: 154618 - RNA, 14 nt, Homo sapiens
uguuaacugaaugc

SEQ ID NO: 154619 - RNA, 16 nt, Homo sapiens
cuuaaaauagccauaa

SEQ ID NO: 154620 - RNA, 15 nt, Homo sapiens
aguugggugauaugu

SEQ ID NO: 154621 - RNA, 22 nt, Homo sapiens
uguacaguuuuuauugcuuguu

SEQ ID NO: 154622 - RNA, 20 nt, Homo sapiens
uggacucaagcaagauuuca

SEQ ID NO: 154623 - RNA, 22 nt, Homo sapiens
cagucuucuuccaugucuauua

SEQ ID NO: 154624 - RNA, 19 nt, Homo sapiens
uccuaagccaugggagaca

SEQ ID NO: 154625 - RNA, 17 nt, Homo sapiens
gucaaagccuugguaaa

SEQ ID NO: 154626 - RNA, 13 nt, Homo sapiens
gaaacagcuucau

SEQ ID NO: 154627 - RNA, 14 nt, Homo sapiens
caaugucuaaaaac

SEQ ID NO: 154628 - RNA, 13 nt, Homo sapiens
guccaaggucucc

SEQ ID NO: 154629 - RNA, 17 nt, Homo sapiens
uuuaaaugaaagugaga

SEQ ID NO: 154630 - RNA, 12 nt, Homo sapiens
acaaucuuguca

SEQ ID NO: 154631 - RNA, 20 nt, Homo sapiens
aaaaucaaacaauucaggga

SEQ ID NO: 154632 - RNA, 17 nt, Homo sapiens
accuaaauaugagccca

SEQ ID NO: 154633 - RNA, 12 nt, Homo sapiens
acugagccagca

SEQ ID NO: 154634 - RNA, 13 nt, Homo sapiens
gauacgacaacuu

SEQ ID NO: 154635 - RNA, 18 nt, Homo sapiens
auguaagaucguucucug

SEQ ID NO: 154636 - RNA, 21 nt, Homo sapiens
ccuaaaaggcagaguacaaag

SEQ ID NO: 154637 - RNA, 17 nt, Homo sapiens
agaaaguggcuugaaau

SEQ ID NO: 154638 - RNA, 15 nt, Homo sapiens
augagcaaaaccaaa

SEQ ID NO: 154639 - RNA, 12 nt, Homo sapiens
gacucaagcaag

SEQ ID NO: 154640 - RNA, 16 nt, Homo sapiens
accaauauuguacagu

SEQ ID NO: 154641 - RNA, 22 nt, Homo sapiens
gccggggaaggaggccguccau

SEQ ID NO: 154642 - RNA, 17 nt, Homo sapiens
cuguaugucucguggua

SEQ ID NO: 154643 - RNA, 11 nt, Homo sapiens
aagacugacca

SEQ ID NO: 154644 - RNA, 21 nt, Homo sapiens
ccauaaaggggagggacucau

SEQ ID NO: 154645 - RNA, 10 nt, Homo sapiens
gaaaacagaa

SEQ ID NO: 154646 - RNA, 18 nt, Homo sapiens
auugcaauagaaauccaa

SEQ ID NO: 154647 - RNA, 16 nt, Homo sapiens
aagaauguuuaugaau

SEQ ID NO: 154648 - RNA, 14 nt, Homo sapiens
uacuguccaaagac

SEQ ID NO: 154649 - RNA, 19 nt, Homo sapiens
aguuuacauuuuguauauu

SEQ ID NO: 154650 - RNA, 19 nt, Homo sapiens
guuuauacccguuucacau

SEQ ID NO: 154651 - RNA, 22 nt, Homo sapiens
ugacucaagacuuccagagccu

SEQ ID NO: 154652 - RNA, 17 nt, Homo sapiens
cuagaguucauggauau

SEQ ID NO: 154653 - RNA, 23 nt, Homo sapiens
uuaaaaggaaagcagauggugga

SEQ ID NO: 154654 - RNA, 18 nt, Homo sapiens
ucagaaaauggcacuugg

SEQ ID NO: 154655 - RNA, 22 nt, Homo sapiens
aaguaagccauguaucucagga

SEQ ID NO: 154656 - RNA, 20 nt, Homo sapiens
ucuaagccuucugguuuuau

SEQ ID NO: 154657 - RNA, 17 nt, Homo sapiens
uauugaacuuaugcaaa

SEQ ID NO: 154658 - RNA, 16 nt, Homo sapiens
uacuauuuuuacuaau

SEQ ID NO: 154659 - RNA, 13 nt, Homo sapiens
agcaaaaccaaau

SEQ ID NO: 154660 - RNA, 15 nt, Homo sapiens
auugaacuuaugcaa

SEQ ID NO: 154661 - RNA, 11 nt, Homo sapiens
uguccaaagac

SEQ ID NO: 154662 - RNA, 20 nt, Homo sapiens
cugaccaauauuguacaguu

SEQ ID NO: 154663 - RNA, 23 nt, Homo sapiens
guucauggauauguuauacugaa

SEQ ID NO: 154664 - RNA, 21 nt, Homo sapiens
ugcuguagaagauggcacuua

SEQ ID NO: 154665 - RNA, 14 nt, Homo sapiens
aucaguguuuccaa

SEQ ID NO: 154666 - RNA, 19 nt, Homo sapiens
cucgagguuucucaaagaa

SEQ ID NO: 154667 - RNA, 11 nt, Homo sapiens
acccucccacu

SEQ ID NO: 154668 - RNA, 20 nt, Homo sapiens
ucucaaacuccugaccucaa

SEQ ID NO: 154669 - RNA, 17 nt, Homo sapiens
ucaaacuccugaccuca

SEQ ID NO: 154670 - RNA, 14 nt, Homo sapiens
ugcaauguuuuaga

SEQ ID NO: 154671 - RNA, 16 nt, Homo sapiens
aaucucuccauucccg

SEQ ID NO: 154672 - RNA, 17 nt, Homo sapiens
aaccguacacuguguuu

SEQ ID NO: 154673 - RNA, 13 nt, Homo sapiens
cacuuuucaaugu

SEQ ID NO: 154674 - RNA, 19 nt, Homo sapiens
cuagcaacauuuguuuuag

SEQ ID NO: 154675 - RNA, 20 nt, Homo sapiens
gucaaagauacacaaucuga

SEQ ID NO: 154676 - RNA, 14 nt, Homo sapiens
uggcucaucucuuu

SEQ ID NO: 154677 - RNA, 18 nt, Homo sapiens
uucuuucaaagaagccag

SEQ ID NO: 154678 - RNA, 21 nt, Homo sapiens
aguagcuggauuacaggcaug

SEQ ID NO: 154679 - RNA, 20 nt, Homo sapiens
uaagaugaaacaucauuuca

SEQ ID NO: 154680 - RNA, 22 nt, Homo sapiens
cuuaaaagaaagagaaguuuuc

SEQ ID NO: 154681 - RNA, 15 nt, Homo sapiens
gauauaaaagacuga

SEQ ID NO: 154682 - RNA, 13 nt, Homo sapiens
caaucccucaaaa

SEQ ID NO: 154683 - RNA, 15 nt, Homo sapiens
gcuagggaauaucaa

SEQ ID NO: 154684 - RNA, 15 nt, Homo sapiens
ccagagcaaacagaa

SEQ ID NO: 154685 - RNA, 21 nt, Homo sapiens
gaguucauggauauguuauac

SEQ ID NO: 154686 - RNA, 19 nt, Homo sapiens
uguuaagccauguguucca

SEQ ID NO: 154687 - RNA, 11 nt, Homo sapiens
uuuaaagacag

SEQ ID NO: 154688 - RNA, 14 nt, Homo sapiens
ucaacaaagucacc

SEQ ID NO: 154689 - RNA, 16 nt, Homo sapiens
acaauauacuuguaua

SEQ ID NO: 154690 - RNA, 16 nt, Homo sapiens
augacacucuagucaa

SEQ ID NO: 154691 - RNA, 12 nt, Homo sapiens
gaccaggucuca

SEQ ID NO: 154692 - RNA, 21 nt, Homo sapiens
ugugaccauuagcauuuguca

SEQ ID NO: 154693 - RNA, 20 nt, Homo sapiens
uuaauaggguaaauucucua

SEQ ID NO: 154694 - RNA, 10 nt, Homo sapiens
ugucuuuauu

SEQ ID NO: 154695 - RNA, 14 nt, Homo sapiens
cauaugaauaacau

SEQ ID NO: 154696 - RNA, 19 nt, Homo sapiens
agacgugauuuugcuguag

SEQ ID NO: 154697 - RNA, 13 nt, Homo sapiens
uucuuuucugacu

SEQ ID NO: 154698 - RNA, 18 nt, Homo sapiens
augcuggggacacagcau

SEQ ID NO: 154699 - RNA, 18 nt, Homo sapiens
accaacuauagaauguau

SEQ ID NO: 154700 - RNA, 17 nt, Homo sapiens
gaugcuggggacacagc

SEQ ID NO: 154701 - RNA, 15 nt, Homo sapiens
uuugaggguguauau

SEQ ID NO: 154702 - RNA, 12 nt, Homo sapiens
ugaggguguaua

SEQ ID NO: 154703 - RNA, 14 nt, Homo sapiens
ucuaaguaaauaca

SEQ ID NO: 154704 - RNA, 16 nt, Homo sapiens
uguuauacugaaccag

SEQ ID NO: 154705 - RNA, 15 nt, Homo sapiens
aguguaccagagaag

SEQ ID NO: 154706 - RNA, 20 nt, Homo sapiens
gacucuaacaguaguugcaa

SEQ ID NO: 154707 - RNA, 12 nt, Homo sapiens
gcuggagugcaa

SEQ ID NO: 154708 - RNA, 18 nt, Homo sapiens
aaguaauccaccugccuc

SEQ ID NO: 154709 - RNA, 16 nt, Homo sapiens
ucugcauucucuaguc

SEQ ID NO: 154710 - RNA, 22 nt, Homo sapiens
gaauaacauggugugcuucuua

SEQ ID NO: 154711 - RNA, 15 nt, Homo sapiens
uuuaauagcgucaua

SEQ ID NO: 154712 - RNA, 21 nt, Homo sapiens
gacgucacccuccauucugca

SEQ ID NO: 154713 - RNA, 22 nt, Homo sapiens
uugcacaaauugggccaaagaa

SEQ ID NO: 154714 - RNA, 17 nt, Homo sapiens
acccuucuuuucugacu

SEQ ID NO: 154715 - RNA, 12 nt, Homo sapiens
uuaagaaauuca

SEQ ID NO: 154716 - RNA, 19 nt, Homo sapiens
aacugaaugccacucugua

SEQ ID NO: 154717 - RNA, 18 nt, Homo sapiens
aaaccugaugcuggggac

SEQ ID NO: 154718 - RNA, 15 nt, Homo sapiens
auucucuagucaguu

SEQ ID NO: 154719 - RNA, 22 nt, Homo sapiens
gccauaaaggggagggacucau

SEQ ID NO: 154720 - RNA, 21 nt, Homo sapiens
agccaaccuagcuagcaacau

SEQ ID NO: 154721 - RNA, 18 nt, Homo sapiens
aagagaaguuuucuugac

SEQ ID NO: 154722 - RNA, 22 nt, Homo sapiens
agcuggagucugucaauguccu

SEQ ID NO: 154723 - RNA, 13 nt, Homo sapiens
cagccucaucucu

SEQ ID NO: 154724 - RNA, 23 nt, Homo sapiens
acccuucuccuuagaaguggaag

SEQ ID NO: 154725 - RNA, 20 nt, Homo sapiens
cuaagcacgggccauaugaa

SEQ ID NO: 154726 - RNA, 19 nt, Homo sapiens
agaucguucucugccucac

SEQ ID NO: 154727 - RNA, 12 nt, Homo sapiens
uaguugcuguau

SEQ ID NO: 154728 - RNA, 17 nt, Homo sapiens
auuuucuuuuuauacua

SEQ ID NO: 154729 - RNA, 20 nt, Homo sapiens
ucugacucuuggcacagcau

SEQ ID NO: 154730 - RNA, 15 nt, Homo sapiens
gccccagccuaggaa

SEQ ID NO: 154731 - RNA, 13 nt, Homo sapiens
ggaaccagcccag

SEQ ID NO: 154732 - RNA, 14 nt, Homo sapiens
aaaaggcagaguac

SEQ ID NO: 154733 - RNA, 18 nt, Homo sapiens
acacaaucugaaacagcu

SEQ ID NO: 154734 - RNA, 20 nt, Homo sapiens
acagugacuccacucugagu

SEQ ID NO: 154735 - RNA, 16 nt, Homo sapiens
ugagacagcacagcca

SEQ ID NO: 154736 - RNA, 16 nt, Homo sapiens
gaacugaacauuccag

SEQ ID NO: 154737 - RNA, 14 nt, Homo sapiens
uagaaugagacuua

SEQ ID NO: 154738 - RNA, 16 nt, Homo sapiens
guggauuggauuuguc

SEQ ID NO: 154739 - RNA, 22 nt, Homo sapiens
uuaaaaaauggacucuugaaau

SEQ ID NO: 154740 - RNA, 22 nt, Homo sapiens
ucaaagaaauuuccacucaggu

SEQ ID NO: 154741 - RNA, 14 nt, Homo sapiens
ugaaacaucauuuc

SEQ ID NO: 154742 - RNA, 21 nt, Homo sapiens
ugguuuugcucacaaaagucu

SEQ ID NO: 154743 - RNA, 19 nt, Homo sapiens
uugcuugcacaaaccaauu

SEQ ID NO: 154744 - RNA, 19 nt, Homo sapiens
agggaacugaacauuccag

SEQ ID NO: 154745 - RNA, 22 nt, Homo sapiens
caucugccuccccuucacuccc

SEQ ID NO: 154746 - RNA, 15 nt, Homo sapiens
uacuuuaauguauaa

SEQ ID NO: 154747 - RNA, 13 nt, Homo sapiens
ugggauuacaggg

SEQ ID NO: 154748 - RNA, 22 nt, Homo sapiens
uggcuucuuuacuuaguucaag

SEQ ID NO: 154749 - RNA, 23 nt, Homo sapiens
cuuuuuuuuuuuuuaaagacaga

SEQ ID NO: 154750 - RNA, 13 nt, Homo sapiens
ucaucauuuccau

SEQ ID NO: 154751 - RNA, 12 nt, Homo sapiens
gaaccaggccag

SEQ ID NO: 154752 - RNA, 9 nt, Homo sapiens
aaagugaug

SEQ ID NO: 154753 - RNA, 15 nt, Homo sapiens
uggcuucuuuacuua

SEQ ID NO: 154754 - RNA, 18 nt, Homo sapiens
cucccagccagguucuga

SEQ ID NO: 154755 - RNA, 15 nt, Homo sapiens
aguuguuaauaaaag

SEQ ID NO: 154756 - RNA, 13 nt, Homo sapiens
uaauaaagacagg

SEQ ID NO: 154757 - RNA, 20 nt, Homo sapiens
aagaugaaacaucauuucaa

SEQ ID NO: 154758 - RNA, 19 nt, Homo sapiens
gaguacaaaguaagccaug

SEQ ID NO: 154759 - RNA, 20 nt, Homo sapiens
cuguucuaaggcugugccau

SEQ ID NO: 154760 - RNA, 18 nt, Homo sapiens
cuauaagaugaaacauca

SEQ ID NO: 154761 - RNA, 23 nt, Homo sapiens
aagacgucacccuccauucugca

SEQ ID NO: 154762 - RNA, 21 nt, Homo sapiens
ugccacucuguaauugcaaaa

SEQ ID NO: 154763 - RNA, 19 nt, Homo sapiens
cuggcaguggaacuaagaa

SEQ ID NO: 154764 - RNA, 22 nt, Homo sapiens
ucuaaagauggaaaaaccaccc

SEQ ID NO: 154765 - RNA, 20 nt, Homo sapiens
auuugcuuagaaagucugau

SEQ ID NO: 154766 - RNA, 13 nt, Homo sapiens
cauuuguuuucac

SEQ ID NO: 154767 - RNA, 18 nt, Homo sapiens
ccaggcuggagugcaaug

SEQ ID NO: 154768 - RNA, 21 nt, Homo sapiens
accucgagguuucucaaagaa

SEQ ID NO: 154769 - RNA, 23 nt, Homo sapiens
aauaagcaggcgugaccugccag

SEQ ID NO: 154770 - RNA, 24 nt, Homo sapiens
cauguuggccaggcuggucucaaa

SEQ ID NO: 154771 - RNA, 20 nt, Homo sapiens
uuucuugucuauaaagcauu

SEQ ID NO: 154772 - RNA, 22 nt, Homo sapiens
cuagaguucauggauauguuau

SEQ ID NO: 154773 - RNA, 13 nt, Homo sapiens
uggagucugucaa

SEQ ID NO: 154774 - RNA, 23 nt, Homo sapiens
uuauucuguaguuucacucucau

SEQ ID NO: 154775 - RNA, 12 nt, Homo sapiens
gguauuuagcca

SEQ ID NO: 154776 - RNA, 22 nt, Homo sapiens
uaggaagaauuuuuauauccac

SEQ ID NO: 154777 - RNA, 22 nt, Homo sapiens
uagucugaacaauauauacuua

SEQ ID NO: 154778 - RNA, 20 nt, Homo sapiens
cugaacaauauauacuuaua

SEQ ID NO: 154779 - RNA, 21 nt, Homo sapiens
cugaugcuggggacacagcau

SEQ ID NO: 154780 - RNA, 19 nt, Homo sapiens
gcuucuuaaaauagccaua

SEQ ID NO: 154781 - RNA, 19 nt, Homo sapiens
ggacuaaguguaccagaga

SEQ ID NO: 154782 - RNA, 16 nt, Homo sapiens
cugugccaucagcucc

SEQ ID NO: 154783 - RNA, 21 nt, Homo sapiens
ucugccuccccuucacuccca

SEQ ID NO: 154784 - RNA, 22 nt, Homo sapiens
augaggaauuucuguucuucca

SEQ ID NO: 154785 - RNA, 21 nt, Homo sapiens
ccugaugcuggggacacagca

SEQ ID NO: 154786 - RNA, 22 nt, Homo sapiens
cgaauauaucaguaauuucaga

SEQ ID NO: 154787 - RNA, 15 nt, Homo sapiens
acagcaucagcucaa

SEQ ID NO: 154788 - RNA, 14 nt, Homo sapiens
acagcaucagcuca

SEQ ID NO: 154789 - RNA, 15 nt, Homo sapiens
uuaaaaauaugugua

SEQ ID NO: 154790 - RNA, 16 nt, Homo sapiens
aagcagguucuuguua

SEQ ID NO: 154791 - RNA, 22 nt, Homo sapiens
ucaaacaaaaagucauaaaagu

SEQ ID NO: 154792 - RNA, 14 nt, Homo sapiens
aaugagacuuacuu

SEQ ID NO: 154793 - RNA, 22 nt, Homo sapiens
caggcaugugccacccacccaa

SEQ ID NO: 154794 - RNA, 15 nt, Homo sapiens
acucaucauuuccau

SEQ ID NO: 154795 - RNA, 16 nt, Homo sapiens
ugaaguuuaauugacu

SEQ ID NO: 154796 - RNA, 17 nt, Homo sapiens
gauuugggcucuuggaa

SEQ ID NO: 154797 - RNA, 23 nt, Homo sapiens
cgugaccugccaggcacacugag

SEQ ID NO: 154798 - RNA, 23 nt, Homo sapiens
uaaaaguuggcucaggagucuua

SEQ ID NO: 154799 - RNA, 19 nt, Homo sapiens
cuccacaaagccaaucuca

SEQ ID NO: 154800 - RNA, 17 nt, Homo sapiens
gucaauguccuacugag

SEQ ID NO: 154801 - RNA, 12 nt, Homo sapiens
uuugcuguagaa

SEQ ID NO: 154802 - RNA, 24 nt, Homo sapiens
agugagacuuugaggguguauauu

SEQ ID NO: 154803 - RNA, 14 nt, Homo sapiens
guuuaguugcacaa

SEQ ID NO: 154804 - RNA, 22 nt, Homo sapiens
guuucauauugaugugugucua

SEQ ID NO: 154805 - RNA, 21 nt, Homo sapiens
aagauuucagauuugugacca

SEQ ID NO: 154806 - RNA, 12 nt, Homo sapiens
auugcuugcaca

SEQ ID NO: 154807 - RNA, 11 nt, Homo sapiens
ggcucaucucu

SEQ ID NO: 154808 - RNA, 14 nt, Homo sapiens
aucaguagccagca

SEQ ID NO: 154809 - RNA, 15 nt, Homo sapiens
aaaaguuuuguaaau

SEQ ID NO: 154810 - RNA, 20 nt, Homo sapiens
aaagcuggagucugucaaug

SEQ ID NO: 154811 - RNA, 22 nt, Homo sapiens
uacugcuggcaguggaacuaag

SEQ ID NO: 154812 - RNA, 12 nt, Homo sapiens
uuuuauauccac

SEQ ID NO: 154813 - RNA, 20 nt, Homo sapiens
gcuuagcuaauauugcaaug

SEQ ID NO: 154814 - RNA, 15 nt, Homo sapiens
uaucuaaaaucugcu

SEQ ID NO: 154815 - RNA, 20 nt, Homo sapiens
aaaauaaucaguguuuccaa

SEQ ID NO: 154816 - RNA, 17 nt, Homo sapiens
guucugguuacuguucu

SEQ ID NO: 154817 - RNA, 14 nt, Homo sapiens
caguggaacuaaga

SEQ ID NO: 154818 - RNA, 21 nt, Homo sapiens
gcagaguacaaaguaagccau

SEQ ID NO: 154819 - RNA, 22 nt, Homo sapiens
cccgccacccucccacugccaa

SEQ ID NO: 154820 - RNA, 15 nt, Homo sapiens
aaauuucucuacugu

SEQ ID NO: 154821 - RNA, 20 nt, Homo sapiens
agcuuacaagccagcuggag

SEQ ID NO: 154822 - RNA, 15 nt, Homo sapiens
cuuuauacucaggca

SEQ ID NO: 154823 - RNA, 15 nt, Homo sapiens
cuguggccaaguucu

SEQ ID NO: 154824 - RNA, 18 nt, Homo sapiens
ucugcauucucuagucag

SEQ ID NO: 154825 - RNA, 23 nt, Homo sapiens
uguauauuuucugugcagccacu

SEQ ID NO: 154826 - RNA, 14 nt, Homo sapiens
caucauuucaaucg

SEQ ID NO: 154827 - RNA, 13 nt, Homo sapiens
ucuuccaucaccu

SEQ ID NO: 154828 - RNA, 13 nt, Homo sapiens
gucuuguguuucu

SEQ ID NO: 154829 - RNA, 22 nt, Homo sapiens
ggagucuuagagcuuuaccuaa

SEQ ID NO: 154830 - RNA, 16 nt, Homo sapiens
gcagaguacaaaguaa

SEQ ID NO: 154831 - RNA, 16 nt, Homo sapiens
uagaaauccaauugga

SEQ ID NO: 154832 - RNA, 23 nt, Homo sapiens
caaucaguagccagcaucugccu

SEQ ID NO: 154833 - RNA, 21 nt, Homo sapiens
uaagaagcagauaaugguguu

SEQ ID NO: 154834 - RNA, 19 nt, Homo sapiens
acauuuguuguucuguuaa

SEQ ID NO: 154835 - RNA, 13 nt, Homo sapiens
guucucugccuca

SEQ ID NO: 154836 - RNA, 16 nt, Homo sapiens
ugaccugccaggcaca

SEQ ID NO: 154837 - RNA, 23 nt, Homo sapiens
uaaaaaaaaaaaaaaaagugaug

SEQ ID NO: 154838 - RNA, 23 nt, Homo sapiens
ggcagaguacaaaguaagccaug

SEQ ID NO: 154839 - RNA, 17 nt, Homo sapiens
auucagggagugggcua

SEQ ID NO: 154840 - RNA, 21 nt, Homo sapiens
gauaggguuucuaaugguuau

SEQ ID NO: 154841 - RNA, 17 nt, Homo sapiens
ccagagccucaaaugag

SEQ ID NO: 154842 - RNA, 20 nt, Homo sapiens
ucaaaaaaaaaaaaauguga

SEQ ID NO: 154843 - RNA, 15 nt, Homo sapiens
ucuguucuuccauca

SEQ ID NO: 154844 - RNA, 23 nt, Homo sapiens
cuagugcaguuuuuuucuugucu

SEQ ID NO: 154845 - RNA, 12 nt, Homo sapiens
acacagcaucag

SEQ ID NO: 154846 - RNA, 23 nt, Homo sapiens
aagaauuuuuauauccacuaaaa

SEQ ID NO: 154847 - RNA, 18 nt, Homo sapiens
aucacauucccauuugcu

SEQ ID NO: 154848 - RNA, 14 nt, Homo sapiens
acaaaguaagccau

SEQ ID NO: 154849 - RNA, 19 nt, Homo sapiens
uuaaauguagaaagugauc

SEQ ID NO: 154850 - RNA, 22 nt, Homo sapiens
agagagaaaaguaacuguuuug

SEQ ID NO: 154851 - RNA, 14 nt, Homo sapiens
cuagucaguuggcu

SEQ ID NO: 154852 - RNA, 15 nt, Homo sapiens
uccuguuacaaaaga

SEQ ID NO: 154853 - RNA, 14 nt, Homo sapiens
aaagaacuuggaaa

SEQ ID NO: 154854 - RNA, 19 nt, Homo sapiens
ugccaucuuggacuuguca

SEQ ID NO: 154855 - RNA, 14 nt, Homo sapiens
aauagugauuucca

SEQ ID NO: 154856 - RNA, 21 nt, Homo sapiens
acuuuuuccuggcucaucucu

SEQ ID NO: 154857 - RNA, 21 nt, Homo sapiens
aagggauggaagaaguaaaua

SEQ ID NO: 154858 - RNA, 18 nt, Homo sapiens
gccagagcaaacagaaaa

SEQ ID NO: 154859 - RNA, 14 nt, Homo sapiens
ggguucaagugauu

SEQ ID NO: 154860 - RNA, 20 nt, Homo sapiens
uuuuuacuaaucuuucugca

SEQ ID NO: 154861 - RNA, 13 nt, Homo sapiens
ugauuguagcuau

SEQ ID NO: 154862 - RNA, 19 nt, Homo sapiens
caauauauacuuauagaau

SEQ ID NO: 154863 - RNA, 11 nt, Homo sapiens
uuuaaccaaga

SEQ ID NO: 154864 - RNA, 16 nt, Homo sapiens
aaacagaaaaccugau

SEQ ID NO: 154865 - RNA, 17 nt, Homo sapiens
cugguggggcugccagg

SEQ ID NO: 154866 - RNA, 14 nt, Homo sapiens
aaaaaugugacuca

SEQ ID NO: 154867 - RNA, 16 nt, Homo sapiens
uugacauucugaaugc

SEQ ID NO: 154868 - RNA, 13 nt, Homo sapiens
auucugcacucag

SEQ ID NO: 154869 - RNA, 19 nt, Homo sapiens
acaaucuugucauacuuga

SEQ ID NO: 154870 - RNA, 15 nt, Homo sapiens
uuggugaacauugca

SEQ ID NO: 154871 - RNA, 22 nt, Homo sapiens
aagaugaaugagcaaaaccaaa

SEQ ID NO: 154872 - RNA, 15 nt, Homo sapiens
ucuaaaaucugcuag

SEQ ID NO: 154873 - RNA, 17 nt, Homo sapiens
acuuuuuccuggcucau

SEQ ID NO: 154874 - RNA, 15 nt, Homo sapiens
aauguagaaagugau

SEQ ID NO: 154875 - RNA, 21 nt, Homo sapiens
guauaguuaaccacuaccgaa

SEQ ID NO: 154876 - RNA, 15 nt, Homo sapiens
aucuaaaaucugcua

SEQ ID NO: 154877 - RNA, 21 nt, Homo sapiens
ggucagaguuccgacugccau

SEQ ID NO: 154878 - RNA, 14 nt, Homo sapiens
uauacaauauacuu

SEQ ID NO: 154879 - RNA, 14 nt, Homo sapiens
ccagccucaucucu

SEQ ID NO: 154880 - RNA, 17 nt, Homo sapiens
gacgugauuuugcugua

SEQ ID NO: 154881 - RNA, 23 nt, Homo sapiens
ccuaagccaugggagacacugau

SEQ ID NO: 154882 - RNA, 15 nt, Homo sapiens
uucaguuuucaggag

SEQ ID NO: 154883 - RNA, 17 nt, Homo sapiens
caaacuccugaccucaa

SEQ ID NO: 154884 - RNA, 16 nt, Homo sapiens
gacacagcaucagcuc

SEQ ID NO: 154885 - RNA, 18 nt, Homo sapiens
aaccucgagguuucucaa

SEQ ID NO: 154886 - RNA, 17 nt, Homo sapiens
uuuaauguuuccuuuaa

SEQ ID NO: 154887 - RNA, 18 nt, Homo sapiens
cacucuguaauugcaaaa

SEQ ID NO: 154888 - RNA, 18 nt, Homo sapiens
uugcaauguggcuugaau

SEQ ID NO: 154889 - RNA, 15 nt, Homo sapiens
cuggaccaggucuca

SEQ ID NO: 154890 - RNA, 19 nt, Homo sapiens
uuggauacgacaacuugca

SEQ ID NO: 154891 - RNA, 20 nt, Homo sapiens
ugaaagcuggagucugucaa

SEQ ID NO: 154892 - RNA, 20 nt, Homo sapiens
aagugagcuccuaagccaug

SEQ ID NO: 154893 - RNA, 13 nt, Homo sapiens
auuuacauugccu

SEQ ID NO: 154894 - RNA, 21 nt, Homo sapiens
aguauauucaaccaaauacuu

SEQ ID NO: 154895 - RNA, 13 nt, Homo sapiens
caucauuuccauu

SEQ ID NO: 154896 - RNA, 22 nt, Homo sapiens
gaaaaagaagguugagggcaau

SEQ ID NO: 154897 - RNA, 23 nt, Homo sapiens
ccacccccaaauuuucuuuuuau

SEQ ID NO: 154898 - RNA, 22 nt, Homo sapiens
uaaauuucucuacugucucagu

SEQ ID NO: 154899 - RNA, 19 nt, Homo sapiens
uguauuuaaaugaaaguga

SEQ ID NO: 154900 - RNA, 20 nt, Homo sapiens
uacccguuucacaugcuuuu

SEQ ID NO: 154901 - RNA, 15 nt, Homo sapiens
guugcuguaugucuc

SEQ ID NO: 154902 - RNA, 21 nt, Homo sapiens
caaguucuuaguugcuguaug

SEQ ID NO: 154903 - RNA, 17 nt, Homo sapiens
cuucuuuuugcuucaaa

SEQ ID NO: 154904 - RNA, 16 nt, Homo sapiens
uacaaaguaagccaug

SEQ ID NO: 154905 - RNA, 15 nt, Homo sapiens
gaccauuagcauuug

SEQ ID NO: 154906 - RNA, 22 nt, Homo sapiens
guaacuguuuugguuuugcuca

SEQ ID NO: 154907 - RNA, 19 nt, Homo sapiens
gagaucuauauauguauaa

SEQ ID NO: 154908 - RNA, 14 nt, Homo sapiens
gcuucugauaugca

SEQ ID NO: 154909 - RNA, 15 nt, Homo sapiens
cuuuuuauacuauua

SEQ ID NO: 154910 - RNA, 16 nt, Homo sapiens
gccacuguuaagccau

SEQ ID NO: 154911 - RNA, 15 nt, Homo sapiens
uggggacacagcauc

SEQ ID NO: 154912 - RNA, 15 nt, Homo sapiens
uaacauggugugcuu

SEQ ID NO: 154913 - RNA, 17 nt, Homo sapiens
uaacaggagugccacuu

SEQ ID NO: 154914 - RNA, 14 nt, Homo sapiens
cacuguuaagccau

SEQ ID NO: 154915 - RNA, 21 nt, Homo sapiens
uacuauuuuuacuaaucuuuc

SEQ ID NO: 154916 - RNA, 18 nt, Homo sapiens
ucauaaaagucacuuuau

SEQ ID NO: 154917 - RNA, 10 nt, Homo sapiens
gaaaagcagg

SEQ ID NO: 154918 - RNA, 16 nt, Homo sapiens
aaguuuaauugacuua

SEQ ID NO: 154919 - RNA, 14 nt, Homo sapiens
uacuuaguucaagc

SEQ ID NO: 154920 - RNA, 13 nt, Homo sapiens
uggaaccagccca

SEQ ID NO: 154921 - RNA, 16 nt, Homo sapiens
ucagcaccuacagugu

SEQ ID NO: 154922 - RNA, 22 nt, Homo sapiens
ucauucugcauucucuagucag

SEQ ID NO: 154923 - RNA, 23 nt, Homo sapiens
gucucaguuuacauuuuguauau

SEQ ID NO: 154924 - RNA, 13 nt, Homo sapiens
caacuguggcuua

SEQ ID NO: 154925 - RNA, 16 nt, Homo sapiens
cccuucuuuucugacu

SEQ ID NO: 154926 - RNA, 22 nt, Homo sapiens
cuuguuagugcacagcacaaau

SEQ ID NO: 154927 - RNA, 16 nt, Homo sapiens
uuaauaaagacagggu

SEQ ID NO: 154928 - RNA, 19 nt, Homo sapiens
caccaacuauagaauguau

SEQ ID NO: 154929 - RNA, 21 nt, Homo sapiens
accuucaguugucucugaugu

SEQ ID NO: 154930 - RNA, 19 nt, Homo sapiens
ugagucccagagccaauca

SEQ ID NO: 154931 - RNA, 19 nt, Homo sapiens
gccacccucccacugccaa

SEQ ID NO: 154932 - RNA, 23 nt, Homo sapiens
caguuggcuaagaagugacucuu

SEQ ID NO: 154933 - RNA, 14 nt, Homo sapiens
aaaagacugaccaa

SEQ ID NO: 154934 - RNA, 16 nt, Homo sapiens
aaauauaguucacaau

SEQ ID NO: 154935 - RNA, 20 nt, Homo sapiens
uugaaguauauucaaccaaa

SEQ ID NO: 154936 - RNA, 12 nt, Homo sapiens
auguaucucagg

SEQ ID NO: 154937 - RNA, 17 nt, Homo sapiens
uccacagugacuccacu

SEQ ID NO: 154938 - RNA, 10 nt, Homo sapiens
uaaagacaga

SEQ ID NO: 154939 - RNA, 22 nt, Homo sapiens
gcagcgauuaauaacaggcaaa

SEQ ID NO: 154940 - RNA, 22 nt, Homo sapiens
ccauacuagaguucauggauau

SEQ ID NO: 154941 - RNA, 19 nt, Homo sapiens
cauugcaauagaaauccaa

SEQ ID NO: 154942 - RNA, 22 nt, Homo sapiens
uucagucaaagauacacaaucu

SEQ ID NO: 154943 - RNA, 20 nt, Homo sapiens
ugaguagcuggauuacaggc

SEQ ID NO: 154944 - RNA, 21 nt, Homo sapiens
cacuucccacuauugcuugca

SEQ ID NO: 154945 - RNA, 20 nt, Homo sapiens
acucuaacaguaguugcaau

SEQ ID NO: 154946 - RNA, 21 nt, Homo sapiens
aaugcugguuuuucaguuuuc

SEQ ID NO: 154947 - RNA, 23 nt, Homo sapiens
agaauauuauuggaaaauucucu

SEQ ID NO: 154948 - RNA, 20 nt, Homo sapiens
uaaauuucucuacugucuca

SEQ ID NO: 154949 - RNA, 22 nt, Homo sapiens
uacuuuuuccuggcucaucucu

SEQ ID NO: 154950 - RNA, 11 nt, Homo sapiens
ccacucagguc

SEQ ID NO: 154951 - RNA, 20 nt, Homo sapiens
ugcaguuuuuuucuugucua

SEQ ID NO: 154952 - RNA, 12 nt, Homo sapiens
uauuccagagac

SEQ ID NO: 154953 - RNA, 18 nt, Homo sapiens
guuuuacuguccaaagac

SEQ ID NO: 154954 - RNA, 16 nt, Homo sapiens
cuaaauaugagcccag

SEQ ID NO: 154955 - RNA, 22 nt, Homo sapiens
guuuaugcauagauaaucucuc

SEQ ID NO: 154956 - RNA, 17 nt, Homo sapiens
ucagucuuuuccaugaa

SEQ ID NO: 154957 - RNA, 16 nt, Homo sapiens
uuuacuguccaaagac

SEQ ID NO: 154958 - RNA, 23 nt, Homo sapiens
aaucaguguuuccaaucuguccu

SEQ ID NO: 154959 - RNA, 17 nt, Homo sapiens
uagugaaucacguaaag

SEQ ID NO: 154960 - RNA, 13 nt, Homo sapiens
uuuugcuguagaa

SEQ ID NO: 154961 - RNA, 19 nt, Homo sapiens
cuccuggaccaggucucau

SEQ ID NO: 154962 - RNA, 13 nt, Homo sapiens
caaaguaagccau

SEQ ID NO: 154963 - RNA, 16 nt, Homo sapiens
uuccuccccuguucau

SEQ ID NO: 154964 - RNA, 23 nt, Homo sapiens
uuccaaucuguccuguuacaaaa

SEQ ID NO: 154965 - RNA, 20 nt, Homo sapiens
ggcuggagugcaaugacaca

SEQ ID NO: 154966 - RNA, 16 nt, Homo sapiens
cuaacaguaguugcaa

SEQ ID NO: 154967 - RNA, 17 nt, Homo sapiens
acuuacuucucugcuau

SEQ ID NO: 154968 - RNA, 22 nt, Homo sapiens
gaaaagaaucggcaauguuuca

SEQ ID NO: 154969 - RNA, 11 nt, Homo sapiens
cacaugcuuuu

SEQ ID NO: 154970 - RNA, 21 nt, Homo sapiens
ucuaaggcugugccaucagcu

SEQ ID NO: 154971 - RNA, 14 nt, Homo sapiens
acugaacauuccag

SEQ ID NO: 154972 - RNA, 17 nt, Homo sapiens
ggcacacugagccagca

SEQ ID NO: 154973 - RNA, 19 nt, Homo sapiens
cgugguaggacuguagaaa

SEQ ID NO: 154974 - RNA, 23 nt, Homo sapiens
acugggacuaaguguaccagaga

SEQ ID NO: 154975 - RNA, 21 nt, Homo sapiens
ccgccacccucccacugccaa

SEQ ID NO: 154976 - RNA, 18 nt, Homo sapiens
acgugauuuugcuguaga

SEQ ID NO: 154977 - RNA, 13 nt, Homo sapiens
accuacaguguac

SEQ ID NO: 154978 - RNA, 14 nt, Homo sapiens
gcuaauauugcaau

SEQ ID NO: 154979 - RNA, 18 nt, Homo sapiens
auaugacacucuagucaa

SEQ ID NO: 154980 - RNA, 21 nt, Homo sapiens
ucaagacgucacccuccauuc

SEQ ID NO: 154981 - RNA, 11 nt, Homo sapiens
uuugcuguaga

SEQ ID NO: 154982 - RNA, 13 nt, Homo sapiens
auauacuuauaga

SEQ ID NO: 154983 - RNA, 13 nt, Homo sapiens
gguuauauguaua

SEQ ID NO: 154984 - RNA, 20 nt, Homo sapiens
guuaaaaguuguguuuugaa

SEQ ID NO: 154985 - RNA, 14 nt, Homo sapiens
uccaaagacauguu

SEQ ID NO: 154986 - RNA, 17 nt, Homo sapiens
agaugcauccuuucaua

SEQ ID NO: 154987 - RNA, 14 nt, Homo sapiens
uaaaauagccauaa

SEQ ID NO: 154988 - RNA, 16 nt, Homo sapiens
ucaaagccuugguaaa

SEQ ID NO: 154989 - RNA, 17 nt, Homo sapiens
agguugagggcaaugga

SEQ ID NO: 154990 - RNA, 13 nt, Homo sapiens
cuaaauaugagcc

SEQ ID NO: 154991 - RNA, 16 nt, Homo sapiens
cagcauggagucacag

SEQ ID NO: 154992 - RNA, 12 nt, Homo sapiens
ccaguuacauaa

SEQ ID NO: 154993 - RNA, 18 nt, Homo sapiens
guugagggcaauggacaa

SEQ ID NO: 154994 - RNA, 14 nt, Homo sapiens
aauaaaauuguaca

SEQ ID NO: 154995 - RNA, 22 nt, Homo sapiens
gcaggauuugggcucuuggaau

SEQ ID NO: 154996 - RNA, 13 nt, Homo sapiens
ucccucaaaacaa

SEQ ID NO: 154997 - RNA, 19 nt, Homo sapiens
acugggcgcaguuggucuu

SEQ ID NO: 154998 - RNA, 18 nt, Homo sapiens
auacugaaccaggccaga

SEQ ID NO: 154999 - RNA, 23 nt, Homo sapiens
aaaugcugguuuuucaguuuuca

SEQ ID NO: 155000 - RNA, 12 nt, Homo sapiens
ugaaacaucauu

SEQ ID NO: 155001 - RNA, 18 nt, Homo sapiens
ggaacuaagaaagcccuu

SEQ ID NO: 155002 - RNA, 21 nt, Homo sapiens
agugcaguuuuuuucuugucu

SEQ ID NO: 155003 - RNA, 23 nt, Homo sapiens
uagugauuuccacagugacucca

SEQ ID NO: 155004 - RNA, 13 nt, Homo sapiens
accaggucucaua

SEQ ID NO: 155005 - RNA, 21 nt, Homo sapiens
acugcauaugaaaggacacua

SEQ ID NO: 155006 - RNA, 18 nt, Homo sapiens
cagugacuccacucugag

SEQ ID NO: 155007 - RNA, 15 nt, Homo sapiens
acaauauacuuguau

SEQ ID NO: 155008 - RNA, 15 nt, Homo sapiens
cuaguaaaagccauc

SEQ ID NO: 155009 - RNA, 13 nt, Homo sapiens
cacacuguuaaaa

SEQ ID NO: 155010 - RNA, 19 nt, Homo sapiens
ugcuucuuaaaauagccau

SEQ ID NO: 155011 - RNA, 18 nt, Homo sapiens
agcucagguagcacuuua

SEQ ID NO: 155012 - RNA, 15 nt, Homo sapiens
acaaagccaaucuca

SEQ ID NO: 155013 - RNA, 19 nt, Homo sapiens
aaaauggcacuugggggac

SEQ ID NO: 155014 - RNA, 21 nt, Homo sapiens
guuuuacuguccaaagacaug

SEQ ID NO: 155015 - RNA, 17 nt, Homo sapiens
uucuuccaugucuauua

SEQ ID NO: 155016 - RNA, 22 nt, Homo sapiens
uagaaccucgagguuucucaaa

SEQ ID NO: 155017 - RNA, 14 nt, Homo sapiens
uuugaggguguaua

SEQ ID NO: 155018 - RNA, 18 nt, Homo sapiens
uugugcauaaaaacaaga

SEQ ID NO: 155019 - RNA, 20 nt, Homo sapiens
gaaaagaaucggcaauguuu

SEQ ID NO: 155020 - RNA, 12 nt, Homo sapiens
aacuucugccuc

SEQ ID NO: 155021 - RNA, 15 nt, Homo sapiens
uaagaaauucacuuc

SEQ ID NO: 155022 - RNA, 17 nt, Homo sapiens
cuucagucuuuuccaug

SEQ ID NO: 155023 - RNA, 14 nt, Homo sapiens
uuuauugcuuguug

SEQ ID NO: 155024 - RNA, 23 nt, Homo sapiens
gucaauguccuacugagacagca

SEQ ID NO: 155025 - RNA, 22 nt, Homo sapiens
caaagauacacaaucugaaaca

SEQ ID NO: 155026 - RNA, 17 nt, Homo sapiens
cauacuagaguucaugg

SEQ ID NO: 155027 - RNA, 17 nt, Homo sapiens
ccaaauauuccagagac

SEQ ID NO: 155028 - RNA, 19 nt, Homo sapiens
cgugauuuugcuguagaag

SEQ ID NO: 155029 - RNA, 23 nt, Homo sapiens
ugucucgugguaggacuguagaa

SEQ ID NO: 155030 - RNA, 13 nt, Homo sapiens
caggcacacugag

SEQ ID NO: 155031 - RNA, 13 nt, Homo sapiens
ugaacauugcaau

SEQ ID NO: 155032 - RNA, 20 nt, Homo sapiens
auuagcauuugucaacaaag

SEQ ID NO: 155033 - RNA, 20 nt, Homo sapiens
guauauucaaccaaauacuu

SEQ ID NO: 155034 - RNA, 17 nt, Homo sapiens
uuaaaccguacacugug

SEQ ID NO: 155035 - RNA, 16 nt, Homo sapiens
aaaagggaacugaaca

SEQ ID NO: 155036 - RNA, 20 nt, Homo sapiens
aaugacacagucuuggcuca

SEQ ID NO: 155037 - RNA, 13 nt, Homo sapiens
aggacuguagaaa

SEQ ID NO: 155038 - RNA, 18 nt, Homo sapiens
uacuuauagaauucaguc

SEQ ID NO: 155039 - RNA, 12 nt, Homo sapiens
gccaagcaguuu

SEQ ID NO: 155040 - RNA, 15 nt, Homo sapiens
cucaggcagaucuca

SEQ ID NO: 155041 - RNA, 17 nt, Homo sapiens
uuaugaauaguuuccaa

SEQ ID NO: 155042 - RNA, 14 nt, Homo sapiens
cuggccuccaaguc

SEQ ID NO: 155043 - RNA, 22 nt, Homo sapiens
uagucucuggcaagaugcuuua

SEQ ID NO: 155044 - RNA, 22 nt, Homo sapiens
aacuuggaaauagugauuucca

SEQ ID NO: 155045 - RNA, 19 nt, Homo sapiens
accgcaggauuugggcucu

SEQ ID NO: 155046 - RNA, 21 nt, Homo sapiens
ugcccaggcuggagugcaaug

SEQ ID NO: 155047 - RNA, 15 nt, Homo sapiens
ugcagccacuguuaa

SEQ ID NO: 155048 - RNA, 14 nt, Homo sapiens
uucuggggcuucag

SEQ ID NO: 155049 - RNA, 16 nt, Homo sapiens
ucacguaaagcuagaa

SEQ ID NO: 155050 - RNA, 22 nt, Homo sapiens
uguuucaaacaaaaagucauaa

SEQ ID NO: 155051 - RNA, 18 nt, Homo sapiens
cuauuuuuuguaaugugu

SEQ ID NO: 155052 - RNA, 12 nt, Homo sapiens
ggaaaauucucu

SEQ ID NO: 155053 - RNA, 13 nt, Homo sapiens
acuguccaaagac

SEQ ID NO: 155054 - RNA, 18 nt, Homo sapiens
ugcaaugacacagucuug

SEQ ID NO: 155055 - RNA, 16 nt, Homo sapiens
agcuguuuuguugaca

SEQ ID NO: 155056 - RNA, 19 nt, Homo sapiens
guuucaccauguuggccag

SEQ ID NO: 155057 - RNA, 16 nt, Homo sapiens
uuucauaucacacugu

SEQ ID NO: 155058 - RNA, 22 nt, Homo sapiens
gccuaggaaagccaguuacaua

SEQ ID NO: 155059 - RNA, 22 nt, Homo sapiens
gcacaaaccaauuaaacccagu

SEQ ID NO: 155060 - RNA, 20 nt, Homo sapiens
aagaaucggcaauguuucaa

SEQ ID NO: 155061 - RNA, 17 nt, Homo sapiens
auuucucuacugucuca

SEQ ID NO: 155062 - RNA, 18 nt, Homo sapiens
gcccaggcuggagugcaa

SEQ ID NO: 155063 - RNA, 15 nt, Homo sapiens
aaggcagaguacaaa

SEQ ID NO: 155064 - RNA, 21 nt, Homo sapiens
ugcacaaauugggccaaagaa

SEQ ID NO: 155065 - RNA, 20 nt, Homo sapiens
gacagcuccuggaccaggcc

SEQ ID NO: 155066 - RNA, 20 nt, Homo sapiens
aaguaaauauagcucaggua

SEQ ID NO: 155067 - RNA, 18 nt, Homo sapiens
aaagacaggguuucacca

SEQ ID NO: 155068 - RNA, 21 nt, Homo sapiens
cuaugauuguccguaggccca

SEQ ID NO: 155069 - RNA, 19 nt, Homo sapiens
cucugagucccagagccaa

SEQ ID NO: 155070 - RNA, 22 nt, Homo sapiens
uaccuuuuauuuuaauguuucc

SEQ ID NO: 155071 - RNA, 15 nt, Homo sapiens
aauagugauuuccac

SEQ ID NO: 155072 - RNA, 14 nt, Homo sapiens
gucugaacaauaua

SEQ ID NO: 155073 - RNA, 16 nt, Homo sapiens
ucaggcagaucucagc

SEQ ID NO: 155074 - RNA, 21 nt, Homo sapiens
cacugccaaagaacuuggaaa

SEQ ID NO: 155075 - RNA, 22 nt, Homo sapiens
uuaaguuacacauuuuucagau

SEQ ID NO: 155076 - RNA, 19 nt, Homo sapiens
aauagugauuuccacagug

SEQ ID NO: 155077 - RNA, 14 nt, Homo sapiens
uguagaaagugauc

SEQ ID NO: 155078 - RNA, 14 nt, Homo sapiens
caguaguugcaaug

SEQ ID NO: 155079 - RNA, 21 nt, Homo sapiens
aauuuuauguuuaguugcaca

SEQ ID NO: 155080 - RNA, 22 nt, Homo sapiens
uagugaaucacguaaagcuaga

SEQ ID NO: 155081 - RNA, 23 nt, Homo sapiens
ucaaaugagaaaaugucuuuauu

SEQ ID NO: 155082 - RNA, 22 nt, Homo sapiens
ccauaggaggccaacccaaaau

SEQ ID NO: 155083 - RNA, 17 nt, Homo sapiens
cucaaagaaauuuccac

SEQ ID NO: 155084 - RNA, 20 nt, Homo sapiens
agugcaguuuuuuucuuguc

SEQ ID NO: 155085 - RNA, 18 nt, Homo sapiens
ccucccacugccaaagaa

SEQ ID NO: 155086 - RNA, 23 nt, Homo sapiens
uucagauauaaaagacugaccaa

SEQ ID NO: 155087 - RNA, 23 nt, Homo sapiens
aauuuuauguuuaguugcacaaa

SEQ ID NO: 155088 - RNA, 12 nt, Homo sapiens
uuucccaaagag

SEQ ID NO: 155089 - RNA, 22 nt, Homo sapiens
ccugaccucaaguaauccaccu

SEQ ID NO: 155090 - RNA, 16 nt, Homo sapiens
aaaccaaauauuccag

SEQ ID NO: 155091 - RNA, 19 nt, Homo sapiens
cccuguucauucugcauuc

SEQ ID NO: 155092 - RNA, 18 nt, Homo sapiens
uguugacauucugaaugc

SEQ ID NO: 155093 - RNA, 22 nt, Homo sapiens
aauauuccagagacugggacua

SEQ ID NO: 155094 - RNA, 14 nt, Homo sapiens
auuguagcuaugau

SEQ ID NO: 155095 - RNA, 19 nt, Homo sapiens
caugggagacacugaugua

SEQ ID NO: 155096 - RNA, 14 nt, Homo sapiens
gccagcaucugccu

SEQ ID NO: 155097 - RNA, 22 nt, Homo sapiens
agauucuaauggcuuuauugca

SEQ ID NO: 155098 - RNA, 19 nt, Homo sapiens
ucaagugauucuccugccu

SEQ ID NO: 155099 - RNA, 15 nt, Homo sapiens
gccaguuacauaaaa

SEQ ID NO: 155100 - RNA, 14 nt, Homo sapiens
ucucucuucuuuuc

SEQ ID NO: 155101 - RNA, 13 nt, Homo sapiens
guaagacugugua

SEQ ID NO: 155102 - RNA, 13 nt, Homo sapiens
uuacuaaucuuuc

SEQ ID NO: 155103 - RNA, 20 nt, Homo sapiens
ugauauguugguagauucua

SEQ ID NO: 155104 - RNA, 17 nt, Homo sapiens
gaaaagggaacugaaca

SEQ ID NO: 155105 - RNA, 14 nt, Homo sapiens
accguacacugugu

SEQ ID NO: 155106 - RNA, 22 nt, Homo sapiens
gugcuucuuaaaauagccauaa

SEQ ID NO: 155107 - RNA, 20 nt, Homo sapiens
cauaaaaguuggcucaggag

SEQ ID NO: 155108 - RNA, 19 nt, Homo sapiens
uuucuuucaaagaagccag

SEQ ID NO: 155109 - RNA, 17 nt, Homo sapiens
agugagcuccuaagcca

SEQ ID NO: 155110 - RNA, 13 nt, Homo sapiens
ccaggggagaccc

SEQ ID NO: 155111 - RNA, 16 nt, Homo sapiens
gcaguggaacuaagaa

SEQ ID NO: 155112 - RNA, 18 nt, Homo sapiens
ugaaguuuaauugacuua

SEQ ID NO: 155113 - RNA, 19 nt, Homo sapiens
agucuuagagcuuuaccua

SEQ ID NO: 155114 - RNA, 14 nt, Homo sapiens
uaguaaaagccauc

SEQ ID NO: 155115 - RNA, 21 nt, Homo sapiens
caaucuguccuguuacaaaag

SEQ ID NO: 155116 - RNA, 18 nt, Homo sapiens
gcaguuuuuuucuugucu

SEQ ID NO: 155117 - RNA, 17 nt, Homo sapiens
cacauuuuucagauaua

SEQ ID NO: 155118 - RNA, 20 nt, Homo sapiens
ucuacugucucaguuuacau

SEQ ID NO: 155119 - RNA, 18 nt, Homo sapiens
auauguauaucacauucc

SEQ ID NO: 155120 - RNA, 16 nt, Homo sapiens
aauuuugucuuuauga

SEQ ID NO: 155121 - RNA, 23 nt, Homo sapiens
auacuguuuuacuguccaaagac

SEQ ID NO: 155122 - RNA, 14 nt, Homo sapiens
ugcacguauuuuaa

SEQ ID NO: 155123 - RNA, 20 nt, Homo sapiens
cuggauuacaggcaugugcc

SEQ ID NO: 155124 - RNA, 18 nt, Homo sapiens
aaggacacuagaagauuu

SEQ ID NO: 155125 - RNA, 14 nt, Homo sapiens
acguaagacugugu

SEQ ID NO: 155126 - RNA, 14 nt, Homo sapiens
aggguaaauucucu

SEQ ID NO: 155127 - RNA, 19 nt, Homo sapiens
gacuuugaggguguauauu

SEQ ID NO: 155128 - RNA, 16 nt, Homo sapiens
gaguuccgacugccau

SEQ ID NO: 155129 - RNA, 16 nt, Homo sapiens
uaaugguuauauguau

SEQ ID NO: 155130 - RNA, 23 nt, Homo sapiens
gaagggcuuggacucaagcaaga

SEQ ID NO: 155131 - RNA, 22 nt, Homo sapiens
cugucaauguccuacugagaca

SEQ ID NO: 155132 - RNA, 24 nt, Homo sapiens
ggacagcuccuggaccaggcccau

SEQ ID NO: 155133 - RNA, 22 nt, Homo sapiens
cuuaagacgugauuuugcugua

SEQ ID NO: 155134 - RNA, 18 nt, Homo sapiens
uugcacaaauugggccaa

SEQ ID NO: 155135 - RNA, 18 nt, Homo sapiens
accuaaauaugagcccag

SEQ ID NO: 155136 - RNA, 21 nt, Homo sapiens
ugaugcuggggacacagcauc

SEQ ID NO: 155137 - RNA, 22 nt, Homo sapiens
agaagauggcacuuauaaccaa

SEQ ID NO: 155138 - RNA, 13 nt, Homo sapiens
ucuuuuugcuuca

SEQ ID NO: 155139 - RNA, 17 nt, Homo sapiens
ugcuugcacaaaccaau

SEQ ID NO: 155140 - RNA, 13 nt, Homo sapiens
auuugucaacaaa

SEQ ID NO: 155141 - RNA, 19 nt, Homo sapiens
ccucaucuccuaaaaggca

SEQ ID NO: 155142 - RNA, 15 nt, Homo sapiens
gaauguaaugguggc

SEQ ID NO: 155143 - RNA, 20 nt, Homo sapiens
ggcacagcauggagucacag

SEQ ID NO: 155144 - RNA, 23 nt, Homo sapiens
uguuaagccauguguuccaaggc

SEQ ID NO: 155145 - RNA, 15 nt, Homo sapiens
agcgauuaauaacag

SEQ ID NO: 155146 - RNA, 15 nt, Homo sapiens
auacuagaguucaug

SEQ ID NO: 155147 - RNA, 16 nt, Homo sapiens
augagggaacugugua

SEQ ID NO: 155148 - RNA, 12 nt, Homo sapiens
cuguccaaagac

SEQ ID NO: 155149 - RNA, 14 nt, Homo sapiens
acuuauuuauauaa

SEQ ID NO: 155150 - RNA, 21 nt, Homo sapiens
gaauuuuuauauccacuaaaa

SEQ ID NO: 155151 - RNA, 14 nt, Homo sapiens
uguacagucuugua

SEQ ID NO: 155152 - RNA, 15 nt, Homo sapiens
ucuaaaaacauuugu

SEQ ID NO: 155153 - RNA, 16 nt, Homo sapiens
uaauaaaaguacaugu

SEQ ID NO: 155154 - RNA, 15 nt, Homo sapiens
caggcgugaccugcc

SEQ ID NO: 155155 - RNA, 18 nt, Homo sapiens
acauuuguuuguggucua

SEQ ID NO: 155156 - RNA, 16 nt, Homo sapiens
acguaagacuguguaa

SEQ ID NO: 155157 - RNA, 21 nt, Homo sapiens
ugugcuucuuaaaauagccau

SEQ ID NO: 155158 - RNA, 18 nt, Homo sapiens
ccaaagaaacauugccuu

SEQ ID NO: 155159 - RNA, 17 nt, Homo sapiens
aaaaaugugacucaaga

SEQ ID NO: 155160 - RNA, 22 nt, Homo sapiens
cuccuuggcuucuuuacuuagu

SEQ ID NO: 155161 - RNA, 12 nt, Homo sapiens
agccucaucucu

SEQ ID NO: 155162 - RNA, 12 nt, Homo sapiens
uguagaaaguga

SEQ ID NO: 155163 - RNA, 23 nt, Homo sapiens
gaaaugcugguuuuucaguuuuc

SEQ ID NO: 155164 - RNA, 13 nt, Homo sapiens
gguucaagugauu

SEQ ID NO: 155165 - RNA, 12 nt, Homo sapiens
uucacucccacc

SEQ ID NO: 155166 - RNA, 21 nt, Homo sapiens
ucaugggguggacucuaacag

SEQ ID NO: 155167 - RNA, 13 nt, Homo sapiens
gcugggauuacag

SEQ ID NO: 155168 - RNA, 11 nt, Homo sapiens
gaaaacagaaa

SEQ ID NO: 155169 - RNA, 18 nt, Homo sapiens
ggauacgacaacuugcac

SEQ ID NO: 155170 - RNA, 18 nt, Homo sapiens
cauuuguuuuagucugaa

SEQ ID NO: 155171 - RNA, 15 nt, Homo sapiens
gcuaguaaaagccau

SEQ ID NO: 155172 - RNA, 17 nt, Homo sapiens
gaaugagcaaaaccaaa

SEQ ID NO: 155173 - RNA, 22 nt, Homo sapiens
caaaaccaaauauuccagagac

SEQ ID NO: 155174 - RNA, 15 nt, Homo sapiens
gcaccuacaguguac

SEQ ID NO: 155175 - RNA, 18 nt, Homo sapiens
caaucugaaacagcuuca

SEQ ID NO: 155176 - RNA, 12 nt, Homo sapiens
uggcucaucucu

SEQ ID NO: 155177 - RNA, 13 nt, Homo sapiens
auguguuccaagg

SEQ ID NO: 155178 - RNA, 15 nt, Homo sapiens
ugcacaaaccaauua

SEQ ID NO: 155179 - RNA, 18 nt, Homo sapiens
gcaaacagaaaaagaagg

SEQ ID NO: 155180 - RNA, 20 nt, Homo sapiens
guuuaugcauagauaaucuc

SEQ ID NO: 155181 - RNA, 22 nt, Homo sapiens
aagccuugguaaaauaaucagu

SEQ ID NO: 155182 - RNA, 13 nt, Homo sapiens
caaucguaaaauu

SEQ ID NO: 155183 - RNA, 19 nt, Homo sapiens
auuuuauguuuaguugcac

SEQ ID NO: 155184 - RNA, 15 nt, Homo sapiens
cacaaauuaguugua

SEQ ID NO: 155185 - RNA, 15 nt, Homo sapiens
ccugccaggcacacu

SEQ ID NO: 155186 - RNA, 19 nt, Homo sapiens
caauguuucaaacaaaaag

SEQ ID NO: 155187 - RNA, 22 nt, Homo sapiens
aacauuuguuuuagucugaaca

SEQ ID NO: 155188 - RNA, 21 nt, Homo sapiens
uuauauguauaucacauuccc

SEQ ID NO: 155189 - RNA, 15 nt, Homo sapiens
aucuguccuguuaca

SEQ ID NO: 155190 - RNA, 19 nt, Homo sapiens
uuuucuucuuuuugcuuca

SEQ ID NO: 155191 - RNA, 15 nt, Homo sapiens
gaaugagacuuacuu

SEQ ID NO: 155192 - RNA, 20 nt, Homo sapiens
ucuaaagauggaaaaaccac

SEQ ID NO: 155193 - RNA, 17 nt, Homo sapiens
cuccuggaccaggucuc

SEQ ID NO: 155194 - RNA, 14 nt, Homo sapiens
aaacaaucuuguca

SEQ ID NO: 155195 - RNA, 21 nt, Homo sapiens
uggcaguggaacuaagaaagc

SEQ ID NO: 155196 - RNA, 18 nt, Homo sapiens
uaaaccguacacuguguu

SEQ ID NO: 155197 - RNA, 18 nt, Homo sapiens
acugccaaagaacuugga

SEQ ID NO: 155198 - RNA, 17 nt, Homo sapiens
ucaaaacaaucuuguca

SEQ ID NO: 155199 - RNA, 24 nt, Homo sapiens
cuugguaaaauaaucaguguuucc

SEQ ID NO: 155200 - RNA, 21 nt, Homo sapiens
guccaucccgucgacguagaa

SEQ ID NO: 155201 - RNA, 14 nt, Homo sapiens
acagccacuuggga

SEQ ID NO: 155202 - RNA, 16 nt, Homo sapiens
uacagucuuguauuaa

SEQ ID NO: 155203 - RNA, 22 nt, Homo sapiens
ccucaaaugagaaaaugucuuu

SEQ ID NO: 155204 - RNA, 12 nt, Homo sapiens
caguguuuccaa

SEQ ID NO: 155205 - RNA, 18 nt, Homo sapiens
cuugacuuuugaaaacaa

SEQ ID NO: 155206 - RNA, 15 nt, Homo sapiens
ccacugccaaagaac

SEQ ID NO: 155207 - RNA, 14 nt, Homo sapiens
aaauucacuucccc

SEQ ID NO: 155208 - RNA, 18 nt, Homo sapiens
guuuacauuuuguauauu

SEQ ID NO: 155209 - RNA, 22 nt, Homo sapiens
gugccucugggacuggacaauu

SEQ ID NO: 155210 - RNA, 15 nt, Homo sapiens
caaugacacagucuu

SEQ ID NO: 155211 - RNA, 16 nt, Homo sapiens
uaaaccguacacugug

SEQ ID NO: 155212 - RNA, 16 nt, Homo sapiens
ucauuguaaaaagccc

SEQ ID NO: 155213 - RNA, 13 nt, Homo sapiens
aaaguaagccaug

SEQ ID NO: 155214 - RNA, 22 nt, Homo sapiens
agacagcacagccaaccuagcu

SEQ ID NO: 155215 - RNA, 22 nt, Homo sapiens
gcgcaguuggucuuuaaccacu

SEQ ID NO: 155216 - RNA, 13 nt, Homo sapiens
aagcauucuucaa

SEQ ID NO: 155217 - RNA, 11 nt, Homo sapiens
ugaacauucca

SEQ ID NO: 155218 - RNA, 15 nt, Homo sapiens
aauguauuugcuaua

SEQ ID NO: 155219 - RNA, 16 nt, Homo sapiens
aauugcuucaagcauu

SEQ ID NO: 155220 - RNA, 23 nt, Homo sapiens
auauacuuauagaauucagucaa

SEQ ID NO: 155221 - RNA, 22 nt, Homo sapiens
gcaaaaccaaauauuccagaga

SEQ ID NO: 155222 - RNA, 21 nt, Homo sapiens
uguguuuuuaauaaagacagg

SEQ ID NO: 155223 - RNA, 17 nt, Homo sapiens
augguggccuggggcuu

SEQ ID NO: 155224 - RNA, 20 nt, Homo sapiens
gccagguucugacucuuggc

SEQ ID NO: 155225 - RNA, 18 nt, Homo sapiens
aaguucuuaguugcugua

SEQ ID NO: 155226 - RNA, 23 nt, Homo sapiens
ucuuaagacgugauuuugcugua

SEQ ID NO: 155227 - RNA, 18 nt, Homo sapiens
gaucguucucugccucac

SEQ ID NO: 155228 - RNA, 15 nt, Homo sapiens
gagugggcuaagcac

SEQ ID NO: 155229 - RNA, 21 nt, Homo sapiens
caugucuauuagcuccacaaa

SEQ ID NO: 155230 - RNA, 15 nt, Homo sapiens
acaguaguugcaaug

SEQ ID NO: 155231 - RNA, 16 nt, Homo sapiens
gcauuugucaacaaag

SEQ ID NO: 155232 - RNA, 20 nt, Homo sapiens
gaguucauggauauguuaua

SEQ ID NO: 155233 - RNA, 13 nt, Homo sapiens
gaauuaagcacag

SEQ ID NO: 155234 - RNA, 18 nt, Homo sapiens
cagaaagcuagaaagugu

SEQ ID NO: 155235 - RNA, 13 nt, Homo sapiens
guguaccagagaa

SEQ ID NO: 155236 - RNA, 14 nt, Homo sapiens
ugaauaugccacuu

SEQ ID NO: 155237 - RNA, 23 nt, Homo sapiens
guggacucuaacaguaguugcaa

SEQ ID NO: 155238 - RNA, 13 nt, Homo sapiens
ucaaguaauccac

SEQ ID NO: 155239 - RNA, 21 nt, Homo sapiens
cccacugccaaagaacuugga

SEQ ID NO: 155240 - RNA, 17 nt, Homo sapiens
agucugucaauguccua

SEQ ID NO: 155241 - RNA, 15 nt, Homo sapiens
uggauuugucuuugg

SEQ ID NO: 155242 - RNA, 23 nt, Homo sapiens
gaaaagaaucggcaauguuucaa

SEQ ID NO: 155243 - RNA, 17 nt, Homo sapiens
uuagugcacagcacaaa

SEQ ID NO: 155244 - RNA, 19 nt, Homo sapiens
acacagucuuggcucacug

SEQ ID NO: 155245 - RNA, 16 nt, Homo sapiens
cuucuuuuugcuucaa

SEQ ID NO: 155246 - RNA, 17 nt, Homo sapiens
ugaauuuugucuuuaug

SEQ ID NO: 155247 - RNA, 13 nt, Homo sapiens
aucugaacuccuu

SEQ ID NO: 155248 - RNA, 17 nt, Homo sapiens
aagaucguucucugccu

SEQ ID NO: 155249 - RNA, 16 nt, Homo sapiens
cuaaguguaccagaga

SEQ ID NO: 155250 - RNA, 17 nt, Homo sapiens
agauuucagauuuguga

SEQ ID NO: 155251 - RNA, 19 nt, Homo sapiens
cuccugaguagcuggauua

SEQ ID NO: 155252 - RNA, 19 nt, Homo sapiens
cccucuaggaggugaugau

SEQ ID NO: 155253 - RNA, 13 nt, Homo sapiens
agaagaugaauga

SEQ ID NO: 155254 - RNA, 14 nt, Homo sapiens
agcuggagucuguc

SEQ ID NO: 155255 - RNA, 15 nt, Homo sapiens
aaugugacucaagac

SEQ ID NO: 155256 - RNA, 18 nt, Homo sapiens
uccagagacugggacuaa

SEQ ID NO: 155257 - RNA, 20 nt, Homo sapiens
auaaaggggagggacucauc

SEQ ID NO: 155258 - RNA, 22 nt, Homo sapiens
gugggcuaagcacgggccauau

SEQ ID NO: 155259 - RNA, 15 nt, Homo sapiens
agcugccuguacaca

SEQ ID NO: 155260 - RNA, 20 nt, Homo sapiens
uccuuggcuucuuuacuuag

SEQ ID NO: 155261 - RNA, 13 nt, Homo sapiens
gucuauuagcucc

SEQ ID NO: 155262 - RNA, 21 nt, Homo sapiens
uugcccaggcuggagugcaau

SEQ ID NO: 155263 - RNA, 21 nt, Homo sapiens
ucucccagccagguucugacu

SEQ ID NO: 155264 - RNA, 13 nt, Homo sapiens
agguugagggcaa

SEQ ID NO: 155265 - RNA, 18 nt, Homo sapiens
uccuccccuguucauucu

SEQ ID NO: 155266 - RNA, 20 nt, Homo sapiens
cccaggcuggagugcaauga

SEQ ID NO: 155267 - RNA, 21 nt, Homo sapiens
auuuuacuuuuuccuggcuca

SEQ ID NO: 155268 - RNA, 21 nt, Homo sapiens
cuuuguaaagaaaguggcuug

SEQ ID NO: 155269 - RNA, 19 nt, Homo sapiens
ugcaguuuuuuucuugucu

SEQ ID NO: 155270 - RNA, 14 nt, Homo sapiens
agaugaaacaucau

SEQ ID NO: 155271 - RNA, 18 nt, Homo sapiens
ucacagccacuugggaua

SEQ ID NO: 155272 - RNA, 15 nt, Homo sapiens
agucugaacaauaua

SEQ ID NO: 155273 - RNA, 15 nt, Homo sapiens
acaaaguaagccaug

SEQ ID NO: 155274 - RNA, 22 nt, Homo sapiens
aaacauuuguuuguggucuaua

SEQ ID NO: 155275 - RNA, 22 nt, Homo sapiens
ggcugucagauauaaguaacuu

SEQ ID NO: 155276 - RNA, 19 nt, Homo sapiens
agaaccucgagguuucuca

SEQ ID NO: 155277 - RNA, 14 nt, Homo sapiens
ccaaagugguauag

SEQ ID NO: 155278 - RNA, 22 nt, Homo sapiens
uaaccaaagcccaaagugguau

SEQ ID NO: 155279 - RNA, 17 nt, Homo sapiens
agguuucucaaagaaau

SEQ ID NO: 155280 - RNA, 15 nt, Homo sapiens
uuuucaaugucuaaa

SEQ ID NO: 155281 - RNA, 18 nt, Homo sapiens
cagggagugggcuaagca

SEQ ID NO: 155282 - RNA, 15 nt, Homo sapiens
caaauauuccagaga

SEQ ID NO: 155283 - RNA, 15 nt, Homo sapiens
ucauggauauguuau

SEQ ID NO: 155284 - RNA, 18 nt, Homo sapiens
auaggaggccaacccaaa

SEQ ID NO: 155285 - RNA, 17 nt, Homo sapiens
cuuagccaagcaguuuc

SEQ ID NO: 155286 - RNA, 14 nt, Homo sapiens
uugcucacaaaagu

SEQ ID NO: 155287 - RNA, 22 nt, Homo sapiens
ucccucaaaacaaucuugucau

SEQ ID NO: 155288 - RNA, 20 nt, Homo sapiens
uauacccguuucacaugcuu

SEQ ID NO: 155289 - RNA, 21 nt, Homo sapiens
caaucugaaacagcuucaugg

SEQ ID NO: 155290 - RNA, 23 nt, Homo sapiens
uucagucaaagauacacaaucug

SEQ ID NO: 155291 - RNA, 20 nt, Homo sapiens
agcuguuuaugcauagauaa

SEQ ID NO: 155292 - RNA, 22 nt, Homo sapiens
aauguuuaugaauaguuuccaa

SEQ ID NO: 155293 - RNA, 12 nt, Homo sapiens
gagcaaacagaa

SEQ ID NO: 155294 - RNA, 15 nt, Homo sapiens
cuccuuagaagugga

SEQ ID NO: 155295 - RNA, 16 nt, Homo sapiens
gccagagcaaacagaa

SEQ ID NO: 155296 - RNA, 11 nt, Homo sapiens
aguugcuguau

SEQ ID NO: 155297 - RNA, 19 nt, Homo sapiens
aaccaaauauuccagagac

SEQ ID NO: 155298 - RNA, 17 nt, Homo sapiens
guucuaaggcugugcca

SEQ ID NO: 155299 - RNA, 18 nt, Homo sapiens
cuuagagcuuuaccuaaa

SEQ ID NO: 155300 - RNA, 22 nt, Homo sapiens
agauacacaaucugaaacagcu

SEQ ID NO: 155301 - RNA, 16 nt, Homo sapiens
acaagaacacugaaaa

SEQ ID NO: 155302 - RNA, 15 nt, Homo sapiens
cagagccucaaauga

SEQ ID NO: 155303 - RNA, 15 nt, Homo sapiens
aauaaccauugucau

SEQ ID NO: 155304 - RNA, 14 nt, Homo sapiens
ccuggggcuucuga

SEQ ID NO: 155305 - RNA, 23 nt, Homo sapiens
caggcgugaccugccaggcacac

SEQ ID NO: 155306 - RNA, 20 nt, Homo sapiens
uacaguuuuuauugcuuguu

SEQ ID NO: 155307 - RNA, 23 nt, Homo sapiens
ccuaggaaagccaguuacauaaa

SEQ ID NO: 155308 - RNA, 13 nt, Homo sapiens
uaaauguagaaag

SEQ ID NO: 155309 - RNA, 13 nt, Homo sapiens
accaauauuguac

SEQ ID NO: 155310 - RNA, 21 nt, Homo sapiens
aauguguucggugauuucaga

SEQ ID NO: 155311 - RNA, 11 nt, Homo sapiens
uaaaagccauc

SEQ ID NO: 155312 - RNA, 21 nt, Homo sapiens
gaguuauuuuuauuuauuuaa

SEQ ID NO: 155313 - RNA, 20 nt, Homo sapiens
gcacucagaaaauggcacuu

SEQ ID NO: 155314 - RNA, 18 nt, Homo sapiens
uucugcauucucuaguca

SEQ ID NO: 155315 - RNA, 22 nt, Homo sapiens
uguagagagagaaaaguaacug

SEQ ID NO: 155316 - RNA, 19 nt, Homo sapiens
accaaauacuuuaauguau

SEQ ID NO: 155317 - RNA, 21 nt, Homo sapiens
gacucaagacuuccagagccu

SEQ ID NO: 155318 - RNA, 22 nt, Homo sapiens
agcaaaaccaaauauuccagag

SEQ ID NO: 155319 - RNA, 16 nt, Homo sapiens
uucccauuaaagaagu

SEQ ID NO: 155320 - RNA, 16 nt, Homo sapiens
uggccuggggcuucug

SEQ ID NO: 155321 - RNA, 16 nt, Homo sapiens
uggcaggacagcuccu

SEQ ID NO: 155322 - RNA, 22 nt, Homo sapiens
ucuuuguaaagaaaguggcuug

SEQ ID NO: 155323 - RNA, 15 nt, Homo sapiens
aaucaguguuuccaa

SEQ ID NO: 155324 - RNA, 18 nt, Homo sapiens
ccugccaggcacacugag

SEQ ID NO: 155325 - RNA, 14 nt, Homo sapiens
ccaaauuauggcaa

SEQ ID NO: 155326 - RNA, 14 nt, Homo sapiens
uuugucaacaaagu

SEQ ID NO: 155327 - RNA, 19 nt, Homo sapiens
agggcuuggacucaagcaa

SEQ ID NO: 155328 - RNA, 20 nt, Homo sapiens
aucugcuagggaauaucaau

SEQ ID NO: 155329 - RNA, 16 nt, Homo sapiens
auggcaggacagcucc

SEQ ID NO: 155330 - RNA, 16 nt, Homo sapiens
auccacuaaaaucaaa

SEQ ID NO: 155331 - RNA, 23 nt, Homo sapiens
acauuuuacuuuuuccuggcuca

SEQ ID NO: 155332 - RNA, 17 nt, Homo sapiens
gcaauggacaaggaagg

SEQ ID NO: 155333 - RNA, 15 nt, Homo sapiens
gaaauggggaacuac

SEQ ID NO: 155334 - RNA, 16 nt, Homo sapiens
ugagucccagagccaa

SEQ ID NO: 155335 - RNA, 19 nt, Homo sapiens
ccacuauugcuugcacaaa

SEQ ID NO: 155336 - RNA, 15 nt, Homo sapiens
uuuuccuguucuuaa

SEQ ID NO: 155337 - RNA, 18 nt, Homo sapiens
uguagaagauggcacuua

SEQ ID NO: 155338 - RNA, 21 nt, Homo sapiens
aauaguuguuauucuguaguu

SEQ ID NO: 155339 - RNA, 16 nt, Homo sapiens
cuggcaagaugcuuua

SEQ ID NO: 155340 - RNA, 19 nt, Homo sapiens
cauggauauguuauacuga

SEQ ID NO: 155341 - RNA, 16 nt, Homo sapiens
ucaaacaaaaagucau

SEQ ID NO: 155342 - RNA, 17 nt, Homo sapiens
uaaaccguacacugugu

SEQ ID NO: 155343 - RNA, 18 nt, Homo sapiens
uggcuaguaaaagccauc

SEQ ID NO: 155344 - RNA, 17 nt, Homo sapiens
caaucuguccuguuaca

SEQ ID NO: 155345 - RNA, 18 nt, Homo sapiens
cucaaagaaauuuccacu

SEQ ID NO: 155346 - RNA, 16 nt, Homo sapiens
aaagugauccauacuu

SEQ ID NO: 155347 - RNA, 18 nt, Homo sapiens
gaaccaggccagagcaaa

SEQ ID NO: 155348 - RNA, 19 nt, Homo sapiens
uuugcuucaaaaacauucu

SEQ ID NO: 155349 - RNA, 16 nt, Homo sapiens
uuacauuuuguauauu

SEQ ID NO: 155350 - RNA, 12 nt, Homo sapiens
guucauucugca

SEQ ID NO: 155351 - RNA, 22 nt, Homo sapiens
gugaccugccaggcacacugag

SEQ ID NO: 155352 - RNA, 21 nt, Homo sapiens
uggauuacaggcaugugccac

SEQ ID NO: 155353 - RNA, 17 nt, Homo sapiens
ucaauguccuacugaga

SEQ ID NO: 155354 - RNA, 14 nt, Homo sapiens
ucuuaguugcugua

SEQ ID NO: 155355 - RNA, 16 nt, Homo sapiens
cgugauuuugcuguag

SEQ ID NO: 155356 - RNA, 15 nt, Homo sapiens
cucuguaauugcaaa

SEQ ID NO: 155357 - RNA, 16 nt, Homo sapiens
cucaaagaaauuucca

SEQ ID NO: 155358 - RNA, 12 nt, Homo sapiens
uauuuuuacuaa

SEQ ID NO: 155359 - RNA, 13 nt, Homo sapiens
ucaaagugagcuc

SEQ ID NO: 155360 - RNA, 20 nt, Homo sapiens
uuauuaaauguagaaaguga

SEQ ID NO: 155361 - RNA, 19 nt, Homo sapiens
aagccauguguuccaaggc

SEQ ID NO: 155362 - RNA, 13 nt, Homo sapiens
aagccuugguaaa

SEQ ID NO: 155363 - RNA, 14 nt, Homo sapiens
caguguacagucuu

SEQ ID NO: 155364 - RNA, 16 nt, Homo sapiens
gucagucuucuuccau

SEQ ID NO: 155365 - RNA, 14 nt, Homo sapiens
auagaauucaguca

SEQ ID NO: 155366 - RNA, 21 nt, Homo sapiens
aauguuuuagaaugagacuua

SEQ ID NO: 155367 - RNA, 23 nt, Homo sapiens
aacuuggaaauagugauuuccac

SEQ ID NO: 155368 - RNA, 15 nt, Homo sapiens
cuaacaguaguugca

SEQ ID NO: 155369 - RNA, 23 nt, Homo sapiens
aauugggccaaagaaacauugcc

SEQ ID NO: 155370 - RNA, 13 nt, Homo sapiens
agucuucuuccau

SEQ ID NO: 155371 - RNA, 20 nt, Homo sapiens
aaaugagaagucucacugau

SEQ ID NO: 155372 - RNA, 21 nt, Homo sapiens
gaauucagucaaagauacaca

SEQ ID NO: 155373 - RNA, 19 nt, Homo sapiens
auuaucuaaaaucugcuag

SEQ ID NO: 155374 - RNA, 13 nt, Homo sapiens
cagcuguuuaugc

SEQ ID NO: 155375 - RNA, 15 nt, Homo sapiens
caacaaagucaccca

SEQ ID NO: 155376 - RNA, 20 nt, Homo sapiens
gcccaggcuggagugcaaug

SEQ ID NO: 155377 - RNA, 12 nt, Homo sapiens
gaaucucucuuc

SEQ ID NO: 155378 - RNA, 21 nt, Homo sapiens
aaaugugacucaagacuucca

SEQ ID NO: 155379 - RNA, 18 nt, Homo sapiens
gucacagccacuugggau

SEQ ID NO: 155380 - RNA, 17 nt, Homo sapiens
agucuuagagcuuuacc

SEQ ID NO: 155381 - RNA, 18 nt, Homo sapiens
auuuuucagauauaaaag

SEQ ID NO: 155382 - RNA, 21 nt, Homo sapiens
ggcuucagucuuuuccaugaa

SEQ ID NO: 155383 - RNA, 16 nt, Homo sapiens
caaauauuccagagac

SEQ ID NO: 155384 - RNA, 12 nt, Homo sapiens
ggagacacugau

SEQ ID NO: 155385 - RNA, 9 nt, Homo sapiens
aaagacaga

SEQ ID NO: 155386 - RNA, 14 nt, Homo sapiens
ugaauaguuuccaa

SEQ ID NO: 155387 - RNA, 21 nt, Homo sapiens
cagagaagggcuuggacucaa

SEQ ID NO: 155388 - RNA, 21 nt, Homo sapiens
cuuguuagugcacagcacaaa

SEQ ID NO: 155389 - RNA, 19 nt, Homo sapiens
uggaaauagugauuuccac

SEQ ID NO: 155390 - RNA, 22 nt, Homo sapiens
gcccagacccuucuccuuagaa

SEQ ID NO: 155391 - RNA, 18 nt, Homo sapiens
uagcauuugucaacaaag

SEQ ID NO: 155392 - RNA, 13 nt, Homo sapiens
cacugauguauga

SEQ ID NO: 155393 - RNA, 22 nt, Homo sapiens
gacucuauuaaaaucuucaaua

SEQ ID NO: 155394 - RNA, 13 nt, Homo sapiens
gaauaugcacaaa

SEQ ID NO: 155395 - RNA, 15 nt, Homo sapiens
aacauugcaauagaa

SEQ ID NO: 155396 - RNA, 11 nt, Homo sapiens
uugcuguagaa

SEQ ID NO: 155397 - RNA, 12 nt, Homo sapiens
uguaauugcaaa

SEQ ID NO: 155398 - RNA, 14 nt, Homo sapiens
ugccaaagaacuug

SEQ ID NO: 155399 - RNA, 19 nt, Homo sapiens
uagugauuuccacagugac

SEQ ID NO: 155400 - RNA, 23 nt, Homo sapiens
cacuguuaagccauguguuccaa

SEQ ID NO: 155401 - RNA, 23 nt, Homo sapiens
aaauuuucuuuuuauacuauuaa

SEQ ID NO: 155402 - RNA, 13 nt, Homo sapiens
agcagauaauggu

SEQ ID NO: 155403 - RNA, 17 nt, Homo sapiens
gacucuuggcacagcau

SEQ ID NO: 155404 - RNA, 20 nt, Homo sapiens
ggacuaaguguaccagagaa

SEQ ID NO: 155405 - RNA, 15 nt, Homo sapiens
uuaaaugaaagugag

SEQ ID NO: 155406 - RNA, 18 nt, Homo sapiens
aucugaaacagcuucaug

SEQ ID NO: 155407 - RNA, 13 nt, Homo sapiens
cuucuccuuagaa

SEQ ID NO: 155408 - RNA, 23 nt, Homo sapiens
ugauagagguucuuuauugcuca

SEQ ID NO: 155409 - RNA, 16 nt, Homo sapiens
cuugguaaaauaauca

SEQ ID NO: 155410 - RNA, 14 nt, Homo sapiens
ucuaauggcuuuau

SEQ ID NO: 155411 - RNA, 20 nt, Homo sapiens
gaccugccaggcacacugag

SEQ ID NO: 155412 - RNA, 14 nt, Homo sapiens
cucaucauuuccau

SEQ ID NO: 155413 - RNA, 21 nt, Homo sapiens
ccuuggcuaguaaaagccauc

SEQ ID NO: 155414 - RNA, 21 nt, Homo sapiens
guauaaauauguauuuuguca

SEQ ID NO: 155415 - RNA, 15 nt, Homo sapiens
cccgucgacguagaa

SEQ ID NO: 155416 - RNA, 23 nt, Homo sapiens
uuacuguucuaaggcugugccau

SEQ ID NO: 155417 - RNA, 19 nt, Homo sapiens
aguuuauacccguuucaca

SEQ ID NO: 155418 - RNA, 20 nt, Homo sapiens
ucauacuugaaaauaugaca

SEQ ID NO: 155419 - RNA, 14 nt, Homo sapiens
gcuccuaagccaug

SEQ ID NO: 155420 - RNA, 19 nt, Homo sapiens
uuauacaauauacuuguau

SEQ ID NO: 155421 - RNA, 13 nt, Homo sapiens
gcaaaaccaaaua

SEQ ID NO: 155422 - RNA, 13 nt, Homo sapiens
gagcaaacagaaa

SEQ ID NO: 155423 - RNA, 19 nt, Homo sapiens
uacaaaguaagccauguau

SEQ ID NO: 155424 - RNA, 21 nt, Homo sapiens
aagaauuuuuauauccacuaa

SEQ ID NO: 155425 - RNA, 14 nt, Homo sapiens
agaauaaauacugu

SEQ ID NO: 155426 - RNA, 15 nt, Homo sapiens
ugguuauauguauau

SEQ ID NO: 155427 - RNA, 22 nt, Homo sapiens
acauuuguuuuagucugaacaa

SEQ ID NO: 155428 - RNA, 15 nt, Homo sapiens
ccaaagacauguuua

SEQ ID NO: 155429 - RNA, 17 nt, Homo sapiens
cuuggguucaagugauu

SEQ ID NO: 155430 - RNA, 22 nt, Homo sapiens
acagucuuguauuaaguuguua

SEQ ID NO: 155431 - RNA, 19 nt, Homo sapiens
ugaggaauuucuguucuuc

SEQ ID NO: 155432 - RNA, 16 nt, Homo sapiens
uggaaauagugauuuc

SEQ ID NO: 155433 - RNA, 19 nt, Human herpesvirus 6
aaaaaaugaaugugcugau

SEQ ID NO: 155434 - RNA, 18 nt, Human herpesvirus 6
aaaaaacacaaaucugga

SEQ ID NO: 155435 - RNA, 11 nt, Human herpesvirus 6
aaaaacuaauu

SEQ ID NO: 155436 - RNA, 13 nt, Human herpesvirus 6
aaaaacaguuuac

SEQ ID NO: 155437 - RNA, 12 nt, Human herpesvirus 6
aaaaacauucua

SEQ ID NO: 155438 - RNA, 19 nt, Human herpesvirus 6
aaaaacaaaaaacaacuuu

SEQ ID NO: 155439 - RNA, 22 nt, Human herpesvirus 6
aaaaacacuagccuacuaugac

SEQ ID NO: 155440 - RNA, 13 nt, Human herpesvirus 6
aaaaacacaaacc

SEQ ID NO: 155441 - RNA, 15 nt, Human herpesvirus 6
aaaaacgucacguca

SEQ ID NO: 155442 - RNA, 17 nt, Human herpesvirus 6
aaaaacucacacaacca

SEQ ID NO: 155443 - RNA, 16 nt, Human herpesvirus 6
aaaaaguaguugcuaa

SEQ ID NO: 155444 - RNA, 21 nt, Human herpesvirus 6
aaaaagcagaucgaguuacau

SEQ ID NO: 155445 - RNA, 17 nt, Human herpesvirus 6
aaaaagugcuuuaucua

SEQ ID NO: 155446 - RNA, 18 nt, Human herpesvirus 6
aaacauuuauaaaaggag

SEQ ID NO: 155447 - RNA, 19 nt, Human herpesvirus 6
aaacauuuauaaaaggagu

SEQ ID NO: 155448 - RNA, 15 nt, Human herpesvirus 6
aaacauuucuuacac

SEQ ID NO: 155449 - RNA, 15 nt, Human herpesvirus 6
aaacaugaacauuga

SEQ ID NO: 155450 - RNA, 18 nt, Human herpesvirus 6
aaacagauuaaauauacc

SEQ ID NO: 155451 - RNA, 20 nt, Human herpesvirus 6
aaacagggagugauugauga

SEQ ID NO: 155452 - RNA, 13 nt, Human herpesvirus 6
aaacaguugauua

SEQ ID NO: 155453 - RNA, 14 nt, Human herpesvirus 6
aaacaucaguaaca

SEQ ID NO: 155454 - RNA, 22 nt, Human herpesvirus 6
aaaccaucgucauaaccucauc

SEQ ID NO: 155455 - RNA, 23 nt, Human herpesvirus 6
aaaccauagcuguccaugagauu

SEQ ID NO: 155456 - RNA, 13 nt, Human herpesvirus 6
aaaccaucaauuu

SEQ ID NO: 155457 - RNA, 19 nt, Human herpesvirus 6
aaaccaucaauuuuaucca

SEQ ID NO: 155458 - RNA, 19 nt, Human herpesvirus 6
aaaccaccggcuaacccua

SEQ ID NO: 155459 - RNA, 20 nt, Human herpesvirus 6
aaaccagcaaguucaucagc

SEQ ID NO: 155460 - RNA, 16 nt, Human herpesvirus 6
aaacaagucaucucac

SEQ ID NO: 155461 - RNA, 18 nt, Human herpesvirus 6
aaacacgugauuccucaa

SEQ ID NO: 155462 - RNA, 17 nt, Human herpesvirus 6
aaacacuagccuacuau

SEQ ID NO: 155463 - RNA, 23 nt, Human herpesvirus 6
aaacaccucuaaaacaagacaga

SEQ ID NO: 155464 - RNA, 17 nt, Human herpesvirus 6
aaacagcuuuauuccca

SEQ ID NO: 155465 - RNA, 15 nt, Human herpesvirus 6
aaacagcuuuuccuc

SEQ ID NO: 155466 - RNA, 17 nt, Human herpesvirus 6
aaacaggaacagucuga

SEQ ID NO: 155467 - RNA, 19 nt, Human herpesvirus 6
aaaauuuuuuacaucacga

SEQ ID NO: 155468 - RNA, 20 nt, Human herpesvirus 6
aaacaaauucuuacauuuug

SEQ ID NO: 155469 - RNA, 15 nt, Human herpesvirus 6
aaaauugcucuauug

SEQ ID NO: 155470 - RNA, 16 nt, Human herpesvirus 6
aaaauucgccaauuaa

SEQ ID NO: 155471 - RNA, 12 nt, Human herpesvirus 6
aaaauucuugaa

SEQ ID NO: 155472 - RNA, 23 nt, Human herpesvirus 6
aaaagguggucguagacaguaaa

SEQ ID NO: 155473 - RNA, 15 nt, Human herpesvirus 6
aaaaguauagucuag

SEQ ID NO: 155474 - RNA, 23 nt, Human herpesvirus 6
aaaaguauagucuagcaaccuaa

SEQ ID NO: 155475 - RNA, 20 nt, Human herpesvirus 6
aaaagugcuuuaucuagcca

SEQ ID NO: 155476 - RNA, 19 nt, Human herpesvirus 6
aaaauaaauacuagcuaaa

SEQ ID NO: 155477 - RNA, 16 nt, Human herpesvirus 6
aaaauaaguacauaga

SEQ ID NO: 155478 - RNA, 22 nt, Human herpesvirus 6
aaaauacugcagcucgacucca

SEQ ID NO: 155479 - RNA, 14 nt, Human herpesvirus 6
aaaauagaagucuc

SEQ ID NO: 155480 - RNA, 19 nt, Human herpesvirus 6
aaaauagcagaaguuuaca

SEQ ID NO: 155481 - RNA, 20 nt, Human herpesvirus 6
aaaauagccagggcauucgu

SEQ ID NO: 155482 - RNA, 19 nt, Human herpesvirus 6
aaaaugguuagaaauucua

SEQ ID NO: 155483 - RNA, 23 nt, Human herpesvirus 6
aaaauguuuuucauaaaugguag

SEQ ID NO: 155484 - RNA, 17 nt, Human herpesvirus 6
aaaaggaguaugacugu

SEQ ID NO: 155485 - RNA, 17 nt, Human herpesvirus 6
aaaagcugacuauucag

SEQ ID NO: 155486 - RNA, 18 nt, Human herpesvirus 6
aaaaguauagucuagcaa

SEQ ID NO: 155487 - RNA, 22 nt, Human herpesvirus 6
aaaaguauagucuagcaaccua

SEQ ID NO: 155488 - RNA, 20 nt, Human herpesvirus 6
aaaaguauccuaaauaccaa

SEQ ID NO: 155489 - RNA, 22 nt, Human herpesvirus 6
aaaaguuagcggggagucucca

SEQ ID NO: 155490 - RNA, 22 nt, Human herpesvirus 6
aaaaguugugauuuugggacaa

SEQ ID NO: 155491 - RNA, 15 nt, Human herpesvirus 6
aaaagguguuguguu

SEQ ID NO: 155492 - RNA, 21 nt, Human herpesvirus 6
aaaacggccaaccucuuccua

SEQ ID NO: 155493 - RNA, 20 nt, Human herpesvirus 6
aaaacuaauucggaacauug

SEQ ID NO: 155494 - RNA, 22 nt, Human herpesvirus 6
aaaaccgguacgcuuuuacuga

SEQ ID NO: 155495 - RNA, 13 nt, Human herpesvirus 6
aaaacgaccugau

SEQ ID NO: 155496 - RNA, 13 nt, Human herpesvirus 6
aaaacgaguauga

SEQ ID NO: 155497 - RNA, 21 nt, Human herpesvirus 6
aaaagcgccugccuacacugc

SEQ ID NO: 155498 - RNA, 12 nt, Human herpesvirus 6
aaaagcaucuca

SEQ ID NO: 155499 - RNA, 12 nt, Human herpesvirus 6
aaaacuuacuaa

SEQ ID NO: 155500 - RNA, 19 nt, Human herpesvirus 6
aaaacuuacuaauguggau

SEQ ID NO: 155501 - RNA, 12 nt, Human herpesvirus 6
aaaacaacgaaa

SEQ ID NO: 155502 - RNA, 16 nt, Human herpesvirus 6
aaaacaacgacuauca

SEQ ID NO: 155503 - RNA, 17 nt, Human herpesvirus 6
aaaaauuuugaugccaa

SEQ ID NO: 155504 - RNA, 18 nt, Human herpesvirus 6
aaaaauuuugaugccaaa

SEQ ID NO: 155505 - RNA, 13 nt, Human herpesvirus 6
aaaacaagacaga

SEQ ID NO: 155506 - RNA, 12 nt, Human herpesvirus 6
aaaacaagaucc

SEQ ID NO: 155507 - RNA, 16 nt, Human herpesvirus 6
aaaaauguugcaugga

SEQ ID NO: 155508 - RNA, 19 nt, Human herpesvirus 6
aaaacauuucuuacacaaa

SEQ ID NO: 155509 - RNA, 17 nt, Human herpesvirus 6
aaaaauugccuuguaaa

SEQ ID NO: 155510 - RNA, 17 nt, Human herpesvirus 6
aaaaaugagacuuagcu

SEQ ID NO: 155511 - RNA, 16 nt, Human herpesvirus 6
aaaaauggcucagaga

SEQ ID NO: 155512 - RNA, 18 nt, Human herpesvirus 6
aaaaauggcucagagaaa

SEQ ID NO: 155513 - RNA, 16 nt, Human herpesvirus 6
aaaaaugcacaauuua

SEQ ID NO: 155514 - RNA, 17 nt, Human herpesvirus 6
aaaaauauuaauuacau

SEQ ID NO: 155515 - RNA, 15 nt, Human herpesvirus 6
aacaauuauguguca

SEQ ID NO: 155516 - RNA, 18 nt, Human herpesvirus 6
aacaaucagccugcucag

SEQ ID NO: 155517 - RNA, 15 nt, Human herpesvirus 6
aacaauccauguuca

SEQ ID NO: 155518 - RNA, 14 nt, Human herpesvirus 6
aacaaguaaauucc

SEQ ID NO: 155519 - RNA, 14 nt, Human herpesvirus 6
aacaauaacaacaa

SEQ ID NO: 155520 - RNA, 13 nt, Human herpesvirus 6
aacaccagcauaa

SEQ ID NO: 155521 - RNA, 14 nt, Human herpesvirus 6
aacacagcaugcau

SEQ ID NO: 155522 - RNA, 21 nt, Human herpesvirus 6
aacacagcacauaacugcaua

SEQ ID NO: 155523 - RNA, 13 nt, Human herpesvirus 6
aacacacagugaa

SEQ ID NO: 155524 - RNA, 14 nt, Human herpesvirus 6
aacacacagugaaa

SEQ ID NO: 155525 - RNA, 16 nt, Human herpesvirus 6
aacacgaagacgaaga

SEQ ID NO: 155526 - RNA, 15 nt, Human herpesvirus 6
aacacccauggaauu

SEQ ID NO: 155527 - RNA, 15 nt, Human herpesvirus 6
aacaacagcauguaa

SEQ ID NO: 155528 - RNA, 17 nt, Human herpesvirus 6
aacaacgucaugcaaaa

SEQ ID NO: 155529 - RNA, 15 nt, Human herpesvirus 6
aacaacgacuaucaa

SEQ ID NO: 155530 - RNA, 23 nt, Human herpesvirus 6
aaauuacacaccuuaaacaugua

SEQ ID NO: 155531 - RNA, 22 nt, Human herpesvirus 6
aaauuacuaguaauaacauuaa

SEQ ID NO: 155532 - RNA, 21 nt, Human herpesvirus 6
aaauggaugucauauggugcg

SEQ ID NO: 155533 - RNA, 18 nt, Human herpesvirus 6
aaaucauuuugaaauguc

SEQ ID NO: 155534 - RNA, 19 nt, Human herpesvirus 6
aaauccgauagccauacca

SEQ ID NO: 155535 - RNA, 14 nt, Human herpesvirus 6
aaauccuauauuac

SEQ ID NO: 155536 - RNA, 16 nt, Human herpesvirus 6
aaauguugcauggaaa

SEQ ID NO: 155537 - RNA, 16 nt, Human herpesvirus 6
aaauguuuauuaucca

SEQ ID NO: 155538 - RNA, 22 nt, Human herpesvirus 6
aaaucgcuuaaagcguuugcaa

SEQ ID NO: 155539 - RNA, 19 nt, Human herpesvirus 6
aaaccucaaaaaugcacaa

SEQ ID NO: 155540 - RNA, 19 nt, Human herpesvirus 6
aaacgccguguuucgccaa

SEQ ID NO: 155541 - RNA, 19 nt, Human herpesvirus 6
aaacgacaaagaaccggcg

SEQ ID NO: 155542 - RNA, 23 nt, Human herpesvirus 6
aaacgaagucuuuggcuuggcca

SEQ ID NO: 155543 - RNA, 13 nt, Human herpesvirus 6
aaacuaacauagc

SEQ ID NO: 155544 - RNA, 23 nt, Human herpesvirus 6
aaacguugcacuacuugucuuac

SEQ ID NO: 155545 - RNA, 15 nt, Human herpesvirus 6
aaaguaagcaccuua

SEQ ID NO: 155546 - RNA, 23 nt, Human herpesvirus 6
aaacuaggugauugggagcucac

SEQ ID NO: 155547 - RNA, 20 nt, Human herpesvirus 6
aaacucgcaccucugaaaca

SEQ ID NO: 155548 - RNA, 12 nt, Human herpesvirus 6
aaacucacacaa

SEQ ID NO: 155549 - RNA, 16 nt, Human herpesvirus 6
aaacucacacaaccau

SEQ ID NO: 155550 - RNA, 17 nt, Human herpesvirus 6
aaacucacacaaccauc

SEQ ID NO: 155551 - RNA, 14 nt, Human herpesvirus 6
aaaguucaguaaca

SEQ ID NO: 155552 - RNA, 16 nt, Human herpesvirus 6
aaaguucaucuuucaa

SEQ ID NO: 155553 - RNA, 16 nt, Human herpesvirus 6
aaaguuuaaguuuuca

SEQ ID NO: 155554 - RNA, 17 nt, Human herpesvirus 6
aaaguuuaaguuuucac

SEQ ID NO: 155555 - RNA, 22 nt, Human herpesvirus 6
aaaguuuucggcuucgcugcua

SEQ ID NO: 155556 - RNA, 15 nt, Human herpesvirus 6
aaaguuuugugaucc

SEQ ID NO: 155557 - RNA, 18 nt, Human herpesvirus 6
aaaguauagucuagcaac

SEQ ID NO: 155558 - RNA, 16 nt, Human herpesvirus 6
aaaguauccuaaauac

SEQ ID NO: 155559 - RNA, 17 nt, Human herpesvirus 6
aaaguauccuaaauacc

SEQ ID NO: 155560 - RNA, 17 nt, Human herpesvirus 6
aaaguauuggugcauca

SEQ ID NO: 155561 - RNA, 15 nt, Human herpesvirus 6
aaagucagagauuau

SEQ ID NO: 155562 - RNA, 18 nt, Human herpesvirus 6
aaagugaaagagacucua

SEQ ID NO: 155563 - RNA, 18 nt, Human herpesvirus 6
aaaucaaaugauuuuaca

SEQ ID NO: 155564 - RNA, 14 nt, Human herpesvirus 6
aaaucaaacucacc

SEQ ID NO: 155565 - RNA, 19 nt, Human herpesvirus 6
aaaucaucucgugcaaaag

SEQ ID NO: 155566 - RNA, 16 nt, Human herpesvirus 6
aaauauuaauuaccua

SEQ ID NO: 155567 - RNA, 21 nt, Human herpesvirus 6
aaauauuauuuucccacagau

SEQ ID NO: 155568 - RNA, 15 nt, Human herpesvirus 6
aaauaacgauggagu

SEQ ID NO: 155569 - RNA, 13 nt, Human herpesvirus 6
aaauaaguacaua

SEQ ID NO: 155570 - RNA, 11 nt, Human herpesvirus 6
aaauaaauacu

SEQ ID NO: 155571 - RNA, 17 nt, Human herpesvirus 6
aaauaaacaccagcaua

SEQ ID NO: 155572 - RNA, 12 nt, Human herpesvirus 6
aaauaaacaguu

SEQ ID NO: 155573 - RNA, 13 nt, Human herpesvirus 6
aagagaacgagcu

SEQ ID NO: 155574 - RNA, 17 nt, Human herpesvirus 6
aagagaugaaagacaga

SEQ ID NO: 155575 - RNA, 16 nt, Human herpesvirus 6
aagacuccuacaauac

SEQ ID NO: 155576 - RNA, 17 nt, Human herpesvirus 6
aagacguuugcuguuuu

SEQ ID NO: 155577 - RNA, 20 nt, Human herpesvirus 6
aagaggauccauucuagaua

SEQ ID NO: 155578 - RNA, 22 nt, Human herpesvirus 6
aagagucccaucuauacacccu

SEQ ID NO: 155579 - RNA, 23 nt, Human herpesvirus 6
aagagucccaucuauacacccug

SEQ ID NO: 155580 - RNA, 16 nt, Human herpesvirus 6
aagagcgucguauuaa

SEQ ID NO: 155581 - RNA, 14 nt, Human herpesvirus 6
aagaucaagcaagu

SEQ ID NO: 155582 - RNA, 19 nt, Human herpesvirus 6
aacuuuuuucggauuuuga

SEQ ID NO: 155583 - RNA, 21 nt, Human herpesvirus 6
aacuuuuuuuuuucuuacaac

SEQ ID NO: 155584 - RNA, 23 nt, Human herpesvirus 6
aagaaaaagaaauuaaucgucuu

SEQ ID NO: 155585 - RNA, 12 nt, Human herpesvirus 6
aagaaacagaua

SEQ ID NO: 155586 - RNA, 17 nt, Human herpesvirus 6
aagaaacaguaaaucuc

SEQ ID NO: 155587 - RNA, 19 nt, Human herpesvirus 6
aagaaacgaagucuuuggc

SEQ ID NO: 155588 - RNA, 18 nt, Human herpesvirus 6
aagaacaaaaucuucuuu

SEQ ID NO: 155589 - RNA, 11 nt, Human herpesvirus 6
aagacacaauc

SEQ ID NO: 155590 - RNA, 14 nt, Human herpesvirus 6
aagacaaauuaauu

SEQ ID NO: 155591 - RNA, 13 nt, Human herpesvirus 6
aagaaccaaagac

SEQ ID NO: 155592 - RNA, 22 nt, Human herpesvirus 6
aacugcauacguuugccaaagc

SEQ ID NO: 155593 - RNA, 16 nt, Human herpesvirus 6
aacugguucagaauuu

SEQ ID NO: 155594 - RNA, 22 nt, Human herpesvirus 6
aacuuuuagagacuuugcugau

SEQ ID NO: 155595 - RNA, 15 nt, Human herpesvirus 6
aacuggugucugucu

SEQ ID NO: 155596 - RNA, 19 nt, Human herpesvirus 6
aacgcuaaauauaucaaag

SEQ ID NO: 155597 - RNA, 21 nt, Human herpesvirus 6
aacuauuaauaaaucgcuuaa

SEQ ID NO: 155598 - RNA, 15 nt, Human herpesvirus 6
aacgcgacaggguga

SEQ ID NO: 155599 - RNA, 22 nt, Human herpesvirus 6
aacgcgacagggugagucacau

SEQ ID NO: 155600 - RNA, 24 nt, Human herpesvirus 6
aacgccacagccuguucuugcuac

SEQ ID NO: 155601 - RNA, 18 nt, Human herpesvirus 6
aacgcaucacacauacaa

SEQ ID NO: 155602 - RNA, 18 nt, Human herpesvirus 6
aacgccuccacaugacac

SEQ ID NO: 155603 - RNA, 21 nt, Human herpesvirus 6
aacgcacuggacaucaauucc

SEQ ID NO: 155604 - RNA, 14 nt, Human herpesvirus 6
aacgauaugcugcc

SEQ ID NO: 155605 - RNA, 16 nt, Human herpesvirus 6
aacgaugguacaggcg

SEQ ID NO: 155606 - RNA, 18 nt, Human herpesvirus 6
aacgagaaccugcagggg

SEQ ID NO: 155607 - RNA, 19 nt, Human herpesvirus 6
aacgagccaagccauggaa

SEQ ID NO: 155608 - RNA, 13 nt, Human herpesvirus 6
aacgaagucuuug

SEQ ID NO: 155609 - RNA, 17 nt, Human herpesvirus 6
aacgacuaccacaucac

SEQ ID NO: 155610 - RNA, 14 nt, Human herpesvirus 6
aacugaauuugcau

SEQ ID NO: 155611 - RNA, 13 nt, Human herpesvirus 6
aacugacugacaa

SEQ ID NO: 155612 - RNA, 16 nt, Human herpesvirus 6
aacucuuauaacaagc

SEQ ID NO: 155613 - RNA, 13 nt, Human herpesvirus 6
aacucuaccugga

SEQ ID NO: 155614 - RNA, 17 nt, Human herpesvirus 6
aacucaucaaauccucu

SEQ ID NO: 155615 - RNA, 19 nt, Human herpesvirus 6
aacucaucgacuucugucu

SEQ ID NO: 155616 - RNA, 17 nt, Human herpesvirus 6
aacuaugugcauuccga

SEQ ID NO: 155617 - RNA, 15 nt, Human herpesvirus 6
aacucacacaaccau

SEQ ID NO: 155618 - RNA, 21 nt, Human herpesvirus 6
aacaggauucccuucagacau

SEQ ID NO: 155619 - RNA, 13 nt, Human herpesvirus 6
aacagucugacau

SEQ ID NO: 155620 - RNA, 14 nt, Human herpesvirus 6
aacaguaauuuuag

SEQ ID NO: 155621 - RNA, 19 nt, Human herpesvirus 6
aacaguaauuuuagggaug

SEQ ID NO: 155622 - RNA, 22 nt, Human herpesvirus 6
aacaggcuugugaaagaccgua

SEQ ID NO: 155623 - RNA, 18 nt, Human herpesvirus 6
aacauagcgaauuugaac

SEQ ID NO: 155624 - RNA, 13 nt, Human herpesvirus 6
aacauagucaagu

SEQ ID NO: 155625 - RNA, 23 nt, Human herpesvirus 6
aacaguuuaccuauuuacaaugu

SEQ ID NO: 155626 - RNA, 14 nt, Human herpesvirus 6
aacauaaaaauaca

SEQ ID NO: 155627 - RNA, 14 nt, Human herpesvirus 6
aacauaaaacaaca

SEQ ID NO: 155628 - RNA, 15 nt, Human herpesvirus 6
aacauaaaacaacaa

SEQ ID NO: 155629 - RNA, 16 nt, Human herpesvirus 6
aaccccucccaucccc

SEQ ID NO: 155630 - RNA, 15 nt, Human herpesvirus 6
aacccccgauucaga

SEQ ID NO: 155631 - RNA, 17 nt, Human herpesvirus 6
aaccguaugccugagcu

SEQ ID NO: 155632 - RNA, 13 nt, Human herpesvirus 6
aaccgaaaaaccc

SEQ ID NO: 155633 - RNA, 16 nt, Human herpesvirus 6
aagauucagagugaau

SEQ ID NO: 155634 - RNA, 20 nt, Human herpesvirus 6
aagauuacggcaacauaccc

SEQ ID NO: 155635 - RNA, 15 nt, Human herpesvirus 6
aagaugguaucugaa

SEQ ID NO: 155636 - RNA, 21 nt, Human herpesvirus 6
aagaugacagcgauacaauaa

SEQ ID NO: 155637 - RNA, 15 nt, Human herpesvirus 6
aagaucuaaauuucu

SEQ ID NO: 155638 - RNA, 20 nt, Human herpesvirus 6
aagaucuguacguauaccua

SEQ ID NO: 155639 - RNA, 20 nt, Human herpesvirus 6
aagaucuuuauggagggaau

SEQ ID NO: 155640 - RNA, 20 nt, Human herpesvirus 6
aaggucaucaugcugugaga

SEQ ID NO: 155641 - RNA, 19 nt, Human herpesvirus 6
aagggucuaucgcaaauuc

SEQ ID NO: 155642 - RNA, 17 nt, Human herpesvirus 6
aagcagaucgaguuaca

SEQ ID NO: 155643 - RNA, 15 nt, Human herpesvirus 6
aagcacccuacacaa

SEQ ID NO: 155644 - RNA, 16 nt, Human herpesvirus 6
aagcaccuaauuacaa

SEQ ID NO: 155645 - RNA, 13 nt, Human herpesvirus 6
aaguauuggugca

SEQ ID NO: 155646 - RNA, 16 nt, Human herpesvirus 6
aaguauuggugcauca

SEQ ID NO: 155647 - RNA, 22 nt, Human herpesvirus 6
aaguaguugcuaagugugauac

SEQ ID NO: 155648 - RNA, 23 nt, Human herpesvirus 6
aauaaaaugcccauucucagaca

SEQ ID NO: 155649 - RNA, 15 nt, Human herpesvirus 6
aaguagccaaugauu

SEQ ID NO: 155650 - RNA, 20 nt, Human herpesvirus 6
aaguaagggcuuuucaagau

SEQ ID NO: 155651 - RNA, 20 nt, Human herpesvirus 6
aagguggucguagacaguaa

SEQ ID NO: 155652 - RNA, 23 nt, Human herpesvirus 6
aagguggaaggcaaucaacuggu

SEQ ID NO: 155653 - RNA, 15 nt, Human herpesvirus 6
aagguggcaucagaa

SEQ ID NO: 155654 - RNA, 15 nt, Human herpesvirus 6
aaguaaaacaaaaca

SEQ ID NO: 155655 - RNA, 18 nt, Human herpesvirus 6
aauccauguucauaggac

SEQ ID NO: 155656 - RNA, 19 nt, Human herpesvirus 6
aauccacugcauuucauuc

SEQ ID NO: 155657 - RNA, 23 nt, Human herpesvirus 6
aauccagacuagacgcacuaagu

SEQ ID NO: 155658 - RNA, 18 nt, Human herpesvirus 6
aaucauuguuugaauaac

SEQ ID NO: 155659 - RNA, 23 nt, Human herpesvirus 6
aaucacaacaaaaaugcuuuuau

SEQ ID NO: 155660 - RNA, 15 nt, Human herpesvirus 6
aaucacaaugaucaa

SEQ ID NO: 155661 - RNA, 18 nt, Human herpesvirus 6
aauauuuccaugacugug

SEQ ID NO: 155662 - RNA, 21 nt, Human herpesvirus 6
aauauuuccaugacugugagg

SEQ ID NO: 155663 - RNA, 17 nt, Human herpesvirus 6
aaucaacauucccuuaa

SEQ ID NO: 155664 - RNA, 24 nt, Human herpesvirus 6
aaucaacauucccuuaauguaugc

SEQ ID NO: 155665 - RNA, 14 nt, Human herpesvirus 6
aauaacacgcuguu

SEQ ID NO: 155666 - RNA, 17 nt, Human herpesvirus 6
aauaaauacuagcuaaa

SEQ ID NO: 155667 - RNA, 21 nt, Human herpesvirus 6
aauaaaguuaaauugauagua

SEQ ID NO: 155668 - RNA, 14 nt, Human herpesvirus 6
aauaagccuaagaa

SEQ ID NO: 155669 - RNA, 19 nt, Human herpesvirus 6
aauaaguacauagaauuuc

SEQ ID NO: 155670 - RNA, 15 nt, Human herpesvirus 6
aauaauggcaugcau

SEQ ID NO: 155671 - RNA, 12 nt, Human herpesvirus 6
aauaaugccuaa

SEQ ID NO: 155672 - RNA, 14 nt, Human herpesvirus 6
aauaauuacaauac

SEQ ID NO: 155673 - RNA, 20 nt, Human herpesvirus 6
aauaauuauccucucuggaa

SEQ ID NO: 155674 - RNA, 15 nt, Human herpesvirus 6
aauaauuauggacaa

SEQ ID NO: 155675 - RNA, 23 nt, Human herpesvirus 6
aauauuaauuacauauagucaau

SEQ ID NO: 155676 - RNA, 23 nt, Human herpesvirus 6
aauauuaauuaccuauagucaau

SEQ ID NO: 155677 - RNA, 12 nt, Human herpesvirus 6
aauaugaacaau

SEQ ID NO: 155678 - RNA, 15 nt, Human herpesvirus 6
aauuuaccguuuaaa

SEQ ID NO: 155679 - RNA, 24 nt, Human herpesvirus 6
aauuuaccguuuaaacuaugcaaa

SEQ ID NO: 155680 - RNA, 22 nt, Human herpesvirus 6
aauuuagccuauuaagcagccg

SEQ ID NO: 155681 - RNA, 17 nt, Human herpesvirus 6
aauuuaauaagagccaa

SEQ ID NO: 155682 - RNA, 19 nt, Human herpesvirus 6
aauuuaucgcagcaucaug

SEQ ID NO: 155683 - RNA, 20 nt, Human herpesvirus 6
aauuuggguuguguugcagu

SEQ ID NO: 155684 - RNA, 15 nt, Human herpesvirus 6
aauuugaacguauga

SEQ ID NO: 155685 - RNA, 17 nt, Human herpesvirus 6
aauuuccugaucacaga

SEQ ID NO: 155686 - RNA, 17 nt, Human herpesvirus 6
aauuccgauaguagauu

SEQ ID NO: 155687 - RNA, 19 nt, Human herpesvirus 6
aauuccacgugcuugucuc

SEQ ID NO: 155688 - RNA, 15 nt, Human herpesvirus 6
aauucaccagauuca

SEQ ID NO: 155689 - RNA, 17 nt, Human herpesvirus 6
aauucaccagauucacu

SEQ ID NO: 155690 - RNA, 22 nt, Human herpesvirus 6
aauuccugugacgccuugaugu

SEQ ID NO: 155691 - RNA, 14 nt, Human herpesvirus 6
aauugaacauugua

SEQ ID NO: 155692 - RNA, 17 nt, Human herpesvirus 6
aauucuucugugacuau

SEQ ID NO: 155693 - RNA, 14 nt, Human herpesvirus 6
aauugacuacagcu

SEQ ID NO: 155694 - RNA, 21 nt, Human herpesvirus 6
aaugaaacaagaaagaggaau

SEQ ID NO: 155695 - RNA, 20 nt, Human herpesvirus 6
aaugaccucaucccuuaaaa

SEQ ID NO: 155696 - RNA, 20 nt, Human herpesvirus 6
aaugaaugccgacaucuccu

SEQ ID NO: 155697 - RNA, 15 nt, Human herpesvirus 6
aaugaauguguucac

SEQ ID NO: 155698 - RNA, 20 nt, Human herpesvirus 6
aaucuucccuuuuacaauac

SEQ ID NO: 155699 - RNA, 21 nt, Human herpesvirus 6
aaucuguguuuccaaaauugg

SEQ ID NO: 155700 - RNA, 18 nt, Human herpesvirus 6
aaucugaauuuaaugcaa

SEQ ID NO: 155701 - RNA, 16 nt, Human herpesvirus 6
aauuacaagguacaca

SEQ ID NO: 155702 - RNA, 23 nt, Human herpesvirus 6
aauguguuuuucuuuuacaggaa

SEQ ID NO: 155703 - RNA, 20 nt, Human herpesvirus 6
acacaaaaaauugacaauga

SEQ ID NO: 155704 - RNA, 21 nt, Human herpesvirus 6
acaauuucuuguugaguuuca

SEQ ID NO: 155705 - RNA, 14 nt, Human herpesvirus 6
acaauuauguguca

SEQ ID NO: 155706 - RNA, 21 nt, Human herpesvirus 6
acaauuaugugucaaguuuca

SEQ ID NO: 155707 - RNA, 19 nt, Human herpesvirus 6
acaauguucaauuacucaa

SEQ ID NO: 155708 - RNA, 19 nt, Human herpesvirus 6
acaauguuuuugacaaaua

SEQ ID NO: 155709 - RNA, 18 nt, Human herpesvirus 6
acaaugcagaacaacagc

SEQ ID NO: 155710 - RNA, 22 nt, Human herpesvirus 6
acaaugcagaacaacagcaugu

SEQ ID NO: 155711 - RNA, 15 nt, Human herpesvirus 6
acaagucgacaaauu

SEQ ID NO: 155712 - RNA, 17 nt, Human herpesvirus 6
acaaguauccuuccacc

SEQ ID NO: 155713 - RNA, 18 nt, Human herpesvirus 6
acaaguagcucguaauaa

SEQ ID NO: 155714 - RNA, 12 nt, Human herpesvirus 6
acaauacacaga

SEQ ID NO: 155715 - RNA, 12 nt, Human herpesvirus 6
acaauaacaaca

SEQ ID NO: 155716 - RNA, 15 nt, Human herpesvirus 6
acaaguuucaauaua

SEQ ID NO: 155717 - RNA, 21 nt, Human herpesvirus 6
acaaaccaucaauuuuaucca

SEQ ID NO: 155718 - RNA, 17 nt, Human herpesvirus 6
acaaacuauauugcugc

SEQ ID NO: 155719 - RNA, 23 nt, Human herpesvirus 6
acaaacuauauugcugcuagaua

SEQ ID NO: 155720 - RNA, 17 nt, Human herpesvirus 6
acaaacaugcguugugu

SEQ ID NO: 155721 - RNA, 14 nt, Human herpesvirus 6
acaaaauuucucac

SEQ ID NO: 155722 - RNA, 10 nt, Human herpesvirus 6
acaacaggcu

SEQ ID NO: 155723 - RNA, 16 nt, Human herpesvirus 6
acaacauuaucaauua

SEQ ID NO: 155724 - RNA, 16 nt, Human herpesvirus 6
acaacccccgauucag

SEQ ID NO: 155725 - RNA, 22 nt, Human herpesvirus 6
acaaccauccagauaaccucac

SEQ ID NO: 155726 - RNA, 15 nt, Human herpesvirus 6
acaacgaaacaguuc

SEQ ID NO: 155727 - RNA, 13 nt, Human herpesvirus 6
acaacgacuauca

SEQ ID NO: 155728 - RNA, 14 nt, Human herpesvirus 6
acaacgacuaucaa

SEQ ID NO: 155729 - RNA, 14 nt, Human herpesvirus 6
acuccccauucaac

SEQ ID NO: 155730 - RNA, 16 nt, Human herpesvirus 6
acucccggcccagaga

SEQ ID NO: 155731 - RNA, 13 nt, Human herpesvirus 6
acuccaauccaac

SEQ ID NO: 155732 - RNA, 17 nt, Human herpesvirus 6
acucuuauaacaagcac

SEQ ID NO: 155733 - RNA, 20 nt, Human herpesvirus 6
acucuuauaacaagcacuga

SEQ ID NO: 155734 - RNA, 18 nt, Human herpesvirus 6
acucuguguugaaugaac

SEQ ID NO: 155735 - RNA, 15 nt, Human herpesvirus 6
acucuucggcauaaa

SEQ ID NO: 155736 - RNA, 23 nt, Human herpesvirus 6
acguaucaaccccgcacgcauac

SEQ ID NO: 155737 - RNA, 19 nt, Human herpesvirus 6
acguaugaaaguccucaaa

SEQ ID NO: 155738 - RNA, 17 nt, Human herpesvirus 6
acgucuccuguaaaaua

SEQ ID NO: 155739 - RNA, 13 nt, Human herpesvirus 6
acucauccaagac

SEQ ID NO: 155740 - RNA, 14 nt, Human herpesvirus 6
acucauccaagacu

SEQ ID NO: 155741 - RNA, 21 nt, Human herpesvirus 6
acuugaaaaaguaguugcuaa

SEQ ID NO: 155742 - RNA, 12 nt, Human herpesvirus 6
acuugaaagccu

SEQ ID NO: 155743 - RNA, 16 nt, Human herpesvirus 6
acuuacuaauguggau

SEQ ID NO: 155744 - RNA, 16 nt, Human herpesvirus 6
acuucgugcugugaua

SEQ ID NO: 155745 - RNA, 19 nt, Human herpesvirus 6
acuucguuuauucaggaug

SEQ ID NO: 155746 - RNA, 19 nt, Human herpesvirus 6
acugacgguuagguuuaau

SEQ ID NO: 155747 - RNA, 14 nt, Human herpesvirus 6
agaacgagcuuagc

SEQ ID NO: 155748 - RNA, 21 nt, Human herpesvirus 6
agaacgggcacacgucccuau

SEQ ID NO: 155749 - RNA, 12 nt, Human herpesvirus 6
agaaccaaagac

SEQ ID NO: 155750 - RNA, 12 nt, Human herpesvirus 6
agaacaucucag

SEQ ID NO: 155751 - RNA, 17 nt, Human herpesvirus 6
agaaacuugcuccugga

SEQ ID NO: 155752 - RNA, 15 nt, Human herpesvirus 6
agacaaacgccucca

SEQ ID NO: 155753 - RNA, 20 nt, Human herpesvirus 6
agacaaacgccuccacauga

SEQ ID NO: 155754 - RNA, 12 nt, Human herpesvirus 6
agacaauaauca

SEQ ID NO: 155755 - RNA, 13 nt, Human herpesvirus 6
agaauucaaaaac

SEQ ID NO: 155756 - RNA, 21 nt, Human herpesvirus 6
agaauuaauguccagugauaa

SEQ ID NO: 155757 - RNA, 18 nt, Human herpesvirus 6
agaauuacgcagacuuaa

SEQ ID NO: 155758 - RNA, 16 nt, Human herpesvirus 6
acuugauaaacuguau

SEQ ID NO: 155759 - RNA, 18 nt, Human herpesvirus 6
acuugauaaacuguaugc

SEQ ID NO: 155760 - RNA, 12 nt, Human herpesvirus 6
acuugauguaug

SEQ ID NO: 155761 - RNA, 19 nt, Human herpesvirus 6
acuugcacucgaaaacagu

SEQ ID NO: 155762 - RNA, 19 nt, Human herpesvirus 6
acuugucggcgaugcaucu

SEQ ID NO: 155763 - RNA, 16 nt, Human herpesvirus 6
acuuguacaaauucau

SEQ ID NO: 155764 - RNA, 16 nt, Human herpesvirus 6
agaaaagugcaagggu

SEQ ID NO: 155765 - RNA, 23 nt, Human herpesvirus 6
agaaaauaaaaaaaagacaucac

SEQ ID NO: 155766 - RNA, 21 nt, Human herpesvirus 6
acuuucaugauucuuugucua

SEQ ID NO: 155767 - RNA, 16 nt, Human herpesvirus 6
agaaacauuugcugau

SEQ ID NO: 155768 - RNA, 17 nt, Human herpesvirus 6
agaaacauuugcugaug

SEQ ID NO: 155769 - RNA, 18 nt, Human herpesvirus 6
agaaacauuugcugaugc

SEQ ID NO: 155770 - RNA, 19 nt, Human herpesvirus 6
agaaacaaugcuuugggac

SEQ ID NO: 155771 - RNA, 22 nt, Human herpesvirus 6
agaaaauguuucauccaaauac

SEQ ID NO: 155772 - RNA, 15 nt, Human herpesvirus 6
agaaacagauagugu

SEQ ID NO: 155773 - RNA, 18 nt, Human herpesvirus 6
agaaaauuauagcuucaa

SEQ ID NO: 155774 - RNA, 17 nt, Human herpesvirus 6
agaggugcgaaugcuca

SEQ ID NO: 155775 - RNA, 12 nt, Human herpesvirus 6
agaggugcugau

SEQ ID NO: 155776 - RNA, 13 nt, Human herpesvirus 6
agaggugcugaug

SEQ ID NO: 155777 - RNA, 23 nt, Human herpesvirus 6
agauagaccuugaucuauguaau

SEQ ID NO: 155778 - RNA, 15 nt, Human herpesvirus 6
agauacugguuuaca

SEQ ID NO: 155779 - RNA, 15 nt, Human herpesvirus 6
agaggacgggaagaa

SEQ ID NO: 155780 - RNA, 15 nt, Human herpesvirus 6
agaggagaaaugauc

SEQ ID NO: 155781 - RNA, 15 nt, Human herpesvirus 6
agaggaauugcuuug

SEQ ID NO: 155782 - RNA, 16 nt, Human herpesvirus 6
agaggcguccgaggga

SEQ ID NO: 155783 - RNA, 16 nt, Human herpesvirus 6
agauaggcaaaccaua

SEQ ID NO: 155784 - RNA, 17 nt, Human herpesvirus 6
agauauggaugaucacu

SEQ ID NO: 155785 - RNA, 17 nt, Human herpesvirus 6
agauggaaaauugcaaa

SEQ ID NO: 155786 - RNA, 16 nt, Human herpesvirus 6
agacacgcuaaaaaca

SEQ ID NO: 155787 - RNA, 19 nt, Human herpesvirus 6
agacuuacagagcuuuuaa

SEQ ID NO: 155788 - RNA, 15 nt, Human herpesvirus 6
agacuuggugaugau

SEQ ID NO: 155789 - RNA, 16 nt, Human herpesvirus 6
agacuuggugaugaug

SEQ ID NO: 155790 - RNA, 13 nt, Human herpesvirus 6
agacuuuacuucu

SEQ ID NO: 155791 - RNA, 23 nt, Human herpesvirus 6
agagacgacucgcggaguggagu

SEQ ID NO: 155792 - RNA, 18 nt, Human herpesvirus 6
agagaccaauuuauguca

SEQ ID NO: 155793 - RNA, 23 nt, Human herpesvirus 6
agagaccaauuuaugucauuuca

SEQ ID NO: 155794 - RNA, 18 nt, Human herpesvirus 6
agagaagagcgaaaugca

SEQ ID NO: 155795 - RNA, 14 nt, Human herpesvirus 6
agagagauuaacuc

SEQ ID NO: 155796 - RNA, 14 nt, Human herpesvirus 6
agcacauaacugca

SEQ ID NO: 155797 - RNA, 19 nt, Human herpesvirus 6
agcaacaauccauguucau

SEQ ID NO: 155798 - RNA, 14 nt, Human herpesvirus 6
agcaccuaauuaca

SEQ ID NO: 155799 - RNA, 15 nt, Human herpesvirus 6
agcaccuaauuacaa

SEQ ID NO: 155800 - RNA, 20 nt, Human herpesvirus 6
agcacccuaugcaagcucau

SEQ ID NO: 155801 - RNA, 14 nt, Human herpesvirus 6
agcaccaucaauaa

SEQ ID NO: 155802 - RNA, 14 nt, Human herpesvirus 6
agcagcaauaggca

SEQ ID NO: 155803 - RNA, 21 nt, Human herpesvirus 6
agcagcaauaggcaccuaucu

SEQ ID NO: 155804 - RNA, 16 nt, Human herpesvirus 6
agcagaucgcaaaauu

SEQ ID NO: 155805 - RNA, 16 nt, Human herpesvirus 6
agauuuguaaggacaa

SEQ ID NO: 155806 - RNA, 17 nt, Human herpesvirus 6
agauuuguaaggacaaa

SEQ ID NO: 155807 - RNA, 18 nt, Human herpesvirus 6
agauuuguaaggacaaag

SEQ ID NO: 155808 - RNA, 21 nt, Human herpesvirus 6
agauugcauaugucuguuaua

SEQ ID NO: 155809 - RNA, 22 nt, Human herpesvirus 6
agauugcauaugucuguuauaa

SEQ ID NO: 155810 - RNA, 15 nt, Human herpesvirus 6
agcaaauguaacuuu

SEQ ID NO: 155811 - RNA, 20 nt, Human herpesvirus 6
agcaaagcacccuacacaaa

SEQ ID NO: 155812 - RNA, 15 nt, Human herpesvirus 6
agauguacucaucca

SEQ ID NO: 155813 - RNA, 16 nt, Human herpesvirus 6
agauguacucauccaa

SEQ ID NO: 155814 - RNA, 13 nt, Human herpesvirus 6
agauguguauuau

SEQ ID NO: 155815 - RNA, 13 nt, Human herpesvirus 6
agauguugcaaua

SEQ ID NO: 155816 - RNA, 14 nt, Human herpesvirus 6
agauuaaaacauca

SEQ ID NO: 155817 - RNA, 14 nt, Human herpesvirus 6
agauuaauucuucc

SEQ ID NO: 155818 - RNA, 21 nt, Human herpesvirus 6
agauuaacuccggauuguuaa

SEQ ID NO: 155819 - RNA, 15 nt, Human herpesvirus 6
agauuacggcaacau

SEQ ID NO: 155820 - RNA, 15 nt, Human herpesvirus 6
agauucuaaugauaa

SEQ ID NO: 155821 - RNA, 19 nt, Human herpesvirus 6
agauuagaaauuacauaag

SEQ ID NO: 155822 - RNA, 21 nt, Human herpesvirus 6
acggccuggaguacaagacca

SEQ ID NO: 155823 - RNA, 13 nt, Human herpesvirus 6
acgggcaacuccc

SEQ ID NO: 155824 - RNA, 21 nt, Human herpesvirus 6
acggcuucaagaaugccguga

SEQ ID NO: 155825 - RNA, 15 nt, Human herpesvirus 6
acggaacgauuugca

SEQ ID NO: 155826 - RNA, 19 nt, Human herpesvirus 6
acggagaacgggcaacucc

SEQ ID NO: 155827 - RNA, 16 nt, Human herpesvirus 6
acggcaacauacccuu

SEQ ID NO: 155828 - RNA, 21 nt, Human herpesvirus 6
acggcagcggaccaauccaug

SEQ ID NO: 155829 - RNA, 17 nt, Human herpesvirus 6
acguagacagucacaca

SEQ ID NO: 155830 - RNA, 11 nt, Human herpesvirus 6
acggugccaaa

SEQ ID NO: 155831 - RNA, 12 nt, Human herpesvirus 6
acggugccaaag

SEQ ID NO: 155832 - RNA, 14 nt, Human herpesvirus 6
acggugccaaagga

SEQ ID NO: 155833 - RNA, 16 nt, Human herpesvirus 6
acggucgaaaguucau

SEQ ID NO: 155834 - RNA, 15 nt, Human herpesvirus 6
acgcaacucuaccug

SEQ ID NO: 155835 - RNA, 16 nt, Human herpesvirus 6
acgcuaaauauaucaa

SEQ ID NO: 155836 - RNA, 14 nt, Human herpesvirus 6
acgcucaugaagac

SEQ ID NO: 155837 - RNA, 15 nt, Human herpesvirus 6
acgcgucaacaaaca

SEQ ID NO: 155838 - RNA, 20 nt, Human herpesvirus 6
acgcacuggacaucaauucc

SEQ ID NO: 155839 - RNA, 23 nt, Human herpesvirus 6
acgcuuuuacugauuaguuuuca

SEQ ID NO: 155840 - RNA, 19 nt, Human herpesvirus 6
acgcuggagcagcuuccac

SEQ ID NO: 155841 - RNA, 21 nt, Human herpesvirus 6
acgauaucaauuccugugacg

SEQ ID NO: 155842 - RNA, 18 nt, Human herpesvirus 6
acgauagcagcucugcaa

SEQ ID NO: 155843 - RNA, 13 nt, Human herpesvirus 6
acgauaugucucu

SEQ ID NO: 155844 - RNA, 22 nt, Human herpesvirus 6
acgauuuaauuuuaucaugccc

SEQ ID NO: 155845 - RNA, 20 nt, Human herpesvirus 6
acgaaagcaguuuuacauca

SEQ ID NO: 155846 - RNA, 16 nt, Human herpesvirus 6
acgaaaaagaaaacca

SEQ ID NO: 155847 - RNA, 15 nt, Human herpesvirus 6
acgaaaagcaucuca

SEQ ID NO: 155848 - RNA, 20 nt, Human herpesvirus 6
acgaaaauugaugauguucu

SEQ ID NO: 155849 - RNA, 22 nt, Human herpesvirus 6
acgaaacauagucaaguaugug

SEQ ID NO: 155850 - RNA, 15 nt, Human herpesvirus 6
accuuuggaaaauau

SEQ ID NO: 155851 - RNA, 11 nt, Human herpesvirus 6
accuucacuuu

SEQ ID NO: 155852 - RNA, 20 nt, Human herpesvirus 6
accguuuaaacuaugcaaac

SEQ ID NO: 155853 - RNA, 19 nt, Human herpesvirus 6
accguuuaucgaugugcga

SEQ ID NO: 155854 - RNA, 16 nt, Human herpesvirus 6
accucaauuaauacaa

SEQ ID NO: 155855 - RNA, 11 nt, Human herpesvirus 6
accucaugagu

SEQ ID NO: 155856 - RNA, 20 nt, Human herpesvirus 6
accucauauaagaaccaaca

SEQ ID NO: 155857 - RNA, 22 nt, Human herpesvirus 6
accucaucgcgacuaaaaauac

SEQ ID NO: 155858 - RNA, 17 nt, Human herpesvirus 6
accucuaaaacaagaca

SEQ ID NO: 155859 - RNA, 22 nt, Human herpesvirus 6
accucgcucacaauauuucaca

SEQ ID NO: 155860 - RNA, 15 nt, Human herpesvirus 6
accuccuuuguaugu

SEQ ID NO: 155861 - RNA, 16 nt, Human herpesvirus 6
accucauuguuucacu

SEQ ID NO: 155862 - RNA, 17 nt, Human herpesvirus 6
accucauuguuucacuu

SEQ ID NO: 155863 - RNA, 20 nt, Human herpesvirus 6
accgccgugcuucuggcaca

SEQ ID NO: 155864 - RNA, 24 nt, Human herpesvirus 6
acccacgguggccuggcacggugc

SEQ ID NO: 155865 - RNA, 21 nt, Human herpesvirus 6
acacagcacauaacugcauac

SEQ ID NO: 155866 - RNA, 21 nt, Human herpesvirus 6
acacagagcgcaucuuuaaca

SEQ ID NO: 155867 - RNA, 23 nt, Human herpesvirus 6
acacaccuuaaacauguauauaa

SEQ ID NO: 155868 - RNA, 18 nt, Human herpesvirus 6
acacacgccgacuccguc

SEQ ID NO: 155869 - RNA, 12 nt, Human herpesvirus 6
acacaaucuucg

SEQ ID NO: 155870 - RNA, 21 nt, Human herpesvirus 6
acacaauuaguccauuaccac

SEQ ID NO: 155871 - RNA, 13 nt, Human herpesvirus 6
acacacccagcag

SEQ ID NO: 155872 - RNA, 21 nt, Human herpesvirus 6
acacaccgucuucaaccuguu

SEQ ID NO: 155873 - RNA, 22 nt, Human herpesvirus 6
acacaaucagaaaacacuaucu

SEQ ID NO: 155874 - RNA, 21 nt, Human herpesvirus 6
acacacagcuaaacaccacuu

SEQ ID NO: 155875 - RNA, 13 nt, Human herpesvirus 6
acacacagggugc

SEQ ID NO: 155876 - RNA, 13 nt, Human herpesvirus 6
acacacagugaaa

SEQ ID NO: 155877 - RNA, 13 nt, Human herpesvirus 6
acacauccaccca

SEQ ID NO: 155878 - RNA, 14 nt, Human herpesvirus 6
acacauguauuuau

SEQ ID NO: 155879 - RNA, 16 nt, Human herpesvirus 6
acacauguauuuauuc

SEQ ID NO: 155880 - RNA, 19 nt, Human herpesvirus 6
acagcaaguugcuaccgcu

SEQ ID NO: 155881 - RNA, 14 nt, Human herpesvirus 6
acauaucacuugua

SEQ ID NO: 155882 - RNA, 19 nt, Human herpesvirus 6
acauauuguguuguaagau

SEQ ID NO: 155883 - RNA, 16 nt, Human herpesvirus 6
acaucaacuacauuaa

SEQ ID NO: 155884 - RNA, 19 nt, Human herpesvirus 6
acaguuuaccuauuuacaa

SEQ ID NO: 155885 - RNA, 21 nt, Human herpesvirus 6
acaguuucucgaaaaaacaac

SEQ ID NO: 155886 - RNA, 20 nt, Human herpesvirus 6
acaucaugauuaucauagac

SEQ ID NO: 155887 - RNA, 16 nt, Human herpesvirus 6
acaucccguaugaaau

SEQ ID NO: 155888 - RNA, 23 nt, Human herpesvirus 6
acagcguguuauuucgggacaaa

SEQ ID NO: 155889 - RNA, 17 nt, Human herpesvirus 6
acagcuaaacaccacuu

SEQ ID NO: 155890 - RNA, 16 nt, Human herpesvirus 6
acagugugaucaucac

SEQ ID NO: 155891 - RNA, 13 nt, Human herpesvirus 6
acagucugacaug

SEQ ID NO: 155892 - RNA, 13 nt, Human herpesvirus 6
acagucuacaugu

SEQ ID NO: 155893 - RNA, 15 nt, Human herpesvirus 6
acagucuacaugucc

SEQ ID NO: 155894 - RNA, 19 nt, Human herpesvirus 6
acagucauacuccuuuuau

SEQ ID NO: 155895 - RNA, 22 nt, Human herpesvirus 6
acauggaaaauucgccaauuaa

SEQ ID NO: 155896 - RNA, 18 nt, Human herpesvirus 6
acauggaagacaaauuaa

SEQ ID NO: 155897 - RNA, 17 nt, Human herpesvirus 6
acauggugaaagacuua

SEQ ID NO: 155898 - RNA, 22 nt, Human herpesvirus 6
acauuugccgggaugagcuuua

SEQ ID NO: 155899 - RNA, 13 nt, Human herpesvirus 6
acauuugcugaug

SEQ ID NO: 155900 - RNA, 19 nt, Human herpesvirus 6
acauuuuguacaaacuuuu

SEQ ID NO: 155901 - RNA, 14 nt, Human herpesvirus 6
accaacacaccugc

SEQ ID NO: 155902 - RNA, 16 nt, Human herpesvirus 6
acauuguagaaagauc

SEQ ID NO: 155903 - RNA, 22 nt, Human herpesvirus 6
acauuguaaauagguaaacugu

SEQ ID NO: 155904 - RNA, 20 nt, Human herpesvirus 6
acauuuaauaaagaacaugu

SEQ ID NO: 155905 - RNA, 15 nt, Human herpesvirus 6
accaagcaccuaauu

SEQ ID NO: 155906 - RNA, 23 nt, Human herpesvirus 6
accaauaaaauuuuuugcaguau

SEQ ID NO: 155907 - RNA, 19 nt, Human herpesvirus 6
accaauuuaugucauuuca

SEQ ID NO: 155908 - RNA, 17 nt, Human herpesvirus 6
accacugugauaugcaa

SEQ ID NO: 155909 - RNA, 14 nt, Human herpesvirus 6
accaaagacauuca

SEQ ID NO: 155910 - RNA, 23 nt, Human herpesvirus 6
accaacgugucacacguguuaaa

SEQ ID NO: 155911 - RNA, 14 nt, Human herpesvirus 6
accaguagcacaaa

SEQ ID NO: 155912 - RNA, 11 nt, Human herpesvirus 6
accauguguau

SEQ ID NO: 155913 - RNA, 22 nt, Human herpesvirus 6
acccaaaaugcaacgcaucaca

SEQ ID NO: 155914 - RNA, 23 nt, Human herpesvirus 6
accaauuccuuaauucuaaauac

SEQ ID NO: 155915 - RNA, 12 nt, Human herpesvirus 6
accagauucacu

SEQ ID NO: 155916 - RNA, 16 nt, Human herpesvirus 6
caauguuuuugacaaa

SEQ ID NO: 155917 - RNA, 23 nt, Human herpesvirus 6
caauuccacgugcuugucucaca

SEQ ID NO: 155918 - RNA, 11 nt, Human herpesvirus 6
caauuagucca

SEQ ID NO: 155919 - RNA, 16 nt, Human herpesvirus 6
caaggccgacucuaua

SEQ ID NO: 155920 - RNA, 16 nt, Human herpesvirus 6
caaggaaagacaugca

SEQ ID NO: 155921 - RNA, 19 nt, Human herpesvirus 6
caagacuacagacucccca

SEQ ID NO: 155922 - RNA, 14 nt, Human herpesvirus 6
cacaauauuucaca

SEQ ID NO: 155923 - RNA, 15 nt, Human herpesvirus 6
cacaauauuucacau

SEQ ID NO: 155924 - RNA, 14 nt, Human herpesvirus 6
cacacacagggugc

SEQ ID NO: 155925 - RNA, 17 nt, Human herpesvirus 6
cacacaaccauccagau

SEQ ID NO: 155926 - RNA, 23 nt, Human herpesvirus 6
cacaugccaugcaauaggccaua

SEQ ID NO: 155927 - RNA, 19 nt, Human herpesvirus 6
cacauguauuuauucacuc

SEQ ID NO: 155928 - RNA, 23 nt, Human herpesvirus 6
cacaccacucuguuuuuuugcaa

SEQ ID NO: 155929 - RNA, 13 nt, Human herpesvirus 6
cacacagugaaac

SEQ ID NO: 155930 - RNA, 11 nt, Human herpesvirus 6
cacacauguau

SEQ ID NO: 155931 - RNA, 12 nt, Human herpesvirus 6
cacacauguauu

SEQ ID NO: 155932 - RNA, 21 nt, Human herpesvirus 6
cacacauguauuuauucacuc

SEQ ID NO: 155933 - RNA, 19 nt, Human herpesvirus 6
cacaccuuaaacauguaua

SEQ ID NO: 155934 - RNA, 19 nt, Human herpesvirus 6
cacaaaucuggaucaucaa

SEQ ID NO: 155935 - RNA, 22 nt, Human herpesvirus 6
cacaaaccaaaaugacucuaaa

SEQ ID NO: 155936 - RNA, 23 nt, Human herpesvirus 6
cacaaacccaaguucaucagcau

SEQ ID NO: 155937 - RNA, 20 nt, Human herpesvirus 6
cacaaaguuuaaguuuucac

SEQ ID NO: 155938 - RNA, 19 nt, Human herpesvirus 6
cacaaaaaauugacaauga

SEQ ID NO: 155939 - RNA, 17 nt, Human herpesvirus 6
caauuuuauccauccaa

SEQ ID NO: 155940 - RNA, 18 nt, Human herpesvirus 6
cacguaaccgaugcugau

SEQ ID NO: 155941 - RNA, 13 nt, Human herpesvirus 6
cacuagccuacua

SEQ ID NO: 155942 - RNA, 20 nt, Human herpesvirus 6
cacgguccacacgccagucc

SEQ ID NO: 155943 - RNA, 22 nt, Human herpesvirus 6
cacgcuggagcagcuuccacgc

SEQ ID NO: 155944 - RNA, 16 nt, Human herpesvirus 6
cacgcuaaaaacagac

SEQ ID NO: 155945 - RNA, 21 nt, Human herpesvirus 6
caccaaugacaccgauucaga

SEQ ID NO: 155946 - RNA, 19 nt, Human herpesvirus 6
caccaccaucuaauaggua

SEQ ID NO: 155947 - RNA, 13 nt, Human herpesvirus 6
cacccuacaaucu

SEQ ID NO: 155948 - RNA, 15 nt, Human herpesvirus 6
caccggcuaacccua

SEQ ID NO: 155949 - RNA, 18 nt, Human herpesvirus 6
caccgcauauaucauauu

SEQ ID NO: 155950 - RNA, 20 nt, Human herpesvirus 6
cagcuuccguaucacacuua

SEQ ID NO: 155951 - RNA, 14 nt, Human herpesvirus 6
caggaagcgccaua

SEQ ID NO: 155952 - RNA, 17 nt, Human herpesvirus 6
caggaaguuaauugugu

SEQ ID NO: 155953 - RNA, 18 nt, Human herpesvirus 6
caggaaguuaauuguguu

SEQ ID NO: 155954 - RNA, 15 nt, Human herpesvirus 6
caggaauccuauuca

SEQ ID NO: 155955 - RNA, 16 nt, Human herpesvirus 6
cagcuaagaguaacaa

SEQ ID NO: 155956 - RNA, 19 nt, Human herpesvirus 6
cagcggaagugaaagcagu

SEQ ID NO: 155957 - RNA, 17 nt, Human herpesvirus 6
cagcgauacaauaacaa

SEQ ID NO: 155958 - RNA, 17 nt, Human herpesvirus 6
cagccuugcgguaaaug

SEQ ID NO: 155959 - RNA, 20 nt, Human herpesvirus 6
cagccuugcgguaaauggca

SEQ ID NO: 155960 - RNA, 17 nt, Human herpesvirus 6
cagccgucgauaauaau

SEQ ID NO: 155961 - RNA, 14 nt, Human herpesvirus 6
cagcauuaacuaca

SEQ ID NO: 155962 - RNA, 21 nt, Human herpesvirus 6
cagcagaguccggcgcacgca

SEQ ID NO: 155963 - RNA, 15 nt, Human herpesvirus 6
cagcagaugcuuacc

SEQ ID NO: 155964 - RNA, 17 nt, Human herpesvirus 6
cagauguguacaaccga

SEQ ID NO: 155965 - RNA, 20 nt, Human herpesvirus 6
cagauuucuuauuaugugac

SEQ ID NO: 155966 - RNA, 22 nt, Human herpesvirus 6
cagauugcauaugucuguuaua

SEQ ID NO: 155967 - RNA, 19 nt, Human herpesvirus 6
cagauugcggacaugguga

SEQ ID NO: 155968 - RNA, 15 nt, Human herpesvirus 6
cagcaaguucaucag

SEQ ID NO: 155969 - RNA, 21 nt, Human herpesvirus 6
cagcaaguugcuaccgcuggg

SEQ ID NO: 155970 - RNA, 15 nt, Human herpesvirus 6
cagauacuacacaaa

SEQ ID NO: 155971 - RNA, 21 nt, Human herpesvirus 6
cagaucggcguuuugauaacc

SEQ ID NO: 155972 - RNA, 15 nt, Human herpesvirus 6
cagaucuaauucaca

SEQ ID NO: 155973 - RNA, 13 nt, Human herpesvirus 6
cagaucuaucaca

SEQ ID NO: 155974 - RNA, 20 nt, Human herpesvirus 6
cagauaaccucacuacugaa

SEQ ID NO: 155975 - RNA, 12 nt, Human herpesvirus 6
cagagacaccag

SEQ ID NO: 155976 - RNA, 21 nt, Human herpesvirus 6
cagagacgguguuuucaucag

SEQ ID NO: 155977 - RNA, 13 nt, Human herpesvirus 6
cagagacgugacc

SEQ ID NO: 155978 - RNA, 18 nt, Human herpesvirus 6
cagaaaagcaaacaugca

SEQ ID NO: 155979 - RNA, 16 nt, Human herpesvirus 6
cagaaaaguauagucu

SEQ ID NO: 155980 - RNA, 20 nt, Human herpesvirus 6
cagaaaaguauagucuagca

SEQ ID NO: 155981 - RNA, 14 nt, Human herpesvirus 6
cagaaaauguuuca

SEQ ID NO: 155982 - RNA, 20 nt, Human herpesvirus 6
cagaaaauguuucauccaaa

SEQ ID NO: 155983 - RNA, 22 nt, Human herpesvirus 6
cagagaucguaccggucugcaa

SEQ ID NO: 155984 - RNA, 22 nt, Human herpesvirus 6
cagagcaaauuaugguuaucau

SEQ ID NO: 155985 - RNA, 21 nt, Human herpesvirus 6
cagaaaaaaaucagaauccac

SEQ ID NO: 155986 - RNA, 14 nt, Human herpesvirus 6
cacuugcaauguga

SEQ ID NO: 155987 - RNA, 15 nt, Human herpesvirus 6
cacuugcaaugugau

SEQ ID NO: 155988 - RNA, 16 nt, Human herpesvirus 6
cacuugcaaugugauc

SEQ ID NO: 155989 - RNA, 23 nt, Human herpesvirus 6
cacuugaaccaagucaacaacgu

SEQ ID NO: 155990 - RNA, 11 nt, Human herpesvirus 6
cacucauacac

SEQ ID NO: 155991 - RNA, 16 nt, Human herpesvirus 6
cacugugaauccagac

SEQ ID NO: 155992 - RNA, 15 nt, Human herpesvirus 6
cacuuaagccagcuu

SEQ ID NO: 155993 - RNA, 14 nt, Human herpesvirus 6
caaacuauauugcu

SEQ ID NO: 155994 - RNA, 18 nt, Human herpesvirus 6
caaacgugaauauaucaa

SEQ ID NO: 155995 - RNA, 18 nt, Human herpesvirus 6
caaacccgacaauguaaa

SEQ ID NO: 155996 - RNA, 14 nt, Human herpesvirus 6
caaagcauacucaa

SEQ ID NO: 155997 - RNA, 19 nt, Human herpesvirus 6
caaagauguacucauccaa

SEQ ID NO: 155998 - RNA, 21 nt, Human herpesvirus 6
caaagauguacucauccaaga

SEQ ID NO: 155999 - RNA, 19 nt, Human herpesvirus 6
caaagacgauugcuuuagu

SEQ ID NO: 156000 - RNA, 16 nt, Human herpesvirus 6
caaagacauucaacau

SEQ ID NO: 156001 - RNA, 18 nt, Human herpesvirus 6
caaaaaccgccaagagau

SEQ ID NO: 156002 - RNA, 13 nt, Human herpesvirus 6
caaaaauguugca

SEQ ID NO: 156003 - RNA, 11 nt, Human herpesvirus 6
caaaacaaagg

SEQ ID NO: 156004 - RNA, 21 nt, Human herpesvirus 6
caaacauccuaacaagacaga

SEQ ID NO: 156005 - RNA, 18 nt, Human herpesvirus 6
auuuuuuuaauuggugcg

SEQ ID NO: 156006 - RNA, 16 nt, Human herpesvirus 6
auuuucauuuugauau

SEQ ID NO: 156007 - RNA, 14 nt, Human herpesvirus 6
auuuuuguugugau

SEQ ID NO: 156008 - RNA, 13 nt, Human herpesvirus 6
auuuuagauauau

SEQ ID NO: 156009 - RNA, 18 nt, Human herpesvirus 6
auuuucaaucuguguuuc

SEQ ID NO: 156010 - RNA, 17 nt, Human herpesvirus 6
auuuuauuaacuguaaa

SEQ ID NO: 156011 - RNA, 21 nt, Human herpesvirus 6
auuuguucgauugccaaaggc

SEQ ID NO: 156012 - RNA, 12 nt, Human herpesvirus 6
auuuuacaaaga

SEQ ID NO: 156013 - RNA, 17 nt, Human herpesvirus 6
auuuuacaaagaccuau

SEQ ID NO: 156014 - RNA, 17 nt, Human herpesvirus 6
caaaucuggaucaucaa

SEQ ID NO: 156015 - RNA, 21 nt, Human herpesvirus 6
caacaauaacaacaacaauaa

SEQ ID NO: 156016 - RNA, 13 nt, Human herpesvirus 6
caaauguaacuuu

SEQ ID NO: 156017 - RNA, 22 nt, Human herpesvirus 6
caacagaaaaaaaucagaaucc

SEQ ID NO: 156018 - RNA, 15 nt, Human herpesvirus 6
caacacgccagacau

SEQ ID NO: 156019 - RNA, 13 nt, Human herpesvirus 6
caacacccaugga

SEQ ID NO: 156020 - RNA, 14 nt, Human herpesvirus 6
caacacacagugaa

SEQ ID NO: 156021 - RNA, 16 nt, Human herpesvirus 6
caacacagcaugcauu

SEQ ID NO: 156022 - RNA, 21 nt, Human herpesvirus 6
caaauaauaaaaaguaauaua

SEQ ID NO: 156023 - RNA, 16 nt, Human herpesvirus 6
caaaucggacaaugca

SEQ ID NO: 156024 - RNA, 22 nt, Human herpesvirus 6
caaaucucacugucgaaauuca

SEQ ID NO: 156025 - RNA, 16 nt, Human herpesvirus 6
caaaucuccaaaagcg

SEQ ID NO: 156026 - RNA, 17 nt, Human herpesvirus 6
caaaucuccaaaagcgc

SEQ ID NO: 156027 - RNA, 14 nt, Human herpesvirus 6
caaauaaauacaga

SEQ ID NO: 156028 - RNA, 14 nt, Human herpesvirus 6
caaaguaaucucgu

SEQ ID NO: 156029 - RNA, 20 nt, Human herpesvirus 6
caaaguucaguaacauuuaa

SEQ ID NO: 156030 - RNA, 15 nt, Human herpesvirus 6
caaaguauuggugca

SEQ ID NO: 156031 - RNA, 19 nt, Human herpesvirus 6
caacgacuaccacaucacc

SEQ ID NO: 156032 - RNA, 13 nt, Human herpesvirus 6
caacgcaauucca

SEQ ID NO: 156033 - RNA, 14 nt, Human herpesvirus 6
caacauaucacuug

SEQ ID NO: 156034 - RNA, 15 nt, Human herpesvirus 6
caacuaaaccauguc

SEQ ID NO: 156035 - RNA, 17 nt, Human herpesvirus 6
caacgucaugcaaaaca

SEQ ID NO: 156036 - RNA, 21 nt, Human herpesvirus 6
caacuuuugcuuagucuguaa

SEQ ID NO: 156037 - RNA, 21 nt, Human herpesvirus 6
caagacagaccgucaaaucuc

SEQ ID NO: 156038 - RNA, 20 nt, Human herpesvirus 6
caagaaaucauuuugaaaug

SEQ ID NO: 156039 - RNA, 15 nt, Human herpesvirus 6
auggaagaaccaaag

SEQ ID NO: 156040 - RNA, 15 nt, Human herpesvirus 6
auggaaaauugcaaa

SEQ ID NO: 156041 - RNA, 17 nt, Human herpesvirus 6
augcuuugggaccuuca

SEQ ID NO: 156042 - RNA, 22 nt, Human herpesvirus 6
augcuuugguuucaguagugag

SEQ ID NO: 156043 - RNA, 21 nt, Human herpesvirus 6
auggagagagcgugcacacaa

SEQ ID NO: 156044 - RNA, 22 nt, Human herpesvirus 6
auggagagagcgugcacacaaa

SEQ ID NO: 156045 - RNA, 19 nt, Human herpesvirus 6
auggagcccgcucggucuc

SEQ ID NO: 156046 - RNA, 23 nt, Human herpesvirus 6
auuaugaguaugaaacuuacaag

SEQ ID NO: 156047 - RNA, 18 nt, Human herpesvirus 6
auuaugugucaaguuuca

SEQ ID NO: 156048 - RNA, 16 nt, Human herpesvirus 6
auuauucaacauuacu

SEQ ID NO: 156049 - RNA, 16 nt, Human herpesvirus 6
auuauucugucuugau

SEQ ID NO: 156050 - RNA, 17 nt, Human herpesvirus 6
auuauucugucuugaua

SEQ ID NO: 156051 - RNA, 21 nt, Human herpesvirus 6
auucaaaaauguugcauggaa

SEQ ID NO: 156052 - RNA, 20 nt, Human herpesvirus 6
auuauguaauacaucaacaa

SEQ ID NO: 156053 - RNA, 17 nt, Human herpesvirus 6
auuccgacuguguuaca

SEQ ID NO: 156054 - RNA, 18 nt, Human herpesvirus 6
auuccgacuguguuacaa

SEQ ID NO: 156055 - RNA, 17 nt, Human herpesvirus 6
auuccuucaauguucuu

SEQ ID NO: 156056 - RNA, 14 nt, Human herpesvirus 6
auucccaugacgau

SEQ ID NO: 156057 - RNA, 15 nt, Human herpesvirus 6
auuccaagacaugua

SEQ ID NO: 156058 - RNA, 17 nt, Human herpesvirus 6
auuccaugcgaguagau

SEQ ID NO: 156059 - RNA, 16 nt, Human herpesvirus 6
auuccagggaacuuga

SEQ ID NO: 156060 - RNA, 21 nt, Human herpesvirus 6
auuccacgugcuugucucaca

SEQ ID NO: 156061 - RNA, 13 nt, Human herpesvirus 6
auucagagugaau

SEQ ID NO: 156062 - RNA, 12 nt, Human herpesvirus 6
auucacucugaa

SEQ ID NO: 156063 - RNA, 18 nt, Human herpesvirus 6
auucacauuaccucugca

SEQ ID NO: 156064 - RNA, 15 nt, Human herpesvirus 6
auucaacauuccaac

SEQ ID NO: 156065 - RNA, 16 nt, Human herpesvirus 6
auucaaaauaaauacu

SEQ ID NO: 156066 - RNA, 21 nt, Human herpesvirus 6
auucaaaauaaauacuagcua

SEQ ID NO: 156067 - RNA, 16 nt, Human herpesvirus 6
auugugauucugcauu

SEQ ID NO: 156068 - RNA, 18 nt, Human herpesvirus 6
auugucugcaguggucau

SEQ ID NO: 156069 - RNA, 13 nt, Human herpesvirus 6
auugugacaagga

SEQ ID NO: 156070 - RNA, 22 nt, Human herpesvirus 6
auugguuuuuuuuaacaguguc

SEQ ID NO: 156071 - RNA, 15 nt, Human herpesvirus 6
auuguaaaagggaag

SEQ ID NO: 156072 - RNA, 17 nt, Human herpesvirus 6
auugguuaaaaggaaua

SEQ ID NO: 156073 - RNA, 15 nt, Human herpesvirus 6
auuguaaauagguaa

SEQ ID NO: 156074 - RNA, 23 nt, Human herpesvirus 6
auugacucugcauaguguagaaa

SEQ ID NO: 156075 - RNA, 19 nt, Human herpesvirus 6
auugagugugcaucagcau

SEQ ID NO: 156076 - RNA, 16 nt, Human herpesvirus 6
auuguaucgagucuuu

SEQ ID NO: 156077 - RNA, 18 nt, Human herpesvirus 6
auuguaccuagcagcaaa

SEQ ID NO: 156078 - RNA, 21 nt, Human herpesvirus 6
auucgcaagacuacagacucc

SEQ ID NO: 156079 - RNA, 22 nt, Human herpesvirus 6
auucgaugucggaaucuacuga

SEQ ID NO: 156080 - RNA, 12 nt, Human herpesvirus 6
auucuuaccaag

SEQ ID NO: 156081 - RNA, 15 nt, Human herpesvirus 6
auucuuaccaagaaa

SEQ ID NO: 156082 - RNA, 21 nt, Human herpesvirus 6
auucuuccggaauuuugagau

SEQ ID NO: 156083 - RNA, 16 nt, Human herpesvirus 6
auucuuaaagcgugug

SEQ ID NO: 156084 - RNA, 14 nt, Human herpesvirus 6
auucugucuugaua

SEQ ID NO: 156085 - RNA, 15 nt, Human herpesvirus 6
auucugucuugauaa

SEQ ID NO: 156086 - RNA, 19 nt, Human herpesvirus 6
auucuguucuucaucauca

SEQ ID NO: 156087 - RNA, 15 nt, Human herpesvirus 6
auugaccagccagau

SEQ ID NO: 156088 - RNA, 23 nt, Human herpesvirus 6
auugaaagaguguuuggauaaug

SEQ ID NO: 156089 - RNA, 17 nt, Human herpesvirus 6
auuuaucgaccuaaaaa

SEQ ID NO: 156090 - RNA, 19 nt, Human herpesvirus 6
auuucaagagaacaugauu

SEQ ID NO: 156091 - RNA, 17 nt, Human herpesvirus 6
auuucaaugcguuucuu

SEQ ID NO: 156092 - RNA, 14 nt, Human herpesvirus 6
auuuacuguuucuu

SEQ ID NO: 156093 - RNA, 23 nt, Human herpesvirus 6
auuuacuguuucuuugacauuua

SEQ ID NO: 156094 - RNA, 17 nt, Human herpesvirus 6
auuguuaauauuagcca

SEQ ID NO: 156095 - RNA, 14 nt, Human herpesvirus 6
auuucucguuuacu

SEQ ID NO: 156096 - RNA, 20 nt, Human herpesvirus 6
auuucguuugggauguccau

SEQ ID NO: 156097 - RNA, 22 nt, Human herpesvirus 6
auuucgauguggagaagaucua

SEQ ID NO: 156098 - RNA, 19 nt, Human herpesvirus 6
auuucagguucuucaaaaa

SEQ ID NO: 156099 - RNA, 20 nt, Human herpesvirus 6
auuucagguucuucaaaaaa

SEQ ID NO: 156100 - RNA, 18 nt, Human herpesvirus 6
auuucacuuaagccagcu

SEQ ID NO: 156101 - RNA, 16 nt, Human herpesvirus 6
auuuccaugacuguga

SEQ ID NO: 156102 - RNA, 15 nt, Human herpesvirus 6
auuuccaugcauauc

SEQ ID NO: 156103 - RNA, 20 nt, Human herpesvirus 6
auuuccggagauuaaaacau

SEQ ID NO: 156104 - RNA, 15 nt, Human herpesvirus 6
aggguucgacccuaa

SEQ ID NO: 156105 - RNA, 18 nt, Human herpesvirus 6
aggguaugaaacuuuaug

SEQ ID NO: 156106 - RNA, 19 nt, Human herpesvirus 6
agguuuugugggguuccag

SEQ ID NO: 156107 - RNA, 13 nt, Human herpesvirus 6
aguaaaacuauug

SEQ ID NO: 156108 - RNA, 16 nt, Human herpesvirus 6
agguuucgaucaauaa

SEQ ID NO: 156109 - RNA, 23 nt, Human herpesvirus 6
agguuauuuaugaaaauugcucu

SEQ ID NO: 156110 - RNA, 23 nt, Human herpesvirus 6
agguguccuuuguauuuuucgag

SEQ ID NO: 156111 - RNA, 16 nt, Human herpesvirus 6
agguguaaaucaucaa

SEQ ID NO: 156112 - RNA, 22 nt, Human herpesvirus 6
agguguaaaucaucaacguaag

SEQ ID NO: 156113 - RNA, 16 nt, Human herpesvirus 6
agguggaaggcaauca

SEQ ID NO: 156114 - RNA, 20 nt, Human herpesvirus 6
aggaugaagaaaaaaacugu

SEQ ID NO: 156115 - RNA, 20 nt, Human herpesvirus 6
aggcgcuugaaaccacugac

SEQ ID NO: 156116 - RNA, 17 nt, Human herpesvirus 6
aggauagagagauagau

SEQ ID NO: 156117 - RNA, 16 nt, Human herpesvirus 6
aggggcggauccgcuc

SEQ ID NO: 156118 - RNA, 15 nt, Human herpesvirus 6
aggggagagacaucc

SEQ ID NO: 156119 - RNA, 12 nt, Human herpesvirus 6
aggcguugugcu

SEQ ID NO: 156120 - RNA, 17 nt, Human herpesvirus 6
agcuuccgucacaacau

SEQ ID NO: 156121 - RNA, 19 nt, Human herpesvirus 6
agcuuccgucacaacauuu

SEQ ID NO: 156122 - RNA, 23 nt, Human herpesvirus 6
agcuuguggaucaucuccaauaa

SEQ ID NO: 156123 - RNA, 21 nt, Human herpesvirus 6
aggaaaacccagcaugaugau

SEQ ID NO: 156124 - RNA, 16 nt, Human herpesvirus 6
agcuuucauccaugaa

SEQ ID NO: 156125 - RNA, 15 nt, Human herpesvirus 6
aggaaagacaugcau

SEQ ID NO: 156126 - RNA, 22 nt, Human herpesvirus 6
aggaaagaagauuuuccuagua

SEQ ID NO: 156127 - RNA, 14 nt, Human herpesvirus 6
aggaacuggugaga

SEQ ID NO: 156128 - RNA, 22 nt, Human herpesvirus 6
aggaacccagauuuguguucaa

SEQ ID NO: 156129 - RNA, 16 nt, Human herpesvirus 6
aggaacgauaugcugc

SEQ ID NO: 156130 - RNA, 20 nt, Human herpesvirus 6
aggaagauagcagaauagag

SEQ ID NO: 156131 - RNA, 18 nt, Human herpesvirus 6
aggaagaugguaucugaa

SEQ ID NO: 156132 - RNA, 18 nt, Human herpesvirus 6
aggaagaagauacgagaa

SEQ ID NO: 156133 - RNA, 22 nt, Human herpesvirus 6
aggaauccuauucauaacagau

SEQ ID NO: 156134 - RNA, 21 nt, Human herpesvirus 6
agcugucgaguaauuguggau

SEQ ID NO: 156135 - RNA, 13 nt, Human herpesvirus 6
agcuuagggccaa

SEQ ID NO: 156136 - RNA, 19 nt, Human herpesvirus 6
agcugcgcugauccugacu

SEQ ID NO: 156137 - RNA, 17 nt, Human herpesvirus 6
agcauuaacuacaucaa

SEQ ID NO: 156138 - RNA, 22 nt, Human herpesvirus 6
agcauacucaacccaaaaugca

SEQ ID NO: 156139 - RNA, 23 nt, Human herpesvirus 6
agcaucauguucggagauaucau

SEQ ID NO: 156140 - RNA, 16 nt, Human herpesvirus 6
agcagucaguaaugau

SEQ ID NO: 156141 - RNA, 23 nt, Human herpesvirus 6
agcagcuuuggcaaacguaugca

SEQ ID NO: 156142 - RNA, 14 nt, Human herpesvirus 6
agcaggaacccaga

SEQ ID NO: 156143 - RNA, 18 nt, Human herpesvirus 6
aguugggaucuucugcua

SEQ ID NO: 156144 - RNA, 19 nt, Human herpesvirus 6
aguugggaucuucugcuaa

SEQ ID NO: 156145 - RNA, 16 nt, Human herpesvirus 6
auaaaaggaguaugac

SEQ ID NO: 156146 - RNA, 16 nt, Human herpesvirus 6
aguuucaauauaugau

SEQ ID NO: 156147 - RNA, 20 nt, Human herpesvirus 6
aguuucacauauaugaugcu

SEQ ID NO: 156148 - RNA, 22 nt, Human herpesvirus 6
aguuucggcaacugaauuugca

SEQ ID NO: 156149 - RNA, 17 nt, Human herpesvirus 6
aguuuaccuauuuacaa

SEQ ID NO: 156150 - RNA, 21 nt, Human herpesvirus 6
aguuuaccuauuuacaauguu

SEQ ID NO: 156151 - RNA, 13 nt, Human herpesvirus 6
aguuuacuaaaaa

SEQ ID NO: 156152 - RNA, 16 nt, Human herpesvirus 6
aguuuacugugauuuc

SEQ ID NO: 156153 - RNA, 14 nt, Human herpesvirus 6
aguugaagaucuuu

SEQ ID NO: 156154 - RNA, 16 nt, Human herpesvirus 6
aguucuguggccgaag

SEQ ID NO: 156155 - RNA, 21 nt, Human herpesvirus 6
aguucucucacgcgccaacgc

SEQ ID NO: 156156 - RNA, 16 nt, Human herpesvirus 6
aguucuucaacauauc

SEQ ID NO: 156157 - RNA, 13 nt, Human herpesvirus 6
aguucaguaacau

SEQ ID NO: 156158 - RNA, 15 nt, Human herpesvirus 6
aguucaguaacauuu

SEQ ID NO: 156159 - RNA, 16 nt, Human herpesvirus 6
aguucaucagcauuaa

SEQ ID NO: 156160 - RNA, 18 nt, Human herpesvirus 6
auaacauagaaaaaugag

SEQ ID NO: 156161 - RNA, 19 nt, Human herpesvirus 6
auaauaauggcaugcauua

SEQ ID NO: 156162 - RNA, 16 nt, Human herpesvirus 6
auaauaggaacuauga

SEQ ID NO: 156163 - RNA, 17 nt, Human herpesvirus 6
auaaccucacuacugaa

SEQ ID NO: 156164 - RNA, 20 nt, Human herpesvirus 6
auaauaagccuaagaaauuu

SEQ ID NO: 156165 - RNA, 12 nt, Human herpesvirus 6
auaaacaccagc

SEQ ID NO: 156166 - RNA, 15 nt, Human herpesvirus 6
auaaacagagacugg

SEQ ID NO: 156167 - RNA, 17 nt, Human herpesvirus 6
auaaaauuuacaguguu

SEQ ID NO: 156168 - RNA, 18 nt, Human herpesvirus 6
auaaauugguggacaacg

SEQ ID NO: 156169 - RNA, 16 nt, Human herpesvirus 6
auaaauuuaccaccag

SEQ ID NO: 156170 - RNA, 19 nt, Human herpesvirus 6
auaaacugugucuguucaa

SEQ ID NO: 156171 - RNA, 22 nt, Human herpesvirus 6
auaaacguuguagcccgaggau

SEQ ID NO: 156172 - RNA, 18 nt, Human herpesvirus 6
aguuauacuggcaaagca

SEQ ID NO: 156173 - RNA, 14 nt, Human herpesvirus 6
aguuagcagaagaa

SEQ ID NO: 156174 - RNA, 15 nt, Human herpesvirus 6
aguuaauuguguugu

SEQ ID NO: 156175 - RNA, 15 nt, Human herpesvirus 6
aguuaauaggugugg

SEQ ID NO: 156176 - RNA, 15 nt, Human herpesvirus 6
agugugaucaucaca

SEQ ID NO: 156177 - RNA, 15 nt, Human herpesvirus 6
agugugcaucagcau

SEQ ID NO: 156178 - RNA, 16 nt, Human herpesvirus 6
aguguauccggcucau

SEQ ID NO: 156179 - RNA, 16 nt, Human herpesvirus 6
aguguuuuauggagga

SEQ ID NO: 156180 - RNA, 21 nt, Human herpesvirus 6
agugcuuuaaucacaaugauc

SEQ ID NO: 156181 - RNA, 17 nt, Human herpesvirus 6
agugcuuuaucuagcca

SEQ ID NO: 156182 - RNA, 19 nt, Human herpesvirus 6
agugcuucucucgaugaaa

SEQ ID NO: 156183 - RNA, 14 nt, Human herpesvirus 6
agugcgcuggcuua

SEQ ID NO: 156184 - RNA, 16 nt, Human herpesvirus 6
agugcugcaacgggcg

SEQ ID NO: 156185 - RNA, 16 nt, Human herpesvirus 6
aguguagaaaacaucc

SEQ ID NO: 156186 - RNA, 14 nt, Human herpesvirus 6
agugggaccuauaa

SEQ ID NO: 156187 - RNA, 18 nt, Human herpesvirus 6
aguagaaggucaucaugc

SEQ ID NO: 156188 - RNA, 14 nt, Human herpesvirus 6
aguacuuacgugug

SEQ ID NO: 156189 - RNA, 16 nt, Human herpesvirus 6
aguaaauacaauagua

SEQ ID NO: 156190 - RNA, 20 nt, Human herpesvirus 6
aguaaaugaauguguucaca

SEQ ID NO: 156191 - RNA, 22 nt, Human herpesvirus 6
aguaacggaaaacgaguaugaa

SEQ ID NO: 156192 - RNA, 16 nt, Human herpesvirus 6
agugcaacaaaaagcu

SEQ ID NO: 156193 - RNA, 14 nt, Human herpesvirus 6
agugauugugacaa

SEQ ID NO: 156194 - RNA, 19 nt, Human herpesvirus 6
aguaugggugagugcauua

SEQ ID NO: 156195 - RNA, 20 nt, Human herpesvirus 6
aguauauaauguguugguca

SEQ ID NO: 156196 - RNA, 14 nt, Human herpesvirus 6
aguauagucuagca

SEQ ID NO: 156197 - RNA, 15 nt, Human herpesvirus 6
agugagauacguguu

SEQ ID NO: 156198 - RNA, 13 nt, Human herpesvirus 6
augaaaguccuca

SEQ ID NO: 156199 - RNA, 19 nt, Human herpesvirus 6
augaaaugaaugccgacau

SEQ ID NO: 156200 - RNA, 19 nt, Human herpesvirus 6
augaaaguugauacgccag

SEQ ID NO: 156201 - RNA, 17 nt, Human herpesvirus 6
augaaaguuucggaaaa

SEQ ID NO: 156202 - RNA, 21 nt, Human herpesvirus 6
augaaaaaaaaaucaacauuc

SEQ ID NO: 156203 - RNA, 16 nt, Human herpesvirus 6
augaaaauugcucuau

SEQ ID NO: 156204 - RNA, 13 nt, Human herpesvirus 6
augaaacauaaaa

SEQ ID NO: 156205 - RNA, 23 nt, Human herpesvirus 6
aucuugaucaaauaucugaaaca

SEQ ID NO: 156206 - RNA, 17 nt, Human herpesvirus 6
aucuuuauggagggaau

SEQ ID NO: 156207 - RNA, 15 nt, Human herpesvirus 6
aucuugaaaucuacu

SEQ ID NO: 156208 - RNA, 19 nt, Human herpesvirus 6
aucgucggaucaacagaug

SEQ ID NO: 156209 - RNA, 15 nt, Human herpesvirus 6
aucguugauugaugc

SEQ ID NO: 156210 - RNA, 16 nt, Human herpesvirus 6
aucuaauaaaauacac

SEQ ID NO: 156211 - RNA, 13 nt, Human herpesvirus 6
aucgccuuuuacu

SEQ ID NO: 156212 - RNA, 22 nt, Human herpesvirus 6
aucgcuaaguguugacugaucu

SEQ ID NO: 156213 - RNA, 16 nt, Human herpesvirus 6
aucggagauagggcug

SEQ ID NO: 156214 - RNA, 14 nt, Human herpesvirus 6
augaacaaugacau

SEQ ID NO: 156215 - RNA, 16 nt, Human herpesvirus 6
augaauguguucacag

SEQ ID NO: 156216 - RNA, 11 nt, Human herpesvirus 6
augaauuccau

SEQ ID NO: 156217 - RNA, 19 nt, Human herpesvirus 6
augaauucguuacaaucuc

SEQ ID NO: 156218 - RNA, 21 nt, Human herpesvirus 6
augagacuuagcuagaugugu

SEQ ID NO: 156219 - RNA, 16 nt, Human herpesvirus 6
augagaggacagucaa

SEQ ID NO: 156220 - RNA, 15 nt, Human herpesvirus 6
augacuuuucuauca

SEQ ID NO: 156221 - RNA, 16 nt, Human herpesvirus 6
augacuuuucuaucac

SEQ ID NO: 156222 - RNA, 19 nt, Human herpesvirus 6
augacuuuucuaucacuca

SEQ ID NO: 156223 - RNA, 22 nt, Human herpesvirus 6
augaccuggccgaguuuggaca

SEQ ID NO: 156224 - RNA, 13 nt, Human herpesvirus 6
augauaaauugau

SEQ ID NO: 156225 - RNA, 11 nt, Human herpesvirus 6
augagcuuuaa

SEQ ID NO: 156226 - RNA, 22 nt, Human herpesvirus 6
augaggcgcuugaaaccacuga

SEQ ID NO: 156227 - RNA, 17 nt, Human herpesvirus 6
augagcguaagaauuaa

SEQ ID NO: 156228 - RNA, 14 nt, Human herpesvirus 6
augcgaaucugccg

SEQ ID NO: 156229 - RNA, 14 nt, Human herpesvirus 6
augcugaugaauuu

SEQ ID NO: 156230 - RNA, 12 nt, Human herpesvirus 6
augcaucaucaa

SEQ ID NO: 156231 - RNA, 17 nt, Human herpesvirus 6
augccaaauguauugaa

SEQ ID NO: 156232 - RNA, 16 nt, Human herpesvirus 6
augccgacaagcuuuu

SEQ ID NO: 156233 - RNA, 18 nt, Human herpesvirus 6
augauuaucauagacaaa

SEQ ID NO: 156234 - RNA, 12 nt, Human herpesvirus 6
augauuuauaga

SEQ ID NO: 156235 - RNA, 14 nt, Human herpesvirus 6
augaucacuaucag

SEQ ID NO: 156236 - RNA, 19 nt, Human herpesvirus 6
augauauaguuuuugcuua

SEQ ID NO: 156237 - RNA, 15 nt, Human herpesvirus 6
augaucugcuugaua

SEQ ID NO: 156238 - RNA, 17 nt, Human herpesvirus 6
augaucuagcuauagcu

SEQ ID NO: 156239 - RNA, 18 nt, Human herpesvirus 6
augaucuagcuauagcua

SEQ ID NO: 156240 - RNA, 23 nt, Human herpesvirus 6
augaucaacggccuggaguacaa

SEQ ID NO: 156241 - RNA, 15 nt, Human herpesvirus 6
augauacaugcaauu

SEQ ID NO: 156242 - RNA, 16 nt, Human herpesvirus 6
augcaaacugacugua

SEQ ID NO: 156243 - RNA, 22 nt, Human herpesvirus 6
augcaacauccugcguguuaau

SEQ ID NO: 156244 - RNA, 16 nt, Human herpesvirus 6
augcaagccaugacaa

SEQ ID NO: 156245 - RNA, 18 nt, Human herpesvirus 6
augcaagcucaugaacau

SEQ ID NO: 156246 - RNA, 20 nt, Human herpesvirus 6
augauuuuacaaagaccuau

SEQ ID NO: 156247 - RNA, 19 nt, Human herpesvirus 6
augcagacugcuucuuaga

SEQ ID NO: 156248 - RNA, 22 nt, Human herpesvirus 6
augcagaacaacagcauguaau

SEQ ID NO: 156249 - RNA, 22 nt, Human herpesvirus 6
auccauugagugugcaucagca

SEQ ID NO: 156250 - RNA, 12 nt, Human herpesvirus 6
aucauuaccagu

SEQ ID NO: 156251 - RNA, 17 nt, Human herpesvirus 6
auccccaagaggaucca

SEQ ID NO: 156252 - RNA, 23 nt, Human herpesvirus 6
aucccaauaaauauauuuauuga

SEQ ID NO: 156253 - RNA, 18 nt, Human herpesvirus 6
auccuuccaccuacauca

SEQ ID NO: 156254 - RNA, 22 nt, Human herpesvirus 6
aucgauacccggcgaauggaua

SEQ ID NO: 156255 - RNA, 12 nt, Human herpesvirus 6
aucgcaccaucu

SEQ ID NO: 156256 - RNA, 20 nt, Human herpesvirus 6
aucgagccaaagaaacagau

SEQ ID NO: 156257 - RNA, 12 nt, Human herpesvirus 6
aucgacauuugu

SEQ ID NO: 156258 - RNA, 13 nt, Human herpesvirus 6
aucgaccaugugu

SEQ ID NO: 156259 - RNA, 15 nt, Human herpesvirus 6
aucgaccauguguau

SEQ ID NO: 156260 - RNA, 14 nt, Human herpesvirus 6
aucgaccuaaaaaa

SEQ ID NO: 156261 - RNA, 20 nt, Human herpesvirus 6
aucacaccaauggucacaca

SEQ ID NO: 156262 - RNA, 15 nt, Human herpesvirus 6
aucacaugccaugca

SEQ ID NO: 156263 - RNA, 13 nt, Human herpesvirus 6
auauuccagacaa

SEQ ID NO: 156264 - RNA, 15 nt, Human herpesvirus 6
aucaucuccaauaaa

SEQ ID NO: 156265 - RNA, 16 nt, Human herpesvirus 6
aucauguucggagaua

SEQ ID NO: 156266 - RNA, 16 nt, Human herpesvirus 6
aucauggugucuuugu

SEQ ID NO: 156267 - RNA, 19 nt, Human herpesvirus 6
aucaucaaaucggacaaug

SEQ ID NO: 156268 - RNA, 21 nt, Human herpesvirus 6
aucaucaaaucggacaaugca

SEQ ID NO: 156269 - RNA, 17 nt, Human herpesvirus 6
aucauauaauauuucca

SEQ ID NO: 156270 - RNA, 14 nt, Human herpesvirus 6
auagucaaguaugu

SEQ ID NO: 156271 - RNA, 13 nt, Human herpesvirus 6
auagugcguuauc

SEQ ID NO: 156272 - RNA, 19 nt, Human herpesvirus 6
auagucuagcaaccuaaug

SEQ ID NO: 156273 - RNA, 14 nt, Human herpesvirus 6
auaguggcuaugaa

SEQ ID NO: 156274 - RNA, 21 nt, Human herpesvirus 6
auaguugggaucuucugcuaa

SEQ ID NO: 156275 - RNA, 15 nt, Human herpesvirus 6
auaguuacuuugaug

SEQ ID NO: 156276 - RNA, 15 nt, Human herpesvirus 6
auaggaaguaaauac

SEQ ID NO: 156277 - RNA, 20 nt, Human herpesvirus 6
auaggaaucuuguguucuau

SEQ ID NO: 156278 - RNA, 22 nt, Human herpesvirus 6
auaggaaucuuguguucuauca

SEQ ID NO: 156279 - RNA, 23 nt, Human herpesvirus 6
auaggauaacugagcggaaucua

SEQ ID NO: 156280 - RNA, 17 nt, Human herpesvirus 6
auagguguuugcagaug

SEQ ID NO: 156281 - RNA, 19 nt, Human herpesvirus 6
auagcuguccaugagauuu

SEQ ID NO: 156282 - RNA, 24 nt, Human herpesvirus 6
auagcauucuguucuucaucauca

SEQ ID NO: 156283 - RNA, 14 nt, Human herpesvirus 6
auaauuacaauaca

SEQ ID NO: 156284 - RNA, 12 nt, Human herpesvirus 6
auagcagcaaua

SEQ ID NO: 156285 - RNA, 15 nt, Human herpesvirus 6
auagcaggcauugac

SEQ ID NO: 156286 - RNA, 21 nt, Human herpesvirus 6
auagcaggcauugacuauuaa

SEQ ID NO: 156287 - RNA, 13 nt, Human herpesvirus 6
auaauggcaugca

SEQ ID NO: 156288 - RNA, 17 nt, Human herpesvirus 6
auaaucccgucuccuca

SEQ ID NO: 156289 - RNA, 21 nt, Human herpesvirus 6
auaaucccgucuccucaugga

SEQ ID NO: 156290 - RNA, 14 nt, Human herpesvirus 6
auaucauucucaag

SEQ ID NO: 156291 - RNA, 19 nt, Human herpesvirus 6
auaucagcacccuaugcaa

SEQ ID NO: 156292 - RNA, 20 nt, Human herpesvirus 6
auaucagcacccuaugcaag

SEQ ID NO: 156293 - RNA, 15 nt, Human herpesvirus 6
auaucgagccaaaga

SEQ ID NO: 156294 - RNA, 15 nt, Human herpesvirus 6
auaucgauucuguaa

SEQ ID NO: 156295 - RNA, 16 nt, Human herpesvirus 6
auauccuagcauuucc

SEQ ID NO: 156296 - RNA, 14 nt, Human herpesvirus 6
auauccugucgcac

SEQ ID NO: 156297 - RNA, 19 nt, Human herpesvirus 6
auaucgaaauaacgagauc

SEQ ID NO: 156298 - RNA, 13 nt, Human herpesvirus 6
auauggugcgugu

SEQ ID NO: 156299 - RNA, 22 nt, Human herpesvirus 6
auauuaauuacauauagucaau

SEQ ID NO: 156300 - RNA, 16 nt, Human herpesvirus 6
auauuaauuaccuaua

SEQ ID NO: 156301 - RNA, 21 nt, Human herpesvirus 6
auauuaauuaccuauagucaa

SEQ ID NO: 156302 - RNA, 22 nt, Human herpesvirus 6
auauuaauuaccuauagucaau

SEQ ID NO: 156303 - RNA, 23 nt, Human herpesvirus 6
auauuaauuaccuauagucaaug

SEQ ID NO: 156304 - RNA, 17 nt, Human herpesvirus 6
auauaagaaccaacaga

SEQ ID NO: 156305 - RNA, 20 nt, Human herpesvirus 6
auauaaauccgauagccaua

SEQ ID NO: 156306 - RNA, 20 nt, Human herpesvirus 6
auauaacuuuacauuaaaca

SEQ ID NO: 156307 - RNA, 22 nt, Human herpesvirus 6
auauacauuuguacacuuuauc

SEQ ID NO: 156308 - RNA, 18 nt, Human herpesvirus 6
auauagacauugcuuucu

SEQ ID NO: 156309 - RNA, 14 nt, Human herpesvirus 6
auauacuuacuuga

SEQ ID NO: 156310 - RNA, 15 nt, Human herpesvirus 6
auauacuuacuugag

SEQ ID NO: 156311 - RNA, 14 nt, Human herpesvirus 6
auauaucuugaaau

SEQ ID NO: 156312 - RNA, 13 nt, Human herpesvirus 6
auauaucaaagau

SEQ ID NO: 156313 - RNA, 15 nt, Human herpesvirus 6
auauagucaauguug

SEQ ID NO: 156314 - RNA, 21 nt, Human herpesvirus 6
auauauuuaacaacaucuuaa

SEQ ID NO: 156315 - RNA, 17 nt, Human herpesvirus 6
auaucaauuccugugac

SEQ ID NO: 156316 - RNA, 14 nt, Human herpesvirus 6
auauauuugcauac

SEQ ID NO: 156317 - RNA, 19 nt, Human herpesvirus 6
cgaugucggaaucuacuga

SEQ ID NO: 156318 - RNA, 20 nt, Human herpesvirus 6
cgaugucggaaucuacugag

SEQ ID NO: 156319 - RNA, 14 nt, Human herpesvirus 6
cgauucagaccuca

SEQ ID NO: 156320 - RNA, 14 nt, Human herpesvirus 6
cgauugccaaaggc

SEQ ID NO: 156321 - RNA, 23 nt, Human herpesvirus 6
cgauauuaacgacuucgacuuca

SEQ ID NO: 156322 - RNA, 22 nt, Human herpesvirus 6
cgauaucagcacccuaugcaag

SEQ ID NO: 156323 - RNA, 18 nt, Human herpesvirus 6
cgauggaagaaccaaaga

SEQ ID NO: 156324 - RNA, 17 nt, Human herpesvirus 6
cgaucuuauauuaaaga

SEQ ID NO: 156325 - RNA, 22 nt, Human herpesvirus 6
cgaugauuauucugucuugaua

SEQ ID NO: 156326 - RNA, 22 nt, Human herpesvirus 6
cgauacguuucuguccaaugac

SEQ ID NO: 156327 - RNA, 16 nt, Human herpesvirus 6
cgauacaccccguuga

SEQ ID NO: 156328 - RNA, 16 nt, Human herpesvirus 6
cgauagucaugcacuc

SEQ ID NO: 156329 - RNA, 17 nt, Human herpesvirus 6
cgauagcagcucugcaa

SEQ ID NO: 156330 - RNA, 19 nt, Human herpesvirus 6
cgauaaacuccuuacucau

SEQ ID NO: 156331 - RNA, 19 nt, Human herpesvirus 6
cgaggcgaaggagauuuca

SEQ ID NO: 156332 - RNA, 12 nt, Human herpesvirus 6
cgacagaugugu

SEQ ID NO: 156333 - RNA, 19 nt, Human herpesvirus 6
cgacucccggcccagagac

SEQ ID NO: 156334 - RNA, 22 nt, Human herpesvirus 6
cgacuuuuaaaucugagguuuc

SEQ ID NO: 156335 - RNA, 16 nt, Human herpesvirus 6
cgagaaacgcccugaa

SEQ ID NO: 156336 - RNA, 17 nt, Human herpesvirus 6
cgagagcugacuuaaag

SEQ ID NO: 156337 - RNA, 19 nt, Human herpesvirus 6
cgagagcugacuuaaaguu

SEQ ID NO: 156338 - RNA, 20 nt, Human herpesvirus 6
cgagaauacgcuguguuuac

SEQ ID NO: 156339 - RNA, 15 nt, Human herpesvirus 6
cgagcccucguccaa

SEQ ID NO: 156340 - RNA, 19 nt, Human herpesvirus 6
cgagcccucguccaaauca

SEQ ID NO: 156341 - RNA, 19 nt, Human herpesvirus 6
cgaagaagagccuuuaacc

SEQ ID NO: 156342 - RNA, 18 nt, Human herpesvirus 6
cgaacguagacagucaca

SEQ ID NO: 156343 - RNA, 15 nt, Human herpesvirus 6
cgaaauucaccagau

SEQ ID NO: 156344 - RNA, 16 nt, Human herpesvirus 6
cgaaccuagauucauu

SEQ ID NO: 156345 - RNA, 12 nt, Human herpesvirus 6
cgaagucuuugg

SEQ ID NO: 156346 - RNA, 14 nt, Human herpesvirus 6
cgaagugaagaauu

SEQ ID NO: 156347 - RNA, 19 nt, Human herpesvirus 6
cgaauacuuucaugauucu

SEQ ID NO: 156348 - RNA, 23 nt, Human herpesvirus 6
cgaaaccaucgucauaaccucau

SEQ ID NO: 156349 - RNA, 17 nt, Human herpesvirus 6
cgaaacgaaagcugaug

SEQ ID NO: 156350 - RNA, 23 nt, Human herpesvirus 6
cgaaagcugaugcgcaacugaua

SEQ ID NO: 156351 - RNA, 15 nt, Human herpesvirus 6
ccuuuuacuuacauc

SEQ ID NO: 156352 - RNA, 22 nt, Human herpesvirus 6
ccuuuuuuacuaguuuucacac

SEQ ID NO: 156353 - RNA, 23 nt, Human herpesvirus 6
cgaaaaacauuucuuacacaaau

SEQ ID NO: 156354 - RNA, 16 nt, Human herpesvirus 6
cgaaaauugaugaugu

SEQ ID NO: 156355 - RNA, 16 nt, Human herpesvirus 6
ccuuuuacaauacaca

SEQ ID NO: 156356 - RNA, 18 nt, Human herpesvirus 6
ccuuugugugauaucauu

SEQ ID NO: 156357 - RNA, 23 nt, Human herpesvirus 6
ccuuugugugauaucauucucaa

SEQ ID NO: 156358 - RNA, 17 nt, Human herpesvirus 6
ccuggaaaaacugacug

SEQ ID NO: 156359 - RNA, 19 nt, Human herpesvirus 6
ccuggaaaaacugacugac

SEQ ID NO: 156360 - RNA, 14 nt, Human herpesvirus 6
ccuggcacggugcc

SEQ ID NO: 156361 - RNA, 14 nt, Human herpesvirus 6
ccuucagacaucca

SEQ ID NO: 156362 - RNA, 22 nt, Human herpesvirus 6
ccugggugaguuuuaucacuuu

SEQ ID NO: 156363 - RNA, 19 nt, Human herpesvirus 6
ccugggaaaagggugacac

SEQ ID NO: 156364 - RNA, 15 nt, Human herpesvirus 6
ccuucugccugaaaa

SEQ ID NO: 156365 - RNA, 18 nt, Human herpesvirus 6
ccuugggacauguauauu

SEQ ID NO: 156366 - RNA, 18 nt, Human herpesvirus 6
ccuugcgguaaauggcau

SEQ ID NO: 156367 - RNA, 19 nt, Human herpesvirus 6
ccucgcucacaauauuuca

SEQ ID NO: 156368 - RNA, 16 nt, Human herpesvirus 6
ccucgguccaaccccu

SEQ ID NO: 156369 - RNA, 15 nt, Human herpesvirus 6
ccucguggaguaaaa

SEQ ID NO: 156370 - RNA, 13 nt, Human herpesvirus 6
ccucguuguuuca

SEQ ID NO: 156371 - RNA, 16 nt, Human herpesvirus 6
ccucguuguuucauaa

SEQ ID NO: 156372 - RNA, 13 nt, Human herpesvirus 6
ccucugaaacacu

SEQ ID NO: 156373 - RNA, 19 nt, Human herpesvirus 6
ccucuccuauaaauacuga

SEQ ID NO: 156374 - RNA, 12 nt, Human herpesvirus 6
ccucacuacuga

SEQ ID NO: 156375 - RNA, 21 nt, Human herpesvirus 6
ccgguuuggugguaaugacua

SEQ ID NO: 156376 - RNA, 12 nt, Human herpesvirus 6
ccgggugcuccg

SEQ ID NO: 156377 - RNA, 20 nt, Human herpesvirus 6
ccguaaacaaauucuuacau

SEQ ID NO: 156378 - RNA, 19 nt, Human herpesvirus 6
ccguauaucuacugcaguc

SEQ ID NO: 156379 - RNA, 20 nt, Human herpesvirus 6
ccgguuacggaaaagaugag

SEQ ID NO: 156380 - RNA, 15 nt, Human herpesvirus 6
ccgugauguuuuccu

SEQ ID NO: 156381 - RNA, 16 nt, Human herpesvirus 6
ccuaucuagaucaaua

SEQ ID NO: 156382 - RNA, 15 nt, Human herpesvirus 6
ccuauugguuugcau

SEQ ID NO: 156383 - RNA, 16 nt, Human herpesvirus 6
ccuauagucaauguug

SEQ ID NO: 156384 - RNA, 15 nt, Human herpesvirus 6
ccuauaaauacugaa

SEQ ID NO: 156385 - RNA, 22 nt, Human herpesvirus 6
ccggcugagcggaguggagaua

SEQ ID NO: 156386 - RNA, 21 nt, Human herpesvirus 6
ccgcauaucgcccccauacac

SEQ ID NO: 156387 - RNA, 19 nt, Human herpesvirus 6
ccgcagaggcggcgaccgc

SEQ ID NO: 156388 - RNA, 22 nt, Human herpesvirus 6
ccgaauugugccguuuaugcga

SEQ ID NO: 156389 - RNA, 22 nt, Human herpesvirus 6
ccgaggggcggauccgcuccgc

SEQ ID NO: 156390 - RNA, 14 nt, Human herpesvirus 6
ccgaugaauucugg

SEQ ID NO: 156391 - RNA, 17 nt, Human herpesvirus 6
ccgauuuuucagugucu

SEQ ID NO: 156392 - RNA, 19 nt, Human herpesvirus 6
cccaaguucaucagcauua

SEQ ID NO: 156393 - RNA, 14 nt, Human herpesvirus 6
ccgacaauguaaaa

SEQ ID NO: 156394 - RNA, 14 nt, Human herpesvirus 6
cauguaacuaagca

SEQ ID NO: 156395 - RNA, 13 nt, Human herpesvirus 6
cauggugaaagac

SEQ ID NO: 156396 - RNA, 16 nt, Human herpesvirus 6
caugacugugagguua

SEQ ID NO: 156397 - RNA, 18 nt, Human herpesvirus 6
caugaucucacgucacag

SEQ ID NO: 156398 - RNA, 12 nt, Human herpesvirus 6
caugaugaucug

SEQ ID NO: 156399 - RNA, 19 nt, Human herpesvirus 6
caugcaauaggccauaacg

SEQ ID NO: 156400 - RNA, 23 nt, Human herpesvirus 6
caugcaacccgccacucuacaau

SEQ ID NO: 156401 - RNA, 16 nt, Human herpesvirus 6
caugcaaaacagacuu

SEQ ID NO: 156402 - RNA, 18 nt, Human herpesvirus 6
caugcaacacaacaaaca

SEQ ID NO: 156403 - RNA, 20 nt, Human herpesvirus 6
caugcauugcgagauuguaa

SEQ ID NO: 156404 - RNA, 16 nt, Human herpesvirus 6
cauuugcugaugcgau

SEQ ID NO: 156405 - RNA, 21 nt, Human herpesvirus 6
cauuguuuuugcaugugauaa

SEQ ID NO: 156406 - RNA, 15 nt, Human herpesvirus 6
cauuguuugaauaac

SEQ ID NO: 156407 - RNA, 22 nt, Human herpesvirus 6
cauuuugaaaugucgaaucuca

SEQ ID NO: 156408 - RNA, 16 nt, Human herpesvirus 6
cauuguauauguguua

SEQ ID NO: 156409 - RNA, 17 nt, Human herpesvirus 6
cauugaauaacgguguu

SEQ ID NO: 156410 - RNA, 21 nt, Human herpesvirus 6
cauugagugugcaucagcaua

SEQ ID NO: 156411 - RNA, 21 nt, Human herpesvirus 6
cauucuagauacggugucaca

SEQ ID NO: 156412 - RNA, 22 nt, Human herpesvirus 6
cauucuagauacggugucacac

SEQ ID NO: 156413 - RNA, 12 nt, Human herpesvirus 6
cauucaacaucc

SEQ ID NO: 156414 - RNA, 16 nt, Human herpesvirus 6
cauucaacauuccaac

SEQ ID NO: 156415 - RNA, 16 nt, Human herpesvirus 6
cauuccucguucuacc

SEQ ID NO: 156416 - RNA, 22 nt, Human herpesvirus 6
cauuccucguucuaccaugugc

SEQ ID NO: 156417 - RNA, 22 nt, Human herpesvirus 6
caucaguaacaccguccuuccu

SEQ ID NO: 156418 - RNA, 22 nt, Human herpesvirus 6
caucaucgccuuuuacuuacau

SEQ ID NO: 156419 - RNA, 15 nt, Human herpesvirus 6
caucaacuacauuaa

SEQ ID NO: 156420 - RNA, 16 nt, Human herpesvirus 6
caucaacuacauuaac

SEQ ID NO: 156421 - RNA, 17 nt, Human herpesvirus 6
caucaacugacuuauaa

SEQ ID NO: 156422 - RNA, 21 nt, Human herpesvirus 6
caucaacugacuuauaaguca

SEQ ID NO: 156423 - RNA, 23 nt, Human herpesvirus 6
caucaaucucuaugagacuguuu

SEQ ID NO: 156424 - RNA, 11 nt, Human herpesvirus 6
cauaugucucg

SEQ ID NO: 156425 - RNA, 20 nt, Human herpesvirus 6
cauaugucuguuauaacaca

SEQ ID NO: 156426 - RNA, 18 nt, Human herpesvirus 6
cauauuauuaacaaugaa

SEQ ID NO: 156427 - RNA, 20 nt, Human herpesvirus 6
caucaaaucggacaaugcag

SEQ ID NO: 156428 - RNA, 23 nt, Human herpesvirus 6
caggacaaucgucggaucaacag

SEQ ID NO: 156429 - RNA, 11 nt, Human herpesvirus 6
caggaggcuau

SEQ ID NO: 156430 - RNA, 22 nt, Human herpesvirus 6
caggaugaagaaaaaaacugug

SEQ ID NO: 156431 - RNA, 14 nt, Human herpesvirus 6
caugaaacucuuug

SEQ ID NO: 156432 - RNA, 22 nt, Human herpesvirus 6
caucuuuuucuucaggugucuc

SEQ ID NO: 156433 - RNA, 14 nt, Human herpesvirus 6
caucgauccaaaag

SEQ ID NO: 156434 - RNA, 13 nt, Human herpesvirus 6
caucuuaccuuca

SEQ ID NO: 156435 - RNA, 14 nt, Human herpesvirus 6
caucuuaccuucaa

SEQ ID NO: 156436 - RNA, 16 nt, Human herpesvirus 6
caucuuaaaagaccac

SEQ ID NO: 156437 - RNA, 19 nt, Human herpesvirus 6
caucccagauacauaaaca

SEQ ID NO: 156438 - RNA, 15 nt, Human herpesvirus 6
cauccguuaguaaau

SEQ ID NO: 156439 - RNA, 14 nt, Human herpesvirus 6
cauccgucauacaa

SEQ ID NO: 156440 - RNA, 12 nt, Human herpesvirus 6
caucauuccagg

SEQ ID NO: 156441 - RNA, 14 nt, Human herpesvirus 6
caucauuccaggga

SEQ ID NO: 156442 - RNA, 22 nt, Human herpesvirus 6
caucauuccagggaacuugaug

SEQ ID NO: 156443 - RNA, 18 nt, Human herpesvirus 6
cauccaaaauacacuaac

SEQ ID NO: 156444 - RNA, 21 nt, Human herpesvirus 6
cauccagaaaagcaaacaugc

SEQ ID NO: 156445 - RNA, 17 nt, Human herpesvirus 6
ccagauacuacacaaac

SEQ ID NO: 156446 - RNA, 20 nt, Human herpesvirus 6
ccagauacuacacaaacgaa

SEQ ID NO: 156447 - RNA, 13 nt, Human herpesvirus 6
ccacuugaaccaa

SEQ ID NO: 156448 - RNA, 15 nt, Human herpesvirus 6
ccagauguguacaac

SEQ ID NO: 156449 - RNA, 23 nt, Human herpesvirus 6
ccagauucgguugcuuauaugca

SEQ ID NO: 156450 - RNA, 12 nt, Human herpesvirus 6
ccagcauguuuu

SEQ ID NO: 156451 - RNA, 20 nt, Human herpesvirus 6
ccacgcauagacaaaccagc

SEQ ID NO: 156452 - RNA, 13 nt, Human herpesvirus 6
ccacggaagaaga

SEQ ID NO: 156453 - RNA, 21 nt, Human herpesvirus 6
ccaccgagauccccaagagga

SEQ ID NO: 156454 - RNA, 19 nt, Human herpesvirus 6
ccacguccucgugcucugc

SEQ ID NO: 156455 - RNA, 21 nt, Human herpesvirus 6
ccaucugcgaaaaagaauugg

SEQ ID NO: 156456 - RNA, 14 nt, Human herpesvirus 6
ccaugacgauucaa

SEQ ID NO: 156457 - RNA, 20 nt, Human herpesvirus 6
ccaugacugugagguuauuu

SEQ ID NO: 156458 - RNA, 15 nt, Human herpesvirus 6
cccaagaggauccau

SEQ ID NO: 156459 - RNA, 23 nt, Human herpesvirus 6
cccaagaacgggaugacuggcca

SEQ ID NO: 156460 - RNA, 18 nt, Human herpesvirus 6
ccagugcuuuaaucacaa

SEQ ID NO: 156461 - RNA, 18 nt, Human herpesvirus 6
ccaguguggauaucucaa

SEQ ID NO: 156462 - RNA, 21 nt, Human herpesvirus 6
ccaguuaauaagauguugcaa

SEQ ID NO: 156463 - RNA, 23 nt, Human herpesvirus 6
ccaguuaauaagauguugcaaua

SEQ ID NO: 156464 - RNA, 13 nt, Human herpesvirus 6
ccaguauugaaga

SEQ ID NO: 156465 - RNA, 13 nt, Human herpesvirus 6
ccauaaaaauauc

SEQ ID NO: 156466 - RNA, 16 nt, Human herpesvirus 6
ccauaaguuaauucca

SEQ ID NO: 156467 - RNA, 23 nt, Human herpesvirus 6
ccacagccuguucuugcuaccga

SEQ ID NO: 156468 - RNA, 13 nt, Human herpesvirus 6
ccacacgccaguc

SEQ ID NO: 156469 - RNA, 23 nt, Human herpesvirus 6
ccacaccaucuucagcucaaaca

SEQ ID NO: 156470 - RNA, 17 nt, Human herpesvirus 6
ccaacgcgacaggguga

SEQ ID NO: 156471 - RNA, 17 nt, Human herpesvirus 6
ccaacgcuaaauauauc

SEQ ID NO: 156472 - RNA, 19 nt, Human herpesvirus 6
ccaacgcuaaauauaucaa

SEQ ID NO: 156473 - RNA, 20 nt, Human herpesvirus 6
ccaacgaaaagcaucucaaa

SEQ ID NO: 156474 - RNA, 12 nt, Human herpesvirus 6
aaaauguugcau

SEQ ID NO: 156475 - RNA, 11 nt, Human herpesvirus 6
ccaccagagac

SEQ ID NO: 156476 - RNA, 15 nt, Human herpesvirus 6
ccacccaucuccuca

SEQ ID NO: 156477 - RNA, 13 nt, Human herpesvirus 6
aaaaugaccucau

SEQ ID NO: 156478 - RNA, 18 nt, Human herpesvirus 6
aaaaugccucuccuauaa

SEQ ID NO: 156479 - RNA, 15 nt, Human herpesvirus 6
aaaaugcaacgcauc

SEQ ID NO: 156480 - RNA, 19 nt, Human herpesvirus 6
aaaaugcaacgcaucacac

SEQ ID NO: 156481 - RNA, 23 nt, Human herpesvirus 6
aaaaugcaacgcaucacacauac

SEQ ID NO: 156482 - RNA, 16 nt, Human herpesvirus 6
aaaauaauuacauuaa

SEQ ID NO: 156483 - RNA, 13 nt, Human herpesvirus 6
ccacauguguauu

SEQ ID NO: 156484 - RNA, 21 nt, Human herpesvirus 6
aaaauaucgcgcaaaccauaa

SEQ ID NO: 156485 - RNA, 14 nt, Human herpesvirus 6
aaaaucagaaucca

SEQ ID NO: 156486 - RNA, 15 nt, Human herpesvirus 6
aaaauagaagucuca

SEQ ID NO: 156487 - RNA, 17 nt, Human herpesvirus 6
aaaauauuaauuaccua

SEQ ID NO: 156488 - RNA, 14 nt, Human herpesvirus 6
cuucuuuuuaacua

SEQ ID NO: 156489 - RNA, 20 nt, Human herpesvirus 6
cuugaaaagcccuuacuuga

SEQ ID NO: 156490 - RNA, 16 nt, Human herpesvirus 6
cuucgcggugcagaac

SEQ ID NO: 156491 - RNA, 22 nt, Human herpesvirus 6
cuucgcggugcagaacaucuca

SEQ ID NO: 156492 - RNA, 14 nt, Human herpesvirus 6
cuucccuuuuacaa

SEQ ID NO: 156493 - RNA, 17 nt, Human herpesvirus 6
cuucggaugcaccuguu

SEQ ID NO: 156494 - RNA, 17 nt, Human herpesvirus 6
cuucgcugcuaucgucu

SEQ ID NO: 156495 - RNA, 20 nt, Human herpesvirus 6
cuucuaacaauaauugcauu

SEQ ID NO: 156496 - RNA, 20 nt, Human herpesvirus 6
cuugauauaaucccgucucc

SEQ ID NO: 156497 - RNA, 23 nt, Human herpesvirus 6
cuugauauaaucccgucuccuca

SEQ ID NO: 156498 - RNA, 15 nt, Human herpesvirus 6
cuugaucaaauaucu

SEQ ID NO: 156499 - RNA, 18 nt, Human herpesvirus 6
cuugaucaaauaucugaa

SEQ ID NO: 156500 - RNA, 15 nt, Human herpesvirus 6
cuugaucacaacaua

SEQ ID NO: 156501 - RNA, 16 nt, Human herpesvirus 6
cuugggacauguauau

SEQ ID NO: 156502 - RNA, 20 nt, Human herpesvirus 6
cuugggugugcauugugaca

SEQ ID NO: 156503 - RNA, 18 nt, Human herpesvirus 6
cuuggcuaucgcaaugau

SEQ ID NO: 156504 - RNA, 22 nt, Human herpesvirus 6
cuuggaaaauaacgauggagua

SEQ ID NO: 156505 - RNA, 17 nt, Human herpesvirus 6
cuugcgauacauguuug

SEQ ID NO: 156506 - RNA, 20 nt, Human herpesvirus 6
cuugcgauuguucugcgaua

SEQ ID NO: 156507 - RNA, 20 nt, Human herpesvirus 6
cuuauaauaggaacuaugaa

SEQ ID NO: 156508 - RNA, 17 nt, Human herpesvirus 6
cuuauaacaagcacuga

SEQ ID NO: 156509 - RNA, 16 nt, Human herpesvirus 6
cuuagacuuggugaug

SEQ ID NO: 156510 - RNA, 15 nt, Human herpesvirus 6
cuuagagacgugaua

SEQ ID NO: 156511 - RNA, 22 nt, Human herpesvirus 6
cuuagagacgugauacuauaaa

SEQ ID NO: 156512 - RNA, 17 nt, Human herpesvirus 6
cuuagcuagaugugucu

SEQ ID NO: 156513 - RNA, 18 nt, Human herpesvirus 6
cuuagcauauuuuggcaa

SEQ ID NO: 156514 - RNA, 17 nt, Human herpesvirus 6
cuguccaucuucagaca

SEQ ID NO: 156515 - RNA, 21 nt, Human herpesvirus 6
cuguccaugagauuuucaauc

SEQ ID NO: 156516 - RNA, 23 nt, Human herpesvirus 6
cuguauuaaugucacugucgaau

SEQ ID NO: 156517 - RNA, 14 nt, Human herpesvirus 6
cuguccucuuugaa

SEQ ID NO: 156518 - RNA, 15 nt, Human herpesvirus 6
cuuacguugaugauu

SEQ ID NO: 156519 - RNA, 22 nt, Human herpesvirus 6
cuuacgguguaucggagacuac

SEQ ID NO: 156520 - RNA, 14 nt, Human herpesvirus 6
cuuacguaugugaa

SEQ ID NO: 156521 - RNA, 13 nt, Human herpesvirus 6
cuucagacaucca

SEQ ID NO: 156522 - RNA, 19 nt, Human herpesvirus 6
cuucagacauccagaaaag

SEQ ID NO: 156523 - RNA, 23 nt, Human herpesvirus 6
cuucaccugucucugcuuuaugg

SEQ ID NO: 156524 - RNA, 23 nt, Human herpesvirus 6
cuucaguagagacuuuacagucu

SEQ ID NO: 156525 - RNA, 12 nt, Human herpesvirus 6
cuucagcucaaa

SEQ ID NO: 156526 - RNA, 21 nt, Human herpesvirus 6
cuucagcucaaacaaauggaa

SEQ ID NO: 156527 - RNA, 14 nt, Human herpesvirus 6
cuuauuaauuuccu

SEQ ID NO: 156528 - RNA, 22 nt, Human herpesvirus 6
cuuauucaaaaauguugcaugg

SEQ ID NO: 156529 - RNA, 18 nt, Human herpesvirus 6
cuuauuucaaugcguuuc

SEQ ID NO: 156530 - RNA, 21 nt, Human herpesvirus 6
cuucaaacaccucacaaucua

SEQ ID NO: 156531 - RNA, 19 nt, Human herpesvirus 6
cuucaaucguugauugaug

SEQ ID NO: 156532 - RNA, 13 nt, Human herpesvirus 6
cuggaaaauaaca

SEQ ID NO: 156533 - RNA, 12 nt, Human herpesvirus 6
cugcauaugcag

SEQ ID NO: 156534 - RNA, 14 nt, Human herpesvirus 6
cugcauaugcagac

SEQ ID NO: 156535 - RNA, 16 nt, Human herpesvirus 6
cugcagugauauggaa

SEQ ID NO: 156536 - RNA, 22 nt, Human herpesvirus 6
cugaugauggacgucaugugug

SEQ ID NO: 156537 - RNA, 19 nt, Human herpesvirus 6
cugguauccaauuaacaca

SEQ ID NO: 156538 - RNA, 19 nt, Human herpesvirus 6
cuggucugcuugcaaauau

SEQ ID NO: 156539 - RNA, 19 nt, Human herpesvirus 6
cuccuauuuacgguuucag

SEQ ID NO: 156540 - RNA, 20 nt, Human herpesvirus 6
cuccgcacguuaucaaugau

SEQ ID NO: 156541 - RNA, 23 nt, Human herpesvirus 6
cuccggggggaaaccucaaaaau

SEQ ID NO: 156542 - RNA, 13 nt, Human herpesvirus 6
cuccuacauucuc

SEQ ID NO: 156543 - RNA, 16 nt, Human herpesvirus 6
cuccggccccagagac

SEQ ID NO: 156544 - RNA, 15 nt, Human herpesvirus 6
cucuuuuuaauucca

SEQ ID NO: 156545 - RNA, 16 nt, Human herpesvirus 6
cucuuuuuaauuccaa

SEQ ID NO: 156546 - RNA, 16 nt, Human herpesvirus 6
cugaaaauaaacaguu

SEQ ID NO: 156547 - RNA, 19 nt, Human herpesvirus 6
cucuuuauagagcaacuca

SEQ ID NO: 156548 - RNA, 20 nt, Human herpesvirus 6
cucuuuauagagcaacucau

SEQ ID NO: 156549 - RNA, 23 nt, Human herpesvirus 6
cugaaagaaucgguaaacuucag

SEQ ID NO: 156550 - RNA, 22 nt, Human herpesvirus 6
cugacauggaagacaaauuaau

SEQ ID NO: 156551 - RNA, 19 nt, Human herpesvirus 6
cugaaucuuccuuauaaca

SEQ ID NO: 156552 - RNA, 22 nt, Human herpesvirus 6
cugagaguaaauauuucuaaac

SEQ ID NO: 156553 - RNA, 19 nt, Human herpesvirus 6
cugagaugacaucugcaaa

SEQ ID NO: 156554 - RNA, 22 nt, Human herpesvirus 6
cugagaugacaucugcaaaaaa

SEQ ID NO: 156555 - RNA, 19 nt, Human herpesvirus 6
cugagacucuacgaucuua

SEQ ID NO: 156556 - RNA, 15 nt, Human herpesvirus 6
cugagaccuugucaa

SEQ ID NO: 156557 - RNA, 14 nt, Human herpesvirus 6
cugagcuacacgau

SEQ ID NO: 156558 - RNA, 22 nt, Human herpesvirus 6
cugagccuucugccugaaaaug

SEQ ID NO: 156559 - RNA, 21 nt, Human herpesvirus 6
cuaauacauauaaaagcuaaa

SEQ ID NO: 156560 - RNA, 19 nt, Human herpesvirus 6
cuaacauagcgaauuugaa

SEQ ID NO: 156561 - RNA, 24 nt, Human herpesvirus 6
cuaaauuucuacaaaaauacugca

SEQ ID NO: 156562 - RNA, 19 nt, Human herpesvirus 6
cuaacaauaauugcauucu

SEQ ID NO: 156563 - RNA, 13 nt, Human herpesvirus 6
cuaaauuggucuc

SEQ ID NO: 156564 - RNA, 18 nt, Human herpesvirus 6
cguuacgacgaacaauau

SEQ ID NO: 156565 - RNA, 14 nt, Human herpesvirus 6
cguuauaaaaucua

SEQ ID NO: 156566 - RNA, 18 nt, Human herpesvirus 6
cguuaaucuaauaaaaua

SEQ ID NO: 156567 - RNA, 15 nt, Human herpesvirus 6
cguucaucauuccag

SEQ ID NO: 156568 - RNA, 22 nt, Human herpesvirus 6
cguuccaaaguaguuaccguga

SEQ ID NO: 156569 - RNA, 22 nt, Human herpesvirus 6
cguuccacgcauagacaaacca

SEQ ID NO: 156570 - RNA, 17 nt, Human herpesvirus 6
cguucguuguaugugug

SEQ ID NO: 156571 - RNA, 14 nt, Human herpesvirus 6
cuaaauacauucac

SEQ ID NO: 156572 - RNA, 16 nt, Human herpesvirus 6
cuaaauacauucacau

SEQ ID NO: 156573 - RNA, 18 nt, Human herpesvirus 6
cguaaucgcgguccaaca

SEQ ID NO: 156574 - RNA, 21 nt, Human herpesvirus 6
cguaauggaaacgacaaagaa

SEQ ID NO: 156575 - RNA, 12 nt, Human herpesvirus 6
cguaaugugcaa

SEQ ID NO: 156576 - RNA, 14 nt, Human herpesvirus 6
cguaaugugcaaag

SEQ ID NO: 156577 - RNA, 19 nt, Human herpesvirus 6
cguaaguggguacaaugaa

SEQ ID NO: 156578 - RNA, 18 nt, Human herpesvirus 6
cguaagaauuaaugucca

SEQ ID NO: 156579 - RNA, 19 nt, Human herpesvirus 6
cgguuggaugccugcauau

SEQ ID NO: 156580 - RNA, 14 nt, Human herpesvirus 6
cgugacggcgacaa

SEQ ID NO: 156581 - RNA, 14 nt, Human herpesvirus 6
cgugccaguucaca

SEQ ID NO: 156582 - RNA, 17 nt, Human herpesvirus 6
cguguuagaauguauac

SEQ ID NO: 156583 - RNA, 20 nt, Human herpesvirus 6
cgugugaaauuuuugacuga

SEQ ID NO: 156584 - RNA, 18 nt, Human herpesvirus 6
cggccggagugccguuga

SEQ ID NO: 156585 - RNA, 18 nt, Human herpesvirus 6
cggcgcggagcccaagaa

SEQ ID NO: 156586 - RNA, 20 nt, Human herpesvirus 6
cggagugccguugagugccu

SEQ ID NO: 156587 - RNA, 20 nt, Human herpesvirus 6
cggauuguuaauauuagcca

SEQ ID NO: 156588 - RNA, 15 nt, Human herpesvirus 6
cgcaacucuaccugg

SEQ ID NO: 156589 - RNA, 23 nt, Human herpesvirus 6
cgcaaacgugaauauaucaaauu

SEQ ID NO: 156590 - RNA, 15 nt, Human herpesvirus 6
cgauuguucugcgau

SEQ ID NO: 156591 - RNA, 19 nt, Human herpesvirus 6
cgggcuuugugaaauaucg

SEQ ID NO: 156592 - RNA, 17 nt, Human herpesvirus 6
cgggaucguagguaauu

SEQ ID NO: 156593 - RNA, 16 nt, Human herpesvirus 6
cgggagcaacuauaau

SEQ ID NO: 156594 - RNA, 12 nt, Human herpesvirus 6
cgggacaaaacc

SEQ ID NO: 156595 - RNA, 22 nt, Human herpesvirus 6
cuccaauccaacgaauacuucu

SEQ ID NO: 156596 - RNA, 16 nt, Human herpesvirus 6
cucccggcccagagac

SEQ ID NO: 156597 - RNA, 16 nt, Human herpesvirus 6
cucaucgcgacuaaaa

SEQ ID NO: 156598 - RNA, 15 nt, Human herpesvirus 6
cucaugaguguuuaa

SEQ ID NO: 156599 - RNA, 19 nt, Human herpesvirus 6
cucacugucgaaauucacc

SEQ ID NO: 156600 - RNA, 23 nt, Human herpesvirus 6
cucacugucgaaauucaccagau

SEQ ID NO: 156601 - RNA, 14 nt, Human herpesvirus 6
cucagagaaacgga

SEQ ID NO: 156602 - RNA, 22 nt, Human herpesvirus 6
cuauuuguuuaaugcauucaca

SEQ ID NO: 156603 - RNA, 20 nt, Human herpesvirus 6
cuauuuuuccgaaaggugaa

SEQ ID NO: 156604 - RNA, 20 nt, Human herpesvirus 6
cuauuuuuuuuaauguugag

SEQ ID NO: 156605 - RNA, 14 nt, Human herpesvirus 6
cuauuuaacaucca

SEQ ID NO: 156606 - RNA, 17 nt, Human herpesvirus 6
cuauauccaaagacuca

SEQ ID NO: 156607 - RNA, 21 nt, Human herpesvirus 6
cuauauuuuuaccgaaccaua

SEQ ID NO: 156608 - RNA, 17 nt, Human herpesvirus 6
cuauccgcuaaaacgac

SEQ ID NO: 156609 - RNA, 14 nt, Human herpesvirus 6
cuaucgcaaugauu

SEQ ID NO: 156610 - RNA, 19 nt, Human herpesvirus 6
cuaucgucuacccuaucga

SEQ ID NO: 156611 - RNA, 18 nt, Human herpesvirus 6
cuaugcaaacgaaaccau

SEQ ID NO: 156612 - RNA, 17 nt, Human herpesvirus 6
cuaucuuauuaauuucc

SEQ ID NO: 156613 - RNA, 14 nt, Human herpesvirus 6
cuaugaagauuuga

SEQ ID NO: 156614 - RNA, 17 nt, Human herpesvirus 6
cuaucuuuuucuguguu

SEQ ID NO: 156615 - RNA, 17 nt, Human herpesvirus 6
cuaucuccgcaaaccac

SEQ ID NO: 156616 - RNA, 12 nt, Human herpesvirus 6
cuauagucaaug

SEQ ID NO: 156617 - RNA, 21 nt, Human herpesvirus 6
cuauaaauucucuggaugcuu

SEQ ID NO: 156618 - RNA, 17 nt, Human herpesvirus 6
cuagcuaaaacuugaaa

SEQ ID NO: 156619 - RNA, 21 nt, Human herpesvirus 6
cuaggacguacagaaccagau

SEQ ID NO: 156620 - RNA, 15 nt, Human herpesvirus 6
cuaggcagaucauca

SEQ ID NO: 156621 - RNA, 21 nt, Human herpesvirus 6
cuaggugauugggagcucacu

SEQ ID NO: 156622 - RNA, 14 nt, Human herpesvirus 6
cuaguaauaacauu

SEQ ID NO: 156623 - RNA, 17 nt, Human herpesvirus 6
cuacugaaaccaaagca

SEQ ID NO: 156624 - RNA, 17 nt, Human herpesvirus 6
cuacaacauuaucaauu

SEQ ID NO: 156625 - RNA, 18 nt, Human herpesvirus 6
cuaauuucgacaauccua

SEQ ID NO: 156626 - RNA, 12 nt, Human herpesvirus 6
cuagaugugucu

SEQ ID NO: 156627 - RNA, 17 nt, Human herpesvirus 6
cuagaucuggaucucag

SEQ ID NO: 156628 - RNA, 15 nt, Human herpesvirus 6
cuagaugcaaaucuc

SEQ ID NO: 156629 - RNA, 18 nt, Human herpesvirus 6
cuagacucgccgaugaaa

SEQ ID NO: 156630 - RNA, 23 nt, Human herpesvirus 6
cuagagaaaauuauagcuucaaa

SEQ ID NO: 156631 - RNA, 21 nt, Human herpesvirus 6
cuagauacggugucacacagc

SEQ ID NO: 156632 - RNA, 20 nt, Human herpesvirus 6
cuacuucuuucuaaaaucaa

SEQ ID NO: 156633 - RNA, 16 nt, Human herpesvirus 6
cuacuuuuucaaguaa

SEQ ID NO: 156634 - RNA, 16 nt, Human herpesvirus 6
cuagaaggagcuuuca

SEQ ID NO: 156635 - RNA, 19 nt, Human herpesvirus 6
gccgcagccgucgauaaua

SEQ ID NO: 156636 - RNA, 14 nt, Human herpesvirus 6
gccguccuauucag

SEQ ID NO: 156637 - RNA, 23 nt, Human herpesvirus 6
gccuggaguacaagaccaucugc

SEQ ID NO: 156638 - RNA, 16 nt, Human herpesvirus 6
gccuccggccccagag

SEQ ID NO: 156639 - RNA, 18 nt, Human herpesvirus 6
gccuccccgggugcuccg

SEQ ID NO: 156640 - RNA, 22 nt, Human herpesvirus 6
gccgcgaacucguuaauaguua

SEQ ID NO: 156641 - RNA, 18 nt, Human herpesvirus 6
gccguucugcuuagcaua

SEQ ID NO: 156642 - RNA, 17 nt, Human herpesvirus 6
gccuacggcgccacaaa

SEQ ID NO: 156643 - RNA, 17 nt, Human herpesvirus 6
gccaucaguaugccaua

SEQ ID NO: 156644 - RNA, 18 nt, Human herpesvirus 6
gccauauccuagcauuuc

SEQ ID NO: 156645 - RNA, 19 nt, Human herpesvirus 6
gccauauccuagcauuucc

SEQ ID NO: 156646 - RNA, 20 nt, Human herpesvirus 6
gccacgacgugcugcaaggc

SEQ ID NO: 156647 - RNA, 20 nt, Human herpesvirus 6
gcccccauacacacccagca

SEQ ID NO: 156648 - RNA, 21 nt, Human herpesvirus 6
gcccauccaccuucccuccca

SEQ ID NO: 156649 - RNA, 20 nt, Human herpesvirus 6
gcccgacaaguaagauugca

SEQ ID NO: 156650 - RNA, 22 nt, Human herpesvirus 6
gcauuucuugguuguguauauu

SEQ ID NO: 156651 - RNA, 15 nt, Human herpesvirus 6
gccaccgucugggac

SEQ ID NO: 156652 - RNA, 21 nt, Human herpesvirus 6
gcauuaacuacaucaacuaca

SEQ ID NO: 156653 - RNA, 21 nt, Human herpesvirus 6
gcauucuguucuucaucauca

SEQ ID NO: 156654 - RNA, 22 nt, Human herpesvirus 6
gcauuccgagcuuuuguuuucu

SEQ ID NO: 156655 - RNA, 18 nt, Human herpesvirus 6
gcauuccucguucuacca

SEQ ID NO: 156656 - RNA, 14 nt, Human herpesvirus 6
gcauugacuauuaa

SEQ ID NO: 156657 - RNA, 13 nt, Human herpesvirus 6
gcauuagucacag

SEQ ID NO: 156658 - RNA, 18 nt, Human herpesvirus 6
gcauuagucuuaaucaac

SEQ ID NO: 156659 - RNA, 16 nt, Human herpesvirus 6
gcauugaagaugacag

SEQ ID NO: 156660 - RNA, 22 nt, Human herpesvirus 6
gcaugagggguaugucugugca

SEQ ID NO: 156661 - RNA, 15 nt, Human herpesvirus 6
gcaucugccauauca

SEQ ID NO: 156662 - RNA, 22 nt, Human herpesvirus 6
gcaaccugaaacuccccagaga

SEQ ID NO: 156663 - RNA, 20 nt, Human herpesvirus 6
gcaacauccugcguguuaau

SEQ ID NO: 156664 - RNA, 19 nt, Human herpesvirus 6
gcaaauacuauuuuaguca

SEQ ID NO: 156665 - RNA, 14 nt, Human herpesvirus 6
gcaaagagaccaau

SEQ ID NO: 156666 - RNA, 17 nt, Human herpesvirus 6
gcguagucgcuauagca

SEQ ID NO: 156667 - RNA, 14 nt, Human herpesvirus 6
gcgucaacaaacaa

SEQ ID NO: 156668 - RNA, 22 nt, Human herpesvirus 6
gcgucucuacgcgcguccgcuc

SEQ ID NO: 156669 - RNA, 17 nt, Human herpesvirus 6
gcguguggaguugaaga

SEQ ID NO: 156670 - RNA, 17 nt, Human herpesvirus 6
gcgcugcauagacugaa

SEQ ID NO: 156671 - RNA, 19 nt, Human herpesvirus 6
gccuuguauuucaacguga

SEQ ID NO: 156672 - RNA, 17 nt, Human herpesvirus 6
gccuucgguacagugaa

SEQ ID NO: 156673 - RNA, 16 nt, Human herpesvirus 6
gcuggaaaacuauuaa

SEQ ID NO: 156674 - RNA, 20 nt, Human herpesvirus 6
gcuauuguaccuagcagcaa

SEQ ID NO: 156675 - RNA, 14 nt, Human herpesvirus 6
gcuauuucuguuac

SEQ ID NO: 156676 - RNA, 14 nt, Human herpesvirus 6
gcucacaauauuuc

SEQ ID NO: 156677 - RNA, 22 nt, Human herpesvirus 6
gcuaccgcuuuuuagcacguua

SEQ ID NO: 156678 - RNA, 15 nt, Human herpesvirus 6
gcuaaauugauaaua

SEQ ID NO: 156679 - RNA, 13 nt, Human herpesvirus 6
gcuaaaucaaaug

SEQ ID NO: 156680 - RNA, 13 nt, Human herpesvirus 6
gcguugugcugag

SEQ ID NO: 156681 - RNA, 16 nt, Human herpesvirus 6
gcguugauacaucccg

SEQ ID NO: 156682 - RNA, 14 nt, Human herpesvirus 6
gcgugugugcuccg

SEQ ID NO: 156683 - RNA, 19 nt, Human herpesvirus 6
gcguuagguguaaaucauc

SEQ ID NO: 156684 - RNA, 22 nt, Human herpesvirus 6
ggcuauuugacaauaaacauga

SEQ ID NO: 156685 - RNA, 15 nt, Human herpesvirus 6
ggcuauaaucacaaa

SEQ ID NO: 156686 - RNA, 13 nt, Human herpesvirus 6
ggcggcgaccgca

SEQ ID NO: 156687 - RNA, 19 nt, Human herpesvirus 6
ggcgguauaacuuccggaa

SEQ ID NO: 156688 - RNA, 13 nt, Human herpesvirus 6
ggaucgaacucuu

SEQ ID NO: 156689 - RNA, 20 nt, Human herpesvirus 6
ggaucgggcccggggacgga

SEQ ID NO: 156690 - RNA, 14 nt, Human herpesvirus 6
ggaucugagugaau

SEQ ID NO: 156691 - RNA, 13 nt, Human herpesvirus 6
ggcaacugaauuu

SEQ ID NO: 156692 - RNA, 21 nt, Human herpesvirus 6
ggcacagugugaucaucacau

SEQ ID NO: 156693 - RNA, 13 nt, Human herpesvirus 6
gcuucuuauauag

SEQ ID NO: 156694 - RNA, 16 nt, Human herpesvirus 6
gcuucuggcacaggca

SEQ ID NO: 156695 - RNA, 17 nt, Human herpesvirus 6
gcuucuauauccaaaga

SEQ ID NO: 156696 - RNA, 21 nt, Human herpesvirus 6
gcuucgcaagacgccacgggc

SEQ ID NO: 156697 - RNA, 17 nt, Human herpesvirus 6
gcuguaaauauucauau

SEQ ID NO: 156698 - RNA, 12 nt, Human herpesvirus 6
ggaguugcagug

SEQ ID NO: 156699 - RNA, 17 nt, Human herpesvirus 6
ggauacauaauaucuau

SEQ ID NO: 156700 - RNA, 17 nt, Human herpesvirus 6
ggauacguauauugugu

SEQ ID NO: 156701 - RNA, 14 nt, Human herpesvirus 6
ggagugauugugac

SEQ ID NO: 156702 - RNA, 17 nt, Human herpesvirus 6
ggagcauucacauaaga

SEQ ID NO: 156703 - RNA, 13 nt, Human herpesvirus 6
ggagaacgggcaa

SEQ ID NO: 156704 - RNA, 11 nt, Human herpesvirus 6
ggucuugcuaa

SEQ ID NO: 156705 - RNA, 22 nt, Human herpesvirus 6
ggucgagaauacgcuguguuua

SEQ ID NO: 156706 - RNA, 19 nt, Human herpesvirus 6
gguccguuuuucucugcaa

SEQ ID NO: 156707 - RNA, 14 nt, Human herpesvirus 6
gguccaaggauuau

SEQ ID NO: 156708 - RNA, 12 nt, Human herpesvirus 6
ggugaaaugaau

SEQ ID NO: 156709 - RNA, 13 nt, Human herpesvirus 6
ggugagugcauua

SEQ ID NO: 156710 - RNA, 15 nt, Human herpesvirus 6
ggugcagaacaucuc

SEQ ID NO: 156711 - RNA, 12 nt, Human herpesvirus 6
ggugccaaagga

SEQ ID NO: 156712 - RNA, 21 nt, Human herpesvirus 6
ggugcgaucgagcaacagcgu

SEQ ID NO: 156713 - RNA, 17 nt, Human herpesvirus 6
ggugcuauuucuguuac

SEQ ID NO: 156714 - RNA, 19 nt, Human herpesvirus 6
gguggauuaugaguaugaa

SEQ ID NO: 156715 - RNA, 16 nt, Human herpesvirus 6
gguauccaauuaacac

SEQ ID NO: 156716 - RNA, 18 nt, Human herpesvirus 6
gguaaauggcauacauuu

SEQ ID NO: 156717 - RNA, 16 nt, Human herpesvirus 6
guaaacgauaucaauu

SEQ ID NO: 156718 - RNA, 18 nt, Human herpesvirus 6
guaaauaaacaccagcau

SEQ ID NO: 156719 - RNA, 20 nt, Human herpesvirus 6
guaaauaaacaccagcauaa

SEQ ID NO: 156720 - RNA, 23 nt, Human herpesvirus 6
guaacggagcccgugcacguccc

SEQ ID NO: 156721 - RNA, 14 nt, Human herpesvirus 6
guaagcaucugcug

SEQ ID NO: 156722 - RNA, 19 nt, Human herpesvirus 6
guaagcagcagaacaacuu

SEQ ID NO: 156723 - RNA, 13 nt, Human herpesvirus 6
guaagauugcaga

SEQ ID NO: 156724 - RNA, 19 nt, Human herpesvirus 6
guaaguuuugggugcuauu

SEQ ID NO: 156725 - RNA, 13 nt, Human herpesvirus 6
guaauacaucaac

SEQ ID NO: 156726 - RNA, 13 nt, Human herpesvirus 6
guaauagccaaac

SEQ ID NO: 156727 - RNA, 22 nt, Human herpesvirus 6
guaauauauuuuuuaacaguac

SEQ ID NO: 156728 - RNA, 20 nt, Human herpesvirus 6
guaauggcauucaccgguga

SEQ ID NO: 156729 - RNA, 21 nt, Human herpesvirus 6
guaauggaucuugaucaaaua

SEQ ID NO: 156730 - RNA, 22 nt, Human herpesvirus 6
guaauuuucaaucuguguuucc

SEQ ID NO: 156731 - RNA, 16 nt, Human herpesvirus 6
guaauugaacauugua

SEQ ID NO: 156732 - RNA, 12 nt, Human herpesvirus 6
guaauuguuaaa

SEQ ID NO: 156733 - RNA, 22 nt, Human herpesvirus 6
guaauauuuuuucagcuuucau

SEQ ID NO: 156734 - RNA, 18 nt, Human herpesvirus 6
guaaucucguugggauag

SEQ ID NO: 156735 - RNA, 21 nt, Human herpesvirus 6
guaaaacuauugacauaggaa

SEQ ID NO: 156736 - RNA, 19 nt, Human herpesvirus 6
guaaaagggaagauuugua

SEQ ID NO: 156737 - RNA, 15 nt, Human herpesvirus 6
guaaacaaauucuua

SEQ ID NO: 156738 - RNA, 15 nt, Human herpesvirus 6
gguuuucuuacacau

SEQ ID NO: 156739 - RNA, 23 nt, Human herpesvirus 6
gguucuuaaagaguuuucucaca

SEQ ID NO: 156740 - RNA, 13 nt, Human herpesvirus 6
gguuuauugcacg

SEQ ID NO: 156741 - RNA, 22 nt, Human herpesvirus 6
ggugucugucuauuaucuggcc

SEQ ID NO: 156742 - RNA, 20 nt, Human herpesvirus 6
gguuagguuuaauaguuuua

SEQ ID NO: 156743 - RNA, 16 nt, Human herpesvirus 6
gaucucaguagauuac

SEQ ID NO: 156744 - RNA, 12 nt, Human herpesvirus 6
gaucuauuucuc

SEQ ID NO: 156745 - RNA, 13 nt, Human herpesvirus 6
gaucgcaccaucu

SEQ ID NO: 156746 - RNA, 15 nt, Human herpesvirus 6
gauacguauauugug

SEQ ID NO: 156747 - RNA, 20 nt, Human herpesvirus 6
gauacguauauuguguaccu

SEQ ID NO: 156748 - RNA, 15 nt, Human herpesvirus 6
gauacuaaguguaau

SEQ ID NO: 156749 - RNA, 13 nt, Human herpesvirus 6
gauacuacacaaa

SEQ ID NO: 156750 - RNA, 22 nt, Human herpesvirus 6
gauacauguuuguugugaucuu

SEQ ID NO: 156751 - RNA, 19 nt, Human herpesvirus 6
gauacauaauaucuaucuu

SEQ ID NO: 156752 - RNA, 17 nt, Human herpesvirus 6
gauacaucguuuguuga

SEQ ID NO: 156753 - RNA, 14 nt, Human herpesvirus 6
gagguuaucuggau

SEQ ID NO: 156754 - RNA, 19 nt, Human herpesvirus 6
gaguaaaacgcucacauca

SEQ ID NO: 156755 - RNA, 22 nt, Human herpesvirus 6
gauaauauuugucguuguaguu

SEQ ID NO: 156756 - RNA, 14 nt, Human herpesvirus 6
gaugagcgucagag

SEQ ID NO: 156757 - RNA, 17 nt, Human herpesvirus 6
gaugaguaauacaucau

SEQ ID NO: 156758 - RNA, 15 nt, Human herpesvirus 6
gaugcaaaucucacu

SEQ ID NO: 156759 - RNA, 16 nt, Human herpesvirus 6
gaugcaucugccauau

SEQ ID NO: 156760 - RNA, 20 nt, Human herpesvirus 6
gaugaauuuguccguauaca

SEQ ID NO: 156761 - RNA, 15 nt, Human herpesvirus 6
gaugacuggccauau

SEQ ID NO: 156762 - RNA, 18 nt, Human herpesvirus 6
gaugacagcgauacaaua

SEQ ID NO: 156763 - RNA, 21 nt, Human herpesvirus 6
gaugacagcgauacaauaaca

SEQ ID NO: 156764 - RNA, 22 nt, Human herpesvirus 6
gaugacaucugcaaaaaacaaa

SEQ ID NO: 156765 - RNA, 20 nt, Human herpesvirus 6
gauggugcggcgggauuaau

SEQ ID NO: 156766 - RNA, 17 nt, Human herpesvirus 6
gaugccugcauaugcag

SEQ ID NO: 156767 - RNA, 18 nt, Human herpesvirus 6
gaugccugcauaugcaga

SEQ ID NO: 156768 - RNA, 20 nt, Human herpesvirus 6
gaugcaccgccgcucuauag

SEQ ID NO: 156769 - RNA, 19 nt, Human herpesvirus 6
gauuauaucgcaagcaaaa

SEQ ID NO: 156770 - RNA, 19 nt, Human herpesvirus 6
gauuaguuuucacaaagaa

SEQ ID NO: 156771 - RNA, 17 nt, Human herpesvirus 6
gauuauauauuugcaua

SEQ ID NO: 156772 - RNA, 18 nt, Human herpesvirus 6
gauuauauauuugcauac

SEQ ID NO: 156773 - RNA, 20 nt, Human herpesvirus 6
gauucuccggguuuuagaga

SEQ ID NO: 156774 - RNA, 15 nt, Human herpesvirus 6
gauucuaaugauaaa

SEQ ID NO: 156775 - RNA, 16 nt, Human herpesvirus 6
gauucugcauuuauau

SEQ ID NO: 156776 - RNA, 17 nt, Human herpesvirus 6
gauguuguguugauuac

SEQ ID NO: 156777 - RNA, 17 nt, Human herpesvirus 6
gauguggagcggaaaca

SEQ ID NO: 156778 - RNA, 14 nt, Human herpesvirus 6
gauguugcaauaaa

SEQ ID NO: 156779 - RNA, 22 nt, Human herpesvirus 6
gaugucucgggggcauuagucu

SEQ ID NO: 156780 - RNA, 18 nt, Human herpesvirus 6
gauguagguuucgaucaa

SEQ ID NO: 156781 - RNA, 20 nt, Human herpesvirus 6
gauguauggagauguuagua

SEQ ID NO: 156782 - RNA, 17 nt, Human herpesvirus 6
gauuacggcaacauacc

SEQ ID NO: 156783 - RNA, 20 nt, Human herpesvirus 6
gauuacacuuucuuguagua

SEQ ID NO: 156784 - RNA, 15 nt, Human herpesvirus 6
gauugcagacgcuga

SEQ ID NO: 156785 - RNA, 16 nt, Human herpesvirus 6
gauuguaauaaagugu

SEQ ID NO: 156786 - RNA, 15 nt, Human herpesvirus 6
gauuguaauauucaa

SEQ ID NO: 156787 - RNA, 18 nt, Human herpesvirus 6
gauuguuaauauuagcca

SEQ ID NO: 156788 - RNA, 23 nt, Human herpesvirus 6
gauuuacuguuucuuugacauuu

SEQ ID NO: 156789 - RNA, 24 nt, Human herpesvirus 6
gauuuaguacaguaugucuccaaa

SEQ ID NO: 156790 - RNA, 18 nt, Human herpesvirus 6
gauuucacuuaagccagc

SEQ ID NO: 156791 - RNA, 19 nt, Human herpesvirus 6
gauuucaagauauauuaaa

SEQ ID NO: 156792 - RNA, 15 nt, Human herpesvirus 6
gauuucaaggcuuca

SEQ ID NO: 156793 - RNA, 19 nt, Human herpesvirus 6
gauuugggcuuuauuccga

SEQ ID NO: 156794 - RNA, 13 nt, Human herpesvirus 6
gauuuuagacaaa

SEQ ID NO: 156795 - RNA, 22 nt, Human herpesvirus 6
gauuuaauuuuaucaugcccga

SEQ ID NO: 156796 - RNA, 17 nt, Human herpesvirus 6
gcaaacguaugcaguua

SEQ ID NO: 156797 - RNA, 18 nt, Human herpesvirus 6
gcaaacgugaauauauca

SEQ ID NO: 156798 - RNA, 15 nt, Human herpesvirus 6
gcaaacgaaaccauc

SEQ ID NO: 156799 - RNA, 15 nt, Human herpesvirus 6
gcaaaacagacuuua

SEQ ID NO: 156800 - RNA, 15 nt, Human herpesvirus 6
gcaaaauugacuaca

SEQ ID NO: 156801 - RNA, 13 nt, Human herpesvirus 6
gcaaaccauaaaa

SEQ ID NO: 156802 - RNA, 12 nt, Human herpesvirus 6
gcaaaacuguua

SEQ ID NO: 156803 - RNA, 14 nt, Human herpesvirus 6
gcaaaacuguuaaa

SEQ ID NO: 156804 - RNA, 17 nt, Human herpesvirus 6
gcaaaaacggguuuauu

SEQ ID NO: 156805 - RNA, 16 nt, Human herpesvirus 6
gacucgccgcugcaga

SEQ ID NO: 156806 - RNA, 17 nt, Human herpesvirus 6
gacucgcggaguggagu

SEQ ID NO: 156807 - RNA, 16 nt, Human herpesvirus 6
gacuacucuggcugaa

SEQ ID NO: 156808 - RNA, 18 nt, Human herpesvirus 6
gacuacucuggcugaaag

SEQ ID NO: 156809 - RNA, 18 nt, Human herpesvirus 6
gacuaggauuagaacaau

SEQ ID NO: 156810 - RNA, 20 nt, Human herpesvirus 6
gacuaucugagacaguccau

SEQ ID NO: 156811 - RNA, 21 nt, Human herpesvirus 6
gacugcccgcuaccaacaggu

SEQ ID NO: 156812 - RNA, 19 nt, Human herpesvirus 6
gacugccgguaacgcuguc

SEQ ID NO: 156813 - RNA, 19 nt, Human herpesvirus 6
gacugaagaugagcagcuu

SEQ ID NO: 156814 - RNA, 17 nt, Human herpesvirus 6
gacuuacagagcuuuua

SEQ ID NO: 156815 - RNA, 18 nt, Human herpesvirus 6
gacuuacagagcuuuuaa

SEQ ID NO: 156816 - RNA, 21 nt, Human herpesvirus 6
gacugguauccaauuaacaca

SEQ ID NO: 156817 - RNA, 22 nt, Human herpesvirus 6
gacugguauccaauuaacacau

SEQ ID NO: 156818 - RNA, 19 nt, Human herpesvirus 6
aaauauuucuaaacacaga

SEQ ID NO: 156819 - RNA, 21 nt, Human herpesvirus 6
aaauauguugaaucuuauuca

SEQ ID NO: 156820 - RNA, 20 nt, Human herpesvirus 6
aaauauuuuguagaguguua

SEQ ID NO: 156821 - RNA, 16 nt, Human herpesvirus 6
aaauaucgccauuaaa

SEQ ID NO: 156822 - RNA, 21 nt, Human herpesvirus 6
aaauaucgccccugucuguga

SEQ ID NO: 156823 - RNA, 22 nt, Human herpesvirus 6
aaauaucgccccugucugugau

SEQ ID NO: 156824 - RNA, 19 nt, Human herpesvirus 6
aaauaucgcgcaaaccaua

SEQ ID NO: 156825 - RNA, 17 nt, Human herpesvirus 6
aaauauaauuucggguu

SEQ ID NO: 156826 - RNA, 16 nt, Human herpesvirus 6
aaauaguuguauuuau

SEQ ID NO: 156827 - RNA, 16 nt, Human herpesvirus 6
aaauagugcugagacu

SEQ ID NO: 156828 - RNA, 17 nt, Human herpesvirus 6
aaauagguaaacuguuu

SEQ ID NO: 156829 - RNA, 18 nt, Human herpesvirus 6
gacguuugcuguuuucac

SEQ ID NO: 156830 - RNA, 13 nt, Human herpesvirus 6
aaauguaacuuuu

SEQ ID NO: 156831 - RNA, 14 nt, Human herpesvirus 6
aaaugguagcuauu

SEQ ID NO: 156832 - RNA, 15 nt, Human herpesvirus 6
aaaugcccauucuca

SEQ ID NO: 156833 - RNA, 20 nt, Human herpesvirus 6
aaaugcaacgcaucacacau

SEQ ID NO: 156834 - RNA, 21 nt, Human herpesvirus 6
aaaugcaacgcaucacacaua

SEQ ID NO: 156835 - RNA, 20 nt, Human herpesvirus 6
aaaugaugaguaauacauca

SEQ ID NO: 156836 - RNA, 14 nt, Human herpesvirus 6
aaauggcauacauu

SEQ ID NO: 156837 - RNA, 15 nt, Human herpesvirus 6
gagagauuuacuguu

SEQ ID NO: 156838 - RNA, 16 nt, Human herpesvirus 6
gagccuguggacgugc

SEQ ID NO: 156839 - RNA, 19 nt, Human herpesvirus 6
gagaggagcauucacauaa

SEQ ID NO: 156840 - RNA, 14 nt, Human herpesvirus 6
gagcgaaaugcaau

SEQ ID NO: 156841 - RNA, 19 nt, Human herpesvirus 6
gagaacaaaaugaggggaa

SEQ ID NO: 156842 - RNA, 14 nt, Human herpesvirus 6
gagacguuguuuga

SEQ ID NO: 156843 - RNA, 22 nt, Human herpesvirus 6
gacuuuucuaucacucauacac

SEQ ID NO: 156844 - RNA, 17 nt, Human herpesvirus 6
gacuuuuuguagaacuu

SEQ ID NO: 156845 - RNA, 19 nt, Human herpesvirus 6
gagaaaaaacaaagcuuua

SEQ ID NO: 156846 - RNA, 12 nt, Human herpesvirus 6
gaggugcugaug

SEQ ID NO: 156847 - RNA, 23 nt, Human herpesvirus 6
gaggggaacacgccggggaccga

SEQ ID NO: 156848 - RNA, 18 nt, Human herpesvirus 6
gaggagugaacauacaaa

SEQ ID NO: 156849 - RNA, 18 nt, Human herpesvirus 6
gaggauccauucuagaua

SEQ ID NO: 156850 - RNA, 20 nt, Human herpesvirus 6
gagcuacgccaaaacuacaa

SEQ ID NO: 156851 - RNA, 16 nt, Human herpesvirus 6
gaaccugaaaucugag

SEQ ID NO: 156852 - RNA, 18 nt, Human herpesvirus 6
gaaccucaugaguguuua

SEQ ID NO: 156853 - RNA, 16 nt, Human herpesvirus 6
gaaccgaucugugagc

SEQ ID NO: 156854 - RNA, 18 nt, Human herpesvirus 6
gaacccuagacacacaaa

SEQ ID NO: 156855 - RNA, 15 nt, Human herpesvirus 6
gaacauaauugcacc

SEQ ID NO: 156856 - RNA, 18 nt, Human herpesvirus 6
gaacaugauuauaucgca

SEQ ID NO: 156857 - RNA, 14 nt, Human herpesvirus 6
gaaccaccagagac

SEQ ID NO: 156858 - RNA, 13 nt, Human herpesvirus 6
gaacauuguucua

SEQ ID NO: 156859 - RNA, 18 nt, Human herpesvirus 6
gaaccaaagacauucaac

SEQ ID NO: 156860 - RNA, 19 nt, Human herpesvirus 6
gaacaauauagaagacgca

SEQ ID NO: 156861 - RNA, 12 nt, Human herpesvirus 6
gaaauucuaugu

SEQ ID NO: 156862 - RNA, 13 nt, Human herpesvirus 6
gaaauucuaugua

SEQ ID NO: 156863 - RNA, 20 nt, Human herpesvirus 6
gaaauuugagaaaguuguac

SEQ ID NO: 156864 - RNA, 15 nt, Human herpesvirus 6
gaaauuuaauaagaa

SEQ ID NO: 156865 - RNA, 12 nt, Human herpesvirus 6
gaacaaggccaa

SEQ ID NO: 156866 - RNA, 22 nt, Human herpesvirus 6
cuuuagaacagcuuagggccaa

SEQ ID NO: 156867 - RNA, 17 nt, Human herpesvirus 6
cuuuaucgauguagaua

SEQ ID NO: 156868 - RNA, 14 nt, Human herpesvirus 6
cuuuaucuagccaa

SEQ ID NO: 156869 - RNA, 18 nt, Human herpesvirus 6
cuuuaucuagccaauuca

SEQ ID NO: 156870 - RNA, 16 nt, Human herpesvirus 6
cuuuauaagauuuaca

SEQ ID NO: 156871 - RNA, 20 nt, Human herpesvirus 6
cuuuauuguguguacaauga

SEQ ID NO: 156872 - RNA, 14 nt, Human herpesvirus 6
cuuucaaaagcaug

SEQ ID NO: 156873 - RNA, 19 nt, Human herpesvirus 6
cuuuaaucacaaugaucaa

SEQ ID NO: 156874 - RNA, 16 nt, Human herpesvirus 6
cuuuacagucuuuaaa

SEQ ID NO: 156875 - RNA, 21 nt, Human herpesvirus 6
cuuuaacuacaacauuaucaa

SEQ ID NO: 156876 - RNA, 15 nt, Human herpesvirus 6
cuuguugaguuucag

SEQ ID NO: 156877 - RNA, 20 nt, Human herpesvirus 6
cuugucgggcuuugugaaau

SEQ ID NO: 156878 - RNA, 15 nt, Human herpesvirus 6
cuuguguaucuguga

SEQ ID NO: 156879 - RNA, 18 nt, Human herpesvirus 6
cuuguguaucugugaaca

SEQ ID NO: 156880 - RNA, 15 nt, Human herpesvirus 6
cuuguacaaauucau

SEQ ID NO: 156881 - RNA, 17 nt, Human herpesvirus 6
gaacgcgguaacgccac

SEQ ID NO: 156882 - RNA, 21 nt, Human herpesvirus 6
gaacgcaacgcggagugaacu

SEQ ID NO: 156883 - RNA, 13 nt, Human herpesvirus 6
gaacuacauauaa

SEQ ID NO: 156884 - RNA, 18 nt, Human herpesvirus 6
gaacgcaagucacgggca

SEQ ID NO: 156885 - RNA, 16 nt, Human herpesvirus 6
gaaguuuacauagaaa

SEQ ID NO: 156886 - RNA, 15 nt, Human herpesvirus 6
gaaguuuccuuugug

SEQ ID NO: 156887 - RNA, 18 nt, Human herpesvirus 6
gaaguuuccuuuguguga

SEQ ID NO: 156888 - RNA, 13 nt, Human herpesvirus 6
gaagugcuucucu

SEQ ID NO: 156889 - RNA, 18 nt, Human herpesvirus 6
gaagcaucccuaugucga

SEQ ID NO: 156890 - RNA, 19 nt, Human herpesvirus 6
gaagcgucaacggcuucaa

SEQ ID NO: 156891 - RNA, 16 nt, Human herpesvirus 6
gaagccuucaacuuuu

SEQ ID NO: 156892 - RNA, 20 nt, Human herpesvirus 6
gaagcgccauaaaaauaucg

SEQ ID NO: 156893 - RNA, 15 nt, Human herpesvirus 6
gaauaauaagccuaa

SEQ ID NO: 156894 - RNA, 18 nt, Human herpesvirus 6
gaauaauaagccuaagaa

SEQ ID NO: 156895 - RNA, 20 nt, Human herpesvirus 6
gaauaucugcuaagucuuug

SEQ ID NO: 156896 - RNA, 22 nt, Human herpesvirus 6
gaauaguucuucaacauaucac

SEQ ID NO: 156897 - RNA, 15 nt, Human herpesvirus 6
gaaucauguguagca

SEQ ID NO: 156898 - RNA, 15 nt, Human herpesvirus 6
gaaucauggugucuu

SEQ ID NO: 156899 - RNA, 18 nt, Human herpesvirus 6
gaaucauggugucuuugu

SEQ ID NO: 156900 - RNA, 21 nt, Human herpesvirus 6
gaauccaccaaugacaccgau

SEQ ID NO: 156901 - RNA, 20 nt, Human herpesvirus 6
aaacgccuccacaugacacc

SEQ ID NO: 156902 - RNA, 15 nt, Human herpesvirus 6
aaacgaguaugaaua

SEQ ID NO: 156903 - RNA, 19 nt, Human herpesvirus 6
aaacgaucgacccacuccu

SEQ ID NO: 156904 - RNA, 20 nt, Human herpesvirus 6
aaauacugcagcucgacucc

SEQ ID NO: 156905 - RNA, 14 nt, Human herpesvirus 6
aaaguuuugugauc

SEQ ID NO: 156906 - RNA, 17 nt, Human herpesvirus 6
gaccuaugcgcuuuuau

SEQ ID NO: 156907 - RNA, 18 nt, Human herpesvirus 6
gaccuauaaaaaauuuca

SEQ ID NO: 156908 - RNA, 12 nt, Human herpesvirus 6
gaccauguguau

SEQ ID NO: 156909 - RNA, 13 nt, Human herpesvirus 6
gaccauguguaua

SEQ ID NO: 156910 - RNA, 15 nt, Human herpesvirus 6
gaccauguguauauu

SEQ ID NO: 156911 - RNA, 23 nt, Human herpesvirus 6
gaccauggcccuacuacagugga

SEQ ID NO: 156912 - RNA, 23 nt, Human herpesvirus 6
gacagaggaaauaaaaacaccuc

SEQ ID NO: 156913 - RNA, 23 nt, Human herpesvirus 6
gacagaauucuucugugacuaua

SEQ ID NO: 156914 - RNA, 22 nt, Human herpesvirus 6
gacagaccgucaaaucucgccg

SEQ ID NO: 156915 - RNA, 23 nt, Human herpesvirus 6
aaaguuugugcgaauuguguugc

SEQ ID NO: 156916 - RNA, 16 nt, Human herpesvirus 6
gacaaguaagauugca

SEQ ID NO: 156917 - RNA, 19 nt, Human herpesvirus 6
gacaaguaagauugcagac

SEQ ID NO: 156918 - RNA, 22 nt, Human herpesvirus 6
aaaguuucuguugaauuccaga

SEQ ID NO: 156919 - RNA, 14 nt, Human herpesvirus 6
gacaaugauacuaa

SEQ ID NO: 156920 - RNA, 21 nt, Human herpesvirus 6
gacaaugcagaacaacagcau

SEQ ID NO: 156921 - RNA, 20 nt, Human herpesvirus 6
gacacacaaaaaauugacaa

SEQ ID NO: 156922 - RNA, 16 nt, Human herpesvirus 6
aaacguaugcaguuau

SEQ ID NO: 156923 - RNA, 16 nt, Human herpesvirus 6
aaacuaaaacaucaga

SEQ ID NO: 156924 - RNA, 23 nt, Human herpesvirus 6
aaacuaacauagcgaauuugaac

SEQ ID NO: 156925 - RNA, 13 nt, Human herpesvirus 6
aaacugaggcaaa

SEQ ID NO: 156926 - RNA, 12 nt, Human herpesvirus 6
aaagcauacuca

SEQ ID NO: 156927 - RNA, 14 nt, Human herpesvirus 6
aaagcauacucaac

SEQ ID NO: 156928 - RNA, 15 nt, Human herpesvirus 6
gacaaggaaugaaau

SEQ ID NO: 156929 - RNA, 20 nt, Human herpesvirus 6
aaacugugaaaaccuuucaa

SEQ ID NO: 156930 - RNA, 14 nt, Human herpesvirus 6
aaacuguaugcaau

SEQ ID NO: 156931 - RNA, 19 nt, Human herpesvirus 6
aaagcuggaaaacuauuaa

SEQ ID NO: 156932 - RNA, 23 nt, Human herpesvirus 6
aaaggaaaccaccggcuaacccu

SEQ ID NO: 156933 - RNA, 21 nt, Human herpesvirus 6
aaagcguuugcaaaacuguua

SEQ ID NO: 156934 - RNA, 18 nt, Human herpesvirus 6
aaaggccguuggauccaa

SEQ ID NO: 156935 - RNA, 19 nt, Human herpesvirus 6
aaagggagaugaaacauaa

SEQ ID NO: 156936 - RNA, 22 nt, Human herpesvirus 6
aaaggaauagcaggcauugacu

SEQ ID NO: 156937 - RNA, 18 nt, Human herpesvirus 6
aaaguaguugcuaagugu

SEQ ID NO: 156938 - RNA, 13 nt, Human herpesvirus 6
aaaguauccuaaa

SEQ ID NO: 156939 - RNA, 16 nt, Human herpesvirus 6
aaagugucacucguuu

SEQ ID NO: 156940 - RNA, 13 nt, Human herpesvirus 6
aaaguuaauucaa

SEQ ID NO: 156941 - RNA, 18 nt, Human herpesvirus 6
aaagucuaaugguugaaa

SEQ ID NO: 156942 - RNA, 13 nt, Human herpesvirus 6
aaugcaugauggu

SEQ ID NO: 156943 - RNA, 23 nt, Human herpesvirus 6
aaugcaugucgaacagcuuuuca

SEQ ID NO: 156944 - RNA, 13 nt, Human herpesvirus 6
aaugauuuuacaa

SEQ ID NO: 156945 - RNA, 16 nt, Human herpesvirus 6
aaugauauauugugau

SEQ ID NO: 156946 - RNA, 17 nt, Human herpesvirus 6
aaugaucaauuuuacaa

SEQ ID NO: 156947 - RNA, 14 nt, Human herpesvirus 6
aaucuucauuaaaa

SEQ ID NO: 156948 - RNA, 21 nt, Human herpesvirus 6
aaucuauccgcuaaaacgacu

SEQ ID NO: 156949 - RNA, 14 nt, Human herpesvirus 6
aauccaccaaugac

SEQ ID NO: 156950 - RNA, 16 nt, Human herpesvirus 6
aauccaccaaugacac

SEQ ID NO: 156951 - RNA, 18 nt, Human herpesvirus 6
aauccaacgaauacuucu

SEQ ID NO: 156952 - RNA, 22 nt, Human herpesvirus 6
aaucuauugucgaagaacccga

SEQ ID NO: 156953 - RNA, 18 nt, Human herpesvirus 6
aaucugcguuccucucuc

SEQ ID NO: 156954 - RNA, 22 nt, Human herpesvirus 6
aaucuggcaaccuugacagaua

SEQ ID NO: 156955 - RNA, 18 nt, Human herpesvirus 6
aaugcucaaccuaaugac

SEQ ID NO: 156956 - RNA, 22 nt, Human herpesvirus 6
aaugcccauucucagacagcuu

SEQ ID NO: 156957 - RNA, 15 nt, Human herpesvirus 6
aaugccgacaucucc

SEQ ID NO: 156958 - RNA, 22 nt, Human herpesvirus 6
aaugucuguauuuuucuuugca

SEQ ID NO: 156959 - RNA, 23 nt, Human herpesvirus 6
aauguauugauuauauauuugca

SEQ ID NO: 156960 - RNA, 17 nt, Human herpesvirus 6
aaugguuagaaauucua

SEQ ID NO: 156961 - RNA, 16 nt, Human herpesvirus 6
aauguaaaguuauauu

SEQ ID NO: 156962 - RNA, 14 nt, Human herpesvirus 6
aauugggaagcaua

SEQ ID NO: 156963 - RNA, 21 nt, Human herpesvirus 6
aauuggcgucuaguaccugua

SEQ ID NO: 156964 - RNA, 16 nt, Human herpesvirus 6
aauuggucucuuugcg

SEQ ID NO: 156965 - RNA, 23 nt, Human herpesvirus 6
aauugguuuuuuuuaacaguguc

SEQ ID NO: 156966 - RNA, 17 nt, Human herpesvirus 6
aauugauaauaaguccu

SEQ ID NO: 156967 - RNA, 17 nt, Human herpesvirus 6
aauugauacaaacguga

SEQ ID NO: 156968 - RNA, 13 nt, Human herpesvirus 6
aauugcauccaaa

SEQ ID NO: 156969 - RNA, 22 nt, Human herpesvirus 6
aauuccggccuaggacguacag

SEQ ID NO: 156970 - RNA, 22 nt, Human herpesvirus 6
aauuccaagacauguacaucaa

SEQ ID NO: 156971 - RNA, 20 nt, Human herpesvirus 6
aauuccacgugcuugucuca

SEQ ID NO: 156972 - RNA, 22 nt, Human herpesvirus 6
aauuccacgugcuugucucaca

SEQ ID NO: 156973 - RNA, 15 nt, Human herpesvirus 6
aauucaggaacauaa

SEQ ID NO: 156974 - RNA, 14 nt, Human herpesvirus 6
aauucuauguacuu

SEQ ID NO: 156975 - RNA, 16 nt, Human herpesvirus 6
aauucuauguacuuau

SEQ ID NO: 156976 - RNA, 20 nt, Human herpesvirus 6
aauucuuacauuuuguacaa

SEQ ID NO: 156977 - RNA, 20 nt, Human herpesvirus 6
aauucggucaccuacauucg

SEQ ID NO: 156978 - RNA, 18 nt, Human herpesvirus 6
aauucugcuccuuuaucu

SEQ ID NO: 156979 - RNA, 21 nt, Human herpesvirus 6
aauuaugguuaucaucacaaa

SEQ ID NO: 156980 - RNA, 19 nt, Human herpesvirus 6
aauuaugugucaaguuuca

SEQ ID NO: 156981 - RNA, 17 nt, Human herpesvirus 6
aauuaccuauagucaau

SEQ ID NO: 156982 - RNA, 14 nt, Human herpesvirus 6
aauuaggugcuugg

SEQ ID NO: 156983 - RNA, 23 nt, Human herpesvirus 6
aauguuuuucauaaaugguagcu

SEQ ID NO: 156984 - RNA, 16 nt, Human herpesvirus 6
aauguuuuugacaaau

SEQ ID NO: 156985 - RNA, 14 nt, Human herpesvirus 6
aauguugcauggaa

SEQ ID NO: 156986 - RNA, 19 nt, Human herpesvirus 6
aauguuucauccaaauaca

SEQ ID NO: 156987 - RNA, 15 nt, Human herpesvirus 6
aauuaaaaaaagagg

SEQ ID NO: 156988 - RNA, 23 nt, Human herpesvirus 6
aaugugacaguucgagcccauaa

SEQ ID NO: 156989 - RNA, 12 nt, Human herpesvirus 6
aauguguucaca

SEQ ID NO: 156990 - RNA, 13 nt, Human herpesvirus 6
aauguguucacag

SEQ ID NO: 156991 - RNA, 15 nt, Human herpesvirus 6
aauguuaaauaacuc

SEQ ID NO: 156992 - RNA, 23 nt, Human herpesvirus 6
aauguuaagcaaaaacagauuaa

SEQ ID NO: 156993 - RNA, 14 nt, Human herpesvirus 6
aaggcugccaugaa

SEQ ID NO: 156994 - RNA, 17 nt, Human herpesvirus 6
aagggcucuauuacuau

SEQ ID NO: 156995 - RNA, 20 nt, Human herpesvirus 6
aaggguaugaaacuuuauga

SEQ ID NO: 156996 - RNA, 18 nt, Human herpesvirus 6
aaguauccuaaauaccaa

SEQ ID NO: 156997 - RNA, 22 nt, Human herpesvirus 6
aaguauccuuccaccuacauca

SEQ ID NO: 156998 - RNA, 20 nt, Human herpesvirus 6
aaguagugcuucaacuaaau

SEQ ID NO: 156999 - RNA, 16 nt, Human herpesvirus 6
aaguaguuaccgugau

SEQ ID NO: 157000 - RNA, 16 nt, Human herpesvirus 6
aaguauuuuacuuuau

SEQ ID NO: 157001 - RNA, 15 nt, Human herpesvirus 6
aaguguguucuuaca

SEQ ID NO: 157002 - RNA, 20 nt, Human herpesvirus 6
aaguuagcggggagucucca

SEQ ID NO: 157003 - RNA, 18 nt, Human herpesvirus 6
aaguucaguaacauuuaa

SEQ ID NO: 157004 - RNA, 17 nt, Human herpesvirus 6
aaguucaucagccauuu

SEQ ID NO: 157005 - RNA, 19 nt, Human herpesvirus 6
aaguucaucagccauuucg

SEQ ID NO: 157006 - RNA, 16 nt, Human herpesvirus 6
aagaauuaauguccag

SEQ ID NO: 157007 - RNA, 21 nt, Human herpesvirus 6
aagaaugccgugaauuguguc

SEQ ID NO: 157008 - RNA, 13 nt, Human herpesvirus 6
aagacacaaucuu

SEQ ID NO: 157009 - RNA, 15 nt, Human herpesvirus 6
aagaaucauuacuuc

SEQ ID NO: 157010 - RNA, 16 nt, Human herpesvirus 6
aaggagcuuucaucca

SEQ ID NO: 157011 - RNA, 18 nt, Human herpesvirus 6
aagcuauugaaacuaggu

SEQ ID NO: 157012 - RNA, 14 nt, Human herpesvirus 6
aagcuaaaucaaau

SEQ ID NO: 157013 - RNA, 17 nt, Human herpesvirus 6
aaggaugcggacucuga

SEQ ID NO: 157014 - RNA, 13 nt, Human herpesvirus 6
aaggagauuucag

SEQ ID NO: 157015 - RNA, 20 nt, Human herpesvirus 6
aagcgacgguguauccuaua

SEQ ID NO: 157016 - RNA, 21 nt, Human herpesvirus 6
aaucaucagaggcaccuugug

SEQ ID NO: 157017 - RNA, 14 nt, Human herpesvirus 6
aaucagaauccacc

SEQ ID NO: 157018 - RNA, 15 nt, Human herpesvirus 6
aaucagaauccacca

SEQ ID NO: 157019 - RNA, 22 nt, Human herpesvirus 6
aaucagacggguaagcagcaga

SEQ ID NO: 157020 - RNA, 14 nt, Human herpesvirus 6
aauacggaaaaagu

SEQ ID NO: 157021 - RNA, 15 nt, Human herpesvirus 6
aauacuaaauguuau

SEQ ID NO: 157022 - RNA, 16 nt, Human herpesvirus 6
aauacugaaguuaaua

SEQ ID NO: 157023 - RNA, 20 nt, Human herpesvirus 6
aauauaacgcuucuaacaau

SEQ ID NO: 157024 - RNA, 14 nt, Human herpesvirus 6
aauauaacuuuaca

SEQ ID NO: 157025 - RNA, 18 nt, Human herpesvirus 6
aauauaacuuuacauuaa

SEQ ID NO: 157026 - RNA, 12 nt, Human herpesvirus 6
aauauagacuuu

SEQ ID NO: 157027 - RNA, 21 nt, Human herpesvirus 6
aauauaucaaagauguacuca

SEQ ID NO: 157028 - RNA, 22 nt, Human herpesvirus 6
aauauaucaaagauguacucau

SEQ ID NO: 157029 - RNA, 22 nt, Human herpesvirus 6
aauaucuaucuuauuaauuucc

SEQ ID NO: 157030 - RNA, 17 nt, Human herpesvirus 6
aauaugaacaaugacau

SEQ ID NO: 157031 - RNA, 14 nt, Human herpesvirus 6
aauaaguacauaga

SEQ ID NO: 157032 - RNA, 16 nt, Human herpesvirus 6
aaguuuugggugcuau

SEQ ID NO: 157033 - RNA, 20 nt, Human herpesvirus 6
aaguuuauuuugucagucaa

SEQ ID NO: 157034 - RNA, 19 nt, Human herpesvirus 6
aaguuuccuuugugugaua

SEQ ID NO: 157035 - RNA, 19 nt, Human herpesvirus 6
aaguuucuguugaauucca

SEQ ID NO: 157036 - RNA, 19 nt, Human herpesvirus 6
aaguuugugcgaauugugu

SEQ ID NO: 157037 - RNA, 20 nt, Human herpesvirus 6
aaguuauauucuucuguaaa

SEQ ID NO: 157038 - RNA, 14 nt, Human herpesvirus 6
aauaauggcaugca

SEQ ID NO: 157039 - RNA, 19 nt, Human herpesvirus 6
aauaaugcccagaugugga

SEQ ID NO: 157040 - RNA, 20 nt, Human herpesvirus 6
aauaauuuguuuuuccauaa

SEQ ID NO: 157041 - RNA, 21 nt, Human herpesvirus 6
aauaauuuuauuaacuguaaa

SEQ ID NO: 157042 - RNA, 15 nt, Human herpesvirus 6
aauacaaaauuugaa

SEQ ID NO: 157043 - RNA, 15 nt, Human herpesvirus 6
aauacaacaauaaaa

SEQ ID NO: 157044 - RNA, 21 nt, Human herpesvirus 6
aauacacuaacaggauucccu

SEQ ID NO: 157045 - RNA, 16 nt, Human herpesvirus 6
aauacauauaaaagcu

SEQ ID NO: 157046 - RNA, 20 nt, Human herpesvirus 6
aauaccaauuccuuaauucu

SEQ ID NO: 157047 - RNA, 18 nt, Human herpesvirus 6
aauacauuuccaugcaua

SEQ ID NO: 157048 - RNA, 14 nt, Human herpesvirus 6
aacuaguugcuugu

SEQ ID NO: 157049 - RNA, 16 nt, Human herpesvirus 6
aacuaguugcuuguac

SEQ ID NO: 157050 - RNA, 15 nt, Human herpesvirus 6
aacuauauugcugcu

SEQ ID NO: 157051 - RNA, 16 nt, Human herpesvirus 6
aacuauauugcugcua

SEQ ID NO: 157052 - RNA, 22 nt, Human herpesvirus 6
aacuaggugauugggagcucac

SEQ ID NO: 157053 - RNA, 20 nt, Human herpesvirus 6
aacuaugcaaacgaaaccau

SEQ ID NO: 157054 - RNA, 14 nt, Human herpesvirus 6
aacugacugacaaa

SEQ ID NO: 157055 - RNA, 19 nt, Human herpesvirus 6
aacuaauaaaugcuaccca

SEQ ID NO: 157056 - RNA, 21 nt, Human herpesvirus 6
aacuaaaucgcgccauauccu

SEQ ID NO: 157057 - RNA, 19 nt, Human herpesvirus 6
aacuaauucggaacauugu

SEQ ID NO: 157058 - RNA, 16 nt, Human herpesvirus 6
aaccuuauacagaugu

SEQ ID NO: 157059 - RNA, 18 nt, Human herpesvirus 6
aaccucgcucacaauauu

SEQ ID NO: 157060 - RNA, 20 nt, Human herpesvirus 6
aaccgccgugcuucuggcac

SEQ ID NO: 157061 - RNA, 21 nt, Human herpesvirus 6
aaccuaauggaccaagcaccu

SEQ ID NO: 157062 - RNA, 22 nt, Human herpesvirus 6
aacugcuggcugagauucacuc

SEQ ID NO: 157063 - RNA, 23 nt, Human herpesvirus 6
aacugcauacguuugccaaagcu

SEQ ID NO: 157064 - RNA, 24 nt, Human herpesvirus 6
aacugcauacguuugccaaagcug

SEQ ID NO: 157065 - RNA, 20 nt, Human herpesvirus 6
aacugcuggcugagauucac

SEQ ID NO: 157066 - RNA, 15 nt, Human herpesvirus 6
aacuguccucuuuga

SEQ ID NO: 157067 - RNA, 15 nt, Human herpesvirus 6
aacuguaugcaauac

SEQ ID NO: 157068 - RNA, 16 nt, Human herpesvirus 6
aacugugucuguucaa

SEQ ID NO: 157069 - RNA, 17 nt, Human herpesvirus 6
aacugugucuguucaac

SEQ ID NO: 157070 - RNA, 17 nt, Human herpesvirus 6
aacuuuuugccgucaca

SEQ ID NO: 157071 - RNA, 20 nt, Human herpesvirus 6
aacuuuuuguauuauguaau

SEQ ID NO: 157072 - RNA, 12 nt, Human herpesvirus 6
aagaaccaaaga

SEQ ID NO: 157073 - RNA, 13 nt, Human herpesvirus 6
aagaaccaacaga

SEQ ID NO: 157074 - RNA, 21 nt, Human herpesvirus 6
aagaaccaacagaaaaaaauc

SEQ ID NO: 157075 - RNA, 20 nt, Human herpesvirus 6
aagaaccggcgugugcgauu

SEQ ID NO: 157076 - RNA, 19 nt, Human herpesvirus 6
aagaaccugaaaucugagu

SEQ ID NO: 157077 - RNA, 16 nt, Human herpesvirus 6
aagaaaugaccuggcc

SEQ ID NO: 157078 - RNA, 13 nt, Human herpesvirus 6
aagaaacaaugcu

SEQ ID NO: 157079 - RNA, 14 nt, Human herpesvirus 6
aaccaggacagcuu

SEQ ID NO: 157080 - RNA, 18 nt, Human herpesvirus 6
aaccaggacagcuucuau

SEQ ID NO: 157081 - RNA, 23 nt, Human herpesvirus 6
aaccaucuguucaauuauaucau

SEQ ID NO: 157082 - RNA, 12 nt, Human herpesvirus 6
aaccaucaauuu

SEQ ID NO: 157083 - RNA, 13 nt, Human herpesvirus 6
aaccagauaucuc

SEQ ID NO: 157084 - RNA, 14 nt, Human herpesvirus 6
aacccgacaaugua

SEQ ID NO: 157085 - RNA, 13 nt, Human herpesvirus 6
aacccuaacccua

SEQ ID NO: 157086 - RNA, 22 nt, Human herpesvirus 6
aacccagcaugaugaucugccu

SEQ ID NO: 157087 - RNA, 13 nt, Human herpesvirus 6
aacccaaguucau

SEQ ID NO: 157088 - RNA, 15 nt, Human herpesvirus 6
aacccaaguucauca

SEQ ID NO: 157089 - RNA, 13 nt, Human herpesvirus 6
uuuugcaugcauu

SEQ ID NO: 157090 - RNA, 18 nt, Human herpesvirus 6
aacauaucgagccaaaga

SEQ ID NO: 157091 - RNA, 16 nt, Human herpesvirus 6
uuuuguagaguguuau

SEQ ID NO: 157092 - RNA, 12 nt, Human herpesvirus 6
uuuuguugguua

SEQ ID NO: 157093 - RNA, 12 nt, Human herpesvirus 6
uuuuuaacuaau

SEQ ID NO: 157094 - RNA, 12 nt, Human herpesvirus 6
uuuuuaauucca

SEQ ID NO: 157095 - RNA, 18 nt, Human herpesvirus 6
uuuuucggaaaacagcuc

SEQ ID NO: 157096 - RNA, 23 nt, Human herpesvirus 6
uuuuuccgauacagcaccaucaa

SEQ ID NO: 157097 - RNA, 19 nt, Human herpesvirus 6
aacauguauauaaauuggu

SEQ ID NO: 157098 - RNA, 13 nt, Human herpesvirus 6
aacauuucuuaca

SEQ ID NO: 157099 - RNA, 17 nt, Human herpesvirus 6
aacauuucuuacacaaa

SEQ ID NO: 157100 - RNA, 16 nt, Human herpesvirus 6
aaccaaagacauucaa

SEQ ID NO: 157101 - RNA, 17 nt, Human herpesvirus 6
uuuucgcuugaugcaug

SEQ ID NO: 157102 - RNA, 15 nt, Human herpesvirus 6
uuuucggauuuugaa

SEQ ID NO: 157103 - RNA, 15 nt, Human herpesvirus 6
uuuucuaucacucau

SEQ ID NO: 157104 - RNA, 21 nt, Human herpesvirus 6
uuuucuaucacucauacacag

SEQ ID NO: 157105 - RNA, 19 nt, Human herpesvirus 6
uuuuaccgguuugguggua

SEQ ID NO: 157106 - RNA, 23 nt, Human herpesvirus 6
uuuuccuguuguguuuacauaua

SEQ ID NO: 157107 - RNA, 16 nt, Human herpesvirus 6
uuuuacaauacacaga

SEQ ID NO: 157108 - RNA, 15 nt, Human herpesvirus 6
aacagacuuuacuuc

SEQ ID NO: 157109 - RNA, 21 nt, Human herpesvirus 6
uuuugaaaugucgaaucucaa

SEQ ID NO: 157110 - RNA, 14 nt, Human herpesvirus 6
uuuguguccuugaa

SEQ ID NO: 157111 - RNA, 13 nt, Human herpesvirus 6
uuugugaaauauc

SEQ ID NO: 157112 - RNA, 15 nt, Human herpesvirus 6
uuuguuuucuacauu

SEQ ID NO: 157113 - RNA, 19 nt, Human herpesvirus 6
uuuuaaaagauuugaucca

SEQ ID NO: 157114 - RNA, 16 nt, Human herpesvirus 6
uuuuaaagcacauaag

SEQ ID NO: 157115 - RNA, 17 nt, Human herpesvirus 6
uuuuaauuacggaacaa

SEQ ID NO: 157116 - RNA, 20 nt, Human herpesvirus 6
uuuuaaucaugauugcauca

SEQ ID NO: 157117 - RNA, 19 nt, Human herpesvirus 6
uuuuaauccauauuuggaa

SEQ ID NO: 157118 - RNA, 14 nt, Human herpesvirus 6
uuuuaauacauuuc

SEQ ID NO: 157119 - RNA, 17 nt, Human herpesvirus 6
uuuuaacaguacuauga

SEQ ID NO: 157120 - RNA, 19 nt, Human herpesvirus 6
uuuuaacaguacuaugauu

SEQ ID NO: 157121 - RNA, 16 nt, Human herpesvirus 6
uuugaggcaggaucag

SEQ ID NO: 157122 - RNA, 23 nt, Human herpesvirus 6
uuugcauaauaauggcaugcauu

SEQ ID NO: 157123 - RNA, 16 nt, Human herpesvirus 6
uuugcauacauuccuu

SEQ ID NO: 157124 - RNA, 19 nt, Human herpesvirus 6
uuugauuuuguacaguaga

SEQ ID NO: 157125 - RNA, 18 nt, Human herpesvirus 6
uuugcaaaacuguuaaaa

SEQ ID NO: 157126 - RNA, 19 nt, Human herpesvirus 6
uuugcaaaacuguuaaaag

SEQ ID NO: 157127 - RNA, 13 nt, Human herpesvirus 6
uuucccucagggu

SEQ ID NO: 157128 - RNA, 20 nt, Human herpesvirus 6
uuuccgauacagcaccauca

SEQ ID NO: 157129 - RNA, 17 nt, Human herpesvirus 6
uuucuguugaauuccag

SEQ ID NO: 157130 - RNA, 12 nt, Human herpesvirus 6
uuucuuacaaca

SEQ ID NO: 157131 - RNA, 18 nt, Human herpesvirus 6
uuucuuacaacaggcuug

SEQ ID NO: 157132 - RNA, 14 nt, Human herpesvirus 6
uuucuuuugaggga

SEQ ID NO: 157133 - RNA, 18 nt, Human herpesvirus 6
uuucuuugcagagaugua

SEQ ID NO: 157134 - RNA, 21 nt, Human herpesvirus 6
uugucagucaacgcaauucca

SEQ ID NO: 157135 - RNA, 15 nt, Human herpesvirus 6
uugucagauacugau

SEQ ID NO: 157136 - RNA, 20 nt, Human herpesvirus 6
uugucgaagucuucuugggc

SEQ ID NO: 157137 - RNA, 20 nt, Human herpesvirus 6
uugucgcaugcuuauuucaa

SEQ ID NO: 157138 - RNA, 14 nt, Human herpesvirus 6
uuguccuucagggg

SEQ ID NO: 157139 - RNA, 18 nt, Human herpesvirus 6
uucuugcuaccgacucca

SEQ ID NO: 157140 - RNA, 16 nt, Human herpesvirus 6
uucuugggacuaggaa

SEQ ID NO: 157141 - RNA, 16 nt, Human herpesvirus 6
uuuaaaaaaacacuag

SEQ ID NO: 157142 - RNA, 16 nt, Human herpesvirus 6
uuuaaacaacacagca

SEQ ID NO: 157143 - RNA, 16 nt, Human herpesvirus 6
uugucggcgaugcauc

SEQ ID NO: 157144 - RNA, 23 nt, Human herpesvirus 6
uugucgggaaauaaaaaauauua

SEQ ID NO: 157145 - RNA, 16 nt, Human herpesvirus 6
uugucucgcaaacagc

SEQ ID NO: 157146 - RNA, 23 nt, Human herpesvirus 6
uugugacuacguuuuguguuaaa

SEQ ID NO: 157147 - RNA, 16 nt, Human herpesvirus 6
uugugacgauaguguu

SEQ ID NO: 157148 - RNA, 16 nt, Human herpesvirus 6
uuguuuaaugcauuca

SEQ ID NO: 157149 - RNA, 17 nt, Human herpesvirus 6
uuucaucauuuacaaaa

SEQ ID NO: 157150 - RNA, 23 nt, Human herpesvirus 6
uuucauagacugcacgcugggcu

SEQ ID NO: 157151 - RNA, 18 nt, Human herpesvirus 6
uuuccagagcauacauaa

SEQ ID NO: 157152 - RNA, 18 nt, Human herpesvirus 6
uuuccauaaguuaauucc

SEQ ID NO: 157153 - RNA, 13 nt, Human herpesvirus 6
uuuccaugcauau

SEQ ID NO: 157154 - RNA, 13 nt, Human herpesvirus 6
uuuccaugugaau

SEQ ID NO: 157155 - RNA, 19 nt, Human herpesvirus 6
uuucccaauuuguguuuau

SEQ ID NO: 157156 - RNA, 12 nt, Human herpesvirus 6
uuucaguauuaa

SEQ ID NO: 157157 - RNA, 14 nt, Human herpesvirus 6
uuuagauuccguaa

SEQ ID NO: 157158 - RNA, 21 nt, Human herpesvirus 6
uuuaguacaguaugucuccaa

SEQ ID NO: 157159 - RNA, 22 nt, Human herpesvirus 6
uuuauaaacuuaaaacaaucaa

SEQ ID NO: 157160 - RNA, 21 nt, Human herpesvirus 6
uuuauagagcaacucaucaaa

SEQ ID NO: 157161 - RNA, 16 nt, Human herpesvirus 6
uuuaaaguuuugugau

SEQ ID NO: 157162 - RNA, 14 nt, Human herpesvirus 6
uuuaacuugaugua

SEQ ID NO: 157163 - RNA, 15 nt, Human herpesvirus 6
uuuaacuugauguau

SEQ ID NO: 157164 - RNA, 11 nt, Human herpesvirus 6
uuuaaucucac

SEQ ID NO: 157165 - RNA, 18 nt, Human herpesvirus 6
uuuagagaaaagugcaag

SEQ ID NO: 157166 - RNA, 12 nt, Human herpesvirus 6
uuuaauauaucu

SEQ ID NO: 157167 - RNA, 21 nt, Human herpesvirus 6
uuuaauaaagaacaugugaca

SEQ ID NO: 157168 - RNA, 17 nt, Human herpesvirus 6
uggauaaaauugauggu

SEQ ID NO: 157169 - RNA, 18 nt, Human herpesvirus 6
uggagcugugucgauguc

SEQ ID NO: 157170 - RNA, 15 nt, Human herpesvirus 6
uggagagaacugucu

SEQ ID NO: 157171 - RNA, 18 nt, Human herpesvirus 6
uggcagguaaccaaaaaa

SEQ ID NO: 157172 - RNA, 17 nt, Human herpesvirus 6
uggcagaucuugaaaag

SEQ ID NO: 157173 - RNA, 23 nt, Human herpesvirus 6
uggcaugugaacggagauauaau

SEQ ID NO: 157174 - RNA, 15 nt, Human herpesvirus 6
uggcaucagaaucca

SEQ ID NO: 157175 - RNA, 22 nt, Human herpesvirus 6
uggcaucggcuuggauagaaau

SEQ ID NO: 157176 - RNA, 19 nt, Human herpesvirus 6
uggcgccgaaacugccauc

SEQ ID NO: 157177 - RNA, 22 nt, Human herpesvirus 6
uggcugugacgaagauggaugu

SEQ ID NO: 157178 - RNA, 16 nt, Human herpesvirus 6
uggcuucuauauccaa

SEQ ID NO: 157179 - RNA, 23 nt, Human herpesvirus 6
uggcuucuauauccaaagacuca

SEQ ID NO: 157180 - RNA, 15 nt, Human herpesvirus 6
ugggaccuauaaaaa

SEQ ID NO: 157181 - RNA, 21 nt, Human herpesvirus 6
ugggaccuauaaaaaauuuca

SEQ ID NO: 157182 - RNA, 14 nt, Human herpesvirus 6
ugggacauguauau

SEQ ID NO: 157183 - RNA, 14 nt, Human herpesvirus 6
ugggaucuucugcu

SEQ ID NO: 157184 - RNA, 19 nt, Human herpesvirus 6
ugggaggagugaacauaca

SEQ ID NO: 157185 - RNA, 15 nt, Human herpesvirus 6
uguauagucuaauca

SEQ ID NO: 157186 - RNA, 17 nt, Human herpesvirus 6
uguaucgagucuuuaua

SEQ ID NO: 157187 - RNA, 21 nt, Human herpesvirus 6
uguaguuuguguccuugaauu

SEQ ID NO: 157188 - RNA, 16 nt, Human herpesvirus 6
uguauuuuucuuugca

SEQ ID NO: 157189 - RNA, 16 nt, Human herpesvirus 6
ugucaaauagccaaaa

SEQ ID NO: 157190 - RNA, 18 nt, Human herpesvirus 6
uguauuuaucgaccuaaa

SEQ ID NO: 157191 - RNA, 19 nt, Human herpesvirus 6
uguagcaaaaacagguuuc

SEQ ID NO: 157192 - RNA, 22 nt, Human herpesvirus 6
uguagaaagaucgcuuuugaaa

SEQ ID NO: 157193 - RNA, 18 nt, Human herpesvirus 6
uguaaauaaacaccagca

SEQ ID NO: 157194 - RNA, 12 nt, Human herpesvirus 6
uguaaauaugcu

SEQ ID NO: 157195 - RNA, 13 nt, Human herpesvirus 6
uguaaaggauaau

SEQ ID NO: 157196 - RNA, 22 nt, Human herpesvirus 6
uguaacaucccagauacauaaa

SEQ ID NO: 157197 - RNA, 13 nt, Human herpesvirus 6
uguaaaucaucaa

SEQ ID NO: 157198 - RNA, 21 nt, Human herpesvirus 6
ugggguuccaggcggcaugaa

SEQ ID NO: 157199 - RNA, 14 nt, Human herpesvirus 6
ugggauugugauuc

SEQ ID NO: 157200 - RNA, 13 nt, Human herpesvirus 6
ugggcacaaaaca

SEQ ID NO: 157201 - RNA, 15 nt, Human herpesvirus 6
ugggugagugcauua

SEQ ID NO: 157202 - RNA, 12 nt, Human herpesvirus 6
ugggugugcauu

SEQ ID NO: 157203 - RNA, 17 nt, Human herpesvirus 6
ugguugaaaucacacca

SEQ ID NO: 157204 - RNA, 15 nt, Human herpesvirus 6
ugguuuacagcacuu

SEQ ID NO: 157205 - RNA, 20 nt, Human herpesvirus 6
uggaaauucgcuacuaucgu

SEQ ID NO: 157206 - RNA, 15 nt, Human herpesvirus 6
ugcugugauagcuau

SEQ ID NO: 157207 - RNA, 19 nt, Human herpesvirus 6
ugcuguauauguaaauaaa

SEQ ID NO: 157208 - RNA, 22 nt, Human herpesvirus 6
ugcuguauauguaaauaaacac

SEQ ID NO: 157209 - RNA, 13 nt, Human herpesvirus 6
ugcuuauacuguu

SEQ ID NO: 157210 - RNA, 23 nt, Human herpesvirus 6
ugcuuuuagauggaaaauugcaa

SEQ ID NO: 157211 - RNA, 15 nt, Human herpesvirus 6
uggagaagaucuaaa

SEQ ID NO: 157212 - RNA, 15 nt, Human herpesvirus 6
uggaagaaauugcaa

SEQ ID NO: 157213 - RNA, 15 nt, Human herpesvirus 6
uggaagaaccaaaga

SEQ ID NO: 157214 - RNA, 22 nt, Human herpesvirus 6
uggaagaaccaaagacauucaa

SEQ ID NO: 157215 - RNA, 20 nt, Human herpesvirus 6
ugcugcuagauaauuaugca

SEQ ID NO: 157216 - RNA, 16 nt, Human herpesvirus 6
ugcugguaaauuuuau

SEQ ID NO: 157217 - RNA, 13 nt, Human herpesvirus 6
ugcucaaccuaau

SEQ ID NO: 157218 - RNA, 13 nt, Human herpesvirus 6
ugcagacgcugaa

SEQ ID NO: 157219 - RNA, 14 nt, Human herpesvirus 6
ugcagaacaucuca

SEQ ID NO: 157220 - RNA, 16 nt, Human herpesvirus 6
ugcagaacaucucaga

SEQ ID NO: 157221 - RNA, 21 nt, Human herpesvirus 6
ugcagaacaucucagaucuag

SEQ ID NO: 157222 - RNA, 17 nt, Human herpesvirus 6
ugcagaucuaauucaca

SEQ ID NO: 157223 - RNA, 22 nt, Human herpesvirus 6
ugcagcguuucauuucaucuug

SEQ ID NO: 157224 - RNA, 21 nt, Human herpesvirus 6
ugacuauuaaacuaacauagc

SEQ ID NO: 157225 - RNA, 16 nt, Human herpesvirus 6
ugacgauucaaaccgc

SEQ ID NO: 157226 - RNA, 23 nt, Human herpesvirus 6
ugacggccuccggccccagagac

SEQ ID NO: 157227 - RNA, 19 nt, Human herpesvirus 6
ugacggaggcgacgaaaga

SEQ ID NO: 157228 - RNA, 16 nt, Human herpesvirus 6
ugacuguguguugaau

SEQ ID NO: 157229 - RNA, 19 nt, Human herpesvirus 6
ugacuggagcagucugcug

SEQ ID NO: 157230 - RNA, 20 nt, Human herpesvirus 6
ugacucugcauaguguagaa

SEQ ID NO: 157231 - RNA, 15 nt, Human herpesvirus 6
ugagaaagccgguga

SEQ ID NO: 157232 - RNA, 14 nt, Human herpesvirus 6
ugccuauacaggca

SEQ ID NO: 157233 - RNA, 15 nt, Human herpesvirus 6
ugccugcauaugcag

SEQ ID NO: 157234 - RNA, 15 nt, Human herpesvirus 6
ugccguugagugccu

SEQ ID NO: 157235 - RNA, 18 nt, Human herpesvirus 6
ugccgggaugagcuuuaa

SEQ ID NO: 157236 - RNA, 14 nt, Human herpesvirus 6
ugcaucugccauau

SEQ ID NO: 157237 - RNA, 16 nt, Human herpesvirus 6
ugcaucugccauauca

SEQ ID NO: 157238 - RNA, 14 nt, Human herpesvirus 6
ugcaugugauaaau

SEQ ID NO: 157239 - RNA, 14 nt, Human herpesvirus 6
ugcauuguuaucac

SEQ ID NO: 157240 - RNA, 16 nt, Human herpesvirus 6
ugcauucgugcucgca

SEQ ID NO: 157241 - RNA, 22 nt, Human herpesvirus 6
ugcauuucuugguuguguauau

SEQ ID NO: 157242 - RNA, 23 nt, Human herpesvirus 6
uucuucaggugucucaaccuuca

SEQ ID NO: 157243 - RNA, 20 nt, Human herpesvirus 6
uucuuagaaccgaucuguga

SEQ ID NO: 157244 - RNA, 17 nt, Human herpesvirus 6
uucuuacguaugugaag

SEQ ID NO: 157245 - RNA, 12 nt, Human herpesvirus 6
uucugugacuau

SEQ ID NO: 157246 - RNA, 19 nt, Human herpesvirus 6
uucuggaucggacggugau

SEQ ID NO: 157247 - RNA, 17 nt, Human herpesvirus 6
uucugacucucucagua

SEQ ID NO: 157248 - RNA, 19 nt, Human herpesvirus 6
uucugacucucucaguaau

SEQ ID NO: 157249 - RNA, 12 nt, Human herpesvirus 6
uucuauauccaa

SEQ ID NO: 157250 - RNA, 18 nt, Human herpesvirus 6
uucucaugcgcaguguua

SEQ ID NO: 157251 - RNA, 17 nt, Human herpesvirus 6
uucucuuuuuaauucca

SEQ ID NO: 157252 - RNA, 18 nt, Human herpesvirus 6
uucucuuuuuaauuccaa

SEQ ID NO: 157253 - RNA, 17 nt, Human herpesvirus 6
uucucguuuacuccgau

SEQ ID NO: 157254 - RNA, 22 nt, Human herpesvirus 6
uucgcucacguggcagucugcu

SEQ ID NO: 157255 - RNA, 16 nt, Human herpesvirus 6
uucggaaaauguaaac

SEQ ID NO: 157256 - RNA, 18 nt, Human herpesvirus 6
uucgguuucgucgcaaaa

SEQ ID NO: 157257 - RNA, 13 nt, Human herpesvirus 6
uucuaaacacaga

SEQ ID NO: 157258 - RNA, 21 nt, Human herpesvirus 6
uucguuaaaaaaaaugugucu

SEQ ID NO: 157259 - RNA, 19 nt, Human herpesvirus 6
uucguuacgacgaacaaua

SEQ ID NO: 157260 - RNA, 21 nt, Human herpesvirus 6
uucgaugucggaaucuacuga

SEQ ID NO: 157261 - RNA, 13 nt, Human herpesvirus 6
uucgccuguaaag

SEQ ID NO: 157262 - RNA, 21 nt, Human herpesvirus 6
uucgccuguaaagucugaaug

SEQ ID NO: 157263 - RNA, 16 nt, Human herpesvirus 6
uucgccuuguauuuca

SEQ ID NO: 157264 - RNA, 18 nt, Human herpesvirus 6
uuccuuaauucuaaauac

SEQ ID NO: 157265 - RNA, 20 nt, Human herpesvirus 6
uuccgucacaacauuuggca

SEQ ID NO: 157266 - RNA, 15 nt, Human herpesvirus 6
uuccucaaaugaauu

SEQ ID NO: 157267 - RNA, 20 nt, Human herpesvirus 6
uucauuguuuuugcauguga

SEQ ID NO: 157268 - RNA, 18 nt, Human herpesvirus 6
uuccacgcauagacaaac

SEQ ID NO: 157269 - RNA, 16 nt, Human herpesvirus 6
uuccagggaacuugau

SEQ ID NO: 157270 - RNA, 21 nt, Human herpesvirus 6
uuccagggaacuugauguuga

SEQ ID NO: 157271 - RNA, 18 nt, Human herpesvirus 6
uuccauaaguuaauucca

SEQ ID NO: 157272 - RNA, 19 nt, Human herpesvirus 6
uuccauaaguuaauuccag

SEQ ID NO: 157273 - RNA, 17 nt, Human herpesvirus 6
uuccaguauugaagaaa

SEQ ID NO: 157274 - RNA, 18 nt, Human herpesvirus 6
uuccccaugucuugccuc

SEQ ID NO: 157275 - RNA, 16 nt, Human herpesvirus 6
uuccgcgauacccagc

SEQ ID NO: 157276 - RNA, 21 nt, Human herpesvirus 6
uuccgucucgccuaccuucac

SEQ ID NO: 157277 - RNA, 22 nt, Human herpesvirus 6
uuccuagaggugccgaugaauu

SEQ ID NO: 157278 - RNA, 17 nt, Human herpesvirus 6
uucccuucagacaucca

SEQ ID NO: 157279 - RNA, 23 nt, Human herpesvirus 6
uucccuuuaaccccacgaaaaau

SEQ ID NO: 157280 - RNA, 14 nt, Human herpesvirus 6
uuccgauacagcac

SEQ ID NO: 157281 - RNA, 20 nt, Human herpesvirus 6
uuccgauacagcaccaucaa

SEQ ID NO: 157282 - RNA, 21 nt, Human herpesvirus 6
uuccgauacagcaccaucaau

SEQ ID NO: 157283 - RNA, 14 nt, Human herpesvirus 6
uuccgccugcagug

SEQ ID NO: 157284 - RNA, 16 nt, Human herpesvirus 6
uucaugauauuccaga

SEQ ID NO: 157285 - RNA, 15 nt, Human herpesvirus 6
uucaguaacauuuaa

SEQ ID NO: 157286 - RNA, 16 nt, Human herpesvirus 6
uucaguaacauuuaau

SEQ ID NO: 157287 - RNA, 12 nt, Human herpesvirus 6
uucauacuguau

SEQ ID NO: 157288 - RNA, 12 nt, Human herpesvirus 6
uucaucaguuuc

SEQ ID NO: 157289 - RNA, 16 nt, Human herpesvirus 6
uucaucaucaccaagu

SEQ ID NO: 157290 - RNA, 19 nt, Human herpesvirus 6
uucauaaaugguagcuauu

SEQ ID NO: 157291 - RNA, 20 nt, Human herpesvirus 6
uucauaaaugguagcuauua

SEQ ID NO: 157292 - RNA, 14 nt, Human herpesvirus 6
uucaauauaugauu

SEQ ID NO: 157293 - RNA, 17 nt, Human herpesvirus 6
uucaaucuguguuucca

SEQ ID NO: 157294 - RNA, 20 nt, Human herpesvirus 6
uucaaucuguguuuccaaaa

SEQ ID NO: 157295 - RNA, 13 nt, Human herpesvirus 6
uucaauuacucaa

SEQ ID NO: 157296 - RNA, 17 nt, Human herpesvirus 6
uucacauauaugaugcu

SEQ ID NO: 157297 - RNA, 21 nt, Human herpesvirus 6
uucaccacugugauaugcaaa

SEQ ID NO: 157298 - RNA, 13 nt, Human herpesvirus 6
uucaccagauuca

SEQ ID NO: 157299 - RNA, 13 nt, Human herpesvirus 6
uuaucaaugauac

SEQ ID NO: 157300 - RNA, 18 nt, Human herpesvirus 6
uuauaugcgucagaccuc

SEQ ID NO: 157301 - RNA, 20 nt, Human herpesvirus 6
uuaucgauguagauaaauau

SEQ ID NO: 157302 - RNA, 16 nt, Human herpesvirus 6
uuaucgaccaugugua

SEQ ID NO: 157303 - RNA, 15 nt, Human herpesvirus 6
uuaucauagacaaac

SEQ ID NO: 157304 - RNA, 19 nt, Human herpesvirus 6
uuauucacggcuaauauga

SEQ ID NO: 157305 - RNA, 22 nt, Human herpesvirus 6
uuauucacggcuaauaugaucc

SEQ ID NO: 157306 - RNA, 14 nt, Human herpesvirus 6
uuauuaacuguaaa

SEQ ID NO: 157307 - RNA, 12 nt, Human herpesvirus 6
uuauucugcuau

SEQ ID NO: 157308 - RNA, 17 nt, Human herpesvirus 6
uuauucugucuugauaa

SEQ ID NO: 157309 - RNA, 15 nt, Human herpesvirus 6
uuauuggcaaccuga

SEQ ID NO: 157310 - RNA, 20 nt, Human herpesvirus 6
uuaugugucaaguuucacca

SEQ ID NO: 157311 - RNA, 16 nt, Human herpesvirus 6
uuaugaucuagcuaua

SEQ ID NO: 157312 - RNA, 14 nt, Human herpesvirus 6
uuaccuauagucaa

SEQ ID NO: 157313 - RNA, 13 nt, Human herpesvirus 6
uuaccuaucgucc

SEQ ID NO: 157314 - RNA, 18 nt, Human herpesvirus 6
uuacauauagucaauguu

SEQ ID NO: 157315 - RNA, 18 nt, Human herpesvirus 6
uuacauuaaacacuaaau

SEQ ID NO: 157316 - RNA, 23 nt, Human herpesvirus 6
uuaccaccagaaaaguauagucu

SEQ ID NO: 157317 - RNA, 15 nt, Human herpesvirus 6
uuacauuaugaaguc

SEQ ID NO: 157318 - RNA, 13 nt, Human herpesvirus 6
uuacauauaguca

SEQ ID NO: 157319 - RNA, 20 nt, Human herpesvirus 6
uuagugaaaaagguggcauc

SEQ ID NO: 157320 - RNA, 18 nt, Human herpesvirus 6
uuacuaccucuaaaccca

SEQ ID NO: 157321 - RNA, 21 nt, Human herpesvirus 6
uuacuaccucuaaacccagac

SEQ ID NO: 157322 - RNA, 21 nt, Human herpesvirus 6
uuagagacgugauacuauaaa

SEQ ID NO: 157323 - RNA, 18 nt, Human herpesvirus 6
uuagauauauacuuucaa

SEQ ID NO: 157324 - RNA, 16 nt, Human herpesvirus 6
uuaaguagugcuucaa

SEQ ID NO: 157325 - RNA, 23 nt, Human herpesvirus 6
uuaauaaauugguuuuuuuuaac

SEQ ID NO: 157326 - RNA, 16 nt, Human herpesvirus 6
uuaauaguuacuuuga

SEQ ID NO: 157327 - RNA, 13 nt, Human herpesvirus 6
uuaagcaaaaaca

SEQ ID NO: 157328 - RNA, 22 nt, Human herpesvirus 6
uuaagagugcaacaaaaagcuu

SEQ ID NO: 157329 - RNA, 21 nt, Human herpesvirus 6
uuaaacaacacagcacauaac

SEQ ID NO: 157330 - RNA, 16 nt, Human herpesvirus 6
uguuugcagaugagcc

SEQ ID NO: 157331 - RNA, 15 nt, Human herpesvirus 6
uuaaaguuauauucu

SEQ ID NO: 157332 - RNA, 19 nt, Human herpesvirus 6
uuaaaguuauauucuucug

SEQ ID NO: 157333 - RNA, 16 nt, Human herpesvirus 6
uuaaacuaacauagcg

SEQ ID NO: 157334 - RNA, 17 nt, Human herpesvirus 6
uuaaagaguuuucucac

SEQ ID NO: 157335 - RNA, 23 nt, Human herpesvirus 6
ugucacacagcaugaacucucac

SEQ ID NO: 157336 - RNA, 14 nt, Human herpesvirus 6
ugucucaaccuuca

SEQ ID NO: 157337 - RNA, 22 nt, Human herpesvirus 6
ugucgguaaacuuaccauauau

SEQ ID NO: 157338 - RNA, 19 nt, Human herpesvirus 6
ugucggucagacagugagu

SEQ ID NO: 157339 - RNA, 16 nt, Human herpesvirus 6
ugucgucuucccgcca

SEQ ID NO: 157340 - RNA, 19 nt, Human herpesvirus 6
ugucucgcaaacagcuuua

SEQ ID NO: 157341 - RNA, 22 nt, Human herpesvirus 6
ugucucgggggcauuagucuua

SEQ ID NO: 157342 - RNA, 15 nt, Human herpesvirus 6
uguugugaucuuuac

SEQ ID NO: 157343 - RNA, 16 nt, Human herpesvirus 6
ugucuugauaacggcu

SEQ ID NO: 157344 - RNA, 13 nt, Human herpesvirus 6
uguuuagccuuua

SEQ ID NO: 157345 - RNA, 19 nt, Human herpesvirus 6
uguuuaaaguuuugugauc

SEQ ID NO: 157346 - RNA, 19 nt, Human herpesvirus 6
uguuuaaguaaaacaaaac

SEQ ID NO: 157347 - RNA, 16 nt, Human herpesvirus 6
uguuucauccaaauac

SEQ ID NO: 157348 - RNA, 18 nt, Human herpesvirus 6
uguuuccagagcauacau

SEQ ID NO: 157349 - RNA, 17 nt, Human herpesvirus 6
ucuuucuaaaaucaaaa

SEQ ID NO: 157350 - RNA, 21 nt, Human herpesvirus 6
ucuuuauuaaauguuacugaa

SEQ ID NO: 157351 - RNA, 22 nt, Human herpesvirus 6
ucuuuauuaaauguuacugaac

SEQ ID NO: 157352 - RNA, 21 nt, Human herpesvirus 6
ucuuuacaaaagacacaaucu

SEQ ID NO: 157353 - RNA, 16 nt, Human herpesvirus 6
ucuugucacucucgau

SEQ ID NO: 157354 - RNA, 15 nt, Human herpesvirus 6
ucuugguucuauaag

SEQ ID NO: 157355 - RNA, 18 nt, Human herpesvirus 6
ucuugguucuauaagcuc

SEQ ID NO: 157356 - RNA, 16 nt, Human herpesvirus 6
ucuugguuguguauau

SEQ ID NO: 157357 - RNA, 15 nt, Human herpesvirus 6
ucuuguugaguuuca

SEQ ID NO: 157358 - RNA, 21 nt, Human herpesvirus 6
ucuuguguucuaucacauagu

SEQ ID NO: 157359 - RNA, 22 nt, Human herpesvirus 6
ucuucgaauacuuucaugauuc

SEQ ID NO: 157360 - RNA, 11 nt, Human herpesvirus 6
ucuugaucaaa

SEQ ID NO: 157361 - RNA, 20 nt, Human herpesvirus 6
ugaaaccaaagcauacucaa

SEQ ID NO: 157362 - RNA, 17 nt, Human herpesvirus 6
ugaaacuccccagagaa

SEQ ID NO: 157363 - RNA, 20 nt, Human herpesvirus 6
ugaaacuccccagagaaaau

SEQ ID NO: 157364 - RNA, 18 nt, Human herpesvirus 6
ugaaauucaaaauaaaua

SEQ ID NO: 157365 - RNA, 19 nt, Human herpesvirus 6
ugaaaucuauccucccauu

SEQ ID NO: 157366 - RNA, 18 nt, Human herpesvirus 6
ugaaaguugauacgccag

SEQ ID NO: 157367 - RNA, 15 nt, Human herpesvirus 6
ugaaaguauuuuacu

SEQ ID NO: 157368 - RNA, 19 nt, Human herpesvirus 6
ugaaaguauuuuacuuuau

SEQ ID NO: 157369 - RNA, 21 nt, Human herpesvirus 6
ugaagaaaauugcagaucuaa

SEQ ID NO: 157370 - RNA, 22 nt, Human herpesvirus 6
ugaagaaaauugcagaucuaau

SEQ ID NO: 157371 - RNA, 19 nt, Human herpesvirus 6
ugaagaaguuaacuaugga

SEQ ID NO: 157372 - RNA, 21 nt, Human herpesvirus 6
ugaacgcgucgguaaacaauu

SEQ ID NO: 157373 - RNA, 14 nt, Human herpesvirus 6
ugaacguaugagga

SEQ ID NO: 157374 - RNA, 16 nt, Human herpesvirus 6
ugaauguguaaugucu

SEQ ID NO: 157375 - RNA, 20 nt, Human herpesvirus 6
ugaauugugcaagcuguaug

SEQ ID NO: 157376 - RNA, 21 nt, Human herpesvirus 6
ugaauuuguccguauacagcu

SEQ ID NO: 157377 - RNA, 11 nt, Human herpesvirus 6
ugaauuuaccg

SEQ ID NO: 157378 - RNA, 23 nt, Human herpesvirus 6
ugaaucuuccuuauaacacacag

SEQ ID NO: 157379 - RNA, 15 nt, Human herpesvirus 6
ugaauaauaagccua

SEQ ID NO: 157380 - RNA, 20 nt, Human herpesvirus 6
ugaagauuugacauugcuga

SEQ ID NO: 157381 - RNA, 21 nt, Human herpesvirus 6
ugaagauuugacauugcugaa

SEQ ID NO: 157382 - RNA, 21 nt, Human herpesvirus 6
ugaagaggugcgaaugcucaa

SEQ ID NO: 157383 - RNA, 18 nt, Human herpesvirus 6
ugaagaucacgcccauau

SEQ ID NO: 157384 - RNA, 20 nt, Human herpesvirus 6
ugacaccucaauuaauacaa

SEQ ID NO: 157385 - RNA, 19 nt, Human herpesvirus 6
ugacagaauucuucuguga

SEQ ID NO: 157386 - RNA, 15 nt, Human herpesvirus 6
ugacagcgauacaau

SEQ ID NO: 157387 - RNA, 21 nt, Human herpesvirus 6
ugacagcgauacaauaacaau

SEQ ID NO: 157388 - RNA, 17 nt, Human herpesvirus 6
ugaccaccaaaacgaca

SEQ ID NO: 157389 - RNA, 12 nt, Human herpesvirus 6
ugacauugcuga

SEQ ID NO: 157390 - RNA, 14 nt, Human herpesvirus 6
ucgcggaguggagu

SEQ ID NO: 157391 - RNA, 19 nt, Human herpesvirus 6
ucgcgcaccgccuccgcca

SEQ ID NO: 157392 - RNA, 19 nt, Human herpesvirus 6
ucgcgccgcguacacgaaa

SEQ ID NO: 157393 - RNA, 23 nt, Human herpesvirus 6
ucgcuaagcucguucucuuucca

SEQ ID NO: 157394 - RNA, 16 nt, Human herpesvirus 6
ucggaagacauuucua

SEQ ID NO: 157395 - RNA, 22 nt, Human herpesvirus 6
uccuauaaaaaaagcaaauacu

SEQ ID NO: 157396 - RNA, 16 nt, Human herpesvirus 6
uccuauaaauacugaa

SEQ ID NO: 157397 - RNA, 20 nt, Human herpesvirus 6
uccuauucagaggugcugau

SEQ ID NO: 157398 - RNA, 15 nt, Human herpesvirus 6
uccuauucauaacag

SEQ ID NO: 157399 - RNA, 18 nt, Human herpesvirus 6
uccuauugguuugcauaa

SEQ ID NO: 157400 - RNA, 18 nt, Human herpesvirus 6
uccguuuuucucugcaaa

SEQ ID NO: 157401 - RNA, 21 nt, Human herpesvirus 6
uccguuucucggcauaucuuc

SEQ ID NO: 157402 - RNA, 19 nt, Human herpesvirus 6
uccgucucgccuaccuuca

SEQ ID NO: 157403 - RNA, 14 nt, Human herpesvirus 6
uccgucacaacauu

SEQ ID NO: 157404 - RNA, 15 nt, Human herpesvirus 6
ucuacuguacaaaau

SEQ ID NO: 157405 - RNA, 12 nt, Human herpesvirus 6
ucuacugagauc

SEQ ID NO: 157406 - RNA, 20 nt, Human herpesvirus 6
ucuacguaugaaaguccuca

SEQ ID NO: 157407 - RNA, 15 nt, Human herpesvirus 6
ucgucuccuacauuc

SEQ ID NO: 157408 - RNA, 18 nt, Human herpesvirus 6
ucgugaagaggauggauc

SEQ ID NO: 157409 - RNA, 17 nt, Human herpesvirus 6
ucgucgccuccccgggu

SEQ ID NO: 157410 - RNA, 20 nt, Human herpesvirus 6
ucgugaucaccgugaucauc

SEQ ID NO: 157411 - RNA, 18 nt, Human herpesvirus 6
ucguaaccauucugcaaa

SEQ ID NO: 157412 - RNA, 19 nt, Human herpesvirus 6
ucgguugcuuauaugcagc

SEQ ID NO: 157413 - RNA, 16 nt, Human herpesvirus 6
ucgucacuccaaucca

SEQ ID NO: 157414 - RNA, 21 nt, Human herpesvirus 6
ucguccauacaguuguguaca

SEQ ID NO: 157415 - RNA, 23 nt, Human herpesvirus 6
ucugacauggaagacaaauuaau

SEQ ID NO: 157416 - RNA, 23 nt, Human herpesvirus 6
ucugacuauuucaaaagaguuac

SEQ ID NO: 157417 - RNA, 20 nt, Human herpesvirus 6
ucugagaugacaucugcaaa

SEQ ID NO: 157418 - RNA, 21 nt, Human herpesvirus 6
ucugagaugacaucugcaaaa

SEQ ID NO: 157419 - RNA, 22 nt, Human herpesvirus 6
ucucuuuauagagcaacucauc

SEQ ID NO: 157420 - RNA, 20 nt, Human herpesvirus 6
ucucacucgugccaguucac

SEQ ID NO: 157421 - RNA, 21 nt, Human herpesvirus 6
ucucacugucgaaauucacca

SEQ ID NO: 157422 - RNA, 14 nt, Human herpesvirus 6
ucucagacagcuuu

SEQ ID NO: 157423 - RNA, 18 nt, Human herpesvirus 6
ucucaagcacaaaaccag

SEQ ID NO: 157424 - RNA, 21 nt, Human herpesvirus 6
ucuauugguuaaaaggaauag

SEQ ID NO: 157425 - RNA, 17 nt, Human herpesvirus 6
ucuagaauaucugcuaa

SEQ ID NO: 157426 - RNA, 18 nt, Human herpesvirus 6
ucuauggaucugagugaa

SEQ ID NO: 157427 - RNA, 16 nt, Human herpesvirus 6
ucuauuauaagcaaac

SEQ ID NO: 157428 - RNA, 21 nt, Human herpesvirus 6
ucugccgaucucucucagauc

SEQ ID NO: 157429 - RNA, 17 nt, Human herpesvirus 6
ucugcuauuuuuuucac

SEQ ID NO: 157430 - RNA, 12 nt, Human herpesvirus 6
ucugcucugugu

SEQ ID NO: 157431 - RNA, 14 nt, Human herpesvirus 6
ucugcuuagcauau

SEQ ID NO: 157432 - RNA, 16 nt, Human herpesvirus 6
ucugcgugaacguguu

SEQ ID NO: 157433 - RNA, 20 nt, Human herpesvirus 6
ucugcggaaauaaaaaauau

SEQ ID NO: 157434 - RNA, 22 nt, Human herpesvirus 6
ucugcggaaauaaaaaauauua

SEQ ID NO: 157435 - RNA, 14 nt, Human herpesvirus 6
ucuguuuuaauuaa

SEQ ID NO: 157436 - RNA, 15 nt, Human herpesvirus 6
ucuucagcucaaaca

SEQ ID NO: 157437 - RNA, 17 nt, Human herpesvirus 6
ucuguucuucaucauca

SEQ ID NO: 157438 - RNA, 16 nt, Human herpesvirus 6
ucuguuuauugccaau

SEQ ID NO: 157439 - RNA, 20 nt, Human herpesvirus 6
ucauagauuguuauuaguga

SEQ ID NO: 157440 - RNA, 22 nt, Human herpesvirus 6
ucauagauuguuauuagugauu

SEQ ID NO: 157441 - RNA, 20 nt, Human herpesvirus 6
ucauauggugcguguacaag

SEQ ID NO: 157442 - RNA, 21 nt, Human herpesvirus 6
ucauauggugcguguacaagu

SEQ ID NO: 157443 - RNA, 15 nt, Human herpesvirus 6
ucauaguuaugcguc

SEQ ID NO: 157444 - RNA, 13 nt, Human herpesvirus 6
ucauauaagaacc

SEQ ID NO: 157445 - RNA, 14 nt, Human herpesvirus 6
ucaugaguguuuaa

SEQ ID NO: 157446 - RNA, 20 nt, Human herpesvirus 6
ucaugaguguuuaacgcuca

SEQ ID NO: 157447 - RNA, 18 nt, Human herpesvirus 6
ucaugauauuccagacaa

SEQ ID NO: 157448 - RNA, 13 nt, Human herpesvirus 6
ucaucagcauuaa

SEQ ID NO: 157449 - RNA, 18 nt, Human herpesvirus 6
ucagugaaggcugccaug

SEQ ID NO: 157450 - RNA, 13 nt, Human herpesvirus 6
ucauaaacagaca

SEQ ID NO: 157451 - RNA, 23 nt, Human herpesvirus 6
ucauacccgaaguucucucacgc

SEQ ID NO: 157452 - RNA, 19 nt, Human herpesvirus 6
ucauacaaaaugaccucau

SEQ ID NO: 157453 - RNA, 17 nt, Human herpesvirus 6
uccaaaguauuggugca

SEQ ID NO: 157454 - RNA, 17 nt, Human herpesvirus 6
uccaaauacacuuucau

SEQ ID NO: 157455 - RNA, 15 nt, Human herpesvirus 6
ucauggugucuuugu

SEQ ID NO: 157456 - RNA, 22 nt, Human herpesvirus 6
ucauucgcuaguaauauaggau

SEQ ID NO: 157457 - RNA, 23 nt, Human herpesvirus 6
ucauucgcuaguaauauaggauu

SEQ ID NO: 157458 - RNA, 15 nt, Human herpesvirus 6
ucauguuuacugcau

SEQ ID NO: 157459 - RNA, 14 nt, Human herpesvirus 6
uccaacacuuuuac

SEQ ID NO: 157460 - RNA, 23 nt, Human herpesvirus 6
uccaacgcacacgcuaacuaaau

SEQ ID NO: 157461 - RNA, 19 nt, Human herpesvirus 6
uccaacggagaaaacuaua

SEQ ID NO: 157462 - RNA, 14 nt, Human herpesvirus 6
uccaagacauguac

SEQ ID NO: 157463 - RNA, 16 nt, Human herpesvirus 6
uccauccgucauacaa

SEQ ID NO: 157464 - RNA, 22 nt, Human herpesvirus 6
uccaucggaacgauaugucucu

SEQ ID NO: 157465 - RNA, 17 nt, Human herpesvirus 6
uccaugcaacacaacaa

SEQ ID NO: 157466 - RNA, 13 nt, Human herpesvirus 6
uccauuaccacac

SEQ ID NO: 157467 - RNA, 19 nt, Human herpesvirus 6
uccauucuagauacggugu

SEQ ID NO: 157468 - RNA, 15 nt, Human herpesvirus 6
uccccgggugcuccg

SEQ ID NO: 157469 - RNA, 15 nt, Human herpesvirus 6
ucccggaaauuucac

SEQ ID NO: 157470 - RNA, 15 nt, Human herpesvirus 6
ucccggcccagagac

SEQ ID NO: 157471 - RNA, 17 nt, Human herpesvirus 6
ucccgucuccucaugga

SEQ ID NO: 157472 - RNA, 23 nt, Human herpesvirus 6
uccgccugcagugauauggaaac

SEQ ID NO: 157473 - RNA, 15 nt, Human herpesvirus 6
uccggccccagagac

SEQ ID NO: 157474 - RNA, 12 nt, Human herpesvirus 6
ucacauguucuu

SEQ ID NO: 157475 - RNA, 15 nt, Human herpesvirus 6
ucacauuauaagaca

SEQ ID NO: 157476 - RNA, 21 nt, Human herpesvirus 6
ucacauuauaagacacugaua

SEQ ID NO: 157477 - RNA, 17 nt, Human herpesvirus 6
ucacggcuaauaugauc

SEQ ID NO: 157478 - RNA, 16 nt, Human herpesvirus 6
ucacgggcagcugcau

SEQ ID NO: 157479 - RNA, 22 nt, Human herpesvirus 6
ucacggucgaaaguucaucuuu

SEQ ID NO: 157480 - RNA, 15 nt, Human herpesvirus 6
ucacuccaauccaac

SEQ ID NO: 157481 - RNA, 14 nt, Human herpesvirus 6
ucacucauacacag

SEQ ID NO: 157482 - RNA, 23 nt, Human herpesvirus 6
ucagauaccucauuguuucacuu

SEQ ID NO: 157483 - RNA, 15 nt, Human herpesvirus 6
ucagaucgagaauuu

SEQ ID NO: 157484 - RNA, 15 nt, Human herpesvirus 6
ucacucucgauuuca

SEQ ID NO: 157485 - RNA, 16 nt, Human herpesvirus 6
ucagcacccuaugcaa

SEQ ID NO: 157486 - RNA, 22 nt, Human herpesvirus 6
ucagcacccuaugcaagcucau

SEQ ID NO: 157487 - RNA, 14 nt, Human herpesvirus 6
ucacaagcugucca

SEQ ID NO: 157488 - RNA, 17 nt, Human herpesvirus 6
ucacaagcuguccaucu

SEQ ID NO: 157489 - RNA, 22 nt, Human herpesvirus 6
ucacaagcuguccaucuucaga

SEQ ID NO: 157490 - RNA, 16 nt, Human herpesvirus 6
ucacacguuauaucua

SEQ ID NO: 157491 - RNA, 22 nt, Human herpesvirus 6
ucaaccccgcacgcauaccuac

SEQ ID NO: 157492 - RNA, 18 nt, Human herpesvirus 6
ucaacaacgucaugcaaa

SEQ ID NO: 157493 - RNA, 22 nt, Human herpesvirus 6
ucaacaacgucaugcaaaacag

SEQ ID NO: 157494 - RNA, 17 nt, Human herpesvirus 6
ucaacacacagucauac

SEQ ID NO: 157495 - RNA, 14 nt, Human herpesvirus 6
ucaaaaaugcacaa

SEQ ID NO: 157496 - RNA, 18 nt, Human herpesvirus 6
ucaaaaauguugcaugga

SEQ ID NO: 157497 - RNA, 19 nt, Human herpesvirus 6
ucaaaaauguugcauggaa

SEQ ID NO: 157498 - RNA, 17 nt, Human herpesvirus 6
ucaaaucggacaaugca

SEQ ID NO: 157499 - RNA, 18 nt, Human herpesvirus 6
ucaacaaacacgugauuc

SEQ ID NO: 157500 - RNA, 20 nt, Human herpesvirus 6
ucaacaaacacgugauuccu

SEQ ID NO: 157501 - RNA, 19 nt, Human herpesvirus 6
ucaaauugauuaugauuuc

SEQ ID NO: 157502 - RNA, 20 nt, Human herpesvirus 6
uauuuuccuguuguguuuac

SEQ ID NO: 157503 - RNA, 18 nt, Human herpesvirus 6
uauuuucguuaucggaga

SEQ ID NO: 157504 - RNA, 10 nt, Human herpesvirus 6
uauuugcaua

SEQ ID NO: 157505 - RNA, 20 nt, Human herpesvirus 6
uauaagauaggcaaaccaua

SEQ ID NO: 157506 - RNA, 18 nt, Human herpesvirus 6
uauaagucaucauauaau

SEQ ID NO: 157507 - RNA, 20 nt, Human herpesvirus 6
uauaaauccgauagccauac

SEQ ID NO: 157508 - RNA, 20 nt, Human herpesvirus 6
uauaaaaggaguaugacugu

SEQ ID NO: 157509 - RNA, 21 nt, Human herpesvirus 6
uauaaauguagcauacgacaa

SEQ ID NO: 157510 - RNA, 11 nt, Human herpesvirus 6
uauaacaagca

SEQ ID NO: 157511 - RNA, 13 nt, Human herpesvirus 6
uauaaaaacacac

SEQ ID NO: 157512 - RNA, 23 nt, Human herpesvirus 6
uauugaauuguauauauagcugu

SEQ ID NO: 157513 - RNA, 13 nt, Human herpesvirus 6
uauugaagacuga

SEQ ID NO: 157514 - RNA, 17 nt, Human herpesvirus 6
uauucucggucuugcua

SEQ ID NO: 157515 - RNA, 22 nt, Human herpesvirus 6
uauaauuaaaauagaagucuca

SEQ ID NO: 157516 - RNA, 18 nt, Human herpesvirus 6
uauuccgggguuguauac

SEQ ID NO: 157517 - RNA, 19 nt, Human herpesvirus 6
uauucccaugacgauucaa

SEQ ID NO: 157518 - RNA, 20 nt, Human herpesvirus 6
uauuccccagcuguguuuac

SEQ ID NO: 157519 - RNA, 23 nt, Human herpesvirus 6
uauaaucccgucuccucauggag

SEQ ID NO: 157520 - RNA, 15 nt, Human herpesvirus 6
uauaauacacuauua

SEQ ID NO: 157521 - RNA, 14 nt, Human herpesvirus 6
gugggaugcauuau

SEQ ID NO: 157522 - RNA, 14 nt, Human herpesvirus 6
gugggaaugcugag

SEQ ID NO: 157523 - RNA, 19 nt, Human herpesvirus 6
guguggaacauacuggugg

SEQ ID NO: 157524 - RNA, 23 nt, Human herpesvirus 6
guguuauaaggaagauucagagu

SEQ ID NO: 157525 - RNA, 14 nt, Human herpesvirus 6
guguguuauaagga

SEQ ID NO: 157526 - RNA, 23 nt, Human herpesvirus 6
guuacugaacuuuguccuuacaa

SEQ ID NO: 157527 - RNA, 18 nt, Human herpesvirus 6
guuagaaauucuauguac

SEQ ID NO: 157528 - RNA, 14 nt, Human herpesvirus 6
gugcuugucucaca

SEQ ID NO: 157529 - RNA, 18 nt, Human herpesvirus 6
gugacgccuugauguuuc

SEQ ID NO: 157530 - RNA, 19 nt, Human herpesvirus 6
gugacgccuugauguuucc

SEQ ID NO: 157531 - RNA, 21 nt, Human herpesvirus 6
gugacccggccggagugccgu

SEQ ID NO: 157532 - RNA, 18 nt, Human herpesvirus 6
gugcguauuccacgggau

SEQ ID NO: 157533 - RNA, 13 nt, Human herpesvirus 6
gugaauugugcaa

SEQ ID NO: 157534 - RNA, 17 nt, Human herpesvirus 6
gucggaaucuacugaga

SEQ ID NO: 157535 - RNA, 15 nt, Human herpesvirus 6
gucgggaauguguca

SEQ ID NO: 157536 - RNA, 23 nt, Human herpesvirus 6
gucuauccaugaaacucuuugaa

SEQ ID NO: 157537 - RNA, 18 nt, Human herpesvirus 6
gucucacaagcuguccau

SEQ ID NO: 157538 - RNA, 18 nt, Human herpesvirus 6
gucuagaugcaaaucuca

SEQ ID NO: 157539 - RNA, 22 nt, Human herpesvirus 6
gucugagaugacaucugcaaaa

SEQ ID NO: 157540 - RNA, 21 nt, Human herpesvirus 6
gugaacgcaagucacgggcag

SEQ ID NO: 157541 - RNA, 16 nt, Human herpesvirus 6
gugaaacuugacacau

SEQ ID NO: 157542 - RNA, 16 nt, Human herpesvirus 6
gucucgcccagcgugg

SEQ ID NO: 157543 - RNA, 15 nt, Human herpesvirus 6
gucuccuacauucuc

SEQ ID NO: 157544 - RNA, 23 nt, Human herpesvirus 6
guacaaaaucaaacucaccgcau

SEQ ID NO: 157545 - RNA, 22 nt, Human herpesvirus 6
guccuauucagaggugcugaug

SEQ ID NO: 157546 - RNA, 21 nt, Human herpesvirus 6
guccuuuuuuacuaguuuuca

SEQ ID NO: 157547 - RNA, 22 nt, Human herpesvirus 6
guccuuucgcacgcacauaugc

SEQ ID NO: 157548 - RNA, 22 nt, Human herpesvirus 6
gucgauauagauuauacgaaau

SEQ ID NO: 157549 - RNA, 23 nt, Human herpesvirus 6
uaaaugcuacccacaugaaauca

SEQ ID NO: 157550 - RNA, 14 nt, Human herpesvirus 6
uaaauggcauacau

SEQ ID NO: 157551 - RNA, 17 nt, Human herpesvirus 6
uaaauggcauacauuuu

SEQ ID NO: 157552 - RNA, 14 nt, Human herpesvirus 6
uaaaugguagcuau

SEQ ID NO: 157553 - RNA, 22 nt, Human herpesvirus 6
uaaaugguagcuauuaugugaa

SEQ ID NO: 157554 - RNA, 18 nt, Human herpesvirus 6
uaaaucgcgccauauccu

SEQ ID NO: 157555 - RNA, 15 nt, Human herpesvirus 6
uaaaugucaaagaaa

SEQ ID NO: 157556 - RNA, 20 nt, Human herpesvirus 6
uaacaaaaugguuaugacaa

SEQ ID NO: 157557 - RNA, 19 nt, Human herpesvirus 6
uaacaucccagauacauaa

SEQ ID NO: 157558 - RNA, 20 nt, Human herpesvirus 6
uaacaucccagauacauaaa

SEQ ID NO: 157559 - RNA, 18 nt, Human herpesvirus 6
uaaauuuaccaccaguca

SEQ ID NO: 157560 - RNA, 17 nt, Human herpesvirus 6
uaaauugauaguacuua

SEQ ID NO: 157561 - RNA, 15 nt, Human herpesvirus 6
uaaauugguggacaa

SEQ ID NO: 157562 - RNA, 18 nt, Human herpesvirus 6
uaaagaugggaaauuuau

SEQ ID NO: 157563 - RNA, 16 nt, Human herpesvirus 6
uaaagcgugugauuca

SEQ ID NO: 157564 - RNA, 18 nt, Human herpesvirus 6
uaaacauuaauuuauuaa

SEQ ID NO: 157565 - RNA, 18 nt, Human herpesvirus 6
uaaaauuuauggacaauu

SEQ ID NO: 157566 - RNA, 17 nt, Human herpesvirus 6
uaaacaacacagcacau

SEQ ID NO: 157567 - RNA, 17 nt, Human herpesvirus 6
uaaacaauuauguguca

SEQ ID NO: 157568 - RNA, 19 nt, Human herpesvirus 6
uaaaaauuuuagccgauga

SEQ ID NO: 157569 - RNA, 16 nt, Human herpesvirus 6
uaaaacaaaacauauc

SEQ ID NO: 157570 - RNA, 16 nt, Human herpesvirus 6
uaaaacaucagaugaa

SEQ ID NO: 157571 - RNA, 21 nt, Human herpesvirus 6
uaaaacaagauccaaucacaa

SEQ ID NO: 157572 - RNA, 20 nt, Human herpesvirus 6
uaaaacaggaagcgccauaa

SEQ ID NO: 157573 - RNA, 13 nt, Human herpesvirus 6
uaaaaaacugcau

SEQ ID NO: 157574 - RNA, 23 nt, Human herpesvirus 6
uaaaaacuaauucggaacauugu

SEQ ID NO: 157575 - RNA, 19 nt, Human herpesvirus 6
uaaaaagugcuuuaucuag

SEQ ID NO: 157576 - RNA, 23 nt, Human herpesvirus 6
uaaaaaguuugugcgaauugugu

SEQ ID NO: 157577 - RNA, 19 nt, Human herpesvirus 6
uaaaaagggagaugaaaca

SEQ ID NO: 157578 - RNA, 13 nt, Human herpesvirus 6
guuuacugugauu

SEQ ID NO: 157579 - RNA, 11 nt, Human herpesvirus 6
guuuacauaua

SEQ ID NO: 157580 - RNA, 13 nt, Human herpesvirus 6
guuuauugcacgu

SEQ ID NO: 157581 - RNA, 17 nt, Human herpesvirus 6
guuuauugccaauagau

SEQ ID NO: 157582 - RNA, 18 nt, Human herpesvirus 6
guuucaaauagucgcaca

SEQ ID NO: 157583 - RNA, 23 nt, Human herpesvirus 6
guuuauuuugucagucaacgcaa

SEQ ID NO: 157584 - RNA, 15 nt, Human herpesvirus 6
guugugucaugauua

SEQ ID NO: 157585 - RNA, 11 nt, Human herpesvirus 6
guuguguuaca

SEQ ID NO: 157586 - RNA, 17 nt, Human herpesvirus 6
guuguguugcaguugua

SEQ ID NO: 157587 - RNA, 16 nt, Human herpesvirus 6
guugugaucuuuacaa

SEQ ID NO: 157588 - RNA, 23 nt, Human herpesvirus 6
guuuaacguagcgaaccaggaca

SEQ ID NO: 157589 - RNA, 21 nt, Human herpesvirus 6
guuuaacccucgaugcguuau

SEQ ID NO: 157590 - RNA, 14 nt, Human herpesvirus 6
guugcuuauaugca

SEQ ID NO: 157591 - RNA, 14 nt, Human herpesvirus 6
guuggcgcguuuau

SEQ ID NO: 157592 - RNA, 13 nt, Human herpesvirus 6
guuggaugccugc

SEQ ID NO: 157593 - RNA, 21 nt, Human herpesvirus 6
guuggaugccugcauaugcag

SEQ ID NO: 157594 - RNA, 22 nt, Human herpesvirus 6
guuggaugccugcauaugcaga

SEQ ID NO: 157595 - RNA, 17 nt, Human herpesvirus 6
guuaucgaccaugugua

SEQ ID NO: 157596 - RNA, 16 nt, Human herpesvirus 6
guuaucaucacaaagu

SEQ ID NO: 157597 - RNA, 15 nt, Human herpesvirus 6
guuauaacacaacaa

SEQ ID NO: 157598 - RNA, 18 nt, Human herpesvirus 6
guuuuuuuuaacaguguc

SEQ ID NO: 157599 - RNA, 14 nt, Human herpesvirus 6
guuuuuuggaauau

SEQ ID NO: 157600 - RNA, 17 nt, Human herpesvirus 6
guuuuuuguaccagcau

SEQ ID NO: 157601 - RNA, 18 nt, Human herpesvirus 6
uaaaaaauggauuuggua

SEQ ID NO: 157602 - RNA, 15 nt, Human herpesvirus 6
uaaaaaaacauucua

SEQ ID NO: 157603 - RNA, 22 nt, Human herpesvirus 6
guuuuuacuugauaaacuguau

SEQ ID NO: 157604 - RNA, 16 nt, Human herpesvirus 6
guuuuucucugcaaaa

SEQ ID NO: 157605 - RNA, 20 nt, Human herpesvirus 6
guuuuauuucuuacuaggaa

SEQ ID NO: 157606 - RNA, 16 nt, Human herpesvirus 6
guuuuagaaacauuug

SEQ ID NO: 157607 - RNA, 9 nt, Human herpesvirus 6
guuuuccau

SEQ ID NO: 157608 - RNA, 20 nt, Human herpesvirus 6
guuugucucgcaaacagcuu

SEQ ID NO: 157609 - RNA, 13 nt, Human herpesvirus 6
guuugccaaagcu

SEQ ID NO: 157610 - RNA, 18 nt, Human herpesvirus 6
guuucuguccaaugacua

SEQ ID NO: 157611 - RNA, 18 nt, Human herpesvirus 6
guuucuguugaauuccag

SEQ ID NO: 157612 - RNA, 17 nt, Human herpesvirus 6
guuucuuugacauuuau

SEQ ID NO: 157613 - RNA, 20 nt, Human herpesvirus 6
guuugaauaacaaacuauau

SEQ ID NO: 157614 - RNA, 22 nt, Human herpesvirus 6
uaaugguugaaaauguuuuuca

SEQ ID NO: 157615 - RNA, 19 nt, Human herpesvirus 6
uaauggaaacgacaaagaa

SEQ ID NO: 157616 - RNA, 13 nt, Human herpesvirus 6
uaauuucuaugua

SEQ ID NO: 157617 - RNA, 14 nt, Human herpesvirus 6
uaauuucuauguaa

SEQ ID NO: 157618 - RNA, 17 nt, Human herpesvirus 6
uaauguaugcaucauca

SEQ ID NO: 157619 - RNA, 17 nt, Human herpesvirus 6
uacaaaccaacguguca

SEQ ID NO: 157620 - RNA, 22 nt, Human herpesvirus 6
uacaaacgacaaaaccuaaaua

SEQ ID NO: 157621 - RNA, 19 nt, Human herpesvirus 6
uacaaauucauugugguca

SEQ ID NO: 157622 - RNA, 13 nt, Human herpesvirus 6
uacaaacaugcgu

SEQ ID NO: 157623 - RNA, 15 nt, Human herpesvirus 6
uacaaaaugaccuca

SEQ ID NO: 157624 - RNA, 17 nt, Human herpesvirus 6
uacaaaacaaucuaucu

SEQ ID NO: 157625 - RNA, 11 nt, Human herpesvirus 6
uacaaaaucaa

SEQ ID NO: 157626 - RNA, 20 nt, Human herpesvirus 6
uacacaggauuauaaaaaca

SEQ ID NO: 157627 - RNA, 13 nt, Human herpesvirus 6
uacaaagugaaag

SEQ ID NO: 157628 - RNA, 21 nt, Human herpesvirus 6
uacaaauaauaaaaaguaaua

SEQ ID NO: 157629 - RNA, 21 nt, Human herpesvirus 6
uacacaccgucuucaaccugu

SEQ ID NO: 157630 - RNA, 22 nt, Human herpesvirus 6
uacacaccgucuucaaccuguu

SEQ ID NO: 157631 - RNA, 20 nt, Human herpesvirus 6
uacaacaggcuugugaaaga

SEQ ID NO: 157632 - RNA, 21 nt, Human herpesvirus 6
uacaccuaacgcgggauauuu

SEQ ID NO: 157633 - RNA, 17 nt, Human herpesvirus 6
uaauauuugucguugua

SEQ ID NO: 157634 - RNA, 14 nt, Human herpesvirus 6
uaaucacaaugauc

SEQ ID NO: 157635 - RNA, 16 nt, Human herpesvirus 6
uaaucacaaugaucaa

SEQ ID NO: 157636 - RNA, 19 nt, Human herpesvirus 6
uaaucaugauugcaucaaa

SEQ ID NO: 157637 - RNA, 21 nt, Human herpesvirus 6
uaauccauaugaaaguugaua

SEQ ID NO: 157638 - RNA, 19 nt, Human herpesvirus 6
uaaucuagaauaucugcua

SEQ ID NO: 157639 - RNA, 21 nt, Human herpesvirus 6
uaaucuagaauaucugcuaag

SEQ ID NO: 157640 - RNA, 16 nt, Human herpesvirus 6
uaacccuaacccuaac

SEQ ID NO: 157641 - RNA, 21 nt, Human herpesvirus 6
uaaccaaaaaaacguaugugu

SEQ ID NO: 157642 - RNA, 22 nt, Human herpesvirus 6
uaaccauucugcaaaaggugga

SEQ ID NO: 157643 - RNA, 15 nt, Human herpesvirus 6
aacaagucaucucac

SEQ ID NO: 157644 - RNA, 16 nt, Human herpesvirus 6
aacaauaauugcauuc

SEQ ID NO: 157645 - RNA, 12 nt, Human herpesvirus 6
aacaagcacuga

SEQ ID NO: 157646 - RNA, 13 nt, Human herpesvirus 6
aacaagcacugaa

SEQ ID NO: 157647 - RNA, 19 nt, Human herpesvirus 6
uaccguaaacaaauucuua

SEQ ID NO: 157648 - RNA, 23 nt, Human herpesvirus 6
uaccgcugcguccgaguuagcag

SEQ ID NO: 157649 - RNA, 23 nt, Human herpesvirus 6
uacguuucuguccaaugacuacu

SEQ ID NO: 157650 - RNA, 16 nt, Human herpesvirus 6
uacguuugccaaagcu

SEQ ID NO: 157651 - RNA, 20 nt, Human herpesvirus 6
uacguuuuccaugugaaucg

SEQ ID NO: 157652 - RNA, 15 nt, Human herpesvirus 6
uaccguuuaaacuau

SEQ ID NO: 157653 - RNA, 17 nt, Human herpesvirus 6
uacauuuccaugcauau

SEQ ID NO: 157654 - RNA, 22 nt, Human herpesvirus 6
uacagaaguuucggcaacugaa

SEQ ID NO: 157655 - RNA, 23 nt, Human herpesvirus 6
uacagaaguuucggcaacugaau

SEQ ID NO: 157656 - RNA, 21 nt, Human herpesvirus 6
uacacuuuaucgauguagaua

SEQ ID NO: 157657 - RNA, 22 nt, Human herpesvirus 6
uaccacggggauuuaguacagu

SEQ ID NO: 157658 - RNA, 21 nt, Human herpesvirus 6
uaccagcauguuuucuccuca

SEQ ID NO: 157659 - RNA, 23 nt, Human herpesvirus 6
uaccauuugacuccaacgcacac

SEQ ID NO: 157660 - RNA, 15 nt, Human herpesvirus 6
uaccgagagauuuac

SEQ ID NO: 157661 - RNA, 18 nt, Human herpesvirus 6
uaccgacgcguucaauaa

SEQ ID NO: 157662 - RNA, 13 nt, Human herpesvirus 6
uagacagucacac

SEQ ID NO: 157663 - RNA, 22 nt, Human herpesvirus 6
uagacagucacacacagggugc

SEQ ID NO: 157664 - RNA, 18 nt, Human herpesvirus 6
uagacaagaaaaacagcu

SEQ ID NO: 157665 - RNA, 19 nt, Human herpesvirus 6
uagaauuucuaaccauuuu

SEQ ID NO: 157666 - RNA, 14 nt, Human herpesvirus 6
uagacaaaccagca

SEQ ID NO: 157667 - RNA, 17 nt, Human herpesvirus 6
uagacugaacacaaaaa

SEQ ID NO: 157668 - RNA, 14 nt, Human herpesvirus 6
uagaccuugaucua

SEQ ID NO: 157669 - RNA, 19 nt, Human herpesvirus 6
uagagacgcacccuacaau

SEQ ID NO: 157670 - RNA, 14 nt, Human herpesvirus 6
uagagacgugauac

SEQ ID NO: 157671 - RNA, 21 nt, Human herpesvirus 6
uagacuuuccccauauugugu

SEQ ID NO: 157672 - RNA, 16 nt, Human herpesvirus 6
uagagagauagauaug

SEQ ID NO: 157673 - RNA, 22 nt, Human herpesvirus 6
uacuuacuugagugauggaguu

SEQ ID NO: 157674 - RNA, 18 nt, Human herpesvirus 6
uacuucgugcugugauag

SEQ ID NO: 157675 - RNA, 20 nt, Human herpesvirus 6
uacuugauaaacuguaugca

SEQ ID NO: 157676 - RNA, 22 nt, Human herpesvirus 6
uagaucuccugcgcgucuauac

SEQ ID NO: 157677 - RNA, 19 nt, Human herpesvirus 6
uagauuuauuagccgugau

SEQ ID NO: 157678 - RNA, 19 nt, Human herpesvirus 6
uagauggaaaauugcaaau

SEQ ID NO: 157679 - RNA, 21 nt, Human herpesvirus 6
uagcauuauuaaagaugggaa

SEQ ID NO: 157680 - RNA, 14 nt, Human herpesvirus 6
uagccaaugauucu

SEQ ID NO: 157681 - RNA, 20 nt, Human herpesvirus 6
uagccuaggccuucaccugu

SEQ ID NO: 157682 - RNA, 23 nt, Human herpesvirus 6
uagcccuaauguuaaauaacuca

SEQ ID NO: 157683 - RNA, 22 nt, Human herpesvirus 6
uagcacaaaccaaaaugacucu

SEQ ID NO: 157684 - RNA, 22 nt, Human herpesvirus 6
uagcagcaauaggcaccuaucu

SEQ ID NO: 157685 - RNA, 14 nt, Human herpesvirus 6
uagcaggcauugac

SEQ ID NO: 157686 - RNA, 19 nt, Human herpesvirus 6
uaguccauuaccacacgcu

SEQ ID NO: 157687 - RNA, 23 nt, Human herpesvirus 6
uagucuguaaguuuugggugcua

SEQ ID NO: 157688 - RNA, 13 nt, Human herpesvirus 6
uaguacaguaugu

SEQ ID NO: 157689 - RNA, 17 nt, Human herpesvirus 6
uagguguaaaucaucaa

SEQ ID NO: 157690 - RNA, 22 nt, Human herpesvirus 6
uagguguaaaucaucaacguaa

SEQ ID NO: 157691 - RNA, 22 nt, Human herpesvirus 6
uagugaucacaaaagagaagga

SEQ ID NO: 157692 - RNA, 20 nt, Human herpesvirus 6
uagugcugagacucuacgau

SEQ ID NO: 157693 - RNA, 18 nt, Human herpesvirus 6
uaguguucgcauuagaaa

SEQ ID NO: 157694 - RNA, 18 nt, Human herpesvirus 6
uaguuguauuuaucgauu

SEQ ID NO: 157695 - RNA, 14 nt, Human herpesvirus 6
uaguuaaugcugcu

SEQ ID NO: 157696 - RNA, 19 nt, Human herpesvirus 6
uaguucuucaacauaucac

SEQ ID NO: 157697 - RNA, 21 nt, Human herpesvirus 6
uauaaaaaacuaaaacaucag

SEQ ID NO: 157698 - RNA, 17 nt, Human herpesvirus 6
uaguuuucacacguuau

SEQ ID NO: 157699 - RNA, 21 nt, Human herpesvirus 6
uagggauacguauauugugua

SEQ ID NO: 157700 - RNA, 14 nt, Human herpesvirus 6
uaggacacuuucaa

SEQ ID NO: 157701 - RNA, 17 nt, Human herpesvirus 6
uaggccuucaccugucu

SEQ ID NO: 157702 - RNA, 18 nt, Human herpesvirus 6
uaggacguacagaaccag

SEQ ID NO: 157703 - RNA, 16 nt, Human herpesvirus 6
uagcuauuaugugaau

SEQ ID NO: 157704 - RNA, 16 nt, Human herpesvirus 6
uagcgucuuugcauau

SEQ ID NO: 157705 - RNA, 15 nt, Human herpesvirus 6
uagcuaaaacuugaa

SEQ ID NO: 157706 - RNA, 21 nt, Human herpesvirus 6
uagcggcacguugaccgcaga

SEQ ID NO: 157707 - RNA, 19 nt, Human herpesvirus 6
uagcgguuggaugccugca

SEQ ID NO: 157708 - RNA, 19 nt, Human herpesvirus 6
uagcgaaccaggacagcuu

SEQ ID NO: 157709 - RNA, 13 nt, Human herpesvirus 6
uaggaacuaugaa

SEQ ID NO: 157710 - RNA, 17 nt, Human herpesvirus 6
uagcuguaaauauucau

SEQ ID NO: 157711 - RNA, 15 nt, Human herpesvirus 6
uuucugacucucuca

SEQ ID NO: 157712 - RNA, 14 nt, Human herpesvirus 6
uuucucugcaaaac

SEQ ID NO: 157713 - RNA, 17 nt, Human herpesvirus 6
uuucucugcaaaacaaa

SEQ ID NO: 157714 - RNA, 21 nt, Human herpesvirus 6
uuucuguccaaugacuacuaa

SEQ ID NO: 157715 - RNA, 15 nt, Human herpesvirus 6
uuucuguuacugcga

SEQ ID NO: 157716 - RNA, 18 nt, Human herpesvirus 6
uuugaauucucauuugaa

SEQ ID NO: 157717 - RNA, 20 nt, Human herpesvirus 6
uuugaaaaaacaguuuaccu

SEQ ID NO: 157718 - RNA, 22 nt, Human herpesvirus 6
uuucuuuaccgaguagguaaaa

SEQ ID NO: 157719 - RNA, 18 nt, Human herpesvirus 6
uuucuugguuguguauau

SEQ ID NO: 157720 - RNA, 16 nt, Human herpesvirus 6
uuugccgucacacucu

SEQ ID NO: 157721 - RNA, 21 nt, Human herpesvirus 6
uuugcauauuauuaacaauga

SEQ ID NO: 157722 - RNA, 15 nt, Human herpesvirus 6
uuugcagagauguau

SEQ ID NO: 157723 - RNA, 17 nt, Human herpesvirus 6
uuugacugauacuugaa

SEQ ID NO: 157724 - RNA, 14 nt, Human herpesvirus 6
uuugacauugcuga

SEQ ID NO: 157725 - RNA, 21 nt, Human herpesvirus 6
uuugacauugcugaaccauac

SEQ ID NO: 157726 - RNA, 20 nt, Human herpesvirus 6
uuugaggcaggaucagauuu

SEQ ID NO: 157727 - RNA, 17 nt, Human herpesvirus 6
uuugauuuuguacagua

SEQ ID NO: 157728 - RNA, 13 nt, Human herpesvirus 6
uuugcaaaacugu

SEQ ID NO: 157729 - RNA, 15 nt, Human herpesvirus 6
uuugcaaaacuguua

SEQ ID NO: 157730 - RNA, 22 nt, Human herpesvirus 6
uuuccuuugugugauaucauuc

SEQ ID NO: 157731 - RNA, 21 nt, Human herpesvirus 6
uuucgaauucuuaccaagaaa

SEQ ID NO: 157732 - RNA, 14 nt, Human herpesvirus 6
uuucuaaacacaga

SEQ ID NO: 157733 - RNA, 17 nt, Human herpesvirus 6
uuucucggcauaucuuc

SEQ ID NO: 157734 - RNA, 15 nt, Human herpesvirus 6
uuucaugaucucacg

SEQ ID NO: 157735 - RNA, 18 nt, Human herpesvirus 6
uuuccccagcacacccca

SEQ ID NO: 157736 - RNA, 18 nt, Human herpesvirus 6
uuucagguugccaauaaa

SEQ ID NO: 157737 - RNA, 14 nt, Human herpesvirus 6
uuuauugccaauag

SEQ ID NO: 157738 - RNA, 21 nt, Human herpesvirus 6
uuuauuuacaaaaaaccuuua

SEQ ID NO: 157739 - RNA, 15 nt, Human herpesvirus 6
uuuauuuuuauauuc

SEQ ID NO: 157740 - RNA, 23 nt, Human herpesvirus 6
uuuaucccccguacaagcuuaau

SEQ ID NO: 157741 - RNA, 14 nt, Human herpesvirus 6
uuuaucuagccaau

SEQ ID NO: 157742 - RNA, 16 nt, Human herpesvirus 6
uuuaucgauguagaua

SEQ ID NO: 157743 - RNA, 21 nt, Human herpesvirus 6
uuuaucgcaacacacagugaa

SEQ ID NO: 157744 - RNA, 16 nt, Human herpesvirus 6
uuuaucgcagcaucau

SEQ ID NO: 157745 - RNA, 22 nt, Human herpesvirus 6
uuuauaaugaguuuuucgcaau

SEQ ID NO: 157746 - RNA, 18 nt, Human herpesvirus 6
uuuagauauauacuuuca

SEQ ID NO: 157747 - RNA, 17 nt, Human herpesvirus 6
uuuaguaugggugagug

SEQ ID NO: 157748 - RNA, 13 nt, Human herpesvirus 6
uuuagucuaucca

SEQ ID NO: 157749 - RNA, 22 nt, Human herpesvirus 6
uuuacaauguucaauuacucaa

SEQ ID NO: 157750 - RNA, 22 nt, Human herpesvirus 6
uuuacugacgguuagguuuaau

SEQ ID NO: 157751 - RNA, 20 nt, Human herpesvirus 6
uuuaccguuuaaacuaugca

SEQ ID NO: 157752 - RNA, 20 nt, Human herpesvirus 6
uuuacgguauaggagacaac

SEQ ID NO: 157753 - RNA, 22 nt, Human herpesvirus 6
uuuaaagauagaauaaugccua

SEQ ID NO: 157754 - RNA, 12 nt, Human herpesvirus 6
uuuaacaguguc

SEQ ID NO: 157755 - RNA, 15 nt, Human herpesvirus 6
uuuaaaugaagauaa

SEQ ID NO: 157756 - RNA, 15 nt, Human herpesvirus 6
uuuaaaugaggcuau

SEQ ID NO: 157757 - RNA, 17 nt, Human herpesvirus 6
uuuaaaccucuguagau

SEQ ID NO: 157758 - RNA, 14 nt, Human herpesvirus 6
uuuaauacauuucc

SEQ ID NO: 157759 - RNA, 14 nt, Human herpesvirus 6
uuuaauuuaucgca

SEQ ID NO: 157760 - RNA, 20 nt, Human herpesvirus 6
uuuacaaaagacacaaucuu

SEQ ID NO: 157761 - RNA, 20 nt, Human herpesvirus 6
uuguguuuauuugcccugag

SEQ ID NO: 157762 - RNA, 16 nt, Human herpesvirus 6
uuguguucaagaacac

SEQ ID NO: 157763 - RNA, 20 nt, Human herpesvirus 6
uuguguucguggacaaugau

SEQ ID NO: 157764 - RNA, 15 nt, Human herpesvirus 6
uuguguaucugugaa

SEQ ID NO: 157765 - RNA, 15 nt, Human herpesvirus 6
uugugucaugauuau

SEQ ID NO: 157766 - RNA, 14 nt, Human herpesvirus 6
uuguguagggugcu

SEQ ID NO: 157767 - RNA, 21 nt, Human herpesvirus 6
uuguucuuggagaugacgggu

SEQ ID NO: 157768 - RNA, 14 nt, Human herpesvirus 6
uugucgaagaaccc

SEQ ID NO: 157769 - RNA, 22 nt, Human herpesvirus 6
uugucuaauuucgacaauccua

SEQ ID NO: 157770 - RNA, 22 nt, Human herpesvirus 6
uugucggcgaugcaucugccau

SEQ ID NO: 157771 - RNA, 23 nt, Human herpesvirus 6
uugucggcgaugcaucugccaua

SEQ ID NO: 157772 - RNA, 13 nt, Human herpesvirus 6
uugugacaaggaa

SEQ ID NO: 157773 - RNA, 22 nt, Human herpesvirus 6
uugcuuucucuuuuuaauucca

SEQ ID NO: 157774 - RNA, 19 nt, Human herpesvirus 6
uuggacaccgguaaccucg

SEQ ID NO: 157775 - RNA, 12 nt, Human herpesvirus 6
uuggguauuuau

SEQ ID NO: 157776 - RNA, 15 nt, Human herpesvirus 6
uugggguuauacaua

SEQ ID NO: 157777 - RNA, 13 nt, Human herpesvirus 6
uugggacuaggaa

SEQ ID NO: 157778 - RNA, 16 nt, Human herpesvirus 6
uucauucgcuaguaau

SEQ ID NO: 157779 - RNA, 19 nt, Human herpesvirus 6
uucauuucuccauaccguu

SEQ ID NO: 157780 - RNA, 14 nt, Human herpesvirus 6
uucaucagcauuaa

SEQ ID NO: 157781 - RNA, 13 nt, Human herpesvirus 6
uucaucauuccag

SEQ ID NO: 157782 - RNA, 12 nt, Human herpesvirus 6
uucauccaugaa

SEQ ID NO: 157783 - RNA, 14 nt, Human herpesvirus 6
uucauccaugaaau

SEQ ID NO: 157784 - RNA, 13 nt, Human herpesvirus 6
uucauaugucucg

SEQ ID NO: 157785 - RNA, 16 nt, Human herpesvirus 6
uucagucuucaauaaa

SEQ ID NO: 157786 - RNA, 23 nt, Human herpesvirus 6
uucagucuucaauaaaaacucaa

SEQ ID NO: 157787 - RNA, 15 nt, Human herpesvirus 6
uucacuuaagccagc

SEQ ID NO: 157788 - RNA, 11 nt, Human herpesvirus 6
uucacgugcac

SEQ ID NO: 157789 - RNA, 23 nt, Human herpesvirus 6
uuauaaacccauaggugauuuca

SEQ ID NO: 157790 - RNA, 22 nt, Human herpesvirus 6
uucccuuuaaccccacgaaaaa

SEQ ID NO: 157791 - RNA, 21 nt, Human herpesvirus 6
uuccuaugucaauaguuuuac

SEQ ID NO: 157792 - RNA, 20 nt, Human herpesvirus 6
uuccccugggaaaaggguga

SEQ ID NO: 157793 - RNA, 20 nt, Human herpesvirus 6
uuccggagauuaaaacauca

SEQ ID NO: 157794 - RNA, 19 nt, Human herpesvirus 6
uucgcaaaacuuaaccgca

SEQ ID NO: 157795 - RNA, 20 nt, Human herpesvirus 6
uucgauguggagaagaucua

SEQ ID NO: 157796 - RNA, 21 nt, Human herpesvirus 6
uucgauguggagaagaucuaa

SEQ ID NO: 157797 - RNA, 23 nt, Human herpesvirus 6
uucgcggugcagaacaucucaga

SEQ ID NO: 157798 - RNA, 18 nt, Human herpesvirus 6
uucgcagauuaauucuuc

SEQ ID NO: 157799 - RNA, 21 nt, Human herpesvirus 6
uucgaauacuuucaugauucu

SEQ ID NO: 157800 - RNA, 17 nt, Human herpesvirus 6
uuccuggacauggugaa

SEQ ID NO: 157801 - RNA, 13 nt, Human herpesvirus 6
uuccuuaauucua

SEQ ID NO: 157802 - RNA, 16 nt, Human herpesvirus 6
uugcuccuggauuuga

SEQ ID NO: 157803 - RNA, 15 nt, Human herpesvirus 6
uugcuuagucuguaa

SEQ ID NO: 157804 - RNA, 12 nt, Human herpesvirus 6
uugcauggaaaa

SEQ ID NO: 157805 - RNA, 14 nt, Human herpesvirus 6
uugcaugugauaaa

SEQ ID NO: 157806 - RNA, 20 nt, Human herpesvirus 6
uugcaugugauaaauucgau

SEQ ID NO: 157807 - RNA, 17 nt, Human herpesvirus 6
uugagauuuacaccaaa

SEQ ID NO: 157808 - RNA, 18 nt, Human herpesvirus 6
uugcagaucuaauucaca

SEQ ID NO: 157809 - RNA, 22 nt, Human herpesvirus 6
uugcacuacuugucuuacacuc

SEQ ID NO: 157810 - RNA, 20 nt, Human herpesvirus 6
uugcacucgaaaacagucua

SEQ ID NO: 157811 - RNA, 17 nt, Human herpesvirus 6
uugacguauccucagaa

SEQ ID NO: 157812 - RNA, 13 nt, Human herpesvirus 6
uugaccagccaga

SEQ ID NO: 157813 - RNA, 17 nt, Human herpesvirus 6
uugacuauuaaacuaac

SEQ ID NO: 157814 - RNA, 17 nt, Human herpesvirus 6
uugaauaauaagccuaa

SEQ ID NO: 157815 - RNA, 19 nt, Human herpesvirus 6
uugaacuuuguaaagaagu

SEQ ID NO: 157816 - RNA, 22 nt, Human herpesvirus 6
uugaagaaaauugcagaucuaa

SEQ ID NO: 157817 - RNA, 23 nt, Human herpesvirus 6
uugacagauauuaacacagucuu

SEQ ID NO: 157818 - RNA, 22 nt, Human herpesvirus 6
uugaauuguauauauagcugua

SEQ ID NO: 157819 - RNA, 14 nt, Human herpesvirus 6
uugaaacuagguga

SEQ ID NO: 157820 - RNA, 21 nt, Human herpesvirus 6
uugaaaaaccuuauacagaug

SEQ ID NO: 157821 - RNA, 18 nt, Human herpesvirus 6
uugaaaauguuuuucaua

SEQ ID NO: 157822 - RNA, 13 nt, Human herpesvirus 6
uugaaauugaaag

SEQ ID NO: 157823 - RNA, 13 nt, Human herpesvirus 6
uucuuucuaaaau

SEQ ID NO: 157824 - RNA, 23 nt, Human herpesvirus 6
uucuuucuacgguaggcagggaa

SEQ ID NO: 157825 - RNA, 16 nt, Human herpesvirus 6
uucucguaguugcauu

SEQ ID NO: 157826 - RNA, 14 nt, Human herpesvirus 6
uucuaugaguauau

SEQ ID NO: 157827 - RNA, 14 nt, Human herpesvirus 6
uucuauggaucuga

SEQ ID NO: 157828 - RNA, 19 nt, Human herpesvirus 6
uucuauggaucugagugaa

SEQ ID NO: 157829 - RNA, 14 nt, Human herpesvirus 6
uuaacacagucuuc

SEQ ID NO: 157830 - RNA, 15 nt, Human herpesvirus 6
uuaaagaaacagauu

SEQ ID NO: 157831 - RNA, 13 nt, Human herpesvirus 6
uuaaagaaucugc

SEQ ID NO: 157832 - RNA, 21 nt, Human herpesvirus 6
uuaaaggaugcggacucugac

SEQ ID NO: 157833 - RNA, 20 nt, Human herpesvirus 6
uuaauuccagcuuucuuaga

SEQ ID NO: 157834 - RNA, 16 nt, Human herpesvirus 6
uuaauucuaaauacga

SEQ ID NO: 157835 - RNA, 15 nt, Human herpesvirus 6
uuaauugcgcaggaa

SEQ ID NO: 157836 - RNA, 21 nt, Human herpesvirus 6
uuaaccggaaaaaugaaauuu

SEQ ID NO: 157837 - RNA, 22 nt, Human herpesvirus 6
uuaacgcgaucguagacguuua

SEQ ID NO: 157838 - RNA, 21 nt, Human herpesvirus 6
uuacaccuaacgcgggauauu

SEQ ID NO: 157839 - RNA, 18 nt, Human herpesvirus 6
uuacaauuuaauauaucu

SEQ ID NO: 157840 - RNA, 19 nt, Human herpesvirus 6
uuacaaaagacacaaucuu

SEQ ID NO: 157841 - RNA, 18 nt, Human herpesvirus 6
uuacaaaucuucccuuuu

SEQ ID NO: 157842 - RNA, 17 nt, Human herpesvirus 6
uuacaacugaaacuuca

SEQ ID NO: 157843 - RNA, 14 nt, Human herpesvirus 6
uuacuauguggcau

SEQ ID NO: 157844 - RNA, 21 nt, Human herpesvirus 6
uuacugaacuuuguccuuaca

SEQ ID NO: 157845 - RNA, 22 nt, Human herpesvirus 6
uuacuguuucuuugacauuuau

SEQ ID NO: 157846 - RNA, 15 nt, Human herpesvirus 6
uuacuuacaucgauc

SEQ ID NO: 157847 - RNA, 19 nt, Human herpesvirus 6
uuacuugauaaacuguaug

SEQ ID NO: 157848 - RNA, 20 nt, Human herpesvirus 6
uuacuugauaaacuguaugc

SEQ ID NO: 157849 - RNA, 22 nt, Human herpesvirus 6
uuacuugauaaacuguaugcaa

SEQ ID NO: 157850 - RNA, 17 nt, Human herpesvirus 6
uuacauagaaauuacaa

SEQ ID NO: 157851 - RNA, 15 nt, Human herpesvirus 6
uuacagcacuuugcg

SEQ ID NO: 157852 - RNA, 14 nt, Human herpesvirus 6
uuacaguguuucca

SEQ ID NO: 157853 - RNA, 13 nt, Human herpesvirus 6
uuacauauacauu

SEQ ID NO: 157854 - RNA, 14 nt, Human herpesvirus 6
uuacauauagucaa

SEQ ID NO: 157855 - RNA, 21 nt, Human herpesvirus 6
uuaguaugggugagugcauua

SEQ ID NO: 157856 - RNA, 21 nt, Human herpesvirus 6
uuagucgcacacacaagaaca

SEQ ID NO: 157857 - RNA, 13 nt, Human herpesvirus 6
uuagaaauucuau

SEQ ID NO: 157858 - RNA, 16 nt, Human herpesvirus 6
uuagaaauucuaugua

SEQ ID NO: 157859 - RNA, 18 nt, Human herpesvirus 6
uuagaaccgaucugugag

SEQ ID NO: 157860 - RNA, 15 nt, Human herpesvirus 6
uuaggacacuuucaa

SEQ ID NO: 157861 - RNA, 21 nt, Human herpesvirus 6
uuaggcugcagccccaaaaca

SEQ ID NO: 157862 - RNA, 22 nt, Human herpesvirus 6
uuagggauacguauauugugua

SEQ ID NO: 157863 - RNA, 18 nt, Human herpesvirus 6
uuaggggagagacaucca

SEQ ID NO: 157864 - RNA, 13 nt, Human herpesvirus 6
uguugaaugcaua

SEQ ID NO: 157865 - RNA, 16 nt, Human herpesvirus 6
uguucuugggugugca

SEQ ID NO: 157866 - RNA, 14 nt, Human herpesvirus 6
uguucgaugauuau

SEQ ID NO: 157867 - RNA, 21 nt, Human herpesvirus 6
uguucccggggcccacagcau

SEQ ID NO: 157868 - RNA, 16 nt, Human herpesvirus 6
ugugauuuugggacaa

SEQ ID NO: 157869 - RNA, 14 nt, Human herpesvirus 6
ugugcaagcuguau

SEQ ID NO: 157870 - RNA, 17 nt, Human herpesvirus 6
ugugcaucagcauauga

SEQ ID NO: 157871 - RNA, 18 nt, Human herpesvirus 6
ugugcaucagcauaugau

SEQ ID NO: 157872 - RNA, 16 nt, Human herpesvirus 6
ugugccaggaaagugu

SEQ ID NO: 157873 - RNA, 18 nt, Human herpesvirus 6
ugugauuaaaaaaccgcu

SEQ ID NO: 157874 - RNA, 13 nt, Human herpesvirus 6
uguuagcuuuuac

SEQ ID NO: 157875 - RNA, 18 nt, Human herpesvirus 6
uguuauaacacaacaagu

SEQ ID NO: 157876 - RNA, 22 nt, Human herpesvirus 6
uguuauaacacaacaaguaaau

SEQ ID NO: 157877 - RNA, 19 nt, Human herpesvirus 6
uguuauaaggaagauucag

SEQ ID NO: 157878 - RNA, 16 nt, Human herpesvirus 6
uuaaaccucuguagau

SEQ ID NO: 157879 - RNA, 13 nt, Human herpesvirus 6
uuaaacacuaaau

SEQ ID NO: 157880 - RNA, 20 nt, Human herpesvirus 6
uuaaaauaauuacauuaaaa

SEQ ID NO: 157881 - RNA, 16 nt, Human herpesvirus 6
uuaaaagaccacuuuu

SEQ ID NO: 157882 - RNA, 15 nt, Human herpesvirus 6
uuaaaaggaauagca

SEQ ID NO: 157883 - RNA, 22 nt, Human herpesvirus 6
uuaaaaagaaugggauugugau

SEQ ID NO: 157884 - RNA, 22 nt, Human herpesvirus 6
uuaaaacaggaagcgccauaaa

SEQ ID NO: 157885 - RNA, 23 nt, Human herpesvirus 6
uuaaaacaggaagcgccauaaaa

SEQ ID NO: 157886 - RNA, 15 nt, Human herpesvirus 6
uguuguauuccacag

SEQ ID NO: 157887 - RNA, 20 nt, Human herpesvirus 6
uguuguguuuacauauacau

SEQ ID NO: 157888 - RNA, 15 nt, Human herpesvirus 6
uguuucgcagaggac

SEQ ID NO: 157889 - RNA, 18 nt, Human herpesvirus 6
uguuuuagaaacauuugc

SEQ ID NO: 157890 - RNA, 20 nt, Human herpesvirus 6
uguuuuagucuauccaugaa

SEQ ID NO: 157891 - RNA, 20 nt, Human herpesvirus 6
uguuuguaaauggcauugaa

SEQ ID NO: 157892 - RNA, 19 nt, Human herpesvirus 6
uggcuucuauauccaaaga

SEQ ID NO: 157893 - RNA, 23 nt, Human herpesvirus 6
ugggucguacacgcauuugcaau

SEQ ID NO: 157894 - RNA, 20 nt, Human herpesvirus 6
ugggguguucguaaugugca

SEQ ID NO: 157895 - RNA, 11 nt, Human herpesvirus 6
ugggcuuuauu

SEQ ID NO: 157896 - RNA, 12 nt, Human herpesvirus 6
ugcuaaguguga

SEQ ID NO: 157897 - RNA, 16 nt, Human herpesvirus 6
uggaugaucacuauca

SEQ ID NO: 157898 - RNA, 22 nt, Human herpesvirus 6
uggauuuuuuuaauuggugcga

SEQ ID NO: 157899 - RNA, 22 nt, Human herpesvirus 6
uggauuugguauuuuagauaua

SEQ ID NO: 157900 - RNA, 14 nt, Human herpesvirus 6
uggauggaucggaa

SEQ ID NO: 157901 - RNA, 22 nt, Human herpesvirus 6
uggcaaccugaaacuccccaga

SEQ ID NO: 157902 - RNA, 14 nt, Human herpesvirus 6
uggcggagaaaguu

SEQ ID NO: 157903 - RNA, 15 nt, Human herpesvirus 6
ugucgcacuccgugu

SEQ ID NO: 157904 - RNA, 16 nt, Human herpesvirus 6
ugucgucacuccaauc

SEQ ID NO: 157905 - RNA, 16 nt, Human herpesvirus 6
ugucggccgugaugca

SEQ ID NO: 157906 - RNA, 21 nt, Human herpesvirus 6
ugucggcgaugcaucugccau

SEQ ID NO: 157907 - RNA, 18 nt, Human herpesvirus 6
ugucgaaauucaccagau

SEQ ID NO: 157908 - RNA, 21 nt, Human herpesvirus 6
uguauugauuauauauuugca

SEQ ID NO: 157909 - RNA, 14 nt, Human herpesvirus 6
uguaugugugaugc

SEQ ID NO: 157910 - RNA, 13 nt, Human herpesvirus 6
ugucaaguuucac

SEQ ID NO: 157911 - RNA, 16 nt, Human herpesvirus 6
ugucacacguguuaaa

SEQ ID NO: 157912 - RNA, 19 nt, Human herpesvirus 6
uguauacgccuugggacau

SEQ ID NO: 157913 - RNA, 18 nt, Human herpesvirus 6
uguaguuuguguccuuga

SEQ ID NO: 157914 - RNA, 19 nt, Human herpesvirus 6
uguagcaucuuaccuucaa

SEQ ID NO: 157915 - RNA, 15 nt, Human herpesvirus 6
uggugugggugugau

SEQ ID NO: 157916 - RNA, 15 nt, Human herpesvirus 6
uggugcggcgggauu

SEQ ID NO: 157917 - RNA, 14 nt, Human herpesvirus 6
uggugaguaccugu

SEQ ID NO: 157918 - RNA, 19 nt, Human herpesvirus 6
ucaucauauaauauuucca

SEQ ID NO: 157919 - RNA, 22 nt, Human herpesvirus 6
ucaucauauaauauuuccauaa

SEQ ID NO: 157920 - RNA, 21 nt, Human herpesvirus 6
ucaucaugugugccuacuuug

SEQ ID NO: 157921 - RNA, 18 nt, Human herpesvirus 6
ucauccaaauacacuuuc

SEQ ID NO: 157922 - RNA, 13 nt, Human herpesvirus 6
ucaucaaauccuc

SEQ ID NO: 157923 - RNA, 14 nt, Human herpesvirus 6
ucaucacaugccau

SEQ ID NO: 157924 - RNA, 17 nt, Human herpesvirus 6
ucaucaccaagucuaag

SEQ ID NO: 157925 - RNA, 13 nt, Human herpesvirus 6
ucacaaucuaaua

SEQ ID NO: 157926 - RNA, 13 nt, Human herpesvirus 6
ucacaaugaucaa

SEQ ID NO: 157927 - RNA, 21 nt, Human herpesvirus 6
ucacacauucuacuuguacaa

SEQ ID NO: 157928 - RNA, 13 nt, Human herpesvirus 6
ucacaacaaaaau

SEQ ID NO: 157929 - RNA, 20 nt, Human herpesvirus 6
ucacaagcuguccaucuuca

SEQ ID NO: 157930 - RNA, 17 nt, Human herpesvirus 6
ucaugcccgaaugugau

SEQ ID NO: 157931 - RNA, 17 nt, Human herpesvirus 6
ucaugauauuccagaca

SEQ ID NO: 157932 - RNA, 20 nt, Human herpesvirus 6
ucaugauauuccagacaaua

SEQ ID NO: 157933 - RNA, 12 nt, Human herpesvirus 6
ucaugaucucac

SEQ ID NO: 157934 - RNA, 19 nt, Human herpesvirus 6
ucaugauuaucauagacaa

SEQ ID NO: 157935 - RNA, 17 nt, Human herpesvirus 6
ucaucuauuauaagcaa

SEQ ID NO: 157936 - RNA, 19 nt, Human herpesvirus 6
ucaucuccaauaaaauauc

SEQ ID NO: 157937 - RNA, 17 nt, Human herpesvirus 6
ucaucgcgacuaaaaau

SEQ ID NO: 157938 - RNA, 17 nt, Human herpesvirus 6
ucauuaccaguagcaca

SEQ ID NO: 157939 - RNA, 23 nt, Human herpesvirus 6
ucauguguagcaucuuaccuuca

SEQ ID NO: 157940 - RNA, 15 nt, Human herpesvirus 6
ucauguucggagaua

SEQ ID NO: 157941 - RNA, 19 nt, Human herpesvirus 6
ucauguucggagauaucau

SEQ ID NO: 157942 - RNA, 22 nt, Human herpesvirus 6
ucaugugacggcgucucguauc

SEQ ID NO: 157943 - RNA, 20 nt, Human herpesvirus 6
uccaagacauguacaucaac

SEQ ID NO: 157944 - RNA, 17 nt, Human herpesvirus 6
uccaaugacuacuaaau

SEQ ID NO: 157945 - RNA, 17 nt, Human herpesvirus 6
uccaaggauuaugauca

SEQ ID NO: 157946 - RNA, 22 nt, Human herpesvirus 6
uccgcauaucgcccccauacac

SEQ ID NO: 157947 - RNA, 21 nt, Human herpesvirus 6
uccggaauuuugagauuuaca

SEQ ID NO: 157948 - RNA, 17 nt, Human herpesvirus 6
uccggaagggcucuauu

SEQ ID NO: 157949 - RNA, 21 nt, Human herpesvirus 6
uccgcuguuggguaugcucac

SEQ ID NO: 157950 - RNA, 18 nt, Human herpesvirus 6
uccggggggaaaccucaa

SEQ ID NO: 157951 - RNA, 18 nt, Human herpesvirus 6
uccgucauacaaaaugac

SEQ ID NO: 157952 - RNA, 19 nt, Human herpesvirus 6
uccguuuuucucugcaaaa

SEQ ID NO: 157953 - RNA, 18 nt, Human herpesvirus 6
uccguugucgaagucuuc

SEQ ID NO: 157954 - RNA, 17 nt, Human herpesvirus 6
uccguggggcacacaug

SEQ ID NO: 157955 - RNA, 15 nt, Human herpesvirus 6
uccguuccaaccucc

SEQ ID NO: 157956 - RNA, 15 nt, Human herpesvirus 6
uccuaaauaccaauu

SEQ ID NO: 157957 - RNA, 18 nt, Human herpesvirus 6
uccuaccauguugcuuau

SEQ ID NO: 157958 - RNA, 13 nt, Human herpesvirus 6
uccucucuggaaa

SEQ ID NO: 157959 - RNA, 16 nt, Human herpesvirus 6
uccccaugucuugccu

SEQ ID NO: 157960 - RNA, 16 nt, Human herpesvirus 6
uccccauucaacaucc

SEQ ID NO: 157961 - RNA, 16 nt, Human herpesvirus 6
uccccagcuguguuua

SEQ ID NO: 157962 - RNA, 14 nt, Human herpesvirus 6
uccaccaaugacac

SEQ ID NO: 157963 - RNA, 14 nt, Human herpesvirus 6
ucccagauacauaa

SEQ ID NO: 157964 - RNA, 22 nt, Human herpesvirus 6
ucccagauacauaaacaccccg

SEQ ID NO: 157965 - RNA, 21 nt, Human herpesvirus 6
ucccauacggucgaaugagcu

SEQ ID NO: 157966 - RNA, 18 nt, Human herpesvirus 6
ucgaaaguucaucuuuca

SEQ ID NO: 157967 - RNA, 13 nt, Human herpesvirus 6
ucgaaagagauau

SEQ ID NO: 157968 - RNA, 17 nt, Human herpesvirus 6
uccuuugccuguauuaa

SEQ ID NO: 157969 - RNA, 14 nt, Human herpesvirus 6
uccugagaguaaau

SEQ ID NO: 157970 - RNA, 20 nt, Human herpesvirus 6
uccugaucacagagcagaga

SEQ ID NO: 157971 - RNA, 17 nt, Human herpesvirus 6
uccugacuacgauccau

SEQ ID NO: 157972 - RNA, 13 nt, Human herpesvirus 6
ucgcuaguaauau

SEQ ID NO: 157973 - RNA, 19 nt, Human herpesvirus 6
ucgcucacaauauuucaca

SEQ ID NO: 157974 - RNA, 19 nt, Human herpesvirus 6
ucgcuuaaagcguuugcaa

SEQ ID NO: 157975 - RNA, 15 nt, Human herpesvirus 6
ucgaaugagcucauu

SEQ ID NO: 157976 - RNA, 19 nt, Human herpesvirus 6
ucgaaugcccacaccaucu

SEQ ID NO: 157977 - RNA, 22 nt, Human herpesvirus 6
ucgacaacggaccaggacaauc

SEQ ID NO: 157978 - RNA, 19 nt, Human herpesvirus 6
ucgcggaguggaguccagu

SEQ ID NO: 157979 - RNA, 21 nt, Human herpesvirus 6
ucgagaauacgcuguguuuac

SEQ ID NO: 157980 - RNA, 23 nt, Human herpesvirus 6
ucgagaauacgcuguguuuacau

SEQ ID NO: 157981 - RNA, 16 nt, Human herpesvirus 6
ucgaccauguguauau

SEQ ID NO: 157982 - RNA, 14 nt, Human herpesvirus 6
ucguggacaaugau

SEQ ID NO: 157983 - RNA, 15 nt, Human herpesvirus 6
ucguggacaaugaua

SEQ ID NO: 157984 - RNA, 22 nt, Human herpesvirus 6
ucgugcucgccguauaagucua

SEQ ID NO: 157985 - RNA, 22 nt, Human herpesvirus 6
ucgugauccaaauccugacuac

SEQ ID NO: 157986 - RNA, 15 nt, Human herpesvirus 6
ucgguuuugucccga

SEQ ID NO: 157987 - RNA, 23 nt, Human herpesvirus 6
ucggugauagcgucuuugcauau

SEQ ID NO: 157988 - RNA, 16 nt, Human herpesvirus 6
ucguagacaguaaaau

SEQ ID NO: 157989 - RNA, 15 nt, Human herpesvirus 6
ucguacguacuacag

SEQ ID NO: 157990 - RNA, 17 nt, Human herpesvirus 6
ucgucaaaggcgaugaa

SEQ ID NO: 157991 - RNA, 20 nt, Human herpesvirus 6
ucggaacgccguuuuaucca

SEQ ID NO: 157992 - RNA, 15 nt, Human herpesvirus 6
ucggaauuucuuccu

SEQ ID NO: 157993 - RNA, 17 nt, Human herpesvirus 6
ucggcaacugaauuugc

SEQ ID NO: 157994 - RNA, 18 nt, Human herpesvirus 6
ucgguaaacuuaccauau

SEQ ID NO: 157995 - RNA, 22 nt, Human herpesvirus 6
ucggugauuauagauagcucca

SEQ ID NO: 157996 - RNA, 20 nt, Human herpesvirus 6
ucgggaaauaaaaaauauua

SEQ ID NO: 157997 - RNA, 20 nt, Human herpesvirus 6
ucggcgugugugcuccgggg

SEQ ID NO: 157998 - RNA, 13 nt, Human herpesvirus 6
ucuaaaaucaaaa

SEQ ID NO: 157999 - RNA, 19 nt, Human herpesvirus 6
ucguggucauugguguuua

SEQ ID NO: 158000 - RNA, 22 nt, Human herpesvirus 6
ucguuguucuugggugugcauu

SEQ ID NO: 158001 - RNA, 20 nt, Human herpesvirus 6
ucguuccccaugucuugccu

SEQ ID NO: 158002 - RNA, 21 nt, Human herpesvirus 6
ucucaagcacaaaaccaggaa

SEQ ID NO: 158003 - RNA, 18 nt, Human herpesvirus 6
ucuauugucgaagaaccc

SEQ ID NO: 158004 - RNA, 14 nt, Human herpesvirus 6
ucucaaaaaacaua

SEQ ID NO: 158005 - RNA, 11 nt, Human herpesvirus 6
ucuaauucaca

SEQ ID NO: 158006 - RNA, 22 nt, Human herpesvirus 6
ucuaauacauauaaaagcuaaa

SEQ ID NO: 158007 - RNA, 23 nt, Human herpesvirus 6
ucuaauacauauaaaagcuaaau

SEQ ID NO: 158008 - RNA, 13 nt, Human herpesvirus 6
ucugcuaauucau

SEQ ID NO: 158009 - RNA, 18 nt, Human herpesvirus 6
ucugcuauuuuuuucacu

SEQ ID NO: 158010 - RNA, 22 nt, Human herpesvirus 6
ucugccucgguuuugucccgaa

SEQ ID NO: 158011 - RNA, 18 nt, Human herpesvirus 6
ucugccugaaaaugaaga

SEQ ID NO: 158012 - RNA, 15 nt, Human herpesvirus 6
ucugcaaaacaaagg

SEQ ID NO: 158013 - RNA, 21 nt, Human herpesvirus 6
ucuccucgcaauccccacgaa

SEQ ID NO: 158014 - RNA, 22 nt, Human herpesvirus 6
ucuccguggggcacacauguau

SEQ ID NO: 158015 - RNA, 13 nt, Human herpesvirus 6
ugaccggccauca

SEQ ID NO: 158016 - RNA, 23 nt, Human herpesvirus 6
ugaccgcagaggaucuguuuaug

SEQ ID NO: 158017 - RNA, 23 nt, Human herpesvirus 6
ugaccuuacggggagcuuggaag

SEQ ID NO: 158018 - RNA, 19 nt, Human herpesvirus 6
ugacgauucaaaccgcaga

SEQ ID NO: 158019 - RNA, 18 nt, Human herpesvirus 6
ugagcuuguggaucaucu

SEQ ID NO: 158020 - RNA, 21 nt, Human herpesvirus 6
ugacggaauaugguuccacuu

SEQ ID NO: 158021 - RNA, 20 nt, Human herpesvirus 6
ugacguauccucagaaccau

SEQ ID NO: 158022 - RNA, 18 nt, Human herpesvirus 6
ugagcggaaucuauuguc

SEQ ID NO: 158023 - RNA, 11 nt, Human herpesvirus 6
ugauacauccc

SEQ ID NO: 158024 - RNA, 12 nt, Human herpesvirus 6
ugauacaucccg

SEQ ID NO: 158025 - RNA, 19 nt, Human herpesvirus 6
ugaguuuuuaucggugaug

SEQ ID NO: 158026 - RNA, 20 nt, Human herpesvirus 6
ugagguuuccgucucgccua

SEQ ID NO: 158027 - RNA, 18 nt, Human herpesvirus 6
ugaguaauugaacauugu

SEQ ID NO: 158028 - RNA, 14 nt, Human herpesvirus 6
ugaguauauaaaaa

SEQ ID NO: 158029 - RNA, 20 nt, Human herpesvirus 6
ugauuauucugucuugauaa

SEQ ID NO: 158030 - RNA, 20 nt, Human herpesvirus 6
ugauucugcauuuauaucaa

SEQ ID NO: 158031 - RNA, 20 nt, Human herpesvirus 6
ugauuaguuuucacaaagaa

SEQ ID NO: 158032 - RNA, 20 nt, Human herpesvirus 6
ugauuauaucgcaagcaaaa

SEQ ID NO: 158033 - RNA, 18 nt, Human herpesvirus 6
ugauacuauaaacaauug

SEQ ID NO: 158034 - RNA, 14 nt, Human herpesvirus 6
ugauuagagacgca

SEQ ID NO: 158035 - RNA, 21 nt, Human herpesvirus 6
ugaaucgucaaaggcgaugaa

SEQ ID NO: 158036 - RNA, 19 nt, Human herpesvirus 6
ugaauccagacuagacgca

SEQ ID NO: 158037 - RNA, 14 nt, Human herpesvirus 6
ugaauguguucaca

SEQ ID NO: 158038 - RNA, 16 nt, Human herpesvirus 6
ugaauguguucacaga

SEQ ID NO: 158039 - RNA, 13 nt, Human herpesvirus 6
ugacaucugcaaa

SEQ ID NO: 158040 - RNA, 15 nt, Human herpesvirus 6
ugacauggaagacaa

SEQ ID NO: 158041 - RNA, 23 nt, Human herpesvirus 6
ugaaacggcgcggagcccaagaa

SEQ ID NO: 158042 - RNA, 14 nt, Human herpesvirus 6
ugaaaccacugacc

SEQ ID NO: 158043 - RNA, 19 nt, Human herpesvirus 6
ugaaacuucacgaucuaca

SEQ ID NO: 158044 - RNA, 19 nt, Human herpesvirus 6
ugaaaucacguacuaucuu

SEQ ID NO: 158045 - RNA, 15 nt, Human herpesvirus 6
ugaaaucuacuguac

SEQ ID NO: 158046 - RNA, 15 nt, Human herpesvirus 6
ugaaauaucagaaau

SEQ ID NO: 158047 - RNA, 18 nt, Human herpesvirus 6
ugaaaauaaacaguuaua

SEQ ID NO: 158048 - RNA, 19 nt, Human herpesvirus 6
ugaaaaaguaguugcuaag

SEQ ID NO: 158049 - RNA, 18 nt, Human herpesvirus 6
ugaaaaaaaaaauaucac

SEQ ID NO: 158050 - RNA, 16 nt, Human herpesvirus 6
ugaaaaaaaaugaagg

SEQ ID NO: 158051 - RNA, 22 nt, Human herpesvirus 6
ugaaaaaaaauugccuuguaaa

SEQ ID NO: 158052 - RNA, 15 nt, Human herpesvirus 6
ucugucugcagcuua

SEQ ID NO: 158053 - RNA, 18 nt, Human herpesvirus 6
ucugucuuuaauggcgcc

SEQ ID NO: 158054 - RNA, 15 nt, Human herpesvirus 6
ugcaugguccacaga

SEQ ID NO: 158055 - RNA, 22 nt, Human herpesvirus 6
ugcauucgugcucgcauuucuc

SEQ ID NO: 158056 - RNA, 22 nt, Human herpesvirus 6
ugcaucugccauaucacacauc

SEQ ID NO: 158057 - RNA, 13 nt, Human herpesvirus 6
ugcauauuauuaa

SEQ ID NO: 158058 - RNA, 12 nt, Human herpesvirus 6
ugcaucagugaa

SEQ ID NO: 158059 - RNA, 19 nt, Human herpesvirus 6
ugcaucaucaagggugcug

SEQ ID NO: 158060 - RNA, 23 nt, Human herpesvirus 6
ugcccacaccaucuucagcucaa

SEQ ID NO: 158061 - RNA, 20 nt, Human herpesvirus 6
ugcauuuguagagacgaaag

SEQ ID NO: 158062 - RNA, 22 nt, Human herpesvirus 6
ugcauuuuggguugaguaugcu

SEQ ID NO: 158063 - RNA, 16 nt, Human herpesvirus 6
ugcauuuuguauuuau

SEQ ID NO: 158064 - RNA, 22 nt, Human herpesvirus 6
ugccaaggaaagacaugcauuu

SEQ ID NO: 158065 - RNA, 21 nt, Human herpesvirus 6
ugccaaaggaaaccaccggcu

SEQ ID NO: 158066 - RNA, 15 nt, Human herpesvirus 6
ugcaaacugacugua

SEQ ID NO: 158067 - RNA, 15 nt, Human herpesvirus 6
ugcaaacgauuugua

SEQ ID NO: 158068 - RNA, 17 nt, Human herpesvirus 6
ugcaaaaaacaaaugaa

SEQ ID NO: 158069 - RNA, 23 nt, Human herpesvirus 6
ugcaaaaaacaaaugaaagucuc

SEQ ID NO: 158070 - RNA, 13 nt, Human herpesvirus 6
ugcaaaacaaagg

SEQ ID NO: 158071 - RNA, 14 nt, Human herpesvirus 6
ugcaaaacuguuaa

SEQ ID NO: 158072 - RNA, 20 nt, Human herpesvirus 6
ugauuucgguuucgucgcaa

SEQ ID NO: 158073 - RNA, 19 nt, Human herpesvirus 6
ugauuugucgaaucagauc

SEQ ID NO: 158074 - RNA, 15 nt, Human herpesvirus 6
ugauuuuagacaaaa

SEQ ID NO: 158075 - RNA, 14 nt, Human herpesvirus 6
ugauuuugggacaa

SEQ ID NO: 158076 - RNA, 15 nt, Human herpesvirus 6
ugcaaaucucacugu

SEQ ID NO: 158077 - RNA, 18 nt, Human herpesvirus 6
ugcaacacaacaaacauc

SEQ ID NO: 158078 - RNA, 21 nt, Human herpesvirus 6
ugcauaucguggaauggcugc

SEQ ID NO: 158079 - RNA, 22 nt, Human herpesvirus 6
ugcauaccgccuccgcagucuc

SEQ ID NO: 158080 - RNA, 18 nt, Human herpesvirus 6
ugcaguggucaugaucug

SEQ ID NO: 158081 - RNA, 19 nt, Human herpesvirus 6
ugcagugauauggaaacac

SEQ ID NO: 158082 - RNA, 21 nt, Human herpesvirus 6
ugcagugauauggaaacacuu

SEQ ID NO: 158083 - RNA, 19 nt, Human herpesvirus 6
ugcgcuauuguaccuagca

SEQ ID NO: 158084 - RNA, 14 nt, Human herpesvirus 6
ugcgauucuaauaa

SEQ ID NO: 158085 - RNA, 20 nt, Human herpesvirus 6
ugcgauauucaaaguaaucu

SEQ ID NO: 158086 - RNA, 18 nt, Human herpesvirus 6
ugcgaucgagcaacagcg

SEQ ID NO: 158087 - RNA, 21 nt, Human herpesvirus 6
ugcgaaugcucaaccuaauga

SEQ ID NO: 158088 - RNA, 15 nt, Human herpesvirus 6
ugcggacauggugaa

SEQ ID NO: 158089 - RNA, 12 nt, Human herpesvirus 6
ugcguuccucuc

SEQ ID NO: 158090 - RNA, 16 nt, Human herpesvirus 6
ugcccgcuaccaacag

SEQ ID NO: 158091 - RNA, 16 nt, Human herpesvirus 6
ugcccagauguggaau

SEQ ID NO: 158092 - RNA, 22 nt, Human herpesvirus 6
ugccgacaucuccuucuaauau

SEQ ID NO: 158093 - RNA, 16 nt, Human herpesvirus 6
ugccucuccuauaaau

SEQ ID NO: 158094 - RNA, 12 nt, Human herpesvirus 6
ugccucagaggu

SEQ ID NO: 158095 - RNA, 14 nt, Human herpesvirus 6
ugccugcauaugca

SEQ ID NO: 158096 - RNA, 16 nt, Human herpesvirus 6
acuugucuuacacucu

SEQ ID NO: 158097 - RNA, 16 nt, Human herpesvirus 6
agaaaaucuuccacug

SEQ ID NO: 158098 - RNA, 21 nt, Human herpesvirus 6
agaaaaggacauucgcuuucu

SEQ ID NO: 158099 - RNA, 12 nt, Human herpesvirus 6
acuuagcaacua

SEQ ID NO: 158100 - RNA, 21 nt, Human herpesvirus 6
acuucaaacaccucacaaucu

SEQ ID NO: 158101 - RNA, 14 nt, Human herpesvirus 6
acuugauguugauc

SEQ ID NO: 158102 - RNA, 21 nt, Human herpesvirus 6
acuuggacaccgguaaccucg

SEQ ID NO: 158103 - RNA, 12 nt, Human herpesvirus 6
acugauacuuga

SEQ ID NO: 158104 - RNA, 18 nt, Human herpesvirus 6
acugacgguuagguuuaa

SEQ ID NO: 158105 - RNA, 15 nt, Human herpesvirus 6
acugaaacuucacga

SEQ ID NO: 158106 - RNA, 21 nt, Human herpesvirus 6
acugaaacuucacgaucuaca

SEQ ID NO: 158107 - RNA, 14 nt, Human herpesvirus 6
acugaaaccaaagc

SEQ ID NO: 158108 - RNA, 15 nt, Human herpesvirus 6
acugaaaccaaagca

SEQ ID NO: 158109 - RNA, 11 nt, Human herpesvirus 6
acugaauuugc

SEQ ID NO: 158110 - RNA, 17 nt, Human herpesvirus 6
acugacaaauacgagag

SEQ ID NO: 158111 - RNA, 14 nt, Human herpesvirus 6
acugaagaugagca

SEQ ID NO: 158112 - RNA, 19 nt, Human herpesvirus 6
acuggugagaaauaacuua

SEQ ID NO: 158113 - RNA, 18 nt, Human herpesvirus 6
acugguuuacagcacuuu

SEQ ID NO: 158114 - RNA, 19 nt, Human herpesvirus 6
acuguacgccaguguggau

SEQ ID NO: 158115 - RNA, 13 nt, Human herpesvirus 6
acuguaugcaaua

SEQ ID NO: 158116 - RNA, 16 nt, Human herpesvirus 6
acuuacagagcuuuua

SEQ ID NO: 158117 - RNA, 19 nt, Human herpesvirus 6
acucugacgaaguuuuuac

SEQ ID NO: 158118 - RNA, 15 nt, Human herpesvirus 6
acucuuugaacuuuu

SEQ ID NO: 158119 - RNA, 17 nt, Human herpesvirus 6
acucauacacaggauua

SEQ ID NO: 158120 - RNA, 14 nt, Human herpesvirus 6
acucauagauuuca

SEQ ID NO: 158121 - RNA, 16 nt, Human herpesvirus 6
acgguuugucucgcaa

SEQ ID NO: 158122 - RNA, 17 nt, Human herpesvirus 6
acgguguuuucaucagu

SEQ ID NO: 158123 - RNA, 14 nt, Human herpesvirus 6
acguagugaugauu

SEQ ID NO: 158124 - RNA, 21 nt, Human herpesvirus 6
acguauccucagaaccaucug

SEQ ID NO: 158125 - RNA, 23 nt, Human herpesvirus 6
acggucgaaaguucaucuuucaa

SEQ ID NO: 158126 - RNA, 23 nt, Human herpesvirus 6
acggagucggcgugugugcuccg

SEQ ID NO: 158127 - RNA, 20 nt, Human herpesvirus 6
acgguucaccacugugauau

SEQ ID NO: 158128 - RNA, 14 nt, Human herpesvirus 6
acuaguuuucacac

SEQ ID NO: 158129 - RNA, 19 nt, Human herpesvirus 6
acuagauucaggguuuauc

SEQ ID NO: 158130 - RNA, 21 nt, Human herpesvirus 6
acuacugaaaccaaagcauac

SEQ ID NO: 158131 - RNA, 22 nt, Human herpesvirus 6
acuacuucuuucuaaaaucaaa

SEQ ID NO: 158132 - RNA, 18 nt, Human herpesvirus 6
agaaggucaucaugcugu

SEQ ID NO: 158133 - RNA, 20 nt, Human herpesvirus 6
agaaggcuaucacuuagaca

SEQ ID NO: 158134 - RNA, 15 nt, Human herpesvirus 6
agaagacuucgacaa

SEQ ID NO: 158135 - RNA, 20 nt, Human herpesvirus 6
agaagaaaagaaaaagcagc

SEQ ID NO: 158136 - RNA, 18 nt, Human herpesvirus 6
agaauccaccaaugacac

SEQ ID NO: 158137 - RNA, 14 nt, Human herpesvirus 6
agaauaaugccuaa

SEQ ID NO: 158138 - RNA, 17 nt, Human herpesvirus 6
agaaugcaacauccugc

SEQ ID NO: 158139 - RNA, 13 nt, Human herpesvirus 6
agaaugccgugaa

SEQ ID NO: 158140 - RNA, 21 nt, Human herpesvirus 6
agaauagagagaaagagauaa

SEQ ID NO: 158141 - RNA, 18 nt, Human herpesvirus 6
agaauuacuauguggcau

SEQ ID NO: 158142 - RNA, 18 nt, Human herpesvirus 6
agaaccaaagacauucaa

SEQ ID NO: 158143 - RNA, 14 nt, Human herpesvirus 6
agaacaauuaucac

SEQ ID NO: 158144 - RNA, 20 nt, Human herpesvirus 6
agaacaauuaucacaguuga

SEQ ID NO: 158145 - RNA, 21 nt, Human herpesvirus 6
agaaauuacaagguacacaau

SEQ ID NO: 158146 - RNA, 14 nt, Human herpesvirus 6
agaaaacacuaucu

SEQ ID NO: 158147 - RNA, 14 nt, Human herpesvirus 6
agaaacgcccugaa

SEQ ID NO: 158148 - RNA, 15 nt, Human herpesvirus 6
agaaacguugcacua

SEQ ID NO: 158149 - RNA, 23 nt, Human herpesvirus 6
agaaacguugcacuacuugucuu

SEQ ID NO: 158150 - RNA, 15 nt, Human herpesvirus 6
agagaaaagugcaag

SEQ ID NO: 158151 - RNA, 17 nt, Human herpesvirus 6
agagaaacggaacugcu

SEQ ID NO: 158152 - RNA, 15 nt, Human herpesvirus 6
agagaacgagcuuag

SEQ ID NO: 158153 - RNA, 17 nt, Human herpesvirus 6
agagaagagucaccuua

SEQ ID NO: 158154 - RNA, 23 nt, Human herpesvirus 6
agagaagcgcggauagcguucau

SEQ ID NO: 158155 - RNA, 14 nt, Human herpesvirus 6
agacugcuucuuag

SEQ ID NO: 158156 - RNA, 13 nt, Human herpesvirus 6
agacuuuccccau

SEQ ID NO: 158157 - RNA, 17 nt, Human herpesvirus 6
agaccuucuuuuagucu

SEQ ID NO: 158158 - RNA, 13 nt, Human herpesvirus 6
agaccuugaucua

SEQ ID NO: 158159 - RNA, 20 nt, Human herpesvirus 6
agacgaaaauuguaacuuca

SEQ ID NO: 158160 - RNA, 16 nt, Human herpesvirus 6
agacgaaacauaguca

SEQ ID NO: 158161 - RNA, 19 nt, Human herpesvirus 6
agacguuugcuguuuucac

SEQ ID NO: 158162 - RNA, 18 nt, Human herpesvirus 6
agacuaauccauaugaaa

SEQ ID NO: 158163 - RNA, 16 nt, Human herpesvirus 6
agacuccccaccgaga

SEQ ID NO: 158164 - RNA, 21 nt, Human herpesvirus 6
agaccaauuuaugucauuuca

SEQ ID NO: 158165 - RNA, 22 nt, Human herpesvirus 6
agaccaauuuaugucauuucau

SEQ ID NO: 158166 - RNA, 22 nt, Human herpesvirus 6
agacaugcauuuuguauuuauc

SEQ ID NO: 158167 - RNA, 16 nt, Human herpesvirus 6
agacaucacauuauaa

SEQ ID NO: 158168 - RNA, 23 nt, Human herpesvirus 6
agacaaacgccuccacaugacac

SEQ ID NO: 158169 - RNA, 15 nt, Human herpesvirus 6
agaauuuauguucag

SEQ ID NO: 158170 - RNA, 15 nt, Human herpesvirus 6
agaauuucuaaccau

SEQ ID NO: 158171 - RNA, 16 nt, Human herpesvirus 6
agacagaccacacccc

SEQ ID NO: 158172 - RNA, 17 nt, Human herpesvirus 6
agacagaccacaccccu

SEQ ID NO: 158173 - RNA, 21 nt, Human herpesvirus 6
agacagaggaaauaaaaacac

SEQ ID NO: 158174 - RNA, 22 nt, Human herpesvirus 6
agacagaggaaauaaaaacacc

SEQ ID NO: 158175 - RNA, 23 nt, Human herpesvirus 6
agacagucacacacagggugcuu

SEQ ID NO: 158176 - RNA, 15 nt, Human herpesvirus 6
agacacuguaucugu

SEQ ID NO: 158177 - RNA, 15 nt, Human herpesvirus 6
accggcuaacccuaa

SEQ ID NO: 158178 - RNA, 23 nt, Human herpesvirus 6
acccuucaccgucucugaagcaa

SEQ ID NO: 158179 - RNA, 15 nt, Human herpesvirus 6
accgucaaccgccac

SEQ ID NO: 158180 - RNA, 21 nt, Human herpesvirus 6
acccuaaacccuaccauccuu

SEQ ID NO: 158181 - RNA, 18 nt, Human herpesvirus 6
acccuacaaucuguccag

SEQ ID NO: 158182 - RNA, 20 nt, Human herpesvirus 6
acccuagcuuuucauaugaa

SEQ ID NO: 158183 - RNA, 18 nt, Human herpesvirus 6
acccuaagugaaauucaa

SEQ ID NO: 158184 - RNA, 22 nt, Human herpesvirus 6
accauggcccuacuacagugga

SEQ ID NO: 158185 - RNA, 17 nt, Human herpesvirus 6
acccaaguucaucagca

SEQ ID NO: 158186 - RNA, 19 nt, Human herpesvirus 6
acccacaugaaaucacgua

SEQ ID NO: 158187 - RNA, 18 nt, Human herpesvirus 6
accaucaaucucuaugag

SEQ ID NO: 158188 - RNA, 18 nt, Human herpesvirus 6
accaucgucauaaccuca

SEQ ID NO: 158189 - RNA, 16 nt, Human herpesvirus 6
accaucuucagcucaa

SEQ ID NO: 158190 - RNA, 19 nt, Human herpesvirus 6
accauaaaaaaucuuguca

SEQ ID NO: 158191 - RNA, 17 nt, Human herpesvirus 6
accauacguagugauga

SEQ ID NO: 158192 - RNA, 21 nt, Human herpesvirus 6
acggagcccgugcacgucccg

SEQ ID NO: 158193 - RNA, 15 nt, Human herpesvirus 6
acggaacaaggccaa

SEQ ID NO: 158194 - RNA, 14 nt, Human herpesvirus 6
acggaagcugaaaa

SEQ ID NO: 158195 - RNA, 18 nt, Human herpesvirus 6
acggaaaaaaaaucuauc

SEQ ID NO: 158196 - RNA, 19 nt, Human herpesvirus 6
acggaaaaaaaaucuaucc

SEQ ID NO: 158197 - RNA, 16 nt, Human herpesvirus 6
acgcuuacacacagga

SEQ ID NO: 158198 - RNA, 14 nt, Human herpesvirus 6
acgccaguguggau

SEQ ID NO: 158199 - RNA, 17 nt, Human herpesvirus 6
acgcacccuacaaucug

SEQ ID NO: 158200 - RNA, 22 nt, Human herpesvirus 6
acgaaauaaaugaagcuuucau

SEQ ID NO: 158201 - RNA, 22 nt, Human herpesvirus 6
acgaaauaauugauacggcagc

SEQ ID NO: 158202 - RNA, 19 nt, Human herpesvirus 6
acgcacgacaacacgccag

SEQ ID NO: 158203 - RNA, 17 nt, Human herpesvirus 6
acgcagcguaaugugca

SEQ ID NO: 158204 - RNA, 18 nt, Human herpesvirus 6
acgcagcguaaugugcaa

SEQ ID NO: 158205 - RNA, 17 nt, Human herpesvirus 6
acgcauaccuacauccu

SEQ ID NO: 158206 - RNA, 13 nt, Human herpesvirus 6
acgcaucacacau

SEQ ID NO: 158207 - RNA, 15 nt, Human herpesvirus 6
acgcaucacacauac

SEQ ID NO: 158208 - RNA, 15 nt, Human herpesvirus 6
acgccaaaacuacaa

SEQ ID NO: 158209 - RNA, 15 nt, Human herpesvirus 6
acgcauuugcaauug

SEQ ID NO: 158210 - RNA, 21 nt, Human herpesvirus 6
acgaaaaagaaaaccaguauu

SEQ ID NO: 158211 - RNA, 14 nt, Human herpesvirus 6
acgaaaaagcuauc

SEQ ID NO: 158212 - RNA, 18 nt, Human herpesvirus 6
accuuguaauuucuaugu

SEQ ID NO: 158213 - RNA, 18 nt, Human herpesvirus 6
accuugaucuauguaaua

SEQ ID NO: 158214 - RNA, 15 nt, Human herpesvirus 6
accuccaguuuggau

SEQ ID NO: 158215 - RNA, 15 nt, Human herpesvirus 6
accuaaauacauuca

SEQ ID NO: 158216 - RNA, 21 nt, Human herpesvirus 6
accuaaauacauucacauuac

SEQ ID NO: 158217 - RNA, 16 nt, Human herpesvirus 6
accguucaucauucca

SEQ ID NO: 158218 - RNA, 17 nt, Human herpesvirus 6
accguucaucauuccag

SEQ ID NO: 158219 - RNA, 13 nt, Human herpesvirus 6
accucugcaauag

SEQ ID NO: 158220 - RNA, 16 nt, Human herpesvirus 6
accucugaaacacugu

SEQ ID NO: 158221 - RNA, 14 nt, Human herpesvirus 6
acauaaaacaacaa

SEQ ID NO: 158222 - RNA, 19 nt, Human herpesvirus 6
acauaaacuuagaucuaua

SEQ ID NO: 158223 - RNA, 11 nt, Human herpesvirus 6
acaucugcaaa

SEQ ID NO: 158224 - RNA, 12 nt, Human herpesvirus 6
acaucugcaaaa

SEQ ID NO: 158225 - RNA, 20 nt, Human herpesvirus 6
acaucugcaaaaaacaaaug

SEQ ID NO: 158226 - RNA, 13 nt, Human herpesvirus 6
acauggugaaaga

SEQ ID NO: 158227 - RNA, 19 nt, Human herpesvirus 6
acaugguuaggacaauuag

SEQ ID NO: 158228 - RNA, 13 nt, Human herpesvirus 6
acauuaacagacg

SEQ ID NO: 158229 - RNA, 19 nt, Human herpesvirus 6
acauuauaagauaggcaaa

SEQ ID NO: 158230 - RNA, 16 nt, Human herpesvirus 6
accacuuuuaaaauac

SEQ ID NO: 158231 - RNA, 21 nt, Human herpesvirus 6
accagccagauacuacacaaa

SEQ ID NO: 158232 - RNA, 17 nt, Human herpesvirus 6
accaccggcuaacccua

SEQ ID NO: 158233 - RNA, 19 nt, Human herpesvirus 6
accaccggcuaacccuaac

SEQ ID NO: 158234 - RNA, 15 nt, Human herpesvirus 6
accaacacaccugcc

SEQ ID NO: 158235 - RNA, 18 nt, Human herpesvirus 6
accaacacaccugccuag

SEQ ID NO: 158236 - RNA, 12 nt, Human herpesvirus 6
accaaagacauu

SEQ ID NO: 158237 - RNA, 15 nt, Human herpesvirus 6
aauuuccugaucaca

SEQ ID NO: 158238 - RNA, 19 nt, Human herpesvirus 6
aauuuccugaucacagagc

SEQ ID NO: 158239 - RNA, 23 nt, Human herpesvirus 6
acacgcuguugcucgaucgcacc

SEQ ID NO: 158240 - RNA, 13 nt, Human herpesvirus 6
acacgccagacau

SEQ ID NO: 158241 - RNA, 17 nt, Human herpesvirus 6
acacgccgacuccgucc

SEQ ID NO: 158242 - RNA, 15 nt, Human herpesvirus 6
acacgggucgggggu

SEQ ID NO: 158243 - RNA, 19 nt, Human herpesvirus 6
aauuuaccguuuaaacuau

SEQ ID NO: 158244 - RNA, 18 nt, Human herpesvirus 6
aauuuaucgcagcaucau

SEQ ID NO: 158245 - RNA, 12 nt, Human herpesvirus 6
aauuucauagac

SEQ ID NO: 158246 - RNA, 17 nt, Human herpesvirus 6
acacuagccuacuauga

SEQ ID NO: 158247 - RNA, 13 nt, Human herpesvirus 6
acagaacacaucc

SEQ ID NO: 158248 - RNA, 21 nt, Human herpesvirus 6
acagaccgucaaaucucgccg

SEQ ID NO: 158249 - RNA, 15 nt, Human herpesvirus 6
acagacgaaucacau

SEQ ID NO: 158250 - RNA, 20 nt, Human herpesvirus 6
acagacgaaucacauccgcu

SEQ ID NO: 158251 - RNA, 17 nt, Human herpesvirus 6
acagagcgcaucuuuaa

SEQ ID NO: 158252 - RNA, 14 nt, Human herpesvirus 6
acagacuuuacuuc

SEQ ID NO: 158253 - RNA, 22 nt, Human herpesvirus 6
acagagagaggagcauucacau

SEQ ID NO: 158254 - RNA, 17 nt, Human herpesvirus 6
acagagauacguaguca

SEQ ID NO: 158255 - RNA, 18 nt, Human herpesvirus 6
acagagauauuucgugcu

SEQ ID NO: 158256 - RNA, 16 nt, Human herpesvirus 6
acaggaaguuaauugu

SEQ ID NO: 158257 - RNA, 22 nt, Human herpesvirus 6
acagcuuuuccucaauaugaua

SEQ ID NO: 158258 - RNA, 14 nt, Human herpesvirus 6
acaggaacagucug

SEQ ID NO: 158259 - RNA, 15 nt, Human herpesvirus 6
acaggaacagucuga

SEQ ID NO: 158260 - RNA, 13 nt, Human herpesvirus 6
acagcgauacaau

SEQ ID NO: 158261 - RNA, 16 nt, Human herpesvirus 6
acagucuuuaaaugag

SEQ ID NO: 158262 - RNA, 18 nt, Human herpesvirus 6
acaguugauaaacauuaa

SEQ ID NO: 158263 - RNA, 11 nt, Human herpesvirus 6
acaguuuaccu

SEQ ID NO: 158264 - RNA, 12 nt, Human herpesvirus 6
acaggauucccu

SEQ ID NO: 158265 - RNA, 23 nt, Human herpesvirus 6
acaggauucccuucagacaucca

SEQ ID NO: 158266 - RNA, 18 nt, Human herpesvirus 6
acaggauuauaaaaacac

SEQ ID NO: 158267 - RNA, 22 nt, Human herpesvirus 6
acaguccauuucuaaagauuug

SEQ ID NO: 158268 - RNA, 17 nt, Human herpesvirus 6
auauauuggcaugugaa

SEQ ID NO: 158269 - RNA, 13 nt, Human herpesvirus 6
auauauugugauc

SEQ ID NO: 158270 - RNA, 19 nt, Human herpesvirus 6
auauauuugcacuuccuca

SEQ ID NO: 158271 - RNA, 21 nt, Human herpesvirus 6
auauacauuuguacacuuuau

SEQ ID NO: 158272 - RNA, 14 nt, Human herpesvirus 6
auauagacuuuccc

SEQ ID NO: 158273 - RNA, 17 nt, Human herpesvirus 6
auagcaggcauugacua

SEQ ID NO: 158274 - RNA, 21 nt, Human herpesvirus 6
auagcagaaaauguuucaucc

SEQ ID NO: 158275 - RNA, 15 nt, Human herpesvirus 6
auagcagaaguuuac

SEQ ID NO: 158276 - RNA, 16 nt, Human herpesvirus 6
auagcguucauuccca

SEQ ID NO: 158277 - RNA, 23 nt, Human herpesvirus 6
auauuugcacuuccucacgcaaa

SEQ ID NO: 158278 - RNA, 14 nt, Human herpesvirus 6
auauuuccaugacu

SEQ ID NO: 158279 - RNA, 18 nt, Human herpesvirus 6
auauuuccaugacuguga

SEQ ID NO: 158280 - RNA, 13 nt, Human herpesvirus 6
auauugcugcuag

SEQ ID NO: 158281 - RNA, 17 nt, Human herpesvirus 6
auauuguguaacucuuu

SEQ ID NO: 158282 - RNA, 16 nt, Human herpesvirus 6
aucaaagaacaaaauc

SEQ ID NO: 158283 - RNA, 19 nt, Human herpesvirus 6
aucaaagacgauugcuuua

SEQ ID NO: 158284 - RNA, 19 nt, Human herpesvirus 6
auauuuuguagaguguuau

SEQ ID NO: 158285 - RNA, 14 nt, Human herpesvirus 6
aucaaaucggacaa

SEQ ID NO: 158286 - RNA, 16 nt, Human herpesvirus 6
aucaaaucggacaaug

SEQ ID NO: 158287 - RNA, 16 nt, Human herpesvirus 6
aucaacaaacacguga

SEQ ID NO: 158288 - RNA, 11 nt, Human herpesvirus 6
aucaaacucac

SEQ ID NO: 158289 - RNA, 20 nt, Human herpesvirus 6
aucaccgauaaaaacucaca

SEQ ID NO: 158290 - RNA, 22 nt, Human herpesvirus 6
aucaccgauaaaaacucacaca

SEQ ID NO: 158291 - RNA, 23 nt, Human herpesvirus 6
aucaccgauaaaaacucacacaa

SEQ ID NO: 158292 - RNA, 19 nt, Human herpesvirus 6
aucacgauguuaacauaaa

SEQ ID NO: 158293 - RNA, 18 nt, Human herpesvirus 6
aucaacagauggugcgau

SEQ ID NO: 158294 - RNA, 14 nt, Human herpesvirus 6
aucaacauucccuu

SEQ ID NO: 158295 - RNA, 14 nt, Human herpesvirus 6
auacuuucaagugu

SEQ ID NO: 158296 - RNA, 13 nt, Human herpesvirus 6
auagaaauuacaa

SEQ ID NO: 158297 - RNA, 14 nt, Human herpesvirus 6
auagauggugcuau

SEQ ID NO: 158298 - RNA, 17 nt, Human herpesvirus 6
auagagcaacucaucaa

SEQ ID NO: 158299 - RNA, 20 nt, Human herpesvirus 6
auacgccuugggacauguau

SEQ ID NO: 158300 - RNA, 15 nt, Human herpesvirus 6
auacgguuugucucg

SEQ ID NO: 158301 - RNA, 19 nt, Human herpesvirus 6
auaccucauuguuucacuu

SEQ ID NO: 158302 - RNA, 22 nt, Human herpesvirus 6
auacgaaccucaugaguguuua

SEQ ID NO: 158303 - RNA, 17 nt, Human herpesvirus 6
auacguauauuguguac

SEQ ID NO: 158304 - RNA, 12 nt, Human herpesvirus 6
auacuacacaaa

SEQ ID NO: 158305 - RNA, 13 nt, Human herpesvirus 6
auacuagcuaaaa

SEQ ID NO: 158306 - RNA, 21 nt, Human herpesvirus 6
auacuauaaacaauuguauuc

SEQ ID NO: 158307 - RNA, 15 nt, Human herpesvirus 6
auacaucaacaaaca

SEQ ID NO: 158308 - RNA, 18 nt, Human herpesvirus 6
auacaucccguaugaaau

SEQ ID NO: 158309 - RNA, 24 nt, Human herpesvirus 6
auacaucauuaaaauauucuacuu

SEQ ID NO: 158310 - RNA, 17 nt, Human herpesvirus 6
auacauauaaaagcuaa

SEQ ID NO: 158311 - RNA, 23 nt, Human herpesvirus 6
auacacaggauuauaaaaacaca

SEQ ID NO: 158312 - RNA, 13 nt, Human herpesvirus 6
auaaaucaaagac

SEQ ID NO: 158313 - RNA, 22 nt, Human herpesvirus 6
auaaaugaauagauaauaauca

SEQ ID NO: 158314 - RNA, 14 nt, Human herpesvirus 6
auaaauaugguaau

SEQ ID NO: 158315 - RNA, 17 nt, Human herpesvirus 6
auaaaguaagcaccuua

SEQ ID NO: 158316 - RNA, 16 nt, Human herpesvirus 6
auaaauugguggacaa

SEQ ID NO: 158317 - RNA, 20 nt, Human herpesvirus 6
auaaauugguggacaacgau

SEQ ID NO: 158318 - RNA, 15 nt, Human herpesvirus 6
auaaaucgcuuaaag

SEQ ID NO: 158319 - RNA, 14 nt, Human herpesvirus 6
auaaaugguagcua

SEQ ID NO: 158320 - RNA, 20 nt, Human herpesvirus 6
auaaauucucuggaugcuuu

SEQ ID NO: 158321 - RNA, 17 nt, Human herpesvirus 6
auaacaacaacaauaac

SEQ ID NO: 158322 - RNA, 14 nt, Human herpesvirus 6
auaacaagcacuga

SEQ ID NO: 158323 - RNA, 15 nt, Human herpesvirus 6
aucagccugcucaga

SEQ ID NO: 158324 - RNA, 16 nt, Human herpesvirus 6
aucaguaugccauaaa

SEQ ID NO: 158325 - RNA, 13 nt, Human herpesvirus 6
aucagaauccacc

SEQ ID NO: 158326 - RNA, 16 nt, Human herpesvirus 6
aucagaauccaccaau

SEQ ID NO: 158327 - RNA, 18 nt, Human herpesvirus 6
aucagaauccaccaauga

SEQ ID NO: 158328 - RNA, 22 nt, Human herpesvirus 6
aucagaauccaccaaugacacc

SEQ ID NO: 158329 - RNA, 13 nt, Human herpesvirus 6
aucaucaccaagu

SEQ ID NO: 158330 - RNA, 17 nt, Human herpesvirus 6
aucaucaccaagucuaa

SEQ ID NO: 158331 - RNA, 23 nt, Human herpesvirus 6
aucauuuuuuugauuuacaaggc

SEQ ID NO: 158332 - RNA, 21 nt, Human herpesvirus 6
aucauuaaaauauucuacuuu

SEQ ID NO: 158333 - RNA, 15 nt, Human herpesvirus 6
auccgucauacaaaa

SEQ ID NO: 158334 - RNA, 14 nt, Human herpesvirus 6
auccuaacaagaca

SEQ ID NO: 158335 - RNA, 15 nt, Human herpesvirus 6
auccuaacaagacag

SEQ ID NO: 158336 - RNA, 16 nt, Human herpesvirus 6
auccgcuaaaacgacu

SEQ ID NO: 158337 - RNA, 18 nt, Human herpesvirus 6
aucccagcucaccaccau

SEQ ID NO: 158338 - RNA, 18 nt, Human herpesvirus 6
aucccuaauaaaugucaa

SEQ ID NO: 158339 - RNA, 12 nt, Human herpesvirus 6
auccauguucau

SEQ ID NO: 158340 - RNA, 15 nt, Human herpesvirus 6
auccauccaauccaa

SEQ ID NO: 158341 - RNA, 16 nt, Human herpesvirus 6
auccauccaauccaau

SEQ ID NO: 158342 - RNA, 15 nt, Human herpesvirus 6
auccaugcaacacaa

SEQ ID NO: 158343 - RNA, 12 nt, Human herpesvirus 6
auccaccaauga

SEQ ID NO: 158344 - RNA, 15 nt, Human herpesvirus 6
auccaccaaugacac

SEQ ID NO: 158345 - RNA, 19 nt, Human herpesvirus 6
aucgauugacucugcauag

SEQ ID NO: 158346 - RNA, 20 nt, Human herpesvirus 6
aucgguuguguuagcuuugc

SEQ ID NO: 158347 - RNA, 15 nt, Human herpesvirus 6
aucgucuacccuauc

SEQ ID NO: 158348 - RNA, 19 nt, Human herpesvirus 6
aucguccaauccuauaaaa

SEQ ID NO: 158349 - RNA, 15 nt, Human herpesvirus 6
auccucgaauaauua

SEQ ID NO: 158350 - RNA, 13 nt, Human herpesvirus 6
auccuaaauacca

SEQ ID NO: 158351 - RNA, 14 nt, Human herpesvirus 6
auccuagcauuucc

SEQ ID NO: 158352 - RNA, 12 nt, Human herpesvirus 6
auccucuacgua

SEQ ID NO: 158353 - RNA, 14 nt, Human herpesvirus 6
aucgagcaacagcg

SEQ ID NO: 158354 - RNA, 15 nt, Human herpesvirus 6
aucgagcaacagcgu

SEQ ID NO: 158355 - RNA, 17 nt, Human herpesvirus 6
aucgagccaaagaaaca

SEQ ID NO: 158356 - RNA, 16 nt, Human herpesvirus 6
aucgaccauguguaua

SEQ ID NO: 158357 - RNA, 17 nt, Human herpesvirus 6
aucgaaaucguauacgu

SEQ ID NO: 158358 - RNA, 13 nt, Human herpesvirus 6
aucuacugagauc

SEQ ID NO: 158359 - RNA, 13 nt, Human herpesvirus 6
aucuacugcaguc

SEQ ID NO: 158360 - RNA, 18 nt, Human herpesvirus 6
aucgucggaucaacagau

SEQ ID NO: 158361 - RNA, 17 nt, Human herpesvirus 6
aucuaccgagagauuua

SEQ ID NO: 158362 - RNA, 24 nt, Human herpesvirus 6
aucuagaucuggaucucaguagau

SEQ ID NO: 158363 - RNA, 18 nt, Human herpesvirus 6
aucuaugggagugauugu

SEQ ID NO: 158364 - RNA, 21 nt, Human herpesvirus 6
aucuauuauaagcaaacaugu

SEQ ID NO: 158365 - RNA, 21 nt, Human herpesvirus 6
aucuauugaagauaauaaaac

SEQ ID NO: 158366 - RNA, 11 nt, Human herpesvirus 6
aucuagcuaua

SEQ ID NO: 158367 - RNA, 17 nt, Human herpesvirus 6
aucugaaacacugaguu

SEQ ID NO: 158368 - RNA, 20 nt, Human herpesvirus 6
aucugagugaauugugcaag

SEQ ID NO: 158369 - RNA, 22 nt, Human herpesvirus 6
aucugcauacagaaaucaaaga

SEQ ID NO: 158370 - RNA, 19 nt, Human herpesvirus 6
aucugccauaucacacauc

SEQ ID NO: 158371 - RNA, 15 nt, Human herpesvirus 6
aguggguacaaugaa

SEQ ID NO: 158372 - RNA, 18 nt, Human herpesvirus 6
aguggacauuggucuuug

SEQ ID NO: 158373 - RNA, 23 nt, Human herpesvirus 6
aguggauuguaucgagucuuuau

SEQ ID NO: 158374 - RNA, 17 nt, Human herpesvirus 6
agugcguccguuugugg

SEQ ID NO: 158375 - RNA, 19 nt, Human herpesvirus 6
agugcuuuaaucacaauga

SEQ ID NO: 158376 - RNA, 23 nt, Human herpesvirus 6
agugcuuuaaucacaaugaucaa

SEQ ID NO: 158377 - RNA, 18 nt, Human herpesvirus 6
agugcuuuaucuagccaa

SEQ ID NO: 158378 - RNA, 18 nt, Human herpesvirus 6
aguauccuaaauaccaau

SEQ ID NO: 158379 - RNA, 21 nt, Human herpesvirus 6
aguauccuuccaccuacauca

SEQ ID NO: 158380 - RNA, 16 nt, Human herpesvirus 6
aguaugaaacuuacaa

SEQ ID NO: 158381 - RNA, 17 nt, Human herpesvirus 6
aguaugaauacgaggag

SEQ ID NO: 158382 - RNA, 16 nt, Human herpesvirus 6
aguugaagaucuuuau

SEQ ID NO: 158383 - RNA, 18 nt, Human herpesvirus 6
aguugacguuccaaagua

SEQ ID NO: 158384 - RNA, 14 nt, Human herpesvirus 6
aguucgccuuguca

SEQ ID NO: 158385 - RNA, 17 nt, Human herpesvirus 6
aguucgccuugucauca

SEQ ID NO: 158386 - RNA, 22 nt, Human herpesvirus 6
aguuaugcgucuguuuauugcc

SEQ ID NO: 158387 - RNA, 17 nt, Human herpesvirus 6
aguucaguaacauuuaa

SEQ ID NO: 158388 - RNA, 20 nt, Human herpesvirus 6
aguuugauuuuguacaguag

SEQ ID NO: 158389 - RNA, 12 nt, Human herpesvirus 6
aguuuucucaca

SEQ ID NO: 158390 - RNA, 18 nt, Human herpesvirus 6
aguucuucaacauaucac

SEQ ID NO: 158391 - RNA, 15 nt, Human herpesvirus 6
aguuuguguagggug

SEQ ID NO: 158392 - RNA, 17 nt, Human herpesvirus 6
auaaaaaaaagacauca

SEQ ID NO: 158393 - RNA, 20 nt, Human herpesvirus 6
auaaaaaaaagacaucacau

SEQ ID NO: 158394 - RNA, 20 nt, Human herpesvirus 6
aguuuuuuaagagugcaaca

SEQ ID NO: 158395 - RNA, 22 nt, Human herpesvirus 6
aguuuucacacguuauaucuaa

SEQ ID NO: 158396 - RNA, 21 nt, Human herpesvirus 6
aguuuugcguguggaguugaa

SEQ ID NO: 158397 - RNA, 13 nt, Human herpesvirus 6
auaaaaacucaau

SEQ ID NO: 158398 - RNA, 21 nt, Human herpesvirus 6
auaaaaacucacacaaccauc

SEQ ID NO: 158399 - RNA, 17 nt, Human herpesvirus 6
auaaaaauacauuuuaa

SEQ ID NO: 158400 - RNA, 18 nt, Human herpesvirus 6
aguagugcuucaacuaaa

SEQ ID NO: 158401 - RNA, 24 nt, Human herpesvirus 6
aguagcacaaaccaaaaugacucu

SEQ ID NO: 158402 - RNA, 20 nt, Human herpesvirus 6
aguaauggaucuugaucaaa

SEQ ID NO: 158403 - RNA, 18 nt, Human herpesvirus 6
aguaacggaaaacgagua

SEQ ID NO: 158404 - RNA, 22 nt, Human herpesvirus 6
aguaaauauuucuaaacacaga

SEQ ID NO: 158405 - RNA, 16 nt, Human herpesvirus 6
aguaaaacuauugaca

SEQ ID NO: 158406 - RNA, 20 nt, Human herpesvirus 6
agguaucaaagaacaaaauc

SEQ ID NO: 158407 - RNA, 19 nt, Human herpesvirus 6
aggucaucaugcugugaga

SEQ ID NO: 158408 - RNA, 17 nt, Human herpesvirus 6
aggucaucguccaaucc

SEQ ID NO: 158409 - RNA, 15 nt, Human herpesvirus 6
agggaagauuuguaa

SEQ ID NO: 158410 - RNA, 14 nt, Human herpesvirus 6
agggacucggaaaa

SEQ ID NO: 158411 - RNA, 20 nt, Human herpesvirus 6
agggauacguauauugugua

SEQ ID NO: 158412 - RNA, 24 nt, Human herpesvirus 6
agggaugucggucagacagugagu

SEQ ID NO: 158413 - RNA, 14 nt, Human herpesvirus 6
aggggaagggaaua

SEQ ID NO: 158414 - RNA, 19 nt, Human herpesvirus 6
aggggagacgaaacauagu

SEQ ID NO: 158415 - RNA, 13 nt, Human herpesvirus 6
agguaaagaucug

SEQ ID NO: 158416 - RNA, 17 nt, Human herpesvirus 6
aggcauagcagcaauag

SEQ ID NO: 158417 - RNA, 22 nt, Human herpesvirus 6
aggcauugacuauuaaacuaac

SEQ ID NO: 158418 - RNA, 18 nt, Human herpesvirus 6
aggcugcagccccaaaac

SEQ ID NO: 158419 - RNA, 24 nt, Human herpesvirus 6
aggcuauggcuuccggaauaguuc

SEQ ID NO: 158420 - RNA, 21 nt, Human herpesvirus 6
agcuguucgguuuagcuauaa

SEQ ID NO: 158421 - RNA, 23 nt, Human herpesvirus 6
agcugcagggguguggucugaga

SEQ ID NO: 158422 - RNA, 18 nt, Human herpesvirus 6
agcugaugcgcaacugau

SEQ ID NO: 158423 - RNA, 21 nt, Human herpesvirus 6
agcugaugcgcaacugauacc

SEQ ID NO: 158424 - RNA, 13 nt, Human herpesvirus 6
aggacuaggauua

SEQ ID NO: 158425 - RNA, 17 nt, Human herpesvirus 6
aggaccaagacacguca

SEQ ID NO: 158426 - RNA, 17 nt, Human herpesvirus 6
agcuuccguaucacacu

SEQ ID NO: 158427 - RNA, 16 nt, Human herpesvirus 6
agcuuagggccaaacu

SEQ ID NO: 158428 - RNA, 20 nt, Human herpesvirus 6
agcuguccaucuucagacau

SEQ ID NO: 158429 - RNA, 20 nt, Human herpesvirus 6
agcuuacggagacggguugg

SEQ ID NO: 158430 - RNA, 19 nt, Human herpesvirus 6
agcgcaucuuuaacauggu

SEQ ID NO: 158431 - RNA, 18 nt, Human herpesvirus 6
agcuaucgucuacccuau

SEQ ID NO: 158432 - RNA, 13 nt, Human herpesvirus 6
agcuaucgugcug

SEQ ID NO: 158433 - RNA, 17 nt, Human herpesvirus 6
agcuaauggcgcauaac

SEQ ID NO: 158434 - RNA, 20 nt, Human herpesvirus 6
agcuauuaugugaauguuaa

SEQ ID NO: 158435 - RNA, 18 nt, Human herpesvirus 6
agcuauugaaacuaggug

SEQ ID NO: 158436 - RNA, 21 nt, Human herpesvirus 6
agccuugcgguaaauggcaua

SEQ ID NO: 158437 - RNA, 17 nt, Human herpesvirus 6
agcgaauuuguuaagca

SEQ ID NO: 158438 - RNA, 16 nt, Human herpesvirus 6
agccgaugauaauauu

SEQ ID NO: 158439 - RNA, 14 nt, Human herpesvirus 6
agcccuuacuugaa

SEQ ID NO: 158440 - RNA, 17 nt, Human herpesvirus 6
agagguacuuuccauua

SEQ ID NO: 158441 - RNA, 18 nt, Human herpesvirus 6
cacgcuaaaaacagacga

SEQ ID NO: 158442 - RNA, 19 nt, Human herpesvirus 6
cacggggauuuaguacagu

SEQ ID NO: 158443 - RNA, 13 nt, Human herpesvirus 6
cacgcauuugcaa

SEQ ID NO: 158444 - RNA, 22 nt, Human herpesvirus 6
cacgcgauggaagaaccaaaga

SEQ ID NO: 158445 - RNA, 15 nt, Human herpesvirus 6
cacgcuaaaaacaga

SEQ ID NO: 158446 - RNA, 13 nt, Human herpesvirus 6
cacguuagcuuua

SEQ ID NO: 158447 - RNA, 18 nt, Human herpesvirus 6
cacgucaacgugucuaua

SEQ ID NO: 158448 - RNA, 14 nt, Human herpesvirus 6
cacguccucgugcu

SEQ ID NO: 158449 - RNA, 15 nt, Human herpesvirus 6
cacggugccaaagga

SEQ ID NO: 158450 - RNA, 23 nt, Human herpesvirus 6
cacggugccaaaggaaaccaccg

SEQ ID NO: 158451 - RNA, 17 nt, Human herpesvirus 6
cacgauguuaacauaaa

SEQ ID NO: 158452 - RNA, 19 nt, Human herpesvirus 6
cacgacauccguuaguaaa

SEQ ID NO: 158453 - RNA, 15 nt, Human herpesvirus 6
caccuuaaacaugua

SEQ ID NO: 158454 - RNA, 22 nt, Human herpesvirus 6
caccuuagucgcacacacaaga

SEQ ID NO: 158455 - RNA, 13 nt, Human herpesvirus 6
caccgacgguuaa

SEQ ID NO: 158456 - RNA, 18 nt, Human herpesvirus 6
caccgucuucaaccuguu

SEQ ID NO: 158457 - RNA, 20 nt, Human herpesvirus 6
caccggaugucgacuccucc

SEQ ID NO: 158458 - RNA, 15 nt, Human herpesvirus 6
caccuaauuacaauu

SEQ ID NO: 158459 - RNA, 20 nt, Human herpesvirus 6
cacuauuauauuguauauuu

SEQ ID NO: 158460 - RNA, 19 nt, Human herpesvirus 6
cacugaaucggaaacugag

SEQ ID NO: 158461 - RNA, 16 nt, Human herpesvirus 6
cacugauaacucaccc

SEQ ID NO: 158462 - RNA, 21 nt, Human herpesvirus 6
cacuuccgcgauacccagcgg

SEQ ID NO: 158463 - RNA, 14 nt, Human herpesvirus 6
cagaggcguggaaa

SEQ ID NO: 158464 - RNA, 14 nt, Human herpesvirus 6
cagauguguacaac

SEQ ID NO: 158465 - RNA, 14 nt, Human herpesvirus 6
cagauucacugacc

SEQ ID NO: 158466 - RNA, 15 nt, Human herpesvirus 6
cagaggugcugauga

SEQ ID NO: 158467 - RNA, 17 nt, Human herpesvirus 6
cagaugucaaguauuca

SEQ ID NO: 158468 - RNA, 18 nt, Human herpesvirus 6
cagaaaauguuucaucca

SEQ ID NO: 158469 - RNA, 21 nt, Human herpesvirus 6
cagaaaauguuucauccaaau

SEQ ID NO: 158470 - RNA, 18 nt, Human herpesvirus 6
cagaaaaguauagucuag

SEQ ID NO: 158471 - RNA, 15 nt, Human herpesvirus 6
cagaaaacacuaucu

SEQ ID NO: 158472 - RNA, 17 nt, Human herpesvirus 6
cagagaaaaaacaaagc

SEQ ID NO: 158473 - RNA, 22 nt, Human herpesvirus 6
cagagaaaauuuuuuacaucac

SEQ ID NO: 158474 - RNA, 16 nt, Human herpesvirus 6
cagaaauaaaauuucg

SEQ ID NO: 158475 - RNA, 20 nt, Human herpesvirus 6
caagccauggaaaacaaaga

SEQ ID NO: 158476 - RNA, 15 nt, Human herpesvirus 6
caagauuguguuucu

SEQ ID NO: 158477 - RNA, 14 nt, Human herpesvirus 6
caacacgccagaca

SEQ ID NO: 158478 - RNA, 18 nt, Human herpesvirus 6
caagaggauccauucuag

SEQ ID NO: 158479 - RNA, 15 nt, Human herpesvirus 6
caacacagcacauaa

SEQ ID NO: 158480 - RNA, 14 nt, Human herpesvirus 6
caacacaccugccu

SEQ ID NO: 158481 - RNA, 19 nt, Human herpesvirus 6
caaucuaccgagagauuua

SEQ ID NO: 158482 - RNA, 15 nt, Human herpesvirus 6
caauccauguucaua

SEQ ID NO: 158483 - RNA, 19 nt, Human herpesvirus 6
caauccauguucauaggac

SEQ ID NO: 158484 - RNA, 23 nt, Human herpesvirus 6
caauccaugcaacacaacaaaca

SEQ ID NO: 158485 - RNA, 12 nt, Human herpesvirus 6
caaucuguccag

SEQ ID NO: 158486 - RNA, 18 nt, Human herpesvirus 6
caaugacaccgauucaga

SEQ ID NO: 158487 - RNA, 19 nt, Human herpesvirus 6
caaugcagaacaacagcau

SEQ ID NO: 158488 - RNA, 21 nt, Human herpesvirus 6
caaugcagaacaacagcaugu

SEQ ID NO: 158489 - RNA, 23 nt, Human herpesvirus 6
caaugagguauaucucggacuca

SEQ ID NO: 158490 - RNA, 21 nt, Human herpesvirus 6
caauacgguuugucucgcaaa

SEQ ID NO: 158491 - RNA, 21 nt, Human herpesvirus 6
caauaaacaugauuguaauaa

SEQ ID NO: 158492 - RNA, 13 nt, Human herpesvirus 6
caauacacagaaa

SEQ ID NO: 158493 - RNA, 13 nt, Human herpesvirus 6
caauaacaacaac

SEQ ID NO: 158494 - RNA, 14 nt, Human herpesvirus 6
cacagugaaacgga

SEQ ID NO: 158495 - RNA, 16 nt, Human herpesvirus 6
cacagugugaucauca

SEQ ID NO: 158496 - RNA, 23 nt, Human herpesvirus 6
cacauaguuucgaauucuuacca

SEQ ID NO: 158497 - RNA, 14 nt, Human herpesvirus 6
cacauauaugaugc

SEQ ID NO: 158498 - RNA, 20 nt, Human herpesvirus 6
caccacugugauaugcaaac

SEQ ID NO: 158499 - RNA, 12 nt, Human herpesvirus 6
caccagccggua

SEQ ID NO: 158500 - RNA, 17 nt, Human herpesvirus 6
cacaccuuaaacaugua

SEQ ID NO: 158501 - RNA, 23 nt, Human herpesvirus 6
cacaggacacgacaaaacaauca

SEQ ID NO: 158502 - RNA, 12 nt, Human herpesvirus 6
cacacccauggc

SEQ ID NO: 158503 - RNA, 16 nt, Human herpesvirus 6
cacacacaagaacaga

SEQ ID NO: 158504 - RNA, 17 nt, Human herpesvirus 6
caauguucaauuacuca

SEQ ID NO: 158505 - RNA, 19 nt, Human herpesvirus 6
caauguucaauuacucaac

SEQ ID NO: 158506 - RNA, 23 nt, Human herpesvirus 6
aucugcggaaauaaaaaauauua

SEQ ID NO: 158507 - RNA, 17 nt, Human herpesvirus 6
aucugcgucgucuauca

SEQ ID NO: 158508 - RNA, 12 nt, Human herpesvirus 6
aucugcuugaua

SEQ ID NO: 158509 - RNA, 15 nt, Human herpesvirus 6
aucugugaacaaguu

SEQ ID NO: 158510 - RNA, 15 nt, Human herpesvirus 6
aucuguccagcuugc

SEQ ID NO: 158511 - RNA, 16 nt, Human herpesvirus 6
augguuaucaucacaa

SEQ ID NO: 158512 - RNA, 19 nt, Human herpesvirus 6
auggugcgaucgagcaaca

SEQ ID NO: 158513 - RNA, 16 nt, Human herpesvirus 6
auggugcguguacaag

SEQ ID NO: 158514 - RNA, 16 nt, Human herpesvirus 6
augucauuucaucuau

SEQ ID NO: 158515 - RNA, 14 nt, Human herpesvirus 6
augucgauguggau

SEQ ID NO: 158516 - RNA, 15 nt, Human herpesvirus 6
augucggaaucuacu

SEQ ID NO: 158517 - RNA, 17 nt, Human herpesvirus 6
augucggaaucuacuga

SEQ ID NO: 158518 - RNA, 20 nt, Human herpesvirus 6
augucggaaucuacugagau

SEQ ID NO: 158519 - RNA, 21 nt, Human herpesvirus 6
augucgugguggucuuguuau

SEQ ID NO: 158520 - RNA, 16 nt, Human herpesvirus 6
augucuagaugcaaau

SEQ ID NO: 158521 - RNA, 20 nt, Human herpesvirus 6
auguaaauaaacaccagcau

SEQ ID NO: 158522 - RNA, 22 nt, Human herpesvirus 6
auguaaauaaacaccagcauaa

SEQ ID NO: 158523 - RNA, 15 nt, Human herpesvirus 6
auguaauacaucaac

SEQ ID NO: 158524 - RNA, 13 nt, Human herpesvirus 6
augucuccaaaca

SEQ ID NO: 158525 - RNA, 22 nt, Human herpesvirus 6
augucucgcguugauacauccc

SEQ ID NO: 158526 - RNA, 23 nt, Human herpesvirus 6
augugacucggaacauaauugca

SEQ ID NO: 158527 - RNA, 21 nt, Human herpesvirus 6
augucuucuugggacuaggaa

SEQ ID NO: 158528 - RNA, 22 nt, Human herpesvirus 6
auguggacguucugucugcagc

SEQ ID NO: 158529 - RNA, 22 nt, Human herpesvirus 6
augugcgcguguuagaauguau

SEQ ID NO: 158530 - RNA, 19 nt, Human herpesvirus 6
augugucggccgugaugca

SEQ ID NO: 158531 - RNA, 16 nt, Human herpesvirus 6
auuaauuuccugauca

SEQ ID NO: 158532 - RNA, 18 nt, Human herpesvirus 6
auuacauauagucaaugu

SEQ ID NO: 158533 - RNA, 17 nt, Human herpesvirus 6
auuaccuauagucaaug

SEQ ID NO: 158534 - RNA, 18 nt, Human herpesvirus 6
auuaccuauagucaaugu

SEQ ID NO: 158535 - RNA, 22 nt, Human herpesvirus 6
auguucaaaauugggcgaagac

SEQ ID NO: 158536 - RNA, 23 nt, Human herpesvirus 6
auugcuuucucuuuuuaauucca

SEQ ID NO: 158537 - RNA, 14 nt, Human herpesvirus 6
auugcugcuagaua

SEQ ID NO: 158538 - RNA, 20 nt, Human herpesvirus 6
auuggcgucuaguaccugua

SEQ ID NO: 158539 - RNA, 12 nt, Human herpesvirus 6
auucuaaauacg

SEQ ID NO: 158540 - RNA, 22 nt, Human herpesvirus 6
auucuaccguagaccguuucuu

SEQ ID NO: 158541 - RNA, 22 nt, Human herpesvirus 6
auucucaugcgcaguguuauuc

SEQ ID NO: 158542 - RNA, 21 nt, Human herpesvirus 6
auucgguugcuuauaugcagc

SEQ ID NO: 158543 - RNA, 21 nt, Human herpesvirus 6
auuccucguucuaccaugugc

SEQ ID NO: 158544 - RNA, 18 nt, Human herpesvirus 6
auucccuucagacaucca

SEQ ID NO: 158545 - RNA, 19 nt, Human herpesvirus 6
auuccucaaaugaauuuau

SEQ ID NO: 158546 - RNA, 16 nt, Human herpesvirus 6
auuccaguuaauaaga

SEQ ID NO: 158547 - RNA, 20 nt, Human herpesvirus 6
auuccacgggaucguaggua

SEQ ID NO: 158548 - RNA, 18 nt, Human herpesvirus 6
auucccaugacgauucaa

SEQ ID NO: 158549 - RNA, 20 nt, Human herpesvirus 6
auucccaugacgauucaaac

SEQ ID NO: 158550 - RNA, 19 nt, Human herpesvirus 6
auuccagggaacuugaugu

SEQ ID NO: 158551 - RNA, 20 nt, Human herpesvirus 6
auucauuguuuuugcaugug

SEQ ID NO: 158552 - RNA, 15 nt, Human herpesvirus 6
auuauaagacacuga

SEQ ID NO: 158553 - RNA, 16 nt, Human herpesvirus 6
auuauaagacacugau

SEQ ID NO: 158554 - RNA, 15 nt, Human herpesvirus 6
auuauaaauguagca

SEQ ID NO: 158555 - RNA, 19 nt, Human herpesvirus 6
auuagaaauuacauaagca

SEQ ID NO: 158556 - RNA, 19 nt, Human herpesvirus 6
auuacuucgugcugugaua

SEQ ID NO: 158557 - RNA, 20 nt, Human herpesvirus 6
auuacgucuuuuugugcuuu

SEQ ID NO: 158558 - RNA, 15 nt, Human herpesvirus 6
auuacuaguaauaac

SEQ ID NO: 158559 - RNA, 13 nt, Human herpesvirus 6
auuagaugaauuu

SEQ ID NO: 158560 - RNA, 23 nt, Human herpesvirus 6
auuagagcuacgccaaaacuaca

SEQ ID NO: 158561 - RNA, 22 nt, Human herpesvirus 6
auuucacgugaagauguucaaa

SEQ ID NO: 158562 - RNA, 17 nt, Human herpesvirus 6
auuucuuuugagggaau

SEQ ID NO: 158563 - RNA, 14 nt, Human herpesvirus 6
auuugagaaaguug

SEQ ID NO: 158564 - RNA, 20 nt, Human herpesvirus 6
caaaaaccgccaagagauag

SEQ ID NO: 158565 - RNA, 21 nt, Human herpesvirus 6
caaaaacgagaaccugcaggg

SEQ ID NO: 158566 - RNA, 13 nt, Human herpesvirus 6
caaaaacagauua

SEQ ID NO: 158567 - RNA, 15 nt, Human herpesvirus 6
auuuguguucaagaa

SEQ ID NO: 158568 - RNA, 17 nt, Human herpesvirus 6
auuuguucgauugccaa

SEQ ID NO: 158569 - RNA, 14 nt, Human herpesvirus 6
auuugcugaugcga

SEQ ID NO: 158570 - RNA, 14 nt, Human herpesvirus 6
auuugggcuuuauu

SEQ ID NO: 158571 - RNA, 22 nt, Human herpesvirus 6
auuuggcauuaaaggacuacau

SEQ ID NO: 158572 - RNA, 18 nt, Human herpesvirus 6
auuugcauacauuccuua

SEQ ID NO: 158573 - RNA, 20 nt, Human herpesvirus 6
auuugccgggaugagcuuua

SEQ ID NO: 158574 - RNA, 19 nt, Human herpesvirus 6
auuuacaaaaaaccuuuaa

SEQ ID NO: 158575 - RNA, 16 nt, Human herpesvirus 6
auuuauagaauuaaga

SEQ ID NO: 158576 - RNA, 21 nt, Human herpesvirus 6
auuuaccguuuaaacuaugca

SEQ ID NO: 158577 - RNA, 22 nt, Human herpesvirus 6
auuuaccguuuaaacuaugcaa

SEQ ID NO: 158578 - RNA, 14 nt, Human herpesvirus 6
auuuaccuuccuga

SEQ ID NO: 158579 - RNA, 20 nt, Human herpesvirus 6
auuuaauaaagaacauguga

SEQ ID NO: 158580 - RNA, 15 nt, Human herpesvirus 6
auuuaaaugaagaua

SEQ ID NO: 158581 - RNA, 22 nt, Human herpesvirus 6
auuuaaacaacacagcacauaa

SEQ ID NO: 158582 - RNA, 17 nt, Human herpesvirus 6
auuguucgcuuguguca

SEQ ID NO: 158583 - RNA, 22 nt, Human herpesvirus 6
auuguuugaauaacaaacuaua

SEQ ID NO: 158584 - RNA, 20 nt, Human herpesvirus 6
auugguuaaaaggaauagca

SEQ ID NO: 158585 - RNA, 13 nt, Human herpesvirus 6
auuggucuuugcc

SEQ ID NO: 158586 - RNA, 19 nt, Human herpesvirus 6
auuguguucugcucugugu

SEQ ID NO: 158587 - RNA, 19 nt, Human herpesvirus 6
auugugauucugcauuuau

SEQ ID NO: 158588 - RNA, 21 nt, Human herpesvirus 6
auugucugcaguggucaugau

SEQ ID NO: 158589 - RNA, 17 nt, Human herpesvirus 6
auugucaaauagccaaa

SEQ ID NO: 158590 - RNA, 20 nt, Human herpesvirus 6
auugucaaauagccaaaaaa

SEQ ID NO: 158591 - RNA, 21 nt, Human herpesvirus 6
caaacagcuuuauucccauga

SEQ ID NO: 158592 - RNA, 22 nt, Human herpesvirus 6
caaaccauaaaaaaucuuguca

SEQ ID NO: 158593 - RNA, 17 nt, Human herpesvirus 6
caaaauuugaaauauca

SEQ ID NO: 158594 - RNA, 12 nt, Human herpesvirus 6
caaacaaggguu

SEQ ID NO: 158595 - RNA, 14 nt, Human herpesvirus 6
caaacaaauggaaa

SEQ ID NO: 158596 - RNA, 15 nt, Human herpesvirus 6
caaacaccucacaau

SEQ ID NO: 158597 - RNA, 18 nt, Human herpesvirus 6
caaaaagcuuuaaagcag

SEQ ID NO: 158598 - RNA, 17 nt, Human herpesvirus 6
caaaaauguugcaugga

SEQ ID NO: 158599 - RNA, 21 nt, Human herpesvirus 6
caaaauugggaaucaugugua

SEQ ID NO: 158600 - RNA, 17 nt, Human herpesvirus 6
caaaaugguuaugacaa

SEQ ID NO: 158601 - RNA, 18 nt, Human herpesvirus 6
caaaucuucccuuuuaca

SEQ ID NO: 158602 - RNA, 19 nt, Human herpesvirus 6
caaaugauuuuacaaagac

SEQ ID NO: 158603 - RNA, 17 nt, Human herpesvirus 6
caaacccgacaauguaa

SEQ ID NO: 158604 - RNA, 22 nt, Human herpesvirus 6
caaacucaccgcauauaucaua

SEQ ID NO: 158605 - RNA, 12 nt, Human herpesvirus 6
caacaaccacag

SEQ ID NO: 158606 - RNA, 13 nt, Human herpesvirus 6
caacaaccacagc

SEQ ID NO: 158607 - RNA, 13 nt, Human herpesvirus 6
caacaacaauaac

SEQ ID NO: 158608 - RNA, 14 nt, Human herpesvirus 6
caacaacaauaaca

SEQ ID NO: 158609 - RNA, 22 nt, Human herpesvirus 6
caaauuaugguuaucaucacaa

SEQ ID NO: 158610 - RNA, 12 nt, Human herpesvirus 6
caaauucucucu

SEQ ID NO: 158611 - RNA, 17 nt, Human herpesvirus 6
caaauugaccagccaga

SEQ ID NO: 158612 - RNA, 19 nt, Human herpesvirus 6
caaauuuaguuaauucuca

SEQ ID NO: 158613 - RNA, 22 nt, Human herpesvirus 6
cauguguagcaucuuaccuuca

SEQ ID NO: 158614 - RNA, 14 nt, Human herpesvirus 6
cauguguauauuga

SEQ ID NO: 158615 - RNA, 20 nt, Human herpesvirus 6
cauguucggagauaucauaa

SEQ ID NO: 158616 - RNA, 21 nt, Human herpesvirus 6
cauuaaaaaaaauagcagaag

SEQ ID NO: 158617 - RNA, 13 nt, Human herpesvirus 6
caugcaacacaac

SEQ ID NO: 158618 - RNA, 15 nt, Human herpesvirus 6
caugucuugcaacuc

SEQ ID NO: 158619 - RNA, 17 nt, Human herpesvirus 6
caugacugugagguuau

SEQ ID NO: 158620 - RNA, 21 nt, Human herpesvirus 6
caugacgauucaaaccgcaga

SEQ ID NO: 158621 - RNA, 12 nt, Human herpesvirus 6
caugaauuccau

SEQ ID NO: 158622 - RNA, 12 nt, Human herpesvirus 6
caucugcaaaaa

SEQ ID NO: 158623 - RNA, 18 nt, Human herpesvirus 6
caucugcaaaaaacaaau

SEQ ID NO: 158624 - RNA, 11 nt, Human herpesvirus 6
caucugcaaaa

SEQ ID NO: 158625 - RNA, 16 nt, Human herpesvirus 6
caugaucugcuugaua

SEQ ID NO: 158626 - RNA, 22 nt, Human herpesvirus 6
caugagcguaagaauuaauguc

SEQ ID NO: 158627 - RNA, 22 nt, Human herpesvirus 6
caucacauuauaagacacugau

SEQ ID NO: 158628 - RNA, 18 nt, Human herpesvirus 6
caucaccgauaaaaacuc

SEQ ID NO: 158629 - RNA, 15 nt, Human herpesvirus 6
caucucaaaaaacau

SEQ ID NO: 158630 - RNA, 13 nt, Human herpesvirus 6
caucuauacaccc

SEQ ID NO: 158631 - RNA, 18 nt, Human herpesvirus 6
caucuauuauaagcaaac

SEQ ID NO: 158632 - RNA, 23 nt, Human herpesvirus 6
caucuauuauaagcaaacaugua

SEQ ID NO: 158633 - RNA, 23 nt, Human herpesvirus 6
cagcauaacuggaaucaugaccg

SEQ ID NO: 158634 - RNA, 22 nt, Human herpesvirus 6
cagcauguuuucuccucaacua

SEQ ID NO: 158635 - RNA, 16 nt, Human herpesvirus 6
cagugcuuaugacugg

SEQ ID NO: 158636 - RNA, 22 nt, Human herpesvirus 6
cagauuuccgccugcagugaua

SEQ ID NO: 158637 - RNA, 20 nt, Human herpesvirus 6
cagauugcggacauggugaa

SEQ ID NO: 158638 - RNA, 17 nt, Human herpesvirus 6
cagcacauaacugcaua

SEQ ID NO: 158639 - RNA, 21 nt, Human herpesvirus 6
cagcacccuaugcaagcucau

SEQ ID NO: 158640 - RNA, 19 nt, Human herpesvirus 6
cagcaaucaccaccaacac

SEQ ID NO: 158641 - RNA, 20 nt, Human herpesvirus 6
cauaaucugcguuccucucu

SEQ ID NO: 158642 - RNA, 15 nt, Human herpesvirus 6
cauacucaacccaaa

SEQ ID NO: 158643 - RNA, 16 nt, Human herpesvirus 6
cauaaguuaauuccag

SEQ ID NO: 158644 - RNA, 14 nt, Human herpesvirus 6
cauagcagcaauag

SEQ ID NO: 158645 - RNA, 19 nt, Human herpesvirus 6
cauagaaaaaugagacuua

SEQ ID NO: 158646 - RNA, 11 nt, Human herpesvirus 6
cauacuggugg

SEQ ID NO: 158647 - RNA, 15 nt, Human herpesvirus 6
cauagaaauuacaag

SEQ ID NO: 158648 - RNA, 22 nt, Human herpesvirus 6
cauaacgauagcagcucugcaa

SEQ ID NO: 158649 - RNA, 19 nt, Human herpesvirus 6
cauaacuggaaucaugacc

SEQ ID NO: 158650 - RNA, 16 nt, Human herpesvirus 6
cagugugaucaucaca

SEQ ID NO: 158651 - RNA, 16 nt, Human herpesvirus 6
caguuaggauuacacu

SEQ ID NO: 158652 - RNA, 17 nt, Human herpesvirus 6
ccacugcggaguuuuau

SEQ ID NO: 158653 - RNA, 17 nt, Human herpesvirus 6
ccacuugcaaugugauc

SEQ ID NO: 158654 - RNA, 21 nt, Human herpesvirus 6
ccaggaaaguguguucuuaca

SEQ ID NO: 158655 - RNA, 22 nt, Human herpesvirus 6
ccagagaaaauuuuuuacauca

SEQ ID NO: 158656 - RNA, 20 nt, Human herpesvirus 6
ccacgaacguagacagucac

SEQ ID NO: 158657 - RNA, 18 nt, Human herpesvirus 6
ccaccuggaaaaacugac

SEQ ID NO: 158658 - RNA, 15 nt, Human herpesvirus 6
ccaccuaauaaacug

SEQ ID NO: 158659 - RNA, 13 nt, Human herpesvirus 6
ccacguacuauuu

SEQ ID NO: 158660 - RNA, 15 nt, Human herpesvirus 6
ccacggggauuuagu

SEQ ID NO: 158661 - RNA, 17 nt, Human herpesvirus 6
ccaaggaaagacaugca

SEQ ID NO: 158662 - RNA, 19 nt, Human herpesvirus 6
ccaagacauguacaucaac

SEQ ID NO: 158663 - RNA, 22 nt, Human herpesvirus 6
ccaacucgacuaaaagacguuu

SEQ ID NO: 158664 - RNA, 19 nt, Human herpesvirus 6
ccaaacuacggaaaaucuc

SEQ ID NO: 158665 - RNA, 12 nt, Human herpesvirus 6
ccaaaagauuac

SEQ ID NO: 158666 - RNA, 21 nt, Human herpesvirus 6
ccaaaaugcaacgcaucacac

SEQ ID NO: 158667 - RNA, 22 nt, Human herpesvirus 6
cauugugugggguguguaugcg

SEQ ID NO: 158668 - RNA, 16 nt, Human herpesvirus 6
cauuguuuuugcaugu

SEQ ID NO: 158669 - RNA, 18 nt, Human herpesvirus 6
cauugcgagauuguaaua

SEQ ID NO: 158670 - RNA, 22 nt, Human herpesvirus 6
cauugcgagauuguaauauuca

SEQ ID NO: 158671 - RNA, 15 nt, Human herpesvirus 6
cauucucguugaaua

SEQ ID NO: 158672 - RNA, 18 nt, Human herpesvirus 6
cauuguauagucuaauca

SEQ ID NO: 158673 - RNA, 17 nt, Human herpesvirus 6
cauuauuguguucugcu

SEQ ID NO: 158674 - RNA, 15 nt, Human herpesvirus 6
cauucaaagucuaau

SEQ ID NO: 158675 - RNA, 12 nt, Human herpesvirus 6
cauucacauaag

SEQ ID NO: 158676 - RNA, 13 nt, Human herpesvirus 6
cauucaccgguga

SEQ ID NO: 158677 - RNA, 19 nt, Human herpesvirus 6
cauugaauaacgguguuga

SEQ ID NO: 158678 - RNA, 17 nt, Human herpesvirus 6
cauugaaaaaucucuau

SEQ ID NO: 158679 - RNA, 13 nt, Human herpesvirus 6
cauuagcauacag

SEQ ID NO: 158680 - RNA, 16 nt, Human herpesvirus 6
cauuaccucugcaaua

SEQ ID NO: 158681 - RNA, 16 nt, Human herpesvirus 6
cauuauaagacacuga

SEQ ID NO: 158682 - RNA, 17 nt, Human herpesvirus 6
cauuaaacugaggcaaa

SEQ ID NO: 158683 - RNA, 16 nt, Human herpesvirus 6
ccuguuacucuagaaa

SEQ ID NO: 158684 - RNA, 20 nt, Human herpesvirus 6
ccuguuaucuuacgguguau

SEQ ID NO: 158685 - RNA, 13 nt, Human herpesvirus 6
ccuguaaaauaua

SEQ ID NO: 158686 - RNA, 15 nt, Human herpesvirus 6
ccuucagacauccag

SEQ ID NO: 158687 - RNA, 13 nt, Human herpesvirus 6
ccuucagacucaa

SEQ ID NO: 158688 - RNA, 20 nt, Human herpesvirus 6
ccuguuuuagaaacauuugc

SEQ ID NO: 158689 - RNA, 23 nt, Human herpesvirus 6
ccuucgcggugcagaacaucuca

SEQ ID NO: 158690 - RNA, 17 nt, Human herpesvirus 6
cgaaaguucaucuuuca

SEQ ID NO: 158691 - RNA, 18 nt, Human herpesvirus 6
cgaaaguucaucuuucaa

SEQ ID NO: 158692 - RNA, 17 nt, Human herpesvirus 6
cgaaacauagucaagua

SEQ ID NO: 158693 - RNA, 20 nt, Human herpesvirus 6
cgaaaauuguaacuucauac

SEQ ID NO: 158694 - RNA, 22 nt, Human herpesvirus 6
cgaaaaagaauugggauuucaa

SEQ ID NO: 158695 - RNA, 21 nt, Human herpesvirus 6
ccuuuuuuacuaguuuucaca

SEQ ID NO: 158696 - RNA, 16 nt, Human herpesvirus 6
ccuuucagaguagaaa

SEQ ID NO: 158697 - RNA, 14 nt, Human herpesvirus 6
ccuuucaguucaaa

SEQ ID NO: 158698 - RNA, 13 nt, Human herpesvirus 6
ccuggaguacaag

SEQ ID NO: 158699 - RNA, 21 nt, Human herpesvirus 6
ccugccuauacaggcaaccgc

SEQ ID NO: 158700 - RNA, 12 nt, Human herpesvirus 6
ccugcauaugca

SEQ ID NO: 158701 - RNA, 15 nt, Human herpesvirus 6
ccugcauaugcagac

SEQ ID NO: 158702 - RNA, 15 nt, Human herpesvirus 6
ccucagaggugagua

SEQ ID NO: 158703 - RNA, 18 nt, Human herpesvirus 6
ccucagggucaaaaaacu

SEQ ID NO: 158704 - RNA, 21 nt, Human herpesvirus 6
ccucgcucacaauauuucaca

SEQ ID NO: 158705 - RNA, 18 nt, Human herpesvirus 6
ccuccuuuguauguucac

SEQ ID NO: 158706 - RNA, 17 nt, Human herpesvirus 6
ccucgaauaauuauccu

SEQ ID NO: 158707 - RNA, 18 nt, Human herpesvirus 6
ccgcugacaaccuccgca

SEQ ID NO: 158708 - RNA, 19 nt, Human herpesvirus 6
ccgcguccuccauccguca

SEQ ID NO: 158709 - RNA, 15 nt, Human herpesvirus 6
ccggaacacggugau

SEQ ID NO: 158710 - RNA, 22 nt, Human herpesvirus 6
cccuguuuuuguguucagucua

SEQ ID NO: 158711 - RNA, 22 nt, Human herpesvirus 6
ccuaucucucgcuuaccguuca

SEQ ID NO: 158712 - RNA, 16 nt, Human herpesvirus 6
ccuauugguuugcaua

SEQ ID NO: 158713 - RNA, 19 nt, Human herpesvirus 6
ccuauucagaggugcugau

SEQ ID NO: 158714 - RNA, 17 nt, Human herpesvirus 6
ccucaacacucucagug

SEQ ID NO: 158715 - RNA, 22 nt, Human herpesvirus 6
ccucaaaaaugcacaauuuagc

SEQ ID NO: 158716 - RNA, 17 nt, Human herpesvirus 6
ccuaucuagaucaauau

SEQ ID NO: 158717 - RNA, 18 nt, Human herpesvirus 6
ccuaucuagaucaauaua

SEQ ID NO: 158718 - RNA, 14 nt, Human herpesvirus 6
ccuauauguguugc

SEQ ID NO: 158719 - RNA, 13 nt, Human herpesvirus 6
ccuauagucaaug

SEQ ID NO: 158720 - RNA, 17 nt, Human herpesvirus 6
ccuauagucaauguugu

SEQ ID NO: 158721 - RNA, 23 nt, Human herpesvirus 6
ccuaguaggauggaauggaauuu

SEQ ID NO: 158722 - RNA, 16 nt, Human herpesvirus 6
ccuagacacacaaaaa

SEQ ID NO: 158723 - RNA, 20 nt, Human herpesvirus 6
ccuagaggugccgaugaauu

SEQ ID NO: 158724 - RNA, 22 nt, Human herpesvirus 6
ccguaauggaaacgacaaagaa

SEQ ID NO: 158725 - RNA, 15 nt, Human herpesvirus 6
cccgagcacggucca

SEQ ID NO: 158726 - RNA, 18 nt, Human herpesvirus 6
cccgcacgcauaccuaca

SEQ ID NO: 158727 - RNA, 23 nt, Human herpesvirus 6
cccgcagagguacuuuccauuaa

SEQ ID NO: 158728 - RNA, 16 nt, Human herpesvirus 6
ccauauuguguaacuc

SEQ ID NO: 158729 - RNA, 14 nt, Human herpesvirus 6
ccagggaacuugau

SEQ ID NO: 158730 - RNA, 18 nt, Human herpesvirus 6
ccauaccguuuacuuaaa

SEQ ID NO: 158731 - RNA, 19 nt, Human herpesvirus 6
ccauacgauauaaaauuua

SEQ ID NO: 158732 - RNA, 22 nt, Human herpesvirus 6
ccauacggucgaaugagcucau

SEQ ID NO: 158733 - RNA, 12 nt, Human herpesvirus 6
ccauaauggaag

SEQ ID NO: 158734 - RNA, 21 nt, Human herpesvirus 6
ccccaagaggauccauucuag

SEQ ID NO: 158735 - RNA, 15 nt, Human herpesvirus 6
cccaugacgauucaa

SEQ ID NO: 158736 - RNA, 16 nt, Human herpesvirus 6
cccaugacgauucaaa

SEQ ID NO: 158737 - RNA, 14 nt, Human herpesvirus 6
cccauaccuguaaa

SEQ ID NO: 158738 - RNA, 20 nt, Human herpesvirus 6
ccaucaguaugccauaaaga

SEQ ID NO: 158739 - RNA, 18 nt, Human herpesvirus 6
ccaucauuauugucugca

SEQ ID NO: 158740 - RNA, 16 nt, Human herpesvirus 6
ccauccaauccaauau

SEQ ID NO: 158741 - RNA, 14 nt, Human herpesvirus 6
gccagggcauucgu

SEQ ID NO: 158742 - RNA, 22 nt, Human herpesvirus 6
gccaucaguaugccauaaagaa

SEQ ID NO: 158743 - RNA, 14 nt, Human herpesvirus 6
gccagaagaauuua

SEQ ID NO: 158744 - RNA, 17 nt, Human herpesvirus 6
gccagauacuacacaaa

SEQ ID NO: 158745 - RNA, 20 nt, Human herpesvirus 6
gccacguaaccgaugcugau

SEQ ID NO: 158746 - RNA, 15 nt, Human herpesvirus 6
gccaaccucuuccua

SEQ ID NO: 158747 - RNA, 18 nt, Human herpesvirus 6
gccaacgcgacaggguga

SEQ ID NO: 158748 - RNA, 16 nt, Human herpesvirus 6
gccaauagauggugcu

SEQ ID NO: 158749 - RNA, 23 nt, Human herpesvirus 6
gcauuaacuacaucaacuacauu

SEQ ID NO: 158750 - RNA, 21 nt, Human herpesvirus 6
gcauuagaaaaucuuccacug

SEQ ID NO: 158751 - RNA, 12 nt, Human herpesvirus 6
gcauuagucaca

SEQ ID NO: 158752 - RNA, 17 nt, Human herpesvirus 6
gcauugguugauuuuug

SEQ ID NO: 158753 - RNA, 19 nt, Human herpesvirus 6
gcauugcgagauuguaaua

SEQ ID NO: 158754 - RNA, 21 nt, Human herpesvirus 6
gcaucagugaaggcugccaug

SEQ ID NO: 158755 - RNA, 14 nt, Human herpesvirus 6
gcaguuaugugcug

SEQ ID NO: 158756 - RNA, 16 nt, Human herpesvirus 6
gcaguuuuacaucauc

SEQ ID NO: 158757 - RNA, 16 nt, Human herpesvirus 6
gcauacagauguguau

SEQ ID NO: 158758 - RNA, 20 nt, Human herpesvirus 6
gcauaauaauggcaugcauu

SEQ ID NO: 158759 - RNA, 14 nt, Human herpesvirus 6
gcaucacacauaca

SEQ ID NO: 158760 - RNA, 19 nt, Human herpesvirus 6
gcaucagaauccagaaacu

SEQ ID NO: 158761 - RNA, 19 nt, Human herpesvirus 6
gcagugauauggaaacacu

SEQ ID NO: 158762 - RNA, 24 nt, Human herpesvirus 6
gcagguacugcuaaaagcuaugua

SEQ ID NO: 158763 - RNA, 14 nt, Human herpesvirus 6
gcagaacaucucag

SEQ ID NO: 158764 - RNA, 19 nt, Human herpesvirus 6
gcagaaguuuacauagaaa

SEQ ID NO: 158765 - RNA, 15 nt, Human herpesvirus 6
gauucagagugaauu

SEQ ID NO: 158766 - RNA, 20 nt, Human herpesvirus 6
gauucccuucagacauccag

SEQ ID NO: 158767 - RNA, 17 nt, Human herpesvirus 6
gauucagaaaguucuau

SEQ ID NO: 158768 - RNA, 14 nt, Human herpesvirus 6
gauuaucauagaca

SEQ ID NO: 158769 - RNA, 15 nt, Human herpesvirus 6
gauuaucauagacaa

SEQ ID NO: 158770 - RNA, 16 nt, Human herpesvirus 6
gauuaucauagacaaa

SEQ ID NO: 158771 - RNA, 20 nt, Human herpesvirus 6
gauuucgguuucgucgcaaa

SEQ ID NO: 158772 - RNA, 17 nt, Human herpesvirus 6
gauuucacuuaagccag

SEQ ID NO: 158773 - RNA, 22 nt, Human herpesvirus 6
gauuugcuugucgggcuuugug

SEQ ID NO: 158774 - RNA, 16 nt, Human herpesvirus 6
gcaacgcaucacacau

SEQ ID NO: 158775 - RNA, 20 nt, Human herpesvirus 6
gcaaccuaauggaccaagca

SEQ ID NO: 158776 - RNA, 22 nt, Human herpesvirus 6
gcaaaacuguuaaaagagaaua

SEQ ID NO: 158777 - RNA, 18 nt, Human herpesvirus 6
gcaaaagcugacuauuca

SEQ ID NO: 158778 - RNA, 12 nt, Human herpesvirus 6
gcaaaacagacu

SEQ ID NO: 158779 - RNA, 12 nt, Human herpesvirus 6
gcaaaaacagau

SEQ ID NO: 158780 - RNA, 15 nt, Human herpesvirus 6
gauuuuuauucugcu

SEQ ID NO: 158781 - RNA, 21 nt, Human herpesvirus 6
gcacuuccgcgauacccagcg

SEQ ID NO: 158782 - RNA, 23 nt, Human herpesvirus 6
gcacccuacaaucuguccagcuu

SEQ ID NO: 158783 - RNA, 22 nt, Human herpesvirus 6
gcacccuaugcaagcucaugaa

SEQ ID NO: 158784 - RNA, 20 nt, Human herpesvirus 6
gcaacuacuuuuucaaguaa

SEQ ID NO: 158785 - RNA, 23 nt, Human herpesvirus 6
gcaacucguuuuugauugcaauc

SEQ ID NO: 158786 - RNA, 22 nt, Human herpesvirus 6
gcaacucuaccuggaaacaacg

SEQ ID NO: 158787 - RNA, 15 nt, Human herpesvirus 6
gcaacugaauuugca

SEQ ID NO: 158788 - RNA, 18 nt, Human herpesvirus 6
gcaagacgccacgggcau

SEQ ID NO: 158789 - RNA, 17 nt, Human herpesvirus 6
gcaagacuacagacucc

SEQ ID NO: 158790 - RNA, 18 nt, Human herpesvirus 6
gcaagaacugcgacucaa

SEQ ID NO: 158791 - RNA, 12 nt, Human herpesvirus 6
gaugcugaugaa

SEQ ID NO: 158792 - RNA, 18 nt, Human herpesvirus 6
gaugcaucugccauauca

SEQ ID NO: 158793 - RNA, 23 nt, Human herpesvirus 6
gaugauuugucgaaucagaucac

SEQ ID NO: 158794 - RNA, 18 nt, Human herpesvirus 6
gauuacaaaacaaucuau

SEQ ID NO: 158795 - RNA, 19 nt, Human herpesvirus 6
gauuacaagggaaauccua

SEQ ID NO: 158796 - RNA, 21 nt, Human herpesvirus 6
gauuacgucuuuuugugcuuu

SEQ ID NO: 158797 - RNA, 15 nt, Human herpesvirus 6
gaucgagcaacagcg

SEQ ID NO: 158798 - RNA, 15 nt, Human herpesvirus 6
gaucgcaccaucugu

SEQ ID NO: 158799 - RNA, 17 nt, Human herpesvirus 6
gaucuaugggagugauu

SEQ ID NO: 158800 - RNA, 20 nt, Human herpesvirus 6
gaucuaaauuucuacaaaaa

SEQ ID NO: 158801 - RNA, 14 nt, Human herpesvirus 6
gaucugccaucccu

SEQ ID NO: 158802 - RNA, 14 nt, Human herpesvirus 6
gaucugcuugauau

SEQ ID NO: 158803 - RNA, 16 nt, Human herpesvirus 6
gaguauauaaaaaacu

SEQ ID NO: 158804 - RNA, 19 nt, Human herpesvirus 6
gaguauauaaaaaacuaaa

SEQ ID NO: 158805 - RNA, 20 nt, Human herpesvirus 6
gaguaugacuguguguugaa

SEQ ID NO: 158806 - RNA, 17 nt, Human herpesvirus 6
gaguacaagaccaucug

SEQ ID NO: 158807 - RNA, 20 nt, Human herpesvirus 6
gauaucagcacccuaugcaa

SEQ ID NO: 158808 - RNA, 15 nt, Human herpesvirus 6
gauauggaugaucac

SEQ ID NO: 158809 - RNA, 16 nt, Human herpesvirus 6
gauauggaugaucacu

SEQ ID NO: 158810 - RNA, 17 nt, Human herpesvirus 6
cuuggagaugacggguu

SEQ ID NO: 158811 - RNA, 15 nt, Human herpesvirus 6
cuugcaaauauuauu

SEQ ID NO: 158812 - RNA, 20 nt, Human herpesvirus 6
cuuggccuucgguacaguga

SEQ ID NO: 158813 - RNA, 18 nt, Human herpesvirus 6
cuuggagcuuccgucaca

SEQ ID NO: 158814 - RNA, 20 nt, Human herpesvirus 6
cuugauaaacuguaugcaau

SEQ ID NO: 158815 - RNA, 16 nt, Human herpesvirus 6
cuugauguugaucuga

SEQ ID NO: 158816 - RNA, 18 nt, Human herpesvirus 6
gaaaggugaaaugaaugu

SEQ ID NO: 158817 - RNA, 15 nt, Human herpesvirus 6
cuugggugugcauug

SEQ ID NO: 158818 - RNA, 18 nt, Human herpesvirus 6
cuuggcucgugauccuac

SEQ ID NO: 158819 - RNA, 14 nt, Human herpesvirus 6
cuugggacauguau

SEQ ID NO: 158820 - RNA, 17 nt, Human herpesvirus 6
cuuguaauuucuaugua

SEQ ID NO: 158821 - RNA, 18 nt, Human herpesvirus 6
gaaaggccguuggaucca

SEQ ID NO: 158822 - RNA, 18 nt, Human herpesvirus 6
cuugguguggaacauacu

SEQ ID NO: 158823 - RNA, 18 nt, Human herpesvirus 6
gaacagucugacauggaa

SEQ ID NO: 158824 - RNA, 17 nt, Human herpesvirus 6
gaaaugaaugccgacau

SEQ ID NO: 158825 - RNA, 15 nt, Human herpesvirus 6
gaaaucuacuguaca

SEQ ID NO: 158826 - RNA, 22 nt, Human herpesvirus 6
gaaaucuacuguacaaaaucaa

SEQ ID NO: 158827 - RNA, 14 nt, Human herpesvirus 6
gaaccaucuguuca

SEQ ID NO: 158828 - RNA, 22 nt, Human herpesvirus 6
gaaccaucuguucaauuauauc

SEQ ID NO: 158829 - RNA, 14 nt, Human herpesvirus 6
gaaccagauaucuc

SEQ ID NO: 158830 - RNA, 18 nt, Human herpesvirus 6
gaacguagacagucacac

SEQ ID NO: 158831 - RNA, 20 nt, Human herpesvirus 6
gaacuggugagaaauaacuu

SEQ ID NO: 158832 - RNA, 21 nt, Human herpesvirus 6
gaacucauguugccucuggac

SEQ ID NO: 158833 - RNA, 24 nt, Human herpesvirus 6
gaacuuuuuuaaaccucuguagau

SEQ ID NO: 158834 - RNA, 20 nt, Human herpesvirus 6
gaacuuuuuucggauuuuga

SEQ ID NO: 158835 - RNA, 15 nt, Human herpesvirus 6
gaagacgcaaagaga

SEQ ID NO: 158836 - RNA, 16 nt, Human herpesvirus 6
gaauaauuauccucuc

SEQ ID NO: 158837 - RNA, 22 nt, Human herpesvirus 6
gaaugcgagucgcgaagugcuu

SEQ ID NO: 158838 - RNA, 20 nt, Human herpesvirus 6
gaauacuacagugacuuuca

SEQ ID NO: 158839 - RNA, 14 nt, Human herpesvirus 6
gaagugaagaauuu

SEQ ID NO: 158840 - RNA, 20 nt, Human herpesvirus 6
gaauguuuguuuuugucaga

SEQ ID NO: 158841 - RNA, 12 nt, Human herpesvirus 6
gaaugugauuau

SEQ ID NO: 158842 - RNA, 11 nt, Human herpesvirus 6
gaaugugcuga

SEQ ID NO: 158843 - RNA, 23 nt, Human herpesvirus 6
gaaugugucaguucaacgcuguc

SEQ ID NO: 158844 - RNA, 19 nt, Human herpesvirus 6
gaauguguucacagagcau

SEQ ID NO: 158845 - RNA, 21 nt, Human herpesvirus 6
gaauucuuaccaagaaaucau

SEQ ID NO: 158846 - RNA, 16 nt, Human herpesvirus 6
gacagaagacgacaua

SEQ ID NO: 158847 - RNA, 18 nt, Human herpesvirus 6
gacagaucggcguuuuga

SEQ ID NO: 158848 - RNA, 18 nt, Human herpesvirus 6
gacucccggcccagagac

SEQ ID NO: 158849 - RNA, 17 nt, Human herpesvirus 6
gacuauauuaucuuuca

SEQ ID NO: 158850 - RNA, 23 nt, Human herpesvirus 6
gacuauuaaacuaacauagcgaa

SEQ ID NO: 158851 - RNA, 13 nt, Human herpesvirus 6
gagaaaguuucug

SEQ ID NO: 158852 - RNA, 15 nt, Human herpesvirus 6
gacuucgacuucaaa

SEQ ID NO: 158853 - RNA, 21 nt, Human herpesvirus 6
gagaacaagugacccggccgg

SEQ ID NO: 158854 - RNA, 15 nt, Human herpesvirus 6
gagaaaugaucaaua

SEQ ID NO: 158855 - RNA, 16 nt, Human herpesvirus 6
gagauaucauaaucug

SEQ ID NO: 158856 - RNA, 22 nt, Human herpesvirus 6
gagcaacucaucaaauccucua

SEQ ID NO: 158857 - RNA, 22 nt, Human herpesvirus 6
gagauguauggagagcuuauau

SEQ ID NO: 158858 - RNA, 15 nt, Human herpesvirus 6
gagcggugugcaguu

SEQ ID NO: 158859 - RNA, 15 nt, Human herpesvirus 6
gagcgaaaugcaauc

SEQ ID NO: 158860 - RNA, 13 nt, Human herpesvirus 6
gagcgagaucuau

SEQ ID NO: 158861 - RNA, 14 nt, Human herpesvirus 6
gaggaggaggaaga

SEQ ID NO: 158862 - RNA, 18 nt, Human herpesvirus 6
gaggaaauaaaaacaccu

SEQ ID NO: 158863 - RNA, 19 nt, Human herpesvirus 6
gagcuuguggaucaucucc

SEQ ID NO: 158864 - RNA, 15 nt, Human herpesvirus 6
gagcuuuggcuguga

SEQ ID NO: 158865 - RNA, 21 nt, Human herpesvirus 6
gagcuuuuaaagaaucauuac

SEQ ID NO: 158866 - RNA, 14 nt, Human herpesvirus 6
gacuaccacaucac

SEQ ID NO: 158867 - RNA, 17 nt, Human herpesvirus 6
gacgccuugauguuucc

SEQ ID NO: 158868 - RNA, 17 nt, Human herpesvirus 6
gacgauaguguucucug

SEQ ID NO: 158869 - RNA, 23 nt, Human herpesvirus 6
gaccuugucaauaaacauuucau

SEQ ID NO: 158870 - RNA, 18 nt, Human herpesvirus 6
gacgaaagaggacgggaa

SEQ ID NO: 158871 - RNA, 14 nt, Human herpesvirus 6
gacgauaguguucu

SEQ ID NO: 158872 - RNA, 20 nt, Human herpesvirus 6
gacgacucgcggaguggagu

SEQ ID NO: 158873 - RNA, 15 nt, Human herpesvirus 6
gaccggagaaaauca

SEQ ID NO: 158874 - RNA, 19 nt, Human herpesvirus 6
gacccugccuauacaggca

SEQ ID NO: 158875 - RNA, 21 nt, Human herpesvirus 6
gacaucgucuccuacauucuc

SEQ ID NO: 158876 - RNA, 22 nt, Human herpesvirus 6
gacauaggaauucuuauuuacc

SEQ ID NO: 158877 - RNA, 21 nt, Human herpesvirus 6
gacaucacggccguauaucua

SEQ ID NO: 158878 - RNA, 14 nt, Human herpesvirus 6
gacauggugaaaga

SEQ ID NO: 158879 - RNA, 14 nt, Human herpesvirus 6
gacauguacaucaa

SEQ ID NO: 158880 - RNA, 15 nt, Human herpesvirus 6
gacauguacaucaac

SEQ ID NO: 158881 - RNA, 23 nt, Human herpesvirus 6
gacauggaagacaaauuaauuaa

SEQ ID NO: 158882 - RNA, 12 nt, Human herpesvirus 6
gacauguauauu

SEQ ID NO: 158883 - RNA, 21 nt, Human herpesvirus 6
gaccaauuuaugucauuucau

SEQ ID NO: 158884 - RNA, 19 nt, Human herpesvirus 6
gaccauacguagugaugau

SEQ ID NO: 158885 - RNA, 18 nt, Human herpesvirus 6
cuacaucaacuacauuaa

SEQ ID NO: 158886 - RNA, 13 nt, Human herpesvirus 6
cuaccauguugcu

SEQ ID NO: 158887 - RNA, 13 nt, Human herpesvirus 6
cuacccacaugaa

SEQ ID NO: 158888 - RNA, 16 nt, Human herpesvirus 6
cuaccacaucaccgau

SEQ ID NO: 158889 - RNA, 18 nt, Human herpesvirus 6
cuacauauaaauccgaua

SEQ ID NO: 158890 - RNA, 14 nt, Human herpesvirus 6
cuacagacucccca

SEQ ID NO: 158891 - RNA, 13 nt, Human herpesvirus 6
cuaauucacauau

SEQ ID NO: 158892 - RNA, 21 nt, Human herpesvirus 6
cuaauuacaauuuaauauauc

SEQ ID NO: 158893 - RNA, 14 nt, Human herpesvirus 6
cuaaucaucagagg

SEQ ID NO: 158894 - RNA, 22 nt, Human herpesvirus 6
cuacuaugacuuuucuaucacu

SEQ ID NO: 158895 - RNA, 15 nt, Human herpesvirus 6
cuacguagauauaaa

SEQ ID NO: 158896 - RNA, 15 nt, Human herpesvirus 6
cuacugaaaccaaag

SEQ ID NO: 158897 - RNA, 23 nt, Human herpesvirus 6
cuaggaagaugguaucugaagac

SEQ ID NO: 158898 - RNA, 17 nt, Human herpesvirus 6
cuaggauuagaacaauu

SEQ ID NO: 158899 - RNA, 16 nt, Human herpesvirus 6
cuaggcagaucaucaa

SEQ ID NO: 158900 - RNA, 19 nt, Human herpesvirus 6
cucacucgugccaguucac

SEQ ID NO: 158901 - RNA, 16 nt, Human herpesvirus 6
cucaacacucucagug

SEQ ID NO: 158902 - RNA, 16 nt, Human herpesvirus 6
cucagaaccaucuguu

SEQ ID NO: 158903 - RNA, 19 nt, Human herpesvirus 6
cucagaaccaucuguucaa

SEQ ID NO: 158904 - RNA, 23 nt, Human herpesvirus 6
cucagcgacucccggcccagaga

SEQ ID NO: 158905 - RNA, 16 nt, Human herpesvirus 6
cucaguagauuaccua

SEQ ID NO: 158906 - RNA, 17 nt, Human herpesvirus 6
cucaguaauuuguguaa

SEQ ID NO: 158907 - RNA, 23 nt, Human herpesvirus 6
cucaguaauuuguguaauuuaau

SEQ ID NO: 158908 - RNA, 17 nt, Human herpesvirus 6
cucauacacaggauuau

SEQ ID NO: 158909 - RNA, 15 nt, Human herpesvirus 6
cucaucaaauccucu

SEQ ID NO: 158910 - RNA, 23 nt, Human herpesvirus 6
cucaucaaauccucuacguauga

SEQ ID NO: 158911 - RNA, 22 nt, Human herpesvirus 6
cucaucuucagucuucaauaaa

SEQ ID NO: 158912 - RNA, 23 nt, Human herpesvirus 6
cucaucgcgacuaaaaauacgga

SEQ ID NO: 158913 - RNA, 16 nt, Human herpesvirus 6
cuauagucaauguugu

SEQ ID NO: 158914 - RNA, 23 nt, Human herpesvirus 6
cuauaauaguuuggccuauauga

SEQ ID NO: 158915 - RNA, 17 nt, Human herpesvirus 6
cuauacuauauaugcaa

SEQ ID NO: 158916 - RNA, 20 nt, Human herpesvirus 6
cuauagacgccauaauggaa

SEQ ID NO: 158917 - RNA, 19 nt, Human herpesvirus 6
cuauaaacaauuguauucu

SEQ ID NO: 158918 - RNA, 22 nt, Human herpesvirus 6
cuauaaacaauuguauucuuga

SEQ ID NO: 158919 - RNA, 15 nt, Human herpesvirus 6
cuagugugccuauua

SEQ ID NO: 158920 - RNA, 22 nt, Human herpesvirus 6
cuaguguuauucggaguuuuca

SEQ ID NO: 158921 - RNA, 19 nt, Human herpesvirus 6
cuauuuuuaaaccuguugu

SEQ ID NO: 158922 - RNA, 15 nt, Human herpesvirus 6
cuauuugacaauaaa

SEQ ID NO: 158923 - RNA, 15 nt, Human herpesvirus 6
cucaaaaaugcacaa

SEQ ID NO: 158924 - RNA, 21 nt, Human herpesvirus 6
cucaacgcguaucgauuuaac

SEQ ID NO: 158925 - RNA, 15 nt, Human herpesvirus 6
cuauauugcugcuag

SEQ ID NO: 158926 - RNA, 20 nt, Human herpesvirus 6
cuauauuuuuaccgaaccau

SEQ ID NO: 158927 - RNA, 17 nt, Human herpesvirus 6
cgaaugugauuaugcca

SEQ ID NO: 158928 - RNA, 22 nt, Human herpesvirus 6
cgaauggauaaacgugucugaa

SEQ ID NO: 158929 - RNA, 15 nt, Human herpesvirus 6
cgacaaaacaaucag

SEQ ID NO: 158930 - RNA, 17 nt, Human herpesvirus 6
cgacacagaacacaucc

SEQ ID NO: 158931 - RNA, 17 nt, Human herpesvirus 6
cgaauaauuauccucuc

SEQ ID NO: 158932 - RNA, 22 nt, Human herpesvirus 6
cgaauaauuauccucucuggaa

SEQ ID NO: 158933 - RNA, 16 nt, Human herpesvirus 6
cgaaggagauuucagg

SEQ ID NO: 158934 - RNA, 21 nt, Human herpesvirus 6
cgaagaauccuucguucuggu

SEQ ID NO: 158935 - RNA, 19 nt, Human herpesvirus 6
cggaaacugaggacguucu

SEQ ID NO: 158936 - RNA, 23 nt, Human herpesvirus 6
cggaaaagaugagcgucagagua

SEQ ID NO: 158937 - RNA, 19 nt, Human herpesvirus 6
cggaacugcuggcugagau

SEQ ID NO: 158938 - RNA, 18 nt, Human herpesvirus 6
cgacagggugagucacau

SEQ ID NO: 158939 - RNA, 21 nt, Human herpesvirus 6
cgacaucgucuccuacauucu

SEQ ID NO: 158940 - RNA, 14 nt, Human herpesvirus 6
cggaccaauccaug

SEQ ID NO: 158941 - RNA, 22 nt, Human herpesvirus 6
cggaauaguucuucaacauauc

SEQ ID NO: 158942 - RNA, 16 nt, Human herpesvirus 6
cggaaucuacugagau

SEQ ID NO: 158943 - RNA, 16 nt, Human herpesvirus 6
cggaaucuauugucga

SEQ ID NO: 158944 - RNA, 16 nt, Human herpesvirus 6
cggaguggaguccagu

SEQ ID NO: 158945 - RNA, 16 nt, Human herpesvirus 6
cggagagcgagucuug

SEQ ID NO: 158946 - RNA, 17 nt, Human herpesvirus 6
cggggacgacacguggg

SEQ ID NO: 158947 - RNA, 20 nt, Human herpesvirus 6
cggaucguaaggcaguaaag

SEQ ID NO: 158948 - RNA, 14 nt, Human herpesvirus 6
cguacacgcauuug

SEQ ID NO: 158949 - RNA, 13 nt, Human herpesvirus 6
cguaaugugcaaa

SEQ ID NO: 158950 - RNA, 14 nt, Human herpesvirus 6
cgucucguauccag

SEQ ID NO: 158951 - RNA, 19 nt, Human herpesvirus 6
cgucucccgcgccagguug

SEQ ID NO: 158952 - RNA, 15 nt, Human herpesvirus 6
cguaauaauuugggu

SEQ ID NO: 158953 - RNA, 21 nt, Human herpesvirus 6
cggguaaacgcgcgccggugc

SEQ ID NO: 158954 - RNA, 22 nt, Human herpesvirus 6
cggugucacacagcaugaacuc

SEQ ID NO: 158955 - RNA, 16 nt, Human herpesvirus 6
cuaacgaaaauugaug

SEQ ID NO: 158956 - RNA, 16 nt, Human herpesvirus 6
cuaacccuaacccuaa

SEQ ID NO: 158957 - RNA, 17 nt, Human herpesvirus 6
cuaauaugaacaaugac

SEQ ID NO: 158958 - RNA, 19 nt, Human herpesvirus 6
cuaaaucgcgccauauccu

SEQ ID NO: 158959 - RNA, 20 nt, Human herpesvirus 6
cuaaaucgcgccauauccua

SEQ ID NO: 158960 - RNA, 15 nt, Human herpesvirus 6
cuaaauugauaauaa

SEQ ID NO: 158961 - RNA, 18 nt, Human herpesvirus 6
cuaaauuucuacaaaaau

SEQ ID NO: 158962 - RNA, 13 nt, Human herpesvirus 6
cuaaauacauuca

SEQ ID NO: 158963 - RNA, 17 nt, Human herpesvirus 6
cuaaagucagagauuau

SEQ ID NO: 158964 - RNA, 17 nt, Human herpesvirus 6
cuaaauauaucaaagau

SEQ ID NO: 158965 - RNA, 16 nt, Human herpesvirus 6
cuaaacaccacuugau

SEQ ID NO: 158966 - RNA, 20 nt, Human herpesvirus 6
cuaaacaccacuugaucaca

SEQ ID NO: 158967 - RNA, 18 nt, Human herpesvirus 6
cgugucacacguguuaaa

SEQ ID NO: 158968 - RNA, 12 nt, Human herpesvirus 6
cgugucugugua

SEQ ID NO: 158969 - RNA, 24 nt, Human herpesvirus 6
cugggguguucguaaugugcagau

SEQ ID NO: 158970 - RNA, 17 nt, Human herpesvirus 6
cuggguuucgaagaauc

SEQ ID NO: 158971 - RNA, 13 nt, Human herpesvirus 6
cugcauaguguag

SEQ ID NO: 158972 - RNA, 19 nt, Human herpesvirus 6
cugcauaugcagacugcuu

SEQ ID NO: 158973 - RNA, 17 nt, Human herpesvirus 6
cugcaugguccacagau

SEQ ID NO: 158974 - RNA, 14 nt, Human herpesvirus 6
cugcuaauucauag

SEQ ID NO: 158975 - RNA, 17 nt, Human herpesvirus 6
cugaaacuccccagaga

SEQ ID NO: 158976 - RNA, 18 nt, Human herpesvirus 6
cugaaacuccccagagaa

SEQ ID NO: 158977 - RNA, 22 nt, Human herpesvirus 6
cucuuuauagagcaacucauca

SEQ ID NO: 158978 - RNA, 23 nt, Human herpesvirus 6
cugaagcaaagcacccuacacaa

SEQ ID NO: 158979 - RNA, 18 nt, Human herpesvirus 6
cugaaacuucacgaucua

SEQ ID NO: 158980 - RNA, 22 nt, Human herpesvirus 6
cugagcuacacgauuaacgguu

SEQ ID NO: 158981 - RNA, 19 nt, Human herpesvirus 6
cugagccuucugccugaaa

SEQ ID NO: 158982 - RNA, 15 nt, Human herpesvirus 6
cugagauucacuccg

SEQ ID NO: 158983 - RNA, 20 nt, Human herpesvirus 6
cugagaacgggcacacgucc

SEQ ID NO: 158984 - RNA, 16 nt, Human herpesvirus 6
cugagaccuugucaau

SEQ ID NO: 158985 - RNA, 16 nt, Human herpesvirus 6
cucccauguaugcauu

SEQ ID NO: 158986 - RNA, 18 nt, Human herpesvirus 6
cucccccggaguacacgu

SEQ ID NO: 158987 - RNA, 21 nt, Human herpesvirus 6
cuccccuguccccucggucca

SEQ ID NO: 158988 - RNA, 20 nt, Human herpesvirus 6
cuccgauuuucuuaguaauu

SEQ ID NO: 158989 - RNA, 16 nt, Human herpesvirus 6
cucugcaaaacaaagg

SEQ ID NO: 158990 - RNA, 14 nt, Human herpesvirus 6
cuccgccaccaccg

SEQ ID NO: 158991 - RNA, 15 nt, Human herpesvirus 6
cuucaaacaccucac

SEQ ID NO: 158992 - RNA, 22 nt, Human herpesvirus 6
cuucaaagugauuccaguuaau

SEQ ID NO: 158993 - RNA, 21 nt, Human herpesvirus 6
cuuauucaaaaauguugcaug

SEQ ID NO: 158994 - RNA, 23 nt, Human herpesvirus 6
cuuauuaauuuccugaucacaga

SEQ ID NO: 158995 - RNA, 14 nt, Human herpesvirus 6
cuucagacauccag

SEQ ID NO: 158996 - RNA, 17 nt, Human herpesvirus 6
cuucagacauccagaaa

SEQ ID NO: 158997 - RNA, 11 nt, Human herpesvirus 6
cuucaccuguc

SEQ ID NO: 158998 - RNA, 18 nt, Human herpesvirus 6
cuuccgcgauacccagcg

SEQ ID NO: 158999 - RNA, 13 nt, Human herpesvirus 6
cuuccgauaaaga

SEQ ID NO: 159000 - RNA, 19 nt, Human herpesvirus 6
cuuccguaucacacuuagc

SEQ ID NO: 159001 - RNA, 15 nt, Human herpesvirus 6
cuuccuuauaacaca

SEQ ID NO: 159002 - RNA, 22 nt, Human herpesvirus 6
cuucgacaacggaccaggacaa

SEQ ID NO: 159003 - RNA, 20 nt, Human herpesvirus 6
cuucgacuucaaacaccuca

SEQ ID NO: 159004 - RNA, 19 nt, Human herpesvirus 6
cuucuuuuagucuuuacca

SEQ ID NO: 159005 - RNA, 16 nt, Human herpesvirus 6
cuugaaaaaguaguug

SEQ ID NO: 159006 - RNA, 15 nt, Human herpesvirus 6
cuucucucgaugaaa

SEQ ID NO: 159007 - RNA, 14 nt, Human herpesvirus 6
cuucugcuaauuca

SEQ ID NO: 159008 - RNA, 17 nt, Human herpesvirus 6
cuuacauuuuguacaaa

SEQ ID NO: 159009 - RNA, 16 nt, Human herpesvirus 6
cuuaccuucaaaguga

SEQ ID NO: 159010 - RNA, 12 nt, Human herpesvirus 6
cuuacacgaugu

SEQ ID NO: 159011 - RNA, 15 nt, Human herpesvirus 6
cuuacaucgauccaa

SEQ ID NO: 159012 - RNA, 15 nt, Human herpesvirus 6
cuuaauucuaaauac

SEQ ID NO: 159013 - RNA, 23 nt, Human herpesvirus 6
cuuagaagacagaccacaccccu

SEQ ID NO: 159014 - RNA, 15 nt, Human herpesvirus 6
cuuacguaugugaag

SEQ ID NO: 159015 - RNA, 18 nt, Human herpesvirus 6
cuuauaagucaucauaua

SEQ ID NO: 159016 - RNA, 13 nt, Human herpesvirus 6
cuuauauuaaaga

SEQ ID NO: 159017 - RNA, 15 nt, Human herpesvirus 6
cuuauaacaagcacu

SEQ ID NO: 159018 - RNA, 16 nt, Human herpesvirus 6
cuguuuacgaaugaug

SEQ ID NO: 159019 - RNA, 20 nt, Human herpesvirus 6
cuuaaaaaaacacaguauuu

SEQ ID NO: 159020 - RNA, 23 nt, Human herpesvirus 6
cuguuuucaccaucaaucucuau

SEQ ID NO: 159021 - RNA, 13 nt, Human herpesvirus 6
cuguguauuguaa

SEQ ID NO: 159022 - RNA, 22 nt, Human herpesvirus 6
cugucucggauauauacuuacu

SEQ ID NO: 159023 - RNA, 19 nt, Human herpesvirus 6
cugucgaguaauuguggau

SEQ ID NO: 159024 - RNA, 15 nt, Human herpesvirus 6
cugucgaaauucacc

SEQ ID NO: 159025 - RNA, 13 nt, Human herpesvirus 6
cugucgaauaugu

SEQ ID NO: 159026 - RNA, 17 nt, Human herpesvirus 6
cuguccgccuguuccac

SEQ ID NO: 159027 - RNA, 19 nt, Human herpesvirus 6
cuguguguugaauguuaca

SEQ ID NO: 159028 - RNA, 11 nt, Human herpesvirus 6
cuguucaauua

SEQ ID NO: 159029 - RNA, 21 nt, Human herpesvirus 6
cuguuauaacacaacaaguaa

SEQ ID NO: 159030 - RNA, 21 nt, Human herpesvirus 6
uaagucguugugucaugauua

SEQ ID NO: 159031 - RNA, 19 nt, Human herpesvirus 6
uaagucuuuagaacagcuu

SEQ ID NO: 159032 - RNA, 15 nt, Human herpesvirus 6
uaagggucuaucgca

SEQ ID NO: 159033 - RNA, 16 nt, Human herpesvirus 6
uaagucaucauauaau

SEQ ID NO: 159034 - RNA, 13 nt, Human herpesvirus 6
uaaguacauagaa

SEQ ID NO: 159035 - RNA, 14 nt, Human herpesvirus 6
uaaguacauagaau

SEQ ID NO: 159036 - RNA, 23 nt, Human herpesvirus 6
uaagauugcagacgcugaaauca

SEQ ID NO: 159037 - RNA, 15 nt, Human herpesvirus 6
uaagaguaacaacua

SEQ ID NO: 159038 - RNA, 16 nt, Human herpesvirus 6
uaagaguaacaacuac

SEQ ID NO: 159039 - RNA, 12 nt, Human herpesvirus 6
uaagagugcaac

SEQ ID NO: 159040 - RNA, 13 nt, Human herpesvirus 6
uaagagugcaaca

SEQ ID NO: 159041 - RNA, 19 nt, Human herpesvirus 6
uaagacuuauaauauuccu

SEQ ID NO: 159042 - RNA, 20 nt, Human herpesvirus 6
uaacgagccaagccauggaa

SEQ ID NO: 159043 - RNA, 16 nt, Human herpesvirus 6
uaacggaaaaauuuua

SEQ ID NO: 159044 - RNA, 21 nt, Human herpesvirus 6
uaaccucaucgcgacuaaaaa

SEQ ID NO: 159045 - RNA, 23 nt, Human herpesvirus 6
uaagaaugaaaaaaaaaauauca

SEQ ID NO: 159046 - RNA, 20 nt, Human herpesvirus 6
uaagaauuaauguccaguga

SEQ ID NO: 159047 - RNA, 13 nt, Human herpesvirus 6
uaagaaagcaguu

SEQ ID NO: 159048 - RNA, 19 nt, Human herpesvirus 6
uaagaaauuuugcaugcau

SEQ ID NO: 159049 - RNA, 18 nt, Human herpesvirus 6
uaacauuaaaauagccag

SEQ ID NO: 159050 - RNA, 22 nt, Human herpesvirus 6
uaacauccaaaauacacuaaca

SEQ ID NO: 159051 - RNA, 22 nt, Human herpesvirus 6
uaacauagaaaaaugagacuua

SEQ ID NO: 159052 - RNA, 20 nt, Human herpesvirus 6
uaaccggaaaaaugaaauuu

SEQ ID NO: 159053 - RNA, 23 nt, Human herpesvirus 6
uaaccggaaaagagaaguuuaca

SEQ ID NO: 159054 - RNA, 20 nt, Human herpesvirus 6
uaaauaggugaaauggcuaa

SEQ ID NO: 159055 - RNA, 13 nt, Human herpesvirus 6
uaaauacuagcua

SEQ ID NO: 159056 - RNA, 15 nt, Human herpesvirus 6
uaaauacuagcuaaa

SEQ ID NO: 159057 - RNA, 21 nt, Human herpesvirus 6
uaaauacauucacauuaccuc

SEQ ID NO: 159058 - RNA, 18 nt, Human herpesvirus 6
uaaaguuuaaagaugugu

SEQ ID NO: 159059 - RNA, 16 nt, Human herpesvirus 6
uaaaguuuacugugau

SEQ ID NO: 159060 - RNA, 15 nt, Human herpesvirus 6
uaaauaaaugaauag

SEQ ID NO: 159061 - RNA, 23 nt, Human herpesvirus 6
uaaauaaacaccagcauaacugg

SEQ ID NO: 159062 - RNA, 16 nt, Human herpesvirus 6
uaaaaaaucuugucac

SEQ ID NO: 159063 - RNA, 13 nt, Human herpesvirus 6
uaaaaaauucuug

SEQ ID NO: 159064 - RNA, 11 nt, Human herpesvirus 6
uaaaaacucac

SEQ ID NO: 159065 - RNA, 20 nt, Human herpesvirus 6
uaaaaacucacacaaccauc

SEQ ID NO: 159066 - RNA, 22 nt, Human herpesvirus 6
guuuuuguguucagucuaugca

SEQ ID NO: 159067 - RNA, 20 nt, Human herpesvirus 6
guuuuuuaacgaaaaccauu

SEQ ID NO: 159068 - RNA, 15 nt, Human herpesvirus 6
guuuuuuaugcaaac

SEQ ID NO: 159069 - RNA, 21 nt, Human herpesvirus 6
gugggaggagugaacauacaa

SEQ ID NO: 159070 - RNA, 13 nt, Human herpesvirus 6
guuuuguggcucu

SEQ ID NO: 159071 - RNA, 22 nt, Human herpesvirus 6
guggucugagaugacaucugca

SEQ ID NO: 159072 - RNA, 15 nt, Human herpesvirus 6
uaaaauggcugugcu

SEQ ID NO: 159073 - RNA, 23 nt, Human herpesvirus 6
uaaaagcauuuuuguugugauug

SEQ ID NO: 159074 - RNA, 16 nt, Human herpesvirus 6
uaaaauguguaguggu

SEQ ID NO: 159075 - RNA, 23 nt, Human herpesvirus 6
uaaaauguuuuuuguaccagcau

SEQ ID NO: 159076 - RNA, 23 nt, Human herpesvirus 6
uaaaauccuccuagggaauuuaa

SEQ ID NO: 159077 - RNA, 18 nt, Human herpesvirus 6
uaaaauaauuacauuaaa

SEQ ID NO: 159078 - RNA, 17 nt, Human herpesvirus 6
uaaaauaccgacaagaa

SEQ ID NO: 159079 - RNA, 16 nt, Human herpesvirus 6
uaaaauagaagucuca

SEQ ID NO: 159080 - RNA, 14 nt, Human herpesvirus 6
uaaaagggaagauu

SEQ ID NO: 159081 - RNA, 21 nt, Human herpesvirus 6
uaaagauagaauaaugccuaa

SEQ ID NO: 159082 - RNA, 15 nt, Human herpesvirus 6
uaaacuaacauagcg

SEQ ID NO: 159083 - RNA, 14 nt, Human herpesvirus 6
uaaacuguaugcaa

SEQ ID NO: 159084 - RNA, 22 nt, Human herpesvirus 6
uaaagaaauaaaguuaauucaa

SEQ ID NO: 159085 - RNA, 16 nt, Human herpesvirus 6
uaaagaacaugugaca

SEQ ID NO: 159086 - RNA, 21 nt, Human herpesvirus 6
uaaagaacaugugacacgauu

SEQ ID NO: 159087 - RNA, 16 nt, Human herpesvirus 6
uaauauuuuuucagcu

SEQ ID NO: 159088 - RNA, 14 nt, Human herpesvirus 6
uaauauuagccauu

SEQ ID NO: 159089 - RNA, 17 nt, Human herpesvirus 6
uaauaugaacaaugaca

SEQ ID NO: 159090 - RNA, 12 nt, Human herpesvirus 6
uaauaguuuuaa

SEQ ID NO: 159091 - RNA, 16 nt, Human herpesvirus 6
uaauaggaacuaugaa

SEQ ID NO: 159092 - RNA, 20 nt, Human herpesvirus 6
uaaucccgucuccucaugga

SEQ ID NO: 159093 - RNA, 23 nt, Human herpesvirus 6
uaaucacaaugaucaauuuuaca

SEQ ID NO: 159094 - RNA, 14 nt, Human herpesvirus 6
uaaguuaauuccag

SEQ ID NO: 159095 - RNA, 23 nt, Human herpesvirus 6
uaauaaauugguuuuuuuuaaca

SEQ ID NO: 159096 - RNA, 17 nt, Human herpesvirus 6
uaauaaaacaagaucca

SEQ ID NO: 159097 - RNA, 13 nt, Human herpesvirus 6
uaauaaacugugu

SEQ ID NO: 159098 - RNA, 20 nt, Human herpesvirus 6
uaauaaacuuuuaaaacagg

SEQ ID NO: 159099 - RNA, 14 nt, Human herpesvirus 6
uaauaaacauuuau

SEQ ID NO: 159100 - RNA, 11 nt, Human herpesvirus 6
uaauacaucaa

SEQ ID NO: 159101 - RNA, 20 nt, Human herpesvirus 6
uaauacauuuccaugcauau

SEQ ID NO: 159102 - RNA, 17 nt, Human herpesvirus 6
uaauaagauguugcaau

SEQ ID NO: 159103 - RNA, 17 nt, Human herpesvirus 6
uaauaauggcaugcauu

SEQ ID NO: 159104 - RNA, 23 nt, Human herpesvirus 6
uaauacaaaauuugaaauaucag

SEQ ID NO: 159105 - RNA, 21 nt, Human herpesvirus 6
uaaucgcgguccaacacagca

SEQ ID NO: 159106 - RNA, 20 nt, Human herpesvirus 6
uaaugcccagauguggaauu

SEQ ID NO: 159107 - RNA, 19 nt, Human herpesvirus 6
uaaugcgguucgacagaga

SEQ ID NO: 159108 - RNA, 20 nt, Human herpesvirus 6
uaaugaguuuuucgcaauuu

SEQ ID NO: 159109 - RNA, 21 nt, Human herpesvirus 6
uaauggguuuguuuucuacau

SEQ ID NO: 159110 - RNA, 21 nt, Human herpesvirus 6
uaauggaucuugaucaaauau

SEQ ID NO: 159111 - RNA, 20 nt, Human herpesvirus 6
uacaaagugaaagagacucu

SEQ ID NO: 159112 - RNA, 16 nt, Human herpesvirus 6
uacaaaaugaccucau

SEQ ID NO: 159113 - RNA, 16 nt, Human herpesvirus 6
uaauuacauauaguca

SEQ ID NO: 159114 - RNA, 16 nt, Human herpesvirus 6
uaauuaccuauaguca

SEQ ID NO: 159115 - RNA, 17 nt, Human herpesvirus 6
uaauuaccuauagucaa

SEQ ID NO: 159116 - RNA, 18 nt, Human herpesvirus 6
uaauuaccuauagucaau

SEQ ID NO: 159117 - RNA, 16 nt, Human herpesvirus 6
uaauuacgcuguccgc

SEQ ID NO: 159118 - RNA, 14 nt, Human herpesvirus 6
uaccaagaaaucau

SEQ ID NO: 159119 - RNA, 18 nt, Human herpesvirus 6
uacauuuguacacuuuau

SEQ ID NO: 159120 - RNA, 23 nt, Human herpesvirus 6
uaccaguagcacaaaccaaaaug

SEQ ID NO: 159121 - RNA, 19 nt, Human herpesvirus 6
uacaacugaaacuucacga

SEQ ID NO: 159122 - RNA, 20 nt, Human herpesvirus 6
uacacguauguacuccgggg

SEQ ID NO: 159123 - RNA, 22 nt, Human herpesvirus 6
uacggaaaagaugagcgucaga

SEQ ID NO: 159124 - RNA, 15 nt, Human herpesvirus 6
uacgcgcauacguau

SEQ ID NO: 159125 - RNA, 20 nt, Human herpesvirus 6
uacgccaaaacuacaaagug

SEQ ID NO: 159126 - RNA, 21 nt, Human herpesvirus 6
uacgccuugggacauguauau

SEQ ID NO: 159127 - RNA, 23 nt, Human herpesvirus 6
uacuaugacuuuucuaucacuca

SEQ ID NO: 159128 - RNA, 21 nt, Human herpesvirus 6
uacuauuuguuuaaugcauuc

SEQ ID NO: 159129 - RNA, 14 nt, Human herpesvirus 6
uacguagugaugau

SEQ ID NO: 159130 - RNA, 20 nt, Human herpesvirus 6
uacguaugaaaguccucaaa

SEQ ID NO: 159131 - RNA, 17 nt, Human herpesvirus 6
uaccaugugcggagaaa

SEQ ID NO: 159132 - RNA, 18 nt, Human herpesvirus 6
uacccgaaguucucucac

SEQ ID NO: 159133 - RNA, 18 nt, Human herpesvirus 6
uacccggggauguguuca

SEQ ID NO: 159134 - RNA, 14 nt, Human herpesvirus 6
uacccuaagugaaa

SEQ ID NO: 159135 - RNA, 19 nt, Human herpesvirus 6
uacccuaagugaaauucaa

SEQ ID NO: 159136 - RNA, 15 nt, Human herpesvirus 6
uaguacgucuccugu

SEQ ID NO: 159137 - RNA, 16 nt, Human herpesvirus 6
uaguacaguaugucuc

SEQ ID NO: 159138 - RNA, 14 nt, Human herpesvirus 6
uagguguaaaucau

SEQ ID NO: 159139 - RNA, 19 nt, Human herpesvirus 6
uaguuacggggaagaucua

SEQ ID NO: 159140 - RNA, 22 nt, Human herpesvirus 6
uauaaaaauagugggaggcauu

SEQ ID NO: 159141 - RNA, 19 nt, Human herpesvirus 6
uauaaaauuuaauaaggaa

SEQ ID NO: 159142 - RNA, 20 nt, Human herpesvirus 6
uauaaaaaaagcaaauacua

SEQ ID NO: 159143 - RNA, 15 nt, Human herpesvirus 6
uauaaagagaccaau

SEQ ID NO: 159144 - RNA, 19 nt, Human herpesvirus 6
uauaaauguuuauuaucca

SEQ ID NO: 159145 - RNA, 20 nt, Human herpesvirus 6
uauaaauguagcauacgaca

SEQ ID NO: 159146 - RNA, 22 nt, Human herpesvirus 6
uauaaauguagcauacgacaaa

SEQ ID NO: 159147 - RNA, 15 nt, Human herpesvirus 6
uauaaggaagauuca

SEQ ID NO: 159148 - RNA, 13 nt, Human herpesvirus 6
uauaagauaggca

SEQ ID NO: 159149 - RNA, 16 nt, Human herpesvirus 6
uauaagaaccaacaga

SEQ ID NO: 159150 - RNA, 14 nt, Human herpesvirus 6
uaggccuucaccug

SEQ ID NO: 159151 - RNA, 12 nt, Human herpesvirus 6
uagccaaacaag

SEQ ID NO: 159152 - RNA, 23 nt, Human herpesvirus 6
uagccaaugauucuuaauucuua

SEQ ID NO: 159153 - RNA, 12 nt, Human herpesvirus 6
uagcgaauuuga

SEQ ID NO: 159154 - RNA, 15 nt, Human herpesvirus 6
uacugcaugcuaaua

SEQ ID NO: 159155 - RNA, 23 nt, Human herpesvirus 6
uacugauuaguuuucacaaagaa

SEQ ID NO: 159156 - RNA, 23 nt, Human herpesvirus 6
uagcauucuguucuucaucauca

SEQ ID NO: 159157 - RNA, 17 nt, Human herpesvirus 6
uagcaucuuaccuucaa

SEQ ID NO: 159158 - RNA, 17 nt, Human herpesvirus 6
uacugaaaccaaagcau

SEQ ID NO: 159159 - RNA, 21 nt, Human herpesvirus 6
uacugagcaaagaaaugaccu

SEQ ID NO: 159160 - RNA, 17 nt, Human herpesvirus 6
uaucaccuuacaaauaa

SEQ ID NO: 159161 - RNA, 20 nt, Human herpesvirus 6
uaucacgauguuaacauaaa

SEQ ID NO: 159162 - RNA, 22 nt, Human herpesvirus 6
uaucacgucuccuuuauugcca

SEQ ID NO: 159163 - RNA, 16 nt, Human herpesvirus 6
uaucacucauacacag

SEQ ID NO: 159164 - RNA, 17 nt, Human herpesvirus 6
uauaaucuacgcauuga

SEQ ID NO: 159165 - RNA, 20 nt, Human herpesvirus 6
uauauuuuuaccgaaccaua

SEQ ID NO: 159166 - RNA, 21 nt, Human herpesvirus 6
uauauuuuuuaacaguacuau

SEQ ID NO: 159167 - RNA, 15 nt, Human herpesvirus 6
uaucuagccaauuca

SEQ ID NO: 159168 - RNA, 23 nt, Human herpesvirus 6
uaucugcauacagaaaucaaaga

SEQ ID NO: 159169 - RNA, 20 nt, Human herpesvirus 6
uaucugaccaccaaaacgac

SEQ ID NO: 159170 - RNA, 15 nt, Human herpesvirus 6
uaucgucuacccuau

SEQ ID NO: 159171 - RNA, 16 nt, Human herpesvirus 6
uaucuaaagucagaga

SEQ ID NO: 159172 - RNA, 12 nt, Human herpesvirus 6
uaucgcaaugau

SEQ ID NO: 159173 - RNA, 23 nt, Human herpesvirus 6
uaucgcccccauacacacccagc

SEQ ID NO: 159174 - RNA, 19 nt, Human herpesvirus 6
uaucgcgcaaaccauaaaa

SEQ ID NO: 159175 - RNA, 16 nt, Human herpesvirus 6
uaugcaaacugacugu

SEQ ID NO: 159176 - RNA, 14 nt, Human herpesvirus 6
uaugauccgguaua

SEQ ID NO: 159177 - RNA, 17 nt, Human herpesvirus 6
uaucuucgccuuguauu

SEQ ID NO: 159178 - RNA, 15 nt, Human herpesvirus 6
uaugagaacaaguga

SEQ ID NO: 159179 - RNA, 21 nt, Human herpesvirus 6
uaugacuuuucuaucacucau

SEQ ID NO: 159180 - RNA, 14 nt, Human herpesvirus 6
uaugugugaugcgu

SEQ ID NO: 159181 - RNA, 21 nt, Human herpesvirus 6
uauuaacgacuucgacuucaa

SEQ ID NO: 159182 - RNA, 16 nt, Human herpesvirus 6
uauguacccuaaguga

SEQ ID NO: 159183 - RNA, 14 nt, Human herpesvirus 6
uaugucugugcaaa

SEQ ID NO: 159184 - RNA, 18 nt, Human herpesvirus 6
ucaaaaaccgccaagaga

SEQ ID NO: 159185 - RNA, 21 nt, Human herpesvirus 6
uauuuuuuuucgccgugugug

SEQ ID NO: 159186 - RNA, 22 nt, Human herpesvirus 6
ucaaaaaaauucccauguugau

SEQ ID NO: 159187 - RNA, 21 nt, Human herpesvirus 6
uauuuuggcaaaaaaacccca

SEQ ID NO: 159188 - RNA, 19 nt, Human herpesvirus 6
ucaaacaaauggaaacugg

SEQ ID NO: 159189 - RNA, 20 nt, Human herpesvirus 6
ucaaaauugggcgaagaccu

SEQ ID NO: 159190 - RNA, 13 nt, Human herpesvirus 6
ucaaaagcaugaa

SEQ ID NO: 159191 - RNA, 21 nt, Human herpesvirus 6
ucaaaauaaauacuagcuaaa

SEQ ID NO: 159192 - RNA, 21 nt, Human herpesvirus 6
ucaaaacggaggcugaaauuu

SEQ ID NO: 159193 - RNA, 13 nt, Human herpesvirus 6
uauuucacauauu

SEQ ID NO: 159194 - RNA, 14 nt, Human herpesvirus 6
uauuucucguucuc

SEQ ID NO: 159195 - RNA, 14 nt, Human herpesvirus 6
uauuucgggacaaa

SEQ ID NO: 159196 - RNA, 22 nt, Human herpesvirus 6
uauuucgaaagagauauagccu

SEQ ID NO: 159197 - RNA, 18 nt, Human herpesvirus 6
uauuguguguacaaugac

SEQ ID NO: 159198 - RNA, 22 nt, Human herpesvirus 6
uauuuagguuuugucguuugua

SEQ ID NO: 159199 - RNA, 17 nt, Human herpesvirus 6
uauuuaugaaaauugcu

SEQ ID NO: 159200 - RNA, 17 nt, Human herpesvirus 6
uauuuccaugacuguga

SEQ ID NO: 159201 - RNA, 20 nt, Human herpesvirus 6
uauuuccaugacugugaggu

SEQ ID NO: 159202 - RNA, 18 nt, Human herpesvirus 6
uauuuuagucacacauuc

SEQ ID NO: 159203 - RNA, 19 nt, Human herpesvirus 6
uauuuuauaauacacuauu

SEQ ID NO: 159204 - RNA, 19 nt, Human herpesvirus 6
uauuuuaauacauuuccau

SEQ ID NO: 159205 - RNA, 20 nt, Human herpesvirus 6
uauuaauuaccuauagucaa

SEQ ID NO: 159206 - RNA, 15 nt, Human herpesvirus 6
uauuaaguagugcuu

SEQ ID NO: 159207 - RNA, 18 nt, Human herpesvirus 6
uauuaaguagugcuucaa

SEQ ID NO: 159208 - RNA, 18 nt, Human herpesvirus 6
uauuacauuuuuggaugg

SEQ ID NO: 159209 - RNA, 17 nt, Human herpesvirus 6
uauuauccaaacauacg

SEQ ID NO: 159210 - RNA, 20 nt, Human herpesvirus 6
uauucagaggugcugaugau

SEQ ID NO: 159211 - RNA, 20 nt, Human herpesvirus 6
uauucccaugacgauucaaa

SEQ ID NO: 159212 - RNA, 19 nt, Human herpesvirus 6
uauuccccagcuguguuua

SEQ ID NO: 159213 - RNA, 23 nt, Human herpesvirus 6
uauucaaaaauguugcauggaaa

SEQ ID NO: 159214 - RNA, 19 nt, Human herpesvirus 6
uauucacggcuaauaugau

SEQ ID NO: 159215 - RNA, 14 nt, Human herpesvirus 6
uauuggcaugugaa

SEQ ID NO: 159216 - RNA, 17 nt, Human herpesvirus 6
uauugcacguucaggca

SEQ ID NO: 159217 - RNA, 20 nt, Human herpesvirus 6
uauucuccuaccauguugcu

SEQ ID NO: 159218 - RNA, 15 nt, Human herpesvirus 6
uauucugucuugaua

SEQ ID NO: 159219 - RNA, 19 nt, Human herpesvirus 6
ucaacggccuggaguacaa

SEQ ID NO: 159220 - RNA, 15 nt, Human herpesvirus 6
ucaacgcaauuccac

SEQ ID NO: 159221 - RNA, 21 nt, Human herpesvirus 6
ucaacauaucacuuguauuaa

SEQ ID NO: 159222 - RNA, 17 nt, Human herpesvirus 6
ucaacacucucagugua

SEQ ID NO: 159223 - RNA, 18 nt, Human herpesvirus 6
ucaacacucucaguguaa

SEQ ID NO: 159224 - RNA, 15 nt, Human herpesvirus 6
ucaacacccauggaa

SEQ ID NO: 159225 - RNA, 19 nt, Human herpesvirus 6
ucaaagauguacucaucca

SEQ ID NO: 159226 - RNA, 17 nt, Human herpesvirus 6
ucaaagaaacaguaaau

SEQ ID NO: 159227 - RNA, 12 nt, Human herpesvirus 6
ucaaagaaaguu

SEQ ID NO: 159228 - RNA, 15 nt, Human herpesvirus 6
ucaauaaaaacucaa

SEQ ID NO: 159229 - RNA, 11 nt, Human herpesvirus 6
ucaaguuucac

SEQ ID NO: 159230 - RNA, 19 nt, Human herpesvirus 6
ucaagugguguuuagcugu

SEQ ID NO: 159231 - RNA, 23 nt, Human herpesvirus 6
ucaaguguuuggugugacauuca

SEQ ID NO: 159232 - RNA, 22 nt, Human herpesvirus 6
ucaauaagccgaguuuggcaau

SEQ ID NO: 159233 - RNA, 21 nt, Human herpesvirus 6
ucaagcaaguuccauuuucaa

SEQ ID NO: 159234 - RNA, 23 nt, Human herpesvirus 6
ucaauagauuuuauaacgacaaa

SEQ ID NO: 159235 - RNA, 21 nt, Human herpesvirus 6
ucaauacauuuuucaauaaug

SEQ ID NO: 159236 - RNA, 12 nt, Human herpesvirus 6
ucaauuaauaca

SEQ ID NO: 159237 - RNA, 13 nt, Human herpesvirus 6
ucaauuaauacaa

SEQ ID NO: 159238 - RNA, 13 nt, Human herpesvirus 6
ucaauuacucaac

SEQ ID NO: 159239 - RNA, 14 nt, Human herpesvirus 6
ggcacggugccaaa

SEQ ID NO: 159240 - RNA, 19 nt, Human herpesvirus 6
ggaggccuucaugagccag

SEQ ID NO: 159241 - RNA, 14 nt, Human herpesvirus 6
ggaggagugaacau

SEQ ID NO: 159242 - RNA, 15 nt, Human herpesvirus 6
ggaguggaguccagu

SEQ ID NO: 159243 - RNA, 22 nt, Human herpesvirus 6
ggaguaugacuguguguugaau

SEQ ID NO: 159244 - RNA, 21 nt, Human herpesvirus 6
ggaguaaaacgcucacaucau

SEQ ID NO: 159245 - RNA, 22 nt, Human herpesvirus 6
ggagggagugaagagauguuuc

SEQ ID NO: 159246 - RNA, 23 nt, Human herpesvirus 6
ggcccauccaccuucccucccac

SEQ ID NO: 159247 - RNA, 20 nt, Human herpesvirus 6
ggcgaugaccgcuaaauuga

SEQ ID NO: 159248 - RNA, 20 nt, Human herpesvirus 6
ggcgauacguuucuguccaa

SEQ ID NO: 159249 - RNA, 21 nt, Human herpesvirus 6
ggcgauacguuucuguccaau

SEQ ID NO: 159250 - RNA, 17 nt, Human herpesvirus 6
ggccuccgccacugcga

SEQ ID NO: 159251 - RNA, 13 nt, Human herpesvirus 6
ggagaagaucuaa

SEQ ID NO: 159252 - RNA, 13 nt, Human herpesvirus 6
ggagaggaccaag

SEQ ID NO: 159253 - RNA, 14 nt, Human herpesvirus 6
ggagaggaccaaga

SEQ ID NO: 159254 - RNA, 22 nt, Human herpesvirus 6
ggacgcuagugaucacaaaaga

SEQ ID NO: 159255 - RNA, 13 nt, Human herpesvirus 6
ggacggggacgac

SEQ ID NO: 159256 - RNA, 17 nt, Human herpesvirus 6
ggaaauaaaaacaccuc

SEQ ID NO: 159257 - RNA, 13 nt, Human herpesvirus 6
ggaagggcucuau

SEQ ID NO: 159258 - RNA, 13 nt, Human herpesvirus 6
ggaaaauugcaaa

SEQ ID NO: 159259 - RNA, 14 nt, Human herpesvirus 6
ggaaacaugaacau

SEQ ID NO: 159260 - RNA, 14 nt, Human herpesvirus 6
ggaaacgacaaaga

SEQ ID NO: 159261 - RNA, 23 nt, Human herpesvirus 6
ggaaacgacggaacgauuugcag

SEQ ID NO: 159262 - RNA, 19 nt, Human herpesvirus 6
ggaaaauauuuccaugacu

SEQ ID NO: 159263 - RNA, 12 nt, Human herpesvirus 6
ggaaaacuauua

SEQ ID NO: 159264 - RNA, 16 nt, Human herpesvirus 6
ggaauacguuaguuuu

SEQ ID NO: 159265 - RNA, 23 nt, Human herpesvirus 6
ggaauguuuguuuuugucagaua

SEQ ID NO: 159266 - RNA, 12 nt, Human herpesvirus 6
ggaauuucuucc

SEQ ID NO: 159267 - RNA, 16 nt, Human herpesvirus 6
ggacacgcgcagugga

SEQ ID NO: 159268 - RNA, 17 nt, Human herpesvirus 6
ggacagcuucuauuacu

SEQ ID NO: 159269 - RNA, 18 nt, Human herpesvirus 6
ggacacccgcguccucca

SEQ ID NO: 159270 - RNA, 14 nt, Human herpesvirus 6
gcguugugugauaa

SEQ ID NO: 159271 - RNA, 13 nt, Human herpesvirus 6
gcguuugcaaaac

SEQ ID NO: 159272 - RNA, 17 nt, Human herpesvirus 6
gcuaaacaccacuugau

SEQ ID NO: 159273 - RNA, 20 nt, Human herpesvirus 6
gcguguacaaguagcucgua

SEQ ID NO: 159274 - RNA, 22 nt, Human herpesvirus 6
gcguggaauuuguggaacaaua

SEQ ID NO: 159275 - RNA, 15 nt, Human herpesvirus 6
gcgggaccuggcgga

SEQ ID NO: 159276 - RNA, 22 nt, Human herpesvirus 6
gcgggacgaaacgaucgaccca

SEQ ID NO: 159277 - RNA, 14 nt, Human herpesvirus 6
gcggaggggcgcga

SEQ ID NO: 159278 - RNA, 17 nt, Human herpesvirus 6
gcggaguggaguccagu

SEQ ID NO: 159279 - RNA, 21 nt, Human herpesvirus 6
gcggaauguuuguuuuuguca

SEQ ID NO: 159280 - RNA, 19 nt, Human herpesvirus 6
gcggaaauaaaaaauauua

SEQ ID NO: 159281 - RNA, 23 nt, Human herpesvirus 6
gcggaaauaaaaaauauuaauua

SEQ ID NO: 159282 - RNA, 15 nt, Human herpesvirus 6
gcgcuggcuuauuaa

SEQ ID NO: 159283 - RNA, 14 nt, Human herpesvirus 6
gcccagauguggaa

SEQ ID NO: 159284 - RNA, 23 nt, Human herpesvirus 6
gcugauccugacugguauccaau

SEQ ID NO: 159285 - RNA, 17 nt, Human herpesvirus 6
gcucaaccuaaugacua

SEQ ID NO: 159286 - RNA, 15 nt, Human herpesvirus 6
gcuugcgauacaugu

SEQ ID NO: 159287 - RNA, 18 nt, Human herpesvirus 6
gcuugaugcauguggcaa

SEQ ID NO: 159288 - RNA, 15 nt, Human herpesvirus 6
ggaaaaaugaaauuu

SEQ ID NO: 159289 - RNA, 19 nt, Human herpesvirus 6
ggaaaacaaagaaucaaug

SEQ ID NO: 159290 - RNA, 12 nt, Human herpesvirus 6
ggaaaacagcuc

SEQ ID NO: 159291 - RNA, 23 nt, Human herpesvirus 6
gcuucuuagaaccgaucugugag

SEQ ID NO: 159292 - RNA, 20 nt, Human herpesvirus 6
gcuguaaauauucauauuau

SEQ ID NO: 159293 - RNA, 12 nt, Human herpesvirus 6
gcuggaugcuga

SEQ ID NO: 159294 - RNA, 23 nt, Human herpesvirus 6
gugcguuaucgaccauguguaua

SEQ ID NO: 159295 - RNA, 22 nt, Human herpesvirus 6
gugcuauuucuguuacugcgag

SEQ ID NO: 159296 - RNA, 14 nt, Human herpesvirus 6
gugcugagacucua

SEQ ID NO: 159297 - RNA, 14 nt, Human herpesvirus 6
gugcuuugaggcag

SEQ ID NO: 159298 - RNA, 12 nt, Human herpesvirus 6
gugcguauucca

SEQ ID NO: 159299 - RNA, 19 nt, Human herpesvirus 6
gugaucuuuacaaaagaca

SEQ ID NO: 159300 - RNA, 21 nt, Human herpesvirus 6
gugaucuuuacaaaagacaca

SEQ ID NO: 159301 - RNA, 14 nt, Human herpesvirus 6
gugagucacauaga

SEQ ID NO: 159302 - RNA, 13 nt, Human herpesvirus 6
gugagugcauuau

SEQ ID NO: 159303 - RNA, 14 nt, Human herpesvirus 6
gugaucacaaaaga

SEQ ID NO: 159304 - RNA, 14 nt, Human herpesvirus 6
gugaauugugcaag

SEQ ID NO: 159305 - RNA, 21 nt, Human herpesvirus 6
gugacagaauucuucugugac

SEQ ID NO: 159306 - RNA, 24 nt, Human herpesvirus 6
gugacagaauucuucugugacuau

SEQ ID NO: 159307 - RNA, 22 nt, Human herpesvirus 6
gugacggaggcgacgaaagagg

SEQ ID NO: 159308 - RNA, 12 nt, Human herpesvirus 6
gucuuacacucu

SEQ ID NO: 159309 - RNA, 13 nt, Human herpesvirus 6
gucuuacuguauu

SEQ ID NO: 159310 - RNA, 14 nt, Human herpesvirus 6
gucuuuagaacagc

SEQ ID NO: 159311 - RNA, 16 nt, Human herpesvirus 6
gucuuuagaacagcuu

SEQ ID NO: 159312 - RNA, 17 nt, Human herpesvirus 6
gucuuuuuucccuaaca

SEQ ID NO: 159313 - RNA, 19 nt, Human herpesvirus 6
gugaaaguauuuuacuuua

SEQ ID NO: 159314 - RNA, 20 nt, Human herpesvirus 6
gucugacauggaagacaaau

SEQ ID NO: 159315 - RNA, 21 nt, Human herpesvirus 6
gucugagaugacaucugcaaa

SEQ ID NO: 159316 - RNA, 16 nt, Human herpesvirus 6
gucugaaaccuagaaa

SEQ ID NO: 159317 - RNA, 16 nt, Human herpesvirus 6
gucucgcaaacagcuu

SEQ ID NO: 159318 - RNA, 16 nt, Human herpesvirus 6
gucuccuuuauugcca

SEQ ID NO: 159319 - RNA, 14 nt, Human herpesvirus 6
gucucgcacuuccg

SEQ ID NO: 159320 - RNA, 16 nt, Human herpesvirus 6
gucucgccuaccuuca

SEQ ID NO: 159321 - RNA, 20 nt, Human herpesvirus 6
gucguacacgcauuugcaau

SEQ ID NO: 159322 - RNA, 20 nt, Human herpesvirus 6
gucgucaccgaaguacccau

SEQ ID NO: 159323 - RNA, 19 nt, Human herpesvirus 6
gucgguaaacuuaccauau

SEQ ID NO: 159324 - RNA, 23 nt, Human herpesvirus 6
gucgguccguuuuucucugcaaa

SEQ ID NO: 159325 - RNA, 16 nt, Human herpesvirus 6
gucguucuuaacucau

SEQ ID NO: 159326 - RNA, 21 nt, Human herpesvirus 6
gucgggaaauaaaaaauauua

SEQ ID NO: 159327 - RNA, 14 nt, Human herpesvirus 6
gucuagaugcaaau

SEQ ID NO: 159328 - RNA, 15 nt, Human herpesvirus 6
gucucacaagcuguc

SEQ ID NO: 159329 - RNA, 22 nt, Human herpesvirus 6
gucuaucauuuuuuugauuuac

SEQ ID NO: 159330 - RNA, 15 nt, Human herpesvirus 6
gucguugugucauga

SEQ ID NO: 159331 - RNA, 21 nt, Human herpesvirus 6
gucgcacacacaagaacagag

SEQ ID NO: 159332 - RNA, 20 nt, Human herpesvirus 6
guccuuuuuuacuaguuuuc

SEQ ID NO: 159333 - RNA, 20 nt, Human herpesvirus 6
gucgaaauucaccagauuca

SEQ ID NO: 159334 - RNA, 18 nt, Human herpesvirus 6
gucagugcuuaugacugg

SEQ ID NO: 159335 - RNA, 22 nt, Human herpesvirus 6
gucauaaccucaucgcgacuaa

SEQ ID NO: 159336 - RNA, 21 nt, Human herpesvirus 6
gucaucauauaauauuuccau

SEQ ID NO: 159337 - RNA, 15 nt, Human herpesvirus 6
guccaaugacuacua

SEQ ID NO: 159338 - RNA, 15 nt, Human herpesvirus 6
guccaaccccuccca

SEQ ID NO: 159339 - RNA, 20 nt, Human herpesvirus 6
guccaaccccucccaucccc

SEQ ID NO: 159340 - RNA, 11 nt, Human herpesvirus 6
guaaaguuaua

SEQ ID NO: 159341 - RNA, 22 nt, Human herpesvirus 6
guaaauacccugggguguucgu

SEQ ID NO: 159342 - RNA, 16 nt, Human herpesvirus 6
ggugcgucuggaugaa

SEQ ID NO: 159343 - RNA, 14 nt, Human herpesvirus 6
ggugcgaaccuaga

SEQ ID NO: 159344 - RNA, 19 nt, Human herpesvirus 6
gguggcaucagaauccaga

SEQ ID NO: 159345 - RNA, 20 nt, Human herpesvirus 6
ggucacguauaccauuccca

SEQ ID NO: 159346 - RNA, 15 nt, Human herpesvirus 6
ggugagugcauuaua

SEQ ID NO: 159347 - RNA, 16 nt, Human herpesvirus 6
ggcuaucgcaaugauu

SEQ ID NO: 159348 - RNA, 22 nt, Human herpesvirus 6
ggcuauuuuuccgaaaggugaa

SEQ ID NO: 159349 - RNA, 13 nt, Human herpesvirus 6
ggggcauuagucu

SEQ ID NO: 159350 - RNA, 12 nt, Human herpesvirus 6
gggggacgggcg

SEQ ID NO: 159351 - RNA, 16 nt, Human herpesvirus 6
gguacgguccggcuga

SEQ ID NO: 159352 - RNA, 20 nt, Human herpesvirus 6
ggggugucggacgacgggcg

SEQ ID NO: 159353 - RNA, 10 nt, Human herpesvirus 6
guaugacugu

SEQ ID NO: 159354 - RNA, 14 nt, Human herpesvirus 6
guaugaggaaaucu

SEQ ID NO: 159355 - RNA, 22 nt, Human herpesvirus 6
guauuaaugucuucgaauacuu

SEQ ID NO: 159356 - RNA, 19 nt, Human herpesvirus 6
guaugcauuguuaucacga

SEQ ID NO: 159357 - RNA, 15 nt, Human herpesvirus 6
guaugccgauuaaug

SEQ ID NO: 159358 - RNA, 17 nt, Human herpesvirus 6
guagcuauuaugugaau

SEQ ID NO: 159359 - RNA, 19 nt, Human herpesvirus 6
guauauuuuaauacauuuc

SEQ ID NO: 159360 - RNA, 22 nt, Human herpesvirus 6
guaucacgucuccuuuauugcc

SEQ ID NO: 159361 - RNA, 14 nt, Human herpesvirus 6
guauuauguaauac

SEQ ID NO: 159362 - RNA, 19 nt, Human herpesvirus 6
guauuauguaauacaucaa

SEQ ID NO: 159363 - RNA, 19 nt, Human herpesvirus 6
gucacacucuuaacuacuu

SEQ ID NO: 159364 - RNA, 16 nt, Human herpesvirus 6
gucacacguguuaaau

SEQ ID NO: 159365 - RNA, 16 nt, Human herpesvirus 6
gucaggaaaaaguuaa

SEQ ID NO: 159366 - RNA, 15 nt, Human herpesvirus 6
gucaccuguauagau

SEQ ID NO: 159367 - RNA, 22 nt, Human herpesvirus 6
guagaucuccugcgcgucuaua

SEQ ID NO: 159368 - RNA, 18 nt, Human herpesvirus 6
guagcaucuuaccuucaa

SEQ ID NO: 159369 - RNA, 14 nt, Human herpesvirus 6
guaaauauucauau

SEQ ID NO: 159370 - RNA, 14 nt, Human herpesvirus 6
guaauuucuaugua

SEQ ID NO: 159371 - RNA, 15 nt, Human herpesvirus 6
guaauuucuauguaa

SEQ ID NO: 159372 - RNA, 22 nt, Human herpesvirus 6
guacaaguuugugugccuuugu

SEQ ID NO: 159373 - RNA, 23 nt, Human herpesvirus 6
guacacuuuaucgauguagauaa

SEQ ID NO: 159374 - RNA, 14 nt, Human herpesvirus 6
guacagaaccagau

SEQ ID NO: 159375 - RNA, 12 nt, Human herpesvirus 6
uuuuuuaugcaa

SEQ ID NO: 159376 - RNA, 15 nt, Human herpesvirus 6
uuuuuauucugcuau

SEQ ID NO: 159377 - RNA, 19 nt, Human herpesvirus 6
uuuuggcuauuugacaaua

SEQ ID NO: 159378 - RNA, 14 nt, Human herpesvirus 6
uuuuguaccagcau

SEQ ID NO: 159379 - RNA, 17 nt, Human herpesvirus 6
uuuuuaccgaaccauaa

SEQ ID NO: 159380 - RNA, 13 nt, Human herpesvirus 6
uuuucacuuggag

SEQ ID NO: 159381 - RNA, 20 nt, Human herpesvirus 6
uuuucaagagcgagaucuau

SEQ ID NO: 159382 - RNA, 12 nt, Human herpesvirus 6
uuuuccauaaag

SEQ ID NO: 159383 - RNA, 18 nt, Human herpesvirus 6
uuuucgcgcgcgugugug

SEQ ID NO: 159384 - RNA, 13 nt, Human herpesvirus 6
uuuucucugcaaa

SEQ ID NO: 159385 - RNA, 17 nt, Human herpesvirus 6
uuuucggugcacaugga

SEQ ID NO: 159386 - RNA, 15 nt, Human herpesvirus 6
uuuugcaugugauaa

SEQ ID NO: 159387 - RNA, 16 nt, Human herpesvirus 6
uuuugcaugugauaaa

SEQ ID NO: 159388 - RNA, 20 nt, Human herpesvirus 6
uuuuaugaucgacauuugua

SEQ ID NO: 159389 - RNA, 19 nt, Human herpesvirus 6
uuuuauccauccaauccaa

SEQ ID NO: 159390 - RNA, 14 nt, Human herpesvirus 6
uuuuacaucacgac

SEQ ID NO: 159391 - RNA, 13 nt, Human herpesvirus 6
uuuguguccuuga

SEQ ID NO: 159392 - RNA, 18 nt, Human herpesvirus 6
uuuuaagucguuguguca

SEQ ID NO: 159393 - RNA, 14 nt, Human herpesvirus 6
uuuggugaacacca

SEQ ID NO: 159394 - RNA, 14 nt, Human herpesvirus 6
uuuguagaguguua

SEQ ID NO: 159395 - RNA, 19 nt, Human herpesvirus 6
uuugggauacauaauaucu

SEQ ID NO: 159396 - RNA, 20 nt, Human herpesvirus 6
uuugcugaugcgauguggag

SEQ ID NO: 159397 - RNA, 22 nt, Human herpesvirus 6
uuguauagucuaaucaucagag

SEQ ID NO: 159398 - RNA, 21 nt, Human herpesvirus 6
uuguauauguguuaugaauga

SEQ ID NO: 159399 - RNA, 19 nt, Human herpesvirus 6
uuguauuucaacgugaauc

SEQ ID NO: 159400 - RNA, 18 nt, Human herpesvirus 6
uuguauuuuuaauuugaa

SEQ ID NO: 159401 - RNA, 16 nt, Human herpesvirus 6
uuguaauuucuaugua

SEQ ID NO: 159402 - RNA, 23 nt, Human herpesvirus 6
uuggcugugacgaagauggaugu

SEQ ID NO: 159403 - RNA, 22 nt, Human herpesvirus 6
ucuaucuccgcaaaccacccca

SEQ ID NO: 159404 - RNA, 19 nt, Human herpesvirus 6
ucucgagcuagagugacau

SEQ ID NO: 159405 - RNA, 18 nt, Human herpesvirus 6
ucuauuccccauuccuag

SEQ ID NO: 159406 - RNA, 14 nt, Human herpesvirus 6
ucuauguaaacuuc

SEQ ID NO: 159407 - RNA, 17 nt, Human herpesvirus 6
ucuagaugcaaaucuca

SEQ ID NO: 159408 - RNA, 19 nt, Human herpesvirus 6
ucuagaugcaaaucucacu

SEQ ID NO: 159409 - RNA, 20 nt, Human herpesvirus 6
ucuagcaaccuaauggacca

SEQ ID NO: 159410 - RNA, 13 nt, Human herpesvirus 6
ucuauaugcaucu

SEQ ID NO: 159411 - RNA, 17 nt, Human herpesvirus 6
ucuaucacucauacaca

SEQ ID NO: 159412 - RNA, 19 nt, Human herpesvirus 6
ucuauccaugaaacucuuu

SEQ ID NO: 159413 - RNA, 20 nt, Human herpesvirus 6
ucucuucccacaaaccauca

SEQ ID NO: 159414 - RNA, 17 nt, Human herpesvirus 6
ucucugcaaaacaaagg

SEQ ID NO: 159415 - RNA, 22 nt, Human herpesvirus 6
ucucuggaugcuuuuagaugga

SEQ ID NO: 159416 - RNA, 15 nt, Human herpesvirus 6
ucucguaguugcauu

SEQ ID NO: 159417 - RNA, 22 nt, Human herpesvirus 6
ucucguuccccaugucuugccu

SEQ ID NO: 159418 - RNA, 18 nt, Human herpesvirus 6
ucucgccgaccugucauu

SEQ ID NO: 159419 - RNA, 20 nt, Human herpesvirus 6
ucucgggagaggaccaagac

SEQ ID NO: 159420 - RNA, 18 nt, Human herpesvirus 6
ucucucgcuuaccguuca

SEQ ID NO: 159421 - RNA, 22 nt, Human herpesvirus 6
ucucucggcugacaacaaagga

SEQ ID NO: 159422 - RNA, 22 nt, Human herpesvirus 6
ucucucagaucgagaauuuugu

SEQ ID NO: 159423 - RNA, 21 nt, Human herpesvirus 6
ucucucagcuggcugacagga

SEQ ID NO: 159424 - RNA, 23 nt, Human herpesvirus 6
ucucucaguaauuuguguaauuu

SEQ ID NO: 159425 - RNA, 18 nt, Human herpesvirus 6
ucuagacucgccgaugaa

SEQ ID NO: 159426 - RNA, 23 nt, Human herpesvirus 6
ucuagauacggugucacacagca

SEQ ID NO: 159427 - RNA, 21 nt, Human herpesvirus 6
ucuagaauaucugcuaagucu

SEQ ID NO: 159428 - RNA, 18 nt, Human herpesvirus 6
ucuacuuguacaaauuca

SEQ ID NO: 159429 - RNA, 21 nt, Human herpesvirus 6
ucuacguaugaaaguccucaa

SEQ ID NO: 159430 - RNA, 14 nt, Human herpesvirus 6
ucuacugagaucau

SEQ ID NO: 159431 - RNA, 17 nt, Human herpesvirus 6
ucuacuguacaaaauca

SEQ ID NO: 159432 - RNA, 14 nt, Human herpesvirus 6
ucuacccuaucgau

SEQ ID NO: 159433 - RNA, 15 nt, Human herpesvirus 6
ucgcauuagucacag

SEQ ID NO: 159434 - RNA, 14 nt, Human herpesvirus 6
ucgcaagcuaucau

SEQ ID NO: 159435 - RNA, 14 nt, Human herpesvirus 6
ucgcacgcacauau

SEQ ID NO: 159436 - RNA, 19 nt, Human herpesvirus 6
ucgcaauccccacgaacua

SEQ ID NO: 159437 - RNA, 11 nt, Human herpesvirus 6
ucgcaaugauu

SEQ ID NO: 159438 - RNA, 18 nt, Human herpesvirus 6
ucgccuuuuacuuacauc

SEQ ID NO: 159439 - RNA, 16 nt, Human herpesvirus 6
ucuuauuaugugacuc

SEQ ID NO: 159440 - RNA, 14 nt, Human herpesvirus 6
ucuucgccuguaaa

SEQ ID NO: 159441 - RNA, 20 nt, Human herpesvirus 6
ucuucgaauacuuucaugau

SEQ ID NO: 159442 - RNA, 18 nt, Human herpesvirus 6
ucuucggauucgcaagcu

SEQ ID NO: 159443 - RNA, 22 nt, Human herpesvirus 6
ucuucggauucgcaagcuauca

SEQ ID NO: 159444 - RNA, 12 nt, Human herpesvirus 6
ucuucuguaaau

SEQ ID NO: 159445 - RNA, 13 nt, Human herpesvirus 6
ucuuuaaaugagg

SEQ ID NO: 159446 - RNA, 15 nt, Human herpesvirus 6
ucuuuaccauuugac

SEQ ID NO: 159447 - RNA, 16 nt, Human herpesvirus 6
ucuuguugaguuucag

SEQ ID NO: 159448 - RNA, 14 nt, Human herpesvirus 6
ucuuuagaacagcu

SEQ ID NO: 159449 - RNA, 16 nt, Human herpesvirus 6
ucuugccgaauugugc

SEQ ID NO: 159450 - RNA, 13 nt, Human herpesvirus 6
ucuugcaacucgu

SEQ ID NO: 159451 - RNA, 20 nt, Human herpesvirus 6
ucuugaaaucuacuguacaa

SEQ ID NO: 159452 - RNA, 16 nt, Human herpesvirus 6
ucuugaucaaauaucu

SEQ ID NO: 159453 - RNA, 18 nt, Human herpesvirus 6
ucuugaucaaauaucuga

SEQ ID NO: 159454 - RNA, 19 nt, Human herpesvirus 6
ucugacauggaagacaaau

SEQ ID NO: 159455 - RNA, 13 nt, Human herpesvirus 6
ucugagaugacau

SEQ ID NO: 159456 - RNA, 19 nt, Human herpesvirus 6
ucucuuuuuaauuccaaga

SEQ ID NO: 159457 - RNA, 20 nt, Human herpesvirus 6
ucucuuuauagagcaacuca

SEQ ID NO: 159458 - RNA, 19 nt, Human herpesvirus 6
ucuuaaagcgugugauuca

SEQ ID NO: 159459 - RNA, 12 nt, Human herpesvirus 6
ucuuaacuacuu

SEQ ID NO: 159460 - RNA, 11 nt, Human herpesvirus 6
ucuuacaacag

SEQ ID NO: 159461 - RNA, 18 nt, Human herpesvirus 6
ucuguucaauuauaucau

SEQ ID NO: 159462 - RNA, 16 nt, Human herpesvirus 6
ucuguucgauguacag

SEQ ID NO: 159463 - RNA, 17 nt, Human herpesvirus 6
ucuuagagacgugauac

SEQ ID NO: 159464 - RNA, 13 nt, Human herpesvirus 6
ucuuacguugaug

SEQ ID NO: 159465 - RNA, 14 nt, Human herpesvirus 6
ugaugcgaugugga

SEQ ID NO: 159466 - RNA, 16 nt, Human herpesvirus 6
ugaugcguugcauuuu

SEQ ID NO: 159467 - RNA, 16 nt, Human herpesvirus 6
ugaugaauuuaugucc

SEQ ID NO: 159468 - RNA, 14 nt, Human herpesvirus 6
ugaugaucugccuu

SEQ ID NO: 159469 - RNA, 14 nt, Human herpesvirus 6
ugaucuagcuauag

SEQ ID NO: 159470 - RNA, 15 nt, Human herpesvirus 6
ugcaagccaugacaa

SEQ ID NO: 159471 - RNA, 15 nt, Human herpesvirus 6
ugcaauuuccuguca

SEQ ID NO: 159472 - RNA, 20 nt, Human herpesvirus 6
ugcacauggaaaauucgcca

SEQ ID NO: 159473 - RNA, 20 nt, Human herpesvirus 6
ugagccagauucgguugcuu

SEQ ID NO: 159474 - RNA, 15 nt, Human herpesvirus 6
ugagccgcacuguug

SEQ ID NO: 159475 - RNA, 19 nt, Human herpesvirus 6
ugauagcgucuuugcauau

SEQ ID NO: 159476 - RNA, 18 nt, Human herpesvirus 6
ugauauaguuuuugcuua

SEQ ID NO: 159477 - RNA, 15 nt, Human herpesvirus 6
ugauauauugugauc

SEQ ID NO: 159478 - RNA, 20 nt, Human herpesvirus 6
ugagagcuaauaugaacaau

SEQ ID NO: 159479 - RNA, 14 nt, Human herpesvirus 6
ugacuuauaaguca

SEQ ID NO: 159480 - RNA, 17 nt, Human herpesvirus 6
ugacucucucaguaauu

SEQ ID NO: 159481 - RNA, 11 nt, Human herpesvirus 6
ugacucgccuu

SEQ ID NO: 159482 - RNA, 15 nt, Human herpesvirus 6
ugacaccucaauuaa

SEQ ID NO: 159483 - RNA, 15 nt, Human herpesvirus 6
ugacuacagcugcag

SEQ ID NO: 159484 - RNA, 22 nt, Human herpesvirus 6
ugacaaccuccgcauaucgccc

SEQ ID NO: 159485 - RNA, 15 nt, Human herpesvirus 6
ugaagauuugacauu

SEQ ID NO: 159486 - RNA, 16 nt, Human herpesvirus 6
ugaaggcugccaugaa

SEQ ID NO: 159487 - RNA, 17 nt, Human herpesvirus 6
ugaaggcugccaugaaa

SEQ ID NO: 159488 - RNA, 20 nt, Human herpesvirus 6
ugaacgcgucgguaaacaau

SEQ ID NO: 159489 - RNA, 18 nt, Human herpesvirus 6
ugaacgcaagucacgggc

SEQ ID NO: 159490 - RNA, 17 nt, Human herpesvirus 6
ugaacgcagcguaaugu

SEQ ID NO: 159491 - RNA, 19 nt, Human herpesvirus 6
ugaagaaaaaaacugugaa

SEQ ID NO: 159492 - RNA, 20 nt, Human herpesvirus 6
ugaagaacagaaugcuauuc

SEQ ID NO: 159493 - RNA, 14 nt, Human herpesvirus 6
ugaagaggugcgaa

SEQ ID NO: 159494 - RNA, 13 nt, Human herpesvirus 6
ucuuuauuuuucc

SEQ ID NO: 159495 - RNA, 20 nt, Human herpesvirus 6
ucuuuccccagcacacccca

SEQ ID NO: 159496 - RNA, 20 nt, Human herpesvirus 6
ucagauugcggacaugguga

SEQ ID NO: 159497 - RNA, 17 nt, Human herpesvirus 6
ucagcccccagcugaaa

SEQ ID NO: 159498 - RNA, 21 nt, Human herpesvirus 6
ucagagcgggcuauaaucaca

SEQ ID NO: 159499 - RNA, 13 nt, Human herpesvirus 6
ucagaucuagauc

SEQ ID NO: 159500 - RNA, 14 nt, Human herpesvirus 6
ucagaguagaaacu

SEQ ID NO: 159501 - RNA, 14 nt, Human herpesvirus 6
ucagagugaauucc

SEQ ID NO: 159502 - RNA, 22 nt, Human herpesvirus 6
ucagagugaauuccuggacaug

SEQ ID NO: 159503 - RNA, 12 nt, Human herpesvirus 6
ucagauacugau

SEQ ID NO: 159504 - RNA, 16 nt, Human herpesvirus 6
ucagauacugaucguu

SEQ ID NO: 159505 - RNA, 21 nt, Human herpesvirus 6
ucagagaaacggaacugcuug

SEQ ID NO: 159506 - RNA, 13 nt, Human herpesvirus 6
ucagacagugagu

SEQ ID NO: 159507 - RNA, 13 nt, Human herpesvirus 6
ucacuuguauuaa

SEQ ID NO: 159508 - RNA, 12 nt, Human herpesvirus 6
ucagaauccacc

SEQ ID NO: 159509 - RNA, 19 nt, Human herpesvirus 6
ucagaauccaccaaugaca

SEQ ID NO: 159510 - RNA, 14 nt, Human herpesvirus 6
ucagaauccagaaa

SEQ ID NO: 159511 - RNA, 14 nt, Human herpesvirus 6
ucacuuaagccagc

SEQ ID NO: 159512 - RNA, 13 nt, Human herpesvirus 6
ucaguaugccaua

SEQ ID NO: 159513 - RNA, 15 nt, Human herpesvirus 6
ucagucugcuaaaaa

SEQ ID NO: 159514 - RNA, 12 nt, Human herpesvirus 6
ucaguagauuac

SEQ ID NO: 159515 - RNA, 14 nt, Human herpesvirus 6
ucaguaacauuuaa

SEQ ID NO: 159516 - RNA, 14 nt, Human herpesvirus 6
ucagggucaaaaaa

SEQ ID NO: 159517 - RNA, 18 nt, Human herpesvirus 6
ucauaaaugguagcuauu

SEQ ID NO: 159518 - RNA, 20 nt, Human herpesvirus 6
ucauaaaugguagcuauuau

SEQ ID NO: 159519 - RNA, 12 nt, Human herpesvirus 6
ucauaaacagac

SEQ ID NO: 159520 - RNA, 19 nt, Human herpesvirus 6
ucauaaacagacagaggaa

SEQ ID NO: 159521 - RNA, 19 nt, Human herpesvirus 6
ucaguucaaacgcagacua

SEQ ID NO: 159522 - RNA, 17 nt, Human herpesvirus 6
ucagcuuccguaucaca

SEQ ID NO: 159523 - RNA, 17 nt, Human herpesvirus 6
ucagcuuucauaagcuc

SEQ ID NO: 159524 - RNA, 17 nt, Human herpesvirus 6
uaugcauuguuaucacg

SEQ ID NO: 159525 - RNA, 18 nt, Human herpesvirus 6
uaugccacacccauuucc

SEQ ID NO: 159526 - RNA, 14 nt, Human herpesvirus 6
uauccucagaacca

SEQ ID NO: 159527 - RNA, 21 nt, Human herpesvirus 6
uauccgugaauccccgcagag

SEQ ID NO: 159528 - RNA, 19 nt, Human herpesvirus 6
uauccuuccaccuacauca

SEQ ID NO: 159529 - RNA, 20 nt, Human herpesvirus 6
uauccuaaauaccaauuccu

SEQ ID NO: 159530 - RNA, 15 nt, Human herpesvirus 6
uauccuagcauuucc

SEQ ID NO: 159531 - RNA, 13 nt, Human herpesvirus 6
uaugccugagcuu

SEQ ID NO: 159532 - RNA, 12 nt, Human herpesvirus 6
uauggaucugag

SEQ ID NO: 159533 - RNA, 19 nt, Human herpesvirus 6
uauggaugaucacuaucag

SEQ ID NO: 159534 - RNA, 15 nt, Human herpesvirus 6
uaugggugagugcau

SEQ ID NO: 159535 - RNA, 18 nt, Human herpesvirus 6
uauggugaguaccuguac

SEQ ID NO: 159536 - RNA, 23 nt, Human herpesvirus 6
ucacaugcgagcaaaaaauaguc

SEQ ID NO: 159537 - RNA, 20 nt, Human herpesvirus 6
ucacauauaugaugcuguag

SEQ ID NO: 159538 - RNA, 16 nt, Human herpesvirus 6
ucacauuauaagacac

SEQ ID NO: 159539 - RNA, 22 nt, Human herpesvirus 6
ucacuaucaggguuuuguggaa

SEQ ID NO: 159540 - RNA, 18 nt, Human herpesvirus 6
ucacucauacacaggauu

SEQ ID NO: 159541 - RNA, 15 nt, Human herpesvirus 6
ucaccgcauauauca

SEQ ID NO: 159542 - RNA, 12 nt, Human herpesvirus 6
ucaccuacauuc

SEQ ID NO: 159543 - RNA, 15 nt, Human herpesvirus 6
ucaccagauucacug

SEQ ID NO: 159544 - RNA, 17 nt, Human herpesvirus 6
ucaccagauucacugac

SEQ ID NO: 159545 - RNA, 14 nt, Human herpesvirus 6
ucaccaucaaucuc

SEQ ID NO: 159546 - RNA, 22 nt, Human herpesvirus 6
ucccuuaaaaaaacacaguauu

SEQ ID NO: 159547 - RNA, 20 nt, Human herpesvirus 6
ucccuuaauguaugcaucau

SEQ ID NO: 159548 - RNA, 20 nt, Human herpesvirus 6
uccgaaaggugaaaugaaug

SEQ ID NO: 159549 - RNA, 19 nt, Human herpesvirus 6
ucccuaugucgauguggau

SEQ ID NO: 159550 - RNA, 19 nt, Human herpesvirus 6
uccauuaacgaugguacag

SEQ ID NO: 159551 - RNA, 18 nt, Human herpesvirus 6
uccauuagguugcuagac

SEQ ID NO: 159552 - RNA, 19 nt, Human herpesvirus 6
uccgagcggugugcaguua

SEQ ID NO: 159553 - RNA, 21 nt, Human herpesvirus 6
uccuagaggugccgaugaauu

SEQ ID NO: 159554 - RNA, 22 nt, Human herpesvirus 6
uccuagaaggagcuuucaucca

SEQ ID NO: 159555 - RNA, 23 nt, Human herpesvirus 6
uccuaugucaauaguuuuacuuc

SEQ ID NO: 159556 - RNA, 23 nt, Human herpesvirus 6
uccuauucagaggugcugaugau

SEQ ID NO: 159557 - RNA, 16 nt, Human herpesvirus 6
uccuauucauaacaga

SEQ ID NO: 159558 - RNA, 17 nt, Human herpesvirus 6
uccuauugguuugcaua

SEQ ID NO: 159559 - RNA, 13 nt, Human herpesvirus 6
uccucaacuaaac

SEQ ID NO: 159560 - RNA, 17 nt, Human herpesvirus 6
uccucaauaugauauau

SEQ ID NO: 159561 - RNA, 15 nt, Human herpesvirus 6
uccucagaaccaucu

SEQ ID NO: 159562 - RNA, 17 nt, Human herpesvirus 6
ucgauccaaaagauuac

SEQ ID NO: 159563 - RNA, 13 nt, Human herpesvirus 6
ucgagccaaagaa

SEQ ID NO: 159564 - RNA, 17 nt, Human herpesvirus 6
ucgcaaacagcuuuauu

SEQ ID NO: 159565 - RNA, 13 nt, Human herpesvirus 6
ucgauugugaugu

SEQ ID NO: 159566 - RNA, 16 nt, Human herpesvirus 6
ucgcaaauucucucua

SEQ ID NO: 159567 - RNA, 13 nt, Human herpesvirus 6
ucgauuucacuua

SEQ ID NO: 159568 - RNA, 19 nt, Human herpesvirus 6
uccuuccuuuuuucgcaaa

SEQ ID NO: 159569 - RNA, 15 nt, Human herpesvirus 6
uccuuauaacacaca

SEQ ID NO: 159570 - RNA, 19 nt, Human herpesvirus 6
uccuuccaccuacaucaga

SEQ ID NO: 159571 - RNA, 21 nt, Human herpesvirus 6
uccuccuagggaauuuaaucc

SEQ ID NO: 159572 - RNA, 18 nt, Human herpesvirus 6
uccucgaucguaggcaga

SEQ ID NO: 159573 - RNA, 18 nt, Human herpesvirus 6
ucauuguuucacuucuag

SEQ ID NO: 159574 - RNA, 17 nt, Human herpesvirus 6
ucauuguuuuugcaugu

SEQ ID NO: 159575 - RNA, 20 nt, Human herpesvirus 6
ucauuguuuuugcaugugau

SEQ ID NO: 159576 - RNA, 18 nt, Human herpesvirus 6
ucauagauuguuauuagu

SEQ ID NO: 159577 - RNA, 16 nt, Human herpesvirus 6
ucauagacaaaccgcc

SEQ ID NO: 159578 - RNA, 22 nt, Human herpesvirus 6
ucauaggacuaggauuagaaca

SEQ ID NO: 159579 - RNA, 20 nt, Human herpesvirus 6
ucauagauuucauacuguau

SEQ ID NO: 159580 - RNA, 21 nt, Human herpesvirus 6
ucauacuguauggcaaaagca

SEQ ID NO: 159581 - RNA, 18 nt, Human herpesvirus 6
ucauacaaaaugaccuca

SEQ ID NO: 159582 - RNA, 20 nt, Human herpesvirus 6
ucauacccgaaguucucuca

SEQ ID NO: 159583 - RNA, 17 nt, Human herpesvirus 6
uccaacacagcaugcau

SEQ ID NO: 159584 - RNA, 24 nt, Human herpesvirus 6
uccaaaguauuggugcaucaguga

SEQ ID NO: 159585 - RNA, 13 nt, Human herpesvirus 6
uccaaaagauuac

SEQ ID NO: 159586 - RNA, 19 nt, Human herpesvirus 6
uccaccuggaaaaacugac

SEQ ID NO: 159587 - RNA, 23 nt, Human herpesvirus 6
uccacccaucuccucaacacucu

SEQ ID NO: 159588 - RNA, 23 nt, Human herpesvirus 6
uccacgaacguagacagucacac

SEQ ID NO: 159589 - RNA, 13 nt, Human herpesvirus 6
uccacgcauagac

SEQ ID NO: 159590 - RNA, 19 nt, Human herpesvirus 6
uccauaccguuuacuuaaa

SEQ ID NO: 159591 - RNA, 19 nt, Human herpesvirus 6
uccagugcuuuaaucacaa

SEQ ID NO: 159592 - RNA, 15 nt, Human herpesvirus 6
uccaucuucagacau

SEQ ID NO: 159593 - RNA, 21 nt, Human herpesvirus 6
uccagaaaagcaaacaugcaa

SEQ ID NO: 159594 - RNA, 19 nt, Human herpesvirus 6
uccagacuagacgcacuaa

SEQ ID NO: 159595 - RNA, 16 nt, Human herpesvirus 6
uccagaaguccuucau

SEQ ID NO: 159596 - RNA, 21 nt, Human herpesvirus 6
uccaggcggcaugaauuccau

SEQ ID NO: 159597 - RNA, 15 nt, Human herpesvirus 6
uucuguguauuguaa

SEQ ID NO: 159598 - RNA, 13 nt, Human herpesvirus 6
uucuuacaacagg

SEQ ID NO: 159599 - RNA, 21 nt, Human herpesvirus 6
uucuuacaacaggcuugugaa

SEQ ID NO: 159600 - RNA, 21 nt, Human herpesvirus 6
uucuggcacaggcauagcagc

SEQ ID NO: 159601 - RNA, 12 nt, Human herpesvirus 6
uucugucugcag

SEQ ID NO: 159602 - RNA, 15 nt, Human herpesvirus 6
uucuguccaaugacu

SEQ ID NO: 159603 - RNA, 19 nt, Human herpesvirus 6
uucuguccaaugacuacua

SEQ ID NO: 159604 - RNA, 16 nt, Human herpesvirus 6
uucuguugaauuccag

SEQ ID NO: 159605 - RNA, 17 nt, Human herpesvirus 6
uucugcagaaugaaugu

SEQ ID NO: 159606 - RNA, 22 nt, Human herpesvirus 6
uucugagccuucugccugaaaa

SEQ ID NO: 159607 - RNA, 17 nt, Human herpesvirus 6
uucuucaggugucucaa

SEQ ID NO: 159608 - RNA, 21 nt, Human herpesvirus 6
uucuuauuuaccuuccugaga

SEQ ID NO: 159609 - RNA, 14 nt, Human herpesvirus 6
uucuugauuagaga

SEQ ID NO: 159610 - RNA, 17 nt, Human herpesvirus 6
uucuugaaaaaccuuau

SEQ ID NO: 159611 - RNA, 13 nt, Human herpesvirus 6
uugauaaacugua

SEQ ID NO: 159612 - RNA, 14 nt, Human herpesvirus 6
uugauaaacuguau

SEQ ID NO: 159613 - RNA, 15 nt, Human herpesvirus 6
uugauaaacuguaug

SEQ ID NO: 159614 - RNA, 16 nt, Human herpesvirus 6
uugagcuuguggauca

SEQ ID NO: 159615 - RNA, 19 nt, Human herpesvirus 6
uuggagagacguuguuuga

SEQ ID NO: 159616 - RNA, 15 nt, Human herpesvirus 6
uuggcauugauaaug

SEQ ID NO: 159617 - RNA, 19 nt, Human herpesvirus 6
uugauguggacguucuguc

SEQ ID NO: 159618 - RNA, 22 nt, Human herpesvirus 6
uucaaguaagggcuuuucaaga

SEQ ID NO: 159619 - RNA, 17 nt, Human herpesvirus 6
uucaauaaaaacucaau

SEQ ID NO: 159620 - RNA, 17 nt, Human herpesvirus 6
uucaaccuguuuccaga

SEQ ID NO: 159621 - RNA, 19 nt, Human herpesvirus 6
uucaaaaauguugcaugga

SEQ ID NO: 159622 - RNA, 21 nt, Human herpesvirus 6
uucaaaauugggcgaagaccu

SEQ ID NO: 159623 - RNA, 13 nt, Human herpesvirus 6
uucaaaugcagua

SEQ ID NO: 159624 - RNA, 14 nt, Human herpesvirus 6
uucaacauuacucu

SEQ ID NO: 159625 - RNA, 16 nt, Human herpesvirus 6
uucacacguuauaucu

SEQ ID NO: 159626 - RNA, 17 nt, Human herpesvirus 6
uucacacguuauaucua

SEQ ID NO: 159627 - RNA, 21 nt, Human herpesvirus 6
uucacauaagacuuauaauau

SEQ ID NO: 159628 - RNA, 17 nt, Human herpesvirus 6
uuccaagacauguacau

SEQ ID NO: 159629 - RNA, 11 nt, Human herpesvirus 6
uucucugcaaa

SEQ ID NO: 159630 - RNA, 12 nt, Human herpesvirus 6
uucucugcaaaa

SEQ ID NO: 159631 - RNA, 17 nt, Human herpesvirus 6
uucucuuuccagcccua

SEQ ID NO: 159632 - RNA, 17 nt, Human herpesvirus 6
uucgugcucgcauuucu

SEQ ID NO: 159633 - RNA, 20 nt, Human herpesvirus 6
uucgugcugugauagcuaug

SEQ ID NO: 159634 - RNA, 14 nt, Human herpesvirus 6
uucgucuccuggga

SEQ ID NO: 159635 - RNA, 15 nt, Human herpesvirus 6
uucgucgagaaccac

SEQ ID NO: 159636 - RNA, 22 nt, Human herpesvirus 6
uucgucgagaaccaccagagac

SEQ ID NO: 159637 - RNA, 17 nt, Human herpesvirus 6
uuccacgcauagacaaa

SEQ ID NO: 159638 - RNA, 22 nt, Human herpesvirus 6
uuccacgggaucguagguaauu

SEQ ID NO: 159639 - RNA, 19 nt, Human herpesvirus 6
uuccagacaauaaucauua

SEQ ID NO: 159640 - RNA, 18 nt, Human herpesvirus 6
uuccagugagaacguaua

SEQ ID NO: 159641 - RNA, 16 nt, Human herpesvirus 6
uuccauaaaguuaaag

SEQ ID NO: 159642 - RNA, 14 nt, Human herpesvirus 6
uucggaacauuguu

SEQ ID NO: 159643 - RNA, 17 nt, Human herpesvirus 6
uuaugaucuagcuauag

SEQ ID NO: 159644 - RNA, 17 nt, Human herpesvirus 6
uuauguaauacaucaac

SEQ ID NO: 159645 - RNA, 14 nt, Human herpesvirus 6
uuauuaacaaugaa

SEQ ID NO: 159646 - RNA, 21 nt, Human herpesvirus 6
uuauguaugcauuguuaucac

SEQ ID NO: 159647 - RNA, 15 nt, Human herpesvirus 6
uuaucgaccaugugu

SEQ ID NO: 159648 - RNA, 19 nt, Human herpesvirus 6
uuaucgaccauguguauau

SEQ ID NO: 159649 - RNA, 20 nt, Human herpesvirus 6
uuaucgcaacacacagugaa

SEQ ID NO: 159650 - RNA, 14 nt, Human herpesvirus 6
uuauuggaccacga

SEQ ID NO: 159651 - RNA, 18 nt, Human herpesvirus 6
uuauuauccaaacauacg

SEQ ID NO: 159652 - RNA, 15 nt, Human herpesvirus 6
uuauugcacguucag

SEQ ID NO: 159653 - RNA, 16 nt, Human herpesvirus 6
uuauuggcauugauaa

SEQ ID NO: 159654 - RNA, 18 nt, Human herpesvirus 6
uuauuuugggauacauaa

SEQ ID NO: 159655 - RNA, 23 nt, Human herpesvirus 6
uucaaaauaaauacuagcuaaaa

SEQ ID NO: 159656 - RNA, 12 nt, Human herpesvirus 6
uuaucaaugaua

SEQ ID NO: 159657 - RNA, 10 nt, Human herpesvirus 6
uuauccaucc

SEQ ID NO: 159658 - RNA, 17 nt, Human herpesvirus 6
uuaucacaguugauaaa

SEQ ID NO: 159659 - RNA, 20 nt, Human herpesvirus 6
uuauauucguggauaacguc

SEQ ID NO: 159660 - RNA, 14 nt, Human herpesvirus 6
uuauaauauuccug

SEQ ID NO: 159661 - RNA, 15 nt, Human herpesvirus 6
uuagcuuuacccugg

SEQ ID NO: 159662 - RNA, 14 nt, Human herpesvirus 6
uuauaagauuuaca

SEQ ID NO: 159663 - RNA, 21 nt, Human herpesvirus 6
uuauaagcaaacauguauccu

SEQ ID NO: 159664 - RNA, 13 nt, Human herpesvirus 6
uuauagaugacug

SEQ ID NO: 159665 - RNA, 23 nt, Human herpesvirus 6
uuagcgcuguauguuauguaauu

SEQ ID NO: 159666 - RNA, 21 nt, Human herpesvirus 6
uuagcauauuuuggcaaaaaa

SEQ ID NO: 159667 - RNA, 17 nt, Human herpesvirus 6
uuagcaaucauuagcau

SEQ ID NO: 159668 - RNA, 16 nt, Human herpesvirus 6
uuagagcuacgccaaa

SEQ ID NO: 159669 - RNA, 14 nt, Human herpesvirus 6
uuagacacgcuaaa

SEQ ID NO: 159670 - RNA, 17 nt, Human herpesvirus 6
uuagagaaaagugcaag

SEQ ID NO: 159671 - RNA, 22 nt, Human herpesvirus 6
uuagagacgcacccuacaaucu

SEQ ID NO: 159672 - RNA, 23 nt, Human herpesvirus 6
uuagagacgcacccuacaaucug

SEQ ID NO: 159673 - RNA, 18 nt, Human herpesvirus 6
uuagagacgugauacuau

SEQ ID NO: 159674 - RNA, 15 nt, Human herpesvirus 6
uuacggcaacauacc

SEQ ID NO: 159675 - RNA, 16 nt, Human herpesvirus 6
uuacggcaacauaccc

SEQ ID NO: 159676 - RNA, 21 nt, Human herpesvirus 6
uuagaagacagaccacacccc

SEQ ID NO: 159677 - RNA, 17 nt, Human herpesvirus 6
uguguuuacauauacau

SEQ ID NO: 159678 - RNA, 19 nt, Human herpesvirus 6
uguguuuccaaaauuggga

SEQ ID NO: 159679 - RNA, 13 nt, Human herpesvirus 6
uuaacuauggagu

SEQ ID NO: 159680 - RNA, 15 nt, Human herpesvirus 6
uuaacuucgacagac

SEQ ID NO: 159681 - RNA, 15 nt, Human herpesvirus 6
uuaagaaaacaugag

SEQ ID NO: 159682 - RNA, 13 nt, Human herpesvirus 6
uguguucagucua

SEQ ID NO: 159683 - RNA, 12 nt, Human herpesvirus 6
ugugugauauca

SEQ ID NO: 159684 - RNA, 15 nt, Human herpesvirus 6
uguguucuaucacau

SEQ ID NO: 159685 - RNA, 14 nt, Human herpesvirus 6
uguggauaucucaa

SEQ ID NO: 159686 - RNA, 13 nt, Human herpesvirus 6
uuaaucuaauaaa

SEQ ID NO: 159687 - RNA, 16 nt, Human herpesvirus 6
uuaauguccagugaua

SEQ ID NO: 159688 - RNA, 20 nt, Human herpesvirus 6
uuaauaagucuuuagaacag

SEQ ID NO: 159689 - RNA, 20 nt, Human herpesvirus 6
uuaccacacgcuuacacaca

SEQ ID NO: 159690 - RNA, 17 nt, Human herpesvirus 6
uuaauuccagcuuucuu

SEQ ID NO: 159691 - RNA, 16 nt, Human herpesvirus 6
uuacauauagucaaug

SEQ ID NO: 159692 - RNA, 10 nt, Human herpesvirus 6
uuaauuccaa

SEQ ID NO: 159693 - RNA, 14 nt, Human herpesvirus 6
uuaauuccaagaca

SEQ ID NO: 159694 - RNA, 17 nt, Human herpesvirus 6
uuaauuacauauaguca

SEQ ID NO: 159695 - RNA, 19 nt, Human herpesvirus 6
uuaauuacauauagucaau

SEQ ID NO: 159696 - RNA, 17 nt, Human herpesvirus 6
uuaauuaccuauaguca

SEQ ID NO: 159697 - RNA, 19 nt, Human herpesvirus 6
uuaauuaccuauagucaau

SEQ ID NO: 159698 - RNA, 19 nt, Human herpesvirus 6
uuaccguuuaaacuaugca

SEQ ID NO: 159699 - RNA, 18 nt, Human herpesvirus 6
uuaccguaaacaaauucu

SEQ ID NO: 159700 - RNA, 20 nt, Human herpesvirus 6
uuaccguaaacaaauucuua

SEQ ID NO: 159701 - RNA, 13 nt, Human herpesvirus 6
uuaccuauaguca

SEQ ID NO: 159702 - RNA, 18 nt, Human herpesvirus 6
uuaccuauagucaauguu

SEQ ID NO: 159703 - RNA, 21 nt, Human herpesvirus 6
uuaccuucaaagugauuccag

SEQ ID NO: 159704 - RNA, 17 nt, Human herpesvirus 6
ugguuuacagcacuuug

SEQ ID NO: 159705 - RNA, 16 nt, Human herpesvirus 6
uggucugagaugacau

SEQ ID NO: 159706 - RNA, 21 nt, Human herpesvirus 6
uggucaugaucugcuugauau

SEQ ID NO: 159707 - RNA, 20 nt, Human herpesvirus 6
ugguauuuuagauauauacu

SEQ ID NO: 159708 - RNA, 22 nt, Human herpesvirus 6
ugggacccacgguggccuggca

SEQ ID NO: 159709 - RNA, 16 nt, Human herpesvirus 6
ugggaccuucaggaac

SEQ ID NO: 159710 - RNA, 13 nt, Human herpesvirus 6
ugggauguccauu

SEQ ID NO: 159711 - RNA, 18 nt, Human herpesvirus 6
ugguauccaauuaacaca

SEQ ID NO: 159712 - RNA, 20 nt, Human herpesvirus 6
ugguauccaauuaacacauu

SEQ ID NO: 159713 - RNA, 17 nt, Human herpesvirus 6
uggaucggaagacauuu

SEQ ID NO: 159714 - RNA, 15 nt, Human herpesvirus 6
uggcacggugccaaa

SEQ ID NO: 159715 - RNA, 18 nt, Human herpesvirus 6
uggcacggugccaaagga

SEQ ID NO: 159716 - RNA, 23 nt, Human herpesvirus 6
uggaucuugaucaaauaucugaa

SEQ ID NO: 159717 - RNA, 18 nt, Human herpesvirus 6
uggcauugauaaugauau

SEQ ID NO: 159718 - RNA, 23 nt, Human herpesvirus 6
uggcauucaccggugaugaacug

SEQ ID NO: 159719 - RNA, 19 nt, Human herpesvirus 6
uggccuggcacggugccaa

SEQ ID NO: 159720 - RNA, 15 nt, Human herpesvirus 6
ugucucgcaaacagc

SEQ ID NO: 159721 - RNA, 12 nt, Human herpesvirus 6
ugucugugauuu

SEQ ID NO: 159722 - RNA, 13 nt, Human herpesvirus 6
ugucuggcagcua

SEQ ID NO: 159723 - RNA, 14 nt, Human herpesvirus 6
ugucuccaaacaga

SEQ ID NO: 159724 - RNA, 16 nt, Human herpesvirus 6
ugugcucggcucuuug

SEQ ID NO: 159725 - RNA, 15 nt, Human herpesvirus 6
ugugacgccuugaug

SEQ ID NO: 159726 - RNA, 21 nt, Human herpesvirus 6
ugugaacggagauauaaucua

SEQ ID NO: 159727 - RNA, 18 nt, Human herpesvirus 6
uguagaguguuaugaucu

SEQ ID NO: 159728 - RNA, 14 nt, Human herpesvirus 6
uguaccuagcagca

SEQ ID NO: 159729 - RNA, 15 nt, Human herpesvirus 6
uguaccuuguaauuu

SEQ ID NO: 159730 - RNA, 23 nt, Human herpesvirus 6
uguaccuuguaauuucuauguaa

SEQ ID NO: 159731 - RNA, 23 nt, Human herpesvirus 6
uguaauacaucaacaaacacgug

SEQ ID NO: 159732 - RNA, 19 nt, Human herpesvirus 6
uguaaguuuugggugcuau

SEQ ID NO: 159733 - RNA, 15 nt, Human herpesvirus 6
uguacaaccgaaugu

SEQ ID NO: 159734 - RNA, 21 nt, Human herpesvirus 6
uguacaaguuugugugccuuu

SEQ ID NO: 159735 - RNA, 18 nt, Human herpesvirus 6
uguaaaucaucaacguaa

SEQ ID NO: 159736 - RNA, 14 nt, Human herpesvirus 6
uguaaaguuauauu

SEQ ID NO: 159737 - RNA, 19 nt, Human herpesvirus 6
uguaaauaaacaccagcau

SEQ ID NO: 159738 - RNA, 14 nt, Human herpesvirus 6
uggagaagaucuaa

SEQ ID NO: 159739 - RNA, 14 nt, Human herpesvirus 6
uggagacaccucag

SEQ ID NO: 159740 - RNA, 22 nt, Human herpesvirus 6
uggagcccgcucggucucgcac

SEQ ID NO: 159741 - RNA, 17 nt, Human herpesvirus 6
uggagcggaaacaugaa

SEQ ID NO: 159742 - RNA, 20 nt, Human herpesvirus 6
uggauauacggaaaagaugu

SEQ ID NO: 159743 - RNA, 18 nt, Human herpesvirus 6
uggaguauuuguuuuauu

SEQ ID NO: 159744 - RNA, 13 nt, Human herpesvirus 6
uggaaaucaguuc

SEQ ID NO: 159745 - RNA, 16 nt, Human herpesvirus 6
uggaaacgacaaagaa

SEQ ID NO: 159746 - RNA, 14 nt, Human herpesvirus 6
uggaaaacuauuaa

SEQ ID NO: 159747 - RNA, 13 nt, Human herpesvirus 6
uggaaaauugcaa

SEQ ID NO: 159748 - RNA, 21 nt, Human herpesvirus 6
ugcuuuacaucgaauuucaca

SEQ ID NO: 159749 - RNA, 19 nt, Human herpesvirus 6
uggaaaacaaagaaucaau

SEQ ID NO: 159750 - RNA, 21 nt, Human herpesvirus 6
ugcugcuagauaauuaugcau

SEQ ID NO: 159751 - RNA, 18 nt, Human herpesvirus 6
ugcuguuagagauaucug

SEQ ID NO: 159752 - RNA, 21 nt, Human herpesvirus 6
ugcuguuagagauaucugcau

SEQ ID NO: 159753 - RNA, 18 nt, Human herpesvirus 6
ugcuuaacuugcacucga

SEQ ID NO: 159754 - RNA, 16 nt, Human herpesvirus 6
ugcuucucucgaugaa

SEQ ID NO: 159755 - RNA, 14 nt, Human herpesvirus 6
ugcacuugggcaau

SEQ ID NO: 159756 - RNA, 21 nt, Human herpesvirus 6
ugcagaaaaacggcagcuaua

SEQ ID NO: 159757 - RNA, 16 nt, Human herpesvirus 6
ugcagaacaacagcau

SEQ ID NO: 159758 - RNA, 15 nt, Human herpesvirus 6
ugcagaacaucucag

SEQ ID NO: 159759 - RNA, 18 nt, Human herpesvirus 6
ugcuccuuuaucuuuauu

SEQ ID NO: 159760 - RNA, 23 nt, Human herpesvirus 6
ugcuccacucggauucaaagaaa

SEQ ID NO: 159761 - RNA, 22 nt, Human herpesvirus 6
ugcuaggacuucguucuugaca

SEQ ID NO: 159762 - RNA, 17 nt, Human herpesvirus 6
aggugucgucacuccaa

SEQ ID NO: 159763 - RNA, 18 nt, Human herpesvirus 6
aggugucucaaccuucau

SEQ ID NO: 159764 - RNA, 21 nt, Human herpesvirus 6
agguguaaaucaucaacguaa

SEQ ID NO: 159765 - RNA, 13 nt, Human herpesvirus 6
aggugcugaugau

SEQ ID NO: 159766 - RNA, 18 nt, Human herpesvirus 6
aggugauugggagcucac

SEQ ID NO: 159767 - RNA, 19 nt, Human herpesvirus 6
aggcgcuaguuacggggaa

SEQ ID NO: 159768 - RNA, 17 nt, Human herpesvirus 6
aggccuucaccugucuc

SEQ ID NO: 159769 - RNA, 22 nt, Human herpesvirus 6
aggcgacgaaagaggacgggaa

SEQ ID NO: 159770 - RNA, 21 nt, Human herpesvirus 6
aguagaaggucaucaugcugu

SEQ ID NO: 159771 - RNA, 15 nt, Human herpesvirus 6
aguauugucugauau

SEQ ID NO: 159772 - RNA, 17 nt, Human herpesvirus 6
agucacgggcagcugca

SEQ ID NO: 159773 - RNA, 12 nt, Human herpesvirus 6
agucaauguugu

SEQ ID NO: 159774 - RNA, 16 nt, Human herpesvirus 6
agucaucauauaauau

SEQ ID NO: 159775 - RNA, 22 nt, Human herpesvirus 6
agucaucauauaauauuuccau

SEQ ID NO: 159776 - RNA, 20 nt, Human herpesvirus 6
agucguugugucaugauuau

SEQ ID NO: 159777 - RNA, 19 nt, Human herpesvirus 6
agucggcgugugugcuccg

SEQ ID NO: 159778 - RNA, 23 nt, Human herpesvirus 6
agucggcgugugugcuccgggga

SEQ ID NO: 159779 - RNA, 18 nt, Human herpesvirus 6
aguuuccuuugugugaua

SEQ ID NO: 159780 - RNA, 15 nt, Human herpesvirus 6
aguuucucgaaaaaa

SEQ ID NO: 159781 - RNA, 19 nt, Human herpesvirus 6
aguuucucgaaaaaacaac

SEQ ID NO: 159782 - RNA, 22 nt, Human herpesvirus 6
aguuguacaggaggcuauggcu

SEQ ID NO: 159783 - RNA, 20 nt, Human herpesvirus 6
aguuuacauagaaauuacaa

SEQ ID NO: 159784 - RNA, 21 nt, Human herpesvirus 6
aguuguguacaaugguuuuac

SEQ ID NO: 159785 - RNA, 18 nt, Human herpesvirus 6
auaacagcgguucgggcu

SEQ ID NO: 159786 - RNA, 20 nt, Human herpesvirus 6
auaaacaugauuguaauaaa

SEQ ID NO: 159787 - RNA, 14 nt, Human herpesvirus 6
agucuuuaccauuu

SEQ ID NO: 159788 - RNA, 17 nt, Human herpesvirus 6
agucuuuaccauuugac

SEQ ID NO: 159789 - RNA, 20 nt, Human herpesvirus 6
agugaaggcugccaugaaac

SEQ ID NO: 159790 - RNA, 20 nt, Human herpesvirus 6
agucuggcaucugcggcucu

SEQ ID NO: 159791 - RNA, 19 nt, Human herpesvirus 6
aguuacuuugauguuaacu

SEQ ID NO: 159792 - RNA, 22 nt, Human herpesvirus 6
aguuaauaagauguugcaauaa

SEQ ID NO: 159793 - RNA, 14 nt, Human herpesvirus 6
agugugauacggaa

SEQ ID NO: 159794 - RNA, 21 nt, Human herpesvirus 6
agugaauugugcaagcuguau

SEQ ID NO: 159795 - RNA, 20 nt, Human herpesvirus 6
agugugcaucagcauaugau

SEQ ID NO: 159796 - RNA, 15 nt, Human herpesvirus 6
aguguggauaucuca

SEQ ID NO: 159797 - RNA, 16 nt, Human herpesvirus 6
aguguggauaucucaa

SEQ ID NO: 159798 - RNA, 22 nt, Human herpesvirus 6
aguguuuggugugacauucaaa

SEQ ID NO: 159799 - RNA, 17 nt, Human herpesvirus 6
auaauugauacggcagc

SEQ ID NO: 159800 - RNA, 20 nt, Human herpesvirus 6
auaauuuguuuuuccauaaa

SEQ ID NO: 159801 - RNA, 21 nt, Human herpesvirus 6
auaauuccgacuguguuacaa

SEQ ID NO: 159802 - RNA, 17 nt, Human herpesvirus 6
auaauggcaugcauuau

SEQ ID NO: 159803 - RNA, 18 nt, Human herpesvirus 6
auaauauuccugagcuac

SEQ ID NO: 159804 - RNA, 19 nt, Human herpesvirus 6
auaaugcccagauguggaa

SEQ ID NO: 159805 - RNA, 23 nt, Human herpesvirus 6
auaaucuacgcauugacggguau

SEQ ID NO: 159806 - RNA, 22 nt, Human herpesvirus 6
auaaugaguuuuucgcaauuug

SEQ ID NO: 159807 - RNA, 11 nt, Human herpesvirus 6
auacaauaaca

SEQ ID NO: 159808 - RNA, 18 nt, Human herpesvirus 6
auaccaacgugagggaaa

SEQ ID NO: 159809 - RNA, 20 nt, Human herpesvirus 6
auacauucacauuaccucug

SEQ ID NO: 159810 - RNA, 21 nt, Human herpesvirus 6
auacauuccuuaagaaugaaa

SEQ ID NO: 159811 - RNA, 23 nt, Human herpesvirus 6
auacauuuuaacuauccauuuua

SEQ ID NO: 159812 - RNA, 16 nt, Human herpesvirus 6
auacaaaaugaccuca

SEQ ID NO: 159813 - RNA, 15 nt, Human herpesvirus 6
auaauaaacauuuau

SEQ ID NO: 159814 - RNA, 20 nt, Human herpesvirus 6
auaaggugucgucacuccaa

SEQ ID NO: 159815 - RNA, 15 nt, Human herpesvirus 6
auaaguuaauuccag

SEQ ID NO: 159816 - RNA, 17 nt, Human herpesvirus 6
auaauaaaaaguaauau

SEQ ID NO: 159817 - RNA, 14 nt, Human herpesvirus 6
auaagaaagcaguu

SEQ ID NO: 159818 - RNA, 18 nt, Human herpesvirus 6
auaagauguugcaauaaa

SEQ ID NO: 159819 - RNA, 19 nt, Human herpesvirus 6
auaagcaaauguaacuuuu

SEQ ID NO: 159820 - RNA, 19 nt, Human herpesvirus 6
auaagacacugauaacuca

SEQ ID NO: 159821 - RNA, 15 nt, Human herpesvirus 6
auaaccucacuacug

SEQ ID NO: 159822 - RNA, 19 nt, Human herpesvirus 6
auaacccccgauaacuuuu

SEQ ID NO: 159823 - RNA, 15 nt, Human herpesvirus 6
auagguguuugcaga

SEQ ID NO: 159824 - RNA, 13 nt, Human herpesvirus 6
auagucaauguug

SEQ ID NO: 159825 - RNA, 12 nt, Human herpesvirus 6
auaggccauaac

SEQ ID NO: 159826 - RNA, 21 nt, Human herpesvirus 6
auaccgaaaucuccugagaag

SEQ ID NO: 159827 - RNA, 16 nt, Human herpesvirus 6
auacccgaaguucucu

SEQ ID NO: 159828 - RNA, 18 nt, Human herpesvirus 6
auacccgaaguucucuca

SEQ ID NO: 159829 - RNA, 14 nt, Human herpesvirus 6
auauaacuuuacau

SEQ ID NO: 159830 - RNA, 20 nt, Human herpesvirus 6
auauaaauugguggacaacg

SEQ ID NO: 159831 - RNA, 15 nt, Human herpesvirus 6
auauaaaagcuaaau

SEQ ID NO: 159832 - RNA, 21 nt, Human herpesvirus 6
auaguucuucaacauaucacu

SEQ ID NO: 159833 - RNA, 23 nt, Human herpesvirus 6
auauaaaaaacuaaaacaucaga

SEQ ID NO: 159834 - RNA, 17 nt, Human herpesvirus 6
auauaaaaaacugcaug

SEQ ID NO: 159835 - RNA, 14 nt, Human herpesvirus 6
auaucucggacuca

SEQ ID NO: 159836 - RNA, 23 nt, Human herpesvirus 6
auaucgagccaaagaaacagaua

SEQ ID NO: 159837 - RNA, 12 nt, Human herpesvirus 6
auauccaaagac

SEQ ID NO: 159838 - RNA, 15 nt, Human herpesvirus 6
auauccaaagacuca

SEQ ID NO: 159839 - RNA, 20 nt, Human herpesvirus 6
auaucaucuuuuucuucagg

SEQ ID NO: 159840 - RNA, 23 nt, Human herpesvirus 6
auauuagccauuuuuuucuuaca

SEQ ID NO: 159841 - RNA, 15 nt, Human herpesvirus 6
aucaagcaucucuuc

SEQ ID NO: 159842 - RNA, 13 nt, Human herpesvirus 6
aucaagggugcug

SEQ ID NO: 159843 - RNA, 14 nt, Human herpesvirus 6
aucaagggugcuga

SEQ ID NO: 159844 - RNA, 16 nt, Human herpesvirus 6
auauuaauuacauaua

SEQ ID NO: 159845 - RNA, 21 nt, Human herpesvirus 6
auauuaauuacauauagucaa

SEQ ID NO: 159846 - RNA, 23 nt, Human herpesvirus 6
auauuaauuacauauagucaaug

SEQ ID NO: 159847 - RNA, 21 nt, Human herpesvirus 6
auauguaaauaaacaccagca

SEQ ID NO: 159848 - RNA, 14 nt, Human herpesvirus 6
auauggaugaucac

SEQ ID NO: 159849 - RNA, 19 nt, Human herpesvirus 6
auaugcaaacugacuguac

SEQ ID NO: 159850 - RNA, 21 nt, Human herpesvirus 6
auaugaggcgcuugaaaccac

SEQ ID NO: 159851 - RNA, 23 nt, Human herpesvirus 6
aggaugaagaaaaaaacugugaa

SEQ ID NO: 159852 - RNA, 20 nt, Human herpesvirus 6
aggaugaaguuucacauaua

SEQ ID NO: 159853 - RNA, 20 nt, Human herpesvirus 6
aggauuucccuuguaaucaa

SEQ ID NO: 159854 - RNA, 21 nt, Human herpesvirus 6
aggcaaaaacgagaaccugca

SEQ ID NO: 159855 - RNA, 23 nt, Human herpesvirus 6
aggccugugugccaggaaagugu

SEQ ID NO: 159856 - RNA, 15 nt, Human herpesvirus 6
aggccgucaaagaca

SEQ ID NO: 159857 - RNA, 20 nt, Human herpesvirus 6
aggaauagcaggcauugacu

SEQ ID NO: 159858 - RNA, 19 nt, Human herpesvirus 6
aggaagauucagagugaau

SEQ ID NO: 159859 - RNA, 23 nt, Human herpesvirus 6
aggagucucggcccgagcgcacu

SEQ ID NO: 159860 - RNA, 12 nt, Human herpesvirus 6
agcguaaugugc

SEQ ID NO: 159861 - RNA, 16 nt, Human herpesvirus 6
agcggaccaauccaug

SEQ ID NO: 159862 - RNA, 21 nt, Human herpesvirus 6
agcggacgguuuauuuuuaua

SEQ ID NO: 159863 - RNA, 20 nt, Human herpesvirus 6
agcguguuauuucgggacaa

SEQ ID NO: 159864 - RNA, 15 nt, Human herpesvirus 6
agcuaaaacuugaaa

SEQ ID NO: 159865 - RNA, 15 nt, Human herpesvirus 6
agcuaauaugaacaa

SEQ ID NO: 159866 - RNA, 23 nt, Human herpesvirus 6
aggaacuggugagaaauaacuua

SEQ ID NO: 159867 - RNA, 19 nt, Human herpesvirus 6
agcuuuuccucaauaugau

SEQ ID NO: 159868 - RNA, 15 nt, Human herpesvirus 6
agcuuucauaagcuc

SEQ ID NO: 159869 - RNA, 17 nt, Human herpesvirus 6
agcuuuauguacccuaa

SEQ ID NO: 159870 - RNA, 18 nt, Human herpesvirus 6
agcuuguggaucaucucc

SEQ ID NO: 159871 - RNA, 20 nt, Human herpesvirus 6
agcuuguggaucaucuccaa

SEQ ID NO: 159872 - RNA, 20 nt, Human herpesvirus 6
agcuuguuaggacacuuuca

SEQ ID NO: 159873 - RNA, 14 nt, Human herpesvirus 6
agcaucgguugugu

SEQ ID NO: 159874 - RNA, 12 nt, Human herpesvirus 6
agcaucaccugg

SEQ ID NO: 159875 - RNA, 22 nt, Human herpesvirus 6
agcagcuggcgaaaagugcugu

SEQ ID NO: 159876 - RNA, 11 nt, Human herpesvirus 6
agcagcaauag

SEQ ID NO: 159877 - RNA, 16 nt, Human herpesvirus 6
agcagcaauaggcacc

SEQ ID NO: 159878 - RNA, 17 nt, Human herpesvirus 6
agcagcauuaacuacau

SEQ ID NO: 159879 - RNA, 14 nt, Human herpesvirus 6
agcacgguccacac

SEQ ID NO: 159880 - RNA, 13 nt, Human herpesvirus 6
agcagaaguuuac

SEQ ID NO: 159881 - RNA, 15 nt, Human herpesvirus 6
agcagaaguuuacau

SEQ ID NO: 159882 - RNA, 21 nt, Human herpesvirus 6
agccaaugauucuuaauucuu

SEQ ID NO: 159883 - RNA, 23 nt, Human herpesvirus 6
agccaaaaaaguuuauuuaguca

SEQ ID NO: 159884 - RNA, 18 nt, Human herpesvirus 6
agccaaacaaggguuuaa

SEQ ID NO: 159885 - RNA, 18 nt, Human herpesvirus 6
agccagauacuacacaaa

SEQ ID NO: 159886 - RNA, 13 nt, Human herpesvirus 6
agccaugacaaga

SEQ ID NO: 159887 - RNA, 23 nt, Human herpesvirus 6
agccaugacaagaaagguauuga

SEQ ID NO: 159888 - RNA, 16 nt, Human herpesvirus 6
agccugagaacgggca

SEQ ID NO: 159889 - RNA, 12 nt, Human herpesvirus 6
agccggugaccg

SEQ ID NO: 159890 - RNA, 17 nt, Human herpesvirus 6
agccggugaccggccau

SEQ ID NO: 159891 - RNA, 23 nt, Human herpesvirus 6
agagacgaaagcaguuuuacauc

SEQ ID NO: 159892 - RNA, 19 nt, Human herpesvirus 6
agagauagaccuugaucua

SEQ ID NO: 159893 - RNA, 15 nt, Human herpesvirus 6
agagucuuuccccag

SEQ ID NO: 159894 - RNA, 20 nt, Human herpesvirus 6
agaaaaaaaacgaauagcau

SEQ ID NO: 159895 - RNA, 21 nt, Human herpesvirus 6
agaaaaacaacgaaacaguuc

SEQ ID NO: 159896 - RNA, 17 nt, Human herpesvirus 6
agaaaaaugagacuuag

SEQ ID NO: 159897 - RNA, 23 nt, Human herpesvirus 6
acuuuucuaucacucauacacag

SEQ ID NO: 159898 - RNA, 14 nt, Human herpesvirus 6
acuuuuaaaucuga

SEQ ID NO: 159899 - RNA, 18 nt, Human herpesvirus 6
acuuugauguuaacucag

SEQ ID NO: 159900 - RNA, 23 nt, Human herpesvirus 6
agauauaauuccgacuguguuac

SEQ ID NO: 159901 - RNA, 16 nt, Human herpesvirus 6
agauauggaugaucac

SEQ ID NO: 159902 - RNA, 21 nt, Human herpesvirus 6
agauauggaugaucacuauca

SEQ ID NO: 159903 - RNA, 19 nt, Human herpesvirus 6
agauauuaacacagucuuc

SEQ ID NO: 159904 - RNA, 21 nt, Human herpesvirus 6
agauccccaagaggauccauu

SEQ ID NO: 159905 - RNA, 15 nt, Human herpesvirus 6
agauccgucucucag

SEQ ID NO: 159906 - RNA, 18 nt, Human herpesvirus 6
agaucgcauuagucacag

SEQ ID NO: 159907 - RNA, 23 nt, Human herpesvirus 6
agaucuaaauuucuacaaaaaua

SEQ ID NO: 159908 - RNA, 13 nt, Human herpesvirus 6
agaucuaauucac

SEQ ID NO: 159909 - RNA, 17 nt, Human herpesvirus 6
agaucuguucgaaaaag

SEQ ID NO: 159910 - RNA, 23 nt, Human herpesvirus 6
agaucaucaaaucggacaaugca

SEQ ID NO: 159911 - RNA, 15 nt, Human herpesvirus 6
agauacgaaccucau

SEQ ID NO: 159912 - RNA, 14 nt, Human herpesvirus 6
agauacgagaacaa

SEQ ID NO: 159913 - RNA, 15 nt, Human herpesvirus 6
agauacauaaacacc

SEQ ID NO: 159914 - RNA, 16 nt, Human herpesvirus 6
agauaauaaucauauu

SEQ ID NO: 159915 - RNA, 13 nt, Human herpesvirus 6
agauaaauauaac

SEQ ID NO: 159916 - RNA, 20 nt, Human herpesvirus 6
agauaaccucacuacugaaa

SEQ ID NO: 159917 - RNA, 21 nt, Human herpesvirus 6
agauaaccucacuacugaaac

SEQ ID NO: 159918 - RNA, 17 nt, Human herpesvirus 6
agagugcaacaaaaagc

SEQ ID NO: 159919 - RNA, 19 nt, Human herpesvirus 6
agaguguuaugaucuagcu

SEQ ID NO: 159920 - RNA, 15 nt, Human herpesvirus 6
agcaaguucaucagc

SEQ ID NO: 159921 - RNA, 14 nt, Human herpesvirus 6
agcaaguuccauuu

SEQ ID NO: 159922 - RNA, 23 nt, Human herpesvirus 6
agcaaucaccaccaacacaccug

SEQ ID NO: 159923 - RNA, 20 nt, Human herpesvirus 6
agauuuauugcgauucuaau

SEQ ID NO: 159924 - RNA, 15 nt, Human herpesvirus 6
agauuuggcauuaaa

SEQ ID NO: 159925 - RNA, 14 nt, Human herpesvirus 6
agcaaagaaaugac

SEQ ID NO: 159926 - RNA, 12 nt, Human herpesvirus 6
agcaaacaugca

SEQ ID NO: 159927 - RNA, 21 nt, Human herpesvirus 6
agcaaagacaucgauuugcug

SEQ ID NO: 159928 - RNA, 14 nt, Human herpesvirus 6
agauugugcaguua

SEQ ID NO: 159929 - RNA, 17 nt, Human herpesvirus 6
agauugugcaguuauua

SEQ ID NO: 159930 - RNA, 15 nt, Human herpesvirus 6
agauuuacaccaaac

SEQ ID NO: 159931 - RNA, 18 nt, Human herpesvirus 6
agauuaaauauaccugaa

SEQ ID NO: 159932 - RNA, 23 nt, Human herpesvirus 6
agauguugcaauaaaaaauggau

SEQ ID NO: 159933 - RNA, 14 nt, Human herpesvirus 6
agaugugugucuuc

SEQ ID NO: 159934 - RNA, 12 nt, Human herpesvirus 6
agauucacuccg

SEQ ID NO: 159935 - RNA, 13 nt, Human herpesvirus 6
agauucacugacc

SEQ ID NO: 159936 - RNA, 21 nt, Human herpesvirus 6
agauuacuucgugcugugaua

SEQ ID NO: 159937 - RNA, 22 nt, Human herpesvirus 6
agauuaggggagagacauccau

SEQ ID NO: 159938 - RNA, 14 nt, Human herpesvirus 6
agaugaaagacaga

SEQ ID NO: 159939 - RNA, 22 nt, Human herpesvirus 6
agaugaauuuguccguauacag

SEQ ID NO: 159940 - RNA, 16 nt, Human herpesvirus 6
agaugcaaaucucacu

SEQ ID NO: 159941 - RNA, 16 nt, Human herpesvirus 6
agaugacaucugcaaa

SEQ ID NO: 159942 - RNA, 13 nt, Human herpesvirus 6
acauauagucaau

SEQ ID NO: 159943 - RNA, 14 nt, Human herpesvirus 6
acauauacauuugu

SEQ ID NO: 159944 - RNA, 16 nt, Human herpesvirus 6
acauauacauuuguac

SEQ ID NO: 159945 - RNA, 15 nt, Human herpesvirus 6
acauaucgagccaaa

SEQ ID NO: 159946 - RNA, 19 nt, Human herpesvirus 6
acauaucgagccaaagaaa

SEQ ID NO: 159947 - RNA, 23 nt, Human herpesvirus 6
acauaugccgaggcuuacuacgg

SEQ ID NO: 159948 - RNA, 18 nt, Human herpesvirus 6
acaucaacaaacacguga

SEQ ID NO: 159949 - RNA, 23 nt, Human herpesvirus 6
acaucaccgauaaaaacucacac

SEQ ID NO: 159950 - RNA, 22 nt, Human herpesvirus 6
acauucuaucgcgaauaucgca

SEQ ID NO: 159951 - RNA, 14 nt, Human herpesvirus 6
acauuggucuuugc

SEQ ID NO: 159952 - RNA, 17 nt, Human herpesvirus 6
acaucccguaugaaaua

SEQ ID NO: 159953 - RNA, 16 nt, Human herpesvirus 6
acaggcuugugaaaga

SEQ ID NO: 159954 - RNA, 12 nt, Human herpesvirus 6
acagggggaucg

SEQ ID NO: 159955 - RNA, 14 nt, Human herpesvirus 6
acauaauaucuauc

SEQ ID NO: 159956 - RNA, 15 nt, Human herpesvirus 6
acauagaaauuacaa

SEQ ID NO: 159957 - RNA, 18 nt, Human herpesvirus 6
acauagaaauuacaaggu

SEQ ID NO: 159958 - RNA, 14 nt, Human herpesvirus 6
acauagaauuucua

SEQ ID NO: 159959 - RNA, 22 nt, Human herpesvirus 6
acauaguuucgaauucuuacca

SEQ ID NO: 159960 - RNA, 21 nt, Human herpesvirus 6
acauauaaaagcuaaaucaaa

SEQ ID NO: 159961 - RNA, 16 nt, Human herpesvirus 6
acauauaaauccgaua

SEQ ID NO: 159962 - RNA, 22 nt, Human herpesvirus 6
acaguaugucuccaaacagaga

SEQ ID NO: 159963 - RNA, 14 nt, Human herpesvirus 6
acagucacacacag

SEQ ID NO: 159964 - RNA, 23 nt, Human herpesvirus 6
acauaaggcgcgaguuggugcua

SEQ ID NO: 159965 - RNA, 16 nt, Human herpesvirus 6
acagguggagcugugu

SEQ ID NO: 159966 - RNA, 21 nt, Human herpesvirus 6
acacgaaaaacauuucuuaca

SEQ ID NO: 159967 - RNA, 17 nt, Human herpesvirus 6
acaccuuaaacauguau

SEQ ID NO: 159968 - RNA, 16 nt, Human herpesvirus 6
acacucuuaacuacuu

SEQ ID NO: 159969 - RNA, 18 nt, Human herpesvirus 6
acagaucggcguuuugau

SEQ ID NO: 159970 - RNA, 18 nt, Human herpesvirus 6
acacuuagcaacuacuuu

SEQ ID NO: 159971 - RNA, 15 nt, Human herpesvirus 6
acacagcacauaacu

SEQ ID NO: 159972 - RNA, 15 nt, Human herpesvirus 6
acacagcaugcauuu

SEQ ID NO: 159973 - RNA, 14 nt, Human herpesvirus 6
acacaggauuauaa

SEQ ID NO: 159974 - RNA, 14 nt, Human herpesvirus 6
acacaaaccaucaa

SEQ ID NO: 159975 - RNA, 15 nt, Human herpesvirus 6
acaauuuagccuauu

SEQ ID NO: 159976 - RNA, 14 nt, Human herpesvirus 6
acacacagugaaac

SEQ ID NO: 159977 - RNA, 20 nt, Human herpesvirus 6
acacaccgucuucaaccugu

SEQ ID NO: 159978 - RNA, 16 nt, Human herpesvirus 6
acacaauuaguccauu

SEQ ID NO: 159979 - RNA, 17 nt, Human herpesvirus 6
acacaaucagaaaacac

SEQ ID NO: 159980 - RNA, 16 nt, Human herpesvirus 6
acacaaccauccagau

SEQ ID NO: 159981 - RNA, 15 nt, Human herpesvirus 6
acacaagaacagaga

SEQ ID NO: 159982 - RNA, 19 nt, Human herpesvirus 6
acaacaggcuugugaaaga

SEQ ID NO: 159983 - RNA, 15 nt, Human herpesvirus 6
acaacgucaugcaaa

SEQ ID NO: 159984 - RNA, 15 nt, Human herpesvirus 6
acaacugaaacuuca

SEQ ID NO: 159985 - RNA, 20 nt, Human herpesvirus 6
acaaccauccagauaaccuc

SEQ ID NO: 159986 - RNA, 16 nt, Human herpesvirus 6
acaacgacuaccacau

SEQ ID NO: 159987 - RNA, 17 nt, Human herpesvirus 6
acaacgacuaccacauc

SEQ ID NO: 159988 - RNA, 21 nt, Human herpesvirus 6
acaacgacuaccacaucaccg

SEQ ID NO: 159989 - RNA, 21 nt, Human herpesvirus 6
acaauuagauaaacaacgcuc

SEQ ID NO: 159990 - RNA, 16 nt, Human herpesvirus 6
acaauuaucacaguug

SEQ ID NO: 159991 - RNA, 22 nt, Human herpesvirus 6
acaauuaucacaguugauaaac

SEQ ID NO: 159992 - RNA, 20 nt, Human herpesvirus 6
acaauggaaaagguggucgu

SEQ ID NO: 159993 - RNA, 19 nt, Human herpesvirus 6
acaaugcagaacaacagca

SEQ ID NO: 159994 - RNA, 20 nt, Human herpesvirus 6
acaaucagaaaacacuaucu

SEQ ID NO: 159995 - RNA, 20 nt, Human herpesvirus 6
acaauccauguucauaggac

SEQ ID NO: 159996 - RNA, 16 nt, Human herpesvirus 6
acaaugacauuauuaa

SEQ ID NO: 159997 - RNA, 22 nt, Human herpesvirus 6
acaaugauacuaaguguaaugu

SEQ ID NO: 159998 - RNA, 22 nt, Human herpesvirus 6
acaaucgucggaucaacagaug

SEQ ID NO: 159999 - RNA, 12 nt, Human herpesvirus 6
acaaucuaauac

SEQ ID NO: 160000 - RNA, 17 nt, Human herpesvirus 6
acaaguaagauugcaga

SEQ ID NO: 160001 - RNA, 23 nt, Human herpesvirus 6
acaaguagcucguaauaauuugg

SEQ ID NO: 160002 - RNA, 15 nt, Human herpesvirus 6
acaauaauugcauuc

SEQ ID NO: 160003 - RNA, 16 nt, Human herpesvirus 6
acaauacaacaauaaa

SEQ ID NO: 160004 - RNA, 21 nt, Human herpesvirus 6
acaauaacaauuauucaacau

SEQ ID NO: 160005 - RNA, 18 nt, Human herpesvirus 6
acaaaucagcauccggua

SEQ ID NO: 160006 - RNA, 18 nt, Human herpesvirus 6
acaaauacgagagcugac

SEQ ID NO: 160007 - RNA, 13 nt, Human herpesvirus 6
acaaauuaauuaa

SEQ ID NO: 160008 - RNA, 20 nt, Human herpesvirus 6
acaacaauaacaacaacaau

SEQ ID NO: 160009 - RNA, 22 nt, Human herpesvirus 6
acaacaacgaaaaagcuaucgu

SEQ ID NO: 160010 - RNA, 13 nt, Human herpesvirus 6
acaacaacaauaa

SEQ ID NO: 160011 - RNA, 15 nt, Human herpesvirus 6
acaaauugaccagcc

SEQ ID NO: 160012 - RNA, 18 nt, Human herpesvirus 6
acaaauugaccagccaga

SEQ ID NO: 160013 - RNA, 17 nt, Human herpesvirus 6
acaaagugagauacgug

SEQ ID NO: 160014 - RNA, 17 nt, Human herpesvirus 6
acaaaccaaaaugacuc

SEQ ID NO: 160015 - RNA, 15 nt, Human herpesvirus 6
acaaaccaucaauuu

SEQ ID NO: 160016 - RNA, 14 nt, Human herpesvirus 6
acaaaccaucagcc

SEQ ID NO: 160017 - RNA, 18 nt, Human herpesvirus 6
acaaaauuugaaauauca

SEQ ID NO: 160018 - RNA, 22 nt, Human herpesvirus 6
acaaaaacgaccugaucacaga

SEQ ID NO: 160019 - RNA, 19 nt, Human herpesvirus 6
aauuuuuuucaugaucuca

SEQ ID NO: 160020 - RNA, 11 nt, Human herpesvirus 6
aauuuguguaa

SEQ ID NO: 160021 - RNA, 15 nt, Human herpesvirus 6
aauuuuauccaucca

SEQ ID NO: 160022 - RNA, 20 nt, Human herpesvirus 6
aauuuuauccauccaaucca

SEQ ID NO: 160023 - RNA, 16 nt, Human herpesvirus 6
aaugacaccgauucag

SEQ ID NO: 160024 - RNA, 20 nt, Human herpesvirus 6
aaugaauagauaauaaucau

SEQ ID NO: 160025 - RNA, 21 nt, Human herpesvirus 6
aaugaauguguucacagagca

SEQ ID NO: 160026 - RNA, 22 nt, Human herpesvirus 6
aaugaauuuauuuucaauauca

SEQ ID NO: 160027 - RNA, 22 nt, Human herpesvirus 6
aaugaacgcagcguaaugugca

SEQ ID NO: 160028 - RNA, 13 nt, Human herpesvirus 6
aaugaaugugcug

SEQ ID NO: 160029 - RNA, 14 nt, Human herpesvirus 6
aaugaaugugcuga

SEQ ID NO: 160030 - RNA, 18 nt, Human herpesvirus 6
aaucuucugcuucuucag

SEQ ID NO: 160031 - RNA, 19 nt, Human herpesvirus 6
aaugaaaaaaaaugaaggg

SEQ ID NO: 160032 - RNA, 19 nt, Human herpesvirus 6
aauuucuuguugaguuuca

SEQ ID NO: 160033 - RNA, 17 nt, Human herpesvirus 6
acugucgaaauucacca

SEQ ID NO: 160034 - RNA, 15 nt, Human herpesvirus 6
acugugucuguucaa

SEQ ID NO: 160035 - RNA, 20 nt, Human herpesvirus 6
acuucuuucuaaaaucaaaa

SEQ ID NO: 160036 - RNA, 12 nt, Human herpesvirus 6
acuugagugaug

SEQ ID NO: 160037 - RNA, 18 nt, Human herpesvirus 6
acuugagugauggaguua

SEQ ID NO: 160038 - RNA, 21 nt, Human herpesvirus 6
acuugauaaacuguaugcaau

SEQ ID NO: 160039 - RNA, 13 nt, Human herpesvirus 6
acuuaagccagcu

SEQ ID NO: 160040 - RNA, 17 nt, Human herpesvirus 6
acuucgugcugugauag

SEQ ID NO: 160041 - RNA, 21 nt, Human herpesvirus 6
acuucgugcugugauagcuau

SEQ ID NO: 160042 - RNA, 14 nt, Human herpesvirus 6
acuucgacuucaaa

SEQ ID NO: 160043 - RNA, 21 nt, Human herpesvirus 6
acugcuaaaagcuauguauga

SEQ ID NO: 160044 - RNA, 12 nt, Human herpesvirus 6
acuccuacaaua

SEQ ID NO: 160045 - RNA, 17 nt, Human herpesvirus 6
acugcagcucgacucca

SEQ ID NO: 160046 - RNA, 18 nt, Human herpesvirus 6
acugcagcucgacuccag

SEQ ID NO: 160047 - RNA, 15 nt, Human herpesvirus 6
acuauugacauagga

SEQ ID NO: 160048 - RNA, 16 nt, Human herpesvirus 6
acuauuuuagucacac

SEQ ID NO: 160049 - RNA, 18 nt, Human herpesvirus 6
acuauuuuagucacacau

SEQ ID NO: 160050 - RNA, 22 nt, Human herpesvirus 6
acuauuuuagucacacauucua

SEQ ID NO: 160051 - RNA, 23 nt, Human herpesvirus 6
acuauuuguuuaaugcauucaca

SEQ ID NO: 160052 - RNA, 24 nt, Human herpesvirus 6
acuauuuguuuaaugcauucacaa

SEQ ID NO: 160053 - RNA, 17 nt, Human herpesvirus 6
acuccgauuuucuuagu

SEQ ID NO: 160054 - RNA, 12 nt, Human herpesvirus 6
acuccccagaga

SEQ ID NO: 160055 - RNA, 20 nt, Human herpesvirus 6
acuccggggggaaaccucaa

SEQ ID NO: 160056 - RNA, 21 nt, Human herpesvirus 6
acuccagugcuuuaaucacaa

SEQ ID NO: 160057 - RNA, 18 nt, Human herpesvirus 6
acuauggaguccuuguca

SEQ ID NO: 160058 - RNA, 18 nt, Human herpesvirus 6
acuaugacuuuucuauca

SEQ ID NO: 160059 - RNA, 15 nt, Human herpesvirus 6
acuacaaagugaaag

SEQ ID NO: 160060 - RNA, 18 nt, Human herpesvirus 6
acuacaacauuaucaauu

SEQ ID NO: 160061 - RNA, 22 nt, Human herpesvirus 6
acuaagcaggaacccagauuug

SEQ ID NO: 160062 - RNA, 22 nt, Human herpesvirus 6
acuaaaaagagucccaucuaua

SEQ ID NO: 160063 - RNA, 15 nt, Human herpesvirus 6
acguuugccaaagcu

SEQ ID NO: 160064 - RNA, 20 nt, Human herpesvirus 6
acguuugcuguuuucaccau

SEQ ID NO: 160065 - RNA, 14 nt, Human herpesvirus 6
acuaaaacaucaga

SEQ ID NO: 160066 - RNA, 17 nt, Human herpesvirus 6
acuaaaacaucagauga

SEQ ID NO: 160067 - RNA, 19 nt, Human herpesvirus 6
acggcagcggaagugaaag

SEQ ID NO: 160068 - RNA, 15 nt, Human herpesvirus 6
acgggcacacguccc

SEQ ID NO: 160069 - RNA, 21 nt, Human herpesvirus 6
acgggcauuccucguucuacc

SEQ ID NO: 160070 - RNA, 18 nt, Human herpesvirus 6
acggguauuuuacauugu

SEQ ID NO: 160071 - RNA, 23 nt, Human herpesvirus 6
acgggucacguauaccauuccca

SEQ ID NO: 160072 - RNA, 15 nt, Human herpesvirus 6
acguucugucugcag

SEQ ID NO: 160073 - RNA, 23 nt, Human herpesvirus 6
acguuucuguccaaugacuacua

SEQ ID NO: 160074 - RNA, 14 nt, Human herpesvirus 6
acguuaaauaucua

SEQ ID NO: 160075 - RNA, 15 nt, Human herpesvirus 6
acguuaucaaugaua

SEQ ID NO: 160076 - RNA, 15 nt, Human herpesvirus 6
acgugucacacgugu

SEQ ID NO: 160077 - RNA, 20 nt, Human herpesvirus 6
acgugaagugggccucguug

SEQ ID NO: 160078 - RNA, 16 nt, Human herpesvirus 6
acgugcuugucucaca

SEQ ID NO: 160079 - RNA, 20 nt, Human herpesvirus 6
acgugcuugucucacaagcu

SEQ ID NO: 160080 - RNA, 20 nt, Human herpesvirus 6
accuggaaaaacugacugac

SEQ ID NO: 160081 - RNA, 17 nt, Human herpesvirus 6
acgacaacacgccagac

SEQ ID NO: 160082 - RNA, 19 nt, Human herpesvirus 6
acgacaacacgccagacau

SEQ ID NO: 160083 - RNA, 11 nt, Human herpesvirus 6
acgaauacuuc

SEQ ID NO: 160084 - RNA, 18 nt, Human herpesvirus 6
acgaggaggggagacgaa

SEQ ID NO: 160085 - RNA, 17 nt, Human herpesvirus 6
acgcaacgcggagugaa

SEQ ID NO: 160086 - RNA, 20 nt, Human herpesvirus 6
acgauauauaaaaaacugca

SEQ ID NO: 160087 - RNA, 14 nt, Human herpesvirus 6
acggcaacauaccc

SEQ ID NO: 160088 - RNA, 22 nt, Human herpesvirus 6
acgcgacagggugagucacaua

SEQ ID NO: 160089 - RNA, 16 nt, Human herpesvirus 6
acgcgaucuaauaacc

SEQ ID NO: 160090 - RNA, 20 nt, Human herpesvirus 6
acgcgauuuaaacaacacag

SEQ ID NO: 160091 - RNA, 22 nt, Human herpesvirus 6
accaagacacgucaacgugucu

SEQ ID NO: 160092 - RNA, 14 nt, Human herpesvirus 6
accaauccaugcaa

SEQ ID NO: 160093 - RNA, 19 nt, Human herpesvirus 6
accaauuccuuaauucuaa

SEQ ID NO: 160094 - RNA, 20 nt, Human herpesvirus 6
accaauuccuuaauucuaaa

SEQ ID NO: 160095 - RNA, 18 nt, Human herpesvirus 6
accaauuuaugucauuuc

SEQ ID NO: 160096 - RNA, 18 nt, Human herpesvirus 6
accaagucaacaacguca

SEQ ID NO: 160097 - RNA, 24 nt, Human herpesvirus 6
accaagucaacaacgucaugcaaa

SEQ ID NO: 160098 - RNA, 13 nt, Human herpesvirus 6
accaagcaccuaa

SEQ ID NO: 160099 - RNA, 16 nt, Human herpesvirus 6
acauuucuauggaucu

SEQ ID NO: 160100 - RNA, 20 nt, Human herpesvirus 6
acauuucuauggaucugagu

SEQ ID NO: 160101 - RNA, 16 nt, Human herpesvirus 6
accaccaaaacgacag

SEQ ID NO: 160102 - RNA, 11 nt, Human herpesvirus 6
accgcaaaaaa

SEQ ID NO: 160103 - RNA, 14 nt, Human herpesvirus 6
accgaucugugagc

SEQ ID NO: 160104 - RNA, 19 nt, Human herpesvirus 6
accgauaaaaacucacaca

SEQ ID NO: 160105 - RNA, 15 nt, Human herpesvirus 6
accgcagagcaaauu

SEQ ID NO: 160106 - RNA, 16 nt, Human herpesvirus 6
accuaucuagaucaau

SEQ ID NO: 160107 - RNA, 15 nt, Human herpesvirus 6
accuauuagcuauaa

SEQ ID NO: 160108 - RNA, 17 nt, Human herpesvirus 6
accuauagucaauguug

SEQ ID NO: 160109 - RNA, 18 nt, Human herpesvirus 6
accggaaaaaugaaauuu

SEQ ID NO: 160110 - RNA, 23 nt, Human herpesvirus 6
accuaauuacaauuuaauauauc

SEQ ID NO: 160111 - RNA, 24 nt, Human herpesvirus 6
accuagacccugccuauacaggca

SEQ ID NO: 160112 - RNA, 17 nt, Human herpesvirus 6
augaaagcuucauuuau

SEQ ID NO: 160113 - RNA, 22 nt, Human herpesvirus 6
augaacgcagcguaaugugcaa

SEQ ID NO: 160114 - RNA, 17 nt, Human herpesvirus 6
augaagacggcaaaggc

SEQ ID NO: 160115 - RNA, 19 nt, Human herpesvirus 6
augaaaaaaaaaauaucac

SEQ ID NO: 160116 - RNA, 15 nt, Human herpesvirus 6
aucuuuguuccagau

SEQ ID NO: 160117 - RNA, 20 nt, Human herpesvirus 6
augaaacaggaacagucuga

SEQ ID NO: 160118 - RNA, 15 nt, Human herpesvirus 6
aucuuauauuaaaga

SEQ ID NO: 160119 - RNA, 22 nt, Human herpesvirus 6
aucuuauucaaaaauguugcau

SEQ ID NO: 160120 - RNA, 19 nt, Human herpesvirus 6
aucuucgccuuguauuuca

SEQ ID NO: 160121 - RNA, 18 nt, Human herpesvirus 6
aucuugaaaucuacugua

SEQ ID NO: 160122 - RNA, 20 nt, Human herpesvirus 6
aucuugaaaucuacuguaca

SEQ ID NO: 160123 - RNA, 16 nt, Human herpesvirus 6
aucuucaauagauuuu

SEQ ID NO: 160124 - RNA, 22 nt, Human herpesvirus 6
aucuuucauuuuuuugcaacuu

SEQ ID NO: 160125 - RNA, 15 nt, Human herpesvirus 6
augaauguguucaca

SEQ ID NO: 160126 - RNA, 19 nt, Human herpesvirus 6
augaauguguucacagagc

SEQ ID NO: 160127 - RNA, 23 nt, Human herpesvirus 6
augaauuccaugcgaguagauuc

SEQ ID NO: 160128 - RNA, 23 nt, Human herpesvirus 6
augacaccucaauuaauacaaaa

SEQ ID NO: 160129 - RNA, 22 nt, Human herpesvirus 6
augacggccuccggccccagag

SEQ ID NO: 160130 - RNA, 20 nt, Human herpesvirus 6
augaccucaucccuuaaaaa

SEQ ID NO: 160131 - RNA, 12 nt, Human herpesvirus 6
augacgauucaa

SEQ ID NO: 160132 - RNA, 19 nt, Human herpesvirus 6
augacgauucaaaccgcag

SEQ ID NO: 160133 - RNA, 14 nt, Human herpesvirus 6
augacaucugcaaa

SEQ ID NO: 160134 - RNA, 16 nt, Human herpesvirus 6
augacaucugcaaaaa

SEQ ID NO: 160135 - RNA, 13 nt, Human herpesvirus 6
augacauuauuaa

SEQ ID NO: 160136 - RNA, 15 nt, Human herpesvirus 6
augaucgacauuugu

SEQ ID NO: 160137 - RNA, 10 nt, Human herpesvirus 6
augaucucac

SEQ ID NO: 160138 - RNA, 19 nt, Human herpesvirus 6
augaggcgcuugaaaccac

SEQ ID NO: 160139 - RNA, 15 nt, Human herpesvirus 6
augagaggacaguca

SEQ ID NO: 160140 - RNA, 12 nt, Human herpesvirus 6
augcaacgcauc

SEQ ID NO: 160141 - RNA, 13 nt, Human herpesvirus 6
augcaaaucucac

SEQ ID NO: 160142 - RNA, 17 nt, Human herpesvirus 6
augcaaacccgacaaug

SEQ ID NO: 160143 - RNA, 13 nt, Human herpesvirus 6
augaugaguaaua

SEQ ID NO: 160144 - RNA, 13 nt, Human herpesvirus 6
augauuaucauag

SEQ ID NO: 160145 - RNA, 16 nt, Human herpesvirus 6
augauauuccagacaa

SEQ ID NO: 160146 - RNA, 12 nt, Human herpesvirus 6
augauugcauca

SEQ ID NO: 160147 - RNA, 16 nt, Human herpesvirus 6
augcaauaggccauaa

SEQ ID NO: 160148 - RNA, 17 nt, Human herpesvirus 6
augcagaacaacagcau

SEQ ID NO: 160149 - RNA, 15 nt, Human herpesvirus 6
augcagguacugcua

SEQ ID NO: 160150 - RNA, 22 nt, Human herpesvirus 6
augcauucacaaggaaugugca

SEQ ID NO: 160151 - RNA, 19 nt, Human herpesvirus 6
augcaucucuacuuguuau

SEQ ID NO: 160152 - RNA, 14 nt, Human herpesvirus 6
augcaucugccaua

SEQ ID NO: 160153 - RNA, 15 nt, Human herpesvirus 6
augcaucugccauau

SEQ ID NO: 160154 - RNA, 16 nt, Human herpesvirus 6
augcguuguguuacac

SEQ ID NO: 160155 - RNA, 15 nt, Human herpesvirus 6
augcguggggugcgu

SEQ ID NO: 160156 - RNA, 22 nt, Human herpesvirus 6
augcgcaggauaauuuauggaa

SEQ ID NO: 160157 - RNA, 23 nt, Human herpesvirus 6
augcgucuguuuauugccaauag

SEQ ID NO: 160158 - RNA, 23 nt, Human herpesvirus 6
augccugcauaugcagacugcuu

SEQ ID NO: 160159 - RNA, 14 nt, Human herpesvirus 6
augccaaagcuuua

SEQ ID NO: 160160 - RNA, 19 nt, Human herpesvirus 6
augccaacgcgacagggug

SEQ ID NO: 160161 - RNA, 16 nt, Human herpesvirus 6
augcccagauguggaa

SEQ ID NO: 160162 - RNA, 19 nt, Human herpesvirus 6
auggauuugguauuuuaga

SEQ ID NO: 160163 - RNA, 15 nt, Human herpesvirus 6
auggauguguggaag

SEQ ID NO: 160164 - RNA, 19 nt, Human herpesvirus 6
auggaugucauauggugcg

SEQ ID NO: 160165 - RNA, 17 nt, Human herpesvirus 6
auggcagaucuugaaaa

SEQ ID NO: 160166 - RNA, 22 nt, Human herpesvirus 6
auggcagaucuugaaaagcccu

SEQ ID NO: 160167 - RNA, 19 nt, Human herpesvirus 6
auggcgucgaaguauugua

SEQ ID NO: 160168 - RNA, 20 nt, Human herpesvirus 6
auggcgucgaaguauuguau

SEQ ID NO: 160169 - RNA, 16 nt, Human herpesvirus 6
auggcuaacguacuca

SEQ ID NO: 160170 - RNA, 21 nt, Human herpesvirus 6
auggcgcacgcuaaaaaacgg

SEQ ID NO: 160171 - RNA, 13 nt, Human herpesvirus 6
auggcgcacgcua

SEQ ID NO: 160172 - RNA, 17 nt, Human herpesvirus 6
auggaaauucgcuacua

SEQ ID NO: 160173 - RNA, 17 nt, Human herpesvirus 6
auggaaaauugcaaauu

SEQ ID NO: 160174 - RNA, 18 nt, Human herpesvirus 6
augcuuugggaccuucag

SEQ ID NO: 160175 - RNA, 23 nt, Human herpesvirus 6
auggagacuccccgcuaacuuuu

SEQ ID NO: 160176 - RNA, 15 nt, Human herpesvirus 6
auggagagcuuauau

SEQ ID NO: 160177 - RNA, 16 nt, Human herpesvirus 6
auggauaaacgugucu

SEQ ID NO: 160178 - RNA, 16 nt, Human herpesvirus 6
auggagggaauuguau

SEQ ID NO: 160179 - RNA, 13 nt, Human herpesvirus 6
auguucacuccuc

SEQ ID NO: 160180 - RNA, 18 nt, Human herpesvirus 6
augucaauaguuuuacuu

SEQ ID NO: 160181 - RNA, 16 nt, Human herpesvirus 6
auguaugcaucaucaa

SEQ ID NO: 160182 - RNA, 20 nt, Human herpesvirus 6
augggagugauugugacaag

SEQ ID NO: 160183 - RNA, 14 nt, Human herpesvirus 6
auguacucauccaa

SEQ ID NO: 160184 - RNA, 23 nt, Human herpesvirus 6
auguacucauccaagacuccuac

SEQ ID NO: 160185 - RNA, 15 nt, Human herpesvirus 6
augggauugugauuc

SEQ ID NO: 160186 - RNA, 22 nt, Human herpesvirus 6
auuaucgcccgguaaauuacua

SEQ ID NO: 160187 - RNA, 15 nt, Human herpesvirus 6
auuaucauagacaaa

SEQ ID NO: 160188 - RNA, 16 nt, Human herpesvirus 6
auuaucauagacaaac

SEQ ID NO: 160189 - RNA, 22 nt, Human herpesvirus 6
auuauccuauugguuugcauaa

SEQ ID NO: 160190 - RNA, 23 nt, Human herpesvirus 6
auuauccuauugguuugcauaau

SEQ ID NO: 160191 - RNA, 21 nt, Human herpesvirus 6
auuaugugaauguuaagcaaa

SEQ ID NO: 160192 - RNA, 22 nt, Human herpesvirus 6
auuaugugaauguuaagcaaaa

SEQ ID NO: 160193 - RNA, 21 nt, Human herpesvirus 6
auuauucacggcuaauaugau

SEQ ID NO: 160194 - RNA, 22 nt, Human herpesvirus 6
auuaauuacauauagucaaugu

SEQ ID NO: 160195 - RNA, 19 nt, Human herpesvirus 6
auuaauuaccuauagucaa

SEQ ID NO: 160196 - RNA, 14 nt, Human herpesvirus 6
auuauagcuucaaa

SEQ ID NO: 160197 - RNA, 19 nt, Human herpesvirus 6
auuauauauuugcauacau

SEQ ID NO: 160198 - RNA, 14 nt, Human herpesvirus 6
auuaaaacaucagu

SEQ ID NO: 160199 - RNA, 15 nt, Human herpesvirus 6
auguuuucuccucaa

SEQ ID NO: 160200 - RNA, 15 nt, Human herpesvirus 6
auguuuuugacaaau

SEQ ID NO: 160201 - RNA, 17 nt, Human herpesvirus 6
auuaaacuaacauagcg

SEQ ID NO: 160202 - RNA, 17 nt, Human herpesvirus 6
auuaaaggacuacaucc

SEQ ID NO: 160203 - RNA, 16 nt, Human herpesvirus 6
auuaacuaguugcuug

SEQ ID NO: 160204 - RNA, 21 nt, Human herpesvirus 6
auuaagugcgcuggcuuauua

SEQ ID NO: 160205 - RNA, 16 nt, Human herpesvirus 6
auuaaguagugcuuca

SEQ ID NO: 160206 - RNA, 19 nt, Human herpesvirus 6
auucugggaaggaacauac

SEQ ID NO: 160207 - RNA, 16 nt, Human herpesvirus 6
auugaaaaaucucuau

SEQ ID NO: 160208 - RNA, 17 nt, Human herpesvirus 6
auucuucugugacuaua

SEQ ID NO: 160209 - RNA, 12 nt, Human herpesvirus 6
auugacuauuaa

SEQ ID NO: 160210 - RNA, 17 nt, Human herpesvirus 6
auucaaaaauguugcau

SEQ ID NO: 160211 - RNA, 22 nt, Human herpesvirus 6
auucaaaauaaauacuagcuaa

SEQ ID NO: 160212 - RNA, 19 nt, Human herpesvirus 6
auucaccagauucacugac

SEQ ID NO: 160213 - RNA, 17 nt, Human herpesvirus 6
auucagaggugcugaug

SEQ ID NO: 160214 - RNA, 18 nt, Human herpesvirus 6
auucagagugaauuccug

SEQ ID NO: 160215 - RNA, 19 nt, Human herpesvirus 6
caacucguuuuugauugca

SEQ ID NO: 160216 - RNA, 16 nt, Human herpesvirus 6
caacugguuuugagaa

SEQ ID NO: 160217 - RNA, 18 nt, Human herpesvirus 6
caacuaaauauguugaau

SEQ ID NO: 160218 - RNA, 18 nt, Human herpesvirus 6
caacgcuaaauauaucaa

SEQ ID NO: 160219 - RNA, 19 nt, Human herpesvirus 6
caacgcaucacacauacaa

SEQ ID NO: 160220 - RNA, 15 nt, Human herpesvirus 6
caacgcggagugaac

SEQ ID NO: 160221 - RNA, 16 nt, Human herpesvirus 6
caacgacuaccacauc

SEQ ID NO: 160222 - RNA, 14 nt, Human herpesvirus 6
caacgacuaucaaa

SEQ ID NO: 160223 - RNA, 22 nt, Human herpesvirus 6
caaccugaaacuccccagagaa

SEQ ID NO: 160224 - RNA, 15 nt, Human herpesvirus 6
caacgaauacuucuc

SEQ ID NO: 160225 - RNA, 22 nt, Human herpesvirus 6
caaccccgcacgcauaccuaca

SEQ ID NO: 160226 - RNA, 17 nt, Human herpesvirus 6
caagacauguacaucaa

SEQ ID NO: 160227 - RNA, 21 nt, Human herpesvirus 6
caagagauagaccuugaucua

SEQ ID NO: 160228 - RNA, 20 nt, Human herpesvirus 6
caagguucgucgagaaccac

SEQ ID NO: 160229 - RNA, 18 nt, Human herpesvirus 6
caaguagccaaugauucu

SEQ ID NO: 160230 - RNA, 14 nt, Human herpesvirus 6
caagagaacaugau

SEQ ID NO: 160231 - RNA, 22 nt, Human herpesvirus 6
caaguguuuggugugacauuca

SEQ ID NO: 160232 - RNA, 23 nt, Human herpesvirus 6
caaguguuuggugugacauucaa

SEQ ID NO: 160233 - RNA, 12 nt, Human herpesvirus 6
caaguucaucag

SEQ ID NO: 160234 - RNA, 22 nt, Human herpesvirus 6
cacaaaccaucaauuuuaucca

SEQ ID NO: 160235 - RNA, 23 nt, Human herpesvirus 6
cacaaaacaguugauuauuuagu

SEQ ID NO: 160236 - RNA, 23 nt, Human herpesvirus 6
cacaaaaccaggaauccuauuca

SEQ ID NO: 160237 - RNA, 16 nt, Human herpesvirus 6
cacaaucuaauacaua

SEQ ID NO: 160238 - RNA, 16 nt, Human herpesvirus 6
cacagcagcagcauua

SEQ ID NO: 160239 - RNA, 15 nt, Human herpesvirus 6
cacagcuaaacacca

SEQ ID NO: 160240 - RNA, 16 nt, Human herpesvirus 6
cacagcaugcauuugg

SEQ ID NO: 160241 - RNA, 16 nt, Human herpesvirus 6
caauccaauauaacuu

SEQ ID NO: 160242 - RNA, 20 nt, Human herpesvirus 6
caauuaugugucaaguuuca

SEQ ID NO: 160243 - RNA, 21 nt, Human herpesvirus 6
caauuaugugucaaguuucac

SEQ ID NO: 160244 - RNA, 19 nt, Human herpesvirus 6
caauuaucacaguugauaa

SEQ ID NO: 160245 - RNA, 17 nt, Human herpesvirus 6
caauuuaauauaucuug

SEQ ID NO: 160246 - RNA, 21 nt, Human herpesvirus 6
caauuccuuaauucuaaauac

SEQ ID NO: 160247 - RNA, 22 nt, Human herpesvirus 6
caauuuuauccauccaauccaa

SEQ ID NO: 160248 - RNA, 14 nt, Human herpesvirus 6
caauaaaaacucaa

SEQ ID NO: 160249 - RNA, 16 nt, Human herpesvirus 6
caauaggcaccuaucu

SEQ ID NO: 160250 - RNA, 16 nt, Human herpesvirus 6
caauaaaacgaauggu

SEQ ID NO: 160251 - RNA, 22 nt, Human herpesvirus 6
caauauaugauuuucggauuac

SEQ ID NO: 160252 - RNA, 19 nt, Human herpesvirus 6
caaaguucaguaacauuua

SEQ ID NO: 160253 - RNA, 18 nt, Human herpesvirus 6
caaagugauuccaguuaa

SEQ ID NO: 160254 - RNA, 19 nt, Human herpesvirus 6
caaauaaaaaauucuugaa

SEQ ID NO: 160255 - RNA, 22 nt, Human herpesvirus 6
caaaguauuggugcaucaguga

SEQ ID NO: 160256 - RNA, 15 nt, Human herpesvirus 6
caaagcuuuauguac

SEQ ID NO: 160257 - RNA, 20 nt, Human herpesvirus 6
caaaggaaaccaccggcuaa

SEQ ID NO: 160258 - RNA, 13 nt, Human herpesvirus 6
caaaggcgaugaa

SEQ ID NO: 160259 - RNA, 22 nt, Human herpesvirus 6
caaagauguacucauccaagac

SEQ ID NO: 160260 - RNA, 21 nt, Human herpesvirus 6
caaagcacccuacacaaacua

SEQ ID NO: 160261 - RNA, 15 nt, Human herpesvirus 6
caaagaaacaguaaa

SEQ ID NO: 160262 - RNA, 22 nt, Human herpesvirus 6
caaagaaccggcgugugcgauu

SEQ ID NO: 160263 - RNA, 22 nt, Human herpesvirus 6
caaagacaucgauuugcuggua

SEQ ID NO: 160264 - RNA, 13 nt, Human herpesvirus 6
caaagacauucaa

SEQ ID NO: 160265 - RNA, 21 nt, Human herpesvirus 6
caaagacauucaacauuccaa

SEQ ID NO: 160266 - RNA, 16 nt, Human herpesvirus 6
caaagacgauugcuuu

SEQ ID NO: 160267 - RNA, 13 nt, Human herpesvirus 6
caaaaucaaacuc

SEQ ID NO: 160268 - RNA, 17 nt, Human herpesvirus 6
caaacugacuguaccau

SEQ ID NO: 160269 - RNA, 19 nt, Human herpesvirus 6
caaaacuguccucuuugaa

SEQ ID NO: 160270 - RNA, 14 nt, Human herpesvirus 6
caaaagaguuacua

SEQ ID NO: 160271 - RNA, 16 nt, Human herpesvirus 6
caaaagacacaaucuu

SEQ ID NO: 160272 - RNA, 17 nt, Human herpesvirus 6
caaaacuuucauccuga

SEQ ID NO: 160273 - RNA, 22 nt, Human herpesvirus 6
caaaagauuacggcaacauacc

SEQ ID NO: 160274 - RNA, 9 nt, Human herpesvirus 6
auugccaaa

SEQ ID NO: 160275 - RNA, 12 nt, Human herpesvirus 6
auugccaaaggc

SEQ ID NO: 160276 - RNA, 22 nt, Human herpesvirus 6
auugccaaggaaagacaugcau

SEQ ID NO: 160277 - RNA, 19 nt, Human herpesvirus 6
auugcauccaaaguauugg

SEQ ID NO: 160278 - RNA, 18 nt, Human herpesvirus 6
auugccuucgcagauuaa

SEQ ID NO: 160279 - RNA, 17 nt, Human herpesvirus 6
auugccuuguaaaucaa

SEQ ID NO: 160280 - RNA, 11 nt, Human herpesvirus 6
auugagugugc

SEQ ID NO: 160281 - RNA, 15 nt, Human herpesvirus 6
auugagugugcauca

SEQ ID NO: 160282 - RNA, 15 nt, Human herpesvirus 6
auuuccugaucacag

SEQ ID NO: 160283 - RNA, 19 nt, Human herpesvirus 6
auugcgauucuaauaaaag

SEQ ID NO: 160284 - RNA, 18 nt, Human herpesvirus 6
auuuccauaaguuaauuc

SEQ ID NO: 160285 - RNA, 16 nt, Human herpesvirus 6
auuucccuuguaauca

SEQ ID NO: 160286 - RNA, 22 nt, Human herpesvirus 6
auuuccauaaguuaauuccagc

SEQ ID NO: 160287 - RNA, 23 nt, Human herpesvirus 6
auuuccaugcauaucguggaaug

SEQ ID NO: 160288 - RNA, 18 nt, Human herpesvirus 6
auuucuugguuguguaua

SEQ ID NO: 160289 - RNA, 19 nt, Human herpesvirus 6
auuucuuguugaguuucag

SEQ ID NO: 160290 - RNA, 21 nt, Human herpesvirus 6
auuucuuguugaguuucagca

SEQ ID NO: 160291 - RNA, 16 nt, Human herpesvirus 6
auuucuccauaccguu

SEQ ID NO: 160292 - RNA, 24 nt, Human herpesvirus 6
auuuguuuuauuucuuacuaggaa

SEQ ID NO: 160293 - RNA, 16 nt, Human herpesvirus 6
auuuuuugcaguauua

SEQ ID NO: 160294 - RNA, 13 nt, Human herpesvirus 6
auuuuuaauuuga

SEQ ID NO: 160295 - RNA, 16 nt, Human herpesvirus 6
auuuuguuuucuacgu

SEQ ID NO: 160296 - RNA, 17 nt, Human herpesvirus 6
auuuuguuuucuacgua

SEQ ID NO: 160297 - RNA, 15 nt, Human herpesvirus 6
auuuuacaaagaccu

SEQ ID NO: 160298 - RNA, 20 nt, Human herpesvirus 6
auuuuaacuauccauuuuau

SEQ ID NO: 160299 - RNA, 17 nt, Human herpesvirus 6
auuuuauaacgacaaaa

SEQ ID NO: 160300 - RNA, 12 nt, Human herpesvirus 6
auuuuagauaua

SEQ ID NO: 160301 - RNA, 17 nt, Human herpesvirus 6
auuuuagauauauacuu

SEQ ID NO: 160302 - RNA, 15 nt, Human herpesvirus 6
auuuuccuaguagga

SEQ ID NO: 160303 - RNA, 19 nt, Human herpesvirus 6
auuuuauccauccaaucca

SEQ ID NO: 160304 - RNA, 14 nt, Human herpesvirus 6
auuuugcaugcauu

SEQ ID NO: 160305 - RNA, 14 nt, Human herpesvirus 6
auuuugagauuuac

SEQ ID NO: 160306 - RNA, 17 nt, Human herpesvirus 6
auuuugaugccaaagcu

SEQ ID NO: 160307 - RNA, 15 nt, Human herpesvirus 6
auuuucgguguguau

SEQ ID NO: 160308 - RNA, 20 nt, Human herpesvirus 6
auuuugaaaaaacaguuuac

SEQ ID NO: 160309 - RNA, 22 nt, Human herpesvirus 6
auuuugaaaugucgaaucucaa

SEQ ID NO: 160310 - RNA, 21 nt, Human herpesvirus 6
caucauuccagggaacuugau

SEQ ID NO: 160311 - RNA, 22 nt, Human herpesvirus 6
caucaugauuaucauagacaaa

SEQ ID NO: 160312 - RNA, 23 nt, Human herpesvirus 6
caucaugauuaucauagacaaac

SEQ ID NO: 160313 - RNA, 17 nt, Human herpesvirus 6
cauaucgcccccauaca

SEQ ID NO: 160314 - RNA, 19 nt, Human herpesvirus 6
cauauggugcguguacaag

SEQ ID NO: 160315 - RNA, 16 nt, Human herpesvirus 6
cauauagucaauguug

SEQ ID NO: 160316 - RNA, 22 nt, Human herpesvirus 6
cauauaauauuuccauaaguua

SEQ ID NO: 160317 - RNA, 14 nt, Human herpesvirus 6
cauaucacuuguau

SEQ ID NO: 160318 - RNA, 17 nt, Human herpesvirus 6
cauauauuggcauguga

SEQ ID NO: 160319 - RNA, 18 nt, Human herpesvirus 6
cauacguuugccaaagcu

SEQ ID NO: 160320 - RNA, 18 nt, Human herpesvirus 6
cauauaaaagcuaaauca

SEQ ID NO: 160321 - RNA, 20 nt, Human herpesvirus 6
cauauaaaagcuaaaucaaa

SEQ ID NO: 160322 - RNA, 23 nt, Human herpesvirus 6
cauauaaaagcuaaaucaaauga

SEQ ID NO: 160323 - RNA, 19 nt, Human herpesvirus 6
cauauaaauccgauagcca

SEQ ID NO: 160324 - RNA, 20 nt, Human herpesvirus 6
cauacccgaaguucucucac

SEQ ID NO: 160325 - RNA, 19 nt, Human herpesvirus 6
cauaccgaucccagcucac

SEQ ID NO: 160326 - RNA, 15 nt, Human herpesvirus 6
cauacaguuguguac

SEQ ID NO: 160327 - RNA, 18 nt, Human herpesvirus 6
cauccagauaaccucacu

SEQ ID NO: 160328 - RNA, 20 nt, Human herpesvirus 6
caucccuaugucgaugugga

SEQ ID NO: 160329 - RNA, 14 nt, Human herpesvirus 6
cauccaugaaauca

SEQ ID NO: 160330 - RNA, 22 nt, Human herpesvirus 6
caucccccuccccggagcacac

SEQ ID NO: 160331 - RNA, 13 nt, Human herpesvirus 6
cauccuaacaaga

SEQ ID NO: 160332 - RNA, 19 nt, Human herpesvirus 6
cauccgucauacaaaauga

SEQ ID NO: 160333 - RNA, 22 nt, Human herpesvirus 6
cauccucgaauaauuauccucu

SEQ ID NO: 160334 - RNA, 16 nt, Human herpesvirus 6
caucuuuuucuucagg

SEQ ID NO: 160335 - RNA, 15 nt, Human herpesvirus 6
caucuuaccuucaaa

SEQ ID NO: 160336 - RNA, 19 nt, Human herpesvirus 6
caucgcgcgcgacgugcca

SEQ ID NO: 160337 - RNA, 23 nt, Human herpesvirus 6
caucgauuugcugguaaauuuua

SEQ ID NO: 160338 - RNA, 12 nt, Human herpesvirus 6
caucugccauau

SEQ ID NO: 160339 - RNA, 13 nt, Human herpesvirus 6
caucugccauauc

SEQ ID NO: 160340 - RNA, 14 nt, Human herpesvirus 6
caucugccauauca

SEQ ID NO: 160341 - RNA, 16 nt, Human herpesvirus 6
caucugccauaucaca

SEQ ID NO: 160342 - RNA, 18 nt, Human herpesvirus 6
cagguugccaauaaaaug

SEQ ID NO: 160343 - RNA, 14 nt, Human herpesvirus 6
caguaaaucuucau

SEQ ID NO: 160344 - RNA, 15 nt, Human herpesvirus 6
cagggucaaaaaacu

SEQ ID NO: 160345 - RNA, 17 nt, Human herpesvirus 6
cagguagaguugcguua

SEQ ID NO: 160346 - RNA, 16 nt, Human herpesvirus 6
caguaauuuuagggau

SEQ ID NO: 160347 - RNA, 18 nt, Human herpesvirus 6
caguagcacaaaccaaaa

SEQ ID NO: 160348 - RNA, 14 nt, Human herpesvirus 6
caguagauuaccua

SEQ ID NO: 160349 - RNA, 14 nt, Human herpesvirus 6
cagucauacuccuu

SEQ ID NO: 160350 - RNA, 15 nt, Human herpesvirus 6
caguaugucuccaaa

SEQ ID NO: 160351 - RNA, 14 nt, Human herpesvirus 6
cauaaaacaacaac

SEQ ID NO: 160352 - RNA, 22 nt, Human herpesvirus 6
cauaauucggucaccuacauuc

SEQ ID NO: 160353 - RNA, 17 nt, Human herpesvirus 6
caguuuaccuauuuaca

SEQ ID NO: 160354 - RNA, 17 nt, Human herpesvirus 6
cauaaaaaaucuuguca

SEQ ID NO: 160355 - RNA, 19 nt, Human herpesvirus 6
cauaaaaaaucuugucacu

SEQ ID NO: 160356 - RNA, 22 nt, Human herpesvirus 6
cagucuacacacacgccgguua

SEQ ID NO: 160357 - RNA, 22 nt, Human herpesvirus 6
cagucugcuggaugcugaugaa

SEQ ID NO: 160358 - RNA, 20 nt, Human herpesvirus 6
cagugaaggcugccaugaaa

SEQ ID NO: 160359 - RNA, 13 nt, Human herpesvirus 6
cagucugacaugg

SEQ ID NO: 160360 - RNA, 16 nt, Human herpesvirus 6
cagucugacauggaag

SEQ ID NO: 160361 - RNA, 13 nt, Human herpesvirus 6
caguuaugugcug

SEQ ID NO: 160362 - RNA, 22 nt, Human herpesvirus 6
caguuccggaagggcucuauua

SEQ ID NO: 160363 - RNA, 22 nt, Human herpesvirus 6
caccaccaacacaccugccuag

SEQ ID NO: 160364 - RNA, 14 nt, Human herpesvirus 6
cagaacaacagcau

SEQ ID NO: 160365 - RNA, 13 nt, Human herpesvirus 6
cagaacaucucag

SEQ ID NO: 160366 - RNA, 13 nt, Human herpesvirus 6
cacauguauuuau

SEQ ID NO: 160367 - RNA, 18 nt, Human herpesvirus 6
cacauuauaagacacuga

SEQ ID NO: 160368 - RNA, 17 nt, Human herpesvirus 6
caccaacacaccugccu

SEQ ID NO: 160369 - RNA, 13 nt, Human herpesvirus 6
cagaaguuuacau

SEQ ID NO: 160370 - RNA, 14 nt, Human herpesvirus 6
cagaauacgaacag

SEQ ID NO: 160371 - RNA, 23 nt, Human herpesvirus 6
cagaaguccuucaugauauucca

SEQ ID NO: 160372 - RNA, 21 nt, Human herpesvirus 6
cagaauaaaaauuuuagccga

SEQ ID NO: 160373 - RNA, 23 nt, Human herpesvirus 6
cagaauuuguaaaaaaacauucu

SEQ ID NO: 160374 - RNA, 17 nt, Human herpesvirus 6
cagacagugagugagua

SEQ ID NO: 160375 - RNA, 21 nt, Human herpesvirus 6
cagacagugagugaguacaag

SEQ ID NO: 160376 - RNA, 22 nt, Human herpesvirus 6
cagacggauucaaaaaaaauau

SEQ ID NO: 160377 - RNA, 16 nt, Human herpesvirus 6
cagacgcugaaaucau

SEQ ID NO: 160378 - RNA, 16 nt, Human herpesvirus 6
cagaggugcugaugau

SEQ ID NO: 160379 - RNA, 13 nt, Human herpesvirus 6
cagaucuaauuca

SEQ ID NO: 160380 - RNA, 14 nt, Human herpesvirus 6
cagaucuaucacag

SEQ ID NO: 160381 - RNA, 15 nt, Human herpesvirus 6
cagauaaccucacua

SEQ ID NO: 160382 - RNA, 19 nt, Human herpesvirus 6
cagauaaccucacuacuga

SEQ ID NO: 160383 - RNA, 19 nt, Human herpesvirus 6
cagauaccucauuguuuca

SEQ ID NO: 160384 - RNA, 22 nt, Human herpesvirus 6
cagauaccucauuguuucacuu

SEQ ID NO: 160385 - RNA, 23 nt, Human herpesvirus 6
cagauggugcgaucgagcaacag

SEQ ID NO: 160386 - RNA, 21 nt, Human herpesvirus 6
cagcugucuagauucuaauga

SEQ ID NO: 160387 - RNA, 18 nt, Human herpesvirus 6
cagcuugcgauacauguu

SEQ ID NO: 160388 - RNA, 19 nt, Human herpesvirus 6
cagcuaagaguaacaacua

SEQ ID NO: 160389 - RNA, 15 nt, Human herpesvirus 6
cagccuguucuugcu

SEQ ID NO: 160390 - RNA, 21 nt, Human herpesvirus 6
cagcgacucccggcccagaga

SEQ ID NO: 160391 - RNA, 17 nt, Human herpesvirus 6
cagcggaccaauccaug

SEQ ID NO: 160392 - RNA, 21 nt, Human herpesvirus 6
caggccgguacccguguguga

SEQ ID NO: 160393 - RNA, 14 nt, Human herpesvirus 6
caggaauucacucu

SEQ ID NO: 160394 - RNA, 20 nt, Human herpesvirus 6
caggcaaccgccgugcuucu

SEQ ID NO: 160395 - RNA, 22 nt, Human herpesvirus 6
caggauucccuucagacaucca

SEQ ID NO: 160396 - RNA, 19 nt, Human herpesvirus 6
ccgcagccgucgauaauaa

SEQ ID NO: 160397 - RNA, 20 nt, Human herpesvirus 6
ccgauacagcaccaucaaua

SEQ ID NO: 160398 - RNA, 13 nt, Human herpesvirus 6
ccgauucagaaag

SEQ ID NO: 160399 - RNA, 22 nt, Human herpesvirus 6
cccuaucgauuugggcuuuauu

SEQ ID NO: 160400 - RNA, 16 nt, Human herpesvirus 6
cccuagacacacaaaa

SEQ ID NO: 160401 - RNA, 22 nt, Human herpesvirus 6
ccgccguccuauucagaggugc

SEQ ID NO: 160402 - RNA, 16 nt, Human herpesvirus 6
ccggcgaacugagauu

SEQ ID NO: 160403 - RNA, 17 nt, Human herpesvirus 6
ccggcgaacugagauug

SEQ ID NO: 160404 - RNA, 15 nt, Human herpesvirus 6
ccggcccauccaccu

SEQ ID NO: 160405 - RNA, 14 nt, Human herpesvirus 6
ccggccccagagac

SEQ ID NO: 160406 - RNA, 15 nt, Human herpesvirus 6
ccgcgccguuucaaa

SEQ ID NO: 160407 - RNA, 17 nt, Human herpesvirus 6
ccggauuguuaauauua

SEQ ID NO: 160408 - RNA, 23 nt, Human herpesvirus 6
cccacgguggccuggcacggugc

SEQ ID NO: 160409 - RNA, 16 nt, Human herpesvirus 6
cccagcugaaauagac

SEQ ID NO: 160410 - RNA, 14 nt, Human herpesvirus 6
cccagauacauaaa

SEQ ID NO: 160411 - RNA, 22 nt, Human herpesvirus 6
cccagagaaaauuuuuuacauc

SEQ ID NO: 160412 - RNA, 21 nt, Human herpesvirus 6
cccagagacgguguuuucauc

SEQ ID NO: 160413 - RNA, 17 nt, Human herpesvirus 6
cccagcguggaauuugu

SEQ ID NO: 160414 - RNA, 21 nt, Human herpesvirus 6
cccggaguacacguauguacu

SEQ ID NO: 160415 - RNA, 13 nt, Human herpesvirus 6
cccggaaauuuca

SEQ ID NO: 160416 - RNA, 15 nt, Human herpesvirus 6
ccccggaguacacgu

SEQ ID NO: 160417 - RNA, 20 nt, Human herpesvirus 6
ccccuacgcuaacgaacaaa

SEQ ID NO: 160418 - RNA, 22 nt, Human herpesvirus 6
ccccuaucgauuugggcuuuau

SEQ ID NO: 160419 - RNA, 14 nt, Human herpesvirus 6
ccauuaaauccgau

SEQ ID NO: 160420 - RNA, 14 nt, Human herpesvirus 6
ccauucaacauccu

SEQ ID NO: 160421 - RNA, 16 nt, Human herpesvirus 6
ccauggaaaacaaaga

SEQ ID NO: 160422 - RNA, 19 nt, Human herpesvirus 6
cccaagaggauccauucua

SEQ ID NO: 160423 - RNA, 20 nt, Human herpesvirus 6
cccaaguucaucagcauuaa

SEQ ID NO: 160424 - RNA, 22 nt, Human herpesvirus 6
ccauuuccggaguugcagugug

SEQ ID NO: 160425 - RNA, 21 nt, Human herpesvirus 6
caugcauaucguggaauggcu

SEQ ID NO: 160426 - RNA, 18 nt, Human herpesvirus 6
caugcauuuuguauuuau

SEQ ID NO: 160427 - RNA, 19 nt, Human herpesvirus 6
cauggaagacaaauuaauu

SEQ ID NO: 160428 - RNA, 19 nt, Human herpesvirus 6
cauggaaaacaaagaauca

SEQ ID NO: 160429 - RNA, 13 nt, Human herpesvirus 6
caugguccacaga

SEQ ID NO: 160430 - RNA, 21 nt, Human herpesvirus 6
cauuuaauaaagaacauguga

SEQ ID NO: 160431 - RNA, 18 nt, Human herpesvirus 6
ccaaagcuuuauguaccc

SEQ ID NO: 160432 - RNA, 16 nt, Human herpesvirus 6
ccaaaggaaaccaccg

SEQ ID NO: 160433 - RNA, 15 nt, Human herpesvirus 6
ccaaagacauucaac

SEQ ID NO: 160434 - RNA, 19 nt, Human herpesvirus 6
ccaaagacauucaacauuc

SEQ ID NO: 160435 - RNA, 20 nt, Human herpesvirus 6
cauuuguuuuuuaaagcaca

SEQ ID NO: 160436 - RNA, 21 nt, Human herpesvirus 6
cauuugccgggaugagcuuua

SEQ ID NO: 160437 - RNA, 20 nt, Human herpesvirus 6
cauuugacuccaacgcacac

SEQ ID NO: 160438 - RNA, 13 nt, Human herpesvirus 6
cauuuccaugcau

SEQ ID NO: 160439 - RNA, 17 nt, Human herpesvirus 6
cauuucuaaagauuugg

SEQ ID NO: 160440 - RNA, 18 nt, Human herpesvirus 6
cauuucuauggaucugag

SEQ ID NO: 160441 - RNA, 17 nt, Human herpesvirus 6
ccaaauccugacuacga

SEQ ID NO: 160442 - RNA, 21 nt, Human herpesvirus 6
ccaacggccuuucuguuuuaa

SEQ ID NO: 160443 - RNA, 16 nt, Human herpesvirus 6
ccaacgcgacagggug

SEQ ID NO: 160444 - RNA, 21 nt, Human herpesvirus 6
ccaauauaacuuuacauuaaa

SEQ ID NO: 160445 - RNA, 22 nt, Human herpesvirus 6
ccaaucccggacgcaccuccuu

SEQ ID NO: 160446 - RNA, 18 nt, Human herpesvirus 6
ccaauccaacgaauacuu

SEQ ID NO: 160447 - RNA, 12 nt, Human herpesvirus 6
ccaauccaauau

SEQ ID NO: 160448 - RNA, 22 nt, Human herpesvirus 6
ccaauccaugcaacacaacaaa

SEQ ID NO: 160449 - RNA, 16 nt, Human herpesvirus 6
ccaauuccuuaauucu

SEQ ID NO: 160450 - RNA, 15 nt, Human herpesvirus 6
ccacagcagcagcau

SEQ ID NO: 160451 - RNA, 21 nt, Human herpesvirus 6
ccacaccaucuucagcucaaa

SEQ ID NO: 160452 - RNA, 17 nt, Human herpesvirus 6
ccaauuaacacauuuua

SEQ ID NO: 160453 - RNA, 15 nt, Human herpesvirus 6
ccaaugacuacuaaa

SEQ ID NO: 160454 - RNA, 14 nt, Human herpesvirus 6
ccaaugauucuuaa

SEQ ID NO: 160455 - RNA, 13 nt, Human herpesvirus 6
ccagauacuacac

SEQ ID NO: 160456 - RNA, 13 nt, Human herpesvirus 6
ccacaucaccgau

SEQ ID NO: 160457 - RNA, 17 nt, Human herpesvirus 6
ccaccaaugacaccgau

SEQ ID NO: 160458 - RNA, 22 nt, Human herpesvirus 6
ccaugacgauucaaaccgcaga

SEQ ID NO: 160459 - RNA, 23 nt, Human herpesvirus 6
ccaguuuggauucaggcuuuaac

SEQ ID NO: 160460 - RNA, 14 nt, Human herpesvirus 6
ccauaaaaaaucuu

SEQ ID NO: 160461 - RNA, 19 nt, Human herpesvirus 6
ccauaaaaaaucuugucac

SEQ ID NO: 160462 - RNA, 19 nt, Human herpesvirus 6
ccaguaaaucuucauuaaa

SEQ ID NO: 160463 - RNA, 20 nt, Human herpesvirus 6
ccaguaaaucuucauuaaaa

SEQ ID NO: 160464 - RNA, 16 nt, Human herpesvirus 6
ccaguagcacaaacca

SEQ ID NO: 160465 - RNA, 19 nt, Human herpesvirus 6
ccaguguggauaucucaaa

SEQ ID NO: 160466 - RNA, 20 nt, Human herpesvirus 6
ccaguuaauaagauguugca

SEQ ID NO: 160467 - RNA, 11 nt, Human herpesvirus 6
guauagacauu

SEQ ID NO: 160468 - RNA, 13 nt, Human herpesvirus 6
guauagauuuauu

SEQ ID NO: 160469 - RNA, 20 nt, Human herpesvirus 6
guauaggaaucuuguguucu

SEQ ID NO: 160470 - RNA, 14 nt, Human herpesvirus 6
guauagucuagcaa

SEQ ID NO: 160471 - RNA, 22 nt, Human herpesvirus 6
guauacgccuugggacauguau

SEQ ID NO: 160472 - RNA, 22 nt, Human herpesvirus 6
guauuuuagauauauacuuuca

SEQ ID NO: 160473 - RNA, 20 nt, Human herpesvirus 6
guauuuuuuaagagugggau

SEQ ID NO: 160474 - RNA, 17 nt, Human herpesvirus 6
guauuuuuuuguuguug

SEQ ID NO: 160475 - RNA, 21 nt, Human herpesvirus 6
guauaucgagaaaaggacauu

SEQ ID NO: 160476 - RNA, 20 nt, Human herpesvirus 6
guauauugaauuguauauau

SEQ ID NO: 160477 - RNA, 16 nt, Human herpesvirus 6
guauauauagcuguaa

SEQ ID NO: 160478 - RNA, 19 nt, Human herpesvirus 6
guacuauagacgccauaau

SEQ ID NO: 160479 - RNA, 17 nt, Human herpesvirus 6
guaaucucguugggaua

SEQ ID NO: 160480 - RNA, 17 nt, Human herpesvirus 6
guaauaucuucuuugag

SEQ ID NO: 160481 - RNA, 22 nt, Human herpesvirus 6
guaccuuguaauuucuauguaa

SEQ ID NO: 160482 - RNA, 19 nt, Human herpesvirus 6
guaagaauuaauguccagu

SEQ ID NO: 160483 - RNA, 16 nt, Human herpesvirus 6
guaaaaaaacauucua

SEQ ID NO: 160484 - RNA, 17 nt, Human herpesvirus 6
guaaaaaaacauucuau

SEQ ID NO: 160485 - RNA, 20 nt, Human herpesvirus 6
gguuugcauaauaauggcau

SEQ ID NO: 160486 - RNA, 15 nt, Human herpesvirus 6
gguuggaugccugca

SEQ ID NO: 160487 - RNA, 22 nt, Human herpesvirus 6
gguuggaugccugcauaugcag

SEQ ID NO: 160488 - RNA, 14 nt, Human herpesvirus 6
gguuuaaucucaca

SEQ ID NO: 160489 - RNA, 17 nt, Human herpesvirus 6
gguugaaaucacaccaa

SEQ ID NO: 160490 - RNA, 16 nt, Human herpesvirus 6
gggcgcgagacagcgg

SEQ ID NO: 160491 - RNA, 13 nt, Human herpesvirus 6
ggggagacagauu

SEQ ID NO: 160492 - RNA, 17 nt, Human herpesvirus 6
ggggacugugaaguaaa

SEQ ID NO: 160493 - RNA, 13 nt, Human herpesvirus 6
ggggagggaccca

SEQ ID NO: 160494 - RNA, 24 nt, Human herpesvirus 6
ggggaacuacauauaaauccgaua

SEQ ID NO: 160495 - RNA, 14 nt, Human herpesvirus 6
gggcggggcggacg

SEQ ID NO: 160496 - RNA, 14 nt, Human herpesvirus 6
gguacacaauauac

SEQ ID NO: 160497 - RNA, 20 nt, Human herpesvirus 6
gguaagcagcagaacaacuu

SEQ ID NO: 160498 - RNA, 20 nt, Human herpesvirus 6
ggguuuguuuucuacauuuu

SEQ ID NO: 160499 - RNA, 22 nt, Human herpesvirus 6
ggguuuuagagaaaagugcaag

SEQ ID NO: 160500 - RNA, 16 nt, Human herpesvirus 6
gggugugcauugugac

SEQ ID NO: 160501 - RNA, 19 nt, Human herpesvirus 6
gguggguuauagaugacug

SEQ ID NO: 160502 - RNA, 16 nt, Human herpesvirus 6
ggucauugguguuuau

SEQ ID NO: 160503 - RNA, 15 nt, Human herpesvirus 6
ggucagauaguugau

SEQ ID NO: 160504 - RNA, 15 nt, Human herpesvirus 6
ggucagacagugagu

SEQ ID NO: 160505 - RNA, 16 nt, Human herpesvirus 6
ggucguacacgcauuu

SEQ ID NO: 160506 - RNA, 13 nt, Human herpesvirus 6
ggugaaaugaaug

SEQ ID NO: 160507 - RNA, 15 nt, Human herpesvirus 6
ggucuugcuaagggu

SEQ ID NO: 160508 - RNA, 20 nt, Human herpesvirus 6
ggcuucaagaaugccgugaa

SEQ ID NO: 160509 - RNA, 17 nt, Human herpesvirus 6
ggcuuaauaagucuuua

SEQ ID NO: 160510 - RNA, 15 nt, Human herpesvirus 6
gggaaucaugguguc

SEQ ID NO: 160511 - RNA, 18 nt, Human herpesvirus 6
gggcacaucuauguguau

SEQ ID NO: 160512 - RNA, 13 nt, Human herpesvirus 6
ggcugcagccuaa

SEQ ID NO: 160513 - RNA, 15 nt, Human herpesvirus 6
ggcucgugauccuac

SEQ ID NO: 160514 - RNA, 20 nt, Human herpesvirus 6
ggcucgugauccuacaaggg

SEQ ID NO: 160515 - RNA, 20 nt, Human herpesvirus 6
ggcucuaugaagauuugaca

SEQ ID NO: 160516 - RNA, 21 nt, Human herpesvirus 6
ggcgcauaacggaaaaaugcc

SEQ ID NO: 160517 - RNA, 13 nt, Human herpesvirus 6
ggaugagcuuuaa

SEQ ID NO: 160518 - RNA, 20 nt, Human herpesvirus 6
ggaucugagugaauugugca

SEQ ID NO: 160519 - RNA, 15 nt, Human herpesvirus 6
ggaucguaaggcagu

SEQ ID NO: 160520 - RNA, 21 nt, Human herpesvirus 6
ggauuaauaaaggauguuugu

SEQ ID NO: 160521 - RNA, 21 nt, Human herpesvirus 6
ggauuggaggcgaacguagaa

SEQ ID NO: 160522 - RNA, 15 nt, Human herpesvirus 6
ggcacacauguauuu

SEQ ID NO: 160523 - RNA, 12 nt, Human herpesvirus 6
ggcaacauaccc

SEQ ID NO: 160524 - RNA, 15 nt, Human herpesvirus 6
ggcaaccugaaacuc

SEQ ID NO: 160525 - RNA, 17 nt, Human herpesvirus 6
ggcauuacauuaugaag

SEQ ID NO: 160526 - RNA, 15 nt, Human herpesvirus 6
ggcacaucuaugugu

SEQ ID NO: 160527 - RNA, 15 nt, Human herpesvirus 6
ggcauagcagcaaua

SEQ ID NO: 160528 - RNA, 15 nt, Human herpesvirus 6
ggauaauuuauggaa

SEQ ID NO: 160529 - RNA, 21 nt, Human herpesvirus 6
ggaagaaacggacacgcgcag

SEQ ID NO: 160530 - RNA, 21 nt, Human herpesvirus 6
ggaacugcuggcugagauuca

SEQ ID NO: 160531 - RNA, 15 nt, Human herpesvirus 6
gcuuuaucuagccaa

SEQ ID NO: 160532 - RNA, 18 nt, Human herpesvirus 6
gcuuucucgauugugaug

SEQ ID NO: 160533 - RNA, 21 nt, Human herpesvirus 6
gcuuucucuuuuuaauuccaa

SEQ ID NO: 160534 - RNA, 17 nt, Human herpesvirus 6
gcuuugacgguuuauau

SEQ ID NO: 160535 - RNA, 14 nt, Human herpesvirus 6
gcuuucaguauuaa

SEQ ID NO: 160536 - RNA, 17 nt, Human herpesvirus 6
gcuuuauucccaugacg

SEQ ID NO: 160537 - RNA, 22 nt, Human herpesvirus 6
ggaacccagauuuguguucaag

SEQ ID NO: 160538 - RNA, 21 nt, Human herpesvirus 6
gcuuuuacugauuaguuuuca

SEQ ID NO: 160539 - RNA, 14 nt, Human herpesvirus 6
gcgcgacgugccac

SEQ ID NO: 160540 - RNA, 22 nt, Human herpesvirus 6
gcgccauauccuagcauuuccg

SEQ ID NO: 160541 - RNA, 13 nt, Human herpesvirus 6
gcgaguagacuca

SEQ ID NO: 160542 - RNA, 14 nt, Human herpesvirus 6
gcgauacaauaaca

SEQ ID NO: 160543 - RNA, 19 nt, Human herpesvirus 6
gcgagauuguaauauucaa

SEQ ID NO: 160544 - RNA, 16 nt, Human herpesvirus 6
gcgucuuugcauauua

SEQ ID NO: 160545 - RNA, 15 nt, Human herpesvirus 6
gcuaucgucuacccu

SEQ ID NO: 160546 - RNA, 17 nt, Human herpesvirus 6
gcuaucgucuacccuau

SEQ ID NO: 160547 - RNA, 16 nt, Human herpesvirus 6
gcuagagaaaauuaua

SEQ ID NO: 160548 - RNA, 21 nt, Human herpesvirus 6
gcgguuggaugccugcauaug

SEQ ID NO: 160549 - RNA, 11 nt, Human herpesvirus 6
gcguccuccau

SEQ ID NO: 160550 - RNA, 21 nt, Human herpesvirus 6
gcgcgucgacgggcagucccu

SEQ ID NO: 160551 - RNA, 20 nt, Human herpesvirus 6
gcgccggaucguaaggcagu

SEQ ID NO: 160552 - RNA, 15 nt, Human herpesvirus 6
gcuccuccccugucc

SEQ ID NO: 160553 - RNA, 14 nt, Human herpesvirus 6
gcuaucugauuuug

SEQ ID NO: 160554 - RNA, 22 nt, Human herpesvirus 6
gcuaucuuggugugggugugau

SEQ ID NO: 160555 - RNA, 15 nt, Human herpesvirus 6
gcucuauuacuauau

SEQ ID NO: 160556 - RNA, 12 nt, Human herpesvirus 6
gcucgcauuucu

SEQ ID NO: 160557 - RNA, 17 nt, Human herpesvirus 6
gcuuguggaucaucucc

SEQ ID NO: 160558 - RNA, 22 nt, Human herpesvirus 6
gcuugugaaagaccguagcaaa

SEQ ID NO: 160559 - RNA, 13 nt, Human herpesvirus 6
gcuuauaagcaaa

SEQ ID NO: 160560 - RNA, 21 nt, Human herpesvirus 6
gcuuaccguucaucauuccag

SEQ ID NO: 160561 - RNA, 13 nt, Human herpesvirus 6
gcuguguuuacau

SEQ ID NO: 160562 - RNA, 18 nt, Human herpesvirus 6
gccgacagaugugugucu

SEQ ID NO: 160563 - RNA, 13 nt, Human herpesvirus 6
gcagaucaucaaa

SEQ ID NO: 160564 - RNA, 21 nt, Human herpesvirus 6
gcagauuuauugcgauucuaa

SEQ ID NO: 160565 - RNA, 14 nt, Human herpesvirus 6
gcacggugccaaag

SEQ ID NO: 160566 - RNA, 17 nt, Human herpesvirus 6
gcagaggggaagggaau

SEQ ID NO: 160567 - RNA, 17 nt, Human herpesvirus 6
gcagagguacuuuccau

SEQ ID NO: 160568 - RNA, 20 nt, Human herpesvirus 6
gccucgacguccaccuggaa

SEQ ID NO: 160569 - RNA, 17 nt, Human herpesvirus 6
gccucccauguaugcau

SEQ ID NO: 160570 - RNA, 21 nt, Human herpesvirus 6
gccucuccuauaaauacugaa

SEQ ID NO: 160571 - RNA, 23 nt, Human herpesvirus 6
gccucuaaccguuguucuuggag

SEQ ID NO: 160572 - RNA, 22 nt, Human herpesvirus 6
gccguauaagucuaaugcaaag

SEQ ID NO: 160573 - RNA, 18 nt, Human herpesvirus 6
gccuaaauaccauuuuau

SEQ ID NO: 160574 - RNA, 18 nt, Human herpesvirus 6
gccggaucguaaggcagu

SEQ ID NO: 160575 - RNA, 18 nt, Human herpesvirus 6
gccuggcacggugccaaa

SEQ ID NO: 160576 - RNA, 19 nt, Human herpesvirus 6
gccuggcacggugccaaag

SEQ ID NO: 160577 - RNA, 23 nt, Human herpesvirus 6
gccuggcacggugccaaaggaaa

SEQ ID NO: 160578 - RNA, 19 nt, Human herpesvirus 6
gccuugucaucaugugugc

SEQ ID NO: 160579 - RNA, 18 nt, Human herpesvirus 6
gcgaaucugccgaucucu

SEQ ID NO: 160580 - RNA, 22 nt, Human herpesvirus 6
gcgaauggauaaacgugucuga

SEQ ID NO: 160581 - RNA, 14 nt, Human herpesvirus 6
gcgaaccaggacag

SEQ ID NO: 160582 - RNA, 17 nt, Human herpesvirus 6
guuuuagaaacauuugc

SEQ ID NO: 160583 - RNA, 14 nt, Human herpesvirus 6
guuuucacaaagaa

SEQ ID NO: 160584 - RNA, 23 nt, Human herpesvirus 6
guuuucccaccuaauaaacugug

SEQ ID NO: 160585 - RNA, 15 nt, Human herpesvirus 6
guuuuccgaaaucaa

SEQ ID NO: 160586 - RNA, 19 nt, Human herpesvirus 6
guuuucgcuugaugcaugu

SEQ ID NO: 160587 - RNA, 17 nt, Human herpesvirus 6
guuuggugugacauuca

SEQ ID NO: 160588 - RNA, 17 nt, Human herpesvirus 6
guuugucucgcaaacag

SEQ ID NO: 160589 - RNA, 15 nt, Human herpesvirus 6
uaaaaagugcuuuau

SEQ ID NO: 160590 - RNA, 18 nt, Human herpesvirus 6
uaaaaagugcuuuaucua

SEQ ID NO: 160591 - RNA, 22 nt, Human herpesvirus 6
uaaaaagugcuuuaucuagcca

SEQ ID NO: 160592 - RNA, 23 nt, Human herpesvirus 6
uaaaaagugcuuuaucuagccaa

SEQ ID NO: 160593 - RNA, 18 nt, Human herpesvirus 6
guuuugggaaaucuggca

SEQ ID NO: 160594 - RNA, 17 nt, Human herpesvirus 6
guuucggaaaauguaaa

SEQ ID NO: 160595 - RNA, 18 nt, Human herpesvirus 6
guuucuuacguaugugaa

SEQ ID NO: 160596 - RNA, 16 nt, Human herpesvirus 6
guuuaccuauuuacaa

SEQ ID NO: 160597 - RNA, 12 nt, Human herpesvirus 6
guuuacauagaa

SEQ ID NO: 160598 - RNA, 14 nt, Human herpesvirus 6
guuuacauauacau

SEQ ID NO: 160599 - RNA, 12 nt, Human herpesvirus 6
guuguacaggag

SEQ ID NO: 160600 - RNA, 15 nt, Human herpesvirus 6
guuguguuuacauau

SEQ ID NO: 160601 - RNA, 13 nt, Human herpesvirus 6
guuguucuugggu

SEQ ID NO: 160602 - RNA, 15 nt, Human herpesvirus 6
guugaugauuuacac

SEQ ID NO: 160603 - RNA, 19 nt, Human herpesvirus 6
guugccaguaaaucuucau

SEQ ID NO: 160604 - RNA, 14 nt, Human herpesvirus 6
guuguaugugugau

SEQ ID NO: 160605 - RNA, 12 nt, Human herpesvirus 6
uaaaucuucauu

SEQ ID NO: 160606 - RNA, 21 nt, Human herpesvirus 6
uaaaugaauagauaauaauca

SEQ ID NO: 160607 - RNA, 22 nt, Human herpesvirus 6
uaaaucaaagacgauugcuuua

SEQ ID NO: 160608 - RNA, 16 nt, Human herpesvirus 6
uaaaucaucaacguaa

SEQ ID NO: 160609 - RNA, 20 nt, Human herpesvirus 6
uaaauaugguaauuuucaau

SEQ ID NO: 160610 - RNA, 16 nt, Human herpesvirus 6
uaaacaguuauacugg

SEQ ID NO: 160611 - RNA, 13 nt, Human herpesvirus 6
uaaacaacacagc

SEQ ID NO: 160612 - RNA, 15 nt, Human herpesvirus 6
uaaacaccagcauaa

SEQ ID NO: 160613 - RNA, 17 nt, Human herpesvirus 6
uaaacacuaaauuacca

SEQ ID NO: 160614 - RNA, 22 nt, Human herpesvirus 6
uaaaacuuacuaauguggauuc

SEQ ID NO: 160615 - RNA, 15 nt, Human herpesvirus 6
uaaaacaagacagac

SEQ ID NO: 160616 - RNA, 21 nt, Human herpesvirus 6
uaaaaauuuuagccgaugaua

SEQ ID NO: 160617 - RNA, 12 nt, Human herpesvirus 6
uaaaacaagaca

SEQ ID NO: 160618 - RNA, 14 nt, Human herpesvirus 6
uaaaacaagacaga

SEQ ID NO: 160619 - RNA, 22 nt, Human herpesvirus 6
uaaaaauuauccuggcgaugca

SEQ ID NO: 160620 - RNA, 23 nt, Human herpesvirus 6
uaaaaauaucgcgcaaaccauaa

SEQ ID NO: 160621 - RNA, 20 nt, Human herpesvirus 6
uaaaacaucaguaacaccgu

SEQ ID NO: 160622 - RNA, 18 nt, Human herpesvirus 6
uaaaacaggaagcgccau

SEQ ID NO: 160623 - RNA, 15 nt, Human herpesvirus 6
uaaaacaucagauga

SEQ ID NO: 160624 - RNA, 20 nt, Human herpesvirus 6
uaaauguagcauacgacaaa

SEQ ID NO: 160625 - RNA, 22 nt, Human herpesvirus 6
uaaauguagcauacgacaaaua

SEQ ID NO: 160626 - RNA, 18 nt, Human herpesvirus 6
uaaaugguagcuauuaug

SEQ ID NO: 160627 - RNA, 20 nt, Human herpesvirus 6
uaaauggcauugaagaugac

SEQ ID NO: 160628 - RNA, 15 nt, Human herpesvirus 6
uaacuaagauugugc

SEQ ID NO: 160629 - RNA, 21 nt, Human herpesvirus 6
uaacaauuauucaacauuacu

SEQ ID NO: 160630 - RNA, 22 nt, Human herpesvirus 6
uaacaauuauucaacauuacuc

SEQ ID NO: 160631 - RNA, 13 nt, Human herpesvirus 6
uaacaagcacuga

SEQ ID NO: 160632 - RNA, 14 nt, Human herpesvirus 6
uaacaagcacugaa

SEQ ID NO: 160633 - RNA, 19 nt, Human herpesvirus 6
guuccccaugucuugccuc

SEQ ID NO: 160634 - RNA, 17 nt, Human herpesvirus 6
guuccacgcauagacaa

SEQ ID NO: 160635 - RNA, 18 nt, Human herpesvirus 6
guuccacgcauagacaaa

SEQ ID NO: 160636 - RNA, 19 nt, Human herpesvirus 6
guuccacgcauagacaaac

SEQ ID NO: 160637 - RNA, 22 nt, Human herpesvirus 6
guuccaaaguaguuaccgugau

SEQ ID NO: 160638 - RNA, 15 nt, Human herpesvirus 6
guucaagaacacagg

SEQ ID NO: 160639 - RNA, 14 nt, Human herpesvirus 6
guucaucauuccag

SEQ ID NO: 160640 - RNA, 16 nt, Human herpesvirus 6
guucaguaacauuuaa

SEQ ID NO: 160641 - RNA, 19 nt, Human herpesvirus 6
guucuucaacauaucacuu

SEQ ID NO: 160642 - RNA, 22 nt, Human herpesvirus 6
guucuuuacguuuuccauguga

SEQ ID NO: 160643 - RNA, 22 nt, Human herpesvirus 6
guugaagaucuuuauggaggga

SEQ ID NO: 160644 - RNA, 15 nt, Human herpesvirus 6
guucguggacaauga

SEQ ID NO: 160645 - RNA, 21 nt, Human herpesvirus 6
guuacagauacauagauuuua

SEQ ID NO: 160646 - RNA, 18 nt, Human herpesvirus 6
guuaaauugauaguacuu

SEQ ID NO: 160647 - RNA, 20 nt, Human herpesvirus 6
guguuguuguauauguuaac

SEQ ID NO: 160648 - RNA, 15 nt, Human herpesvirus 6
guguuuacauauaca

SEQ ID NO: 160649 - RNA, 20 nt, Human herpesvirus 6
guguuuacauauacauuugu

SEQ ID NO: 160650 - RNA, 23 nt, Human herpesvirus 6
guguuuacauauacauuuguaca

SEQ ID NO: 160651 - RNA, 14 nt, Human herpesvirus 6
guuaugaaugagau

SEQ ID NO: 160652 - RNA, 13 nt, Human herpesvirus 6
guuauuguuguug

SEQ ID NO: 160653 - RNA, 17 nt, Human herpesvirus 6
guuauguaaagaaauaa

SEQ ID NO: 160654 - RNA, 12 nt, Human herpesvirus 6
guuaugugcugu

SEQ ID NO: 160655 - RNA, 16 nt, Human herpesvirus 6
guuauuagugauuaug

SEQ ID NO: 160656 - RNA, 17 nt, Human herpesvirus 6
guggacgcuagugauca

SEQ ID NO: 160657 - RNA, 22 nt, Human herpesvirus 6
guggauuguaucgagucuuuau

SEQ ID NO: 160658 - RNA, 17 nt, Human herpesvirus 6
guggauuaugaguauga

SEQ ID NO: 160659 - RNA, 19 nt, Human herpesvirus 6
guggauuaugaguaugaaa

SEQ ID NO: 160660 - RNA, 12 nt, Human herpesvirus 6
guccauuaccac

SEQ ID NO: 160661 - RNA, 14 nt, Human herpesvirus 6
guccauuaccacac

SEQ ID NO: 160662 - RNA, 13 nt, Human herpesvirus 6
gucaaguuucacc

SEQ ID NO: 160663 - RNA, 15 nt, Human herpesvirus 6
gucaacgugucuaua

SEQ ID NO: 160664 - RNA, 16 nt, Human herpesvirus 6
gucaaauagccaaaaa

SEQ ID NO: 160665 - RNA, 12 nt, Human herpesvirus 6
guguacaaugac

SEQ ID NO: 160666 - RNA, 13 nt, Human herpesvirus 6
guguaaaucauca

SEQ ID NO: 160667 - RNA, 22 nt, Human herpesvirus 6
guguaacucuuuuuguugcuau

SEQ ID NO: 160668 - RNA, 14 nt, Human herpesvirus 6
guggcagucugcuc

SEQ ID NO: 160669 - RNA, 16 nt, Human herpesvirus 6
gugucacacagcauga

SEQ ID NO: 160670 - RNA, 19 nt, Human herpesvirus 6
gugucaaguuucaccaugu

SEQ ID NO: 160671 - RNA, 12 nt, Human herpesvirus 6
guguauuguaaa

SEQ ID NO: 160672 - RNA, 14 nt, Human herpesvirus 6
guguagcaaaaaca

SEQ ID NO: 160673 - RNA, 20 nt, Human herpesvirus 6
guguauauugaauuguauau

SEQ ID NO: 160674 - RNA, 22 nt, Human herpesvirus 6
guguauauuuuaauacauuucc

SEQ ID NO: 160675 - RNA, 22 nt, Human herpesvirus 6
guguuaugaaugagauguucua

SEQ ID NO: 160676 - RNA, 16 nt, Human herpesvirus 6
guguuaugaucuagcu

SEQ ID NO: 160677 - RNA, 15 nt, Human herpesvirus 6
guguuacugauggca

SEQ ID NO: 160678 - RNA, 16 nt, Human herpesvirus 6
guguggauaucucaaa

SEQ ID NO: 160679 - RNA, 18 nt, Human herpesvirus 6
guguuagcuuugcgauau

SEQ ID NO: 160680 - RNA, 20 nt, Human herpesvirus 6
guguugaauguuacagauac

SEQ ID NO: 160681 - RNA, 12 nt, Human herpesvirus 6
gugucuguucaa

SEQ ID NO: 160682 - RNA, 18 nt, Human herpesvirus 6
gugucuguucaacgucuu

SEQ ID NO: 160683 - RNA, 13 nt, Human herpesvirus 6
gugugacauucaa

SEQ ID NO: 160684 - RNA, 14 nt, Human herpesvirus 6
guguggaacauacu

SEQ ID NO: 160685 - RNA, 20 nt, Human herpesvirus 6
uauauaguuuuuugauggaa

SEQ ID NO: 160686 - RNA, 15 nt, Human herpesvirus 6
uauauauagcuguaa

SEQ ID NO: 160687 - RNA, 13 nt, Human herpesvirus 6
uauauccugucgc

SEQ ID NO: 160688 - RNA, 18 nt, Human herpesvirus 6
uauagucuagcaaccuaa

SEQ ID NO: 160689 - RNA, 13 nt, Human herpesvirus 6
uauaggaguuaca

SEQ ID NO: 160690 - RNA, 18 nt, Human herpesvirus 6
uauagcuguaaauauuca

SEQ ID NO: 160691 - RNA, 18 nt, Human herpesvirus 6
uauagacauugcuuucuc

SEQ ID NO: 160692 - RNA, 16 nt, Human herpesvirus 6
uauauuugcacuuccu

SEQ ID NO: 160693 - RNA, 22 nt, Human herpesvirus 6
uauauauuugcauacauuccuu

SEQ ID NO: 160694 - RNA, 19 nt, Human herpesvirus 6
uaucccuaauaaaugucaa

SEQ ID NO: 160695 - RNA, 20 nt, Human herpesvirus 6
uaucccuaauaaaugucaaa

SEQ ID NO: 160696 - RNA, 15 nt, Human herpesvirus 6
uauccauccaaucca

SEQ ID NO: 160697 - RNA, 18 nt, Human herpesvirus 6
uagugagguuaucuggau

SEQ ID NO: 160698 - RNA, 13 nt, Human herpesvirus 6
uauaccauuccca

SEQ ID NO: 160699 - RNA, 20 nt, Human herpesvirus 6
uauacagaauaaaaauuuua

SEQ ID NO: 160700 - RNA, 16 nt, Human herpesvirus 6
uagcagaagaacagcu

SEQ ID NO: 160701 - RNA, 16 nt, Human herpesvirus 6
uagcuguaaauauuca

SEQ ID NO: 160702 - RNA, 16 nt, Human herpesvirus 6
uagucuagcaaccuaa

SEQ ID NO: 160703 - RNA, 17 nt, Human herpesvirus 6
uagucuagcaaccuaau

SEQ ID NO: 160704 - RNA, 14 nt, Human herpesvirus 6
uaggaugaucgauu

SEQ ID NO: 160705 - RNA, 17 nt, Human herpesvirus 6
uaggauggaauggaauu

SEQ ID NO: 160706 - RNA, 20 nt, Human herpesvirus 6
uagaugcaaaucucacuguc

SEQ ID NO: 160707 - RNA, 23 nt, Human herpesvirus 6
uagauuaggggagagacauccau

SEQ ID NO: 160708 - RNA, 20 nt, Human herpesvirus 6
uagauaaacaacgcuccaua

SEQ ID NO: 160709 - RNA, 14 nt, Human herpesvirus 6
uagagcaacucauc

SEQ ID NO: 160710 - RNA, 15 nt, Human herpesvirus 6
uagagcaacucauca

SEQ ID NO: 160711 - RNA, 15 nt, Human herpesvirus 6
uagagcuacgccaaa

SEQ ID NO: 160712 - RNA, 21 nt, Human herpesvirus 6
uagagcauggcgcacgcuaaa

SEQ ID NO: 160713 - RNA, 17 nt, Human herpesvirus 6
uagaguguuaugaucua

SEQ ID NO: 160714 - RNA, 21 nt, Human herpesvirus 6
uagcaaccuaauggaccaagc

SEQ ID NO: 160715 - RNA, 15 nt, Human herpesvirus 6
uagcacaaaccaaaa

SEQ ID NO: 160716 - RNA, 15 nt, Human herpesvirus 6
uagcagaaguuuaca

SEQ ID NO: 160717 - RNA, 16 nt, Human herpesvirus 6
uagcagaaguuuacau

SEQ ID NO: 160718 - RNA, 18 nt, Human herpesvirus 6
uagcagaaguuuacauag

SEQ ID NO: 160719 - RNA, 20 nt, Human herpesvirus 6
uagcagaaguuuacauagaa

SEQ ID NO: 160720 - RNA, 17 nt, Human herpesvirus 6
uagcagcaaucagcaac

SEQ ID NO: 160721 - RNA, 22 nt, Human herpesvirus 6
uagcgguuggaugccugcauau

SEQ ID NO: 160722 - RNA, 22 nt, Human herpesvirus 6
uagcguacaagucgacaaauua

SEQ ID NO: 160723 - RNA, 20 nt, Human herpesvirus 6
uagcuauaaaaacacacauc

SEQ ID NO: 160724 - RNA, 21 nt, Human herpesvirus 6
uagaauaucugcuaagucuuu

SEQ ID NO: 160725 - RNA, 22 nt, Human herpesvirus 6
uagaaggagcuuucauccauga

SEQ ID NO: 160726 - RNA, 15 nt, Human herpesvirus 6
uagaauaaugccuaa

SEQ ID NO: 160727 - RNA, 14 nt, Human herpesvirus 6
uagaauuucuaacc

SEQ ID NO: 160728 - RNA, 14 nt, Human herpesvirus 6
uagacacacaaaaa

SEQ ID NO: 160729 - RNA, 16 nt, Human herpesvirus 6
uagagaaaagugcaag

SEQ ID NO: 160730 - RNA, 18 nt, Human herpesvirus 6
uagagacgcacccuacaa

SEQ ID NO: 160731 - RNA, 22 nt, Human herpesvirus 6
uagaaaaacaacgaaacaguuc

SEQ ID NO: 160732 - RNA, 18 nt, Human herpesvirus 6
uacuugucuuacacucuc

SEQ ID NO: 160733 - RNA, 17 nt, Human herpesvirus 6
uacuugauaaacuguau

SEQ ID NO: 160734 - RNA, 17 nt, Human herpesvirus 6
uagaaauucuauguacu

SEQ ID NO: 160735 - RNA, 21 nt, Human herpesvirus 6
uagaacaauuaucacaguuga

SEQ ID NO: 160736 - RNA, 21 nt, Human herpesvirus 6
uagaaauuacaagguacacaa

SEQ ID NO: 160737 - RNA, 17 nt, Human herpesvirus 6
uacaucgaauuucacau

SEQ ID NO: 160738 - RNA, 24 nt, Human herpesvirus 6
uacaucaucgccuuuuacuuacau

SEQ ID NO: 160739 - RNA, 16 nt, Human herpesvirus 6
uacauagaaauuacaa
